United States Patent Application Publication US 2026/0275334 A1, published September 17, 2026 (application 18/868,554).

The application's sequence listing, which the Patent Office published only in electronic form, follows.

SEQUENCE LISTING (39537 sequences)

SEQ ID NO: 1 - DNA, 1190 bp, synthetic construct
  misc_feature 1..1190: note = Nucleotide
  source 1..1190: mol_type = other DNA
caccactcaggccaggccagtggccttgggaggggcctgtgatgctgggaccacagttcctgggcagggagcaaccgtctaggcgtggggagaacgcaggacgtgacccacacaccgcactggaggctccgctctgcccggctccgggaccccttcctccgccgcacccgccccggtggtccgcggatgcccgcccttgccgctcagccactccccccgcaccgaggcctaggactccccaggcgccgagctgagccggggccgatgcagctgagccgcgccgccgccgccgccgccgccgcccctgcggagcccccggagccgctgtcccccgcgccggccccggccccggccccccccggccccctcccgcgcagcgcggccgacggggctccggcgggggggaagggggggccggggcgccgcgcgcggagtccccgggcgctccgttccccggcgcgagcggccccggcccgggccccggcgcggggatggacggccccggggccagcgccgtggtcgtgcgcgtcggcatcccggacctgcagcagacggtgagccccgccgccctgggcccggccgtgcccctgcgctccccgcccgggattcccccacccccgccgggcgcgcccggcgcccgggacccccggcccacggctactcacccctcccccgccgcctccgccgggaccctccccatcgccagggcggggccccgggaagcccggcccctggggcggggcttcggccgcggttcgcggaggcgcggggtcccgggcgccggcacccgagccccggactccttcggcgggggcccggggctcggcaccccgcatggggccggcggggcgggtccgcgctcccgggacctgagctcacgagcccgctccgctgcagaagtgcctgcgcctggacccggccgcgcccgtgtgggccgccaagcagcgcgtgctctgcgccctcaaccacagcctccaggacgcgctcaactatgggcttttccagccgccctcccggggccgcgccggcaagttcctggatgaggagcggctcctgcaggagtacccgcccaacctggacacgcccctgccctacctggagtttcgatacaagcggcgagtttatgcccagaacctcatcgatgataagcagtttgcaaagcttcacacaaaggcgaacctgaagaagtt

SEQ ID NO: 2 - DNA, 1986 bp, synthetic construct
  misc_feature 1..1986: note = Nucleotide
  source 1..1986: mol_type = other DNA
cgccccacccccactcccgccccggccgtgccctgccggcagggccccccacccccaccccgggccgcgggctcggcctgccccttacgacggcgcccgggccaggaatgttgcatgaatcgtcctgtttgctgttgctcggagactcgccctgtacattgcttagtgccctcaccggccgcccagcccacccagcgcacagtcaggaagggcgtggaccagggaggctggggcgggaggtgccgggggtggggtgccctagcgtgaccacctccttcgcagctcctggtggccattctcccagagggggaacctagtccagcatgcgaggtcaggacccgccttggtgactcggggggaggggggagacattgggattctcgatgggggccaaggagcccccctgttttgcatattttaatccactctatatttggaacgagaaaaggaacaaatatctctgtccgtaatagtttcctctcccctcccttctacttccactggtcccactgcagctgcccagtcttccatctccggcccctcactgccactgccaccccacaacggggcaggggacgctccagctggtctggggttggccagggccctagtggcccgccctggggccccagctcggcccctcgcctcgctgagctctagtgtgccccaccgacccttcaggtgctgctcgtggtgggaggggcggcaggccgcgggtcctgctgtgcacccgcgggaccagccggcctgggagaccatcggccgggggggatgagggcagggccctgccgctccaccgcagccatcttcctcacagggtctctccccaaggagggggctagcttggtccccatgctcttgggcaactacagcagagaagcctccctgccttggaccccaaagtctcctgtcctgccctttatgtgtgtgggtgaaactgggtgcgtctgagcacgtgggagccgtgtgtgtgcctgattactgagtggccaccaggggccgctctggactagcgcggggccgtggaggcgtgcaccgtgtgcatgcgtggggtgtacctgtgagagcaccctgtctcctcttccaaagaaagtcagaggccatcctgcaccctgggtccagctgtttgcccagcctgtccttccagagcctcacccagcctgagcggggttccctggtgaatccctgctgcttggggaggccccaagggccccttggaggcagcgcccccaccttgggcttctgagggcatcatagggggacccctagagtcagttcaccacaggccctggggagagtcaaagacccccgagggtgcccagccccccacactgtgactcctcacactcagcgatgacctgtggggtggggggccctgggacgtttttaaacctagggtttggagtctggactaagctccatccacgtcactcacaagtttctgtttatatttctagctttttttaataaaataaaaaaaaaaagaaaacagaagttttcacaacccaggggcctggcacgccggtctgtgcctgcccgccccgccctggcccaccggccccactccctgggcacagagtcacacccactcatccttccgccaacagtccaggtcacacagcagcagtcactgtaacagactgccacatacacactcggtctcacactcacctgtgggttttggttccgttcaatttgggtttttaactttacagggtcagttccgcttcacctccttttgtatggagttccatccggggggtttcaccccctgctccagtcctgaggcctcctgaccctgacgttgtgatacgccccacagagatctatgtttcttatattattattattgataataattattataatattattatgtaataaatttataagaaatgaagccatggctcagttgcctgcttgaggggatatttgtgtctgtccctcataccggccacacaaacctcctcagcctggaccacatgc

SEQ ID NO: 3 - DNA, 3712 bp, synthetic construct
  misc_feature 1..3712: note = Nucleotide
  source 1..3712: mol_type = other DNA
gcttcggccgcggttcgcggaggcgcggggtcccgggcgccggcacccgagccccggactccttcggcgggggcccggggctcggcaccccgcatggggccggcggggcgggtccgcgctcccgggacctgagctcacgagcccgctccgctgcagaagtgcctgcgcctggacccggccgcgcccgtgtgggccgccaagcagcgcgtgctctgcgccctcaaccacagcctccaggacgcgctcaactatgggcttttccagccgccctcccggggccgcgccggcaagttcctggatgaggagcggctcctgcaggagtacccgcccaacctggacacgcccctgccctacctggaggtaagtggccggcgcgggggtgagctgaggagcgcgcagggtggatcaccaagccccgtggcgggaccagtgaagggcacggcagtggggaaacacaagtgggaggggtgaggggtggaggctgtgtgtgtgtgtgtgtgtgtgtgtgtgtggtgctgtgtgcagagtgcagtgagcgtgtacagggtgcagcgagcggacacagtgtatgcgatgagtaggcgcggtgtgtgcagtgagcgggcagggcgagcagtaaggatgtacagtgtgggcagtgtgcgagcatgtgtagtgagcaggcagtgtgtgcagttagcaggcacagtgtgtgcagtgagtgggcagtgtgcacagcatgtacagtgtgagtggtgtgtgctgtgtgccgtgagcatgtgtagtgagtgggcacagtgcagtcagtgtgcacaaagtatgcagtgggcacgtaccgtgtgtgcagtgagtggtgtgcagtgtgtagtgtgcagtgagcagtgtgtacagcattgcagtgtggggcagtgagtacagtgtgagtgttgtgattgtggtaagcaggatgcgcagtatacagtgaacagtgtgcacagtgtgtgcagtgtgggctgtgtgccacagagtcagtgtggtgtgtgtagtttgaacagtgtgtgcattgagcagcatggatggtgtggacgctgagcattgttctccagggaggagtgtgagcacgagagagtgccagaggggtgtgtggtgtgagcagggctatctgtgtgcacgtttgttcctttctccagctgtgaagtcttgtgaaggccaaccaagtcccctcctttactcacccatgcatggtgtgaagatgtattgagtgccttgctaggcatggggacgtagacggggtcagtcctgtggaaggtcttggagtttggcagggtggaggggggtgcccaactgcagtgggcattgaataaagattttgtgagctgagctcaaagttgggcgggcctccgtggtggcacaggaaagtggggtcagttctacctggagagtggagggggatgtctaggatggtaagcctggaatcaggccttcagagaggagtgggattttgccgagaatcctggggatgggaaggcgacgggacagtgcaggctgcgggcagctaggcacgtgccttccatcgggctgcatcatgcctgagtgtggtgggtgcatggcagctgttagctctgtccactgtggtagtatgactgatggtgtgtacaggagggcagtgaggggtgcggtgtggccagcatgagcgggacggggtttgtgcatggactcacttgctcagccggggtgggggcattttctctaccttttctttatctgagcagtttcgatacaagcggcgagtttatgcccagaacctcatcgatgataagcagtttgcaaagcttcacacaaaggtaaaggatcacggggagggggctcctgaggttccctcctgcctccctgtggctgctgtcccccaccccagcttggggctgaccacagtcccccagctttagctcagtccatttccccatcatcaggggcccagagcctgtactgggtgtggctgaagggctgggcacagattcctggccccatggttggggtcaggtggtacagtgatgtgttccagttagatcagactcttgccgacccccctggcttaggggctggagtgtcctgtgagaagctgggtggagagggagtggacaagcatctgatgtgatggctgtcgggacaaggcacccagcatcgagtggtcgaccagtgctaggcatttgtgattagacctctcattaatcctcttccagagggactattataaccctgtttcacagatggggacacagagtacccgactgtgtagacagtgaagctggggctgaacccagatctgtctgattccaggccctgtgcccaggcatgcctttgaggtgtctactgctgggtgccacccccaactgggcctgaccccaaatgctcttgaggggggcaccttactatttcccgctgaatgtcagaggggcagggtgggtgccacagcccctccccaggggcttccacccgcagctcacagtccagcaggcacttgtttgctggatactttatgggcggtctcgagctcaggagaggggtcagaatggagggtctctggagcccaggagaggaatcagaactgtcagccctgtgtcctaatggtcccatcagtgactttggagcctcaggcttctgtgccaggcttttctgctgccccagggcaggcggtggtcaacggccttggcactatggctgggcagagtccactgtggaaaggtccccctctcctgccactggccctcacttgaccttgtcagcctgggttcctaccccatggccacctctccctccggatctctcttcagtgaccaacaagacatgagtgactcactctgaagtaggtctcgtttgtttttaggatgagcctgaacttcttacatagcccgtgtttctgcttgcctgggctccagctggcctttccctctcccctggtagtgagcacttcctcctctttcactgcctggcccgcctgaggaggttgcctcccaaggcaggggtccctatggcaccctcccctatttctgaggtacactgggtgtttatggaagggccccggcctttggccagggcaccttgccttgtgtgtgtggtgtccgtagtgccggctggggaagtgaggccttgtggggtgagtgaataaactgggtgaatgagtacaaggccatcaaagtcatgtcacaggatgggtccctggggtgggggtctgcggtggggtgagctggagaggaagatgggccgaagaaggagcaggttgtctcagggtgctgaggattcagggctgctgtggggctggttcctgcctgggtggacctcgggctcttctaggccaggcaggtcggggcagcagggccggagagacggagccagggcagtgactgggcctggagtgggggacttgcttggggccccaccagggtgacctggccttggtgaggggctacttgggtacaagctgacagtcgtgactggtttggctatcagggcgcaaggaagggctttgagccgtgcatgggcccacccgagtgggaattggggccgtggtgggagtgcaggaccgtggttgacaattgtgatgtcaggtgacaggtcagactggtagggatgtggcgggggttgcctgaaggtggcctgaggcttgccggaggaaggcgggtgatgttcagatgatggaggccttggtgccaggctgactgacggccggtgttccaggcgaacctgaagaagttca

SEQ ID NO: 4 - DNA, 50 bp, synthetic construct
  misc_feature 1..50: note = Nucleotide
  source 1..50: mol_type = other DNA
aggagagaggaggagagagaggagagagagaggagagagaggagagagag

SEQ ID NO: 5 - DNA, 17 bp, synthetic construct
  misc_feature 1..17: note = Oligonucleotide
  source 1..17: mol_type = other DNA
gcctggcctgagtggtg

SEQ ID NO: 6 - DNA, 17 bp, synthetic construct
  misc_feature 1..17: note = Oligonucleotide
  source 1..17: mol_type = other DNA
ctggcctggcctgagtg

SEQ ID NO: 7 - DNA, 17 bp, synthetic construct
  misc_feature 1..17: note = Oligonucleotide
  source 1..17: mol_type = other DNA
ccactggcctggcctga

SEQ ID NO: 8 - DNA, 17 bp, synthetic construct
  misc_feature 1..17: note = Oligonucleotide
  source 1..17: mol_type = other DNA
aggccactggcctggcc

SEQ ID NO: 9 - DNA, 17 bp, synthetic construct
  misc_feature 1..17: note = Oligonucleotide
  source 1..17: mol_type = other DNA
ccaaggccactggcctg

SEQ ID NO: 10 - DNA, 17 bp, synthetic construct
  misc_feature 1..17: note = Oligonucleotide
  source 1..17: mol_type = other DNA
ctcccaaggccactggc

SEQ ID NO: 11 - DNA, 17 bp, synthetic construct
  misc_feature 1..17: note = Oligonucleotide
  source 1..17: mol_type = other DNA
cccctcccaaggccact

SEQ ID NO: 12 - DNA, 17 bp, synthetic construct
  misc_feature 1..17: note = Oligonucleotide
  source 1..17: mol_type = other DNA
aggcccctcccaaggcc

SEQ ID NO: 13 - DNA, 17 bp, synthetic construct
  misc_feature 1..17: note = Oligonucleotide
  source 1..17: mol_type = other DNA
cacaggcccctcccaag

SEQ ID NO: 14 - DNA, 17 bp, synthetic construct
  misc_feature 1..17: note = Oligonucleotide
  source 1..17: mol_type = other DNA
catcacaggcccctccc

SEQ ID NO: 15 - DNA, 17 bp, synthetic construct
  misc_feature 1..17: note = Oligonucleotide
  source 1..17: mol_type = other DNA
cagcatcacaggcccct

SEQ ID NO: 16 - DNA, 17 bp, synthetic construct
  misc_feature 1..17: note = Oligonucleotide
  source 1..17: mol_type = other DNA
tcccagcatcacaggcc

SEQ ID NO: 17 - DNA, 17 bp, synthetic construct
  misc_feature 1..17: note = Oligonucleotide
  source 1..17: mol_type = other DNA
tggtcccagcatcacag

SEQ ID NO: 18 - DNA, 17 bp, synthetic construct
  misc_feature 1..17: note = Oligonucleotide
  source 1..17: mol_type = other DNA
ctgtggtcccagcatca

SEQ ID NO: 19 - DNA, 17 bp, synthetic construct
  misc_feature 1..17: note = Oligonucleotide
  source 1..17: mol_type = other DNA
gaactgtggtcccagca

SEQ ID NO: 20 - DNA, 17 bp, synthetic construct
  misc_feature 1..17: note = Oligonucleotide
  source 1..17: mol_type = other DNA
caggaactgtggtccca

SEQ ID NO: 21 - DNA, 17 bp, synthetic construct
  misc_feature 1..17: note = Oligonucleotide
  source 1..17: mol_type = other DNA
gcccaggaactgtggtc

SEQ ID NO: 22 - DNA, 17 bp, synthetic construct
  misc_feature 1..17: note = Oligonucleotide
  source 1..17: mol_type = other DNA
cctgcccaggaactgtg

SEQ ID NO: 23 - DNA, 17 bp, synthetic construct
  misc_feature 1..17: note = Oligonucleotide
  source 1..17: mol_type = other DNA
ctccctgcccaggaact

SEQ ID NO: 24 - DNA, 17 bp, synthetic construct
  misc_feature 1..17: note = Oligonucleotide
  source 1..17: mol_type = other DNA
ttgctccctgcccagga

SEQ ID NO: 25 - DNA, 17 bp, synthetic construct
  misc_feature 1..17: note = Oligonucleotide
  source 1..17: mol_type = other DNA
cggttgctccctgccca

SEQ ID NO: 26 - DNA, 17 bp, synthetic construct
  misc_feature 1..17: note = Oligonucleotide
  source 1..17: mol_type = other DNA
agacggttgctccctgc

SEQ ID NO: 27 - DNA, 17 bp, synthetic construct
  misc_feature 1..17: note = Oligonucleotide
  source 1..17: mol_type = other DNA
cctagacggttgctccc

SEQ ID NO: 28 - DNA, 17 bp, synthetic construct
  misc_feature 1..17: note = Oligonucleotide
  source 1..17: mol_type = other DNA
acgcctagacggttgct

SEQ ID NO: 29 - DNA, 17 bp, synthetic construct
  misc_feature 1..17: note = Oligonucleotide
  source 1..17: mol_type = other DNA
cccacgcctagacggtt

SEQ ID NO: 30 - DNA, 17 bp, synthetic construct
  misc_feature 1..17: note = Oligonucleotide
  source 1..17: mol_type = other DNA
ctccccacgcctagacg

SEQ ID NO: 31 - DNA, 17 bp, synthetic construct
  misc_feature 1..17: note = Oligonucleotide
  source 1..17: mol_type = other DNA
gttctccccacgcctag

SEQ ID NO: 32 - DNA, 17 bp, synthetic construct
  misc_feature 1..17: note = Oligonucleotide
  source 1..17: mol_type = other DNA
tgcgttctccccacgcc

SEQ ID NO: 33 - DNA, 17 bp, synthetic construct
  misc_feature 1..17: note = Oligonucleotide
  source 1..17: mol_type = other DNA
tcctgcgttctccccac

SEQ ID NO: 34 - DNA, 17 bp, synthetic construct
  misc_feature 1..17: note = Oligonucleotide
  source 1..17: mol_type = other DNA
acgtcctgcgttctccc

SEQ ID NO: 35 - DNA, 17 bp, synthetic construct
  misc_feature 1..17: note = Oligonucleotide
  source 1..17: mol_type = other DNA
gtcacgtcctgcgttct

SEQ ID NO: 36 - DNA, 17 bp, synthetic construct
  misc_feature 1..17: note = Oligonucleotide
  source 1..17: mol_type = other DNA
tgggtcacgtcctgcgt

SEQ ID NO: 37 - DNA, 17 bp, synthetic construct
  misc_feature 1..17: note = Oligonucleotide
  source 1..17: mol_type = other DNA
gtgtgggtcacgtcctg

SEQ ID NO: 38 - DNA, 17 bp, synthetic construct
  misc_feature 1..17: note = Oligonucleotide
  source 1..17: mol_type = other DNA
ggtgtgtgggtcacgtc

SEQ ID NO: 39 - DNA, 17 bp, synthetic construct
  misc_feature 1..17: note = Oligonucleotide
  source 1..17: mol_type = other DNA
tgcggtgtgtgggtcac

SEQ ID NO: 40 - DNA, 17 bp, synthetic construct
  misc_feature 1..17: note = Oligonucleotide
  source 1..17: mol_type = other DNA
cagtgcggtgtgtgggt

SEQ ID NO: 41 - DNA, 17 bp, synthetic construct
  misc_feature 1..17: note = Oligonucleotide
  source 1..17: mol_type = other DNA
ctccagtgcggtgtgtg

SEQ ID NO: 42 - DNA, 17 bp, synthetic construct
  misc_feature 1..17: note = Oligonucleotide
  source 1..17: mol_type = other DNA
agcctccagtgcggtgt

SEQ ID NO: 43 - DNA, 17 bp, synthetic construct
  misc_feature 1..17: note = Oligonucleotide
  source 1..17: mol_type = other DNA
cggagcctccagtgcgg

SEQ ID NO: 44 - DNA, 17 bp, synthetic construct
  misc_feature 1..17: note = Oligonucleotide
  source 1..17: mol_type = other DNA
gagcggagcctccagtg

SEQ ID NO: 45 - DNA, 17 bp, synthetic construct
  misc_feature 1..17: note = Oligonucleotide
  source 1..17: mol_type = other DNA
gcagagcggagcctcca

SEQ ID NO: 46 - DNA, 17 bp, synthetic construct
  misc_feature 1..17: note = Oligonucleotide
  source 1..17: mol_type = other DNA
cgggcagagcggagcct

SEQ ID NO: 47 - DNA, 17 bp, synthetic construct
  misc_feature 1..17: note = Oligonucleotide
  source 1..17: mol_type = other DNA
aggaaggggtcccggag

SEQ ID NO: 48 - DNA, 17 bp, synthetic construct
  misc_feature 1..17: note = Oligonucleotide
  source 1..17: mol_type = other DNA
cggaggaaggggtcccg

SEQ ID NO: 49 - DNA, 17 bp, synthetic construct
  misc_feature 1..17: note = Oligonucleotide
  source 1..17: mol_type = other DNA
cggcggaggaaggggtc

SEQ ID NO: 50 - DNA, 17 bp, synthetic construct
  misc_feature 1..17: note = Oligonucleotide
  source 1..17: mol_type = other DNA
gtgcggcggaggaaggg

SEQ ID NO: 51 - DNA, 17 bp, synthetic construct
  misc_feature 1..17: note = Oligonucleotide
  source 1..17: mol_type = other DNA
cgggtgcggcggaggaa

SEQ ID NO: 52 - DNA, 17 bp, synthetic construct
  misc_feature 1..17: note = Oligonucleotide
  source 1..17: mol_type = other DNA
gggcgggtgcggcggag

SEQ ID NO: 53 - DNA, 17 bp, synthetic construct
  misc_feature 1..17: note = Oligonucleotide
  source 1..17: mol_type = other DNA
ccggggcgggtgcggcg

SEQ ID NO: 54 - DNA, 17 bp, synthetic construct
  misc_feature 1..17: note = Oligonucleotide
  source 1..17: mol_type = other DNA
ccaccggggcgggtgcg

SEQ ID NO: 55 - DNA, 17 bp, synthetic construct
  misc_feature 1..17: note = Oligonucleotide
  source 1..17: mol_type = other DNA
ggaccaccggggcgggt

SEQ ID NO: 56 - DNA, 17 bp, synthetic construct
  misc_feature 1..17: note = Oligonucleotide
  source 1..17: mol_type = other DNA
cgcggaccaccggggcg

SEQ ID NO: 57 - DNA, 17 bp, synthetic construct
  misc_feature 1..17: note = Oligonucleotide
  source 1..17: mol_type = other DNA
atccgcggaccaccggg

SEQ ID NO: 58 - DNA, 17 bp, synthetic construct
  misc_feature 1..17: note = Oligonucleotide
  source 1..17: mol_type = other DNA
ggcatccgcggaccacc

SEQ ID NO: 59 - DNA, 17 bp, synthetic construct
  misc_feature 1..17: note = Oligonucleotide
  source 1..17: mol_type = other DNA
gcgggcatccgcggacc

SEQ ID NO: 60 - DNA, 17 bp, synthetic construct
  misc_feature 1..17: note = Oligonucleotide
  source 1..17: mol_type = other DNA
agggcgggcatccgcgg

SEQ ID NO: 61 - DNA, 17 bp, synthetic construct
  misc_feature 1..17: note = Oligonucleotide
  source 1..17: mol_type = other DNA
gcaagggcgggcatccg

SEQ ID NO: 62 - DNA, 17 bp, synthetic construct
  misc_feature 1..17: note = Oligonucleotide
  source 1..17: mol_type = other DNA
gcggcaagggcgggcat

SEQ ID NO: 63 - DNA, 17 bp, synthetic construct
  misc_feature 1..17: note = Oligonucleotide
  source 1..17: mol_type = other DNA
tgagcggcaagggcggg

SEQ ID NO: 64 - DNA, 17 bp, synthetic construct
  misc_feature 1..17: note = Oligonucleotide
  source 1..17: mol_type = other DNA
ggctgagcggcaagggc

SEQ ID NO: 65 - DNA, 17 bp, synthetic construct
  misc_feature 1..17: note = Oligonucleotide
  source 1..17: mol_type = other DNA
agtggctgagcggcaag

SEQ ID NO: 66 - DNA, 17 bp, synthetic construct
  misc_feature 1..17: note = Oligonucleotide
  source 1..17: mol_type = other DNA
gggagtggctgagcggc

SEQ ID NO: 67 - DNA, 17 bp, synthetic construct
  misc_feature 1..17: note = Oligonucleotide
  source 1..17: mol_type = other DNA
ggggggagtggctgagc

SEQ ID NO: 68 - DNA, 17 bp, synthetic construct
  misc_feature 1..17: note = Oligonucleotide
  source 1..17: mol_type = other DNA
tgcggggggagtggctg

SEQ ID NO: 69 - DNA, 17 bp, synthetic construct
  misc_feature 1..17: note = Oligonucleotide
  source 1..17: mol_type = other DNA
cggtgcggggggagtgg

SEQ ID NO: 70 - DNA, 17 bp, synthetic construct
  misc_feature 1..17: note = Oligonucleotide
  source 1..17: mol_type = other DNA
cctcggtgcggggggag

SEQ ID NO: 71 - DNA, 17 bp, synthetic construct
  misc_feature 1..17: note = Oligonucleotide
  source 1..17: mol_type = other DNA
aggcctcggtgcggggg

SEQ ID NO: 72 - DNA, 17 bp, synthetic construct
  misc_feature 1..17: note = Oligonucleotide
  source 1..17: mol_type = other DNA
cctaggcctcggtgcgg

SEQ ID NO: 73 - DNA, 17 bp, synthetic construct
  misc_feature 1..17: note = Oligonucleotide
  source 1..17: mol_type = other DNA
agtcctaggcctcggtg

SEQ ID NO: 74 - DNA, 17 bp, synthetic construct
  misc_feature 1..17: note = Oligonucleotide
  source 1..17: mol_type = other DNA
gggagtcctaggcctcg

SEQ ID NO: 75 - DNA, 17 bp, synthetic construct
  misc_feature 1..17: note = Oligonucleotide
  source 1..17: mol_type = other DNA
ggctcagctcggcgcct

SEQ ID NO: 76 - DNA, 17 bp, synthetic construct
  misc_feature 1..17: note = Oligonucleotide
  source 1..17: mol_type = other DNA
cccggctcagctcggcg

SEQ ID NO: 77 - DNA, 17 bp, synthetic construct
  misc_feature 1..17: note = Oligonucleotide
  source 1..17: mol_type = other DNA
ggccccggctcagctcg

SEQ ID NO: 78 - DNA, 17 bp, synthetic construct
  misc_feature 1..17: note = Oligonucleotide
  source 1..17: mol_type = other DNA
atcggccccggctcagc

SEQ ID NO: 79 - DNA, 17 bp, synthetic construct
  misc_feature 1..17: note = Oligonucleotide
  source 1..17: mol_type = other DNA
tgcatcggccccggctc

SEQ ID NO: 80 - DNA, 17 bp, synthetic construct
  misc_feature 1..17: note = Oligonucleotide
  source 1..17: mol_type = other DNA
agctgcatcggccccgg

SEQ ID NO: 81 - DNA, 17 bp, synthetic construct
  misc_feature 1..17: note = Oligonucleotide
  source 1..17: mol_type = other DNA
ctcagctgcatcggccc

SEQ ID NO: 82 - DNA, 17 bp, synthetic construct
  misc_feature 1..17: note = Oligonucleotide
  source 1..17: mol_type = other DNA
cggctcagctgcatcgg

SEQ ID NO: 83 - DNA, 17 bp, synthetic construct
  misc_feature 1..17: note = Oligonucleotide
  source 1..17: mol_type = other DNA
gcgcggctcagctgcat

SEQ ID NO: 84 - DNA, 17 bp, synthetic construct
  misc_feature 1..17: note = Oligonucleotide
  source 1..17: mol_type = other DNA
gcggcgcggctcagctg

SEQ ID NO: 85 - DNA, 17 bp, synthetic construct
  misc_feature 1..17: note = Oligonucleotide
  source 1..17: mol_type = other DNA
gcggcggcgcggctcag

SEQ ID NO: 86 - DNA, 17 bp, synthetic construct
  misc_feature 1..17: note = Oligonucleotide
  source 1..17: mol_type = other DNA
gcggcggcggcgcggct

SEQ ID NO: 87 - DNA, 17 bp, synthetic construct
  misc_feature 1..17: note = Oligonucleotide
  source 1..17: mol_type = other DNA
gcggcggcggcggcgcg

SEQ ID NO: 88 - DNA, 17 bp, synthetic construct
  misc_feature 1..17: note = Oligonucleotide
  source 1..17: mol_type = other DNA
gcggcggcggcggcggc

SEQ ID NO: 89 - DNA, 17 bp, synthetic construct
  misc_feature 1..17: note = Oligonucleotide
  source 1..17: mol_type = other DNA
caggggcggcggcggcg

SEQ ID NO: 90 - DNA, 17 bp, synthetic construct
  misc_feature 1..17: note = Oligonucleotide
  source 1..17: mol_type = other DNA
ccgcaggggcggcggcg

SEQ ID NO: 91 - DNA, 17 bp, synthetic construct
  misc_feature 1..17: note = Oligonucleotide
  source 1..17: mol_type = other DNA
ggggcggcggcggcggc

SEQ ID NO: 92 - DNA, 17 bp, synthetic construct
  misc_feature 1..17: note = Oligonucleotide
  source 1..17: mol_type = other DNA
gcaggggcggcggcggc

SEQ ID NO: 93 - DNA, 17 bp, synthetic construct
  misc_feature 1..17: note = Oligonucleotide
  source 1..17: mol_type = other DNA
tccgcaggggcggcggc

SEQ ID NO: 94 - DNA, 17 bp, synthetic construct
  misc_feature 1..17: note = Oligonucleotide
  source 1..17: mol_type = other DNA
ggctccgcaggggcggc

SEQ ID NO: 95 - DNA, 17 bp, synthetic construct
  misc_feature 1..17: note = Oligonucleotide
  source 1..17: mol_type = other DNA
gggggctccgcaggggc

SEQ ID NO: 96 - DNA, 17 bp, synthetic construct
  misc_feature 1..17: note = Oligonucleotide
  source 1..17: mol_type = other DNA
tccgggggctccgcagg

SEQ ID NO: 97 - DNA, 17 bp, synthetic construct
  misc_feature 1..17: note = Oligonucleotide
  source 1..17: mol_type = other DNA
ggctccgggggctccgc

SEQ ID NO: 98 - DNA, 17 bp, synthetic construct
  misc_feature 1..17: note = Oligonucleotide
  source 1..17: mol_type = other DNA
agcggctccgggggctc

SEQ ID NO: 99 - DNA, 17 bp, synthetic construct
  misc_feature 1..17: note = Oligonucleotide
  source 1..17: mol_type = other DNA
gacagcggctccggggg

SEQ ID NO: 100 - DNA, 17 bp, synthetic construct
  misc_feature 1..17: note = Oligonucleotide
  source 1..17: mol_type = other DNA
ggggacagcggctccgg

SEQ ID NO: 101 - DNA, 17 bp, synthetic construct
  misc_feature 1..17: note = Oligonucleotide
  source 1..17: mol_type = other DNA
gcgggggacagcggctc

SEQ ID NO: 102 - DNA, 17 bp, synthetic construct
  misc_feature 1..17: note = Oligonucleotide
  source 1..17: mol_type = other DNA
ggcgcgggggacagcgg

SEQ ID NO: 103 - DNA, 17 bp, synthetic construct
  misc_feature 1..17: note = Oligonucleotide
  source 1..17: mol_type = other DNA
gccggcgcgggggacag

SEQ ID NO: 104 - DNA, 17 bp, synthetic construct
  misc_feature 1..17: note = Oligonucleotide
  source 1..17: mol_type = other DNA
ggggccggcgcggggga

SEQ ID NO: 105 - DNA, 17 bp, synthetic construct
  misc_feature 1..17: note = Oligonucleotide
  source 1..17: mol_type = other DNA
gccggggccggcgcggg

SEQ ID NO: 106 - DNA, 17 bp, synthetic construct
  misc_feature 1..17: note = Oligonucleotide
  source 1..17: mol_type = other DNA
ggggccggggccggcgc

SEQ ID NO: 107 - DNA, 17 bp, synthetic construct
  misc_feature 1..17: note = Oligonucleotide
  source 1..17: mol_type = other DNA
gccggggccggggccgg

SEQ ID NO: 108 - DNA, 17 bp, synthetic construct
  misc_feature 1..17: note = Oligonucleotide
  source 1..17: mol_type = other DNA
ggggccggggccggggc

SEQ ID NO: 109 - DNA, 17 bp, synthetic construct
  misc_feature 1..17: note = Oligonucleotide
  source 1..17: mol_type = other DNA
gggggggccggggccgg

SEQ ID NO: 110 - DNA, 17 bp, synthetic construct
  misc_feature 1..17: note = Oligonucleotide
  source 1..17: mol_type = other DNA
ccggggggggccggggc

SEQ ID NO: 111 - DNA, 17 bp, synthetic construct
  misc_feature 1..17: note = Oligonucleotide
  source 1..17: mol_type = other DNA
gggccggggggggccgg

SEQ ID NO: 112 - DNA, 17 bp, synthetic construct
  misc_feature 1..17: note = Oligonucleotide
  source 1..17: mol_type = other DNA
agggggccggggggggc

SEQ ID NO: 113 - DNA, 17 bp, synthetic construct
  misc_feature 1..17: note = Oligonucleotide
  source 1..17: mol_type = other DNA
gggagggggccgggggg

SEQ ID NO: 114 - DNA, 17 bp, synthetic construct
  misc_feature 1..17: note = Oligonucleotide
  source 1..17: mol_type = other DNA
cgcgggagggggccggg

SEQ ID NO: 115 - DNA, 17 bp, synthetic construct
  misc_feature 1..17: note = Oligonucleotide
  source 1..17: mol_type = other DNA
ctgcgcgggagggggcc

SEQ ID NO: 116 - DNA, 17 bp, synthetic construct
  misc_feature 1..17: note = Oligonucleotide
  source 1..17: mol_type = other DNA
gcgctgcgcgggagggg

SEQ ID NO: 117 - DNA, 17 bp, synthetic construct
  misc_feature 1..17: note = Oligonucleotide
  source 1..17: mol_type = other DNA
gccgcgctgcgcgggag

SEQ ID NO: 118 - DNA, 17 bp, synthetic construct
  misc_feature 1..17: note = Oligonucleotide
  source 1..17: mol_type = other DNA
tcggccgcgctgcgcgg

SEQ ID NO: 119 - DNA, 17 bp, synthetic construct
  misc_feature 1..17: note = Oligonucleotide
  source 1..17: mol_type = other DNA
ccgtcggccgcgctgcg

SEQ ID NO: 120 - DNA, 17 bp, synthetic construct
  misc_feature 1..17: note = Oligonucleotide
  source 1..17: mol_type = other DNA
gccccgtcggccgcgct

SEQ ID NO: 121 - DNA, 17 bp, synthetic construct
  misc_feature 1..17: note = Oligonucleotide
  source 1..17: mol_type = other DNA
ggagccccgtcggccgc

SEQ ID NO: 122 - DNA, 17 bp, synthetic construct
  misc_feature 1..17: note = Oligonucleotide
  source 1..17: mol_type = other DNA
gccggagccccgtcggc

SEQ ID NO: 123 - DNA, 17 bp, synthetic construct
  misc_feature 1..17: note = Oligonucleotide
  source 1..17: mol_type = other DNA
cccgccggagccccgtc

SEQ ID NO: 124 - DNA, 17 bp, synthetic construct
  misc_feature 1..17: note = Oligonucleotide
  source 1..17: mol_type = other DNA
ccccccgccggagcccc

SEQ ID NO: 125 - DNA, 17 bp, synthetic construct
  misc_feature 1..17: note = Oligonucleotide
  source 1..17: mol_type = other DNA
ttcccccccgccggagc

SEQ ID NO: 126 - DNA, 17 bp, synthetic construct
  misc_feature 1..17: note = Oligonucleotide
  source 1..17: mol_type = other DNA
cccttcccccccgccgg

SEQ ID NO: 127 - DNA, 17 bp, synthetic construct
  misc_feature 1..17: note = Oligonucleotide
  source 1..17: mol_type = other DNA
ccccccttcccccccgc

SEQ ID NO: 128 - DNA, 17 bp, synthetic construct
  misc_feature 1..17: note = Oligonucleotide
  source 1..17: mol_type = other DNA
ggcccccccttcccccc

SEQ ID NO: 129 - DNA, 17 bp, synthetic construct
  misc_feature 1..17: note = Oligonucleotide
  source 1..17: mol_type = other DNA
cccggcccccccttccc

SEQ ID NO: 130 - DNA, 17 bp, synthetic construct
  misc_feature 1..17: note = Oligonucleotide
  source 1..17: mol_type = other DNA
cgccccggccccccctt

SEQ ID NO: 131 - DNA, 17 bp, synthetic construct
  misc_feature 1..17: note = Oligonucleotide
  source 1..17: mol_type = other DNA
cggcgccccggcccccc

SEQ ID NO: 132 - DNA, 17 bp, synthetic construct
  misc_feature 1..17: note = Oligonucleotide
  source 1..17: mol_type = other DNA
gcgcggcgccccggccc

SEQ ID NO: 133 - DNA, 17 bp, synthetic construct
  misc_feature 1..17: note = Oligonucleotide
  source 1..17: mol_type = other DNA
cgcgcgcggcgccccgg

SEQ ID NO: 134 - DNA, 17 bp, synthetic construct
  misc_feature 1..17: note = Oligonucleotide
  source 1..17: mol_type = other DNA
ctccgcgcgcggcgccc

SEQ ID NO: 135 - DNA, 17 bp, synthetic construct
  misc_feature 1..17: note = Oligonucleotide
  source 1..17: mol_type = other DNA
ggactccgcgcgcggcg

SEQ ID NO: 136 - DNA, 17 bp, synthetic construct
  misc_feature 1..17: note = Oligonucleotide
  source 1..17: mol_type = other DNA
cggggactccgcgcgcg

SEQ ID NO: 137 - DNA, 17 bp, synthetic construct
  misc_feature 1..17: note = Oligonucleotide
  source 1..17: mol_type = other DNA
gcccggggactccgcgc

SEQ ID NO: 138 - DNA, 17 bp, synthetic construct
  misc_feature 1..17: note = Oligonucleotide
  source 1..17: mol_type = other DNA
agcgcccggggactccg

SEQ ID NO: 139 - DNA, 17 bp, synthetic construct
  misc_feature 1..17: note = Oligonucleotide
  source 1..17: mol_type = other DNA
cggagcgcccggggact

SEQ ID NO: 140 - DNA, 17 bp, synthetic construct
  misc_feature 1..17: note = Oligonucleotide
  source 1..17: mol_type = other DNA
gaacggagcgcccgggg

SEQ ID NO: 141 - DNA, 17 bp, synthetic construct
  misc_feature 1..17: note = Oligonucleotide
  source 1..17: mol_type = other DNA
ggggaacggagcgcccg

SEQ ID NO: 142 - DNA, 17 bp, synthetic construct
  misc_feature 1..17: note = Oligonucleotide
  source 1..17: mol_type = other DNA
gccggggaacggagcgc

SEQ ID NO: 143 - DNA, 17 bp, synthetic construct
  misc_feature 1..17: note = Oligonucleotide
  source 1..17: mol_type = other DNA
cgcgccggggaacggag

SEQ ID NO: 144 - DNA, 17 bp, synthetic construct
  misc_feature 1..17: note = Oligonucleotide
  source 1..17: mol_type = other DNA
gctcgcgccggggaacg

SEQ ID NO: 145 - DNA, 17 bp, synthetic construct
  misc_feature 1..17: note = Oligonucleotide
  source 1..17: mol_type = other DNA
gccgctcgcgccgggga

SEQ ID NO: 146 - DNA, 17 bp, synthetic construct
  misc_feature 1..17: note = Oligonucleotide
  source 1..17: mol_type = other DNA
ggggccgctcgcgccgg

SEQ ID NO: 147 - DNA, 17 bp, synthetic construct
  misc_feature 1..17: note = Oligonucleotide
  source 1..17: mol_type = other DNA
gccggggccgctcgcgc

SEQ ID NO: 148 - DNA, 17 bp, synthetic construct
  misc_feature 1..17: note = Oligonucleotide
  source 1..17: mol_type = other DNA
cgggccggggccgctcg

SEQ ID NO: 149 - DNA, 17 bp, synthetic construct
  misc_feature 1..17: note = Oligonucleotide
  source 1..17: mol_type = other DNA
gcccgggccggggccgc

SEQ ID NO: 150 - DNA, 17 bp, synthetic construct
  misc_feature 1..17: note = Oligonucleotide
  source 1..17: mol_type = other DNA
ggggcccgggccggggc

SEQ ID NO: 151 - DNA, 17 bp, synthetic construct
  misc_feature 1..17: note = Oligonucleotide
  source 1..17: mol_type = other DNA
gccggggcccgggccgg

SEQ ID NO: 152 - DNA, 17 bp, synthetic construct
  misc_feature 1..17: note = Oligonucleotide
  source 1..17: mol_type = other DNA
cgcgccggggcccgggc

SEQ ID NO: 153 - DNA, 17 bp, synthetic construct
  misc_feature 1..17: note = Oligonucleotide
  source 1..17: mol_type = other DNA
ccccgcgccggggcccg

SEQ ID NO: 154 - DNA, 17 bp, synthetic construct
  misc_feature 1..17: note = Oligonucleotide
  source 1..17: mol_type = other DNA
catccccgcgccggggc

SEQ ID NO: 155 - DNA, 17 bp, synthetic construct
  misc_feature 1..17: note = Oligonucleotide
  source 1..17: mol_type = other DNA
gtccatccccgcgccgg

SEQ ID NO: 156 - DNA, 17 bp, synthetic construct
  misc_feature 1..17: note = Oligonucleotide
  source 1..17: mol_type = other DNA
gccgtccatccccgcgc

SEQ ID NO: 157 - DNA, 17 bp, synthetic construct
  misc_feature 1..17: note = Oligonucleotide
  source 1..17: mol_type = other DNA
ggggccgtccatccccg

SEQ ID NO: 158 - DNA, 17 bp, synthetic construct
  misc_feature 1..17: note = Oligonucleotide
  source 1..17: mol_type = other DNA
cccggggccgtccatcc

SEQ ID NO: 159 - DNA, 17 bp, synthetic construct
  misc_feature 1..17: note = Oligonucleotide
  source 1..17: mol_type = other DNA
ggccccggggccgtcca

SEQ ID NO: 160 - DNA, 17 bp, synthetic construct
  misc_feature 1..17: note = Oligonucleotide
  source 1..17: mol_type = other DNA
gctggccccggggccgt

SEQ ID NO: 161 - DNA, 17 bp, synthetic construct
  misc_feature 1..17: note = Oligonucleotide
  source 1..17: mol_type = other DNA
ggcgctggccccggggc

SEQ ID NO: 162 - DNA, 17 bp, synthetic construct
  misc_feature 1..17: note = Oligonucleotide
  source 1..17: mol_type = other DNA
cacggcgctggccccgg

SEQ ID NO: 163 - DNA, 17 bp, synthetic construct
  misc_feature 1..17: note = Oligonucleotide
  source 1..17: mol_type = other DNA
gaccacggcgctggccc

SEQ ID NO: 164 - DNA, 17 bp, synthetic construct
  misc_feature 1..17: note = Oligonucleotide
  source 1..17: mol_type = other DNA
cacgaccacggcgctgg

SEQ ID NO: 165 - DNA, 17 bp, synthetic construct
  misc_feature 1..17: note = Oligonucleotide
  source 1..17: mol_type = other DNA
gcgcacgaccacggcgc

SEQ ID NO: 166 - DNA, 17 bp, synthetic construct
  misc_feature 1..17: note = Oligonucleotide
  source 1..17: mol_type = other DNA
gacgcgcacgaccacgg

SEQ ID NO: 167 - DNA, 17 bp, synthetic construct
  misc_feature 1..17: note = Oligonucleotide
  source 1..17: mol_type = other DNA
gccgacgcgcacgacca

SEQ ID NO: 168 - DNA, 17 bp, synthetic construct
  misc_feature 1..17: note = Oligonucleotide
  source 1..17: mol_type = other DNA
gatgccgacgcgcacga

SEQ ID NO: 169 - DNA, 17 bp, synthetic construct
  misc_feature 1..17: note = Oligonucleotide
  source 1..17: mol_type = other DNA
cgggatgccgacgcgca

SEQ ID NO: 170 - DNA, 17 bp, synthetic construct
  misc_feature 1..17: note = Oligonucleotide
  source 1..17: mol_type = other DNA
gtccgggatgccgacgc

SEQ ID NO: 171 - DNA, 17 bp, synthetic construct
  misc_feature 1..17: note = Oligonucleotide
  source 1..17: mol_type = other DNA
caggtccgggatgccga

SEQ ID NO: 172 - DNA, 17 bp, synthetic construct
  misc_feature 1..17: note = Oligonucleotide
  source 1..17: mol_type = other DNA
ctgcaggtccgggatgc

SEQ ID NO: 173 - DNA, 17 bp, synthetic construct
  misc_feature 1..17: note = Oligonucleotide
  source 1..17: mol_type = other DNA
ctgctgcaggtccggga

SEQ ID NO: 174 - DNA, 17 bp, synthetic construct
  misc_feature 1..17: note = Oligonucleotide
  source 1..17: mol_type = other DNA
cgtctgctgcaggtccg

SEQ ID NO: 175 - DNA, 17 bp, synthetic construct
  misc_feature 1..17: note = Oligonucleotide
  source 1..17: mol_type = other DNA
cgaaccgcggccgaagc

SEQ ID NO: 176 - DNA, 17 bp, synthetic construct
  misc_feature 1..17: note = Oligonucleotide
  source 1..17: mol_type = other DNA
ccgcgaaccgcggccga

SEQ ID NO: 177 - DNA, 17 bp, synthetic construct
  misc_feature 1..17: note = Oligonucleotide
  source 1..17: mol_type = other DNA
cctccgcgaaccgcggc

SEQ ID NO: 178 - DNA, 17 bp, synthetic construct
  misc_feature 1..17: note = Oligonucleotide
  source 1..17: mol_type = other DNA
gcgcctccgcgaaccgc

SEQ ID NO: 179 - DNA, 17 bp, synthetic construct
  misc_feature 1..17: note = Oligonucleotide
  source 1..17: mol_type = other DNA
cccgcgcctccgcgaac

SEQ ID NO: 180 - DNA, 17 bp, synthetic construct
  misc_feature 1..17: note = Oligonucleotide
  source 1..17: mol_type = other DNA
gaccccgcgcctccgcg

SEQ ID NO: 181 - DNA, 17 bp, synthetic construct
  misc_feature 1..17: note = Oligonucleotide
  source 1..17: mol_type = other DNA
cgggaccccgcgcctcc

SEQ ID NO: 182 - DNA, 17 bp, synthetic construct
  misc_feature 1..17: note = Oligonucleotide
  source 1..17: mol_type = other DNA
gcccgggaccccgcgcc

SEQ ID NO: 183 - DNA, 17 bp, synthetic construct
  misc_feature 1..17: note = Oligonucleotide
  source 1..17: mol_type = other DNA
ggcgcccgggaccccgc

SEQ ID NO: 184 - DNA, 17 bp, synthetic construct
  misc_feature 1..17: note = Oligonucleotide
  source 1..17: mol_type = other DNA
gccggcgcccgggaccc

SEQ ID NO: 185 - DNA, 17 bp, synthetic construct
  misc_feature 1..17: note = Oligonucleotide
  source 1..17: mol_type = other DNA
ggtgccggcgcccggga

SEQ ID NO: 186 - DNA, 17 bp, synthetic construct
  misc_feature 1..17: note = Oligonucleotide
  source 1..17: mol_type = other DNA
tcgggtgccggcgcccg

SEQ ID NO: 187 - DNA, 17 bp, synthetic construct
  misc_feature 1..17: note = Oligonucleotide
  source 1..17: mol_type = other DNA
ggctcgggtgccggcgc

SEQ ID NO: 188 - DNA, 17 bp, synthetic construct
  misc_feature 1..17: note = Oligonucleotide
  source 1..17: mol_type = other DNA
cggggctcgggtgccgg

SEQ ID NO: 189 - DNA, 17 bp, synthetic construct
  misc_feature 1..17: note = Oligonucleotide
  source 1..17: mol_type = other DNA
gtccggggctcgggtgc

SEQ ID NO: 190 - DNA, 17 bp, synthetic construct
  misc_feature 1..17: note = Oligonucleotide
  source 1..17: mol_type = other DNA
ggagtccggggctcggg

SEQ ID NO: 191 - DNA, 17 bp, synthetic construct
  misc_feature 1..17: note = Oligonucleotide
  source 1..17: mol_type = other DNA
gaaggagtccggggctc

SEQ ID NO: 192 - DNA, 17 bp, synthetic construct
  misc_feature 1..17: note = Oligonucleotide
  source 1..17: mol_type = other DNA
gccgaaggagtccgggg

SEQ ID NO: 193 - DNA, 17 bp, synthetic construct
  misc_feature 1..17: note = Oligonucleotide
  source 1..17: mol_type = other DNA
cccgccgaaggagtccg

SEQ ID NO: 194 - DNA, 17 bp, synthetic construct
  misc_feature 1..17: note = Oligonucleotide
  source 1..17: mol_type = other DNA
gcccccgccgaaggagt

SEQ ID NO: 195 - DNA, 17 bp, synthetic construct
  misc_feature 1..17: note = Oligonucleotide
  source 1..17: mol_type = other DNA
cgggcccccgccgaagg

SEQ ID NO: 196 - DNA, 17 bp, synthetic construct
  misc_feature 1..17: note = Oligonucleotide
  source 1..17: mol_type = other DNA
ccccgggcccccgccga

SEQ ID NO: 197 - DNA, 17 bp, synthetic construct
  misc_feature 1..17: note = Oligonucleotide
  source 1..17: mol_type = other DNA
gagccccgggcccccgc

SEQ ID NO: 198 - DNA, 17 bp, synthetic construct
  misc_feature 1..17: note = Oligonucleotide
  source 1..17: mol_type = other DNA
gccgagccccgggcccc

SEQ ID NO: 199 - DNA, 17 bp, synthetic construct
  misc_feature 1..17: note = Oligonucleotide
  source 1..17: mol_type = other DNA
ggtgccgagccccgggc

SEQ ID NO: 200 - DNA, 17 bp, synthetic construct
  misc_feature 1..17: note = Oligonucleotide
  source 1..17: mol_type = other DNA
cggggtgccgagccccg

SEQ ID NO: 201 - DNA, 17 bp, synthetic construct
  misc_feature 1..17: note = Oligonucleotide
  source 1..17: mol_type = other DNA
atgcggggtgccgagcc

SEQ ID NO: 202 - DNA, 17 bp, synthetic construct
  misc_feature 1..17: note = Oligonucleotide
  source 1..17: mol_type = other DNA
cccatgcggggtgccga

SEQ ID NO: 203 - DNA, 17 bp, synthetic construct
  misc_feature 1..17: note = Oligonucleotide
  source 1..17: mol_type = other DNA
ggccccatgcggggtgc

SEQ ID NO: 204 - DNA, 17 bp, synthetic construct
  misc_feature 1..17: note = Oligonucleotide
  source 1..17: mol_type = other DNA
gccggccccatgcgggg

SEQ ID NO: 205 - DNA, 17 bp, synthetic construct
  misc_feature 1..17: note = Oligonucleotide
  source 1..17: mol_type = other DNA
cccgccggccccatgcg

SEQ ID NO: 206 - DNA, 17 bp, synthetic construct
  misc_feature 1..17: note = Oligonucleotide
  source 1..17: mol_type = other DNA
cgccccgccggccccat

SEQ ID NO: 207 - DNA, 17 bp, synthetic construct
  misc_feature 1..17: note = Oligonucleotide
  source 1..17: mol_type = other DNA
acccgccccgccggccc

SEQ ID NO: 208 - DNA, 17 bp, synthetic construct
  misc_feature 1..17: note = Oligonucleotide
  source 1..17: mol_type = other DNA
cggacccgccccgccgg

SEQ ID NO: 209 - DNA, 17 bp, synthetic construct
  misc_feature 1..17: note = Oligonucleotide
  source 1..17: mol_type = other DNA
gcgcggacccgccccgc

SEQ ID NO: 210 - DNA, 17 bp, synthetic construct
  misc_feature 1..17: note = Oligonucleotide
  source 1..17: mol_type = other DNA
ggagcgcggacccgccc

SEQ ID NO: 211 - DNA, 17 bp, synthetic construct
  misc_feature 1..17: note = Oligonucleotide
  source 1..17: mol_type = other DNA
ccgggagcgcggacccg

SEQ ID NO: 212 - DNA, 17 bp, synthetic construct
  misc_feature 1..17: note = Oligonucleotide
  source 1..17: mol_type = other DNA
gtcccgggagcgcggac

SEQ ID NO: 213 - DNA, 17 bp, synthetic construct
  misc_feature 1..17: note = Oligonucleotide
  source 1..17: mol_type = other DNA
caggtcccgggagcgcg

SEQ ID NO: 214 - DNA, 17 bp, synthetic construct
  misc_feature 1..17: note = Oligonucleotide
  source 1..17: mol_type = other DNA
gctcaggtcccgggagc

SEQ ID NO: 215 - DNA, 17 bp, synthetic construct
  misc_feature 1..17: note = Oligonucleotide
  source 1..17: mol_type = other DNA
tgagctcaggtcccggg

SEQ ID NO: 216 - DNA, 17 bp, synthetic construct
  misc_feature 1..17: note = Oligonucleotide
  source 1..17: mol_type = other DNA
tcgtgagctcaggtccc

SEQ ID NO: 217 - DNA, 17 bp, synthetic construct
  misc_feature 1..17: note = Oligonucleotide
  source 1..17: mol_type = other DNA
ggctcgtgagctcaggt

SEQ ID NO: 218 - DNA, 17 bp, synthetic construct
  misc_feature 1..17: note = Oligonucleotide
  source 1..17: mol_type = other DNA
gcgggctcgtgagctca

SEQ ID NO: 219 - DNA, 17 bp, synthetic construct
  misc_feature 1..17: note = Oligonucleotide
  source 1..17: mol_type = other DNA
ggagcgggctcgtgagc

SEQ ID NO: 220 - DNA, 17 bp, synthetic construct
  misc_feature 1..17: note = Oligonucleotide
  source 1..17: mol_type = other DNA
agcggagcgggctcgtg

SEQ ID NO: 221 - DNA, 17 bp, synthetic construct
  misc_feature 1..17: note = Oligonucleotide
  source 1..17: mol_type = other DNA
tgcagcggagcgggctc

SEQ ID NO: 222 - DNA, 17 bp, synthetic construct
  misc_feature 1..17: note = Oligonucleotide
  source 1..17: mol_type = other DNA
ttctgcagcggagcggg

SEQ ID NO: 223 - DNA, 17 bp, synthetic construct
  misc_feature 1..17: note = Oligonucleotide
  source 1..17: mol_type = other DNA
cacttctgcagcggagc

SEQ ID NO: 224 - DNA, 17 bp, synthetic construct
  misc_feature 1..17: note = Oligonucleotide
  source 1..17: mol_type = other DNA
aggcacttctgcagcgg

SEQ ID NO: 225 - DNA, 17 bp, synthetic construct
  misc_feature 1..17: note = Oligonucleotide
  source 1..17: mol_type = other DNA
cgcaggcacttctgcag

SEQ ID NO: 226 - DNA, 17 bp, synthetic construct
  misc_feature 1..17: note = Oligonucleotide
  source 1..17: mol_type = other DNA
aggcgcaggcacttctg

SEQ ID NO: 227 - DNA, 17 bp, synthetic construct
  misc_feature 1..17: note = Oligonucleotide
  source 1..17: mol_type = other DNA
tccaggcgcaggcactt

SEQ ID NO: 228 - DNA, 17 bp, synthetic construct
  misc_feature 1..17: note = Oligonucleotide
  source 1..17: mol_type = other DNA
gggtccaggcgcaggca

SEQ ID NO: 229 - DNA, 17 bp, synthetic construct
  misc_feature 1..17: note = Oligonucleotide
  source 1..17: mol_type = other DNA
gccgggtccaggcgcag

SEQ ID NO: 230 - DNA, 17 bp, synthetic construct
  misc_feature 1..17: note = Oligonucleotide
  source 1..17: mol_type = other DNA
gcggccgggtccaggcg

SEQ ID NO: 231 - DNA, 17 bp, synthetic construct
  misc_feature 1..17: note = Oligonucleotide
  source 1..17: mol_type = other DNA
ggcgcggccgggtccag

SEQ ID NO: 232 - DNA, 17 bp, synthetic construct
  misc_feature 1..17: note = Oligonucleotide
  source 1..17: mol_type = other DNA
acgggcgcggccgggtc

SEQ ID NO: 233 - DNA, 17 bp, synthetic construct
  misc_feature 1..17: note = Oligonucleotide
  source 1..17: mol_type = other DNA
cacacgggcgcggccgg

SEQ ID NO: 234 - DNA, 17 bp, synthetic construct
  misc_feature 1..17: note = Oligonucleotide
  source 1..17: mol_type = other DNA
gcccacacgggcgcggc

SEQ ID NO: 235 - DNA, 17 bp, synthetic construct
  misc_feature 1..17: note = Oligonucleotide
  source 1..17: mol_type = other DNA
gcggcccacacgggcgc

SEQ ID NO: 236 - DNA, 17 bp, synthetic construct
  misc_feature 1..17: note = Oligonucleotide
  source 1..17: mol_type = other DNA
ttggcggcccacacggg

SEQ ID NO: 237 - DNA, 17 bp, synthetic construct
  misc_feature 1..17: note = Oligonucleotide
  source 1..17: mol_type = other DNA
tgcttggcggcccacac

SEQ ID NO: 238 - DNA, 17 bp, synthetic construct
  misc_feature 1..17: note = Oligonucleotide
  source 1..17: mol_type = other DNA
cgctgcttggcggccca

SEQ ID NO: 239 - DNA, 17 bp, synthetic construct
  misc_feature 1..17: note = Oligonucleotide
  source 1..17: mol_type = other DNA
acgcgctgcttggcggc

SEQ ID NO: 240 - DNA, 17 bp, synthetic construct
  misc_feature 1..17: note = Oligonucleotide
  source 1..17: mol_type = other DNA
agcacgcgctgcttggc

SEQ ID NO: 241 - DNA, 17 bp, synthetic construct
  misc_feature 1..17: note = Oligonucleotide
  source 1..17: mol_type = other DNA
cagagcacgcgctgctt

SEQ ID NO: 242 - DNA, 17 bp, synthetic construct
  misc_feature 1..17: note = Oligonucleotide
  source 1..17: mol_type = other DNA
gcgcagagcacgcgctg

SEQ ID NO: 243 - DNA, 17 bp, synthetic construct
  misc_feature 1..17: note = Oligonucleotide
  source 1..17: mol_type = other DNA
agggcgcagagcacgcg

SEQ ID NO: 244 - DNA, 17 bp, synthetic construct
  misc_feature 1..17: note = Oligonucleotide
  source 1..17: mol_type = other DNA
ttgagggcgcagagcac

SEQ ID NO: 245 - DNA, 17 bp, synthetic construct
  misc_feature 1..17: note = Oligonucleotide
  source 1..17: mol_type = other DNA
tggttgagggcgcagag

SEQ ID NO: 246 - DNA, 17 bp, synthetic construct
  misc_feature 1..17: note = Oligonucleotide
  source 1..17: mol_type = other DNA
ctgtggttgagggcgca

SEQ ID NO: 247 - DNA, 17 bp, synthetic construct
  misc_feature 1..17: note = Oligonucleotide
  source 1..17: mol_type = other DNA
aggctgtggttgagggc

SEQ ID NO: 248 - DNA, 17 bp, synthetic construct
  misc_feature 1..17: note = Oligonucleotide
  source 1..17: mol_type = other DNA
tggaggctgtggttgag

SEQ ID NO: 249 - DNA, 17 bp, synthetic construct
  misc_feature 1..17: note = Oligonucleotide
  source 1..17: mol_type = other DNA
tcctggaggctgtggtt

SEQ ID NO: 250 - DNA, 17 bp, synthetic construct
  misc_feature 1..17: note = Oligonucleotide
  source 1..17: mol_type = other DNA
gcgtcctggaggctgtg

SEQ ID NO: 251 - DNA, 17 bp, synthetic construct
  misc_feature 1..17: note = Oligonucleotide
  source 1..17: mol_type = other DNA
agcgcgtcctggaggct

SEQ ID NO: 252 - DNA, 17 bp, synthetic construct
  misc_feature 1..17: note = Oligonucleotide
  source 1..17: mol_type = other DNA
ttgagcgcgtcctggag

SEQ ID NO: 253 - DNA, 17 bp, synthetic construct
  misc_feature 1..17: note = Oligonucleotide
  source 1..17: mol_type = other DNA
tagttgagcgcgtcctg

SEQ ID NO: 254 - DNA, 17 bp, synthetic construct
  misc_feature 1..17: note = Oligonucleotide
  source 1..17: mol_type = other DNA
ccatagttgagcgcgtc

SEQ ID NO: 255 - DNA, 17 bp, synthetic construct
  misc_feature 1..17: note = Oligonucleotide
  source 1..17: mol_type = other DNA
agcccatagttgagcgc

SEQ ID NO: 256 - DNA, 17 bp, synthetic construct
  misc_feature 1..17: note = Oligonucleotide
  source 1..17: mol_type = other DNA
aaaagcccatagttgag

SEQ ID NO: 257 - DNA, 17 bp, synthetic construct
  misc_feature 1..17: note = Oligonucleotide
  source 1..17: mol_type = other DNA
tggaaaagcccatagtt

SEQ ID NO: 258 - DNA, 17 bp, synthetic construct
  misc_feature 1..17: note = Oligonucleotide
  source 1..17: mol_type = other DNA
ggctggaaaagcccata

SEQ ID NO: 259 - DNA, 17 bp, synthetic construct
  misc_feature 1..17: note = Oligonucleotide
  source 1..17: mol_type = other DNA
ggcggctggaaaagccc

SEQ ID NO: 260 - DNA, 17 bp, synthetic construct
  misc_feature 1..17: note = Oligonucleotide
  source 1..17: mol_type = other DNA
gagggcggctggaaaag

SEQ ID NO: 261 - DNA, 17 bp, synthetic construct
  misc_feature 1..17: note = Oligonucleotide
  source 1..17: mol_type = other DNA
cgggagggcggctggaa

SEQ ID NO: 262 - DNA, 17 bp, synthetic construct
  misc_feature 1..17: note = Oligonucleotide
  source 1..17: mol_type = other DNA
ccccgggagggcggctg

SEQ ID NO: 263 - DNA, 17 bp, synthetic construct
  misc_feature 1..17: note = Oligonucleotide
  source 1..17: mol_type = other DNA
cggccccgggagggcgg

SEQ ID NO: 264 - DNA, 17 bp, synthetic construct
  misc_feature 1..17: note = Oligonucleotide
  source 1..17: mol_type = other DNA
gcgcggccccgggaggg

SEQ ID NO: 265 - DNA, 17 bp, synthetic construct
  misc_feature 1..17: note = Oligonucleotide
  source 1..17: mol_type = other DNA
ccggcgcggccccggga

SEQ ID NO: 266 - DNA, 17 bp, synthetic construct
  misc_feature 1..17: note = Oligonucleotide
  source 1..17: mol_type = other DNA
ttgccggcgcggccccg

SEQ ID NO: 267 - DNA, 17 bp, synthetic construct
  misc_feature 1..17: note = Oligonucleotide
  source 1..17: mol_type = other DNA
aacttgccggcgcggcc

SEQ ID NO: 268 - DNA, 17 bp, synthetic construct
  misc_feature 1..17: note = Oligonucleotide
  source 1..17: mol_type = other DNA
aggaacttgccggcgcg

SEQ ID NO: 269 - DNA, 17 bp, synthetic construct
  misc_feature 1..17: note = Oligonucleotide
  source 1..17: mol_type = other DNA
tccaggaacttgccggc

SEQ ID NO: 270 - DNA, 17 bp, synthetic construct
  misc_feature 1..17: note = Oligonucleotide
  source 1..17: mol_type = other DNA
tcatccaggaacttgcc

SEQ ID NO: 271 - DNA, 17 bp, synthetic construct
  misc_feature 1..17: note = Oligonucleotide
  source 1..17: mol_type = other DNA
tcctcatccaggaactt

SEQ ID NO: 272 - DNA, 17 bp, synthetic construct
  misc_feature 1..17: note = Oligonucleotide
  source 1..17: mol_type = other DNA
cgctcctcatccaggaa

SEQ ID NO: 273 - DNA, 17 bp, synthetic construct
  misc_feature 1..17: note = Oligonucleotide
  source 1..17: mol_type = other DNA
agccgctcctcatccag

SEQ ID NO: 274 - DNA, 17 bp, synthetic construct
  misc_feature 1..17: note = Oligonucleotide
  source 1..17: mol_type = other DNA
aggagccgctcctcatc

SEQ ID NO: 275 - DNA, 17 bp, synthetic construct
  misc_feature 1..17: note = Oligonucleotide
  source 1..17: mol_type = other DNA
tgcaggagccgctcctc

SEQ ID NO: 276 - DNA, 17 bp, synthetic construct
  misc_feature 1..17: note = Oligonucleotide
  source 1..17: mol_type = other DNA
tcctgcaggagccgctc

SEQ ID NO: 277 - DNA, 17 bp, synthetic construct
  misc_feature 1..17: note = Oligonucleotide
  source 1..17: mol_type = other DNA
tactcctgcaggagccg

SEQ ID NO: 278 - DNA, 17 bp, synthetic construct
  misc_feature 1..17: note = Oligonucleotide
  source 1..17: mol_type = other DNA
gggtactcctgcaggag

SEQ ID NO: 279 - DNA, 17 bp, synthetic construct
  misc_feature 1..17: note = Oligonucleotide
  source 1..17: mol_type = other DNA
ggcgggtactcctgcag

SEQ ID NO: 280 - DNA, 17 bp, synthetic construct
  misc_feature 1..17: note = Oligonucleotide
  source 1..17: mol_type = other DNA
ttgggcgggtactcctg

SEQ ID NO: 281 - DNA, 17 bp, synthetic construct
  misc_feature 1..17: note = Oligonucleotide
  source 1..17: mol_type = other DNA
aggttgggcgggtactc

SEQ ID NO: 282 - DNA, 17 bp, synthetic construct
  misc_feature 1..17: note = Oligonucleotide
  source 1..17: mol_type = other DNA
tccaggttgggcgggta

SEQ ID NO: 283 - DNA, 17 bp, synthetic construct
  misc_feature 1..17: note = Oligonucleotide
  source 1..17: mol_type = other DNA
gtgtccaggttgggcgg

SEQ ID NO: 284 - DNA, 17 bp, synthetic construct
  misc_feature 1..17: note = Oligonucleotide
  source 1..17: mol_type = other DNA
ggcgtgtccaggttggg

SEQ ID NO: 285 - DNA, 17 bp, synthetic construct
  misc_feature 1..17: note = Oligonucleotide
  source 1..17: mol_type = other DNA
aggggcgtgtccaggtt

SEQ ID NO: 286 - DNA, 17 bp, synthetic construct
  misc_feature 1..17: note = Oligonucleotide
  source 1..17: mol_type = other DNA
ggcaggggcgtgtccag

SEQ ID NO: 287 - DNA, 17 bp, synthetic construct
  misc_feature 1..17: note = Oligonucleotide
  source 1..17: mol_type = other DNA
tagggcaggggcgtgtc

SEQ ID NO: 288 - DNA, 17 bp, synthetic construct
  misc_feature 1..17: note = Oligonucleotide
  source 1..17: mol_type = other DNA
aggtagggcaggggcgt

SEQ ID NO: 289 - DNA, 17 bp, synthetic construct
  misc_feature 1..17: note = Oligonucleotide
  source 1..17: mol_type = other DNA
tccaggtagggcagggg

SEQ ID NO: 290 - DNA, 17 bp, synthetic construct
  misc_feature 1..17: note = Oligonucleotide
  source 1..17: mol_type = other DNA
aactccaggtagggcag

SEQ ID NO: 291 - DNA, 17 bp, synthetic construct
  misc_feature 1..17: note = Oligonucleotide
  source 1..17: mol_type = other DNA
cgaaactccaggtaggg

SEQ ID NO: 292 - DNA, 17 bp, synthetic construct
  misc_feature 1..17: note = Oligonucleotide
  source 1..17: mol_type = other DNA
tatcgaaactccaggta

SEQ ID NO: 293 - DNA, 17 bp, synthetic construct
  misc_feature 1..17: note = Oligonucleotide
  source 1..17: mol_type = other DNA
ttgtatcgaaactccag

SEQ ID NO: 294 - DNA, 17 bp, synthetic construct
  misc_feature 1..17: note = Oligonucleotide
  source 1..17: mol_type = other DNA
cgcttgtatcgaaactc

SEQ ID NO: 295 - DNA, 17 bp, synthetic construct
  misc_feature 1..17: note = Oligonucleotide
  source 1..17: mol_type = other DNA
cgccgcttgtatcgaaa

SEQ ID NO: 296 - DNA, 17 bp, synthetic construct
  misc_feature 1..17: note = Oligonucleotide
  source 1..17: mol_type = other DNA
actcgccgcttgtatcg

SEQ ID NO: 297 - DNA, 17 bp, synthetic construct
  misc_feature 1..17: note = Oligonucleotide
  source 1..17: mol_type = other DNA
taaactcgccgcttgta

SEQ ID NO: 298 - DNA, 17 bp, synthetic construct
  misc_feature 1..17: note = Oligonucleotide
  source 1..17: mol_type = other DNA
gcataaactcgccgctt

SEQ ID NO: 299 - DNA, 17 bp, synthetic construct
  misc_feature 1..17: note = Oligonucleotide
  source 1..17: mol_type = other DNA
tgggcataaactcgccg

SEQ ID NO: 300 - DNA, 17 bp, synthetic construct
  misc_feature 1..17: note = Oligonucleotide
  source 1..17: mol_type = other DNA
ttctgggcataaactcg

SEQ ID NO: 301 - DNA, 17 bp, synthetic construct
  misc_feature 1..17: note = Oligonucleotide
  source 1..17: mol_type = other DNA
aggttctgggcataaac

SEQ ID NO: 302 - DNA, 17 bp, synthetic construct
  misc_feature 1..17: note = Oligonucleotide
  source 1..17: mol_type = other DNA
atgaggttctgggcata

SEQ ID NO: 303 - DNA, 17 bp, synthetic construct
  misc_feature 1..17: note = Oligonucleotide
  source 1..17: mol_type = other DNA
tcgatgaggttctgggc

SEQ ID NO: 304 - DNA, 17 bp, synthetic construct
  misc_feature 1..17: note = Oligonucleotide
  source 1..17: mol_type = other DNA
tcatcgatgaggttctg

SEQ ID NO: 305 - DNA, 17 bp, synthetic construct
  misc_feature 1..17: note = Oligonucleotide
  source 1..17: mol_type = other DNA
ttatcatcgatgaggtt

SEQ ID NO: 306 - DNA, 17 bp, synthetic construct
  misc_feature 1..17: note = Oligonucleotide
  source 1..17: mol_type = other DNA
tgcttatcatcgatgag

SEQ ID NO: 307 - DNA, 17 bp, synthetic construct
  misc_feature 1..17: note = Oligonucleotide
  source 1..17: mol_type = other DNA
aactgcttatcatcgat

SEQ ID NO: 308 - DNA, 17 bp, synthetic construct
  misc_feature 1..17: note = Oligonucleotide
  source 1..17: mol_type = other DNA
gcaaactgcttatcatc

SEQ ID NO: 309 - DNA, 17 bp, synthetic construct
  misc_feature 1..17: note = Oligonucleotide
  source 1..17: mol_type = other DNA
tttgcaaactgcttatc

SEQ ID NO: 310 - DNA, 17 bp, synthetic construct
  misc_feature 1..17: note = Oligonucleotide
  source 1..17: mol_type = other DNA
agctttgcaaactgctt

SEQ ID NO: 311 - DNA, 17 bp, synthetic construct
  misc_feature 1..17: note = Oligonucleotide
  source 1..17: mol_type = other DNA
tgaagctttgcaaactg

SEQ ID NO: 312 - DNA, 17 bp, synthetic construct
  misc_feature 1..17: note = Oligonucleotide
  source 1..17: mol_type = other DNA
gtgtgaagctttgcaaa

SEQ ID NO: 313 - DNA, 17 bp, synthetic construct
  misc_feature 1..17: note = Oligonucleotide
  source 1..17: mol_type = other DNA
tttgtgtgaagctttgc

SEQ ID NO: 314 - DNA, 17 bp, synthetic construct
  misc_feature 1..17: note = Oligonucleotide
  source 1..17: mol_type = other DNA
gcctttgtgtgaagctt

SEQ ID NO: 315 - DNA, 17 bp, synthetic construct
  misc_feature 1..17: note = Oligonucleotide
  source 1..17: mol_type = other DNA
ttcgcctttgtgtgaag

SEQ ID NO: 316 - DNA, 17 bp, synthetic construct
  misc_feature 1..17: note = Oligonucleotide
  source 1..17: mol_type = other DNA
aggttcgcctttgtgtg

SEQ ID NO: 317 - DNA, 17 bp, synthetic construct
  misc_feature 1..17: note = Oligonucleotide
  source 1..17: mol_type = other DNA
ttcaggttcgcctttgt

SEQ ID NO: 318 - DNA, 17 bp, synthetic construct
  misc_feature 1..17: note = Oligonucleotide
  source 1..17: mol_type = other DNA
ttcttcaggttcgcctt

SEQ ID NO: 319 - DNA, 17 bp, synthetic construct
  misc_feature 1..17: note = Oligonucleotide
  source 1..17: mol_type = other DNA
aacttcttcaggttcgc

SEQ ID NO: 320 - DNA, 25 bp, synthetic construct
  misc_feature 1..25: note = Oligonucleotide
  source 1..25: mol_type = other DNA
ggccactggcctggcctgagtggtg

SEQ ID NO: 321 - DNA, 25 bp, synthetic construct
  misc_feature 1..25: note = Oligonucleotide
  source 1..25: mol_type = other DNA
caaggccactggcctggcctgagtg

SEQ ID NO: 322 - DNA, 25 bp, synthetic construct
  misc_feature 1..25: note = Oligonucleotide
  source 1..25: mol_type = other DNA
tcccaaggccactggcctggcctga

SEQ ID NO: 323 - DNA, 25 bp, synthetic construct
  misc_feature 1..25: note = Oligonucleotide
  source 1..25: mol_type = other DNA
ccctcccaaggccactggcctggcc

SEQ ID NO: 324 - DNA, 25 bp, synthetic construct
  misc_feature 1..25: note = Oligonucleotide
  source 1..25: mol_type = other DNA
ggcccctcccaaggccactggcctg

SEQ ID NO: 325 - DNA, 25 bp, synthetic construct
  misc_feature 1..25: note = Oligonucleotide
  source 1..25: mol_type = other DNA
acaggcccctcccaaggccactggc

SEQ ID NO: 326 - DNA, 25 bp, synthetic construct
  misc_feature 1..25: note = Oligonucleotide
  source 1..25: mol_type = other DNA
atcacaggcccctcccaaggccact

SEQ ID NO: 327 - DNA, 25 bp, synthetic construct
  misc_feature 1..25: note = Oligonucleotide
  source 1..25: mol_type = other DNA
agcatcacaggcccctcccaaggcc

SEQ ID NO: 328 - DNA, 25 bp, synthetic construct
  misc_feature 1..25: note = Oligonucleotide
  source 1..25: mol_type = other DNA
cccagcatcacaggcccctcccaag

SEQ ID NO: 329 - DNA, 25 bp, synthetic construct
  misc_feature 1..25: note = Oligonucleotide
  source 1..25: mol_type = other DNA
ggtcccagcatcacaggcccctccc

SEQ ID NO: 330 - DNA, 25 bp, synthetic construct
  misc_feature 1..25: note = Oligonucleotide
  source 1..25: mol_type = other DNA
tgtggtcccagcatcacaggcccct

SEQ ID NO: 331 - DNA, 25 bp, synthetic construct
  misc_feature 1..25: note = Oligonucleotide
  source 1..25: mol_type = other DNA
aactgtggtcccagcatcacaggcc

SEQ ID NO: 332 - DNA, 25 bp, synthetic construct
  misc_feature 1..25: note = Oligonucleotide
  source 1..25: mol_type = other DNA
aggaactgtggtcccagcatcacag

SEQ ID NO: 333 - DNA, 25 bp, synthetic construct
  misc_feature 1..25: note = Oligonucleotide
  source 1..25: mol_type = other DNA
cccaggaactgtggtcccagcatca

SEQ ID NO: 334 - DNA, 25 bp, synthetic construct
  misc_feature 1..25: note = Oligonucleotide
  source 1..25: mol_type = other DNA
ctgcccaggaactgtggtcccagca

SEQ ID NO: 335 - DNA, 25 bp, synthetic construct
  misc_feature 1..25: note = Oligonucleotide
  source 1..25: mol_type = other DNA
tccctgcccaggaactgtggtccca

SEQ ID NO: 336 - DNA, 25 bp, synthetic construct
  misc_feature 1..25: note = Oligonucleotide
  source 1..25: mol_type = other DNA
tgctccctgcccaggaactgtggtc

SEQ ID NO: 337 - DNA, 25 bp, synthetic construct
  misc_feature 1..25: note = Oligonucleotide
  source 1..25: mol_type = other DNA
ggttgctccctgcccaggaactgtg

SEQ ID NO: 338 - DNA, 25 bp, synthetic construct
  misc_feature 1..25: note = Oligonucleotide
  source 1..25: mol_type = other DNA
gacggttgctccctgcccaggaact

SEQ ID NO: 339 - DNA, 25 bp, synthetic construct
  misc_feature 1..25: note = Oligonucleotide
  source 1..25: mol_type = other DNA
ctagacggttgctccctgcccagga

SEQ ID NO: 340 - DNA, 25 bp, synthetic construct
  misc_feature 1..25: note = Oligonucleotide
  source 1..25: mol_type = other DNA
cgcctagacggttgctccctgccca

SEQ ID NO: 341 - DNA, 25 bp, synthetic construct
  misc_feature 1..25: note = Oligonucleotide
  source 1..25: mol_type = other DNA
ccacgcctagacggttgctccctgc

SEQ ID NO: 342 - DNA, 25 bp, synthetic construct
  misc_feature 1..25: note = Oligonucleotide
  source 1..25: mol_type = other DNA
tccccacgcctagacggttgctccc

SEQ ID NO: 343 - DNA, 25 bp, synthetic construct
  misc_feature 1..25: note = Oligonucleotide
  source 1..25: mol_type = other DNA
ttctccccacgcctagacggttgct

SEQ ID NO: 344 - DNA, 25 bp, synthetic construct
  misc_feature 1..25: note = Oligonucleotide
  source 1..25: mol_type = other DNA
gcgttctccccacgcctagacggtt

SEQ ID NO: 345 - DNA, 25 bp, synthetic construct
  misc_feature 1..25: note = Oligonucleotide
  source 1..25: mol_type = other DNA
cctgcgttctccccacgcctagacg

SEQ ID NO: 346 - DNA, 25 bp, synthetic construct
  misc_feature 1..25: note = Oligonucleotide
  source 1..25: mol_type = other DNA
cgtcctgcgttctccccacgcctag

SEQ ID NO: 347 - DNA, 25 bp, synthetic construct
  misc_feature 1..25: note = Oligonucleotide
  source 1..25: mol_type = other DNA
tcacgtcctgcgttctccccacgcc

SEQ ID NO: 348 - DNA, 25 bp, synthetic construct
  misc_feature 1..25: note = Oligonucleotide
  source 1..25: mol_type = other DNA
gggtcacgtcctgcgttctccccac

SEQ ID NO: 349 - DNA, 25 bp, synthetic construct
  misc_feature 1..25: note = Oligonucleotide
  source 1..25: mol_type = other DNA
tgtgggtcacgtcctgcgttctccc

SEQ ID NO: 350 - DNA, 25 bp, synthetic construct
  misc_feature 1..25: note = Oligonucleotide
  source 1..25: mol_type = other DNA
gtgtgtgggtcacgtcctgcgttct

SEQ ID NO: 351 - DNA, 25 bp, synthetic construct
  misc_feature 1..25: note = Oligonucleotide
  source 1..25: mol_type = other DNA
gcggtgtgtgggtcacgtcctgcgt

SEQ ID NO: 352 - DNA, 25 bp, synthetic construct
  misc_feature 1..25: note = Oligonucleotide
  source 1..25: mol_type = other DNA
agtgcggtgtgtgggtcacgtcctg

SEQ ID NO: 353 - DNA, 25 bp, synthetic construct
  misc_feature 1..25: note = Oligonucleotide
  source 1..25: mol_type = other DNA
tccagtgcggtgtgtgggtcacgtc

SEQ ID NO: 354 - DNA, 25 bp, synthetic construct
  misc_feature 1..25: note = Oligonucleotide
  source 1..25: mol_type = other DNA
gcctccagtgcggtgtgtgggtcac

SEQ ID NO: 355 - DNA, 25 bp, synthetic construct
  misc_feature 1..25: note = Oligonucleotide
  source 1..25: mol_type = other DNA
ggagcctccagtgcggtgtgtgggt

SEQ ID NO: 356 - DNA, 25 bp, synthetic construct
  misc_feature 1..25: note = Oligonucleotide
  source 1..25: mol_type = other DNA
agcggagcctccagtgcggtgtgtg

SEQ ID NO: 357 - DNA, 25 bp, synthetic construct
  misc_feature 1..25: note = Oligonucleotide
  source 1..25: mol_type = other DNA
cagagcggagcctccagtgcggtgt

SEQ ID NO: 358 - DNA, 25 bp, synthetic construct
  misc_feature 1..25: note = Oligonucleotide
  source 1..25: mol_type = other DNA
gggcagagcggagcctccagtgcgg

SEQ ID NO: 359 - DNA, 25 bp, synthetic construct
  misc_feature 1..25: note = Oligonucleotide
  source 1..25: mol_type = other DNA
tgcggcggaggaaggggtcccggag

SEQ ID NO: 360 - DNA, 25 bp, synthetic construct
  misc_feature 1..25: note = Oligonucleotide
  source 1..25: mol_type = other DNA
gggtgcggcggaggaaggggtcccg

SEQ ID NO: 361 - DNA, 25 bp, synthetic construct
  misc_feature 1..25: note = Oligonucleotide
  source 1..25: mol_type = other DNA
ggcgggtgcggcggaggaaggggtc

SEQ ID NO: 362 - DNA, 25 bp, synthetic construct
  misc_feature 1..25: note = Oligonucleotide
  source 1..25: mol_type = other DNA
cggggcgggtgcggcggaggaaggg

SEQ ID NO: 363 - DNA, 25 bp, synthetic construct
  misc_feature 1..25: note = Oligonucleotide
  source 1..25: mol_type = other DNA
caccggggcgggtgcggcggaggaa

SEQ ID NO: 364 - DNA, 25 bp, synthetic construct
  misc_feature 1..25: note = Oligonucleotide
  source 1..25: mol_type = other DNA
gaccaccggggcgggtgcggcggag

SEQ ID NO: 365 - DNA, 25 bp, synthetic construct
  misc_feature 1..25: note = Oligonucleotide
  source 1..25: mol_type = other DNA
gcggaccaccggggcgggtgcggcg

SEQ ID NO: 366 - DNA, 25 bp, synthetic construct
  misc_feature 1..25: note = Oligonucleotide
  source 1..25: mol_type = other DNA
tccgcggaccaccggggcgggtgcg

SEQ ID NO: 367 - DNA, 25 bp, synthetic construct
  misc_feature 1..25: note = Oligonucleotide
  source 1..25: mol_type = other DNA
gcatccgcggaccaccggggcgggt

SEQ ID NO: 368 - DNA, 25 bp, synthetic construct
  misc_feature 1..25: note = Oligonucleotide
  source 1..25: mol_type = other DNA
cgggcatccgcggaccaccggggcg

SEQ ID NO: 369 - DNA, 25 bp, synthetic construct
  misc_feature 1..25: note = Oligonucleotide
  source 1..25: mol_type = other DNA
gggcgggcatccgcggaccaccggg

SEQ ID NO: 370 - DNA, 25 bp, synthetic construct
  misc_feature 1..25: note = Oligonucleotide
  source 1..25: mol_type = other DNA
caagggcgggcatccgcggaccacc

SEQ ID NO: 371 - DNA, 25 bp, synthetic construct
  misc_feature 1..25: note = Oligonucleotide
  source 1..25: mol_type = other DNA
cggcaagggcgggcatccgcggacc

SEQ ID NO: 372 - DNA, 25 bp, synthetic construct
  misc_feature 1..25: note = Oligonucleotide
  source 1..25: mol_type = other DNA
gagcggcaagggcgggcatccgcgg

SEQ ID NO: 373 - DNA, 25 bp, synthetic construct
  misc_feature 1..25: note = Oligonucleotide
  source 1..25: mol_type = other DNA
gctgagcggcaagggcgggcatccg

SEQ ID NO: 374 - DNA, 25 bp, synthetic construct
  misc_feature 1..25: note = Oligonucleotide
  source 1..25: mol_type = other DNA
gtggctgagcggcaagggcgggcat

SEQ ID NO: 375 - DNA, 25 bp, synthetic construct
  misc_feature 1..25: note = Oligonucleotide
  source 1..25: mol_type = other DNA
ggagtggctgagcggcaagggcggg

SEQ ID NO: 376 - DNA, 25 bp, synthetic construct
  misc_feature 1..25: note = Oligonucleotide
  source 1..25: mol_type = other DNA
gggggagtggctgagcggcaagggc

SEQ ID NO: 377 - DNA, 25 bp, synthetic construct
  misc_feature 1..25: note = Oligonucleotide
  source 1..25: mol_type = other DNA
gcggggggagtggctgagcggcaag

SEQ ID NO: 378 - DNA, 25 bp, synthetic construct
  misc_feature 1..25: note = Oligonucleotide
  source 1..25: mol_type = other DNA
ggtgcggggggagtggctgagcggc

SEQ ID NO: 379 - DNA, 25 bp, synthetic construct
  misc_feature 1..25: note = Oligonucleotide
  source 1..25: mol_type = other DNA
ctcggtgcggggggagtggctgagc

SEQ ID NO: 380 - DNA, 25 bp, synthetic construct
  misc_feature 1..25: note = Oligonucleotide
  source 1..25: mol_type = other DNA
ggcctcggtgcggggggagtggctg

SEQ ID NO: 381 - DNA, 25 bp, synthetic construct
  misc_feature 1..25: note = Oligonucleotide
  source 1..25: mol_type = other DNA
ctaggcctcggtgcggggggagtgg

SEQ ID NO: 382 - DNA, 25 bp, synthetic construct
  misc_feature 1..25: note = Oligonucleotide
  source 1..25: mol_type = other DNA
gtcctaggcctcggtgcggggggag

SEQ ID NO: 383 - DNA, 25 bp, synthetic construct
  misc_feature 1..25: note = Oligonucleotide
  source 1..25: mol_type = other DNA
ggagtcctaggcctcggtgcggggg

SEQ ID NO: 384 - DNA, 25 bp, synthetic construct
  misc_feature 1..25: note = Oligonucleotide
  source 1..25: mol_type = other DNA
tcggccccggctcagctcggcgcct

SEQ ID NO: 385 - DNA, 25 bp, synthetic construct
  misc_feature 1..25: note = Oligonucleotide
  source 1..25: mol_type = other DNA
gcatcggccccggctcagctcggcg

SEQ ID NO: 386 - DNA, 25 bp, synthetic construct
  misc_feature 1..25: note = Oligonucleotide
  source 1..25: mol_type = other DNA
gctgcatcggccccggctcagctcg

SEQ ID NO: 387 - DNA, 25 bp, synthetic construct
  misc_feature 1..25: note = Oligonucleotide
  source 1..25: mol_type = other DNA
tcagctgcatcggccccggctcagc

SEQ ID NO: 388 - DNA, 25 bp, synthetic construct
  misc_feature 1..25: note = Oligonucleotide
  source 1..25: mol_type = other DNA
ggctcagctgcatcggccccggctc

SEQ ID NO: 389 - DNA, 25 bp, synthetic construct
  misc_feature 1..25: note = Oligonucleotide
  source 1..25: mol_type = other DNA
cgcggctcagctgcatcggccccgg

SEQ ID NO: 390 - DNA, 25 bp, synthetic construct
  misc_feature 1..25: note = Oligonucleotide
  source 1..25: mol_type = other DNA
cggcgcggctcagctgcatcggccc

SEQ ID NO: 391 - DNA, 25 bp, synthetic construct
  misc_feature 1..25: note = Oligonucleotide
  source 1..25: mol_type = other DNA
cggcggcgcggctcagctgcatcgg

SEQ ID NO: 392 - DNA, 25 bp, synthetic construct
  misc_feature 1..25: note = Oligonucleotide
  source 1..25: mol_type = other DNA
cggcggcggcgcggctcagctgcat

SEQ ID NO: 393 - DNA, 25 bp, synthetic construct
  misc_feature 1..25: note = Oligonucleotide
  source 1..25: mol_type = other DNA
cggcggcggcggcgcggctcagctg

SEQ ID NO: 394 - DNA, 25 bp, synthetic construct
  misc_feature 1..25: note = Oligonucleotide
  source 1..25: mol_type = other DNA
cggcggcggcggcggcgcggctcag

SEQ ID NO: 395 - DNA, 25 bp, synthetic construct
  misc_feature 1..25: note = Oligonucleotide
  source 1..25: mol_type = other DNA
cggcggcggcggcggcggcgcggct

SEQ ID NO: 396 - DNA, 25 bp, synthetic construct
  misc_feature 1..25: note = Oligonucleotide
  source 1..25: mol_type = other DNA
cggcggcggcggcggcggcggcgcg

SEQ ID NO: 397 - DNA, 25 bp, synthetic construct
  misc_feature 1..25: note = Oligonucleotide
  source 1..25: mol_type = other DNA
gggcggcggcggcggcggcggcggc

SEQ ID NO: 398 - DNA, 25 bp, synthetic construct
  misc_feature 1..25: note = Oligonucleotide
  source 1..25: mol_type = other DNA
caggggcggcggcggcggcggcggc

SEQ ID NO: 399 - DNA, 25 bp, synthetic construct
  misc_feature 1..25: note = Oligonucleotide
  source 1..25: mol_type = other DNA
ccgcaggggcggcggcggcggcggc

SEQ ID NO: 400 - DNA, 25 bp, synthetic construct
  misc_feature 1..25: note = Oligonucleotide
  source 1..25: mol_type = other DNA
gctccgcaggggcggcggcggcggc

SEQ ID NO: 401 - DNA, 25 bp, synthetic construct
  misc_feature 1..25: note = Oligonucleotide
  source 1..25: mol_type = other DNA
ggggctccgcaggggcggcggcggc

SEQ ID NO: 402 - DNA, 25 bp, synthetic construct
  misc_feature 1..25: note = Oligonucleotide
  source 1..25: mol_type = other DNA
ccgggggctccgcaggggcggcggc

SEQ ID NO: 403 - DNA, 25 bp, synthetic construct
  misc_feature 1..25: note = Oligonucleotide
  source 1..25: mol_type = other DNA
gctccgggggctccgcaggggcggc

SEQ ID NO: 404 - DNA, 25 bp, synthetic construct
  misc_feature 1..25: note = Oligonucleotide
  source 1..25: mol_type = other DNA
gcggctccgggggctccgcaggggc

SEQ ID NO: 405 - DNA, 25 bp, synthetic construct
  misc_feature 1..25: note = Oligonucleotide
  source 1..25: mol_type = other DNA
acagcggctccgggggctccgcagg

SEQ ID NO: 406 - DNA, 25 bp, synthetic construct
  misc_feature 1..25: note = Oligonucleotide
  source 1..25: mol_type = other DNA
gggacagcggctccgggggctccgc

SEQ ID NO: 407 - DNA, 25 bp, synthetic construct
  misc_feature 1..25: note = Oligonucleotide
  source 1..25: mol_type = other DNA
cgggggacagcggctccgggggctc

SEQ ID NO: 408 - DNA, 25 bp, synthetic construct
  misc_feature 1..25: note = Oligonucleotide
  source 1..25: mol_type = other DNA
gcgcgggggacagcggctccggggg

SEQ ID NO: 409 - DNA, 25 bp, synthetic construct
  misc_feature 1..25: note = Oligonucleotide
  source 1..25: mol_type = other DNA
ccggcgcgggggacagcggctccgg

SEQ ID NO: 410 - DNA, 25 bp, synthetic construct
  misc_feature 1..25: note = Oligonucleotide
  source 1..25: mol_type = other DNA
gggccggcgcgggggacagcggctc

SEQ ID NO: 411 - DNA, 25 bp, synthetic construct
  misc_feature 1..25: note = Oligonucleotide
  source 1..25: mol_type = other DNA
ccggggccggcgcgggggacagcgg

SEQ ID NO: 412 - DNA, 25 bp, synthetic construct
  misc_feature 1..25: note = Oligonucleotide
  source 1..25: mol_type = other DNA
gggccggggccggcgcgggggacag

SEQ ID NO: 413 - DNA, 25 bp, synthetic construct
  misc_feature 1..25: note = Oligonucleotide
  source 1..25: mol_type = other DNA
ccggggccggggccggcgcggggga

SEQ ID NO: 414 - DNA, 25 bp, synthetic construct
  misc_feature 1..25: note = Oligonucleotide
  source 1..25: mol_type = other DNA
gggccggggccggggccggcgcggg

SEQ ID NO: 415 - DNA, 25 bp, synthetic construct
  misc_feature 1..25: note = Oligonucleotide
  source 1..25: mol_type = other DNA
ggggggccggggccggggccggcgc

SEQ ID NO: 416 - DNA, 25 bp, synthetic construct
  misc_feature 1..25: note = Oligonucleotide
  source 1..25: mol_type = other DNA
cggggggggccggggccggggccgg

SEQ ID NO: 417 - DNA, 25 bp, synthetic construct
  misc_feature 1..25: note = Oligonucleotide
  source 1..25: mol_type = other DNA
ggccggggggggccggggccggggc

SEQ ID NO: 418 - DNA, 25 bp, synthetic construct
  misc_feature 1..25: note = Oligonucleotide
  source 1..25: mol_type = other DNA
gggggccggggggggccggggccgg

SEQ ID NO: 419 - DNA, 25 bp, synthetic construct
  misc_feature 1..25: note = Oligonucleotide
  source 1..25: mol_type = other DNA
ggagggggccggggggggccggggc

SEQ ID NO: 420 - DNA, 25 bp, synthetic construct
  misc_feature 1..25: note = Oligonucleotide
  source 1..25: mol_type = other DNA
gcgggagggggccggggggggccgg

SEQ ID NO: 421 - DNA, 25 bp, synthetic construct
  misc_feature 1..25: note = Oligonucleotide
  source 1..25: mol_type = other DNA
tgcgcgggagggggccggggggggc

SEQ ID NO: 422 - DNA, 25 bp, synthetic construct
  misc_feature 1..25: note = Oligonucleotide
  source 1..25: mol_type = other DNA
cgctgcgcgggagggggccgggggg

SEQ ID NO: 423 - DNA, 25 bp, synthetic construct
  misc_feature 1..25: note = Oligonucleotide
  source 1..25: mol_type = other DNA
ccgcgctgcgcgggagggggccggg

SEQ ID NO: 424 - DNA, 25 bp, synthetic construct
  misc_feature 1..25: note = Oligonucleotide
  source 1..25: mol_type = other DNA
cggccgcgctgcgcgggagggggcc

SEQ ID NO: 425 - DNA, 25 bp, synthetic construct
  misc_feature 1..25: note = Oligonucleotide
  source 1..25: mol_type = other DNA
cgtcggccgcgctgcgcgggagggg

SEQ ID NO: 426 - DNA, 25 bp, synthetic construct
  misc_feature 1..25: note = Oligonucleotide
  source 1..25: mol_type = other DNA
ccccgtcggccgcgctgcgcgggag

SEQ ID NO: 427 - DNA, 25 bp, synthetic construct
  misc_feature 1..25: note = Oligonucleotide
  source 1..25: mol_type = other DNA
gagccccgtcggccgcgctgcgcgg

SEQ ID NO: 428 - DNA, 25 bp, synthetic construct
  misc_feature 1..25: note = Oligonucleotide
  source 1..25: mol_type = other DNA
ccggagccccgtcggccgcgctgcg

SEQ ID NO: 429 - DNA, 25 bp, synthetic construct
  misc_feature 1..25: note = Oligonucleotide
  source 1..25: mol_type = other DNA
ccgccggagccccgtcggccgcgct

SEQ ID NO: 430 - DNA, 25 bp, synthetic construct
  misc_feature 1..25: note = Oligonucleotide
  source 1..25: mol_type = other DNA
cccccgccggagccccgtcggccgc

SEQ ID NO: 431 - DNA, 25 bp, synthetic construct
  misc_feature 1..25: note = Oligonucleotide
  source 1..25: mol_type = other DNA
tcccccccgccggagccccgtcggc

SEQ ID NO: 432 - DNA, 25 bp, synthetic construct
  misc_feature 1..25: note = Oligonucleotide
  source 1..25: mol_type = other DNA
ccttcccccccgccggagccccgtc

SEQ ID NO: 433 - DNA, 25 bp, synthetic construct
  misc_feature 1..25: note = Oligonucleotide
  source 1..25: mol_type = other DNA
cccccttcccccccgccggagcccc

SEQ ID NO: 434 - DNA, 25 bp, synthetic construct
  misc_feature 1..25: note = Oligonucleotide
  source 1..25: mol_type = other DNA
gcccccccttcccccccgccggagc

SEQ ID NO: 435 - DNA, 25 bp, synthetic construct
  misc_feature 1..25: note = Oligonucleotide
  source 1..25: mol_type = other DNA
ccggcccccccttcccccccgccgg

SEQ ID NO: 436 - DNA, 25 bp, synthetic construct
  misc_feature 1..25: note = Oligonucleotide
  source 1..25: mol_type = other DNA
gccccggcccccccttcccccccgc

SEQ ID NO: 437 - DNA, 25 bp, synthetic construct
  misc_feature 1..25: note = Oligonucleotide
  source 1..25: mol_type = other DNA
ggcgccccggcccccccttcccccc

SEQ ID NO: 438 - DNA, 25 bp, synthetic construct
  misc_feature 1..25: note = Oligonucleotide
  source 1..25: mol_type = other DNA
cgcggcgccccggcccccccttccc

SEQ ID NO: 439 - DNA, 25 bp, synthetic construct
  misc_feature 1..25: note = Oligonucleotide
  source 1..25: mol_type = other DNA
gcgcgcggcgccccggccccccctt

SEQ ID NO: 440 - DNA, 25 bp, synthetic construct
  misc_feature 1..25: note = Oligonucleotide
  source 1..25: mol_type = other DNA
tccgcgcgcggcgccccggcccccc

SEQ ID NO: 441 - DNA, 25 bp, synthetic construct
  misc_feature 1..25: note = Oligonucleotide
  source 1..25: mol_type = other DNA
gactccgcgcgcggcgccccggccc

SEQ ID NO: 442 - DNA, 25 bp, synthetic construct
  misc_feature 1..25: note = Oligonucleotide
  source 1..25: mol_type = other DNA
ggggactccgcgcgcggcgccccgg

SEQ ID NO: 443 - DNA, 25 bp, synthetic construct
  misc_feature 1..25: note = Oligonucleotide
  source 1..25: mol_type = other DNA
cccggggactccgcgcgcggcgccc

SEQ ID NO: 444 - DNA, 25 bp, synthetic construct
  misc_feature 1..25: note = Oligonucleotide
  source 1..25: mol_type = other DNA
gcgcccggggactccgcgcgcggcg

SEQ ID NO: 445 - DNA, 25 bp, synthetic construct
  misc_feature 1..25: note = Oligonucleotide
  source 1..25: mol_type = other DNA
ggagcgcccggggactccgcgcgcg

SEQ ID NO: 446 - DNA, 25 bp, synthetic construct
  misc_feature 1..25: note = Oligonucleotide
  source 1..25: mol_type = other DNA
aacggagcgcccggggactccgcgc

SEQ ID NO: 447 - DNA, 25 bp, synthetic construct
  misc_feature 1..25: note = Oligonucleotide
  source 1..25: mol_type = other DNA
gggaacggagcgcccggggactccg

SEQ ID NO: 448 - DNA, 25 bp, synthetic construct
  misc_feature 1..25: note = Oligonucleotide
  source 1..25: mol_type = other DNA
ccggggaacggagcgcccggggact

SEQ ID NO: 449 - DNA, 25 bp, synthetic construct
  misc_feature 1..25: note = Oligonucleotide
  source 1..25: mol_type = other DNA
gcgccggggaacggagcgcccgggg

SEQ ID NO: 450 - DNA, 25 bp, synthetic construct
  misc_feature 1..25: note = Oligonucleotide
  source 1..25: mol_type = other DNA
ctcgcgccggggaacggagcgcccg

SEQ ID NO: 451 - DNA, 25 bp, synthetic construct
  misc_feature 1..25: note = Oligonucleotide
  source 1..25: mol_type = other DNA
ccgctcgcgccggggaacggagcgc

SEQ ID NO: 452 - DNA, 25 bp, synthetic construct
  misc_feature 1..25: note = Oligonucleotide
  source 1..25: mol_type = other DNA
gggccgctcgcgccggggaacggag

SEQ ID NO: 453 - DNA, 25 bp, synthetic construct
  misc_feature 1..25: note = Oligonucleotide
  source 1..25: mol_type = other DNA
ccggggccgctcgcgccggggaacg

SEQ ID NO: 454 - DNA, 25 bp, synthetic construct
  misc_feature 1..25: note = Oligonucleotide
  source 1..25: mol_type = other DNA
gggccggggccgctcgcgccgggga

SEQ ID NO: 455 - DNA, 25 bp, synthetic construct
  misc_feature 1..25: note = Oligonucleotide
  source 1..25: mol_type = other DNA
cccgggccggggccgctcgcgccgg

SEQ ID NO: 456 - DNA, 25 bp, synthetic construct
  misc_feature 1..25: note = Oligonucleotide
  source 1..25: mol_type = other DNA
gggcccgggccggggccgctcgcgc

SEQ ID NO: 457 - DNA, 25 bp, synthetic construct
  misc_feature 1..25: note = Oligonucleotide
  source 1..25: mol_type = other DNA
ccggggcccgggccggggccgctcg

SEQ ID NO: 458 - DNA, 25 bp, synthetic construct
  misc_feature 1..25: note = Oligonucleotide
  source 1..25: mol_type = other DNA
gcgccggggcccgggccggggccgc

SEQ ID NO: 459 - DNA, 25 bp, synthetic construct
  misc_feature 1..25: note = Oligonucleotide
  source 1..25: mol_type = other DNA
cccgcgccggggcccgggccggggc

SEQ ID NO: 460 - DNA, 25 bp, synthetic construct
  misc_feature 1..25: note = Oligonucleotide
  source 1..25: mol_type = other DNA
atccccgcgccggggcccgggccgg

SEQ ID NO: 461 - DNA, 25 bp, synthetic construct
  misc_feature 1..25: note = Oligonucleotide
  source 1..25: mol_type = other DNA
tccatccccgcgccggggcccgggc

SEQ ID NO: 462 - DNA, 25 bp, synthetic construct
  misc_feature 1..25: note = Oligonucleotide
  source 1..25: mol_type = other DNA
ccgtccatccccgcgccggggcccg

SEQ ID NO: 463 - DNA, 25 bp, synthetic construct
  misc_feature 1..25: note = Oligonucleotide
  source 1..25: mol_type = other DNA
gggccgtccatccccgcgccggggc

SEQ ID NO: 464 - DNA, 25 bp, synthetic construct
  misc_feature 1..25: note = Oligonucleotide
  source 1..25: mol_type = other DNA
ccggggccgtccatccccgcgccgg

SEQ ID NO: 465 - DNA, 25 bp, synthetic construct
  misc_feature 1..25: note = Oligonucleotide
  source 1..25: mol_type = other DNA
gccccggggccgtccatccccgcgc

SEQ ID NO: 466 - DNA, 25 bp, synthetic construct
  misc_feature 1..25: note = Oligonucleotide
  source 1..25: mol_type = other DNA
ctggccccggggccgtccatccccg

SEQ ID NO: 467 - DNA, 25 bp, synthetic construct
  misc_feature 1..25: note = Oligonucleotide
  source 1..25: mol_type = other DNA
gcgctggccccggggccgtccatcc

SEQ ID NO: 468 - DNA, 25 bp, synthetic construct
  misc_feature 1..25: note = Oligonucleotide
  source 1..25: mol_type = other DNA
acggcgctggccccggggccgtcca

SEQ ID NO: 469 - DNA, 25 bp, synthetic construct
  misc_feature 1..25: note = Oligonucleotide
  source 1..25: mol_type = other DNA
accacggcgctggccccggggccgt

SEQ ID NO: 470 - DNA, 25 bp, synthetic construct
  misc_feature 1..25: note = Oligonucleotide
  source 1..25: mol_type = other DNA
acgaccacggcgctggccccggggc

SEQ ID NO: 471 - DNA, 25 bp, synthetic construct
  misc_feature 1..25: note = Oligonucleotide
  source 1..25: mol_type = other DNA
cgcacgaccacggcgctggccccgg

SEQ ID NO: 472 - DNA, 25 bp, synthetic construct
  misc_feature 1..25: note = Oligonucleotide
  source 1..25: mol_type = other DNA
acgcgcacgaccacggcgctggccc

SEQ ID NO: 473 - DNA, 25 bp, synthetic construct
  misc_feature 1..25: note = Oligonucleotide
  source 1..25: mol_type = other DNA
ccgacgcgcacgaccacggcgctgg

SEQ ID NO: 474 - DNA, 25 bp, synthetic construct
  misc_feature 1..25: note = Oligonucleotide
  source 1..25: mol_type = other DNA
atgccgacgcgcacgaccacggcgc

SEQ ID NO: 475 - DNA, 25 bp, synthetic construct
  misc_feature 1..25: note = Oligonucleotide
  source 1..25: mol_type = other DNA
gggatgccgacgcgcacgaccacgg

SEQ ID NO: 476 - DNA, 25 bp, synthetic construct
  misc_feature 1..25: note = Oligonucleotide
  source 1..25: mol_type = other DNA
tccgggatgccgacgcgcacgacca

SEQ ID NO: 477 - DNA, 25 bp, synthetic construct
  misc_feature 1..25: note = Oligonucleotide
  source 1..25: mol_type = other DNA
aggtccgggatgccgacgcgcacga

SEQ ID NO: 478 - DNA, 25 bp, synthetic construct
  misc_feature 1..25: note = Oligonucleotide
  source 1..25: mol_type = other DNA
tgcaggtccgggatgccgacgcgca

SEQ ID NO: 479 - DNA, 25 bp, synthetic construct
  misc_feature 1..25: note = Oligonucleotide
  source 1..25: mol_type = other DNA
tgctgcaggtccgggatgccgacgc

SEQ ID NO: 480 - DNA, 25 bp, synthetic construct
  misc_feature 1..25: note = Oligonucleotide
  source 1..25: mol_type = other DNA
gtctgctgcaggtccgggatgccga

SEQ ID NO: 481 - DNA, 25 bp, synthetic construct
  misc_feature 1..25: note = Oligonucleotide
  source 1..25: mol_type = other DNA
cgcctccgcgaaccgcggccgaagc

SEQ ID NO: 482 - DNA, 25 bp, synthetic construct
  misc_feature 1..25: note = Oligonucleotide
  source 1..25: mol_type = other DNA
ccgcgcctccgcgaaccgcggccga

SEQ ID NO: 483 - DNA, 25 bp, synthetic construct
  misc_feature 1..25: note = Oligonucleotide
  source 1..25: mol_type = other DNA
accccgcgcctccgcgaaccgcggc

SEQ ID NO: 484 - DNA, 25 bp, synthetic construct
  misc_feature 1..25: note = Oligonucleotide
  source 1..25: mol_type = other DNA
gggaccccgcgcctccgcgaaccgc

SEQ ID NO: 485 - DNA, 25 bp, synthetic construct
  misc_feature 1..25: note = Oligonucleotide
  source 1..25: mol_type = other DNA
cccgggaccccgcgcctccgcgaac

SEQ ID NO: 486 - DNA, 25 bp, synthetic construct
  misc_feature 1..25: note = Oligonucleotide
  source 1..25: mol_type = other DNA
gcgcccgggaccccgcgcctccgcg

SEQ ID NO: 487 - DNA, 25 bp, synthetic construct
  misc_feature 1..25: note = Oligonucleotide
  source 1..25: mol_type = other DNA
ccggcgcccgggaccccgcgcctcc

SEQ ID NO: 488 - DNA, 25 bp, synthetic construct
  misc_feature 1..25: note = Oligonucleotide
  source 1..25: mol_type = other DNA
gtgccggcgcccgggaccccgcgcc

SEQ ID NO: 489 - DNA, 25 bp, synthetic construct
  misc_feature 1..25: note = Oligonucleotide
  source 1..25: mol_type = other DNA
cgggtgccggcgcccgggaccccgc

SEQ ID NO: 490 - DNA, 25 bp, synthetic construct
  misc_feature 1..25: note = Oligonucleotide
  source 1..25: mol_type = other DNA
gctcgggtgccggcgcccgggaccc

SEQ ID NO: 491 - DNA, 25 bp, synthetic construct
  misc_feature 1..25: note = Oligonucleotide
  source 1..25: mol_type = other DNA
ggggctcgggtgccggcgcccggga

SEQ ID NO: 492 - DNA, 25 bp, synthetic construct
  misc_feature 1..25: note = Oligonucleotide
  source 1..25: mol_type = other DNA
tccggggctcgggtgccggcgcccg

SEQ ID NO: 493 - DNA, 25 bp, synthetic construct
  misc_feature 1..25: note = Oligonucleotide
  source 1..25: mol_type = other DNA
gagtccggggctcgggtgccggcgc

SEQ ID NO: 494 - DNA, 25 bp, synthetic construct
  misc_feature 1..25: note = Oligonucleotide
  source 1..25: mol_type = other DNA
aaggagtccggggctcgggtgccgg

SEQ ID NO: 495 - DNA, 25 bp, synthetic construct
  misc_feature 1..25: note = Oligonucleotide
  source 1..25: mol_type = other DNA
ccgaaggagtccggggctcgggtgc

SEQ ID NO: 496 - DNA, 25 bp, synthetic construct
  misc_feature 1..25: note = Oligonucleotide
  source 1..25: mol_type = other DNA
ccgccgaaggagtccggggctcggg

SEQ ID NO: 497 - DNA, 25 bp, synthetic construct
  misc_feature 1..25: note = Oligonucleotide
  source 1..25: mol_type = other DNA
cccccgccgaaggagtccggggctc

SEQ ID NO: 498 - DNA, 25 bp, synthetic construct
  misc_feature 1..25: note = Oligonucleotide
  source 1..25: mol_type = other DNA
gggcccccgccgaaggagtccgggg

SEQ ID NO: 499 - DNA, 25 bp, synthetic construct
  misc_feature 1..25: note = Oligonucleotide
  source 1..25: mol_type = other DNA
cccgggcccccgccgaaggagtccg

SEQ ID NO: 500 - DNA, 25 bp, synthetic construct
  misc_feature 1..25: note = Oligonucleotide
  source 1..25: mol_type = other DNA
agccccgggcccccgccgaaggagt

SEQ ID NO: 501 - DNA, 25 bp, synthetic construct
  misc_feature 1..25: note = Oligonucleotide
  source 1..25: mol_type = other DNA
ccgagccccgggcccccgccgaagg

SEQ ID NO: 502 - DNA, 25 bp, synthetic construct
  misc_feature 1..25: note = Oligonucleotide
  source 1..25: mol_type = other DNA
gtgccgagccccgggcccccgccga

SEQ ID NO: 503 - DNA, 25 bp, synthetic construct
  misc_feature 1..25: note = Oligonucleotide
  source 1..25: mol_type = other DNA
ggggtgccgagccccgggcccccgc

SEQ ID NO: 504 - DNA, 25 bp, synthetic construct
  misc_feature 1..25: note = Oligonucleotide
  source 1..25: mol_type = other DNA
tgcggggtgccgagccccgggcccc

SEQ ID NO: 505 - DNA, 25 bp, synthetic construct
  misc_feature 1..25: note = Oligonucleotide
  source 1..25: mol_type = other DNA
ccatgcggggtgccgagccccgggc

SEQ ID NO: 506 - DNA, 25 bp, synthetic construct
  misc_feature 1..25: note = Oligonucleotide
  source 1..25: mol_type = other DNA
gccccatgcggggtgccgagccccg

SEQ ID NO: 507 - DNA, 25 bp, synthetic construct
  misc_feature 1..25: note = Oligonucleotide
  source 1..25: mol_type = other DNA
ccggccccatgcggggtgccgagcc

SEQ ID NO: 508 - DNA, 25 bp, synthetic construct
  misc_feature 1..25: note = Oligonucleotide
  source 1..25: mol_type = other DNA
ccgccggccccatgcggggtgccga

SEQ ID NO: 509 - DNA, 25 bp, synthetic construct
  misc_feature 1..25: note = Oligonucleotide
  source 1..25: mol_type = other DNA
gccccgccggccccatgcggggtgc

SEQ ID NO: 510 - DNA, 25 bp, synthetic construct
  misc_feature 1..25: note = Oligonucleotide
  source 1..25: mol_type = other DNA
cccgccccgccggccccatgcgggg

SEQ ID NO: 511 - DNA, 25 bp, synthetic construct
  misc_feature 1..25: note = Oligonucleotide
  source 1..25: mol_type = other DNA
ggacccgccccgccggccccatgcg

SEQ ID NO: 512 - DNA, 25 bp, synthetic construct
  misc_feature 1..25: note = Oligonucleotide
  source 1..25: mol_type = other DNA
cgcggacccgccccgccggccccat

SEQ ID NO: 513 - DNA, 25 bp, synthetic construct
  misc_feature 1..25: note = Oligonucleotide
  source 1..25: mol_type = other DNA
gagcgcggacccgccccgccggccc

SEQ ID NO: 514 - DNA, 25 bp, synthetic construct
  misc_feature 1..25: note = Oligonucleotide
  source 1..25: mol_type = other DNA
cgggagcgcggacccgccccgccgg

SEQ ID NO: 515 - DNA, 25 bp, synthetic construct
  misc_feature 1..25: note = Oligonucleotide
  source 1..25: mol_type = other DNA
tcccgggagcgcggacccgccccgc

SEQ ID NO: 516 - DNA, 25 bp, synthetic construct
  misc_feature 1..25: note = Oligonucleotide
  source 1..25: mol_type = other DNA
aggtcccgggagcgcggacccgccc

SEQ ID NO: 517 - DNA, 25 bp, synthetic construct
  misc_feature 1..25: note = Oligonucleotide
  source 1..25: mol_type = other DNA
ctcaggtcccgggagcgcggacccg

SEQ ID NO: 518 - DNA, 25 bp, synthetic construct
  misc_feature 1..25: note = Oligonucleotide
  source 1..25: mol_type = other DNA
gagctcaggtcccgggagcgcggac

SEQ ID NO: 519 - DNA, 25 bp, synthetic construct
  misc_feature 1..25: note = Oligonucleotide
  source 1..25: mol_type = other DNA
cgtgagctcaggtcccgggagcgcg

SEQ ID NO: 520 - DNA, 25 bp, synthetic construct
  misc_feature 1..25: note = Oligonucleotide
  source 1..25: mol_type = other DNA
gctcgtgagctcaggtcccgggagc

SEQ ID NO: 521 - DNA, 25 bp, synthetic construct
  misc_feature 1..25: note = Oligonucleotide
  source 1..25: mol_type = other DNA
cgggctcgtgagctcaggtcccggg

SEQ ID NO: 522 - DNA, 25 bp, synthetic construct
  misc_feature 1..25: note = Oligonucleotide
  source 1..25: mol_type = other DNA
gagcgggctcgtgagctcaggtccc

SEQ ID NO: 523 - DNA, 25 bp, synthetic construct
  misc_feature 1..25: note = Oligonucleotide
  source 1..25: mol_type = other DNA
gcggagcgggctcgtgagctcaggt

SEQ ID NO: 524 - DNA, 25 bp, synthetic construct
  misc_feature 1..25: note = Oligonucleotide
  source 1..25: mol_type = other DNA
gcagcggagcgggctcgtgagctca

SEQ ID NO: 525 - DNA, 25 bp, synthetic construct
  misc_feature 1..25: note = Oligonucleotide
  source 1..25: mol_type = other DNA
tctgcagcggagcgggctcgtgagc

SEQ ID NO: 526 - DNA, 25 bp, synthetic construct
  misc_feature 1..25: note = Oligonucleotide
  source 1..25: mol_type = other DNA
acttctgcagcggagcgggctcgtg

SEQ ID NO: 527 - DNA, 25 bp, synthetic construct
  misc_feature 1..25: note = Oligonucleotide
  source 1..25: mol_type = other DNA
ggcacttctgcagcggagcgggctc

SEQ ID NO: 528 - DNA, 25 bp, synthetic construct
  misc_feature 1..25: note = Oligonucleotide
  source 1..25: mol_type = other DNA
gcaggcacttctgcagcggagcggg

SEQ ID NO: 529 - DNA, 25 bp, synthetic construct
  misc_feature 1..25: note = Oligonucleotide
  source 1..25: mol_type = other DNA
ggcgcaggcacttctgcagcggagc

SEQ ID NO: 530 - DNA, 25 bp, synthetic construct
  misc_feature 1..25: note = Oligonucleotide
  source 1..25: mol_type = other DNA
ccaggcgcaggcacttctgcagcgg

SEQ ID NO: 531 - DNA, 25 bp, synthetic construct
  misc_feature 1..25: note = Oligonucleotide
  source 1..25: mol_type = other DNA
ggtccaggcgcaggcacttctgcag

SEQ ID NO: 532 - DNA, 25 bp, synthetic construct
  misc_feature 1..25: note = Oligonucleotide
  source 1..25: mol_type = other DNA
ccgggtccaggcgcaggcacttctg

SEQ ID NO: 533 - DNA, 25 bp, synthetic construct
  misc_feature 1..25: note = Oligonucleotide
  source 1..25: mol_type = other DNA
cggccgggtccaggcgcaggcactt

SEQ ID NO: 534 - DNA, 25 bp, synthetic construct
  misc_feature 1..25: note = Oligonucleotide
  source 1..25: mol_type = other DNA
gcgcggccgggtccaggcgcaggca

SEQ ID NO: 535 - DNA, 25 bp, synthetic construct
  misc_feature 1..25: note = Oligonucleotide
  source 1..25: mol_type = other DNA
cgggcgcggccgggtccaggcgcag

SEQ ID NO: 536 - DNA, 25 bp, synthetic construct
  misc_feature 1..25: note = Oligonucleotide
  source 1..25: mol_type = other DNA
acacgggcgcggccgggtccaggcg

SEQ ID NO: 537 - DNA, 25 bp, synthetic construct
  misc_feature 1..25: note = Oligonucleotide
  source 1..25: mol_type = other DNA
cccacacgggcgcggccgggtccag

SEQ ID NO: 538 - DNA, 25 bp, synthetic construct
  misc_feature 1..25: note = Oligonucleotide
  source 1..25: mol_type = other DNA
cggcccacacgggcgcggccgggtc

SEQ ID NO: 539 - DNA, 25 bp, synthetic construct
  misc_feature 1..25: note = Oligonucleotide
  source 1..25: mol_type = other DNA
tggcggcccacacgggcgcggccgg

SEQ ID NO: 540 - DNA, 25 bp, synthetic construct
  misc_feature 1..25: note = Oligonucleotide
  source 1..25: mol_type = other DNA
gcttggcggcccacacgggcgcggc

SEQ ID NO: 541 - DNA, 25 bp, synthetic construct
  misc_feature 1..25: note = Oligonucleotide
  source 1..25: mol_type = other DNA
gctgcttggcggcccacacgggcgc

SEQ ID NO: 542 - DNA, 25 bp, synthetic construct
  misc_feature 1..25: note = Oligonucleotide
  source 1..25: mol_type = other DNA
cgcgctgcttggcggcccacacggg

SEQ ID NO: 543 - DNA, 25 bp, synthetic construct
  misc_feature 1..25: note = Oligonucleotide
  source 1..25: mol_type = other DNA
gcacgcgctgcttggcggcccacac

SEQ ID NO: 544 - DNA, 25 bp, synthetic construct
  misc_feature 1..25: note = Oligonucleotide
  source 1..25: mol_type = other DNA
agagcacgcgctgcttggcggccca

SEQ ID NO: 545 - DNA, 25 bp, synthetic construct
  misc_feature 1..25: note = Oligonucleotide
  source 1..25: mol_type = other DNA
cgcagagcacgcgctgcttggcggc

SEQ ID NO: 546 - DNA, 25 bp, synthetic construct
  misc_feature 1..25: note = Oligonucleotide
  source 1..25: mol_type = other DNA
gggcgcagagcacgcgctgcttggc

SEQ ID NO: 547 - DNA, 25 bp, synthetic construct
  misc_feature 1..25: note = Oligonucleotide
  source 1..25: mol_type = other DNA
tgagggcgcagagcacgcgctgctt

SEQ ID NO: 548 - DNA, 25 bp, synthetic construct
  misc_feature 1..25: note = Oligonucleotide
  source 1..25: mol_type = other DNA
ggttgagggcgcagagcacgcgctg

SEQ ID NO: 549 - DNA, 25 bp, synthetic construct
  misc_feature 1..25: note = Oligonucleotide
  source 1..25: mol_type = other DNA
tgtggttgagggcgcagagcacgcg

SEQ ID NO: 550 - DNA, 25 bp, synthetic construct
  misc_feature 1..25: note = Oligonucleotide
  source 1..25: mol_type = other DNA
ggctgtggttgagggcgcagagcac

SEQ ID NO: 551 - DNA, 25 bp, synthetic construct
  misc_feature 1..25: note = Oligonucleotide
  source 1..25: mol_type = other DNA
ggaggctgtggttgagggcgcagag

SEQ ID NO: 552 - DNA, 25 bp, synthetic construct
  misc_feature 1..25: note = Oligonucleotide
  source 1..25: mol_type = other DNA
cctggaggctgtggttgagggcgca

SEQ ID NO: 553 - DNA, 25 bp, synthetic construct
  misc_feature 1..25: note = Oligonucleotide
  source 1..25: mol_type = other DNA
cgtcctggaggctgtggttgagggc

SEQ ID NO: 554 - DNA, 25 bp, synthetic construct
  misc_feature 1..25: note = Oligonucleotide
  source 1..25: mol_type = other DNA
gcgcgtcctggaggctgtggttgag

SEQ ID NO: 555 - DNA, 25 bp, synthetic construct
  misc_feature 1..25: note = Oligonucleotide
  source 1..25: mol_type = other DNA
tgagcgcgtcctggaggctgtggtt

SEQ ID NO: 556 - DNA, 25 bp, synthetic construct
  misc_feature 1..25: note = Oligonucleotide
  source 1..25: mol_type = other DNA
agttgagcgcgtcctggaggctgtg

SEQ ID NO: 557 - DNA, 25 bp, synthetic construct
  misc_feature 1..25: note = Oligonucleotide
  source 1..25: mol_type = other DNA
catagttgagcgcgtcctggaggct

SEQ ID NO: 558 - DNA, 25 bp, synthetic construct
  misc_feature 1..25: note = Oligonucleotide
  source 1..25: mol_type = other DNA
gcccatagttgagcgcgtcctggag

SEQ ID NO: 559 - DNA, 25 bp, synthetic construct
  misc_feature 1..25: note = Oligonucleotide
  source 1..25: mol_type = other DNA
aaagcccatagttgagcgcgtcctg

SEQ ID NO: 560 - DNA, 25 bp, synthetic construct
  misc_feature 1..25: note = Oligonucleotide
  source 1..25: mol_type = other DNA
ggaaaagcccatagttgagcgcgtc

SEQ ID NO: 561 - DNA, 25 bp, synthetic construct
  misc_feature 1..25: note = Oligonucleotide
  source 1..25: mol_type = other DNA
gctggaaaagcccatagttgagcgc

SEQ ID NO: 562 - DNA, 25 bp, synthetic construct
  misc_feature 1..25: note = Oligonucleotide
  source 1..25: mol_type = other DNA
gcggctggaaaagcccatagttgag

SEQ ID NO: 563 - DNA, 25 bp, synthetic construct
  misc_feature 1..25: note = Oligonucleotide
  source 1..25: mol_type = other DNA
agggcggctggaaaagcccatagtt

SEQ ID NO: 564 - DNA, 25 bp, synthetic construct
  misc_feature 1..25: note = Oligonucleotide
  source 1..25: mol_type = other DNA
gggagggcggctggaaaagcccata

SEQ ID NO: 565 - DNA, 25 bp, synthetic construct
  misc_feature 1..25: note = Oligonucleotide
  source 1..25: mol_type = other DNA
cccgggagggcggctggaaaagccc

SEQ ID NO: 566 - DNA, 25 bp, synthetic construct
  misc_feature 1..25: note = Oligonucleotide
  source 1..25: mol_type = other DNA
ggccccgggagggcggctggaaaag

SEQ ID NO: 567 - DNA, 25 bp, synthetic construct
  misc_feature 1..25: note = Oligonucleotide
  source 1..25: mol_type = other DNA
cgcggccccgggagggcggctggaa

SEQ ID NO: 568 - DNA, 25 bp, synthetic construct
  misc_feature 1..25: note = Oligonucleotide
  source 1..25: mol_type = other DNA
cggcgcggccccgggagggcggctg

SEQ ID NO: 569 - DNA, 25 bp, synthetic construct
  misc_feature 1..25: note = Oligonucleotide
  source 1..25: mol_type = other DNA
tgccggcgcggccccgggagggcgg

SEQ ID NO: 570 - DNA, 25 bp, synthetic construct
  misc_feature 1..25: note = Oligonucleotide
  source 1..25: mol_type = other DNA
acttgccggcgcggccccgggaggg

SEQ ID NO: 571 - DNA, 25 bp, synthetic construct
  misc_feature 1..25: note = Oligonucleotide
  source 1..25: mol_type = other DNA
ggaacttgccggcgcggccccggga

SEQ ID NO: 572 - DNA, 25 bp, synthetic construct
  misc_feature 1..25: note = Oligonucleotide
  source 1..25: mol_type = other DNA
ccaggaacttgccggcgcggccccg

SEQ ID NO: 573 - DNA, 25 bp, synthetic construct
  misc_feature 1..25: note = Oligonucleotide
  source 1..25: mol_type = other DNA
catccaggaacttgccggcgcggcc

SEQ ID NO: 574 - DNA, 25 bp, synthetic construct
  misc_feature 1..25: note = Oligonucleotide
  source 1..25: mol_type = other DNA
cctcatccaggaacttgccggcgcg

SEQ ID NO: 575 - DNA, 25 bp, synthetic construct
  misc_feature 1..25: note = Oligonucleotide
  source 1..25: mol_type = other DNA
gctcctcatccaggaacttgccggc

SEQ ID NO: 576 - DNA, 25 bp, synthetic construct
  misc_feature 1..25: note = Oligonucleotide
  source 1..25: mol_type = other DNA
gccgctcctcatccaggaacttgcc

SEQ ID NO: 577 - DNA, 25 bp, synthetic construct
  misc_feature 1..25: note = Oligonucleotide
  source 1..25: mol_type = other DNA
ggagccgctcctcatccaggaactt

SEQ ID NO: 578 - DNA, 25 bp, synthetic construct
  misc_feature 1..25: note = Oligonucleotide
  source 1..25: mol_type = other DNA
gcaggagccgctcctcatccaggaa

SEQ ID NO: 579 - DNA, 25 bp, synthetic construct
  misc_feature 1..25: note = Oligonucleotide
  source 1..25: mol_type = other DNA
cctgcaggagccgctcctcatccag

SEQ ID NO: 580 - DNA, 25 bp, synthetic construct
  misc_feature 1..25: note = Oligonucleotide
  source 1..25: mol_type = other DNA
actcctgcaggagccgctcctcatc

SEQ ID NO: 581 - DNA, 25 bp, synthetic construct
  misc_feature 1..25: note = Oligonucleotide
  source 1..25: mol_type = other DNA
ggtactcctgcaggagccgctcctc

SEQ ID NO: 582 - DNA, 25 bp, synthetic construct
  misc_feature 1..25: note = Oligonucleotide
  source 1..25: mol_type = other DNA
gcgggtactcctgcaggagccgctc

SEQ ID NO: 583 - DNA, 25 bp, synthetic construct
  misc_feature 1..25: note = Oligonucleotide
  source 1..25: mol_type = other DNA
tgggcgggtactcctgcaggagccg

SEQ ID NO: 584 - DNA, 25 bp, synthetic construct
  misc_feature 1..25: note = Oligonucleotide
  source 1..25: mol_type = other DNA
ggttgggcgggtactcctgcaggag

SEQ ID NO: 585 - DNA, 25 bp, synthetic construct
  misc_feature 1..25: note = Oligonucleotide
  source 1..25: mol_type = other DNA
ccaggttgggcgggtactcctgcag

SEQ ID NO: 586 - DNA, 25 bp, synthetic construct
  misc_feature 1..25: note = Oligonucleotide
  source 1..25: mol_type = other DNA
tgtccaggttgggcgggtactcctg

SEQ ID NO: 587 - DNA, 25 bp, synthetic construct
  misc_feature 1..25: note = Oligonucleotide
  source 1..25: mol_type = other DNA
gcgtgtccaggttgggcgggtactc

SEQ ID NO: 588 - DNA, 25 bp, synthetic construct
  misc_feature 1..25: note = Oligonucleotide
  source 1..25: mol_type = other DNA
ggggcgtgtccaggttgggcgggta

SEQ ID NO: 589 - DNA, 25 bp, synthetic construct
  misc_feature 1..25: note = Oligonucleotide
  source 1..25: mol_type = other DNA
gcaggggcgtgtccaggttgggcgg

SEQ ID NO: 590 - DNA, 25 bp, synthetic construct
  misc_feature 1..25: note = Oligonucleotide
  source 1..25: mol_type = other DNA
agggcaggggcgtgtccaggttggg

SEQ ID NO: 591 - DNA, 25 bp, synthetic construct
  misc_feature 1..25: note = Oligonucleotide
  source 1..25: mol_type = other DNA
ggtagggcaggggcgtgtccaggtt

SEQ ID NO: 592 - DNA, 25 bp, synthetic construct
  misc_feature 1..25: note = Oligonucleotide
  source 1..25: mol_type = other DNA
ccaggtagggcaggggcgtgtccag

SEQ ID NO: 593 - DNA, 25 bp, synthetic construct
  misc_feature 1..25: note = Oligonucleotide
  source 1..25: mol_type = other DNA
actccaggtagggcaggggcgtgtc

SEQ ID NO: 594 - DNA, 25 bp, synthetic construct
  misc_feature 1..25: note = Oligonucleotide
  source 1..25: mol_type = other DNA
gaaactccaggtagggcaggggcgt

SEQ ID NO: 595 - DNA, 25 bp, synthetic construct
  misc_feature 1..25: note = Oligonucleotide
  source 1..25: mol_type = other DNA
atcgaaactccaggtagggcagggg

SEQ ID NO: 596 - DNA, 25 bp, synthetic construct
  misc_feature 1..25: note = Oligonucleotide
  source 1..25: mol_type = other DNA
tgtatcgaaactccaggtagggcag

SEQ ID NO: 597 - DNA, 25 bp, synthetic construct
  misc_feature 1..25: note = Oligonucleotide
  source 1..25: mol_type = other DNA
gcttgtatcgaaactccaggtaggg

SEQ ID NO: 598 - DNA, 25 bp, synthetic construct
  misc_feature 1..25: note = Oligonucleotide
  source 1..25: mol_type = other DNA
gccgcttgtatcgaaactccaggta

SEQ ID NO: 599 - DNA, 25 bp, synthetic construct
  misc_feature 1..25: note = Oligonucleotide
  source 1..25: mol_type = other DNA
ctcgccgcttgtatcgaaactccag

SEQ ID NO: 600 - DNA, 25 bp, synthetic construct
  misc_feature 1..25: note = Oligonucleotide
  source 1..25: mol_type = other DNA
aaactcgccgcttgtatcgaaactc

SEQ ID NO: 601 - DNA, 25 bp, synthetic construct
  misc_feature 1..25: note = Oligonucleotide
  source 1..25: mol_type = other DNA
cataaactcgccgcttgtatcgaaa

SEQ ID NO: 602 - DNA, 25 bp, synthetic construct
  misc_feature 1..25: note = Oligonucleotide
  source 1..25: mol_type = other DNA
gggcataaactcgccgcttgtatcg

SEQ ID NO: 603 - DNA, 25 bp, synthetic construct
  misc_feature 1..25: note = Oligonucleotide
  source 1..25: mol_type = other DNA
tctgggcataaactcgccgcttgta

SEQ ID NO: 604 - DNA, 25 bp, synthetic construct
  misc_feature 1..25: note = Oligonucleotide
  source 1..25: mol_type = other DNA
ggttctgggcataaactcgccgctt

SEQ ID NO: 605 - DNA, 25 bp, synthetic construct
  misc_feature 1..25: note = Oligonucleotide
  source 1..25: mol_type = other DNA
tgaggttctgggcataaactcgccg

SEQ ID NO: 606 - DNA, 25 bp, synthetic construct
  misc_feature 1..25: note = Oligonucleotide
  source 1..25: mol_type = other DNA
cgatgaggttctgggcataaactcg

SEQ ID NO: 607 - DNA, 25 bp, synthetic construct
  misc_feature 1..25: note = Oligonucleotide
  source 1..25: mol_type = other DNA
catcgatgaggttctgggcataaac

SEQ ID NO: 608 - DNA, 25 bp, synthetic construct
  misc_feature 1..25: note = Oligonucleotide
  source 1..25: mol_type = other DNA
tatcatcgatgaggttctgggcata

SEQ ID NO: 609 - DNA, 25 bp, synthetic construct
  misc_feature 1..25: note = Oligonucleotide
  source 1..25: mol_type = other DNA
gcttatcatcgatgaggttctgggc

SEQ ID NO: 610 - DNA, 25 bp, synthetic construct
  misc_feature 1..25: note = Oligonucleotide
  source 1..25: mol_type = other DNA
actgcttatcatcgatgaggttctg

SEQ ID NO: 611 - DNA, 25 bp, synthetic construct
  misc_feature 1..25: note = Oligonucleotide
  source 1..25: mol_type = other DNA
caaactgcttatcatcgatgaggtt

SEQ ID NO: 612 - DNA, 25 bp, synthetic construct
  misc_feature 1..25: note = Oligonucleotide
  source 1..25: mol_type = other DNA
ttgcaaactgcttatcatcgatgag

SEQ ID NO: 613 - DNA, 25 bp, synthetic construct
  misc_feature 1..25: note = Oligonucleotide
  source 1..25: mol_type = other DNA
gctttgcaaactgcttatcatcgat

SEQ ID NO: 614 - DNA, 25 bp, synthetic construct
  misc_feature 1..25: note = Oligonucleotide
  source 1..25: mol_type = other DNA
gaagctttgcaaactgcttatcatc

SEQ ID NO: 615 - DNA, 25 bp, synthetic construct
  misc_feature 1..25: note = Oligonucleotide
  source 1..25: mol_type = other DNA
tgtgaagctttgcaaactgcttatc

SEQ ID NO: 616 - DNA, 25 bp, synthetic construct
  misc_feature 1..25: note = Oligonucleotide
  source 1..25: mol_type = other DNA
ttgtgtgaagctttgcaaactgctt

SEQ ID NO: 617 - DNA, 25 bp, synthetic construct
  misc_feature 1..25: note = Oligonucleotide
  source 1..25: mol_type = other DNA
cctttgtgtgaagctttgcaaactg

SEQ ID NO: 618 - DNA, 25 bp, synthetic construct
  misc_feature 1..25: note = Oligonucleotide
  source 1..25: mol_type = other DNA
tcgcctttgtgtgaagctttgcaaa

SEQ ID NO: 619 - DNA, 25 bp, synthetic construct
  misc_feature 1..25: note = Oligonucleotide
  source 1..25: mol_type = other DNA
ggttcgcctttgtgtgaagctttgc

SEQ ID NO: 620 - DNA, 25 bp, synthetic construct
  misc_feature 1..25: note = Oligonucleotide
  source 1..25: mol_type = other DNA
tcaggttcgcctttgtgtgaagctt

SEQ ID NO: 621 - DNA, 25 bp, synthetic construct
  misc_feature 1..25: note = Oligonucleotide
  source 1..25: mol_type = other DNA
tcttcaggttcgcctttgtgtgaag

SEQ ID NO: 622 - DNA, 25 bp, synthetic construct
  misc_feature 1..25: note = Oligonucleotide
  source 1..25: mol_type = other DNA
acttcttcaggttcgcctttgtgtg

SEQ ID NO: 623 - DNA, 17 bp, synthetic construct
  misc_feature 1..17: note = Oligonucleotide
  source 1..17: mol_type = other DNA
ggagtgggggtggggcg

SEQ ID NO: 624 - DNA, 17 bp, synthetic construct
  misc_feature 1..17: note = Oligonucleotide
  source 1..17: mol_type = other DNA
gcgggagtgggggtggg

SEQ ID NO: 625 - DNA, 17 bp, synthetic construct
  misc_feature 1..17: note = Oligonucleotide
  source 1..17: mol_type = other DNA
ggggcgggagtgggggt

SEQ ID NO: 626 - DNA, 17 bp, synthetic construct
  misc_feature 1..17: note = Oligonucleotide
  source 1..17: mol_type = other DNA
gccggggcgggagtggg

SEQ ID NO: 627 - DNA, 17 bp, synthetic construct
  misc_feature 1..17: note = Oligonucleotide
  source 1..17: mol_type = other DNA
acggccggggcgggagt

SEQ ID NO: 628 - DNA, 17 bp, synthetic construct
  misc_feature 1..17: note = Oligonucleotide
  source 1..17: mol_type = other DNA
ggcacggccggggcggg

SEQ ID NO: 629 - DNA, 17 bp, synthetic construct
  misc_feature 1..17: note = Oligonucleotide
  source 1..17: mol_type = other DNA
cagggcacggccggggc

SEQ ID NO: 630 - DNA, 17 bp, synthetic construct
  misc_feature 1..17: note = Oligonucleotide
  source 1..17: mol_type = other DNA
cggcagggcacggccgg

SEQ ID NO: 631 - DNA, 17 bp, synthetic construct
  misc_feature 1..17: note = Oligonucleotide
  source 1..17: mol_type = other DNA
tgccggcagggcacggc

SEQ ID NO: 632 - DNA, 17 bp, synthetic construct
  misc_feature 1..17: note = Oligonucleotide
  source 1..17: mol_type = other DNA
ccctgccggcagggcac

SEQ ID NO: 633 - DNA, 17 bp, synthetic construct
  misc_feature 1..17: note = Oligonucleotide
  source 1..17: mol_type = other DNA
gggccctgccggcaggg

SEQ ID NO: 634 - DNA, 17 bp, synthetic construct
  misc_feature 1..17: note = Oligonucleotide
  source 1..17: mol_type = other DNA
ggggggccctgccggca

SEQ ID NO: 635 - DNA, 17 bp, synthetic construct
  misc_feature 1..17: note = Oligonucleotide
  source 1..17: mol_type = other DNA
ggtggggggccctgccg

SEQ ID NO: 636 - DNA, 17 bp, synthetic construct
  misc_feature 1..17: note = Oligonucleotide
  source 1..17: mol_type = other DNA
gggggtggggggccctg

SEQ ID NO: 637 - DNA, 17 bp, synthetic construct
  misc_feature 1..17: note = Oligonucleotide
  source 1..17: mol_type = other DNA
ggtgggggtggggggcc

SEQ ID NO: 638 - DNA, 17 bp, synthetic construct
  misc_feature 1..17: note = Oligonucleotide
  source 1..17: mol_type = other DNA
cggggtgggggtggggg

SEQ ID NO: 639 - DNA, 17 bp, synthetic construct
  misc_feature 1..17: note = Oligonucleotide
  source 1..17: mol_type = other DNA
gcccggggtgggggtgg

SEQ ID NO: 640 - DNA, 17 bp, synthetic construct
  misc_feature 1..17: note = Oligonucleotide
  source 1..17: mol_type = other DNA
gcggcccggggtggggg

SEQ ID NO: 641 - DNA, 17 bp, synthetic construct
  misc_feature 1..17: note = Oligonucleotide
  source 1..17: mol_type = other DNA
cccgcggcccggggtgg

SEQ ID NO: 642 - DNA, 17 bp, synthetic construct
  misc_feature 1..17: note = Oligonucleotide
  source 1..17: mol_type = other DNA
gagcccgcggcccgggg

SEQ ID NO: 643 - DNA, 17 bp, synthetic construct
  misc_feature 1..17: note = Oligonucleotide
  source 1..17: mol_type = other DNA
gccgagcccgcggcccg

SEQ ID NO: 644 - DNA, 17 bp, synthetic construct
  misc_feature 1..17: note = Oligonucleotide
  source 1..17: mol_type = other DNA
caggccgagcccgcggc

SEQ ID NO: 645 - DNA, 17 bp, synthetic construct
  misc_feature 1..17: note = Oligonucleotide
  source 1..17: mol_type = other DNA
gggcaggccgagcccgc

SEQ ID NO: 646 - DNA, 17 bp, synthetic construct
  misc_feature 1..17: note = Oligonucleotide
  source 1..17: mol_type = other DNA
aaggggcaggccgagcc

SEQ ID NO: 647 - DNA, 17 bp, synthetic construct
  misc_feature 1..17: note = Oligonucleotide
  source 1..17: mol_type = other DNA
cgtaaggggcaggccga

SEQ ID NO: 648 - DNA, 17 bp, synthetic construct
  misc_feature 1..17: note = Oligonucleotide
  source 1..17: mol_type = other DNA
cgtcgtaaggggcaggc

SEQ ID NO: 649 - DNA, 17 bp, synthetic construct
  misc_feature 1..17: note = Oligonucleotide
  source 1..17: mol_type = other DNA
cgccgtcgtaaggggca

SEQ ID NO: 650 - DNA, 17 bp, synthetic construct
  misc_feature 1..17: note = Oligonucleotide
  source 1..17: mol_type = other DNA
gggcgccgtcgtaaggg

SEQ ID NO: 651 - DNA, 17 bp, synthetic construct
  misc_feature 1..17: note = Oligonucleotide
  source 1..17: mol_type = other DNA
cccgggcgccgtcgtaa

SEQ ID NO: 652 - DNA, 17 bp, synthetic construct
  misc_feature 1..17: note = Oligonucleotide
  source 1..17: mol_type = other DNA
tggcccgggcgccgtcg

SEQ ID NO: 653 - DNA, 17 bp, synthetic construct
  misc_feature 1..17: note = Oligonucleotide
  source 1..17: mol_type = other DNA
tcctggcccgggcgccg

SEQ ID NO: 654 - DNA, 17 bp, synthetic construct
  misc_feature 1..17: note = Oligonucleotide
  source 1..17: mol_type = other DNA
cattcctggcccgggcg

SEQ ID NO: 655 - DNA, 17 bp, synthetic construct
  misc_feature 1..17: note = Oligonucleotide
  source 1..17: mol_type = other DNA
caacattcctggcccgg

SEQ ID NO: 656 - DNA, 17 bp, synthetic construct
  misc_feature 1..17: note = Oligonucleotide
  source 1..17: mol_type = other DNA
atgcaacattcctggcc

SEQ ID NO: 657 - DNA, 17 bp, synthetic construct
  misc_feature 1..17: note = Oligonucleotide
  source 1..17: mol_type = other DNA
ttcatgcaacattcctg

SEQ ID NO: 658 - DNA, 17 bp, synthetic construct
  misc_feature 1..17: note = Oligonucleotide
  source 1..17: mol_type = other DNA
cgattcatgcaacattc

SEQ ID NO: 659 - DNA, 17 bp, synthetic construct
  misc_feature 1..17: note = Oligonucleotide
  source 1..17: mol_type = other DNA
ggacgattcatgcaaca

SEQ ID NO: 660 - DNA, 17 bp, synthetic construct
  misc_feature 1..17: note = Oligonucleotide
  source 1..17: mol_type = other DNA
acaggacgattcatgca

SEQ ID NO: 661 - DNA, 17 bp, synthetic construct
  misc_feature 1..17: note = Oligonucleotide
  source 1..17: mol_type = other DNA
caaacaggacgattcat

SEQ ID NO: 662 - DNA, 17 bp, synthetic construct
  misc_feature 1..17: note = Oligonucleotide
  source 1..17: mol_type = other DNA
cagcaaacaggacgatt

SEQ ID NO: 663 - DNA, 17 bp, synthetic construct
  misc_feature 1..17: note = Oligonucleotide
  source 1..17: mol_type = other DNA
caacagcaaacaggacg

SEQ ID NO: 664 - DNA, 17 bp, synthetic construct
  misc_feature 1..17: note = Oligonucleotide
  source 1..17: mol_type = other DNA
gagcaacagcaaacagg

SEQ ID NO: 665 - DNA, 17 bp, synthetic construct
  misc_feature 1..17: note = Oligonucleotide
  source 1..17: mol_type = other DNA
tccgagcaacagcaaac

SEQ ID NO: 666 - DNA, 17 bp, synthetic construct
  misc_feature 1..17: note = Oligonucleotide
  source 1..17: mol_type = other DNA
gtctccgagcaacagca

SEQ ID NO: 667 - DNA, 17 bp, synthetic construct
  misc_feature 1..17: note = Oligonucleotide
  source 1..17: mol_type = other DNA
cgagtctccgagcaaca

SEQ ID NO: 668 - DNA, 17 bp, synthetic construct
  misc_feature 1..17: note = Oligonucleotide
  source 1..17: mol_type = other DNA
gggcgagtctccgagca

SEQ ID NO: 669 - DNA, 17 bp, synthetic construct
  misc_feature 1..17: note = Oligonucleotide
  source 1..17: mol_type = other DNA
acagggcgagtctccga

SEQ ID NO: 670 - DNA, 17 bp, synthetic construct
  misc_feature 1..17: note = Oligonucleotide
  source 1..17: mol_type = other DNA
tgtacagggcgagtctc

SEQ ID NO: 671 - DNA, 17 bp, synthetic construct
  misc_feature 1..17: note = Oligonucleotide
  source 1..17: mol_type = other DNA
caatgtacagggcgagt

SEQ ID NO: 672 - DNA, 17 bp, synthetic construct
  misc_feature 1..17: note = Oligonucleotide
  source 1..17: mol_type = other DNA
aagcaatgtacagggcg

SEQ ID NO: 673 - DNA, 17 bp, synthetic construct
  misc_feature 1..17: note = Oligonucleotide
  source 1..17: mol_type = other DNA
actaagcaatgtacagg

SEQ ID NO: 674 - DNA, 17 bp, synthetic construct
  misc_feature 1..17: note = Oligonucleotide
  source 1..17: mol_type = other DNA
ggcactaagcaatgtac

SEQ ID NO: 675 - DNA, 17 bp, synthetic construct
  misc_feature 1..17: note = Oligonucleotide
  source 1..17: mol_type = other DNA
gagggcactaagcaatg

SEQ ID NO: 676 - DNA, 17 bp, synthetic construct
  misc_feature 1..17: note = Oligonucleotide
  source 1..17: mol_type = other DNA
ggtgagggcactaagca

SEQ ID NO: 677 - DNA, 17 bp, synthetic construct
  misc_feature 1..17: note = Oligonucleotide
  source 1..17: mol_type = other DNA
gccggtgagggcactaa

SEQ ID NO: 678 - DNA, 17 bp, synthetic construct
  misc_feature 1..17: note = Oligonucleotide
  source 1..17: mol_type = other DNA
gcggccggtgagggcac

SEQ ID NO: 679 - DNA, 17 bp, synthetic construct
  misc_feature 1..17: note = Oligonucleotide
  source 1..17: mol_type = other DNA
tgggcggccggtgaggg

SEQ ID NO: 680 - DNA, 17 bp, synthetic construct
  misc_feature 1..17: note = Oligonucleotide
  source 1..17: mol_type = other DNA
ggctgggcggccggtga

SEQ ID NO: 681 - DNA, 17 bp, synthetic construct
  misc_feature 1..17: note = Oligonucleotide
  source 1..17: mol_type = other DNA
gtgggctgggcggccgg

SEQ ID NO: 682 - DNA, 17 bp, synthetic construct
  misc_feature 1..17: note = Oligonucleotide
  source 1..17: mol_type = other DNA
tgggtgggctgggcggc

SEQ ID NO: 683 - DNA, 17 bp, synthetic construct
  misc_feature 1..17: note = Oligonucleotide
  source 1..17: mol_type = other DNA
cgctgggtgggctgggc

SEQ ID NO: 684 - DNA, 17 bp, synthetic construct
  misc_feature 1..17: note = Oligonucleotide
  source 1..17: mol_type = other DNA
gtgcgctgggtgggctg

SEQ ID NO: 685 - DNA, 17 bp, synthetic construct
  misc_feature 1..17: note = Oligonucleotide
  source 1..17: mol_type = other DNA
actgtgcgctgggtggg

SEQ ID NO: 686 - DNA, 17 bp, synthetic construct
  misc_feature 1..17: note = Oligonucleotide
  source 1..17: mol_type = other DNA
ctgactgtgcgctgggt

SEQ ID NO: 687 - DNA, 17 bp, synthetic construct
  misc_feature 1..17: note = Oligonucleotide
  source 1..17: mol_type = other DNA
ttcctgactgtgcgctg

SEQ ID NO: 688 - DNA, 17 bp, synthetic construct
  misc_feature 1..17: note = Oligonucleotide
  source 1..17: mol_type = other DNA
cccttcctgactgtgcg

SEQ ID NO: 689 - DNA, 17 bp, synthetic construct
  misc_feature 1..17: note = Oligonucleotide
  source 1..17: mol_type = other DNA
acgcccttcctgactgt

SEQ ID NO: 690 - DNA, 17 bp, synthetic construct
  misc_feature 1..17: note = Oligonucleotide
  source 1..17: mol_type = other DNA
tccacgcccttcctgac

SEQ ID NO: 691 - DNA, 17 bp, synthetic construct
  misc_feature 1..17: note = Oligonucleotide
  source 1..17: mol_type = other DNA
tggtccacgcccttcct

SEQ ID NO: 692 - DNA, 17 bp, synthetic construct
  misc_feature 1..17: note = Oligonucleotide
  source 1..17: mol_type = other DNA
ccctggtccacgccctt

SEQ ID NO: 693 - DNA, 17 bp, synthetic construct
  misc_feature 1..17: note = Oligonucleotide
  source 1..17: mol_type = other DNA
cctccctggtccacgcc

SEQ ID NO: 694 - DNA, 17 bp, synthetic construct
  misc_feature 1..17: note = Oligonucleotide
  source 1..17: mol_type = other DNA
cagcctccctggtccac

SEQ ID NO: 695 - DNA, 17 bp, synthetic construct
  misc_feature 1..17: note = Oligonucleotide
  source 1..17: mol_type = other DNA
ccccagcctccctggtc

SEQ ID NO: 696 - DNA, 17 bp, synthetic construct
  misc_feature 1..17: note = Oligonucleotide
  source 1..17: mol_type = other DNA
ccgccccagcctccctg

SEQ ID NO: 697 - DNA, 17 bp, synthetic construct
  misc_feature 1..17: note = Oligonucleotide
  source 1..17: mol_type = other DNA
ctcccgccccagcctcc

SEQ ID NO: 698 - DNA, 17 bp, synthetic construct
  misc_feature 1..17: note = Oligonucleotide
  source 1..17: mol_type = other DNA
cacctcccgccccagcc

SEQ ID NO: 699 - DNA, 17 bp, synthetic construct
  misc_feature 1..17: note = Oligonucleotide
  source 1..17: mol_type = other DNA
cggcacctcccgcccca

SEQ ID NO: 700 - DNA, 17 bp, synthetic construct
  misc_feature 1..17: note = Oligonucleotide
  source 1..17: mol_type = other DNA
ccccggcacctcccgcc

SEQ ID NO: 701 - DNA, 17 bp, synthetic construct
  misc_feature 1..17: note = Oligonucleotide
  source 1..17: mol_type = other DNA
cacccccggcacctccc

SEQ ID NO: 702 - DNA, 17 bp, synthetic construct
  misc_feature 1..17: note = Oligonucleotide
  source 1..17: mol_type = other DNA
ccccacccccggcacct

SEQ ID NO: 703 - DNA, 17 bp, synthetic construct
  misc_feature 1..17: note = Oligonucleotide
  source 1..17: mol_type = other DNA
gcaccccacccccggca

SEQ ID NO: 704 - DNA, 17 bp, synthetic construct
  misc_feature 1..17: note = Oligonucleotide
  source 1..17: mol_type = other DNA
agggcaccccacccccg

SEQ ID NO: 705 - DNA, 17 bp, synthetic construct
  misc_feature 1..17: note = Oligonucleotide
  source 1..17: mol_type = other DNA
gctagggcaccccaccc

SEQ ID NO: 706 - DNA, 17 bp, synthetic construct
  misc_feature 1..17: note = Oligonucleotide
  source 1..17: mol_type = other DNA
cacgctagggcacccca

SEQ ID NO: 707 - DNA, 17 bp, synthetic construct
  misc_feature 1..17: note = Oligonucleotide
  source 1..17: mol_type = other DNA
ggtcacgctagggcacc

SEQ ID NO: 708 - DNA, 17 bp, synthetic construct
  misc_feature 1..17: note = Oligonucleotide
  source 1..17: mol_type = other DNA
ggtggtcacgctagggc

SEQ ID NO: 709 - DNA, 17 bp, synthetic construct
  misc_feature 1..17: note = Oligonucleotide
  source 1..17: mol_type = other DNA
ggaggtggtcacgctag

SEQ ID NO: 710 - DNA, 17 bp, synthetic construct
  misc_feature 1..17: note = Oligonucleotide
  source 1..17: mol_type = other DNA
gaaggaggtggtcacgc

SEQ ID NO: 711 - DNA, 17 bp, synthetic construct
  misc_feature 1..17: note = Oligonucleotide
  source 1..17: mol_type = other DNA
tgcgaaggaggtggtca

SEQ ID NO: 712 - DNA, 17 bp, synthetic construct
  misc_feature 1..17: note = Oligonucleotide
  source 1..17: mol_type = other DNA
agctgcgaaggaggtgg

SEQ ID NO: 713 - DNA, 17 bp, synthetic construct
  misc_feature 1..17: note = Oligonucleotide
  source 1..17: mol_type = other DNA
aggagctgcgaaggagg

SEQ ID NO: 714 - DNA, 17 bp, synthetic construct
  misc_feature 1..17: note = Oligonucleotide
  source 1..17: mol_type = other DNA
accaggagctgcgaagg

SEQ ID NO: 715 - DNA, 17 bp, synthetic construct
  misc_feature 1..17: note = Oligonucleotide
  source 1..17: mol_type = other DNA
gccaccaggagctgcga

SEQ ID NO: 716 - DNA, 17 bp, synthetic construct
  misc_feature 1..17: note = Oligonucleotide
  source 1..17: mol_type = other DNA
atggccaccaggagctg

SEQ ID NO: 717 - DNA, 17 bp, synthetic construct
  misc_feature 1..17: note = Oligonucleotide
  source 1..17: mol_type = other DNA
agaatggccaccaggag

SEQ ID NO: 718 - DNA, 17 bp, synthetic construct
  misc_feature 1..17: note = Oligonucleotide
  source 1..17: mol_type = other DNA
gggagaatggccaccag

SEQ ID NO: 719 - DNA, 17 bp, synthetic construct
  misc_feature 1..17: note = Oligonucleotide
  source 1..17: mol_type = other DNA
tctgggagaatggccac

SEQ ID NO: 720 - DNA, 17 bp, synthetic construct
  misc_feature 1..17: note = Oligonucleotide
  source 1..17: mol_type = other DNA
ccctctgggagaatggc

SEQ ID NO: 721 - DNA, 17 bp, synthetic construct
  misc_feature 1..17: note = Oligonucleotide
  source 1..17: mol_type = other DNA
tccccctctgggagaat

SEQ ID NO: 722 - DNA, 17 bp, synthetic construct
  misc_feature 1..17: note = Oligonucleotide
  source 1..17: mol_type = other DNA
ggttccccctctgggag

SEQ ID NO: 723 - DNA, 17 bp, synthetic construct
  misc_feature 1..17: note = Oligonucleotide
  source 1..17: mol_type = other DNA
ctaggttccccctctgg

SEQ ID NO: 724 - DNA, 17 bp, synthetic construct
  misc_feature 1..17: note = Oligonucleotide
  source 1..17: mol_type = other DNA
ggactaggttccccctc

SEQ ID NO: 725 - DNA, 17 bp, synthetic construct
  misc_feature 1..17: note = Oligonucleotide
  source 1..17: mol_type = other DNA
gctggactaggttcccc

SEQ ID NO: 726 - DNA, 17 bp, synthetic construct
  misc_feature 1..17: note = Oligonucleotide
  source 1..17: mol_type = other DNA
catgctggactaggttc

SEQ ID NO: 727 - DNA, 17 bp, synthetic construct
  misc_feature 1..17: note = Oligonucleotide
  source 1..17: mol_type = other DNA
tcgcatgctggactagg

SEQ ID NO: 728 - DNA, 17 bp, synthetic construct
  misc_feature 1..17: note = Oligonucleotide
  source 1..17: mol_type = other DNA
acctcgcatgctggact

SEQ ID NO: 729 - DNA, 17 bp, synthetic construct
  misc_feature 1..17: note = Oligonucleotide
  source 1..17: mol_type = other DNA
ctgacctcgcatgctgg

SEQ ID NO: 730 - DNA, 17 bp, synthetic construct
  misc_feature 1..17: note = Oligonucleotide
  source 1..17: mol_type = other DNA
gtcctgacctcgcatgc

SEQ ID NO: 731 - DNA, 17 bp, synthetic construct
  misc_feature 1..17: note = Oligonucleotide
  source 1..17: mol_type = other DNA
cgggtcctgacctcgca

SEQ ID NO: 732 - DNA, 17 bp, synthetic construct
  misc_feature 1..17: note = Oligonucleotide
  source 1..17: mol_type = other DNA
aggcgggtcctgacctc

SEQ ID NO: 733 - DNA, 17 bp, synthetic construct
  misc_feature 1..17: note = Oligonucleotide
  source 1..17: mol_type = other DNA
ccaaggcgggtcctgac

SEQ ID NO: 734 - DNA, 17 bp, synthetic construct
  misc_feature 1..17: note = Oligonucleotide
  source 1..17: mol_type = other DNA
tcaccaaggcgggtcct

SEQ ID NO: 735 - DNA, 17 bp, synthetic construct
  misc_feature 1..17: note = Oligonucleotide
  source 1..17: mol_type = other DNA
gagtcaccaaggcgggt

SEQ ID NO: 736 - DNA, 17 bp, synthetic construct
  misc_feature 1..17: note = Oligonucleotide
  source 1..17: mol_type = other DNA
cccgagtcaccaaggcg

SEQ ID NO: 737 - DNA, 17 bp, synthetic construct
  misc_feature 1..17: note = Oligonucleotide
  source 1..17: mol_type = other DNA
ccccccgagtcaccaag

SEQ ID NO: 738 - DNA, 17 bp, synthetic construct
  misc_feature 1..17: note = Oligonucleotide
  source 1..17: mol_type = other DNA
cctccccccgagtcacc

SEQ ID NO: 739 - DNA, 17 bp, synthetic construct
  misc_feature 1..17: note = Oligonucleotide
  source 1..17: mol_type = other DNA
ccccctccccccgagtc

SEQ ID NO: 740 - DNA, 17 bp, synthetic construct
  misc_feature 1..17: note = Oligonucleotide
  source 1..17: mol_type = other DNA
ctcccccctccccccga

SEQ ID NO: 741 - DNA, 17 bp, synthetic construct
  misc_feature 1..17: note = Oligonucleotide
  source 1..17: mol_type = other DNA
tgtctcccccctccccc

SEQ ID NO: 742 - DNA, 17 bp, synthetic construct
  misc_feature 1..17: note = Oligonucleotide
  source 1..17: mol_type = other DNA
caatgtctcccccctcc

SEQ ID NO: 743 - DNA, 17 bp, synthetic construct
  misc_feature 1..17: note = Oligonucleotide
  source 1..17: mol_type = other DNA
tcccaatgtctcccccc

SEQ ID NO: 744 - DNA, 17 bp, synthetic construct
  misc_feature 1..17: note = Oligonucleotide
  source 1..17: mol_type = other DNA
gaatcccaatgtctccc

SEQ ID NO: 745 - DNA, 17 bp, synthetic construct
  misc_feature 1..17: note = Oligonucleotide
  source 1..17: mol_type = other DNA
cgagaatcccaatgtct

SEQ ID NO: 746 - DNA, 17 bp, synthetic construct
  misc_feature 1..17: note = Oligonucleotide
  source 1..17: mol_type = other DNA
catcgagaatcccaatg

SEQ ID NO: 747 - DNA, 17 bp, synthetic construct
  misc_feature 1..17: note = Oligonucleotide
  source 1..17: mol_type = other DNA
ccccatcgagaatccca

SEQ ID NO: 748 - DNA, 17 bp, synthetic construct
  misc_feature 1..17: note = Oligonucleotide
  source 1..17: mol_type = other DNA
ggcccccatcgagaatc

SEQ ID NO: 749 - DNA, 17 bp, synthetic construct
  misc_feature 1..17: note = Oligonucleotide
  source 1..17: mol_type = other DNA
cttggcccccatcgaga

SEQ ID NO: 750 - DNA, 17 bp, synthetic construct
  misc_feature 1..17: note = Oligonucleotide
  source 1..17: mol_type = other DNA
ctccttggcccccatcg

SEQ ID NO: 751 - DNA, 17 bp, synthetic construct
  misc_feature 1..17: note = Oligonucleotide
  source 1..17: mol_type = other DNA
gggctccttggccccca

SEQ ID NO: 752 - DNA, 17 bp, synthetic construct
  misc_feature 1..17: note = Oligonucleotide
  source 1..17: mol_type = other DNA
ggggggctccttggccc

SEQ ID NO: 753 - DNA, 17 bp, synthetic construct
  misc_feature 1..17: note = Oligonucleotide
  source 1..17: mol_type = other DNA
acaggggggctccttgg

SEQ ID NO: 754 - DNA, 17 bp, synthetic construct
  misc_feature 1..17: note = Oligonucleotide
  source 1..17: mol_type = other DNA
aaaacaggggggctcct

SEQ ID NO: 755 - DNA, 17 bp, synthetic construct
  misc_feature 1..17: note = Oligonucleotide
  source 1..17: mol_type = other DNA
tgcaaaacaggggggct

SEQ ID NO: 756 - DNA, 17 bp, synthetic construct
  misc_feature 1..17: note = Oligonucleotide
  source 1..17: mol_type = other DNA
atatgcaaaacaggggg

SEQ ID NO: 757 - DNA, 17 bp, synthetic construct
  misc_feature 1..17: note = Oligonucleotide
  source 1..17: mol_type = other DNA
aaaatatgcaaaacagg

SEQ ID NO: 758 - DNA, 17 bp, synthetic construct
  misc_feature 1..17: note = Oligonucleotide
  source 1..17: mol_type = other DNA
attaaaatatgcaaaac

SEQ ID NO: 759 - DNA, 17 bp, synthetic construct
  misc_feature 1..17: note = Oligonucleotide
  source 1..17: mol_type = other DNA
tggattaaaatatgcaa

SEQ ID NO: 760 - DNA, 17 bp, synthetic construct
  misc_feature 1..17: note = Oligonucleotide
  source 1..17: mol_type = other DNA
gagtggattaaaatatg

SEQ ID NO: 761 - DNA, 17 bp, synthetic construct
  misc_feature 1..17: note = Oligonucleotide
  source 1..17: mol_type = other DNA
atagagtggattaaaat

SEQ ID NO: 762 - DNA, 17 bp, synthetic construct
  misc_feature 1..17: note = Oligonucleotide
  source 1..17: mol_type = other DNA
aatatagagtggattaa

SEQ ID NO: 763 - DNA, 17 bp, synthetic construct
  misc_feature 1..17: note = Oligonucleotide
  source 1..17: mol_type = other DNA
ccaaatatagagtggat

SEQ ID NO: 764 - DNA, 17 bp, synthetic construct
  misc_feature 1..17: note = Oligonucleotide
  source 1..17: mol_type = other DNA
gttccaaatatagagtg

SEQ ID NO: 765 - DNA, 17 bp, synthetic construct
  misc_feature 1..17: note = Oligonucleotide
  source 1..17: mol_type = other DNA
ctcgttccaaatataga

SEQ ID NO: 766 - DNA, 17 bp, synthetic construct
  misc_feature 1..17: note = Oligonucleotide
  source 1..17: mol_type = other DNA
tttctcgttccaaatat

SEQ ID NO: 767 - DNA, 17 bp, synthetic construct
  misc_feature 1..17: note = Oligonucleotide
  source 1..17: mol_type = other DNA
ccttttctcgttccaaa

SEQ ID NO: 768 - DNA, 17 bp, synthetic construct
  misc_feature 1..17: note = Oligonucleotide
  source 1..17: mol_type = other DNA
gttccttttctcgttcc

SEQ ID NO: 769 - DNA, 17 bp, synthetic construct
  misc_feature 1..17: note = Oligonucleotide
  source 1..17: mol_type = other DNA
tttgttccttttctcgt

SEQ ID NO: 770 - DNA, 17 bp, synthetic construct
  misc_feature 1..17: note = Oligonucleotide
  source 1..17: mol_type = other DNA
atatttgttccttttct

SEQ ID NO: 771 - DNA, 17 bp, synthetic construct
  misc_feature 1..17: note = Oligonucleotide
  source 1..17: mol_type = other DNA
gagatatttgttccttt

SEQ ID NO: 772 - DNA, 17 bp, synthetic construct
  misc_feature 1..17: note = Oligonucleotide
  source 1..17: mol_type = other DNA
acagagatatttgttcc

SEQ ID NO: 773 - DNA, 17 bp, synthetic construct
  misc_feature 1..17: note = Oligonucleotide
  source 1..17: mol_type = other DNA
cggacagagatatttgt

SEQ ID NO: 774 - DNA, 17 bp, synthetic construct
  misc_feature 1..17: note = Oligonucleotide
  source 1..17: mol_type = other DNA
ttacggacagagatatt

SEQ ID NO: 775 - DNA, 17 bp, synthetic construct
  misc_feature 1..17: note = Oligonucleotide
  source 1..17: mol_type = other DNA
ctattacggacagagat

SEQ ID NO: 776 - DNA, 17 bp, synthetic construct
  misc_feature 1..17: note = Oligonucleotide
  source 1..17: mol_type = other DNA
aaactattacggacaga

SEQ ID NO: 777 - DNA, 17 bp, synthetic construct
  misc_feature 1..17: note = Oligonucleotide
  source 1..17: mol_type = other DNA
aggaaactattacggac

SEQ ID NO: 778 - DNA, 17 bp, synthetic construct
  misc_feature 1..17: note = Oligonucleotide
  source 1..17: mol_type = other DNA
gagaggaaactattacg

SEQ ID NO: 779 - DNA, 17 bp, synthetic construct
  misc_feature 1..17: note = Oligonucleotide
  source 1..17: mol_type = other DNA
ggggagaggaaactatt

SEQ ID NO: 780 - DNA, 17 bp, synthetic construct
  misc_feature 1..17: note = Oligonucleotide
  source 1..17: mol_type = other DNA
ggaggggagaggaaact

SEQ ID NO: 781 - DNA, 17 bp, synthetic construct
  misc_feature 1..17: note = Oligonucleotide
  source 1..17: mol_type = other DNA
aagggaggggagaggaa

SEQ ID NO: 782 - DNA, 17 bp, synthetic construct
  misc_feature 1..17: note = Oligonucleotide
  source 1..17: mol_type = other DNA
tagaagggaggggagag

SEQ ID NO: 783 - DNA, 17 bp, synthetic construct
  misc_feature 1..17: note = Oligonucleotide
  source 1..17: mol_type = other DNA
aagtagaagggagggga

SEQ ID NO: 784 - DNA, 17 bp, synthetic construct
  misc_feature 1..17: note = Oligonucleotide
  source 1..17: mol_type = other DNA
tggaagtagaagggagg

SEQ ID NO: 785 - DNA, 17 bp, synthetic construct
  misc_feature 1..17: note = Oligonucleotide
  source 1..17: mol_type = other DNA
cagtggaagtagaaggg

SEQ ID NO: 786 - DNA, 17 bp, synthetic construct
  misc_feature 1..17: note = Oligonucleotide
  source 1..17: mol_type = other DNA
gaccagtggaagtagaa

SEQ ID NO: 787 - DNA, 17 bp, synthetic construct
  misc_feature 1..17: note = Oligonucleotide
  source 1..17: mol_type = other DNA
tgggaccagtggaagta

SEQ ID NO: 788 - DNA, 17 bp, synthetic construct
  misc_feature 1..17: note = Oligonucleotide
  source 1..17: mol_type = other DNA
cagtgggaccagtggaa

SEQ ID NO: 789 - DNA, 17 bp, synthetic construct
  misc_feature 1..17: note = Oligonucleotide
  source 1..17: mol_type = other DNA
ctgcagtgggaccagtg

SEQ ID NO: 790 - DNA, 17 bp, synthetic construct
  misc_feature 1..17: note = Oligonucleotide
  source 1..17: mol_type = other DNA
cagctgcagtgggacca

SEQ ID NO: 791 - DNA, 17 bp, synthetic construct
  misc_feature 1..17: note = Oligonucleotide
  source 1..17: mol_type = other DNA
gggcagctgcagtggga

SEQ ID NO: 792 - DNA, 17 bp, synthetic construct
  misc_feature 1..17: note = Oligonucleotide
  source 1..17: mol_type = other DNA
actgggcagctgcagtg

SEQ ID NO: 793 - DNA, 17 bp, synthetic construct
  misc_feature 1..17: note = Oligonucleotide
  source 1..17: mol_type = other DNA
aagactgggcagctgca

SEQ ID NO: 794 - DNA, 17 bp, synthetic construct
  misc_feature 1..17: note = Oligonucleotide
  source 1..17: mol_type = other DNA
tggaagactgggcagct

SEQ ID NO: 795 - DNA, 17 bp, synthetic construct
  misc_feature 1..17: note = Oligonucleotide
  source 1..17: mol_type = other DNA
agatggaagactgggca

SEQ ID NO: 796 - DNA, 17 bp, synthetic construct
  misc_feature 1..17: note = Oligonucleotide
  source 1..17: mol_type = other DNA
cggagatggaagactgg

SEQ ID NO: 797 - DNA, 17 bp, synthetic construct
  misc_feature 1..17: note = Oligonucleotide
  source 1..17: mol_type = other DNA
ggccggagatggaagac

SEQ ID NO: 798 - DNA, 17 bp, synthetic construct
  misc_feature 1..17: note = Oligonucleotide
  source 1..17: mol_type = other DNA
aggggccggagatggaa

SEQ ID NO: 799 - DNA, 17 bp, synthetic construct
  misc_feature 1..17: note = Oligonucleotide
  source 1..17: mol_type = other DNA
gtgaggggccggagatg

SEQ ID NO: 800 - DNA, 17 bp, synthetic construct
  misc_feature 1..17: note = Oligonucleotide
  source 1..17: mol_type = other DNA
gcagtgaggggccggag

SEQ ID NO: 801 - DNA, 17 bp, synthetic construct
  misc_feature 1..17: note = Oligonucleotide
  source 1..17: mol_type = other DNA
gtggcagtgaggggccg

SEQ ID NO: 802 - DNA, 17 bp, synthetic construct
  misc_feature 1..17: note = Oligonucleotide
  source 1..17: mol_type = other DNA
gcagtggcagtgagggg

SEQ ID NO: 803 - DNA, 17 bp, synthetic construct
  misc_feature 1..17: note = Oligonucleotide
  source 1..17: mol_type = other DNA
gtggcagtggcagtgag

SEQ ID NO: 804 - DNA, 17 bp, synthetic construct
  misc_feature 1..17: note = Oligonucleotide
  source 1..17: mol_type = other DNA
ggggtggcagtggcagt

SEQ ID NO: 805 - DNA, 17 bp, synthetic construct
  misc_feature 1..17: note = Oligonucleotide
  source 1..17: mol_type = other DNA
tgtggggtggcagtggc

SEQ ID NO: 806 - DNA, 17 bp, synthetic construct
  misc_feature 1..17: note = Oligonucleotide
  source 1..17: mol_type = other DNA
cgttgtggggtggcagt

SEQ ID NO: 807 - DNA, 17 bp, synthetic construct
  misc_feature 1..17: note = Oligonucleotide
  source 1..17: mol_type = other DNA
ccccgttgtggggtggc

SEQ ID NO: 808 - DNA, 17 bp, synthetic construct
  misc_feature 1..17: note = Oligonucleotide
  source 1..17: mol_type = other DNA
ctgccccgttgtggggt

SEQ ID NO: 809 - DNA, 17 bp, synthetic construct
  misc_feature 1..17: note = Oligonucleotide
  source 1..17: mol_type = other DNA
cccctgccccgttgtgg

SEQ ID NO: 810 - DNA, 17 bp, synthetic construct
  misc_feature 1..17: note = Oligonucleotide
  source 1..17: mol_type = other DNA
cgtcccctgccccgttg

SEQ ID NO: 811 - DNA, 17 bp, synthetic construct
  misc_feature 1..17: note = Oligonucleotide
  source 1..17: mol_type = other DNA
gagcgtcccctgccccg

SEQ ID NO: 812 - DNA, 17 bp, synthetic construct
  misc_feature 1..17: note = Oligonucleotide
  source 1..17: mol_type = other DNA
ctggagcgtcccctgcc

SEQ ID NO: 813 - DNA, 17 bp, synthetic construct
  misc_feature 1..17: note = Oligonucleotide
  source 1..17: mol_type = other DNA
cagctggagcgtcccct

SEQ ID NO: 814 - DNA, 17 bp, synthetic construct
  misc_feature 1..17: note = Oligonucleotide
  source 1..17: mol_type = other DNA
gaccagctggagcgtcc

SEQ ID NO: 815 - DNA, 17 bp, synthetic construct
  misc_feature 1..17: note = Oligonucleotide
  source 1..17: mol_type = other DNA
ccagaccagctggagcg

SEQ ID NO: 816 - DNA, 17 bp, synthetic construct
  misc_feature 1..17: note = Oligonucleotide
  source 1..17: mol_type = other DNA
accccagaccagctgga

SEQ ID NO: 817 - DNA, 17 bp, synthetic construct
  misc_feature 1..17: note = Oligonucleotide
  source 1..17: mol_type = other DNA
ccaaccccagaccagct

SEQ ID NO: 818 - DNA, 17 bp, synthetic construct
  misc_feature 1..17: note = Oligonucleotide
  source 1..17: mol_type = other DNA
tggccaaccccagacca

SEQ ID NO: 819 - DNA, 17 bp, synthetic construct
  misc_feature 1..17: note = Oligonucleotide
  source 1..17: mol_type = other DNA
ccctggccaaccccaga

SEQ ID NO: 820 - DNA, 17 bp, synthetic construct
  misc_feature 1..17: note = Oligonucleotide
  source 1..17: mol_type = other DNA
gggccctggccaacccc

SEQ ID NO: 821 - DNA, 17 bp, synthetic construct
  misc_feature 1..17: note = Oligonucleotide
  source 1..17: mol_type = other DNA
ctagggccctggccaac

SEQ ID NO: 822 - DNA, 17 bp, synthetic construct
  misc_feature 1..17: note = Oligonucleotide
  source 1..17: mol_type = other DNA
ccactagggccctggcc

SEQ ID NO: 823 - DNA, 17 bp, synthetic construct
  misc_feature 1..17: note = Oligonucleotide
  source 1..17: mol_type = other DNA
gggccactagggccctg

SEQ ID NO: 824 - DNA, 17 bp, synthetic construct
  misc_feature 1..17: note = Oligonucleotide
  source 1..17: mol_type = other DNA
ggcgggccactagggcc

SEQ ID NO: 825 - DNA, 17 bp, synthetic construct
  misc_feature 1..17: note = Oligonucleotide
  source 1..17: mol_type = other DNA
cagggcgggccactagg

SEQ ID NO: 826 - DNA, 17 bp, synthetic construct
  misc_feature 1..17: note = Oligonucleotide
  source 1..17: mol_type = other DNA
ccccagggcgggccact

SEQ ID NO: 827 - DNA, 17 bp, synthetic construct
  misc_feature 1..17: note = Oligonucleotide
  source 1..17: mol_type = other DNA
gggccccagggcgggcc

SEQ ID NO: 828 - DNA, 17 bp, synthetic construct
  misc_feature 1..17: note = Oligonucleotide
  source 1..17: mol_type = other DNA
ctggggccccagggcgg

SEQ ID NO: 829 - DNA, 17 bp, synthetic construct
  misc_feature 1..17: note = Oligonucleotide
  source 1..17: mol_type = other DNA
gagctggggccccaggg

SEQ ID NO: 830 - DNA, 17 bp, synthetic construct
  misc_feature 1..17: note = Oligonucleotide
  source 1..17: mol_type = other DNA
gccgagctggggcccca

SEQ ID NO: 831 - DNA, 17 bp, synthetic construct
  misc_feature 1..17: note = Oligonucleotide
  source 1..17: mol_type = other DNA
ggggccgagctggggcc

SEQ ID NO: 832 - DNA, 17 bp, synthetic construct
  misc_feature 1..17: note = Oligonucleotide
  source 1..17: mol_type = other DNA
cgaggggccgagctggg

SEQ ID NO: 833 - DNA, 17 bp, synthetic construct
  misc_feature 1..17: note = Oligonucleotide
  source 1..17: mol_type = other DNA
aggcgaggggccgagct

SEQ ID NO: 834 - DNA, 17 bp, synthetic construct
  misc_feature 1..17: note = Oligonucleotide
  source 1..17: mol_type = other DNA
gcgaggcgaggggccga

SEQ ID NO: 835 - DNA, 17 bp, synthetic construct
  misc_feature 1..17: note = Oligonucleotide
  source 1..17: mol_type = other DNA
tcagcgaggcgaggggc

SEQ ID NO: 836 - DNA, 17 bp, synthetic construct
  misc_feature 1..17: note = Oligonucleotide
  source 1..17: mol_type = other DNA
agctcagcgaggcgagg

SEQ ID NO: 837 - DNA, 17 bp, synthetic construct
  misc_feature 1..17: note = Oligonucleotide
  source 1..17: mol_type = other DNA
tagagctcagcgaggcg

SEQ ID NO: 838 - DNA, 17 bp, synthetic construct
  misc_feature 1..17: note = Oligonucleotide
  source 1..17: mol_type = other DNA
cactagagctcagcgag

SEQ ID NO: 839 - DNA, 17 bp, synthetic construct
  misc_feature 1..17: note = Oligonucleotide
  source 1..17: mol_type = other DNA
gcacactagagctcagc

SEQ ID NO: 840 - DNA, 17 bp, synthetic construct
  misc_feature 1..17: note = Oligonucleotide
  source 1..17: mol_type = other DNA
ggggcacactagagctc

SEQ ID NO: 841 - DNA, 17 bp, synthetic construct
  misc_feature 1..17: note = Oligonucleotide
  source 1..17: mol_type = other DNA
ggtggggcacactagag

SEQ ID NO: 842 - DNA, 17 bp, synthetic construct
  misc_feature 1..17: note = Oligonucleotide
  source 1..17: mol_type = other DNA
gtcggtggggcacacta

SEQ ID NO: 843 - DNA, 17 bp, synthetic construct
  misc_feature 1..17: note = Oligonucleotide
  source 1..17: mol_type = other DNA
agggtcggtggggcaca

SEQ ID NO: 844 - DNA, 17 bp, synthetic construct
  misc_feature 1..17: note = Oligonucleotide
  source 1..17: mol_type = other DNA
tgaagggtcggtggggc

SEQ ID NO: 845 - DNA, 17 bp, synthetic construct
  misc_feature 1..17: note = Oligonucleotide
  source 1..17: mol_type = other DNA
acctgaagggtcggtgg

SEQ ID NO: 846 - DNA, 17 bp, synthetic construct
  misc_feature 1..17: note = Oligonucleotide
  source 1..17: mol_type = other DNA
agcacctgaagggtcgg

SEQ ID NO: 847 - DNA, 17 bp, synthetic construct
  misc_feature 1..17: note = Oligonucleotide
  source 1..17: mol_type = other DNA
agcagcacctgaagggt

SEQ ID NO: 848 - DNA, 17 bp, synthetic construct
  misc_feature 1..17: note = Oligonucleotide
  source 1..17: mol_type = other DNA
acgagcagcacctgaag

SEQ ID NO: 849 - DNA, 17 bp, synthetic construct
  misc_feature 1..17: note = Oligonucleotide
  source 1..17: mol_type = other DNA
accacgagcagcacctg

SEQ ID NO: 850 - DNA, 17 bp, synthetic construct
  misc_feature 1..17: note = Oligonucleotide
  source 1..17: mol_type = other DNA
cccaccacgagcagcac

SEQ ID NO: 851 - DNA, 17 bp, synthetic construct
  misc_feature 1..17: note = Oligonucleotide
  source 1..17: mol_type = other DNA
cctcccaccacgagcag

SEQ ID NO: 852 - DNA, 17 bp, synthetic construct
  misc_feature 1..17: note = Oligonucleotide
  source 1..17: mol_type = other DNA
gcccctcccaccacgag

SEQ ID NO: 853 - DNA, 17 bp, synthetic construct
  misc_feature 1..17: note = Oligonucleotide
  source 1..17: mol_type = other DNA
gccgcccctcccaccac

SEQ ID NO: 854 - DNA, 17 bp, synthetic construct
  misc_feature 1..17: note = Oligonucleotide
  source 1..17: mol_type = other DNA
cctgccgcccctcccac

SEQ ID NO: 855 - DNA, 17 bp, synthetic construct
  misc_feature 1..17: note = Oligonucleotide
  source 1..17: mol_type = other DNA
cggcctgccgcccctcc

SEQ ID NO: 856 - DNA, 17 bp, synthetic construct
  misc_feature 1..17: note = Oligonucleotide
  source 1..17: mol_type = other DNA
ccgcggcctgccgcccc

SEQ ID NO: 857 - DNA, 17 bp, synthetic construct
  misc_feature 1..17: note = Oligonucleotide
  source 1..17: mol_type = other DNA
gacccgcggcctgccgc

SEQ ID NO: 858 - DNA, 17 bp, synthetic construct
  misc_feature 1..17: note = Oligonucleotide
  source 1..17: mol_type = other DNA
caggacccgcggcctgc

SEQ ID NO: 859 - DNA, 17 bp, synthetic construct
  misc_feature 1..17: note = Oligonucleotide
  source 1..17: mol_type = other DNA
cagcaggacccgcggcc

SEQ ID NO: 860 - DNA, 17 bp, synthetic construct
  misc_feature 1..17: note = Oligonucleotide
  source 1..17: mol_type = other DNA
gcacagcaggacccgcg

SEQ ID NO: 861 - DNA, 17 bp, synthetic construct
  misc_feature 1..17: note = Oligonucleotide
  source 1..17: mol_type = other DNA
ggtgcacagcaggaccc

SEQ ID NO: 862 - DNA, 17 bp, synthetic construct
  misc_feature 1..17: note = Oligonucleotide
  source 1..17: mol_type = other DNA
gcgggtgcacagcagga

SEQ ID NO: 863 - DNA, 17 bp, synthetic construct
  misc_feature 1..17: note = Oligonucleotide
  source 1..17: mol_type = other DNA
cccgcgggtgcacagca

SEQ ID NO: 864 - DNA, 17 bp, synthetic construct
  misc_feature 1..17: note = Oligonucleotide
  source 1..17: mol_type = other DNA
ggtcccgcgggtgcaca

SEQ ID NO: 865 - DNA, 17 bp, synthetic construct
  misc_feature 1..17: note = Oligonucleotide
  source 1..17: mol_type = other DNA
gctggtcccgcgggtgc

SEQ ID NO: 866 - DNA, 17 bp, synthetic construct
  misc_feature 1..17: note = Oligonucleotide
  source 1..17: mol_type = other DNA
ccggctggtcccgcggg

SEQ ID NO: 867 - DNA, 17 bp, synthetic construct
  misc_feature 1..17: note = Oligonucleotide
  source 1..17: mol_type = other DNA
aggccggctggtcccgc

SEQ ID NO: 868 - DNA, 17 bp, synthetic construct
  misc_feature 1..17: note = Oligonucleotide
  source 1..17: mol_type = other DNA
cccaggccggctggtcc

SEQ ID NO: 869 - DNA, 17 bp, synthetic construct
  misc_feature 1..17: note = Oligonucleotide
  source 1..17: mol_type = other DNA
tctcccaggccggctgg

SEQ ID NO: 870 - DNA, 17 bp, synthetic construct
  misc_feature 1..17: note = Oligonucleotide
  source 1..17: mol_type = other DNA
tggtctcccaggccggc

SEQ ID NO: 871 - DNA, 17 bp, synthetic construct
  misc_feature 1..17: note = Oligonucleotide
  source 1..17: mol_type = other DNA
cgatggtctcccaggcc

SEQ ID NO: 872 - DNA, 17 bp, synthetic construct
  misc_feature 1..17: note = Oligonucleotide
  source 1..17: mol_type = other DNA
ggccgatggtctcccag

SEQ ID NO: 873 - DNA, 17 bp, synthetic construct
  misc_feature 1..17: note = Oligonucleotide
  source 1..17: mol_type = other DNA
cccggccgatggtctcc

SEQ ID NO: 874 - DNA, 17 bp, synthetic construct
  misc_feature 1..17: note = Oligonucleotide
  source 1..17: mol_type = other DNA
ccccccggccgatggtc

SEQ ID NO: 875 - DNA, 17 bp, synthetic construct
  misc_feature 1..17: note = Oligonucleotide
  source 1..17: mol_type = other DNA
atcccccccggccgatg

SEQ ID NO: 876 - DNA, 17 bp, synthetic construct
  misc_feature 1..17: note = Oligonucleotide
  source 1..17: mol_type = other DNA
ctcatcccccccggccg

SEQ ID NO: 877 - DNA, 17 bp, synthetic construct
  misc_feature 1..17: note = Oligonucleotide
  source 1..17: mol_type = other DNA
gccctcatcccccccgg

SEQ ID NO: 878 - DNA, 17 bp, synthetic construct
  misc_feature 1..17: note = Oligonucleotide
  source 1..17: mol_type = other DNA
cctgccctcatcccccc

SEQ ID NO: 879 - DNA, 17 bp, synthetic construct
  misc_feature 1..17: note = Oligonucleotide
  source 1..17: mol_type = other DNA
ggccctgccctcatccc

SEQ ID NO: 880 - DNA, 17 bp, synthetic construct
  misc_feature 1..17: note = Oligonucleotide
  source 1..17: mol_type = other DNA
cagggccctgccctcat

SEQ ID NO: 881 - DNA, 17 bp, synthetic construct
  misc_feature 1..17: note = Oligonucleotide
  source 1..17: mol_type = other DNA
cggcagggccctgccct

SEQ ID NO: 882 - DNA, 17 bp, synthetic construct
  misc_feature 1..17: note = Oligonucleotide
  source 1..17: mol_type = other DNA
gagcggcagggccctgc

SEQ ID NO: 883 - DNA, 17 bp, synthetic construct
  misc_feature 1..17: note = Oligonucleotide
  source 1..17: mol_type = other DNA
gtggagcggcagggccc

SEQ ID NO: 884 - DNA, 17 bp, synthetic construct
  misc_feature 1..17: note = Oligonucleotide
  source 1..17: mol_type = other DNA
gcggtggagcggcaggg

SEQ ID NO: 885 - DNA, 17 bp, synthetic construct
  misc_feature 1..17: note = Oligonucleotide
  source 1..17: mol_type = other DNA
gctgcggtggagcggca

SEQ ID NO: 886 - DNA, 17 bp, synthetic construct
  misc_feature 1..17: note = Oligonucleotide
  source 1..17: mol_type = other DNA
atggctgcggtggagcg

SEQ ID NO: 887 - DNA, 17 bp, synthetic construct
  misc_feature 1..17: note = Oligonucleotide
  source 1..17: mol_type = other DNA
aagatggctgcggtgga

SEQ ID NO: 888 - DNA, 17 bp, synthetic construct
  misc_feature 1..17: note = Oligonucleotide
  source 1..17: mol_type = other DNA
aggaagatggctgcggt

SEQ ID NO: 889 - DNA, 17 bp, synthetic construct
  misc_feature 1..17: note = Oligonucleotide
  source 1..17: mol_type = other DNA
gtgaggaagatggctgc

SEQ ID NO: 890 - DNA, 17 bp, synthetic construct
  misc_feature 1..17: note = Oligonucleotide
  source 1..17: mol_type = other DNA
cctgtgaggaagatggc

SEQ ID NO: 891 - DNA, 17 bp, synthetic construct
  misc_feature 1..17: note = Oligonucleotide
  source 1..17: mol_type = other DNA
gaccctgtgaggaagat

SEQ ID NO: 892 - DNA, 17 bp, synthetic construct
  misc_feature 1..17: note = Oligonucleotide
  source 1..17: mol_type = other DNA
agagaccctgtgaggaa

SEQ ID NO: 893 - DNA, 17 bp, synthetic construct
  misc_feature 1..17: note = Oligonucleotide
  source 1..17: mol_type = other DNA
gggagagaccctgtgag

SEQ ID NO: 894 - DNA, 17 bp, synthetic construct
  misc_feature 1..17: note = Oligonucleotide
  source 1..17: mol_type = other DNA
ttggggagagaccctgt

SEQ ID NO: 895 - DNA, 17 bp, synthetic construct
  misc_feature 1..17: note = Oligonucleotide
  source 1..17: mol_type = other DNA
tccttggggagagaccc

SEQ ID NO: 896 - DNA, 17 bp, synthetic construct
  misc_feature 1..17: note = Oligonucleotide
  source 1..17: mol_type = other DNA
ccctccttggggagaga

SEQ ID NO: 897 - DNA, 17 bp, synthetic construct
  misc_feature 1..17: note = Oligonucleotide
  source 1..17: mol_type = other DNA
gccccctccttggggag

SEQ ID NO: 898 - DNA, 17 bp, synthetic construct
  misc_feature 1..17: note = Oligonucleotide
  source 1..17: mol_type = other DNA
ctagccccctccttggg

SEQ ID NO: 899 - DNA, 17 bp, synthetic construct
  misc_feature 1..17: note = Oligonucleotide
  source 1..17: mol_type = other DNA
aagctagccccctcctt

SEQ ID NO: 900 - DNA, 17 bp, synthetic construct
  misc_feature 1..17: note = Oligonucleotide
  source 1..17: mol_type = other DNA
accaagctagccccctc

SEQ ID NO: 901 - DNA, 17 bp, synthetic construct
  misc_feature 1..17: note = Oligonucleotide
  source 1..17: mol_type = other DNA
gggaccaagctagcccc

SEQ ID NO: 902 - DNA, 17 bp, synthetic construct
  misc_feature 1..17: note = Oligonucleotide
  source 1..17: mol_type = other DNA
atggggaccaagctagc

SEQ ID NO: 903 - DNA, 17 bp, synthetic construct
  misc_feature 1..17: note = Oligonucleotide
  source 1..17: mol_type = other DNA
agcatggggaccaagct

SEQ ID NO: 904 - DNA, 17 bp, synthetic construct
  misc_feature 1..17: note = Oligonucleotide
  source 1..17: mol_type = other DNA
aagagcatggggaccaa

SEQ ID NO: 905 - DNA, 17 bp, synthetic construct
  misc_feature 1..17: note = Oligonucleotide
  source 1..17: mol_type = other DNA
cccaagagcatggggac

SEQ ID NO: 906 - DNA, 17 bp, synthetic construct
  misc_feature 1..17: note = Oligonucleotide
  source 1..17: mol_type = other DNA
ttgcccaagagcatggg

SEQ ID NO: 907 - DNA, 17 bp, synthetic construct
  misc_feature 1..17: note = Oligonucleotide
  source 1..17: mol_type = other DNA
tagttgcccaagagcat

SEQ ID NO: 908 - DNA, 17 bp, synthetic construct
  misc_feature 1..17: note = Oligonucleotide
  source 1..17: mol_type = other DNA
ctgtagttgcccaagag

SEQ ID NO: 909 - DNA, 17 bp, synthetic construct
  misc_feature 1..17: note = Oligonucleotide
  source 1..17: mol_type = other DNA
ctgctgtagttgcccaa

SEQ ID NO: 910 - DNA, 17 bp, synthetic construct
  misc_feature 1..17: note = Oligonucleotide
  source 1..17: mol_type = other DNA
tctctgctgtagttgcc

SEQ ID NO: 911 - DNA, 17 bp, synthetic construct
  misc_feature 1..17: note = Oligonucleotide
  source 1..17: mol_type = other DNA
gcttctctgctgtagtt

SEQ ID NO: 912 - DNA, 17 bp, synthetic construct
  misc_feature 1..17: note = Oligonucleotide
  source 1..17: mol_type = other DNA
gaggcttctctgctgta

SEQ ID NO: 913 - DNA, 17 bp, synthetic construct
  misc_feature 1..17: note = Oligonucleotide
  source 1..17: mol_type = other DNA
agggaggcttctctgct

SEQ ID NO: 914 - DNA, 17 bp, synthetic construct
  misc_feature 1..17: note = Oligonucleotide
  source 1..17: mol_type = other DNA
ggcagggaggcttctct

SEQ ID NO: 915 - DNA, 17 bp, synthetic construct
  misc_feature 1..17: note = Oligonucleotide
  source 1..17: mol_type = other DNA
caaggcagggaggcttc

SEQ ID NO: 916 - DNA, 17 bp, synthetic construct
  misc_feature 1..17: note = Oligonucleotide
  source 1..17: mol_type = other DNA
gtccaaggcagggaggc

SEQ ID NO: 917 - DNA, 17 bp, synthetic construct
  misc_feature 1..17: note = Oligonucleotide
  source 1..17: mol_type = other DNA
ggggtccaaggcaggga

SEQ ID NO: 918 - DNA, 17 bp, synthetic construct
  misc_feature 1..17: note = Oligonucleotide
  source 1..17: mol_type = other DNA
tttggggtccaaggcag

SEQ ID NO: 919 - DNA, 17 bp, synthetic construct
  misc_feature 1..17: note = Oligonucleotide
  source 1..17: mol_type = other DNA
gactttggggtccaagg

SEQ ID NO: 920 - DNA, 17 bp, synthetic construct
  misc_feature 1..17: note = Oligonucleotide
  source 1..17: mol_type = other DNA
ggagactttggggtcca

SEQ ID NO: 921 - DNA, 17 bp, synthetic construct
  misc_feature 1..17: note = Oligonucleotide
  source 1..17: mol_type = other DNA
acaggagactttggggt

SEQ ID NO: 922 - DNA, 17 bp, synthetic construct
  misc_feature 1..17: note = Oligonucleotide
  source 1..17: mol_type = other DNA
aggacaggagactttgg

SEQ ID NO: 923 - DNA, 17 bp, synthetic construct
  misc_feature 1..17: note = Oligonucleotide
  source 1..17: mol_type = other DNA
ggcaggacaggagactt

SEQ ID NO: 924 - DNA, 17 bp, synthetic construct
  misc_feature 1..17: note = Oligonucleotide
  source 1..17: mol_type = other DNA
aagggcaggacaggaga

SEQ ID NO: 925 - DNA, 17 bp, synthetic construct
  misc_feature 1..17: note = Oligonucleotide
  source 1..17: mol_type = other DNA
ataaagggcaggacagg

SEQ ID NO: 926 - DNA, 17 bp, synthetic construct
  misc_feature 1..17: note = Oligonucleotide
  source 1..17: mol_type = other DNA
cacataaagggcaggac

SEQ ID NO: 927 - DNA, 17 bp, synthetic construct
  misc_feature 1..17: note = Oligonucleotide
  source 1..17: mol_type = other DNA
acacacataaagggcag

SEQ ID NO: 928 - DNA, 17 bp, synthetic construct
  misc_feature 1..17: note = Oligonucleotide
  source 1..17: mol_type = other DNA
cccacacacataaaggg

SEQ ID NO: 929 - DNA, 17 bp, synthetic construct
  misc_feature 1..17: note = Oligonucleotide
  source 1..17: mol_type = other DNA
tcacccacacacataaa

SEQ ID NO: 930 - DNA, 17 bp, synthetic construct
  misc_feature 1..17: note = Oligonucleotide
  source 1..17: mol_type = other DNA
gtttcacccacacacat

SEQ ID NO: 931 - DNA, 17 bp, synthetic construct
  misc_feature 1..17: note = Oligonucleotide
  source 1..17: mol_type = other DNA
ccagtttcacccacaca

SEQ ID NO: 932 - DNA, 17 bp, synthetic construct
  misc_feature 1..17: note = Oligonucleotide
  source 1..17: mol_type = other DNA
cacccagtttcacccac

SEQ ID NO: 933 - DNA, 17 bp, synthetic construct
  misc_feature 1..17: note = Oligonucleotide
  source 1..17: mol_type = other DNA
acgcacccagtttcacc

SEQ ID NO: 934 - DNA, 17 bp, synthetic construct
  misc_feature 1..17: note = Oligonucleotide
  source 1..17: mol_type = other DNA
cagacgcacccagtttc

SEQ ID NO: 935 - DNA, 17 bp, synthetic construct
  misc_feature 1..17: note = Oligonucleotide
  source 1..17: mol_type = other DNA
gctcagacgcacccagt

SEQ ID NO: 936 - DNA, 17 bp, synthetic construct
  misc_feature 1..17: note = Oligonucleotide
  source 1..17: mol_type = other DNA
cgtgctcagacgcaccc

SEQ ID NO: 937 - DNA, 17 bp, synthetic construct
  misc_feature 1..17: note = Oligonucleotide
  source 1..17: mol_type = other DNA
ccacgtgctcagacgca

SEQ ID NO: 938 - DNA, 17 bp, synthetic construct
  misc_feature 1..17: note = Oligonucleotide
  source 1..17: mol_type = other DNA
ctcccacgtgctcagac

SEQ ID NO: 939 - DNA, 17 bp, synthetic construct
  misc_feature 1..17: note = Oligonucleotide
  source 1..17: mol_type = other DNA
cggctcccacgtgctca

SEQ ID NO: 940 - DNA, 17 bp, synthetic construct
  misc_feature 1..17: note = Oligonucleotide
  source 1..17: mol_type = other DNA
acacggctcccacgtgc

SEQ ID NO: 941 - DNA, 17 bp, synthetic construct
  misc_feature 1..17: note = Oligonucleotide
  source 1..17: mol_type = other DNA
cacacacggctcccacg

SEQ ID NO: 942 - DNA, 17 bp, synthetic construct
  misc_feature 1..17: note = Oligonucleotide
  source 1..17: mol_type = other DNA
gcacacacacggctccc

SEQ ID NO: 943 - DNA, 17 bp, synthetic construct
  misc_feature 1..17: note = Oligonucleotide
  source 1..17: mol_type = other DNA
caggcacacacacggct

SEQ ID NO: 944 - DNA, 17 bp, synthetic construct
  misc_feature 1..17: note = Oligonucleotide
  source 1..17: mol_type = other DNA
aatcaggcacacacacg

SEQ ID NO: 945 - DNA, 17 bp, synthetic construct
  misc_feature 1..17: note = Oligonucleotide
  source 1..17: mol_type = other DNA
agtaatcaggcacacac

SEQ ID NO: 946 - DNA, 17 bp, synthetic construct
  misc_feature 1..17: note = Oligonucleotide
  source 1..17: mol_type = other DNA
ctcagtaatcaggcaca

SEQ ID NO: 947 - DNA, 17 bp, synthetic construct
  misc_feature 1..17: note = Oligonucleotide
  source 1..17: mol_type = other DNA
ccactcagtaatcaggc

SEQ ID NO: 948 - DNA, 17 bp, synthetic construct
  misc_feature 1..17: note = Oligonucleotide
  source 1..17: mol_type = other DNA
tggccactcagtaatca

SEQ ID NO: 949 - DNA, 17 bp, synthetic construct
  misc_feature 1..17: note = Oligonucleotide
  source 1..17: mol_type = other DNA
tggtggccactcagtaa

SEQ ID NO: 950 - DNA, 17 bp, synthetic construct
  misc_feature 1..17: note = Oligonucleotide
  source 1..17: mol_type = other DNA
ccctggtggccactcag

SEQ ID NO: 951 - DNA, 17 bp, synthetic construct
  misc_feature 1..17: note = Oligonucleotide
  source 1..17: mol_type = other DNA
ggcccctggtggccact

SEQ ID NO: 952 - DNA, 17 bp, synthetic construct
  misc_feature 1..17: note = Oligonucleotide
  source 1..17: mol_type = other DNA
agcggcccctggtggcc

SEQ ID NO: 953 - DNA, 17 bp, synthetic construct
  misc_feature 1..17: note = Oligonucleotide
  source 1..17: mol_type = other DNA
cagagcggcccctggtg

SEQ ID NO: 954 - DNA, 17 bp, synthetic construct
  misc_feature 1..17: note = Oligonucleotide
  source 1..17: mol_type = other DNA
gtccagagcggcccctg

SEQ ID NO: 955 - DNA, 17 bp, synthetic construct
  misc_feature 1..17: note = Oligonucleotide
  source 1..17: mol_type = other DNA
ctagtccagagcggccc

SEQ ID NO: 956 - DNA, 17 bp, synthetic construct
  misc_feature 1..17: note = Oligonucleotide
  source 1..17: mol_type = other DNA
gcgctagtccagagcgg

SEQ ID NO: 957 - DNA, 17 bp, synthetic construct
  misc_feature 1..17: note = Oligonucleotide
  source 1..17: mol_type = other DNA
cccgcgctagtccagag

SEQ ID NO: 958 - DNA, 17 bp, synthetic construct
  misc_feature 1..17: note = Oligonucleotide
  source 1..17: mol_type = other DNA
ggccccgcgctagtcca

SEQ ID NO: 959 - DNA, 17 bp, synthetic construct
  misc_feature 1..17: note = Oligonucleotide
  source 1..17: mol_type = other DNA
cacggccccgcgctagt

SEQ ID NO: 960 - DNA, 17 bp, synthetic construct
  misc_feature 1..17: note = Oligonucleotide
  source 1..17: mol_type = other DNA
ctccacggccccgcgct

SEQ ID NO: 961 - DNA, 17 bp, synthetic construct
  misc_feature 1..17: note = Oligonucleotide
  source 1..17: mol_type = other DNA
cgcctccacggccccgc

SEQ ID NO: 962 - DNA, 17 bp, synthetic construct
  misc_feature 1..17: note = Oligonucleotide
  source 1..17: mol_type = other DNA
gcacgcctccacggccc

SEQ ID NO: 963 - DNA, 17 bp, synthetic construct
  misc_feature 1..17: note = Oligonucleotide
  source 1..17: mol_type = other DNA
ggtgcacgcctccacgg

SEQ ID NO: 964 - DNA, 17 bp, synthetic construct
  misc_feature 1..17: note = Oligonucleotide
  source 1..17: mol_type = other DNA
cacggtgcacgcctcca

SEQ ID NO: 965 - DNA, 17 bp, synthetic construct
  misc_feature 1..17: note = Oligonucleotide
  source 1..17: mol_type = other DNA
gcacacggtgcacgcct

SEQ ID NO: 966 - DNA, 17 bp, synthetic construct
  misc_feature 1..17: note = Oligonucleotide
  source 1..17: mol_type = other DNA
catgcacacggtgcacg

SEQ ID NO: 967 - DNA, 17 bp, synthetic construct
  misc_feature 1..17: note = Oligonucleotide
  source 1..17: mol_type = other DNA
acgcatgcacacggtgc

SEQ ID NO: 968 - DNA, 17 bp, synthetic construct
  misc_feature 1..17: note = Oligonucleotide
  source 1..17: mol_type = other DNA
cccacgcatgcacacgg

SEQ ID NO: 969 - DNA, 17 bp, synthetic construct
  misc_feature 1..17: note = Oligonucleotide
  source 1..17: mol_type = other DNA
caccccacgcatgcaca

SEQ ID NO: 970 - DNA, 17 bp, synthetic construct
  misc_feature 1..17: note = Oligonucleotide
  source 1..17: mol_type = other DNA
gtacaccccacgcatgc

SEQ ID NO: 971 - DNA, 17 bp, synthetic construct
  misc_feature 1..17: note = Oligonucleotide
  source 1..17: mol_type = other DNA
caggtacaccccacgca

SEQ ID NO: 972 - DNA, 17 bp, synthetic construct
  misc_feature 1..17: note = Oligonucleotide
  source 1..17: mol_type = other DNA
tcacaggtacaccccac

SEQ ID NO: 973 - DNA, 17 bp, synthetic construct
  misc_feature 1..17: note = Oligonucleotide
  source 1..17: mol_type = other DNA
ctctcacaggtacaccc

SEQ ID NO: 974 - DNA, 17 bp, synthetic construct
  misc_feature 1..17: note = Oligonucleotide
  source 1..17: mol_type = other DNA
gtgctctcacaggtaca

SEQ ID NO: 975 - DNA, 17 bp, synthetic construct
  misc_feature 1..17: note = Oligonucleotide
  source 1..17: mol_type = other DNA
agggtgctctcacaggt

SEQ ID NO: 976 - DNA, 17 bp, synthetic construct
  misc_feature 1..17: note = Oligonucleotide
  source 1..17: mol_type = other DNA
gacagggtgctctcaca

SEQ ID NO: 977 - DNA, 17 bp, synthetic construct
  misc_feature 1..17: note = Oligonucleotide
  source 1..17: mol_type = other DNA
ggagacagggtgctctc

SEQ ID NO: 978 - DNA, 17 bp, synthetic construct
  misc_feature 1..17: note = Oligonucleotide
  source 1..17: mol_type = other DNA
agaggagacagggtgct

SEQ ID NO: 979 - DNA, 17 bp, synthetic construct
  misc_feature 1..17: note = Oligonucleotide
  source 1..17: mol_type = other DNA
ggaagaggagacagggt

SEQ ID NO: 980 - DNA, 17 bp, synthetic construct
  misc_feature 1..17: note = Oligonucleotide
  source 1..17: mol_type = other DNA
tttggaagaggagacag

SEQ ID NO: 981 - DNA, 17 bp, synthetic construct
  misc_feature 1..17: note = Oligonucleotide
  source 1..17: mol_type = other DNA
ttctttggaagaggaga

SEQ ID NO: 982 - DNA, 17 bp, synthetic construct
  misc_feature 1..17: note = Oligonucleotide
  source 1..17: mol_type = other DNA
actttctttggaagagg

SEQ ID NO: 983 - DNA, 17 bp, synthetic construct
  misc_feature 1..17: note = Oligonucleotide
  source 1..17: mol_type = other DNA
ctgactttctttggaag

SEQ ID NO: 984 - DNA, 17 bp, synthetic construct
  misc_feature 1..17: note = Oligonucleotide
  source 1..17: mol_type = other DNA
cctctgactttctttgg

SEQ ID NO: 985 - DNA, 17 bp, synthetic construct
  misc_feature 1..17: note = Oligonucleotide
  source 1..17: mol_type = other DNA
tggcctctgactttctt

SEQ ID NO: 986 - DNA, 17 bp, synthetic construct
  misc_feature 1..17: note = Oligonucleotide
  source 1..17: mol_type = other DNA
ggatggcctctgacttt

SEQ ID NO: 987 - DNA, 17 bp, synthetic construct
  misc_feature 1..17: note = Oligonucleotide
  source 1..17: mol_type = other DNA
gcaggatggcctctgac

SEQ ID NO: 988 - DNA, 17 bp, synthetic construct
  misc_feature 1..17: note = Oligonucleotide
  source 1..17: mol_type = other DNA
ggtgcaggatggcctct

SEQ ID NO: 989 - DNA, 17 bp, synthetic construct
  misc_feature 1..17: note = Oligonucleotide
  source 1..17: mol_type = other DNA
cagggtgcaggatggcc

SEQ ID NO: 990 - DNA, 17 bp, synthetic construct
  misc_feature 1..17: note = Oligonucleotide
  source 1..17: mol_type = other DNA
acccagggtgcaggatg

SEQ ID NO: 991 - DNA, 17 bp, synthetic construct
  misc_feature 1..17: note = Oligonucleotide
  source 1..17: mol_type = other DNA
tggacccagggtgcagg

SEQ ID NO: 992 - DNA, 17 bp, synthetic construct
  misc_feature 1..17: note = Oligonucleotide
  source 1..17: mol_type = other DNA
agctggacccagggtgc

SEQ ID NO: 993 - DNA, 17 bp, synthetic construct
  misc_feature 1..17: note = Oligonucleotide
  source 1..17: mol_type = other DNA
aacagctggacccaggg

SEQ ID NO: 994 - DNA, 17 bp, synthetic construct
  misc_feature 1..17: note = Oligonucleotide
  source 1..17: mol_type = other DNA
gcaaacagctggaccca

SEQ ID NO: 995 - DNA, 17 bp, synthetic construct
  misc_feature 1..17: note = Oligonucleotide
  source 1..17: mol_type = other DNA
tgggcaaacagctggac

SEQ ID NO: 996 - DNA, 17 bp, synthetic construct
  misc_feature 1..17: note = Oligonucleotide
  source 1..17: mol_type = other DNA
ggctgggcaaacagctg

SEQ ID NO: 997 - DNA, 17 bp, synthetic construct
  misc_feature 1..17: note = Oligonucleotide
  source 1..17: mol_type = other DNA
acaggctgggcaaacag

SEQ ID NO: 998 - DNA, 17 bp, synthetic construct
  misc_feature 1..17: note = Oligonucleotide
  source 1..17: mol_type = other DNA
aggacaggctgggcaaa

SEQ ID NO: 999 - DNA, 17 bp, synthetic construct
  misc_feature 1..17: note = Oligonucleotide
  source 1..17: mol_type = other DNA
ggaaggacaggctgggc

SEQ ID NO: 1000 - DNA, 17 bp, synthetic construct
  misc_feature 1..17: note = Oligonucleotide
  source 1..17: mol_type = other DNA
tctggaaggacaggctg

SEQ ID NO: 1001 - DNA, 17 bp, synthetic construct
  misc_feature 1..17: note = Oligonucleotide
  source 1..17: mol_type = other DNA
ggctctggaaggacagg

SEQ ID NO: 1002 - DNA, 17 bp, synthetic construct
  misc_feature 1..17: note = Oligonucleotide
  source 1..17: mol_type = other DNA
tgaggctctggaaggac

SEQ ID NO: 1003 - DNA, 17 bp, synthetic construct
  misc_feature 1..17: note = Oligonucleotide
  source 1..17: mol_type = other DNA
gggtgaggctctggaag

SEQ ID NO: 1004 - DNA, 17 bp, synthetic construct
  misc_feature 1..17: note = Oligonucleotide
  source 1..17: mol_type = other DNA
gctgggtgaggctctgg

SEQ ID NO: 1005 - DNA, 17 bp, synthetic construct
  misc_feature 1..17: note = Oligonucleotide
  source 1..17: mol_type = other DNA
caggctgggtgaggctc

SEQ ID NO: 1006 - DNA, 17 bp, synthetic construct
  misc_feature 1..17: note = Oligonucleotide
  source 1..17: mol_type = other DNA
gctcaggctgggtgagg

SEQ ID NO: 1007 - DNA, 17 bp, synthetic construct
  misc_feature 1..17: note = Oligonucleotide
  source 1..17: mol_type = other DNA
cccgctcaggctgggtg

SEQ ID NO: 1008 - DNA, 17 bp, synthetic construct
  misc_feature 1..17: note = Oligonucleotide
  source 1..17: mol_type = other DNA
aaccccgctcaggctgg

SEQ ID NO: 1009 - DNA, 17 bp, synthetic construct
  misc_feature 1..17: note = Oligonucleotide
  source 1..17: mol_type = other DNA
gggaaccccgctcaggc

SEQ ID NO: 1010 - DNA, 17 bp, synthetic construct
  misc_feature 1..17: note = Oligonucleotide
  source 1..17: mol_type = other DNA
ccagggaaccccgctca

SEQ ID NO: 1011 - DNA, 17 bp, synthetic construct
  misc_feature 1..17: note = Oligonucleotide
  source 1..17: mol_type = other DNA
tcaccagggaaccccgc

SEQ ID NO: 1012 - DNA, 17 bp, synthetic construct
  misc_feature 1..17: note = Oligonucleotide
  source 1..17: mol_type = other DNA
gattcaccagggaaccc

SEQ ID NO: 1013 - DNA, 17 bp, synthetic construct
  misc_feature 1..17: note = Oligonucleotide
  source 1..17: mol_type = other DNA
agggattcaccagggaa

SEQ ID NO: 1014 - DNA, 17 bp, synthetic construct
  misc_feature 1..17: note = Oligonucleotide
  source 1..17: mol_type = other DNA
agcagggattcaccagg

SEQ ID NO: 1015 - DNA, 17 bp, synthetic construct
  misc_feature 1..17: note = Oligonucleotide
  source 1..17: mol_type = other DNA
agcagcagggattcacc

SEQ ID NO: 1016 - DNA, 17 bp, synthetic construct
  misc_feature 1..17: note = Oligonucleotide
  source 1..17: mol_type = other DNA
ccaagcagcagggattc

SEQ ID NO: 1017 - DNA, 17 bp, synthetic construct
  misc_feature 1..17: note = Oligonucleotide
  source 1..17: mol_type = other DNA
tccccaagcagcaggga

SEQ ID NO: 1018 - DNA, 17 bp, synthetic construct
  misc_feature 1..17: note = Oligonucleotide
  source 1..17: mol_type = other DNA
gcctccccaagcagcag

SEQ ID NO: 1019 - DNA, 17 bp, synthetic construct
  misc_feature 1..17: note = Oligonucleotide
  source 1..17: mol_type = other DNA
ggggcctccccaagcag

SEQ ID NO: 1020 - DNA, 17 bp, synthetic construct
  misc_feature 1..17: note = Oligonucleotide
  source 1..17: mol_type = other DNA
cttggggcctccccaag

SEQ ID NO: 1021 - DNA, 17 bp, synthetic construct
  misc_feature 1..17: note = Oligonucleotide
  source 1..17: mol_type = other DNA
gcccttggggcctcccc

SEQ ID NO: 1022 - DNA, 17 bp, synthetic construct
  misc_feature 1..17: note = Oligonucleotide
  source 1..17: mol_type = other DNA
ggggcccttggggcctc

SEQ ID NO: 1023 - DNA, 17 bp, synthetic construct
  misc_feature 1..17: note = Oligonucleotide
  source 1..17: mol_type = other DNA
caaggggcccttggggc

SEQ ID NO: 1024 - DNA, 17 bp, synthetic construct
  misc_feature 1..17: note = Oligonucleotide
  source 1..17: mol_type = other DNA
ctccaaggggcccttgg

SEQ ID NO: 1025 - DNA, 17 bp, synthetic construct
  misc_feature 1..17: note = Oligonucleotide
  source 1..17: mol_type = other DNA
tgcctccaaggggccct

SEQ ID NO: 1026 - DNA, 17 bp, synthetic construct
  misc_feature 1..17: note = Oligonucleotide
  source 1..17: mol_type = other DNA
cgctgcctccaaggggc

SEQ ID NO: 1027 - DNA, 17 bp, synthetic construct
  misc_feature 1..17: note = Oligonucleotide
  source 1..17: mol_type = other DNA
gggcgctgcctccaagg

SEQ ID NO: 1028 - DNA, 17 bp, synthetic construct
  misc_feature 1..17: note = Oligonucleotide
  source 1..17: mol_type = other DNA
tgggggcgctgcctcca

SEQ ID NO: 1029 - DNA, 17 bp, synthetic construct
  misc_feature 1..17: note = Oligonucleotide
  source 1..17: mol_type = other DNA
aggtgggggcgctgcct

SEQ ID NO: 1030 - DNA, 17 bp, synthetic construct
  misc_feature 1..17: note = Oligonucleotide
  source 1..17: mol_type = other DNA
ccaaggtgggggcgctg

SEQ ID NO: 1031 - DNA, 17 bp, synthetic construct
  misc_feature 1..17: note = Oligonucleotide
  source 1..17: mol_type = other DNA
agcccaaggtgggggcg

SEQ ID NO: 1032 - DNA, 17 bp, synthetic construct
  misc_feature 1..17: note = Oligonucleotide
  source 1..17: mol_type = other DNA
agaagcccaaggtgggg

SEQ ID NO: 1033 - DNA, 17 bp, synthetic construct
  misc_feature 1..17: note = Oligonucleotide
  source 1..17: mol_type = other DNA
ctcagaagcccaaggtg

SEQ ID NO: 1034 - DNA, 17 bp, synthetic construct
  misc_feature 1..17: note = Oligonucleotide
  source 1..17: mol_type = other DNA
gccctcagaagcccaag

SEQ ID NO: 1035 - DNA, 17 bp, synthetic construct
  misc_feature 1..17: note = Oligonucleotide
  source 1..17: mol_type = other DNA
gatgccctcagaagccc

SEQ ID NO: 1036 - DNA, 17 bp, synthetic construct
  misc_feature 1..17: note = Oligonucleotide
  source 1..17: mol_type = other DNA
tatgatgccctcagaag

SEQ ID NO: 1037 - DNA, 17 bp, synthetic construct
  misc_feature 1..17: note = Oligonucleotide
  source 1..17: mol_type = other DNA
ccctatgatgccctcag

SEQ ID NO: 1038 - DNA, 17 bp, synthetic construct
  misc_feature 1..17: note = Oligonucleotide
  source 1..17: mol_type = other DNA
tccccctatgatgccct

SEQ ID NO: 1039 - DNA, 17 bp, synthetic construct
  misc_feature 1..17: note = Oligonucleotide
  source 1..17: mol_type = other DNA
gggtccccctatgatgc

SEQ ID NO: 1040 - DNA, 17 bp, synthetic construct
  misc_feature 1..17: note = Oligonucleotide
  source 1..17: mol_type = other DNA
taggggtccccctatga

SEQ ID NO: 1041 - DNA, 17 bp, synthetic construct
  misc_feature 1..17: note = Oligonucleotide
  source 1..17: mol_type = other DNA
ctctaggggtcccccta

SEQ ID NO: 1042 - DNA, 17 bp, synthetic construct
  misc_feature 1..17: note = Oligonucleotide
  source 1..17: mol_type = other DNA
tgactctaggggtcccc

SEQ ID NO: 1043 - DNA, 17 bp, synthetic construct
  misc_feature 1..17: note = Oligonucleotide
  source 1..17: mol_type = other DNA
aactgactctaggggtc

SEQ ID NO: 1044 - DNA, 17 bp, synthetic construct
  misc_feature 1..17: note = Oligonucleotide
  source 1..17: mol_type = other DNA
gtgaactgactctaggg

SEQ ID NO: 1045 - DNA, 17 bp, synthetic construct
  misc_feature 1..17: note = Oligonucleotide
  source 1..17: mol_type = other DNA
gtggtgaactgactcta

SEQ ID NO: 1046 - DNA, 17 bp, synthetic construct
  misc_feature 1..17: note = Oligonucleotide
  source 1..17: mol_type = other DNA
cctgtggtgaactgact

SEQ ID NO: 1047 - DNA, 17 bp, synthetic construct
  misc_feature 1..17: note = Oligonucleotide
  source 1..17: mol_type = other DNA
gggcctgtggtgaactg

SEQ ID NO: 1048 - DNA, 17 bp, synthetic construct
  misc_feature 1..17: note = Oligonucleotide
  source 1..17: mol_type = other DNA
ccagggcctgtggtgaa

SEQ ID NO: 1049 - DNA, 17 bp, synthetic construct
  misc_feature 1..17: note = Oligonucleotide
  source 1..17: mol_type = other DNA
tccccagggcctgtggt

SEQ ID NO: 1050 - DNA, 17 bp, synthetic construct
  misc_feature 1..17: note = Oligonucleotide
  source 1..17: mol_type = other DNA
ctctccccagggcctgt

SEQ ID NO: 1051 - DNA, 17 bp, synthetic construct
  misc_feature 1..17: note = Oligonucleotide
  source 1..17: mol_type = other DNA
tgactctccccagggcc

SEQ ID NO: 1052 - DNA, 17 bp, synthetic construct
  misc_feature 1..17: note = Oligonucleotide
  source 1..17: mol_type = other DNA
ctttgactctccccagg

SEQ ID NO: 1053 - DNA, 17 bp, synthetic construct
  misc_feature 1..17: note = Oligonucleotide
  source 1..17: mol_type = other DNA
ggtctttgactctcccc

SEQ ID NO: 1054 - DNA, 17 bp, synthetic construct
  misc_feature 1..17: note = Oligonucleotide
  source 1..17: mol_type = other DNA
gggggtctttgactctc

SEQ ID NO: 1055 - DNA, 17 bp, synthetic construct
  misc_feature 1..17: note = Oligonucleotide
  source 1..17: mol_type = other DNA
ctcgggggtctttgact

SEQ ID NO: 1056 - DNA, 17 bp, synthetic construct
  misc_feature 1..17: note = Oligonucleotide
  source 1..17: mol_type = other DNA
accctcgggggtctttg

SEQ ID NO: 1057 - DNA, 17 bp, synthetic construct
  misc_feature 1..17: note = Oligonucleotide
  source 1..17: mol_type = other DNA
ggcaccctcgggggtct

SEQ ID NO: 1058 - DNA, 17 bp, synthetic construct
  misc_feature 1..17: note = Oligonucleotide
  source 1..17: mol_type = other DNA
ctgggcaccctcggggg

SEQ ID NO: 1059 - DNA, 17 bp, synthetic construct
  misc_feature 1..17: note = Oligonucleotide
  source 1..17: mol_type = other DNA
gggctgggcaccctcgg

SEQ ID NO: 1060 - DNA, 17 bp, synthetic construct
  misc_feature 1..17: note = Oligonucleotide
  source 1..17: mol_type = other DNA
ggggggctgggcaccct

SEQ ID NO: 1061 - DNA, 17 bp, synthetic construct
  misc_feature 1..17: note = Oligonucleotide
  source 1..17: mol_type = other DNA
tgtggggggctgggcac

SEQ ID NO: 1062 - DNA, 17 bp, synthetic construct
  misc_feature 1..17: note = Oligonucleotide
  source 1..17: mol_type = other DNA
cagtgtggggggctggg

SEQ ID NO: 1063 - DNA, 17 bp, synthetic construct
  misc_feature 1..17: note = Oligonucleotide
  source 1..17: mol_type = other DNA
tcacagtgtggggggct

SEQ ID NO: 1064 - DNA, 17 bp, synthetic construct
  misc_feature 1..17: note = Oligonucleotide
  source 1..17: mol_type = other DNA
gagtcacagtgtggggg

SEQ ID NO: 1065 - DNA, 17 bp, synthetic construct
  misc_feature 1..17: note = Oligonucleotide
  source 1..17: mol_type = other DNA
gaggagtcacagtgtgg

SEQ ID NO: 1066 - DNA, 17 bp, synthetic construct
  misc_feature 1..17: note = Oligonucleotide
  source 1..17: mol_type = other DNA
tgtgaggagtcacagtg

SEQ ID NO: 1067 - DNA, 17 bp, synthetic construct
  misc_feature 1..17: note = Oligonucleotide
  source 1..17: mol_type = other DNA
gagtgtgaggagtcaca

SEQ ID NO: 1068 - DNA, 17 bp, synthetic construct
  misc_feature 1..17: note = Oligonucleotide
  source 1..17: mol_type = other DNA
gctgagtgtgaggagtc

SEQ ID NO: 1069 - DNA, 17 bp, synthetic construct
  misc_feature 1..17: note = Oligonucleotide
  source 1..17: mol_type = other DNA
atcgctgagtgtgagga

SEQ ID NO: 1070 - DNA, 17 bp, synthetic construct
  misc_feature 1..17: note = Oligonucleotide
  source 1..17: mol_type = other DNA
gtcatcgctgagtgtga

SEQ ID NO: 1071 - DNA, 17 bp, synthetic construct
  misc_feature 1..17: note = Oligonucleotide
  source 1..17: mol_type = other DNA
caggtcatcgctgagtg

SEQ ID NO: 1072 - DNA, 17 bp, synthetic construct
  misc_feature 1..17: note = Oligonucleotide
  source 1..17: mol_type = other DNA
ccacaggtcatcgctga

SEQ ID NO: 1073 - DNA, 17 bp, synthetic construct
  misc_feature 1..17: note = Oligonucleotide
  source 1..17: mol_type = other DNA
accccacaggtcatcgc

SEQ ID NO: 1074 - DNA, 17 bp, synthetic construct
  misc_feature 1..17: note = Oligonucleotide
  source 1..17: mol_type = other DNA
cccaccccacaggtcat

SEQ ID NO: 1075 - DNA, 17 bp, synthetic construct
  misc_feature 1..17: note = Oligonucleotide
  source 1..17: mol_type = other DNA
ccccccaccccacaggt

SEQ ID NO: 1076 - DNA, 17 bp, synthetic construct
  misc_feature 1..17: note = Oligonucleotide
  source 1..17: mol_type = other DNA
gggccccccaccccaca

SEQ ID NO: 1077 - DNA, 17 bp, synthetic construct
  misc_feature 1..17: note = Oligonucleotide
  source 1..17: mol_type = other DNA
ccagggccccccacccc

SEQ ID NO: 1078 - DNA, 17 bp, synthetic construct
  misc_feature 1..17: note = Oligonucleotide
  source 1..17: mol_type = other DNA
gtcccagggccccccac

SEQ ID NO: 1079 - DNA, 17 bp, synthetic construct
  misc_feature 1..17: note = Oligonucleotide
  source 1..17: mol_type = other DNA
aacgtcccagggccccc

SEQ ID NO: 1080 - DNA, 17 bp, synthetic construct
  misc_feature 1..17: note = Oligonucleotide
  source 1..17: mol_type = other DNA
aaaaacgtcccagggcc

SEQ ID NO: 1081 - DNA, 17 bp, synthetic construct
  misc_feature 1..17: note = Oligonucleotide
  source 1..17: mol_type = other DNA
tttaaaaacgtcccagg

SEQ ID NO: 1082 - DNA, 17 bp, synthetic construct
  misc_feature 1..17: note = Oligonucleotide
  source 1..17: mol_type = other DNA
aggtttaaaaacgtccc

SEQ ID NO: 1083 - DNA, 17 bp, synthetic construct
  misc_feature 1..17: note = Oligonucleotide
  source 1..17: mol_type = other DNA
cctaggtttaaaaacgt

SEQ ID NO: 1084 - DNA, 17 bp, synthetic construct
  misc_feature 1..17: note = Oligonucleotide
  source 1..17: mol_type = other DNA
aaccctaggtttaaaaa

SEQ ID NO: 1085 - DNA, 17 bp, synthetic construct
  misc_feature 1..17: note = Oligonucleotide
  source 1..17: mol_type = other DNA
ccaaaccctaggtttaa

SEQ ID NO: 1086 - DNA, 17 bp, synthetic construct
  misc_feature 1..17: note = Oligonucleotide
  source 1..17: mol_type = other DNA
actccaaaccctaggtt

SEQ ID NO: 1087 - DNA, 17 bp, synthetic construct
  misc_feature 1..17: note = Oligonucleotide
  source 1..17: mol_type = other DNA
cagactccaaaccctag

SEQ ID NO: 1088 - DNA, 17 bp, synthetic construct
  misc_feature 1..17: note = Oligonucleotide
  source 1..17: mol_type = other DNA
gtccagactccaaaccc

SEQ ID NO: 1089 - DNA, 17 bp, synthetic construct
  misc_feature 1..17: note = Oligonucleotide
  source 1..17: mol_type = other DNA
ttagtccagactccaaa

SEQ ID NO: 1090 - DNA, 17 bp, synthetic construct
  misc_feature 1..17: note = Oligonucleotide
  source 1..17: mol_type = other DNA
agcttagtccagactcc

SEQ ID NO: 1091 - DNA, 17 bp, synthetic construct
  misc_feature 1..17: note = Oligonucleotide
  source 1..17: mol_type = other DNA
tggagcttagtccagac

SEQ ID NO: 1092 - DNA, 17 bp, synthetic construct
  misc_feature 1..17: note = Oligonucleotide
  source 1..17: mol_type = other DNA
ggatggagcttagtcca

SEQ ID NO: 1093 - DNA, 17 bp, synthetic construct
  misc_feature 1..17: note = Oligonucleotide
  source 1..17: mol_type = other DNA
cgtggatggagcttagt

SEQ ID NO: 1094 - DNA, 17 bp, synthetic construct
  misc_feature 1..17: note = Oligonucleotide
  source 1..17: mol_type = other DNA
tgacgtggatggagctt

SEQ ID NO: 1095 - DNA, 17 bp, synthetic construct
  misc_feature 1..17: note = Oligonucleotide
  source 1..17: mol_type = other DNA
gagtgacgtggatggag

SEQ ID NO: 1096 - DNA, 17 bp, synthetic construct
  misc_feature 1..17: note = Oligonucleotide
  source 1..17: mol_type = other DNA
tgtgagtgacgtggatg

SEQ ID NO: 1097 - DNA, 17 bp, synthetic construct
  misc_feature 1..17: note = Oligonucleotide
  source 1..17: mol_type = other DNA
acttgtgagtgacgtgg

SEQ ID NO: 1098 - DNA, 17 bp, synthetic construct
  misc_feature 1..17: note = Oligonucleotide
  source 1..17: mol_type = other DNA
gaaacttgtgagtgacg

SEQ ID NO: 1099 - DNA, 17 bp, synthetic construct
  misc_feature 1..17: note = Oligonucleotide
  source 1..17: mol_type = other DNA
acagaaacttgtgagtg

SEQ ID NO: 1100 - DNA, 17 bp, synthetic construct
  misc_feature 1..17: note = Oligonucleotide
  source 1..17: mol_type = other DNA
taaacagaaacttgtga

SEQ ID NO: 1101 - DNA, 17 bp, synthetic construct
  misc_feature 1..17: note = Oligonucleotide
  source 1..17: mol_type = other DNA
atataaacagaaacttg

SEQ ID NO: 1102 - DNA, 17 bp, synthetic construct
  misc_feature 1..17: note = Oligonucleotide
  source 1..17: mol_type = other DNA
gaaatataaacagaaac

SEQ ID NO: 1103 - DNA, 17 bp, synthetic construct
  misc_feature 1..17: note = Oligonucleotide
  source 1..17: mol_type = other DNA
ctagaaatataaacaga

SEQ ID NO: 1104 - DNA, 17 bp, synthetic construct
  misc_feature 1..17: note = Oligonucleotide
  source 1..17: mol_type = other DNA
aagctagaaatataaac

SEQ ID NO: 1105 - DNA, 17 bp, synthetic construct
  misc_feature 1..17: note = Oligonucleotide
  source 1..17: mol_type = other DNA
aaaaagctagaaatata

SEQ ID NO: 1106 - DNA, 17 bp, synthetic construct
  misc_feature 1..17: note = Oligonucleotide
  source 1..17: mol_type = other DNA
taaaaaaagctagaaat

SEQ ID NO: 1107 - DNA, 17 bp, synthetic construct
  misc_feature 1..17: note = Oligonucleotide
  source 1..17: mol_type = other DNA
tattaaaaaaagctaga

SEQ ID NO: 1108 - DNA, 17 bp, synthetic construct
  misc_feature 1..17: note = Oligonucleotide
  source 1..17: mol_type = other DNA
ttttattaaaaaaagct

SEQ ID NO: 1109 - DNA, 17 bp, synthetic construct
  misc_feature 1..17: note = Oligonucleotide
  source 1..17: mol_type = other DNA
ttattttattaaaaaaa

SEQ ID NO: 1110 - DNA, 17 bp, synthetic construct
  misc_feature 1..17: note = Oligonucleotide
  source 1..17: mol_type = other DNA
tttttattttattaaaa

SEQ ID NO: 1111 - DNA, 17 bp, synthetic construct
  misc_feature 1..17: note = Oligonucleotide
  source 1..17: mol_type = other DNA
ttttttttattttatta

SEQ ID NO: 1112 - DNA, 17 bp, synthetic construct
  misc_feature 1..17: note = Oligonucleotide
  source 1..17: mol_type = other DNA
tttttttttttatttta

SEQ ID NO: 1113 - DNA, 17 bp, synthetic construct
  misc_feature 1..17: note = Oligonucleotide
  source 1..17: mol_type = other DNA
ttctttttttttttatt

SEQ ID NO: 1114 - DNA, 17 bp, synthetic construct
  misc_feature 1..17: note = Oligonucleotide
  source 1..17: mol_type = other DNA
gttttcttttttttttt

SEQ ID NO: 1115 - DNA, 17 bp, synthetic construct
  misc_feature 1..17: note = Oligonucleotide
  source 1..17: mol_type = other DNA
tctgttttctttttttt

SEQ ID NO: 1116 - DNA, 17 bp, synthetic construct
  misc_feature 1..17: note = Oligonucleotide
  source 1..17: mol_type = other DNA
acttctgttttcttttt

SEQ ID NO: 1117 - DNA, 17 bp, synthetic construct
  misc_feature 1..17: note = Oligonucleotide
  source 1..17: mol_type = other DNA
aaaacttctgttttctt

SEQ ID NO: 1118 - DNA, 17 bp, synthetic construct
  misc_feature 1..17: note = Oligonucleotide
  source 1..17: mol_type = other DNA
gtgaaaacttctgtttt

SEQ ID NO: 1119 - DNA, 17 bp, synthetic construct
  misc_feature 1..17: note = Oligonucleotide
  source 1..17: mol_type = other DNA
gttgtgaaaacttctgt

SEQ ID NO: 1120 - DNA, 17 bp, synthetic construct
  misc_feature 1..17: note = Oligonucleotide
  source 1..17: mol_type = other DNA
tgggttgtgaaaacttc

SEQ ID NO: 1121 - DNA, 17 bp, synthetic construct
  misc_feature 1..17: note = Oligonucleotide
  source 1..17: mol_type = other DNA
ccctgggttgtgaaaac

SEQ ID NO: 1122 - DNA, 17 bp, synthetic construct
  misc_feature 1..17: note = Oligonucleotide
  source 1..17: mol_type = other DNA
ggcccctgggttgtgaa

SEQ ID NO: 1123 - DNA, 17 bp, synthetic construct
  misc_feature 1..17: note = Oligonucleotide
  source 1..17: mol_type = other DNA
ccaggcccctgggttgt

SEQ ID NO: 1124 - DNA, 17 bp, synthetic construct
  misc_feature 1..17: note = Oligonucleotide
  source 1..17: mol_type = other DNA
gtgccaggcccctgggt

SEQ ID NO: 1125 - DNA, 17 bp, synthetic construct
  misc_feature 1..17: note = Oligonucleotide
  source 1..17: mol_type = other DNA
ggcgtgccaggcccctg

SEQ ID NO: 1126 - DNA, 17 bp, synthetic construct
  misc_feature 1..17: note = Oligonucleotide
  source 1..17: mol_type = other DNA
accggcgtgccaggccc

SEQ ID NO: 1127 - DNA, 17 bp, synthetic construct
  misc_feature 1..17: note = Oligonucleotide
  source 1..17: mol_type = other DNA
cagaccggcgtgccagg

SEQ ID NO: 1128 - DNA, 17 bp, synthetic construct
  misc_feature 1..17: note = Oligonucleotide
  source 1..17: mol_type = other DNA
gcacagaccggcgtgcc

SEQ ID NO: 1129 - DNA, 17 bp, synthetic construct
  misc_feature 1..17: note = Oligonucleotide
  source 1..17: mol_type = other DNA
caggcacagaccggcgt

SEQ ID NO: 1130 - DNA, 17 bp, synthetic construct
  misc_feature 1..17: note = Oligonucleotide
  source 1..17: mol_type = other DNA
gggcaggcacagaccgg

SEQ ID NO: 1131 - DNA, 17 bp, synthetic construct
  misc_feature 1..17: note = Oligonucleotide
  source 1..17: mol_type = other DNA
ggcgggcaggcacagac

SEQ ID NO: 1132 - DNA, 17 bp, synthetic construct
  misc_feature 1..17: note = Oligonucleotide
  source 1..17: mol_type = other DNA
cggggcgggcaggcaca

SEQ ID NO: 1133 - DNA, 17 bp, synthetic construct
  misc_feature 1..17: note = Oligonucleotide
  source 1..17: mol_type = other DNA
gggcggggcgggcaggc

SEQ ID NO: 1134 - DNA, 17 bp, synthetic construct
  misc_feature 1..17: note = Oligonucleotide
  source 1..17: mol_type = other DNA
ccagggcggggcgggca

SEQ ID NO: 1135 - DNA, 17 bp, synthetic construct
  misc_feature 1..17: note = Oligonucleotide
  source 1..17: mol_type = other DNA
gggccagggcggggcgg

SEQ ID NO: 1136 - DNA, 17 bp, synthetic construct
  misc_feature 1..17: note = Oligonucleotide
  source 1..17: mol_type = other DNA
ggtgggccagggcgggg

SEQ ID NO: 1137 - DNA, 17 bp, synthetic construct
  misc_feature 1..17: note = Oligonucleotide
  source 1..17: mol_type = other DNA
gccggtgggccagggcg

SEQ ID NO: 1138 - DNA, 17 bp, synthetic construct
  misc_feature 1..17: note = Oligonucleotide
  source 1..17: mol_type = other DNA
ggggccggtgggccagg

SEQ ID NO: 1139 - DNA, 17 bp, synthetic construct
  misc_feature 1..17: note = Oligonucleotide
  source 1..17: mol_type = other DNA
agtggggccggtgggcc

SEQ ID NO: 1140 - DNA, 17 bp, synthetic construct
  misc_feature 1..17: note = Oligonucleotide
  source 1..17: mol_type = other DNA
gggagtggggccggtgg

SEQ ID NO: 1141 - DNA, 17 bp, synthetic construct
  misc_feature 1..17: note = Oligonucleotide
  source 1..17: mol_type = other DNA
ccagggagtggggccgg

SEQ ID NO: 1142 - DNA, 17 bp, synthetic construct
  misc_feature 1..17: note = Oligonucleotide
  source 1..17: mol_type = other DNA
tgcccagggagtggggc

SEQ ID NO: 1143 - DNA, 17 bp, synthetic construct
  misc_feature 1..17: note = Oligonucleotide
  source 1..17: mol_type = other DNA
ctgtgcccagggagtgg

SEQ ID NO: 1144 - DNA, 17 bp, synthetic construct
  misc_feature 1..17: note = Oligonucleotide
  source 1..17: mol_type = other DNA
actctgtgcccagggag

SEQ ID NO: 1145 - DNA, 17 bp, synthetic construct
  misc_feature 1..17: note = Oligonucleotide
  source 1..17: mol_type = other DNA
gtgactctgtgcccagg

SEQ ID NO: 1146 - DNA, 17 bp, synthetic construct
  misc_feature 1..17: note = Oligonucleotide
  source 1..17: mol_type = other DNA
ggtgtgactctgtgccc

SEQ ID NO: 1147 - DNA, 17 bp, synthetic construct
  misc_feature 1..17: note = Oligonucleotide
  source 1..17: mol_type = other DNA
gtgggtgtgactctgtg

SEQ ID NO: 1148 - DNA, 17 bp, synthetic construct
  misc_feature 1..17: note = Oligonucleotide
  source 1..17: mol_type = other DNA
tgagtgggtgtgactct

SEQ ID NO: 1149 - DNA, 17 bp, synthetic construct
  misc_feature 1..17: note = Oligonucleotide
  source 1..17: mol_type = other DNA
ggatgagtgggtgtgac

SEQ ID NO: 1150 - DNA, 17 bp, synthetic construct
  misc_feature 1..17: note = Oligonucleotide
  source 1..17: mol_type = other DNA
gaaggatgagtgggtgt

SEQ ID NO: 1151 - DNA, 17 bp, synthetic construct
  misc_feature 1..17: note = Oligonucleotide
  source 1..17: mol_type = other DNA
gcggaaggatgagtggg

SEQ ID NO: 1152 - DNA, 17 bp, synthetic construct
  misc_feature 1..17: note = Oligonucleotide
  source 1..17: mol_type = other DNA
ttggcggaaggatgagt

SEQ ID NO: 1153 - DNA, 17 bp, synthetic construct
  misc_feature 1..17: note = Oligonucleotide
  source 1..17: mol_type = other DNA
ctgttggcggaaggatg

SEQ ID NO: 1154 - DNA, 17 bp, synthetic construct
  misc_feature 1..17: note = Oligonucleotide
  source 1..17: mol_type = other DNA
ggactgttggcggaagg

SEQ ID NO: 1155 - DNA, 17 bp, synthetic construct
  misc_feature 1..17: note = Oligonucleotide
  source 1..17: mol_type = other DNA
cctggactgttggcgga

SEQ ID NO: 1156 - DNA, 17 bp, synthetic construct
  misc_feature 1..17: note = Oligonucleotide
  source 1..17: mol_type = other DNA
tgacctggactgttggc

SEQ ID NO: 1157 - DNA, 17 bp, synthetic construct
  misc_feature 1..17: note = Oligonucleotide
  source 1..17: mol_type = other DNA
gtgtgacctggactgtt

SEQ ID NO: 1158 - DNA, 17 bp, synthetic construct
  misc_feature 1..17: note = Oligonucleotide
  source 1..17: mol_type = other DNA
gctgtgtgacctggact

SEQ ID NO: 1159 - DNA, 17 bp, synthetic construct
  misc_feature 1..17: note = Oligonucleotide
  source 1..17: mol_type = other DNA
gctgctgtgtgacctgg

SEQ ID NO: 1160 - DNA, 17 bp, synthetic construct
  misc_feature 1..17: note = Oligonucleotide
  source 1..17: mol_type = other DNA
actgctgctgtgtgacc

SEQ ID NO: 1161 - DNA, 17 bp, synthetic construct
  misc_feature 1..17: note = Oligonucleotide
  source 1..17: mol_type = other DNA
gtgactgctgctgtgtg

SEQ ID NO: 1162 - DNA, 17 bp, synthetic construct
  misc_feature 1..17: note = Oligonucleotide
  source 1..17: mol_type = other DNA
acagtgactgctgctgt

SEQ ID NO: 1163 - DNA, 17 bp, synthetic construct
  misc_feature 1..17: note = Oligonucleotide
  source 1..17: mol_type = other DNA
gttacagtgactgctgc

SEQ ID NO: 1164 - DNA, 17 bp, synthetic construct
  misc_feature 1..17: note = Oligonucleotide
  source 1..17: mol_type = other DNA
tctgttacagtgactgc

SEQ ID NO: 1165 - DNA, 17 bp, synthetic construct
  misc_feature 1..17: note = Oligonucleotide
  source 1..17: mol_type = other DNA
cagtctgttacagtgac

SEQ ID NO: 1166 - DNA, 17 bp, synthetic construct
  misc_feature 1..17: note = Oligonucleotide
  source 1..17: mol_type = other DNA
tggcagtctgttacagt

SEQ ID NO: 1167 - DNA, 17 bp, synthetic construct
  misc_feature 1..17: note = Oligonucleotide
  source 1..17: mol_type = other DNA
atgtggcagtctgttac

SEQ ID NO: 1168 - DNA, 17 bp, synthetic construct
  misc_feature 1..17: note = Oligonucleotide
  source 1..17: mol_type = other DNA
tgtatgtggcagtctgt

SEQ ID NO: 1169 - DNA, 17 bp, synthetic construct
  misc_feature 1..17: note = Oligonucleotide
  source 1..17: mol_type = other DNA
gtgtgtatgtggcagtc

SEQ ID NO: 1170 - DNA, 17 bp, synthetic construct
  misc_feature 1..17: note = Oligonucleotide
  source 1..17: mol_type = other DNA
cgagtgtgtatgtggca

SEQ ID NO: 1171 - DNA, 17 bp, synthetic construct
  misc_feature 1..17: note = Oligonucleotide
  source 1..17: mol_type = other DNA
gaccgagtgtgtatgtg

SEQ ID NO: 1172 - DNA, 17 bp, synthetic construct
  misc_feature 1..17: note = Oligonucleotide
  source 1..17: mol_type = other DNA
tgagaccgagtgtgtat

SEQ ID NO: 1173 - DNA, 17 bp, synthetic construct
  misc_feature 1..17: note = Oligonucleotide
  source 1..17: mol_type = other DNA
gtgtgagaccgagtgtg

SEQ ID NO: 1174 - DNA, 17 bp, synthetic construct
  misc_feature 1..17: note = Oligonucleotide
  source 1..17: mol_type = other DNA
tgagtgtgagaccgagt

SEQ ID NO: 1175 - DNA, 17 bp, synthetic construct
  misc_feature 1..17: note = Oligonucleotide
  source 1..17: mol_type = other DNA
aggtgagtgtgagaccg

SEQ ID NO: 1176 - DNA, 17 bp, synthetic construct
  misc_feature 1..17: note = Oligonucleotide
  source 1..17: mol_type = other DNA
cacaggtgagtgtgaga

SEQ ID NO: 1177 - DNA, 17 bp, synthetic construct
  misc_feature 1..17: note = Oligonucleotide
  source 1..17: mol_type = other DNA
acccacaggtgagtgtg

SEQ ID NO: 1178 - DNA, 17 bp, synthetic construct
  misc_feature 1..17: note = Oligonucleotide
  source 1..17: mol_type = other DNA
aaaacccacaggtgagt

SEQ ID NO: 1179 - DNA, 17 bp, synthetic construct
  misc_feature 1..17: note = Oligonucleotide
  source 1..17: mol_type = other DNA
accaaaacccacaggtg

SEQ ID NO: 1180 - DNA, 17 bp, synthetic construct
  misc_feature 1..17: note = Oligonucleotide
  source 1..17: mol_type = other DNA
ggaaccaaaacccacag

SEQ ID NO: 1181 - DNA, 17 bp, synthetic construct
  misc_feature 1..17: note = Oligonucleotide
  source 1..17: mol_type = other DNA
aacggaaccaaaaccca

SEQ ID NO: 1182 - DNA, 17 bp, synthetic construct
  misc_feature 1..17: note = Oligonucleotide
  source 1..17: mol_type = other DNA
ttgaacggaaccaaaac

SEQ ID NO: 1183 - DNA, 17 bp, synthetic construct
  misc_feature 1..17: note = Oligonucleotide
  source 1..17: mol_type = other DNA
aaattgaacggaaccaa

SEQ ID NO: 1184 - DNA, 17 bp, synthetic construct
  misc_feature 1..17: note = Oligonucleotide
  source 1..17: mol_type = other DNA
cccaaattgaacggaac

SEQ ID NO: 1185 - DNA, 17 bp, synthetic construct
  misc_feature 1..17: note = Oligonucleotide
  source 1..17: mol_type = other DNA
aaacccaaattgaacgg

SEQ ID NO: 1186 - DNA, 17 bp, synthetic construct
  misc_feature 1..17: note = Oligonucleotide
  source 1..17: mol_type = other DNA
taaaaacccaaattgaa

SEQ ID NO: 1187 - DNA, 17 bp, synthetic construct
  misc_feature 1..17: note = Oligonucleotide
  source 1..17: mol_type = other DNA
agttaaaaacccaaatt

SEQ ID NO: 1188 - DNA, 17 bp, synthetic construct
  misc_feature 1..17: note = Oligonucleotide
  source 1..17: mol_type = other DNA
taaagttaaaaacccaa

SEQ ID NO: 1189 - DNA, 17 bp, synthetic construct
  misc_feature 1..17: note = Oligonucleotide
  source 1..17: mol_type = other DNA
ctgtaaagttaaaaacc

SEQ ID NO: 1190 - DNA, 17 bp, synthetic construct
  misc_feature 1..17: note = Oligonucleotide
  source 1..17: mol_type = other DNA
accctgtaaagttaaaa

SEQ ID NO: 1191 - DNA, 17 bp, synthetic construct
  misc_feature 1..17: note = Oligonucleotide
  source 1..17: mol_type = other DNA
ctgaccctgtaaagtta

SEQ ID NO: 1192 - DNA, 17 bp, synthetic construct
  misc_feature 1..17: note = Oligonucleotide
  source 1..17: mol_type = other DNA
gaactgaccctgtaaag

SEQ ID NO: 1193 - DNA, 17 bp, synthetic construct
  misc_feature 1..17: note = Oligonucleotide
  source 1..17: mol_type = other DNA
gcggaactgaccctgta

SEQ ID NO: 1194 - DNA, 17 bp, synthetic construct
  misc_feature 1..17: note = Oligonucleotide
  source 1..17: mol_type = other DNA
gaagcggaactgaccct

SEQ ID NO: 1195 - DNA, 17 bp, synthetic construct
  misc_feature 1..17: note = Oligonucleotide
  source 1..17: mol_type = other DNA
ggtgaagcggaactgac

SEQ ID NO: 1196 - DNA, 17 bp, synthetic construct
  misc_feature 1..17: note = Oligonucleotide
  source 1..17: mol_type = other DNA
ggaggtgaagcggaact

SEQ ID NO: 1197 - DNA, 17 bp, synthetic construct
  misc_feature 1..17: note = Oligonucleotide
  source 1..17: mol_type = other DNA
aaaggaggtgaagcgga

SEQ ID NO: 1198 - DNA, 17 bp, synthetic construct
  misc_feature 1..17: note = Oligonucleotide
  source 1..17: mol_type = other DNA
acaaaaggaggtgaagc

SEQ ID NO: 1199 - DNA, 17 bp, synthetic construct
  misc_feature 1..17: note = Oligonucleotide
  source 1..17: mol_type = other DNA
catacaaaaggaggtga

SEQ ID NO: 1200 - DNA, 17 bp, synthetic construct
  misc_feature 1..17: note = Oligonucleotide
  source 1..17: mol_type = other DNA
ctccatacaaaaggagg

SEQ ID NO: 1201 - DNA, 17 bp, synthetic construct
  misc_feature 1..17: note = Oligonucleotide
  source 1..17: mol_type = other DNA
gaactccatacaaaagg

SEQ ID NO: 1202 - DNA, 17 bp, synthetic construct
  misc_feature 1..17: note = Oligonucleotide
  source 1..17: mol_type = other DNA
atggaactccatacaaa

SEQ ID NO: 1203 - DNA, 17 bp, synthetic construct
  misc_feature 1..17: note = Oligonucleotide
  source 1..17: mol_type = other DNA
cggatggaactccatac

SEQ ID NO: 1204 - DNA, 17 bp, synthetic construct
  misc_feature 1..17: note = Oligonucleotide
  source 1..17: mol_type = other DNA
ccccggatggaactcca

SEQ ID NO: 1205 - DNA, 17 bp, synthetic construct
  misc_feature 1..17: note = Oligonucleotide
  source 1..17: mol_type = other DNA
accccccggatggaact

SEQ ID NO: 1206 - DNA, 17 bp, synthetic construct
  misc_feature 1..17: note = Oligonucleotide
  source 1..17: mol_type = other DNA
gaaaccccccggatgga

SEQ ID NO: 1207 - DNA, 17 bp, synthetic construct
  misc_feature 1..17: note = Oligonucleotide
  source 1..17: mol_type = other DNA
ggtgaaaccccccggat

SEQ ID NO: 1208 - DNA, 17 bp, synthetic construct
  misc_feature 1..17: note = Oligonucleotide
  source 1..17: mol_type = other DNA
gggggtgaaaccccccg

SEQ ID NO: 1209 - DNA, 17 bp, synthetic construct
  misc_feature 1..17: note = Oligonucleotide
  source 1..17: mol_type = other DNA
gcagggggtgaaacccc

SEQ ID NO: 1210 - DNA, 17 bp, synthetic construct
  misc_feature 1..17: note = Oligonucleotide
  source 1..17: mol_type = other DNA
ggagcagggggtgaaac

SEQ ID NO: 1211 - DNA, 17 bp, synthetic construct
  misc_feature 1..17: note = Oligonucleotide
  source 1..17: mol_type = other DNA
actggagcagggggtga

SEQ ID NO: 1212 - DNA, 17 bp, synthetic construct
  misc_feature 1..17: note = Oligonucleotide
  source 1..17: mol_type = other DNA
aggactggagcaggggg

SEQ ID NO: 1213 - DNA, 17 bp, synthetic construct
  misc_feature 1..17: note = Oligonucleotide
  source 1..17: mol_type = other DNA
ctcaggactggagcagg

SEQ ID NO: 1214 - DNA, 17 bp, synthetic construct
  misc_feature 1..17: note = Oligonucleotide
  source 1..17: mol_type = other DNA
ggcctcaggactggagc

SEQ ID NO: 1215 - DNA, 17 bp, synthetic construct
  misc_feature 1..17: note = Oligonucleotide
  source 1..17: mol_type = other DNA
ggaggcctcaggactgg

SEQ ID NO: 1216 - DNA, 17 bp, synthetic construct
  misc_feature 1..17: note = Oligonucleotide
  source 1..17: mol_type = other DNA
tcaggaggcctcaggac

SEQ ID NO: 1217 - DNA, 17 bp, synthetic construct
  misc_feature 1..17: note = Oligonucleotide
  source 1..17: mol_type = other DNA
gggtcaggaggcctcag

SEQ ID NO: 1218 - DNA, 17 bp, synthetic construct
  misc_feature 1..17: note = Oligonucleotide
  source 1..17: mol_type = other DNA
tcagggtcaggaggcct

SEQ ID NO: 1219 - DNA, 17 bp, synthetic construct
  misc_feature 1..17: note = Oligonucleotide
  source 1..17: mol_type = other DNA
acgtcagggtcaggagg

SEQ ID NO: 1220 - DNA, 17 bp, synthetic construct
  misc_feature 1..17: note = Oligonucleotide
  source 1..17: mol_type = other DNA
acaacgtcagggtcagg

SEQ ID NO: 1221 - DNA, 17 bp, synthetic construct
  misc_feature 1..17: note = Oligonucleotide
  source 1..17: mol_type = other DNA
atcacaacgtcagggtc

SEQ ID NO: 1222 - DNA, 17 bp, synthetic construct
  misc_feature 1..17: note = Oligonucleotide
  source 1..17: mol_type = other DNA
cgtatcacaacgtcagg

SEQ ID NO: 1223 - DNA, 17 bp, synthetic construct
  misc_feature 1..17: note = Oligonucleotide
  source 1..17: mol_type = other DNA
gggcgtatcacaacgtc

SEQ ID NO: 1224 - DNA, 17 bp, synthetic construct
  misc_feature 1..17: note = Oligonucleotide
  source 1..17: mol_type = other DNA
gtggggcgtatcacaac

SEQ ID NO: 1225 - DNA, 17 bp, synthetic construct
  misc_feature 1..17: note = Oligonucleotide
  source 1..17: mol_type = other DNA
tctgtggggcgtatcac

SEQ ID NO: 1226 - DNA, 17 bp, synthetic construct
  misc_feature 1..17: note = Oligonucleotide
  source 1..17: mol_type = other DNA
atctctgtggggcgtat

SEQ ID NO: 1227 - DNA, 17 bp, synthetic construct
  misc_feature 1..17: note = Oligonucleotide
  source 1..17: mol_type = other DNA
tagatctctgtggggcg

SEQ ID NO: 1228 - DNA, 17 bp, synthetic construct
  misc_feature 1..17: note = Oligonucleotide
  source 1..17: mol_type = other DNA
acatagatctctgtggg

SEQ ID NO: 1229 - DNA, 17 bp, synthetic construct
  misc_feature 1..17: note = Oligonucleotide
  source 1..17: mol_type = other DNA
gaaacatagatctctgt

SEQ ID NO: 1230 - DNA, 17 bp, synthetic construct
  misc_feature 1..17: note = Oligonucleotide
  source 1..17: mol_type = other DNA
taagaaacatagatctc

SEQ ID NO: 1231 - DNA, 17 bp, synthetic construct
  misc_feature 1..17: note = Oligonucleotide
  source 1..17: mol_type = other DNA
atataagaaacatagat

SEQ ID NO: 1232 - DNA, 17 bp, synthetic construct
  misc_feature 1..17: note = Oligonucleotide
  source 1..17: mol_type = other DNA
ataatataagaaacata

SEQ ID NO: 1233 - DNA, 17 bp, synthetic construct
  misc_feature 1..17: note = Oligonucleotide
  source 1..17: mol_type = other DNA
ataataatataagaaac

SEQ ID NO: 1234 - DNA, 17 bp, synthetic construct
  misc_feature 1..17: note = Oligonucleotide
  source 1..17: mol_type = other DNA
ataataataatataaga

SEQ ID NO: 1235 - DNA, 17 bp, synthetic construct
  misc_feature 1..17: note = Oligonucleotide
  source 1..17: mol_type = other DNA
tcaataataataatata

SEQ ID NO: 1236 - DNA, 17 bp, synthetic construct
  misc_feature 1..17: note = Oligonucleotide
  source 1..17: mol_type = other DNA
ttatcaataataataat

SEQ ID NO: 1237 - DNA, 17 bp, synthetic construct
  misc_feature 1..17: note = Oligonucleotide
  source 1..17: mol_type = other DNA
ttattatcaataataat

SEQ ID NO: 1238 - DNA, 17 bp, synthetic construct
  misc_feature 1..17: note = Oligonucleotide
  source 1..17: mol_type = other DNA
taattattatcaataat

SEQ ID NO: 1239 - DNA, 17 bp, synthetic construct
  misc_feature 1..17: note = Oligonucleotide
  source 1..17: mol_type = other DNA
taataattattatcaat

SEQ ID NO: 1240 - DNA, 17 bp, synthetic construct
  misc_feature 1..17: note = Oligonucleotide
  source 1..17: mol_type = other DNA
ttataataattattatc

SEQ ID NO: 1241 - DNA, 17 bp, synthetic construct
  misc_feature 1..17: note = Oligonucleotide
  source 1..17: mol_type = other DNA
atattataataattatt

SEQ ID NO: 1242 - DNA, 17 bp, synthetic construct
  misc_feature 1..17: note = Oligonucleotide
  source 1..17: mol_type = other DNA
ataatattataataatt

SEQ ID NO: 1243 - DNA, 17 bp, synthetic construct
  misc_feature 1..17: note = Oligonucleotide
  source 1..17: mol_type = other DNA
ataataatattataata

SEQ ID NO: 1244 - DNA, 17 bp, synthetic construct
  misc_feature 1..17: note = Oligonucleotide
  source 1..17: mol_type = other DNA
tacataataatattata

SEQ ID NO: 1245 - DNA, 17 bp, synthetic construct
  misc_feature 1..17: note = Oligonucleotide
  source 1..17: mol_type = other DNA
tattacataataatatt

SEQ ID NO: 1246 - DNA, 17 bp, synthetic construct
  misc_feature 1..17: note = Oligonucleotide
  source 1..17: mol_type = other DNA
atttattacataataat

SEQ ID NO: 1247 - DNA, 17 bp, synthetic construct
  misc_feature 1..17: note = Oligonucleotide
  source 1..17: mol_type = other DNA
taaatttattacataat

SEQ ID NO: 1248 - DNA, 17 bp, synthetic construct
  misc_feature 1..17: note = Oligonucleotide
  source 1..17: mol_type = other DNA
ttataaatttattacat

SEQ ID NO: 1249 - DNA, 17 bp, synthetic construct
  misc_feature 1..17: note = Oligonucleotide
  source 1..17: mol_type = other DNA
ttcttataaatttatta

SEQ ID NO: 1250 - DNA, 17 bp, synthetic construct
  misc_feature 1..17: note = Oligonucleotide
  source 1..17: mol_type = other DNA
catttcttataaattta

SEQ ID NO: 1251 - DNA, 17 bp, synthetic construct
  misc_feature 1..17: note = Oligonucleotide
  source 1..17: mol_type = other DNA
cttcatttcttataaat

SEQ ID NO: 1252 - DNA, 17 bp, synthetic construct
  misc_feature 1..17: note = Oligonucleotide
  source 1..17: mol_type = other DNA
tggcttcatttcttata

SEQ ID NO: 1253 - DNA, 17 bp, synthetic construct
  misc_feature 1..17: note = Oligonucleotide
  source 1..17: mol_type = other DNA
ccatggcttcatttctt

SEQ ID NO: 1254 - DNA, 17 bp, synthetic construct
  misc_feature 1..17: note = Oligonucleotide
  source 1..17: mol_type = other DNA
gagccatggcttcattt

SEQ ID NO: 1255 - DNA, 17 bp, synthetic construct
  misc_feature 1..17: note = Oligonucleotide
  source 1..17: mol_type = other DNA
actgagccatggcttca

SEQ ID NO: 1256 - DNA, 17 bp, synthetic construct
  misc_feature 1..17: note = Oligonucleotide
  source 1..17: mol_type = other DNA
gcaactgagccatggct

SEQ ID NO: 1257 - DNA, 17 bp, synthetic construct
  misc_feature 1..17: note = Oligonucleotide
  source 1..17: mol_type = other DNA
caggcaactgagccatg

SEQ ID NO: 1258 - DNA, 17 bp, synthetic construct
  misc_feature 1..17: note = Oligonucleotide
  source 1..17: mol_type = other DNA
aagcaggcaactgagcc

SEQ ID NO: 1259 - DNA, 17 bp, synthetic construct
  misc_feature 1..17: note = Oligonucleotide
  source 1..17: mol_type = other DNA
ctcaagcaggcaactga

SEQ ID NO: 1260 - DNA, 17 bp, synthetic construct
  misc_feature 1..17: note = Oligonucleotide
  source 1..17: mol_type = other DNA
cccctcaagcaggcaac

SEQ ID NO: 1261 - DNA, 17 bp, synthetic construct
  misc_feature 1..17: note = Oligonucleotide
  source 1..17: mol_type = other DNA
tatcccctcaagcaggc

SEQ ID NO: 1262 - DNA, 17 bp, synthetic construct
  misc_feature 1..17: note = Oligonucleotide
  source 1..17: mol_type = other DNA
aaatatcccctcaagca

SEQ ID NO: 1263 - DNA, 17 bp, synthetic construct
  misc_feature 1..17: note = Oligonucleotide
  source 1..17: mol_type = other DNA
cacaaatatcccctcaa

SEQ ID NO: 1264 - DNA, 17 bp, synthetic construct
  misc_feature 1..17: note = Oligonucleotide
  source 1..17: mol_type = other DNA
agacacaaatatcccct

SEQ ID NO: 1265 - DNA, 17 bp, synthetic construct
  misc_feature 1..17: note = Oligonucleotide
  source 1..17: mol_type = other DNA
gacagacacaaatatcc

SEQ ID NO: 1266 - DNA, 17 bp, synthetic construct
  misc_feature 1..17: note = Oligonucleotide
  source 1..17: mol_type = other DNA
agggacagacacaaata

SEQ ID NO: 1267 - DNA, 17 bp, synthetic construct
  misc_feature 1..17: note = Oligonucleotide
  source 1..17: mol_type = other DNA
atgagggacagacacaa

SEQ ID NO: 1268 - DNA, 17 bp, synthetic construct
  misc_feature 1..17: note = Oligonucleotide
  source 1..17: mol_type = other DNA
ggtatgagggacagaca

SEQ ID NO: 1269 - DNA, 17 bp, synthetic construct
  misc_feature 1..17: note = Oligonucleotide
  source 1..17: mol_type = other DNA
gccggtatgagggacag

SEQ ID NO: 1270 - DNA, 17 bp, synthetic construct
  misc_feature 1..17: note = Oligonucleotide
  source 1..17: mol_type = other DNA
gtggccggtatgaggga

SEQ ID NO: 1271 - DNA, 17 bp, synthetic construct
  misc_feature 1..17: note = Oligonucleotide
  source 1..17: mol_type = other DNA
tgtgtggccggtatgag

SEQ ID NO: 1272 - DNA, 17 bp, synthetic construct
  misc_feature 1..17: note = Oligonucleotide
  source 1..17: mol_type = other DNA
gtttgtgtggccggtat

SEQ ID NO: 1273 - DNA, 17 bp, synthetic construct
  misc_feature 1..17: note = Oligonucleotide
  source 1..17: mol_type = other DNA
gaggtttgtgtggccgg

SEQ ID NO: 1274 - DNA, 17 bp, synthetic construct
  misc_feature 1..17: note = Oligonucleotide
  source 1..17: mol_type = other DNA
gaggaggtttgtgtggc

SEQ ID NO: 1275 - DNA, 17 bp, synthetic construct
  misc_feature 1..17: note = Oligonucleotide
  source 1..17: mol_type = other DNA
gctgaggaggtttgtgt

SEQ ID NO: 1276 - DNA, 17 bp, synthetic construct
  misc_feature 1..17: note = Oligonucleotide
  source 1..17: mol_type = other DNA
caggctgaggaggtttg

SEQ ID NO: 1277 - DNA, 17 bp, synthetic construct
  misc_feature 1..17: note = Oligonucleotide
  source 1..17: mol_type = other DNA
gtccaggctgaggaggt

SEQ ID NO: 1278 - DNA, 17 bp, synthetic construct
  misc_feature 1..17: note = Oligonucleotide
  source 1..17: mol_type = other DNA
gtggtccaggctgagga

SEQ ID NO: 1279 - DNA, 17 bp, synthetic construct
  misc_feature 1..17: note = Oligonucleotide
  source 1..17: mol_type = other DNA
catgtggtccaggctga

SEQ ID NO: 1280 - DNA, 25 bp, synthetic construct
  misc_feature 1..25: note = Oligonucleotide
  source 1..25: mol_type = other DNA
ccggggcgggagtgggggtggggcg

SEQ ID NO: 1281 - DNA, 25 bp, synthetic construct
  misc_feature 1..25: note = Oligonucleotide
  source 1..25: mol_type = other DNA
cggccggggcgggagtgggggtggg

SEQ ID NO: 1282 - DNA, 25 bp, synthetic construct
  misc_feature 1..25: note = Oligonucleotide
  source 1..25: mol_type = other DNA
gcacggccggggcgggagtgggggt

SEQ ID NO: 1283 - DNA, 25 bp, synthetic construct
  misc_feature 1..25: note = Oligonucleotide
  source 1..25: mol_type = other DNA
agggcacggccggggcgggagtggg

SEQ ID NO: 1284 - DNA, 25 bp, synthetic construct
  misc_feature 1..25: note = Oligonucleotide
  source 1..25: mol_type = other DNA
ggcagggcacggccggggcgggagt

SEQ ID NO: 1285 - DNA, 25 bp, synthetic construct
  misc_feature 1..25: note = Oligonucleotide
  source 1..25: mol_type = other DNA
gccggcagggcacggccggggcggg

SEQ ID NO: 1286 - DNA, 25 bp, synthetic construct
  misc_feature 1..25: note = Oligonucleotide
  source 1..25: mol_type = other DNA
cctgccggcagggcacggccggggc

SEQ ID NO: 1287 - DNA, 25 bp, synthetic construct
  misc_feature 1..25: note = Oligonucleotide
  source 1..25: mol_type = other DNA
ggccctgccggcagggcacggccgg

SEQ ID NO: 1288 - DNA, 25 bp, synthetic construct
  misc_feature 1..25: note = Oligonucleotide
  source 1..25: mol_type = other DNA
gggggccctgccggcagggcacggc

SEQ ID NO: 1289 - DNA, 25 bp, synthetic construct
  misc_feature 1..25: note = Oligonucleotide
  source 1..25: mol_type = other DNA
gtggggggccctgccggcagggcac

SEQ ID NO: 1290 - DNA, 25 bp, synthetic construct
  misc_feature 1..25: note = Oligonucleotide
  source 1..25: mol_type = other DNA
ggggtggggggccctgccggcaggg

SEQ ID NO: 1291 - DNA, 25 bp, synthetic construct
  misc_feature 1..25: note = Oligonucleotide
  source 1..25: mol_type = other DNA
gtgggggtggggggccctgccggca

SEQ ID NO: 1292 - DNA, 25 bp, synthetic construct
  misc_feature 1..25: note = Oligonucleotide
  source 1..25: mol_type = other DNA
ggggtgggggtggggggccctgccg

SEQ ID NO: 1293 - DNA, 25 bp, synthetic construct
  misc_feature 1..25: note = Oligonucleotide
  source 1..25: mol_type = other DNA
cccggggtgggggtggggggccctg

SEQ ID NO: 1294 - DNA, 25 bp, synthetic construct
  misc_feature 1..25: note = Oligonucleotide
  source 1..25: mol_type = other DNA
cggcccggggtgggggtggggggcc

SEQ ID NO: 1295 - DNA, 25 bp, synthetic construct
  misc_feature 1..25: note = Oligonucleotide
  source 1..25: mol_type = other DNA
ccgcggcccggggtgggggtggggg

SEQ ID NO: 1296 - DNA, 25 bp, synthetic construct
  misc_feature 1..25: note = Oligonucleotide
  source 1..25: mol_type = other DNA
agcccgcggcccggggtgggggtgg

SEQ ID NO: 1297 - DNA, 25 bp, synthetic construct
  misc_feature 1..25: note = Oligonucleotide
  source 1..25: mol_type = other DNA
ccgagcccgcggcccggggtggggg

SEQ ID NO: 1298 - DNA, 25 bp, synthetic construct
  misc_feature 1..25: note = Oligonucleotide
  source 1..25: mol_type = other DNA
aggccgagcccgcggcccggggtgg

SEQ ID NO: 1299 - DNA, 25 bp, synthetic construct
  misc_feature 1..25: note = Oligonucleotide
  source 1..25: mol_type = other DNA
ggcaggccgagcccgcggcccgggg

SEQ ID NO: 1300 - DNA, 25 bp, synthetic construct
  misc_feature 1..25: note = Oligonucleotide
  source 1..25: mol_type = other DNA
aggggcaggccgagcccgcggcccg

SEQ ID NO: 1301 - DNA, 25 bp, synthetic construct
  misc_feature 1..25: note = Oligonucleotide
  source 1..25: mol_type = other DNA
gtaaggggcaggccgagcccgcggc

SEQ ID NO: 1302 - DNA, 25 bp, synthetic construct
  misc_feature 1..25: note = Oligonucleotide
  source 1..25: mol_type = other DNA
gtcgtaaggggcaggccgagcccgc

SEQ ID NO: 1303 - DNA, 25 bp, synthetic construct
  misc_feature 1..25: note = Oligonucleotide
  source 1..25: mol_type = other DNA
gccgtcgtaaggggcaggccgagcc

SEQ ID NO: 1304 - DNA, 25 bp, synthetic construct
  misc_feature 1..25: note = Oligonucleotide
  source 1..25: mol_type = other DNA
ggcgccgtcgtaaggggcaggccga

SEQ ID NO: 1305 - DNA, 25 bp, synthetic construct
  misc_feature 1..25: note = Oligonucleotide
  source 1..25: mol_type = other DNA
ccgggcgccgtcgtaaggggcaggc

SEQ ID NO: 1306 - DNA, 25 bp, synthetic construct
  misc_feature 1..25: note = Oligonucleotide
  source 1..25: mol_type = other DNA
ggcccgggcgccgtcgtaaggggca

SEQ ID NO: 1307 - DNA, 25 bp, synthetic construct
  misc_feature 1..25: note = Oligonucleotide
  source 1..25: mol_type = other DNA
cctggcccgggcgccgtcgtaaggg

SEQ ID NO: 1308 - DNA, 25 bp, synthetic construct
  misc_feature 1..25: note = Oligonucleotide
  source 1..25: mol_type = other DNA
attcctggcccgggcgccgtcgtaa

SEQ ID NO: 1309 - DNA, 25 bp, synthetic construct
  misc_feature 1..25: note = Oligonucleotide
  source 1..25: mol_type = other DNA
aacattcctggcccgggcgccgtcg

SEQ ID NO: 1310 - DNA, 25 bp, synthetic construct
  misc_feature 1..25: note = Oligonucleotide
  source 1..25: mol_type = other DNA
tgcaacattcctggcccgggcgccg

SEQ ID NO: 1311 - DNA, 25 bp, synthetic construct
  misc_feature 1..25: note = Oligonucleotide
  source 1..25: mol_type = other DNA
tcatgcaacattcctggcccgggcg

SEQ ID NO: 1312 - DNA, 25 bp, synthetic construct
  misc_feature 1..25: note = Oligonucleotide
  source 1..25: mol_type = other DNA
gattcatgcaacattcctggcccgg

SEQ ID NO: 1313 - DNA, 25 bp, synthetic construct
  misc_feature 1..25: note = Oligonucleotide
  source 1..25: mol_type = other DNA
gacgattcatgcaacattcctggcc

SEQ ID NO: 1314 - DNA, 25 bp, synthetic construct
  misc_feature 1..25: note = Oligonucleotide
  source 1..25: mol_type = other DNA
caggacgattcatgcaacattcctg

SEQ ID NO: 1315 - DNA, 25 bp, synthetic construct
  misc_feature 1..25: note = Oligonucleotide
  source 1..25: mol_type = other DNA
aaacaggacgattcatgcaacattc

SEQ ID NO: 1316 - DNA, 25 bp, synthetic construct
  misc_feature 1..25: note = Oligonucleotide
  source 1..25: mol_type = other DNA
agcaaacaggacgattcatgcaaca

SEQ ID NO: 1317 - DNA, 25 bp, synthetic construct
  misc_feature 1..25: note = Oligonucleotide
  source 1..25: mol_type = other DNA
aacagcaaacaggacgattcatgca

SEQ ID NO: 1318 - DNA, 25 bp, synthetic construct
  misc_feature 1..25: note = Oligonucleotide
  source 1..25: mol_type = other DNA
agcaacagcaaacaggacgattcat

SEQ ID NO: 1319 - DNA, 25 bp, synthetic construct
  misc_feature 1..25: note = Oligonucleotide
  source 1..25: mol_type = other DNA
ccgagcaacagcaaacaggacgatt

SEQ ID NO: 1320 - DNA, 25 bp, synthetic construct
  misc_feature 1..25: note = Oligonucleotide
  source 1..25: mol_type = other DNA
tctccgagcaacagcaaacaggacg

SEQ ID NO: 1321 - DNA, 25 bp, synthetic construct
  misc_feature 1..25: note = Oligonucleotide
  source 1..25: mol_type = other DNA
gagtctccgagcaacagcaaacagg

SEQ ID NO: 1322 - DNA, 25 bp, synthetic construct
  misc_feature 1..25: note = Oligonucleotide
  source 1..25: mol_type = other DNA
ggcgagtctccgagcaacagcaaac

SEQ ID NO: 1323 - DNA, 25 bp, synthetic construct
  misc_feature 1..25: note = Oligonucleotide
  source 1..25: mol_type = other DNA
cagggcgagtctccgagcaacagca

SEQ ID NO: 1324 - DNA, 25 bp, synthetic construct
  misc_feature 1..25: note = Oligonucleotide
  source 1..25: mol_type = other DNA
gtacagggcgagtctccgagcaaca

SEQ ID NO: 1325 - DNA, 25 bp, synthetic construct
  misc_feature 1..25: note = Oligonucleotide
  source 1..25: mol_type = other DNA
aatgtacagggcgagtctccgagca

SEQ ID NO: 1326 - DNA, 25 bp, synthetic construct
  misc_feature 1..25: note = Oligonucleotide
  source 1..25: mol_type = other DNA
agcaatgtacagggcgagtctccga

SEQ ID NO: 1327 - DNA, 25 bp, synthetic construct
  misc_feature 1..25: note = Oligonucleotide
  source 1..25: mol_type = other DNA
ctaagcaatgtacagggcgagtctc

SEQ ID NO: 1328 - DNA, 25 bp, synthetic construct
  misc_feature 1..25: note = Oligonucleotide
  source 1..25: mol_type = other DNA
gcactaagcaatgtacagggcgagt

SEQ ID NO: 1329 - DNA, 25 bp, synthetic construct
  misc_feature 1..25: note = Oligonucleotide
  source 1..25: mol_type = other DNA
agggcactaagcaatgtacagggcg

SEQ ID NO: 1330 - DNA, 25 bp, synthetic construct
  misc_feature 1..25: note = Oligonucleotide
  source 1..25: mol_type = other DNA
gtgagggcactaagcaatgtacagg

SEQ ID NO: 1331 - DNA, 25 bp, synthetic construct
  misc_feature 1..25: note = Oligonucleotide
  source 1..25: mol_type = other DNA
ccggtgagggcactaagcaatgtac

SEQ ID NO: 1332 - DNA, 25 bp, synthetic construct
  misc_feature 1..25: note = Oligonucleotide
  source 1..25: mol_type = other DNA
cggccggtgagggcactaagcaatg

SEQ ID NO: 1333 - DNA, 25 bp, synthetic construct
  misc_feature 1..25: note = Oligonucleotide
  source 1..25: mol_type = other DNA
gggcggccggtgagggcactaagca

SEQ ID NO: 1334 - DNA, 25 bp, synthetic construct
  misc_feature 1..25: note = Oligonucleotide
  source 1..25: mol_type = other DNA
gctgggcggccggtgagggcactaa

SEQ ID NO: 1335 - DNA, 25 bp, synthetic construct
  misc_feature 1..25: note = Oligonucleotide
  source 1..25: mol_type = other DNA
tgggctgggcggccggtgagggcac

SEQ ID NO: 1336 - DNA, 25 bp, synthetic construct
  misc_feature 1..25: note = Oligonucleotide
  source 1..25: mol_type = other DNA
gggtgggctgggcggccggtgaggg

SEQ ID NO: 1337 - DNA, 25 bp, synthetic construct
  misc_feature 1..25: note = Oligonucleotide
  source 1..25: mol_type = other DNA
gctgggtgggctgggcggccggtga

SEQ ID NO: 1338 - DNA, 25 bp, synthetic construct
  misc_feature 1..25: note = Oligonucleotide
  source 1..25: mol_type = other DNA
tgcgctgggtgggctgggcggccgg

SEQ ID NO: 1339 - DNA, 25 bp, synthetic construct
  misc_feature 1..25: note = Oligonucleotide
  source 1..25: mol_type = other DNA
ctgtgcgctgggtgggctgggcggc

SEQ ID NO: 1340 - DNA, 25 bp, synthetic construct
  misc_feature 1..25: note = Oligonucleotide
  source 1..25: mol_type = other DNA
tgactgtgcgctgggtgggctgggc

SEQ ID NO: 1341 - DNA, 25 bp, synthetic construct
  misc_feature 1..25: note = Oligonucleotide
  source 1..25: mol_type = other DNA
tcctgactgtgcgctgggtgggctg

SEQ ID NO: 1342 - DNA, 25 bp, synthetic construct
  misc_feature 1..25: note = Oligonucleotide
  source 1..25: mol_type = other DNA
ccttcctgactgtgcgctgggtggg

SEQ ID NO: 1343 - DNA, 25 bp, synthetic construct
  misc_feature 1..25: note = Oligonucleotide
  source 1..25: mol_type = other DNA
cgcccttcctgactgtgcgctgggt

SEQ ID NO: 1344 - DNA, 25 bp, synthetic construct
  misc_feature 1..25: note = Oligonucleotide
  source 1..25: mol_type = other DNA
ccacgcccttcctgactgtgcgctg

SEQ ID NO: 1345 - DNA, 25 bp, synthetic construct
  misc_feature 1..25: note = Oligonucleotide
  source 1..25: mol_type = other DNA
ggtccacgcccttcctgactgtgcg

SEQ ID NO: 1346 - DNA, 25 bp, synthetic construct
  misc_feature 1..25: note = Oligonucleotide
  source 1..25: mol_type = other DNA
cctggtccacgcccttcctgactgt

SEQ ID NO: 1347 - DNA, 25 bp, synthetic construct
  misc_feature 1..25: note = Oligonucleotide
  source 1..25: mol_type = other DNA
ctccctggtccacgcccttcctgac

SEQ ID NO: 1348 - DNA, 25 bp, synthetic construct
  misc_feature 1..25: note = Oligonucleotide
  source 1..25: mol_type = other DNA
agcctccctggtccacgcccttcct

SEQ ID NO: 1349 - DNA, 25 bp, synthetic construct
  misc_feature 1..25: note = Oligonucleotide
  source 1..25: mol_type = other DNA
cccagcctccctggtccacgccctt

SEQ ID NO: 1350 - DNA, 25 bp, synthetic construct
  misc_feature 1..25: note = Oligonucleotide
  source 1..25: mol_type = other DNA
cgccccagcctccctggtccacgcc

SEQ ID NO: 1351 - DNA, 25 bp, synthetic construct
  misc_feature 1..25: note = Oligonucleotide
  source 1..25: mol_type = other DNA
tcccgccccagcctccctggtccac

SEQ ID NO: 1352 - DNA, 25 bp, synthetic construct
  misc_feature 1..25: note = Oligonucleotide
  source 1..25: mol_type = other DNA
acctcccgccccagcctccctggtc

SEQ ID NO: 1353 - DNA, 25 bp, synthetic construct
  misc_feature 1..25: note = Oligonucleotide
  source 1..25: mol_type = other DNA
ggcacctcccgccccagcctccctg

SEQ ID NO: 1354 - DNA, 25 bp, synthetic construct
  misc_feature 1..25: note = Oligonucleotide
  source 1..25: mol_type = other DNA
cccggcacctcccgccccagcctcc

SEQ ID NO: 1355 - DNA, 25 bp, synthetic construct
  misc_feature 1..25: note = Oligonucleotide
  source 1..25: mol_type = other DNA
acccccggcacctcccgccccagcc

SEQ ID NO: 1356 - DNA, 25 bp, synthetic construct
  misc_feature 1..25: note = Oligonucleotide
  source 1..25: mol_type = other DNA
cccacccccggcacctcccgcccca

SEQ ID NO: 1357 - DNA, 25 bp, synthetic construct
  misc_feature 1..25: note = Oligonucleotide
  source 1..25: mol_type = other DNA
caccccacccccggcacctcccgcc

SEQ ID NO: 1358 - DNA, 25 bp, synthetic construct
  misc_feature 1..25: note = Oligonucleotide
  source 1..25: mol_type = other DNA
gggcaccccacccccggcacctccc

SEQ ID NO: 1359 - DNA, 25 bp, synthetic construct
  misc_feature 1..25: note = Oligonucleotide
  source 1..25: mol_type = other DNA
ctagggcaccccacccccggcacct

SEQ ID NO: 1360 - DNA, 25 bp, synthetic construct
  misc_feature 1..25: note = Oligonucleotide
  source 1..25: mol_type = other DNA
acgctagggcaccccacccccggca

SEQ ID NO: 1361 - DNA, 25 bp, synthetic construct
  misc_feature 1..25: note = Oligonucleotide
  source 1..25: mol_type = other DNA
gtcacgctagggcaccccacccccg

SEQ ID NO: 1362 - DNA, 25 bp, synthetic construct
  misc_feature 1..25: note = Oligonucleotide
  source 1..25: mol_type = other DNA
gtggtcacgctagggcaccccaccc

SEQ ID NO: 1363 - DNA, 25 bp, synthetic construct
  misc_feature 1..25: note = Oligonucleotide
  source 1..25: mol_type = other DNA
gaggtggtcacgctagggcacccca

SEQ ID NO: 1364 - DNA, 25 bp, synthetic construct
  misc_feature 1..25: note = Oligonucleotide
  source 1..25: mol_type = other DNA
aaggaggtggtcacgctagggcacc

SEQ ID NO: 1365 - DNA, 25 bp, synthetic construct
  misc_feature 1..25: note = Oligonucleotide
  source 1..25: mol_type = other DNA
gcgaaggaggtggtcacgctagggc

SEQ ID NO: 1366 - DNA, 25 bp, synthetic construct
  misc_feature 1..25: note = Oligonucleotide
  source 1..25: mol_type = other DNA
gctgcgaaggaggtggtcacgctag

SEQ ID NO: 1367 - DNA, 25 bp, synthetic construct
  misc_feature 1..25: note = Oligonucleotide
  source 1..25: mol_type = other DNA
ggagctgcgaaggaggtggtcacgc

SEQ ID NO: 1368 - DNA, 25 bp, synthetic construct
  misc_feature 1..25: note = Oligonucleotide
  source 1..25: mol_type = other DNA
ccaggagctgcgaaggaggtggtca

SEQ ID NO: 1369 - DNA, 25 bp, synthetic construct
  misc_feature 1..25: note = Oligonucleotide
  source 1..25: mol_type = other DNA
ccaccaggagctgcgaaggaggtgg

SEQ ID NO: 1370 - DNA, 25 bp, synthetic construct
  misc_feature 1..25: note = Oligonucleotide
  source 1..25: mol_type = other DNA
tggccaccaggagctgcgaaggagg

SEQ ID NO: 1371 - DNA, 25 bp, synthetic construct
  misc_feature 1..25: note = Oligonucleotide
  source 1..25: mol_type = other DNA
gaatggccaccaggagctgcgaagg

SEQ ID NO: 1372 - DNA, 25 bp, synthetic construct
  misc_feature 1..25: note = Oligonucleotide
  source 1..25: mol_type = other DNA
ggagaatggccaccaggagctgcga

SEQ ID NO: 1373 - DNA, 25 bp, synthetic construct
  misc_feature 1..25: note = Oligonucleotide
  source 1..25: mol_type = other DNA
ctgggagaatggccaccaggagctg

SEQ ID NO: 1374 - DNA, 25 bp, synthetic construct
  misc_feature 1..25: note = Oligonucleotide
  source 1..25: mol_type = other DNA
cctctgggagaatggccaccaggag

SEQ ID NO: 1375 - DNA, 25 bp, synthetic construct
  misc_feature 1..25: note = Oligonucleotide
  source 1..25: mol_type = other DNA
ccccctctgggagaatggccaccag

SEQ ID NO: 1376 - DNA, 25 bp, synthetic construct
  misc_feature 1..25: note = Oligonucleotide
  source 1..25: mol_type = other DNA
gttccccctctgggagaatggccac

SEQ ID NO: 1377 - DNA, 25 bp, synthetic construct
  misc_feature 1..25: note = Oligonucleotide
  source 1..25: mol_type = other DNA
taggttccccctctgggagaatggc

SEQ ID NO: 1378 - DNA, 25 bp, synthetic construct
  misc_feature 1..25: note = Oligonucleotide
  source 1..25: mol_type = other DNA
gactaggttccccctctgggagaat

SEQ ID NO: 1379 - DNA, 25 bp, synthetic construct
  misc_feature 1..25: note = Oligonucleotide
  source 1..25: mol_type = other DNA
ctggactaggttccccctctgggag

SEQ ID NO: 1380 - DNA, 25 bp, synthetic construct
  misc_feature 1..25: note = Oligonucleotide
  source 1..25: mol_type = other DNA
atgctggactaggttccccctctgg

SEQ ID NO: 1381 - DNA, 25 bp, synthetic construct
  misc_feature 1..25: note = Oligonucleotide
  source 1..25: mol_type = other DNA
cgcatgctggactaggttccccctc

SEQ ID NO: 1382 - DNA, 25 bp, synthetic construct
  misc_feature 1..25: note = Oligonucleotide
  source 1..25: mol_type = other DNA
cctcgcatgctggactaggttcccc

SEQ ID NO: 1383 - DNA, 25 bp, synthetic construct
  misc_feature 1..25: note = Oligonucleotide
  source 1..25: mol_type = other DNA
tgacctcgcatgctggactaggttc

SEQ ID NO: 1384 - DNA, 25 bp, synthetic construct
  misc_feature 1..25: note = Oligonucleotide
  source 1..25: mol_type = other DNA
tcctgacctcgcatgctggactagg

SEQ ID NO: 1385 - DNA, 25 bp, synthetic construct
  misc_feature 1..25: note = Oligonucleotide
  source 1..25: mol_type = other DNA
gggtcctgacctcgcatgctggact

SEQ ID NO: 1386 - DNA, 25 bp, synthetic construct
  misc_feature 1..25: note = Oligonucleotide
  source 1..25: mol_type = other DNA
ggcgggtcctgacctcgcatgctgg

SEQ ID NO: 1387 - DNA, 25 bp, synthetic construct
  misc_feature 1..25: note = Oligonucleotide
  source 1..25: mol_type = other DNA
caaggcgggtcctgacctcgcatgc

SEQ ID NO: 1388 - DNA, 25 bp, synthetic construct
  misc_feature 1..25: note = Oligonucleotide
  source 1..25: mol_type = other DNA
caccaaggcgggtcctgacctcgca

SEQ ID NO: 1389 - DNA, 25 bp, synthetic construct
  misc_feature 1..25: note = Oligonucleotide
  source 1..25: mol_type = other DNA
agtcaccaaggcgggtcctgacctc

SEQ ID NO: 1390 - DNA, 25 bp, synthetic construct
  misc_feature 1..25: note = Oligonucleotide
  source 1..25: mol_type = other DNA
ccgagtcaccaaggcgggtcctgac

SEQ ID NO: 1391 - DNA, 25 bp, synthetic construct
  misc_feature 1..25: note = Oligonucleotide
  source 1..25: mol_type = other DNA
cccccgagtcaccaaggcgggtcct

SEQ ID NO: 1392 - DNA, 25 bp, synthetic construct
  misc_feature 1..25: note = Oligonucleotide
  source 1..25: mol_type = other DNA
ctccccccgagtcaccaaggcgggt

SEQ ID NO: 1393 - DNA, 25 bp, synthetic construct
  misc_feature 1..25: note = Oligonucleotide
  source 1..25: mol_type = other DNA
cccctccccccgagtcaccaaggcg

SEQ ID NO: 1394 - DNA, 25 bp, synthetic construct
  misc_feature 1..25: note = Oligonucleotide
  source 1..25: mol_type = other DNA
tcccccctccccccgagtcaccaag

SEQ ID NO: 1395 - DNA, 25 bp, synthetic construct
  misc_feature 1..25: note = Oligonucleotide
  source 1..25: mol_type = other DNA
gtctcccccctccccccgagtcacc

SEQ ID NO: 1396 - DNA, 25 bp, synthetic construct
  misc_feature 1..25: note = Oligonucleotide
  source 1..25: mol_type = other DNA
aatgtctcccccctccccccgagtc

SEQ ID NO: 1397 - DNA, 25 bp, synthetic construct
  misc_feature 1..25: note = Oligonucleotide
  source 1..25: mol_type = other DNA
cccaatgtctcccccctccccccga

SEQ ID NO: 1398 - DNA, 25 bp, synthetic construct
  misc_feature 1..25: note = Oligonucleotide
  source 1..25: mol_type = other DNA
aatcccaatgtctcccccctccccc

SEQ ID NO: 1399 - DNA, 25 bp, synthetic construct
  misc_feature 1..25: note = Oligonucleotide
  source 1..25: mol_type = other DNA
gagaatcccaatgtctcccccctcc

SEQ ID NO: 1400 - DNA, 25 bp, synthetic construct
  misc_feature 1..25: note = Oligonucleotide
  source 1..25: mol_type = other DNA
atcgagaatcccaatgtctcccccc

SEQ ID NO: 1401 - DNA, 25 bp, synthetic construct
  misc_feature 1..25: note = Oligonucleotide
  source 1..25: mol_type = other DNA
cccatcgagaatcccaatgtctccc

SEQ ID NO: 1402 - DNA, 25 bp, synthetic construct
  misc_feature 1..25: note = Oligonucleotide
  source 1..25: mol_type = other DNA
gcccccatcgagaatcccaatgtct

SEQ ID NO: 1403 - DNA, 25 bp, synthetic construct
  misc_feature 1..25: note = Oligonucleotide
  source 1..25: mol_type = other DNA
ttggcccccatcgagaatcccaatg

SEQ ID NO: 1404 - DNA, 25 bp, synthetic construct
  misc_feature 1..25: note = Oligonucleotide
  source 1..25: mol_type = other DNA
tccttggcccccatcgagaatccca

SEQ ID NO: 1405 - DNA, 25 bp, synthetic construct
  misc_feature 1..25: note = Oligonucleotide
  source 1..25: mol_type = other DNA
ggctccttggcccccatcgagaatc

SEQ ID NO: 1406 - DNA, 25 bp, synthetic construct
  misc_feature 1..25: note = Oligonucleotide
  source 1..25: mol_type = other DNA
gggggctccttggcccccatcgaga

SEQ ID NO: 1407 - DNA, 25 bp, synthetic construct
  misc_feature 1..25: note = Oligonucleotide
  source 1..25: mol_type = other DNA
caggggggctccttggcccccatcg

SEQ ID NO: 1408 - DNA, 25 bp, synthetic construct
  misc_feature 1..25: note = Oligonucleotide
  source 1..25: mol_type = other DNA
aaacaggggggctccttggccccca

SEQ ID NO: 1409 - DNA, 25 bp, synthetic construct
  misc_feature 1..25: note = Oligonucleotide
  source 1..25: mol_type = other DNA
gcaaaacaggggggctccttggccc

SEQ ID NO: 1410 - DNA, 25 bp, synthetic construct
  misc_feature 1..25: note = Oligonucleotide
  source 1..25: mol_type = other DNA
tatgcaaaacaggggggctccttgg

SEQ ID NO: 1411 - DNA, 25 bp, synthetic construct
  misc_feature 1..25: note = Oligonucleotide
  source 1..25: mol_type = other DNA
aaatatgcaaaacaggggggctcct

SEQ ID NO: 1412 - DNA, 25 bp, synthetic construct
  misc_feature 1..25: note = Oligonucleotide
  source 1..25: mol_type = other DNA
ttaaaatatgcaaaacaggggggct

SEQ ID NO: 1413 - DNA, 25 bp, synthetic construct
  misc_feature 1..25: note = Oligonucleotide
  source 1..25: mol_type = other DNA
ggattaaaatatgcaaaacaggggg

SEQ ID NO: 1414 - DNA, 25 bp, synthetic construct
  misc_feature 1..25: note = Oligonucleotide
  source 1..25: mol_type = other DNA
agtggattaaaatatgcaaaacagg

SEQ ID NO: 1415 - DNA, 25 bp, synthetic construct
  misc_feature 1..25: note = Oligonucleotide
  source 1..25: mol_type = other DNA
tagagtggattaaaatatgcaaaac

SEQ ID NO: 1416 - DNA, 25 bp, synthetic construct
  misc_feature 1..25: note = Oligonucleotide
  source 1..25: mol_type = other DNA
atatagagtggattaaaatatgcaa

SEQ ID NO: 1417 - DNA, 25 bp, synthetic construct
  misc_feature 1..25: note = Oligonucleotide
  source 1..25: mol_type = other DNA
caaatatagagtggattaaaatatg

SEQ ID NO: 1418 - DNA, 25 bp, synthetic construct
  misc_feature 1..25: note = Oligonucleotide
  source 1..25: mol_type = other DNA
ttccaaatatagagtggattaaaat

SEQ ID NO: 1419 - DNA, 25 bp, synthetic construct
  misc_feature 1..25: note = Oligonucleotide
  source 1..25: mol_type = other DNA
tcgttccaaatatagagtggattaa

SEQ ID NO: 1420 - DNA, 25 bp, synthetic construct
  misc_feature 1..25: note = Oligonucleotide
  source 1..25: mol_type = other DNA
ttctcgttccaaatatagagtggat

SEQ ID NO: 1421 - DNA, 25 bp, synthetic construct
  misc_feature 1..25: note = Oligonucleotide
  source 1..25: mol_type = other DNA
cttttctcgttccaaatatagagtg

SEQ ID NO: 1422 - DNA, 25 bp, synthetic construct
  misc_feature 1..25: note = Oligonucleotide
  source 1..25: mol_type = other DNA
ttccttttctcgttccaaatataga

SEQ ID NO: 1423 - DNA, 25 bp, synthetic construct
  misc_feature 1..25: note = Oligonucleotide
  source 1..25: mol_type = other DNA
ttgttccttttctcgttccaaatat

SEQ ID NO: 1424 - DNA, 25 bp, synthetic construct
  misc_feature 1..25: note = Oligonucleotide
  source 1..25: mol_type = other DNA
tatttgttccttttctcgttccaaa

SEQ ID NO: 1425 - DNA, 25 bp, synthetic construct
  misc_feature 1..25: note = Oligonucleotide
  source 1..25: mol_type = other DNA
agatatttgttccttttctcgttcc

SEQ ID NO: 1426 - DNA, 25 bp, synthetic construct
  misc_feature 1..25: note = Oligonucleotide
  source 1..25: mol_type = other DNA
cagagatatttgttccttttctcgt

SEQ ID NO: 1427 - DNA, 25 bp, synthetic construct
  misc_feature 1..25: note = Oligonucleotide
  source 1..25: mol_type = other DNA
ggacagagatatttgttccttttct

SEQ ID NO: 1428 - DNA, 25 bp, synthetic construct
  misc_feature 1..25: note = Oligonucleotide
  source 1..25: mol_type = other DNA
tacggacagagatatttgttccttt

SEQ ID NO: 1429 - DNA, 25 bp, synthetic construct
  misc_feature 1..25: note = Oligonucleotide
  source 1..25: mol_type = other DNA
tattacggacagagatatttgttcc

SEQ ID NO: 1430 - DNA, 25 bp, synthetic construct
  misc_feature 1..25: note = Oligonucleotide
  source 1..25: mol_type = other DNA
aactattacggacagagatatttgt

SEQ ID NO: 1431 - DNA, 25 bp, synthetic construct
  misc_feature 1..25: note = Oligonucleotide
  source 1..25: mol_type = other DNA
ggaaactattacggacagagatatt

SEQ ID NO: 1432 - DNA, 25 bp, synthetic construct
  misc_feature 1..25: note = Oligonucleotide
  source 1..25: mol_type = other DNA
agaggaaactattacggacagagat

SEQ ID NO: 1433 - DNA, 25 bp, synthetic construct
  misc_feature 1..25: note = Oligonucleotide
  source 1..25: mol_type = other DNA
gggagaggaaactattacggacaga

SEQ ID NO: 1434 - DNA, 25 bp, synthetic construct
  misc_feature 1..25: note = Oligonucleotide
  source 1..25: mol_type = other DNA
gaggggagaggaaactattacggac

SEQ ID NO: 1435 - DNA, 25 bp, synthetic construct
  misc_feature 1..25: note = Oligonucleotide
  source 1..25: mol_type = other DNA
agggaggggagaggaaactattacg

SEQ ID NO: 1436 - DNA, 25 bp, synthetic construct
  misc_feature 1..25: note = Oligonucleotide
  source 1..25: mol_type = other DNA
agaagggaggggagaggaaactatt

SEQ ID NO: 1437 - DNA, 25 bp, synthetic construct
  misc_feature 1..25: note = Oligonucleotide
  source 1..25: mol_type = other DNA
agtagaagggaggggagaggaaact

SEQ ID NO: 1438 - DNA, 25 bp, synthetic construct
  misc_feature 1..25: note = Oligonucleotide
  source 1..25: mol_type = other DNA
ggaagtagaagggaggggagaggaa

SEQ ID NO: 1439 - DNA, 25 bp, synthetic construct
  misc_feature 1..25: note = Oligonucleotide
  source 1..25: mol_type = other DNA
agtggaagtagaagggaggggagag

SEQ ID NO: 1440 - DNA, 25 bp, synthetic construct
  misc_feature 1..25: note = Oligonucleotide
  source 1..25: mol_type = other DNA
accagtggaagtagaagggagggga

SEQ ID NO: 1441 - DNA, 25 bp, synthetic construct
  misc_feature 1..25: note = Oligonucleotide
  source 1..25: mol_type = other DNA
gggaccagtggaagtagaagggagg

SEQ ID NO: 1442 - DNA, 25 bp, synthetic construct
  misc_feature 1..25: note = Oligonucleotide
  source 1..25: mol_type = other DNA
agtgggaccagtggaagtagaaggg

SEQ ID NO: 1443 - DNA, 25 bp, synthetic construct
  misc_feature 1..25: note = Oligonucleotide
  source 1..25: mol_type = other DNA
tgcagtgggaccagtggaagtagaa

SEQ ID NO: 1444 - DNA, 25 bp, synthetic construct
  misc_feature 1..25: note = Oligonucleotide
  source 1..25: mol_type = other DNA
agctgcagtgggaccagtggaagta

SEQ ID NO: 1445 - DNA, 25 bp, synthetic construct
  misc_feature 1..25: note = Oligonucleotide
  source 1..25: mol_type = other DNA
ggcagctgcagtgggaccagtggaa

SEQ ID NO: 1446 - DNA, 25 bp, synthetic construct
  misc_feature 1..25: note = Oligonucleotide
  source 1..25: mol_type = other DNA
ctgggcagctgcagtgggaccagtg

SEQ ID NO: 1447 - DNA, 25 bp, synthetic construct
  misc_feature 1..25: note = Oligonucleotide
  source 1..25: mol_type = other DNA
agactgggcagctgcagtgggacca

SEQ ID NO: 1448 - DNA, 25 bp, synthetic construct
  misc_feature 1..25: note = Oligonucleotide
  source 1..25: mol_type = other DNA
ggaagactgggcagctgcagtggga

SEQ ID NO: 1449 - DNA, 25 bp, synthetic construct
  misc_feature 1..25: note = Oligonucleotide
  source 1..25: mol_type = other DNA
gatggaagactgggcagctgcagtg

SEQ ID NO: 1450 - DNA, 25 bp, synthetic construct
  misc_feature 1..25: note = Oligonucleotide
  source 1..25: mol_type = other DNA
ggagatggaagactgggcagctgca

SEQ ID NO: 1451 - DNA, 25 bp, synthetic construct
  misc_feature 1..25: note = Oligonucleotide
  source 1..25: mol_type = other DNA
gccggagatggaagactgggcagct

SEQ ID NO: 1452 - DNA, 25 bp, synthetic construct
  misc_feature 1..25: note = Oligonucleotide
  source 1..25: mol_type = other DNA
ggggccggagatggaagactgggca

SEQ ID NO: 1453 - DNA, 25 bp, synthetic construct
  misc_feature 1..25: note = Oligonucleotide
  source 1..25: mol_type = other DNA
tgaggggccggagatggaagactgg

SEQ ID NO: 1454 - DNA, 25 bp, synthetic construct
  misc_feature 1..25: note = Oligonucleotide
  source 1..25: mol_type = other DNA
cagtgaggggccggagatggaagac

SEQ ID NO: 1455 - DNA, 25 bp, synthetic construct
  misc_feature 1..25: note = Oligonucleotide
  source 1..25: mol_type = other DNA
tggcagtgaggggccggagatggaa

SEQ ID NO: 1456 - DNA, 25 bp, synthetic construct
  misc_feature 1..25: note = Oligonucleotide
  source 1..25: mol_type = other DNA
cagtggcagtgaggggccggagatg

SEQ ID NO: 1457 - DNA, 25 bp, synthetic construct
  misc_feature 1..25: note = Oligonucleotide
  source 1..25: mol_type = other DNA
tggcagtggcagtgaggggccggag

SEQ ID NO: 1458 - DNA, 25 bp, synthetic construct
  misc_feature 1..25: note = Oligonucleotide
  source 1..25: mol_type = other DNA
gggtggcagtggcagtgaggggccg

SEQ ID NO: 1459 - DNA, 25 bp, synthetic construct
  misc_feature 1..25: note = Oligonucleotide
  source 1..25: mol_type = other DNA
gtggggtggcagtggcagtgagggg

SEQ ID NO: 1460 - DNA, 25 bp, synthetic construct
  misc_feature 1..25: note = Oligonucleotide
  source 1..25: mol_type = other DNA
gttgtggggtggcagtggcagtgag

SEQ ID NO: 1461 - DNA, 25 bp, synthetic construct
  misc_feature 1..25: note = Oligonucleotide
  source 1..25: mol_type = other DNA
cccgttgtggggtggcagtggcagt

SEQ ID NO: 1462 - DNA, 25 bp, synthetic construct
  misc_feature 1..25: note = Oligonucleotide
  source 1..25: mol_type = other DNA
tgccccgttgtggggtggcagtggc

SEQ ID NO: 1463 - DNA, 25 bp, synthetic construct
  misc_feature 1..25: note = Oligonucleotide
  source 1..25: mol_type = other DNA
ccctgccccgttgtggggtggcagt

SEQ ID NO: 1464 - DNA, 25 bp, synthetic construct
  misc_feature 1..25: note = Oligonucleotide
  source 1..25: mol_type = other DNA
gtcccctgccccgttgtggggtggc

SEQ ID NO: 1465 - DNA, 25 bp, synthetic construct
  misc_feature 1..25: note = Oligonucleotide
  source 1..25: mol_type = other DNA
agcgtcccctgccccgttgtggggt

SEQ ID NO: 1466 - DNA, 25 bp, synthetic construct
  misc_feature 1..25: note = Oligonucleotide
  source 1..25: mol_type = other DNA
tggagcgtcccctgccccgttgtgg

SEQ ID NO: 1467 - DNA, 25 bp, synthetic construct
  misc_feature 1..25: note = Oligonucleotide
  source 1..25: mol_type = other DNA
agctggagcgtcccctgccccgttg

SEQ ID NO: 1468 - DNA, 25 bp, synthetic construct
  misc_feature 1..25: note = Oligonucleotide
  source 1..25: mol_type = other DNA
accagctggagcgtcccctgccccg

SEQ ID NO: 1469 - DNA, 25 bp, synthetic construct
  misc_feature 1..25: note = Oligonucleotide
  source 1..25: mol_type = other DNA
cagaccagctggagcgtcccctgcc

SEQ ID NO: 1470 - DNA, 25 bp, synthetic construct
  misc_feature 1..25: note = Oligonucleotide
  source 1..25: mol_type = other DNA
ccccagaccagctggagcgtcccct

SEQ ID NO: 1471 - DNA, 25 bp, synthetic construct
  misc_feature 1..25: note = Oligonucleotide
  source 1..25: mol_type = other DNA
caaccccagaccagctggagcgtcc

SEQ ID NO: 1472 - DNA, 25 bp, synthetic construct
  misc_feature 1..25: note = Oligonucleotide
  source 1..25: mol_type = other DNA
ggccaaccccagaccagctggagcg

SEQ ID NO: 1473 - DNA, 25 bp, synthetic construct
  misc_feature 1..25: note = Oligonucleotide
  source 1..25: mol_type = other DNA
cctggccaaccccagaccagctgga

SEQ ID NO: 1474 - DNA, 25 bp, synthetic construct
  misc_feature 1..25: note = Oligonucleotide
  source 1..25: mol_type = other DNA
ggccctggccaaccccagaccagct

SEQ ID NO: 1475 - DNA, 25 bp, synthetic construct
  misc_feature 1..25: note = Oligonucleotide
  source 1..25: mol_type = other DNA
tagggccctggccaaccccagacca

SEQ ID NO: 1476 - DNA, 25 bp, synthetic construct
  misc_feature 1..25: note = Oligonucleotide
  source 1..25: mol_type = other DNA
cactagggccctggccaaccccaga

SEQ ID NO: 1477 - DNA, 25 bp, synthetic construct
  misc_feature 1..25: note = Oligonucleotide
  source 1..25: mol_type = other DNA
ggccactagggccctggccaacccc

SEQ ID NO: 1478 - DNA, 25 bp, synthetic construct
  misc_feature 1..25: note = Oligonucleotide
  source 1..25: mol_type = other DNA
gcgggccactagggccctggccaac

SEQ ID NO: 1479 - DNA, 25 bp, synthetic construct
  misc_feature 1..25: note = Oligonucleotide
  source 1..25: mol_type = other DNA
agggcgggccactagggccctggcc

SEQ ID NO: 1480 - DNA, 25 bp, synthetic construct
  misc_feature 1..25: note = Oligonucleotide
  source 1..25: mol_type = other DNA
cccagggcgggccactagggccctg

SEQ ID NO: 1481 - DNA, 25 bp, synthetic construct
  misc_feature 1..25: note = Oligonucleotide
  source 1..25: mol_type = other DNA
ggccccagggcgggccactagggcc

SEQ ID NO: 1482 - DNA, 25 bp, synthetic construct
  misc_feature 1..25: note = Oligonucleotide
  source 1..25: mol_type = other DNA
tggggccccagggcgggccactagg

SEQ ID NO: 1483 - DNA, 25 bp, synthetic construct
  misc_feature 1..25: note = Oligonucleotide
  source 1..25: mol_type = other DNA
agctggggccccagggcgggccact

SEQ ID NO: 1484 - DNA, 25 bp, synthetic construct
  misc_feature 1..25: note = Oligonucleotide
  source 1..25: mol_type = other DNA
ccgagctggggccccagggcgggcc

SEQ ID NO: 1485 - DNA, 25 bp, synthetic construct
  misc_feature 1..25: note = Oligonucleotide
  source 1..25: mol_type = other DNA
gggccgagctggggccccagggcgg

SEQ ID NO: 1486 - DNA, 25 bp, synthetic construct
  misc_feature 1..25: note = Oligonucleotide
  source 1..25: mol_type = other DNA
gaggggccgagctggggccccaggg

SEQ ID NO: 1487 - DNA, 25 bp, synthetic construct
  misc_feature 1..25: note = Oligonucleotide
  source 1..25: mol_type = other DNA
ggcgaggggccgagctggggcccca

SEQ ID NO: 1488 - DNA, 25 bp, synthetic construct
  misc_feature 1..25: note = Oligonucleotide
  source 1..25: mol_type = other DNA
cgaggcgaggggccgagctggggcc

SEQ ID NO: 1489 - DNA, 25 bp, synthetic construct
  misc_feature 1..25: note = Oligonucleotide
  source 1..25: mol_type = other DNA
cagcgaggcgaggggccgagctggg

SEQ ID NO: 1490 - DNA, 25 bp, synthetic construct
  misc_feature 1..25: note = Oligonucleotide
  source 1..25: mol_type = other DNA
gctcagcgaggcgaggggccgagct

SEQ ID NO: 1491 - DNA, 25 bp, synthetic construct
  misc_feature 1..25: note = Oligonucleotide
  source 1..25: mol_type = other DNA
agagctcagcgaggcgaggggccga

SEQ ID NO: 1492 - DNA, 25 bp, synthetic construct
  misc_feature 1..25: note = Oligonucleotide
  source 1..25: mol_type = other DNA
actagagctcagcgaggcgaggggc

SEQ ID NO: 1493 - DNA, 25 bp, synthetic construct
  misc_feature 1..25: note = Oligonucleotide
  source 1..25: mol_type = other DNA
cacactagagctcagcgaggcgagg

SEQ ID NO: 1494 - DNA, 25 bp, synthetic construct
  misc_feature 1..25: note = Oligonucleotide
  source 1..25: mol_type = other DNA
gggcacactagagctcagcgaggcg

SEQ ID NO: 1495 - DNA, 25 bp, synthetic construct
  misc_feature 1..25: note = Oligonucleotide
  source 1..25: mol_type = other DNA
gtggggcacactagagctcagcgag

SEQ ID NO: 1496 - DNA, 25 bp, synthetic construct
  misc_feature 1..25: note = Oligonucleotide
  source 1..25: mol_type = other DNA
tcggtggggcacactagagctcagc

SEQ ID NO: 1497 - DNA, 25 bp, synthetic construct
  misc_feature 1..25: note = Oligonucleotide
  source 1..25: mol_type = other DNA
gggtcggtggggcacactagagctc

SEQ ID NO: 1498 - DNA, 25 bp, synthetic construct
  misc_feature 1..25: note = Oligonucleotide
  source 1..25: mol_type = other DNA
gaagggtcggtggggcacactagag

SEQ ID NO: 1499 - DNA, 25 bp, synthetic construct
  misc_feature 1..25: note = Oligonucleotide
  source 1..25: mol_type = other DNA
cctgaagggtcggtggggcacacta

SEQ ID NO: 1500 - DNA, 25 bp, synthetic construct
  misc_feature 1..25: note = Oligonucleotide
  source 1..25: mol_type = other DNA
gcacctgaagggtcggtggggcaca

SEQ ID NO: 1501 - DNA, 25 bp, synthetic construct
  misc_feature 1..25: note = Oligonucleotide
  source 1..25: mol_type = other DNA
gcagcacctgaagggtcggtggggc

SEQ ID NO: 1502 - DNA, 25 bp, synthetic construct
  misc_feature 1..25: note = Oligonucleotide
  source 1..25: mol_type = other DNA
cgagcagcacctgaagggtcggtgg

SEQ ID NO: 1503 - DNA, 25 bp, synthetic construct
  misc_feature 1..25: note = Oligonucleotide
  source 1..25: mol_type = other DNA
ccacgagcagcacctgaagggtcgg

SEQ ID NO: 1504 - DNA, 25 bp, synthetic construct
  misc_feature 1..25: note = Oligonucleotide
  source 1..25: mol_type = other DNA
ccaccacgagcagcacctgaagggt

SEQ ID NO: 1505 - DNA, 25 bp, synthetic construct
  misc_feature 1..25: note = Oligonucleotide
  source 1..25: mol_type = other DNA
ctcccaccacgagcagcacctgaag

SEQ ID NO: 1506 - DNA, 25 bp, synthetic construct
  misc_feature 1..25: note = Oligonucleotide
  source 1..25: mol_type = other DNA
cccctcccaccacgagcagcacctg

SEQ ID NO: 1507 - DNA, 25 bp, synthetic construct
  misc_feature 1..25: note = Oligonucleotide
  source 1..25: mol_type = other DNA
ccgcccctcccaccacgagcagcac

SEQ ID NO: 1508 - DNA, 25 bp, synthetic construct
  misc_feature 1..25: note = Oligonucleotide
  source 1..25: mol_type = other DNA
ctgccgcccctcccaccacgagcag

SEQ ID NO: 1509 - DNA, 25 bp, synthetic construct
  misc_feature 1..25: note = Oligonucleotide
  source 1..25: mol_type = other DNA
ggcctgccgcccctcccaccacgag

SEQ ID NO: 1510 - DNA, 25 bp, synthetic construct
  misc_feature 1..25: note = Oligonucleotide
  source 1..25: mol_type = other DNA
cgcggcctgccgcccctcccaccac

SEQ ID NO: 1511 - DNA, 25 bp, synthetic construct
  misc_feature 1..25: note = Oligonucleotide
  source 1..25: mol_type = other DNA
acccgcggcctgccgcccctcccac

SEQ ID NO: 1512 - DNA, 25 bp, synthetic construct
  misc_feature 1..25: note = Oligonucleotide
  source 1..25: mol_type = other DNA
aggacccgcggcctgccgcccctcc

SEQ ID NO: 1513 - DNA, 25 bp, synthetic construct
  misc_feature 1..25: note = Oligonucleotide
  source 1..25: mol_type = other DNA
agcaggacccgcggcctgccgcccc

SEQ ID NO: 1514 - DNA, 25 bp, synthetic construct
  misc_feature 1..25: note = Oligonucleotide
  source 1..25: mol_type = other DNA
cacagcaggacccgcggcctgccgc

SEQ ID NO: 1515 - DNA, 25 bp, synthetic construct
  misc_feature 1..25: note = Oligonucleotide
  source 1..25: mol_type = other DNA
gtgcacagcaggacccgcggcctgc

SEQ ID NO: 1516 - DNA, 25 bp, synthetic construct
  misc_feature 1..25: note = Oligonucleotide
  source 1..25: mol_type = other DNA
cgggtgcacagcaggacccgcggcc

SEQ ID NO: 1517 - DNA, 25 bp, synthetic construct
  misc_feature 1..25: note = Oligonucleotide
  source 1..25: mol_type = other DNA
ccgcgggtgcacagcaggacccgcg

SEQ ID NO: 1518 - DNA, 25 bp, synthetic construct
  misc_feature 1..25: note = Oligonucleotide
  source 1..25: mol_type = other DNA
gtcccgcgggtgcacagcaggaccc

SEQ ID NO: 1519 - DNA, 25 bp, synthetic construct
  misc_feature 1..25: note = Oligonucleotide
  source 1..25: mol_type = other DNA
ctggtcccgcgggtgcacagcagga

SEQ ID NO: 1520 - DNA, 25 bp, synthetic construct
  misc_feature 1..25: note = Oligonucleotide
  source 1..25: mol_type = other DNA
cggctggtcccgcgggtgcacagca

SEQ ID NO: 1521 - DNA, 25 bp, synthetic construct
  misc_feature 1..25: note = Oligonucleotide
  source 1..25: mol_type = other DNA
ggccggctggtcccgcgggtgcaca

SEQ ID NO: 1522 - DNA, 25 bp, synthetic construct
  misc_feature 1..25: note = Oligonucleotide
  source 1..25: mol_type = other DNA
ccaggccggctggtcccgcgggtgc

SEQ ID NO: 1523 - DNA, 25 bp, synthetic construct
  misc_feature 1..25: note = Oligonucleotide
  source 1..25: mol_type = other DNA
ctcccaggccggctggtcccgcggg

SEQ ID NO: 1524 - DNA, 25 bp, synthetic construct
  misc_feature 1..25: note = Oligonucleotide
  source 1..25: mol_type = other DNA
ggtctcccaggccggctggtcccgc

SEQ ID NO: 1525 - DNA, 25 bp, synthetic construct
  misc_feature 1..25: note = Oligonucleotide
  source 1..25: mol_type = other DNA
gatggtctcccaggccggctggtcc

SEQ ID NO: 1526 - DNA, 25 bp, synthetic construct
  misc_feature 1..25: note = Oligonucleotide
  source 1..25: mol_type = other DNA
gccgatggtctcccaggccggctgg

SEQ ID NO: 1527 - DNA, 25 bp, synthetic construct
  misc_feature 1..25: note = Oligonucleotide
  source 1..25: mol_type = other DNA
ccggccgatggtctcccaggccggc

SEQ ID NO: 1528 - DNA, 25 bp, synthetic construct
  misc_feature 1..25: note = Oligonucleotide
  source 1..25: mol_type = other DNA
cccccggccgatggtctcccaggcc

SEQ ID NO: 1529 - DNA, 25 bp, synthetic construct
  misc_feature 1..25: note = Oligonucleotide
  source 1..25: mol_type = other DNA
tcccccccggccgatggtctcccag

SEQ ID NO: 1530 - DNA, 25 bp, synthetic construct
  misc_feature 1..25: note = Oligonucleotide
  source 1..25: mol_type = other DNA
tcatcccccccggccgatggtctcc

SEQ ID NO: 1531 - DNA, 25 bp, synthetic construct
  misc_feature 1..25: note = Oligonucleotide
  source 1..25: mol_type = other DNA
ccctcatcccccccggccgatggtc

SEQ ID NO: 1532 - DNA, 25 bp, synthetic construct
  misc_feature 1..25: note = Oligonucleotide
  source 1..25: mol_type = other DNA
ctgccctcatcccccccggccgatg

SEQ ID NO: 1533 - DNA, 25 bp, synthetic construct
  misc_feature 1..25: note = Oligonucleotide
  source 1..25: mol_type = other DNA
gccctgccctcatcccccccggccg

SEQ ID NO: 1534 - DNA, 25 bp, synthetic construct
  misc_feature 1..25: note = Oligonucleotide
  source 1..25: mol_type = other DNA
agggccctgccctcatcccccccgg

SEQ ID NO: 1535 - DNA, 25 bp, synthetic construct
  misc_feature 1..25: note = Oligonucleotide
  source 1..25: mol_type = other DNA
ggcagggccctgccctcatcccccc

SEQ ID NO: 1536 - DNA, 25 bp, synthetic construct
  misc_feature 1..25: note = Oligonucleotide
  source 1..25: mol_type = other DNA
agcggcagggccctgccctcatccc

SEQ ID NO: 1537 - DNA, 25 bp, synthetic construct
  misc_feature 1..25: note = Oligonucleotide
  source 1..25: mol_type = other DNA
tggagcggcagggccctgccctcat

SEQ ID NO: 1538 - DNA, 25 bp, synthetic construct
  misc_feature 1..25: note = Oligonucleotide
  source 1..25: mol_type = other DNA
cggtggagcggcagggccctgccct

SEQ ID NO: 1539 - DNA, 25 bp, synthetic construct
  misc_feature 1..25: note = Oligonucleotide
  source 1..25: mol_type = other DNA
ctgcggtggagcggcagggccctgc

SEQ ID NO: 1540 - DNA, 25 bp, synthetic construct
  misc_feature 1..25: note = Oligonucleotide
  source 1..25: mol_type = other DNA
tggctgcggtggagcggcagggccc

SEQ ID NO: 1541 - DNA, 25 bp, synthetic construct
  misc_feature 1..25: note = Oligonucleotide
  source 1..25: mol_type = other DNA
agatggctgcggtggagcggcaggg

SEQ ID NO: 1542 - DNA, 25 bp, synthetic construct
  misc_feature 1..25: note = Oligonucleotide
  source 1..25: mol_type = other DNA
ggaagatggctgcggtggagcggca

SEQ ID NO: 1543 - DNA, 25 bp, synthetic construct
  misc_feature 1..25: note = Oligonucleotide
  source 1..25: mol_type = other DNA
tgaggaagatggctgcggtggagcg

SEQ ID NO: 1544 - DNA, 25 bp, synthetic construct
  misc_feature 1..25: note = Oligonucleotide
  source 1..25: mol_type = other DNA
ctgtgaggaagatggctgcggtgga

SEQ ID NO: 1545 - DNA, 25 bp, synthetic construct
  misc_feature 1..25: note = Oligonucleotide
  source 1..25: mol_type = other DNA
accctgtgaggaagatggctgcggt

SEQ ID NO: 1546 - DNA, 25 bp, synthetic construct
  misc_feature 1..25: note = Oligonucleotide
  source 1..25: mol_type = other DNA
gagaccctgtgaggaagatggctgc

SEQ ID NO: 1547 - DNA, 25 bp, synthetic construct
  misc_feature 1..25: note = Oligonucleotide
  source 1..25: mol_type = other DNA
ggagagaccctgtgaggaagatggc

SEQ ID NO: 1548 - DNA, 25 bp, synthetic construct
  misc_feature 1..25: note = Oligonucleotide
  source 1..25: mol_type = other DNA
tggggagagaccctgtgaggaagat

SEQ ID NO: 1549 - DNA, 25 bp, synthetic construct
  misc_feature 1..25: note = Oligonucleotide
  source 1..25: mol_type = other DNA
ccttggggagagaccctgtgaggaa

SEQ ID NO: 1550 - DNA, 25 bp, synthetic construct
  misc_feature 1..25: note = Oligonucleotide
  source 1..25: mol_type = other DNA
cctccttggggagagaccctgtgag

SEQ ID NO: 1551 - DNA, 25 bp, synthetic construct
  misc_feature 1..25: note = Oligonucleotide
  source 1..25: mol_type = other DNA
ccccctccttggggagagaccctgt

SEQ ID NO: 1552 - DNA, 25 bp, synthetic construct
  misc_feature 1..25: note = Oligonucleotide
  source 1..25: mol_type = other DNA
tagccccctccttggggagagaccc

SEQ ID NO: 1553 - DNA, 25 bp, synthetic construct
  misc_feature 1..25: note = Oligonucleotide
  source 1..25: mol_type = other DNA
agctagccccctccttggggagaga

SEQ ID NO: 1554 - DNA, 25 bp, synthetic construct
  misc_feature 1..25: note = Oligonucleotide
  source 1..25: mol_type = other DNA
ccaagctagccccctccttggggag

SEQ ID NO: 1555 - DNA, 25 bp, synthetic construct
  misc_feature 1..25: note = Oligonucleotide
  source 1..25: mol_type = other DNA
ggaccaagctagccccctccttggg

SEQ ID NO: 1556 - DNA, 25 bp, synthetic construct
  misc_feature 1..25: note = Oligonucleotide
  source 1..25: mol_type = other DNA
tggggaccaagctagccccctcctt

SEQ ID NO: 1557 - DNA, 25 bp, synthetic construct
  misc_feature 1..25: note = Oligonucleotide
  source 1..25: mol_type = other DNA
gcatggggaccaagctagccccctc

SEQ ID NO: 1558 - DNA, 25 bp, synthetic construct
  misc_feature 1..25: note = Oligonucleotide
  source 1..25: mol_type = other DNA
agagcatggggaccaagctagcccc

SEQ ID NO: 1559 - DNA, 25 bp, synthetic construct
  misc_feature 1..25: note = Oligonucleotide
  source 1..25: mol_type = other DNA
ccaagagcatggggaccaagctagc

SEQ ID NO: 1560 - DNA, 25 bp, synthetic construct
  misc_feature 1..25: note = Oligonucleotide
  source 1..25: mol_type = other DNA
tgcccaagagcatggggaccaagct

SEQ ID NO: 1561 - DNA, 25 bp, synthetic construct
  misc_feature 1..25: note = Oligonucleotide
  source 1..25: mol_type = other DNA
agttgcccaagagcatggggaccaa

SEQ ID NO: 1562 - DNA, 25 bp, synthetic construct
  misc_feature 1..25: note = Oligonucleotide
  source 1..25: mol_type = other DNA
tgtagttgcccaagagcatggggac

SEQ ID NO: 1563 - DNA, 25 bp, synthetic construct
  misc_feature 1..25: note = Oligonucleotide
  source 1..25: mol_type = other DNA
tgctgtagttgcccaagagcatggg

SEQ ID NO: 1564 - DNA, 25 bp, synthetic construct
  misc_feature 1..25: note = Oligonucleotide
  source 1..25: mol_type = other DNA
ctctgctgtagttgcccaagagcat

SEQ ID NO: 1565 - DNA, 25 bp, synthetic construct
  misc_feature 1..25: note = Oligonucleotide
  source 1..25: mol_type = other DNA
cttctctgctgtagttgcccaagag

SEQ ID NO: 1566 - DNA, 25 bp, synthetic construct
  misc_feature 1..25: note = Oligonucleotide
  source 1..25: mol_type = other DNA
aggcttctctgctgtagttgcccaa

SEQ ID NO: 1567 - DNA, 25 bp, synthetic construct
  misc_feature 1..25: note = Oligonucleotide
  source 1..25: mol_type = other DNA
gggaggcttctctgctgtagttgcc

SEQ ID NO: 1568 - DNA, 25 bp, synthetic construct
  misc_feature 1..25: note = Oligonucleotide
  source 1..25: mol_type = other DNA
gcagggaggcttctctgctgtagtt

SEQ ID NO: 1569 - DNA, 25 bp, synthetic construct
  misc_feature 1..25: note = Oligonucleotide
  source 1..25: mol_type = other DNA
aaggcagggaggcttctctgctgta

SEQ ID NO: 1570 - DNA, 25 bp, synthetic construct
  misc_feature 1..25: note = Oligonucleotide
  source 1..25: mol_type = other DNA
tccaaggcagggaggcttctctgct

SEQ ID NO: 1571 - DNA, 25 bp, synthetic construct
  misc_feature 1..25: note = Oligonucleotide
  source 1..25: mol_type = other DNA
gggtccaaggcagggaggcttctct

SEQ ID NO: 1572 - DNA, 25 bp, synthetic construct
  misc_feature 1..25: note = Oligonucleotide
  source 1..25: mol_type = other DNA
ttggggtccaaggcagggaggcttc

SEQ ID NO: 1573 - DNA, 25 bp, synthetic construct
  misc_feature 1..25: note = Oligonucleotide
  source 1..25: mol_type = other DNA
actttggggtccaaggcagggaggc

SEQ ID NO: 1574 - DNA, 25 bp, synthetic construct
  misc_feature 1..25: note = Oligonucleotide
  source 1..25: mol_type = other DNA
gagactttggggtccaaggcaggga

SEQ ID NO: 1575 - DNA, 25 bp, synthetic construct
  misc_feature 1..25: note = Oligonucleotide
  source 1..25: mol_type = other DNA
caggagactttggggtccaaggcag

SEQ ID NO: 1576 - DNA, 25 bp, synthetic construct
  misc_feature 1..25: note = Oligonucleotide
  source 1..25: mol_type = other DNA
ggacaggagactttggggtccaagg

SEQ ID NO: 1577 - DNA, 25 bp, synthetic construct
  misc_feature 1..25: note = Oligonucleotide
  source 1..25: mol_type = other DNA
gcaggacaggagactttggggtcca

SEQ ID NO: 1578 - DNA, 25 bp, synthetic construct
  misc_feature 1..25: note = Oligonucleotide
  source 1..25: mol_type = other DNA
agggcaggacaggagactttggggt

SEQ ID NO: 1579 - DNA, 25 bp, synthetic construct
  misc_feature 1..25: note = Oligonucleotide
  source 1..25: mol_type = other DNA
taaagggcaggacaggagactttgg

SEQ ID NO: 1580 - DNA, 25 bp, synthetic construct
  misc_feature 1..25: note = Oligonucleotide
  source 1..25: mol_type = other DNA
acataaagggcaggacaggagactt

SEQ ID NO: 1581 - DNA, 25 bp, synthetic construct
  misc_feature 1..25: note = Oligonucleotide
  source 1..25: mol_type = other DNA
cacacataaagggcaggacaggaga

SEQ ID NO: 1582 - DNA, 25 bp, synthetic construct
  misc_feature 1..25: note = Oligonucleotide
  source 1..25: mol_type = other DNA
ccacacacataaagggcaggacagg

SEQ ID NO: 1583 - DNA, 25 bp, synthetic construct
  misc_feature 1..25: note = Oligonucleotide
  source 1..25: mol_type = other DNA
cacccacacacataaagggcaggac

SEQ ID NO: 1584 - DNA, 25 bp, synthetic construct
  misc_feature 1..25: note = Oligonucleotide
  source 1..25: mol_type = other DNA
tttcacccacacacataaagggcag

SEQ ID NO: 1585 - DNA, 25 bp, synthetic construct
  misc_feature 1..25: note = Oligonucleotide
  source 1..25: mol_type = other DNA
cagtttcacccacacacataaaggg

SEQ ID NO: 1586 - DNA, 25 bp, synthetic construct
  misc_feature 1..25: note = Oligonucleotide
  source 1..25: mol_type = other DNA
acccagtttcacccacacacataaa

SEQ ID NO: 1587 - DNA, 25 bp, synthetic construct
  misc_feature 1..25: note = Oligonucleotide
  source 1..25: mol_type = other DNA
cgcacccagtttcacccacacacat

SEQ ID NO: 1588 - DNA, 25 bp, synthetic construct
  misc_feature 1..25: note = Oligonucleotide
  source 1..25: mol_type = other DNA
agacgcacccagtttcacccacaca

SEQ ID NO: 1589 - DNA, 25 bp, synthetic construct
  misc_feature 1..25: note = Oligonucleotide
  source 1..25: mol_type = other DNA
ctcagacgcacccagtttcacccac

SEQ ID NO: 1590 - DNA, 25 bp, synthetic construct
  misc_feature 1..25: note = Oligonucleotide
  source 1..25: mol_type = other DNA
gtgctcagacgcacccagtttcacc

SEQ ID NO: 1591 - DNA, 25 bp, synthetic construct
  misc_feature 1..25: note = Oligonucleotide
  source 1..25: mol_type = other DNA
cacgtgctcagacgcacccagtttc

SEQ ID NO: 1592 - DNA, 25 bp, synthetic construct
  misc_feature 1..25: note = Oligonucleotide
  source 1..25: mol_type = other DNA
tcccacgtgctcagacgcacccagt

SEQ ID NO: 1593 - DNA, 25 bp, synthetic construct
  misc_feature 1..25: note = Oligonucleotide
  source 1..25: mol_type = other DNA
ggctcccacgtgctcagacgcaccc

SEQ ID NO: 1594 - DNA, 25 bp, synthetic construct
  misc_feature 1..25: note = Oligonucleotide
  source 1..25: mol_type = other DNA
cacggctcccacgtgctcagacgca

SEQ ID NO: 1595 - DNA, 25 bp, synthetic construct
  misc_feature 1..25: note = Oligonucleotide
  source 1..25: mol_type = other DNA
acacacggctcccacgtgctcagac

SEQ ID NO: 1596 - DNA, 25 bp, synthetic construct
  misc_feature 1..25: note = Oligonucleotide
  source 1..25: mol_type = other DNA
cacacacacggctcccacgtgctca

SEQ ID NO: 1597 - DNA, 25 bp, synthetic construct
  misc_feature 1..25: note = Oligonucleotide
  source 1..25: mol_type = other DNA
aggcacacacacggctcccacgtgc

SEQ ID NO: 1598 - DNA, 25 bp, synthetic construct
  misc_feature 1..25: note = Oligonucleotide
  source 1..25: mol_type = other DNA
atcaggcacacacacggctcccacg

SEQ ID NO: 1599 - DNA, 25 bp, synthetic construct
  misc_feature 1..25: note = Oligonucleotide
  source 1..25: mol_type = other DNA
gtaatcaggcacacacacggctccc

SEQ ID NO: 1600 - DNA, 25 bp, synthetic construct
  misc_feature 1..25: note = Oligonucleotide
  source 1..25: mol_type = other DNA
tcagtaatcaggcacacacacggct

SEQ ID NO: 1601 - DNA, 25 bp, synthetic construct
  misc_feature 1..25: note = Oligonucleotide
  source 1..25: mol_type = other DNA
cactcagtaatcaggcacacacacg

SEQ ID NO: 1602 - DNA, 25 bp, synthetic construct
  misc_feature 1..25: note = Oligonucleotide
  source 1..25: mol_type = other DNA
ggccactcagtaatcaggcacacac

SEQ ID NO: 1603 - DNA, 25 bp, synthetic construct
  misc_feature 1..25: note = Oligonucleotide
  source 1..25: mol_type = other DNA
ggtggccactcagtaatcaggcaca

SEQ ID NO: 1604 - DNA, 25 bp, synthetic construct
  misc_feature 1..25: note = Oligonucleotide
  source 1..25: mol_type = other DNA
cctggtggccactcagtaatcaggc

SEQ ID NO: 1605 - DNA, 25 bp, synthetic construct
  misc_feature 1..25: note = Oligonucleotide
  source 1..25: mol_type = other DNA
gcccctggtggccactcagtaatca

SEQ ID NO: 1606 - DNA, 25 bp, synthetic construct
  misc_feature 1..25: note = Oligonucleotide
  source 1..25: mol_type = other DNA
gcggcccctggtggccactcagtaa

SEQ ID NO: 1607 - DNA, 25 bp, synthetic construct
  misc_feature 1..25: note = Oligonucleotide
  source 1..25: mol_type = other DNA
agagcggcccctggtggccactcag

SEQ ID NO: 1608 - DNA, 25 bp, synthetic construct
  misc_feature 1..25: note = Oligonucleotide
  source 1..25: mol_type = other DNA
tccagagcggcccctggtggccact

SEQ ID NO: 1609 - DNA, 25 bp, synthetic construct
  misc_feature 1..25: note = Oligonucleotide
  source 1..25: mol_type = other DNA
tagtccagagcggcccctggtggcc

SEQ ID NO: 1610 - DNA, 25 bp, synthetic construct
  misc_feature 1..25: note = Oligonucleotide
  source 1..25: mol_type = other DNA
cgctagtccagagcggcccctggtg

SEQ ID NO: 1611 - DNA, 25 bp, synthetic construct
  misc_feature 1..25: note = Oligonucleotide
  source 1..25: mol_type = other DNA
ccgcgctagtccagagcggcccctg

SEQ ID NO: 1612 - DNA, 25 bp, synthetic construct
  misc_feature 1..25: note = Oligonucleotide
  source 1..25: mol_type = other DNA
gccccgcgctagtccagagcggccc

SEQ ID NO: 1613 - DNA, 25 bp, synthetic construct
  misc_feature 1..25: note = Oligonucleotide
  source 1..25: mol_type = other DNA
acggccccgcgctagtccagagcgg

SEQ ID NO: 1614 - DNA, 25 bp, synthetic construct
  misc_feature 1..25: note = Oligonucleotide
  source 1..25: mol_type = other DNA
tccacggccccgcgctagtccagag

SEQ ID NO: 1615 - DNA, 25 bp, synthetic construct
  misc_feature 1..25: note = Oligonucleotide
  source 1..25: mol_type = other DNA
gcctccacggccccgcgctagtcca

SEQ ID NO: 1616 - DNA, 25 bp, synthetic construct
  misc_feature 1..25: note = Oligonucleotide
  source 1..25: mol_type = other DNA
cacgcctccacggccccgcgctagt

SEQ ID NO: 1617 - DNA, 25 bp, synthetic construct
  misc_feature 1..25: note = Oligonucleotide
  source 1..25: mol_type = other DNA
gtgcacgcctccacggccccgcgct

SEQ ID NO: 1618 - DNA, 25 bp, synthetic construct
  misc_feature 1..25: note = Oligonucleotide
  source 1..25: mol_type = other DNA
acggtgcacgcctccacggccccgc

SEQ ID NO: 1619 - DNA, 25 bp, synthetic construct
  misc_feature 1..25: note = Oligonucleotide
  source 1..25: mol_type = other DNA
cacacggtgcacgcctccacggccc

SEQ ID NO: 1620 - DNA, 25 bp, synthetic construct
  misc_feature 1..25: note = Oligonucleotide
  source 1..25: mol_type = other DNA
atgcacacggtgcacgcctccacgg

SEQ ID NO: 1621 - DNA, 25 bp, synthetic construct
  misc_feature 1..25: note = Oligonucleotide
  source 1..25: mol_type = other DNA
cgcatgcacacggtgcacgcctcca

SEQ ID NO: 1622 - DNA, 25 bp, synthetic construct
  misc_feature 1..25: note = Oligonucleotide
  source 1..25: mol_type = other DNA
ccacgcatgcacacggtgcacgcct

SEQ ID NO: 1623 - DNA, 25 bp, synthetic construct
  misc_feature 1..25: note = Oligonucleotide
  source 1..25: mol_type = other DNA
accccacgcatgcacacggtgcacg

SEQ ID NO: 1624 - DNA, 25 bp, synthetic construct
  misc_feature 1..25: note = Oligonucleotide
  source 1..25: mol_type = other DNA
tacaccccacgcatgcacacggtgc

SEQ ID NO: 1625 - DNA, 25 bp, synthetic construct
  misc_feature 1..25: note = Oligonucleotide
  source 1..25: mol_type = other DNA
aggtacaccccacgcatgcacacgg

SEQ ID NO: 1626 - DNA, 25 bp, synthetic construct
  misc_feature 1..25: note = Oligonucleotide
  source 1..25: mol_type = other DNA
cacaggtacaccccacgcatgcaca

SEQ ID NO: 1627 - DNA, 25 bp, synthetic construct
  misc_feature 1..25: note = Oligonucleotide
  source 1..25: mol_type = other DNA
tctcacaggtacaccccacgcatgc

SEQ ID NO: 1628 - DNA, 25 bp, synthetic construct
  misc_feature 1..25: note = Oligonucleotide
  source 1..25: mol_type = other DNA
tgctctcacaggtacaccccacgca

SEQ ID NO: 1629 - DNA, 25 bp, synthetic construct
  misc_feature 1..25: note = Oligonucleotide
  source 1..25: mol_type = other DNA
gggtgctctcacaggtacaccccac

SEQ ID NO: 1630 - DNA, 25 bp, synthetic construct
  misc_feature 1..25: note = Oligonucleotide
  source 1..25: mol_type = other DNA
acagggtgctctcacaggtacaccc

SEQ ID NO: 1631 - DNA, 25 bp, synthetic construct
  misc_feature 1..25: note = Oligonucleotide
  source 1..25: mol_type = other DNA
gagacagggtgctctcacaggtaca

SEQ ID NO: 1632 - DNA, 25 bp, synthetic construct
  misc_feature 1..25: note = Oligonucleotide
  source 1..25: mol_type = other DNA
gaggagacagggtgctctcacaggt

SEQ ID NO: 1633 - DNA, 25 bp, synthetic construct
  misc_feature 1..25: note = Oligonucleotide
  source 1..25: mol_type = other DNA
gaagaggagacagggtgctctcaca

SEQ ID NO: 1634 - DNA, 25 bp, synthetic construct
  misc_feature 1..25: note = Oligonucleotide
  source 1..25: mol_type = other DNA
ttggaagaggagacagggtgctctc

SEQ ID NO: 1635 - DNA, 25 bp, synthetic construct
  misc_feature 1..25: note = Oligonucleotide
  source 1..25: mol_type = other DNA
tctttggaagaggagacagggtgct

SEQ ID NO: 1636 - DNA, 25 bp, synthetic construct
  misc_feature 1..25: note = Oligonucleotide
  source 1..25: mol_type = other DNA
ctttctttggaagaggagacagggt

SEQ ID NO: 1637 - DNA, 25 bp, synthetic construct
  misc_feature 1..25: note = Oligonucleotide
  source 1..25: mol_type = other DNA
tgactttctttggaagaggagacag

SEQ ID NO: 1638 - DNA, 25 bp, synthetic construct
  misc_feature 1..25: note = Oligonucleotide
  source 1..25: mol_type = other DNA
ctctgactttctttggaagaggaga

SEQ ID NO: 1639 - DNA, 25 bp, synthetic construct
  misc_feature 1..25: note = Oligonucleotide
  source 1..25: mol_type = other DNA
ggcctctgactttctttggaagagg

SEQ ID NO: 1640 - DNA, 25 bp, synthetic construct
  misc_feature 1..25: note = Oligonucleotide
  source 1..25: mol_type = other DNA
gatggcctctgactttctttggaag

SEQ ID NO: 1641 - DNA, 25 bp, synthetic construct
  misc_feature 1..25: note = Oligonucleotide
  source 1..25: mol_type = other DNA
caggatggcctctgactttctttgg

SEQ ID NO: 1642 - DNA, 25 bp, synthetic construct
  misc_feature 1..25: note = Oligonucleotide
  source 1..25: mol_type = other DNA
gtgcaggatggcctctgactttctt

SEQ ID NO: 1643 - DNA, 25 bp, synthetic construct
  misc_feature 1..25: note = Oligonucleotide
  source 1..25: mol_type = other DNA
agggtgcaggatggcctctgacttt

SEQ ID NO: 1644 - DNA, 25 bp, synthetic construct
  misc_feature 1..25: note = Oligonucleotide
  source 1..25: mol_type = other DNA
cccagggtgcaggatggcctctgac

SEQ ID NO: 1645 - DNA, 25 bp, synthetic construct
  misc_feature 1..25: note = Oligonucleotide
  source 1..25: mol_type = other DNA
ggacccagggtgcaggatggcctct

SEQ ID NO: 1646 - DNA, 25 bp, synthetic construct
  misc_feature 1..25: note = Oligonucleotide
  source 1..25: mol_type = other DNA
gctggacccagggtgcaggatggcc

SEQ ID NO: 1647 - DNA, 25 bp, synthetic construct
  misc_feature 1..25: note = Oligonucleotide
  source 1..25: mol_type = other DNA
acagctggacccagggtgcaggatg

SEQ ID NO: 1648 - DNA, 25 bp, synthetic construct
  misc_feature 1..25: note = Oligonucleotide
  source 1..25: mol_type = other DNA
caaacagctggacccagggtgcagg

SEQ ID NO: 1649 - DNA, 25 bp, synthetic construct
  misc_feature 1..25: note = Oligonucleotide
  source 1..25: mol_type = other DNA
gggcaaacagctggacccagggtgc

SEQ ID NO: 1650 - DNA, 25 bp, synthetic construct
  misc_feature 1..25: note = Oligonucleotide
  source 1..25: mol_type = other DNA
gctgggcaaacagctggacccaggg

SEQ ID NO: 1651 - DNA, 25 bp, synthetic construct
  misc_feature 1..25: note = Oligonucleotide
  source 1..25: mol_type = other DNA
caggctgggcaaacagctggaccca

SEQ ID NO: 1652 - DNA, 25 bp, synthetic construct
  misc_feature 1..25: note = Oligonucleotide
  source 1..25: mol_type = other DNA
ggacaggctgggcaaacagctggac

SEQ ID NO: 1653 - DNA, 25 bp, synthetic construct
  misc_feature 1..25: note = Oligonucleotide
  source 1..25: mol_type = other DNA
gaaggacaggctgggcaaacagctg

SEQ ID NO: 1654 - DNA, 25 bp, synthetic construct
  misc_feature 1..25: note = Oligonucleotide
  source 1..25: mol_type = other DNA
ctggaaggacaggctgggcaaacag

SEQ ID NO: 1655 - DNA, 25 bp, synthetic construct
  misc_feature 1..25: note = Oligonucleotide
  source 1..25: mol_type = other DNA
gctctggaaggacaggctgggcaaa

SEQ ID NO: 1656 - DNA, 25 bp, synthetic construct
  misc_feature 1..25: note = Oligonucleotide
  source 1..25: mol_type = other DNA
gaggctctggaaggacaggctgggc

SEQ ID NO: 1657 - DNA, 25 bp, synthetic construct
  misc_feature 1..25: note = Oligonucleotide
  source 1..25: mol_type = other DNA
ggtgaggctctggaaggacaggctg

SEQ ID NO: 1658 - DNA, 25 bp, synthetic construct
  misc_feature 1..25: note = Oligonucleotide
  source 1..25: mol_type = other DNA
ctgggtgaggctctggaaggacagg

SEQ ID NO: 1659 - DNA, 25 bp, synthetic construct
  misc_feature 1..25: note = Oligonucleotide
  source 1..25: mol_type = other DNA
aggctgggtgaggctctggaaggac

SEQ ID NO: 1660 - DNA, 25 bp, synthetic construct
  misc_feature 1..25: note = Oligonucleotide
  source 1..25: mol_type = other DNA
ctcaggctgggtgaggctctggaag

SEQ ID NO: 1661 - DNA, 25 bp, synthetic construct
  misc_feature 1..25: note = Oligonucleotide
  source 1..25: mol_type = other DNA
ccgctcaggctgggtgaggctctgg

SEQ ID NO: 1662 - DNA, 25 bp, synthetic construct
  misc_feature 1..25: note = Oligonucleotide
  source 1..25: mol_type = other DNA
accccgctcaggctgggtgaggctc

SEQ ID NO: 1663 - DNA, 25 bp, synthetic construct
  misc_feature 1..25: note = Oligonucleotide
  source 1..25: mol_type = other DNA
ggaaccccgctcaggctgggtgagg

SEQ ID NO: 1664 - DNA, 25 bp, synthetic construct
  misc_feature 1..25: note = Oligonucleotide
  source 1..25: mol_type = other DNA
cagggaaccccgctcaggctgggtg

SEQ ID NO: 1665 - DNA, 25 bp, synthetic construct
  misc_feature 1..25: note = Oligonucleotide
  source 1..25: mol_type = other DNA
caccagggaaccccgctcaggctgg

SEQ ID NO: 1666 - DNA, 25 bp, synthetic construct
  misc_feature 1..25: note = Oligonucleotide
  source 1..25: mol_type = other DNA
attcaccagggaaccccgctcaggc

SEQ ID NO: 1667 - DNA, 25 bp, synthetic construct
  misc_feature 1..25: note = Oligonucleotide
  source 1..25: mol_type = other DNA
gggattcaccagggaaccccgctca

SEQ ID NO: 1668 - DNA, 25 bp, synthetic construct
  misc_feature 1..25: note = Oligonucleotide
  source 1..25: mol_type = other DNA
gcagggattcaccagggaaccccgc

SEQ ID NO: 1669 - DNA, 25 bp, synthetic construct
  misc_feature 1..25: note = Oligonucleotide
  source 1..25: mol_type = other DNA
gcagcagggattcaccagggaaccc

SEQ ID NO: 1670 - DNA, 25 bp, synthetic construct
  misc_feature 1..25: note = Oligonucleotide
  source 1..25: mol_type = other DNA
caagcagcagggattcaccagggaa

SEQ ID NO: 1671 - DNA, 25 bp, synthetic construct
  misc_feature 1..25: note = Oligonucleotide
  source 1..25: mol_type = other DNA
ccccaagcagcagggattcaccagg

SEQ ID NO: 1672 - DNA, 25 bp, synthetic construct
  misc_feature 1..25: note = Oligonucleotide
  source 1..25: mol_type = other DNA
cctccccaagcagcagggattcacc

SEQ ID NO: 1673 - DNA, 25 bp, synthetic construct
  misc_feature 1..25: note = Oligonucleotide
  source 1..25: mol_type = other DNA
gggcctccccaagcagcagggattc

SEQ ID NO: 1674 - DNA, 25 bp, synthetic construct
  misc_feature 1..25: note = Oligonucleotide
  source 1..25: mol_type = other DNA
ttggggcctccccaagcagcaggga

SEQ ID NO: 1675 - DNA, 25 bp, synthetic construct
  misc_feature 1..25: note = Oligonucleotide
  source 1..25: mol_type = other DNA
cccttggggcctccccaagcagcag

SEQ ID NO: 1676 - DNA, 25 bp, synthetic construct
  misc_feature 1..25: note = Oligonucleotide
  source 1..25: mol_type = other DNA
gggcccttggggcctccccaagcag

SEQ ID NO: 1677 - DNA, 25 bp, synthetic construct
  misc_feature 1..25: note = Oligonucleotide
  source 1..25: mol_type = other DNA
aaggggcccttggggcctccccaag

SEQ ID NO: 1678 - DNA, 25 bp, synthetic construct
  misc_feature 1..25: note = Oligonucleotide
  source 1..25: mol_type = other DNA
tccaaggggcccttggggcctcccc

SEQ ID NO: 1679 - DNA, 25 bp, synthetic construct
  misc_feature 1..25: note = Oligonucleotide
  source 1..25: mol_type = other DNA
gcctccaaggggcccttggggcctc

SEQ ID NO: 1680 - DNA, 25 bp, synthetic construct
  misc_feature 1..25: note = Oligonucleotide
  source 1..25: mol_type = other DNA
gctgcctccaaggggcccttggggc

SEQ ID NO: 1681 - DNA, 25 bp, synthetic construct
  misc_feature 1..25: note = Oligonucleotide
  source 1..25: mol_type = other DNA
ggcgctgcctccaaggggcccttgg

SEQ ID NO: 1682 - DNA, 25 bp, synthetic construct
  misc_feature 1..25: note = Oligonucleotide
  source 1..25: mol_type = other DNA
gggggcgctgcctccaaggggccct

SEQ ID NO: 1683 - DNA, 25 bp, synthetic construct
  misc_feature 1..25: note = Oligonucleotide
  source 1..25: mol_type = other DNA
ggtgggggcgctgcctccaaggggc

SEQ ID NO: 1684 - DNA, 25 bp, synthetic construct
  misc_feature 1..25: note = Oligonucleotide
  source 1..25: mol_type = other DNA
caaggtgggggcgctgcctccaagg

SEQ ID NO: 1685 - DNA, 25 bp, synthetic construct
  misc_feature 1..25: note = Oligonucleotide
  source 1..25: mol_type = other DNA
gcccaaggtgggggcgctgcctcca

SEQ ID NO: 1686 - DNA, 25 bp, synthetic construct
  misc_feature 1..25: note = Oligonucleotide
  source 1..25: mol_type = other DNA
gaagcccaaggtgggggcgctgcct

SEQ ID NO: 1687 - DNA, 25 bp, synthetic construct
  misc_feature 1..25: note = Oligonucleotide
  source 1..25: mol_type = other DNA
tcagaagcccaaggtgggggcgctg

SEQ ID NO: 1688 - DNA, 25 bp, synthetic construct
  misc_feature 1..25: note = Oligonucleotide
  source 1..25: mol_type = other DNA
ccctcagaagcccaaggtgggggcg

SEQ ID NO: 1689 - DNA, 25 bp, synthetic construct
  misc_feature 1..25: note = Oligonucleotide
  source 1..25: mol_type = other DNA
atgccctcagaagcccaaggtgggg

SEQ ID NO: 1690 - DNA, 25 bp, synthetic construct
  misc_feature 1..25: note = Oligonucleotide
  source 1..25: mol_type = other DNA
atgatgccctcagaagcccaaggtg

SEQ ID NO: 1691 - DNA, 25 bp, synthetic construct
  misc_feature 1..25: note = Oligonucleotide
  source 1..25: mol_type = other DNA
cctatgatgccctcagaagcccaag

SEQ ID NO: 1692 - DNA, 25 bp, synthetic construct
  misc_feature 1..25: note = Oligonucleotide
  source 1..25: mol_type = other DNA
ccccctatgatgccctcagaagccc

SEQ ID NO: 1693 - DNA, 25 bp, synthetic construct
  misc_feature 1..25: note = Oligonucleotide
  source 1..25: mol_type = other DNA
ggtccccctatgatgccctcagaag

SEQ ID NO: 1694 - DNA, 25 bp, synthetic construct
  misc_feature 1..25: note = Oligonucleotide
  source 1..25: mol_type = other DNA
aggggtccccctatgatgccctcag

SEQ ID NO: 1695 - DNA, 25 bp, synthetic construct
  misc_feature 1..25: note = Oligonucleotide
  source 1..25: mol_type = other DNA
tctaggggtccccctatgatgccct

SEQ ID NO: 1696 - DNA, 25 bp, synthetic construct
  misc_feature 1..25: note = Oligonucleotide
  source 1..25: mol_type = other DNA
gactctaggggtccccctatgatgc

SEQ ID NO: 1697 - DNA, 25 bp, synthetic construct
  misc_feature 1..25: note = Oligonucleotide
  source 1..25: mol_type = other DNA
actgactctaggggtccccctatga

SEQ ID NO: 1698 - DNA, 25 bp, synthetic construct
  misc_feature 1..25: note = Oligonucleotide
  source 1..25: mol_type = other DNA
tgaactgactctaggggtcccccta

SEQ ID NO: 1699 - DNA, 25 bp, synthetic construct
  misc_feature 1..25: note = Oligonucleotide
  source 1..25: mol_type = other DNA
tggtgaactgactctaggggtcccc

SEQ ID NO: 1700 - DNA, 25 bp, synthetic construct
  misc_feature 1..25: note = Oligonucleotide
  source 1..25: mol_type = other DNA
ctgtggtgaactgactctaggggtc

SEQ ID NO: 1701 - DNA, 25 bp, synthetic construct
  misc_feature 1..25: note = Oligonucleotide
  source 1..25: mol_type = other DNA
ggcctgtggtgaactgactctaggg

SEQ ID NO: 1702 - DNA, 25 bp, synthetic construct
  misc_feature 1..25: note = Oligonucleotide
  source 1..25: mol_type = other DNA
cagggcctgtggtgaactgactcta

SEQ ID NO: 1703 - DNA, 25 bp, synthetic construct
  misc_feature 1..25: note = Oligonucleotide
  source 1..25: mol_type = other DNA
ccccagggcctgtggtgaactgact

SEQ ID NO: 1704 - DNA, 25 bp, synthetic construct
  misc_feature 1..25: note = Oligonucleotide
  source 1..25: mol_type = other DNA
tctccccagggcctgtggtgaactg

SEQ ID NO: 1705 - DNA, 25 bp, synthetic construct
  misc_feature 1..25: note = Oligonucleotide
  source 1..25: mol_type = other DNA
gactctccccagggcctgtggtgaa

SEQ ID NO: 1706 - DNA, 25 bp, synthetic construct
  misc_feature 1..25: note = Oligonucleotide
  source 1..25: mol_type = other DNA
tttgactctccccagggcctgtggt

SEQ ID NO: 1707 - DNA, 25 bp, synthetic construct
  misc_feature 1..25: note = Oligonucleotide
  source 1..25: mol_type = other DNA
gtctttgactctccccagggcctgt

SEQ ID NO: 1708 - DNA, 25 bp, synthetic construct
  misc_feature 1..25: note = Oligonucleotide
  source 1..25: mol_type = other DNA
ggggtctttgactctccccagggcc

SEQ ID NO: 1709 - DNA, 25 bp, synthetic construct
  misc_feature 1..25: note = Oligonucleotide
  source 1..25: mol_type = other DNA
tcgggggtctttgactctccccagg

SEQ ID NO: 1710 - DNA, 25 bp, synthetic construct
  misc_feature 1..25: note = Oligonucleotide
  source 1..25: mol_type = other DNA
ccctcgggggtctttgactctcccc

SEQ ID NO: 1711 - DNA, 25 bp, synthetic construct
  misc_feature 1..25: note = Oligonucleotide
  source 1..25: mol_type = other DNA
gcaccctcgggggtctttgactctc

SEQ ID NO: 1712 - DNA, 25 bp, synthetic construct
  misc_feature 1..25: note = Oligonucleotide
  source 1..25: mol_type = other DNA
tgggcaccctcgggggtctttgact

SEQ ID NO: 1713 - DNA, 25 bp, synthetic construct
  misc_feature 1..25: note = Oligonucleotide
  source 1..25: mol_type = other DNA
ggctgggcaccctcgggggtctttg

SEQ ID NO: 1714 - DNA, 25 bp, synthetic construct
  misc_feature 1..25: note = Oligonucleotide
  source 1..25: mol_type = other DNA
gggggctgggcaccctcgggggtct

SEQ ID NO: 1715 - DNA, 25 bp, synthetic construct
  misc_feature 1..25: note = Oligonucleotide
  source 1..25: mol_type = other DNA
gtggggggctgggcaccctcggggg

SEQ ID NO: 1716 - DNA, 25 bp, synthetic construct
  misc_feature 1..25: note = Oligonucleotide
  source 1..25: mol_type = other DNA
agtgtggggggctgggcaccctcgg

SEQ ID NO: 1717 - DNA, 25 bp, synthetic construct
  misc_feature 1..25: note = Oligonucleotide
  source 1..25: mol_type = other DNA
cacagtgtggggggctgggcaccct

SEQ ID NO: 1718 - DNA, 25 bp, synthetic construct
  misc_feature 1..25: note = Oligonucleotide
  source 1..25: mol_type = other DNA
agtcacagtgtggggggctgggcac

SEQ ID NO: 1719 - DNA, 25 bp, synthetic construct
  misc_feature 1..25: note = Oligonucleotide
  source 1..25: mol_type = other DNA
aggagtcacagtgtggggggctggg

SEQ ID NO: 1720 - DNA, 25 bp, synthetic construct
  misc_feature 1..25: note = Oligonucleotide
  source 1..25: mol_type = other DNA
gtgaggagtcacagtgtggggggct

SEQ ID NO: 1721 - DNA, 25 bp, synthetic construct
  misc_feature 1..25: note = Oligonucleotide
  source 1..25: mol_type = other DNA
agtgtgaggagtcacagtgtggggg

SEQ ID NO: 1722 - DNA, 25 bp, synthetic construct
  misc_feature 1..25: note = Oligonucleotide
  source 1..25: mol_type = other DNA
ctgagtgtgaggagtcacagtgtgg

SEQ ID NO: 1723 - DNA, 25 bp, synthetic construct
  misc_feature 1..25: note = Oligonucleotide
  source 1..25: mol_type = other DNA
tcgctgagtgtgaggagtcacagtg

SEQ ID NO: 1724 - DNA, 25 bp, synthetic construct
  misc_feature 1..25: note = Oligonucleotide
  source 1..25: mol_type = other DNA
tcatcgctgagtgtgaggagtcaca

SEQ ID NO: 1725 - DNA, 25 bp, synthetic construct
  misc_feature 1..25: note = Oligonucleotide
  source 1..25: mol_type = other DNA
aggtcatcgctgagtgtgaggagtc

SEQ ID NO: 1726 - DNA, 25 bp, synthetic construct
  misc_feature 1..25: note = Oligonucleotide
  source 1..25: mol_type = other DNA
cacaggtcatcgctgagtgtgagga

SEQ ID NO: 1727 - DNA, 25 bp, synthetic construct
  misc_feature 1..25: note = Oligonucleotide
  source 1..25: mol_type = other DNA
ccccacaggtcatcgctgagtgtga

SEQ ID NO: 1728 - DNA, 25 bp, synthetic construct
  misc_feature 1..25: note = Oligonucleotide
  source 1..25: mol_type = other DNA
ccaccccacaggtcatcgctgagtg

SEQ ID NO: 1729 - DNA, 25 bp, synthetic construct
  misc_feature 1..25: note = Oligonucleotide
  source 1..25: mol_type = other DNA
cccccaccccacaggtcatcgctga

SEQ ID NO: 1730 - DNA, 25 bp, synthetic construct
  misc_feature 1..25: note = Oligonucleotide
  source 1..25: mol_type = other DNA
ggccccccaccccacaggtcatcgc

SEQ ID NO: 1731 - DNA, 25 bp, synthetic construct
  misc_feature 1..25: note = Oligonucleotide
  source 1..25: mol_type = other DNA
cagggccccccaccccacaggtcat

SEQ ID NO: 1732 - DNA, 25 bp, synthetic construct
  misc_feature 1..25: note = Oligonucleotide
  source 1..25: mol_type = other DNA
tcccagggccccccaccccacaggt

SEQ ID NO: 1733 - DNA, 25 bp, synthetic construct
  misc_feature 1..25: note = Oligonucleotide
  source 1..25: mol_type = other DNA
acgtcccagggccccccaccccaca

SEQ ID NO: 1734 - DNA, 25 bp, synthetic construct
  misc_feature 1..25: note = Oligonucleotide
  source 1..25: mol_type = other DNA
aaaacgtcccagggccccccacccc

SEQ ID NO: 1735 - DNA, 25 bp, synthetic construct
  misc_feature 1..25: note = Oligonucleotide
  source 1..25: mol_type = other DNA
ttaaaaacgtcccagggccccccac

SEQ ID NO: 1736 - DNA, 25 bp, synthetic construct
  misc_feature 1..25: note = Oligonucleotide
  source 1..25: mol_type = other DNA
ggtttaaaaacgtcccagggccccc

SEQ ID NO: 1737 - DNA, 25 bp, synthetic construct
  misc_feature 1..25: note = Oligonucleotide
  source 1..25: mol_type = other DNA
ctaggtttaaaaacgtcccagggcc

SEQ ID NO: 1738 - DNA, 25 bp, synthetic construct
  misc_feature 1..25: note = Oligonucleotide
  source 1..25: mol_type = other DNA
accctaggtttaaaaacgtcccagg

SEQ ID NO: 1739 - DNA, 25 bp, synthetic construct
  misc_feature 1..25: note = Oligonucleotide
  source 1..25: mol_type = other DNA
caaaccctaggtttaaaaacgtccc

SEQ ID NO: 1740 - DNA, 25 bp, synthetic construct
  misc_feature 1..25: note = Oligonucleotide
  source 1..25: mol_type = other DNA
ctccaaaccctaggtttaaaaacgt

SEQ ID NO: 1741 - DNA, 25 bp, synthetic construct
  misc_feature 1..25: note = Oligonucleotide
  source 1..25: mol_type = other DNA
agactccaaaccctaggtttaaaaa

SEQ ID NO: 1742 - DNA, 25 bp, synthetic construct
  misc_feature 1..25: note = Oligonucleotide
  source 1..25: mol_type = other DNA
tccagactccaaaccctaggtttaa

SEQ ID NO: 1743 - DNA, 25 bp, synthetic construct
  misc_feature 1..25: note = Oligonucleotide
  source 1..25: mol_type = other DNA
tagtccagactccaaaccctaggtt

SEQ ID NO: 1744 - DNA, 25 bp, synthetic construct
  misc_feature 1..25: note = Oligonucleotide
  source 1..25: mol_type = other DNA
gcttagtccagactccaaaccctag

SEQ ID NO: 1745 - DNA, 25 bp, synthetic construct
  misc_feature 1..25: note = Oligonucleotide
  source 1..25: mol_type = other DNA
ggagcttagtccagactccaaaccc

SEQ ID NO: 1746 - DNA, 25 bp, synthetic construct
  misc_feature 1..25: note = Oligonucleotide
  source 1..25: mol_type = other DNA
gatggagcttagtccagactccaaa

SEQ ID NO: 1747 - DNA, 25 bp, synthetic construct
  misc_feature 1..25: note = Oligonucleotide
  source 1..25: mol_type = other DNA
gtggatggagcttagtccagactcc

SEQ ID NO: 1748 - DNA, 25 bp, synthetic construct
  misc_feature 1..25: note = Oligonucleotide
  source 1..25: mol_type = other DNA
gacgtggatggagcttagtccagac

SEQ ID NO: 1749 - DNA, 25 bp, synthetic construct
  misc_feature 1..25: note = Oligonucleotide
  source 1..25: mol_type = other DNA
agtgacgtggatggagcttagtcca

SEQ ID NO: 1750 - DNA, 25 bp, synthetic construct
  misc_feature 1..25: note = Oligonucleotide
  source 1..25: mol_type = other DNA
gtgagtgacgtggatggagcttagt

SEQ ID NO: 1751 - DNA, 25 bp, synthetic construct
  misc_feature 1..25: note = Oligonucleotide
  source 1..25: mol_type = other DNA
cttgtgagtgacgtggatggagctt

SEQ ID NO: 1752 - DNA, 25 bp, synthetic construct
  misc_feature 1..25: note = Oligonucleotide
  source 1..25: mol_type = other DNA
aaacttgtgagtgacgtggatggag

SEQ ID NO: 1753 - DNA, 25 bp, synthetic construct
  misc_feature 1..25: note = Oligonucleotide
  source 1..25: mol_type = other DNA
cagaaacttgtgagtgacgtggatg

SEQ ID NO: 1754 - DNA, 25 bp, synthetic construct
  misc_feature 1..25: note = Oligonucleotide
  source 1..25: mol_type = other DNA
aaacagaaacttgtgagtgacgtgg

SEQ ID NO: 1755 - DNA, 25 bp, synthetic construct
  misc_feature 1..25: note = Oligonucleotide
  source 1..25: mol_type = other DNA
tataaacagaaacttgtgagtgacg

SEQ ID NO: 1756 - DNA, 25 bp, synthetic construct
  misc_feature 1..25: note = Oligonucleotide
  source 1..25: mol_type = other DNA
aaatataaacagaaacttgtgagtg

SEQ ID NO: 1757 - DNA, 25 bp, synthetic construct
  misc_feature 1..25: note = Oligonucleotide
  source 1..25: mol_type = other DNA
tagaaatataaacagaaacttgtga

SEQ ID NO: 1758 - DNA, 25 bp, synthetic construct
  misc_feature 1..25: note = Oligonucleotide
  source 1..25: mol_type = other DNA
agctagaaatataaacagaaacttg

SEQ ID NO: 1759 - DNA, 25 bp, synthetic construct
  misc_feature 1..25: note = Oligonucleotide
  source 1..25: mol_type = other DNA
aaaagctagaaatataaacagaaac

SEQ ID NO: 1760 - DNA, 25 bp, synthetic construct
  misc_feature 1..25: note = Oligonucleotide
  source 1..25: mol_type = other DNA
aaaaaaagctagaaatataaacaga

SEQ ID NO: 1761 - DNA, 25 bp, synthetic construct
  misc_feature 1..25: note = Oligonucleotide
  source 1..25: mol_type = other DNA
attaaaaaaagctagaaatataaac

SEQ ID NO: 1762 - DNA, 25 bp, synthetic construct
  misc_feature 1..25: note = Oligonucleotide
  source 1..25: mol_type = other DNA
tttattaaaaaaagctagaaatata

SEQ ID NO: 1763 - DNA, 25 bp, synthetic construct
  misc_feature 1..25: note = Oligonucleotide
  source 1..25: mol_type = other DNA
tattttattaaaaaaagctagaaat

SEQ ID NO: 1764 - DNA, 25 bp, synthetic construct
  misc_feature 1..25: note = Oligonucleotide
  source 1..25: mol_type = other DNA
ttttattttattaaaaaaagctaga

SEQ ID NO: 1765 - DNA, 25 bp, synthetic construct
  misc_feature 1..25: note = Oligonucleotide
  source 1..25: mol_type = other DNA
tttttttattttattaaaaaaagct

SEQ ID NO: 1766 - DNA, 25 bp, synthetic construct
  misc_feature 1..25: note = Oligonucleotide
  source 1..25: mol_type = other DNA
ttttttttttattttattaaaaaaa

SEQ ID NO: 1767 - DNA, 25 bp, synthetic construct
  misc_feature 1..25: note = Oligonucleotide
  source 1..25: mol_type = other DNA
tctttttttttttattttattaaaa

SEQ ID NO: 1768 - DNA, 25 bp, synthetic construct
  misc_feature 1..25: note = Oligonucleotide
  source 1..25: mol_type = other DNA
ttttctttttttttttattttatta

SEQ ID NO: 1769 - DNA, 25 bp, synthetic construct
  misc_feature 1..25: note = Oligonucleotide
  source 1..25: mol_type = other DNA
ctgttttctttttttttttatttta

SEQ ID NO: 1770 - DNA, 25 bp, synthetic construct
  misc_feature 1..25: note = Oligonucleotide
  source 1..25: mol_type = other DNA
cttctgttttctttttttttttatt

SEQ ID NO: 1771 - DNA, 25 bp, synthetic construct
  misc_feature 1..25: note = Oligonucleotide
  source 1..25: mol_type = other DNA
aaacttctgttttcttttttttttt

SEQ ID NO: 1772 - DNA, 25 bp, synthetic construct
  misc_feature 1..25: note = Oligonucleotide
  source 1..25: mol_type = other DNA
tgaaaacttctgttttctttttttt

SEQ ID NO: 1773 - DNA, 25 bp, synthetic construct
  misc_feature 1..25: note = Oligonucleotide
  source 1..25: mol_type = other DNA
ttgtgaaaacttctgttttcttttt

SEQ ID NO: 1774 - DNA, 25 bp, synthetic construct
  misc_feature 1..25: note = Oligonucleotide
  source 1..25: mol_type = other DNA
gggttgtgaaaacttctgttttctt

SEQ ID NO: 1775 - DNA, 25 bp, synthetic construct
  misc_feature 1..25: note = Oligonucleotide
  source 1..25: mol_type = other DNA
cctgggttgtgaaaacttctgtttt

SEQ ID NO: 1776 - DNA, 25 bp, synthetic construct
  misc_feature 1..25: note = Oligonucleotide
  source 1..25: mol_type = other DNA
gcccctgggttgtgaaaacttctgt

SEQ ID NO: 1777 - DNA, 25 bp, synthetic construct
  misc_feature 1..25: note = Oligonucleotide
  source 1..25: mol_type = other DNA
caggcccctgggttgtgaaaacttc

SEQ ID NO: 1778 - DNA, 25 bp, synthetic construct
  misc_feature 1..25: note = Oligonucleotide
  source 1..25: mol_type = other DNA
tgccaggcccctgggttgtgaaaac

SEQ ID NO: 1779 - DNA, 25 bp, synthetic construct
  misc_feature 1..25: note = Oligonucleotide
  source 1..25: mol_type = other DNA
gcgtgccaggcccctgggttgtgaa

SEQ ID NO: 1780 - DNA, 25 bp, synthetic construct
  misc_feature 1..25: note = Oligonucleotide
  source 1..25: mol_type = other DNA
ccggcgtgccaggcccctgggttgt

SEQ ID NO: 1781 - DNA, 25 bp, synthetic construct
  misc_feature 1..25: note = Oligonucleotide
  source 1..25: mol_type = other DNA
agaccggcgtgccaggcccctgggt

SEQ ID NO: 1782 - DNA, 25 bp, synthetic construct
  misc_feature 1..25: note = Oligonucleotide
  source 1..25: mol_type = other DNA
cacagaccggcgtgccaggcccctg

SEQ ID NO: 1783 - DNA, 25 bp, synthetic construct
  misc_feature 1..25: note = Oligonucleotide
  source 1..25: mol_type = other DNA
aggcacagaccggcgtgccaggccc

SEQ ID NO: 1784 - DNA, 25 bp, synthetic construct
  misc_feature 1..25: note = Oligonucleotide
  source 1..25: mol_type = other DNA
ggcaggcacagaccggcgtgccagg

SEQ ID NO: 1785 - DNA, 25 bp, synthetic construct
  misc_feature 1..25: note = Oligonucleotide
  source 1..25: mol_type = other DNA
gcgggcaggcacagaccggcgtgcc

SEQ ID NO: 1786 - DNA, 25 bp, synthetic construct
  misc_feature 1..25: note = Oligonucleotide
  source 1..25: mol_type = other DNA
ggggcgggcaggcacagaccggcgt

SEQ ID NO: 1787 - DNA, 25 bp, synthetic construct
  misc_feature 1..25: note = Oligonucleotide
  source 1..25: mol_type = other DNA
ggcggggcgggcaggcacagaccgg

SEQ ID NO: 1788 - DNA, 25 bp, synthetic construct
  misc_feature 1..25: note = Oligonucleotide
  source 1..25: mol_type = other DNA
cagggcggggcgggcaggcacagac

SEQ ID NO: 1789 - DNA, 25 bp, synthetic construct
  misc_feature 1..25: note = Oligonucleotide
  source 1..25: mol_type = other DNA
ggccagggcggggcgggcaggcaca

SEQ ID NO: 1790 - DNA, 25 bp, synthetic construct
  misc_feature 1..25: note = Oligonucleotide
  source 1..25: mol_type = other DNA
gtgggccagggcggggcgggcaggc

SEQ ID NO: 1791 - DNA, 25 bp, synthetic construct
  misc_feature 1..25: note = Oligonucleotide
  source 1..25: mol_type = other DNA
ccggtgggccagggcggggcgggca

SEQ ID NO: 1792 - DNA, 25 bp, synthetic construct
  misc_feature 1..25: note = Oligonucleotide
  source 1..25: mol_type = other DNA
gggccggtgggccagggcggggcgg

SEQ ID NO: 1793 - DNA, 25 bp, synthetic construct
  misc_feature 1..25: note = Oligonucleotide
  source 1..25: mol_type = other DNA
gtggggccggtgggccagggcgggg

SEQ ID NO: 1794 - DNA, 25 bp, synthetic construct
  misc_feature 1..25: note = Oligonucleotide
  source 1..25: mol_type = other DNA
ggagtggggccggtgggccagggcg

SEQ ID NO: 1795 - DNA, 25 bp, synthetic construct
  misc_feature 1..25: note = Oligonucleotide
  source 1..25: mol_type = other DNA
cagggagtggggccggtgggccagg

SEQ ID NO: 1796 - DNA, 25 bp, synthetic construct
  misc_feature 1..25: note = Oligonucleotide
  source 1..25: mol_type = other DNA
gcccagggagtggggccggtgggcc

SEQ ID NO: 1797 - DNA, 25 bp, synthetic construct
  misc_feature 1..25: note = Oligonucleotide
  source 1..25: mol_type = other DNA
tgtgcccagggagtggggccggtgg

SEQ ID NO: 1798 - DNA, 25 bp, synthetic construct
  misc_feature 1..25: note = Oligonucleotide
  source 1..25: mol_type = other DNA
ctctgtgcccagggagtggggccgg

SEQ ID NO: 1799 - DNA, 25 bp, synthetic construct
  misc_feature 1..25: note = Oligonucleotide
  source 1..25: mol_type = other DNA
tgactctgtgcccagggagtggggc

SEQ ID NO: 1800 - DNA, 25 bp, synthetic construct
  misc_feature 1..25: note = Oligonucleotide
  source 1..25: mol_type = other DNA
gtgtgactctgtgcccagggagtgg

SEQ ID NO: 1801 - DNA, 25 bp, synthetic construct
  misc_feature 1..25: note = Oligonucleotide
  source 1..25: mol_type = other DNA
tgggtgtgactctgtgcccagggag

SEQ ID NO: 1802 - DNA, 25 bp, synthetic construct
  misc_feature 1..25: note = Oligonucleotide
  source 1..25: mol_type = other DNA
gagtgggtgtgactctgtgcccagg

SEQ ID NO: 1803 - DNA, 25 bp, synthetic construct
  misc_feature 1..25: note = Oligonucleotide
  source 1..25: mol_type = other DNA
gatgagtgggtgtgactctgtgccc

SEQ ID NO: 1804 - DNA, 25 bp, synthetic construct
  misc_feature 1..25: note = Oligonucleotide
  source 1..25: mol_type = other DNA
aaggatgagtgggtgtgactctgtg

SEQ ID NO: 1805 - DNA, 25 bp, synthetic construct
  misc_feature 1..25: note = Oligonucleotide
  source 1..25: mol_type = other DNA
cggaaggatgagtgggtgtgactct

SEQ ID NO: 1806 - DNA, 25 bp, synthetic construct
  misc_feature 1..25: note = Oligonucleotide
  source 1..25: mol_type = other DNA
tggcggaaggatgagtgggtgtgac

SEQ ID NO: 1807 - DNA, 25 bp, synthetic construct
  misc_feature 1..25: note = Oligonucleotide
  source 1..25: mol_type = other DNA
tgttggcggaaggatgagtgggtgt

SEQ ID NO: 1808 - DNA, 25 bp, synthetic construct
  misc_feature 1..25: note = Oligonucleotide
  source 1..25: mol_type = other DNA
gactgttggcggaaggatgagtggg

SEQ ID NO: 1809 - DNA, 25 bp, synthetic construct
  misc_feature 1..25: note = Oligonucleotide
  source 1..25: mol_type = other DNA
ctggactgttggcggaaggatgagt

SEQ ID NO: 1810 - DNA, 25 bp, synthetic construct
  misc_feature 1..25: note = Oligonucleotide
  source 1..25: mol_type = other DNA
gacctggactgttggcggaaggatg

SEQ ID NO: 1811 - DNA, 25 bp, synthetic construct
  misc_feature 1..25: note = Oligonucleotide
  source 1..25: mol_type = other DNA
tgtgacctggactgttggcggaagg

SEQ ID NO: 1812 - DNA, 25 bp, synthetic construct
  misc_feature 1..25: note = Oligonucleotide
  source 1..25: mol_type = other DNA
ctgtgtgacctggactgttggcgga

SEQ ID NO: 1813 - DNA, 25 bp, synthetic construct
  misc_feature 1..25: note = Oligonucleotide
  source 1..25: mol_type = other DNA
ctgctgtgtgacctggactgttggc

SEQ ID NO: 1814 - DNA, 25 bp, synthetic construct
  misc_feature 1..25: note = Oligonucleotide
  source 1..25: mol_type = other DNA
ctgctgctgtgtgacctggactgtt

SEQ ID NO: 1815 - DNA, 25 bp, synthetic construct
  misc_feature 1..25: note = Oligonucleotide
  source 1..25: mol_type = other DNA
tgactgctgctgtgtgacctggact

SEQ ID NO: 1816 - DNA, 25 bp, synthetic construct
  misc_feature 1..25: note = Oligonucleotide
  source 1..25: mol_type = other DNA
cagtgactgctgctgtgtgacctgg

SEQ ID NO: 1817 - DNA, 25 bp, synthetic construct
  misc_feature 1..25: note = Oligonucleotide
  source 1..25: mol_type = other DNA
ttacagtgactgctgctgtgtgacc

SEQ ID NO: 1818 - DNA, 25 bp, synthetic construct
  misc_feature 1..25: note = Oligonucleotide
  source 1..25: mol_type = other DNA
ctgttacagtgactgctgctgtgtg

SEQ ID NO: 1819 - DNA, 25 bp, synthetic construct
  misc_feature 1..25: note = Oligonucleotide
  source 1..25: mol_type = other DNA
agtctgttacagtgactgctgctgt

SEQ ID NO: 1820 - DNA, 25 bp, synthetic construct
  misc_feature 1..25: note = Oligonucleotide
  source 1..25: mol_type = other DNA
ggcagtctgttacagtgactgctgc

SEQ ID NO: 1821 - DNA, 25 bp, synthetic construct
  misc_feature 1..25: note = Oligonucleotide
  source 1..25: mol_type = other DNA
tgtggcagtctgttacagtgactgc

SEQ ID NO: 1822 - DNA, 25 bp, synthetic construct
  misc_feature 1..25: note = Oligonucleotide
  source 1..25: mol_type = other DNA
gtatgtggcagtctgttacagtgac

SEQ ID NO: 1823 - DNA, 25 bp, synthetic construct
  misc_feature 1..25: note = Oligonucleotide
  source 1..25: mol_type = other DNA
tgtgtatgtggcagtctgttacagt

SEQ ID NO: 1824 - DNA, 25 bp, synthetic construct
  misc_feature 1..25: note = Oligonucleotide
  source 1..25: mol_type = other DNA
gagtgtgtatgtggcagtctgttac

SEQ ID NO: 1825 - DNA, 25 bp, synthetic construct
  misc_feature 1..25: note = Oligonucleotide
  source 1..25: mol_type = other DNA
accgagtgtgtatgtggcagtctgt

SEQ ID NO: 1826 - DNA, 25 bp, synthetic construct
  misc_feature 1..25: note = Oligonucleotide
  source 1..25: mol_type = other DNA
gagaccgagtgtgtatgtggcagtc

SEQ ID NO: 1827 - DNA, 25 bp, synthetic construct
  misc_feature 1..25: note = Oligonucleotide
  source 1..25: mol_type = other DNA
tgtgagaccgagtgtgtatgtggca

SEQ ID NO: 1828 - DNA, 25 bp, synthetic construct
  misc_feature 1..25: note = Oligonucleotide
  source 1..25: mol_type = other DNA
gagtgtgagaccgagtgtgtatgtg

SEQ ID NO: 1829 - DNA, 25 bp, synthetic construct
  misc_feature 1..25: note = Oligonucleotide
  source 1..25: mol_type = other DNA
ggtgagtgtgagaccgagtgtgtat

SEQ ID NO: 1830 - DNA, 25 bp, synthetic construct
  misc_feature 1..25: note = Oligonucleotide
  source 1..25: mol_type = other DNA
acaggtgagtgtgagaccgagtgtg

SEQ ID NO: 1831 - DNA, 25 bp, synthetic construct
  misc_feature 1..25: note = Oligonucleotide
  source 1..25: mol_type = other DNA
cccacaggtgagtgtgagaccgagt

SEQ ID NO: 1832 - DNA, 25 bp, synthetic construct
  misc_feature 1..25: note = Oligonucleotide
  source 1..25: mol_type = other DNA
aaacccacaggtgagtgtgagaccg

SEQ ID NO: 1833 - DNA, 25 bp, synthetic construct
  misc_feature 1..25: note = Oligonucleotide
  source 1..25: mol_type = other DNA
ccaaaacccacaggtgagtgtgaga

SEQ ID NO: 1834 - DNA, 25 bp, synthetic construct
  misc_feature 1..25: note = Oligonucleotide
  source 1..25: mol_type = other DNA
gaaccaaaacccacaggtgagtgtg

SEQ ID NO: 1835 - DNA, 25 bp, synthetic construct
  misc_feature 1..25: note = Oligonucleotide
  source 1..25: mol_type = other DNA
acggaaccaaaacccacaggtgagt

SEQ ID NO: 1836 - DNA, 25 bp, synthetic construct
  misc_feature 1..25: note = Oligonucleotide
  source 1..25: mol_type = other DNA
tgaacggaaccaaaacccacaggtg

SEQ ID NO: 1837 - DNA, 25 bp, synthetic construct
  misc_feature 1..25: note = Oligonucleotide
  source 1..25: mol_type = other DNA
aattgaacggaaccaaaacccacag

SEQ ID NO: 1838 - DNA, 25 bp, synthetic construct
  misc_feature 1..25: note = Oligonucleotide
  source 1..25: mol_type = other DNA
ccaaattgaacggaaccaaaaccca

SEQ ID NO: 1839 - DNA, 25 bp, synthetic construct
  misc_feature 1..25: note = Oligonucleotide
  source 1..25: mol_type = other DNA
aacccaaattgaacggaaccaaaac

SEQ ID NO: 1840 - DNA, 25 bp, synthetic construct
  misc_feature 1..25: note = Oligonucleotide
  source 1..25: mol_type = other DNA
aaaaacccaaattgaacggaaccaa

SEQ ID NO: 1841 - DNA, 25 bp, synthetic construct
  misc_feature 1..25: note = Oligonucleotide
  source 1..25: mol_type = other DNA
gttaaaaacccaaattgaacggaac

SEQ ID NO: 1842 - DNA, 25 bp, synthetic construct
  misc_feature 1..25: note = Oligonucleotide
  source 1..25: mol_type = other DNA
aaagttaaaaacccaaattgaacgg

SEQ ID NO: 1843 - DNA, 25 bp, synthetic construct
  misc_feature 1..25: note = Oligonucleotide
  source 1..25: mol_type = other DNA
tgtaaagttaaaaacccaaattgaa

SEQ ID NO: 1844 - DNA, 25 bp, synthetic construct
  misc_feature 1..25: note = Oligonucleotide
  source 1..25: mol_type = other DNA
ccctgtaaagttaaaaacccaaatt

SEQ ID NO: 1845 - DNA, 25 bp, synthetic construct
  misc_feature 1..25: note = Oligonucleotide
  source 1..25: mol_type = other DNA
tgaccctgtaaagttaaaaacccaa

SEQ ID NO: 1846 - DNA, 25 bp, synthetic construct
  misc_feature 1..25: note = Oligonucleotide
  source 1..25: mol_type = other DNA
aactgaccctgtaaagttaaaaacc

SEQ ID NO: 1847 - DNA, 25 bp, synthetic construct
  misc_feature 1..25: note = Oligonucleotide
  source 1..25: mol_type = other DNA
cggaactgaccctgtaaagttaaaa

SEQ ID NO: 1848 - DNA, 25 bp, synthetic construct
  misc_feature 1..25: note = Oligonucleotide
  source 1..25: mol_type = other DNA
aagcggaactgaccctgtaaagtta

SEQ ID NO: 1849 - DNA, 25 bp, synthetic construct
  misc_feature 1..25: note = Oligonucleotide
  source 1..25: mol_type = other DNA
gtgaagcggaactgaccctgtaaag

SEQ ID NO: 1850 - DNA, 25 bp, synthetic construct
  misc_feature 1..25: note = Oligonucleotide
  source 1..25: mol_type = other DNA
gaggtgaagcggaactgaccctgta

SEQ ID NO: 1851 - DNA, 25 bp, synthetic construct
  misc_feature 1..25: note = Oligonucleotide
  source 1..25: mol_type = other DNA
aaggaggtgaagcggaactgaccct

SEQ ID NO: 1852 - DNA, 25 bp, synthetic construct
  misc_feature 1..25: note = Oligonucleotide
  source 1..25: mol_type = other DNA
caaaaggaggtgaagcggaactgac

SEQ ID NO: 1853 - DNA, 25 bp, synthetic construct
  misc_feature 1..25: note = Oligonucleotide
  source 1..25: mol_type = other DNA
atacaaaaggaggtgaagcggaact

SEQ ID NO: 1854 - DNA, 25 bp, synthetic construct
  misc_feature 1..25: note = Oligonucleotide
  source 1..25: mol_type = other DNA
tccatacaaaaggaggtgaagcgga

SEQ ID NO: 1855 - DNA, 25 bp, synthetic construct
  misc_feature 1..25: note = Oligonucleotide
  source 1..25: mol_type = other DNA
aactccatacaaaaggaggtgaagc

SEQ ID NO: 1856 - DNA, 25 bp, synthetic construct
  misc_feature 1..25: note = Oligonucleotide
  source 1..25: mol_type = other DNA
tggaactccatacaaaaggaggtga

SEQ ID NO: 1857 - DNA, 25 bp, synthetic construct
  misc_feature 1..25: note = Oligonucleotide
  source 1..25: mol_type = other DNA
ggatggaactccatacaaaaggagg

SEQ ID NO: 1858 - DNA, 25 bp, synthetic construct
  misc_feature 1..25: note = Oligonucleotide
  source 1..25: mol_type = other DNA
cccggatggaactccatacaaaagg

SEQ ID NO: 1859 - DNA, 25 bp, synthetic construct
  misc_feature 1..25: note = Oligonucleotide
  source 1..25: mol_type = other DNA
ccccccggatggaactccatacaaa

SEQ ID NO: 1860 - DNA, 25 bp, synthetic construct
  misc_feature 1..25: note = Oligonucleotide
  source 1..25: mol_type = other DNA
aaaccccccggatggaactccatac

SEQ ID NO: 1861 - DNA, 25 bp, synthetic construct
  misc_feature 1..25: note = Oligonucleotide
  source 1..25: mol_type = other DNA
gtgaaaccccccggatggaactcca

SEQ ID NO: 1862 - DNA, 25 bp, synthetic construct
  misc_feature 1..25: note = Oligonucleotide
  source 1..25: mol_type = other DNA
ggggtgaaaccccccggatggaact

SEQ ID NO: 1863 - DNA, 25 bp, synthetic construct
  misc_feature 1..25: note = Oligonucleotide
  source 1..25: mol_type = other DNA
cagggggtgaaaccccccggatgga

SEQ ID NO: 1864 - DNA, 25 bp, synthetic construct
  misc_feature 1..25: note = Oligonucleotide
  source 1..25: mol_type = other DNA
gagcagggggtgaaaccccccggat

SEQ ID NO: 1865 - DNA, 25 bp, synthetic construct
  misc_feature 1..25: note = Oligonucleotide
  source 1..25: mol_type = other DNA
ctggagcagggggtgaaaccccccg

SEQ ID NO: 1866 - DNA, 25 bp, synthetic construct
  misc_feature 1..25: note = Oligonucleotide
  source 1..25: mol_type = other DNA
ggactggagcagggggtgaaacccc

SEQ ID NO: 1867 - DNA, 25 bp, synthetic construct
  misc_feature 1..25: note = Oligonucleotide
  source 1..25: mol_type = other DNA
tcaggactggagcagggggtgaaac

SEQ ID NO: 1868 - DNA, 25 bp, synthetic construct
  misc_feature 1..25: note = Oligonucleotide
  source 1..25: mol_type = other DNA
gcctcaggactggagcagggggtga

SEQ ID NO: 1869 - DNA, 25 bp, synthetic construct
  misc_feature 1..25: note = Oligonucleotide
  source 1..25: mol_type = other DNA
gaggcctcaggactggagcaggggg

SEQ ID NO: 1870 - DNA, 25 bp, synthetic construct
  misc_feature 1..25: note = Oligonucleotide
  source 1..25: mol_type = other DNA
caggaggcctcaggactggagcagg

SEQ ID NO: 1871 - DNA, 25 bp, synthetic construct
  misc_feature 1..25: note = Oligonucleotide
  source 1..25: mol_type = other DNA
ggtcaggaggcctcaggactggagc

SEQ ID NO: 1872 - DNA, 25 bp, synthetic construct
  misc_feature 1..25: note = Oligonucleotide
  source 1..25: mol_type = other DNA
cagggtcaggaggcctcaggactgg

SEQ ID NO: 1873 - DNA, 25 bp, synthetic construct
  misc_feature 1..25: note = Oligonucleotide
  source 1..25: mol_type = other DNA
cgtcagggtcaggaggcctcaggac

SEQ ID NO: 1874 - DNA, 25 bp, synthetic construct
  misc_feature 1..25: note = Oligonucleotide
  source 1..25: mol_type = other DNA
caacgtcagggtcaggaggcctcag

SEQ ID NO: 1875 - DNA, 25 bp, synthetic construct
  misc_feature 1..25: note = Oligonucleotide
  source 1..25: mol_type = other DNA
tcacaacgtcagggtcaggaggcct

SEQ ID NO: 1876 - DNA, 25 bp, synthetic construct
  misc_feature 1..25: note = Oligonucleotide
  source 1..25: mol_type = other DNA
gtatcacaacgtcagggtcaggagg

SEQ ID NO: 1877 - DNA, 25 bp, synthetic construct
  misc_feature 1..25: note = Oligonucleotide
  source 1..25: mol_type = other DNA
ggcgtatcacaacgtcagggtcagg

SEQ ID NO: 1878 - DNA, 25 bp, synthetic construct
  misc_feature 1..25: note = Oligonucleotide
  source 1..25: mol_type = other DNA
tggggcgtatcacaacgtcagggtc

SEQ ID NO: 1879 - DNA, 25 bp, synthetic construct
  misc_feature 1..25: note = Oligonucleotide
  source 1..25: mol_type = other DNA
ctgtggggcgtatcacaacgtcagg

SEQ ID NO: 1880 - DNA, 25 bp, synthetic construct
  misc_feature 1..25: note = Oligonucleotide
  source 1..25: mol_type = other DNA
tctctgtggggcgtatcacaacgtc

SEQ ID NO: 1881 - DNA, 25 bp, synthetic construct
  misc_feature 1..25: note = Oligonucleotide
  source 1..25: mol_type = other DNA
agatctctgtggggcgtatcacaac

SEQ ID NO: 1882 - DNA, 25 bp, synthetic construct
  misc_feature 1..25: note = Oligonucleotide
  source 1..25: mol_type = other DNA
catagatctctgtggggcgtatcac

SEQ ID NO: 1883 - DNA, 25 bp, synthetic construct
  misc_feature 1..25: note = Oligonucleotide
  source 1..25: mol_type = other DNA
aaacatagatctctgtggggcgtat

SEQ ID NO: 1884 - DNA, 25 bp, synthetic construct
  misc_feature 1..25: note = Oligonucleotide
  source 1..25: mol_type = other DNA
aagaaacatagatctctgtggggcg

SEQ ID NO: 1885 - DNA, 25 bp, synthetic construct
  misc_feature 1..25: note = Oligonucleotide
  source 1..25: mol_type = other DNA
tataagaaacatagatctctgtggg

SEQ ID NO: 1886 - DNA, 25 bp, synthetic construct
  misc_feature 1..25: note = Oligonucleotide
  source 1..25: mol_type = other DNA
taatataagaaacatagatctctgt

SEQ ID NO: 1887 - DNA, 25 bp, synthetic construct
  misc_feature 1..25: note = Oligonucleotide
  source 1..25: mol_type = other DNA
taataatataagaaacatagatctc

SEQ ID NO: 1888 - DNA, 25 bp, synthetic construct
  misc_feature 1..25: note = Oligonucleotide
  source 1..25: mol_type = other DNA
taataataatataagaaacatagat

SEQ ID NO: 1889 - DNA, 25 bp, synthetic construct
  misc_feature 1..25: note = Oligonucleotide
  source 1..25: mol_type = other DNA
caataataataatataagaaacata

SEQ ID NO: 1890 - DNA, 25 bp, synthetic construct
  misc_feature 1..25: note = Oligonucleotide
  source 1..25: mol_type = other DNA
tatcaataataataatataagaaac

SEQ ID NO: 1891 - DNA, 25 bp, synthetic construct
  misc_feature 1..25: note = Oligonucleotide
  source 1..25: mol_type = other DNA
tattatcaataataataatataaga

SEQ ID NO: 1892 - DNA, 25 bp, synthetic construct
  misc_feature 1..25: note = Oligonucleotide
  source 1..25: mol_type = other DNA
aattattatcaataataataatata

SEQ ID NO: 1893 - DNA, 25 bp, synthetic construct
  misc_feature 1..25: note = Oligonucleotide
  source 1..25: mol_type = other DNA
aataattattatcaataataataat

SEQ ID NO: 1894 - DNA, 25 bp, synthetic construct
  misc_feature 1..25: note = Oligonucleotide
  source 1..25: mol_type = other DNA
tataataattattatcaataataat

SEQ ID NO: 1895 - DNA, 25 bp, synthetic construct
  misc_feature 1..25: note = Oligonucleotide
  source 1..25: mol_type = other DNA
tattataataattattatcaataat

SEQ ID NO: 1896 - DNA, 25 bp, synthetic construct
  misc_feature 1..25: note = Oligonucleotide
  source 1..25: mol_type = other DNA
taatattataataattattatcaat

SEQ ID NO: 1897 - DNA, 25 bp, synthetic construct
  misc_feature 1..25: note = Oligonucleotide
  source 1..25: mol_type = other DNA
taataatattataataattattatc

SEQ ID NO: 1898 - DNA, 25 bp, synthetic construct
  misc_feature 1..25: note = Oligonucleotide
  source 1..25: mol_type = other DNA
acataataatattataataattatt

SEQ ID NO: 1899 - DNA, 25 bp, synthetic construct
  misc_feature 1..25: note = Oligonucleotide
  source 1..25: mol_type = other DNA
attacataataatattataataatt

SEQ ID NO: 1900 - DNA, 25 bp, synthetic construct
  misc_feature 1..25: note = Oligonucleotide
  source 1..25: mol_type = other DNA
tttattacataataatattataata

SEQ ID NO: 1901 - DNA, 25 bp, synthetic construct
  misc_feature 1..25: note = Oligonucleotide
  source 1..25: mol_type = other DNA
aaatttattacataataatattata

SEQ ID NO: 1902 - DNA, 25 bp, synthetic construct
  misc_feature 1..25: note = Oligonucleotide
  source 1..25: mol_type = other DNA
tataaatttattacataataatatt

SEQ ID NO: 1903 - DNA, 25 bp, synthetic construct
  misc_feature 1..25: note = Oligonucleotide
  source 1..25: mol_type = other DNA
tcttataaatttattacataataat

SEQ ID NO: 1904 - DNA, 25 bp, synthetic construct
  misc_feature 1..25: note = Oligonucleotide
  source 1..25: mol_type = other DNA
atttcttataaatttattacataat

SEQ ID NO: 1905 - DNA, 25 bp, synthetic construct
  misc_feature 1..25: note = Oligonucleotide
  source 1..25: mol_type = other DNA
ttcatttcttataaatttattacat

SEQ ID NO: 1906 - DNA, 25 bp, synthetic construct
  misc_feature 1..25: note = Oligonucleotide
  source 1..25: mol_type = other DNA
ggcttcatttcttataaatttatta

SEQ ID NO: 1907 - DNA, 25 bp, synthetic construct
  misc_feature 1..25: note = Oligonucleotide
  source 1..25: mol_type = other DNA
catggcttcatttcttataaattta

SEQ ID NO: 1908 - DNA, 25 bp, synthetic construct
  misc_feature 1..25: note = Oligonucleotide
  source 1..25: mol_type = other DNA
agccatggcttcatttcttataaat

SEQ ID NO: 1909 - DNA, 25 bp, synthetic construct
  misc_feature 1..25: note = Oligonucleotide
  source 1..25: mol_type = other DNA
ctgagccatggcttcatttcttata

SEQ ID NO: 1910 - DNA, 25 bp, synthetic construct
  misc_feature 1..25: note = Oligonucleotide
  source 1..25: mol_type = other DNA
caactgagccatggcttcatttctt

SEQ ID NO: 1911 - DNA, 25 bp, synthetic construct
  misc_feature 1..25: note = Oligonucleotide
  source 1..25: mol_type = other DNA
aggcaactgagccatggcttcattt

SEQ ID NO: 1912 - DNA, 25 bp, synthetic construct
  misc_feature 1..25: note = Oligonucleotide
  source 1..25: mol_type = other DNA
agcaggcaactgagccatggcttca

SEQ ID NO: 1913 - DNA, 25 bp, synthetic construct
  misc_feature 1..25: note = Oligonucleotide
  source 1..25: mol_type = other DNA
tcaagcaggcaactgagccatggct

SEQ ID NO: 1914 - DNA, 25 bp, synthetic construct
  misc_feature 1..25: note = Oligonucleotide
  source 1..25: mol_type = other DNA
ccctcaagcaggcaactgagccatg

SEQ ID NO: 1915 - DNA, 25 bp, synthetic construct
  misc_feature 1..25: note = Oligonucleotide
  source 1..25: mol_type = other DNA
atcccctcaagcaggcaactgagcc

SEQ ID NO: 1916 - DNA, 25 bp, synthetic construct
  misc_feature 1..25: note = Oligonucleotide
  source 1..25: mol_type = other DNA
aatatcccctcaagcaggcaactga

SEQ ID NO: 1917 - DNA, 25 bp, synthetic construct
  misc_feature 1..25: note = Oligonucleotide
  source 1..25: mol_type = other DNA
acaaatatcccctcaagcaggcaac

SEQ ID NO: 1918 - DNA, 25 bp, synthetic construct
  misc_feature 1..25: note = Oligonucleotide
  source 1..25: mol_type = other DNA
gacacaaatatcccctcaagcaggc

SEQ ID NO: 1919 - DNA, 25 bp, synthetic construct
  misc_feature 1..25: note = Oligonucleotide
  source 1..25: mol_type = other DNA
acagacacaaatatcccctcaagca

SEQ ID NO: 1920 - DNA, 25 bp, synthetic construct
  misc_feature 1..25: note = Oligonucleotide
  source 1..25: mol_type = other DNA
gggacagacacaaatatcccctcaa

SEQ ID NO: 1921 - DNA, 25 bp, synthetic construct
  misc_feature 1..25: note = Oligonucleotide
  source 1..25: mol_type = other DNA
tgagggacagacacaaatatcccct

SEQ ID NO: 1922 - DNA, 25 bp, synthetic construct
  misc_feature 1..25: note = Oligonucleotide
  source 1..25: mol_type = other DNA
gtatgagggacagacacaaatatcc

SEQ ID NO: 1923 - DNA, 25 bp, synthetic construct
  misc_feature 1..25: note = Oligonucleotide
  source 1..25: mol_type = other DNA
ccggtatgagggacagacacaaata

SEQ ID NO: 1924 - DNA, 25 bp, synthetic construct
  misc_feature 1..25: note = Oligonucleotide
  source 1..25: mol_type = other DNA
tggccggtatgagggacagacacaa

SEQ ID NO: 1925 - DNA, 25 bp, synthetic construct
  misc_feature 1..25: note = Oligonucleotide
  source 1..25: mol_type = other DNA
gtgtggccggtatgagggacagaca

SEQ ID NO: 1926 - DNA, 25 bp, synthetic construct
  misc_feature 1..25: note = Oligonucleotide
  source 1..25: mol_type = other DNA
tttgtgtggccggtatgagggacag

SEQ ID NO: 1927 - DNA, 25 bp, synthetic construct
  misc_feature 1..25: note = Oligonucleotide
  source 1..25: mol_type = other DNA
aggtttgtgtggccggtatgaggga

SEQ ID NO: 1928 - DNA, 25 bp, synthetic construct
  misc_feature 1..25: note = Oligonucleotide
  source 1..25: mol_type = other DNA
aggaggtttgtgtggccggtatgag

SEQ ID NO: 1929 - DNA, 25 bp, synthetic construct
  misc_feature 1..25: note = Oligonucleotide
  source 1..25: mol_type = other DNA
ctgaggaggtttgtgtggccggtat

SEQ ID NO: 1930 - DNA, 25 bp, synthetic construct
  misc_feature 1..25: note = Oligonucleotide
  source 1..25: mol_type = other DNA
aggctgaggaggtttgtgtggccgg

SEQ ID NO: 1931 - DNA, 25 bp, synthetic construct
  misc_feature 1..25: note = Oligonucleotide
  source 1..25: mol_type = other DNA
tccaggctgaggaggtttgtgtggc

SEQ ID NO: 1932 - DNA, 25 bp, synthetic construct
  misc_feature 1..25: note = Oligonucleotide
  source 1..25: mol_type = other DNA
tggtccaggctgaggaggtttgtgt

SEQ ID NO: 1933 - DNA, 25 bp, synthetic construct
  misc_feature 1..25: note = Oligonucleotide
  source 1..25: mol_type = other DNA
atgtggtccaggctgaggaggtttg

SEQ ID NO: 1934 - DNA, 24 bp, synthetic construct
  misc_feature 1..24: note = Oligonucleotide
  source 1..24: mol_type = other DNA
ctgaccctgtaaagttaaaaccca

SEQ ID NO: 1935 - DNA, 25 bp, synthetic construct
  misc_feature 1..25: note = Oligonucleotide
  source 1..25: mol_type = other DNA
ggcataaactcgccgcttgtactga

SEQ ID NO: 1936 - DNA, 25 bp, synthetic construct
  misc_feature 1..25: note = Oligonucleotide
  source 1..25: mol_type = other DNA
ggcataaactcgccgcttgtatcga

SEQ ID NO: 1937 - DNA, 25 bp, synthetic construct
  misc_feature 1..25: note = Oligonucleotide
  source 1..25: mol_type = other DNA
ctccccgtgatcctttacctttgtg

SEQ ID NO: 1938 - DNA, 25 bp, synthetic construct
  misc_feature 1..25: note = Oligonucleotide
  source 1..25: mol_type = other DNA
cctccaggtagggcaggggcgtgtc

SEQ ID NO: 1939 - DNA, 25 bp, synthetic construct
  misc_feature 1..25: note = Oligonucleotide
  source 1..25: mol_type = other DNA
ttacctccaggtagggcaggggcgt

SEQ ID NO: 1940 - DNA, 25 bp, synthetic construct
  misc_feature 1..25: note = Oligonucleotide
  source 1..25: mol_type = other DNA
cacttacctccaggtagggcagggg

SEQ ID NO: 1941 - DNA, 25 bp, synthetic construct
  misc_feature 1..25: note = Oligonucleotide
  source 1..25: mol_type = other DNA
ggccacttacctccaggtagggcag

SEQ ID NO: 1942 - DNA, 25 bp, synthetic construct
  misc_feature 1..25: note = Oligonucleotide
  source 1..25: mol_type = other DNA
gccggccacttacctccaggtaggg

SEQ ID NO: 1943 - DNA, 25 bp, synthetic construct
  misc_feature 1..25: note = Oligonucleotide
  source 1..25: mol_type = other DNA
cgcgccggccacttacctccaggta

SEQ ID NO: 1944 - DNA, 25 bp, synthetic construct
  misc_feature 1..25: note = Oligonucleotide
  source 1..25: mol_type = other DNA
ccccgcgccggccacttacctccag

SEQ ID NO: 1945 - DNA, 25 bp, synthetic construct
  misc_feature 1..25: note = Oligonucleotide
  source 1..25: mol_type = other DNA
cacccccgcgccggccacttacctc

SEQ ID NO: 1946 - DNA, 25 bp, synthetic construct
  misc_feature 1..25: note = Oligonucleotide
  source 1..25: mol_type = other DNA
gctcacccccgcgccggccacttac

SEQ ID NO: 1947 - DNA, 25 bp, synthetic construct
  misc_feature 1..25: note = Oligonucleotide
  source 1..25: mol_type = other DNA
tcagctcacccccgcgccggccact

SEQ ID NO: 1948 - DNA, 25 bp, synthetic construct
  misc_feature 1..25: note = Oligonucleotide
  source 1..25: mol_type = other DNA
tcctcagctcacccccgcgccggcc

SEQ ID NO: 1949 - DNA, 25 bp, synthetic construct
  misc_feature 1..25: note = Oligonucleotide
  source 1..25: mol_type = other DNA
cgctcctcagctcacccccgcgccg

SEQ ID NO: 1950 - DNA, 25 bp, synthetic construct
  misc_feature 1..25: note = Oligonucleotide
  source 1..25: mol_type = other DNA
gcgcgctcctcagctcacccccgcg

SEQ ID NO: 1951 - DNA, 25 bp, synthetic construct
  misc_feature 1..25: note = Oligonucleotide
  source 1..25: mol_type = other DNA
cctgcgcgctcctcagctcaccccc

SEQ ID NO: 1952 - DNA, 25 bp, synthetic construct
  misc_feature 1..25: note = Oligonucleotide
  source 1..25: mol_type = other DNA
caccctgcgcgctcctcagctcacc

SEQ ID NO: 1953 - DNA, 25 bp, synthetic construct
  misc_feature 1..25: note = Oligonucleotide
  source 1..25: mol_type = other DNA
atccaccctgcgcgctcctcagctc

SEQ ID NO: 1954 - DNA, 25 bp, synthetic construct
  misc_feature 1..25: note = Oligonucleotide
  source 1..25: mol_type = other DNA
gtgatccaccctgcgcgctcctcag

SEQ ID NO: 1955 - DNA, 25 bp, synthetic construct
  misc_feature 1..25: note = Oligonucleotide
  source 1..25: mol_type = other DNA
ttggtgatccaccctgcgcgctcct

SEQ ID NO: 1956 - DNA, 25 bp, synthetic construct
  misc_feature 1..25: note = Oligonucleotide
  source 1..25: mol_type = other DNA
ggcttggtgatccaccctgcgcgct

SEQ ID NO: 1957 - DNA, 25 bp, synthetic construct
  misc_feature 1..25: note = Oligonucleotide
  source 1..25: mol_type = other DNA
cggggcttggtgatccaccctgcgc

SEQ ID NO: 1958 - DNA, 25 bp, synthetic construct
  misc_feature 1..25: note = Oligonucleotide
  source 1..25: mol_type = other DNA
ccacggggcttggtgatccaccctg

SEQ ID NO: 1959 - DNA, 25 bp, synthetic construct
  misc_feature 1..25: note = Oligonucleotide
  source 1..25: mol_type = other DNA
ccgccacggggcttggtgatccacc

SEQ ID NO: 1960 - DNA, 25 bp, synthetic construct
  misc_feature 1..25: note = Oligonucleotide
  source 1..25: mol_type = other DNA
gtcccgccacggggcttggtgatcc

SEQ ID NO: 1961 - DNA, 25 bp, synthetic construct
  misc_feature 1..25: note = Oligonucleotide
  source 1..25: mol_type = other DNA
ctggtcccgccacggggcttggtga

SEQ ID NO: 1962 - DNA, 25 bp, synthetic construct
  misc_feature 1..25: note = Oligonucleotide
  source 1..25: mol_type = other DNA
tcactggtcccgccacggggcttgg

SEQ ID NO: 1963 - DNA, 25 bp, synthetic construct
  misc_feature 1..25: note = Oligonucleotide
  source 1..25: mol_type = other DNA
ccttcactggtcccgccacggggct

SEQ ID NO: 1964 - DNA, 25 bp, synthetic construct
  misc_feature 1..25: note = Oligonucleotide
  source 1..25: mol_type = other DNA
tgcccttcactggtcccgccacggg

SEQ ID NO: 1965 - DNA, 25 bp, synthetic construct
  misc_feature 1..25: note = Oligonucleotide
  source 1..25: mol_type = other DNA
ccgtgcccttcactggtcccgccac

SEQ ID NO: 1966 - DNA, 25 bp, synthetic construct
  misc_feature 1..25: note = Oligonucleotide
  source 1..25: mol_type = other DNA
ctgccgtgcccttcactggtcccgc

SEQ ID NO: 1967 - DNA, 25 bp, synthetic construct
  misc_feature 1..25: note = Oligonucleotide
  source 1..25: mol_type = other DNA
ccactgccgtgcccttcactggtcc

SEQ ID NO: 1968 - DNA, 25 bp, synthetic construct
  misc_feature 1..25: note = Oligonucleotide
  source 1..25: mol_type = other DNA
tccccactgccgtgcccttcactgg

SEQ ID NO: 1969 - DNA, 25 bp, synthetic construct
  misc_feature 1..25: note = Oligonucleotide
  source 1..25: mol_type = other DNA
gtttccccactgccgtgcccttcac

SEQ ID NO: 1970 - DNA, 25 bp, synthetic construct
  misc_feature 1..25: note = Oligonucleotide
  source 1..25: mol_type = other DNA
tgtgtttccccactgccgtgccctt

SEQ ID NO: 1971 - DNA, 25 bp, synthetic construct
  misc_feature 1..25: note = Oligonucleotide
  source 1..25: mol_type = other DNA
acttgtgtttccccactgccgtgcc

SEQ ID NO: 1972 - DNA, 25 bp, synthetic construct
  misc_feature 1..25: note = Oligonucleotide
  source 1..25: mol_type = other DNA
cccacttgtgtttccccactgccgt

SEQ ID NO: 1973 - DNA, 25 bp, synthetic construct
  misc_feature 1..25: note = Oligonucleotide
  source 1..25: mol_type = other DNA
cctcccacttgtgtttccccactgc

SEQ ID NO: 1974 - DNA, 25 bp, synthetic construct
  misc_feature 1..25: note = Oligonucleotide
  source 1..25: mol_type = other DNA
acccctcccacttgtgtttccccac

SEQ ID NO: 1975 - DNA, 25 bp, synthetic construct
  misc_feature 1..25: note = Oligonucleotide
  source 1..25: mol_type = other DNA
ctcacccctcccacttgtgtttccc

SEQ ID NO: 1976 - DNA, 25 bp, synthetic construct
  misc_feature 1..25: note = Oligonucleotide
  source 1..25: mol_type = other DNA
cccctcacccctcccacttgtgttt

SEQ ID NO: 1977 - DNA, 25 bp, synthetic construct
  misc_feature 1..25: note = Oligonucleotide
  source 1..25: mol_type = other DNA
ccacccctcacccctcccacttgtg

SEQ ID NO: 1978 - DNA, 25 bp, synthetic construct
  misc_feature 1..25: note = Oligonucleotide
  source 1..25: mol_type = other DNA
cctccacccctcacccctcccactt

SEQ ID NO: 1979 - DNA, 25 bp, synthetic construct
  misc_feature 1..25: note = Oligonucleotide
  source 1..25: mol_type = other DNA
cagcctccacccctcacccctccca

SEQ ID NO: 1980 - DNA, 25 bp, synthetic construct
  misc_feature 1..25: note = Oligonucleotide
  source 1..25: mol_type = other DNA
acacagcctccacccctcacccctc

SEQ ID NO: 1981 - DNA, 25 bp, synthetic construct
  misc_feature 1..25: note = Oligonucleotide
  source 1..25: mol_type = other DNA
cacacacagcctccacccctcaccc

SEQ ID NO: 1982 - DNA, 25 bp, synthetic construct
  misc_feature 1..25: note = Oligonucleotide
  source 1..25: mol_type = other DNA
acacacacacagcctccacccctca

SEQ ID NO: 1983 - DNA, 25 bp, synthetic construct
  misc_feature 1..25: note = Oligonucleotide
  source 1..25: mol_type = other DNA
cacacacacacacagcctccacccc

SEQ ID NO: 1984 - DNA, 25 bp, synthetic construct
  misc_feature 1..25: note = Oligonucleotide
  source 1..25: mol_type = other DNA
acacacacacacacacagcctccac

SEQ ID NO: 1985 - DNA, 25 bp, synthetic construct
  misc_feature 1..25: note = Oligonucleotide
  source 1..25: mol_type = other DNA
cacacacacacacacacacagcctc

SEQ ID NO: 1986 - DNA, 25 bp, synthetic construct
  misc_feature 1..25: note = Oligonucleotide
  source 1..25: mol_type = other DNA
acacacacacacacacacacacagc

SEQ ID NO: 1987 - DNA, 25 bp, synthetic construct
  misc_feature 1..25: note = Oligonucleotide
  source 1..25: mol_type = other DNA
cacacacacacacacacacacacac

SEQ ID NO: 1988 - DNA, 25 bp, synthetic construct
  misc_feature 1..25: note = Oligonucleotide
  source 1..25: mol_type = other DNA
acacacacacacacacacacacaca

SEQ ID NO: 1989 - DNA, 25 bp, synthetic construct
  misc_feature 1..25: note = Oligonucleotide
  source 1..25: mol_type = other DNA
accacacacacacacacacacacac

SEQ ID NO: 1990 - DNA, 25 bp, synthetic construct
  misc_feature 1..25: note = Oligonucleotide
  source 1..25: mol_type = other DNA
agcaccacacacacacacacacaca

SEQ ID NO: 1991 - DNA, 25 bp, synthetic construct
  misc_feature 1..25: note = Oligonucleotide
  source 1..25: mol_type = other DNA
cacagcaccacacacacacacacac

SEQ ID NO: 1992 - DNA, 25 bp, synthetic construct
  misc_feature 1..25: note = Oligonucleotide
  source 1..25: mol_type = other DNA
gcacacagcaccacacacacacaca

SEQ ID NO: 1993 - DNA, 25 bp, synthetic construct
  misc_feature 1..25: note = Oligonucleotide
  source 1..25: mol_type = other DNA
tctgcacacagcaccacacacacac

SEQ ID NO: 1994 - DNA, 25 bp, synthetic construct
  misc_feature 1..25: note = Oligonucleotide
  source 1..25: mol_type = other DNA
cactctgcacacagcaccacacaca

SEQ ID NO: 1995 - DNA, 25 bp, synthetic construct
  misc_feature 1..25: note = Oligonucleotide
  source 1..25: mol_type = other DNA
ctgcactctgcacacagcaccacac

SEQ ID NO: 1996 - DNA, 25 bp, synthetic construct
  misc_feature 1..25: note = Oligonucleotide
  source 1..25: mol_type = other DNA
tcactgcactctgcacacagcacca

SEQ ID NO: 1997 - DNA, 25 bp, synthetic construct
  misc_feature 1..25: note = Oligonucleotide
  source 1..25: mol_type = other DNA
cgctcactgcactctgcacacagca

SEQ ID NO: 1998 - DNA, 25 bp, synthetic construct
  misc_feature 1..25: note = Oligonucleotide
  source 1..25: mol_type = other DNA
acacgctcactgcactctgcacaca

SEQ ID NO: 1999 - DNA, 25 bp, synthetic construct
  misc_feature 1..25: note = Oligonucleotide
  source 1..25: mol_type = other DNA
tgtacacgctcactgcactctgcac

SEQ ID NO: 2000 - DNA, 25 bp, synthetic construct
  misc_feature 1..25: note = Oligonucleotide
  source 1..25: mol_type = other DNA
ccctgtacacgctcactgcactctg

SEQ ID NO: 2001 - DNA, 25 bp, synthetic construct
  misc_feature 1..25: note = Oligonucleotide
  source 1..25: mol_type = other DNA
gcaccctgtacacgctcactgcact

SEQ ID NO: 2002 - DNA, 25 bp, synthetic construct
  misc_feature 1..25: note = Oligonucleotide
  source 1..25: mol_type = other DNA
gctgcaccctgtacacgctcactgc

SEQ ID NO: 2003 - DNA, 25 bp, synthetic construct
  misc_feature 1..25: note = Oligonucleotide
  source 1..25: mol_type = other DNA
ctcgctgcaccctgtacacgctcac

SEQ ID NO: 2004 - DNA, 25 bp, synthetic construct
  misc_feature 1..25: note = Oligonucleotide
  source 1..25: mol_type = other DNA
ccgctcgctgcaccctgtacacgct

SEQ ID NO: 2005 - DNA, 25 bp, synthetic construct
  misc_feature 1..25: note = Oligonucleotide
  source 1..25: mol_type = other DNA
tgtccgctcgctgcaccctgtacac

SEQ ID NO: 2006 - DNA, 25 bp, synthetic construct
  misc_feature 1..25: note = Oligonucleotide
  source 1..25: mol_type = other DNA
ctgtgtccgctcgctgcaccctgta

SEQ ID NO: 2007 - DNA, 25 bp, synthetic construct
  misc_feature 1..25: note = Oligonucleotide
  source 1..25: mol_type = other DNA
acactgtgtccgctcgctgcaccct

SEQ ID NO: 2008 - DNA, 25 bp, synthetic construct
  misc_feature 1..25: note = Oligonucleotide
  source 1..25: mol_type = other DNA
catacactgtgtccgctcgctgcac

SEQ ID NO: 2009 - DNA, 25 bp, synthetic construct
  misc_feature 1..25: note = Oligonucleotide
  source 1..25: mol_type = other DNA
tcgcatacactgtgtccgctcgctg

SEQ ID NO: 2010 - DNA, 25 bp, synthetic construct
  misc_feature 1..25: note = Oligonucleotide
  source 1..25: mol_type = other DNA
tcatcgcatacactgtgtccgctcg

SEQ ID NO: 2011 - DNA, 25 bp, synthetic construct
  misc_feature 1..25: note = Oligonucleotide
  source 1..25: mol_type = other DNA
tactcatcgcatacactgtgtccgc

SEQ ID NO: 2012 - DNA, 25 bp, synthetic construct
  misc_feature 1..25: note = Oligonucleotide
  source 1..25: mol_type = other DNA
gcctactcatcgcatacactgtgtc

SEQ ID NO: 2013 - DNA, 25 bp, synthetic construct
  misc_feature 1..25: note = Oligonucleotide
  source 1..25: mol_type = other DNA
cgcgcctactcatcgcatacactgt

SEQ ID NO: 2014 - DNA, 25 bp, synthetic construct
  misc_feature 1..25: note = Oligonucleotide
  source 1..25: mol_type = other DNA
caccgcgcctactcatcgcatacac

SEQ ID NO: 2015 - DNA, 25 bp, synthetic construct
  misc_feature 1..25: note = Oligonucleotide
  source 1..25: mol_type = other DNA
acacaccgcgcctactcatcgcata

SEQ ID NO: 2016 - DNA, 25 bp, synthetic construct
  misc_feature 1..25: note = Oligonucleotide
  source 1..25: mol_type = other DNA
tgcacacaccgcgcctactcatcgc

SEQ ID NO: 2017 - DNA, 25 bp, synthetic construct
  misc_feature 1..25: note = Oligonucleotide
  source 1..25: mol_type = other DNA
cactgcacacaccgcgcctactcat

SEQ ID NO: 2018 - DNA, 25 bp, synthetic construct
  misc_feature 1..25: note = Oligonucleotide
  source 1..25: mol_type = other DNA
gctcactgcacacaccgcgcctact

SEQ ID NO: 2019 - DNA, 25 bp, synthetic construct
  misc_feature 1..25: note = Oligonucleotide
  source 1..25: mol_type = other DNA
cccgctcactgcacacaccgcgcct

SEQ ID NO: 2020 - DNA, 25 bp, synthetic construct
  misc_feature 1..25: note = Oligonucleotide
  source 1..25: mol_type = other DNA
ctgcccgctcactgcacacaccgcg

SEQ ID NO: 2021 - DNA, 25 bp, synthetic construct
  misc_feature 1..25: note = Oligonucleotide
  source 1..25: mol_type = other DNA
gccctgcccgctcactgcacacacc

SEQ ID NO: 2022 - DNA, 25 bp, synthetic construct
  misc_feature 1..25: note = Oligonucleotide
  source 1..25: mol_type = other DNA
ctcgccctgcccgctcactgcacac

SEQ ID NO: 2023 - DNA, 25 bp, synthetic construct
  misc_feature 1..25: note = Oligonucleotide
  source 1..25: mol_type = other DNA
ctgctcgccctgcccgctcactgca

SEQ ID NO: 2024 - DNA, 25 bp, synthetic construct
  misc_feature 1..25: note = Oligonucleotide
  source 1..25: mol_type = other DNA
ttactgctcgccctgcccgctcact

SEQ ID NO: 2025 - DNA, 25 bp, synthetic construct
  misc_feature 1..25: note = Oligonucleotide
  source 1..25: mol_type = other DNA
tccttactgctcgccctgcccgctc

SEQ ID NO: 2026 - DNA, 25 bp, synthetic construct
  misc_feature 1..25: note = Oligonucleotide
  source 1..25: mol_type = other DNA
acatccttactgctcgccctgcccg

SEQ ID NO: 2027 - DNA, 25 bp, synthetic construct
  misc_feature 1..25: note = Oligonucleotide
  source 1..25: mol_type = other DNA
tgtacatccttactgctcgccctgc

SEQ ID NO: 2028 - DNA, 25 bp, synthetic construct
  misc_feature 1..25: note = Oligonucleotide
  source 1..25: mol_type = other DNA
cactgtacatccttactgctcgccc

SEQ ID NO: 2029 - DNA, 25 bp, synthetic construct
  misc_feature 1..25: note = Oligonucleotide
  source 1..25: mol_type = other DNA
ccacactgtacatccttactgctcg

SEQ ID NO: 2030 - DNA, 25 bp, synthetic construct
  misc_feature 1..25: note = Oligonucleotide
  source 1..25: mol_type = other DNA
tgcccacactgtacatccttactgc

SEQ ID NO: 2031 - DNA, 25 bp, synthetic construct
  misc_feature 1..25: note = Oligonucleotide
  source 1..25: mol_type = other DNA
cactgcccacactgtacatccttac

SEQ ID NO: 2032 - DNA, 25 bp, synthetic construct
  misc_feature 1..25: note = Oligonucleotide
  source 1..25: mol_type = other DNA
gcacactgcccacactgtacatcct

SEQ ID NO: 2033 - DNA, 25 bp, synthetic construct
  misc_feature 1..25: note = Oligonucleotide
  source 1..25: mol_type = other DNA
ctcgcacactgcccacactgtacat

SEQ ID NO: 2034 - DNA, 25 bp, synthetic construct
  misc_feature 1..25: note = Oligonucleotide
  source 1..25: mol_type = other DNA
atgctcgcacactgcccacactgta

SEQ ID NO: 2035 - DNA, 25 bp, synthetic construct
  misc_feature 1..25: note = Oligonucleotide
  source 1..25: mol_type = other DNA
cacatgctcgcacactgcccacact

SEQ ID NO: 2036 - DNA, 25 bp, synthetic construct
  misc_feature 1..25: note = Oligonucleotide
  source 1..25: mol_type = other DNA
ctacacatgctcgcacactgcccac

SEQ ID NO: 2037 - DNA, 25 bp, synthetic construct
  misc_feature 1..25: note = Oligonucleotide
  source 1..25: mol_type = other DNA
tcactacacatgctcgcacactgcc

SEQ ID NO: 2038 - DNA, 25 bp, synthetic construct
  misc_feature 1..25: note = Oligonucleotide
  source 1..25: mol_type = other DNA
tgctcactacacatgctcgcacact

SEQ ID NO: 2039 - DNA, 25 bp, synthetic construct
  misc_feature 1..25: note = Oligonucleotide
  source 1..25: mol_type = other DNA
gcctgctcactacacatgctcgcac

SEQ ID NO: 2040 - DNA, 25 bp, synthetic construct
  misc_feature 1..25: note = Oligonucleotide
  source 1..25: mol_type = other DNA
actgcctgctcactacacatgctcg

SEQ ID NO: 2041 - DNA, 25 bp, synthetic construct
  misc_feature 1..25: note = Oligonucleotide
  source 1..25: mol_type = other DNA
cacactgcctgctcactacacatgc

SEQ ID NO: 2042 - DNA, 25 bp, synthetic construct
  misc_feature 1..25: note = Oligonucleotide
  source 1..25: mol_type = other DNA
gcacacactgcctgctcactacaca

SEQ ID NO: 2043 - DNA, 25 bp, synthetic construct
  misc_feature 1..25: note = Oligonucleotide
  source 1..25: mol_type = other DNA
actgcacacactgcctgctcactac

SEQ ID NO: 2044 - DNA, 25 bp, synthetic construct
  misc_feature 1..25: note = Oligonucleotide
  source 1..25: mol_type = other DNA
ctaactgcacacactgcctgctcac

SEQ ID NO: 2045 - DNA, 25 bp, synthetic construct
  misc_feature 1..25: note = Oligonucleotide
  source 1..25: mol_type = other DNA
ctgctaactgcacacactgcctgct

SEQ ID NO: 2046 - DNA, 25 bp, synthetic construct
  misc_feature 1..25: note = Oligonucleotide
  source 1..25: mol_type = other DNA
tgcctgctaactgcacacactgcct

SEQ ID NO: 2047 - DNA, 25 bp, synthetic construct
  misc_feature 1..25: note = Oligonucleotide
  source 1..25: mol_type = other DNA
ctgtgcctgctaactgcacacactg

SEQ ID NO: 2048 - DNA, 25 bp, synthetic construct
  misc_feature 1..25: note = Oligonucleotide
  source 1..25: mol_type = other DNA
acactgtgcctgctaactgcacaca

SEQ ID NO: 2049 - DNA, 25 bp, synthetic construct
  misc_feature 1..25: note = Oligonucleotide
  source 1..25: mol_type = other DNA
cacacactgtgcctgctaactgcac

SEQ ID NO: 2050 - DNA, 25 bp, synthetic construct
  misc_feature 1..25: note = Oligonucleotide
  source 1..25: mol_type = other DNA
ctgcacacactgtgcctgctaactg

SEQ ID NO: 2051 - DNA, 25 bp, synthetic construct
  misc_feature 1..25: note = Oligonucleotide
  source 1..25: mol_type = other DNA
tcactgcacacactgtgcctgctaa

SEQ ID NO: 2052 - DNA, 25 bp, synthetic construct
  misc_feature 1..25: note = Oligonucleotide
  source 1..25: mol_type = other DNA
cactcactgcacacactgtgcctgc

SEQ ID NO: 2053 - DNA, 25 bp, synthetic construct
  misc_feature 1..25: note = Oligonucleotide
  source 1..25: mol_type = other DNA
gcccactcactgcacacactgtgcc

SEQ ID NO: 2054 - DNA, 25 bp, synthetic construct
  misc_feature 1..25: note = Oligonucleotide
  source 1..25: mol_type = other DNA
actgcccactcactgcacacactgt

SEQ ID NO: 2055 - DNA, 25 bp, synthetic construct
  misc_feature 1..25: note = Oligonucleotide
  source 1..25: mol_type = other DNA
cacactgcccactcactgcacacac

SEQ ID NO: 2056 - DNA, 25 bp, synthetic construct
  misc_feature 1..25: note = Oligonucleotide
  source 1..25: mol_type = other DNA
gtgcacactgcccactcactgcaca

SEQ ID NO: 2057 - DNA, 25 bp, synthetic construct
  misc_feature 1..25: note = Oligonucleotide
  source 1..25: mol_type = other DNA
gctgtgcacactgcccactcactgc

SEQ ID NO: 2058 - DNA, 25 bp, synthetic construct
  misc_feature 1..25: note = Oligonucleotide
  source 1..25: mol_type = other DNA
catgctgtgcacactgcccactcac

SEQ ID NO: 2059 - DNA, 25 bp, synthetic construct
  misc_feature 1..25: note = Oligonucleotide
  source 1..25: mol_type = other DNA
gtacatgctgtgcacactgcccact

SEQ ID NO: 2060 - DNA, 25 bp, synthetic construct
  misc_feature 1..25: note = Oligonucleotide
  source 1..25: mol_type = other DNA
actgtacatgctgtgcacactgccc

SEQ ID NO: 2061 - DNA, 25 bp, synthetic construct
  misc_feature 1..25: note = Oligonucleotide
  source 1..25: mol_type = other DNA
cacactgtacatgctgtgcacactg

SEQ ID NO: 2062 - DNA, 25 bp, synthetic construct
  misc_feature 1..25: note = Oligonucleotide
  source 1..25: mol_type = other DNA
actcacactgtacatgctgtgcaca

SEQ ID NO: 2063 - DNA, 25 bp, synthetic construct
  misc_feature 1..25: note = Oligonucleotide
  source 1..25: mol_type = other DNA
accactcacactgtacatgctgtgc

SEQ ID NO: 2064 - DNA, 25 bp, synthetic construct
  misc_feature 1..25: note = Oligonucleotide
  source 1..25: mol_type = other DNA
cacaccactcacactgtacatgctg

SEQ ID NO: 2065 - DNA, 25 bp, synthetic construct
  misc_feature 1..25: note = Oligonucleotide
  source 1..25: mol_type = other DNA
gcacacaccactcacactgtacatg

SEQ ID NO: 2066 - DNA, 25 bp, synthetic construct
  misc_feature 1..25: note = Oligonucleotide
  source 1..25: mol_type = other DNA
acagcacacaccactcacactgtac

SEQ ID NO: 2067 - DNA, 25 bp, synthetic construct
  misc_feature 1..25: note = Oligonucleotide
  source 1..25: mol_type = other DNA
cacacagcacacaccactcacactg

SEQ ID NO: 2068 - DNA, 25 bp, synthetic construct
  misc_feature 1..25: note = Oligonucleotide
  source 1..25: mol_type = other DNA
cggcacacagcacacaccactcaca

SEQ ID NO: 2069 - DNA, 25 bp, synthetic construct
  misc_feature 1..25: note = Oligonucleotide
  source 1..25: mol_type = other DNA
tcacggcacacagcacacaccactc

SEQ ID NO: 2070 - DNA, 25 bp, synthetic construct
  misc_feature 1..25: note = Oligonucleotide
  source 1..25: mol_type = other DNA
tgctcacggcacacagcacacacca

SEQ ID NO: 2071 - DNA, 25 bp, synthetic construct
  misc_feature 1..25: note = Oligonucleotide
  source 1..25: mol_type = other DNA
acatgctcacggcacacagcacaca

SEQ ID NO: 2072 - DNA, 25 bp, synthetic construct
  misc_feature 1..25: note = Oligonucleotide
  source 1..25: mol_type = other DNA
tacacatgctcacggcacacagcac

SEQ ID NO: 2073 - DNA, 25 bp, synthetic construct
  misc_feature 1..25: note = Oligonucleotide
  source 1..25: mol_type = other DNA
cactacacatgctcacggcacacag

SEQ ID NO: 2074 - DNA, 25 bp, synthetic construct
  misc_feature 1..25: note = Oligonucleotide
  source 1..25: mol_type = other DNA
actcactacacatgctcacggcaca

SEQ ID NO: 2075 - DNA, 25 bp, synthetic construct
  misc_feature 1..25: note = Oligonucleotide
  source 1..25: mol_type = other DNA
cccactcactacacatgctcacggc

SEQ ID NO: 2076 - DNA, 25 bp, synthetic construct
  misc_feature 1..25: note = Oligonucleotide
  source 1..25: mol_type = other DNA
gtgcccactcactacacatgctcac

SEQ ID NO: 2077 - DNA, 25 bp, synthetic construct
  misc_feature 1..25: note = Oligonucleotide
  source 1..25: mol_type = other DNA
actgtgcccactcactacacatgct

SEQ ID NO: 2078 - DNA, 25 bp, synthetic construct
  misc_feature 1..25: note = Oligonucleotide
  source 1..25: mol_type = other DNA
tgcactgtgcccactcactacacat

SEQ ID NO: 2079 - DNA, 25 bp, synthetic construct
  misc_feature 1..25: note = Oligonucleotide
  source 1..25: mol_type = other DNA
gactgcactgtgcccactcactaca

SEQ ID NO: 2080 - DNA, 25 bp, synthetic construct
  misc_feature 1..25: note = Oligonucleotide
  source 1..25: mol_type = other DNA
actgactgcactgtgcccactcact

SEQ ID NO: 2081 - DNA, 25 bp, synthetic construct
  misc_feature 1..25: note = Oligonucleotide
  source 1..25: mol_type = other DNA
cacactgactgcactgtgcccactc

SEQ ID NO: 2082 - DNA, 25 bp, synthetic construct
  misc_feature 1..25: note = Oligonucleotide
  source 1..25: mol_type = other DNA
gtgcacactgactgcactgtgccca

SEQ ID NO: 2083 - DNA, 25 bp, synthetic construct
  misc_feature 1..25: note = Oligonucleotide
  source 1..25: mol_type = other DNA
tttgtgcacactgactgcactgtgc

SEQ ID NO: 2084 - DNA, 25 bp, synthetic construct
  misc_feature 1..25: note = Oligonucleotide
  source 1..25: mol_type = other DNA
tactttgtgcacactgactgcactg

SEQ ID NO: 2085 - DNA, 25 bp, synthetic construct
  misc_feature 1..25: note = Oligonucleotide
  source 1..25: mol_type = other DNA
gcatactttgtgcacactgactgca

SEQ ID NO: 2086 - DNA, 25 bp, synthetic construct
  misc_feature 1..25: note = Oligonucleotide
  source 1..25: mol_type = other DNA
actgcatactttgtgcacactgact

SEQ ID NO: 2087 - DNA, 25 bp, synthetic construct
  misc_feature 1..25: note = Oligonucleotide
  source 1..25: mol_type = other DNA
cccactgcatactttgtgcacactg

SEQ ID NO: 2088 - DNA, 25 bp, synthetic construct
  misc_feature 1..25: note = Oligonucleotide
  source 1..25: mol_type = other DNA
gtgcccactgcatactttgtgcaca

SEQ ID NO: 2089 - DNA, 25 bp, synthetic construct
  misc_feature 1..25: note = Oligonucleotide
  source 1..25: mol_type = other DNA
tacgtgcccactgcatactttgtgc

SEQ ID NO: 2090 - DNA, 25 bp, synthetic construct
  misc_feature 1..25: note = Oligonucleotide
  source 1..25: mol_type = other DNA
cggtacgtgcccactgcatactttg

SEQ ID NO: 2091 - DNA, 25 bp, synthetic construct
  misc_feature 1..25: note = Oligonucleotide
  source 1..25: mol_type = other DNA
acacggtacgtgcccactgcatact

SEQ ID NO: 2092 - DNA, 25 bp, synthetic construct
  misc_feature 1..25: note = Oligonucleotide
  source 1..25: mol_type = other DNA
cacacacggtacgtgcccactgcat

SEQ ID NO: 2093 - DNA, 25 bp, synthetic construct
  misc_feature 1..25: note = Oligonucleotide
  source 1..25: mol_type = other DNA
ctgcacacacggtacgtgcccactg

SEQ ID NO: 2094 - DNA, 25 bp, synthetic construct
  misc_feature 1..25: note = Oligonucleotide
  source 1..25: mol_type = other DNA
tcactgcacacacggtacgtgccca

SEQ ID NO: 2095 - DNA, 25 bp, synthetic construct
  misc_feature 1..25: note = Oligonucleotide
  source 1..25: mol_type = other DNA
cactcactgcacacacggtacgtgc

SEQ ID NO: 2096 - DNA, 25 bp, synthetic construct
  misc_feature 1..25: note = Oligonucleotide
  source 1..25: mol_type = other DNA
caccactcactgcacacacggtacg

SEQ ID NO: 2097 - DNA, 25 bp, synthetic construct
  misc_feature 1..25: note = Oligonucleotide
  source 1..25: mol_type = other DNA
gcacaccactcactgcacacacggt

SEQ ID NO: 2098 - DNA, 25 bp, synthetic construct
  misc_feature 1..25: note = Oligonucleotide
  source 1..25: mol_type = other DNA
actgcacaccactcactgcacacac

SEQ ID NO: 2099 - DNA, 25 bp, synthetic construct
  misc_feature 1..25: note = Oligonucleotide
  source 1..25: mol_type = other DNA
cacactgcacaccactcactgcaca

SEQ ID NO: 2100 - DNA, 25 bp, synthetic construct
  misc_feature 1..25: note = Oligonucleotide
  source 1..25: mol_type = other DNA
ctacacactgcacaccactcactgc

SEQ ID NO: 2101 - DNA, 25 bp, synthetic construct
  misc_feature 1..25: note = Oligonucleotide
  source 1..25: mol_type = other DNA
acactacacactgcacaccactcac

SEQ ID NO: 2102 - DNA, 25 bp, synthetic construct
  misc_feature 1..25: note = Oligonucleotide
  source 1..25: mol_type = other DNA
tgcacactacacactgcacaccact

SEQ ID NO: 2103 - DNA, 25 bp, synthetic construct
  misc_feature 1..25: note = Oligonucleotide
  source 1..25: mol_type = other DNA
cactgcacactacacactgcacacc

SEQ ID NO: 2104 - DNA, 25 bp, synthetic construct
  misc_feature 1..25: note = Oligonucleotide
  source 1..25: mol_type = other DNA
gctcactgcacactacacactgcac

SEQ ID NO: 2105 - DNA, 25 bp, synthetic construct
  misc_feature 1..25: note = Oligonucleotide
  source 1..25: mol_type = other DNA
actgctcactgcacactacacactg

SEQ ID NO: 2106 - DNA, 25 bp, synthetic construct
  misc_feature 1..25: note = Oligonucleotide
  source 1..25: mol_type = other DNA
cacactgctcactgcacactacaca

SEQ ID NO: 2107 - DNA, 25 bp, synthetic construct
  misc_feature 1..25: note = Oligonucleotide
  source 1..25: mol_type = other DNA
gtacacactgctcactgcacactac

SEQ ID NO: 2108 - DNA, 25 bp, synthetic construct
  misc_feature 1..25: note = Oligonucleotide
  source 1..25: mol_type = other DNA
gctgtacacactgctcactgcacac

SEQ ID NO: 2109 - DNA, 25 bp, synthetic construct
  misc_feature 1..25: note = Oligonucleotide
  source 1..25: mol_type = other DNA
aatgctgtacacactgctcactgca

SEQ ID NO: 2110 - DNA, 25 bp, synthetic construct
  misc_feature 1..25: note = Oligonucleotide
  source 1..25: mol_type = other DNA
tgcaatgctgtacacactgctcact

SEQ ID NO: 2111 - DNA, 25 bp, synthetic construct
  misc_feature 1..25: note = Oligonucleotide
  source 1..25: mol_type = other DNA
cactgcaatgctgtacacactgctc

SEQ ID NO: 2112 - DNA, 25 bp, synthetic construct
  misc_feature 1..25: note = Oligonucleotide
  source 1..25: mol_type = other DNA
ccacactgcaatgctgtacacactg

SEQ ID NO: 2113 - DNA, 25 bp, synthetic construct
  misc_feature 1..25: note = Oligonucleotide
  source 1..25: mol_type = other DNA
gccccacactgcaatgctgtacaca

SEQ ID NO: 2114 - DNA, 25 bp, synthetic construct
  misc_feature 1..25: note = Oligonucleotide
  source 1..25: mol_type = other DNA
actgccccacactgcaatgctgtac

SEQ ID NO: 2115 - DNA, 25 bp, synthetic construct
  misc_feature 1..25: note = Oligonucleotide
  source 1..25: mol_type = other DNA
ctcactgccccacactgcaatgctg

SEQ ID NO: 2116 - DNA, 25 bp, synthetic construct
  misc_feature 1..25: note = Oligonucleotide
  source 1..25: mol_type = other DNA
gtactcactgccccacactgcaatg

SEQ ID NO: 2117 - DNA, 25 bp, synthetic construct
  misc_feature 1..25: note = Oligonucleotide
  source 1..25: mol_type = other DNA
actgtactcactgccccacactgca

SEQ ID NO: 2118 - DNA, 25 bp, synthetic construct
  misc_feature 1..25: note = Oligonucleotide
  source 1..25: mol_type = other DNA
cacactgtactcactgccccacact

SEQ ID NO: 2119 - DNA, 25 bp, synthetic construct
  misc_feature 1..25: note = Oligonucleotide
  source 1..25: mol_type = other DNA
actcacactgtactcactgccccac

SEQ ID NO: 2120 - DNA, 25 bp, synthetic construct
  misc_feature 1..25: note = Oligonucleotide
  source 1..25: mol_type = other DNA
aacactcacactgtactcactgccc

SEQ ID NO: 2121 - DNA, 25 bp, synthetic construct
  misc_feature 1..25: note = Oligonucleotide
  source 1..25: mol_type = other DNA
cacaacactcacactgtactcactg

SEQ ID NO: 2122 - DNA, 25 bp, synthetic construct
  misc_feature 1..25: note = Oligonucleotide
  source 1..25: mol_type = other DNA
aatcacaacactcacactgtactca

SEQ ID NO: 2123 - DNA, 25 bp, synthetic construct
  misc_feature 1..25: note = Oligonucleotide
  source 1..25: mol_type = other DNA
cacaatcacaacactcacactgtac

SEQ ID NO: 2124 - DNA, 25 bp, synthetic construct
  misc_feature 1..25: note = Oligonucleotide
  source 1..25: mol_type = other DNA
taccacaatcacaacactcacactg

SEQ ID NO: 2125 - DNA, 25 bp, synthetic construct
  misc_feature 1..25: note = Oligonucleotide
  source 1..25: mol_type = other DNA
gcttaccacaatcacaacactcaca

SEQ ID NO: 2126 - DNA, 25 bp, synthetic construct
  misc_feature 1..25: note = Oligonucleotide
  source 1..25: mol_type = other DNA
cctgcttaccacaatcacaacactc

SEQ ID NO: 2127 - DNA, 25 bp, synthetic construct
  misc_feature 1..25: note = Oligonucleotide
  source 1..25: mol_type = other DNA
catcctgcttaccacaatcacaaca

SEQ ID NO: 2128 - DNA, 25 bp, synthetic construct
  misc_feature 1..25: note = Oligonucleotide
  source 1..25: mol_type = other DNA
gcgcatcctgcttaccacaatcaca

SEQ ID NO: 2129 - DNA, 25 bp, synthetic construct
  misc_feature 1..25: note = Oligonucleotide
  source 1..25: mol_type = other DNA
actgcgcatcctgcttaccacaatc

SEQ ID NO: 2130 - DNA, 25 bp, synthetic construct
  misc_feature 1..25: note = Oligonucleotide
  source 1..25: mol_type = other DNA
tatactgcgcatcctgcttaccaca

SEQ ID NO: 2131 - DNA, 25 bp, synthetic construct
  misc_feature 1..25: note = Oligonucleotide
  source 1..25: mol_type = other DNA
ctgtatactgcgcatcctgcttacc

SEQ ID NO: 2132 - DNA, 25 bp, synthetic construct
  misc_feature 1..25: note = Oligonucleotide
  source 1..25: mol_type = other DNA
tcactgtatactgcgcatcctgctt

SEQ ID NO: 2133 - DNA, 25 bp, synthetic construct
  misc_feature 1..25: note = Oligonucleotide
  source 1..25: mol_type = other DNA
tgttcactgtatactgcgcatcctg

SEQ ID NO: 2134 - DNA, 25 bp, synthetic construct
  misc_feature 1..25: note = Oligonucleotide
  source 1..25: mol_type = other DNA
cactgttcactgtatactgcgcatc

SEQ ID NO: 2135 - DNA, 25 bp, synthetic construct
  misc_feature 1..25: note = Oligonucleotide
  source 1..25: mol_type = other DNA
gcacactgttcactgtatactgcgc

SEQ ID NO: 2136 - DNA, 25 bp, synthetic construct
  misc_feature 1..25: note = Oligonucleotide
  source 1..25: mol_type = other DNA
tgtgcacactgttcactgtatactg

SEQ ID NO: 2137 - DNA, 25 bp, synthetic construct
  misc_feature 1..25: note = Oligonucleotide
  source 1..25: mol_type = other DNA
cactgtgcacactgttcactgtata

SEQ ID NO: 2138 - DNA, 25 bp, synthetic construct
  misc_feature 1..25: note = Oligonucleotide
  source 1..25: mol_type = other DNA
acacactgtgcacactgttcactgt

SEQ ID NO: 2139 - DNA, 25 bp, synthetic construct
  misc_feature 1..25: note = Oligonucleotide
  source 1..25: mol_type = other DNA
tgcacacactgtgcacactgttcac

SEQ ID NO: 2140 - DNA, 25 bp, synthetic construct
  misc_feature 1..25: note = Oligonucleotide
  source 1..25: mol_type = other DNA
cactgcacacactgtgcacactgtt

SEQ ID NO: 2141 - DNA, 25 bp, synthetic construct
  misc_feature 1..25: note = Oligonucleotide
  source 1..25: mol_type = other DNA
ccacactgcacacactgtgcacact

SEQ ID NO: 2142 - DNA, 25 bp, synthetic construct
  misc_feature 1..25: note = Oligonucleotide
  source 1..25: mol_type = other DNA
agcccacactgcacacactgtgcac

SEQ ID NO: 2143 - DNA, 25 bp, synthetic construct
  misc_feature 1..25: note = Oligonucleotide
  source 1..25: mol_type = other DNA
cacagcccacactgcacacactgtg

SEQ ID NO: 2144 - DNA, 25 bp, synthetic construct
  misc_feature 1..25: note = Oligonucleotide
  source 1..25: mol_type = other DNA
gcacacagcccacactgcacacact

SEQ ID NO: 2145 - DNA, 25 bp, synthetic construct
  misc_feature 1..25: note = Oligonucleotide
  source 1..25: mol_type = other DNA
gtggcacacagcccacactgcacac

SEQ ID NO: 2146 - DNA, 25 bp, synthetic construct
  misc_feature 1..25: note = Oligonucleotide
  source 1..25: mol_type = other DNA
tctgtggcacacagcccacactgca

SEQ ID NO: 2147 - DNA, 25 bp, synthetic construct
  misc_feature 1..25: note = Oligonucleotide
  source 1..25: mol_type = other DNA
gactctgtggcacacagcccacact

SEQ ID NO: 2148 - DNA, 25 bp, synthetic construct
  misc_feature 1..25: note = Oligonucleotide
  source 1..25: mol_type = other DNA
actgactctgtggcacacagcccac

SEQ ID NO: 2149 - DNA, 25 bp, synthetic construct
  misc_feature 1..25: note = Oligonucleotide
  source 1..25: mol_type = other DNA
cacactgactctgtggcacacagcc

SEQ ID NO: 2150 - DNA, 25 bp, synthetic construct
  misc_feature 1..25: note = Oligonucleotide
  source 1..25: mol_type = other DNA
caccacactgactctgtggcacaca

SEQ ID NO: 2151 - DNA, 25 bp, synthetic construct
  misc_feature 1..25: note = Oligonucleotide
  source 1..25: mol_type = other DNA
acacaccacactgactctgtggcac

SEQ ID NO: 2152 - DNA, 25 bp, synthetic construct
  misc_feature 1..25: note = Oligonucleotide
  source 1..25: mol_type = other DNA
tacacacaccacactgactctgtgg

SEQ ID NO: 2153 - DNA, 25 bp, synthetic construct
  misc_feature 1..25: note = Oligonucleotide
  source 1..25: mol_type = other DNA
aactacacacaccacactgactctg

SEQ ID NO: 2154 - DNA, 25 bp, synthetic construct
  misc_feature 1..25: note = Oligonucleotide
  source 1..25: mol_type = other DNA
tcaaactacacacaccacactgact

SEQ ID NO: 2155 - DNA, 25 bp, synthetic construct
  misc_feature 1..25: note = Oligonucleotide
  source 1..25: mol_type = other DNA
tgttcaaactacacacaccacactg

SEQ ID NO: 2156 - DNA, 25 bp, synthetic construct
  misc_feature 1..25: note = Oligonucleotide
  source 1..25: mol_type = other DNA
cactgttcaaactacacacaccaca

SEQ ID NO: 2157 - DNA, 25 bp, synthetic construct
  misc_feature 1..25: note = Oligonucleotide
  source 1..25: mol_type = other DNA
acacactgttcaaactacacacacc

SEQ ID NO: 2158 - DNA, 25 bp, synthetic construct
  misc_feature 1..25: note = Oligonucleotide
  source 1..25: mol_type = other DNA
tgcacacactgttcaaactacacac

SEQ ID NO: 2159 - DNA, 25 bp, synthetic construct
  misc_feature 1..25: note = Oligonucleotide
  source 1..25: mol_type = other DNA
caatgcacacactgttcaaactaca

SEQ ID NO: 2160 - DNA, 25 bp, synthetic construct
  misc_feature 1..25: note = Oligonucleotide
  source 1..25: mol_type = other DNA
gctcaatgcacacactgttcaaact

SEQ ID NO: 2161 - DNA, 25 bp, synthetic construct
  misc_feature 1..25: note = Oligonucleotide
  source 1..25: mol_type = other DNA
gctgctcaatgcacacactgttcaa

SEQ ID NO: 2162 - DNA, 25 bp, synthetic construct
  misc_feature 1..25: note = Oligonucleotide
  source 1..25: mol_type = other DNA
catgctgctcaatgcacacactgtt

SEQ ID NO: 2163 - DNA, 25 bp, synthetic construct
  misc_feature 1..25: note = Oligonucleotide
  source 1..25: mol_type = other DNA
atccatgctgctcaatgcacacact

SEQ ID NO: 2164 - DNA, 25 bp, synthetic construct
  misc_feature 1..25: note = Oligonucleotide
  source 1..25: mol_type = other DNA
accatccatgctgctcaatgcacac

SEQ ID NO: 2165 - DNA, 25 bp, synthetic construct
  misc_feature 1..25: note = Oligonucleotide
  source 1..25: mol_type = other DNA
cacaccatccatgctgctcaatgca

SEQ ID NO: 2166 - DNA, 25 bp, synthetic construct
  misc_feature 1..25: note = Oligonucleotide
  source 1..25: mol_type = other DNA
gtccacaccatccatgctgctcaat

SEQ ID NO: 2167 - DNA, 25 bp, synthetic construct
  misc_feature 1..25: note = Oligonucleotide
  source 1..25: mol_type = other DNA
agcgtccacaccatccatgctgctc

SEQ ID NO: 2168 - DNA, 25 bp, synthetic construct
  misc_feature 1..25: note = Oligonucleotide
  source 1..25: mol_type = other DNA
ctcagcgtccacaccatccatgctg

SEQ ID NO: 2169 - DNA, 25 bp, synthetic construct
  misc_feature 1..25: note = Oligonucleotide
  source 1..25: mol_type = other DNA
atgctcagcgtccacaccatccatg

SEQ ID NO: 2170 - DNA, 25 bp, synthetic construct
  misc_feature 1..25: note = Oligonucleotide
  source 1..25: mol_type = other DNA
acaatgctcagcgtccacaccatcc

SEQ ID NO: 2171 - DNA, 25 bp, synthetic construct
  misc_feature 1..25: note = Oligonucleotide
  source 1..25: mol_type = other DNA
agaacaatgctcagcgtccacacca

SEQ ID NO: 2172 - DNA, 25 bp, synthetic construct
  misc_feature 1..25: note = Oligonucleotide
  source 1..25: mol_type = other DNA
tggagaacaatgctcagcgtccaca

SEQ ID NO: 2173 - DNA, 25 bp, synthetic construct
  misc_feature 1..25: note = Oligonucleotide
  source 1..25: mol_type = other DNA
ccctggagaacaatgctcagcgtcc

SEQ ID NO: 2174 - DNA, 25 bp, synthetic construct
  misc_feature 1..25: note = Oligonucleotide
  source 1..25: mol_type = other DNA
cctccctggagaacaatgctcagcg

SEQ ID NO: 2175 - DNA, 25 bp, synthetic construct
  misc_feature 1..25: note = Oligonucleotide
  source 1..25: mol_type = other DNA
actcctccctggagaacaatgctca

SEQ ID NO: 2176 - DNA, 25 bp, synthetic construct
  misc_feature 1..25: note = Oligonucleotide
  source 1..25: mol_type = other DNA
cacactcctccctggagaacaatgc

SEQ ID NO: 2177 - DNA, 25 bp, synthetic construct
  misc_feature 1..25: note = Oligonucleotide
  source 1..25: mol_type = other DNA
gctcacactcctccctggagaacaa

SEQ ID NO: 2178 - DNA, 25 bp, synthetic construct
  misc_feature 1..25: note = Oligonucleotide
  source 1..25: mol_type = other DNA
cgtgctcacactcctccctggagaa

SEQ ID NO: 2179 - DNA, 25 bp, synthetic construct
  misc_feature 1..25: note = Oligonucleotide
  source 1..25: mol_type = other DNA
tctcgtgctcacactcctccctgga

SEQ ID NO: 2180 - DNA, 25 bp, synthetic construct
  misc_feature 1..25: note = Oligonucleotide
  source 1..25: mol_type = other DNA
ctctctcgtgctcacactcctccct

SEQ ID NO: 2181 - DNA, 25 bp, synthetic construct
  misc_feature 1..25: note = Oligonucleotide
  source 1..25: mol_type = other DNA
gcactctctcgtgctcacactcctc

SEQ ID NO: 2182 - DNA, 25 bp, synthetic construct
  misc_feature 1..25: note = Oligonucleotide
  source 1..25: mol_type = other DNA
ctggcactctctcgtgctcacactc

SEQ ID NO: 2183 - DNA, 25 bp, synthetic construct
  misc_feature 1..25: note = Oligonucleotide
  source 1..25: mol_type = other DNA
cctctggcactctctcgtgctcaca

SEQ ID NO: 2184 - DNA, 25 bp, synthetic construct
  misc_feature 1..25: note = Oligonucleotide
  source 1..25: mol_type = other DNA
acccctctggcactctctcgtgctc

SEQ ID NO: 2185 - DNA, 25 bp, synthetic construct
  misc_feature 1..25: note = Oligonucleotide
  source 1..25: mol_type = other DNA
cacacccctctggcactctctcgtg

SEQ ID NO: 2186 - DNA, 25 bp, synthetic construct
  misc_feature 1..25: note = Oligonucleotide
  source 1..25: mol_type = other DNA
ccacacacccctctggcactctctc

SEQ ID NO: 2187 - DNA, 25 bp, synthetic construct
  misc_feature 1..25: note = Oligonucleotide
  source 1..25: mol_type = other DNA
acaccacacacccctctggcactct

SEQ ID NO: 2188 - DNA, 25 bp, synthetic construct
  misc_feature 1..25: note = Oligonucleotide
  source 1..25: mol_type = other DNA
ctcacaccacacacccctctggcac

SEQ ID NO: 2189 - DNA, 25 bp, synthetic construct
  misc_feature 1..25: note = Oligonucleotide
  source 1..25: mol_type = other DNA
ctgctcacaccacacacccctctgg

SEQ ID NO: 2190 - DNA, 25 bp, synthetic construct
  misc_feature 1..25: note = Oligonucleotide
  source 1..25: mol_type = other DNA
gccctgctcacaccacacacccctc

SEQ ID NO: 2191 - DNA, 25 bp, synthetic construct
  misc_feature 1..25: note = Oligonucleotide
  source 1..25: mol_type = other DNA
atagccctgctcacaccacacaccc

SEQ ID NO: 2192 - DNA, 25 bp, synthetic construct
  misc_feature 1..25: note = Oligonucleotide
  source 1..25: mol_type = other DNA
cagatagccctgctcacaccacaca

SEQ ID NO: 2193 - DNA, 25 bp, synthetic construct
  misc_feature 1..25: note = Oligonucleotide
  source 1..25: mol_type = other DNA
acacagatagccctgctcacaccac

SEQ ID NO: 2194 - DNA, 25 bp, synthetic construct
  misc_feature 1..25: note = Oligonucleotide
  source 1..25: mol_type = other DNA
tgcacacagatagccctgctcacac

SEQ ID NO: 2195 - DNA, 25 bp, synthetic construct
  misc_feature 1..25: note = Oligonucleotide
  source 1..25: mol_type = other DNA
acgtgcacacagatagccctgctca

SEQ ID NO: 2196 - DNA, 25 bp, synthetic construct
  misc_feature 1..25: note = Oligonucleotide
  source 1..25: mol_type = other DNA
caaacgtgcacacagatagccctgc

SEQ ID NO: 2197 - DNA, 25 bp, synthetic construct
  misc_feature 1..25: note = Oligonucleotide
  source 1..25: mol_type = other DNA
gaacaaacgtgcacacagatagccc

SEQ ID NO: 2198 - DNA, 25 bp, synthetic construct
  misc_feature 1..25: note = Oligonucleotide
  source 1..25: mol_type = other DNA
aaggaacaaacgtgcacacagatag

SEQ ID NO: 2199 - DNA, 25 bp, synthetic construct
  misc_feature 1..25: note = Oligonucleotide
  source 1..25: mol_type = other DNA
agaaaggaacaaacgtgcacacaga

SEQ ID NO: 2200 - DNA, 25 bp, synthetic construct
  misc_feature 1..25: note = Oligonucleotide
  source 1..25: mol_type = other DNA
tggagaaaggaacaaacgtgcacac

SEQ ID NO: 2201 - DNA, 25 bp, synthetic construct
  misc_feature 1..25: note = Oligonucleotide
  source 1..25: mol_type = other DNA
agctggagaaaggaacaaacgtgca

SEQ ID NO: 2202 - DNA, 25 bp, synthetic construct
  misc_feature 1..25: note = Oligonucleotide
  source 1..25: mol_type = other DNA
cacagctggagaaaggaacaaacgt

SEQ ID NO: 2203 - DNA, 25 bp, synthetic construct
  misc_feature 1..25: note = Oligonucleotide
  source 1..25: mol_type = other DNA
cttcacagctggagaaaggaacaaa

SEQ ID NO: 2204 - DNA, 25 bp, synthetic construct
  misc_feature 1..25: note = Oligonucleotide
  source 1..25: mol_type = other DNA
agacttcacagctggagaaaggaac

SEQ ID NO: 2205 - DNA, 25 bp, synthetic construct
  misc_feature 1..25: note = Oligonucleotide
  source 1..25: mol_type = other DNA
acaagacttcacagctggagaaagg

SEQ ID NO: 2206 - DNA, 25 bp, synthetic construct
  misc_feature 1..25: note = Oligonucleotide
  source 1..25: mol_type = other DNA
ttcacaagacttcacagctggagaa

SEQ ID NO: 2207 - DNA, 25 bp, synthetic construct
  misc_feature 1..25: note = Oligonucleotide
  source 1..25: mol_type = other DNA
gccttcacaagacttcacagctgga

SEQ ID NO: 2208 - DNA, 25 bp, synthetic construct
  misc_feature 1..25: note = Oligonucleotide
  source 1..25: mol_type = other DNA
ttggccttcacaagacttcacagct

SEQ ID NO: 2209 - DNA, 25 bp, synthetic construct
  misc_feature 1..25: note = Oligonucleotide
  source 1..25: mol_type = other DNA
tggttggccttcacaagacttcaca

SEQ ID NO: 2210 - DNA, 25 bp, synthetic construct
  misc_feature 1..25: note = Oligonucleotide
  source 1..25: mol_type = other DNA
acttggttggccttcacaagacttc

SEQ ID NO: 2211 - DNA, 25 bp, synthetic construct
  misc_feature 1..25: note = Oligonucleotide
  source 1..25: mol_type = other DNA
gggacttggttggccttcacaagac

SEQ ID NO: 2212 - DNA, 25 bp, synthetic construct
  misc_feature 1..25: note = Oligonucleotide
  source 1..25: mol_type = other DNA
gaggggacttggttggccttcacaa

SEQ ID NO: 2213 - DNA, 25 bp, synthetic construct
  misc_feature 1..25: note = Oligonucleotide
  source 1..25: mol_type = other DNA
aaggaggggacttggttggccttca

SEQ ID NO: 2214 - DNA, 25 bp, synthetic construct
  misc_feature 1..25: note = Oligonucleotide
  source 1..25: mol_type = other DNA
gtaaaggaggggacttggttggcct

SEQ ID NO: 2215 - DNA, 25 bp, synthetic construct
  misc_feature 1..25: note = Oligonucleotide
  source 1..25: mol_type = other DNA
tgagtaaaggaggggacttggttgg

SEQ ID NO: 2216 - DNA, 25 bp, synthetic construct
  misc_feature 1..25: note = Oligonucleotide
  source 1..25: mol_type = other DNA
gggtgagtaaaggaggggacttggt

SEQ ID NO: 2217 - DNA, 25 bp, synthetic construct
  misc_feature 1..25: note = Oligonucleotide
  source 1..25: mol_type = other DNA
catgggtgagtaaaggaggggactt

SEQ ID NO: 2218 - DNA, 25 bp, synthetic construct
  misc_feature 1..25: note = Oligonucleotide
  source 1..25: mol_type = other DNA
atgcatgggtgagtaaaggagggga

SEQ ID NO: 2219 - DNA, 25 bp, synthetic construct
  misc_feature 1..25: note = Oligonucleotide
  source 1..25: mol_type = other DNA
accatgcatgggtgagtaaaggagg

SEQ ID NO: 2220 - DNA, 25 bp, synthetic construct
  misc_feature 1..25: note = Oligonucleotide
  source 1..25: mol_type = other DNA
cacaccatgcatgggtgagtaaagg

SEQ ID NO: 2221 - DNA, 25 bp, synthetic construct
  misc_feature 1..25: note = Oligonucleotide
  source 1..25: mol_type = other DNA
cttcacaccatgcatgggtgagtaa

SEQ ID NO: 2222 - DNA, 25 bp, synthetic construct
  misc_feature 1..25: note = Oligonucleotide
  source 1..25: mol_type = other DNA
catcttcacaccatgcatgggtgag

SEQ ID NO: 2223 - DNA, 25 bp, synthetic construct
  misc_feature 1..25: note = Oligonucleotide
  source 1..25: mol_type = other DNA
atacatcttcacaccatgcatgggt

SEQ ID NO: 2224 - DNA, 25 bp, synthetic construct
  misc_feature 1..25: note = Oligonucleotide
  source 1..25: mol_type = other DNA
tcaatacatcttcacaccatgcatg

SEQ ID NO: 2225 - DNA, 25 bp, synthetic construct
  misc_feature 1..25: note = Oligonucleotide
  source 1..25: mol_type = other DNA
cactcaatacatcttcacaccatgc

SEQ ID NO: 2226 - DNA, 25 bp, synthetic construct
  misc_feature 1..25: note = Oligonucleotide
  source 1..25: mol_type = other DNA
aggcactcaatacatcttcacacca

SEQ ID NO: 2227 - DNA, 25 bp, synthetic construct
  misc_feature 1..25: note = Oligonucleotide
  source 1..25: mol_type = other DNA
gcaaggcactcaatacatcttcaca

SEQ ID NO: 2228 - DNA, 25 bp, synthetic construct
  misc_feature 1..25: note = Oligonucleotide
  source 1..25: mol_type = other DNA
ctagcaaggcactcaatacatcttc

SEQ ID NO: 2229 - DNA, 25 bp, synthetic construct
  misc_feature 1..25: note = Oligonucleotide
  source 1..25: mol_type = other DNA
tgcctagcaaggcactcaatacatc

SEQ ID NO: 2230 - DNA, 25 bp, synthetic construct
  misc_feature 1..25: note = Oligonucleotide
  source 1..25: mol_type = other DNA
ccatgcctagcaaggcactcaatac

SEQ ID NO: 2231 - DNA, 25 bp, synthetic construct
  misc_feature 1..25: note = Oligonucleotide
  source 1..25: mol_type = other DNA
tccccatgcctagcaaggcactcaa

SEQ ID NO: 2232 - DNA, 25 bp, synthetic construct
  misc_feature 1..25: note = Oligonucleotide
  source 1..25: mol_type = other DNA
acgtccccatgcctagcaaggcact

SEQ ID NO: 2233 - DNA, 25 bp, synthetic construct
  misc_feature 1..25: note = Oligonucleotide
  source 1..25: mol_type = other DNA
tctacgtccccatgcctagcaaggc

SEQ ID NO: 2234 - DNA, 25 bp, synthetic construct
  misc_feature 1..25: note = Oligonucleotide
  source 1..25: mol_type = other DNA
ccgtctacgtccccatgcctagcaa

SEQ ID NO: 2235 - DNA, 25 bp, synthetic construct
  misc_feature 1..25: note = Oligonucleotide
  source 1..25: mol_type = other DNA
accccgtctacgtccccatgcctag

SEQ ID NO: 2236 - DNA, 25 bp, synthetic construct
  misc_feature 1..25: note = Oligonucleotide
  source 1..25: mol_type = other DNA
ctgaccccgtctacgtccccatgcc

SEQ ID NO: 2237 - DNA, 25 bp, synthetic construct
  misc_feature 1..25: note = Oligonucleotide
  source 1..25: mol_type = other DNA
ggactgaccccgtctacgtccccat

SEQ ID NO: 2238 - DNA, 25 bp, synthetic construct
  misc_feature 1..25: note = Oligonucleotide
  source 1..25: mol_type = other DNA
acaggactgaccccgtctacgtccc

SEQ ID NO: 2239 - DNA, 25 bp, synthetic construct
  misc_feature 1..25: note = Oligonucleotide
  source 1..25: mol_type = other DNA
tccacaggactgaccccgtctacgt

SEQ ID NO: 2240 - DNA, 25 bp, synthetic construct
  misc_feature 1..25: note = Oligonucleotide
  source 1..25: mol_type = other DNA
ccttccacaggactgaccccgtcta

SEQ ID NO: 2241 - DNA, 25 bp, synthetic construct
  misc_feature 1..25: note = Oligonucleotide
  source 1..25: mol_type = other DNA
agaccttccacaggactgaccccgt

SEQ ID NO: 2242 - DNA, 25 bp, synthetic construct
  misc_feature 1..25: note = Oligonucleotide
  source 1..25: mol_type = other DNA
ccaagaccttccacaggactgaccc

SEQ ID NO: 2243 - DNA, 25 bp, synthetic construct
  misc_feature 1..25: note = Oligonucleotide
  source 1..25: mol_type = other DNA
actccaagaccttccacaggactga

SEQ ID NO: 2244 - DNA, 25 bp, synthetic construct
  misc_feature 1..25: note = Oligonucleotide
  source 1..25: mol_type = other DNA
caaactccaagaccttccacaggac

SEQ ID NO: 2245 - DNA, 25 bp, synthetic construct
  misc_feature 1..25: note = Oligonucleotide
  source 1..25: mol_type = other DNA
tgccaaactccaagaccttccacag

SEQ ID NO: 2246 - DNA, 25 bp, synthetic construct
  misc_feature 1..25: note = Oligonucleotide
  source 1..25: mol_type = other DNA
ccctgccaaactccaagaccttcca

SEQ ID NO: 2247 - DNA, 25 bp, synthetic construct
  misc_feature 1..25: note = Oligonucleotide
  source 1..25: mol_type = other DNA
ccaccctgccaaactccaagacctt

SEQ ID NO: 2248 - DNA, 25 bp, synthetic construct
  misc_feature 1..25: note = Oligonucleotide
  source 1..25: mol_type = other DNA
cctccaccctgccaaactccaagac

SEQ ID NO: 2249 - DNA, 25 bp, synthetic construct
  misc_feature 1..25: note = Oligonucleotide
  source 1..25: mol_type = other DNA
ccccctccaccctgccaaactccaa

SEQ ID NO: 2250 - DNA, 25 bp, synthetic construct
  misc_feature 1..25: note = Oligonucleotide
  source 1..25: mol_type = other DNA
cacccccctccaccctgccaaactc

SEQ ID NO: 2251 - DNA, 25 bp, synthetic construct
  misc_feature 1..25: note = Oligonucleotide
  source 1..25: mol_type = other DNA
gggcacccccctccaccctgccaaa

SEQ ID NO: 2252 - DNA, 25 bp, synthetic construct
  misc_feature 1..25: note = Oligonucleotide
  source 1..25: mol_type = other DNA
gttgggcacccccctccaccctgcc

SEQ ID NO: 2253 - DNA, 25 bp, synthetic construct
  misc_feature 1..25: note = Oligonucleotide
  source 1..25: mol_type = other DNA
gcagttgggcacccccctccaccct

SEQ ID NO: 2254 - DNA, 25 bp, synthetic construct
  misc_feature 1..25: note = Oligonucleotide
  source 1..25: mol_type = other DNA
actgcagttgggcacccccctccac

SEQ ID NO: 2255 - DNA, 25 bp, synthetic construct
  misc_feature 1..25: note = Oligonucleotide
  source 1..25: mol_type = other DNA
cccactgcagttgggcacccccctc

SEQ ID NO: 2256 - DNA, 25 bp, synthetic construct
  misc_feature 1..25: note = Oligonucleotide
  source 1..25: mol_type = other DNA
atgcccactgcagttgggcaccccc

SEQ ID NO: 2257 - DNA, 25 bp, synthetic construct
  misc_feature 1..25: note = Oligonucleotide
  source 1..25: mol_type = other DNA
tcaatgcccactgcagttgggcacc

SEQ ID NO: 2258 - DNA, 25 bp, synthetic construct
  misc_feature 1..25: note = Oligonucleotide
  source 1..25: mol_type = other DNA
tattcaatgcccactgcagttgggc

SEQ ID NO: 2259 - DNA, 25 bp, synthetic construct
  misc_feature 1..25: note = Oligonucleotide
  source 1..25: mol_type = other DNA
ctttattcaatgcccactgcagttg

SEQ ID NO: 2260 - DNA, 25 bp, synthetic construct
  misc_feature 1..25: note = Oligonucleotide
  source 1..25: mol_type = other DNA
aatctttattcaatgcccactgcag

SEQ ID NO: 2261 - DNA, 25 bp, synthetic construct
  misc_feature 1..25: note = Oligonucleotide
  source 1..25: mol_type = other DNA
caaaatctttattcaatgcccactg

SEQ ID NO: 2262 - DNA, 25 bp, synthetic construct
  misc_feature 1..25: note = Oligonucleotide
  source 1..25: mol_type = other DNA
tcacaaaatctttattcaatgccca

SEQ ID NO: 2263 - DNA, 25 bp, synthetic construct
  misc_feature 1..25: note = Oligonucleotide
  source 1..25: mol_type = other DNA
agctcacaaaatctttattcaatgc

SEQ ID NO: 2264 - DNA, 25 bp, synthetic construct
  misc_feature 1..25: note = Oligonucleotide
  source 1..25: mol_type = other DNA
ctcagctcacaaaatctttattcaa

SEQ ID NO: 2265 - DNA, 25 bp, synthetic construct
  misc_feature 1..25: note = Oligonucleotide
  source 1..25: mol_type = other DNA
gagctcagctcacaaaatctttatt

SEQ ID NO: 2266 - DNA, 25 bp, synthetic construct
  misc_feature 1..25: note = Oligonucleotide
  source 1..25: mol_type = other DNA
tttgagctcagctcacaaaatcttt

SEQ ID NO: 2267 - DNA, 25 bp, synthetic construct
  misc_feature 1..25: note = Oligonucleotide
  source 1..25: mol_type = other DNA
aactttgagctcagctcacaaaatc

SEQ ID NO: 2268 - DNA, 25 bp, synthetic construct
  misc_feature 1..25: note = Oligonucleotide
  source 1..25: mol_type = other DNA
cccaactttgagctcagctcacaaa

SEQ ID NO: 2269 - DNA, 25 bp, synthetic construct
  misc_feature 1..25: note = Oligonucleotide
  source 1..25: mol_type = other DNA
ccgcccaactttgagctcagctcac

SEQ ID NO: 2270 - DNA, 25 bp, synthetic construct
  misc_feature 1..25: note = Oligonucleotide
  source 1..25: mol_type = other DNA
ggcccgcccaactttgagctcagct

SEQ ID NO: 2271 - DNA, 25 bp, synthetic construct
  misc_feature 1..25: note = Oligonucleotide
  source 1..25: mol_type = other DNA
ggaggcccgcccaactttgagctca

SEQ ID NO: 2272 - DNA, 25 bp, synthetic construct
  misc_feature 1..25: note = Oligonucleotide
  source 1..25: mol_type = other DNA
cacggaggcccgcccaactttgagc

SEQ ID NO: 2273 - DNA, 25 bp, synthetic construct
  misc_feature 1..25: note = Oligonucleotide
  source 1..25: mol_type = other DNA
caccacggaggcccgcccaactttg

SEQ ID NO: 2274 - DNA, 25 bp, synthetic construct
  misc_feature 1..25: note = Oligonucleotide
  source 1..25: mol_type = other DNA
tgccaccacggaggcccgcccaact

SEQ ID NO: 2275 - DNA, 25 bp, synthetic construct
  misc_feature 1..25: note = Oligonucleotide
  source 1..25: mol_type = other DNA
ctgtgccaccacggaggcccgccca

SEQ ID NO: 2276 - DNA, 25 bp, synthetic construct
  misc_feature 1..25: note = Oligonucleotide
  source 1..25: mol_type = other DNA
ttcctgtgccaccacggaggcccgc

SEQ ID NO: 2277 - DNA, 25 bp, synthetic construct
  misc_feature 1..25: note = Oligonucleotide
  source 1..25: mol_type = other DNA
actttcctgtgccaccacggaggcc

SEQ ID NO: 2278 - DNA, 25 bp, synthetic construct
  misc_feature 1..25: note = Oligonucleotide
  source 1..25: mol_type = other DNA
cccactttcctgtgccaccacggag

SEQ ID NO: 2279 - DNA, 25 bp, synthetic construct
  misc_feature 1..25: note = Oligonucleotide
  source 1..25: mol_type = other DNA
gaccccactttcctgtgccaccacg

SEQ ID NO: 2280 - DNA, 25 bp, synthetic construct
  misc_feature 1..25: note = Oligonucleotide
  source 1..25: mol_type = other DNA
actgaccccactttcctgtgccacc

SEQ ID NO: 2281 - DNA, 25 bp, synthetic construct
  misc_feature 1..25: note = Oligonucleotide
  source 1..25: mol_type = other DNA
agaactgaccccactttcctgtgcc

SEQ ID NO: 2282 - DNA, 25 bp, synthetic construct
  misc_feature 1..25: note = Oligonucleotide
  source 1..25: mol_type = other DNA
ggtagaactgaccccactttcctgt

SEQ ID NO: 2283 - DNA, 25 bp, synthetic construct
  misc_feature 1..25: note = Oligonucleotide
  source 1..25: mol_type = other DNA
ccaggtagaactgaccccactttcc

SEQ ID NO: 2284 - DNA, 25 bp, synthetic construct
  misc_feature 1..25: note = Oligonucleotide
  source 1..25: mol_type = other DNA
tctccaggtagaactgaccccactt

SEQ ID NO: 2285 - DNA, 25 bp, synthetic construct
  misc_feature 1..25: note = Oligonucleotide
  source 1..25: mol_type = other DNA
cactctccaggtagaactgacccca

SEQ ID NO: 2286 - DNA, 25 bp, synthetic construct
  misc_feature 1..25: note = Oligonucleotide
  source 1..25: mol_type = other DNA
ctccactctccaggtagaactgacc

SEQ ID NO: 2287 - DNA, 25 bp, synthetic construct
  misc_feature 1..25: note = Oligonucleotide
  source 1..25: mol_type = other DNA
cccctccactctccaggtagaactg

SEQ ID NO: 2288 - DNA, 25 bp, synthetic construct
  misc_feature 1..25: note = Oligonucleotide
  source 1..25: mol_type = other DNA
atccccctccactctccaggtagaa

SEQ ID NO: 2289 - DNA, 25 bp, synthetic construct
  misc_feature 1..25: note = Oligonucleotide
  source 1..25: mol_type = other DNA
gacatccccctccactctccaggta

SEQ ID NO: 2290 - DNA, 25 bp, synthetic construct
  misc_feature 1..25: note = Oligonucleotide
  source 1..25: mol_type = other DNA
ctagacatccccctccactctccag

SEQ ID NO: 2291 - DNA, 25 bp, synthetic construct
  misc_feature 1..25: note = Oligonucleotide
  source 1..25: mol_type = other DNA
atcctagacatccccctccactctc

SEQ ID NO: 2292 - DNA, 25 bp, synthetic construct
  misc_feature 1..25: note = Oligonucleotide
  source 1..25: mol_type = other DNA
accatcctagacatccccctccact

SEQ ID NO: 2293 - DNA, 25 bp, synthetic construct
  misc_feature 1..25: note = Oligonucleotide
  source 1..25: mol_type = other DNA
cttaccatcctagacatccccctcc

SEQ ID NO: 2294 - DNA, 25 bp, synthetic construct
  misc_feature 1..25: note = Oligonucleotide
  source 1..25: mol_type = other DNA
aggcttaccatcctagacatccccc

SEQ ID NO: 2295 - DNA, 25 bp, synthetic construct
  misc_feature 1..25: note = Oligonucleotide
  source 1..25: mol_type = other DNA
tccaggcttaccatcctagacatcc

SEQ ID NO: 2296 - DNA, 25 bp, synthetic construct
  misc_feature 1..25: note = Oligonucleotide
  source 1..25: mol_type = other DNA
gattccaggcttaccatcctagaca

SEQ ID NO: 2297 - DNA, 25 bp, synthetic construct
  misc_feature 1..25: note = Oligonucleotide
  source 1..25: mol_type = other DNA
cctgattccaggcttaccatcctag

SEQ ID NO: 2298 - DNA, 25 bp, synthetic construct
  misc_feature 1..25: note = Oligonucleotide
  source 1..25: mol_type = other DNA
aggcctgattccaggcttaccatcc

SEQ ID NO: 2299 - DNA, 25 bp, synthetic construct
  misc_feature 1..25: note = Oligonucleotide
  source 1..25: mol_type = other DNA
tgaaggcctgattccaggcttacca

SEQ ID NO: 2300 - DNA, 25 bp, synthetic construct
  misc_feature 1..25: note = Oligonucleotide
  source 1..25: mol_type = other DNA
ctctgaaggcctgattccaggctta

SEQ ID NO: 2301 - DNA, 25 bp, synthetic construct
  misc_feature 1..25: note = Oligonucleotide
  source 1..25: mol_type = other DNA
cctctctgaaggcctgattccaggc

SEQ ID NO: 2302 - DNA, 25 bp, synthetic construct
  misc_feature 1..25: note = Oligonucleotide
  source 1..25: mol_type = other DNA
actcctctctgaaggcctgattcca

SEQ ID NO: 2303 - DNA, 25 bp, synthetic construct
  misc_feature 1..25: note = Oligonucleotide
  source 1..25: mol_type = other DNA
cccactcctctctgaaggcctgatt

SEQ ID NO: 2304 - DNA, 25 bp, synthetic construct
  misc_feature 1..25: note = Oligonucleotide
  source 1..25: mol_type = other DNA
aatcccactcctctctgaaggcctg

SEQ ID NO: 2305 - DNA, 25 bp, synthetic construct
  misc_feature 1..25: note = Oligonucleotide
  source 1..25: mol_type = other DNA
caaaatcccactcctctctgaaggc

SEQ ID NO: 2306 - DNA, 25 bp, synthetic construct
  misc_feature 1..25: note = Oligonucleotide
  source 1..25: mol_type = other DNA
cggcaaaatcccactcctctctgaa

SEQ ID NO: 2307 - DNA, 25 bp, synthetic construct
  misc_feature 1..25: note = Oligonucleotide
  source 1..25: mol_type = other DNA
tctcggcaaaatcccactcctctct

SEQ ID NO: 2308 - DNA, 25 bp, synthetic construct
  misc_feature 1..25: note = Oligonucleotide
  source 1..25: mol_type = other DNA
gattctcggcaaaatcccactcctc

SEQ ID NO: 2309 - DNA, 25 bp, synthetic construct
  misc_feature 1..25: note = Oligonucleotide
  source 1..25: mol_type = other DNA
caggattctcggcaaaatcccactc

SEQ ID NO: 2310 - DNA, 25 bp, synthetic construct
  misc_feature 1..25: note = Oligonucleotide
  source 1..25: mol_type = other DNA
ccccaggattctcggcaaaatccca

SEQ ID NO: 2311 - DNA, 25 bp, synthetic construct
  misc_feature 1..25: note = Oligonucleotide
  source 1..25: mol_type = other DNA
catccccaggattctcggcaaaatc

SEQ ID NO: 2312 - DNA, 25 bp, synthetic construct
  misc_feature 1..25: note = Oligonucleotide
  source 1..25: mol_type = other DNA
tcccatccccaggattctcggcaaa

SEQ ID NO: 2313 - DNA, 25 bp, synthetic construct
  misc_feature 1..25: note = Oligonucleotide
  source 1..25: mol_type = other DNA
ccttcccatccccaggattctcggc

SEQ ID NO: 2314 - DNA, 25 bp, synthetic construct
  misc_feature 1..25: note = Oligonucleotide
  source 1..25: mol_type = other DNA
tcgccttcccatccccaggattctc

SEQ ID NO: 2315 - DNA, 25 bp, synthetic construct
  misc_feature 1..25: note = Oligonucleotide
  source 1..25: mol_type = other DNA
ccgtcgccttcccatccccaggatt

SEQ ID NO: 2316 - DNA, 25 bp, synthetic construct
  misc_feature 1..25: note = Oligonucleotide
  source 1..25: mol_type = other DNA
gtcccgtcgccttcccatccccagg

SEQ ID NO: 2317 - DNA, 25 bp, synthetic construct
  misc_feature 1..25: note = Oligonucleotide
  source 1..25: mol_type = other DNA
actgtcccgtcgccttcccatcccc

SEQ ID NO: 2318 - DNA, 25 bp, synthetic construct
  misc_feature 1..25: note = Oligonucleotide
  source 1..25: mol_type = other DNA
tgcactgtcccgtcgccttcccatc

SEQ ID NO: 2319 - DNA, 25 bp, synthetic construct
  misc_feature 1..25: note = Oligonucleotide
  source 1..25: mol_type = other DNA
gcctgcactgtcccgtcgccttccc

SEQ ID NO: 2320 - DNA, 25 bp, synthetic construct
  misc_feature 1..25: note = Oligonucleotide
  source 1..25: mol_type = other DNA
gcagcctgcactgtcccgtcgcctt

SEQ ID NO: 2321 - DNA, 25 bp, synthetic construct
  misc_feature 1..25: note = Oligonucleotide
  source 1..25: mol_type = other DNA
cccgcagcctgcactgtcccgtcgc

SEQ ID NO: 2322 - DNA, 25 bp, synthetic construct
  misc_feature 1..25: note = Oligonucleotide
  source 1..25: mol_type = other DNA
ctgcccgcagcctgcactgtcccgt

SEQ ID NO: 2323 - DNA, 25 bp, synthetic construct
  misc_feature 1..25: note = Oligonucleotide
  source 1..25: mol_type = other DNA
tagctgcccgcagcctgcactgtcc

SEQ ID NO: 2324 - DNA, 25 bp, synthetic construct
  misc_feature 1..25: note = Oligonucleotide
  source 1..25: mol_type = other DNA
gcctagctgcccgcagcctgcactg

SEQ ID NO: 2325 - DNA, 25 bp, synthetic construct
  misc_feature 1..25: note = Oligonucleotide
  source 1..25: mol_type = other DNA
cgtgcctagctgcccgcagcctgca

SEQ ID NO: 2326 - DNA, 25 bp, synthetic construct
  misc_feature 1..25: note = Oligonucleotide
  source 1..25: mol_type = other DNA
gcacgtgcctagctgcccgcagcct

SEQ ID NO: 2327 - DNA, 25 bp, synthetic construct
  misc_feature 1..25: note = Oligonucleotide
  source 1..25: mol_type = other DNA
aaggcacgtgcctagctgcccgcag

SEQ ID NO: 2328 - DNA, 25 bp, synthetic construct
  misc_feature 1..25: note = Oligonucleotide
  source 1..25: mol_type = other DNA
tggaaggcacgtgcctagctgcccg

SEQ ID NO: 2329 - DNA, 25 bp, synthetic construct
  misc_feature 1..25: note = Oligonucleotide
  source 1..25: mol_type = other DNA
cgatggaaggcacgtgcctagctgc

SEQ ID NO: 2330 - DNA, 25 bp, synthetic construct
  misc_feature 1..25: note = Oligonucleotide
  source 1..25: mol_type = other DNA
gcccgatggaaggcacgtgcctagc

SEQ ID NO: 2331 - DNA, 25 bp, synthetic construct
  misc_feature 1..25: note = Oligonucleotide
  source 1..25: mol_type = other DNA
gcagcccgatggaaggcacgtgcct

SEQ ID NO: 2332 - DNA, 25 bp, synthetic construct
  misc_feature 1..25: note = Oligonucleotide
  source 1..25: mol_type = other DNA
gatgcagcccgatggaaggcacgtg

SEQ ID NO: 2333 - DNA, 25 bp, synthetic construct
  misc_feature 1..25: note = Oligonucleotide
  source 1..25: mol_type = other DNA
catgatgcagcccgatggaaggcac

SEQ ID NO: 2334 - DNA, 25 bp, synthetic construct
  misc_feature 1..25: note = Oligonucleotide
  source 1..25: mol_type = other DNA
aggcatgatgcagcccgatggaagg

SEQ ID NO: 2335 - DNA, 25 bp, synthetic construct
  misc_feature 1..25: note = Oligonucleotide
  source 1..25: mol_type = other DNA
ctcaggcatgatgcagcccgatgga

SEQ ID NO: 2336 - DNA, 25 bp, synthetic construct
  misc_feature 1..25: note = Oligonucleotide
  source 1..25: mol_type = other DNA
acactcaggcatgatgcagcccgat

SEQ ID NO: 2337 - DNA, 25 bp, synthetic construct
  misc_feature 1..25: note = Oligonucleotide
  source 1..25: mol_type = other DNA
accacactcaggcatgatgcagccc

SEQ ID NO: 2338 - DNA, 25 bp, synthetic construct
  misc_feature 1..25: note = Oligonucleotide
  source 1..25: mol_type = other DNA
cccaccacactcaggcatgatgcag

SEQ ID NO: 2339 - DNA, 25 bp, synthetic construct
  misc_feature 1..25: note = Oligonucleotide
  source 1..25: mol_type = other DNA
gcacccaccacactcaggcatgatg

SEQ ID NO: 2340 - DNA, 25 bp, synthetic construct
  misc_feature 1..25: note = Oligonucleotide
  source 1..25: mol_type = other DNA
catgcacccaccacactcaggcatg

SEQ ID NO: 2341 - DNA, 25 bp, synthetic construct
  misc_feature 1..25: note = Oligonucleotide
  source 1..25: mol_type = other DNA
tgccatgcacccaccacactcaggc

SEQ ID NO: 2342 - DNA, 25 bp, synthetic construct
  misc_feature 1..25: note = Oligonucleotide
  source 1..25: mol_type = other DNA
agctgccatgcacccaccacactca

SEQ ID NO: 2343 - DNA, 25 bp, synthetic construct
  misc_feature 1..25: note = Oligonucleotide
  source 1..25: mol_type = other DNA
aacagctgccatgcacccaccacac

SEQ ID NO: 2344 - DNA, 25 bp, synthetic construct
  misc_feature 1..25: note = Oligonucleotide
  source 1..25: mol_type = other DNA
gctaacagctgccatgcacccacca

SEQ ID NO: 2345 - DNA, 25 bp, synthetic construct
  misc_feature 1..25: note = Oligonucleotide
  source 1..25: mol_type = other DNA
agagctaacagctgccatgcaccca

SEQ ID NO: 2346 - DNA, 25 bp, synthetic construct
  misc_feature 1..25: note = Oligonucleotide
  source 1..25: mol_type = other DNA
gacagagctaacagctgccatgcac

SEQ ID NO: 2347 - DNA, 25 bp, synthetic construct
  misc_feature 1..25: note = Oligonucleotide
  source 1..25: mol_type = other DNA
gtggacagagctaacagctgccatg

SEQ ID NO: 2348 - DNA, 25 bp, synthetic construct
  misc_feature 1..25: note = Oligonucleotide
  source 1..25: mol_type = other DNA
acagtggacagagctaacagctgcc

SEQ ID NO: 2349 - DNA, 25 bp, synthetic construct
  misc_feature 1..25: note = Oligonucleotide
  source 1..25: mol_type = other DNA
accacagtggacagagctaacagct

SEQ ID NO: 2350 - DNA, 25 bp, synthetic construct
  misc_feature 1..25: note = Oligonucleotide
  source 1..25: mol_type = other DNA
actaccacagtggacagagctaaca

SEQ ID NO: 2351 - DNA, 25 bp, synthetic construct
  misc_feature 1..25: note = Oligonucleotide
  source 1..25: mol_type = other DNA
catactaccacagtggacagagcta

SEQ ID NO: 2352 - DNA, 25 bp, synthetic construct
  misc_feature 1..25: note = Oligonucleotide
  source 1..25: mol_type = other DNA
agtcatactaccacagtggacagag

SEQ ID NO: 2353 - DNA, 25 bp, synthetic construct
  misc_feature 1..25: note = Oligonucleotide
  source 1..25: mol_type = other DNA
atcagtcatactaccacagtggaca

SEQ ID NO: 2354 - DNA, 25 bp, synthetic construct
  misc_feature 1..25: note = Oligonucleotide
  source 1..25: mol_type = other DNA
accatcagtcatactaccacagtgg

SEQ ID NO: 2355 - DNA, 25 bp, synthetic construct
  misc_feature 1..25: note = Oligonucleotide
  source 1..25: mol_type = other DNA
cacaccatcagtcatactaccacag

SEQ ID NO: 2356 - DNA, 25 bp, synthetic construct
  misc_feature 1..25: note = Oligonucleotide
  source 1..25: mol_type = other DNA
gtacacaccatcagtcatactacca

SEQ ID NO: 2357 - DNA, 25 bp, synthetic construct
  misc_feature 1..25: note = Oligonucleotide
  source 1..25: mol_type = other DNA
cctgtacacaccatcagtcatacta

SEQ ID NO: 2358 - DNA, 25 bp, synthetic construct
  misc_feature 1..25: note = Oligonucleotide
  source 1..25: mol_type = other DNA
cctcctgtacacaccatcagtcata

SEQ ID NO: 2359 - DNA, 25 bp, synthetic construct
  misc_feature 1..25: note = Oligonucleotide
  source 1..25: mol_type = other DNA
tgccctcctgtacacaccatcagtc

SEQ ID NO: 2360 - DNA, 25 bp, synthetic construct
  misc_feature 1..25: note = Oligonucleotide
  source 1..25: mol_type = other DNA
cactgccctcctgtacacaccatca

SEQ ID NO: 2361 - DNA, 25 bp, synthetic construct
  misc_feature 1..25: note = Oligonucleotide
  source 1..25: mol_type = other DNA
cctcactgccctcctgtacacacca

SEQ ID NO: 2362 - DNA, 25 bp, synthetic construct
  misc_feature 1..25: note = Oligonucleotide
  source 1..25: mol_type = other DNA
acccctcactgccctcctgtacaca

SEQ ID NO: 2363 - DNA, 25 bp, synthetic construct
  misc_feature 1..25: note = Oligonucleotide
  source 1..25: mol_type = other DNA
cgcacccctcactgccctcctgtac

SEQ ID NO: 2364 - DNA, 25 bp, synthetic construct
  misc_feature 1..25: note = Oligonucleotide
  source 1..25: mol_type = other DNA
caccgcacccctcactgccctcctg

SEQ ID NO: 2365 - DNA, 25 bp, synthetic construct
  misc_feature 1..25: note = Oligonucleotide
  source 1..25: mol_type = other DNA
ccacaccgcacccctcactgccctc

SEQ ID NO: 2366 - DNA, 25 bp, synthetic construct
  misc_feature 1..25: note = Oligonucleotide
  source 1..25: mol_type = other DNA
tggccacaccgcacccctcactgcc

SEQ ID NO: 2367 - DNA, 25 bp, synthetic construct
  misc_feature 1..25: note = Oligonucleotide
  source 1..25: mol_type = other DNA
tgctggccacaccgcacccctcact

SEQ ID NO: 2368 - DNA, 25 bp, synthetic construct
  misc_feature 1..25: note = Oligonucleotide
  source 1..25: mol_type = other DNA
tcatgctggccacaccgcacccctc

SEQ ID NO: 2369 - DNA, 25 bp, synthetic construct
  misc_feature 1..25: note = Oligonucleotide
  source 1..25: mol_type = other DNA
cgctcatgctggccacaccgcaccc

SEQ ID NO: 2370 - DNA, 25 bp, synthetic construct
  misc_feature 1..25: note = Oligonucleotide
  source 1..25: mol_type = other DNA
tcccgctcatgctggccacaccgca

SEQ ID NO: 2371 - DNA, 25 bp, synthetic construct
  misc_feature 1..25: note = Oligonucleotide
  source 1..25: mol_type = other DNA
ccgtcccgctcatgctggccacacc

SEQ ID NO: 2372 - DNA, 25 bp, synthetic construct
  misc_feature 1..25: note = Oligonucleotide
  source 1..25: mol_type = other DNA
accccgtcccgctcatgctggccac

SEQ ID NO: 2373 - DNA, 25 bp, synthetic construct
  misc_feature 1..25: note = Oligonucleotide
  source 1..25: mol_type = other DNA
caaaccccgtcccgctcatgctggc

SEQ ID NO: 2374 - DNA, 25 bp, synthetic construct
  misc_feature 1..25: note = Oligonucleotide
  source 1..25: mol_type = other DNA
gcacaaaccccgtcccgctcatgct

SEQ ID NO: 2375 - DNA, 25 bp, synthetic construct
  misc_feature 1..25: note = Oligonucleotide
  source 1..25: mol_type = other DNA
catgcacaaaccccgtcccgctcat

SEQ ID NO: 2376 - DNA, 25 bp, synthetic construct
  misc_feature 1..25: note = Oligonucleotide
  source 1..25: mol_type = other DNA
gtccatgcacaaaccccgtcccgct

SEQ ID NO: 2377 - DNA, 25 bp, synthetic construct
  misc_feature 1..25: note = Oligonucleotide
  source 1..25: mol_type = other DNA
tgagtccatgcacaaaccccgtccc

SEQ ID NO: 2378 - DNA, 25 bp, synthetic construct
  misc_feature 1..25: note = Oligonucleotide
  source 1..25: mol_type = other DNA
aagtgagtccatgcacaaaccccgt

SEQ ID NO: 2379 - DNA, 25 bp, synthetic construct
  misc_feature 1..25: note = Oligonucleotide
  source 1..25: mol_type = other DNA
agcaagtgagtccatgcacaaaccc

SEQ ID NO: 2380 - DNA, 25 bp, synthetic construct
  misc_feature 1..25: note = Oligonucleotide
  source 1..25: mol_type = other DNA
ctgagcaagtgagtccatgcacaaa

SEQ ID NO: 2381 - DNA, 25 bp, synthetic construct
  misc_feature 1..25: note = Oligonucleotide
  source 1..25: mol_type = other DNA
cggctgagcaagtgagtccatgcac

SEQ ID NO: 2382 - DNA, 25 bp, synthetic construct
  misc_feature 1..25: note = Oligonucleotide
  source 1..25: mol_type = other DNA
ccccggctgagcaagtgagtccatg

SEQ ID NO: 2383 - DNA, 25 bp, synthetic construct
  misc_feature 1..25: note = Oligonucleotide
  source 1..25: mol_type = other DNA
ccaccccggctgagcaagtgagtcc

SEQ ID NO: 2384 - DNA, 25 bp, synthetic construct
  misc_feature 1..25: note = Oligonucleotide
  source 1..25: mol_type = other DNA
cccccaccccggctgagcaagtgag

SEQ ID NO: 2385 - DNA, 25 bp, synthetic construct
  misc_feature 1..25: note = Oligonucleotide
  source 1..25: mol_type = other DNA
atgcccccaccccggctgagcaagt

SEQ ID NO: 2386 - DNA, 25 bp, synthetic construct
  misc_feature 1..25: note = Oligonucleotide
  source 1..25: mol_type = other DNA
aaaatgcccccaccccggctgagca

SEQ ID NO: 2387 - DNA, 25 bp, synthetic construct
  misc_feature 1..25: note = Oligonucleotide
  source 1..25: mol_type = other DNA
gagaaaatgcccccaccccggctga

SEQ ID NO: 2388 - DNA, 25 bp, synthetic construct
  misc_feature 1..25: note = Oligonucleotide
  source 1..25: mol_type = other DNA
gtagagaaaatgcccccaccccggc

SEQ ID NO: 2389 - DNA, 25 bp, synthetic construct
  misc_feature 1..25: note = Oligonucleotide
  source 1..25: mol_type = other DNA
aaggtagagaaaatgcccccacccc

SEQ ID NO: 2390 - DNA, 25 bp, synthetic construct
  misc_feature 1..25: note = Oligonucleotide
  source 1..25: mol_type = other DNA
gaaaaggtagagaaaatgcccccac

SEQ ID NO: 2391 - DNA, 25 bp, synthetic construct
  misc_feature 1..25: note = Oligonucleotide
  source 1..25: mol_type = other DNA
aaagaaaaggtagagaaaatgcccc

SEQ ID NO: 2392 - DNA, 25 bp, synthetic construct
  misc_feature 1..25: note = Oligonucleotide
  source 1..25: mol_type = other DNA
gataaagaaaaggtagagaaaatgc

SEQ ID NO: 2393 - DNA, 25 bp, synthetic construct
  misc_feature 1..25: note = Oligonucleotide
  source 1..25: mol_type = other DNA
tcagataaagaaaaggtagagaaaa

SEQ ID NO: 2394 - DNA, 25 bp, synthetic construct
  misc_feature 1..25: note = Oligonucleotide
  source 1..25: mol_type = other DNA
tgctcagataaagaaaaggtagaga

SEQ ID NO: 2395 - DNA, 17 bp, synthetic construct
  misc_feature 1..17: note = Oligonucleotide
  source 1..17: mol_type = other DNA
acctccaggtagggcag

SEQ ID NO: 2396 - DNA, 17 bp, synthetic construct
  misc_feature 1..17: note = Oligonucleotide
  source 1..17: mol_type = other DNA
cttacctccaggtaggg

SEQ ID NO: 2397 - DNA, 17 bp, synthetic construct
  misc_feature 1..17: note = Oligonucleotide
  source 1..17: mol_type = other DNA
ccacttacctccaggta

SEQ ID NO: 2398 - DNA, 17 bp, synthetic construct
  misc_feature 1..17: note = Oligonucleotide
  source 1..17: mol_type = other DNA
cggccacttacctccag

SEQ ID NO: 2399 - DNA, 17 bp, synthetic construct
  misc_feature 1..17: note = Oligonucleotide
  source 1..17: mol_type = other DNA
cgccggccacttacctc

SEQ ID NO: 2400 - DNA, 17 bp, synthetic construct
  misc_feature 1..17: note = Oligonucleotide
  source 1..17: mol_type = other DNA
ccgcgccggccacttac

SEQ ID NO: 2401 - DNA, 17 bp, synthetic construct
  misc_feature 1..17: note = Oligonucleotide
  source 1..17: mol_type = other DNA
cccccgcgccggccact

SEQ ID NO: 2402 - DNA, 17 bp, synthetic construct
  misc_feature 1..17: note = Oligonucleotide
  source 1..17: mol_type = other DNA
tcacccccgcgccggcc

SEQ ID NO: 2403 - DNA, 17 bp, synthetic construct
  misc_feature 1..17: note = Oligonucleotide
  source 1..17: mol_type = other DNA
agctcacccccgcgccg

SEQ ID NO: 2404 - DNA, 17 bp, synthetic construct
  misc_feature 1..17: note = Oligonucleotide
  source 1..17: mol_type = other DNA
ctcagctcacccccgcg

SEQ ID NO: 2405 - DNA, 17 bp, synthetic construct
  misc_feature 1..17: note = Oligonucleotide
  source 1..17: mol_type = other DNA
ctcctcagctcaccccc

SEQ ID NO: 2406 - DNA, 17 bp, synthetic construct
  misc_feature 1..17: note = Oligonucleotide
  source 1..17: mol_type = other DNA
gcgctcctcagctcacc

SEQ ID NO: 2407 - DNA, 17 bp, synthetic construct
  misc_feature 1..17: note = Oligonucleotide
  source 1..17: mol_type = other DNA
tgcgcgctcctcagctc

SEQ ID NO: 2408 - DNA, 17 bp, synthetic construct
  misc_feature 1..17: note = Oligonucleotide
  source 1..17: mol_type = other DNA
ccctgcgcgctcctcag

SEQ ID NO: 2409 - DNA, 17 bp, synthetic construct
  misc_feature 1..17: note = Oligonucleotide
  source 1..17: mol_type = other DNA
ccaccctgcgcgctcct

SEQ ID NO: 2410 - DNA, 17 bp, synthetic construct
  misc_feature 1..17: note = Oligonucleotide
  source 1..17: mol_type = other DNA
gatccaccctgcgcgct

SEQ ID NO: 2411 - DNA, 17 bp, synthetic construct
  misc_feature 1..17: note = Oligonucleotide
  source 1..17: mol_type = other DNA
ggtgatccaccctgcgc

SEQ ID NO: 2412 - DNA, 17 bp, synthetic construct
  misc_feature 1..17: note = Oligonucleotide
  source 1..17: mol_type = other DNA
cttggtgatccaccctg

SEQ ID NO: 2413 - DNA, 17 bp, synthetic construct
  misc_feature 1..17: note = Oligonucleotide
  source 1..17: mol_type = other DNA
gggcttggtgatccacc

SEQ ID NO: 2414 - DNA, 17 bp, synthetic construct
  misc_feature 1..17: note = Oligonucleotide
  source 1..17: mol_type = other DNA
acggggcttggtgatcc

SEQ ID NO: 2415 - DNA, 17 bp, synthetic construct
  misc_feature 1..17: note = Oligonucleotide
  source 1..17: mol_type = other DNA
gccacggggcttggtga

SEQ ID NO: 2416 - DNA, 17 bp, synthetic construct
  misc_feature 1..17: note = Oligonucleotide
  source 1..17: mol_type = other DNA
cccgccacggggcttgg

SEQ ID NO: 2417 - DNA, 17 bp, synthetic construct
  misc_feature 1..17: note = Oligonucleotide
  source 1..17: mol_type = other DNA
ggtcccgccacggggct

SEQ ID NO: 2418 - DNA, 17 bp, synthetic construct
  misc_feature 1..17: note = Oligonucleotide
  source 1..17: mol_type = other DNA
actggtcccgccacggg

SEQ ID NO: 2419 - DNA, 17 bp, synthetic construct
  misc_feature 1..17: note = Oligonucleotide
  source 1..17: mol_type = other DNA
ttcactggtcccgccac

SEQ ID NO: 2420 - DNA, 17 bp, synthetic construct
  misc_feature 1..17: note = Oligonucleotide
  source 1..17: mol_type = other DNA
cccttcactggtcccgc

SEQ ID NO: 2421 - DNA, 17 bp, synthetic construct
  misc_feature 1..17: note = Oligonucleotide
  source 1..17: mol_type = other DNA
gtgcccttcactggtcc

SEQ ID NO: 2422 - DNA, 17 bp, synthetic construct
  misc_feature 1..17: note = Oligonucleotide
  source 1..17: mol_type = other DNA
gccgtgcccttcactgg

SEQ ID NO: 2423 - DNA, 17 bp, synthetic construct
  misc_feature 1..17: note = Oligonucleotide
  source 1..17: mol_type = other DNA
actgccgtgcccttcac

SEQ ID NO: 2424 - DNA, 17 bp, synthetic construct
  misc_feature 1..17: note = Oligonucleotide
  source 1..17: mol_type = other DNA
cccactgccgtgccctt

SEQ ID NO: 2425 - DNA, 17 bp, synthetic construct
  misc_feature 1..17: note = Oligonucleotide
  source 1..17: mol_type = other DNA
ttccccactgccgtgcc

SEQ ID NO: 2426 - DNA, 17 bp, synthetic construct
  misc_feature 1..17: note = Oligonucleotide
  source 1..17: mol_type = other DNA
tgtttccccactgccgt

SEQ ID NO: 2427 - DNA, 17 bp, synthetic construct
  misc_feature 1..17: note = Oligonucleotide
  source 1..17: mol_type = other DNA
ttgtgtttccccactgc

SEQ ID NO: 2428 - DNA, 17 bp, synthetic construct
  misc_feature 1..17: note = Oligonucleotide
  source 1..17: mol_type = other DNA
cacttgtgtttccccac

SEQ ID NO: 2429 - DNA, 17 bp, synthetic construct
  misc_feature 1..17: note = Oligonucleotide
  source 1..17: mol_type = other DNA
tcccacttgtgtttccc

SEQ ID NO: 2430 - DNA, 17 bp, synthetic construct
  misc_feature 1..17: note = Oligonucleotide
  source 1..17: mol_type = other DNA
ccctcccacttgtgttt

SEQ ID NO: 2431 - DNA, 17 bp, synthetic construct
  misc_feature 1..17: note = Oligonucleotide
  source 1..17: mol_type = other DNA
cacccctcccacttgtg

SEQ ID NO: 2432 - DNA, 17 bp, synthetic construct
  misc_feature 1..17: note = Oligonucleotide
  source 1..17: mol_type = other DNA
cctcacccctcccactt

SEQ ID NO: 2433 - DNA, 17 bp, synthetic construct
  misc_feature 1..17: note = Oligonucleotide
  source 1..17: mol_type = other DNA
acccctcacccctccca

SEQ ID NO: 2434 - DNA, 17 bp, synthetic construct
  misc_feature 1..17: note = Oligonucleotide
  source 1..17: mol_type = other DNA
tccacccctcacccctc

SEQ ID NO: 2435 - DNA, 17 bp, synthetic construct
  misc_feature 1..17: note = Oligonucleotide
  source 1..17: mol_type = other DNA
gcctccacccctcaccc

SEQ ID NO: 2436 - DNA, 17 bp, synthetic construct
  misc_feature 1..17: note = Oligonucleotide
  source 1..17: mol_type = other DNA
acagcctccacccctca

SEQ ID NO: 2437 - DNA, 17 bp, synthetic construct
  misc_feature 1..17: note = Oligonucleotide
  source 1..17: mol_type = other DNA
cacacagcctccacccc

SEQ ID NO: 2438 - DNA, 17 bp, synthetic construct
  misc_feature 1..17: note = Oligonucleotide
  source 1..17: mol_type = other DNA
acacacacagcctccac

SEQ ID NO: 2439 - DNA, 17 bp, synthetic construct
  misc_feature 1..17: note = Oligonucleotide
  source 1..17: mol_type = other DNA
cacacacacacagcctc

SEQ ID NO: 2440 - DNA, 17 bp, synthetic construct
  misc_feature 1..17: note = Oligonucleotide
  source 1..17: mol_type = other DNA
acacacacacacacagc

SEQ ID NO: 2441 - DNA, 17 bp, synthetic construct
  misc_feature 1..17: note = Oligonucleotide
  source 1..17: mol_type = other DNA
cacacacacacacacac

SEQ ID NO: 2442 - DNA, 17 bp, synthetic construct
  misc_feature 1..17: note = Oligonucleotide
  source 1..17: mol_type = other DNA
acacacacacacacaca

SEQ ID NO: 2443 - DNA, 17 bp, synthetic construct
  misc_feature 1..17: note = Oligonucleotide
  source 1..17: mol_type = other DNA
caccacacacacacaca

SEQ ID NO: 2444 - DNA, 17 bp, synthetic construct
  misc_feature 1..17: note = Oligonucleotide
  source 1..17: mol_type = other DNA
cagcaccacacacacac

SEQ ID NO: 2445 - DNA, 17 bp, synthetic construct
  misc_feature 1..17: note = Oligonucleotide
  source 1..17: mol_type = other DNA
acacagcaccacacaca

SEQ ID NO: 2446 - DNA, 17 bp, synthetic construct
  misc_feature 1..17: note = Oligonucleotide
  source 1..17: mol_type = other DNA
tgcacacagcaccacac

SEQ ID NO: 2447 - DNA, 17 bp, synthetic construct
  misc_feature 1..17: note = Oligonucleotide
  source 1..17: mol_type = other DNA
ctctgcacacagcacca

SEQ ID NO: 2448 - DNA, 17 bp, synthetic construct
  misc_feature 1..17: note = Oligonucleotide
  source 1..17: mol_type = other DNA
gcactctgcacacagca

SEQ ID NO: 2449 - DNA, 17 bp, synthetic construct
  misc_feature 1..17: note = Oligonucleotide
  source 1..17: mol_type = other DNA
actgcactctgcacaca

SEQ ID NO: 2450 - DNA, 17 bp, synthetic construct
  misc_feature 1..17: note = Oligonucleotide
  source 1..17: mol_type = other DNA
ctcactgcactctgcac

SEQ ID NO: 2451 - DNA, 17 bp, synthetic construct
  misc_feature 1..17: note = Oligonucleotide
  source 1..17: mol_type = other DNA
acgctcactgcactctg

SEQ ID NO: 2452 - DNA, 17 bp, synthetic construct
  misc_feature 1..17: note = Oligonucleotide
  source 1..17: mol_type = other DNA
tacacgctcactgcact

SEQ ID NO: 2453 - DNA, 17 bp, synthetic construct
  misc_feature 1..17: note = Oligonucleotide
  source 1..17: mol_type = other DNA
ctgtacacgctcactgc

SEQ ID NO: 2454 - DNA, 17 bp, synthetic construct
  misc_feature 1..17: note = Oligonucleotide
  source 1..17: mol_type = other DNA
accctgtacacgctcac

SEQ ID NO: 2455 - DNA, 17 bp, synthetic construct
  misc_feature 1..17: note = Oligonucleotide
  source 1..17: mol_type = other DNA
tgcaccctgtacacgct

SEQ ID NO: 2456 - DNA, 17 bp, synthetic construct
  misc_feature 1..17: note = Oligonucleotide
  source 1..17: mol_type = other DNA
cgctgcaccctgtacac

SEQ ID NO: 2457 - DNA, 17 bp, synthetic construct
  misc_feature 1..17: note = Oligonucleotide
  source 1..17: mol_type = other DNA
gctcgctgcaccctgta

SEQ ID NO: 2458 - DNA, 17 bp, synthetic construct
  misc_feature 1..17: note = Oligonucleotide
  source 1..17: mol_type = other DNA
tccgctcgctgcaccct

SEQ ID NO: 2459 - DNA, 17 bp, synthetic construct
  misc_feature 1..17: note = Oligonucleotide
  source 1..17: mol_type = other DNA
gtgtccgctcgctgcac

SEQ ID NO: 2460 - DNA, 17 bp, synthetic construct
  misc_feature 1..17: note = Oligonucleotide
  source 1..17: mol_type = other DNA
actgtgtccgctcgctg

SEQ ID NO: 2461 - DNA, 17 bp, synthetic construct
  misc_feature 1..17: note = Oligonucleotide
  source 1..17: mol_type = other DNA
tacactgtgtccgctcg

SEQ ID NO: 2462 - DNA, 17 bp, synthetic construct
  misc_feature 1..17: note = Oligonucleotide
  source 1..17: mol_type = other DNA
gcatacactgtgtccgc

SEQ ID NO: 2463 - DNA, 17 bp, synthetic construct
  misc_feature 1..17: note = Oligonucleotide
  source 1..17: mol_type = other DNA
atcgcatacactgtgtc

SEQ ID NO: 2464 - DNA, 17 bp, synthetic construct
  misc_feature 1..17: note = Oligonucleotide
  source 1..17: mol_type = other DNA
ctcatcgcatacactgt

SEQ ID NO: 2465 - DNA, 17 bp, synthetic construct
  misc_feature 1..17: note = Oligonucleotide
  source 1..17: mol_type = other DNA
ctactcatcgcatacac

SEQ ID NO: 2466 - DNA, 17 bp, synthetic construct
  misc_feature 1..17: note = Oligonucleotide
  source 1..17: mol_type = other DNA
cgcctactcatcgcata

SEQ ID NO: 2467 - DNA, 17 bp, synthetic construct
  misc_feature 1..17: note = Oligonucleotide
  source 1..17: mol_type = other DNA
ccgcgcctactcatcgc

SEQ ID NO: 2468 - DNA, 17 bp, synthetic construct
  misc_feature 1..17: note = Oligonucleotide
  source 1..17: mol_type = other DNA
acaccgcgcctactcat

SEQ ID NO: 2469 - DNA, 17 bp, synthetic construct
  misc_feature 1..17: note = Oligonucleotide
  source 1..17: mol_type = other DNA
cacacaccgcgcctact

SEQ ID NO: 2470 - DNA, 17 bp, synthetic construct
  misc_feature 1..17: note = Oligonucleotide
  source 1..17: mol_type = other DNA
ctgcacacaccgcgcct

SEQ ID NO: 2471 - DNA, 17 bp, synthetic construct
  misc_feature 1..17: note = Oligonucleotide
  source 1..17: mol_type = other DNA
tcactgcacacaccgcg

SEQ ID NO: 2472 - DNA, 17 bp, synthetic construct
  misc_feature 1..17: note = Oligonucleotide
  source 1..17: mol_type = other DNA
cgctcactgcacacacc

SEQ ID NO: 2473 - DNA, 17 bp, synthetic construct
  misc_feature 1..17: note = Oligonucleotide
  source 1..17: mol_type = other DNA
gcccgctcactgcacac

SEQ ID NO: 2474 - DNA, 17 bp, synthetic construct
  misc_feature 1..17: note = Oligonucleotide
  source 1..17: mol_type = other DNA
cctgcccgctcactgca

SEQ ID NO: 2475 - DNA, 17 bp, synthetic construct
  misc_feature 1..17: note = Oligonucleotide
  source 1..17: mol_type = other DNA
cgccctgcccgctcact

SEQ ID NO: 2476 - DNA, 17 bp, synthetic construct
  misc_feature 1..17: note = Oligonucleotide
  source 1..17: mol_type = other DNA
gctcgccctgcccgctc

SEQ ID NO: 2477 - DNA, 17 bp, synthetic construct
  misc_feature 1..17: note = Oligonucleotide
  source 1..17: mol_type = other DNA
actgctcgccctgcccg

SEQ ID NO: 2478 - DNA, 17 bp, synthetic construct
  misc_feature 1..17: note = Oligonucleotide
  source 1..17: mol_type = other DNA
cttactgctcgccctgc

SEQ ID NO: 2479 - DNA, 17 bp, synthetic construct
  misc_feature 1..17: note = Oligonucleotide
  source 1..17: mol_type = other DNA
atccttactgctcgccc

SEQ ID NO: 2480 - DNA, 17 bp, synthetic construct
  misc_feature 1..17: note = Oligonucleotide
  source 1..17: mol_type = other DNA
tacatccttactgctcg

SEQ ID NO: 2481 - DNA, 17 bp, synthetic construct
  misc_feature 1..17: note = Oligonucleotide
  source 1..17: mol_type = other DNA
ctgtacatccttactgc

SEQ ID NO: 2482 - DNA, 17 bp, synthetic construct
  misc_feature 1..17: note = Oligonucleotide
  source 1..17: mol_type = other DNA
acactgtacatccttac

SEQ ID NO: 2483 - DNA, 17 bp, synthetic construct
  misc_feature 1..17: note = Oligonucleotide
  source 1..17: mol_type = other DNA
cccacactgtacatcct

SEQ ID NO: 2484 - DNA, 17 bp, synthetic construct
  misc_feature 1..17: note = Oligonucleotide
  source 1..17: mol_type = other DNA
ctgcccacactgtacat

SEQ ID NO: 2485 - DNA, 17 bp, synthetic construct
  misc_feature 1..17: note = Oligonucleotide
  source 1..17: mol_type = other DNA
acactgcccacactgta

SEQ ID NO: 2486 - DNA, 17 bp, synthetic construct
  misc_feature 1..17: note = Oligonucleotide
  source 1..17: mol_type = other DNA
cgcacactgcccacact

SEQ ID NO: 2487 - DNA, 17 bp, synthetic construct
  misc_feature 1..17: note = Oligonucleotide
  source 1..17: mol_type = other DNA
gctcgcacactgcccac

SEQ ID NO: 2488 - DNA, 17 bp, synthetic construct
  misc_feature 1..17: note = Oligonucleotide
  source 1..17: mol_type = other DNA
catgctcgcacactgcc

SEQ ID NO: 2489 - DNA, 17 bp, synthetic construct
  misc_feature 1..17: note = Oligonucleotide
  source 1..17: mol_type = other DNA
acacatgctcgcacact

SEQ ID NO: 2490 - DNA, 17 bp, synthetic construct
  misc_feature 1..17: note = Oligonucleotide
  source 1..17: mol_type = other DNA
actacacatgctcgcac

SEQ ID NO: 2491 - DNA, 17 bp, synthetic construct
  misc_feature 1..17: note = Oligonucleotide
  source 1..17: mol_type = other DNA
ctcactacacatgctcg

SEQ ID NO: 2492 - DNA, 17 bp, synthetic construct
  misc_feature 1..17: note = Oligonucleotide
  source 1..17: mol_type = other DNA
ctgctcactacacatgc

SEQ ID NO: 2493 - DNA, 17 bp, synthetic construct
  misc_feature 1..17: note = Oligonucleotide
  source 1..17: mol_type = other DNA
tgcctgctcactacaca

SEQ ID NO: 2494 - DNA, 17 bp, synthetic construct
  misc_feature 1..17: note = Oligonucleotide
  source 1..17: mol_type = other DNA
cactgcctgctcactac

SEQ ID NO: 2495 - DNA, 17 bp, synthetic construct
  misc_feature 1..17: note = Oligonucleotide
  source 1..17: mol_type = other DNA
acacactgcctgctcac

SEQ ID NO: 2496 - DNA, 17 bp, synthetic construct
  misc_feature 1..17: note = Oligonucleotide
  source 1..17: mol_type = other DNA
tgcacacactgcctgct

SEQ ID NO: 2497 - DNA, 17 bp, synthetic construct
  misc_feature 1..17: note = Oligonucleotide
  source 1..17: mol_type = other DNA
aactgcacacactgcct

SEQ ID NO: 2498 - DNA, 17 bp, synthetic construct
  misc_feature 1..17: note = Oligonucleotide
  source 1..17: mol_type = other DNA
gctaactgcacacactg

SEQ ID NO: 2499 - DNA, 17 bp, synthetic construct
  misc_feature 1..17: note = Oligonucleotide
  source 1..17: mol_type = other DNA
cctgctaactgcacaca

SEQ ID NO: 2500 - DNA, 17 bp, synthetic construct
  misc_feature 1..17: note = Oligonucleotide
  source 1..17: mol_type = other DNA
gtgcctgctaactgcac

SEQ ID NO: 2501 - DNA, 17 bp, synthetic construct
  misc_feature 1..17: note = Oligonucleotide
  source 1..17: mol_type = other DNA
actgtgcctgctaactg

SEQ ID NO: 2502 - DNA, 17 bp, synthetic construct
  misc_feature 1..17: note = Oligonucleotide
  source 1..17: mol_type = other DNA
cacactgtgcctgctaa

SEQ ID NO: 2503 - DNA, 17 bp, synthetic construct
  misc_feature 1..17: note = Oligonucleotide
  source 1..17: mol_type = other DNA
gcacacactgtgcctgc

SEQ ID NO: 2504 - DNA, 17 bp, synthetic construct
  misc_feature 1..17: note = Oligonucleotide
  source 1..17: mol_type = other DNA
actgcacacactgtgcc

SEQ ID NO: 2505 - DNA, 17 bp, synthetic construct
  misc_feature 1..17: note = Oligonucleotide
  source 1..17: mol_type = other DNA
ctcactgcacacactgt

SEQ ID NO: 2506 - DNA, 17 bp, synthetic construct
  misc_feature 1..17: note = Oligonucleotide
  source 1..17: mol_type = other DNA
ccactcactgcacacac

SEQ ID NO: 2507 - DNA, 17 bp, synthetic construct
  misc_feature 1..17: note = Oligonucleotide
  source 1..17: mol_type = other DNA
tgcccactcactgcaca

SEQ ID NO: 2508 - DNA, 17 bp, synthetic construct
  misc_feature 1..17: note = Oligonucleotide
  source 1..17: mol_type = other DNA
cactgcccactcactgc

SEQ ID NO: 2509 - DNA, 17 bp, synthetic construct
  misc_feature 1..17: note = Oligonucleotide
  source 1..17: mol_type = other DNA
gcacactgcccactcac

SEQ ID NO: 2510 - DNA, 17 bp, synthetic construct
  misc_feature 1..17: note = Oligonucleotide
  source 1..17: mol_type = other DNA
tgtgcacactgcccact

SEQ ID NO: 2511 - DNA, 17 bp, synthetic construct
  misc_feature 1..17: note = Oligonucleotide
  source 1..17: mol_type = other DNA
tgctgtgcacactgccc

SEQ ID NO: 2512 - DNA, 17 bp, synthetic construct
  misc_feature 1..17: note = Oligonucleotide
  source 1..17: mol_type = other DNA
acatgctgtgcacactg

SEQ ID NO: 2513 - DNA, 17 bp, synthetic construct
  misc_feature 1..17: note = Oligonucleotide
  source 1..17: mol_type = other DNA
tgtacatgctgtgcaca

SEQ ID NO: 2514 - DNA, 17 bp, synthetic construct
  misc_feature 1..17: note = Oligonucleotide
  source 1..17: mol_type = other DNA
cactgtacatgctgtgc

SEQ ID NO: 2515 - DNA, 17 bp, synthetic construct
  misc_feature 1..17: note = Oligonucleotide
  source 1..17: mol_type = other DNA
tcacactgtacatgctg

SEQ ID NO: 2516 - DNA, 17 bp, synthetic construct
  misc_feature 1..17: note = Oligonucleotide
  source 1..17: mol_type = other DNA
cactcacactgtacatg

SEQ ID NO: 2517 - DNA, 17 bp, synthetic construct
  misc_feature 1..17: note = Oligonucleotide
  source 1..17: mol_type = other DNA
caccactcacactgtac

SEQ ID NO: 2518 - DNA, 17 bp, synthetic construct
  misc_feature 1..17: note = Oligonucleotide
  source 1..17: mol_type = other DNA
acacaccactcacactg

SEQ ID NO: 2519 - DNA, 17 bp, synthetic construct
  misc_feature 1..17: note = Oligonucleotide
  source 1..17: mol_type = other DNA
agcacacaccactcaca

SEQ ID NO: 2520 - DNA, 17 bp, synthetic construct
  misc_feature 1..17: note = Oligonucleotide
  source 1..17: mol_type = other DNA
cacagcacacaccactc

SEQ ID NO: 2521 - DNA, 17 bp, synthetic construct
  misc_feature 1..17: note = Oligonucleotide
  source 1..17: mol_type = other DNA
gcacacagcacacacca

SEQ ID NO: 2522 - DNA, 17 bp, synthetic construct
  misc_feature 1..17: note = Oligonucleotide
  source 1..17: mol_type = other DNA
acggcacacagcacaca

SEQ ID NO: 2523 - DNA, 17 bp, synthetic construct
  misc_feature 1..17: note = Oligonucleotide
  source 1..17: mol_type = other DNA
ctcacggcacacagcac

SEQ ID NO: 2524 - DNA, 17 bp, synthetic construct
  misc_feature 1..17: note = Oligonucleotide
  source 1..17: mol_type = other DNA
atgctcacggcacacag

SEQ ID NO: 2525 - DNA, 17 bp, synthetic construct
  misc_feature 1..17: note = Oligonucleotide
  source 1..17: mol_type = other DNA
cacatgctcacggcaca

SEQ ID NO: 2526 - DNA, 17 bp, synthetic construct
  misc_feature 1..17: note = Oligonucleotide
  source 1..17: mol_type = other DNA
ctacacatgctcacggc

SEQ ID NO: 2527 - DNA, 17 bp, synthetic construct
  misc_feature 1..17: note = Oligonucleotide
  source 1..17: mol_type = other DNA
tcactacacatgctcac

SEQ ID NO: 2528 - DNA, 17 bp, synthetic construct
  misc_feature 1..17: note = Oligonucleotide
  source 1..17: mol_type = other DNA
cactcactacacatgct

SEQ ID NO: 2529 - DNA, 17 bp, synthetic construct
  misc_feature 1..17: note = Oligonucleotide
  source 1..17: mol_type = other DNA
gcccactcactacacat

SEQ ID NO: 2530 - DNA, 17 bp, synthetic construct
  misc_feature 1..17: note = Oligonucleotide
  source 1..17: mol_type = other DNA
tgtgcccactcactaca

SEQ ID NO: 2531 - DNA, 17 bp, synthetic construct
  misc_feature 1..17: note = Oligonucleotide
  source 1..17: mol_type = other DNA
cactgtgcccactcact

SEQ ID NO: 2532 - DNA, 17 bp, synthetic construct
  misc_feature 1..17: note = Oligonucleotide
  source 1..17: mol_type = other DNA
ctgcactgtgcccactc

SEQ ID NO: 2533 - DNA, 17 bp, synthetic construct
  misc_feature 1..17: note = Oligonucleotide
  source 1..17: mol_type = other DNA
tgactgcactgtgccca

SEQ ID NO: 2534 - DNA, 17 bp, synthetic construct
  misc_feature 1..17: note = Oligonucleotide
  source 1..17: mol_type = other DNA
cactgactgcactgtgc

SEQ ID NO: 2535 - DNA, 17 bp, synthetic construct
  misc_feature 1..17: note = Oligonucleotide
  source 1..17: mol_type = other DNA
gcacactgactgcactg

SEQ ID NO: 2536 - DNA, 17 bp, synthetic construct
  misc_feature 1..17: note = Oligonucleotide
  source 1..17: mol_type = other DNA
tgtgcacactgactgca

SEQ ID NO: 2537 - DNA, 17 bp, synthetic construct
  misc_feature 1..17: note = Oligonucleotide
  source 1..17: mol_type = other DNA
ctttgtgcacactgact

SEQ ID NO: 2538 - DNA, 17 bp, synthetic construct
  misc_feature 1..17: note = Oligonucleotide
  source 1..17: mol_type = other DNA
atactttgtgcacactg

SEQ ID NO: 2539 - DNA, 17 bp, synthetic construct
  misc_feature 1..17: note = Oligonucleotide
  source 1..17: mol_type = other DNA
tgcatactttgtgcaca

SEQ ID NO: 2540 - DNA, 17 bp, synthetic construct
  misc_feature 1..17: note = Oligonucleotide
  source 1..17: mol_type = other DNA
cactgcatactttgtgc

SEQ ID NO: 2541 - DNA, 17 bp, synthetic construct
  misc_feature 1..17: note = Oligonucleotide
  source 1..17: mol_type = other DNA
gcccactgcatactttg

SEQ ID NO: 2542 - DNA, 17 bp, synthetic construct
  misc_feature 1..17: note = Oligonucleotide
  source 1..17: mol_type = other DNA
cgtgcccactgcatact

SEQ ID NO: 2543 - DNA, 17 bp, synthetic construct
  misc_feature 1..17: note = Oligonucleotide
  source 1..17: mol_type = other DNA
gtacgtgcccactgcat

SEQ ID NO: 2544 - DNA, 17 bp, synthetic construct
  misc_feature 1..17: note = Oligonucleotide
  source 1..17: mol_type = other DNA
acggtacgtgcccactg

SEQ ID NO: 2545 - DNA, 17 bp, synthetic construct
  misc_feature 1..17: note = Oligonucleotide
  source 1..17: mol_type = other DNA
cacacggtacgtgccca

SEQ ID NO: 2546 - DNA, 17 bp, synthetic construct
  misc_feature 1..17: note = Oligonucleotide
  source 1..17: mol_type = other DNA
gcacacacggtacgtgc

SEQ ID NO: 2547 - DNA, 17 bp, synthetic construct
  misc_feature 1..17: note = Oligonucleotide
  source 1..17: mol_type = other DNA
actgcacacacggtacg

SEQ ID NO: 2548 - DNA, 17 bp, synthetic construct
  misc_feature 1..17: note = Oligonucleotide
  source 1..17: mol_type = other DNA
ctcactgcacacacggt

SEQ ID NO: 2549 - DNA, 17 bp, synthetic construct
  misc_feature 1..17: note = Oligonucleotide
  source 1..17: mol_type = other DNA
acaccactcactgcaca

SEQ ID NO: 2550 - DNA, 17 bp, synthetic construct
  misc_feature 1..17: note = Oligonucleotide
  source 1..17: mol_type = other DNA
tgcacaccactcactgc

SEQ ID NO: 2551 - DNA, 17 bp, synthetic construct
  misc_feature 1..17: note = Oligonucleotide
  source 1..17: mol_type = other DNA
cactgcacaccactcac

SEQ ID NO: 2552 - DNA, 17 bp, synthetic construct
  misc_feature 1..17: note = Oligonucleotide
  source 1..17: mol_type = other DNA
acacactgcacaccact

SEQ ID NO: 2553 - DNA, 17 bp, synthetic construct
  misc_feature 1..17: note = Oligonucleotide
  source 1..17: mol_type = other DNA
actacacactgcacacc

SEQ ID NO: 2554 - DNA, 17 bp, synthetic construct
  misc_feature 1..17: note = Oligonucleotide
  source 1..17: mol_type = other DNA
cacactacacactgcac

SEQ ID NO: 2555 - DNA, 17 bp, synthetic construct
  misc_feature 1..17: note = Oligonucleotide
  source 1..17: mol_type = other DNA
ctgcacactacacactg

SEQ ID NO: 2556 - DNA, 17 bp, synthetic construct
  misc_feature 1..17: note = Oligonucleotide
  source 1..17: mol_type = other DNA
tcactgcacactacaca

SEQ ID NO: 2557 - DNA, 17 bp, synthetic construct
  misc_feature 1..17: note = Oligonucleotide
  source 1..17: mol_type = other DNA
tgctcactgcacactac

SEQ ID NO: 2558 - DNA, 17 bp, synthetic construct
  misc_feature 1..17: note = Oligonucleotide
  source 1..17: mol_type = other DNA
cactgctcactgcacac

SEQ ID NO: 2559 - DNA, 17 bp, synthetic construct
  misc_feature 1..17: note = Oligonucleotide
  source 1..17: mol_type = other DNA
acacactgctcactgca

SEQ ID NO: 2560 - DNA, 17 bp, synthetic construct
  misc_feature 1..17: note = Oligonucleotide
  source 1..17: mol_type = other DNA
tgtacacactgctcact

SEQ ID NO: 2561 - DNA, 17 bp, synthetic construct
  misc_feature 1..17: note = Oligonucleotide
  source 1..17: mol_type = other DNA
tgctgtacacactgctc

SEQ ID NO: 2562 - DNA, 17 bp, synthetic construct
  misc_feature 1..17: note = Oligonucleotide
  source 1..17: mol_type = other DNA
caatgctgtacacactg

SEQ ID NO: 2563 - DNA, 17 bp, synthetic construct
  misc_feature 1..17: note = Oligonucleotide
  source 1..17: mol_type = other DNA
ctgcaatgctgtacaca

SEQ ID NO: 2564 - DNA, 17 bp, synthetic construct
  misc_feature 1..17: note = Oligonucleotide
  source 1..17: mol_type = other DNA
acactgcaatgctgtac

SEQ ID NO: 2565 - DNA, 17 bp, synthetic construct
  misc_feature 1..17: note = Oligonucleotide
  source 1..17: mol_type = other DNA
cccacactgcaatgctg

SEQ ID NO: 2566 - DNA, 17 bp, synthetic construct
  misc_feature 1..17: note = Oligonucleotide
  source 1..17: mol_type = other DNA
tgccccacactgcaatg

SEQ ID NO: 2567 - DNA, 17 bp, synthetic construct
  misc_feature 1..17: note = Oligonucleotide
  source 1..17: mol_type = other DNA
cactgccccacactgca

SEQ ID NO: 2568 - DNA, 17 bp, synthetic construct
  misc_feature 1..17: note = Oligonucleotide
  source 1..17: mol_type = other DNA
actcactgccccacact

SEQ ID NO: 2569 - DNA, 17 bp, synthetic construct
  misc_feature 1..17: note = Oligonucleotide
  source 1..17: mol_type = other DNA
tgtactcactgccccac

SEQ ID NO: 2570 - DNA, 17 bp, synthetic construct
  misc_feature 1..17: note = Oligonucleotide
  source 1..17: mol_type = other DNA
cactgtactcactgccc

SEQ ID NO: 2571 - DNA, 17 bp, synthetic construct
  misc_feature 1..17: note = Oligonucleotide
  source 1..17: mol_type = other DNA
tcacactgtactcactg

SEQ ID NO: 2572 - DNA, 17 bp, synthetic construct
  misc_feature 1..17: note = Oligonucleotide
  source 1..17: mol_type = other DNA
cactcacactgtactca

SEQ ID NO: 2573 - DNA, 17 bp, synthetic construct
  misc_feature 1..17: note = Oligonucleotide
  source 1..17: mol_type = other DNA
caacactcacactgtac

SEQ ID NO: 2574 - DNA, 17 bp, synthetic construct
  misc_feature 1..17: note = Oligonucleotide
  source 1..17: mol_type = other DNA
tcacaacactcacactg

SEQ ID NO: 2575 - DNA, 17 bp, synthetic construct
  misc_feature 1..17: note = Oligonucleotide
  source 1..17: mol_type = other DNA
caatcacaacactcaca

SEQ ID NO: 2576 - DNA, 17 bp, synthetic construct
  misc_feature 1..17: note = Oligonucleotide
  source 1..17: mol_type = other DNA
ccacaatcacaacactc

SEQ ID NO: 2577 - DNA, 17 bp, synthetic construct
  misc_feature 1..17: note = Oligonucleotide
  source 1..17: mol_type = other DNA
ttaccacaatcacaaca

SEQ ID NO: 2578 - DNA, 17 bp, synthetic construct
  misc_feature 1..17: note = Oligonucleotide
  source 1..17: mol_type = other DNA
tgcttaccacaatcaca

SEQ ID NO: 2579 - DNA, 17 bp, synthetic construct
  misc_feature 1..17: note = Oligonucleotide
  source 1..17: mol_type = other DNA
tcctgcttaccacaatc

SEQ ID NO: 2580 - DNA, 17 bp, synthetic construct
  misc_feature 1..17: note = Oligonucleotide
  source 1..17: mol_type = other DNA
gcatcctgcttaccaca

SEQ ID NO: 2581 - DNA, 17 bp, synthetic construct
  misc_feature 1..17: note = Oligonucleotide
  source 1..17: mol_type = other DNA
tgcgcatcctgcttacc

SEQ ID NO: 2582 - DNA, 17 bp, synthetic construct
  misc_feature 1..17: note = Oligonucleotide
  source 1..17: mol_type = other DNA
tactgcgcatcctgctt

SEQ ID NO: 2583 - DNA, 17 bp, synthetic construct
  misc_feature 1..17: note = Oligonucleotide
  source 1..17: mol_type = other DNA
gtatactgcgcatcctg

SEQ ID NO: 2584 - DNA, 17 bp, synthetic construct
  misc_feature 1..17: note = Oligonucleotide
  source 1..17: mol_type = other DNA
actgtatactgcgcatc

SEQ ID NO: 2585 - DNA, 17 bp, synthetic construct
  misc_feature 1..17: note = Oligonucleotide
  source 1..17: mol_type = other DNA
ttcactgtatactgcgc

SEQ ID NO: 2586 - DNA, 17 bp, synthetic construct
  misc_feature 1..17: note = Oligonucleotide
  source 1..17: mol_type = other DNA
ctgttcactgtatactg

SEQ ID NO: 2587 - DNA, 17 bp, synthetic construct
  misc_feature 1..17: note = Oligonucleotide
  source 1..17: mol_type = other DNA
acactgttcactgtata

SEQ ID NO: 2588 - DNA, 17 bp, synthetic construct
  misc_feature 1..17: note = Oligonucleotide
  source 1..17: mol_type = other DNA
tgcacactgttcactgt

SEQ ID NO: 2589 - DNA, 17 bp, synthetic construct
  misc_feature 1..17: note = Oligonucleotide
  source 1..17: mol_type = other DNA
ctgtgcacactgttcac

SEQ ID NO: 2590 - DNA, 17 bp, synthetic construct
  misc_feature 1..17: note = Oligonucleotide
  source 1..17: mol_type = other DNA
acactgtgcacactgtt

SEQ ID NO: 2591 - DNA, 17 bp, synthetic construct
  misc_feature 1..17: note = Oligonucleotide
  source 1..17: mol_type = other DNA
cacacactgtgcacact

SEQ ID NO: 2592 - DNA, 17 bp, synthetic construct
  misc_feature 1..17: note = Oligonucleotide
  source 1..17: mol_type = other DNA
ctgcacacactgtgcac

SEQ ID NO: 2593 - DNA, 17 bp, synthetic construct
  misc_feature 1..17: note = Oligonucleotide
  source 1..17: mol_type = other DNA
acactgcacacactgtg

SEQ ID NO: 2594 - DNA, 17 bp, synthetic construct
  misc_feature 1..17: note = Oligonucleotide
  source 1..17: mol_type = other DNA
cccacactgcacacact

SEQ ID NO: 2595 - DNA, 17 bp, synthetic construct
  misc_feature 1..17: note = Oligonucleotide
  source 1..17: mol_type = other DNA
cagcccacactgcacac

SEQ ID NO: 2596 - DNA, 17 bp, synthetic construct
  misc_feature 1..17: note = Oligonucleotide
  source 1..17: mol_type = other DNA
acacagcccacactgca

SEQ ID NO: 2597 - DNA, 17 bp, synthetic construct
  misc_feature 1..17: note = Oligonucleotide
  source 1..17: mol_type = other DNA
ggcacacagcccacact

SEQ ID NO: 2598 - DNA, 17 bp, synthetic construct
  misc_feature 1..17: note = Oligonucleotide
  source 1..17: mol_type = other DNA
tgtggcacacagcccac

SEQ ID NO: 2599 - DNA, 17 bp, synthetic construct
  misc_feature 1..17: note = Oligonucleotide
  source 1..17: mol_type = other DNA
ctctgtggcacacagcc

SEQ ID NO: 2600 - DNA, 17 bp, synthetic construct
  misc_feature 1..17: note = Oligonucleotide
  source 1..17: mol_type = other DNA
tgactctgtggcacaca

SEQ ID NO: 2601 - DNA, 17 bp, synthetic construct
  misc_feature 1..17: note = Oligonucleotide
  source 1..17: mol_type = other DNA
cactgactctgtggcac

SEQ ID NO: 2602 - DNA, 17 bp, synthetic construct
  misc_feature 1..17: note = Oligonucleotide
  source 1..17: mol_type = other DNA
ccacactgactctgtgg

SEQ ID NO: 2603 - DNA, 17 bp, synthetic construct
  misc_feature 1..17: note = Oligonucleotide
  source 1..17: mol_type = other DNA
acaccacactgactctg

SEQ ID NO: 2604 - DNA, 17 bp, synthetic construct
  misc_feature 1..17: note = Oligonucleotide
  source 1..17: mol_type = other DNA
cacacaccacactgact

SEQ ID NO: 2605 - DNA, 17 bp, synthetic construct
  misc_feature 1..17: note = Oligonucleotide
  source 1..17: mol_type = other DNA
ctacacacaccacactg

SEQ ID NO: 2606 - DNA, 17 bp, synthetic construct
  misc_feature 1..17: note = Oligonucleotide
  source 1..17: mol_type = other DNA
aaactacacacaccaca

SEQ ID NO: 2607 - DNA, 17 bp, synthetic construct
  misc_feature 1..17: note = Oligonucleotide
  source 1..17: mol_type = other DNA
ttcaaactacacacacc

SEQ ID NO: 2608 - DNA, 17 bp, synthetic construct
  misc_feature 1..17: note = Oligonucleotide
  source 1..17: mol_type = other DNA
ctgttcaaactacacac

SEQ ID NO: 2609 - DNA, 17 bp, synthetic construct
  misc_feature 1..17: note = Oligonucleotide
  source 1..17: mol_type = other DNA
acactgttcaaactaca

SEQ ID NO: 2610 - DNA, 17 bp, synthetic construct
  misc_feature 1..17: note = Oligonucleotide
  source 1..17: mol_type = other DNA
cacacactgttcaaact

SEQ ID NO: 2611 - DNA, 17 bp, synthetic construct
  misc_feature 1..17: note = Oligonucleotide
  source 1..17: mol_type = other DNA
atgcacacactgttcaa

SEQ ID NO: 2612 - DNA, 17 bp, synthetic construct
  misc_feature 1..17: note = Oligonucleotide
  source 1..17: mol_type = other DNA
tcaatgcacacactgtt

SEQ ID NO: 2613 - DNA, 17 bp, synthetic construct
  misc_feature 1..17: note = Oligonucleotide
  source 1..17: mol_type = other DNA
tgctcaatgcacacact

SEQ ID NO: 2614 - DNA, 17 bp, synthetic construct
  misc_feature 1..17: note = Oligonucleotide
  source 1..17: mol_type = other DNA
tgctgctcaatgcacac

SEQ ID NO: 2615 - DNA, 17 bp, synthetic construct
  misc_feature 1..17: note = Oligonucleotide
  source 1..17: mol_type = other DNA
ccatgctgctcaatgca

SEQ ID NO: 2616 - DNA, 17 bp, synthetic construct
  misc_feature 1..17: note = Oligonucleotide
  source 1..17: mol_type = other DNA
catccatgctgctcaat

SEQ ID NO: 2617 - DNA, 17 bp, synthetic construct
  misc_feature 1..17: note = Oligonucleotide
  source 1..17: mol_type = other DNA
caccatccatgctgctc

SEQ ID NO: 2618 - DNA, 17 bp, synthetic construct
  misc_feature 1..17: note = Oligonucleotide
  source 1..17: mol_type = other DNA
ccacaccatccatgctg

SEQ ID NO: 2619 - DNA, 17 bp, synthetic construct
  misc_feature 1..17: note = Oligonucleotide
  source 1..17: mol_type = other DNA
cgtccacaccatccatg

SEQ ID NO: 2620 - DNA, 17 bp, synthetic construct
  misc_feature 1..17: note = Oligonucleotide
  source 1..17: mol_type = other DNA
cagcgtccacaccatcc

SEQ ID NO: 2621 - DNA, 17 bp, synthetic construct
  misc_feature 1..17: note = Oligonucleotide
  source 1..17: mol_type = other DNA
gctcagcgtccacacca

SEQ ID NO: 2622 - DNA, 17 bp, synthetic construct
  misc_feature 1..17: note = Oligonucleotide
  source 1..17: mol_type = other DNA
aatgctcagcgtccaca

SEQ ID NO: 2623 - DNA, 17 bp, synthetic construct
  misc_feature 1..17: note = Oligonucleotide
  source 1..17: mol_type = other DNA
aacaatgctcagcgtcc

SEQ ID NO: 2624 - DNA, 17 bp, synthetic construct
  misc_feature 1..17: note = Oligonucleotide
  source 1..17: mol_type = other DNA
gagaacaatgctcagcg

SEQ ID NO: 2625 - DNA, 17 bp, synthetic construct
  misc_feature 1..17: note = Oligonucleotide
  source 1..17: mol_type = other DNA
ctggagaacaatgctca

SEQ ID NO: 2626 - DNA, 17 bp, synthetic construct
  misc_feature 1..17: note = Oligonucleotide
  source 1..17: mol_type = other DNA
tccctggagaacaatgc

SEQ ID NO: 2627 - DNA, 17 bp, synthetic construct
  misc_feature 1..17: note = Oligonucleotide
  source 1..17: mol_type = other DNA
tcctccctggagaacaa

SEQ ID NO: 2628 - DNA, 17 bp, synthetic construct
  misc_feature 1..17: note = Oligonucleotide
  source 1..17: mol_type = other DNA
cactcctccctggagaa

SEQ ID NO: 2629 - DNA, 17 bp, synthetic construct
  misc_feature 1..17: note = Oligonucleotide
  source 1..17: mol_type = other DNA
tcacactcctccctgga

SEQ ID NO: 2630 - DNA, 17 bp, synthetic construct
  misc_feature 1..17: note = Oligonucleotide
  source 1..17: mol_type = other DNA
tgctcacactcctccct

SEQ ID NO: 2631 - DNA, 17 bp, synthetic construct
  misc_feature 1..17: note = Oligonucleotide
  source 1..17: mol_type = other DNA
tcgtgctcacactcctc

SEQ ID NO: 2632 - DNA, 17 bp, synthetic construct
  misc_feature 1..17: note = Oligonucleotide
  source 1..17: mol_type = other DNA
ctctcgtgctcacactc

SEQ ID NO: 2633 - DNA, 17 bp, synthetic construct
  misc_feature 1..17: note = Oligonucleotide
  source 1..17: mol_type = other DNA
actctctcgtgctcaca

SEQ ID NO: 2634 - DNA, 17 bp, synthetic construct
  misc_feature 1..17: note = Oligonucleotide
  source 1..17: mol_type = other DNA
ggcactctctcgtgctc

SEQ ID NO: 2635 - DNA, 17 bp, synthetic construct
  misc_feature 1..17: note = Oligonucleotide
  source 1..17: mol_type = other DNA
tctggcactctctcgtg

SEQ ID NO: 2636 - DNA, 17 bp, synthetic construct
  misc_feature 1..17: note = Oligonucleotide
  source 1..17: mol_type = other DNA
ccctctggcactctctc

SEQ ID NO: 2637 - DNA, 17 bp, synthetic construct
  misc_feature 1..17: note = Oligonucleotide
  source 1..17: mol_type = other DNA
cacccctctggcactct

SEQ ID NO: 2638 - DNA, 17 bp, synthetic construct
  misc_feature 1..17: note = Oligonucleotide
  source 1..17: mol_type = other DNA
acacacccctctggcac

SEQ ID NO: 2639 - DNA, 17 bp, synthetic construct
  misc_feature 1..17: note = Oligonucleotide
  source 1..17: mol_type = other DNA
accacacacccctctgg

SEQ ID NO: 2640 - DNA, 17 bp, synthetic construct
  misc_feature 1..17: note = Oligonucleotide
  source 1..17: mol_type = other DNA
cacaccacacacccctc

SEQ ID NO: 2641 - DNA, 17 bp, synthetic construct
  misc_feature 1..17: note = Oligonucleotide
  source 1..17: mol_type = other DNA
gctcacaccacacaccc

SEQ ID NO: 2642 - DNA, 17 bp, synthetic construct
  misc_feature 1..17: note = Oligonucleotide
  source 1..17: mol_type = other DNA
cctgctcacaccacaca

SEQ ID NO: 2643 - DNA, 17 bp, synthetic construct
  misc_feature 1..17: note = Oligonucleotide
  source 1..17: mol_type = other DNA
agccctgctcacaccac

SEQ ID NO: 2644 - DNA, 17 bp, synthetic construct
  misc_feature 1..17: note = Oligonucleotide
  source 1..17: mol_type = other DNA
gatagccctgctcacac

SEQ ID NO: 2645 - DNA, 17 bp, synthetic construct
  misc_feature 1..17: note = Oligonucleotide
  source 1..17: mol_type = other DNA
acagatagccctgctca

SEQ ID NO: 2646 - DNA, 17 bp, synthetic construct
  misc_feature 1..17: note = Oligonucleotide
  source 1..17: mol_type = other DNA
cacacagatagccctgc

SEQ ID NO: 2647 - DNA, 17 bp, synthetic construct
  misc_feature 1..17: note = Oligonucleotide
  source 1..17: mol_type = other DNA
gtgcacacagatagccc

SEQ ID NO: 2648 - DNA, 17 bp, synthetic construct
  misc_feature 1..17: note = Oligonucleotide
  source 1..17: mol_type = other DNA
aacgtgcacacagatag

SEQ ID NO: 2649 - DNA, 17 bp, synthetic construct
  misc_feature 1..17: note = Oligonucleotide
  source 1..17: mol_type = other DNA
acaaacgtgcacacaga

SEQ ID NO: 2650 - DNA, 17 bp, synthetic construct
  misc_feature 1..17: note = Oligonucleotide
  source 1..17: mol_type = other DNA
ggaacaaacgtgcacac

SEQ ID NO: 2651 - DNA, 17 bp, synthetic construct
  misc_feature 1..17: note = Oligonucleotide
  source 1..17: mol_type = other DNA
aaaggaacaaacgtgca

SEQ ID NO: 2652 - DNA, 17 bp, synthetic construct
  misc_feature 1..17: note = Oligonucleotide
  source 1..17: mol_type = other DNA
gagaaaggaacaaacgt

SEQ ID NO: 2653 - DNA, 17 bp, synthetic construct
  misc_feature 1..17: note = Oligonucleotide
  source 1..17: mol_type = other DNA
ctggagaaaggaacaaa

SEQ ID NO: 2654 - DNA, 17 bp, synthetic construct
  misc_feature 1..17: note = Oligonucleotide
  source 1..17: mol_type = other DNA
cagctggagaaaggaac

SEQ ID NO: 2655 - DNA, 17 bp, synthetic construct
  misc_feature 1..17: note = Oligonucleotide
  source 1..17: mol_type = other DNA
tcacagctggagaaagg

SEQ ID NO: 2656 - DNA, 17 bp, synthetic construct
  misc_feature 1..17: note = Oligonucleotide
  source 1..17: mol_type = other DNA
acttcacagctggagaa

SEQ ID NO: 2657 - DNA, 17 bp, synthetic construct
  misc_feature 1..17: note = Oligonucleotide
  source 1..17: mol_type = other DNA
aagacttcacagctgga

SEQ ID NO: 2658 - DNA, 17 bp, synthetic construct
  misc_feature 1..17: note = Oligonucleotide
  source 1..17: mol_type = other DNA
cacaagacttcacagct

SEQ ID NO: 2659 - DNA, 17 bp, synthetic construct
  misc_feature 1..17: note = Oligonucleotide
  source 1..17: mol_type = other DNA
cttcacaagacttcaca

SEQ ID NO: 2660 - DNA, 17 bp, synthetic construct
  misc_feature 1..17: note = Oligonucleotide
  source 1..17: mol_type = other DNA
ggccttcacaagacttc

SEQ ID NO: 2661 - DNA, 17 bp, synthetic construct
  misc_feature 1..17: note = Oligonucleotide
  source 1..17: mol_type = other DNA
gttggccttcacaagac

SEQ ID NO: 2662 - DNA, 17 bp, synthetic construct
  misc_feature 1..17: note = Oligonucleotide
  source 1..17: mol_type = other DNA
ttggttggccttcacaa

SEQ ID NO: 2663 - DNA, 17 bp, synthetic construct
  misc_feature 1..17: note = Oligonucleotide
  source 1..17: mol_type = other DNA
gacttggttggccttca

SEQ ID NO: 2664 - DNA, 17 bp, synthetic construct
  misc_feature 1..17: note = Oligonucleotide
  source 1..17: mol_type = other DNA
ggggacttggttggcct

SEQ ID NO: 2665 - DNA, 17 bp, synthetic construct
  misc_feature 1..17: note = Oligonucleotide
  source 1..17: mol_type = other DNA
ggaggggacttggttgg

SEQ ID NO: 2666 - DNA, 17 bp, synthetic construct
  misc_feature 1..17: note = Oligonucleotide
  source 1..17: mol_type = other DNA
aaaggaggggacttggt

SEQ ID NO: 2667 - DNA, 17 bp, synthetic construct
  misc_feature 1..17: note = Oligonucleotide
  source 1..17: mol_type = other DNA
agtaaaggaggggactt

SEQ ID NO: 2668 - DNA, 17 bp, synthetic construct
  misc_feature 1..17: note = Oligonucleotide
  source 1..17: mol_type = other DNA
gtgagtaaaggagggga

SEQ ID NO: 2669 - DNA, 17 bp, synthetic construct
  misc_feature 1..17: note = Oligonucleotide
  source 1..17: mol_type = other DNA
tgggtgagtaaaggagg

SEQ ID NO: 2670 - DNA, 17 bp, synthetic construct
  misc_feature 1..17: note = Oligonucleotide
  source 1..17: mol_type = other DNA
gcatgggtgagtaaagg

SEQ ID NO: 2671 - DNA, 17 bp, synthetic construct
  misc_feature 1..17: note = Oligonucleotide
  source 1..17: mol_type = other DNA
catgcatgggtgagtaa

SEQ ID NO: 2672 - DNA, 17 bp, synthetic construct
  misc_feature 1..17: note = Oligonucleotide
  source 1..17: mol_type = other DNA
caccatgcatgggtgag

SEQ ID NO: 2673 - DNA, 17 bp, synthetic construct
  misc_feature 1..17: note = Oligonucleotide
  source 1..17: mol_type = other DNA
tcacaccatgcatgggt

SEQ ID NO: 2674 - DNA, 17 bp, synthetic construct
  misc_feature 1..17: note = Oligonucleotide
  source 1..17: mol_type = other DNA
tcttcacaccatgcatg

SEQ ID NO: 2675 - DNA, 17 bp, synthetic construct
  misc_feature 1..17: note = Oligonucleotide
  source 1..17: mol_type = other DNA
acatcttcacaccatgc

SEQ ID NO: 2676 - DNA, 17 bp, synthetic construct
  misc_feature 1..17: note = Oligonucleotide
  source 1..17: mol_type = other DNA
aatacatcttcacacca

SEQ ID NO: 2677 - DNA, 17 bp, synthetic construct
  misc_feature 1..17: note = Oligonucleotide
  source 1..17: mol_type = other DNA
ctcaatacatcttcaca

SEQ ID NO: 2678 - DNA, 17 bp, synthetic construct
  misc_feature 1..17: note = Oligonucleotide
  source 1..17: mol_type = other DNA
gcactcaatacatcttc

SEQ ID NO: 2679 - DNA, 17 bp, synthetic construct
  misc_feature 1..17: note = Oligonucleotide
  source 1..17: mol_type = other DNA
aaggcactcaatacatc

SEQ ID NO: 2680 - DNA, 17 bp, synthetic construct
  misc_feature 1..17: note = Oligonucleotide
  source 1..17: mol_type = other DNA
agcaaggcactcaatac

SEQ ID NO: 2681 - DNA, 17 bp, synthetic construct
  misc_feature 1..17: note = Oligonucleotide
  source 1..17: mol_type = other DNA
cctagcaaggcactcaa

SEQ ID NO: 2682 - DNA, 17 bp, synthetic construct
  misc_feature 1..17: note = Oligonucleotide
  source 1..17: mol_type = other DNA
atgcctagcaaggcact

SEQ ID NO: 2683 - DNA, 17 bp, synthetic construct
  misc_feature 1..17: note = Oligonucleotide
  source 1..17: mol_type = other DNA
cccatgcctagcaaggc

SEQ ID NO: 2684 - DNA, 17 bp, synthetic construct
  misc_feature 1..17: note = Oligonucleotide
  source 1..17: mol_type = other DNA
gtccccatgcctagcaa

SEQ ID NO: 2685 - DNA, 17 bp, synthetic construct
  misc_feature 1..17: note = Oligonucleotide
  source 1..17: mol_type = other DNA
tacgtccccatgcctag

SEQ ID NO: 2686 - DNA, 17 bp, synthetic construct
  misc_feature 1..17: note = Oligonucleotide
  source 1..17: mol_type = other DNA
gtctacgtccccatgcc

SEQ ID NO: 2687 - DNA, 17 bp, synthetic construct
  misc_feature 1..17: note = Oligonucleotide
  source 1..17: mol_type = other DNA
cccgtctacgtccccat

SEQ ID NO: 2688 - DNA, 17 bp, synthetic construct
  misc_feature 1..17: note = Oligonucleotide
  source 1..17: mol_type = other DNA
gaccccgtctacgtccc

SEQ ID NO: 2689 - DNA, 17 bp, synthetic construct
  misc_feature 1..17: note = Oligonucleotide
  source 1..17: mol_type = other DNA
actgaccccgtctacgt

SEQ ID NO: 2690 - DNA, 17 bp, synthetic construct
  misc_feature 1..17: note = Oligonucleotide
  source 1..17: mol_type = other DNA
aggactgaccccgtcta

SEQ ID NO: 2691 - DNA, 17 bp, synthetic construct
  misc_feature 1..17: note = Oligonucleotide
  source 1..17: mol_type = other DNA
cacaggactgaccccgt

SEQ ID NO: 2692 - DNA, 17 bp, synthetic construct
  misc_feature 1..17: note = Oligonucleotide
  source 1..17: mol_type = other DNA
ttccacaggactgaccc

SEQ ID NO: 2693 - DNA, 17 bp, synthetic construct
  misc_feature 1..17: note = Oligonucleotide
  source 1..17: mol_type = other DNA
accttccacaggactga

SEQ ID NO: 2694 - DNA, 17 bp, synthetic construct
  misc_feature 1..17: note = Oligonucleotide
  source 1..17: mol_type = other DNA
aagaccttccacaggac

SEQ ID NO: 2695 - DNA, 17 bp, synthetic construct
  misc_feature 1..17: note = Oligonucleotide
  source 1..17: mol_type = other DNA
tccaagaccttccacag

SEQ ID NO: 2696 - DNA, 17 bp, synthetic construct
  misc_feature 1..17: note = Oligonucleotide
  source 1..17: mol_type = other DNA
aactccaagaccttcca

SEQ ID NO: 2697 - DNA, 17 bp, synthetic construct
  misc_feature 1..17: note = Oligonucleotide
  source 1..17: mol_type = other DNA
ccaaactccaagacctt

SEQ ID NO: 2698 - DNA, 17 bp, synthetic construct
  misc_feature 1..17: note = Oligonucleotide
  source 1..17: mol_type = other DNA
ctgccaaactccaagac

SEQ ID NO: 2699 - DNA, 17 bp, synthetic construct
  misc_feature 1..17: note = Oligonucleotide
  source 1..17: mol_type = other DNA
accctgccaaactccaa

SEQ ID NO: 2700 - DNA, 17 bp, synthetic construct
  misc_feature 1..17: note = Oligonucleotide
  source 1..17: mol_type = other DNA
tccaccctgccaaactc

SEQ ID NO: 2701 - DNA, 17 bp, synthetic construct
  misc_feature 1..17: note = Oligonucleotide
  source 1..17: mol_type = other DNA
ccctccaccctgccaaa

SEQ ID NO: 2702 - DNA, 17 bp, synthetic construct
  misc_feature 1..17: note = Oligonucleotide
  source 1..17: mol_type = other DNA
cccccctccaccctgcc

SEQ ID NO: 2703 - DNA, 17 bp, synthetic construct
  misc_feature 1..17: note = Oligonucleotide
  source 1..17: mol_type = other DNA
gcacccccctccaccct

SEQ ID NO: 2704 - DNA, 17 bp, synthetic construct
  misc_feature 1..17: note = Oligonucleotide
  source 1..17: mol_type = other DNA
tgggcacccccctccac

SEQ ID NO: 2705 - DNA, 17 bp, synthetic construct
  misc_feature 1..17: note = Oligonucleotide
  source 1..17: mol_type = other DNA
agttgggcacccccctc

SEQ ID NO: 2706 - DNA, 17 bp, synthetic construct
  misc_feature 1..17: note = Oligonucleotide
  source 1..17: mol_type = other DNA
tgcagttgggcaccccc

SEQ ID NO: 2707 - DNA, 17 bp, synthetic construct
  misc_feature 1..17: note = Oligonucleotide
  source 1..17: mol_type = other DNA
cactgcagttgggcacc

SEQ ID NO: 2708 - DNA, 17 bp, synthetic construct
  misc_feature 1..17: note = Oligonucleotide
  source 1..17: mol_type = other DNA
gcccactgcagttgggc

SEQ ID NO: 2709 - DNA, 17 bp, synthetic construct
  misc_feature 1..17: note = Oligonucleotide
  source 1..17: mol_type = other DNA
aatgcccactgcagttg

SEQ ID NO: 2710 - DNA, 17 bp, synthetic construct
  misc_feature 1..17: note = Oligonucleotide
  source 1..17: mol_type = other DNA
ttcaatgcccactgcag

SEQ ID NO: 2711 - DNA, 17 bp, synthetic construct
  misc_feature 1..17: note = Oligonucleotide
  source 1..17: mol_type = other DNA
ttattcaatgcccactg

SEQ ID NO: 2712 - DNA, 17 bp, synthetic construct
  misc_feature 1..17: note = Oligonucleotide
  source 1..17: mol_type = other DNA
tctttattcaatgccca

SEQ ID NO: 2713 - DNA, 17 bp, synthetic construct
  misc_feature 1..17: note = Oligonucleotide
  source 1..17: mol_type = other DNA
aaatctttattcaatgc

SEQ ID NO: 2714 - DNA, 17 bp, synthetic construct
  misc_feature 1..17: note = Oligonucleotide
  source 1..17: mol_type = other DNA
acaaaatctttattcaa

SEQ ID NO: 2715 - DNA, 17 bp, synthetic construct
  misc_feature 1..17: note = Oligonucleotide
  source 1..17: mol_type = other DNA
ctcacaaaatctttatt

SEQ ID NO: 2716 - DNA, 17 bp, synthetic construct
  misc_feature 1..17: note = Oligonucleotide
  source 1..17: mol_type = other DNA
cagctcacaaaatcttt

SEQ ID NO: 2717 - DNA, 17 bp, synthetic construct
  misc_feature 1..17: note = Oligonucleotide
  source 1..17: mol_type = other DNA
gctcagctcacaaaatc

SEQ ID NO: 2718 - DNA, 17 bp, synthetic construct
  misc_feature 1..17: note = Oligonucleotide
  source 1..17: mol_type = other DNA
tgagctcagctcacaaa

SEQ ID NO: 2719 - DNA, 17 bp, synthetic construct
  misc_feature 1..17: note = Oligonucleotide
  source 1..17: mol_type = other DNA
ctttgagctcagctcac

SEQ ID NO: 2720 - DNA, 17 bp, synthetic construct
  misc_feature 1..17: note = Oligonucleotide
  source 1..17: mol_type = other DNA
caactttgagctcagct

SEQ ID NO: 2721 - DNA, 17 bp, synthetic construct
  misc_feature 1..17: note = Oligonucleotide
  source 1..17: mol_type = other DNA
gcccaactttgagctca

SEQ ID NO: 2722 - DNA, 17 bp, synthetic construct
  misc_feature 1..17: note = Oligonucleotide
  source 1..17: mol_type = other DNA
cccgcccaactttgagc

SEQ ID NO: 2723 - DNA, 17 bp, synthetic construct
  misc_feature 1..17: note = Oligonucleotide
  source 1..17: mol_type = other DNA
aggcccgcccaactttg

SEQ ID NO: 2724 - DNA, 17 bp, synthetic construct
  misc_feature 1..17: note = Oligonucleotide
  source 1..17: mol_type = other DNA
cggaggcccgcccaact

SEQ ID NO: 2725 - DNA, 17 bp, synthetic construct
  misc_feature 1..17: note = Oligonucleotide
  source 1..17: mol_type = other DNA
ccacggaggcccgccca

SEQ ID NO: 2726 - DNA, 17 bp, synthetic construct
  misc_feature 1..17: note = Oligonucleotide
  source 1..17: mol_type = other DNA
ccaccacggaggcccgc

SEQ ID NO: 2727 - DNA, 17 bp, synthetic construct
  misc_feature 1..17: note = Oligonucleotide
  source 1..17: mol_type = other DNA
gtgccaccacggaggcc

SEQ ID NO: 2728 - DNA, 17 bp, synthetic construct
  misc_feature 1..17: note = Oligonucleotide
  source 1..17: mol_type = other DNA
cctgtgccaccacggag

SEQ ID NO: 2729 - DNA, 17 bp, synthetic construct
  misc_feature 1..17: note = Oligonucleotide
  source 1..17: mol_type = other DNA
tttcctgtgccaccacg

SEQ ID NO: 2730 - DNA, 17 bp, synthetic construct
  misc_feature 1..17: note = Oligonucleotide
  source 1..17: mol_type = other DNA
cactttcctgtgccacc

SEQ ID NO: 2731 - DNA, 17 bp, synthetic construct
  misc_feature 1..17: note = Oligonucleotide
  source 1..17: mol_type = other DNA
ccccactttcctgtgcc

SEQ ID NO: 2732 - DNA, 17 bp, synthetic construct
  misc_feature 1..17: note = Oligonucleotide
  source 1..17: mol_type = other DNA
tgaccccactttcctgt

SEQ ID NO: 2733 - DNA, 17 bp, synthetic construct
  misc_feature 1..17: note = Oligonucleotide
  source 1..17: mol_type = other DNA
aactgaccccactttcc

SEQ ID NO: 2734 - DNA, 17 bp, synthetic construct
  misc_feature 1..17: note = Oligonucleotide
  source 1..17: mol_type = other DNA
tagaactgaccccactt

SEQ ID NO: 2735 - DNA, 17 bp, synthetic construct
  misc_feature 1..17: note = Oligonucleotide
  source 1..17: mol_type = other DNA
aggtagaactgacccca

SEQ ID NO: 2736 - DNA, 17 bp, synthetic construct
  misc_feature 1..17: note = Oligonucleotide
  source 1..17: mol_type = other DNA
tccaggtagaactgacc

SEQ ID NO: 2737 - DNA, 17 bp, synthetic construct
  misc_feature 1..17: note = Oligonucleotide
  source 1..17: mol_type = other DNA
ctctccaggtagaactg

SEQ ID NO: 2738 - DNA, 17 bp, synthetic construct
  misc_feature 1..17: note = Oligonucleotide
  source 1..17: mol_type = other DNA
ccactctccaggtagaa

SEQ ID NO: 2739 - DNA, 17 bp, synthetic construct
  misc_feature 1..17: note = Oligonucleotide
  source 1..17: mol_type = other DNA
cctccactctccaggta

SEQ ID NO: 2740 - DNA, 17 bp, synthetic construct
  misc_feature 1..17: note = Oligonucleotide
  source 1..17: mol_type = other DNA
ccccctccactctccag

SEQ ID NO: 2741 - DNA, 17 bp, synthetic construct
  misc_feature 1..17: note = Oligonucleotide
  source 1..17: mol_type = other DNA
catccccctccactctc

SEQ ID NO: 2742 - DNA, 17 bp, synthetic construct
  misc_feature 1..17: note = Oligonucleotide
  source 1..17: mol_type = other DNA
agacatccccctccact

SEQ ID NO: 2743 - DNA, 17 bp, synthetic construct
  misc_feature 1..17: note = Oligonucleotide
  source 1..17: mol_type = other DNA
cctagacatccccctcc

SEQ ID NO: 2744 - DNA, 17 bp, synthetic construct
  misc_feature 1..17: note = Oligonucleotide
  source 1..17: mol_type = other DNA
catcctagacatccccc

SEQ ID NO: 2745 - DNA, 17 bp, synthetic construct
  misc_feature 1..17: note = Oligonucleotide
  source 1..17: mol_type = other DNA
taccatcctagacatcc

SEQ ID NO: 2746 - DNA, 17 bp, synthetic construct
  misc_feature 1..17: note = Oligonucleotide
  source 1..17: mol_type = other DNA
gcttaccatcctagaca

SEQ ID NO: 2747 - DNA, 17 bp, synthetic construct
  misc_feature 1..17: note = Oligonucleotide
  source 1..17: mol_type = other DNA
caggcttaccatcctag

SEQ ID NO: 2748 - DNA, 17 bp, synthetic construct
  misc_feature 1..17: note = Oligonucleotide
  source 1..17: mol_type = other DNA
ttccaggcttaccatcc

SEQ ID NO: 2749 - DNA, 17 bp, synthetic construct
  misc_feature 1..17: note = Oligonucleotide
  source 1..17: mol_type = other DNA
tgattccaggcttacca

SEQ ID NO: 2750 - DNA, 17 bp, synthetic construct
  misc_feature 1..17: note = Oligonucleotide
  source 1..17: mol_type = other DNA
gcctgattccaggctta

SEQ ID NO: 2751 - DNA, 17 bp, synthetic construct
  misc_feature 1..17: note = Oligonucleotide
  source 1..17: mol_type = other DNA
aaggcctgattccaggc

SEQ ID NO: 2752 - DNA, 17 bp, synthetic construct
  misc_feature 1..17: note = Oligonucleotide
  source 1..17: mol_type = other DNA
ctgaaggcctgattcca

SEQ ID NO: 2753 - DNA, 17 bp, synthetic construct
  misc_feature 1..17: note = Oligonucleotide
  source 1..17: mol_type = other DNA
tctctgaaggcctgatt

SEQ ID NO: 2754 - DNA, 17 bp, synthetic construct
  misc_feature 1..17: note = Oligonucleotide
  source 1..17: mol_type = other DNA
tcctctctgaaggcctg

SEQ ID NO: 2755 - DNA, 17 bp, synthetic construct
  misc_feature 1..17: note = Oligonucleotide
  source 1..17: mol_type = other DNA
cactcctctctgaaggc

SEQ ID NO: 2756 - DNA, 17 bp, synthetic construct
  misc_feature 1..17: note = Oligonucleotide
  source 1..17: mol_type = other DNA
tcccactcctctctgaa

SEQ ID NO: 2757 - DNA, 17 bp, synthetic construct
  misc_feature 1..17: note = Oligonucleotide
  source 1..17: mol_type = other DNA
aaatcccactcctctct

SEQ ID NO: 2758 - DNA, 17 bp, synthetic construct
  misc_feature 1..17: note = Oligonucleotide
  source 1..17: mol_type = other DNA
gcaaaatcccactcctc

SEQ ID NO: 2759 - DNA, 17 bp, synthetic construct
  misc_feature 1..17: note = Oligonucleotide
  source 1..17: mol_type = other DNA
tcggcaaaatcccactc

SEQ ID NO: 2760 - DNA, 17 bp, synthetic construct
  misc_feature 1..17: note = Oligonucleotide
  source 1..17: mol_type = other DNA
ttctcggcaaaatccca

SEQ ID NO: 2761 - DNA, 17 bp, synthetic construct
  misc_feature 1..17: note = Oligonucleotide
  source 1..17: mol_type = other DNA
ggattctcggcaaaatc

SEQ ID NO: 2762 - DNA, 17 bp, synthetic construct
  misc_feature 1..17: note = Oligonucleotide
  source 1..17: mol_type = other DNA
ccaggattctcggcaaa

SEQ ID NO: 2763 - DNA, 17 bp, synthetic construct
  misc_feature 1..17: note = Oligonucleotide
  source 1..17: mol_type = other DNA
tccccaggattctcggc

SEQ ID NO: 2764 - DNA, 17 bp, synthetic construct
  misc_feature 1..17: note = Oligonucleotide
  source 1..17: mol_type = other DNA
ccatccccaggattctc

SEQ ID NO: 2765 - DNA, 17 bp, synthetic construct
  misc_feature 1..17: note = Oligonucleotide
  source 1..17: mol_type = other DNA
ttcccatccccaggatt

SEQ ID NO: 2766 - DNA, 17 bp, synthetic construct
  misc_feature 1..17: note = Oligonucleotide
  source 1..17: mol_type = other DNA
gccttcccatccccagg

SEQ ID NO: 2767 - DNA, 17 bp, synthetic construct
  misc_feature 1..17: note = Oligonucleotide
  source 1..17: mol_type = other DNA
gtcgccttcccatcccc

SEQ ID NO: 2768 - DNA, 17 bp, synthetic construct
  misc_feature 1..17: note = Oligonucleotide
  source 1..17: mol_type = other DNA
cccgtcgccttcccatc

SEQ ID NO: 2769 - DNA, 17 bp, synthetic construct
  misc_feature 1..17: note = Oligonucleotide
  source 1..17: mol_type = other DNA
tgtcccgtcgccttccc

SEQ ID NO: 2770 - DNA, 17 bp, synthetic construct
  misc_feature 1..17: note = Oligonucleotide
  source 1..17: mol_type = other DNA
cactgtcccgtcgcctt

SEQ ID NO: 2771 - DNA, 17 bp, synthetic construct
  misc_feature 1..17: note = Oligonucleotide
  source 1..17: mol_type = other DNA
ctgcactgtcccgtcgc

SEQ ID NO: 2772 - DNA, 17 bp, synthetic construct
  misc_feature 1..17: note = Oligonucleotide
  source 1..17: mol_type = other DNA
agcctgcactgtcccgt

SEQ ID NO: 2773 - DNA, 17 bp, synthetic construct
  misc_feature 1..17: note = Oligonucleotide
  source 1..17: mol_type = other DNA
cgcagcctgcactgtcc

SEQ ID NO: 2774 - DNA, 17 bp, synthetic construct
  misc_feature 1..17: note = Oligonucleotide
  source 1..17: mol_type = other DNA
gcccgcagcctgcactg

SEQ ID NO: 2775 - DNA, 17 bp, synthetic construct
  misc_feature 1..17: note = Oligonucleotide
  source 1..17: mol_type = other DNA
gctgcccgcagcctgca

SEQ ID NO: 2776 - DNA, 17 bp, synthetic construct
  misc_feature 1..17: note = Oligonucleotide
  source 1..17: mol_type = other DNA
ctagctgcccgcagcct

SEQ ID NO: 2777 - DNA, 17 bp, synthetic construct
  misc_feature 1..17: note = Oligonucleotide
  source 1..17: mol_type = other DNA
tgcctagctgcccgcag

SEQ ID NO: 2778 - DNA, 17 bp, synthetic construct
  misc_feature 1..17: note = Oligonucleotide
  source 1..17: mol_type = other DNA
acgtgcctagctgcccg

SEQ ID NO: 2779 - DNA, 17 bp, synthetic construct
  misc_feature 1..17: note = Oligonucleotide
  source 1..17: mol_type = other DNA
ggcacgtgcctagctgc

SEQ ID NO: 2780 - DNA, 17 bp, synthetic construct
  misc_feature 1..17: note = Oligonucleotide
  source 1..17: mol_type = other DNA
gaaggcacgtgcctagc

SEQ ID NO: 2781 - DNA, 17 bp, synthetic construct
  misc_feature 1..17: note = Oligonucleotide
  source 1..17: mol_type = other DNA
atggaaggcacgtgcct

SEQ ID NO: 2782 - DNA, 17 bp, synthetic construct
  misc_feature 1..17: note = Oligonucleotide
  source 1..17: mol_type = other DNA
ccgatggaaggcacgtg

SEQ ID NO: 2783 - DNA, 17 bp, synthetic construct
  misc_feature 1..17: note = Oligonucleotide
  source 1..17: mol_type = other DNA
agcccgatggaaggcac

SEQ ID NO: 2784 - DNA, 17 bp, synthetic construct
  misc_feature 1..17: note = Oligonucleotide
  source 1..17: mol_type = other DNA
tgcagcccgatggaagg

SEQ ID NO: 2785 - DNA, 17 bp, synthetic construct
  misc_feature 1..17: note = Oligonucleotide
  source 1..17: mol_type = other DNA
tgatgcagcccgatgga

SEQ ID NO: 2786 - DNA, 17 bp, synthetic construct
  misc_feature 1..17: note = Oligonucleotide
  source 1..17: mol_type = other DNA
gcatgatgcagcccgat

SEQ ID NO: 2787 - DNA, 17 bp, synthetic construct
  misc_feature 1..17: note = Oligonucleotide
  source 1..17: mol_type = other DNA
caggcatgatgcagccc

SEQ ID NO: 2788 - DNA, 17 bp, synthetic construct
  misc_feature 1..17: note = Oligonucleotide
  source 1..17: mol_type = other DNA
actcaggcatgatgcag

SEQ ID NO: 2789 - DNA, 17 bp, synthetic construct
  misc_feature 1..17: note = Oligonucleotide
  source 1..17: mol_type = other DNA
cacactcaggcatgatg

SEQ ID NO: 2790 - DNA, 17 bp, synthetic construct
  misc_feature 1..17: note = Oligonucleotide
  source 1..17: mol_type = other DNA
caccacactcaggcatg

SEQ ID NO: 2791 - DNA, 17 bp, synthetic construct
  misc_feature 1..17: note = Oligonucleotide
  source 1..17: mol_type = other DNA
acccaccacactcaggc

SEQ ID NO: 2792 - DNA, 17 bp, synthetic construct
  misc_feature 1..17: note = Oligonucleotide
  source 1..17: mol_type = other DNA
tgcacccaccacactca

SEQ ID NO: 2793 - DNA, 17 bp, synthetic construct
  misc_feature 1..17: note = Oligonucleotide
  source 1..17: mol_type = other DNA
ccatgcacccaccacac

SEQ ID NO: 2794 - DNA, 17 bp, synthetic construct
  misc_feature 1..17: note = Oligonucleotide
  source 1..17: mol_type = other DNA
ctgccatgcacccacca

SEQ ID NO: 2795 - DNA, 17 bp, synthetic construct
  misc_feature 1..17: note = Oligonucleotide
  source 1..17: mol_type = other DNA
cagctgccatgcaccca

SEQ ID NO: 2796 - DNA, 17 bp, synthetic construct
  misc_feature 1..17: note = Oligonucleotide
  source 1..17: mol_type = other DNA
taacagctgccatgcac

SEQ ID NO: 2797 - DNA, 17 bp, synthetic construct
  misc_feature 1..17: note = Oligonucleotide
  source 1..17: mol_type = other DNA
agctaacagctgccatg

SEQ ID NO: 2798 - DNA, 17 bp, synthetic construct
  misc_feature 1..17: note = Oligonucleotide
  source 1..17: mol_type = other DNA
cagagctaacagctgcc

SEQ ID NO: 2799 - DNA, 17 bp, synthetic construct
  misc_feature 1..17: note = Oligonucleotide
  source 1..17: mol_type = other DNA
ggacagagctaacagct

SEQ ID NO: 2800 - DNA, 17 bp, synthetic construct
  misc_feature 1..17: note = Oligonucleotide
  source 1..17: mol_type = other DNA
agtggacagagctaaca

SEQ ID NO: 2801 - DNA, 17 bp, synthetic construct
  misc_feature 1..17: note = Oligonucleotide
  source 1..17: mol_type = other DNA
cacagtggacagagcta

SEQ ID NO: 2802 - DNA, 17 bp, synthetic construct
  misc_feature 1..17: note = Oligonucleotide
  source 1..17: mol_type = other DNA
taccacagtggacagag

SEQ ID NO: 2803 - DNA, 17 bp, synthetic construct
  misc_feature 1..17: note = Oligonucleotide
  source 1..17: mol_type = other DNA
tactaccacagtggaca

SEQ ID NO: 2804 - DNA, 17 bp, synthetic construct
  misc_feature 1..17: note = Oligonucleotide
  source 1..17: mol_type = other DNA
tcatactaccacagtgg

SEQ ID NO: 2805 - DNA, 17 bp, synthetic construct
  misc_feature 1..17: note = Oligonucleotide
  source 1..17: mol_type = other DNA
cagtcatactaccacag

SEQ ID NO: 2806 - DNA, 17 bp, synthetic construct
  misc_feature 1..17: note = Oligonucleotide
  source 1..17: mol_type = other DNA
catcagtcatactacca

SEQ ID NO: 2807 - DNA, 17 bp, synthetic construct
  misc_feature 1..17: note = Oligonucleotide
  source 1..17: mol_type = other DNA
caccatcagtcatacta

SEQ ID NO: 2808 - DNA, 17 bp, synthetic construct
  misc_feature 1..17: note = Oligonucleotide
  source 1..17: mol_type = other DNA
acacaccatcagtcata

SEQ ID NO: 2809 - DNA, 17 bp, synthetic construct
  misc_feature 1..17: note = Oligonucleotide
  source 1..17: mol_type = other DNA
tgtacacaccatcagtc

SEQ ID NO: 2810 - DNA, 17 bp, synthetic construct
  misc_feature 1..17: note = Oligonucleotide
  source 1..17: mol_type = other DNA
tcctgtacacaccatca

SEQ ID NO: 2811 - DNA, 17 bp, synthetic construct
  misc_feature 1..17: note = Oligonucleotide
  source 1..17: mol_type = other DNA
ccctcctgtacacacca

SEQ ID NO: 2812 - DNA, 17 bp, synthetic construct
  misc_feature 1..17: note = Oligonucleotide
  source 1..17: mol_type = other DNA
ctgccctcctgtacaca

SEQ ID NO: 2813 - DNA, 17 bp, synthetic construct
  misc_feature 1..17: note = Oligonucleotide
  source 1..17: mol_type = other DNA
tcactgccctcctgtac

SEQ ID NO: 2814 - DNA, 17 bp, synthetic construct
  misc_feature 1..17: note = Oligonucleotide
  source 1..17: mol_type = other DNA
ccctcactgccctcctg

SEQ ID NO: 2815 - DNA, 17 bp, synthetic construct
  misc_feature 1..17: note = Oligonucleotide
  source 1..17: mol_type = other DNA
cacccctcactgccctc

SEQ ID NO: 2816 - DNA, 17 bp, synthetic construct
  misc_feature 1..17: note = Oligonucleotide
  source 1..17: mol_type = other DNA
ccgcacccctcactgcc

SEQ ID NO: 2817 - DNA, 17 bp, synthetic construct
  misc_feature 1..17: note = Oligonucleotide
  source 1..17: mol_type = other DNA
acaccgcacccctcact

SEQ ID NO: 2818 - DNA, 17 bp, synthetic construct
  misc_feature 1..17: note = Oligonucleotide
  source 1..17: mol_type = other DNA
gccacaccgcacccctc

SEQ ID NO: 2819 - DNA, 17 bp, synthetic construct
  misc_feature 1..17: note = Oligonucleotide
  source 1..17: mol_type = other DNA
ctggccacaccgcaccc

SEQ ID NO: 2820 - DNA, 17 bp, synthetic construct
  misc_feature 1..17: note = Oligonucleotide
  source 1..17: mol_type = other DNA
atgctggccacaccgca

SEQ ID NO: 2821 - DNA, 17 bp, synthetic construct
  misc_feature 1..17: note = Oligonucleotide
  source 1..17: mol_type = other DNA
ctcatgctggccacacc

SEQ ID NO: 2822 - DNA, 17 bp, synthetic construct
  misc_feature 1..17: note = Oligonucleotide
  source 1..17: mol_type = other DNA
ccgctcatgctggccac

SEQ ID NO: 2823 - DNA, 17 bp, synthetic construct
  misc_feature 1..17: note = Oligonucleotide
  source 1..17: mol_type = other DNA
gtcccgctcatgctggc

SEQ ID NO: 2824 - DNA, 17 bp, synthetic construct
  misc_feature 1..17: note = Oligonucleotide
  source 1..17: mol_type = other DNA
cccgtcccgctcatgct

SEQ ID NO: 2825 - DNA, 17 bp, synthetic construct
  misc_feature 1..17: note = Oligonucleotide
  source 1..17: mol_type = other DNA
aaccccgtcccgctcat

SEQ ID NO: 2826 - DNA, 17 bp, synthetic construct
  misc_feature 1..17: note = Oligonucleotide
  source 1..17: mol_type = other DNA
acaaaccccgtcccgct

SEQ ID NO: 2827 - DNA, 17 bp, synthetic construct
  misc_feature 1..17: note = Oligonucleotide
  source 1..17: mol_type = other DNA
tgcacaaaccccgtccc

SEQ ID NO: 2828 - DNA, 17 bp, synthetic construct
  misc_feature 1..17: note = Oligonucleotide
  source 1..17: mol_type = other DNA
ccatgcacaaaccccgt

SEQ ID NO: 2829 - DNA, 17 bp, synthetic construct
  misc_feature 1..17: note = Oligonucleotide
  source 1..17: mol_type = other DNA
agtccatgcacaaaccc

SEQ ID NO: 2830 - DNA, 17 bp, synthetic construct
  misc_feature 1..17: note = Oligonucleotide
  source 1..17: mol_type = other DNA
gtgagtccatgcacaaa

SEQ ID NO: 2831 - DNA, 17 bp, synthetic construct
  misc_feature 1..17: note = Oligonucleotide
  source 1..17: mol_type = other DNA
caagtgagtccatgcac

SEQ ID NO: 2832 - DNA, 17 bp, synthetic construct
  misc_feature 1..17: note = Oligonucleotide
  source 1..17: mol_type = other DNA
gagcaagtgagtccatg

SEQ ID NO: 2833 - DNA, 17 bp, synthetic construct
  misc_feature 1..17: note = Oligonucleotide
  source 1..17: mol_type = other DNA
gctgagcaagtgagtcc

SEQ ID NO: 2834 - DNA, 17 bp, synthetic construct
  misc_feature 1..17: note = Oligonucleotide
  source 1..17: mol_type = other DNA
ccggctgagcaagtgag

SEQ ID NO: 2835 - DNA, 17 bp, synthetic construct
  misc_feature 1..17: note = Oligonucleotide
  source 1..17: mol_type = other DNA
accccggctgagcaagt

SEQ ID NO: 2836 - DNA, 17 bp, synthetic construct
  misc_feature 1..17: note = Oligonucleotide
  source 1..17: mol_type = other DNA
cccaccccggctgagca

SEQ ID NO: 2837 - DNA, 17 bp, synthetic construct
  misc_feature 1..17: note = Oligonucleotide
  source 1..17: mol_type = other DNA
gcccccaccccggctga

SEQ ID NO: 2838 - DNA, 17 bp, synthetic construct
  misc_feature 1..17: note = Oligonucleotide
  source 1..17: mol_type = other DNA
aatgcccccaccccggc

SEQ ID NO: 2839 - DNA, 17 bp, synthetic construct
  misc_feature 1..17: note = Oligonucleotide
  source 1..17: mol_type = other DNA
gaaaatgcccccacccc

SEQ ID NO: 2840 - DNA, 17 bp, synthetic construct
  misc_feature 1..17: note = Oligonucleotide
  source 1..17: mol_type = other DNA
agagaaaatgcccccac

SEQ ID NO: 2841 - DNA, 17 bp, synthetic construct
  misc_feature 1..17: note = Oligonucleotide
  source 1..17: mol_type = other DNA
ggtagagaaaatgcccc

SEQ ID NO: 2842 - DNA, 17 bp, synthetic construct
  misc_feature 1..17: note = Oligonucleotide
  source 1..17: mol_type = other DNA
aaaggtagagaaaatgc

SEQ ID NO: 2843 - DNA, 17 bp, synthetic construct
  misc_feature 1..17: note = Oligonucleotide
  source 1..17: mol_type = other DNA
agaaaaggtagagaaaa

SEQ ID NO: 2844 - DNA, 17 bp, synthetic construct
  misc_feature 1..17: note = Oligonucleotide
  source 1..17: mol_type = other DNA
taaagaaaaggtagaga

SEQ ID NO: 2845 - DNA, 17 bp, synthetic construct
  misc_feature 1..17: note = Oligonucleotide
  source 1..17: mol_type = other DNA
agataaagaaaaggtag

SEQ ID NO: 2846 - DNA, 17 bp, synthetic construct
  misc_feature 1..17: note = Oligonucleotide
  source 1..17: mol_type = other DNA
ctcagataaagaaaagg

SEQ ID NO: 2847 - DNA, 17 bp, synthetic construct
  misc_feature 1..17: note = Oligonucleotide
  source 1..17: mol_type = other DNA
ctgctcagataaagaaa

SEQ ID NO: 2848 - DNA, 25 bp, synthetic construct
  misc_feature 1..25: note = Oligonucleotide
  source 1..25: mol_type = other DNA
aactgctcagataaagaaaaggtag

SEQ ID NO: 2849 - DNA, 25 bp, synthetic construct
  misc_feature 1..25: note = Oligonucleotide
  source 1..25: mol_type = other DNA
cgaaactgctcagataaagaaaagg

SEQ ID NO: 2850 - DNA, 25 bp, synthetic construct
  misc_feature 1..25: note = Oligonucleotide
  source 1..25: mol_type = other DNA
tatcgaaactgctcagataaagaaa

SEQ ID NO: 2851 - DNA, 25 bp, synthetic construct
  misc_feature 1..25: note = Oligonucleotide
  source 1..25: mol_type = other DNA
ttgtatcgaaactgctcagataaag

SEQ ID NO: 2852 - DNA, 25 bp, synthetic construct
  misc_feature 1..25: note = Oligonucleotide
  source 1..25: mol_type = other DNA
cgcttgtatcgaaactgctcagata

SEQ ID NO: 2853 - DNA, 25 bp, synthetic construct
  misc_feature 1..25: note = Oligonucleotide
  source 1..25: mol_type = other DNA
cgccgcttgtatcgaaactgctcag

SEQ ID NO: 2854 - DNA, 25 bp, synthetic construct
  misc_feature 1..25: note = Oligonucleotide
  source 1..25: mol_type = other DNA
actcgccgcttgtatcgaaactgct

SEQ ID NO: 2855 - DNA, 25 bp, synthetic construct
  misc_feature 1..25: note = Oligonucleotide
  source 1..25: mol_type = other DNA
taaactcgccgcttgtatcgaaact

SEQ ID NO: 2856 - DNA, 25 bp, synthetic construct
  misc_feature 1..25: note = Oligonucleotide
  source 1..25: mol_type = other DNA
gcataaactcgccgcttgtatcgaa

SEQ ID NO: 2857 - DNA, 25 bp, synthetic construct
  misc_feature 1..25: note = Oligonucleotide
  source 1..25: mol_type = other DNA
tgggcataaactcgccgcttgtatc

SEQ ID NO: 2858 - DNA, 25 bp, synthetic construct
  misc_feature 1..25: note = Oligonucleotide
  source 1..25: mol_type = other DNA
ttctgggcataaactcgccgcttgt

SEQ ID NO: 2859 - DNA, 25 bp, synthetic construct
  misc_feature 1..25: note = Oligonucleotide
  source 1..25: mol_type = other DNA
aggttctgggcataaactcgccgct

SEQ ID NO: 2860 - DNA, 25 bp, synthetic construct
  misc_feature 1..25: note = Oligonucleotide
  source 1..25: mol_type = other DNA
atgaggttctgggcataaactcgcc

SEQ ID NO: 2861 - DNA, 25 bp, synthetic construct
  misc_feature 1..25: note = Oligonucleotide
  source 1..25: mol_type = other DNA
tcgatgaggttctgggcataaactc

SEQ ID NO: 2862 - DNA, 25 bp, synthetic construct
  misc_feature 1..25: note = Oligonucleotide
  source 1..25: mol_type = other DNA
tcatcgatgaggttctgggcataaa

SEQ ID NO: 2863 - DNA, 25 bp, synthetic construct
  misc_feature 1..25: note = Oligonucleotide
  source 1..25: mol_type = other DNA
ttatcatcgatgaggttctgggcat

SEQ ID NO: 2864 - DNA, 25 bp, synthetic construct
  misc_feature 1..25: note = Oligonucleotide
  source 1..25: mol_type = other DNA
tgcttatcatcgatgaggttctggg

SEQ ID NO: 2865 - DNA, 25 bp, synthetic construct
  misc_feature 1..25: note = Oligonucleotide
  source 1..25: mol_type = other DNA
aactgcttatcatcgatgaggttct

SEQ ID NO: 2866 - DNA, 25 bp, synthetic construct
  misc_feature 1..25: note = Oligonucleotide
  source 1..25: mol_type = other DNA
gcaaactgcttatcatcgatgaggt

SEQ ID NO: 2867 - DNA, 25 bp, synthetic construct
  misc_feature 1..25: note = Oligonucleotide
  source 1..25: mol_type = other DNA
tttgcaaactgcttatcatcgatga

SEQ ID NO: 2868 - DNA, 25 bp, synthetic construct
  misc_feature 1..25: note = Oligonucleotide
  source 1..25: mol_type = other DNA
agctttgcaaactgcttatcatcga

SEQ ID NO: 2869 - DNA, 25 bp, synthetic construct
  misc_feature 1..25: note = Oligonucleotide
  source 1..25: mol_type = other DNA
tgaagctttgcaaactgcttatcat

SEQ ID NO: 2870 - DNA, 25 bp, synthetic construct
  misc_feature 1..25: note = Oligonucleotide
  source 1..25: mol_type = other DNA
gtgtgaagctttgcaaactgcttat

SEQ ID NO: 2871 - DNA, 25 bp, synthetic construct
  misc_feature 1..25: note = Oligonucleotide
  source 1..25: mol_type = other DNA
tttgtgtgaagctttgcaaactgct

SEQ ID NO: 2872 - DNA, 25 bp, synthetic construct
  misc_feature 1..25: note = Oligonucleotide
  source 1..25: mol_type = other DNA
acctttgtgtgaagctttgcaaact

SEQ ID NO: 2873 - DNA, 25 bp, synthetic construct
  misc_feature 1..25: note = Oligonucleotide
  source 1..25: mol_type = other DNA
tttacctttgtgtgaagctttgcaa

SEQ ID NO: 2874 - DNA, 25 bp, synthetic construct
  misc_feature 1..25: note = Oligonucleotide
  source 1..25: mol_type = other DNA
tcctttacctttgtgtgaagctttg

SEQ ID NO: 2875 - DNA, 25 bp, synthetic construct
  misc_feature 1..25: note = Oligonucleotide
  source 1..25: mol_type = other DNA
tgatcctttacctttgtgtgaagct

SEQ ID NO: 2876 - DNA, 25 bp, synthetic construct
  misc_feature 1..25: note = Oligonucleotide
  source 1..25: mol_type = other DNA
ccgtgatcctttacctttgtgtgaa

SEQ ID NO: 2877 - DNA, 25 bp, synthetic construct
  misc_feature 1..25: note = Oligonucleotide
  source 1..25: mol_type = other DNA
tccccgtgatcctttacctttgtgt

SEQ ID NO: 2878 - DNA, 25 bp, synthetic construct
  misc_feature 1..25: note = Oligonucleotide
  source 1..25: mol_type = other DNA
ccctccccgtgatcctttacctttg

SEQ ID NO: 2879 - DNA, 25 bp, synthetic construct
  misc_feature 1..25: note = Oligonucleotide
  source 1..25: mol_type = other DNA
gccccctccccgtgatcctttacct

SEQ ID NO: 2880 - DNA, 25 bp, synthetic construct
  misc_feature 1..25: note = Oligonucleotide
  source 1..25: mol_type = other DNA
ggagccccctccccgtgatccttta

SEQ ID NO: 2881 - DNA, 25 bp, synthetic construct
  misc_feature 1..25: note = Oligonucleotide
  source 1..25: mol_type = other DNA
tcaggagccccctccccgtgatcct

SEQ ID NO: 2882 - DNA, 25 bp, synthetic construct
  misc_feature 1..25: note = Oligonucleotide
  source 1..25: mol_type = other DNA
acctcaggagccccctccccgtgat

SEQ ID NO: 2883 - DNA, 25 bp, synthetic construct
  misc_feature 1..25: note = Oligonucleotide
  source 1..25: mol_type = other DNA
ggaacctcaggagccccctccccgt

SEQ ID NO: 2884 - DNA, 25 bp, synthetic construct
  misc_feature 1..25: note = Oligonucleotide
  source 1..25: mol_type = other DNA
gagggaacctcaggagccccctccc

SEQ ID NO: 2885 - DNA, 25 bp, synthetic construct
  misc_feature 1..25: note = Oligonucleotide
  source 1..25: mol_type = other DNA
caggagggaacctcaggagccccct

SEQ ID NO: 2886 - DNA, 25 bp, synthetic construct
  misc_feature 1..25: note = Oligonucleotide
  source 1..25: mol_type = other DNA
aggcaggagggaacctcaggagccc

SEQ ID NO: 2887 - DNA, 25 bp, synthetic construct
  misc_feature 1..25: note = Oligonucleotide
  source 1..25: mol_type = other DNA
gggaggcaggagggaacctcaggag

SEQ ID NO: 2888 - DNA, 25 bp, synthetic construct
  misc_feature 1..25: note = Oligonucleotide
  source 1..25: mol_type = other DNA
acagggaggcaggagggaacctcag

SEQ ID NO: 2889 - DNA, 25 bp, synthetic construct
  misc_feature 1..25: note = Oligonucleotide
  source 1..25: mol_type = other DNA
gccacagggaggcaggagggaacct

SEQ ID NO: 2890 - DNA, 25 bp, synthetic construct
  misc_feature 1..25: note = Oligonucleotide
  source 1..25: mol_type = other DNA
gcagccacagggaggcaggagggaa

SEQ ID NO: 2891 - DNA, 25 bp, synthetic construct
  misc_feature 1..25: note = Oligonucleotide
  source 1..25: mol_type = other DNA
acagcagccacagggaggcaggagg

SEQ ID NO: 2892 - DNA, 25 bp, synthetic construct
  misc_feature 1..25: note = Oligonucleotide
  source 1..25: mol_type = other DNA
gggacagcagccacagggaggcagg

SEQ ID NO: 2893 - DNA, 25 bp, synthetic construct
  misc_feature 1..25: note = Oligonucleotide
  source 1..25: mol_type = other DNA
tgggggacagcagccacagggaggc

SEQ ID NO: 2894 - DNA, 25 bp, synthetic construct
  misc_feature 1..25: note = Oligonucleotide
  source 1..25: mol_type = other DNA
gggtgggggacagcagccacaggga

SEQ ID NO: 2895 - DNA, 25 bp, synthetic construct
  misc_feature 1..25: note = Oligonucleotide
  source 1..25: mol_type = other DNA
ctggggtgggggacagcagccacag

SEQ ID NO: 2896 - DNA, 25 bp, synthetic construct
  misc_feature 1..25: note = Oligonucleotide
  source 1..25: mol_type = other DNA
aagctggggtgggggacagcagcca

SEQ ID NO: 2897 - DNA, 25 bp, synthetic construct
  misc_feature 1..25: note = Oligonucleotide
  source 1..25: mol_type = other DNA
cccaagctggggtgggggacagcag

SEQ ID NO: 2898 - DNA, 25 bp, synthetic construct
  misc_feature 1..25: note = Oligonucleotide
  source 1..25: mol_type = other DNA
agccccaagctggggtgggggacag

SEQ ID NO: 2899 - DNA, 25 bp, synthetic construct
  misc_feature 1..25: note = Oligonucleotide
  source 1..25: mol_type = other DNA
gtcagccccaagctggggtggggga

SEQ ID NO: 2900 - DNA, 25 bp, synthetic construct
  misc_feature 1..25: note = Oligonucleotide
  source 1..25: mol_type = other DNA
gtggtcagccccaagctggggtggg

SEQ ID NO: 2901 - DNA, 25 bp, synthetic construct
  misc_feature 1..25: note = Oligonucleotide
  source 1..25: mol_type = other DNA
actgtggtcagccccaagctggggt

SEQ ID NO: 2902 - DNA, 25 bp, synthetic construct
  misc_feature 1..25: note = Oligonucleotide
  source 1..25: mol_type = other DNA
gggactgtggtcagccccaagctgg

SEQ ID NO: 2903 - DNA, 25 bp, synthetic construct
  misc_feature 1..25: note = Oligonucleotide
  source 1..25: mol_type = other DNA
tgggggactgtggtcagccccaagc

SEQ ID NO: 2904 - DNA, 25 bp, synthetic construct
  misc_feature 1..25: note = Oligonucleotide
  source 1..25: mol_type = other DNA
agctgggggactgtggtcagcccca

SEQ ID NO: 2905 - DNA, 25 bp, synthetic construct
  misc_feature 1..25: note = Oligonucleotide
  source 1..25: mol_type = other DNA
taaagctgggggactgtggtcagcc

SEQ ID NO: 2906 - DNA, 25 bp, synthetic construct
  misc_feature 1..25: note = Oligonucleotide
  source 1..25: mol_type = other DNA
agctaaagctgggggactgtggtca

SEQ ID NO: 2907 - DNA, 25 bp, synthetic construct
  misc_feature 1..25: note = Oligonucleotide
  source 1..25: mol_type = other DNA
ctgagctaaagctgggggactgtgg

SEQ ID NO: 2908 - DNA, 25 bp, synthetic construct
  misc_feature 1..25: note = Oligonucleotide
  source 1..25: mol_type = other DNA
ggactgagctaaagctgggggactg

SEQ ID NO: 2909 - DNA, 25 bp, synthetic construct
  misc_feature 1..25: note = Oligonucleotide
  source 1..25: mol_type = other DNA
aatggactgagctaaagctggggga

SEQ ID NO: 2910 - DNA, 25 bp, synthetic construct
  misc_feature 1..25: note = Oligonucleotide
  source 1..25: mol_type = other DNA
ggaaatggactgagctaaagctggg

SEQ ID NO: 2911 - DNA, 25 bp, synthetic construct
  misc_feature 1..25: note = Oligonucleotide
  source 1..25: mol_type = other DNA
tggggaaatggactgagctaaagct

SEQ ID NO: 2912 - DNA, 25 bp, synthetic construct
  misc_feature 1..25: note = Oligonucleotide
  source 1..25: mol_type = other DNA
tgatggggaaatggactgagctaaa

SEQ ID NO: 2913 - DNA, 25 bp, synthetic construct
  misc_feature 1..25: note = Oligonucleotide
  source 1..25: mol_type = other DNA
tgatgatggggaaatggactgagct

SEQ ID NO: 2914 - DNA, 25 bp, synthetic construct
  misc_feature 1..25: note = Oligonucleotide
  source 1..25: mol_type = other DNA
ccctgatgatggggaaatggactga

SEQ ID NO: 2915 - DNA, 25 bp, synthetic construct
  misc_feature 1..25: note = Oligonucleotide
  source 1..25: mol_type = other DNA
ggcccctgatgatggggaaatggac

SEQ ID NO: 2916 - DNA, 25 bp, synthetic construct
  misc_feature 1..25: note = Oligonucleotide
  source 1..25: mol_type = other DNA
ctgggcccctgatgatggggaaatg

SEQ ID NO: 2917 - DNA, 25 bp, synthetic construct
  misc_feature 1..25: note = Oligonucleotide
  source 1..25: mol_type = other DNA
gctctgggcccctgatgatggggaa

SEQ ID NO: 2918 - DNA, 25 bp, synthetic construct
  misc_feature 1..25: note = Oligonucleotide
  source 1..25: mol_type = other DNA
caggctctgggcccctgatgatggg

SEQ ID NO: 2919 - DNA, 25 bp, synthetic construct
  misc_feature 1..25: note = Oligonucleotide
  source 1..25: mol_type = other DNA
gtacaggctctgggcccctgatgat

SEQ ID NO: 2920 - DNA, 25 bp, synthetic construct
  misc_feature 1..25: note = Oligonucleotide
  source 1..25: mol_type = other DNA
ccagtacaggctctgggcccctgat

SEQ ID NO: 2921 - DNA, 25 bp, synthetic construct
  misc_feature 1..25: note = Oligonucleotide
  source 1..25: mol_type = other DNA
cacccagtacaggctctgggcccct

SEQ ID NO: 2922 - DNA, 25 bp, synthetic construct
  misc_feature 1..25: note = Oligonucleotide
  source 1..25: mol_type = other DNA
ccacacccagtacaggctctgggcc

SEQ ID NO: 2923 - DNA, 25 bp, synthetic construct
  misc_feature 1..25: note = Oligonucleotide
  source 1..25: mol_type = other DNA
cagccacacccagtacaggctctgg

SEQ ID NO: 2924 - DNA, 25 bp, synthetic construct
  misc_feature 1..25: note = Oligonucleotide
  source 1..25: mol_type = other DNA
cttcagccacacccagtacaggctc

SEQ ID NO: 2925 - DNA, 25 bp, synthetic construct
  misc_feature 1..25: note = Oligonucleotide
  source 1..25: mol_type = other DNA
gcccttcagccacacccagtacagg

SEQ ID NO: 2926 - DNA, 25 bp, synthetic construct
  misc_feature 1..25: note = Oligonucleotide
  source 1..25: mol_type = other DNA
ccagcccttcagccacacccagtac

SEQ ID NO: 2927 - DNA, 25 bp, synthetic construct
  misc_feature 1..25: note = Oligonucleotide
  source 1..25: mol_type = other DNA
tgcccagcccttcagccacacccag

SEQ ID NO: 2928 - DNA, 25 bp, synthetic construct
  misc_feature 1..25: note = Oligonucleotide
  source 1..25: mol_type = other DNA
ctgtgcccagcccttcagccacacc

SEQ ID NO: 2929 - DNA, 25 bp, synthetic construct
  misc_feature 1..25: note = Oligonucleotide
  source 1..25: mol_type = other DNA
aatctgtgcccagcccttcagccac

SEQ ID NO: 2930 - DNA, 25 bp, synthetic construct
  misc_feature 1..25: note = Oligonucleotide
  source 1..25: mol_type = other DNA
aggaatctgtgcccagcccttcagc

SEQ ID NO: 2931 - DNA, 25 bp, synthetic construct
  misc_feature 1..25: note = Oligonucleotide
  source 1..25: mol_type = other DNA
gccaggaatctgtgcccagcccttc

SEQ ID NO: 2932 - DNA, 25 bp, synthetic construct
  misc_feature 1..25: note = Oligonucleotide
  source 1..25: mol_type = other DNA
ggggccaggaatctgtgcccagccc

SEQ ID NO: 2933 - DNA, 25 bp, synthetic construct
  misc_feature 1..25: note = Oligonucleotide
  source 1..25: mol_type = other DNA
catggggccaggaatctgtgcccag

SEQ ID NO: 2934 - DNA, 25 bp, synthetic construct
  misc_feature 1..25: note = Oligonucleotide
  source 1..25: mol_type = other DNA
aaccatggggccaggaatctgtgcc

SEQ ID NO: 2935 - DNA, 25 bp, synthetic construct
  misc_feature 1..25: note = Oligonucleotide
  source 1..25: mol_type = other DNA
cccaaccatggggccaggaatctgt

SEQ ID NO: 2936 - DNA, 25 bp, synthetic construct
  misc_feature 1..25: note = Oligonucleotide
  source 1..25: mol_type = other DNA
gaccccaaccatggggccaggaatc

SEQ ID NO: 2937 - DNA, 25 bp, synthetic construct
  misc_feature 1..25: note = Oligonucleotide
  source 1..25: mol_type = other DNA
cctgaccccaaccatggggccagga

SEQ ID NO: 2938 - DNA, 25 bp, synthetic construct
  misc_feature 1..25: note = Oligonucleotide
  source 1..25: mol_type = other DNA
ccacctgaccccaaccatggggcca

SEQ ID NO: 2939 - DNA, 25 bp, synthetic construct
  misc_feature 1..25: note = Oligonucleotide
  source 1..25: mol_type = other DNA
gtaccacctgaccccaaccatgggg

SEQ ID NO: 2940 - DNA, 25 bp, synthetic construct
  misc_feature 1..25: note = Oligonucleotide
  source 1..25: mol_type = other DNA
actgtaccacctgaccccaaccatg

SEQ ID NO: 2941 - DNA, 25 bp, synthetic construct
  misc_feature 1..25: note = Oligonucleotide
  source 1..25: mol_type = other DNA
atcactgtaccacctgaccccaacc

SEQ ID NO: 2942 - DNA, 25 bp, synthetic construct
  misc_feature 1..25: note = Oligonucleotide
  source 1..25: mol_type = other DNA
cacatcactgtaccacctgacccca

SEQ ID NO: 2943 - DNA, 25 bp, synthetic construct
  misc_feature 1..25: note = Oligonucleotide
  source 1..25: mol_type = other DNA
gaacacatcactgtaccacctgacc

SEQ ID NO: 2944 - DNA, 25 bp, synthetic construct
  misc_feature 1..25: note = Oligonucleotide
  source 1..25: mol_type = other DNA
ctggaacacatcactgtaccacctg

SEQ ID NO: 2945 - DNA, 25 bp, synthetic construct
  misc_feature 1..25: note = Oligonucleotide
  source 1..25: mol_type = other DNA
taactggaacacatcactgtaccac

SEQ ID NO: 2946 - DNA, 25 bp, synthetic construct
  misc_feature 1..25: note = Oligonucleotide
  source 1..25: mol_type = other DNA
atctaactggaacacatcactgtac

SEQ ID NO: 2947 - DNA, 25 bp, synthetic construct
  misc_feature 1..25: note = Oligonucleotide
  source 1..25: mol_type = other DNA
ctgatctaactggaacacatcactg

SEQ ID NO: 2948 - DNA, 25 bp, synthetic construct
  misc_feature 1..25: note = Oligonucleotide
  source 1..25: mol_type = other DNA
agtctgatctaactggaacacatca

SEQ ID NO: 2949 - DNA, 25 bp, synthetic construct
  misc_feature 1..25: note = Oligonucleotide
  source 1..25: mol_type = other DNA
aagagtctgatctaactggaacaca

SEQ ID NO: 2950 - DNA, 25 bp, synthetic construct
  misc_feature 1..25: note = Oligonucleotide
  source 1..25: mol_type = other DNA
ggcaagagtctgatctaactggaac

SEQ ID NO: 2951 - DNA, 25 bp, synthetic construct
  misc_feature 1..25: note = Oligonucleotide
  source 1..25: mol_type = other DNA
gtcggcaagagtctgatctaactgg

SEQ ID NO: 2952 - DNA, 25 bp, synthetic construct
  misc_feature 1..25: note = Oligonucleotide
  source 1..25: mol_type = other DNA
ggggtcggcaagagtctgatctaac

SEQ ID NO: 2953 - DNA, 25 bp, synthetic construct
  misc_feature 1..25: note = Oligonucleotide
  source 1..25: mol_type = other DNA
aggggggtcggcaagagtctgatct

SEQ ID NO: 2954 - DNA, 25 bp, synthetic construct
  misc_feature 1..25: note = Oligonucleotide
  source 1..25: mol_type = other DNA
gccaggggggtcggcaagagtctga

SEQ ID NO: 2955 - DNA, 25 bp, synthetic construct
  misc_feature 1..25: note = Oligonucleotide
  source 1..25: mol_type = other DNA
taagccaggggggtcggcaagagtc

SEQ ID NO: 2956 - DNA, 25 bp, synthetic construct
  misc_feature 1..25: note = Oligonucleotide
  source 1..25: mol_type = other DNA
ccctaagccaggggggtcggcaaga

SEQ ID NO: 2957 - DNA, 25 bp, synthetic construct
  misc_feature 1..25: note = Oligonucleotide
  source 1..25: mol_type = other DNA
agcccctaagccaggggggtcggca

SEQ ID NO: 2958 - DNA, 25 bp, synthetic construct
  misc_feature 1..25: note = Oligonucleotide
  source 1..25: mol_type = other DNA
tccagcccctaagccaggggggtcg

SEQ ID NO: 2959 - DNA, 25 bp, synthetic construct
  misc_feature 1..25: note = Oligonucleotide
  source 1..25: mol_type = other DNA
cactccagcccctaagccagggggg

SEQ ID NO: 2960 - DNA, 25 bp, synthetic construct
  misc_feature 1..25: note = Oligonucleotide
  source 1..25: mol_type = other DNA
ggacactccagcccctaagccaggg

SEQ ID NO: 2961 - DNA, 25 bp, synthetic construct
  misc_feature 1..25: note = Oligonucleotide
  source 1..25: mol_type = other DNA
acaggacactccagcccctaagcca

SEQ ID NO: 2962 - DNA, 25 bp, synthetic construct
  misc_feature 1..25: note = Oligonucleotide
  source 1..25: mol_type = other DNA
ctcacaggacactccagcccctaag

SEQ ID NO: 2963 - DNA, 25 bp, synthetic construct
  misc_feature 1..25: note = Oligonucleotide
  source 1..25: mol_type = other DNA
cttctcacaggacactccagcccct

SEQ ID NO: 2964 - DNA, 25 bp, synthetic construct
  misc_feature 1..25: note = Oligonucleotide
  source 1..25: mol_type = other DNA
cagcttctcacaggacactccagcc

SEQ ID NO: 2965 - DNA, 25 bp, synthetic construct
  misc_feature 1..25: note = Oligonucleotide
  source 1..25: mol_type = other DNA
acccagcttctcacaggacactcca

SEQ ID NO: 2966 - DNA, 25 bp, synthetic construct
  misc_feature 1..25: note = Oligonucleotide
  source 1..25: mol_type = other DNA
tccacccagcttctcacaggacact

SEQ ID NO: 2967 - DNA, 25 bp, synthetic construct
  misc_feature 1..25: note = Oligonucleotide
  source 1..25: mol_type = other DNA
ctctccacccagcttctcacaggac

SEQ ID NO: 2968 - DNA, 25 bp, synthetic construct
  misc_feature 1..25: note = Oligonucleotide
  source 1..25: mol_type = other DNA
tccctctccacccagcttctcacag

SEQ ID NO: 2969 - DNA, 25 bp, synthetic construct
  misc_feature 1..25: note = Oligonucleotide
  source 1..25: mol_type = other DNA
cactccctctccacccagcttctca

SEQ ID NO: 2970 - DNA, 25 bp, synthetic construct
  misc_feature 1..25: note = Oligonucleotide
  source 1..25: mol_type = other DNA
gtccactccctctccacccagcttc

SEQ ID NO: 2971 - DNA, 25 bp, synthetic construct
  misc_feature 1..25: note = Oligonucleotide
  source 1..25: mol_type = other DNA
cttgtccactccctctccacccagc

SEQ ID NO: 2972 - DNA, 25 bp, synthetic construct
  misc_feature 1..25: note = Oligonucleotide
  source 1..25: mol_type = other DNA
atgcttgtccactccctctccaccc

SEQ ID NO: 2973 - DNA, 25 bp, synthetic construct
  misc_feature 1..25: note = Oligonucleotide
  source 1..25: mol_type = other DNA
cagatgcttgtccactccctctcca

SEQ ID NO: 2974 - DNA, 25 bp, synthetic construct
  misc_feature 1..25: note = Oligonucleotide
  source 1..25: mol_type = other DNA
catcagatgcttgtccactccctct

SEQ ID NO: 2975 - DNA, 25 bp, synthetic construct
  misc_feature 1..25: note = Oligonucleotide
  source 1..25: mol_type = other DNA
tcacatcagatgcttgtccactccc

SEQ ID NO: 2976 - DNA, 25 bp, synthetic construct
  misc_feature 1..25: note = Oligonucleotide
  source 1..25: mol_type = other DNA
ccatcacatcagatgcttgtccact

SEQ ID NO: 2977 - DNA, 25 bp, synthetic construct
  misc_feature 1..25: note = Oligonucleotide
  source 1..25: mol_type = other DNA
cagccatcacatcagatgcttgtcc

SEQ ID NO: 2978 - DNA, 25 bp, synthetic construct
  misc_feature 1..25: note = Oligonucleotide
  source 1..25: mol_type = other DNA
cgacagccatcacatcagatgcttg

SEQ ID NO: 2979 - DNA, 25 bp, synthetic construct
  misc_feature 1..25: note = Oligonucleotide
  source 1..25: mol_type = other DNA
tcccgacagccatcacatcagatgc

SEQ ID NO: 2980 - DNA, 25 bp, synthetic construct
  misc_feature 1..25: note = Oligonucleotide
  source 1..25: mol_type = other DNA
ttgtcccgacagccatcacatcaga

SEQ ID NO: 2981 - DNA, 25 bp, synthetic construct
  misc_feature 1..25: note = Oligonucleotide
  source 1..25: mol_type = other DNA
gccttgtcccgacagccatcacatc

SEQ ID NO: 2982 - DNA, 25 bp, synthetic construct
  misc_feature 1..25: note = Oligonucleotide
  source 1..25: mol_type = other DNA
ggtgccttgtcccgacagccatcac

SEQ ID NO: 2983 - DNA, 25 bp, synthetic construct
  misc_feature 1..25: note = Oligonucleotide
  source 1..25: mol_type = other DNA
ctgggtgccttgtcccgacagccat

SEQ ID NO: 2984 - DNA, 25 bp, synthetic construct
  misc_feature 1..25: note = Oligonucleotide
  source 1..25: mol_type = other DNA
atgctgggtgccttgtcccgacagc

SEQ ID NO: 2985 - DNA, 25 bp, synthetic construct
  misc_feature 1..25: note = Oligonucleotide
  source 1..25: mol_type = other DNA
tcgatgctgggtgccttgtcccgac

SEQ ID NO: 2986 - DNA, 25 bp, synthetic construct
  misc_feature 1..25: note = Oligonucleotide
  source 1..25: mol_type = other DNA
cactcgatgctgggtgccttgtccc

SEQ ID NO: 2987 - DNA, 25 bp, synthetic construct
  misc_feature 1..25: note = Oligonucleotide
  source 1..25: mol_type = other DNA
gaccactcgatgctgggtgccttgt

SEQ ID NO: 2988 - DNA, 25 bp, synthetic construct
  misc_feature 1..25: note = Oligonucleotide
  source 1..25: mol_type = other DNA
gtcgaccactcgatgctgggtgcct

SEQ ID NO: 2989 - DNA, 25 bp, synthetic construct
  misc_feature 1..25: note = Oligonucleotide
  source 1..25: mol_type = other DNA
ctggtcgaccactcgatgctgggtg

SEQ ID NO: 2990 - DNA, 25 bp, synthetic construct
  misc_feature 1..25: note = Oligonucleotide
  source 1..25: mol_type = other DNA
gcactggtcgaccactcgatgctgg

SEQ ID NO: 2991 - DNA, 25 bp, synthetic construct
  misc_feature 1..25: note = Oligonucleotide
  source 1..25: mol_type = other DNA
ctagcactggtcgaccactcgatgc

SEQ ID NO: 2992 - DNA, 25 bp, synthetic construct
  misc_feature 1..25: note = Oligonucleotide
  source 1..25: mol_type = other DNA
tgcctagcactggtcgaccactcga

SEQ ID NO: 2993 - DNA, 25 bp, synthetic construct
  misc_feature 1..25: note = Oligonucleotide
  source 1..25: mol_type = other DNA
aaatgcctagcactggtcgaccact

SEQ ID NO: 2994 - DNA, 25 bp, synthetic construct
  misc_feature 1..25: note = Oligonucleotide
  source 1..25: mol_type = other DNA
cacaaatgcctagcactggtcgacc

SEQ ID NO: 2995 - DNA, 25 bp, synthetic construct
  misc_feature 1..25: note = Oligonucleotide
  source 1..25: mol_type = other DNA
aatcacaaatgcctagcactggtcg

SEQ ID NO: 2996 - DNA, 25 bp, synthetic construct
  misc_feature 1..25: note = Oligonucleotide
  source 1..25: mol_type = other DNA
tctaatcacaaatgcctagcactgg

SEQ ID NO: 2997 - DNA, 25 bp, synthetic construct
  misc_feature 1..25: note = Oligonucleotide
  source 1..25: mol_type = other DNA
aggtctaatcacaaatgcctagcac

SEQ ID NO: 2998 - DNA, 25 bp, synthetic construct
  misc_feature 1..25: note = Oligonucleotide
  source 1..25: mol_type = other DNA
gagaggtctaatcacaaatgcctag

SEQ ID NO: 2999 - DNA, 25 bp, synthetic construct
  misc_feature 1..25: note = Oligonucleotide
  source 1..25: mol_type = other DNA
aatgagaggtctaatcacaaatgcc

SEQ ID NO: 3000 - DNA, 25 bp, synthetic construct
  misc_feature 1..25: note = Oligonucleotide
  source 1..25: mol_type = other DNA
attaatgagaggtctaatcacaaat

SEQ ID NO: 3001 - DNA, 25 bp, synthetic construct
  misc_feature 1..25: note = Oligonucleotide
  source 1..25: mol_type = other DNA
aggattaatgagaggtctaatcaca

SEQ ID NO: 3002 - DNA, 25 bp, synthetic construct
  misc_feature 1..25: note = Oligonucleotide
  source 1..25: mol_type = other DNA
aagaggattaatgagaggtctaatc

SEQ ID NO: 3003 - DNA, 25 bp, synthetic construct
  misc_feature 1..25: note = Oligonucleotide
  source 1..25: mol_type = other DNA
tggaagaggattaatgagaggtcta

SEQ ID NO: 3004 - DNA, 25 bp, synthetic construct
  misc_feature 1..25: note = Oligonucleotide
  source 1..25: mol_type = other DNA
ctctggaagaggattaatgagaggt

SEQ ID NO: 3005 - DNA, 25 bp, synthetic construct
  misc_feature 1..25: note = Oligonucleotide
  source 1..25: mol_type = other DNA
tccctctggaagaggattaatgaga

SEQ ID NO: 3006 - DNA, 25 bp, synthetic construct
  misc_feature 1..25: note = Oligonucleotide
  source 1..25: mol_type = other DNA
tagtccctctggaagaggattaatg

SEQ ID NO: 3007 - DNA, 25 bp, synthetic construct
  misc_feature 1..25: note = Oligonucleotide
  source 1..25: mol_type = other DNA
taatagtccctctggaagaggatta

SEQ ID NO: 3008 - DNA, 25 bp, synthetic construct
  misc_feature 1..25: note = Oligonucleotide
  source 1..25: mol_type = other DNA
ttataatagtccctctggaagagga

SEQ ID NO: 3009 - DNA, 25 bp, synthetic construct
  misc_feature 1..25: note = Oligonucleotide
  source 1..25: mol_type = other DNA
gggttataatagtccctctggaaga

SEQ ID NO: 3010 - DNA, 25 bp, synthetic construct
  misc_feature 1..25: note = Oligonucleotide
  source 1..25: mol_type = other DNA
acagggttataatagtccctctgga

SEQ ID NO: 3011 - DNA, 25 bp, synthetic construct
  misc_feature 1..25: note = Oligonucleotide
  source 1..25: mol_type = other DNA
gaaacagggttataatagtccctct

SEQ ID NO: 3012 - DNA, 25 bp, synthetic construct
  misc_feature 1..25: note = Oligonucleotide
  source 1..25: mol_type = other DNA
tgtgaaacagggttataatagtccc

SEQ ID NO: 3013 - DNA, 25 bp, synthetic construct
  misc_feature 1..25: note = Oligonucleotide
  source 1..25: mol_type = other DNA
atctgtgaaacagggttataatagt

SEQ ID NO: 3014 - DNA, 25 bp, synthetic construct
  misc_feature 1..25: note = Oligonucleotide
  source 1..25: mol_type = other DNA
cccatctgtgaaacagggttataat

SEQ ID NO: 3015 - DNA, 25 bp, synthetic construct
  misc_feature 1..25: note = Oligonucleotide
  source 1..25: mol_type = other DNA
gtccccatctgtgaaacagggttat

SEQ ID NO: 3016 - DNA, 25 bp, synthetic construct
  misc_feature 1..25: note = Oligonucleotide
  source 1..25: mol_type = other DNA
tgtgtccccatctgtgaaacagggt

SEQ ID NO: 3017 - DNA, 25 bp, synthetic construct
  misc_feature 1..25: note = Oligonucleotide
  source 1..25: mol_type = other DNA
ctctgtgtccccatctgtgaaacag

SEQ ID NO: 3018 - DNA, 25 bp, synthetic construct
  misc_feature 1..25: note = Oligonucleotide
  source 1..25: mol_type = other DNA
gtactctgtgtccccatctgtgaaa

SEQ ID NO: 3019 - DNA, 25 bp, synthetic construct
  misc_feature 1..25: note = Oligonucleotide
  source 1..25: mol_type = other DNA
cgggtactctgtgtccccatctgtg

SEQ ID NO: 3020 - DNA, 25 bp, synthetic construct
  misc_feature 1..25: note = Oligonucleotide
  source 1..25: mol_type = other DNA
agtcgggtactctgtgtccccatct

SEQ ID NO: 3021 - DNA, 25 bp, synthetic construct
  misc_feature 1..25: note = Oligonucleotide
  source 1..25: mol_type = other DNA
cacagtcgggtactctgtgtcccca

SEQ ID NO: 3022 - DNA, 25 bp, synthetic construct
  misc_feature 1..25: note = Oligonucleotide
  source 1..25: mol_type = other DNA
ctacacagtcgggtactctgtgtcc

SEQ ID NO: 3023 - DNA, 25 bp, synthetic construct
  misc_feature 1..25: note = Oligonucleotide
  source 1..25: mol_type = other DNA
tgtctacacagtcgggtactctgtg

SEQ ID NO: 3024 - DNA, 25 bp, synthetic construct
  misc_feature 1..25: note = Oligonucleotide
  source 1..25: mol_type = other DNA
cactgtctacacagtcgggtactct

SEQ ID NO: 3025 - DNA, 25 bp, synthetic construct
  misc_feature 1..25: note = Oligonucleotide
  source 1..25: mol_type = other DNA
cttcactgtctacacagtcgggtac

SEQ ID NO: 3026 - DNA, 25 bp, synthetic construct
  misc_feature 1..25: note = Oligonucleotide
  source 1..25: mol_type = other DNA
cagcttcactgtctacacagtcggg

SEQ ID NO: 3027 - DNA, 25 bp, synthetic construct
  misc_feature 1..25: note = Oligonucleotide
  source 1..25: mol_type = other DNA
ccccagcttcactgtctacacagtc

SEQ ID NO: 3028 - DNA, 25 bp, synthetic construct
  misc_feature 1..25: note = Oligonucleotide
  source 1..25: mol_type = other DNA
cagccccagcttcactgtctacaca

SEQ ID NO: 3029 - DNA, 25 bp, synthetic construct
  misc_feature 1..25: note = Oligonucleotide
  source 1..25: mol_type = other DNA
gttcagccccagcttcactgtctac

SEQ ID NO: 3030 - DNA, 25 bp, synthetic construct
  misc_feature 1..25: note = Oligonucleotide
  source 1..25: mol_type = other DNA
tgggttcagccccagcttcactgtc

SEQ ID NO: 3031 - DNA, 25 bp, synthetic construct
  misc_feature 1..25: note = Oligonucleotide
  source 1..25: mol_type = other DNA
atctgggttcagccccagcttcact

SEQ ID NO: 3032 - DNA, 25 bp, synthetic construct
  misc_feature 1..25: note = Oligonucleotide
  source 1..25: mol_type = other DNA
cagatctgggttcagccccagcttc

SEQ ID NO: 3033 - DNA, 25 bp, synthetic construct
  misc_feature 1..25: note = Oligonucleotide
  source 1..25: mol_type = other DNA
agacagatctgggttcagccccagc

SEQ ID NO: 3034 - DNA, 25 bp, synthetic construct
  misc_feature 1..25: note = Oligonucleotide
  source 1..25: mol_type = other DNA
atcagacagatctgggttcagcccc

SEQ ID NO: 3035 - DNA, 25 bp, synthetic construct
  misc_feature 1..25: note = Oligonucleotide
  source 1..25: mol_type = other DNA
ggaatcagacagatctgggttcagc

SEQ ID NO: 3036 - DNA, 25 bp, synthetic construct
  misc_feature 1..25: note = Oligonucleotide
  source 1..25: mol_type = other DNA
cctggaatcagacagatctgggttc

SEQ ID NO: 3037 - DNA, 25 bp, synthetic construct
  misc_feature 1..25: note = Oligonucleotide
  source 1..25: mol_type = other DNA
gggcctggaatcagacagatctggg

SEQ ID NO: 3038 - DNA, 25 bp, synthetic construct
  misc_feature 1..25: note = Oligonucleotide
  source 1..25: mol_type = other DNA
acagggcctggaatcagacagatct

SEQ ID NO: 3039 - DNA, 25 bp, synthetic construct
  misc_feature 1..25: note = Oligonucleotide
  source 1..25: mol_type = other DNA
ggcacagggcctggaatcagacaga

SEQ ID NO: 3040 - DNA, 25 bp, synthetic construct
  misc_feature 1..25: note = Oligonucleotide
  source 1..25: mol_type = other DNA
ctgggcacagggcctggaatcagac

SEQ ID NO: 3041 - DNA, 25 bp, synthetic construct
  misc_feature 1..25: note = Oligonucleotide
  source 1..25: mol_type = other DNA
tgcctgggcacagggcctggaatca

SEQ ID NO: 3042 - DNA, 25 bp, synthetic construct
  misc_feature 1..25: note = Oligonucleotide
  source 1..25: mol_type = other DNA
gcatgcctgggcacagggcctggaa

SEQ ID NO: 3043 - DNA, 25 bp, synthetic construct
  misc_feature 1..25: note = Oligonucleotide
  source 1..25: mol_type = other DNA
aaggcatgcctgggcacagggcctg

SEQ ID NO: 3044 - DNA, 25 bp, synthetic construct
  misc_feature 1..25: note = Oligonucleotide
  source 1..25: mol_type = other DNA
tcaaaggcatgcctgggcacagggc

SEQ ID NO: 3045 - DNA, 25 bp, synthetic construct
  misc_feature 1..25: note = Oligonucleotide
  source 1..25: mol_type = other DNA
acctcaaaggcatgcctgggcacag

SEQ ID NO: 3046 - DNA, 25 bp, synthetic construct
  misc_feature 1..25: note = Oligonucleotide
  source 1..25: mol_type = other DNA
gacacctcaaaggcatgcctgggca

SEQ ID NO: 3047 - DNA, 25 bp, synthetic construct
  misc_feature 1..25: note = Oligonucleotide
  source 1..25: mol_type = other DNA
gtagacacctcaaaggcatgcctgg

SEQ ID NO: 3048 - DNA, 25 bp, synthetic construct
  misc_feature 1..25: note = Oligonucleotide
  source 1..25: mol_type = other DNA
gcagtagacacctcaaaggcatgcc

SEQ ID NO: 3049 - DNA, 25 bp, synthetic construct
  misc_feature 1..25: note = Oligonucleotide
  source 1..25: mol_type = other DNA
ccagcagtagacacctcaaaggcat

SEQ ID NO: 3050 - DNA, 25 bp, synthetic construct
  misc_feature 1..25: note = Oligonucleotide
  source 1..25: mol_type = other DNA
cacccagcagtagacacctcaaagg

SEQ ID NO: 3051 - DNA, 25 bp, synthetic construct
  misc_feature 1..25: note = Oligonucleotide
  source 1..25: mol_type = other DNA
tggcacccagcagtagacacctcaa

SEQ ID NO: 3052 - DNA, 25 bp, synthetic construct
  misc_feature 1..25: note = Oligonucleotide
  source 1..25: mol_type = other DNA
gggtggcacccagcagtagacacct

SEQ ID NO: 3053 - DNA, 25 bp, synthetic construct
  misc_feature 1..25: note = Oligonucleotide
  source 1..25: mol_type = other DNA
tgggggtggcacccagcagtagaca

SEQ ID NO: 3054 - DNA, 25 bp, synthetic construct
  misc_feature 1..25: note = Oligonucleotide
  source 1..25: mol_type = other DNA
agttgggggtggcacccagcagtag

SEQ ID NO: 3055 - DNA, 25 bp, synthetic construct
  misc_feature 1..25: note = Oligonucleotide
  source 1..25: mol_type = other DNA
cccagttgggggtggcacccagcag

SEQ ID NO: 3056 - DNA, 25 bp, synthetic construct
  misc_feature 1..25: note = Oligonucleotide
  source 1..25: mol_type = other DNA
aggcccagttgggggtggcacccag

SEQ ID NO: 3057 - DNA, 25 bp, synthetic construct
  misc_feature 1..25: note = Oligonucleotide
  source 1..25: mol_type = other DNA
gtcaggcccagttgggggtggcacc

SEQ ID NO: 3058 - DNA, 25 bp, synthetic construct
  misc_feature 1..25: note = Oligonucleotide
  source 1..25: mol_type = other DNA
ggggtcaggcccagttgggggtggc

SEQ ID NO: 3059 - DNA, 25 bp, synthetic construct
  misc_feature 1..25: note = Oligonucleotide
  source 1..25: mol_type = other DNA
tttggggtcaggcccagttgggggt

SEQ ID NO: 3060 - DNA, 25 bp, synthetic construct
  misc_feature 1..25: note = Oligonucleotide
  source 1..25: mol_type = other DNA
gcatttggggtcaggcccagttggg

SEQ ID NO: 3061 - DNA, 25 bp, synthetic construct
  misc_feature 1..25: note = Oligonucleotide
  source 1..25: mol_type = other DNA
agagcatttggggtcaggcccagtt

SEQ ID NO: 3062 - DNA, 25 bp, synthetic construct
  misc_feature 1..25: note = Oligonucleotide
  source 1..25: mol_type = other DNA
tcaagagcatttggggtcaggccca

SEQ ID NO: 3063 - DNA, 25 bp, synthetic construct
  misc_feature 1..25: note = Oligonucleotide
  source 1..25: mol_type = other DNA
ccctcaagagcatttggggtcaggc

SEQ ID NO: 3064 - DNA, 25 bp, synthetic construct
  misc_feature 1..25: note = Oligonucleotide
  source 1..25: mol_type = other DNA
cccccctcaagagcatttggggtca

SEQ ID NO: 3065 - DNA, 25 bp, synthetic construct
  misc_feature 1..25: note = Oligonucleotide
  source 1..25: mol_type = other DNA
gtgcccccctcaagagcatttgggg

SEQ ID NO: 3066 - DNA, 25 bp, synthetic construct
  misc_feature 1..25: note = Oligonucleotide
  source 1..25: mol_type = other DNA
aaggtgcccccctcaagagcatttg

SEQ ID NO: 3067 - DNA, 25 bp, synthetic construct
  misc_feature 1..25: note = Oligonucleotide
  source 1..25: mol_type = other DNA
agtaaggtgcccccctcaagagcat

SEQ ID NO: 3068 - DNA, 25 bp, synthetic construct
  misc_feature 1..25: note = Oligonucleotide
  source 1..25: mol_type = other DNA
aatagtaaggtgcccccctcaagag

SEQ ID NO: 3069 - DNA, 25 bp, synthetic construct
  misc_feature 1..25: note = Oligonucleotide
  source 1..25: mol_type = other DNA
ggaaatagtaaggtgcccccctcaa

SEQ ID NO: 3070 - DNA, 25 bp, synthetic construct
  misc_feature 1..25: note = Oligonucleotide
  source 1..25: mol_type = other DNA
gcgggaaatagtaaggtgcccccct

SEQ ID NO: 3071 - DNA, 25 bp, synthetic construct
  misc_feature 1..25: note = Oligonucleotide
  source 1..25: mol_type = other DNA
tcagcgggaaatagtaaggtgcccc

SEQ ID NO: 3072 - DNA, 25 bp, synthetic construct
  misc_feature 1..25: note = Oligonucleotide
  source 1..25: mol_type = other DNA
cattcagcgggaaatagtaaggtgc

SEQ ID NO: 3073 - DNA, 25 bp, synthetic construct
  misc_feature 1..25: note = Oligonucleotide
  source 1..25: mol_type = other DNA
tgacattcagcgggaaatagtaagg

SEQ ID NO: 3074 - DNA, 25 bp, synthetic construct
  misc_feature 1..25: note = Oligonucleotide
  source 1..25: mol_type = other DNA
ctctgacattcagcgggaaatagta

SEQ ID NO: 3075 - DNA, 25 bp, synthetic construct
  misc_feature 1..25: note = Oligonucleotide
  source 1..25: mol_type = other DNA
cccctctgacattcagcgggaaata

SEQ ID NO: 3076 - DNA, 25 bp, synthetic construct
  misc_feature 1..25: note = Oligonucleotide
  source 1..25: mol_type = other DNA
ctgcccctctgacattcagcgggaa

SEQ ID NO: 3077 - DNA, 25 bp, synthetic construct
  misc_feature 1..25: note = Oligonucleotide
  source 1..25: mol_type = other DNA
accctgcccctctgacattcagcgg

SEQ ID NO: 3078 - DNA, 25 bp, synthetic construct
  misc_feature 1..25: note = Oligonucleotide
  source 1..25: mol_type = other DNA
cccaccctgcccctctgacattcag

SEQ ID NO: 3079 - DNA, 25 bp, synthetic construct
  misc_feature 1..25: note = Oligonucleotide
  source 1..25: mol_type = other DNA
gcacccaccctgcccctctgacatt

SEQ ID NO: 3080 - DNA, 25 bp, synthetic construct
  misc_feature 1..25: note = Oligonucleotide
  source 1..25: mol_type = other DNA
gtggcacccaccctgcccctctgac

SEQ ID NO: 3081 - DNA, 25 bp, synthetic construct
  misc_feature 1..25: note = Oligonucleotide
  source 1..25: mol_type = other DNA
gctgtggcacccaccctgcccctct

SEQ ID NO: 3082 - DNA, 25 bp, synthetic construct
  misc_feature 1..25: note = Oligonucleotide
  source 1..25: mol_type = other DNA
ggggctgtggcacccaccctgcccc

SEQ ID NO: 3083 - DNA, 25 bp, synthetic construct
  misc_feature 1..25: note = Oligonucleotide
  source 1..25: mol_type = other DNA
ggaggggctgtggcacccaccctgc

SEQ ID NO: 3084 - DNA, 25 bp, synthetic construct
  misc_feature 1..25: note = Oligonucleotide
  source 1..25: mol_type = other DNA
tggggaggggctgtggcacccaccc

SEQ ID NO: 3085 - DNA, 25 bp, synthetic construct
  misc_feature 1..25: note = Oligonucleotide
  source 1..25: mol_type = other DNA
ccctggggaggggctgtggcaccca

SEQ ID NO: 3086 - DNA, 25 bp, synthetic construct
  misc_feature 1..25: note = Oligonucleotide
  source 1..25: mol_type = other DNA
agcccctggggaggggctgtggcac

SEQ ID NO: 3087 - DNA, 25 bp, synthetic construct
  misc_feature 1..25: note = Oligonucleotide
  source 1..25: mol_type = other DNA
ggaagcccctggggaggggctgtgg

SEQ ID NO: 3088 - DNA, 25 bp, synthetic construct
  misc_feature 1..25: note = Oligonucleotide
  source 1..25: mol_type = other DNA
ggtggaagcccctggggaggggctg

SEQ ID NO: 3089 - DNA, 25 bp, synthetic construct
  misc_feature 1..25: note = Oligonucleotide
  source 1..25: mol_type = other DNA
gcgggtggaagcccctggggagggg

SEQ ID NO: 3090 - DNA, 25 bp, synthetic construct
  misc_feature 1..25: note = Oligonucleotide
  source 1..25: mol_type = other DNA
gctgcgggtggaagcccctggggag

SEQ ID NO: 3091 - DNA, 25 bp, synthetic construct
  misc_feature 1..25: note = Oligonucleotide
  source 1..25: mol_type = other DNA
tgagctgcgggtggaagcccctggg

SEQ ID NO: 3092 - DNA, 25 bp, synthetic construct
  misc_feature 1..25: note = Oligonucleotide
  source 1..25: mol_type = other DNA
ctgtgagctgcgggtggaagcccct

SEQ ID NO: 3093 - DNA, 25 bp, synthetic construct
  misc_feature 1..25: note = Oligonucleotide
  source 1..25: mol_type = other DNA
ggactgtgagctgcgggtggaagcc

SEQ ID NO: 3094 - DNA, 25 bp, synthetic construct
  misc_feature 1..25: note = Oligonucleotide
  source 1..25: mol_type = other DNA
gctggactgtgagctgcgggtggaa

SEQ ID NO: 3095 - DNA, 25 bp, synthetic construct
  misc_feature 1..25: note = Oligonucleotide
  source 1..25: mol_type = other DNA
cctgctggactgtgagctgcgggtg

SEQ ID NO: 3096 - DNA, 25 bp, synthetic construct
  misc_feature 1..25: note = Oligonucleotide
  source 1..25: mol_type = other DNA
gtgcctgctggactgtgagctgcgg

SEQ ID NO: 3097 - DNA, 25 bp, synthetic construct
  misc_feature 1..25: note = Oligonucleotide
  source 1..25: mol_type = other DNA
caagtgcctgctggactgtgagctg

SEQ ID NO: 3098 - DNA, 25 bp, synthetic construct
  misc_feature 1..25: note = Oligonucleotide
  source 1..25: mol_type = other DNA
aaacaagtgcctgctggactgtgag

SEQ ID NO: 3099 - DNA, 25 bp, synthetic construct
  misc_feature 1..25: note = Oligonucleotide
  source 1..25: mol_type = other DNA
agcaaacaagtgcctgctggactgt

SEQ ID NO: 3100 - DNA, 25 bp, synthetic construct
  misc_feature 1..25: note = Oligonucleotide
  source 1..25: mol_type = other DNA
tccagcaaacaagtgcctgctggac

SEQ ID NO: 3101 - DNA, 25 bp, synthetic construct
  misc_feature 1..25: note = Oligonucleotide
  source 1..25: mol_type = other DNA
gtatccagcaaacaagtgcctgctg

SEQ ID NO: 3102 - DNA, 25 bp, synthetic construct
  misc_feature 1..25: note = Oligonucleotide
  source 1..25: mol_type = other DNA
aaagtatccagcaaacaagtgcctg

SEQ ID NO: 3103 - DNA, 25 bp, synthetic construct
  misc_feature 1..25: note = Oligonucleotide
  source 1..25: mol_type = other DNA
cataaagtatccagcaaacaagtgc

SEQ ID NO: 3104 - DNA, 25 bp, synthetic construct
  misc_feature 1..25: note = Oligonucleotide
  source 1..25: mol_type = other DNA
gcccataaagtatccagcaaacaag

SEQ ID NO: 3105 - DNA, 25 bp, synthetic construct
  misc_feature 1..25: note = Oligonucleotide
  source 1..25: mol_type = other DNA
accgcccataaagtatccagcaaac

SEQ ID NO: 3106 - DNA, 25 bp, synthetic construct
  misc_feature 1..25: note = Oligonucleotide
  source 1..25: mol_type = other DNA
gagaccgcccataaagtatccagca

SEQ ID NO: 3107 - DNA, 25 bp, synthetic construct
  misc_feature 1..25: note = Oligonucleotide
  source 1..25: mol_type = other DNA
ctcgagaccgcccataaagtatcca

SEQ ID NO: 3108 - DNA, 25 bp, synthetic construct
  misc_feature 1..25: note = Oligonucleotide
  source 1..25: mol_type = other DNA
gagctcgagaccgcccataaagtat

SEQ ID NO: 3109 - DNA, 25 bp, synthetic construct
  misc_feature 1..25: note = Oligonucleotide
  source 1..25: mol_type = other DNA
cctgagctcgagaccgcccataaag

SEQ ID NO: 3110 - DNA, 25 bp, synthetic construct
  misc_feature 1..25: note = Oligonucleotide
  source 1..25: mol_type = other DNA
tctcctgagctcgagaccgcccata

SEQ ID NO: 3111 - DNA, 25 bp, synthetic construct
  misc_feature 1..25: note = Oligonucleotide
  source 1..25: mol_type = other DNA
ccctctcctgagctcgagaccgccc

SEQ ID NO: 3112 - DNA, 25 bp, synthetic construct
  misc_feature 1..25: note = Oligonucleotide
  source 1..25: mol_type = other DNA
gacccctctcctgagctcgagaccg

SEQ ID NO: 3113 - DNA, 25 bp, synthetic construct
  misc_feature 1..25: note = Oligonucleotide
  source 1..25: mol_type = other DNA
tctgacccctctcctgagctcgaga

SEQ ID NO: 3114 - DNA, 25 bp, synthetic construct
  misc_feature 1..25: note = Oligonucleotide
  source 1..25: mol_type = other DNA
cattctgacccctctcctgagctcg

SEQ ID NO: 3115 - DNA, 25 bp, synthetic construct
  misc_feature 1..25: note = Oligonucleotide
  source 1..25: mol_type = other DNA
ctccattctgacccctctcctgagc

SEQ ID NO: 3116 - DNA, 25 bp, synthetic construct
  misc_feature 1..25: note = Oligonucleotide
  source 1..25: mol_type = other DNA
accctccattctgacccctctcctg

SEQ ID NO: 3117 - DNA, 25 bp, synthetic construct
  misc_feature 1..25: note = Oligonucleotide
  source 1..25: mol_type = other DNA
gagaccctccattctgacccctctc

SEQ ID NO: 3118 - DNA, 25 bp, synthetic construct
  misc_feature 1..25: note = Oligonucleotide
  source 1..25: mol_type = other DNA
ccagagaccctccattctgacccct

SEQ ID NO: 3119 - DNA, 25 bp, synthetic construct
  misc_feature 1..25: note = Oligonucleotide
  source 1..25: mol_type = other DNA
gctccagagaccctccattctgacc

SEQ ID NO: 3120 - DNA, 25 bp, synthetic construct
  misc_feature 1..25: note = Oligonucleotide
  source 1..25: mol_type = other DNA
tgggctccagagaccctccattctg

SEQ ID NO: 3121 - DNA, 25 bp, synthetic construct
  misc_feature 1..25: note = Oligonucleotide
  source 1..25: mol_type = other DNA
tcctgggctccagagaccctccatt

SEQ ID NO: 3122 - DNA, 25 bp, synthetic construct
  misc_feature 1..25: note = Oligonucleotide
  source 1..25: mol_type = other DNA
ctctcctgggctccagagaccctcc

SEQ ID NO: 3123 - DNA, 25 bp, synthetic construct
  misc_feature 1..25: note = Oligonucleotide
  source 1..25: mol_type = other DNA
ttcctctcctgggctccagagaccc

SEQ ID NO: 3124 - DNA, 25 bp, synthetic construct
  misc_feature 1..25: note = Oligonucleotide
  source 1..25: mol_type = other DNA
tgattcctctcctgggctccagaga

SEQ ID NO: 3125 - DNA, 25 bp, synthetic construct
  misc_feature 1..25: note = Oligonucleotide
  source 1..25: mol_type = other DNA
ttctgattcctctcctgggctccag

SEQ ID NO: 3126 - DNA, 25 bp, synthetic construct
  misc_feature 1..25: note = Oligonucleotide
  source 1..25: mol_type = other DNA
cagttctgattcctctcctgggctc

SEQ ID NO: 3127 - DNA, 25 bp, synthetic construct
  misc_feature 1..25: note = Oligonucleotide
  source 1..25: mol_type = other DNA
tgacagttctgattcctctcctggg

SEQ ID NO: 3128 - DNA, 25 bp, synthetic construct
  misc_feature 1..25: note = Oligonucleotide
  source 1..25: mol_type = other DNA
ggctgacagttctgattcctctcct

SEQ ID NO: 3129 - DNA, 25 bp, synthetic construct
  misc_feature 1..25: note = Oligonucleotide
  source 1..25: mol_type = other DNA
cagggctgacagttctgattcctct

SEQ ID NO: 3130 - DNA, 25 bp, synthetic construct
  misc_feature 1..25: note = Oligonucleotide
  source 1..25: mol_type = other DNA
acacagggctgacagttctgattcc

SEQ ID NO: 3131 - DNA, 25 bp, synthetic construct
  misc_feature 1..25: note = Oligonucleotide
  source 1..25: mol_type = other DNA
aggacacagggctgacagttctgat

SEQ ID NO: 3132 - DNA, 25 bp, synthetic construct
  misc_feature 1..25: note = Oligonucleotide
  source 1..25: mol_type = other DNA
attaggacacagggctgacagttct

SEQ ID NO: 3133 - DNA, 25 bp, synthetic construct
  misc_feature 1..25: note = Oligonucleotide
  source 1..25: mol_type = other DNA
accattaggacacagggctgacagt

SEQ ID NO: 3134 - DNA, 25 bp, synthetic construct
  misc_feature 1..25: note = Oligonucleotide
  source 1..25: mol_type = other DNA
gggaccattaggacacagggctgac

SEQ ID NO: 3135 - DNA, 25 bp, synthetic construct
  misc_feature 1..25: note = Oligonucleotide
  source 1..25: mol_type = other DNA
gatgggaccattaggacacagggct

SEQ ID NO: 3136 - DNA, 25 bp, synthetic construct
  misc_feature 1..25: note = Oligonucleotide
  source 1..25: mol_type = other DNA
actgatgggaccattaggacacagg

SEQ ID NO: 3137 - DNA, 25 bp, synthetic construct
  misc_feature 1..25: note = Oligonucleotide
  source 1..25: mol_type = other DNA
gtcactgatgggaccattaggacac

SEQ ID NO: 3138 - DNA, 25 bp, synthetic construct
  misc_feature 1..25: note = Oligonucleotide
  source 1..25: mol_type = other DNA
aaagtcactgatgggaccattagga

SEQ ID NO: 3139 - DNA, 25 bp, synthetic construct
  misc_feature 1..25: note = Oligonucleotide
  source 1..25: mol_type = other DNA
tccaaagtcactgatgggaccatta

SEQ ID NO: 3140 - DNA, 25 bp, synthetic construct
  misc_feature 1..25: note = Oligonucleotide
  source 1..25: mol_type = other DNA
ggctccaaagtcactgatgggacca

SEQ ID NO: 3141 - DNA, 25 bp, synthetic construct
  misc_feature 1..25: note = Oligonucleotide
  source 1..25: mol_type = other DNA
tgaggctccaaagtcactgatggga

SEQ ID NO: 3142 - DNA, 25 bp, synthetic construct
  misc_feature 1..25: note = Oligonucleotide
  source 1..25: mol_type = other DNA
gcctgaggctccaaagtcactgatg

SEQ ID NO: 3143 - DNA, 25 bp, synthetic construct
  misc_feature 1..25: note = Oligonucleotide
  source 1..25: mol_type = other DNA
gaagcctgaggctccaaagtcactg

SEQ ID NO: 3144 - DNA, 25 bp, synthetic construct
  misc_feature 1..25: note = Oligonucleotide
  source 1..25: mol_type = other DNA
acagaagcctgaggctccaaagtca

SEQ ID NO: 3145 - DNA, 25 bp, synthetic construct
  misc_feature 1..25: note = Oligonucleotide
  source 1..25: mol_type = other DNA
ggcacagaagcctgaggctccaaag

SEQ ID NO: 3146 - DNA, 25 bp, synthetic construct
  misc_feature 1..25: note = Oligonucleotide
  source 1..25: mol_type = other DNA
cctggcacagaagcctgaggctcca

SEQ ID NO: 3147 - DNA, 25 bp, synthetic construct
  misc_feature 1..25: note = Oligonucleotide
  source 1..25: mol_type = other DNA
aagcctggcacagaagcctgaggct

SEQ ID NO: 3148 - DNA, 25 bp, synthetic construct
  misc_feature 1..25: note = Oligonucleotide
  source 1..25: mol_type = other DNA
gaaaagcctggcacagaagcctgag

SEQ ID NO: 3149 - DNA, 25 bp, synthetic construct
  misc_feature 1..25: note = Oligonucleotide
  source 1..25: mol_type = other DNA
gcagaaaagcctggcacagaagcct

SEQ ID NO: 3150 - DNA, 25 bp, synthetic construct
  misc_feature 1..25: note = Oligonucleotide
  source 1..25: mol_type = other DNA
gcagcagaaaagcctggcacagaag

SEQ ID NO: 3151 - DNA, 25 bp, synthetic construct
  misc_feature 1..25: note = Oligonucleotide
  source 1..25: mol_type = other DNA
ggggcagcagaaaagcctggcacag

SEQ ID NO: 3152 - DNA, 25 bp, synthetic construct
  misc_feature 1..25: note = Oligonucleotide
  source 1..25: mol_type = other DNA
cctggggcagcagaaaagcctggca

SEQ ID NO: 3153 - DNA, 25 bp, synthetic construct
  misc_feature 1..25: note = Oligonucleotide
  source 1..25: mol_type = other DNA
tgccctggggcagcagaaaagcctg

SEQ ID NO: 3154 - DNA, 25 bp, synthetic construct
  misc_feature 1..25: note = Oligonucleotide
  source 1..25: mol_type = other DNA
gcctgccctggggcagcagaaaagc

SEQ ID NO: 3155 - DNA, 25 bp, synthetic construct
  misc_feature 1..25: note = Oligonucleotide
  source 1..25: mol_type = other DNA
accgcctgccctggggcagcagaaa

SEQ ID NO: 3156 - DNA, 25 bp, synthetic construct
  misc_feature 1..25: note = Oligonucleotide
  source 1..25: mol_type = other DNA
accaccgcctgccctggggcagcag

SEQ ID NO: 3157 - DNA, 25 bp, synthetic construct
  misc_feature 1..25: note = Oligonucleotide
  source 1..25: mol_type = other DNA
ttgaccaccgcctgccctggggcag

SEQ ID NO: 3158 - DNA, 25 bp, synthetic construct
  misc_feature 1..25: note = Oligonucleotide
  source 1..25: mol_type = other DNA
ccgttgaccaccgcctgccctgggg

SEQ ID NO: 3159 - DNA, 25 bp, synthetic construct
  misc_feature 1..25: note = Oligonucleotide
  source 1..25: mol_type = other DNA
aggccgttgaccaccgcctgccctg

SEQ ID NO: 3160 - DNA, 25 bp, synthetic construct
  misc_feature 1..25: note = Oligonucleotide
  source 1..25: mol_type = other DNA
ccaaggccgttgaccaccgcctgcc

SEQ ID NO: 3161 - DNA, 25 bp, synthetic construct
  misc_feature 1..25: note = Oligonucleotide
  source 1..25: mol_type = other DNA
gtgccaaggccgttgaccaccgcct

SEQ ID NO: 3162 - DNA, 25 bp, synthetic construct
  misc_feature 1..25: note = Oligonucleotide
  source 1..25: mol_type = other DNA
atagtgccaaggccgttgaccaccg

SEQ ID NO: 3163 - DNA, 25 bp, synthetic construct
  misc_feature 1..25: note = Oligonucleotide
  source 1..25: mol_type = other DNA
gccatagtgccaaggccgttgacca

SEQ ID NO: 3164 - DNA, 25 bp, synthetic construct
  misc_feature 1..25: note = Oligonucleotide
  source 1..25: mol_type = other DNA
ccagccatagtgccaaggccgttga

SEQ ID NO: 3165 - DNA, 25 bp, synthetic construct
  misc_feature 1..25: note = Oligonucleotide
  source 1..25: mol_type = other DNA
tgcccagccatagtgccaaggccgt

SEQ ID NO: 3166 - DNA, 25 bp, synthetic construct
  misc_feature 1..25: note = Oligonucleotide
  source 1..25: mol_type = other DNA
ctctgcccagccatagtgccaaggc

SEQ ID NO: 3167 - DNA, 25 bp, synthetic construct
  misc_feature 1..25: note = Oligonucleotide
  source 1..25: mol_type = other DNA
ggactctgcccagccatagtgccaa

SEQ ID NO: 3168 - DNA, 25 bp, synthetic construct
  misc_feature 1..25: note = Oligonucleotide
  source 1..25: mol_type = other DNA
agtggactctgcccagccatagtgc

SEQ ID NO: 3169 - DNA, 25 bp, synthetic construct
  misc_feature 1..25: note = Oligonucleotide
  source 1..25: mol_type = other DNA
cacagtggactctgcccagccatag

SEQ ID NO: 3170 - DNA, 25 bp, synthetic construct
  misc_feature 1..25: note = Oligonucleotide
  source 1..25: mol_type = other DNA
ttccacagtggactctgcccagcca

SEQ ID NO: 3171 - DNA, 25 bp, synthetic construct
  misc_feature 1..25: note = Oligonucleotide
  source 1..25: mol_type = other DNA
cctttccacagtggactctgcccag

SEQ ID NO: 3172 - DNA, 25 bp, synthetic construct
  misc_feature 1..25: note = Oligonucleotide
  source 1..25: mol_type = other DNA
ggacctttccacagtggactctgcc

SEQ ID NO: 3173 - DNA, 25 bp, synthetic construct
  misc_feature 1..25: note = Oligonucleotide
  source 1..25: mol_type = other DNA
gggggacctttccacagtggactct

SEQ ID NO: 3174 - DNA, 25 bp, synthetic construct
  misc_feature 1..25: note = Oligonucleotide
  source 1..25: mol_type = other DNA
agagggggacctttccacagtggac

SEQ ID NO: 3175 - DNA, 25 bp, synthetic construct
  misc_feature 1..25: note = Oligonucleotide
  source 1..25: mol_type = other DNA
aggagagggggacctttccacagtg

SEQ ID NO: 3176 - DNA, 25 bp, synthetic construct
  misc_feature 1..25: note = Oligonucleotide
  source 1..25: mol_type = other DNA
ggcaggagagggggacctttccaca

SEQ ID NO: 3177 - DNA, 25 bp, synthetic construct
  misc_feature 1..25: note = Oligonucleotide
  source 1..25: mol_type = other DNA
agtggcaggagagggggacctttcc

SEQ ID NO: 3178 - DNA, 25 bp, synthetic construct
  misc_feature 1..25: note = Oligonucleotide
  source 1..25: mol_type = other DNA
gccagtggcaggagagggggacctt

SEQ ID NO: 3179 - DNA, 25 bp, synthetic construct
  misc_feature 1..25: note = Oligonucleotide
  source 1..25: mol_type = other DNA
agggccagtggcaggagagggggac

SEQ ID NO: 3180 - DNA, 25 bp, synthetic construct
  misc_feature 1..25: note = Oligonucleotide
  source 1..25: mol_type = other DNA
gtgagggccagtggcaggagagggg

SEQ ID NO: 3181 - DNA, 25 bp, synthetic construct
  misc_feature 1..25: note = Oligonucleotide
  source 1..25: mol_type = other DNA
caagtgagggccagtggcaggagag

SEQ ID NO: 3182 - DNA, 25 bp, synthetic construct
  misc_feature 1..25: note = Oligonucleotide
  source 1..25: mol_type = other DNA
ggtcaagtgagggccagtggcagga

SEQ ID NO: 3183 - DNA, 25 bp, synthetic construct
  misc_feature 1..25: note = Oligonucleotide
  source 1..25: mol_type = other DNA
caaggtcaagtgagggccagtggca

SEQ ID NO: 3184 - DNA, 25 bp, synthetic construct
  misc_feature 1..25: note = Oligonucleotide
  source 1..25: mol_type = other DNA
tgacaaggtcaagtgagggccagtg

SEQ ID NO: 3185 - DNA, 25 bp, synthetic construct
  misc_feature 1..25: note = Oligonucleotide
  source 1..25: mol_type = other DNA
ggctgacaaggtcaagtgagggcca

SEQ ID NO: 3186 - DNA, 25 bp, synthetic construct
  misc_feature 1..25: note = Oligonucleotide
  source 1..25: mol_type = other DNA
ccaggctgacaaggtcaagtgaggg

SEQ ID NO: 3187 - DNA, 25 bp, synthetic construct
  misc_feature 1..25: note = Oligonucleotide
  source 1..25: mol_type = other DNA
aacccaggctgacaaggtcaagtga

SEQ ID NO: 3188 - DNA, 25 bp, synthetic construct
  misc_feature 1..25: note = Oligonucleotide
  source 1..25: mol_type = other DNA
aggaacccaggctgacaaggtcaag

SEQ ID NO: 3189 - DNA, 25 bp, synthetic construct
  misc_feature 1..25: note = Oligonucleotide
  source 1..25: mol_type = other DNA
ggtaggaacccaggctgacaaggtc

SEQ ID NO: 3190 - DNA, 25 bp, synthetic construct
  misc_feature 1..25: note = Oligonucleotide
  source 1..25: mol_type = other DNA
tggggtaggaacccaggctgacaag

SEQ ID NO: 3191 - DNA, 25 bp, synthetic construct
  misc_feature 1..25: note = Oligonucleotide
  source 1..25: mol_type = other DNA
ccatggggtaggaacccaggctgac

SEQ ID NO: 3192 - DNA, 25 bp, synthetic construct
  misc_feature 1..25: note = Oligonucleotide
  source 1..25: mol_type = other DNA
tggccatggggtaggaacccaggct

SEQ ID NO: 3193 - DNA, 25 bp, synthetic construct
  misc_feature 1..25: note = Oligonucleotide
  source 1..25: mol_type = other DNA
aggtggccatggggtaggaacccag

SEQ ID NO: 3194 - DNA, 25 bp, synthetic construct
  misc_feature 1..25: note = Oligonucleotide
  source 1..25: mol_type = other DNA
gagaggtggccatggggtaggaacc

SEQ ID NO: 3195 - DNA, 25 bp, synthetic construct
  misc_feature 1..25: note = Oligonucleotide
  source 1..25: mol_type = other DNA
agggagaggtggccatggggtagga

SEQ ID NO: 3196 - DNA, 25 bp, synthetic construct
  misc_feature 1..25: note = Oligonucleotide
  source 1..25: mol_type = other DNA
cggagggagaggtggccatggggta

SEQ ID NO: 3197 - DNA, 25 bp, synthetic construct
  misc_feature 1..25: note = Oligonucleotide
  source 1..25: mol_type = other DNA
atccggagggagaggtggccatggg

SEQ ID NO: 3198 - DNA, 25 bp, synthetic construct
  misc_feature 1..25: note = Oligonucleotide
  source 1..25: mol_type = other DNA
gagatccggagggagaggtggccat

SEQ ID NO: 3199 - DNA, 25 bp, synthetic construct
  misc_feature 1..25: note = Oligonucleotide
  source 1..25: mol_type = other DNA
agagagatccggagggagaggtggc

SEQ ID NO: 3200 - DNA, 25 bp, synthetic construct
  misc_feature 1..25: note = Oligonucleotide
  source 1..25: mol_type = other DNA
tgaagagagatccggagggagaggt

SEQ ID NO: 3201 - DNA, 25 bp, synthetic construct
  misc_feature 1..25: note = Oligonucleotide
  source 1..25: mol_type = other DNA
cactgaagagagatccggagggaga

SEQ ID NO: 3202 - DNA, 25 bp, synthetic construct
  misc_feature 1..25: note = Oligonucleotide
  source 1..25: mol_type = other DNA
ggtcactgaagagagatccggaggg

SEQ ID NO: 3203 - DNA, 25 bp, synthetic construct
  misc_feature 1..25: note = Oligonucleotide
  source 1..25: mol_type = other DNA
gttggtcactgaagagagatccgga

SEQ ID NO: 3204 - DNA, 25 bp, synthetic construct
  misc_feature 1..25: note = Oligonucleotide
  source 1..25: mol_type = other DNA
cttgttggtcactgaagagagatcc

SEQ ID NO: 3205 - DNA, 25 bp, synthetic construct
  misc_feature 1..25: note = Oligonucleotide
  source 1..25: mol_type = other DNA
tgtcttgttggtcactgaagagaga

SEQ ID NO: 3206 - DNA, 25 bp, synthetic construct
  misc_feature 1..25: note = Oligonucleotide
  source 1..25: mol_type = other DNA
tcatgtcttgttggtcactgaagag

SEQ ID NO: 3207 - DNA, 25 bp, synthetic construct
  misc_feature 1..25: note = Oligonucleotide
  source 1..25: mol_type = other DNA
cactcatgtcttgttggtcactgaa

SEQ ID NO: 3208 - DNA, 25 bp, synthetic construct
  misc_feature 1..25: note = Oligonucleotide
  source 1..25: mol_type = other DNA
agtcactcatgtcttgttggtcact

SEQ ID NO: 3209 - DNA, 25 bp, synthetic construct
  misc_feature 1..25: note = Oligonucleotide
  source 1..25: mol_type = other DNA
gtgagtcactcatgtcttgttggtc

SEQ ID NO: 3210 - DNA, 25 bp, synthetic construct
  misc_feature 1..25: note = Oligonucleotide
  source 1..25: mol_type = other DNA
agagtgagtcactcatgtcttgttg

SEQ ID NO: 3211 - DNA, 25 bp, synthetic construct
  misc_feature 1..25: note = Oligonucleotide
  source 1..25: mol_type = other DNA
ttcagagtgagtcactcatgtcttg

SEQ ID NO: 3212 - DNA, 25 bp, synthetic construct
  misc_feature 1..25: note = Oligonucleotide
  source 1..25: mol_type = other DNA
tacttcagagtgagtcactcatgtc

SEQ ID NO: 3213 - DNA, 25 bp, synthetic construct
  misc_feature 1..25: note = Oligonucleotide
  source 1..25: mol_type = other DNA
acctacttcagagtgagtcactcat

SEQ ID NO: 3214 - DNA, 25 bp, synthetic construct
  misc_feature 1..25: note = Oligonucleotide
  source 1..25: mol_type = other DNA
gagacctacttcagagtgagtcact

SEQ ID NO: 3215 - DNA, 25 bp, synthetic construct
  misc_feature 1..25: note = Oligonucleotide
  source 1..25: mol_type = other DNA
aacgagacctacttcagagtgagtc

SEQ ID NO: 3216 - DNA, 25 bp, synthetic construct
  misc_feature 1..25: note = Oligonucleotide
  source 1..25: mol_type = other DNA
acaaacgagacctacttcagagtga

SEQ ID NO: 3217 - DNA, 25 bp, synthetic construct
  misc_feature 1..25: note = Oligonucleotide
  source 1..25: mol_type = other DNA
aaaacaaacgagacctacttcagag

SEQ ID NO: 3218 - DNA, 25 bp, synthetic construct
  misc_feature 1..25: note = Oligonucleotide
  source 1..25: mol_type = other DNA
ctaaaaacaaacgagacctacttca

SEQ ID NO: 3219 - DNA, 25 bp, synthetic construct
  misc_feature 1..25: note = Oligonucleotide
  source 1..25: mol_type = other DNA
atcctaaaaacaaacgagacctact

SEQ ID NO: 3220 - DNA, 25 bp, synthetic construct
  misc_feature 1..25: note = Oligonucleotide
  source 1..25: mol_type = other DNA
ctcatcctaaaaacaaacgagacct

SEQ ID NO: 3221 - DNA, 25 bp, synthetic construct
  misc_feature 1..25: note = Oligonucleotide
  source 1..25: mol_type = other DNA
aggctcatcctaaaaacaaacgaga

SEQ ID NO: 3222 - DNA, 25 bp, synthetic construct
  misc_feature 1..25: note = Oligonucleotide
  source 1..25: mol_type = other DNA
ttcaggctcatcctaaaaacaaacg

SEQ ID NO: 3223 - DNA, 25 bp, synthetic construct
  misc_feature 1..25: note = Oligonucleotide
  source 1..25: mol_type = other DNA
aagttcaggctcatcctaaaaacaa

SEQ ID NO: 3224 - DNA, 25 bp, synthetic construct
  misc_feature 1..25: note = Oligonucleotide
  source 1..25: mol_type = other DNA
aagaagttcaggctcatcctaaaaa

SEQ ID NO: 3225 - DNA, 25 bp, synthetic construct
  misc_feature 1..25: note = Oligonucleotide
  source 1..25: mol_type = other DNA
tgtaagaagttcaggctcatcctaa

SEQ ID NO: 3226 - DNA, 25 bp, synthetic construct
  misc_feature 1..25: note = Oligonucleotide
  source 1..25: mol_type = other DNA
ctatgtaagaagttcaggctcatcc

SEQ ID NO: 3227 - DNA, 25 bp, synthetic construct
  misc_feature 1..25: note = Oligonucleotide
  source 1..25: mol_type = other DNA
gggctatgtaagaagttcaggctca

SEQ ID NO: 3228 - DNA, 25 bp, synthetic construct
  misc_feature 1..25: note = Oligonucleotide
  source 1..25: mol_type = other DNA
cacgggctatgtaagaagttcaggc

SEQ ID NO: 3229 - DNA, 25 bp, synthetic construct
  misc_feature 1..25: note = Oligonucleotide
  source 1..25: mol_type = other DNA
aaacacgggctatgtaagaagttca

SEQ ID NO: 3230 - DNA, 25 bp, synthetic construct
  misc_feature 1..25: note = Oligonucleotide
  source 1..25: mol_type = other DNA
cagaaacacgggctatgtaagaagt

SEQ ID NO: 3231 - DNA, 25 bp, synthetic construct
  misc_feature 1..25: note = Oligonucleotide
  source 1..25: mol_type = other DNA
aagcagaaacacgggctatgtaaga

SEQ ID NO: 3232 - DNA, 25 bp, synthetic construct
  misc_feature 1..25: note = Oligonucleotide
  source 1..25: mol_type = other DNA
ggcaagcagaaacacgggctatgta

SEQ ID NO: 3233 - DNA, 25 bp, synthetic construct
  misc_feature 1..25: note = Oligonucleotide
  source 1..25: mol_type = other DNA
ccaggcaagcagaaacacgggctat

SEQ ID NO: 3234 - DNA, 25 bp, synthetic construct
  misc_feature 1..25: note = Oligonucleotide
  source 1..25: mol_type = other DNA
agcccaggcaagcagaaacacgggc

SEQ ID NO: 3235 - DNA, 25 bp, synthetic construct
  misc_feature 1..25: note = Oligonucleotide
  source 1..25: mol_type = other DNA
tggagcccaggcaagcagaaacacg

SEQ ID NO: 3236 - DNA, 25 bp, synthetic construct
  misc_feature 1..25: note = Oligonucleotide
  source 1..25: mol_type = other DNA
agctggagcccaggcaagcagaaac

SEQ ID NO: 3237 - DNA, 25 bp, synthetic construct
  misc_feature 1..25: note = Oligonucleotide
  source 1..25: mol_type = other DNA
gccagctggagcccaggcaagcaga

SEQ ID NO: 3238 - DNA, 25 bp, synthetic construct
  misc_feature 1..25: note = Oligonucleotide
  source 1..25: mol_type = other DNA
aaggccagctggagcccaggcaagc

SEQ ID NO: 3239 - DNA, 25 bp, synthetic construct
  misc_feature 1..25: note = Oligonucleotide
  source 1..25: mol_type = other DNA
ggaaaggccagctggagcccaggca

SEQ ID NO: 3240 - DNA, 25 bp, synthetic construct
  misc_feature 1..25: note = Oligonucleotide
  source 1..25: mol_type = other DNA
gagggaaaggccagctggagcccag

SEQ ID NO: 3241 - DNA, 25 bp, synthetic construct
  misc_feature 1..25: note = Oligonucleotide
  source 1..25: mol_type = other DNA
ggagagggaaaggccagctggagcc

SEQ ID NO: 3242 - DNA, 25 bp, synthetic construct
  misc_feature 1..25: note = Oligonucleotide
  source 1..25: mol_type = other DNA
aggggagagggaaaggccagctgga

SEQ ID NO: 3243 - DNA, 25 bp, synthetic construct
  misc_feature 1..25: note = Oligonucleotide
  source 1..25: mol_type = other DNA
accaggggagagggaaaggccagct

SEQ ID NO: 3244 - DNA, 25 bp, synthetic construct
  misc_feature 1..25: note = Oligonucleotide
  source 1..25: mol_type = other DNA
actaccaggggagagggaaaggcca

SEQ ID NO: 3245 - DNA, 25 bp, synthetic construct
  misc_feature 1..25: note = Oligonucleotide
  source 1..25: mol_type = other DNA
ctcactaccaggggagagggaaagg

SEQ ID NO: 3246 - DNA, 25 bp, synthetic construct
  misc_feature 1..25: note = Oligonucleotide
  source 1..25: mol_type = other DNA
gtgctcactaccaggggagagggaa

SEQ ID NO: 3247 - DNA, 25 bp, synthetic construct
  misc_feature 1..25: note = Oligonucleotide
  source 1..25: mol_type = other DNA
gaagtgctcactaccaggggagagg

SEQ ID NO: 3248 - DNA, 25 bp, synthetic construct
  misc_feature 1..25: note = Oligonucleotide
  source 1..25: mol_type = other DNA
gaggaagtgctcactaccaggggag

SEQ ID NO: 3249 - DNA, 25 bp, synthetic construct
  misc_feature 1..25: note = Oligonucleotide
  source 1..25: mol_type = other DNA
gaggaggaagtgctcactaccaggg

SEQ ID NO: 3250 - DNA, 25 bp, synthetic construct
  misc_feature 1..25: note = Oligonucleotide
  source 1..25: mol_type = other DNA
aaagaggaggaagtgctcactacca

SEQ ID NO: 3251 - DNA, 25 bp, synthetic construct
  misc_feature 1..25: note = Oligonucleotide
  source 1..25: mol_type = other DNA
gtgaaagaggaggaagtgctcacta

SEQ ID NO: 3252 - DNA, 25 bp, synthetic construct
  misc_feature 1..25: note = Oligonucleotide
  source 1..25: mol_type = other DNA
gcagtgaaagaggaggaagtgctca

SEQ ID NO: 3253 - DNA, 25 bp, synthetic construct
  misc_feature 1..25: note = Oligonucleotide
  source 1..25: mol_type = other DNA
caggcagtgaaagaggaggaagtgc

SEQ ID NO: 3254 - DNA, 25 bp, synthetic construct
  misc_feature 1..25: note = Oligonucleotide
  source 1..25: mol_type = other DNA
ggccaggcagtgaaagaggaggaag

SEQ ID NO: 3255 - DNA, 25 bp, synthetic construct
  misc_feature 1..25: note = Oligonucleotide
  source 1..25: mol_type = other DNA
gcgggccaggcagtgaaagaggagg

SEQ ID NO: 3256 - DNA, 25 bp, synthetic construct
  misc_feature 1..25: note = Oligonucleotide
  source 1..25: mol_type = other DNA
caggcgggccaggcagtgaaagagg

SEQ ID NO: 3257 - DNA, 25 bp, synthetic construct
  misc_feature 1..25: note = Oligonucleotide
  source 1..25: mol_type = other DNA
cctcaggcgggccaggcagtgaaag

SEQ ID NO: 3258 - DNA, 25 bp, synthetic construct
  misc_feature 1..25: note = Oligonucleotide
  source 1..25: mol_type = other DNA
cctcctcaggcgggccaggcagtga

SEQ ID NO: 3259 - DNA, 25 bp, synthetic construct
  misc_feature 1..25: note = Oligonucleotide
  source 1..25: mol_type = other DNA
caacctcctcaggcgggccaggcag

SEQ ID NO: 3260 - DNA, 25 bp, synthetic construct
  misc_feature 1..25: note = Oligonucleotide
  source 1..25: mol_type = other DNA
aggcaacctcctcaggcgggccagg

SEQ ID NO: 3261 - DNA, 25 bp, synthetic construct
  misc_feature 1..25: note = Oligonucleotide
  source 1..25: mol_type = other DNA
gggaggcaacctcctcaggcgggcc

SEQ ID NO: 3262 - DNA, 25 bp, synthetic construct
  misc_feature 1..25: note = Oligonucleotide
  source 1..25: mol_type = other DNA
cttgggaggcaacctcctcaggcgg

SEQ ID NO: 3263 - DNA, 25 bp, synthetic construct
  misc_feature 1..25: note = Oligonucleotide
  source 1..25: mol_type = other DNA
tgccttgggaggcaacctcctcagg

SEQ ID NO: 3264 - DNA, 25 bp, synthetic construct
  misc_feature 1..25: note = Oligonucleotide
  source 1..25: mol_type = other DNA
ccctgccttgggaggcaacctcctc

SEQ ID NO: 3265 - DNA, 25 bp, synthetic construct
  misc_feature 1..25: note = Oligonucleotide
  source 1..25: mol_type = other DNA
gacccctgccttgggaggcaacctc

SEQ ID NO: 3266 - DNA, 25 bp, synthetic construct
  misc_feature 1..25: note = Oligonucleotide
  source 1..25: mol_type = other DNA
agggacccctgccttgggaggcaac

SEQ ID NO: 3267 - DNA, 25 bp, synthetic construct
  misc_feature 1..25: note = Oligonucleotide
  source 1..25: mol_type = other DNA
catagggacccctgccttgggaggc

SEQ ID NO: 3268 - DNA, 25 bp, synthetic construct
  misc_feature 1..25: note = Oligonucleotide
  source 1..25: mol_type = other DNA
tgccatagggacccctgccttggga

SEQ ID NO: 3269 - DNA, 25 bp, synthetic construct
  misc_feature 1..25: note = Oligonucleotide
  source 1..25: mol_type = other DNA
gggtgccatagggacccctgccttg

SEQ ID NO: 3270 - DNA, 25 bp, synthetic construct
  misc_feature 1..25: note = Oligonucleotide
  source 1..25: mol_type = other DNA
ggagggtgccatagggacccctgcc

SEQ ID NO: 3271 - DNA, 25 bp, synthetic construct
  misc_feature 1..25: note = Oligonucleotide
  source 1..25: mol_type = other DNA
aggggagggtgccatagggacccct

SEQ ID NO: 3272 - DNA, 25 bp, synthetic construct
  misc_feature 1..25: note = Oligonucleotide
  source 1..25: mol_type = other DNA
aataggggagggtgccatagggacc

SEQ ID NO: 3273 - DNA, 25 bp, synthetic construct
  misc_feature 1..25: note = Oligonucleotide
  source 1..25: mol_type = other DNA
agaaataggggagggtgccataggg

SEQ ID NO: 3274 - DNA, 25 bp, synthetic construct
  misc_feature 1..25: note = Oligonucleotide
  source 1..25: mol_type = other DNA
ctcagaaataggggagggtgccata

SEQ ID NO: 3275 - DNA, 25 bp, synthetic construct
  misc_feature 1..25: note = Oligonucleotide
  source 1..25: mol_type = other DNA
tacctcagaaataggggagggtgcc

SEQ ID NO: 3276 - DNA, 25 bp, synthetic construct
  misc_feature 1..25: note = Oligonucleotide
  source 1..25: mol_type = other DNA
gtgtacctcagaaataggggagggt

SEQ ID NO: 3277 - DNA, 25 bp, synthetic construct
  misc_feature 1..25: note = Oligonucleotide
  source 1..25: mol_type = other DNA
ccagtgtacctcagaaataggggag

SEQ ID NO: 3278 - DNA, 25 bp, synthetic construct
  misc_feature 1..25: note = Oligonucleotide
  source 1..25: mol_type = other DNA
cacccagtgtacctcagaaataggg

SEQ ID NO: 3279 - DNA, 25 bp, synthetic construct
  misc_feature 1..25: note = Oligonucleotide
  source 1..25: mol_type = other DNA
aaacacccagtgtacctcagaaata

SEQ ID NO: 3280 - DNA, 25 bp, synthetic construct
  misc_feature 1..25: note = Oligonucleotide
  source 1..25: mol_type = other DNA
cataaacacccagtgtacctcagaa

SEQ ID NO: 3281 - DNA, 25 bp, synthetic construct
  misc_feature 1..25: note = Oligonucleotide
  source 1..25: mol_type = other DNA
ttccataaacacccagtgtacctca

SEQ ID NO: 3282 - DNA, 25 bp, synthetic construct
  misc_feature 1..25: note = Oligonucleotide
  source 1..25: mol_type = other DNA
cccttccataaacacccagtgtacc

SEQ ID NO: 3283 - DNA, 25 bp, synthetic construct
  misc_feature 1..25: note = Oligonucleotide
  source 1..25: mol_type = other DNA
gggcccttccataaacacccagtgt

SEQ ID NO: 3284 - DNA, 25 bp, synthetic construct
  misc_feature 1..25: note = Oligonucleotide
  source 1..25: mol_type = other DNA
ccggggcccttccataaacacccag

SEQ ID NO: 3285 - DNA, 25 bp, synthetic construct
  misc_feature 1..25: note = Oligonucleotide
  source 1..25: mol_type = other DNA
aggccggggcccttccataaacacc

SEQ ID NO: 3286 - DNA, 25 bp, synthetic construct
  misc_feature 1..25: note = Oligonucleotide
  source 1..25: mol_type = other DNA
caaaggccggggcccttccataaac

SEQ ID NO: 3287 - DNA, 25 bp, synthetic construct
  misc_feature 1..25: note = Oligonucleotide
  source 1..25: mol_type = other DNA
ggccaaaggccggggcccttccata

SEQ ID NO: 3288 - DNA, 25 bp, synthetic construct
  misc_feature 1..25: note = Oligonucleotide
  source 1..25: mol_type = other DNA
cctggccaaaggccggggcccttcc

SEQ ID NO: 3289 - DNA, 25 bp, synthetic construct
  misc_feature 1..25: note = Oligonucleotide
  source 1..25: mol_type = other DNA
tgccctggccaaaggccggggccct

SEQ ID NO: 3290 - DNA, 25 bp, synthetic construct
  misc_feature 1..25: note = Oligonucleotide
  source 1..25: mol_type = other DNA
aggtgccctggccaaaggccggggc

SEQ ID NO: 3291 - DNA, 25 bp, synthetic construct
  misc_feature 1..25: note = Oligonucleotide
  source 1..25: mol_type = other DNA
gcaaggtgccctggccaaaggccgg

SEQ ID NO: 3292 - DNA, 25 bp, synthetic construct
  misc_feature 1..25: note = Oligonucleotide
  source 1..25: mol_type = other DNA
aaggcaaggtgccctggccaaaggc

SEQ ID NO: 3293 - DNA, 25 bp, synthetic construct
  misc_feature 1..25: note = Oligonucleotide
  source 1..25: mol_type = other DNA
cacaaggcaaggtgccctggccaaa

SEQ ID NO: 3294 - DNA, 25 bp, synthetic construct
  misc_feature 1..25: note = Oligonucleotide
  source 1..25: mol_type = other DNA
acacacaaggcaaggtgccctggcc

SEQ ID NO: 3295 - DNA, 25 bp, synthetic construct
  misc_feature 1..25: note = Oligonucleotide
  source 1..25: mol_type = other DNA
cacacacacaaggcaaggtgccctg

SEQ ID NO: 3296 - DNA, 25 bp, synthetic construct
  misc_feature 1..25: note = Oligonucleotide
  source 1..25: mol_type = other DNA
caccacacacacaaggcaaggtgcc

SEQ ID NO: 3297 - DNA, 25 bp, synthetic construct
  misc_feature 1..25: note = Oligonucleotide
  source 1..25: mol_type = other DNA
ggacaccacacacacaaggcaaggt

SEQ ID NO: 3298 - DNA, 25 bp, synthetic construct
  misc_feature 1..25: note = Oligonucleotide
  source 1..25: mol_type = other DNA
tacggacaccacacacacaaggcaa

SEQ ID NO: 3299 - DNA, 25 bp, synthetic construct
  misc_feature 1..25: note = Oligonucleotide
  source 1..25: mol_type = other DNA
cactacggacaccacacacacaagg

SEQ ID NO: 3300 - DNA, 25 bp, synthetic construct
  misc_feature 1..25: note = Oligonucleotide
  source 1..25: mol_type = other DNA
cggcactacggacaccacacacaca

SEQ ID NO: 3301 - DNA, 25 bp, synthetic construct
  misc_feature 1..25: note = Oligonucleotide
  source 1..25: mol_type = other DNA
agccggcactacggacaccacacac

SEQ ID NO: 3302 - DNA, 25 bp, synthetic construct
  misc_feature 1..25: note = Oligonucleotide
  source 1..25: mol_type = other DNA
cccagccggcactacggacaccaca

SEQ ID NO: 3303 - DNA, 25 bp, synthetic construct
  misc_feature 1..25: note = Oligonucleotide
  source 1..25: mol_type = other DNA
ttccccagccggcactacggacacc

SEQ ID NO: 3304 - DNA, 25 bp, synthetic construct
  misc_feature 1..25: note = Oligonucleotide
  source 1..25: mol_type = other DNA
cacttccccagccggcactacggac

SEQ ID NO: 3305 - DNA, 25 bp, synthetic construct
  misc_feature 1..25: note = Oligonucleotide
  source 1..25: mol_type = other DNA
cctcacttccccagccggcactacg

SEQ ID NO: 3306 - DNA, 25 bp, synthetic construct
  misc_feature 1..25: note = Oligonucleotide
  source 1..25: mol_type = other DNA
aggcctcacttccccagccggcact

SEQ ID NO: 3307 - DNA, 25 bp, synthetic construct
  misc_feature 1..25: note = Oligonucleotide
  source 1..25: mol_type = other DNA
acaaggcctcacttccccagccggc

SEQ ID NO: 3308 - DNA, 25 bp, synthetic construct
  misc_feature 1..25: note = Oligonucleotide
  source 1..25: mol_type = other DNA
cccacaaggcctcacttccccagcc

SEQ ID NO: 3309 - DNA, 25 bp, synthetic construct
  misc_feature 1..25: note = Oligonucleotide
  source 1..25: mol_type = other DNA
caccccacaaggcctcacttcccca

SEQ ID NO: 3310 - DNA, 25 bp, synthetic construct
  misc_feature 1..25: note = Oligonucleotide
  source 1..25: mol_type = other DNA
actcaccccacaaggcctcacttcc

SEQ ID NO: 3311 - DNA, 25 bp, synthetic construct
  misc_feature 1..25: note = Oligonucleotide
  source 1..25: mol_type = other DNA
ttcactcaccccacaaggcctcact

SEQ ID NO: 3312 - DNA, 25 bp, synthetic construct
  misc_feature 1..25: note = Oligonucleotide
  source 1..25: mol_type = other DNA
ttattcactcaccccacaaggcctc

SEQ ID NO: 3313 - DNA, 25 bp, synthetic construct
  misc_feature 1..25: note = Oligonucleotide
  source 1..25: mol_type = other DNA
agtttattcactcaccccacaaggc

SEQ ID NO: 3314 - DNA, 25 bp, synthetic construct
  misc_feature 1..25: note = Oligonucleotide
  source 1..25: mol_type = other DNA
cccagtttattcactcaccccacaa

SEQ ID NO: 3315 - DNA, 25 bp, synthetic construct
  misc_feature 1..25: note = Oligonucleotide
  source 1..25: mol_type = other DNA
tcacccagtttattcactcacccca

SEQ ID NO: 3316 - DNA, 25 bp, synthetic construct
  misc_feature 1..25: note = Oligonucleotide
  source 1..25: mol_type = other DNA
cattcacccagtttattcactcacc

SEQ ID NO: 3317 - DNA, 25 bp, synthetic construct
  misc_feature 1..25: note = Oligonucleotide
  source 1..25: mol_type = other DNA
actcattcacccagtttattcactc

SEQ ID NO: 3318 - DNA, 25 bp, synthetic construct
  misc_feature 1..25: note = Oligonucleotide
  source 1..25: mol_type = other DNA
tgtactcattcacccagtttattca

SEQ ID NO: 3319 - DNA, 25 bp, synthetic construct
  misc_feature 1..25: note = Oligonucleotide
  source 1..25: mol_type = other DNA
ccttgtactcattcacccagtttat

SEQ ID NO: 3320 - DNA, 25 bp, synthetic construct
  misc_feature 1..25: note = Oligonucleotide
  source 1..25: mol_type = other DNA
tggccttgtactcattcacccagtt

SEQ ID NO: 3321 - DNA, 25 bp, synthetic construct
  misc_feature 1..25: note = Oligonucleotide
  source 1..25: mol_type = other DNA
tgatggccttgtactcattcaccca

SEQ ID NO: 3322 - DNA, 25 bp, synthetic construct
  misc_feature 1..25: note = Oligonucleotide
  source 1..25: mol_type = other DNA
ctttgatggccttgtactcattcac

SEQ ID NO: 3323 - DNA, 25 bp, synthetic construct
  misc_feature 1..25: note = Oligonucleotide
  source 1..25: mol_type = other DNA
tgactttgatggccttgtactcatt

SEQ ID NO: 3324 - DNA, 25 bp, synthetic construct
  misc_feature 1..25: note = Oligonucleotide
  source 1..25: mol_type = other DNA
acatgactttgatggccttgtactc

SEQ ID NO: 3325 - DNA, 25 bp, synthetic construct
  misc_feature 1..25: note = Oligonucleotide
  source 1..25: mol_type = other DNA
gtgacatgactttgatggccttgta

SEQ ID NO: 3326 - DNA, 25 bp, synthetic construct
  misc_feature 1..25: note = Oligonucleotide
  source 1..25: mol_type = other DNA
cctgtgacatgactttgatggcctt

SEQ ID NO: 3327 - DNA, 25 bp, synthetic construct
  misc_feature 1..25: note = Oligonucleotide
  source 1..25: mol_type = other DNA
catcctgtgacatgactttgatggc

SEQ ID NO: 3328 - DNA, 25 bp, synthetic construct
  misc_feature 1..25: note = Oligonucleotide
  source 1..25: mol_type = other DNA
acccatcctgtgacatgactttgat

SEQ ID NO: 3329 - DNA, 25 bp, synthetic construct
  misc_feature 1..25: note = Oligonucleotide
  source 1..25: mol_type = other DNA
gggacccatcctgtgacatgacttt

SEQ ID NO: 3330 - DNA, 25 bp, synthetic construct
  misc_feature 1..25: note = Oligonucleotide
  source 1..25: mol_type = other DNA
ccagggacccatcctgtgacatgac

SEQ ID NO: 3331 - DNA, 25 bp, synthetic construct
  misc_feature 1..25: note = Oligonucleotide
  source 1..25: mol_type = other DNA
accccagggacccatcctgtgacat

SEQ ID NO: 3332 - DNA, 25 bp, synthetic construct
  misc_feature 1..25: note = Oligonucleotide
  source 1..25: mol_type = other DNA
cccaccccagggacccatcctgtga

SEQ ID NO: 3333 - DNA, 25 bp, synthetic construct
  misc_feature 1..25: note = Oligonucleotide
  source 1..25: mol_type = other DNA
acccccaccccagggacccatcctg

SEQ ID NO: 3334 - DNA, 25 bp, synthetic construct
  misc_feature 1..25: note = Oligonucleotide
  source 1..25: mol_type = other DNA
cagacccccaccccagggacccatc

SEQ ID NO: 3335 - DNA, 25 bp, synthetic construct
  misc_feature 1..25: note = Oligonucleotide
  source 1..25: mol_type = other DNA
ccgcagacccccaccccagggaccc

SEQ ID NO: 3336 - DNA, 25 bp, synthetic construct
  misc_feature 1..25: note = Oligonucleotide
  source 1..25: mol_type = other DNA
ccaccgcagacccccaccccaggga

SEQ ID NO: 3337 - DNA, 25 bp, synthetic construct
  misc_feature 1..25: note = Oligonucleotide
  source 1..25: mol_type = other DNA
accccaccgcagacccccaccccag

SEQ ID NO: 3338 - DNA, 25 bp, synthetic construct
  misc_feature 1..25: note = Oligonucleotide
  source 1..25: mol_type = other DNA
ctcaccccaccgcagacccccaccc

SEQ ID NO: 3339 - DNA, 25 bp, synthetic construct
  misc_feature 1..25: note = Oligonucleotide
  source 1..25: mol_type = other DNA
cagctcaccccaccgcagaccccca

SEQ ID NO: 3340 - DNA, 25 bp, synthetic construct
  misc_feature 1..25: note = Oligonucleotide
  source 1..25: mol_type = other DNA
ctccagctcaccccaccgcagaccc

SEQ ID NO: 3341 - DNA, 25 bp, synthetic construct
  misc_feature 1..25: note = Oligonucleotide
  source 1..25: mol_type = other DNA
cctctccagctcaccccaccgcaga

SEQ ID NO: 3342 - DNA, 25 bp, synthetic construct
  misc_feature 1..25: note = Oligonucleotide
  source 1..25: mol_type = other DNA
cttcctctccagctcaccccaccgc

SEQ ID NO: 3343 - DNA, 25 bp, synthetic construct
  misc_feature 1..25: note = Oligonucleotide
  source 1..25: mol_type = other DNA
catcttcctctccagctcaccccac

SEQ ID NO: 3344 - DNA, 25 bp, synthetic construct
  misc_feature 1..25: note = Oligonucleotide
  source 1..25: mol_type = other DNA
gcccatcttcctctccagctcaccc

SEQ ID NO: 3345 - DNA, 25 bp, synthetic construct
  misc_feature 1..25: note = Oligonucleotide
  source 1..25: mol_type = other DNA
tcggcccatcttcctctccagctca

SEQ ID NO: 3346 - DNA, 25 bp, synthetic construct
  misc_feature 1..25: note = Oligonucleotide
  source 1..25: mol_type = other DNA
tcttcggcccatcttcctctccagc

SEQ ID NO: 3347 - DNA, 25 bp, synthetic construct
  misc_feature 1..25: note = Oligonucleotide
  source 1..25: mol_type = other DNA
ccttcttcggcccatcttcctctcc

SEQ ID NO: 3348 - DNA, 25 bp, synthetic construct
  misc_feature 1..25: note = Oligonucleotide
  source 1..25: mol_type = other DNA
gctccttcttcggcccatcttcctc

SEQ ID NO: 3349 - DNA, 25 bp, synthetic construct
  misc_feature 1..25: note = Oligonucleotide
  source 1..25: mol_type = other DNA
cctgctccttcttcggcccatcttc

SEQ ID NO: 3350 - DNA, 25 bp, synthetic construct
  misc_feature 1..25: note = Oligonucleotide
  source 1..25: mol_type = other DNA
caacctgctccttcttcggcccatc

SEQ ID NO: 3351 - DNA, 25 bp, synthetic construct
  misc_feature 1..25: note = Oligonucleotide
  source 1..25: mol_type = other DNA
agacaacctgctccttcttcggccc

SEQ ID NO: 3352 - DNA, 25 bp, synthetic construct
  misc_feature 1..25: note = Oligonucleotide
  source 1..25: mol_type = other DNA
ctgagacaacctgctccttcttcgg

SEQ ID NO: 3353 - DNA, 25 bp, synthetic construct
  misc_feature 1..25: note = Oligonucleotide
  source 1..25: mol_type = other DNA
accctgagacaacctgctccttctt

SEQ ID NO: 3354 - DNA, 25 bp, synthetic construct
  misc_feature 1..25: note = Oligonucleotide
  source 1..25: mol_type = other DNA
agcaccctgagacaacctgctcctt

SEQ ID NO: 3355 - DNA, 25 bp, synthetic construct
  misc_feature 1..25: note = Oligonucleotide
  source 1..25: mol_type = other DNA
ctcagcaccctgagacaacctgctc

SEQ ID NO: 3356 - DNA, 25 bp, synthetic construct
  misc_feature 1..25: note = Oligonucleotide
  source 1..25: mol_type = other DNA
atcctcagcaccctgagacaacctg

SEQ ID NO: 3357 - DNA, 25 bp, synthetic construct
  misc_feature 1..25: note = Oligonucleotide
  source 1..25: mol_type = other DNA
tgaatcctcagcaccctgagacaac

SEQ ID NO: 3358 - DNA, 25 bp, synthetic construct
  misc_feature 1..25: note = Oligonucleotide
  source 1..25: mol_type = other DNA
ccctgaatcctcagcaccctgagac

SEQ ID NO: 3359 - DNA, 25 bp, synthetic construct
  misc_feature 1..25: note = Oligonucleotide
  source 1..25: mol_type = other DNA
cagccctgaatcctcagcaccctga

SEQ ID NO: 3360 - DNA, 25 bp, synthetic construct
  misc_feature 1..25: note = Oligonucleotide
  source 1..25: mol_type = other DNA
cagcagccctgaatcctcagcaccc

SEQ ID NO: 3361 - DNA, 25 bp, synthetic construct
  misc_feature 1..25: note = Oligonucleotide
  source 1..25: mol_type = other DNA
ccacagcagccctgaatcctcagca

SEQ ID NO: 3362 - DNA, 25 bp, synthetic construct
  misc_feature 1..25: note = Oligonucleotide
  source 1..25: mol_type = other DNA
gccccacagcagccctgaatcctca

SEQ ID NO: 3363 - DNA, 25 bp, synthetic construct
  misc_feature 1..25: note = Oligonucleotide
  source 1..25: mol_type = other DNA
ccagccccacagcagccctgaatcc

SEQ ID NO: 3364 - DNA, 25 bp, synthetic construct
  misc_feature 1..25: note = Oligonucleotide
  source 1..25: mol_type = other DNA
gaaccagccccacagcagccctgaa

SEQ ID NO: 3365 - DNA, 25 bp, synthetic construct
  misc_feature 1..25: note = Oligonucleotide
  source 1..25: mol_type = other DNA
caggaaccagccccacagcagccct

SEQ ID NO: 3366 - DNA, 25 bp, synthetic construct
  misc_feature 1..25: note = Oligonucleotide
  source 1..25: mol_type = other DNA
aggcaggaaccagccccacagcagc

SEQ ID NO: 3367 - DNA, 25 bp, synthetic construct
  misc_feature 1..25: note = Oligonucleotide
  source 1..25: mol_type = other DNA
cccaggcaggaaccagccccacagc

SEQ ID NO: 3368 - DNA, 25 bp, synthetic construct
  misc_feature 1..25: note = Oligonucleotide
  source 1..25: mol_type = other DNA
ccacccaggcaggaaccagccccac

SEQ ID NO: 3369 - DNA, 25 bp, synthetic construct
  misc_feature 1..25: note = Oligonucleotide
  source 1..25: mol_type = other DNA
ggtccacccaggcaggaaccagccc

SEQ ID NO: 3370 - DNA, 25 bp, synthetic construct
  misc_feature 1..25: note = Oligonucleotide
  source 1..25: mol_type = other DNA
cgaggtccacccaggcaggaaccag

SEQ ID NO: 3371 - DNA, 25 bp, synthetic construct
  misc_feature 1..25: note = Oligonucleotide
  source 1..25: mol_type = other DNA
gcccgaggtccacccaggcaggaac

SEQ ID NO: 3372 - DNA, 25 bp, synthetic construct
  misc_feature 1..25: note = Oligonucleotide
  source 1..25: mol_type = other DNA
agagcccgaggtccacccaggcagg

SEQ ID NO: 3373 - DNA, 25 bp, synthetic construct
  misc_feature 1..25: note = Oligonucleotide
  source 1..25: mol_type = other DNA
agaagagcccgaggtccacccaggc

SEQ ID NO: 3374 - DNA, 25 bp, synthetic construct
  misc_feature 1..25: note = Oligonucleotide
  source 1..25: mol_type = other DNA
cctagaagagcccgaggtccaccca

SEQ ID NO: 3375 - DNA, 25 bp, synthetic construct
  misc_feature 1..25: note = Oligonucleotide
  source 1..25: mol_type = other DNA
tggcctagaagagcccgaggtccac

SEQ ID NO: 3376 - DNA, 25 bp, synthetic construct
  misc_feature 1..25: note = Oligonucleotide
  source 1..25: mol_type = other DNA
gcctggcctagaagagcccgaggtc

SEQ ID NO: 3377 - DNA, 25 bp, synthetic construct
  misc_feature 1..25: note = Oligonucleotide
  source 1..25: mol_type = other DNA
cctgcctggcctagaagagcccgag

SEQ ID NO: 3378 - DNA, 25 bp, synthetic construct
  misc_feature 1..25: note = Oligonucleotide
  source 1..25: mol_type = other DNA
cgacctgcctggcctagaagagccc

SEQ ID NO: 3379 - DNA, 25 bp, synthetic construct
  misc_feature 1..25: note = Oligonucleotide
  source 1..25: mol_type = other DNA
ccccgacctgcctggcctagaagag

SEQ ID NO: 3380 - DNA, 25 bp, synthetic construct
  misc_feature 1..25: note = Oligonucleotide
  source 1..25: mol_type = other DNA
ctgccccgacctgcctggcctagaa

SEQ ID NO: 3381 - DNA, 25 bp, synthetic construct
  misc_feature 1..25: note = Oligonucleotide
  source 1..25: mol_type = other DNA
ctgctgccccgacctgcctggccta

SEQ ID NO: 3382 - DNA, 25 bp, synthetic construct
  misc_feature 1..25: note = Oligonucleotide
  source 1..25: mol_type = other DNA
gccctgctgccccgacctgcctggc

SEQ ID NO: 3383 - DNA, 25 bp, synthetic construct
  misc_feature 1..25: note = Oligonucleotide
  source 1..25: mol_type = other DNA
ccggccctgctgccccgacctgcct

SEQ ID NO: 3384 - DNA, 25 bp, synthetic construct
  misc_feature 1..25: note = Oligonucleotide
  source 1..25: mol_type = other DNA
tctccggccctgctgccccgacctg

SEQ ID NO: 3385 - DNA, 25 bp, synthetic construct
  misc_feature 1..25: note = Oligonucleotide
  source 1..25: mol_type = other DNA
gtctctccggccctgctgccccgac

SEQ ID NO: 3386 - DNA, 25 bp, synthetic construct
  misc_feature 1..25: note = Oligonucleotide
  source 1..25: mol_type = other DNA
tccgtctctccggccctgctgcccc

SEQ ID NO: 3387 - DNA, 25 bp, synthetic construct
  misc_feature 1..25: note = Oligonucleotide
  source 1..25: mol_type = other DNA
ggctccgtctctccggccctgctgc

SEQ ID NO: 3388 - DNA, 25 bp, synthetic construct
  misc_feature 1..25: note = Oligonucleotide
  source 1..25: mol_type = other DNA
cctggctccgtctctccggccctgc

SEQ ID NO: 3389 - DNA, 25 bp, synthetic construct
  misc_feature 1..25: note = Oligonucleotide
  source 1..25: mol_type = other DNA
tgccctggctccgtctctccggccc

SEQ ID NO: 3390 - DNA, 25 bp, synthetic construct
  misc_feature 1..25: note = Oligonucleotide
  source 1..25: mol_type = other DNA
cactgccctggctccgtctctccgg

SEQ ID NO: 3391 - DNA, 25 bp, synthetic construct
  misc_feature 1..25: note = Oligonucleotide
  source 1..25: mol_type = other DNA
agtcactgccctggctccgtctctc

SEQ ID NO: 3392 - DNA, 25 bp, synthetic construct
  misc_feature 1..25: note = Oligonucleotide
  source 1..25: mol_type = other DNA
cccagtcactgccctggctccgtct

SEQ ID NO: 3393 - DNA, 25 bp, synthetic construct
  misc_feature 1..25: note = Oligonucleotide
  source 1..25: mol_type = other DNA
aggcccagtcactgccctggctccg

SEQ ID NO: 3394 - DNA, 25 bp, synthetic construct
  misc_feature 1..25: note = Oligonucleotide
  source 1..25: mol_type = other DNA
tccaggcccagtcactgccctggct

SEQ ID NO: 3395 - DNA, 25 bp, synthetic construct
  misc_feature 1..25: note = Oligonucleotide
  source 1..25: mol_type = other DNA
cactccaggcccagtcactgccctg

SEQ ID NO: 3396 - DNA, 25 bp, synthetic construct
  misc_feature 1..25: note = Oligonucleotide
  source 1..25: mol_type = other DNA
ccccactccaggcccagtcactgcc

SEQ ID NO: 3397 - DNA, 25 bp, synthetic construct
  misc_feature 1..25: note = Oligonucleotide
  source 1..25: mol_type = other DNA
gtcccccactccaggcccagtcact

SEQ ID NO: 3398 - DNA, 25 bp, synthetic construct
  misc_feature 1..25: note = Oligonucleotide
  source 1..25: mol_type = other DNA
caagtcccccactccaggcccagtc

SEQ ID NO: 3399 - DNA, 25 bp, synthetic construct
  misc_feature 1..25: note = Oligonucleotide
  source 1..25: mol_type = other DNA
aagcaagtcccccactccaggccca

SEQ ID NO: 3400 - DNA, 25 bp, synthetic construct
  misc_feature 1..25: note = Oligonucleotide
  source 1..25: mol_type = other DNA
cccaagcaagtcccccactccaggc

SEQ ID NO: 3401 - DNA, 25 bp, synthetic construct
  misc_feature 1..25: note = Oligonucleotide
  source 1..25: mol_type = other DNA
ggccccaagcaagtcccccactcca

SEQ ID NO: 3402 - DNA, 25 bp, synthetic construct
  misc_feature 1..25: note = Oligonucleotide
  source 1..25: mol_type = other DNA
tggggccccaagcaagtcccccact

SEQ ID NO: 3403 - DNA, 25 bp, synthetic construct
  misc_feature 1..25: note = Oligonucleotide
  source 1..25: mol_type = other DNA
tggtggggccccaagcaagtccccc

SEQ ID NO: 3404 - DNA, 25 bp, synthetic construct
  misc_feature 1..25: note = Oligonucleotide
  source 1..25: mol_type = other DNA
ccctggtggggccccaagcaagtcc

SEQ ID NO: 3405 - DNA, 25 bp, synthetic construct
  misc_feature 1..25: note = Oligonucleotide
  source 1..25: mol_type = other DNA
tcaccctggtggggccccaagcaag

SEQ ID NO: 3406 - DNA, 25 bp, synthetic construct
  misc_feature 1..25: note = Oligonucleotide
  source 1..25: mol_type = other DNA
aggtcaccctggtggggccccaagc

SEQ ID NO: 3407 - DNA, 25 bp, synthetic construct
  misc_feature 1..25: note = Oligonucleotide
  source 1..25: mol_type = other DNA
gccaggtcaccctggtggggcccca

SEQ ID NO: 3408 - DNA, 25 bp, synthetic construct
  misc_feature 1..25: note = Oligonucleotide
  source 1..25: mol_type = other DNA
aaggccaggtcaccctggtggggcc

SEQ ID NO: 3409 - DNA, 25 bp, synthetic construct
  misc_feature 1..25: note = Oligonucleotide
  source 1..25: mol_type = other DNA
accaaggccaggtcaccctggtggg

SEQ ID NO: 3410 - DNA, 25 bp, synthetic construct
  misc_feature 1..25: note = Oligonucleotide
  source 1..25: mol_type = other DNA
ctcaccaaggccaggtcaccctggt

SEQ ID NO: 3411 - DNA, 25 bp, synthetic construct
  misc_feature 1..25: note = Oligonucleotide
  source 1..25: mol_type = other DNA
cccctcaccaaggccaggtcaccct

SEQ ID NO: 3412 - DNA, 25 bp, synthetic construct
  misc_feature 1..25: note = Oligonucleotide
  source 1..25: mol_type = other DNA
tagcccctcaccaaggccaggtcac

SEQ ID NO: 3413 - DNA, 25 bp, synthetic construct
  misc_feature 1..25: note = Oligonucleotide
  source 1..25: mol_type = other DNA
aagtagcccctcaccaaggccaggt

SEQ ID NO: 3414 - DNA, 25 bp, synthetic construct
  misc_feature 1..25: note = Oligonucleotide
  source 1..25: mol_type = other DNA
cccaagtagcccctcaccaaggcca

SEQ ID NO: 3415 - DNA, 25 bp, synthetic construct
  misc_feature 1..25: note = Oligonucleotide
  source 1..25: mol_type = other DNA
gtacccaagtagcccctcaccaagg

SEQ ID NO: 3416 - DNA, 25 bp, synthetic construct
  misc_feature 1..25: note = Oligonucleotide
  source 1..25: mol_type = other DNA
cttgtacccaagtagcccctcacca

SEQ ID NO: 3417 - DNA, 25 bp, synthetic construct
  misc_feature 1..25: note = Oligonucleotide
  source 1..25: mol_type = other DNA
cagcttgtacccaagtagcccctca

SEQ ID NO: 3418 - DNA, 25 bp, synthetic construct
  misc_feature 1..25: note = Oligonucleotide
  source 1..25: mol_type = other DNA
tgtcagcttgtacccaagtagcccc

SEQ ID NO: 3419 - DNA, 25 bp, synthetic construct
  misc_feature 1..25: note = Oligonucleotide
  source 1..25: mol_type = other DNA
gactgtcagcttgtacccaagtagc

SEQ ID NO: 3420 - DNA, 25 bp, synthetic construct
  misc_feature 1..25: note = Oligonucleotide
  source 1..25: mol_type = other DNA
cacgactgtcagcttgtacccaagt

SEQ ID NO: 3421 - DNA, 25 bp, synthetic construct
  misc_feature 1..25: note = Oligonucleotide
  source 1..25: mol_type = other DNA
agtcacgactgtcagcttgtaccca

SEQ ID NO: 3422 - DNA, 25 bp, synthetic construct
  misc_feature 1..25: note = Oligonucleotide
  source 1..25: mol_type = other DNA
accagtcacgactgtcagcttgtac

SEQ ID NO: 3423 - DNA, 25 bp, synthetic construct
  misc_feature 1..25: note = Oligonucleotide
  source 1..25: mol_type = other DNA
caaaccagtcacgactgtcagcttg

SEQ ID NO: 3424 - DNA, 25 bp, synthetic construct
  misc_feature 1..25: note = Oligonucleotide
  source 1..25: mol_type = other DNA
agccaaaccagtcacgactgtcagc

SEQ ID NO: 3425 - DNA, 25 bp, synthetic construct
  misc_feature 1..25: note = Oligonucleotide
  source 1..25: mol_type = other DNA
gatagccaaaccagtcacgactgtc

SEQ ID NO: 3426 - DNA, 25 bp, synthetic construct
  misc_feature 1..25: note = Oligonucleotide
  source 1..25: mol_type = other DNA
cctgatagccaaaccagtcacgact

SEQ ID NO: 3427 - DNA, 25 bp, synthetic construct
  misc_feature 1..25: note = Oligonucleotide
  source 1..25: mol_type = other DNA
cgccctgatagccaaaccagtcacg

SEQ ID NO: 3428 - DNA, 25 bp, synthetic construct
  misc_feature 1..25: note = Oligonucleotide
  source 1..25: mol_type = other DNA
ttgcgccctgatagccaaaccagtc

SEQ ID NO: 3429 - DNA, 25 bp, synthetic construct
  misc_feature 1..25: note = Oligonucleotide
  source 1..25: mol_type = other DNA
tccttgcgccctgatagccaaacca

SEQ ID NO: 3430 - DNA, 25 bp, synthetic construct
  misc_feature 1..25: note = Oligonucleotide
  source 1..25: mol_type = other DNA
ccttccttgcgccctgatagccaaa

SEQ ID NO: 3431 - DNA, 25 bp, synthetic construct
  misc_feature 1..25: note = Oligonucleotide
  source 1..25: mol_type = other DNA
agcccttccttgcgccctgatagcc

SEQ ID NO: 3432 - DNA, 25 bp, synthetic construct
  misc_feature 1..25: note = Oligonucleotide
  source 1..25: mol_type = other DNA
caaagcccttccttgcgccctgata

SEQ ID NO: 3433 - DNA, 25 bp, synthetic construct
  misc_feature 1..25: note = Oligonucleotide
  source 1..25: mol_type = other DNA
gctcaaagcccttccttgcgccctg

SEQ ID NO: 3434 - DNA, 25 bp, synthetic construct
  misc_feature 1..25: note = Oligonucleotide
  source 1..25: mol_type = other DNA
acggctcaaagcccttccttgcgcc

SEQ ID NO: 3435 - DNA, 25 bp, synthetic construct
  misc_feature 1..25: note = Oligonucleotide
  source 1..25: mol_type = other DNA
tgcacggctcaaagcccttccttgc

SEQ ID NO: 3436 - DNA, 25 bp, synthetic construct
  misc_feature 1..25: note = Oligonucleotide
  source 1..25: mol_type = other DNA
ccatgcacggctcaaagcccttcct

SEQ ID NO: 3437 - DNA, 25 bp, synthetic construct
  misc_feature 1..25: note = Oligonucleotide
  source 1..25: mol_type = other DNA
ggcccatgcacggctcaaagccctt

SEQ ID NO: 3438 - DNA, 25 bp, synthetic construct
  misc_feature 1..25: note = Oligonucleotide
  source 1..25: mol_type = other DNA
gtgggcccatgcacggctcaaagcc

SEQ ID NO: 3439 - DNA, 25 bp, synthetic construct
  misc_feature 1..25: note = Oligonucleotide
  source 1..25: mol_type = other DNA
cgggtgggcccatgcacggctcaaa

SEQ ID NO: 3440 - DNA, 25 bp, synthetic construct
  misc_feature 1..25: note = Oligonucleotide
  source 1..25: mol_type = other DNA
actcgggtgggcccatgcacggctc

SEQ ID NO: 3441 - DNA, 25 bp, synthetic construct
  misc_feature 1..25: note = Oligonucleotide
  source 1..25: mol_type = other DNA
cccactcgggtgggcccatgcacgg

SEQ ID NO: 3442 - DNA, 25 bp, synthetic construct
  misc_feature 1..25: note = Oligonucleotide
  source 1..25: mol_type = other DNA
attcccactcgggtgggcccatgca

SEQ ID NO: 3443 - DNA, 25 bp, synthetic construct
  misc_feature 1..25: note = Oligonucleotide
  source 1..25: mol_type = other DNA
ccaattcccactcgggtgggcccat

SEQ ID NO: 3444 - DNA, 25 bp, synthetic construct
  misc_feature 1..25: note = Oligonucleotide
  source 1..25: mol_type = other DNA
gccccaattcccactcgggtgggcc

SEQ ID NO: 3445 - DNA, 25 bp, synthetic construct
  misc_feature 1..25: note = Oligonucleotide
  source 1..25: mol_type = other DNA
acggccccaattcccactcgggtgg

SEQ ID NO: 3446 - DNA, 25 bp, synthetic construct
  misc_feature 1..25: note = Oligonucleotide
  source 1..25: mol_type = other DNA
accacggccccaattcccactcggg

SEQ ID NO: 3447 - DNA, 25 bp, synthetic construct
  misc_feature 1..25: note = Oligonucleotide
  source 1..25: mol_type = other DNA
cccaccacggccccaattcccactc

SEQ ID NO: 3448 - DNA, 25 bp, synthetic construct
  misc_feature 1..25: note = Oligonucleotide
  source 1..25: mol_type = other DNA
actcccaccacggccccaattccca

SEQ ID NO: 3449 - DNA, 25 bp, synthetic construct
  misc_feature 1..25: note = Oligonucleotide
  source 1..25: mol_type = other DNA
tgcactcccaccacggccccaattc

SEQ ID NO: 3450 - DNA, 25 bp, synthetic construct
  misc_feature 1..25: note = Oligonucleotide
  source 1..25: mol_type = other DNA
tcctgcactcccaccacggccccaa

SEQ ID NO: 3451 - DNA, 25 bp, synthetic construct
  misc_feature 1..25: note = Oligonucleotide
  source 1..25: mol_type = other DNA
cggtcctgcactcccaccacggccc

SEQ ID NO: 3452 - DNA, 25 bp, synthetic construct
  misc_feature 1..25: note = Oligonucleotide
  source 1..25: mol_type = other DNA
ccacggtcctgcactcccaccacgg

SEQ ID NO: 3453 - DNA, 25 bp, synthetic construct
  misc_feature 1..25: note = Oligonucleotide
  source 1..25: mol_type = other DNA
caaccacggtcctgcactcccacca

SEQ ID NO: 3454 - DNA, 25 bp, synthetic construct
  misc_feature 1..25: note = Oligonucleotide
  source 1..25: mol_type = other DNA
tgtcaaccacggtcctgcactccca

SEQ ID NO: 3455 - DNA, 25 bp, synthetic construct
  misc_feature 1..25: note = Oligonucleotide
  source 1..25: mol_type = other DNA
aattgtcaaccacggtcctgcactc

SEQ ID NO: 3456 - DNA, 25 bp, synthetic construct
  misc_feature 1..25: note = Oligonucleotide
  source 1..25: mol_type = other DNA
cacaattgtcaaccacggtcctgca

SEQ ID NO: 3457 - DNA, 25 bp, synthetic construct
  misc_feature 1..25: note = Oligonucleotide
  source 1..25: mol_type = other DNA
catcacaattgtcaaccacggtcct

SEQ ID NO: 3458 - DNA, 25 bp, synthetic construct
  misc_feature 1..25: note = Oligonucleotide
  source 1..25: mol_type = other DNA
tgacatcacaattgtcaaccacggt

SEQ ID NO: 3459 - DNA, 25 bp, synthetic construct
  misc_feature 1..25: note = Oligonucleotide
  source 1..25: mol_type = other DNA
acctgacatcacaattgtcaaccac

SEQ ID NO: 3460 - DNA, 25 bp, synthetic construct
  misc_feature 1..25: note = Oligonucleotide
  source 1..25: mol_type = other DNA
gtcacctgacatcacaattgtcaac

SEQ ID NO: 3461 - DNA, 25 bp, synthetic construct
  misc_feature 1..25: note = Oligonucleotide
  source 1..25: mol_type = other DNA
cctgtcacctgacatcacaattgtc

SEQ ID NO: 3462 - DNA, 25 bp, synthetic construct
  misc_feature 1..25: note = Oligonucleotide
  source 1..25: mol_type = other DNA
tgacctgtcacctgacatcacaatt

SEQ ID NO: 3463 - DNA, 25 bp, synthetic construct
  misc_feature 1..25: note = Oligonucleotide
  source 1..25: mol_type = other DNA
gtctgacctgtcacctgacatcaca

SEQ ID NO: 3464 - DNA, 25 bp, synthetic construct
  misc_feature 1..25: note = Oligonucleotide
  source 1..25: mol_type = other DNA
ccagtctgacctgtcacctgacatc

SEQ ID NO: 3465 - DNA, 25 bp, synthetic construct
  misc_feature 1..25: note = Oligonucleotide
  source 1..25: mol_type = other DNA
ctaccagtctgacctgtcacctgac

SEQ ID NO: 3466 - DNA, 25 bp, synthetic construct
  misc_feature 1..25: note = Oligonucleotide
  source 1..25: mol_type = other DNA
tccctaccagtctgacctgtcacct

SEQ ID NO: 3467 - DNA, 25 bp, synthetic construct
  misc_feature 1..25: note = Oligonucleotide
  source 1..25: mol_type = other DNA
acatccctaccagtctgacctgtca

SEQ ID NO: 3468 - DNA, 25 bp, synthetic construct
  misc_feature 1..25: note = Oligonucleotide
  source 1..25: mol_type = other DNA
gccacatccctaccagtctgacctg

SEQ ID NO: 3469 - DNA, 25 bp, synthetic construct
  misc_feature 1..25: note = Oligonucleotide
  source 1..25: mol_type = other DNA
cccgccacatccctaccagtctgac

SEQ ID NO: 3470 - DNA, 25 bp, synthetic construct
  misc_feature 1..25: note = Oligonucleotide
  source 1..25: mol_type = other DNA
acccccgccacatccctaccagtct

SEQ ID NO: 3471 - DNA, 25 bp, synthetic construct
  misc_feature 1..25: note = Oligonucleotide
  source 1..25: mol_type = other DNA
gcaacccccgccacatccctaccag

SEQ ID NO: 3472 - DNA, 25 bp, synthetic construct
  misc_feature 1..25: note = Oligonucleotide
  source 1..25: mol_type = other DNA
caggcaacccccgccacatccctac

SEQ ID NO: 3473 - DNA, 25 bp, synthetic construct
  misc_feature 1..25: note = Oligonucleotide
  source 1..25: mol_type = other DNA
cttcaggcaacccccgccacatccc

SEQ ID NO: 3474 - DNA, 25 bp, synthetic construct
  misc_feature 1..25: note = Oligonucleotide
  source 1..25: mol_type = other DNA
caccttcaggcaacccccgccacat

SEQ ID NO: 3475 - DNA, 25 bp, synthetic construct
  misc_feature 1..25: note = Oligonucleotide
  source 1..25: mol_type = other DNA
ggccaccttcaggcaacccccgcca

SEQ ID NO: 3476 - DNA, 25 bp, synthetic construct
  misc_feature 1..25: note = Oligonucleotide
  source 1..25: mol_type = other DNA
tcaggccaccttcaggcaacccccg

SEQ ID NO: 3477 - DNA, 25 bp, synthetic construct
  misc_feature 1..25: note = Oligonucleotide
  source 1..25: mol_type = other DNA
gcctcaggccaccttcaggcaaccc

SEQ ID NO: 3478 - DNA, 25 bp, synthetic construct
  misc_feature 1..25: note = Oligonucleotide
  source 1..25: mol_type = other DNA
caagcctcaggccaccttcaggcaa

SEQ ID NO: 3479 - DNA, 25 bp, synthetic construct
  misc_feature 1..25: note = Oligonucleotide
  source 1..25: mol_type = other DNA
cggcaagcctcaggccaccttcagg

SEQ ID NO: 3480 - DNA, 25 bp, synthetic construct
  misc_feature 1..25: note = Oligonucleotide
  source 1..25: mol_type = other DNA
ctccggcaagcctcaggccaccttc

SEQ ID NO: 3481 - DNA, 25 bp, synthetic construct
  misc_feature 1..25: note = Oligonucleotide
  source 1..25: mol_type = other DNA
ttcctccggcaagcctcaggccacc

SEQ ID NO: 3482 - DNA, 25 bp, synthetic construct
  misc_feature 1..25: note = Oligonucleotide
  source 1..25: mol_type = other DNA
gccttcctccggcaagcctcaggcc

SEQ ID NO: 3483 - DNA, 25 bp, synthetic construct
  misc_feature 1..25: note = Oligonucleotide
  source 1..25: mol_type = other DNA
cccgccttcctccggcaagcctcag

SEQ ID NO: 3484 - DNA, 25 bp, synthetic construct
  misc_feature 1..25: note = Oligonucleotide
  source 1..25: mol_type = other DNA
tcacccgccttcctccggcaagcct

SEQ ID NO: 3485 - DNA, 25 bp, synthetic construct
  misc_feature 1..25: note = Oligonucleotide
  source 1..25: mol_type = other DNA
acatcacccgccttcctccggcaag

SEQ ID NO: 3486 - DNA, 25 bp, synthetic construct
  misc_feature 1..25: note = Oligonucleotide
  source 1..25: mol_type = other DNA
tgaacatcacccgccttcctccggc

SEQ ID NO: 3487 - DNA, 25 bp, synthetic construct
  misc_feature 1..25: note = Oligonucleotide
  source 1..25: mol_type = other DNA
atctgaacatcacccgccttcctcc

SEQ ID NO: 3488 - DNA, 25 bp, synthetic construct
  misc_feature 1..25: note = Oligonucleotide
  source 1..25: mol_type = other DNA
atcatctgaacatcacccgccttcc

SEQ ID NO: 3489 - DNA, 25 bp, synthetic construct
  misc_feature 1..25: note = Oligonucleotide
  source 1..25: mol_type = other DNA
tccatcatctgaacatcacccgcct

SEQ ID NO: 3490 - DNA, 25 bp, synthetic construct
  misc_feature 1..25: note = Oligonucleotide
  source 1..25: mol_type = other DNA
gcctccatcatctgaacatcacccg

SEQ ID NO: 3491 - DNA, 25 bp, synthetic construct
  misc_feature 1..25: note = Oligonucleotide
  source 1..25: mol_type = other DNA
aaggcctccatcatctgaacatcac

SEQ ID NO: 3492 - DNA, 25 bp, synthetic construct
  misc_feature 1..25: note = Oligonucleotide
  source 1..25: mol_type = other DNA
accaaggcctccatcatctgaacat

SEQ ID NO: 3493 - DNA, 25 bp, synthetic construct
  misc_feature 1..25: note = Oligonucleotide
  source 1..25: mol_type = other DNA
ggcaccaaggcctccatcatctgaa

SEQ ID NO: 3494 - DNA, 25 bp, synthetic construct
  misc_feature 1..25: note = Oligonucleotide
  source 1..25: mol_type = other DNA
cctggcaccaaggcctccatcatct

SEQ ID NO: 3495 - DNA, 25 bp, synthetic construct
  misc_feature 1..25: note = Oligonucleotide
  source 1..25: mol_type = other DNA
cagcctggcaccaaggcctccatca

SEQ ID NO: 3496 - DNA, 25 bp, synthetic construct
  misc_feature 1..25: note = Oligonucleotide
  source 1..25: mol_type = other DNA
agtcagcctggcaccaaggcctcca

SEQ ID NO: 3497 - DNA, 25 bp, synthetic construct
  misc_feature 1..25: note = Oligonucleotide
  source 1..25: mol_type = other DNA
gtcagtcagcctggcaccaaggcct

SEQ ID NO: 3498 - DNA, 25 bp, synthetic construct
  misc_feature 1..25: note = Oligonucleotide
  source 1..25: mol_type = other DNA
gccgtcagtcagcctggcaccaagg

SEQ ID NO: 3499 - DNA, 25 bp, synthetic construct
  misc_feature 1..25: note = Oligonucleotide
  source 1..25: mol_type = other DNA
ccggccgtcagtcagcctggcacca

SEQ ID NO: 3500 - DNA, 25 bp, synthetic construct
  misc_feature 1..25: note = Oligonucleotide
  source 1..25: mol_type = other DNA
acaccggccgtcagtcagcctggca

SEQ ID NO: 3501 - DNA, 25 bp, synthetic construct
  misc_feature 1..25: note = Oligonucleotide
  source 1..25: mol_type = other DNA
ggaacaccggccgtcagtcagcctg

SEQ ID NO: 3502 - DNA, 17 bp, synthetic construct
  misc_feature 1..17: note = Oligonucleotide
  source 1..17: mol_type = other DNA
aaactgctcagataaag

SEQ ID NO: 3503 - DNA, 17 bp, synthetic construct
  misc_feature 1..17: note = Oligonucleotide
  source 1..17: mol_type = other DNA
tcgaaactgctcagata

SEQ ID NO: 3504 - DNA, 17 bp, synthetic construct
  misc_feature 1..17: note = Oligonucleotide
  source 1..17: mol_type = other DNA
gtatcgaaactgctcag

SEQ ID NO: 3505 - DNA, 17 bp, synthetic construct
  misc_feature 1..17: note = Oligonucleotide
  source 1..17: mol_type = other DNA
cttgtatcgaaactgct

SEQ ID NO: 3506 - DNA, 17 bp, synthetic construct
  misc_feature 1..17: note = Oligonucleotide
  source 1..17: mol_type = other DNA
ccgcttgtatcgaaact

SEQ ID NO: 3507 - DNA, 17 bp, synthetic construct
  misc_feature 1..17: note = Oligonucleotide
  source 1..17: mol_type = other DNA
tcgccgcttgtatcgaa

SEQ ID NO: 3508 - DNA, 17 bp, synthetic construct
  misc_feature 1..17: note = Oligonucleotide
  source 1..17: mol_type = other DNA
aactcgccgcttgtatc

SEQ ID NO: 3509 - DNA, 17 bp, synthetic construct
  misc_feature 1..17: note = Oligonucleotide
  source 1..17: mol_type = other DNA
ataaactcgccgcttgt

SEQ ID NO: 3510 - DNA, 17 bp, synthetic construct
  misc_feature 1..17: note = Oligonucleotide
  source 1..17: mol_type = other DNA
ggcataaactcgccgct

SEQ ID NO: 3511 - DNA, 17 bp, synthetic construct
  misc_feature 1..17: note = Oligonucleotide
  source 1..17: mol_type = other DNA
ctgggcataaactcgcc

SEQ ID NO: 3512 - DNA, 17 bp, synthetic construct
  misc_feature 1..17: note = Oligonucleotide
  source 1..17: mol_type = other DNA
gttctgggcataaactc

SEQ ID NO: 3513 - DNA, 17 bp, synthetic construct
  misc_feature 1..17: note = Oligonucleotide
  source 1..17: mol_type = other DNA
gaggttctgggcataaa

SEQ ID NO: 3514 - DNA, 17 bp, synthetic construct
  misc_feature 1..17: note = Oligonucleotide
  source 1..17: mol_type = other DNA
gatgaggttctgggcat

SEQ ID NO: 3515 - DNA, 17 bp, synthetic construct
  misc_feature 1..17: note = Oligonucleotide
  source 1..17: mol_type = other DNA
atcgatgaggttctggg

SEQ ID NO: 3516 - DNA, 17 bp, synthetic construct
  misc_feature 1..17: note = Oligonucleotide
  source 1..17: mol_type = other DNA
atcatcgatgaggttct

SEQ ID NO: 3517 - DNA, 17 bp, synthetic construct
  misc_feature 1..17: note = Oligonucleotide
  source 1..17: mol_type = other DNA
cttatcatcgatgaggt

SEQ ID NO: 3518 - DNA, 17 bp, synthetic construct
  misc_feature 1..17: note = Oligonucleotide
  source 1..17: mol_type = other DNA
ctgcttatcatcgatga

SEQ ID NO: 3519 - DNA, 17 bp, synthetic construct
  misc_feature 1..17: note = Oligonucleotide
  source 1..17: mol_type = other DNA
aaactgcttatcatcga

SEQ ID NO: 3520 - DNA, 17 bp, synthetic construct
  misc_feature 1..17: note = Oligonucleotide
  source 1..17: mol_type = other DNA
tgcaaactgcttatcat

SEQ ID NO: 3521 - DNA, 17 bp, synthetic construct
  misc_feature 1..17: note = Oligonucleotide
  source 1..17: mol_type = other DNA
ctttgcaaactgcttat

SEQ ID NO: 3522 - DNA, 17 bp, synthetic construct
  misc_feature 1..17: note = Oligonucleotide
  source 1..17: mol_type = other DNA
aagctttgcaaactgct

SEQ ID NO: 3523 - DNA, 17 bp, synthetic construct
  misc_feature 1..17: note = Oligonucleotide
  source 1..17: mol_type = other DNA
gtgaagctttgcaaact

SEQ ID NO: 3524 - DNA, 17 bp, synthetic construct
  misc_feature 1..17: note = Oligonucleotide
  source 1..17: mol_type = other DNA
tgtgtgaagctttgcaa

SEQ ID NO: 3525 - DNA, 17 bp, synthetic construct
  misc_feature 1..17: note = Oligonucleotide
  source 1..17: mol_type = other DNA
ctttgtgtgaagctttg

SEQ ID NO: 3526 - DNA, 17 bp, synthetic construct
  misc_feature 1..17: note = Oligonucleotide
  source 1..17: mol_type = other DNA
tacctttgtgtgaagct

SEQ ID NO: 3527 - DNA, 17 bp, synthetic construct
  misc_feature 1..17: note = Oligonucleotide
  source 1..17: mol_type = other DNA
ctttacctttgtgtgaa

SEQ ID NO: 3528 - DNA, 17 bp, synthetic construct
  misc_feature 1..17: note = Oligonucleotide
  source 1..17: mol_type = other DNA
atcctttacctttgtgt

SEQ ID NO: 3529 - DNA, 17 bp, synthetic construct
  misc_feature 1..17: note = Oligonucleotide
  source 1..17: mol_type = other DNA
gtgatcctttacctttg

SEQ ID NO: 3530 - DNA, 17 bp, synthetic construct
  misc_feature 1..17: note = Oligonucleotide
  source 1..17: mol_type = other DNA
cccgtgatcctttacct

SEQ ID NO: 3531 - DNA, 17 bp, synthetic construct
  misc_feature 1..17: note = Oligonucleotide
  source 1..17: mol_type = other DNA
ctccccgtgatccttta

SEQ ID NO: 3532 - DNA, 17 bp, synthetic construct
  misc_feature 1..17: note = Oligonucleotide
  source 1..17: mol_type = other DNA
cccctccccgtgatcct

SEQ ID NO: 3533 - DNA, 17 bp, synthetic construct
  misc_feature 1..17: note = Oligonucleotide
  source 1..17: mol_type = other DNA
agccccctccccgtgat

SEQ ID NO: 3534 - DNA, 17 bp, synthetic construct
  misc_feature 1..17: note = Oligonucleotide
  source 1..17: mol_type = other DNA
aggagccccctccccgt

SEQ ID NO: 3535 - DNA, 17 bp, synthetic construct
  misc_feature 1..17: note = Oligonucleotide
  source 1..17: mol_type = other DNA
ctcaggagccccctccc

SEQ ID NO: 3536 - DNA, 17 bp, synthetic construct
  misc_feature 1..17: note = Oligonucleotide
  source 1..17: mol_type = other DNA
aacctcaggagccccct

SEQ ID NO: 3537 - DNA, 17 bp, synthetic construct
  misc_feature 1..17: note = Oligonucleotide
  source 1..17: mol_type = other DNA
gggaacctcaggagccc

SEQ ID NO: 3538 - DNA, 17 bp, synthetic construct
  misc_feature 1..17: note = Oligonucleotide
  source 1..17: mol_type = other DNA
ggagggaacctcaggag

SEQ ID NO: 3539 - DNA, 17 bp, synthetic construct
  misc_feature 1..17: note = Oligonucleotide
  source 1..17: mol_type = other DNA
gcaggagggaacctcag

SEQ ID NO: 3540 - DNA, 17 bp, synthetic construct
  misc_feature 1..17: note = Oligonucleotide
  source 1..17: mol_type = other DNA
gaggcaggagggaacct

SEQ ID NO: 3541 - DNA, 17 bp, synthetic construct
  misc_feature 1..17: note = Oligonucleotide
  source 1..17: mol_type = other DNA
agggaggcaggagggaa

SEQ ID NO: 3542 - DNA, 17 bp, synthetic construct
  misc_feature 1..17: note = Oligonucleotide
  source 1..17: mol_type = other DNA
cacagggaggcaggagg

SEQ ID NO: 3543 - DNA, 17 bp, synthetic construct
  misc_feature 1..17: note = Oligonucleotide
  source 1..17: mol_type = other DNA
agccacagggaggcagg

SEQ ID NO: 3544 - DNA, 17 bp, synthetic construct
  misc_feature 1..17: note = Oligonucleotide
  source 1..17: mol_type = other DNA
agcagccacagggaggc

SEQ ID NO: 3545 - DNA, 17 bp, synthetic construct
  misc_feature 1..17: note = Oligonucleotide
  source 1..17: mol_type = other DNA
gacagcagccacaggga

SEQ ID NO: 3546 - DNA, 17 bp, synthetic construct
  misc_feature 1..17: note = Oligonucleotide
  source 1..17: mol_type = other DNA
ggggacagcagccacag

SEQ ID NO: 3547 - DNA, 17 bp, synthetic construct
  misc_feature 1..17: note = Oligonucleotide
  source 1..17: mol_type = other DNA
gtgggggacagcagcca

SEQ ID NO: 3548 - DNA, 17 bp, synthetic construct
  misc_feature 1..17: note = Oligonucleotide
  source 1..17: mol_type = other DNA
ggggtgggggacagcag

SEQ ID NO: 3549 - DNA, 17 bp, synthetic construct
  misc_feature 1..17: note = Oligonucleotide
  source 1..17: mol_type = other DNA
gctggggtgggggacag

SEQ ID NO: 3550 - DNA, 17 bp, synthetic construct
  misc_feature 1..17: note = Oligonucleotide
  source 1..17: mol_type = other DNA
caagctggggtggggga

SEQ ID NO: 3551 - DNA, 17 bp, synthetic construct
  misc_feature 1..17: note = Oligonucleotide
  source 1..17: mol_type = other DNA
ccccaagctggggtggg

SEQ ID NO: 3552 - DNA, 17 bp, synthetic construct
  misc_feature 1..17: note = Oligonucleotide
  source 1..17: mol_type = other DNA
cagccccaagctggggt

SEQ ID NO: 3553 - DNA, 17 bp, synthetic construct
  misc_feature 1..17: note = Oligonucleotide
  source 1..17: mol_type = other DNA
ggtcagccccaagctgg

SEQ ID NO: 3554 - DNA, 17 bp, synthetic construct
  misc_feature 1..17: note = Oligonucleotide
  source 1..17: mol_type = other DNA
tgtggtcagccccaagc

SEQ ID NO: 3555 - DNA, 17 bp, synthetic construct
  misc_feature 1..17: note = Oligonucleotide
  source 1..17: mol_type = other DNA
gactgtggtcagcccca

SEQ ID NO: 3556 - DNA, 17 bp, synthetic construct
  misc_feature 1..17: note = Oligonucleotide
  source 1..17: mol_type = other DNA
ggggactgtggtcagcc

SEQ ID NO: 3557 - DNA, 17 bp, synthetic construct
  misc_feature 1..17: note = Oligonucleotide
  source 1..17: mol_type = other DNA
ctgggggactgtggtca

SEQ ID NO: 3558 - DNA, 17 bp, synthetic construct
  misc_feature 1..17: note = Oligonucleotide
  source 1..17: mol_type = other DNA
aagctgggggactgtgg

SEQ ID NO: 3559 - DNA, 17 bp, synthetic construct
  misc_feature 1..17: note = Oligonucleotide
  source 1..17: mol_type = other DNA
ctaaagctgggggactg

SEQ ID NO: 3560 - DNA, 17 bp, synthetic construct
  misc_feature 1..17: note = Oligonucleotide
  source 1..17: mol_type = other DNA
gagctaaagctggggga

SEQ ID NO: 3561 - DNA, 17 bp, synthetic construct
  misc_feature 1..17: note = Oligonucleotide
  source 1..17: mol_type = other DNA
actgagctaaagctggg

SEQ ID NO: 3562 - DNA, 17 bp, synthetic construct
  misc_feature 1..17: note = Oligonucleotide
  source 1..17: mol_type = other DNA
tggactgagctaaagct

SEQ ID NO: 3563 - DNA, 17 bp, synthetic construct
  misc_feature 1..17: note = Oligonucleotide
  source 1..17: mol_type = other DNA
aaatggactgagctaaa

SEQ ID NO: 3564 - DNA, 17 bp, synthetic construct
  misc_feature 1..17: note = Oligonucleotide
  source 1..17: mol_type = other DNA
gggaaatggactgagct

SEQ ID NO: 3565 - DNA, 17 bp, synthetic construct
  misc_feature 1..17: note = Oligonucleotide
  source 1..17: mol_type = other DNA
atggggaaatggactga

SEQ ID NO: 3566 - DNA, 17 bp, synthetic construct
  misc_feature 1..17: note = Oligonucleotide
  source 1..17: mol_type = other DNA
atgatggggaaatggac

SEQ ID NO: 3567 - DNA, 17 bp, synthetic construct
  misc_feature 1..17: note = Oligonucleotide
  source 1..17: mol_type = other DNA
ctgatgatggggaaatg

SEQ ID NO: 3568 - DNA, 17 bp, synthetic construct
  misc_feature 1..17: note = Oligonucleotide
  source 1..17: mol_type = other DNA
cccctgatgatggggaa

SEQ ID NO: 3569 - DNA, 17 bp, synthetic construct
  misc_feature 1..17: note = Oligonucleotide
  source 1..17: mol_type = other DNA
gggcccctgatgatggg

SEQ ID NO: 3570 - DNA, 17 bp, synthetic construct
  misc_feature 1..17: note = Oligonucleotide
  source 1..17: mol_type = other DNA
tctgggcccctgatgat

SEQ ID NO: 3571 - DNA, 17 bp, synthetic construct
  misc_feature 1..17: note = Oligonucleotide
  source 1..17: mol_type = other DNA
ggctctgggcccctgat

SEQ ID NO: 3572 - DNA, 17 bp, synthetic construct
  misc_feature 1..17: note = Oligonucleotide
  source 1..17: mol_type = other DNA
acaggctctgggcccct

SEQ ID NO: 3573 - DNA, 17 bp, synthetic construct
  misc_feature 1..17: note = Oligonucleotide
  source 1..17: mol_type = other DNA
agtacaggctctgggcc

SEQ ID NO: 3574 - DNA, 17 bp, synthetic construct
  misc_feature 1..17: note = Oligonucleotide
  source 1..17: mol_type = other DNA
cccagtacaggctctgg

SEQ ID NO: 3575 - DNA, 17 bp, synthetic construct
  misc_feature 1..17: note = Oligonucleotide
  source 1..17: mol_type = other DNA
acacccagtacaggctc

SEQ ID NO: 3576 - DNA, 17 bp, synthetic construct
  misc_feature 1..17: note = Oligonucleotide
  source 1..17: mol_type = other DNA
gccacacccagtacagg

SEQ ID NO: 3577 - DNA, 17 bp, synthetic construct
  misc_feature 1..17: note = Oligonucleotide
  source 1..17: mol_type = other DNA
tcagccacacccagtac

SEQ ID NO: 3578 - DNA, 17 bp, synthetic construct
  misc_feature 1..17: note = Oligonucleotide
  source 1..17: mol_type = other DNA
ccttcagccacacccag

SEQ ID NO: 3579 - DNA, 17 bp, synthetic construct
  misc_feature 1..17: note = Oligonucleotide
  source 1..17: mol_type = other DNA
agcccttcagccacacc

SEQ ID NO: 3580 - DNA, 17 bp, synthetic construct
  misc_feature 1..17: note = Oligonucleotide
  source 1..17: mol_type = other DNA
cccagcccttcagccac

SEQ ID NO: 3581 - DNA, 17 bp, synthetic construct
  misc_feature 1..17: note = Oligonucleotide
  source 1..17: mol_type = other DNA
gtgcccagcccttcagc

SEQ ID NO: 3582 - DNA, 17 bp, synthetic construct
  misc_feature 1..17: note = Oligonucleotide
  source 1..17: mol_type = other DNA
tctgtgcccagcccttc

SEQ ID NO: 3583 - DNA, 17 bp, synthetic construct
  misc_feature 1..17: note = Oligonucleotide
  source 1..17: mol_type = other DNA
gaatctgtgcccagccc

SEQ ID NO: 3584 - DNA, 17 bp, synthetic construct
  misc_feature 1..17: note = Oligonucleotide
  source 1..17: mol_type = other DNA
caggaatctgtgcccag

SEQ ID NO: 3585 - DNA, 17 bp, synthetic construct
  misc_feature 1..17: note = Oligonucleotide
  source 1..17: mol_type = other DNA
ggccaggaatctgtgcc

SEQ ID NO: 3586 - DNA, 17 bp, synthetic construct
  misc_feature 1..17: note = Oligonucleotide
  source 1..17: mol_type = other DNA
tggggccaggaatctgt

SEQ ID NO: 3587 - DNA, 17 bp, synthetic construct
  misc_feature 1..17: note = Oligonucleotide
  source 1..17: mol_type = other DNA
ccatggggccaggaatc

SEQ ID NO: 3588 - DNA, 17 bp, synthetic construct
  misc_feature 1..17: note = Oligonucleotide
  source 1..17: mol_type = other DNA
caaccatggggccagga

SEQ ID NO: 3589 - DNA, 17 bp, synthetic construct
  misc_feature 1..17: note = Oligonucleotide
  source 1..17: mol_type = other DNA
ccccaaccatggggcca

SEQ ID NO: 3590 - DNA, 17 bp, synthetic construct
  misc_feature 1..17: note = Oligonucleotide
  source 1..17: mol_type = other DNA
tgaccccaaccatgggg

SEQ ID NO: 3591 - DNA, 17 bp, synthetic construct
  misc_feature 1..17: note = Oligonucleotide
  source 1..17: mol_type = other DNA
acctgaccccaaccatg

SEQ ID NO: 3592 - DNA, 17 bp, synthetic construct
  misc_feature 1..17: note = Oligonucleotide
  source 1..17: mol_type = other DNA
accacctgaccccaacc

SEQ ID NO: 3593 - DNA, 17 bp, synthetic construct
  misc_feature 1..17: note = Oligonucleotide
  source 1..17: mol_type = other DNA
tgtaccacctgacccca

SEQ ID NO: 3594 - DNA, 17 bp, synthetic construct
  misc_feature 1..17: note = Oligonucleotide
  source 1..17: mol_type = other DNA
cactgtaccacctgacc

SEQ ID NO: 3595 - DNA, 17 bp, synthetic construct
  misc_feature 1..17: note = Oligonucleotide
  source 1..17: mol_type = other DNA
catcactgtaccacctg

SEQ ID NO: 3596 - DNA, 17 bp, synthetic construct
  misc_feature 1..17: note = Oligonucleotide
  source 1..17: mol_type = other DNA
acacatcactgtaccac

SEQ ID NO: 3597 - DNA, 17 bp, synthetic construct
  misc_feature 1..17: note = Oligonucleotide
  source 1..17: mol_type = other DNA
ggaacacatcactgtac

SEQ ID NO: 3598 - DNA, 17 bp, synthetic construct
  misc_feature 1..17: note = Oligonucleotide
  source 1..17: mol_type = other DNA
actggaacacatcactg

SEQ ID NO: 3599 - DNA, 17 bp, synthetic construct
  misc_feature 1..17: note = Oligonucleotide
  source 1..17: mol_type = other DNA
ctaactggaacacatca

SEQ ID NO: 3600 - DNA, 17 bp, synthetic construct
  misc_feature 1..17: note = Oligonucleotide
  source 1..17: mol_type = other DNA
gatctaactggaacaca

SEQ ID NO: 3601 - DNA, 17 bp, synthetic construct
  misc_feature 1..17: note = Oligonucleotide
  source 1..17: mol_type = other DNA
tctgatctaactggaac

SEQ ID NO: 3602 - DNA, 17 bp, synthetic construct
  misc_feature 1..17: note = Oligonucleotide
  source 1..17: mol_type = other DNA
gagtctgatctaactgg

SEQ ID NO: 3603 - DNA, 17 bp, synthetic construct
  misc_feature 1..17: note = Oligonucleotide
  source 1..17: mol_type = other DNA
caagagtctgatctaac

SEQ ID NO: 3604 - DNA, 17 bp, synthetic construct
  misc_feature 1..17: note = Oligonucleotide
  source 1..17: mol_type = other DNA
cggcaagagtctgatct

SEQ ID NO: 3605 - DNA, 17 bp, synthetic construct
  misc_feature 1..17: note = Oligonucleotide
  source 1..17: mol_type = other DNA
ggtcggcaagagtctga

SEQ ID NO: 3606 - DNA, 17 bp, synthetic construct
  misc_feature 1..17: note = Oligonucleotide
  source 1..17: mol_type = other DNA
gggggtcggcaagagtc

SEQ ID NO: 3607 - DNA, 17 bp, synthetic construct
  misc_feature 1..17: note = Oligonucleotide
  source 1..17: mol_type = other DNA
caggggggtcggcaaga

SEQ ID NO: 3608 - DNA, 17 bp, synthetic construct
  misc_feature 1..17: note = Oligonucleotide
  source 1..17: mol_type = other DNA
agccaggggggtcggca

SEQ ID NO: 3609 - DNA, 17 bp, synthetic construct
  misc_feature 1..17: note = Oligonucleotide
  source 1..17: mol_type = other DNA
ctaagccaggggggtcg

SEQ ID NO: 3610 - DNA, 17 bp, synthetic construct
  misc_feature 1..17: note = Oligonucleotide
  source 1..17: mol_type = other DNA
cccctaagccagggggg

SEQ ID NO: 3611 - DNA, 17 bp, synthetic construct
  misc_feature 1..17: note = Oligonucleotide
  source 1..17: mol_type = other DNA
cagcccctaagccaggg

SEQ ID NO: 3612 - DNA, 17 bp, synthetic construct
  misc_feature 1..17: note = Oligonucleotide
  source 1..17: mol_type = other DNA
ctccagcccctaagcca

SEQ ID NO: 3613 - DNA, 17 bp, synthetic construct
  misc_feature 1..17: note = Oligonucleotide
  source 1..17: mol_type = other DNA
acactccagcccctaag

SEQ ID NO: 3614 - DNA, 17 bp, synthetic construct
  misc_feature 1..17: note = Oligonucleotide
  source 1..17: mol_type = other DNA
aggacactccagcccct

SEQ ID NO: 3615 - DNA, 17 bp, synthetic construct
  misc_feature 1..17: note = Oligonucleotide
  source 1..17: mol_type = other DNA
cacaggacactccagcc

SEQ ID NO: 3616 - DNA, 17 bp, synthetic construct
  misc_feature 1..17: note = Oligonucleotide
  source 1..17: mol_type = other DNA
tctcacaggacactcca

SEQ ID NO: 3617 - DNA, 17 bp, synthetic construct
  misc_feature 1..17: note = Oligonucleotide
  source 1..17: mol_type = other DNA
gcttctcacaggacact

SEQ ID NO: 3618 - DNA, 17 bp, synthetic construct
  misc_feature 1..17: note = Oligonucleotide
  source 1..17: mol_type = other DNA
ccagcttctcacaggac

SEQ ID NO: 3619 - DNA, 17 bp, synthetic construct
  misc_feature 1..17: note = Oligonucleotide
  source 1..17: mol_type = other DNA
cacccagcttctcacag

SEQ ID NO: 3620 - DNA, 17 bp, synthetic construct
  misc_feature 1..17: note = Oligonucleotide
  source 1..17: mol_type = other DNA
ctccacccagcttctca

SEQ ID NO: 3621 - DNA, 17 bp, synthetic construct
  misc_feature 1..17: note = Oligonucleotide
  source 1..17: mol_type = other DNA
cctctccacccagcttc

SEQ ID NO: 3622 - DNA, 17 bp, synthetic construct
  misc_feature 1..17: note = Oligonucleotide
  source 1..17: mol_type = other DNA
ctccctctccacccagc

SEQ ID NO: 3623 - DNA, 17 bp, synthetic construct
  misc_feature 1..17: note = Oligonucleotide
  source 1..17: mol_type = other DNA
ccactccctctccaccc

SEQ ID NO: 3624 - DNA, 17 bp, synthetic construct
  misc_feature 1..17: note = Oligonucleotide
  source 1..17: mol_type = other DNA
tgtccactccctctcca

SEQ ID NO: 3625 - DNA, 17 bp, synthetic construct
  misc_feature 1..17: note = Oligonucleotide
  source 1..17: mol_type = other DNA
gcttgtccactccctct

SEQ ID NO: 3626 - DNA, 17 bp, synthetic construct
  misc_feature 1..17: note = Oligonucleotide
  source 1..17: mol_type = other DNA
gatgcttgtccactccc

SEQ ID NO: 3627 - DNA, 17 bp, synthetic construct
  misc_feature 1..17: note = Oligonucleotide
  source 1..17: mol_type = other DNA
tcagatgcttgtccact

SEQ ID NO: 3628 - DNA, 17 bp, synthetic construct
  misc_feature 1..17: note = Oligonucleotide
  source 1..17: mol_type = other DNA
acatcagatgcttgtcc

SEQ ID NO: 3629 - DNA, 17 bp, synthetic construct
  misc_feature 1..17: note = Oligonucleotide
  source 1..17: mol_type = other DNA
atcacatcagatgcttg

SEQ ID NO: 3630 - DNA, 17 bp, synthetic construct
  misc_feature 1..17: note = Oligonucleotide
  source 1..17: mol_type = other DNA
gccatcacatcagatgc

SEQ ID NO: 3631 - DNA, 17 bp, synthetic construct
  misc_feature 1..17: note = Oligonucleotide
  source 1..17: mol_type = other DNA
acagccatcacatcaga

SEQ ID NO: 3632 - DNA, 17 bp, synthetic construct
  misc_feature 1..17: note = Oligonucleotide
  source 1..17: mol_type = other DNA
ccgacagccatcacatc

SEQ ID NO: 3633 - DNA, 17 bp, synthetic construct
  misc_feature 1..17: note = Oligonucleotide
  source 1..17: mol_type = other DNA
gtcccgacagccatcac

SEQ ID NO: 3634 - DNA, 17 bp, synthetic construct
  misc_feature 1..17: note = Oligonucleotide
  source 1..17: mol_type = other DNA
cttgtcccgacagccat

SEQ ID NO: 3635 - DNA, 17 bp, synthetic construct
  misc_feature 1..17: note = Oligonucleotide
  source 1..17: mol_type = other DNA
tgccttgtcccgacagc

SEQ ID NO: 3636 - DNA, 17 bp, synthetic construct
  misc_feature 1..17: note = Oligonucleotide
  source 1..17: mol_type = other DNA
gggtgccttgtcccgac

SEQ ID NO: 3637 - DNA, 17 bp, synthetic construct
  misc_feature 1..17: note = Oligonucleotide
  source 1..17: mol_type = other DNA
gctgggtgccttgtccc

SEQ ID NO: 3638 - DNA, 17 bp, synthetic construct
  misc_feature 1..17: note = Oligonucleotide
  source 1..17: mol_type = other DNA
gatgctgggtgccttgt

SEQ ID NO: 3639 - DNA, 17 bp, synthetic construct
  misc_feature 1..17: note = Oligonucleotide
  source 1..17: mol_type = other DNA
ctcgatgctgggtgcct

SEQ ID NO: 3640 - DNA, 17 bp, synthetic construct
  misc_feature 1..17: note = Oligonucleotide
  source 1..17: mol_type = other DNA
ccactcgatgctgggtg

SEQ ID NO: 3641 - DNA, 17 bp, synthetic construct
  misc_feature 1..17: note = Oligonucleotide
  source 1..17: mol_type = other DNA
cgaccactcgatgctgg

SEQ ID NO: 3642 - DNA, 17 bp, synthetic construct
  misc_feature 1..17: note = Oligonucleotide
  source 1..17: mol_type = other DNA
ggtcgaccactcgatgc

SEQ ID NO: 3643 - DNA, 17 bp, synthetic construct
  misc_feature 1..17: note = Oligonucleotide
  source 1..17: mol_type = other DNA
actggtcgaccactcga

SEQ ID NO: 3644 - DNA, 17 bp, synthetic construct
  misc_feature 1..17: note = Oligonucleotide
  source 1..17: mol_type = other DNA
agcactggtcgaccact

SEQ ID NO: 3645 - DNA, 17 bp, synthetic construct
  misc_feature 1..17: note = Oligonucleotide
  source 1..17: mol_type = other DNA
cctagcactggtcgacc

SEQ ID NO: 3646 - DNA, 17 bp, synthetic construct
  misc_feature 1..17: note = Oligonucleotide
  source 1..17: mol_type = other DNA
atgcctagcactggtcg

SEQ ID NO: 3647 - DNA, 17 bp, synthetic construct
  misc_feature 1..17: note = Oligonucleotide
  source 1..17: mol_type = other DNA
caaatgcctagcactgg

SEQ ID NO: 3648 - DNA, 17 bp, synthetic construct
  misc_feature 1..17: note = Oligonucleotide
  source 1..17: mol_type = other DNA
tcacaaatgcctagcac

SEQ ID NO: 3649 - DNA, 17 bp, synthetic construct
  misc_feature 1..17: note = Oligonucleotide
  source 1..17: mol_type = other DNA
taatcacaaatgcctag

SEQ ID NO: 3650 - DNA, 17 bp, synthetic construct
  misc_feature 1..17: note = Oligonucleotide
  source 1..17: mol_type = other DNA
gtctaatcacaaatgcc

SEQ ID NO: 3651 - DNA, 17 bp, synthetic construct
  misc_feature 1..17: note = Oligonucleotide
  source 1..17: mol_type = other DNA
gaggtctaatcacaaat

SEQ ID NO: 3652 - DNA, 17 bp, synthetic construct
  misc_feature 1..17: note = Oligonucleotide
  source 1..17: mol_type = other DNA
tgagaggtctaatcaca

SEQ ID NO: 3653 - DNA, 17 bp, synthetic construct
  misc_feature 1..17: note = Oligonucleotide
  source 1..17: mol_type = other DNA
taatgagaggtctaatc

SEQ ID NO: 3654 - DNA, 17 bp, synthetic construct
  misc_feature 1..17: note = Oligonucleotide
  source 1..17: mol_type = other DNA
gattaatgagaggtcta

SEQ ID NO: 3655 - DNA, 17 bp, synthetic construct
  misc_feature 1..17: note = Oligonucleotide
  source 1..17: mol_type = other DNA
gaggattaatgagaggt

SEQ ID NO: 3656 - DNA, 17 bp, synthetic construct
  misc_feature 1..17: note = Oligonucleotide
  source 1..17: mol_type = other DNA
gaagaggattaatgaga

SEQ ID NO: 3657 - DNA, 17 bp, synthetic construct
  misc_feature 1..17: note = Oligonucleotide
  source 1..17: mol_type = other DNA
ctggaagaggattaatg

SEQ ID NO: 3658 - DNA, 17 bp, synthetic construct
  misc_feature 1..17: note = Oligonucleotide
  source 1..17: mol_type = other DNA
cctctggaagaggatta

SEQ ID NO: 3659 - DNA, 17 bp, synthetic construct
  misc_feature 1..17: note = Oligonucleotide
  source 1..17: mol_type = other DNA
gtccctctggaagagga

SEQ ID NO: 3660 - DNA, 17 bp, synthetic construct
  misc_feature 1..17: note = Oligonucleotide
  source 1..17: mol_type = other DNA
atagtccctctggaaga

SEQ ID NO: 3661 - DNA, 17 bp, synthetic construct
  misc_feature 1..17: note = Oligonucleotide
  source 1..17: mol_type = other DNA
ataatagtccctctgga

SEQ ID NO: 3662 - DNA, 17 bp, synthetic construct
  misc_feature 1..17: note = Oligonucleotide
  source 1..17: mol_type = other DNA
gttataatagtccctct

SEQ ID NO: 3663 - DNA, 17 bp, synthetic construct
  misc_feature 1..17: note = Oligonucleotide
  source 1..17: mol_type = other DNA
agggttataatagtccc

SEQ ID NO: 3664 - DNA, 17 bp, synthetic construct
  misc_feature 1..17: note = Oligonucleotide
  source 1..17: mol_type = other DNA
aacagggttataatagt

SEQ ID NO: 3665 - DNA, 17 bp, synthetic construct
  misc_feature 1..17: note = Oligonucleotide
  source 1..17: mol_type = other DNA
tgaaacagggttataat

SEQ ID NO: 3666 - DNA, 17 bp, synthetic construct
  misc_feature 1..17: note = Oligonucleotide
  source 1..17: mol_type = other DNA
ctgtgaaacagggttat

SEQ ID NO: 3667 - DNA, 17 bp, synthetic construct
  misc_feature 1..17: note = Oligonucleotide
  source 1..17: mol_type = other DNA
catctgtgaaacagggt

SEQ ID NO: 3668 - DNA, 17 bp, synthetic construct
  misc_feature 1..17: note = Oligonucleotide
  source 1..17: mol_type = other DNA
ccccatctgtgaaacag

SEQ ID NO: 3669 - DNA, 17 bp, synthetic construct
  misc_feature 1..17: note = Oligonucleotide
  source 1..17: mol_type = other DNA
tgtccccatctgtgaaa

SEQ ID NO: 3670 - DNA, 17 bp, synthetic construct
  misc_feature 1..17: note = Oligonucleotide
  source 1..17: mol_type = other DNA
ctgtgtccccatctgtg

SEQ ID NO: 3671 - DNA, 17 bp, synthetic construct
  misc_feature 1..17: note = Oligonucleotide
  source 1..17: mol_type = other DNA
actctgtgtccccatct

SEQ ID NO: 3672 - DNA, 17 bp, synthetic construct
  misc_feature 1..17: note = Oligonucleotide
  source 1..17: mol_type = other DNA
ggtactctgtgtcccca

SEQ ID NO: 3673 - DNA, 17 bp, synthetic construct
  misc_feature 1..17: note = Oligonucleotide
  source 1..17: mol_type = other DNA
tcgggtactctgtgtcc

SEQ ID NO: 3674 - DNA, 17 bp, synthetic construct
  misc_feature 1..17: note = Oligonucleotide
  source 1..17: mol_type = other DNA
cagtcgggtactctgtg

SEQ ID NO: 3675 - DNA, 17 bp, synthetic construct
  misc_feature 1..17: note = Oligonucleotide
  source 1..17: mol_type = other DNA
acacagtcgggtactct

SEQ ID NO: 3676 - DNA, 17 bp, synthetic construct
  misc_feature 1..17: note = Oligonucleotide
  source 1..17: mol_type = other DNA
tctacacagtcgggtac

SEQ ID NO: 3677 - DNA, 17 bp, synthetic construct
  misc_feature 1..17: note = Oligonucleotide
  source 1..17: mol_type = other DNA
ctgtctacacagtcggg

SEQ ID NO: 3678 - DNA, 17 bp, synthetic construct
  misc_feature 1..17: note = Oligonucleotide
  source 1..17: mol_type = other DNA
tcactgtctacacagtc

SEQ ID NO: 3679 - DNA, 17 bp, synthetic construct
  misc_feature 1..17: note = Oligonucleotide
  source 1..17: mol_type = other DNA
gcttcactgtctacaca

SEQ ID NO: 3680 - DNA, 17 bp, synthetic construct
  misc_feature 1..17: note = Oligonucleotide
  source 1..17: mol_type = other DNA
ccagcttcactgtctac

SEQ ID NO: 3681 - DNA, 17 bp, synthetic construct
  misc_feature 1..17: note = Oligonucleotide
  source 1..17: mol_type = other DNA
gccccagcttcactgtc

SEQ ID NO: 3682 - DNA, 17 bp, synthetic construct
  misc_feature 1..17: note = Oligonucleotide
  source 1..17: mol_type = other DNA
tcagccccagcttcact

SEQ ID NO: 3683 - DNA, 17 bp, synthetic construct
  misc_feature 1..17: note = Oligonucleotide
  source 1..17: mol_type = other DNA
ggttcagccccagcttc

SEQ ID NO: 3684 - DNA, 17 bp, synthetic construct
  misc_feature 1..17: note = Oligonucleotide
  source 1..17: mol_type = other DNA
ctgggttcagccccagc

SEQ ID NO: 3685 - DNA, 17 bp, synthetic construct
  misc_feature 1..17: note = Oligonucleotide
  source 1..17: mol_type = other DNA
gatctgggttcagcccc

SEQ ID NO: 3686 - DNA, 17 bp, synthetic construct
  misc_feature 1..17: note = Oligonucleotide
  source 1..17: mol_type = other DNA
acagatctgggttcagc

SEQ ID NO: 3687 - DNA, 17 bp, synthetic construct
  misc_feature 1..17: note = Oligonucleotide
  source 1..17: mol_type = other DNA
cagacagatctgggttc

SEQ ID NO: 3688 - DNA, 17 bp, synthetic construct
  misc_feature 1..17: note = Oligonucleotide
  source 1..17: mol_type = other DNA
aatcagacagatctggg

SEQ ID NO: 3689 - DNA, 17 bp, synthetic construct
  misc_feature 1..17: note = Oligonucleotide
  source 1..17: mol_type = other DNA
tggaatcagacagatct

SEQ ID NO: 3690 - DNA, 17 bp, synthetic construct
  misc_feature 1..17: note = Oligonucleotide
  source 1..17: mol_type = other DNA
gcctggaatcagacaga

SEQ ID NO: 3691 - DNA, 17 bp, synthetic construct
  misc_feature 1..17: note = Oligonucleotide
  source 1..17: mol_type = other DNA
agggcctggaatcagac

SEQ ID NO: 3692 - DNA, 17 bp, synthetic construct
  misc_feature 1..17: note = Oligonucleotide
  source 1..17: mol_type = other DNA
cacagggcctggaatca

SEQ ID NO: 3693 - DNA, 17 bp, synthetic construct
  misc_feature 1..17: note = Oligonucleotide
  source 1..17: mol_type = other DNA
gggcacagggcctggaa

SEQ ID NO: 3694 - DNA, 17 bp, synthetic construct
  misc_feature 1..17: note = Oligonucleotide
  source 1..17: mol_type = other DNA
cctgggcacagggcctg

SEQ ID NO: 3695 - DNA, 17 bp, synthetic construct
  misc_feature 1..17: note = Oligonucleotide
  source 1..17: mol_type = other DNA
atgcctgggcacagggc

SEQ ID NO: 3696 - DNA, 17 bp, synthetic construct
  misc_feature 1..17: note = Oligonucleotide
  source 1..17: mol_type = other DNA
ggcatgcctgggcacag

SEQ ID NO: 3697 - DNA, 17 bp, synthetic construct
  misc_feature 1..17: note = Oligonucleotide
  source 1..17: mol_type = other DNA
aaaggcatgcctgggca

SEQ ID NO: 3698 - DNA, 17 bp, synthetic construct
  misc_feature 1..17: note = Oligonucleotide
  source 1..17: mol_type = other DNA
ctcaaaggcatgcctgg

SEQ ID NO: 3699 - DNA, 17 bp, synthetic construct
  misc_feature 1..17: note = Oligonucleotide
  source 1..17: mol_type = other DNA
cacctcaaaggcatgcc

SEQ ID NO: 3700 - DNA, 17 bp, synthetic construct
  misc_feature 1..17: note = Oligonucleotide
  source 1..17: mol_type = other DNA
agacacctcaaaggcat

SEQ ID NO: 3701 - DNA, 17 bp, synthetic construct
  misc_feature 1..17: note = Oligonucleotide
  source 1..17: mol_type = other DNA
agtagacacctcaaagg

SEQ ID NO: 3702 - DNA, 17 bp, synthetic construct
  misc_feature 1..17: note = Oligonucleotide
  source 1..17: mol_type = other DNA
agcagtagacacctcaa

SEQ ID NO: 3703 - DNA, 17 bp, synthetic construct
  misc_feature 1..17: note = Oligonucleotide
  source 1..17: mol_type = other DNA
cccagcagtagacacct

SEQ ID NO: 3704 - DNA, 17 bp, synthetic construct
  misc_feature 1..17: note = Oligonucleotide
  source 1..17: mol_type = other DNA
gcacccagcagtagaca

SEQ ID NO: 3705 - DNA, 17 bp, synthetic construct
  misc_feature 1..17: note = Oligonucleotide
  source 1..17: mol_type = other DNA
gtggcacccagcagtag

SEQ ID NO: 3706 - DNA, 17 bp, synthetic construct
  misc_feature 1..17: note = Oligonucleotide
  source 1..17: mol_type = other DNA
ggggtggcacccagcag

SEQ ID NO: 3707 - DNA, 17 bp, synthetic construct
  misc_feature 1..17: note = Oligonucleotide
  source 1..17: mol_type = other DNA
ttgggggtggcacccag

SEQ ID NO: 3708 - DNA, 17 bp, synthetic construct
  misc_feature 1..17: note = Oligonucleotide
  source 1..17: mol_type = other DNA
cagttgggggtggcacc

SEQ ID NO: 3709 - DNA, 17 bp, synthetic construct
  misc_feature 1..17: note = Oligonucleotide
  source 1..17: mol_type = other DNA
gcccagttgggggtggc

SEQ ID NO: 3710 - DNA, 17 bp, synthetic construct
  misc_feature 1..17: note = Oligonucleotide
  source 1..17: mol_type = other DNA
caggcccagttgggggt

SEQ ID NO: 3711 - DNA, 17 bp, synthetic construct
  misc_feature 1..17: note = Oligonucleotide
  source 1..17: mol_type = other DNA
ggtcaggcccagttggg

SEQ ID NO: 3712 - DNA, 17 bp, synthetic construct
  misc_feature 1..17: note = Oligonucleotide
  source 1..17: mol_type = other DNA
tggggtcaggcccagtt

SEQ ID NO: 3713 - DNA, 17 bp, synthetic construct
  misc_feature 1..17: note = Oligonucleotide
  source 1..17: mol_type = other DNA
atttggggtcaggccca

SEQ ID NO: 3714 - DNA, 17 bp, synthetic construct
  misc_feature 1..17: note = Oligonucleotide
  source 1..17: mol_type = other DNA
agcatttggggtcaggc

SEQ ID NO: 3715 - DNA, 17 bp, synthetic construct
  misc_feature 1..17: note = Oligonucleotide
  source 1..17: mol_type = other DNA
aagagcatttggggtca

SEQ ID NO: 3716 - DNA, 17 bp, synthetic construct
  misc_feature 1..17: note = Oligonucleotide
  source 1..17: mol_type = other DNA
ctcaagagcatttgggg

SEQ ID NO: 3717 - DNA, 17 bp, synthetic construct
  misc_feature 1..17: note = Oligonucleotide
  source 1..17: mol_type = other DNA
cccctcaagagcatttg

SEQ ID NO: 3718 - DNA, 17 bp, synthetic construct
  misc_feature 1..17: note = Oligonucleotide
  source 1..17: mol_type = other DNA
gcccccctcaagagcat

SEQ ID NO: 3719 - DNA, 17 bp, synthetic construct
  misc_feature 1..17: note = Oligonucleotide
  source 1..17: mol_type = other DNA
ggtgcccccctcaagag

SEQ ID NO: 3720 - DNA, 17 bp, synthetic construct
  misc_feature 1..17: note = Oligonucleotide
  source 1..17: mol_type = other DNA
taaggtgcccccctcaa

SEQ ID NO: 3721 - DNA, 17 bp, synthetic construct
  misc_feature 1..17: note = Oligonucleotide
  source 1..17: mol_type = other DNA
tagtaaggtgcccccct

SEQ ID NO: 3722 - DNA, 17 bp, synthetic construct
  misc_feature 1..17: note = Oligonucleotide
  source 1..17: mol_type = other DNA
aaatagtaaggtgcccc

SEQ ID NO: 3723 - DNA, 17 bp, synthetic construct
  misc_feature 1..17: note = Oligonucleotide
  source 1..17: mol_type = other DNA
gggaaatagtaaggtgc

SEQ ID NO: 3724 - DNA, 17 bp, synthetic construct
  misc_feature 1..17: note = Oligonucleotide
  source 1..17: mol_type = other DNA
agcgggaaatagtaagg

SEQ ID NO: 3725 - DNA, 17 bp, synthetic construct
  misc_feature 1..17: note = Oligonucleotide
  source 1..17: mol_type = other DNA
ttcagcgggaaatagta

SEQ ID NO: 3726 - DNA, 17 bp, synthetic construct
  misc_feature 1..17: note = Oligonucleotide
  source 1..17: mol_type = other DNA
acattcagcgggaaata

SEQ ID NO: 3727 - DNA, 17 bp, synthetic construct
  misc_feature 1..17: note = Oligonucleotide
  source 1..17: mol_type = other DNA
ctgacattcagcgggaa

SEQ ID NO: 3728 - DNA, 17 bp, synthetic construct
  misc_feature 1..17: note = Oligonucleotide
  source 1..17: mol_type = other DNA
cctctgacattcagcgg

SEQ ID NO: 3729 - DNA, 17 bp, synthetic construct
  misc_feature 1..17: note = Oligonucleotide
  source 1..17: mol_type = other DNA
gcccctctgacattcag

SEQ ID NO: 3730 - DNA, 17 bp, synthetic construct
  misc_feature 1..17: note = Oligonucleotide
  source 1..17: mol_type = other DNA
cctgcccctctgacatt

SEQ ID NO: 3731 - DNA, 17 bp, synthetic construct
  misc_feature 1..17: note = Oligonucleotide
  source 1..17: mol_type = other DNA
caccctgcccctctgac

SEQ ID NO: 3732 - DNA, 17 bp, synthetic construct
  misc_feature 1..17: note = Oligonucleotide
  source 1..17: mol_type = other DNA
acccaccctgcccctct

SEQ ID NO: 3733 - DNA, 17 bp, synthetic construct
  misc_feature 1..17: note = Oligonucleotide
  source 1..17: mol_type = other DNA
ggcacccaccctgcccc

SEQ ID NO: 3734 - DNA, 17 bp, synthetic construct
  misc_feature 1..17: note = Oligonucleotide
  source 1..17: mol_type = other DNA
tgtggcacccaccctgc

SEQ ID NO: 3735 - DNA, 17 bp, synthetic construct
  misc_feature 1..17: note = Oligonucleotide
  source 1..17: mol_type = other DNA
ggctgtggcacccaccc

SEQ ID NO: 3736 - DNA, 17 bp, synthetic construct
  misc_feature 1..17: note = Oligonucleotide
  source 1..17: mol_type = other DNA
aggggctgtggcaccca

SEQ ID NO: 3737 - DNA, 17 bp, synthetic construct
  misc_feature 1..17: note = Oligonucleotide
  source 1..17: mol_type = other DNA
gggaggggctgtggcac

SEQ ID NO: 3738 - DNA, 17 bp, synthetic construct
  misc_feature 1..17: note = Oligonucleotide
  source 1..17: mol_type = other DNA
ctggggaggggctgtgg

SEQ ID NO: 3739 - DNA, 17 bp, synthetic construct
  misc_feature 1..17: note = Oligonucleotide
  source 1..17: mol_type = other DNA
cccctggggaggggctg

SEQ ID NO: 3740 - DNA, 17 bp, synthetic construct
  misc_feature 1..17: note = Oligonucleotide
  source 1..17: mol_type = other DNA
aagcccctggggagggg

SEQ ID NO: 3741 - DNA, 17 bp, synthetic construct
  misc_feature 1..17: note = Oligonucleotide
  source 1..17: mol_type = other DNA
tggaagcccctggggag

SEQ ID NO: 3742 - DNA, 17 bp, synthetic construct
  misc_feature 1..17: note = Oligonucleotide
  source 1..17: mol_type = other DNA
gggtggaagcccctggg

SEQ ID NO: 3743 - DNA, 17 bp, synthetic construct
  misc_feature 1..17: note = Oligonucleotide
  source 1..17: mol_type = other DNA
tgcgggtggaagcccct

SEQ ID NO: 3744 - DNA, 17 bp, synthetic construct
  misc_feature 1..17: note = Oligonucleotide
  source 1..17: mol_type = other DNA
agctgcgggtggaagcc

SEQ ID NO: 3745 - DNA, 17 bp, synthetic construct
  misc_feature 1..17: note = Oligonucleotide
  source 1..17: mol_type = other DNA
gtgagctgcgggtggaa

SEQ ID NO: 3746 - DNA, 17 bp, synthetic construct
  misc_feature 1..17: note = Oligonucleotide
  source 1..17: mol_type = other DNA
actgtgagctgcgggtg

SEQ ID NO: 3747 - DNA, 17 bp, synthetic construct
  misc_feature 1..17: note = Oligonucleotide
  source 1..17: mol_type = other DNA
tggactgtgagctgcgg

SEQ ID NO: 3748 - DNA, 17 bp, synthetic construct
  misc_feature 1..17: note = Oligonucleotide
  source 1..17: mol_type = other DNA
tgctggactgtgagctg

SEQ ID NO: 3749 - DNA, 17 bp, synthetic construct
  misc_feature 1..17: note = Oligonucleotide
  source 1..17: mol_type = other DNA
gcctgctggactgtgag

SEQ ID NO: 3750 - DNA, 17 bp, synthetic construct
  misc_feature 1..17: note = Oligonucleotide
  source 1..17: mol_type = other DNA
agtgcctgctggactgt

SEQ ID NO: 3751 - DNA, 17 bp, synthetic construct
  misc_feature 1..17: note = Oligonucleotide
  source 1..17: mol_type = other DNA
acaagtgcctgctggac

SEQ ID NO: 3752 - DNA, 17 bp, synthetic construct
  misc_feature 1..17: note = Oligonucleotide
  source 1..17: mol_type = other DNA
caaacaagtgcctgctg

SEQ ID NO: 3753 - DNA, 17 bp, synthetic construct
  misc_feature 1..17: note = Oligonucleotide
  source 1..17: mol_type = other DNA
cagcaaacaagtgcctg

SEQ ID NO: 3754 - DNA, 17 bp, synthetic construct
  misc_feature 1..17: note = Oligonucleotide
  source 1..17: mol_type = other DNA
atccagcaaacaagtgc

SEQ ID NO: 3755 - DNA, 17 bp, synthetic construct
  misc_feature 1..17: note = Oligonucleotide
  source 1..17: mol_type = other DNA
agtatccagcaaacaag

SEQ ID NO: 3756 - DNA, 17 bp, synthetic construct
  misc_feature 1..17: note = Oligonucleotide
  source 1..17: mol_type = other DNA
taaagtatccagcaaac

SEQ ID NO: 3757 - DNA, 17 bp, synthetic construct
  misc_feature 1..17: note = Oligonucleotide
  source 1..17: mol_type = other DNA
ccataaagtatccagca

SEQ ID NO: 3758 - DNA, 17 bp, synthetic construct
  misc_feature 1..17: note = Oligonucleotide
  source 1..17: mol_type = other DNA
cgcccataaagtatcca

SEQ ID NO: 3759 - DNA, 17 bp, synthetic construct
  misc_feature 1..17: note = Oligonucleotide
  source 1..17: mol_type = other DNA
gaccgcccataaagtat

SEQ ID NO: 3760 - DNA, 17 bp, synthetic construct
  misc_feature 1..17: note = Oligonucleotide
  source 1..17: mol_type = other DNA
cgagaccgcccataaag

SEQ ID NO: 3761 - DNA, 17 bp, synthetic construct
  misc_feature 1..17: note = Oligonucleotide
  source 1..17: mol_type = other DNA
gctcgagaccgcccata

SEQ ID NO: 3762 - DNA, 17 bp, synthetic construct
  misc_feature 1..17: note = Oligonucleotide
  source 1..17: mol_type = other DNA
tgagctcgagaccgccc

SEQ ID NO: 3763 - DNA, 17 bp, synthetic construct
  misc_feature 1..17: note = Oligonucleotide
  source 1..17: mol_type = other DNA
tcctgagctcgagaccg

SEQ ID NO: 3764 - DNA, 17 bp, synthetic construct
  misc_feature 1..17: note = Oligonucleotide
  source 1..17: mol_type = other DNA
ctctcctgagctcgaga

SEQ ID NO: 3765 - DNA, 17 bp, synthetic construct
  misc_feature 1..17: note = Oligonucleotide
  source 1..17: mol_type = other DNA
cccctctcctgagctcg

SEQ ID NO: 3766 - DNA, 17 bp, synthetic construct
  misc_feature 1..17: note = Oligonucleotide
  source 1..17: mol_type = other DNA
tgacccctctcctgagc

SEQ ID NO: 3767 - DNA, 17 bp, synthetic construct
  misc_feature 1..17: note = Oligonucleotide
  source 1..17: mol_type = other DNA
ttctgacccctctcctg

SEQ ID NO: 3768 - DNA, 17 bp, synthetic construct
  misc_feature 1..17: note = Oligonucleotide
  source 1..17: mol_type = other DNA
ccattctgacccctctc

SEQ ID NO: 3769 - DNA, 17 bp, synthetic construct
  misc_feature 1..17: note = Oligonucleotide
  source 1..17: mol_type = other DNA
cctccattctgacccct

SEQ ID NO: 3770 - DNA, 17 bp, synthetic construct
  misc_feature 1..17: note = Oligonucleotide
  source 1..17: mol_type = other DNA
gaccctccattctgacc

SEQ ID NO: 3771 - DNA, 17 bp, synthetic construct
  misc_feature 1..17: note = Oligonucleotide
  source 1..17: mol_type = other DNA
agagaccctccattctg

SEQ ID NO: 3772 - DNA, 17 bp, synthetic construct
  misc_feature 1..17: note = Oligonucleotide
  source 1..17: mol_type = other DNA
tccagagaccctccatt

SEQ ID NO: 3773 - DNA, 17 bp, synthetic construct
  misc_feature 1..17: note = Oligonucleotide
  source 1..17: mol_type = other DNA
ggctccagagaccctcc

SEQ ID NO: 3774 - DNA, 17 bp, synthetic construct
  misc_feature 1..17: note = Oligonucleotide
  source 1..17: mol_type = other DNA
ctgggctccagagaccc

SEQ ID NO: 3775 - DNA, 17 bp, synthetic construct
  misc_feature 1..17: note = Oligonucleotide
  source 1..17: mol_type = other DNA
ctcctgggctccagaga

SEQ ID NO: 3776 - DNA, 17 bp, synthetic construct
  misc_feature 1..17: note = Oligonucleotide
  source 1..17: mol_type = other DNA
cctctcctgggctccag

SEQ ID NO: 3777 - DNA, 17 bp, synthetic construct
  misc_feature 1..17: note = Oligonucleotide
  source 1..17: mol_type = other DNA
attcctctcctgggctc

SEQ ID NO: 3778 - DNA, 17 bp, synthetic construct
  misc_feature 1..17: note = Oligonucleotide
  source 1..17: mol_type = other DNA
ctgattcctctcctggg

SEQ ID NO: 3779 - DNA, 17 bp, synthetic construct
  misc_feature 1..17: note = Oligonucleotide
  source 1..17: mol_type = other DNA
gttctgattcctctcct

SEQ ID NO: 3780 - DNA, 17 bp, synthetic construct
  misc_feature 1..17: note = Oligonucleotide
  source 1..17: mol_type = other DNA
acagttctgattcctct

SEQ ID NO: 3781 - DNA, 17 bp, synthetic construct
  misc_feature 1..17: note = Oligonucleotide
  source 1..17: mol_type = other DNA
ctgacagttctgattcc

SEQ ID NO: 3782 - DNA, 17 bp, synthetic construct
  misc_feature 1..17: note = Oligonucleotide
  source 1..17: mol_type = other DNA
gggctgacagttctgat

SEQ ID NO: 3783 - DNA, 17 bp, synthetic construct
  misc_feature 1..17: note = Oligonucleotide
  source 1..17: mol_type = other DNA
acagggctgacagttct

SEQ ID NO: 3784 - DNA, 17 bp, synthetic construct
  misc_feature 1..17: note = Oligonucleotide
  source 1..17: mol_type = other DNA
gacacagggctgacagt

SEQ ID NO: 3785 - DNA, 17 bp, synthetic construct
  misc_feature 1..17: note = Oligonucleotide
  source 1..17: mol_type = other DNA
taggacacagggctgac

SEQ ID NO: 3786 - DNA, 17 bp, synthetic construct
  misc_feature 1..17: note = Oligonucleotide
  source 1..17: mol_type = other DNA
cattaggacacagggct

SEQ ID NO: 3787 - DNA, 17 bp, synthetic construct
  misc_feature 1..17: note = Oligonucleotide
  source 1..17: mol_type = other DNA
gaccattaggacacagg

SEQ ID NO: 3788 - DNA, 17 bp, synthetic construct
  misc_feature 1..17: note = Oligonucleotide
  source 1..17: mol_type = other DNA
tgggaccattaggacac

SEQ ID NO: 3789 - DNA, 17 bp, synthetic construct
  misc_feature 1..17: note = Oligonucleotide
  source 1..17: mol_type = other DNA
tgatgggaccattagga

SEQ ID NO: 3790 - DNA, 17 bp, synthetic construct
  misc_feature 1..17: note = Oligonucleotide
  source 1..17: mol_type = other DNA
cactgatgggaccatta

SEQ ID NO: 3791 - DNA, 17 bp, synthetic construct
  misc_feature 1..17: note = Oligonucleotide
  source 1..17: mol_type = other DNA
agtcactgatgggacca

SEQ ID NO: 3792 - DNA, 17 bp, synthetic construct
  misc_feature 1..17: note = Oligonucleotide
  source 1..17: mol_type = other DNA
caaagtcactgatggga

SEQ ID NO: 3793 - DNA, 17 bp, synthetic construct
  misc_feature 1..17: note = Oligonucleotide
  source 1..17: mol_type = other DNA
ctccaaagtcactgatg

SEQ ID NO: 3794 - DNA, 17 bp, synthetic construct
  misc_feature 1..17: note = Oligonucleotide
  source 1..17: mol_type = other DNA
aggctccaaagtcactg

SEQ ID NO: 3795 - DNA, 17 bp, synthetic construct
  misc_feature 1..17: note = Oligonucleotide
  source 1..17: mol_type = other DNA
ctgaggctccaaagtca

SEQ ID NO: 3796 - DNA, 17 bp, synthetic construct
  misc_feature 1..17: note = Oligonucleotide
  source 1..17: mol_type = other DNA
agcctgaggctccaaag

SEQ ID NO: 3797 - DNA, 17 bp, synthetic construct
  misc_feature 1..17: note = Oligonucleotide
  source 1..17: mol_type = other DNA
agaagcctgaggctcca

SEQ ID NO: 3798 - DNA, 17 bp, synthetic construct
  misc_feature 1..17: note = Oligonucleotide
  source 1..17: mol_type = other DNA
cacagaagcctgaggct

SEQ ID NO: 3799 - DNA, 17 bp, synthetic construct
  misc_feature 1..17: note = Oligonucleotide
  source 1..17: mol_type = other DNA
tggcacagaagcctgag

SEQ ID NO: 3800 - DNA, 17 bp, synthetic construct
  misc_feature 1..17: note = Oligonucleotide
  source 1..17: mol_type = other DNA
gcctggcacagaagcct

SEQ ID NO: 3801 - DNA, 17 bp, synthetic construct
  misc_feature 1..17: note = Oligonucleotide
  source 1..17: mol_type = other DNA
aaagcctggcacagaag

SEQ ID NO: 3802 - DNA, 17 bp, synthetic construct
  misc_feature 1..17: note = Oligonucleotide
  source 1..17: mol_type = other DNA
agaaaagcctggcacag

SEQ ID NO: 3803 - DNA, 17 bp, synthetic construct
  misc_feature 1..17: note = Oligonucleotide
  source 1..17: mol_type = other DNA
agcagaaaagcctggca

SEQ ID NO: 3804 - DNA, 17 bp, synthetic construct
  misc_feature 1..17: note = Oligonucleotide
  source 1..17: mol_type = other DNA
ggcagcagaaaagcctg

SEQ ID NO: 3805 - DNA, 17 bp, synthetic construct
  misc_feature 1..17: note = Oligonucleotide
  source 1..17: mol_type = other DNA
tggggcagcagaaaagc

SEQ ID NO: 3806 - DNA, 17 bp, synthetic construct
  misc_feature 1..17: note = Oligonucleotide
  source 1..17: mol_type = other DNA
ccctggggcagcagaaa

SEQ ID NO: 3807 - DNA, 17 bp, synthetic construct
  misc_feature 1..17: note = Oligonucleotide
  source 1..17: mol_type = other DNA
ctgccctggggcagcag

SEQ ID NO: 3808 - DNA, 17 bp, synthetic construct
  misc_feature 1..17: note = Oligonucleotide
  source 1..17: mol_type = other DNA
cgcctgccctggggcag

SEQ ID NO: 3809 - DNA, 17 bp, synthetic construct
  misc_feature 1..17: note = Oligonucleotide
  source 1..17: mol_type = other DNA
caccgcctgccctgggg

SEQ ID NO: 3810 - DNA, 17 bp, synthetic construct
  misc_feature 1..17: note = Oligonucleotide
  source 1..17: mol_type = other DNA
gaccaccgcctgccctg

SEQ ID NO: 3811 - DNA, 17 bp, synthetic construct
  misc_feature 1..17: note = Oligonucleotide
  source 1..17: mol_type = other DNA
gttgaccaccgcctgcc

SEQ ID NO: 3812 - DNA, 17 bp, synthetic construct
  misc_feature 1..17: note = Oligonucleotide
  source 1..17: mol_type = other DNA
gccgttgaccaccgcct

SEQ ID NO: 3813 - DNA, 17 bp, synthetic construct
  misc_feature 1..17: note = Oligonucleotide
  source 1..17: mol_type = other DNA
aaggccgttgaccaccg

SEQ ID NO: 3814 - DNA, 17 bp, synthetic construct
  misc_feature 1..17: note = Oligonucleotide
  source 1..17: mol_type = other DNA
gccaaggccgttgacca

SEQ ID NO: 3815 - DNA, 17 bp, synthetic construct
  misc_feature 1..17: note = Oligonucleotide
  source 1..17: mol_type = other DNA
agtgccaaggccgttga

SEQ ID NO: 3816 - DNA, 17 bp, synthetic construct
  misc_feature 1..17: note = Oligonucleotide
  source 1..17: mol_type = other DNA
catagtgccaaggccgt

SEQ ID NO: 3817 - DNA, 17 bp, synthetic construct
  misc_feature 1..17: note = Oligonucleotide
  source 1..17: mol_type = other DNA
agccatagtgccaaggc

SEQ ID NO: 3818 - DNA, 17 bp, synthetic construct
  misc_feature 1..17: note = Oligonucleotide
  source 1..17: mol_type = other DNA
cccagccatagtgccaa

SEQ ID NO: 3819 - DNA, 17 bp, synthetic construct
  misc_feature 1..17: note = Oligonucleotide
  source 1..17: mol_type = other DNA
ctgcccagccatagtgc

SEQ ID NO: 3820 - DNA, 17 bp, synthetic construct
  misc_feature 1..17: note = Oligonucleotide
  source 1..17: mol_type = other DNA
actctgcccagccatag

SEQ ID NO: 3821 - DNA, 17 bp, synthetic construct
  misc_feature 1..17: note = Oligonucleotide
  source 1..17: mol_type = other DNA
tggactctgcccagcca

SEQ ID NO: 3822 - DNA, 17 bp, synthetic construct
  misc_feature 1..17: note = Oligonucleotide
  source 1..17: mol_type = other DNA
cagtggactctgcccag

SEQ ID NO: 3823 - DNA, 17 bp, synthetic construct
  misc_feature 1..17: note = Oligonucleotide
  source 1..17: mol_type = other DNA
ccacagtggactctgcc

SEQ ID NO: 3824 - DNA, 17 bp, synthetic construct
  misc_feature 1..17: note = Oligonucleotide
  source 1..17: mol_type = other DNA
tttccacagtggactct

SEQ ID NO: 3825 - DNA, 17 bp, synthetic construct
  misc_feature 1..17: note = Oligonucleotide
  source 1..17: mol_type = other DNA
acctttccacagtggac

SEQ ID NO: 3826 - DNA, 17 bp, synthetic construct
  misc_feature 1..17: note = Oligonucleotide
  source 1..17: mol_type = other DNA
gggacctttccacagtg

SEQ ID NO: 3827 - DNA, 17 bp, synthetic construct
  misc_feature 1..17: note = Oligonucleotide
  source 1..17: mol_type = other DNA
agggggacctttccaca

SEQ ID NO: 3828 - DNA, 17 bp, synthetic construct
  misc_feature 1..17: note = Oligonucleotide
  source 1..17: mol_type = other DNA
gagagggggacctttcc

SEQ ID NO: 3829 - DNA, 17 bp, synthetic construct
  misc_feature 1..17: note = Oligonucleotide
  source 1..17: mol_type = other DNA
caggagagggggacctt

SEQ ID NO: 3830 - DNA, 17 bp, synthetic construct
  misc_feature 1..17: note = Oligonucleotide
  source 1..17: mol_type = other DNA
tggcaggagagggggac

SEQ ID NO: 3831 - DNA, 17 bp, synthetic construct
  misc_feature 1..17: note = Oligonucleotide
  source 1..17: mol_type = other DNA
cagtggcaggagagggg

SEQ ID NO: 3832 - DNA, 17 bp, synthetic construct
  misc_feature 1..17: note = Oligonucleotide
  source 1..17: mol_type = other DNA
ggccagtggcaggagag

SEQ ID NO: 3833 - DNA, 17 bp, synthetic construct
  misc_feature 1..17: note = Oligonucleotide
  source 1..17: mol_type = other DNA
gagggccagtggcagga

SEQ ID NO: 3834 - DNA, 17 bp, synthetic construct
  misc_feature 1..17: note = Oligonucleotide
  source 1..17: mol_type = other DNA
agtgagggccagtggca

SEQ ID NO: 3835 - DNA, 17 bp, synthetic construct
  misc_feature 1..17: note = Oligonucleotide
  source 1..17: mol_type = other DNA
tcaagtgagggccagtg

SEQ ID NO: 3836 - DNA, 17 bp, synthetic construct
  misc_feature 1..17: note = Oligonucleotide
  source 1..17: mol_type = other DNA
aggtcaagtgagggcca

SEQ ID NO: 3837 - DNA, 17 bp, synthetic construct
  misc_feature 1..17: note = Oligonucleotide
  source 1..17: mol_type = other DNA
acaaggtcaagtgaggg

SEQ ID NO: 3838 - DNA, 17 bp, synthetic construct
  misc_feature 1..17: note = Oligonucleotide
  source 1..17: mol_type = other DNA
ctgacaaggtcaagtga

SEQ ID NO: 3839 - DNA, 17 bp, synthetic construct
  misc_feature 1..17: note = Oligonucleotide
  source 1..17: mol_type = other DNA
aggctgacaaggtcaag

SEQ ID NO: 3840 - DNA, 17 bp, synthetic construct
  misc_feature 1..17: note = Oligonucleotide
  source 1..17: mol_type = other DNA
cccaggctgacaaggtc

SEQ ID NO: 3841 - DNA, 17 bp, synthetic construct
  misc_feature 1..17: note = Oligonucleotide
  source 1..17: mol_type = other DNA
gaacccaggctgacaag

SEQ ID NO: 3842 - DNA, 17 bp, synthetic construct
  misc_feature 1..17: note = Oligonucleotide
  source 1..17: mol_type = other DNA
taggaacccaggctgac

SEQ ID NO: 3843 - DNA, 17 bp, synthetic construct
  misc_feature 1..17: note = Oligonucleotide
  source 1..17: mol_type = other DNA
gggtaggaacccaggct

SEQ ID NO: 3844 - DNA, 17 bp, synthetic construct
  misc_feature 1..17: note = Oligonucleotide
  source 1..17: mol_type = other DNA
atggggtaggaacccag

SEQ ID NO: 3845 - DNA, 17 bp, synthetic construct
  misc_feature 1..17: note = Oligonucleotide
  source 1..17: mol_type = other DNA
gccatggggtaggaacc

SEQ ID NO: 3846 - DNA, 17 bp, synthetic construct
  misc_feature 1..17: note = Oligonucleotide
  source 1..17: mol_type = other DNA
gtggccatggggtagga

SEQ ID NO: 3847 - DNA, 17 bp, synthetic construct
  misc_feature 1..17: note = Oligonucleotide
  source 1..17: mol_type = other DNA
gaggtggccatggggta

SEQ ID NO: 3848 - DNA, 17 bp, synthetic construct
  misc_feature 1..17: note = Oligonucleotide
  source 1..17: mol_type = other DNA
ggagaggtggccatggg

SEQ ID NO: 3849 - DNA, 17 bp, synthetic construct
  misc_feature 1..17: note = Oligonucleotide
  source 1..17: mol_type = other DNA
gagggagaggtggccat

SEQ ID NO: 3850 - DNA, 17 bp, synthetic construct
  misc_feature 1..17: note = Oligonucleotide
  source 1..17: mol_type = other DNA
ccggagggagaggtggc

SEQ ID NO: 3851 - DNA, 17 bp, synthetic construct
  misc_feature 1..17: note = Oligonucleotide
  source 1..17: mol_type = other DNA
gatccggagggagaggt

SEQ ID NO: 3852 - DNA, 17 bp, synthetic construct
  misc_feature 1..17: note = Oligonucleotide
  source 1..17: mol_type = other DNA
agagatccggagggaga

SEQ ID NO: 3853 - DNA, 17 bp, synthetic construct
  misc_feature 1..17: note = Oligonucleotide
  source 1..17: mol_type = other DNA
aagagagatccggaggg

SEQ ID NO: 3854 - DNA, 17 bp, synthetic construct
  misc_feature 1..17: note = Oligonucleotide
  source 1..17: mol_type = other DNA
ctgaagagagatccgga

SEQ ID NO: 3855 - DNA, 17 bp, synthetic construct
  misc_feature 1..17: note = Oligonucleotide
  source 1..17: mol_type = other DNA
tcactgaagagagatcc

SEQ ID NO: 3856 - DNA, 17 bp, synthetic construct
  misc_feature 1..17: note = Oligonucleotide
  source 1..17: mol_type = other DNA
tggtcactgaagagaga

SEQ ID NO: 3857 - DNA, 17 bp, synthetic construct
  misc_feature 1..17: note = Oligonucleotide
  source 1..17: mol_type = other DNA
tgttggtcactgaagag

SEQ ID NO: 3858 - DNA, 17 bp, synthetic construct
  misc_feature 1..17: note = Oligonucleotide
  source 1..17: mol_type = other DNA
tcttgttggtcactgaa

SEQ ID NO: 3859 - DNA, 17 bp, synthetic construct
  misc_feature 1..17: note = Oligonucleotide
  source 1..17: mol_type = other DNA
atgtcttgttggtcact

SEQ ID NO: 3860 - DNA, 17 bp, synthetic construct
  misc_feature 1..17: note = Oligonucleotide
  source 1..17: mol_type = other DNA
ctcatgtcttgttggtc

SEQ ID NO: 3861 - DNA, 17 bp, synthetic construct
  misc_feature 1..17: note = Oligonucleotide
  source 1..17: mol_type = other DNA
tcactcatgtcttgttg

SEQ ID NO: 3862 - DNA, 17 bp, synthetic construct
  misc_feature 1..17: note = Oligonucleotide
  source 1..17: mol_type = other DNA
gagtcactcatgtcttg

SEQ ID NO: 3863 - DNA, 17 bp, synthetic construct
  misc_feature 1..17: note = Oligonucleotide
  source 1..17: mol_type = other DNA
agtgagtcactcatgtc

SEQ ID NO: 3864 - DNA, 17 bp, synthetic construct
  misc_feature 1..17: note = Oligonucleotide
  source 1..17: mol_type = other DNA
cagagtgagtcactcat

SEQ ID NO: 3865 - DNA, 17 bp, synthetic construct
  misc_feature 1..17: note = Oligonucleotide
  source 1..17: mol_type = other DNA
cttcagagtgagtcact

SEQ ID NO: 3866 - DNA, 17 bp, synthetic construct
  misc_feature 1..17: note = Oligonucleotide
  source 1..17: mol_type = other DNA
ctacttcagagtgagtc

SEQ ID NO: 3867 - DNA, 17 bp, synthetic construct
  misc_feature 1..17: note = Oligonucleotide
  source 1..17: mol_type = other DNA
gacctacttcagagtga

SEQ ID NO: 3868 - DNA, 17 bp, synthetic construct
  misc_feature 1..17: note = Oligonucleotide
  source 1..17: mol_type = other DNA
cgagacctacttcagag

SEQ ID NO: 3869 - DNA, 17 bp, synthetic construct
  misc_feature 1..17: note = Oligonucleotide
  source 1..17: mol_type = other DNA
aaacgagacctacttca

SEQ ID NO: 3870 - DNA, 17 bp, synthetic construct
  misc_feature 1..17: note = Oligonucleotide
  source 1..17: mol_type = other DNA
aacaaacgagacctact

SEQ ID NO: 3871 - DNA, 17 bp, synthetic construct
  misc_feature 1..17: note = Oligonucleotide
  source 1..17: mol_type = other DNA
aaaaacaaacgagacct

SEQ ID NO: 3872 - DNA, 17 bp, synthetic construct
  misc_feature 1..17: note = Oligonucleotide
  source 1..17: mol_type = other DNA
cctaaaaacaaacgaga

SEQ ID NO: 3873 - DNA, 17 bp, synthetic construct
  misc_feature 1..17: note = Oligonucleotide
  source 1..17: mol_type = other DNA
catcctaaaaacaaacg

SEQ ID NO: 3874 - DNA, 17 bp, synthetic construct
  misc_feature 1..17: note = Oligonucleotide
  source 1..17: mol_type = other DNA
gctcatcctaaaaacaa

SEQ ID NO: 3875 - DNA, 17 bp, synthetic construct
  misc_feature 1..17: note = Oligonucleotide
  source 1..17: mol_type = other DNA
caggctcatcctaaaaa

SEQ ID NO: 3876 - DNA, 17 bp, synthetic construct
  misc_feature 1..17: note = Oligonucleotide
  source 1..17: mol_type = other DNA
gttcaggctcatcctaa

SEQ ID NO: 3877 - DNA, 17 bp, synthetic construct
  misc_feature 1..17: note = Oligonucleotide
  source 1..17: mol_type = other DNA
gaagttcaggctcatcc

SEQ ID NO: 3878 - DNA, 17 bp, synthetic construct
  misc_feature 1..17: note = Oligonucleotide
  source 1..17: mol_type = other DNA
taagaagttcaggctca

SEQ ID NO: 3879 - DNA, 17 bp, synthetic construct
  misc_feature 1..17: note = Oligonucleotide
  source 1..17: mol_type = other DNA
atgtaagaagttcaggc

SEQ ID NO: 3880 - DNA, 17 bp, synthetic construct
  misc_feature 1..17: note = Oligonucleotide
  source 1..17: mol_type = other DNA
gctatgtaagaagttca

SEQ ID NO: 3881 - DNA, 17 bp, synthetic construct
  misc_feature 1..17: note = Oligonucleotide
  source 1..17: mol_type = other DNA
cgggctatgtaagaagt

SEQ ID NO: 3882 - DNA, 17 bp, synthetic construct
  misc_feature 1..17: note = Oligonucleotide
  source 1..17: mol_type = other DNA
acacgggctatgtaaga

SEQ ID NO: 3883 - DNA, 17 bp, synthetic construct
  misc_feature 1..17: note = Oligonucleotide
  source 1..17: mol_type = other DNA
gaaacacgggctatgta

SEQ ID NO: 3884 - DNA, 17 bp, synthetic construct
  misc_feature 1..17: note = Oligonucleotide
  source 1..17: mol_type = other DNA
gcagaaacacgggctat

SEQ ID NO: 3885 - DNA, 17 bp, synthetic construct
  misc_feature 1..17: note = Oligonucleotide
  source 1..17: mol_type = other DNA
caagcagaaacacgggc

SEQ ID NO: 3886 - DNA, 17 bp, synthetic construct
  misc_feature 1..17: note = Oligonucleotide
  source 1..17: mol_type = other DNA
aggcaagcagaaacacg

SEQ ID NO: 3887 - DNA, 17 bp, synthetic construct
  misc_feature 1..17: note = Oligonucleotide
  source 1..17: mol_type = other DNA
cccaggcaagcagaaac

SEQ ID NO: 3888 - DNA, 17 bp, synthetic construct
  misc_feature 1..17: note = Oligonucleotide
  source 1..17: mol_type = other DNA
gagcccaggcaagcaga

SEQ ID NO: 3889 - DNA, 17 bp, synthetic construct
  misc_feature 1..17: note = Oligonucleotide
  source 1..17: mol_type = other DNA
ctggagcccaggcaagc

SEQ ID NO: 3890 - DNA, 17 bp, synthetic construct
  misc_feature 1..17: note = Oligonucleotide
  source 1..17: mol_type = other DNA
cagctggagcccaggca

SEQ ID NO: 3891 - DNA, 17 bp, synthetic construct
  misc_feature 1..17: note = Oligonucleotide
  source 1..17: mol_type = other DNA
ggccagctggagcccag

SEQ ID NO: 3892 - DNA, 17 bp, synthetic construct
  misc_feature 1..17: note = Oligonucleotide
  source 1..17: mol_type = other DNA
aaaggccagctggagcc

SEQ ID NO: 3893 - DNA, 17 bp, synthetic construct
  misc_feature 1..17: note = Oligonucleotide
  source 1..17: mol_type = other DNA
gggaaaggccagctgga

SEQ ID NO: 3894 - DNA, 17 bp, synthetic construct
  misc_feature 1..17: note = Oligonucleotide
  source 1..17: mol_type = other DNA
agagggaaaggccagct

SEQ ID NO: 3895 - DNA, 17 bp, synthetic construct
  misc_feature 1..17: note = Oligonucleotide
  source 1..17: mol_type = other DNA
gggagagggaaaggcca

SEQ ID NO: 3896 - DNA, 17 bp, synthetic construct
  misc_feature 1..17: note = Oligonucleotide
  source 1..17: mol_type = other DNA
caggggagagggaaagg

SEQ ID NO: 3897 - DNA, 17 bp, synthetic construct
  misc_feature 1..17: note = Oligonucleotide
  source 1..17: mol_type = other DNA
taccaggggagagggaa

SEQ ID NO: 3898 - DNA, 17 bp, synthetic construct
  misc_feature 1..17: note = Oligonucleotide
  source 1..17: mol_type = other DNA
cactaccaggggagagg

SEQ ID NO: 3899 - DNA, 17 bp, synthetic construct
  misc_feature 1..17: note = Oligonucleotide
  source 1..17: mol_type = other DNA
gctcactaccaggggag

SEQ ID NO: 3900 - DNA, 17 bp, synthetic construct
  misc_feature 1..17: note = Oligonucleotide
  source 1..17: mol_type = other DNA
agtgctcactaccaggg

SEQ ID NO: 3901 - DNA, 17 bp, synthetic construct
  misc_feature 1..17: note = Oligonucleotide
  source 1..17: mol_type = other DNA
ggaagtgctcactacca

SEQ ID NO: 3902 - DNA, 17 bp, synthetic construct
  misc_feature 1..17: note = Oligonucleotide
  source 1..17: mol_type = other DNA
ggaggaagtgctcacta

SEQ ID NO: 3903 - DNA, 17 bp, synthetic construct
  misc_feature 1..17: note = Oligonucleotide
  source 1..17: mol_type = other DNA
agaggaggaagtgctca

SEQ ID NO: 3904 - DNA, 17 bp, synthetic construct
  misc_feature 1..17: note = Oligonucleotide
  source 1..17: mol_type = other DNA
gaaagaggaggaagtgc

SEQ ID NO: 3905 - DNA, 17 bp, synthetic construct
  misc_feature 1..17: note = Oligonucleotide
  source 1..17: mol_type = other DNA
agtgaaagaggaggaag

SEQ ID NO: 3906 - DNA, 17 bp, synthetic construct
  misc_feature 1..17: note = Oligonucleotide
  source 1..17: mol_type = other DNA
ggcagtgaaagaggagg

SEQ ID NO: 3907 - DNA, 17 bp, synthetic construct
  misc_feature 1..17: note = Oligonucleotide
  source 1..17: mol_type = other DNA
ccaggcagtgaaagagg

SEQ ID NO: 3908 - DNA, 17 bp, synthetic construct
  misc_feature 1..17: note = Oligonucleotide
  source 1..17: mol_type = other DNA
gggccaggcagtgaaag

SEQ ID NO: 3909 - DNA, 17 bp, synthetic construct
  misc_feature 1..17: note = Oligonucleotide
  source 1..17: mol_type = other DNA
ggcgggccaggcagtga

SEQ ID NO: 3910 - DNA, 17 bp, synthetic construct
  misc_feature 1..17: note = Oligonucleotide
  source 1..17: mol_type = other DNA
tcaggcgggccaggcag

SEQ ID NO: 3911 - DNA, 17 bp, synthetic construct
  misc_feature 1..17: note = Oligonucleotide
  source 1..17: mol_type = other DNA
tcctcaggcgggccagg

SEQ ID NO: 3912 - DNA, 17 bp, synthetic construct
  misc_feature 1..17: note = Oligonucleotide
  source 1..17: mol_type = other DNA
acctcctcaggcgggcc

SEQ ID NO: 3913 - DNA, 17 bp, synthetic construct
  misc_feature 1..17: note = Oligonucleotide
  source 1..17: mol_type = other DNA
gcaacctcctcaggcgg

SEQ ID NO: 3914 - DNA, 17 bp, synthetic construct
  misc_feature 1..17: note = Oligonucleotide
  source 1..17: mol_type = other DNA
gaggcaacctcctcagg

SEQ ID NO: 3915 - DNA, 17 bp, synthetic construct
  misc_feature 1..17: note = Oligonucleotide
  source 1..17: mol_type = other DNA
tgggaggcaacctcctc

SEQ ID NO: 3916 - DNA, 17 bp, synthetic construct
  misc_feature 1..17: note = Oligonucleotide
  source 1..17: mol_type = other DNA
ccttgggaggcaacctc

SEQ ID NO: 3917 - DNA, 17 bp, synthetic construct
  misc_feature 1..17: note = Oligonucleotide
  source 1..17: mol_type = other DNA
ctgccttgggaggcaac

SEQ ID NO: 3918 - DNA, 17 bp, synthetic construct
  misc_feature 1..17: note = Oligonucleotide
  source 1..17: mol_type = other DNA
cccctgccttgggaggc

SEQ ID NO: 3919 - DNA, 17 bp, synthetic construct
  misc_feature 1..17: note = Oligonucleotide
  source 1..17: mol_type = other DNA
ggacccctgccttggga

SEQ ID NO: 3920 - DNA, 17 bp, synthetic construct
  misc_feature 1..17: note = Oligonucleotide
  source 1..17: mol_type = other DNA
tagggacccctgccttg

SEQ ID NO: 3921 - DNA, 17 bp, synthetic construct
  misc_feature 1..17: note = Oligonucleotide
  source 1..17: mol_type = other DNA
ccatagggacccctgcc

SEQ ID NO: 3922 - DNA, 17 bp, synthetic construct
  misc_feature 1..17: note = Oligonucleotide
  source 1..17: mol_type = other DNA
gtgccatagggacccct

SEQ ID NO: 3923 - DNA, 17 bp, synthetic construct
  misc_feature 1..17: note = Oligonucleotide
  source 1..17: mol_type = other DNA
agggtgccatagggacc

SEQ ID NO: 3924 - DNA, 17 bp, synthetic construct
  misc_feature 1..17: note = Oligonucleotide
  source 1..17: mol_type = other DNA
gggagggtgccataggg

SEQ ID NO: 3925 - DNA, 17 bp, synthetic construct
  misc_feature 1..17: note = Oligonucleotide
  source 1..17: mol_type = other DNA
taggggagggtgccata

SEQ ID NO: 3926 - DNA, 17 bp, synthetic construct
  misc_feature 1..17: note = Oligonucleotide
  source 1..17: mol_type = other DNA
aaataggggagggtgcc

SEQ ID NO: 3927 - DNA, 17 bp, synthetic construct
  misc_feature 1..17: note = Oligonucleotide
  source 1..17: mol_type = other DNA
cagaaataggggagggt

SEQ ID NO: 3928 - DNA, 17 bp, synthetic construct
  misc_feature 1..17: note = Oligonucleotide
  source 1..17: mol_type = other DNA
cctcagaaataggggag

SEQ ID NO: 3929 - DNA, 17 bp, synthetic construct
  misc_feature 1..17: note = Oligonucleotide
  source 1..17: mol_type = other DNA
gtacctcagaaataggg

SEQ ID NO: 3930 - DNA, 17 bp, synthetic construct
  misc_feature 1..17: note = Oligonucleotide
  source 1..17: mol_type = other DNA
agtgtacctcagaaata

SEQ ID NO: 3931 - DNA, 17 bp, synthetic construct
  misc_feature 1..17: note = Oligonucleotide
  source 1..17: mol_type = other DNA
cccagtgtacctcagaa

SEQ ID NO: 3932 - DNA, 17 bp, synthetic construct
  misc_feature 1..17: note = Oligonucleotide
  source 1..17: mol_type = other DNA
acacccagtgtacctca

SEQ ID NO: 3933 - DNA, 17 bp, synthetic construct
  misc_feature 1..17: note = Oligonucleotide
  source 1..17: mol_type = other DNA
taaacacccagtgtacc

SEQ ID NO: 3934 - DNA, 17 bp, synthetic construct
  misc_feature 1..17: note = Oligonucleotide
  source 1..17: mol_type = other DNA
ccataaacacccagtgt

SEQ ID NO: 3935 - DNA, 17 bp, synthetic construct
  misc_feature 1..17: note = Oligonucleotide
  source 1..17: mol_type = other DNA
cttccataaacacccag

SEQ ID NO: 3936 - DNA, 17 bp, synthetic construct
  misc_feature 1..17: note = Oligonucleotide
  source 1..17: mol_type = other DNA
gcccttccataaacacc

SEQ ID NO: 3937 - DNA, 17 bp, synthetic construct
  misc_feature 1..17: note = Oligonucleotide
  source 1..17: mol_type = other DNA
ggggcccttccataaac

SEQ ID NO: 3938 - DNA, 17 bp, synthetic construct
  misc_feature 1..17: note = Oligonucleotide
  source 1..17: mol_type = other DNA
gccggggcccttccata

SEQ ID NO: 3939 - DNA, 17 bp, synthetic construct
  misc_feature 1..17: note = Oligonucleotide
  source 1..17: mol_type = other DNA
aaggccggggcccttcc

SEQ ID NO: 3940 - DNA, 17 bp, synthetic construct
  misc_feature 1..17: note = Oligonucleotide
  source 1..17: mol_type = other DNA
ccaaaggccggggccct

SEQ ID NO: 3941 - DNA, 17 bp, synthetic construct
  misc_feature 1..17: note = Oligonucleotide
  source 1..17: mol_type = other DNA
tggccaaaggccggggc

SEQ ID NO: 3942 - DNA, 17 bp, synthetic construct
  misc_feature 1..17: note = Oligonucleotide
  source 1..17: mol_type = other DNA
ccctggccaaaggccgg

SEQ ID NO: 3943 - DNA, 17 bp, synthetic construct
  misc_feature 1..17: note = Oligonucleotide
  source 1..17: mol_type = other DNA
gtgccctggccaaaggc

SEQ ID NO: 3944 - DNA, 17 bp, synthetic construct
  misc_feature 1..17: note = Oligonucleotide
  source 1..17: mol_type = other DNA
aaggtgccctggccaaa

SEQ ID NO: 3945 - DNA, 17 bp, synthetic construct
  misc_feature 1..17: note = Oligonucleotide
  source 1..17: mol_type = other DNA
ggcaaggtgccctggcc

SEQ ID NO: 3946 - DNA, 17 bp, synthetic construct
  misc_feature 1..17: note = Oligonucleotide
  source 1..17: mol_type = other DNA
caaggcaaggtgccctg

SEQ ID NO: 3947 - DNA, 17 bp, synthetic construct
  misc_feature 1..17: note = Oligonucleotide
  source 1..17: mol_type = other DNA
acacaaggcaaggtgcc

SEQ ID NO: 3948 - DNA, 17 bp, synthetic construct
  misc_feature 1..17: note = Oligonucleotide
  source 1..17: mol_type = other DNA
cacacacaaggcaaggt

SEQ ID NO: 3949 - DNA, 17 bp, synthetic construct
  misc_feature 1..17: note = Oligonucleotide
  source 1..17: mol_type = other DNA
ccacacacacaaggcaa

SEQ ID NO: 3950 - DNA, 17 bp, synthetic construct
  misc_feature 1..17: note = Oligonucleotide
  source 1..17: mol_type = other DNA
acaccacacacacaagg

SEQ ID NO: 3951 - DNA, 17 bp, synthetic construct
  misc_feature 1..17: note = Oligonucleotide
  source 1..17: mol_type = other DNA
cggacaccacacacaca

SEQ ID NO: 3952 - DNA, 17 bp, synthetic construct
  misc_feature 1..17: note = Oligonucleotide
  source 1..17: mol_type = other DNA
ctacggacaccacacac

SEQ ID NO: 3953 - DNA, 17 bp, synthetic construct
  misc_feature 1..17: note = Oligonucleotide
  source 1..17: mol_type = other DNA
gcactacggacaccaca

SEQ ID NO: 3954 - DNA, 17 bp, synthetic construct
  misc_feature 1..17: note = Oligonucleotide
  source 1..17: mol_type = other DNA
ccggcactacggacacc

SEQ ID NO: 3955 - DNA, 17 bp, synthetic construct
  misc_feature 1..17: note = Oligonucleotide
  source 1..17: mol_type = other DNA
cagccggcactacggac

SEQ ID NO: 3956 - DNA, 17 bp, synthetic construct
  misc_feature 1..17: note = Oligonucleotide
  source 1..17: mol_type = other DNA
ccccagccggcactacg

SEQ ID NO: 3957 - DNA, 17 bp, synthetic construct
  misc_feature 1..17: note = Oligonucleotide
  source 1..17: mol_type = other DNA
cttccccagccggcact

SEQ ID NO: 3958 - DNA, 17 bp, synthetic construct
  misc_feature 1..17: note = Oligonucleotide
  source 1..17: mol_type = other DNA
tcacttccccagccggc

SEQ ID NO: 3959 - DNA, 17 bp, synthetic construct
  misc_feature 1..17: note = Oligonucleotide
  source 1..17: mol_type = other DNA
gcctcacttccccagcc

SEQ ID NO: 3960 - DNA, 17 bp, synthetic construct
  misc_feature 1..17: note = Oligonucleotide
  source 1..17: mol_type = other DNA
aaggcctcacttcccca

SEQ ID NO: 3961 - DNA, 17 bp, synthetic construct
  misc_feature 1..17: note = Oligonucleotide
  source 1..17: mol_type = other DNA
cacaaggcctcacttcc

SEQ ID NO: 3962 - DNA, 17 bp, synthetic construct
  misc_feature 1..17: note = Oligonucleotide
  source 1..17: mol_type = other DNA
ccccacaaggcctcact

SEQ ID NO: 3963 - DNA, 17 bp, synthetic construct
  misc_feature 1..17: note = Oligonucleotide
  source 1..17: mol_type = other DNA
tcaccccacaaggcctc

SEQ ID NO: 3964 - DNA, 17 bp, synthetic construct
  misc_feature 1..17: note = Oligonucleotide
  source 1..17: mol_type = other DNA
cactcaccccacaaggc

SEQ ID NO: 3965 - DNA, 17 bp, synthetic construct
  misc_feature 1..17: note = Oligonucleotide
  source 1..17: mol_type = other DNA
attcactcaccccacaa

SEQ ID NO: 3966 - DNA, 17 bp, synthetic construct
  misc_feature 1..17: note = Oligonucleotide
  source 1..17: mol_type = other DNA
tttattcactcacccca

SEQ ID NO: 3967 - DNA, 17 bp, synthetic construct
  misc_feature 1..17: note = Oligonucleotide
  source 1..17: mol_type = other DNA
cagtttattcactcacc

SEQ ID NO: 3968 - DNA, 17 bp, synthetic construct
  misc_feature 1..17: note = Oligonucleotide
  source 1..17: mol_type = other DNA
acccagtttattcactc

SEQ ID NO: 3969 - DNA, 17 bp, synthetic construct
  misc_feature 1..17: note = Oligonucleotide
  source 1..17: mol_type = other DNA
ttcacccagtttattca

SEQ ID NO: 3970 - DNA, 17 bp, synthetic construct
  misc_feature 1..17: note = Oligonucleotide
  source 1..17: mol_type = other DNA
tcattcacccagtttat

SEQ ID NO: 3971 - DNA, 17 bp, synthetic construct
  misc_feature 1..17: note = Oligonucleotide
  source 1..17: mol_type = other DNA
tactcattcacccagtt

SEQ ID NO: 3972 - DNA, 17 bp, synthetic construct
  misc_feature 1..17: note = Oligonucleotide
  source 1..17: mol_type = other DNA
ttgtactcattcaccca

SEQ ID NO: 3973 - DNA, 17 bp, synthetic construct
  misc_feature 1..17: note = Oligonucleotide
  source 1..17: mol_type = other DNA
gccttgtactcattcac

SEQ ID NO: 3974 - DNA, 17 bp, synthetic construct
  misc_feature 1..17: note = Oligonucleotide
  source 1..17: mol_type = other DNA
atggccttgtactcatt

SEQ ID NO: 3975 - DNA, 17 bp, synthetic construct
  misc_feature 1..17: note = Oligonucleotide
  source 1..17: mol_type = other DNA
ttgatggccttgtactc

SEQ ID NO: 3976 - DNA, 17 bp, synthetic construct
  misc_feature 1..17: note = Oligonucleotide
  source 1..17: mol_type = other DNA
actttgatggccttgta

SEQ ID NO: 3977 - DNA, 17 bp, synthetic construct
  misc_feature 1..17: note = Oligonucleotide
  source 1..17: mol_type = other DNA
atgactttgatggcctt

SEQ ID NO: 3978 - DNA, 17 bp, synthetic construct
  misc_feature 1..17: note = Oligonucleotide
  source 1..17: mol_type = other DNA
gacatgactttgatggc

SEQ ID NO: 3979 - DNA, 17 bp, synthetic construct
  misc_feature 1..17: note = Oligonucleotide
  source 1..17: mol_type = other DNA
tgtgacatgactttgat

SEQ ID NO: 3980 - DNA, 17 bp, synthetic construct
  misc_feature 1..17: note = Oligonucleotide
  source 1..17: mol_type = other DNA
tcctgtgacatgacttt

SEQ ID NO: 3981 - DNA, 17 bp, synthetic construct
  misc_feature 1..17: note = Oligonucleotide
  source 1..17: mol_type = other DNA
ccatcctgtgacatgac

SEQ ID NO: 3982 - DNA, 17 bp, synthetic construct
  misc_feature 1..17: note = Oligonucleotide
  source 1..17: mol_type = other DNA
gacccatcctgtgacat

SEQ ID NO: 3983 - DNA, 17 bp, synthetic construct
  misc_feature 1..17: note = Oligonucleotide
  source 1..17: mol_type = other DNA
agggacccatcctgtga

SEQ ID NO: 3984 - DNA, 17 bp, synthetic construct
  misc_feature 1..17: note = Oligonucleotide
  source 1..17: mol_type = other DNA
cccagggacccatcctg

SEQ ID NO: 3985 - DNA, 17 bp, synthetic construct
  misc_feature 1..17: note = Oligonucleotide
  source 1..17: mol_type = other DNA
caccccagggacccatc

SEQ ID NO: 3986 - DNA, 17 bp, synthetic construct
  misc_feature 1..17: note = Oligonucleotide
  source 1..17: mol_type = other DNA
ccccaccccagggaccc

SEQ ID NO: 3987 - DNA, 17 bp, synthetic construct
  misc_feature 1..17: note = Oligonucleotide
  source 1..17: mol_type = other DNA
gacccccaccccaggga

SEQ ID NO: 3988 - DNA, 17 bp, synthetic construct
  misc_feature 1..17: note = Oligonucleotide
  source 1..17: mol_type = other DNA
gcagacccccaccccag

SEQ ID NO: 3989 - DNA, 17 bp, synthetic construct
  misc_feature 1..17: note = Oligonucleotide
  source 1..17: mol_type = other DNA
accgcagacccccaccc

SEQ ID NO: 3990 - DNA, 17 bp, synthetic construct
  misc_feature 1..17: note = Oligonucleotide
  source 1..17: mol_type = other DNA
cccaccgcagaccccca

SEQ ID NO: 3991 - DNA, 17 bp, synthetic construct
  misc_feature 1..17: note = Oligonucleotide
  source 1..17: mol_type = other DNA
caccccaccgcagaccc

SEQ ID NO: 3992 - DNA, 17 bp, synthetic construct
  misc_feature 1..17: note = Oligonucleotide
  source 1..17: mol_type = other DNA
gctcaccccaccgcaga

SEQ ID NO: 3993 - DNA, 17 bp, synthetic construct
  misc_feature 1..17: note = Oligonucleotide
  source 1..17: mol_type = other DNA
ccagctcaccccaccgc

SEQ ID NO: 3994 - DNA, 17 bp, synthetic construct
  misc_feature 1..17: note = Oligonucleotide
  source 1..17: mol_type = other DNA
tctccagctcaccccac

SEQ ID NO: 3995 - DNA, 17 bp, synthetic construct
  misc_feature 1..17: note = Oligonucleotide
  source 1..17: mol_type = other DNA
tcctctccagctcaccc

SEQ ID NO: 3996 - DNA, 17 bp, synthetic construct
  misc_feature 1..17: note = Oligonucleotide
  source 1..17: mol_type = other DNA
tcttcctctccagctca

SEQ ID NO: 3997 - DNA, 17 bp, synthetic construct
  misc_feature 1..17: note = Oligonucleotide
  source 1..17: mol_type = other DNA
ccatcttcctctccagc

SEQ ID NO: 3998 - DNA, 17 bp, synthetic construct
  misc_feature 1..17: note = Oligonucleotide
  source 1..17: mol_type = other DNA
ggcccatcttcctctcc

SEQ ID NO: 3999 - DNA, 17 bp, synthetic construct
  misc_feature 1..17: note = Oligonucleotide
  source 1..17: mol_type = other DNA
ttcggcccatcttcctc

SEQ ID NO: 4000 - DNA, 17 bp, synthetic construct
  misc_feature 1..17: note = Oligonucleotide
  source 1..17: mol_type = other DNA
ttcttcggcccatcttc

SEQ ID NO: 4001 - DNA, 17 bp, synthetic construct
  misc_feature 1..17: note = Oligonucleotide
  source 1..17: mol_type = other DNA
tccttcttcggcccatc

SEQ ID NO: 4002 - DNA, 17 bp, synthetic construct
  misc_feature 1..17: note = Oligonucleotide
  source 1..17: mol_type = other DNA
tgctccttcttcggccc

SEQ ID NO: 4003 - DNA, 17 bp, synthetic construct
  misc_feature 1..17: note = Oligonucleotide
  source 1..17: mol_type = other DNA
acctgctccttcttcgg

SEQ ID NO: 4004 - DNA, 17 bp, synthetic construct
  misc_feature 1..17: note = Oligonucleotide
  source 1..17: mol_type = other DNA
acaacctgctccttctt

SEQ ID NO: 4005 - DNA, 17 bp, synthetic construct
  misc_feature 1..17: note = Oligonucleotide
  source 1..17: mol_type = other DNA
gagacaacctgctcctt

SEQ ID NO: 4006 - DNA, 17 bp, synthetic construct
  misc_feature 1..17: note = Oligonucleotide
  source 1..17: mol_type = other DNA
cctgagacaacctgctc

SEQ ID NO: 4007 - DNA, 17 bp, synthetic construct
  misc_feature 1..17: note = Oligonucleotide
  source 1..17: mol_type = other DNA
caccctgagacaacctg

SEQ ID NO: 4008 - DNA, 17 bp, synthetic construct
  misc_feature 1..17: note = Oligonucleotide
  source 1..17: mol_type = other DNA
cagcaccctgagacaac

SEQ ID NO: 4009 - DNA, 17 bp, synthetic construct
  misc_feature 1..17: note = Oligonucleotide
  source 1..17: mol_type = other DNA
cctcagcaccctgagac

SEQ ID NO: 4010 - DNA, 17 bp, synthetic construct
  misc_feature 1..17: note = Oligonucleotide
  source 1..17: mol_type = other DNA
aatcctcagcaccctga

SEQ ID NO: 4011 - DNA, 17 bp, synthetic construct
  misc_feature 1..17: note = Oligonucleotide
  source 1..17: mol_type = other DNA
ctgaatcctcagcaccc

SEQ ID NO: 4012 - DNA, 17 bp, synthetic construct
  misc_feature 1..17: note = Oligonucleotide
  source 1..17: mol_type = other DNA
gccctgaatcctcagca

SEQ ID NO: 4013 - DNA, 17 bp, synthetic construct
  misc_feature 1..17: note = Oligonucleotide
  source 1..17: mol_type = other DNA
gcagccctgaatcctca

SEQ ID NO: 4014 - DNA, 17 bp, synthetic construct
  misc_feature 1..17: note = Oligonucleotide
  source 1..17: mol_type = other DNA
acagcagccctgaatcc

SEQ ID NO: 4015 - DNA, 17 bp, synthetic construct
  misc_feature 1..17: note = Oligonucleotide
  source 1..17: mol_type = other DNA
cccacagcagccctgaa

SEQ ID NO: 4016 - DNA, 17 bp, synthetic construct
  misc_feature 1..17: note = Oligonucleotide
  source 1..17: mol_type = other DNA
agccccacagcagccct

SEQ ID NO: 4017 - DNA, 17 bp, synthetic construct
  misc_feature 1..17: note = Oligonucleotide
  source 1..17: mol_type = other DNA
accagccccacagcagc

SEQ ID NO: 4018 - DNA, 17 bp, synthetic construct
  misc_feature 1..17: note = Oligonucleotide
  source 1..17: mol_type = other DNA
ggaaccagccccacagc

SEQ ID NO: 4019 - DNA, 17 bp, synthetic construct
  misc_feature 1..17: note = Oligonucleotide
  source 1..17: mol_type = other DNA
gcaggaaccagccccac

SEQ ID NO: 4020 - DNA, 17 bp, synthetic construct
  misc_feature 1..17: note = Oligonucleotide
  source 1..17: mol_type = other DNA
caggcaggaaccagccc

SEQ ID NO: 4021 - DNA, 17 bp, synthetic construct
  misc_feature 1..17: note = Oligonucleotide
  source 1..17: mol_type = other DNA
acccaggcaggaaccag

SEQ ID NO: 4022 - DNA, 17 bp, synthetic construct
  misc_feature 1..17: note = Oligonucleotide
  source 1..17: mol_type = other DNA
tccacccaggcaggaac

SEQ ID NO: 4023 - DNA, 17 bp, synthetic construct
  misc_feature 1..17: note = Oligonucleotide
  source 1..17: mol_type = other DNA
aggtccacccaggcagg

SEQ ID NO: 4024 - DNA, 17 bp, synthetic construct
  misc_feature 1..17: note = Oligonucleotide
  source 1..17: mol_type = other DNA
ccgaggtccacccaggc

SEQ ID NO: 4025 - DNA, 17 bp, synthetic construct
  misc_feature 1..17: note = Oligonucleotide
  source 1..17: mol_type = other DNA
agcccgaggtccaccca

SEQ ID NO: 4026 - DNA, 17 bp, synthetic construct
  misc_feature 1..17: note = Oligonucleotide
  source 1..17: mol_type = other DNA
aagagcccgaggtccac

SEQ ID NO: 4027 - DNA, 17 bp, synthetic construct
  misc_feature 1..17: note = Oligonucleotide
  source 1..17: mol_type = other DNA
tagaagagcccgaggtc

SEQ ID NO: 4028 - DNA, 17 bp, synthetic construct
  misc_feature 1..17: note = Oligonucleotide
  source 1..17: mol_type = other DNA
gcctagaagagcccgag

SEQ ID NO: 4029 - DNA, 17 bp, synthetic construct
  misc_feature 1..17: note = Oligonucleotide
  source 1..17: mol_type = other DNA
ctggcctagaagagccc

SEQ ID NO: 4030 - DNA, 17 bp, synthetic construct
  misc_feature 1..17: note = Oligonucleotide
  source 1..17: mol_type = other DNA
tgcctggcctagaagag

SEQ ID NO: 4031 - DNA, 17 bp, synthetic construct
  misc_feature 1..17: note = Oligonucleotide
  source 1..17: mol_type = other DNA
acctgcctggcctagaa

SEQ ID NO: 4032 - DNA, 17 bp, synthetic construct
  misc_feature 1..17: note = Oligonucleotide
  source 1..17: mol_type = other DNA
ccgacctgcctggccta

SEQ ID NO: 4033 - DNA, 17 bp, synthetic construct
  misc_feature 1..17: note = Oligonucleotide
  source 1..17: mol_type = other DNA
gccccgacctgcctggc

SEQ ID NO: 4034 - DNA, 17 bp, synthetic construct
  misc_feature 1..17: note = Oligonucleotide
  source 1..17: mol_type = other DNA
gctgccccgacctgcct

SEQ ID NO: 4035 - DNA, 17 bp, synthetic construct
  misc_feature 1..17: note = Oligonucleotide
  source 1..17: mol_type = other DNA
cctgctgccccgacctg

SEQ ID NO: 4036 - DNA, 17 bp, synthetic construct
  misc_feature 1..17: note = Oligonucleotide
  source 1..17: mol_type = other DNA
ggccctgctgccccgac

SEQ ID NO: 4037 - DNA, 17 bp, synthetic construct
  misc_feature 1..17: note = Oligonucleotide
  source 1..17: mol_type = other DNA
tccggccctgctgcccc

SEQ ID NO: 4038 - DNA, 17 bp, synthetic construct
  misc_feature 1..17: note = Oligonucleotide
  source 1..17: mol_type = other DNA
ctctccggccctgctgc

SEQ ID NO: 4039 - DNA, 17 bp, synthetic construct
  misc_feature 1..17: note = Oligonucleotide
  source 1..17: mol_type = other DNA
cgtctctccggccctgc

SEQ ID NO: 4040 - DNA, 17 bp, synthetic construct
  misc_feature 1..17: note = Oligonucleotide
  source 1..17: mol_type = other DNA
ctccgtctctccggccc

SEQ ID NO: 4041 - DNA, 17 bp, synthetic construct
  misc_feature 1..17: note = Oligonucleotide
  source 1..17: mol_type = other DNA
tggctccgtctctccgg

SEQ ID NO: 4042 - DNA, 17 bp, synthetic construct
  misc_feature 1..17: note = Oligonucleotide
  source 1..17: mol_type = other DNA
ccctggctccgtctctc

SEQ ID NO: 4043 - DNA, 17 bp, synthetic construct
  misc_feature 1..17: note = Oligonucleotide
  source 1..17: mol_type = other DNA
ctgccctggctccgtct

SEQ ID NO: 4044 - DNA, 17 bp, synthetic construct
  misc_feature 1..17: note = Oligonucleotide
  source 1..17: mol_type = other DNA
tcactgccctggctccg

SEQ ID NO: 4045 - DNA, 17 bp, synthetic construct
  misc_feature 1..17: note = Oligonucleotide
  source 1..17: mol_type = other DNA
cagtcactgccctggct

SEQ ID NO: 4046 - DNA, 17 bp, synthetic construct
  misc_feature 1..17: note = Oligonucleotide
  source 1..17: mol_type = other DNA
gcccagtcactgccctg

SEQ ID NO: 4047 - DNA, 17 bp, synthetic construct
  misc_feature 1..17: note = Oligonucleotide
  source 1..17: mol_type = other DNA
caggcccagtcactgcc

SEQ ID NO: 4048 - DNA, 17 bp, synthetic construct
  misc_feature 1..17: note = Oligonucleotide
  source 1..17: mol_type = other DNA
ctccaggcccagtcact

SEQ ID NO: 4049 - DNA, 17 bp, synthetic construct
  misc_feature 1..17: note = Oligonucleotide
  source 1..17: mol_type = other DNA
ccactccaggcccagtc

SEQ ID NO: 4050 - DNA, 17 bp, synthetic construct
  misc_feature 1..17: note = Oligonucleotide
  source 1..17: mol_type = other DNA
cccccactccaggccca

SEQ ID NO: 4051 - DNA, 17 bp, synthetic construct
  misc_feature 1..17: note = Oligonucleotide
  source 1..17: mol_type = other DNA
agtcccccactccaggc

SEQ ID NO: 4052 - DNA, 17 bp, synthetic construct
  misc_feature 1..17: note = Oligonucleotide
  source 1..17: mol_type = other DNA
gcaagtcccccactcca

SEQ ID NO: 4053 - DNA, 17 bp, synthetic construct
  misc_feature 1..17: note = Oligonucleotide
  source 1..17: mol_type = other DNA
caagcaagtcccccact

SEQ ID NO: 4054 - DNA, 17 bp, synthetic construct
  misc_feature 1..17: note = Oligonucleotide
  source 1..17: mol_type = other DNA
ccccaagcaagtccccc

SEQ ID NO: 4055 - DNA, 17 bp, synthetic construct
  misc_feature 1..17: note = Oligonucleotide
  source 1..17: mol_type = other DNA
gggccccaagcaagtcc

SEQ ID NO: 4056 - DNA, 17 bp, synthetic construct
  misc_feature 1..17: note = Oligonucleotide
  source 1..17: mol_type = other DNA
gtggggccccaagcaag

SEQ ID NO: 4057 - DNA, 17 bp, synthetic construct
  misc_feature 1..17: note = Oligonucleotide
  source 1..17: mol_type = other DNA
ctggtggggccccaagc

SEQ ID NO: 4058 - DNA, 17 bp, synthetic construct
  misc_feature 1..17: note = Oligonucleotide
  source 1..17: mol_type = other DNA
accctggtggggcccca

SEQ ID NO: 4059 - DNA, 17 bp, synthetic construct
  misc_feature 1..17: note = Oligonucleotide
  source 1..17: mol_type = other DNA
gtcaccctggtggggcc

SEQ ID NO: 4060 - DNA, 17 bp, synthetic construct
  misc_feature 1..17: note = Oligonucleotide
  source 1..17: mol_type = other DNA
caggtcaccctggtggg

SEQ ID NO: 4061 - DNA, 17 bp, synthetic construct
  misc_feature 1..17: note = Oligonucleotide
  source 1..17: mol_type = other DNA
ggccaggtcaccctggt

SEQ ID NO: 4062 - DNA, 17 bp, synthetic construct
  misc_feature 1..17: note = Oligonucleotide
  source 1..17: mol_type = other DNA
caaggccaggtcaccct

SEQ ID NO: 4063 - DNA, 17 bp, synthetic construct
  misc_feature 1..17: note = Oligonucleotide
  source 1..17: mol_type = other DNA
caccaaggccaggtcac

SEQ ID NO: 4064 - DNA, 17 bp, synthetic construct
  misc_feature 1..17: note = Oligonucleotide
  source 1..17: mol_type = other DNA
cctcaccaaggccaggt

SEQ ID NO: 4065 - DNA, 17 bp, synthetic construct
  misc_feature 1..17: note = Oligonucleotide
  source 1..17: mol_type = other DNA
gcccctcaccaaggcca

SEQ ID NO: 4066 - DNA, 17 bp, synthetic construct
  misc_feature 1..17: note = Oligonucleotide
  source 1..17: mol_type = other DNA
gtagcccctcaccaagg

SEQ ID NO: 4067 - DNA, 17 bp, synthetic construct
  misc_feature 1..17: note = Oligonucleotide
  source 1..17: mol_type = other DNA
caagtagcccctcacca

SEQ ID NO: 4068 - DNA, 17 bp, synthetic construct
  misc_feature 1..17: note = Oligonucleotide
  source 1..17: mol_type = other DNA
acccaagtagcccctca

SEQ ID NO: 4069 - DNA, 17 bp, synthetic construct
  misc_feature 1..17: note = Oligonucleotide
  source 1..17: mol_type = other DNA
tgtacccaagtagcccc

SEQ ID NO: 4070 - DNA, 17 bp, synthetic construct
  misc_feature 1..17: note = Oligonucleotide
  source 1..17: mol_type = other DNA
gcttgtacccaagtagc

SEQ ID NO: 4071 - DNA, 17 bp, synthetic construct
  misc_feature 1..17: note = Oligonucleotide
  source 1..17: mol_type = other DNA
tcagcttgtacccaagt

SEQ ID NO: 4072 - DNA, 17 bp, synthetic construct
  misc_feature 1..17: note = Oligonucleotide
  source 1..17: mol_type = other DNA
ctgtcagcttgtaccca

SEQ ID NO: 4073 - DNA, 17 bp, synthetic construct
  misc_feature 1..17: note = Oligonucleotide
  source 1..17: mol_type = other DNA
cgactgtcagcttgtac

SEQ ID NO: 4074 - DNA, 17 bp, synthetic construct
  misc_feature 1..17: note = Oligonucleotide
  source 1..17: mol_type = other DNA
tcacgactgtcagcttg

SEQ ID NO: 4075 - DNA, 17 bp, synthetic construct
  misc_feature 1..17: note = Oligonucleotide
  source 1..17: mol_type = other DNA
cagtcacgactgtcagc

SEQ ID NO: 4076 - DNA, 17 bp, synthetic construct
  misc_feature 1..17: note = Oligonucleotide
  source 1..17: mol_type = other DNA
aaccagtcacgactgtc

SEQ ID NO: 4077 - DNA, 17 bp, synthetic construct
  misc_feature 1..17: note = Oligonucleotide
  source 1..17: mol_type = other DNA
ccaaaccagtcacgact

SEQ ID NO: 4078 - DNA, 17 bp, synthetic construct
  misc_feature 1..17: note = Oligonucleotide
  source 1..17: mol_type = other DNA
tagccaaaccagtcacg

SEQ ID NO: 4079 - DNA, 17 bp, synthetic construct
  misc_feature 1..17: note = Oligonucleotide
  source 1..17: mol_type = other DNA
tgatagccaaaccagtc

SEQ ID NO: 4080 - DNA, 17 bp, synthetic construct
  misc_feature 1..17: note = Oligonucleotide
  source 1..17: mol_type = other DNA
ccctgatagccaaacca

SEQ ID NO: 4081 - DNA, 17 bp, synthetic construct
  misc_feature 1..17: note = Oligonucleotide
  source 1..17: mol_type = other DNA
gcgccctgatagccaaa

SEQ ID NO: 4082 - DNA, 17 bp, synthetic construct
  misc_feature 1..17: note = Oligonucleotide
  source 1..17: mol_type = other DNA
cttgcgccctgatagcc

SEQ ID NO: 4083 - DNA, 17 bp, synthetic construct
  misc_feature 1..17: note = Oligonucleotide
  source 1..17: mol_type = other DNA
ttccttgcgccctgata

SEQ ID NO: 4084 - DNA, 17 bp, synthetic construct
  misc_feature 1..17: note = Oligonucleotide
  source 1..17: mol_type = other DNA
cccttccttgcgccctg

SEQ ID NO: 4085 - DNA, 17 bp, synthetic construct
  misc_feature 1..17: note = Oligonucleotide
  source 1..17: mol_type = other DNA
aagcccttccttgcgcc

SEQ ID NO: 4086 - DNA, 17 bp, synthetic construct
  misc_feature 1..17: note = Oligonucleotide
  source 1..17: mol_type = other DNA
tcaaagcccttccttgc

SEQ ID NO: 4087 - DNA, 17 bp, synthetic construct
  misc_feature 1..17: note = Oligonucleotide
  source 1..17: mol_type = other DNA
ggctcaaagcccttcct

SEQ ID NO: 4088 - DNA, 17 bp, synthetic construct
  misc_feature 1..17: note = Oligonucleotide
  source 1..17: mol_type = other DNA
cacggctcaaagccctt

SEQ ID NO: 4089 - DNA, 17 bp, synthetic construct
  misc_feature 1..17: note = Oligonucleotide
  source 1..17: mol_type = other DNA
atgcacggctcaaagcc

SEQ ID NO: 4090 - DNA, 17 bp, synthetic construct
  misc_feature 1..17: note = Oligonucleotide
  source 1..17: mol_type = other DNA
cccatgcacggctcaaa

SEQ ID NO: 4091 - DNA, 17 bp, synthetic construct
  misc_feature 1..17: note = Oligonucleotide
  source 1..17: mol_type = other DNA
gggcccatgcacggctc

SEQ ID NO: 4092 - DNA, 17 bp, synthetic construct
  misc_feature 1..17: note = Oligonucleotide
  source 1..17: mol_type = other DNA
ggtgggcccatgcacgg

SEQ ID NO: 4093 - DNA, 17 bp, synthetic construct
  misc_feature 1..17: note = Oligonucleotide
  source 1..17: mol_type = other DNA
tcgggtgggcccatgca

SEQ ID NO: 4094 - DNA, 17 bp, synthetic construct
  misc_feature 1..17: note = Oligonucleotide
  source 1..17: mol_type = other DNA
cactcgggtgggcccat

SEQ ID NO: 4095 - DNA, 17 bp, synthetic construct
  misc_feature 1..17: note = Oligonucleotide
  source 1..17: mol_type = other DNA
tcccactcgggtgggcc

SEQ ID NO: 4096 - DNA, 17 bp, synthetic construct
  misc_feature 1..17: note = Oligonucleotide
  source 1..17: mol_type = other DNA
aattcccactcgggtgg

SEQ ID NO: 4097 - DNA, 17 bp, synthetic construct
  misc_feature 1..17: note = Oligonucleotide
  source 1..17: mol_type = other DNA
cccaattcccactcggg

SEQ ID NO: 4098 - DNA, 17 bp, synthetic construct
  misc_feature 1..17: note = Oligonucleotide
  source 1..17: mol_type = other DNA
ggccccaattcccactc

SEQ ID NO: 4099 - DNA, 17 bp, synthetic construct
  misc_feature 1..17: note = Oligonucleotide
  source 1..17: mol_type = other DNA
cacggccccaattccca

SEQ ID NO: 4100 - DNA, 17 bp, synthetic construct
  misc_feature 1..17: note = Oligonucleotide
  source 1..17: mol_type = other DNA
caccacggccccaattc

SEQ ID NO: 4101 - DNA, 17 bp, synthetic construct
  misc_feature 1..17: note = Oligonucleotide
  source 1..17: mol_type = other DNA
tcccaccacggccccaa

SEQ ID NO: 4102 - DNA, 17 bp, synthetic construct
  misc_feature 1..17: note = Oligonucleotide
  source 1..17: mol_type = other DNA
cactcccaccacggccc

SEQ ID NO: 4103 - DNA, 17 bp, synthetic construct
  misc_feature 1..17: note = Oligonucleotide
  source 1..17: mol_type = other DNA
ctgcactcccaccacgg

SEQ ID NO: 4104 - DNA, 17 bp, synthetic construct
  misc_feature 1..17: note = Oligonucleotide
  source 1..17: mol_type = other DNA
gtcctgcactcccacca

SEQ ID NO: 4105 - DNA, 17 bp, synthetic construct
  misc_feature 1..17: note = Oligonucleotide
  source 1..17: mol_type = other DNA
acggtcctgcactccca

SEQ ID NO: 4106 - DNA, 17 bp, synthetic construct
  misc_feature 1..17: note = Oligonucleotide
  source 1..17: mol_type = other DNA
accacggtcctgcactc

SEQ ID NO: 4107 - DNA, 17 bp, synthetic construct
  misc_feature 1..17: note = Oligonucleotide
  source 1..17: mol_type = other DNA
tcaaccacggtcctgca

SEQ ID NO: 4108 - DNA, 17 bp, synthetic construct
  misc_feature 1..17: note = Oligonucleotide
  source 1..17: mol_type = other DNA
ttgtcaaccacggtcct

SEQ ID NO: 4109 - DNA, 17 bp, synthetic construct
  misc_feature 1..17: note = Oligonucleotide
  source 1..17: mol_type = other DNA
caattgtcaaccacggt

SEQ ID NO: 4110 - DNA, 17 bp, synthetic construct
  misc_feature 1..17: note = Oligonucleotide
  source 1..17: mol_type = other DNA
tcacaattgtcaaccac

SEQ ID NO: 4111 - DNA, 17 bp, synthetic construct
  misc_feature 1..17: note = Oligonucleotide
  source 1..17: mol_type = other DNA
acatcacaattgtcaac

SEQ ID NO: 4112 - DNA, 17 bp, synthetic construct
  misc_feature 1..17: note = Oligonucleotide
  source 1..17: mol_type = other DNA
ctgacatcacaattgtc

SEQ ID NO: 4113 - DNA, 17 bp, synthetic construct
  misc_feature 1..17: note = Oligonucleotide
  source 1..17: mol_type = other DNA
cacctgacatcacaatt

SEQ ID NO: 4114 - DNA, 17 bp, synthetic construct
  misc_feature 1..17: note = Oligonucleotide
  source 1..17: mol_type = other DNA
tgtcacctgacatcaca

SEQ ID NO: 4115 - DNA, 17 bp, synthetic construct
  misc_feature 1..17: note = Oligonucleotide
  source 1..17: mol_type = other DNA
acctgtcacctgacatc

SEQ ID NO: 4116 - DNA, 17 bp, synthetic construct
  misc_feature 1..17: note = Oligonucleotide
  source 1..17: mol_type = other DNA
ctgacctgtcacctgac

SEQ ID NO: 4117 - DNA, 17 bp, synthetic construct
  misc_feature 1..17: note = Oligonucleotide
  source 1..17: mol_type = other DNA
agtctgacctgtcacct

SEQ ID NO: 4118 - DNA, 17 bp, synthetic construct
  misc_feature 1..17: note = Oligonucleotide
  source 1..17: mol_type = other DNA
accagtctgacctgtca

SEQ ID NO: 4119 - DNA, 17 bp, synthetic construct
  misc_feature 1..17: note = Oligonucleotide
  source 1..17: mol_type = other DNA
cctaccagtctgacctg

SEQ ID NO: 4120 - DNA, 17 bp, synthetic construct
  misc_feature 1..17: note = Oligonucleotide
  source 1..17: mol_type = other DNA
atccctaccagtctgac

SEQ ID NO: 4121 - DNA, 17 bp, synthetic construct
  misc_feature 1..17: note = Oligonucleotide
  source 1..17: mol_type = other DNA
cacatccctaccagtct

SEQ ID NO: 4122 - DNA, 17 bp, synthetic construct
  misc_feature 1..17: note = Oligonucleotide
  source 1..17: mol_type = other DNA
cgccacatccctaccag

SEQ ID NO: 4123 - DNA, 17 bp, synthetic construct
  misc_feature 1..17: note = Oligonucleotide
  source 1..17: mol_type = other DNA
ccccgccacatccctac

SEQ ID NO: 4124 - DNA, 17 bp, synthetic construct
  misc_feature 1..17: note = Oligonucleotide
  source 1..17: mol_type = other DNA
aacccccgccacatccc

SEQ ID NO: 4125 - DNA, 17 bp, synthetic construct
  misc_feature 1..17: note = Oligonucleotide
  source 1..17: mol_type = other DNA
ggcaacccccgccacat

SEQ ID NO: 4126 - DNA, 17 bp, synthetic construct
  misc_feature 1..17: note = Oligonucleotide
  source 1..17: mol_type = other DNA
tcaggcaacccccgcca

SEQ ID NO: 4127 - DNA, 17 bp, synthetic construct
  misc_feature 1..17: note = Oligonucleotide
  source 1..17: mol_type = other DNA
ccttcaggcaacccccg

SEQ ID NO: 4128 - DNA, 17 bp, synthetic construct
  misc_feature 1..17: note = Oligonucleotide
  source 1..17: mol_type = other DNA
ccaccttcaggcaaccc

SEQ ID NO: 4129 - DNA, 17 bp, synthetic construct
  misc_feature 1..17: note = Oligonucleotide
  source 1..17: mol_type = other DNA
aggccaccttcaggcaa

SEQ ID NO: 4130 - DNA, 17 bp, synthetic construct
  misc_feature 1..17: note = Oligonucleotide
  source 1..17: mol_type = other DNA
ctcaggccaccttcagg

SEQ ID NO: 4131 - DNA, 17 bp, synthetic construct
  misc_feature 1..17: note = Oligonucleotide
  source 1..17: mol_type = other DNA
agcctcaggccaccttc

SEQ ID NO: 4132 - DNA, 17 bp, synthetic construct
  misc_feature 1..17: note = Oligonucleotide
  source 1..17: mol_type = other DNA
gcaagcctcaggccacc

SEQ ID NO: 4133 - DNA, 17 bp, synthetic construct
  misc_feature 1..17: note = Oligonucleotide
  source 1..17: mol_type = other DNA
ccggcaagcctcaggcc

SEQ ID NO: 4134 - DNA, 17 bp, synthetic construct
  misc_feature 1..17: note = Oligonucleotide
  source 1..17: mol_type = other DNA
cctccggcaagcctcag

SEQ ID NO: 4135 - DNA, 17 bp, synthetic construct
  misc_feature 1..17: note = Oligonucleotide
  source 1..17: mol_type = other DNA
cttcctccggcaagcct

SEQ ID NO: 4136 - DNA, 17 bp, synthetic construct
  misc_feature 1..17: note = Oligonucleotide
  source 1..17: mol_type = other DNA
cgccttcctccggcaag

SEQ ID NO: 4137 - DNA, 17 bp, synthetic construct
  misc_feature 1..17: note = Oligonucleotide
  source 1..17: mol_type = other DNA
acccgccttcctccggc

SEQ ID NO: 4138 - DNA, 17 bp, synthetic construct
  misc_feature 1..17: note = Oligonucleotide
  source 1..17: mol_type = other DNA
atcacccgccttcctcc

SEQ ID NO: 4139 - DNA, 17 bp, synthetic construct
  misc_feature 1..17: note = Oligonucleotide
  source 1..17: mol_type = other DNA
aacatcacccgccttcc

SEQ ID NO: 4140 - DNA, 17 bp, synthetic construct
  misc_feature 1..17: note = Oligonucleotide
  source 1..17: mol_type = other DNA
ctgaacatcacccgcct

SEQ ID NO: 4141 - DNA, 17 bp, synthetic construct
  misc_feature 1..17: note = Oligonucleotide
  source 1..17: mol_type = other DNA
catctgaacatcacccg

SEQ ID NO: 4142 - DNA, 17 bp, synthetic construct
  misc_feature 1..17: note = Oligonucleotide
  source 1..17: mol_type = other DNA
catcatctgaacatcac

SEQ ID NO: 4143 - DNA, 17 bp, synthetic construct
  misc_feature 1..17: note = Oligonucleotide
  source 1..17: mol_type = other DNA
ctccatcatctgaacat

SEQ ID NO: 4144 - DNA, 17 bp, synthetic construct
  misc_feature 1..17: note = Oligonucleotide
  source 1..17: mol_type = other DNA
ggcctccatcatctgaa

SEQ ID NO: 4145 - DNA, 17 bp, synthetic construct
  misc_feature 1..17: note = Oligonucleotide
  source 1..17: mol_type = other DNA
caaggcctccatcatct

SEQ ID NO: 4146 - DNA, 17 bp, synthetic construct
  misc_feature 1..17: note = Oligonucleotide
  source 1..17: mol_type = other DNA
caccaaggcctccatca

SEQ ID NO: 4147 - DNA, 17 bp, synthetic construct
  misc_feature 1..17: note = Oligonucleotide
  source 1..17: mol_type = other DNA
tggcaccaaggcctcca

SEQ ID NO: 4148 - DNA, 17 bp, synthetic construct
  misc_feature 1..17: note = Oligonucleotide
  source 1..17: mol_type = other DNA
gcctggcaccaaggcct

SEQ ID NO: 4149 - DNA, 17 bp, synthetic construct
  misc_feature 1..17: note = Oligonucleotide
  source 1..17: mol_type = other DNA
tcagcctggcaccaagg

SEQ ID NO: 4150 - DNA, 17 bp, synthetic construct
  misc_feature 1..17: note = Oligonucleotide
  source 1..17: mol_type = other DNA
cagtcagcctggcacca

SEQ ID NO: 4151 - DNA, 17 bp, synthetic construct
  misc_feature 1..17: note = Oligonucleotide
  source 1..17: mol_type = other DNA
cgtcagtcagcctggca

SEQ ID NO: 4152 - DNA, 17 bp, synthetic construct
  misc_feature 1..17: note = Oligonucleotide
  source 1..17: mol_type = other DNA
ggccgtcagtcagcctg

SEQ ID NO: 4153 - DNA, 17 bp, synthetic construct
  misc_feature 1..17: note = Oligonucleotide
  source 1..17: mol_type = other DNA
accggccgtcagtcagc

SEQ ID NO: 4154 - DNA, 17 bp, synthetic construct
  misc_feature 1..17: note = Oligonucleotide
  source 1..17: mol_type = other DNA
aacaccggccgtcagtc

SEQ ID NO: 4155 - DNA, 17 bp, synthetic construct
  misc_feature 1..17: note = Oligonucleotide
  source 1..17: mol_type = other DNA
tggaacaccggccgtca

SEQ ID NO: 4156 - DNA, 25 bp, synthetic construct
  misc_feature 1..25: note = Oligonucleotide
  source 1..25: mol_type = other DNA
ctggaacaccggccgtcagtcagcc

SEQ ID NO: 4157 - DNA, 25 bp, synthetic construct
  misc_feature 1..25: note = Oligonucleotide
  source 1..25: mol_type = other DNA
cgcctggaacaccggccgtcagtca

SEQ ID NO: 4158 - DNA, 25 bp, synthetic construct
  misc_feature 1..25: note = Oligonucleotide
  source 1..25: mol_type = other DNA
gttcgcctggaacaccggccgtcag

SEQ ID NO: 4159 - DNA, 25 bp, synthetic construct
  misc_feature 1..25: note = Oligonucleotide
  source 1..25: mol_type = other DNA
caggttcgcctggaacaccggccgt

SEQ ID NO: 4160 - DNA, 25 bp, synthetic construct
  misc_feature 1..25: note = Oligonucleotide
  source 1..25: mol_type = other DNA
cttcaggttcgcctggaacaccggc

SEQ ID NO: 4161 - DNA, 25 bp, synthetic construct
  misc_feature 1..25: note = Oligonucleotide
  source 1..25: mol_type = other DNA
cttcttcaggttcgcctggaacacc

SEQ ID NO: 4162 - DNA, 25 bp, synthetic construct
  misc_feature 1..25: note = Oligonucleotide
  source 1..25: mol_type = other DNA
gaacttcttcaggttcgcctggaac

SEQ ID NO: 4163 - DNA, 17 bp, synthetic construct
  misc_feature 1..17: note = Oligonucleotide
  source 1..17: mol_type = other DNA
cctggaacaccggccgt

SEQ ID NO: 4164 - DNA, 17 bp, synthetic construct
  misc_feature 1..17: note = Oligonucleotide
  source 1..17: mol_type = other DNA
tcgcctggaacaccggc

SEQ ID NO: 4165 - DNA, 17 bp, synthetic construct
  misc_feature 1..17: note = Oligonucleotide
  source 1..17: mol_type = other DNA
ggttcgcctggaacacc

SEQ ID NO: 4166 - DNA, 17 bp, synthetic construct
  misc_feature 1..17: note = Oligonucleotide
  source 1..17: mol_type = other DNA
tcaggttcgcctggaac

SEQ ID NO: 4167 - DNA, 17 bp, synthetic construct
  misc_feature 1..17: note = Oligonucleotide
  source 1..17: mol_type = other DNA
tcttcaggttcgcctgg

SEQ ID NO: 4168 - DNA, 17 bp, synthetic construct
  misc_feature 1..17: note = Oligonucleotide
  source 1..17: mol_type = other DNA
acttcttcaggttcgcc

SEQ ID NO: 4169 - DNA, 25 bp, synthetic construct
  misc_feature 1..25: note = Oligonucleotide
  source 1..25: mol_type = other DNA
atggaagactgggcagctgcagtgg

SEQ ID NO: 4170 - DNA, 25 bp, synthetic construct
  misc_feature 1..25: note = Oligonucleotide
  source 1..25: mol_type = other DNA
gtggcagttgcagtgagtggtcgga

SEQ ID NO: 4171 - DNA, 25 bp, synthetic construct
  misc_feature 1..25: note = Oligonucleotide
  source 1..25: mol_type = other DNA
gtgaggtgccggagatggaagactg

SEQ ID NO: 4172 - DNA, 25 bp, synthetic construct
  misc_feature 1..25: note = Oligonucleotide
  source 1..25: mol_type = other DNA
gcagtgaggggccggagatggaaga

SEQ ID NO: 4173 - DNA, 25 bp, synthetic construct
  misc_feature 1..25: note = Oligonucleotide
  source 1..25: mol_type = other DNA
gcagtgagggtccggagatggaaga

SEQ ID NO: 4174 - DNA, 25 bp, synthetic construct
  misc_feature 1..25: note = Oligonucleotide
  source 1..25: mol_type = other DNA
gcagtgaggtgccgtagatggaaga

SEQ ID NO: 4175 - DNA, 25 bp, synthetic construct
  misc_feature 1..25: note = Oligonucleotide
  source 1..25: mol_type = other DNA
tggaaaagcccatagttgagcgcgt

SEQ ID NO: 4176 - DNA, 25 bp, synthetic construct
  misc_feature 1..25: note = Oligonucleotide
  source 1..25: mol_type = other DNA
gtccaggcgcaggcacttctgcagc

SEQ ID NO: 4177 - DNA, 22 bp, synthetic construct
  misc_feature 1..22: note = Oligonucleotide
  source 1..22: mol_type = other DNA
gctcctcatccaggaacttgcc

SEQ ID NO: 4178 - DNA, 25 bp, synthetic construct
  misc_feature 1..25: note = Oligonucleotide
  source 1..25: mol_type = other DNA
cccatagttgagcgcgtcctggagg

SEQ ID NO: 4179 - DNA, 25 bp, synthetic construct
  misc_feature 1..25: note = Oligonucleotide
  source 1..25: mol_type = other DNA
cccatagttgagcgcgtccttaatg

SEQ ID NO: 4180 - DNA, 22 bp, synthetic construct
  misc_feature 1..22: note = Oligonucleotide
  source 1..22: mol_type = other DNA
ctcatccaggaacttgccttag

SEQ ID NO: 4181 - DNA, 22 bp, synthetic construct
  misc_feature 1..22: note = Oligonucleotide
  source 1..22: mol_type = other DNA
ctcatccaggaacttgccggcg

SEQ ID NO: 4182 - DNA, 25 bp, synthetic construct
  misc_feature 1..25: note = Oligonucleotide
  source 1..25: mol_type = other DNA
ctttgtgtgaagctttgcaaactgc

SEQ ID NO: 4183 - DNA, 25 bp, synthetic construct
  misc_feature 1..25: note = Oligonucleotide
  source 1..25: mol_type = other DNA
atcatcgatgaggttctgggcataa

SEQ ID NO: 4184 - DNA, 25 bp, synthetic construct
  misc_feature 1..25: note = Oligonucleotide
  source 1..25: mol_type = other DNA
gagcggagcctccagtgcggtgtgt

SEQ ID NO: 4185 - DNA, 23 bp, synthetic construct
  misc_feature 1..23: note = Oligonucleotide
  source 1..23: mol_type = other DNA
ggcgagaagtggaaagaaaaaca

SEQ ID NO: 4186 - DNA, 22 bp, synthetic construct
  misc_feature 1..22: note = Oligonucleotide
  source 1..22: mol_type = other DNA
gggcacgaagaccaaggtaggg

SEQ ID NO: 4187 - DNA, 25 bp, synthetic construct
  misc_feature 1..25: note = Oligonucleotide
  source 1..25: mol_type = other DNA
gagctcctgtaaaccaccggtgtac

SEQ ID NO: 4188 - DNA, 25 bp, synthetic construct
  misc_feature 1..25: note = Oligonucleotide
  source 1..25: mol_type = other DNA
cttgagctcctgtaaaccaccggtg

SEQ ID NO: 4189 - DNA, 25 bp, synthetic construct
  misc_feature 1..25: note = Oligonucleotide
  source 1..25: mol_type = other DNA
agccttgagctcctgtaaaccaccg

SEQ ID NO: 4190 - DNA, 25 bp, synthetic construct
  misc_feature 1..25: note = Oligonucleotide
  source 1..25: mol_type = other DNA
ggcagccttgagctcctgtaaacca

SEQ ID NO: 4191 - DNA, 25 bp, synthetic construct
  misc_feature 1..25: note = Oligonucleotide
  source 1..25: mol_type = other DNA
tggggcagccttgagctcctgtaaa

SEQ ID NO: 4192 - DNA, 25 bp, synthetic construct
  misc_feature 1..25: note = Oligonucleotide
  source 1..25: mol_type = other DNA
ctctggggcagccttgagctcctgt

SEQ ID NO: 4193 - DNA, 25 bp, synthetic construct
  misc_feature 1..25: note = Oligonucleotide
  source 1..25: mol_type = other DNA
cacctctggggcagccttgagctcc

SEQ ID NO: 4194 - DNA, 25 bp, synthetic construct
  misc_feature 1..25: note = Oligonucleotide
  source 1..25: mol_type = other DNA
agacacctctggggcagccttgagc

SEQ ID NO: 4195 - DNA, 25 bp, synthetic construct
  misc_feature 1..25: note = Oligonucleotide
  source 1..25: mol_type = other DNA
gacagacacctctggggcagccttg

SEQ ID NO: 4196 - DNA, 25 bp, synthetic construct
  misc_feature 1..25: note = Oligonucleotide
  source 1..25: mol_type = other DNA
agagacagacacctctggggcagcc

SEQ ID NO: 4197 - DNA, 25 bp, synthetic construct
  misc_feature 1..25: note = Oligonucleotide
  source 1..25: mol_type = other DNA
cacagagacagacacctctggggca

SEQ ID NO: 4198 - DNA, 25 bp, synthetic construct
  misc_feature 1..25: note = Oligonucleotide
  source 1..25: mol_type = other DNA
ggacacagagacagacacctctggg

SEQ ID NO: 4199 - DNA, 25 bp, synthetic construct
  misc_feature 1..25: note = Oligonucleotide
  source 1..25: mol_type = other DNA
catggacacagagacagacacctct

SEQ ID NO: 4200 - DNA, 25 bp, synthetic construct
  misc_feature 1..25: note = Oligonucleotide
  source 1..25: mol_type = other DNA
tcacatggacacagagacagacacc

SEQ ID NO: 4201 - DNA, 25 bp, synthetic construct
  misc_feature 1..25: note = Oligonucleotide
  source 1..25: mol_type = other DNA
aagtcacatggacacagagacagac

SEQ ID NO: 4202 - DNA, 25 bp, synthetic construct
  misc_feature 1..25: note = Oligonucleotide
  source 1..25: mol_type = other DNA
gtcaagtcacatggacacagagaca

SEQ ID NO: 4203 - DNA, 25 bp, synthetic construct
  misc_feature 1..25: note = Oligonucleotide
  source 1..25: mol_type = other DNA
gaagtcaagtcacatggacacagag

SEQ ID NO: 4204 - DNA, 25 bp, synthetic construct
  misc_feature 1..25: note = Oligonucleotide
  source 1..25: mol_type = other DNA
agagaagtcaagtcacatggacaca

SEQ ID NO: 4205 - DNA, 25 bp, synthetic construct
  misc_feature 1..25: note = Oligonucleotide
  source 1..25: mol_type = other DNA
ttcagagaagtcaagtcacatggac

SEQ ID NO: 4206 - DNA, 25 bp, synthetic construct
  misc_feature 1..25: note = Oligonucleotide
  source 1..25: mol_type = other DNA
aggttcagagaagtcaagtcacatg

SEQ ID NO: 4207 - DNA, 25 bp, synthetic construct
  misc_feature 1..25: note = Oligonucleotide
  source 1..25: mol_type = other DNA
ccaaggttcagagaagtcaagtcac

SEQ ID NO: 4208 - DNA, 25 bp, synthetic construct
  misc_feature 1..25: note = Oligonucleotide
  source 1..25: mol_type = other DNA
gaaccaaggttcagagaagtcaagt

SEQ ID NO: 4209 - DNA, 25 bp, synthetic construct
  misc_feature 1..25: note = Oligonucleotide
  source 1..25: mol_type = other DNA
gaagaaccaaggttcagagaagtca

SEQ ID NO: 4210 - DNA, 25 bp, synthetic construct
  misc_feature 1..25: note = Oligonucleotide
  source 1..25: mol_type = other DNA
agggaagaaccaaggttcagagaag

SEQ ID NO: 4211 - DNA, 25 bp, synthetic construct
  misc_feature 1..25: note = Oligonucleotide
  source 1..25: mol_type = other DNA
tccagggaagaaccaaggttcagag

SEQ ID NO: 4212 - DNA, 25 bp, synthetic construct
  misc_feature 1..25: note = Oligonucleotide
  source 1..25: mol_type = other DNA
ccttccagggaagaaccaaggttca

SEQ ID NO: 4213 - DNA, 25 bp, synthetic construct
  misc_feature 1..25: note = Oligonucleotide
  source 1..25: mol_type = other DNA
gggccttccagggaagaaccaaggt

SEQ ID NO: 4214 - DNA, 25 bp, synthetic construct
  misc_feature 1..25: note = Oligonucleotide
  source 1..25: mol_type = other DNA
ttagggccttccagggaagaaccaa

SEQ ID NO: 4215 - DNA, 25 bp, synthetic construct
  misc_feature 1..25: note = Oligonucleotide
  source 1..25: mol_type = other DNA
cccttagggccttccagggaagaac

SEQ ID NO: 4216 - DNA, 25 bp, synthetic construct
  misc_feature 1..25: note = Oligonucleotide
  source 1..25: mol_type = other DNA
gctcccttagggccttccagggaag

SEQ ID NO: 4217 - DNA, 25 bp, synthetic construct
  misc_feature 1..25: note = Oligonucleotide
  source 1..25: mol_type = other DNA
ggtgctcccttagggccttccaggg

SEQ ID NO: 4218 - DNA, 25 bp, synthetic construct
  misc_feature 1..25: note = Oligonucleotide
  source 1..25: mol_type = other DNA
ggaggtgctcccttagggccttcca

SEQ ID NO: 4219 - DNA, 25 bp, synthetic construct
  misc_feature 1..25: note = Oligonucleotide
  source 1..25: mol_type = other DNA
gggggaggtgctcccttagggcctt

SEQ ID NO: 4220 - DNA, 25 bp, synthetic construct
  misc_feature 1..25: note = Oligonucleotide
  source 1..25: mol_type = other DNA
cctgggggaggtgctcccttagggc

SEQ ID NO: 4221 - DNA, 25 bp, synthetic construct
  misc_feature 1..25: note = Oligonucleotide
  source 1..25: mol_type = other DNA
agtcctgggggaggtgctcccttag

SEQ ID NO: 4222 - DNA, 25 bp, synthetic construct
  misc_feature 1..25: note = Oligonucleotide
  source 1..25: mol_type = other DNA
ggcagtcctgggggaggtgctccct

SEQ ID NO: 4223 - DNA, 25 bp, synthetic construct
  misc_feature 1..25: note = Oligonucleotide
  source 1..25: mol_type = other DNA
gtgggcagtcctgggggaggtgctc

SEQ ID NO: 4224 - DNA, 25 bp, synthetic construct
  misc_feature 1..25: note = Oligonucleotide
  source 1..25: mol_type = other DNA
cctgtgggcagtcctgggggaggtg

SEQ ID NO: 4225 - DNA, 25 bp, synthetic construct
  misc_feature 1..25: note = Oligonucleotide
  source 1..25: mol_type = other DNA
cctcctgtgggcagtcctgggggag

SEQ ID NO: 4226 - DNA, 25 bp, synthetic construct
  misc_feature 1..25: note = Oligonucleotide
  source 1..25: mol_type = other DNA
acacctcctgtgggcagtcctgggg

SEQ ID NO: 4227 - DNA, 25 bp, synthetic construct
  misc_feature 1..25: note = Oligonucleotide
  source 1..25: mol_type = other DNA
ccaacacctcctgtgggcagtcctg

SEQ ID NO: 4228 - DNA, 25 bp, synthetic construct
  misc_feature 1..25: note = Oligonucleotide
  source 1..25: mol_type = other DNA
cccccaacacctcctgtgggcagtc

SEQ ID NO: 4229 - DNA, 25 bp, synthetic construct
  misc_feature 1..25: note = Oligonucleotide
  source 1..25: mol_type = other DNA
cgtcccccaacacctcctgtgggca

SEQ ID NO: 4230 - DNA, 25 bp, synthetic construct
  misc_feature 1..25: note = Oligonucleotide
  source 1..25: mol_type = other DNA
gctcgtcccccaacacctcctgtgg

SEQ ID NO: 4231 - DNA, 25 bp, synthetic construct
  misc_feature 1..25: note = Oligonucleotide
  source 1..25: mol_type = other DNA
tgggctcgtcccccaacacctcctg

SEQ ID NO: 4232 - DNA, 25 bp, synthetic construct
  misc_feature 1..25: note = Oligonucleotide
  source 1..25: mol_type = other DNA
tgctgggctcgtcccccaacacctc

SEQ ID NO: 4233 - DNA, 25 bp, synthetic construct
  misc_feature 1..25: note = Oligonucleotide
  source 1..25: mol_type = other DNA
gcgtgctgggctcgtcccccaacac

SEQ ID NO: 4234 - DNA, 25 bp, synthetic construct
  misc_feature 1..25: note = Oligonucleotide
  source 1..25: mol_type = other DNA
ctcgcgtgctgggctcgtcccccaa

SEQ ID NO: 4235 - DNA, 25 bp, synthetic construct
  misc_feature 1..25: note = Oligonucleotide
  source 1..25: mol_type = other DNA
cccctcgcgtgctgggctcgtcccc

SEQ ID NO: 4236 - DNA, 25 bp, synthetic construct
  misc_feature 1..25: note = Oligonucleotide
  source 1..25: mol_type = other DNA
atacccctcgcgtgctgggctcgtc

SEQ ID NO: 4237 - DNA, 25 bp, synthetic construct
  misc_feature 1..25: note = Oligonucleotide
  source 1..25: mol_type = other DNA
caaatacccctcgcgtgctgggctc

SEQ ID NO: 4238 - DNA, 25 bp, synthetic construct
  misc_feature 1..25: note = Oligonucleotide
  source 1..25: mol_type = other DNA
caccaaatacccctcgcgtgctggg

SEQ ID NO: 4239 - DNA, 25 bp, synthetic construct
  misc_feature 1..25: note = Oligonucleotide
  source 1..25: mol_type = other DNA
caacaccaaatacccctcgcgtgct

SEQ ID NO: 4240 - DNA, 25 bp, synthetic construct
  misc_feature 1..25: note = Oligonucleotide
  source 1..25: mol_type = other DNA
catcaacaccaaatacccctcgcgt

SEQ ID NO: 4241 - DNA, 25 bp, synthetic construct
  misc_feature 1..25: note = Oligonucleotide
  source 1..25: mol_type = other DNA
gaacatcaacaccaaatacccctcg

SEQ ID NO: 4242 - DNA, 25 bp, synthetic construct
  misc_feature 1..25: note = Oligonucleotide
  source 1..25: mol_type = other DNA
agggaacatcaacaccaaatacccc

SEQ ID NO: 4243 - DNA, 25 bp, synthetic construct
  misc_feature 1..25: note = Oligonucleotide
  source 1..25: mol_type = other DNA
cgaagggaacatcaacaccaaatac

SEQ ID NO: 4244 - DNA, 25 bp, synthetic construct
  misc_feature 1..25: note = Oligonucleotide
  source 1..25: mol_type = other DNA
ggacgaagggaacatcaacaccaaa

SEQ ID NO: 4245 - DNA, 25 bp, synthetic construct
  misc_feature 1..25: note = Oligonucleotide
  source 1..25: mol_type = other DNA
aggggacgaagggaacatcaacacc

SEQ ID NO: 4246 - DNA, 25 bp, synthetic construct
  misc_feature 1..25: note = Oligonucleotide
  source 1..25: mol_type = other DNA
gcgaggggacgaagggaacatcaac

SEQ ID NO: 4247 - DNA, 25 bp, synthetic construct
  misc_feature 1..25: note = Oligonucleotide
  source 1..25: mol_type = other DNA
ctggcgaggggacgaagggaacatc

SEQ ID NO: 4248 - DNA, 25 bp, synthetic construct
  misc_feature 1..25: note = Oligonucleotide
  source 1..25: mol_type = other DNA
tccctggcgaggggacgaagggaac

SEQ ID NO: 4249 - DNA, 25 bp, synthetic construct
  misc_feature 1..25: note = Oligonucleotide
  source 1..25: mol_type = other DNA
ctctccctggcgaggggacgaaggg

SEQ ID NO: 4250 - DNA, 25 bp, synthetic construct
  misc_feature 1..25: note = Oligonucleotide
  source 1..25: mol_type = other DNA
cctctctccctggcgaggggacgaa

SEQ ID NO: 4251 - DNA, 25 bp, synthetic construct
  misc_feature 1..25: note = Oligonucleotide
  source 1..25: mol_type = other DNA
cctcctctctccctggcgaggggac

SEQ ID NO: 4252 - DNA, 25 bp, synthetic construct
  misc_feature 1..25: note = Oligonucleotide
  source 1..25: mol_type = other DNA
gaccctcctctctccctggcgaggg

SEQ ID NO: 4253 - DNA, 25 bp, synthetic construct
  misc_feature 1..25: note = Oligonucleotide
  source 1..25: mol_type = other DNA
gctgaccctcctctctccctggcga

SEQ ID NO: 4254 - DNA, 25 bp, synthetic construct
  misc_feature 1..25: note = Oligonucleotide
  source 1..25: mol_type = other DNA
cctgctgaccctcctctctccctgg

SEQ ID NO: 4255 - DNA, 25 bp, synthetic construct
  misc_feature 1..25: note = Oligonucleotide
  source 1..25: mol_type = other DNA
agccctgctgaccctcctctctccc

SEQ ID NO: 4256 - DNA, 25 bp, synthetic construct
  misc_feature 1..25: note = Oligonucleotide
  source 1..25: mol_type = other DNA
cagagccctgctgaccctcctctct

SEQ ID NO: 4257 - DNA, 25 bp, synthetic construct
  misc_feature 1..25: note = Oligonucleotide
  source 1..25: mol_type = other DNA
ccccagagccctgctgaccctcctc

SEQ ID NO: 4258 - DNA, 25 bp, synthetic construct
  misc_feature 1..25: note = Oligonucleotide
  source 1..25: mol_type = other DNA
ctgccccagagccctgctgaccctc

SEQ ID NO: 4259 - DNA, 25 bp, synthetic construct
  misc_feature 1..25: note = Oligonucleotide
  source 1..25: mol_type = other DNA
cccctgccccagagccctgctgacc

SEQ ID NO: 4260 - DNA, 25 bp, synthetic construct
  misc_feature 1..25: note = Oligonucleotide
  source 1..25: mol_type = other DNA
atacccctgccccagagccctgctg

SEQ ID NO: 4261 - DNA, 25 bp, synthetic construct
  misc_feature 1..25: note = Oligonucleotide
  source 1..25: mol_type = other DNA
cccatacccctgccccagagccctg

SEQ ID NO: 4262 - DNA, 25 bp, synthetic construct
  misc_feature 1..25: note = Oligonucleotide
  source 1..25: mol_type = other DNA
ttccccatacccctgccccagagcc

SEQ ID NO: 4263 - DNA, 25 bp, synthetic construct
  misc_feature 1..25: note = Oligonucleotide
  source 1..25: mol_type = other DNA
attttccccatacccctgccccaga

SEQ ID NO: 4264 - DNA, 25 bp, synthetic construct
  misc_feature 1..25: note = Oligonucleotide
  source 1..25: mol_type = other DNA
ctcattttccccatacccctgcccc

SEQ ID NO: 4265 - DNA, 25 bp, synthetic construct
  misc_feature 1..25: note = Oligonucleotide
  source 1..25: mol_type = other DNA
cttctcattttccccatacccctgc

SEQ ID NO: 4266 - DNA, 25 bp, synthetic construct
  misc_feature 1..25: note = Oligonucleotide
  source 1..25: mol_type = other DNA
agtcttctcattttccccatacccc

SEQ ID NO: 4267 - DNA, 25 bp, synthetic construct
  misc_feature 1..25: note = Oligonucleotide
  source 1..25: mol_type = other DNA
cccagtcttctcattttccccatac

SEQ ID NO: 4268 - DNA, 25 bp, synthetic construct
  misc_feature 1..25: note = Oligonucleotide
  source 1..25: mol_type = other DNA
caccccagtcttctcattttcccca

SEQ ID NO: 4269 - DNA, 25 bp, synthetic construct
  misc_feature 1..25: note = Oligonucleotide
  source 1..25: mol_type = other DNA
tgtcaccccagtcttctcattttcc

SEQ ID NO: 4270 - DNA, 25 bp, synthetic construct
  misc_feature 1..25: note = Oligonucleotide
  source 1..25: mol_type = other DNA
acctgtcaccccagtcttctcattt

SEQ ID NO: 4271 - DNA, 25 bp, synthetic construct
  misc_feature 1..25: note = Oligonucleotide
  source 1..25: mol_type = other DNA
cacacctgtcaccccagtcttctca

SEQ ID NO: 4272 - DNA, 25 bp, synthetic construct
  misc_feature 1..25: note = Oligonucleotide
  source 1..25: mol_type = other DNA
acccacacctgtcaccccagtcttc

SEQ ID NO: 4273 - DNA, 25 bp, synthetic construct
  misc_feature 1..25: note = Oligonucleotide
  source 1..25: mol_type = other DNA
cagacccacacctgtcaccccagtc

SEQ ID NO: 4274 - DNA, 25 bp, synthetic construct
  misc_feature 1..25: note = Oligonucleotide
  source 1..25: mol_type = other DNA
ggtcagacccacacctgtcacccca

SEQ ID NO: 4275 - DNA, 25 bp, synthetic construct
  misc_feature 1..25: note = Oligonucleotide
  source 1..25: mol_type = other DNA
gggggtcagacccacacctgtcacc

SEQ ID NO: 4276 - DNA, 25 bp, synthetic construct
  misc_feature 1..25: note = Oligonucleotide
  source 1..25: mol_type = other DNA
ttggggggtcagacccacacctgtc

SEQ ID NO: 4277 - DNA, 25 bp, synthetic construct
  misc_feature 1..25: note = Oligonucleotide
  source 1..25: mol_type = other DNA
gggttggggggtcagacccacacct

SEQ ID NO: 4278 - DNA, 25 bp, synthetic construct
  misc_feature 1..25: note = Oligonucleotide
  source 1..25: mol_type = other DNA
tcggggttggggggtcagacccaca

SEQ ID NO: 4279 - DNA, 25 bp, synthetic construct
  misc_feature 1..25: note = Oligonucleotide
  source 1..25: mol_type = other DNA
ctctcggggttggggggtcagaccc

SEQ ID NO: 4280 - DNA, 25 bp, synthetic construct
  misc_feature 1..25: note = Oligonucleotide
  source 1..25: mol_type = other DNA
ggtctctcggggttggggggtcaga

SEQ ID NO: 4281 - DNA, 25 bp, synthetic construct
  misc_feature 1..25: note = Oligonucleotide
  source 1..25: mol_type = other DNA
gctggtctctcggggttggggggtc

SEQ ID NO: 4282 - DNA, 25 bp, synthetic construct
  misc_feature 1..25: note = Oligonucleotide
  source 1..25: mol_type = other DNA
cctgctggtctctcggggttggggg

SEQ ID NO: 4283 - DNA, 25 bp, synthetic construct
  misc_feature 1..25: note = Oligonucleotide
  source 1..25: mol_type = other DNA
acccctgctggtctctcggggttgg

SEQ ID NO: 4284 - DNA, 25 bp, synthetic construct
  misc_feature 1..25: note = Oligonucleotide
  source 1..25: mol_type = other DNA
tgcacccctgctggtctctcggggt

SEQ ID NO: 4285 - DNA, 25 bp, synthetic construct
  misc_feature 1..25: note = Oligonucleotide
  source 1..25: mol_type = other DNA
ttctgcacccctgctggtctctcgg

SEQ ID NO: 4286 - DNA, 25 bp, synthetic construct
  misc_feature 1..25: note = Oligonucleotide
  source 1..25: mol_type = other DNA
ggcttctgcacccctgctggtctct

SEQ ID NO: 4287 - DNA, 25 bp, synthetic construct
  misc_feature 1..25: note = Oligonucleotide
  source 1..25: mol_type = other DNA
tttggcttctgcacccctgctggtc

SEQ ID NO: 4288 - DNA, 25 bp, synthetic construct
  misc_feature 1..25: note = Oligonucleotide
  source 1..25: mol_type = other DNA
cagtttggcttctgcacccctgctg

SEQ ID NO: 4289 - DNA, 25 bp, synthetic construct
  misc_feature 1..25: note = Oligonucleotide
  source 1..25: mol_type = other DNA
ctgcagtttggcttctgcacccctg

SEQ ID NO: 4290 - DNA, 25 bp, synthetic construct
  misc_feature 1..25: note = Oligonucleotide
  source 1..25: mol_type = other DNA
cctctgcagtttggcttctgcaccc

SEQ ID NO: 4291 - DNA, 25 bp, synthetic construct
  misc_feature 1..25: note = Oligonucleotide
  source 1..25: mol_type = other DNA
ccccctctgcagtttggcttctgca

SEQ ID NO: 4292 - DNA, 25 bp, synthetic construct
  misc_feature 1..25: note = Oligonucleotide
  source 1..25: mol_type = other DNA
ccaccccctctgcagtttggcttct

SEQ ID NO: 4293 - DNA, 25 bp, synthetic construct
  misc_feature 1..25: note = Oligonucleotide
  source 1..25: mol_type = other DNA
tctccaccccctctgcagtttggct

SEQ ID NO: 4294 - DNA, 25 bp, synthetic construct
  misc_feature 1..25: note = Oligonucleotide
  source 1..25: mol_type = other DNA
ccctctccaccccctctgcagtttg

SEQ ID NO: 4295 - DNA, 25 bp, synthetic construct
  misc_feature 1..25: note = Oligonucleotide
  source 1..25: mol_type = other DNA
cccccctctccaccccctctgcagt

SEQ ID NO: 4296 - DNA, 25 bp, synthetic construct
  misc_feature 1..25: note = Oligonucleotide
  source 1..25: mol_type = other DNA
ccacccccctctccaccccctctgc

SEQ ID NO: 4297 - DNA, 25 bp, synthetic construct
  misc_feature 1..25: note = Oligonucleotide
  source 1..25: mol_type = other DNA
ccaccacccccctctccaccccctc

SEQ ID NO: 4298 - DNA, 25 bp, synthetic construct
  misc_feature 1..25: note = Oligonucleotide
  source 1..25: mol_type = other DNA
cctccaccacccccctctccacccc

SEQ ID NO: 4299 - DNA, 25 bp, synthetic construct
  misc_feature 1..25: note = Oligonucleotide
  source 1..25: mol_type = other DNA
ccccctccaccacccccctctccac

SEQ ID NO: 4300 - DNA, 25 bp, synthetic construct
  misc_feature 1..25: note = Oligonucleotide
  source 1..25: mol_type = other DNA
cacccccctccaccacccccctctc

SEQ ID NO: 4301 - DNA, 25 bp, synthetic construct
  misc_feature 1..25: note = Oligonucleotide
  source 1..25: mol_type = other DNA
caccacccccctccaccacccccct

SEQ ID NO: 4302 - DNA, 25 bp, synthetic construct
  misc_feature 1..25: note = Oligonucleotide
  source 1..25: mol_type = other DNA
ctccaccacccccctccaccacccc

SEQ ID NO: 4303 - DNA, 25 bp, synthetic construct
  misc_feature 1..25: note = Oligonucleotide
  source 1..25: mol_type = other DNA
cctctccaccacccccctccaccac

SEQ ID NO: 4304 - DNA, 25 bp, synthetic construct
  misc_feature 1..25: note = Oligonucleotide
  source 1..25: mol_type = other DNA
ccccctctccaccacccccctccac

SEQ ID NO: 4305 - DNA, 25 bp, synthetic construct
  misc_feature 1..25: note = Oligonucleotide
  source 1..25: mol_type = other DNA
cacccccctctccaccacccccctc

SEQ ID NO: 4306 - DNA, 25 bp, synthetic construct
  misc_feature 1..25: note = Oligonucleotide
  source 1..25: mol_type = other DNA
caccacccccctctccaccaccccc

SEQ ID NO: 4307 - DNA, 25 bp, synthetic construct
  misc_feature 1..25: note = Oligonucleotide
  source 1..25: mol_type = other DNA
ctccaccacccccctctccaccacc

SEQ ID NO: 4308 - DNA, 25 bp, synthetic construct
  misc_feature 1..25: note = Oligonucleotide
  source 1..25: mol_type = other DNA
cccctccaccacccccctctccacc

SEQ ID NO: 4309 - DNA, 25 bp, synthetic construct
  misc_feature 1..25: note = Oligonucleotide
  source 1..25: mol_type = other DNA
atccccctccaccacccccctctcc

SEQ ID NO: 4310 - DNA, 25 bp, synthetic construct
  misc_feature 1..25: note = Oligonucleotide
  source 1..25: mol_type = other DNA
accatccccctccaccacccccctc

SEQ ID NO: 4311 - DNA, 25 bp, synthetic construct
  misc_feature 1..25: note = Oligonucleotide
  source 1..25: mol_type = other DNA
tccaccatccccctccaccaccccc

SEQ ID NO: 4312 - DNA, 25 bp, synthetic construct
  misc_feature 1..25: note = Oligonucleotide
  source 1..25: mol_type = other DNA
ccctccaccatccccctccaccacc

SEQ ID NO: 4313 - DNA, 25 bp, synthetic construct
  misc_feature 1..25: note = Oligonucleotide
  source 1..25: mol_type = other DNA
cccccctccaccatccccctccacc

SEQ ID NO: 4314 - DNA, 25 bp, synthetic construct
  misc_feature 1..25: note = Oligonucleotide
  source 1..25: mol_type = other DNA
catcccccctccaccatccccctcc

SEQ ID NO: 4315 - DNA, 25 bp, synthetic construct
  misc_feature 1..25: note = Oligonucleotide
  source 1..25: mol_type = other DNA
caccatcccccctccaccatccccc

SEQ ID NO: 4316 - DNA, 25 bp, synthetic construct
  misc_feature 1..25: note = Oligonucleotide
  source 1..25: mol_type = other DNA
ctccaccatcccccctccaccatcc

SEQ ID NO: 4317 - DNA, 25 bp, synthetic construct
  misc_feature 1..25: note = Oligonucleotide
  source 1..25: mol_type = other DNA
cccctccaccatcccccctccacca

SEQ ID NO: 4318 - DNA, 25 bp, synthetic construct
  misc_feature 1..25: note = Oligonucleotide
  source 1..25: mol_type = other DNA
acccccctccaccatcccccctcca

SEQ ID NO: 4319 - DNA, 25 bp, synthetic construct
  misc_feature 1..25: note = Oligonucleotide
  source 1..25: mol_type = other DNA
accacccccctccaccatcccccct

SEQ ID NO: 4320 - DNA, 25 bp, synthetic construct
  misc_feature 1..25: note = Oligonucleotide
  source 1..25: mol_type = other DNA
tccaccacccccctccaccatcccc

SEQ ID NO: 4321 - DNA, 25 bp, synthetic construct
  misc_feature 1..25: note = Oligonucleotide
  source 1..25: mol_type = other DNA
ctctccaccacccccctccaccatc

SEQ ID NO: 4322 - DNA, 25 bp, synthetic construct
  misc_feature 1..25: note = Oligonucleotide
  source 1..25: mol_type = other DNA
cccctctccaccacccccctccacc

SEQ ID NO: 4323 - DNA, 25 bp, synthetic construct
  misc_feature 1..25: note = Oligonucleotide
  source 1..25: mol_type = other DNA
caccccctctccaccacccccctcc

SEQ ID NO: 4324 - DNA, 25 bp, synthetic construct
  misc_feature 1..25: note = Oligonucleotide
  source 1..25: mol_type = other DNA
caccaccccctctccaccacccccc

SEQ ID NO: 4325 - DNA, 25 bp, synthetic construct
  misc_feature 1..25: note = Oligonucleotide
  source 1..25: mol_type = other DNA
ctccaccaccccctctccaccaccc

SEQ ID NO: 4326 - DNA, 25 bp, synthetic construct
  misc_feature 1..25: note = Oligonucleotide
  source 1..25: mol_type = other DNA
cctctccaccaccccctctccacca

SEQ ID NO: 4327 - DNA, 25 bp, synthetic construct
  misc_feature 1..25: note = Oligonucleotide
  source 1..25: mol_type = other DNA
ccccctctccaccaccccctctcca

SEQ ID NO: 4328 - DNA, 25 bp, synthetic construct
  misc_feature 1..25: note = Oligonucleotide
  source 1..25: mol_type = other DNA
cacccccctctccaccaccccctct

SEQ ID NO: 4329 - DNA, 25 bp, synthetic construct
  misc_feature 1..25: note = Oligonucleotide
  source 1..25: mol_type = other DNA
caccacccccctctccaccaccccc

SEQ ID NO: 4330 - DNA, 25 bp, synthetic construct
  misc_feature 1..25: note = Oligonucleotide
  source 1..25: mol_type = other DNA
ctccaccacccccctctccaccacc

SEQ ID NO: 4331 - DNA, 25 bp, synthetic construct
  misc_feature 1..25: note = Oligonucleotide
  source 1..25: mol_type = other DNA
cctctccaccacccccctctccacc

SEQ ID NO: 4332 - DNA, 25 bp, synthetic construct
  misc_feature 1..25: note = Oligonucleotide
  source 1..25: mol_type = other DNA
acccctctccaccacccccctctcc

SEQ ID NO: 4333 - DNA, 25 bp, synthetic construct
  misc_feature 1..25: note = Oligonucleotide
  source 1..25: mol_type = other DNA
cacacccctctccaccacccccctc

SEQ ID NO: 4334 - DNA, 25 bp, synthetic construct
  misc_feature 1..25: note = Oligonucleotide
  source 1..25: mol_type = other DNA
gatcacacccctctccaccaccccc

SEQ ID NO: 4335 - DNA, 25 bp, synthetic construct
  misc_feature 1..25: note = Oligonucleotide
  source 1..25: mol_type = other DNA
taggatcacacccctctccaccacc

SEQ ID NO: 4336 - DNA, 25 bp, synthetic construct
  misc_feature 1..25: note = Oligonucleotide
  source 1..25: mol_type = other DNA
ggctaggatcacacccctctccacc

SEQ ID NO: 4337 - DNA, 25 bp, synthetic construct
  misc_feature 1..25: note = Oligonucleotide
  source 1..25: mol_type = other DNA
agcggctaggatcacacccctctcc

SEQ ID NO: 4338 - DNA, 25 bp, synthetic construct
  misc_feature 1..25: note = Oligonucleotide
  source 1..25: mol_type = other DNA
atcagcggctaggatcacacccctc

SEQ ID NO: 4339 - DNA, 25 bp, synthetic construct
  misc_feature 1..25: note = Oligonucleotide
  source 1..25: mol_type = other DNA
tacatcagcggctaggatcacaccc

SEQ ID NO: 4340 - DNA, 25 bp, synthetic construct
  misc_feature 1..25: note = Oligonucleotide
  source 1..25: mol_type = other DNA
aattacatcagcggctaggatcaca

SEQ ID NO: 4341 - DNA, 25 bp, synthetic construct
  misc_feature 1..25: note = Oligonucleotide
  source 1..25: mol_type = other DNA
ctgaattacatcagcggctaggatc

SEQ ID NO: 4342 - DNA, 25 bp, synthetic construct
  misc_feature 1..25: note = Oligonucleotide
  source 1..25: mol_type = other DNA
cccctgaattacatcagcggctagg

SEQ ID NO: 4343 - DNA, 25 bp, synthetic construct
  misc_feature 1..25: note = Oligonucleotide
  source 1..25: mol_type = other DNA
cctcccctgaattacatcagcggct

SEQ ID NO: 4344 - DNA, 25 bp, synthetic construct
  misc_feature 1..25: note = Oligonucleotide
  source 1..25: mol_type = other DNA
aaacctcccctgaattacatcagcg

SEQ ID NO: 4345 - DNA, 25 bp, synthetic construct
  misc_feature 1..25: note = Oligonucleotide
  source 1..25: mol_type = other DNA
cggaaacctcccctgaattacatca

SEQ ID NO: 4346 - DNA, 25 bp, synthetic construct
  misc_feature 1..25: note = Oligonucleotide
  source 1..25: mol_type = other DNA
gcccggaaacctcccctgaattaca

SEQ ID NO: 4347 - DNA, 25 bp, synthetic construct
  misc_feature 1..25: note = Oligonucleotide
  source 1..25: mol_type = other DNA
agggcccggaaacctcccctgaatt

SEQ ID NO: 4348 - DNA, 25 bp, synthetic construct
  misc_feature 1..25: note = Oligonucleotide
  source 1..25: mol_type = other DNA
gaaagggcccggaaacctcccctga

SEQ ID NO: 4349 - DNA, 25 bp, synthetic construct
  misc_feature 1..25: note = Oligonucleotide
  source 1..25: mol_type = other DNA
agagaaagggcccggaaacctcccc

SEQ ID NO: 4350 - DNA, 25 bp, synthetic construct
  misc_feature 1..25: note = Oligonucleotide
  source 1..25: mol_type = other DNA
gccagagaaagggcccggaaacctc

SEQ ID NO: 4351 - DNA, 25 bp, synthetic construct
  misc_feature 1..25: note = Oligonucleotide
  source 1..25: mol_type = other DNA
ctggccagagaaagggcccggaaac

SEQ ID NO: 4352 - DNA, 25 bp, synthetic construct
  misc_feature 1..25: note = Oligonucleotide
  source 1..25: mol_type = other DNA
aacctggccagagaaagggcccgga

SEQ ID NO: 4353 - DNA, 25 bp, synthetic construct
  misc_feature 1..25: note = Oligonucleotide
  source 1..25: mol_type = other DNA
accaacctggccagagaaagggccc

SEQ ID NO: 4354 - DNA, 25 bp, synthetic construct
  misc_feature 1..25: note = Oligonucleotide
  source 1..25: mol_type = other DNA
ccaaccaacctggccagagaaaggg

SEQ ID NO: 4355 - DNA, 25 bp, synthetic construct
  misc_feature 1..25: note = Oligonucleotide
  source 1..25: mol_type = other DNA
gtgccaaccaacctggccagagaaa

SEQ ID NO: 4356 - DNA, 25 bp, synthetic construct
  misc_feature 1..25: note = Oligonucleotide
  source 1..25: mol_type = other DNA
tcagtgccaaccaacctggccagag

SEQ ID NO: 4357 - DNA, 25 bp, synthetic construct
  misc_feature 1..25: note = Oligonucleotide
  source 1..25: mol_type = other DNA
tcatcagtgccaaccaacctggcca

SEQ ID NO: 4358 - DNA, 25 bp, synthetic construct
  misc_feature 1..25: note = Oligonucleotide
  source 1..25: mol_type = other DNA
tggtcatcagtgccaaccaacctgg

SEQ ID NO: 4359 - DNA, 25 bp, synthetic construct
  misc_feature 1..25: note = Oligonucleotide
  source 1..25: mol_type = other DNA
acctggtcatcagtgccaaccaacc

SEQ ID NO: 4360 - DNA, 25 bp, synthetic construct
  misc_feature 1..25: note = Oligonucleotide
  source 1..25: mol_type = other DNA
tccacctggtcatcagtgccaacca

SEQ ID NO: 4361 - DNA, 25 bp, synthetic construct
  misc_feature 1..25: note = Oligonucleotide
  source 1..25: mol_type = other DNA
acgtccacctggtcatcagtgccaa

SEQ ID NO: 4362 - DNA, 25 bp, synthetic construct
  misc_feature 1..25: note = Oligonucleotide
  source 1..25: mol_type = other DNA
accacgtccacctggtcatcagtgc

SEQ ID NO: 4363 - DNA, 25 bp, synthetic construct
  misc_feature 1..25: note = Oligonucleotide
  source 1..25: mol_type = other DNA
gagaccacgtccacctggtcatcag

SEQ ID NO: 4364 - DNA, 25 bp, synthetic construct
  misc_feature 1..25: note = Oligonucleotide
  source 1..25: mol_type = other DNA
tcagagaccacgtccacctggtcat

SEQ ID NO: 4365 - DNA, 25 bp, synthetic construct
  misc_feature 1..25: note = Oligonucleotide
  source 1..25: mol_type = other DNA
aagtcagagaccacgtccacctggt

SEQ ID NO: 4366 - DNA, 25 bp, synthetic construct
  misc_feature 1..25: note = Oligonucleotide
  source 1..25: mol_type = other DNA
tccaagtcagagaccacgtccacct

SEQ ID NO: 4367 - DNA, 25 bp, synthetic construct
  misc_feature 1..25: note = Oligonucleotide
  source 1..25: mol_type = other DNA
aactccaagtcagagaccacgtcca

SEQ ID NO: 4368 - DNA, 25 bp, synthetic construct
  misc_feature 1..25: note = Oligonucleotide
  source 1..25: mol_type = other DNA
acaaactccaagtcagagaccacgt

SEQ ID NO: 4369 - DNA, 25 bp, synthetic construct
  misc_feature 1..25: note = Oligonucleotide
  source 1..25: mol_type = other DNA
ccaacaaactccaagtcagagacca

SEQ ID NO: 4370 - DNA, 25 bp, synthetic construct
  misc_feature 1..25: note = Oligonucleotide
  source 1..25: mol_type = other DNA
tccccaacaaactccaagtcagaga

SEQ ID NO: 4371 - DNA, 25 bp, synthetic construct
  misc_feature 1..25: note = Oligonucleotide
  source 1..25: mol_type = other DNA
gactccccaacaaactccaagtcag

SEQ ID NO: 4372 - DNA, 25 bp, synthetic construct
  misc_feature 1..25: note = Oligonucleotide
  source 1..25: mol_type = other DNA
cccgactccccaacaaactccaagt

SEQ ID NO: 4373 - DNA, 25 bp, synthetic construct
  misc_feature 1..25: note = Oligonucleotide
  source 1..25: mol_type = other DNA
attcccgactccccaacaaactcca

SEQ ID NO: 4374 - DNA, 25 bp, synthetic construct
  misc_feature 1..25: note = Oligonucleotide
  source 1..25: mol_type = other DNA
aatattcccgactccccaacaaact

SEQ ID NO: 4375 - DNA, 25 bp, synthetic construct
  misc_feature 1..25: note = Oligonucleotide
  source 1..25: mol_type = other DNA
cacaatattcccgactccccaacaa

SEQ ID NO: 4376 - DNA, 25 bp, synthetic construct
  misc_feature 1..25: note = Oligonucleotide
  source 1..25: mol_type = other DNA
ccccacaatattcccgactccccaa

SEQ ID NO: 4377 - DNA, 25 bp, synthetic construct
  misc_feature 1..25: note = Oligonucleotide
  source 1..25: mol_type = other DNA
aacccccacaatattcccgactccc

SEQ ID NO: 4378 - DNA, 25 bp, synthetic construct
  misc_feature 1..25: note = Oligonucleotide
  source 1..25: mol_type = other DNA
gcaaacccccacaatattcccgact

SEQ ID NO: 4379 - DNA, 25 bp, synthetic construct
  misc_feature 1..25: note = Oligonucleotide
  source 1..25: mol_type = other DNA
tccgcaaacccccacaatattcccg

SEQ ID NO: 4380 - DNA, 25 bp, synthetic construct
  misc_feature 1..25: note = Oligonucleotide
  source 1..25: mol_type = other DNA
tggtccgcaaacccccacaatattc

SEQ ID NO: 4381 - DNA, 25 bp, synthetic construct
  misc_feature 1..25: note = Oligonucleotide
  source 1..25: mol_type = other DNA
tcctggtccgcaaacccccacaata

SEQ ID NO: 4382 - DNA, 25 bp, synthetic construct
  misc_feature 1..25: note = Oligonucleotide
  source 1..25: mol_type = other DNA
tgttcctggtccgcaaacccccaca

SEQ ID NO: 4383 - DNA, 25 bp, synthetic construct
  misc_feature 1..25: note = Oligonucleotide
  source 1..25: mol_type = other DNA
ctctgttcctggtccgcaaaccccc

SEQ ID NO: 4384 - DNA, 25 bp, synthetic construct
  misc_feature 1..25: note = Oligonucleotide
  source 1..25: mol_type = other DNA
tggctctgttcctggtccgcaaacc

SEQ ID NO: 4385 - DNA, 25 bp, synthetic construct
  misc_feature 1..25: note = Oligonucleotide
  source 1..25: mol_type = other DNA
ttctggctctgttcctggtccgcaa

SEQ ID NO: 4386 - DNA, 25 bp, synthetic construct
  misc_feature 1..25: note = Oligonucleotide
  source 1..25: mol_type = other DNA
gagttctggctctgttcctggtccg

SEQ ID NO: 4387 - DNA, 25 bp, synthetic construct
  misc_feature 1..25: note = Oligonucleotide
  source 1..25: mol_type = other DNA
gaggagttctggctctgttcctggt

SEQ ID NO: 4388 - DNA, 25 bp, synthetic construct
  misc_feature 1..25: note = Oligonucleotide
  source 1..25: mol_type = other DNA
atagaggagttctggctctgttcct

SEQ ID NO: 4389 - DNA, 25 bp, synthetic construct
  misc_feature 1..25: note = Oligonucleotide
  source 1..25: mol_type = other DNA
aaaatagaggagttctggctctgtt

SEQ ID NO: 4390 - DNA, 25 bp, synthetic construct
  misc_feature 1..25: note = Oligonucleotide
  source 1..25: mol_type = other DNA
ctgaaaatagaggagttctggctct

SEQ ID NO: 4391 - DNA, 25 bp, synthetic construct
  misc_feature 1..25: note = Oligonucleotide
  source 1..25: mol_type = other DNA
ctactgaaaatagaggagttctggc

SEQ ID NO: 4392 - DNA, 25 bp, synthetic construct
  misc_feature 1..25: note = Oligonucleotide
  source 1..25: mol_type = other DNA
ctcctactgaaaatagaggagttct

SEQ ID NO: 4393 - DNA, 25 bp, synthetic construct
  misc_feature 1..25: note = Oligonucleotide
  source 1..25: mol_type = other DNA
tcactcctactgaaaatagaggagt

SEQ ID NO: 4394 - DNA, 25 bp, synthetic construct
  misc_feature 1..25: note = Oligonucleotide
  source 1..25: mol_type = other DNA
atctcactcctactgaaaatagagg

SEQ ID NO: 4395 - DNA, 25 bp, synthetic construct
  misc_feature 1..25: note = Oligonucleotide
  source 1..25: mol_type = other DNA
cacatctcactcctactgaaaatag

SEQ ID NO: 4396 - DNA, 25 bp, synthetic construct
  misc_feature 1..25: note = Oligonucleotide
  source 1..25: mol_type = other DNA
tcccacatctcactcctactgaaaa

SEQ ID NO: 4397 - DNA, 25 bp, synthetic construct
  misc_feature 1..25: note = Oligonucleotide
  source 1..25: mol_type = other DNA
tcttcccacatctcactcctactga

SEQ ID NO: 4398 - DNA, 25 bp, synthetic construct
  misc_feature 1..25: note = Oligonucleotide
  source 1..25: mol_type = other DNA
cactcttcccacatctcactcctac

SEQ ID NO: 4399 - DNA, 25 bp, synthetic construct
  misc_feature 1..25: note = Oligonucleotide
  source 1..25: mol_type = other DNA
gaccactcttcccacatctcactcc

SEQ ID NO: 4400 - DNA, 25 bp, synthetic construct
  misc_feature 1..25: note = Oligonucleotide
  source 1..25: mol_type = other DNA
cctgaccactcttcccacatctcac

SEQ ID NO: 4401 - DNA, 25 bp, synthetic construct
  misc_feature 1..25: note = Oligonucleotide
  source 1..25: mol_type = other DNA
cagcctgaccactcttcccacatct

SEQ ID NO: 4402 - DNA, 25 bp, synthetic construct
  misc_feature 1..25: note = Oligonucleotide
  source 1..25: mol_type = other DNA
cagcagcctgaccactcttcccaca

SEQ ID NO: 4403 - DNA, 25 bp, synthetic construct
  misc_feature 1..25: note = Oligonucleotide
  source 1..25: mol_type = other DNA
cctcagcagcctgaccactcttccc

SEQ ID NO: 4404 - DNA, 25 bp, synthetic construct
  misc_feature 1..25: note = Oligonucleotide
  source 1..25: mol_type = other DNA
caacctcagcagcctgaccactctt

SEQ ID NO: 4405 - DNA, 25 bp, synthetic construct
  misc_feature 1..25: note = Oligonucleotide
  source 1..25: mol_type = other DNA
acacaacctcagcagcctgaccact

SEQ ID NO: 4406 - DNA, 25 bp, synthetic construct
  misc_feature 1..25: note = Oligonucleotide
  source 1..25: mol_type = other DNA
accacacaacctcagcagcctgacc

SEQ ID NO: 4407 - DNA, 25 bp, synthetic construct
  misc_feature 1..25: note = Oligonucleotide
  source 1..25: mol_type = other DNA
atgaccacacaacctcagcagcctg

SEQ ID NO: 4408 - DNA, 25 bp, synthetic construct
  misc_feature 1..25: note = Oligonucleotide
  source 1..25: mol_type = other DNA
tctatgaccacacaacctcagcagc

SEQ ID NO: 4409 - DNA, 25 bp, synthetic construct
  misc_feature 1..25: note = Oligonucleotide
  source 1..25: mol_type = other DNA
ccttctatgaccacacaacctcagc

SEQ ID NO: 4410 - DNA, 25 bp, synthetic construct
  misc_feature 1..25: note = Oligonucleotide
  source 1..25: mol_type = other DNA
ccaccttctatgaccacacaacctc

SEQ ID NO: 4411 - DNA, 25 bp, synthetic construct
  misc_feature 1..25: note = Oligonucleotide
  source 1..25: mol_type = other DNA
cctccaccttctatgaccacacaac

SEQ ID NO: 4412 - DNA, 25 bp, synthetic construct
  misc_feature 1..25: note = Oligonucleotide
  source 1..25: mol_type = other DNA
ctgcctccaccttctatgaccacac

SEQ ID NO: 4413 - DNA, 25 bp, synthetic construct
  misc_feature 1..25: note = Oligonucleotide
  source 1..25: mol_type = other DNA
ctgctgcctccaccttctatgacca

SEQ ID NO: 4414 - DNA, 25 bp, synthetic construct
  misc_feature 1..25: note = Oligonucleotide
  source 1..25: mol_type = other DNA
ccactgctgcctccaccttctatga

SEQ ID NO: 4415 - DNA, 25 bp, synthetic construct
  misc_feature 1..25: note = Oligonucleotide
  source 1..25: mol_type = other DNA
agcccactgctgcctccaccttcta

SEQ ID NO: 4416 - DNA, 25 bp, synthetic construct
  misc_feature 1..25: note = Oligonucleotide
  source 1..25: mol_type = other DNA
ggcagcccactgctgcctccacctt

SEQ ID NO: 4417 - DNA, 25 bp, synthetic construct
  misc_feature 1..25: note = Oligonucleotide
  source 1..25: mol_type = other DNA
tctggcagcccactgctgcctccac

SEQ ID NO: 4418 - DNA, 25 bp, synthetic construct
  misc_feature 1..25: note = Oligonucleotide
  source 1..25: mol_type = other DNA
ccatctggcagcccactgctgcctc

SEQ ID NO: 4419 - DNA, 25 bp, synthetic construct
  misc_feature 1..25: note = Oligonucleotide
  source 1..25: mol_type = other DNA
aacccatctggcagcccactgctgc

SEQ ID NO: 4420 - DNA, 25 bp, synthetic construct
  misc_feature 1..25: note = Oligonucleotide
  source 1..25: mol_type = other DNA
ccaaacccatctggcagcccactgc

SEQ ID NO: 4421 - DNA, 25 bp, synthetic construct
  misc_feature 1..25: note = Oligonucleotide
  source 1..25: mol_type = other DNA
tgcccaaacccatctggcagcccac

SEQ ID NO: 4422 - DNA, 25 bp, synthetic construct
  misc_feature 1..25: note = Oligonucleotide
  source 1..25: mol_type = other DNA
gtgtgcccaaacccatctggcagcc

SEQ ID NO: 4423 - DNA, 25 bp, synthetic construct
  misc_feature 1..25: note = Oligonucleotide
  source 1..25: mol_type = other DNA
ccagtgtgcccaaacccatctggca

SEQ ID NO: 4424 - DNA, 25 bp, synthetic construct
  misc_feature 1..25: note = Oligonucleotide
  source 1..25: mol_type = other DNA
ttcccagtgtgcccaaacccatctg

SEQ ID NO: 4425 - DNA, 25 bp, synthetic construct
  misc_feature 1..25: note = Oligonucleotide
  source 1..25: mol_type = other DNA
tgcttcccagtgtgcccaaacccat

SEQ ID NO: 4426 - DNA, 25 bp, synthetic construct
  misc_feature 1..25: note = Oligonucleotide
  source 1..25: mol_type = other DNA
atctgcttcccagtgtgcccaaacc

SEQ ID NO: 4427 - DNA, 25 bp, synthetic construct
  misc_feature 1..25: note = Oligonucleotide
  source 1..25: mol_type = other DNA
cgtatctgcttcccagtgtgcccaa

SEQ ID NO: 4428 - DNA, 25 bp, synthetic construct
  misc_feature 1..25: note = Oligonucleotide
  source 1..25: mol_type = other DNA
gggcgtatctgcttcccagtgtgcc

SEQ ID NO: 4429 - DNA, 25 bp, synthetic construct
  misc_feature 1..25: note = Oligonucleotide
  source 1..25: mol_type = other DNA
cccgggcgtatctgcttcccagtgt

SEQ ID NO: 4430 - DNA, 25 bp, synthetic construct
  misc_feature 1..25: note = Oligonucleotide
  source 1..25: mol_type = other DNA
aggcccgggcgtatctgcttcccag

SEQ ID NO: 4431 - DNA, 25 bp, synthetic construct
  misc_feature 1..25: note = Oligonucleotide
  source 1..25: mol_type = other DNA
aacaggcccgggcgtatctgcttcc

SEQ ID NO: 4432 - DNA, 25 bp, synthetic construct
  misc_feature 1..25: note = Oligonucleotide
  source 1..25: mol_type = other DNA
tccaacaggcccgggcgtatctgct

SEQ ID NO: 4433 - DNA, 25 bp, synthetic construct
  misc_feature 1..25: note = Oligonucleotide
  source 1..25: mol_type = other DNA
tcatccaacaggcccgggcgtatct

SEQ ID NO: 4434 - DNA, 25 bp, synthetic construct
  misc_feature 1..25: note = Oligonucleotide
  source 1..25: mol_type = other DNA
cagtcatccaacaggcccgggcgta

SEQ ID NO: 4435 - DNA, 25 bp, synthetic construct
  misc_feature 1..25: note = Oligonucleotide
  source 1..25: mol_type = other DNA
acccagtcatccaacaggcccgggc

SEQ ID NO: 4436 - DNA, 25 bp, synthetic construct
  misc_feature 1..25: note = Oligonucleotide
  source 1..25: mol_type = other DNA
tgcacccagtcatccaacaggcccg

SEQ ID NO: 4437 - DNA, 25 bp, synthetic construct
  misc_feature 1..25: note = Oligonucleotide
  source 1..25: mol_type = other DNA
ccctgcacccagtcatccaacaggc

SEQ ID NO: 4438 - DNA, 25 bp, synthetic construct
  misc_feature 1..25: note = Oligonucleotide
  source 1..25: mol_type = other DNA
tgaccctgcacccagtcatccaaca

SEQ ID NO: 4439 - DNA, 25 bp, synthetic construct
  misc_feature 1..25: note = Oligonucleotide
  source 1..25: mol_type = other DNA
ctgtgaccctgcacccagtcatcca

SEQ ID NO: 4440 - DNA, 25 bp, synthetic construct
  misc_feature 1..25: note = Oligonucleotide
  source 1..25: mol_type = other DNA
ttcctgtgaccctgcacccagtcat

SEQ ID NO: 4441 - DNA, 25 bp, synthetic construct
  misc_feature 1..25: note = Oligonucleotide
  source 1..25: mol_type = other DNA
cccttcctgtgaccctgcacccagt

SEQ ID NO: 4442 - DNA, 25 bp, synthetic construct
  misc_feature 1..25: note = Oligonucleotide
  source 1..25: mol_type = other DNA
ctccccttcctgtgaccctgcaccc

SEQ ID NO: 4443 - DNA, 25 bp, synthetic construct
  misc_feature 1..25: note = Oligonucleotide
  source 1..25: mol_type = other DNA
atcctccccttcctgtgaccctgca

SEQ ID NO: 4444 - DNA, 25 bp, synthetic construct
  misc_feature 1..25: note = Oligonucleotide
  source 1..25: mol_type = other DNA
ctcatcctccccttcctgtgaccct

SEQ ID NO: 4445 - DNA, 25 bp, synthetic construct
  misc_feature 1..25: note = Oligonucleotide
  source 1..25: mol_type = other DNA
aagctcatcctccccttcctgtgac

SEQ ID NO: 4446 - DNA, 25 bp, synthetic construct
  misc_feature 1..25: note = Oligonucleotide
  source 1..25: mol_type = other DNA
gccaagctcatcctccccttcctgt

SEQ ID NO: 4447 - DNA, 25 bp, synthetic construct
  misc_feature 1..25: note = Oligonucleotide
  source 1..25: mol_type = other DNA
gctgccaagctcatcctccccttcc

SEQ ID NO: 4448 - DNA, 25 bp, synthetic construct
  misc_feature 1..25: note = Oligonucleotide
  source 1..25: mol_type = other DNA
caagctgccaagctcatcctcccct

SEQ ID NO: 4449 - DNA, 25 bp, synthetic construct
  misc_feature 1..25: note = Oligonucleotide
  source 1..25: mol_type = other DNA
gcccaagctgccaagctcatcctcc

SEQ ID NO: 4450 - DNA, 25 bp, synthetic construct
  misc_feature 1..25: note = Oligonucleotide
  source 1..25: mol_type = other DNA
gctgcccaagctgccaagctcatcc

SEQ ID NO: 4451 - DNA, 25 bp, synthetic construct
  misc_feature 1..25: note = Oligonucleotide
  source 1..25: mol_type = other DNA
gcagctgcccaagctgccaagctca

SEQ ID NO: 4452 - DNA, 25 bp, synthetic construct
  misc_feature 1..25: note = Oligonucleotide
  source 1..25: mol_type = other DNA
cccgcagctgcccaagctgccaagc

SEQ ID NO: 4453 - DNA, 25 bp, synthetic construct
  misc_feature 1..25: note = Oligonucleotide
  source 1..25: mol_type = other DNA
ggccccgcagctgcccaagctgcca

SEQ ID NO: 4454 - DNA, 25 bp, synthetic construct
  misc_feature 1..25: note = Oligonucleotide
  source 1..25: mol_type = other DNA
caaggccccgcagctgcccaagctg

SEQ ID NO: 4455 - DNA, 25 bp, synthetic construct
  misc_feature 1..25: note = Oligonucleotide
  source 1..25: mol_type = other DNA
agccaaggccccgcagctgcccaag

SEQ ID NO: 4456 - DNA, 25 bp, synthetic construct
  misc_feature 1..25: note = Oligonucleotide
  source 1..25: mol_type = other DNA
ctcagccaaggccccgcagctgccc

SEQ ID NO: 4457 - DNA, 25 bp, synthetic construct
  misc_feature 1..25: note = Oligonucleotide
  source 1..25: mol_type = other DNA
catctcagccaaggccccgcagctg

SEQ ID NO: 4458 - DNA, 25 bp, synthetic construct
  misc_feature 1..25: note = Oligonucleotide
  source 1..25: mol_type = other DNA
tcccatctcagccaaggccccgcag

SEQ ID NO: 4459 - DNA, 25 bp, synthetic construct
  misc_feature 1..25: note = Oligonucleotide
  source 1..25: mol_type = other DNA
gtttcccatctcagccaaggccccg

SEQ ID NO: 4460 - DNA, 25 bp, synthetic construct
  misc_feature 1..25: note = Oligonucleotide
  source 1..25: mol_type = other DNA
catgtttcccatctcagccaaggcc

SEQ ID NO: 4461 - DNA, 25 bp, synthetic construct
  misc_feature 1..25: note = Oligonucleotide
  source 1..25: mol_type = other DNA
agccatgtttcccatctcagccaag

SEQ ID NO: 4462 - DNA, 25 bp, synthetic construct
  misc_feature 1..25: note = Oligonucleotide
  source 1..25: mol_type = other DNA
tgcagccatgtttcccatctcagcc

SEQ ID NO: 4463 - DNA, 25 bp, synthetic construct
  misc_feature 1..25: note = Oligonucleotide
  source 1..25: mol_type = other DNA
acatgcagccatgtttcccatctca

SEQ ID NO: 4464 - DNA, 25 bp, synthetic construct
  misc_feature 1..25: note = Oligonucleotide
  source 1..25: mol_type = other DNA
ccaacatgcagccatgtttcccatc

SEQ ID NO: 4465 - DNA, 25 bp, synthetic construct
  misc_feature 1..25: note = Oligonucleotide
  source 1..25: mol_type = other DNA
gtcccaacatgcagccatgtttccc

SEQ ID NO: 4466 - DNA, 25 bp, synthetic construct
  misc_feature 1..25: note = Oligonucleotide
  source 1..25: mol_type = other DNA
tctgtcccaacatgcagccatgttt

SEQ ID NO: 4467 - DNA, 25 bp, synthetic construct
  misc_feature 1..25: note = Oligonucleotide
  source 1..25: mol_type = other DNA
tggtctgtcccaacatgcagccatg

SEQ ID NO: 4468 - DNA, 25 bp, synthetic construct
  misc_feature 1..25: note = Oligonucleotide
  source 1..25: mol_type = other DNA
cactggtctgtcccaacatgcagcc

SEQ ID NO: 4469 - DNA, 25 bp, synthetic construct
  misc_feature 1..25: note = Oligonucleotide
  source 1..25: mol_type = other DNA
gcacactggtctgtcccaacatgca

SEQ ID NO: 4470 - DNA, 25 bp, synthetic construct
  misc_feature 1..25: note = Oligonucleotide
  source 1..25: mol_type = other DNA
cgggcacactggtctgtcccaacat

SEQ ID NO: 4471 - DNA, 25 bp, synthetic construct
  misc_feature 1..25: note = Oligonucleotide
  source 1..25: mol_type = other DNA
aaacgggcacactggtctgtcccaa

SEQ ID NO: 4472 - DNA, 25 bp, synthetic construct
  misc_feature 1..25: note = Oligonucleotide
  source 1..25: mol_type = other DNA
agcaaacgggcacactggtctgtcc

SEQ ID NO: 4473 - DNA, 25 bp, synthetic construct
  misc_feature 1..25: note = Oligonucleotide
  source 1..25: mol_type = other DNA
ccaagcaaacgggcacactggtctg

SEQ ID NO: 4474 - DNA, 25 bp, synthetic construct
  misc_feature 1..25: note = Oligonucleotide
  source 1..25: mol_type = other DNA
gtcccaagcaaacgggcacactggt

SEQ ID NO: 4475 - DNA, 25 bp, synthetic construct
  misc_feature 1..25: note = Oligonucleotide
  source 1..25: mol_type = other DNA
gcagtcccaagcaaacgggcacact

SEQ ID NO: 4476 - DNA, 25 bp, synthetic construct
  misc_feature 1..25: note = Oligonucleotide
  source 1..25: mol_type = other DNA
ccagcagtcccaagcaaacgggcac

SEQ ID NO: 4477 - DNA, 25 bp, synthetic construct
  misc_feature 1..25: note = Oligonucleotide
  source 1..25: mol_type = other DNA
aaaccagcagtcccaagcaaacggg

SEQ ID NO: 4478 - DNA, 25 bp, synthetic construct
  misc_feature 1..25: note = Oligonucleotide
  source 1..25: mol_type = other DNA
ctaaaaccagcagtcccaagcaaac

SEQ ID NO: 4479 - DNA, 25 bp, synthetic construct
  misc_feature 1..25: note = Oligonucleotide
  source 1..25: mol_type = other DNA
gagctaaaaccagcagtcccaagca

SEQ ID NO: 4480 - DNA, 25 bp, synthetic construct
  misc_feature 1..25: note = Oligonucleotide
  source 1..25: mol_type = other DNA
tcagagctaaaaccagcagtcccaa

SEQ ID NO: 4481 - DNA, 25 bp, synthetic construct
  misc_feature 1..25: note = Oligonucleotide
  source 1..25: mol_type = other DNA
agttcagagctaaaaccagcagtcc

SEQ ID NO: 4482 - DNA, 25 bp, synthetic construct
  misc_feature 1..25: note = Oligonucleotide
  source 1..25: mol_type = other DNA
agaagttcagagctaaaaccagcag

SEQ ID NO: 4483 - DNA, 25 bp, synthetic construct
  misc_feature 1..25: note = Oligonucleotide
  source 1..25: mol_type = other DNA
gacagaagttcagagctaaaaccag

SEQ ID NO: 4484 - DNA, 25 bp, synthetic construct
  misc_feature 1..25: note = Oligonucleotide
  source 1..25: mol_type = other DNA
ctggacagaagttcagagctaaaac

SEQ ID NO: 4485 - DNA, 25 bp, synthetic construct
  misc_feature 1..25: note = Oligonucleotide
  source 1..25: mol_type = other DNA
tgcctggacagaagttcagagctaa

SEQ ID NO: 4486 - DNA, 25 bp, synthetic construct
  misc_feature 1..25: note = Oligonucleotide
  source 1..25: mol_type = other DNA
ggctgcctggacagaagttcagagc

SEQ ID NO: 4487 - DNA, 25 bp, synthetic construct
  misc_feature 1..25: note = Oligonucleotide
  source 1..25: mol_type = other DNA
aggggctgcctggacagaagttcag

SEQ ID NO: 4488 - DNA, 25 bp, synthetic construct
  misc_feature 1..25: note = Oligonucleotide
  source 1..25: mol_type = other DNA
ctgaggggctgcctggacagaagtt

SEQ ID NO: 4489 - DNA, 25 bp, synthetic construct
  misc_feature 1..25: note = Oligonucleotide
  source 1..25: mol_type = other DNA
ggactgaggggctgcctggacagaa

SEQ ID NO: 4490 - DNA, 25 bp, synthetic construct
  misc_feature 1..25: note = Oligonucleotide
  source 1..25: mol_type = other DNA
ctgggactgaggggctgcctggaca

SEQ ID NO: 4491 - DNA, 25 bp, synthetic construct
  misc_feature 1..25: note = Oligonucleotide
  source 1..25: mol_type = other DNA
tgcctgggactgaggggctgcctgg

SEQ ID NO: 4492 - DNA, 25 bp, synthetic construct
  misc_feature 1..25: note = Oligonucleotide
  source 1..25: mol_type = other DNA
gtctgcctgggactgaggggctgcc

SEQ ID NO: 4493 - DNA, 25 bp, synthetic construct
  misc_feature 1..25: note = Oligonucleotide
  source 1..25: mol_type = other DNA
tctgtctgcctgggactgaggggct

SEQ ID NO: 4494 - DNA, 25 bp, synthetic construct
  misc_feature 1..25: note = Oligonucleotide
  source 1..25: mol_type = other DNA
ccctctgtctgcctgggactgaggg

SEQ ID NO: 4495 - DNA, 25 bp, synthetic construct
  misc_feature 1..25: note = Oligonucleotide
  source 1..25: mol_type = other DNA
ccaccctctgtctgcctgggactga

SEQ ID NO: 4496 - DNA, 25 bp, synthetic construct
  misc_feature 1..25: note = Oligonucleotide
  source 1..25: mol_type = other DNA
gacccaccctctgtctgcctgggac

SEQ ID NO: 4497 - DNA, 25 bp, synthetic construct
  misc_feature 1..25: note = Oligonucleotide
  source 1..25: mol_type = other DNA
agtgacccaccctctgtctgcctgg

SEQ ID NO: 4498 - DNA, 25 bp, synthetic construct
  misc_feature 1..25: note = Oligonucleotide
  source 1..25: mol_type = other DNA
tggagtgacccaccctctgtctgcc

SEQ ID NO: 4499 - DNA, 25 bp, synthetic construct
  misc_feature 1..25: note = Oligonucleotide
  source 1..25: mol_type = other DNA
aactggagtgacccaccctctgtct

SEQ ID NO: 4500 - DNA, 25 bp, synthetic construct
  misc_feature 1..25: note = Oligonucleotide
  source 1..25: mol_type = other DNA
tataactggagtgacccaccctctg

SEQ ID NO: 4501 - DNA, 25 bp, synthetic construct
  misc_feature 1..25: note = Oligonucleotide
  source 1..25: mol_type = other DNA
ccctataactggagtgacccaccct

SEQ ID NO: 4502 - DNA, 25 bp, synthetic construct
  misc_feature 1..25: note = Oligonucleotide
  source 1..25: mol_type = other DNA
acaccctataactggagtgacccac

SEQ ID NO: 4503 - DNA, 25 bp, synthetic construct
  misc_feature 1..25: note = Oligonucleotide
  source 1..25: mol_type = other DNA
ggcacaccctataactggagtgacc

SEQ ID NO: 4504 - DNA, 25 bp, synthetic construct
  misc_feature 1..25: note = Oligonucleotide
  source 1..25: mol_type = other DNA
acaggcacaccctataactggagtg

SEQ ID NO: 4505 - DNA, 25 bp, synthetic construct
  misc_feature 1..25: note = Oligonucleotide
  source 1..25: mol_type = other DNA
gccacaggcacaccctataactgga

SEQ ID NO: 4506 - DNA, 25 bp, synthetic construct
  misc_feature 1..25: note = Oligonucleotide
  source 1..25: mol_type = other DNA
gatgccacaggcacaccctataact

SEQ ID NO: 4507 - DNA, 25 bp, synthetic construct
  misc_feature 1..25: note = Oligonucleotide
  source 1..25: mol_type = other DNA
tgggatgccacaggcacaccctata

SEQ ID NO: 4508 - DNA, 25 bp, synthetic construct
  misc_feature 1..25: note = Oligonucleotide
  source 1..25: mol_type = other DNA
aactgggatgccacaggcacaccct

SEQ ID NO: 4509 - DNA, 25 bp, synthetic construct
  misc_feature 1..25: note = Oligonucleotide
  source 1..25: mol_type = other DNA
tgtaactgggatgccacaggcacac

SEQ ID NO: 4510 - DNA, 25 bp, synthetic construct
  misc_feature 1..25: note = Oligonucleotide
  source 1..25: mol_type = other DNA
gtctgtaactgggatgccacaggca

SEQ ID NO: 4511 - DNA, 25 bp, synthetic construct
  misc_feature 1..25: note = Oligonucleotide
  source 1..25: mol_type = other DNA
cttgtctgtaactgggatgccacag

SEQ ID NO: 4512 - DNA, 25 bp, synthetic construct
  misc_feature 1..25: note = Oligonucleotide
  source 1..25: mol_type = other DNA
actcttgtctgtaactgggatgcca

SEQ ID NO: 4513 - DNA, 25 bp, synthetic construct
  misc_feature 1..25: note = Oligonucleotide
  source 1..25: mol_type = other DNA
cacactcttgtctgtaactgggatg

SEQ ID NO: 4514 - DNA, 25 bp, synthetic construct
  misc_feature 1..25: note = Oligonucleotide
  source 1..25: mol_type = other DNA
acacacactcttgtctgtaactggg

SEQ ID NO: 4515 - DNA, 25 bp, synthetic construct
  misc_feature 1..25: note = Oligonucleotide
  source 1..25: mol_type = other DNA
ctgacacacactcttgtctgtaact

SEQ ID NO: 4516 - DNA, 25 bp, synthetic construct
  misc_feature 1..25: note = Oligonucleotide
  source 1..25: mol_type = other DNA
ctactgacacacactcttgtctgta

SEQ ID NO: 4517 - DNA, 25 bp, synthetic construct
  misc_feature 1..25: note = Oligonucleotide
  source 1..25: mol_type = other DNA
tctctactgacacacactcttgtct

SEQ ID NO: 4518 - DNA, 25 bp, synthetic construct
  misc_feature 1..25: note = Oligonucleotide
  source 1..25: mol_type = other DNA
tcttctctactgacacacactcttg

SEQ ID NO: 4519 - DNA, 25 bp, synthetic construct
  misc_feature 1..25: note = Oligonucleotide
  source 1..25: mol_type = other DNA
tcctcttctctactgacacacactc

SEQ ID NO: 4520 - DNA, 25 bp, synthetic construct
  misc_feature 1..25: note = Oligonucleotide
  source 1..25: mol_type = other DNA
cattcctcttctctactgacacaca

SEQ ID NO: 4521 - DNA, 25 bp, synthetic construct
  misc_feature 1..25: note = Oligonucleotide
  source 1..25: mol_type = other DNA
gcccattcctcttctctactgacac

SEQ ID NO: 4522 - DNA, 25 bp, synthetic construct
  misc_feature 1..25: note = Oligonucleotide
  source 1..25: mol_type = other DNA
ccagcccattcctcttctctactga

SEQ ID NO: 4523 - DNA, 25 bp, synthetic construct
  misc_feature 1..25: note = Oligonucleotide
  source 1..25: mol_type = other DNA
accccagcccattcctcttctctac

SEQ ID NO: 4524 - DNA, 25 bp, synthetic construct
  misc_feature 1..25: note = Oligonucleotide
  source 1..25: mol_type = other DNA
gagaccccagcccattcctcttctc

SEQ ID NO: 4525 - DNA, 25 bp, synthetic construct
  misc_feature 1..25: note = Oligonucleotide
  source 1..25: mol_type = other DNA
ccggagaccccagcccattcctctt

SEQ ID NO: 4526 - DNA, 25 bp, synthetic construct
  misc_feature 1..25: note = Oligonucleotide
  source 1..25: mol_type = other DNA
gccccggagaccccagcccattcct

SEQ ID NO: 4527 - DNA, 25 bp, synthetic construct
  misc_feature 1..25: note = Oligonucleotide
  source 1..25: mol_type = other DNA
ggggccccggagaccccagcccatt

SEQ ID NO: 4528 - DNA, 25 bp, synthetic construct
  misc_feature 1..25: note = Oligonucleotide
  source 1..25: mol_type = other DNA
ttgggggccccggagaccccagccc

SEQ ID NO: 4529 - DNA, 25 bp, synthetic construct
  misc_feature 1..25: note = Oligonucleotide
  source 1..25: mol_type = other DNA
tggttgggggccccggagaccccag

SEQ ID NO: 4530 - DNA, 25 bp, synthetic construct
  misc_feature 1..25: note = Oligonucleotide
  source 1..25: mol_type = other DNA
ccttggttgggggccccggagaccc

SEQ ID NO: 4531 - DNA, 25 bp, synthetic construct
  misc_feature 1..25: note = Oligonucleotide
  source 1..25: mol_type = other DNA
cttccttggttgggggccccggaga

SEQ ID NO: 4532 - DNA, 25 bp, synthetic construct
  misc_feature 1..25: note = Oligonucleotide
  source 1..25: mol_type = other DNA
agtcttccttggttgggggccccgg

SEQ ID NO: 4533 - DNA, 25 bp, synthetic construct
  misc_feature 1..25: note = Oligonucleotide
  source 1..25: mol_type = other DNA
tggagtcttccttggttgggggccc

SEQ ID NO: 4534 - DNA, 25 bp, synthetic construct
  misc_feature 1..25: note = Oligonucleotide
  source 1..25: mol_type = other DNA
gtgtggagtcttccttggttggggg

SEQ ID NO: 4535 - DNA, 25 bp, synthetic construct
  misc_feature 1..25: note = Oligonucleotide
  source 1..25: mol_type = other DNA
cgtgtgtggagtcttccttggttgg

SEQ ID NO: 4536 - DNA, 25 bp, synthetic construct
  misc_feature 1..25: note = Oligonucleotide
  source 1..25: mol_type = other DNA
gttcgtgtgtggagtcttccttggt

SEQ ID NO: 4537 - DNA, 25 bp, synthetic construct
  misc_feature 1..25: note = Oligonucleotide
  source 1..25: mol_type = other DNA
ccagttcgtgtgtggagtcttcctt

SEQ ID NO: 4538 - DNA, 25 bp, synthetic construct
  misc_feature 1..25: note = Oligonucleotide
  source 1..25: mol_type = other DNA
tctccagttcgtgtgtggagtcttc

SEQ ID NO: 4539 - DNA, 25 bp, synthetic construct
  misc_feature 1..25: note = Oligonucleotide
  source 1..25: mol_type = other DNA
ccttctccagttcgtgtgtggagtc

SEQ ID NO: 4540 - DNA, 25 bp, synthetic construct
  misc_feature 1..25: note = Oligonucleotide
  source 1..25: mol_type = other DNA
gctccttctccagttcgtgtgtgga

SEQ ID NO: 4541 - DNA, 25 bp, synthetic construct
  misc_feature 1..25: note = Oligonucleotide
  source 1..25: mol_type = other DNA
gctgctccttctccagttcgtgtgt

SEQ ID NO: 4542 - DNA, 25 bp, synthetic construct
  misc_feature 1..25: note = Oligonucleotide
  source 1..25: mol_type = other DNA
ccagctgctccttctccagttcgtg

SEQ ID NO: 4543 - DNA, 25 bp, synthetic construct
  misc_feature 1..25: note = Oligonucleotide
  source 1..25: mol_type = other DNA
gccccagctgctccttctccagttc

SEQ ID NO: 4544 - DNA, 25 bp, synthetic construct
  misc_feature 1..25: note = Oligonucleotide
  source 1..25: mol_type = other DNA
ccagccccagctgctccttctccag

SEQ ID NO: 4545 - DNA, 25 bp, synthetic construct
  misc_feature 1..25: note = Oligonucleotide
  source 1..25: mol_type = other DNA
cagccagccccagctgctccttctc

SEQ ID NO: 4546 - DNA, 25 bp, synthetic construct
  misc_feature 1..25: note = Oligonucleotide
  source 1..25: mol_type = other DNA
cgccagccagccccagctgctcctt

SEQ ID NO: 4547 - DNA, 25 bp, synthetic construct
  misc_feature 1..25: note = Oligonucleotide
  source 1..25: mol_type = other DNA
cctcgccagccagccccagctgctc

SEQ ID NO: 4548 - DNA, 25 bp, synthetic construct
  misc_feature 1..25: note = Oligonucleotide
  source 1..25: mol_type = other DNA
ttgcctcgccagccagccccagctg

SEQ ID NO: 4549 - DNA, 25 bp, synthetic construct
  misc_feature 1..25: note = Oligonucleotide
  source 1..25: mol_type = other DNA
gctttgcctcgccagccagccccag

SEQ ID NO: 4550 - DNA, 25 bp, synthetic construct
  misc_feature 1..25: note = Oligonucleotide
  source 1..25: mol_type = other DNA
ccagctttgcctcgccagccagccc

SEQ ID NO: 4551 - DNA, 25 bp, synthetic construct
  misc_feature 1..25: note = Oligonucleotide
  source 1..25: mol_type = other DNA
gcaccagctttgcctcgccagccag

SEQ ID NO: 4552 - DNA, 25 bp, synthetic construct
  misc_feature 1..25: note = Oligonucleotide
  source 1..25: mol_type = other DNA
gcagcaccagctttgcctcgccagc

SEQ ID NO: 4553 - DNA, 25 bp, synthetic construct
  misc_feature 1..25: note = Oligonucleotide
  source 1..25: mol_type = other DNA
tgagcagcaccagctttgcctcgcc

SEQ ID NO: 4554 - DNA, 25 bp, synthetic construct
  misc_feature 1..25: note = Oligonucleotide
  source 1..25: mol_type = other DNA
ggctgagcagcaccagctttgcctc

SEQ ID NO: 4555 - DNA, 25 bp, synthetic construct
  misc_feature 1..25: note = Oligonucleotide
  source 1..25: mol_type = other DNA
aggggctgagcagcaccagctttgc

SEQ ID NO: 4556 - DNA, 25 bp, synthetic construct
  misc_feature 1..25: note = Oligonucleotide
  source 1..25: mol_type = other DNA
gggaggggctgagcagcaccagctt

SEQ ID NO: 4557 - DNA, 25 bp, synthetic construct
  misc_feature 1..25: note = Oligonucleotide
  source 1..25: mol_type = other DNA
gcagggaggggctgagcagcaccag

SEQ ID NO: 4558 - DNA, 25 bp, synthetic construct
  misc_feature 1..25: note = Oligonucleotide
  source 1..25: mol_type = other DNA
ggagcagggaggggctgagcagcac

SEQ ID NO: 4559 - DNA, 25 bp, synthetic construct
  misc_feature 1..25: note = Oligonucleotide
  source 1..25: mol_type = other DNA
tgaggagcagggaggggctgagcag

SEQ ID NO: 4560 - DNA, 25 bp, synthetic construct
  misc_feature 1..25: note = Oligonucleotide
  source 1..25: mol_type = other DNA
ccttgaggagcagggaggggctgag

SEQ ID NO: 4561 - DNA, 25 bp, synthetic construct
  misc_feature 1..25: note = Oligonucleotide
  source 1..25: mol_type = other DNA
aggccttgaggagcagggaggggct

SEQ ID NO: 4562 - DNA, 25 bp, synthetic construct
  misc_feature 1..25: note = Oligonucleotide
  source 1..25: mol_type = other DNA
tcaaggccttgaggagcagggaggg

SEQ ID NO: 4563 - DNA, 25 bp, synthetic construct
  misc_feature 1..25: note = Oligonucleotide
  source 1..25: mol_type = other DNA
aggtcaaggccttgaggagcaggga

SEQ ID NO: 4564 - DNA, 25 bp, synthetic construct
  misc_feature 1..25: note = Oligonucleotide
  source 1..25: mol_type = other DNA
gggaggtcaaggccttgaggagcag

SEQ ID NO: 4565 - DNA, 25 bp, synthetic construct
  misc_feature 1..25: note = Oligonucleotide
  source 1..25: mol_type = other DNA
aaggggaggtcaaggccttgaggag

SEQ ID NO: 4566 - DNA, 25 bp, synthetic construct
  misc_feature 1..25: note = Oligonucleotide
  source 1..25: mol_type = other DNA
ggaaaggggaggtcaaggccttgag

SEQ ID NO: 4567 - DNA, 25 bp, synthetic construct
  misc_feature 1..25: note = Oligonucleotide
  source 1..25: mol_type = other DNA
gagggaaaggggaggtcaaggcctt

SEQ ID NO: 4568 - DNA, 17 bp, synthetic construct
  misc_feature 1..17: note = Oligonucleotide
  source 1..17: mol_type = other DNA
gtaaaccaccggtgtac

SEQ ID NO: 4569 - DNA, 17 bp, synthetic construct
  misc_feature 1..17: note = Oligonucleotide
  source 1..17: mol_type = other DNA
cctgtaaaccaccggtg

SEQ ID NO: 4570 - DNA, 17 bp, synthetic construct
  misc_feature 1..17: note = Oligonucleotide
  source 1..17: mol_type = other DNA
gctcctgtaaaccaccg

SEQ ID NO: 4571 - DNA, 17 bp, synthetic construct
  misc_feature 1..17: note = Oligonucleotide
  source 1..17: mol_type = other DNA
tgagctcctgtaaacca

SEQ ID NO: 4572 - DNA, 17 bp, synthetic construct
  misc_feature 1..17: note = Oligonucleotide
  source 1..17: mol_type = other DNA
ccttgagctcctgtaaa

SEQ ID NO: 4573 - DNA, 17 bp, synthetic construct
  misc_feature 1..17: note = Oligonucleotide
  source 1..17: mol_type = other DNA
cagccttgagctcctgt

SEQ ID NO: 4574 - DNA, 17 bp, synthetic construct
  misc_feature 1..17: note = Oligonucleotide
  source 1..17: mol_type = other DNA
gggcagccttgagctcc

SEQ ID NO: 4575 - DNA, 17 bp, synthetic construct
  misc_feature 1..17: note = Oligonucleotide
  source 1..17: mol_type = other DNA
ctggggcagccttgagc

SEQ ID NO: 4576 - DNA, 17 bp, synthetic construct
  misc_feature 1..17: note = Oligonucleotide
  source 1..17: mol_type = other DNA
cctctggggcagccttg

SEQ ID NO: 4577 - DNA, 17 bp, synthetic construct
  misc_feature 1..17: note = Oligonucleotide
  source 1..17: mol_type = other DNA
acacctctggggcagcc

SEQ ID NO: 4578 - DNA, 17 bp, synthetic construct
  misc_feature 1..17: note = Oligonucleotide
  source 1..17: mol_type = other DNA
cagacacctctggggca

SEQ ID NO: 4579 - DNA, 17 bp, synthetic construct
  misc_feature 1..17: note = Oligonucleotide
  source 1..17: mol_type = other DNA
agacagacacctctggg

SEQ ID NO: 4580 - DNA, 17 bp, synthetic construct
  misc_feature 1..17: note = Oligonucleotide
  source 1..17: mol_type = other DNA
cagagacagacacctct

SEQ ID NO: 4581 - DNA, 17 bp, synthetic construct
  misc_feature 1..17: note = Oligonucleotide
  source 1..17: mol_type = other DNA
acacagagacagacacc

SEQ ID NO: 4582 - DNA, 17 bp, synthetic construct
  misc_feature 1..17: note = Oligonucleotide
  source 1..17: mol_type = other DNA
tggacacagagacagac

SEQ ID NO: 4583 - DNA, 17 bp, synthetic construct
  misc_feature 1..17: note = Oligonucleotide
  source 1..17: mol_type = other DNA
acatggacacagagaca

SEQ ID NO: 4584 - DNA, 17 bp, synthetic construct
  misc_feature 1..17: note = Oligonucleotide
  source 1..17: mol_type = other DNA
gtcacatggacacagag

SEQ ID NO: 4585 - DNA, 17 bp, synthetic construct
  misc_feature 1..17: note = Oligonucleotide
  source 1..17: mol_type = other DNA
caagtcacatggacaca

SEQ ID NO: 4586 - DNA, 17 bp, synthetic construct
  misc_feature 1..17: note = Oligonucleotide
  source 1..17: mol_type = other DNA
agtcaagtcacatggac

SEQ ID NO: 4587 - DNA, 17 bp, synthetic construct
  misc_feature 1..17: note = Oligonucleotide
  source 1..17: mol_type = other DNA
agaagtcaagtcacatg

SEQ ID NO: 4588 - DNA, 17 bp, synthetic construct
  misc_feature 1..17: note = Oligonucleotide
  source 1..17: mol_type = other DNA
cagagaagtcaagtcac

SEQ ID NO: 4589 - DNA, 17 bp, synthetic construct
  misc_feature 1..17: note = Oligonucleotide
  source 1..17: mol_type = other DNA
gttcagagaagtcaagt

SEQ ID NO: 4590 - DNA, 17 bp, synthetic construct
  misc_feature 1..17: note = Oligonucleotide
  source 1..17: mol_type = other DNA
aaggttcagagaagtca

SEQ ID NO: 4591 - DNA, 17 bp, synthetic construct
  misc_feature 1..17: note = Oligonucleotide
  source 1..17: mol_type = other DNA
accaaggttcagagaag

SEQ ID NO: 4592 - DNA, 17 bp, synthetic construct
  misc_feature 1..17: note = Oligonucleotide
  source 1..17: mol_type = other DNA
agaaccaaggttcagag

SEQ ID NO: 4593 - DNA, 17 bp, synthetic construct
  misc_feature 1..17: note = Oligonucleotide
  source 1..17: mol_type = other DNA
ggaagaaccaaggttca

SEQ ID NO: 4594 - DNA, 17 bp, synthetic construct
  misc_feature 1..17: note = Oligonucleotide
  source 1..17: mol_type = other DNA
cagggaagaaccaaggt

SEQ ID NO: 4595 - DNA, 17 bp, synthetic construct
  misc_feature 1..17: note = Oligonucleotide
  source 1..17: mol_type = other DNA
ttccagggaagaaccaa

SEQ ID NO: 4596 - DNA, 17 bp, synthetic construct
  misc_feature 1..17: note = Oligonucleotide
  source 1..17: mol_type = other DNA
gccttccagggaagaac

SEQ ID NO: 4597 - DNA, 17 bp, synthetic construct
  misc_feature 1..17: note = Oligonucleotide
  source 1..17: mol_type = other DNA
agggccttccagggaag

SEQ ID NO: 4598 - DNA, 17 bp, synthetic construct
  misc_feature 1..17: note = Oligonucleotide
  source 1..17: mol_type = other DNA
cttagggccttccaggg

SEQ ID NO: 4599 - DNA, 17 bp, synthetic construct
  misc_feature 1..17: note = Oligonucleotide
  source 1..17: mol_type = other DNA
tcccttagggccttcca

SEQ ID NO: 4600 - DNA, 17 bp, synthetic construct
  misc_feature 1..17: note = Oligonucleotide
  source 1..17: mol_type = other DNA
tgctcccttagggcctt

SEQ ID NO: 4601 - DNA, 17 bp, synthetic construct
  misc_feature 1..17: note = Oligonucleotide
  source 1..17: mol_type = other DNA
aggtgctcccttagggc

SEQ ID NO: 4602 - DNA, 17 bp, synthetic construct
  misc_feature 1..17: note = Oligonucleotide
  source 1..17: mol_type = other DNA
gggaggtgctcccttag

SEQ ID NO: 4603 - DNA, 17 bp, synthetic construct
  misc_feature 1..17: note = Oligonucleotide
  source 1..17: mol_type = other DNA
tgggggaggtgctccct

SEQ ID NO: 4604 - DNA, 17 bp, synthetic construct
  misc_feature 1..17: note = Oligonucleotide
  source 1..17: mol_type = other DNA
tcctgggggaggtgctc

SEQ ID NO: 4605 - DNA, 17 bp, synthetic construct
  misc_feature 1..17: note = Oligonucleotide
  source 1..17: mol_type = other DNA
cagtcctgggggaggtg

SEQ ID NO: 4606 - DNA, 17 bp, synthetic construct
  misc_feature 1..17: note = Oligonucleotide
  source 1..17: mol_type = other DNA
gggcagtcctgggggag

SEQ ID NO: 4607 - DNA, 17 bp, synthetic construct
  misc_feature 1..17: note = Oligonucleotide
  source 1..17: mol_type = other DNA
tgtgggcagtcctgggg

SEQ ID NO: 4608 - DNA, 17 bp, synthetic construct
  misc_feature 1..17: note = Oligonucleotide
  source 1..17: mol_type = other DNA
tcctgtgggcagtcctg

SEQ ID NO: 4609 - DNA, 17 bp, synthetic construct
  misc_feature 1..17: note = Oligonucleotide
  source 1..17: mol_type = other DNA
acctcctgtgggcagtc

SEQ ID NO: 4610 - DNA, 17 bp, synthetic construct
  misc_feature 1..17: note = Oligonucleotide
  source 1..17: mol_type = other DNA
aacacctcctgtgggca

SEQ ID NO: 4611 - DNA, 17 bp, synthetic construct
  misc_feature 1..17: note = Oligonucleotide
  source 1..17: mol_type = other DNA
cccaacacctcctgtgg

SEQ ID NO: 4612 - DNA, 17 bp, synthetic construct
  misc_feature 1..17: note = Oligonucleotide
  source 1..17: mol_type = other DNA
tcccccaacacctcctg

SEQ ID NO: 4613 - DNA, 17 bp, synthetic construct
  misc_feature 1..17: note = Oligonucleotide
  source 1..17: mol_type = other DNA
tcgtcccccaacacctc

SEQ ID NO: 4614 - DNA, 17 bp, synthetic construct
  misc_feature 1..17: note = Oligonucleotide
  source 1..17: mol_type = other DNA
ggctcgtcccccaacac

SEQ ID NO: 4615 - DNA, 17 bp, synthetic construct
  misc_feature 1..17: note = Oligonucleotide
  source 1..17: mol_type = other DNA
ctgggctcgtcccccaa

SEQ ID NO: 4616 - DNA, 17 bp, synthetic construct
  misc_feature 1..17: note = Oligonucleotide
  source 1..17: mol_type = other DNA
gtgctgggctcgtcccc

SEQ ID NO: 4617 - DNA, 17 bp, synthetic construct
  misc_feature 1..17: note = Oligonucleotide
  source 1..17: mol_type = other DNA
cgcgtgctgggctcgtc

SEQ ID NO: 4618 - DNA, 17 bp, synthetic construct
  misc_feature 1..17: note = Oligonucleotide
  source 1..17: mol_type = other DNA
cctcgcgtgctgggctc

SEQ ID NO: 4619 - DNA, 17 bp, synthetic construct
  misc_feature 1..17: note = Oligonucleotide
  source 1..17: mol_type = other DNA
acccctcgcgtgctggg

SEQ ID NO: 4620 - DNA, 17 bp, synthetic construct
  misc_feature 1..17: note = Oligonucleotide
  source 1..17: mol_type = other DNA
aatacccctcgcgtgct

SEQ ID NO: 4621 - DNA, 17 bp, synthetic construct
  misc_feature 1..17: note = Oligonucleotide
  source 1..17: mol_type = other DNA
ccaaatacccctcgcgt

SEQ ID NO: 4622 - DNA, 17 bp, synthetic construct
  misc_feature 1..17: note = Oligonucleotide
  source 1..17: mol_type = other DNA
acaccaaatacccctcg

SEQ ID NO: 4623 - DNA, 17 bp, synthetic construct
  misc_feature 1..17: note = Oligonucleotide
  source 1..17: mol_type = other DNA
tcaacaccaaatacccc

SEQ ID NO: 4624 - DNA, 17 bp, synthetic construct
  misc_feature 1..17: note = Oligonucleotide
  source 1..17: mol_type = other DNA
acatcaacaccaaatac

SEQ ID NO: 4625 - DNA, 17 bp, synthetic construct
  misc_feature 1..17: note = Oligonucleotide
  source 1..17: mol_type = other DNA
ggaacatcaacaccaaa

SEQ ID NO: 4626 - DNA, 17 bp, synthetic construct
  misc_feature 1..17: note = Oligonucleotide
  source 1..17: mol_type = other DNA
aagggaacatcaacacc

SEQ ID NO: 4627 - DNA, 17 bp, synthetic construct
  misc_feature 1..17: note = Oligonucleotide
  source 1..17: mol_type = other DNA
acgaagggaacatcaac

SEQ ID NO: 4628 - DNA, 17 bp, synthetic construct
  misc_feature 1..17: note = Oligonucleotide
  source 1..17: mol_type = other DNA
gggacgaagggaacatc

SEQ ID NO: 4629 - DNA, 17 bp, synthetic construct
  misc_feature 1..17: note = Oligonucleotide
  source 1..17: mol_type = other DNA
gaggggacgaagggaac

SEQ ID NO: 4630 - DNA, 17 bp, synthetic construct
  misc_feature 1..17: note = Oligonucleotide
  source 1..17: mol_type = other DNA
ggcgaggggacgaaggg

SEQ ID NO: 4631 - DNA, 17 bp, synthetic construct
  misc_feature 1..17: note = Oligonucleotide
  source 1..17: mol_type = other DNA
cctggcgaggggacgaa

SEQ ID NO: 4632 - DNA, 17 bp, synthetic construct
  misc_feature 1..17: note = Oligonucleotide
  source 1..17: mol_type = other DNA
ctccctggcgaggggac

SEQ ID NO: 4633 - DNA, 17 bp, synthetic construct
  misc_feature 1..17: note = Oligonucleotide
  source 1..17: mol_type = other DNA
tctctccctggcgaggg

SEQ ID NO: 4634 - DNA, 17 bp, synthetic construct
  misc_feature 1..17: note = Oligonucleotide
  source 1..17: mol_type = other DNA
tcctctctccctggcga

SEQ ID NO: 4635 - DNA, 17 bp, synthetic construct
  misc_feature 1..17: note = Oligonucleotide
  source 1..17: mol_type = other DNA
ccctcctctctccctgg

SEQ ID NO: 4636 - DNA, 17 bp, synthetic construct
  misc_feature 1..17: note = Oligonucleotide
  source 1..17: mol_type = other DNA
tgaccctcctctctccc

SEQ ID NO: 4637 - DNA, 17 bp, synthetic construct
  misc_feature 1..17: note = Oligonucleotide
  source 1..17: mol_type = other DNA
tgctgaccctcctctct

SEQ ID NO: 4638 - DNA, 17 bp, synthetic construct
  misc_feature 1..17: note = Oligonucleotide
  source 1..17: mol_type = other DNA
ccctgctgaccctcctc

SEQ ID NO: 4639 - DNA, 17 bp, synthetic construct
  misc_feature 1..17: note = Oligonucleotide
  source 1..17: mol_type = other DNA
gagccctgctgaccctc

SEQ ID NO: 4640 - DNA, 17 bp, synthetic construct
  misc_feature 1..17: note = Oligonucleotide
  source 1..17: mol_type = other DNA
ccagagccctgctgacc

SEQ ID NO: 4641 - DNA, 17 bp, synthetic construct
  misc_feature 1..17: note = Oligonucleotide
  source 1..17: mol_type = other DNA
gccccagagccctgctg

SEQ ID NO: 4642 - DNA, 17 bp, synthetic construct
  misc_feature 1..17: note = Oligonucleotide
  source 1..17: mol_type = other DNA
cctgccccagagccctg

SEQ ID NO: 4643 - DNA, 17 bp, synthetic construct
  misc_feature 1..17: note = Oligonucleotide
  source 1..17: mol_type = other DNA
acccctgccccagagcc

SEQ ID NO: 4644 - DNA, 17 bp, synthetic construct
  misc_feature 1..17: note = Oligonucleotide
  source 1..17: mol_type = other DNA
catacccctgccccaga

SEQ ID NO: 4645 - DNA, 17 bp, synthetic construct
  misc_feature 1..17: note = Oligonucleotide
  source 1..17: mol_type = other DNA
ccccatacccctgcccc

SEQ ID NO: 4646 - DNA, 17 bp, synthetic construct
  misc_feature 1..17: note = Oligonucleotide
  source 1..17: mol_type = other DNA
tttccccatacccctgc

SEQ ID NO: 4647 - DNA, 17 bp, synthetic construct
  misc_feature 1..17: note = Oligonucleotide
  source 1..17: mol_type = other DNA
cattttccccatacccc

SEQ ID NO: 4648 - DNA, 17 bp, synthetic construct
  misc_feature 1..17: note = Oligonucleotide
  source 1..17: mol_type = other DNA
tctcattttccccatac

SEQ ID NO: 4649 - DNA, 17 bp, synthetic construct
  misc_feature 1..17: note = Oligonucleotide
  source 1..17: mol_type = other DNA
tcttctcattttcccca

SEQ ID NO: 4650 - DNA, 17 bp, synthetic construct
  misc_feature 1..17: note = Oligonucleotide
  source 1..17: mol_type = other DNA
cagtcttctcattttcc

SEQ ID NO: 4651 - DNA, 17 bp, synthetic construct
  misc_feature 1..17: note = Oligonucleotide
  source 1..17: mol_type = other DNA
ccccagtcttctcattt

SEQ ID NO: 4652 - DNA, 17 bp, synthetic construct
  misc_feature 1..17: note = Oligonucleotide
  source 1..17: mol_type = other DNA
tcaccccagtcttctca

SEQ ID NO: 4653 - DNA, 17 bp, synthetic construct
  misc_feature 1..17: note = Oligonucleotide
  source 1..17: mol_type = other DNA
ctgtcaccccagtcttc

SEQ ID NO: 4654 - DNA, 17 bp, synthetic construct
  misc_feature 1..17: note = Oligonucleotide
  source 1..17: mol_type = other DNA
cacctgtcaccccagtc

SEQ ID NO: 4655 - DNA, 17 bp, synthetic construct
  misc_feature 1..17: note = Oligonucleotide
  source 1..17: mol_type = other DNA
ccacacctgtcacccca

SEQ ID NO: 4656 - DNA, 17 bp, synthetic construct
  misc_feature 1..17: note = Oligonucleotide
  source 1..17: mol_type = other DNA
gacccacacctgtcacc

SEQ ID NO: 4657 - DNA, 17 bp, synthetic construct
  misc_feature 1..17: note = Oligonucleotide
  source 1..17: mol_type = other DNA
tcagacccacacctgtc

SEQ ID NO: 4658 - DNA, 17 bp, synthetic construct
  misc_feature 1..17: note = Oligonucleotide
  source 1..17: mol_type = other DNA
gggtcagacccacacct

SEQ ID NO: 4659 - DNA, 17 bp, synthetic construct
  misc_feature 1..17: note = Oligonucleotide
  source 1..17: mol_type = other DNA
ggggggtcagacccaca

SEQ ID NO: 4660 - DNA, 17 bp, synthetic construct
  misc_feature 1..17: note = Oligonucleotide
  source 1..17: mol_type = other DNA
gttggggggtcagaccc

SEQ ID NO: 4661 - DNA, 17 bp, synthetic construct
  misc_feature 1..17: note = Oligonucleotide
  source 1..17: mol_type = other DNA
ggggttggggggtcaga

SEQ ID NO: 4662 - DNA, 17 bp, synthetic construct
  misc_feature 1..17: note = Oligonucleotide
  source 1..17: mol_type = other DNA
ctcggggttggggggtc

SEQ ID NO: 4663 - DNA, 17 bp, synthetic construct
  misc_feature 1..17: note = Oligonucleotide
  source 1..17: mol_type = other DNA
tctctcggggttggggg

SEQ ID NO: 4664 - DNA, 17 bp, synthetic construct
  misc_feature 1..17: note = Oligonucleotide
  source 1..17: mol_type = other DNA
tggtctctcggggttgg

SEQ ID NO: 4665 - DNA, 17 bp, synthetic construct
  misc_feature 1..17: note = Oligonucleotide
  source 1..17: mol_type = other DNA
tgctggtctctcggggt

SEQ ID NO: 4666 - DNA, 17 bp, synthetic construct
  misc_feature 1..17: note = Oligonucleotide
  source 1..17: mol_type = other DNA
ccctgctggtctctcgg

SEQ ID NO: 4667 - DNA, 17 bp, synthetic construct
  misc_feature 1..17: note = Oligonucleotide
  source 1..17: mol_type = other DNA
cacccctgctggtctct

SEQ ID NO: 4668 - DNA, 17 bp, synthetic construct
  misc_feature 1..17: note = Oligonucleotide
  source 1..17: mol_type = other DNA
ctgcacccctgctggtc

SEQ ID NO: 4669 - DNA, 17 bp, synthetic construct
  misc_feature 1..17: note = Oligonucleotide
  source 1..17: mol_type = other DNA
cttctgcacccctgctg

SEQ ID NO: 4670 - DNA, 17 bp, synthetic construct
  misc_feature 1..17: note = Oligonucleotide
  source 1..17: mol_type = other DNA
tggcttctgcacccctg

SEQ ID NO: 4671 - DNA, 17 bp, synthetic construct
  misc_feature 1..17: note = Oligonucleotide
  source 1..17: mol_type = other DNA
gtttggcttctgcaccc

SEQ ID NO: 4672 - DNA, 17 bp, synthetic construct
  misc_feature 1..17: note = Oligonucleotide
  source 1..17: mol_type = other DNA
gcagtttggcttctgca

SEQ ID NO: 4673 - DNA, 17 bp, synthetic construct
  misc_feature 1..17: note = Oligonucleotide
  source 1..17: mol_type = other DNA
tctgcagtttggcttct

SEQ ID NO: 4674 - DNA, 17 bp, synthetic construct
  misc_feature 1..17: note = Oligonucleotide
  source 1..17: mol_type = other DNA
ccctctgcagtttggct

SEQ ID NO: 4675 - DNA, 17 bp, synthetic construct
  misc_feature 1..17: note = Oligonucleotide
  source 1..17: mol_type = other DNA
accccctctgcagtttg

SEQ ID NO: 4676 - DNA, 17 bp, synthetic construct
  misc_feature 1..17: note = Oligonucleotide
  source 1..17: mol_type = other DNA
tccaccccctctgcagt

SEQ ID NO: 4677 - DNA, 17 bp, synthetic construct
  misc_feature 1..17: note = Oligonucleotide
  source 1..17: mol_type = other DNA
ctctccaccccctctgc

SEQ ID NO: 4678 - DNA, 17 bp, synthetic construct
  misc_feature 1..17: note = Oligonucleotide
  source 1..17: mol_type = other DNA
cccctctccaccccctc

SEQ ID NO: 4679 - DNA, 17 bp, synthetic construct
  misc_feature 1..17: note = Oligonucleotide
  source 1..17: mol_type = other DNA
acccccctctccacccc

SEQ ID NO: 4680 - DNA, 17 bp, synthetic construct
  misc_feature 1..17: note = Oligonucleotide
  source 1..17: mol_type = other DNA
accacccccctctccac

SEQ ID NO: 4681 - DNA, 17 bp, synthetic construct
  misc_feature 1..17: note = Oligonucleotide
  source 1..17: mol_type = other DNA
tccaccacccccctctc

SEQ ID NO: 4682 - DNA, 17 bp, synthetic construct
  misc_feature 1..17: note = Oligonucleotide
  source 1..17: mol_type = other DNA
ccctccaccacccccct

SEQ ID NO: 4683 - DNA, 17 bp, synthetic construct
  misc_feature 1..17: note = Oligonucleotide
  source 1..17: mol_type = other DNA
cccccctccaccacccc

SEQ ID NO: 4684 - DNA, 17 bp, synthetic construct
  misc_feature 1..17: note = Oligonucleotide
  source 1..17: mol_type = other DNA
ccacccccctccaccac

SEQ ID NO: 4685 - DNA, 17 bp, synthetic construct
  misc_feature 1..17: note = Oligonucleotide
  source 1..17: mol_type = other DNA
ccaccacccccctccac

SEQ ID NO: 4686 - DNA, 17 bp, synthetic construct
  misc_feature 1..17: note = Oligonucleotide
  source 1..17: mol_type = other DNA
tctccaccacccccctc

SEQ ID NO: 4687 - DNA, 17 bp, synthetic construct
  misc_feature 1..17: note = Oligonucleotide
  source 1..17: mol_type = other DNA
ccctctccaccaccccc

SEQ ID NO: 4688 - DNA, 17 bp, synthetic construct
  misc_feature 1..17: note = Oligonucleotide
  source 1..17: mol_type = other DNA
cccccctctccaccacc

SEQ ID NO: 4689 - DNA, 17 bp, synthetic construct
  misc_feature 1..17: note = Oligonucleotide
  source 1..17: mol_type = other DNA
ccacccccctctccacc

SEQ ID NO: 4690 - DNA, 17 bp, synthetic construct
  misc_feature 1..17: note = Oligonucleotide
  source 1..17: mol_type = other DNA
ccaccacccccctctcc

SEQ ID NO: 4691 - DNA, 17 bp, synthetic construct
  misc_feature 1..17: note = Oligonucleotide
  source 1..17: mol_type = other DNA
cctccaccacccccctc

SEQ ID NO: 4692 - DNA, 17 bp, synthetic construct
  misc_feature 1..17: note = Oligonucleotide
  source 1..17: mol_type = other DNA
ccccctccaccaccccc

SEQ ID NO: 4693 - DNA, 17 bp, synthetic construct
  misc_feature 1..17: note = Oligonucleotide
  source 1..17: mol_type = other DNA
catccccctccaccacc

SEQ ID NO: 4694 - DNA, 17 bp, synthetic construct
  misc_feature 1..17: note = Oligonucleotide
  source 1..17: mol_type = other DNA
caccatccccctccacc

SEQ ID NO: 4695 - DNA, 17 bp, synthetic construct
  misc_feature 1..17: note = Oligonucleotide
  source 1..17: mol_type = other DNA
ctccaccatccccctcc

SEQ ID NO: 4696 - DNA, 17 bp, synthetic construct
  misc_feature 1..17: note = Oligonucleotide
  source 1..17: mol_type = other DNA
cccctccaccatccccc

SEQ ID NO: 4697 - DNA, 17 bp, synthetic construct
  misc_feature 1..17: note = Oligonucleotide
  source 1..17: mol_type = other DNA
tcccccctccaccatcc

SEQ ID NO: 4698 - DNA, 17 bp, synthetic construct
  misc_feature 1..17: note = Oligonucleotide
  source 1..17: mol_type = other DNA
ccatcccccctccacca

SEQ ID NO: 4699 - DNA, 17 bp, synthetic construct
  misc_feature 1..17: note = Oligonucleotide
  source 1..17: mol_type = other DNA
ccaccatcccccctcca

SEQ ID NO: 4700 - DNA, 17 bp, synthetic construct
  misc_feature 1..17: note = Oligonucleotide
  source 1..17: mol_type = other DNA
cctccaccatcccccct

SEQ ID NO: 4701 - DNA, 17 bp, synthetic construct
  misc_feature 1..17: note = Oligonucleotide
  source 1..17: mol_type = other DNA
ccccctccaccatcccc

SEQ ID NO: 4702 - DNA, 17 bp, synthetic construct
  misc_feature 1..17: note = Oligonucleotide
  source 1..17: mol_type = other DNA
cacccccctccaccatc

SEQ ID NO: 4703 - DNA, 17 bp, synthetic construct
  misc_feature 1..17: note = Oligonucleotide
  source 1..17: mol_type = other DNA
caccacccccctccacc

SEQ ID NO: 4704 - DNA, 17 bp, synthetic construct
  misc_feature 1..17: note = Oligonucleotide
  source 1..17: mol_type = other DNA
ctccaccacccccctcc

SEQ ID NO: 4705 - DNA, 17 bp, synthetic construct
  misc_feature 1..17: note = Oligonucleotide
  source 1..17: mol_type = other DNA
cctctccaccacccccc

SEQ ID NO: 4706 - DNA, 17 bp, synthetic construct
  misc_feature 1..17: note = Oligonucleotide
  source 1..17: mol_type = other DNA
ccccctctccaccaccc

SEQ ID NO: 4707 - DNA, 17 bp, synthetic construct
  misc_feature 1..17: note = Oligonucleotide
  source 1..17: mol_type = other DNA
ccaccccctctccacca

SEQ ID NO: 4708 - DNA, 17 bp, synthetic construct
  misc_feature 1..17: note = Oligonucleotide
  source 1..17: mol_type = other DNA
ccaccaccccctctcca

SEQ ID NO: 4709 - DNA, 17 bp, synthetic construct
  misc_feature 1..17: note = Oligonucleotide
  source 1..17: mol_type = other DNA
tctccaccaccccctct

SEQ ID NO: 4710 - DNA, 17 bp, synthetic construct
  misc_feature 1..17: note = Oligonucleotide
  source 1..17: mol_type = other DNA
ccctctccaccaccccc

SEQ ID NO: 4711 - DNA, 17 bp, synthetic construct
  misc_feature 1..17: note = Oligonucleotide
  source 1..17: mol_type = other DNA
cccccctctccaccacc

SEQ ID NO: 4712 - DNA, 17 bp, synthetic construct
  misc_feature 1..17: note = Oligonucleotide
  source 1..17: mol_type = other DNA
ccacccccctctccacc

SEQ ID NO: 4713 - DNA, 17 bp, synthetic construct
  misc_feature 1..17: note = Oligonucleotide
  source 1..17: mol_type = other DNA
ccaccacccccctctcc

SEQ ID NO: 4714 - DNA, 17 bp, synthetic construct
  misc_feature 1..17: note = Oligonucleotide
  source 1..17: mol_type = other DNA
tctccaccacccccctc

SEQ ID NO: 4715 - DNA, 17 bp, synthetic construct
  misc_feature 1..17: note = Oligonucleotide
  source 1..17: mol_type = other DNA
ccctctccaccaccccc

SEQ ID NO: 4716 - DNA, 17 bp, synthetic construct
  misc_feature 1..17: note = Oligonucleotide
  source 1..17: mol_type = other DNA
cacccctctccaccacc

SEQ ID NO: 4717 - DNA, 17 bp, synthetic construct
  misc_feature 1..17: note = Oligonucleotide
  source 1..17: mol_type = other DNA
tcacacccctctccacc

SEQ ID NO: 4718 - DNA, 17 bp, synthetic construct
  misc_feature 1..17: note = Oligonucleotide
  source 1..17: mol_type = other DNA
ggatcacacccctctcc

SEQ ID NO: 4719 - DNA, 17 bp, synthetic construct
  misc_feature 1..17: note = Oligonucleotide
  source 1..17: mol_type = other DNA
ctaggatcacacccctc

SEQ ID NO: 4720 - DNA, 17 bp, synthetic construct
  misc_feature 1..17: note = Oligonucleotide
  source 1..17: mol_type = other DNA
cggctaggatcacaccc

SEQ ID NO: 4721 - DNA, 17 bp, synthetic construct
  misc_feature 1..17: note = Oligonucleotide
  source 1..17: mol_type = other DNA
cagcggctaggatcaca

SEQ ID NO: 4722 - DNA, 17 bp, synthetic construct
  misc_feature 1..17: note = Oligonucleotide
  source 1..17: mol_type = other DNA
catcagcggctaggatc

SEQ ID NO: 4723 - DNA, 17 bp, synthetic construct
  misc_feature 1..17: note = Oligonucleotide
  source 1..17: mol_type = other DNA
ttacatcagcggctagg

SEQ ID NO: 4724 - DNA, 17 bp, synthetic construct
  misc_feature 1..17: note = Oligonucleotide
  source 1..17: mol_type = other DNA
gaattacatcagcggct

SEQ ID NO: 4725 - DNA, 17 bp, synthetic construct
  misc_feature 1..17: note = Oligonucleotide
  source 1..17: mol_type = other DNA
cctgaattacatcagcg

SEQ ID NO: 4726 - DNA, 17 bp, synthetic construct
  misc_feature 1..17: note = Oligonucleotide
  source 1..17: mol_type = other DNA
tcccctgaattacatca

SEQ ID NO: 4727 - DNA, 17 bp, synthetic construct
  misc_feature 1..17: note = Oligonucleotide
  source 1..17: mol_type = other DNA
acctcccctgaattaca

SEQ ID NO: 4728 - DNA, 17 bp, synthetic construct
  misc_feature 1..17: note = Oligonucleotide
  source 1..17: mol_type = other DNA
gaaacctcccctgaatt

SEQ ID NO: 4729 - DNA, 17 bp, synthetic construct
  misc_feature 1..17: note = Oligonucleotide
  source 1..17: mol_type = other DNA
ccggaaacctcccctga

SEQ ID NO: 4730 - DNA, 17 bp, synthetic construct
  misc_feature 1..17: note = Oligonucleotide
  source 1..17: mol_type = other DNA
ggcccggaaacctcccc

SEQ ID NO: 4731 - DNA, 17 bp, synthetic construct
  misc_feature 1..17: note = Oligonucleotide
  source 1..17: mol_type = other DNA
aagggcccggaaacctc

SEQ ID NO: 4732 - DNA, 17 bp, synthetic construct
  misc_feature 1..17: note = Oligonucleotide
  source 1..17: mol_type = other DNA
agaaagggcccggaaac

SEQ ID NO: 4733 - DNA, 17 bp, synthetic construct
  misc_feature 1..17: note = Oligonucleotide
  source 1..17: mol_type = other DNA
cagagaaagggcccgga

SEQ ID NO: 4734 - DNA, 17 bp, synthetic construct
  misc_feature 1..17: note = Oligonucleotide
  source 1..17: mol_type = other DNA
ggccagagaaagggccc

SEQ ID NO: 4735 - DNA, 17 bp, synthetic construct
  misc_feature 1..17: note = Oligonucleotide
  source 1..17: mol_type = other DNA
cctggccagagaaaggg

SEQ ID NO: 4736 - DNA, 17 bp, synthetic construct
  misc_feature 1..17: note = Oligonucleotide
  source 1..17: mol_type = other DNA
caacctggccagagaaa

SEQ ID NO: 4737 - DNA, 17 bp, synthetic construct
  misc_feature 1..17: note = Oligonucleotide
  source 1..17: mol_type = other DNA
aaccaacctggccagag

SEQ ID NO: 4738 - DNA, 17 bp, synthetic construct
  misc_feature 1..17: note = Oligonucleotide
  source 1..17: mol_type = other DNA
gccaaccaacctggcca

SEQ ID NO: 4739 - DNA, 17 bp, synthetic construct
  misc_feature 1..17: note = Oligonucleotide
  source 1..17: mol_type = other DNA
agtgccaaccaacctgg

SEQ ID NO: 4740 - DNA, 17 bp, synthetic construct
  misc_feature 1..17: note = Oligonucleotide
  source 1..17: mol_type = other DNA
atcagtgccaaccaacc

SEQ ID NO: 4741 - DNA, 17 bp, synthetic construct
  misc_feature 1..17: note = Oligonucleotide
  source 1..17: mol_type = other DNA
gtcatcagtgccaacca

SEQ ID NO: 4742 - DNA, 17 bp, synthetic construct
  misc_feature 1..17: note = Oligonucleotide
  source 1..17: mol_type = other DNA
ctggtcatcagtgccaa

SEQ ID NO: 4743 - DNA, 17 bp, synthetic construct
  misc_feature 1..17: note = Oligonucleotide
  source 1..17: mol_type = other DNA
cacctggtcatcagtgc

SEQ ID NO: 4744 - DNA, 17 bp, synthetic construct
  misc_feature 1..17: note = Oligonucleotide
  source 1..17: mol_type = other DNA
gtccacctggtcatcag

SEQ ID NO: 4745 - DNA, 17 bp, synthetic construct
  misc_feature 1..17: note = Oligonucleotide
  source 1..17: mol_type = other DNA
cacgtccacctggtcat

SEQ ID NO: 4746 - DNA, 17 bp, synthetic construct
  misc_feature 1..17: note = Oligonucleotide
  source 1..17: mol_type = other DNA
gaccacgtccacctggt

SEQ ID NO: 4747 - DNA, 17 bp, synthetic construct
  misc_feature 1..17: note = Oligonucleotide
  source 1..17: mol_type = other DNA
agagaccacgtccacct

SEQ ID NO: 4748 - DNA, 17 bp, synthetic construct
  misc_feature 1..17: note = Oligonucleotide
  source 1..17: mol_type = other DNA
gtcagagaccacgtcca

SEQ ID NO: 4749 - DNA, 17 bp, synthetic construct
  misc_feature 1..17: note = Oligonucleotide
  source 1..17: mol_type = other DNA
caagtcagagaccacgt

SEQ ID NO: 4750 - DNA, 17 bp, synthetic construct
  misc_feature 1..17: note = Oligonucleotide
  source 1..17: mol_type = other DNA
ctccaagtcagagacca

SEQ ID NO: 4751 - DNA, 17 bp, synthetic construct
  misc_feature 1..17: note = Oligonucleotide
  source 1..17: mol_type = other DNA
aaactccaagtcagaga

SEQ ID NO: 4752 - DNA, 17 bp, synthetic construct
  misc_feature 1..17: note = Oligonucleotide
  source 1..17: mol_type = other DNA
aacaaactccaagtcag

SEQ ID NO: 4753 - DNA, 17 bp, synthetic construct
  misc_feature 1..17: note = Oligonucleotide
  source 1..17: mol_type = other DNA
cccaacaaactccaagt

SEQ ID NO: 4754 - DNA, 17 bp, synthetic construct
  misc_feature 1..17: note = Oligonucleotide
  source 1..17: mol_type = other DNA
ctccccaacaaactcca

SEQ ID NO: 4755 - DNA, 17 bp, synthetic construct
  misc_feature 1..17: note = Oligonucleotide
  source 1..17: mol_type = other DNA
cgactccccaacaaact

SEQ ID NO: 4756 - DNA, 17 bp, synthetic construct
  misc_feature 1..17: note = Oligonucleotide
  source 1..17: mol_type = other DNA
tcccgactccccaacaa

SEQ ID NO: 4757 - DNA, 17 bp, synthetic construct
  misc_feature 1..17: note = Oligonucleotide
  source 1..17: mol_type = other DNA
tattcccgactccccaa

SEQ ID NO: 4758 - DNA, 17 bp, synthetic construct
  misc_feature 1..17: note = Oligonucleotide
  source 1..17: mol_type = other DNA
caatattcccgactccc

SEQ ID NO: 4759 - DNA, 17 bp, synthetic construct
  misc_feature 1..17: note = Oligonucleotide
  source 1..17: mol_type = other DNA
ccacaatattcccgact

SEQ ID NO: 4760 - DNA, 17 bp, synthetic construct
  misc_feature 1..17: note = Oligonucleotide
  source 1..17: mol_type = other DNA
cccccacaatattcccg

SEQ ID NO: 4761 - DNA, 17 bp, synthetic construct
  misc_feature 1..17: note = Oligonucleotide
  source 1..17: mol_type = other DNA
aaacccccacaatattc

SEQ ID NO: 4762 - DNA, 17 bp, synthetic construct
  misc_feature 1..17: note = Oligonucleotide
  source 1..17: mol_type = other DNA
cgcaaacccccacaata

SEQ ID NO: 4763 - DNA, 17 bp, synthetic construct
  misc_feature 1..17: note = Oligonucleotide
  source 1..17: mol_type = other DNA
gtccgcaaacccccaca

SEQ ID NO: 4764 - DNA, 17 bp, synthetic construct
  misc_feature 1..17: note = Oligonucleotide
  source 1..17: mol_type = other DNA
ctggtccgcaaaccccc

SEQ ID NO: 4765 - DNA, 17 bp, synthetic construct
  misc_feature 1..17: note = Oligonucleotide
  source 1..17: mol_type = other DNA
ttcctggtccgcaaacc

SEQ ID NO: 4766 - DNA, 17 bp, synthetic construct
  misc_feature 1..17: note = Oligonucleotide
  source 1..17: mol_type = other DNA
ctgttcctggtccgcaa

SEQ ID NO: 4767 - DNA, 17 bp, synthetic construct
  misc_feature 1..17: note = Oligonucleotide
  source 1..17: mol_type = other DNA
gctctgttcctggtccg

SEQ ID NO: 4768 - DNA, 17 bp, synthetic construct
  misc_feature 1..17: note = Oligonucleotide
  source 1..17: mol_type = other DNA
ctggctctgttcctggt

SEQ ID NO: 4769 - DNA, 17 bp, synthetic construct
  misc_feature 1..17: note = Oligonucleotide
  source 1..17: mol_type = other DNA
gttctggctctgttcct

SEQ ID NO: 4770 - DNA, 17 bp, synthetic construct
  misc_feature 1..17: note = Oligonucleotide
  source 1..17: mol_type = other DNA
ggagttctggctctgtt

SEQ ID NO: 4771 - DNA, 17 bp, synthetic construct
  misc_feature 1..17: note = Oligonucleotide
  source 1..17: mol_type = other DNA
agaggagttctggctct

SEQ ID NO: 4772 - DNA, 17 bp, synthetic construct
  misc_feature 1..17: note = Oligonucleotide
  source 1..17: mol_type = other DNA
aatagaggagttctggc

SEQ ID NO: 4773 - DNA, 17 bp, synthetic construct
  misc_feature 1..17: note = Oligonucleotide
  source 1..17: mol_type = other DNA
gaaaatagaggagttct

SEQ ID NO: 4774 - DNA, 17 bp, synthetic construct
  misc_feature 1..17: note = Oligonucleotide
  source 1..17: mol_type = other DNA
actgaaaatagaggagt

SEQ ID NO: 4775 - DNA, 17 bp, synthetic construct
  misc_feature 1..17: note = Oligonucleotide
  source 1..17: mol_type = other DNA
cctactgaaaatagagg

SEQ ID NO: 4776 - DNA, 17 bp, synthetic construct
  misc_feature 1..17: note = Oligonucleotide
  source 1..17: mol_type = other DNA
actcctactgaaaatag

SEQ ID NO: 4777 - DNA, 17 bp, synthetic construct
  misc_feature 1..17: note = Oligonucleotide
  source 1..17: mol_type = other DNA
ctcactcctactgaaaa

SEQ ID NO: 4778 - DNA, 17 bp, synthetic construct
  misc_feature 1..17: note = Oligonucleotide
  source 1..17: mol_type = other DNA
catctcactcctactga

SEQ ID NO: 4779 - DNA, 17 bp, synthetic construct
  misc_feature 1..17: note = Oligonucleotide
  source 1..17: mol_type = other DNA
ccacatctcactcctac

SEQ ID NO: 4780 - DNA, 17 bp, synthetic construct
  misc_feature 1..17: note = Oligonucleotide
  source 1..17: mol_type = other DNA
ttcccacatctcactcc

SEQ ID NO: 4781 - DNA, 17 bp, synthetic construct
  misc_feature 1..17: note = Oligonucleotide
  source 1..17: mol_type = other DNA
ctcttcccacatctcac

SEQ ID NO: 4782 - DNA, 17 bp, synthetic construct
  misc_feature 1..17: note = Oligonucleotide
  source 1..17: mol_type = other DNA
ccactcttcccacatct

SEQ ID NO: 4783 - DNA, 17 bp, synthetic construct
  misc_feature 1..17: note = Oligonucleotide
  source 1..17: mol_type = other DNA
tgaccactcttcccaca

SEQ ID NO: 4784 - DNA, 17 bp, synthetic construct
  misc_feature 1..17: note = Oligonucleotide
  source 1..17: mol_type = other DNA
gcctgaccactcttccc

SEQ ID NO: 4785 - DNA, 17 bp, synthetic construct
  misc_feature 1..17: note = Oligonucleotide
  source 1..17: mol_type = other DNA
gcagcctgaccactctt

SEQ ID NO: 4786 - DNA, 17 bp, synthetic construct
  misc_feature 1..17: note = Oligonucleotide
  source 1..17: mol_type = other DNA
tcagcagcctgaccact

SEQ ID NO: 4787 - DNA, 17 bp, synthetic construct
  misc_feature 1..17: note = Oligonucleotide
  source 1..17: mol_type = other DNA
acctcagcagcctgacc

SEQ ID NO: 4788 - DNA, 17 bp, synthetic construct
  misc_feature 1..17: note = Oligonucleotide
  source 1..17: mol_type = other DNA
acaacctcagcagcctg

SEQ ID NO: 4789 - DNA, 17 bp, synthetic construct
  misc_feature 1..17: note = Oligonucleotide
  source 1..17: mol_type = other DNA
cacacaacctcagcagc

SEQ ID NO: 4790 - DNA, 17 bp, synthetic construct
  misc_feature 1..17: note = Oligonucleotide
  source 1..17: mol_type = other DNA
gaccacacaacctcagc

SEQ ID NO: 4791 - DNA, 17 bp, synthetic construct
  misc_feature 1..17: note = Oligonucleotide
  source 1..17: mol_type = other DNA
tatgaccacacaacctc

SEQ ID NO: 4792 - DNA, 17 bp, synthetic construct
  misc_feature 1..17: note = Oligonucleotide
  source 1..17: mol_type = other DNA
ttctatgaccacacaac

SEQ ID NO: 4793 - DNA, 17 bp, synthetic construct
  misc_feature 1..17: note = Oligonucleotide
  source 1..17: mol_type = other DNA
accttctatgaccacac

SEQ ID NO: 4794 - DNA, 17 bp, synthetic construct
  misc_feature 1..17: note = Oligonucleotide
  source 1..17: mol_type = other DNA
tccaccttctatgacca

SEQ ID NO: 4795 - DNA, 17 bp, synthetic construct
  misc_feature 1..17: note = Oligonucleotide
  source 1..17: mol_type = other DNA
gcctccaccttctatga

SEQ ID NO: 4796 - DNA, 17 bp, synthetic construct
  misc_feature 1..17: note = Oligonucleotide
  source 1..17: mol_type = other DNA
gctgcctccaccttcta

SEQ ID NO: 4797 - DNA, 17 bp, synthetic construct
  misc_feature 1..17: note = Oligonucleotide
  source 1..17: mol_type = other DNA
actgctgcctccacctt

SEQ ID NO: 4798 - DNA, 17 bp, synthetic construct
  misc_feature 1..17: note = Oligonucleotide
  source 1..17: mol_type = other DNA
cccactgctgcctccac

SEQ ID NO: 4799 - DNA, 17 bp, synthetic construct
  misc_feature 1..17: note = Oligonucleotide
  source 1..17: mol_type = other DNA
cagcccactgctgcctc

SEQ ID NO: 4800 - DNA, 17 bp, synthetic construct
  misc_feature 1..17: note = Oligonucleotide
  source 1..17: mol_type = other DNA
tggcagcccactgctgc

SEQ ID NO: 4801 - DNA, 17 bp, synthetic construct
  misc_feature 1..17: note = Oligonucleotide
  source 1..17: mol_type = other DNA
atctggcagcccactgc

SEQ ID NO: 4802 - DNA, 17 bp, synthetic construct
  misc_feature 1..17: note = Oligonucleotide
  source 1..17: mol_type = other DNA
cccatctggcagcccac

SEQ ID NO: 4803 - DNA, 17 bp, synthetic construct
  misc_feature 1..17: note = Oligonucleotide
  source 1..17: mol_type = other DNA
aaacccatctggcagcc

SEQ ID NO: 4804 - DNA, 17 bp, synthetic construct
  misc_feature 1..17: note = Oligonucleotide
  source 1..17: mol_type = other DNA
cccaaacccatctggca

SEQ ID NO: 4805 - DNA, 17 bp, synthetic construct
  misc_feature 1..17: note = Oligonucleotide
  source 1..17: mol_type = other DNA
gtgcccaaacccatctg

SEQ ID NO: 4806 - DNA, 17 bp, synthetic construct
  misc_feature 1..17: note = Oligonucleotide
  source 1..17: mol_type = other DNA
agtgtgcccaaacccat

SEQ ID NO: 4807 - DNA, 17 bp, synthetic construct
  misc_feature 1..17: note = Oligonucleotide
  source 1..17: mol_type = other DNA
cccagtgtgcccaaacc

SEQ ID NO: 4808 - DNA, 17 bp, synthetic construct
  misc_feature 1..17: note = Oligonucleotide
  source 1..17: mol_type = other DNA
cttcccagtgtgcccaa

SEQ ID NO: 4809 - DNA, 17 bp, synthetic construct
  misc_feature 1..17: note = Oligonucleotide
  source 1..17: mol_type = other DNA
ctgcttcccagtgtgcc

SEQ ID NO: 4810 - DNA, 17 bp, synthetic construct
  misc_feature 1..17: note = Oligonucleotide
  source 1..17: mol_type = other DNA
tatctgcttcccagtgt

SEQ ID NO: 4811 - DNA, 17 bp, synthetic construct
  misc_feature 1..17: note = Oligonucleotide
  source 1..17: mol_type = other DNA
gcgtatctgcttcccag

SEQ ID NO: 4812 - DNA, 17 bp, synthetic construct
  misc_feature 1..17: note = Oligonucleotide
  source 1..17: mol_type = other DNA
cgggcgtatctgcttcc

SEQ ID NO: 4813 - DNA, 17 bp, synthetic construct
  misc_feature 1..17: note = Oligonucleotide
  source 1..17: mol_type = other DNA
gcccgggcgtatctgct

SEQ ID NO: 4814 - DNA, 17 bp, synthetic construct
  misc_feature 1..17: note = Oligonucleotide
  source 1..17: mol_type = other DNA
caggcccgggcgtatct

SEQ ID NO: 4815 - DNA, 17 bp, synthetic construct
  misc_feature 1..17: note = Oligonucleotide
  source 1..17: mol_type = other DNA
caacaggcccgggcgta

SEQ ID NO: 4816 - DNA, 17 bp, synthetic construct
  misc_feature 1..17: note = Oligonucleotide
  source 1..17: mol_type = other DNA
atccaacaggcccgggc

SEQ ID NO: 4817 - DNA, 17 bp, synthetic construct
  misc_feature 1..17: note = Oligonucleotide
  source 1..17: mol_type = other DNA
gtcatccaacaggcccg

SEQ ID NO: 4818 - DNA, 17 bp, synthetic construct
  misc_feature 1..17: note = Oligonucleotide
  source 1..17: mol_type = other DNA
ccagtcatccaacaggc

SEQ ID NO: 4819 - DNA, 17 bp, synthetic construct
  misc_feature 1..17: note = Oligonucleotide
  source 1..17: mol_type = other DNA
cacccagtcatccaaca

SEQ ID NO: 4820 - DNA, 17 bp, synthetic construct
  misc_feature 1..17: note = Oligonucleotide
  source 1..17: mol_type = other DNA
ctgcacccagtcatcca

SEQ ID NO: 4821 - DNA, 17 bp, synthetic construct
  misc_feature 1..17: note = Oligonucleotide
  source 1..17: mol_type = other DNA
accctgcacccagtcat

SEQ ID NO: 4822 - DNA, 17 bp, synthetic construct
  misc_feature 1..17: note = Oligonucleotide
  source 1..17: mol_type = other DNA
gtgaccctgcacccagt

SEQ ID NO: 4823 - DNA, 17 bp, synthetic construct
  misc_feature 1..17: note = Oligonucleotide
  source 1..17: mol_type = other DNA
cctgtgaccctgcaccc

SEQ ID NO: 4824 - DNA, 17 bp, synthetic construct
  misc_feature 1..17: note = Oligonucleotide
  source 1..17: mol_type = other DNA
cttcctgtgaccctgca

SEQ ID NO: 4825 - DNA, 17 bp, synthetic construct
  misc_feature 1..17: note = Oligonucleotide
  source 1..17: mol_type = other DNA
ccccttcctgtgaccct

SEQ ID NO: 4826 - DNA, 17 bp, synthetic construct
  misc_feature 1..17: note = Oligonucleotide
  source 1..17: mol_type = other DNA
cctccccttcctgtgac

SEQ ID NO: 4827 - DNA, 17 bp, synthetic construct
  misc_feature 1..17: note = Oligonucleotide
  source 1..17: mol_type = other DNA
catcctccccttcctgt

SEQ ID NO: 4828 - DNA, 17 bp, synthetic construct
  misc_feature 1..17: note = Oligonucleotide
  source 1..17: mol_type = other DNA
gctcatcctccccttcc

SEQ ID NO: 4829 - DNA, 17 bp, synthetic construct
  misc_feature 1..17: note = Oligonucleotide
  source 1..17: mol_type = other DNA
caagctcatcctcccct

SEQ ID NO: 4830 - DNA, 17 bp, synthetic construct
  misc_feature 1..17: note = Oligonucleotide
  source 1..17: mol_type = other DNA
tgccaagctcatcctcc

SEQ ID NO: 4831 - DNA, 17 bp, synthetic construct
  misc_feature 1..17: note = Oligonucleotide
  source 1..17: mol_type = other DNA
agctgccaagctcatcc

SEQ ID NO: 4832 - DNA, 17 bp, synthetic construct
  misc_feature 1..17: note = Oligonucleotide
  source 1..17: mol_type = other DNA
ccaagctgccaagctca

SEQ ID NO: 4833 - DNA, 17 bp, synthetic construct
  misc_feature 1..17: note = Oligonucleotide
  source 1..17: mol_type = other DNA
tgcccaagctgccaagc

SEQ ID NO: 4834 - DNA, 17 bp, synthetic construct
  misc_feature 1..17: note = Oligonucleotide
  source 1..17: mol_type = other DNA
agctgcccaagctgcca

SEQ ID NO: 4835 - DNA, 17 bp, synthetic construct
  misc_feature 1..17: note = Oligonucleotide
  source 1..17: mol_type = other DNA
cgcagctgcccaagctg

SEQ ID NO: 4836 - DNA, 17 bp, synthetic construct
  misc_feature 1..17: note = Oligonucleotide
  source 1..17: mol_type = other DNA
ccccgcagctgcccaag

SEQ ID NO: 4837 - DNA, 17 bp, synthetic construct
  misc_feature 1..17: note = Oligonucleotide
  source 1..17: mol_type = other DNA
aggccccgcagctgccc

SEQ ID NO: 4838 - DNA, 17 bp, synthetic construct
  misc_feature 1..17: note = Oligonucleotide
  source 1..17: mol_type = other DNA
ccaaggccccgcagctg

SEQ ID NO: 4839 - DNA, 17 bp, synthetic construct
  misc_feature 1..17: note = Oligonucleotide
  source 1..17: mol_type = other DNA
cagccaaggccccgcag

SEQ ID NO: 4840 - DNA, 17 bp, synthetic construct
  misc_feature 1..17: note = Oligonucleotide
  source 1..17: mol_type = other DNA
tctcagccaaggccccg

SEQ ID NO: 4841 - DNA, 17 bp, synthetic construct
  misc_feature 1..17: note = Oligonucleotide
  source 1..17: mol_type = other DNA
ccatctcagccaaggcc

SEQ ID NO: 4842 - DNA, 17 bp, synthetic construct
  misc_feature 1..17: note = Oligonucleotide
  source 1..17: mol_type = other DNA
ttcccatctcagccaag

SEQ ID NO: 4843 - DNA, 17 bp, synthetic construct
  misc_feature 1..17: note = Oligonucleotide
  source 1..17: mol_type = other DNA
tgtttcccatctcagcc

SEQ ID NO: 4844 - DNA, 17 bp, synthetic construct
  misc_feature 1..17: note = Oligonucleotide
  source 1..17: mol_type = other DNA
ccatgtttcccatctca

SEQ ID NO: 4845 - DNA, 17 bp, synthetic construct
  misc_feature 1..17: note = Oligonucleotide
  source 1..17: mol_type = other DNA
cagccatgtttcccatc

SEQ ID NO: 4846 - DNA, 17 bp, synthetic construct
  misc_feature 1..17: note = Oligonucleotide
  source 1..17: mol_type = other DNA
atgcagccatgtttccc

SEQ ID NO: 4847 - DNA, 17 bp, synthetic construct
  misc_feature 1..17: note = Oligonucleotide
  source 1..17: mol_type = other DNA
aacatgcagccatgttt

SEQ ID NO: 4848 - DNA, 17 bp, synthetic construct
  misc_feature 1..17: note = Oligonucleotide
  source 1..17: mol_type = other DNA
cccaacatgcagccatg

SEQ ID NO: 4849 - DNA, 17 bp, synthetic construct
  misc_feature 1..17: note = Oligonucleotide
  source 1..17: mol_type = other DNA
tgtcccaacatgcagcc

SEQ ID NO: 4850 - DNA, 17 bp, synthetic construct
  misc_feature 1..17: note = Oligonucleotide
  source 1..17: mol_type = other DNA
gtctgtcccaacatgca

SEQ ID NO: 4851 - DNA, 17 bp, synthetic construct
  misc_feature 1..17: note = Oligonucleotide
  source 1..17: mol_type = other DNA
ctggtctgtcccaacat

SEQ ID NO: 4852 - DNA, 17 bp, synthetic construct
  misc_feature 1..17: note = Oligonucleotide
  source 1..17: mol_type = other DNA
acactggtctgtcccaa

SEQ ID NO: 4853 - DNA, 17 bp, synthetic construct
  misc_feature 1..17: note = Oligonucleotide
  source 1..17: mol_type = other DNA
ggcacactggtctgtcc

SEQ ID NO: 4854 - DNA, 17 bp, synthetic construct
  misc_feature 1..17: note = Oligonucleotide
  source 1..17: mol_type = other DNA
acgggcacactggtctg

SEQ ID NO: 4855 - DNA, 17 bp, synthetic construct
  misc_feature 1..17: note = Oligonucleotide
  source 1..17: mol_type = other DNA
caaacgggcacactggt

SEQ ID NO: 4856 - DNA, 17 bp, synthetic construct
  misc_feature 1..17: note = Oligonucleotide
  source 1..17: mol_type = other DNA
aagcaaacgggcacact

SEQ ID NO: 4857 - DNA, 17 bp, synthetic construct
  misc_feature 1..17: note = Oligonucleotide
  source 1..17: mol_type = other DNA
cccaagcaaacgggcac

SEQ ID NO: 4858 - DNA, 17 bp, synthetic construct
  misc_feature 1..17: note = Oligonucleotide
  source 1..17: mol_type = other DNA
agtcccaagcaaacggg

SEQ ID NO: 4859 - DNA, 17 bp, synthetic construct
  misc_feature 1..17: note = Oligonucleotide
  source 1..17: mol_type = other DNA
agcagtcccaagcaaac

SEQ ID NO: 4860 - DNA, 17 bp, synthetic construct
  misc_feature 1..17: note = Oligonucleotide
  source 1..17: mol_type = other DNA
accagcagtcccaagca

SEQ ID NO: 4861 - DNA, 17 bp, synthetic construct
  misc_feature 1..17: note = Oligonucleotide
  source 1..17: mol_type = other DNA
aaaaccagcagtcccaa

SEQ ID NO: 4862 - DNA, 17 bp, synthetic construct
  misc_feature 1..17: note = Oligonucleotide
  source 1..17: mol_type = other DNA
gctaaaaccagcagtcc

SEQ ID NO: 4863 - DNA, 17 bp, synthetic construct
  misc_feature 1..17: note = Oligonucleotide
  source 1..17: mol_type = other DNA
agagctaaaaccagcag

SEQ ID NO: 4864 - DNA, 17 bp, synthetic construct
  misc_feature 1..17: note = Oligonucleotide
  source 1..17: mol_type = other DNA
ttcagagctaaaaccag

SEQ ID NO: 4865 - DNA, 17 bp, synthetic construct
  misc_feature 1..17: note = Oligonucleotide
  source 1..17: mol_type = other DNA
aagttcagagctaaaac

SEQ ID NO: 4866 - DNA, 17 bp, synthetic construct
  misc_feature 1..17: note = Oligonucleotide
  source 1..17: mol_type = other DNA
cagaagttcagagctaa

SEQ ID NO: 4867 - DNA, 17 bp, synthetic construct
  misc_feature 1..17: note = Oligonucleotide
  source 1..17: mol_type = other DNA
ggacagaagttcagagc

SEQ ID NO: 4868 - DNA, 17 bp, synthetic construct
  misc_feature 1..17: note = Oligonucleotide
  source 1..17: mol_type = other DNA
cctggacagaagttcag

SEQ ID NO: 4869 - DNA, 17 bp, synthetic construct
  misc_feature 1..17: note = Oligonucleotide
  source 1..17: mol_type = other DNA
ctgcctggacagaagtt

SEQ ID NO: 4870 - DNA, 17 bp, synthetic construct
  misc_feature 1..17: note = Oligonucleotide
  source 1..17: mol_type = other DNA
gggctgcctggacagaa

SEQ ID NO: 4871 - DNA, 17 bp, synthetic construct
  misc_feature 1..17: note = Oligonucleotide
  source 1..17: mol_type = other DNA
gaggggctgcctggaca

SEQ ID NO: 4872 - DNA, 17 bp, synthetic construct
  misc_feature 1..17: note = Oligonucleotide
  source 1..17: mol_type = other DNA
actgaggggctgcctgg

SEQ ID NO: 4873 - DNA, 17 bp, synthetic construct
  misc_feature 1..17: note = Oligonucleotide
  source 1..17: mol_type = other DNA
gggactgaggggctgcc

SEQ ID NO: 4874 - DNA, 17 bp, synthetic construct
  misc_feature 1..17: note = Oligonucleotide
  source 1..17: mol_type = other DNA
cctgggactgaggggct

SEQ ID NO: 4875 - DNA, 17 bp, synthetic construct
  misc_feature 1..17: note = Oligonucleotide
  source 1..17: mol_type = other DNA
ctgcctgggactgaggg

SEQ ID NO: 4876 - DNA, 17 bp, synthetic construct
  misc_feature 1..17: note = Oligonucleotide
  source 1..17: mol_type = other DNA
tgtctgcctgggactga

SEQ ID NO: 4877 - DNA, 17 bp, synthetic construct
  misc_feature 1..17: note = Oligonucleotide
  source 1..17: mol_type = other DNA
ctctgtctgcctgggac

SEQ ID NO: 4878 - DNA, 17 bp, synthetic construct
  misc_feature 1..17: note = Oligonucleotide
  source 1..17: mol_type = other DNA
accctctgtctgcctgg

SEQ ID NO: 4879 - DNA, 17 bp, synthetic construct
  misc_feature 1..17: note = Oligonucleotide
  source 1..17: mol_type = other DNA
cccaccctctgtctgcc

SEQ ID NO: 4880 - DNA, 17 bp, synthetic construct
  misc_feature 1..17: note = Oligonucleotide
  source 1..17: mol_type = other DNA
tgacccaccctctgtct

SEQ ID NO: 4881 - DNA, 17 bp, synthetic construct
  misc_feature 1..17: note = Oligonucleotide
  source 1..17: mol_type = other DNA
gagtgacccaccctctg

SEQ ID NO: 4882 - DNA, 17 bp, synthetic construct
  misc_feature 1..17: note = Oligonucleotide
  source 1..17: mol_type = other DNA
ctggagtgacccaccct

SEQ ID NO: 4883 - DNA, 17 bp, synthetic construct
  misc_feature 1..17: note = Oligonucleotide
  source 1..17: mol_type = other DNA
taactggagtgacccac

SEQ ID NO: 4884 - DNA, 17 bp, synthetic construct
  misc_feature 1..17: note = Oligonucleotide
  source 1..17: mol_type = other DNA
ctataactggagtgacc

SEQ ID NO: 4885 - DNA, 17 bp, synthetic construct
  misc_feature 1..17: note = Oligonucleotide
  source 1..17: mol_type = other DNA
accctataactggagtg

SEQ ID NO: 4886 - DNA, 17 bp, synthetic construct
  misc_feature 1..17: note = Oligonucleotide
  source 1..17: mol_type = other DNA
cacaccctataactgga

SEQ ID NO: 4887 - DNA, 17 bp, synthetic construct
  misc_feature 1..17: note = Oligonucleotide
  source 1..17: mol_type = other DNA
aggcacaccctataact

SEQ ID NO: 4888 - DNA, 17 bp, synthetic construct
  misc_feature 1..17: note = Oligonucleotide
  source 1..17: mol_type = other DNA
cacaggcacaccctata

SEQ ID NO: 4889 - DNA, 17 bp, synthetic construct
  misc_feature 1..17: note = Oligonucleotide
  source 1..17: mol_type = other DNA
tgccacaggcacaccct

SEQ ID NO: 4890 - DNA, 17 bp, synthetic construct
  misc_feature 1..17: note = Oligonucleotide
  source 1..17: mol_type = other DNA
ggatgccacaggcacac

SEQ ID NO: 4891 - DNA, 17 bp, synthetic construct
  misc_feature 1..17: note = Oligonucleotide
  source 1..17: mol_type = other DNA
ctgggatgccacaggca

SEQ ID NO: 4892 - DNA, 17 bp, synthetic construct
  misc_feature 1..17: note = Oligonucleotide
  source 1..17: mol_type = other DNA
taactgggatgccacag

SEQ ID NO: 4893 - DNA, 17 bp, synthetic construct
  misc_feature 1..17: note = Oligonucleotide
  source 1..17: mol_type = other DNA
ctgtaactgggatgcca

SEQ ID NO: 4894 - DNA, 17 bp, synthetic construct
  misc_feature 1..17: note = Oligonucleotide
  source 1..17: mol_type = other DNA
tgtctgtaactgggatg

SEQ ID NO: 4895 - DNA, 17 bp, synthetic construct
  misc_feature 1..17: note = Oligonucleotide
  source 1..17: mol_type = other DNA
tcttgtctgtaactggg

SEQ ID NO: 4896 - DNA, 17 bp, synthetic construct
  misc_feature 1..17: note = Oligonucleotide
  source 1..17: mol_type = other DNA
cactcttgtctgtaact

SEQ ID NO: 4897 - DNA, 17 bp, synthetic construct
  misc_feature 1..17: note = Oligonucleotide
  source 1..17: mol_type = other DNA
acacactcttgtctgta

SEQ ID NO: 4898 - DNA, 17 bp, synthetic construct
  misc_feature 1..17: note = Oligonucleotide
  source 1..17: mol_type = other DNA
gacacacactcttgtct

SEQ ID NO: 4899 - DNA, 17 bp, synthetic construct
  misc_feature 1..17: note = Oligonucleotide
  source 1..17: mol_type = other DNA
actgacacacactcttg

SEQ ID NO: 4900 - DNA, 17 bp, synthetic construct
  misc_feature 1..17: note = Oligonucleotide
  source 1..17: mol_type = other DNA
tctactgacacacactc

SEQ ID NO: 4901 - DNA, 17 bp, synthetic construct
  misc_feature 1..17: note = Oligonucleotide
  source 1..17: mol_type = other DNA
ttctctactgacacaca

SEQ ID NO: 4902 - DNA, 17 bp, synthetic construct
  misc_feature 1..17: note = Oligonucleotide
  source 1..17: mol_type = other DNA
ctcttctctactgacac

SEQ ID NO: 4903 - DNA, 17 bp, synthetic construct
  misc_feature 1..17: note = Oligonucleotide
  source 1..17: mol_type = other DNA
ttcctcttctctactga

SEQ ID NO: 4904 - DNA, 17 bp, synthetic construct
  misc_feature 1..17: note = Oligonucleotide
  source 1..17: mol_type = other DNA
ccattcctcttctctac

SEQ ID NO: 4905 - DNA, 17 bp, synthetic construct
  misc_feature 1..17: note = Oligonucleotide
  source 1..17: mol_type = other DNA
agcccattcctcttctc

SEQ ID NO: 4906 - DNA, 17 bp, synthetic construct
  misc_feature 1..17: note = Oligonucleotide
  source 1..17: mol_type = other DNA
cccagcccattcctctt

SEQ ID NO: 4907 - DNA, 17 bp, synthetic construct
  misc_feature 1..17: note = Oligonucleotide
  source 1..17: mol_type = other DNA
gaccccagcccattcct

SEQ ID NO: 4908 - DNA, 17 bp, synthetic construct
  misc_feature 1..17: note = Oligonucleotide
  source 1..17: mol_type = other DNA
ggagaccccagcccatt

SEQ ID NO: 4909 - DNA, 17 bp, synthetic construct
  misc_feature 1..17: note = Oligonucleotide
  source 1..17: mol_type = other DNA
cccggagaccccagccc

SEQ ID NO: 4910 - DNA, 17 bp, synthetic construct
  misc_feature 1..17: note = Oligonucleotide
  source 1..17: mol_type = other DNA
ggccccggagaccccag

SEQ ID NO: 4911 - DNA, 17 bp, synthetic construct
  misc_feature 1..17: note = Oligonucleotide
  source 1..17: mol_type = other DNA
gggggccccggagaccc

SEQ ID NO: 4912 - DNA, 17 bp, synthetic construct
  misc_feature 1..17: note = Oligonucleotide
  source 1..17: mol_type = other DNA
gttgggggccccggaga

SEQ ID NO: 4913 - DNA, 17 bp, synthetic construct
  misc_feature 1..17: note = Oligonucleotide
  source 1..17: mol_type = other DNA
ttggttgggggccccgg

SEQ ID NO: 4914 - DNA, 17 bp, synthetic construct
  misc_feature 1..17: note = Oligonucleotide
  source 1..17: mol_type = other DNA
tccttggttgggggccc

SEQ ID NO: 4915 - DNA, 17 bp, synthetic construct
  misc_feature 1..17: note = Oligonucleotide
  source 1..17: mol_type = other DNA
tcttccttggttggggg

SEQ ID NO: 4916 - DNA, 17 bp, synthetic construct
  misc_feature 1..17: note = Oligonucleotide
  source 1..17: mol_type = other DNA
gagtcttccttggttgg

SEQ ID NO: 4917 - DNA, 17 bp, synthetic construct
  misc_feature 1..17: note = Oligonucleotide
  source 1..17: mol_type = other DNA
gtggagtcttccttggt

SEQ ID NO: 4918 - DNA, 17 bp, synthetic construct
  misc_feature 1..17: note = Oligonucleotide
  source 1..17: mol_type = other DNA
tgtgtggagtcttcctt

SEQ ID NO: 4919 - DNA, 17 bp, synthetic construct
  misc_feature 1..17: note = Oligonucleotide
  source 1..17: mol_type = other DNA
tcgtgtgtggagtcttc

SEQ ID NO: 4920 - DNA, 17 bp, synthetic construct
  misc_feature 1..17: note = Oligonucleotide
  source 1..17: mol_type = other DNA
agttcgtgtgtggagtc

SEQ ID NO: 4921 - DNA, 17 bp, synthetic construct
  misc_feature 1..17: note = Oligonucleotide
  source 1..17: mol_type = other DNA
tccagttcgtgtgtgga

SEQ ID NO: 4922 - DNA, 17 bp, synthetic construct
  misc_feature 1..17: note = Oligonucleotide
  source 1..17: mol_type = other DNA
ttctccagttcgtgtgt

SEQ ID NO: 4923 - DNA, 17 bp, synthetic construct
  misc_feature 1..17: note = Oligonucleotide
  source 1..17: mol_type = other DNA
tccttctccagttcgtg

SEQ ID NO: 4924 - DNA, 17 bp, synthetic construct
  misc_feature 1..17: note = Oligonucleotide
  source 1..17: mol_type = other DNA
tgctccttctccagttc

SEQ ID NO: 4925 - DNA, 17 bp, synthetic construct
  misc_feature 1..17: note = Oligonucleotide
  source 1..17: mol_type = other DNA
agctgctccttctccag

SEQ ID NO: 4926 - DNA, 17 bp, synthetic construct
  misc_feature 1..17: note = Oligonucleotide
  source 1..17: mol_type = other DNA
cccagctgctccttctc

SEQ ID NO: 4927 - DNA, 17 bp, synthetic construct
  misc_feature 1..17: note = Oligonucleotide
  source 1..17: mol_type = other DNA
agccccagctgctcctt

SEQ ID NO: 4928 - DNA, 17 bp, synthetic construct
  misc_feature 1..17: note = Oligonucleotide
  source 1..17: mol_type = other DNA
gccagccccagctgctc

SEQ ID NO: 4929 - DNA, 17 bp, synthetic construct
  misc_feature 1..17: note = Oligonucleotide
  source 1..17: mol_type = other DNA
ccagccagccccagctg

SEQ ID NO: 4930 - DNA, 17 bp, synthetic construct
  misc_feature 1..17: note = Oligonucleotide
  source 1..17: mol_type = other DNA
tcgccagccagccccag

SEQ ID NO: 4931 - DNA, 17 bp, synthetic construct
  misc_feature 1..17: note = Oligonucleotide
  source 1..17: mol_type = other DNA
gcctcgccagccagccc

SEQ ID NO: 4932 - DNA, 17 bp, synthetic construct
  misc_feature 1..17: note = Oligonucleotide
  source 1..17: mol_type = other DNA
tttgcctcgccagccag

SEQ ID NO: 4933 - DNA, 17 bp, synthetic construct
  misc_feature 1..17: note = Oligonucleotide
  source 1..17: mol_type = other DNA
agctttgcctcgccagc

SEQ ID NO: 4934 - DNA, 17 bp, synthetic construct
  misc_feature 1..17: note = Oligonucleotide
  source 1..17: mol_type = other DNA
accagctttgcctcgcc

SEQ ID NO: 4935 - DNA, 17 bp, synthetic construct
  misc_feature 1..17: note = Oligonucleotide
  source 1..17: mol_type = other DNA
agcaccagctttgcctc

SEQ ID NO: 4936 - DNA, 17 bp, synthetic construct
  misc_feature 1..17: note = Oligonucleotide
  source 1..17: mol_type = other DNA
agcagcaccagctttgc

SEQ ID NO: 4937 - DNA, 17 bp, synthetic construct
  misc_feature 1..17: note = Oligonucleotide
  source 1..17: mol_type = other DNA
ctgagcagcaccagctt

SEQ ID NO: 4938 - DNA, 17 bp, synthetic construct
  misc_feature 1..17: note = Oligonucleotide
  source 1..17: mol_type = other DNA
gggctgagcagcaccag

SEQ ID NO: 4939 - DNA, 17 bp, synthetic construct
  misc_feature 1..17: note = Oligonucleotide
  source 1..17: mol_type = other DNA
gaggggctgagcagcac

SEQ ID NO: 4940 - DNA, 17 bp, synthetic construct
  misc_feature 1..17: note = Oligonucleotide
  source 1..17: mol_type = other DNA
agggaggggctgagcag

SEQ ID NO: 4941 - DNA, 17 bp, synthetic construct
  misc_feature 1..17: note = Oligonucleotide
  source 1..17: mol_type = other DNA
agcagggaggggctgag

SEQ ID NO: 4942 - DNA, 17 bp, synthetic construct
  misc_feature 1..17: note = Oligonucleotide
  source 1..17: mol_type = other DNA
aggagcagggaggggct

SEQ ID NO: 4943 - DNA, 17 bp, synthetic construct
  misc_feature 1..17: note = Oligonucleotide
  source 1..17: mol_type = other DNA
ttgaggagcagggaggg

SEQ ID NO: 4944 - DNA, 17 bp, synthetic construct
  misc_feature 1..17: note = Oligonucleotide
  source 1..17: mol_type = other DNA
gccttgaggagcaggga

SEQ ID NO: 4945 - DNA, 17 bp, synthetic construct
  misc_feature 1..17: note = Oligonucleotide
  source 1..17: mol_type = other DNA
aaggccttgaggagcag

SEQ ID NO: 4946 - DNA, 17 bp, synthetic construct
  misc_feature 1..17: note = Oligonucleotide
  source 1..17: mol_type = other DNA
gtcaaggccttgaggag

SEQ ID NO: 4947 - DNA, 17 bp, synthetic construct
  misc_feature 1..17: note = Oligonucleotide
  source 1..17: mol_type = other DNA
gaggtcaaggccttgag

SEQ ID NO: 4948 - DNA, 17 bp, synthetic construct
  misc_feature 1..17: note = Oligonucleotide
  source 1..17: mol_type = other DNA
ggggaggtcaaggcctt

SEQ ID NO: 4949 - DNA, 17 bp, synthetic construct
  misc_feature 1..17: note = Oligonucleotide
  source 1..17: mol_type = other DNA
aaaggggaggtcaaggc

SEQ ID NO: 4950 - DNA, 17 bp, synthetic construct
  misc_feature 1..17: note = Oligonucleotide
  source 1..17: mol_type = other DNA
gggaaaggggaggtcaa

SEQ ID NO: 4951 - DNA, 17 bp, synthetic construct
  misc_feature 1..17: note = Oligonucleotide
  source 1..17: mol_type = other DNA
tgagggaaaggggaggt

SEQ ID NO: 4952 - DNA, 25 bp, synthetic construct
  misc_feature 1..25: note = Oligonucleotide
  source 1..25: mol_type = other DNA
ctggggacacaggcagatgactcac

SEQ ID NO: 4953 - DNA, 25 bp, synthetic construct
  misc_feature 1..25: note = Oligonucleotide
  source 1..25: mol_type = other DNA
gccctggggacacaggcagatgact

SEQ ID NO: 4954 - DNA, 25 bp, synthetic construct
  misc_feature 1..25: note = Oligonucleotide
  source 1..25: mol_type = other DNA
aaggccctggggacacaggcagatg

SEQ ID NO: 4955 - DNA, 25 bp, synthetic construct
  misc_feature 1..25: note = Oligonucleotide
  source 1..25: mol_type = other DNA
gccaaggccctggggacacaggcag

SEQ ID NO: 4956 - DNA, 25 bp, synthetic construct
  misc_feature 1..25: note = Oligonucleotide
  source 1..25: mol_type = other DNA
aaagccaaggccctggggacacagg

SEQ ID NO: 4957 - DNA, 25 bp, synthetic construct
  misc_feature 1..25: note = Oligonucleotide
  source 1..25: mol_type = other DNA
ggcaaagccaaggccctggggacac

SEQ ID NO: 4958 - DNA, 25 bp, synthetic construct
  misc_feature 1..25: note = Oligonucleotide
  source 1..25: mol_type = other DNA
tcaggcaaagccaaggccctgggga

SEQ ID NO: 4959 - DNA, 25 bp, synthetic construct
  misc_feature 1..25: note = Oligonucleotide
  source 1..25: mol_type = other DNA
gggtcaggcaaagccaaggccctgg

SEQ ID NO: 4960 - DNA, 25 bp, synthetic construct
  misc_feature 1..25: note = Oligonucleotide
  source 1..25: mol_type = other DNA
caggggtcaggcaaagccaaggccc

SEQ ID NO: 4961 - DNA, 25 bp, synthetic construct
  misc_feature 1..25: note = Oligonucleotide
  source 1..25: mol_type = other DNA
agacaggggtcaggcaaagccaagg

SEQ ID NO: 4962 - DNA, 25 bp, synthetic construct
  misc_feature 1..25: note = Oligonucleotide
  source 1..25: mol_type = other DNA
cccagacaggggtcaggcaaagcca

SEQ ID NO: 4963 - DNA, 25 bp, synthetic construct
  misc_feature 1..25: note = Oligonucleotide
  source 1..25: mol_type = other DNA
tcccccagacaggggtcaggcaaag

SEQ ID NO: 4964 - DNA, 25 bp, synthetic construct
  misc_feature 1..25: note = Oligonucleotide
  source 1..25: mol_type = other DNA
cactcccccagacaggggtcaggca

SEQ ID NO: 4965 - DNA, 25 bp, synthetic construct
  misc_feature 1..25: note = Oligonucleotide
  source 1..25: mol_type = other DNA
cagcactcccccagacaggggtcag

SEQ ID NO: 4966 - DNA, 25 bp, synthetic construct
  misc_feature 1..25: note = Oligonucleotide
  source 1..25: mol_type = other DNA
caccagcactcccccagacaggggt

SEQ ID NO: 4967 - DNA, 25 bp, synthetic construct
  misc_feature 1..25: note = Oligonucleotide
  source 1..25: mol_type = other DNA
acacaccagcactcccccagacagg

SEQ ID NO: 4968 - DNA, 25 bp, synthetic construct
  misc_feature 1..25: note = Oligonucleotide
  source 1..25: mol_type = other DNA
ctcacacaccagcactcccccagac

SEQ ID NO: 4969 - DNA, 25 bp, synthetic construct
  misc_feature 1..25: note = Oligonucleotide
  source 1..25: mol_type = other DNA
ctcctcacacaccagcactccccca

SEQ ID NO: 4970 - DNA, 25 bp, synthetic construct
  misc_feature 1..25: note = Oligonucleotide
  source 1..25: mol_type = other DNA
aacctcctcacacaccagcactccc

SEQ ID NO: 4971 - DNA, 25 bp, synthetic construct
  misc_feature 1..25: note = Oligonucleotide
  source 1..25: mol_type = other DNA
tggaacctcctcacacaccagcact

SEQ ID NO: 4972 - DNA, 25 bp, synthetic construct
  misc_feature 1..25: note = Oligonucleotide
  source 1..25: mol_type = other DNA
cgctggaacctcctcacacaccagc

SEQ ID NO: 4973 - DNA, 25 bp, synthetic construct
  misc_feature 1..25: note = Oligonucleotide
  source 1..25: mol_type = other DNA
ttgcgctggaacctcctcacacacc

SEQ ID NO: 4974 - DNA, 25 bp, synthetic construct
  misc_feature 1..25: note = Oligonucleotide
  source 1..25: mol_type = other DNA
gacttgcgctggaacctcctcacac

SEQ ID NO: 4975 - DNA, 25 bp, synthetic construct
  misc_feature 1..25: note = Oligonucleotide
  source 1..25: mol_type = other DNA
cctgacttgcgctggaacctcctca

SEQ ID NO: 4976 - DNA, 25 bp, synthetic construct
  misc_feature 1..25: note = Oligonucleotide
  source 1..25: mol_type = other DNA
caccctgacttgcgctggaacctcc

SEQ ID NO: 4977 - DNA, 25 bp, synthetic construct
  misc_feature 1..25: note = Oligonucleotide
  source 1..25: mol_type = other DNA
ggccaccctgacttgcgctggaacc

SEQ ID NO: 4978 - DNA, 25 bp, synthetic construct
  misc_feature 1..25: note = Oligonucleotide
  source 1..25: mol_type = other DNA
ccaggccaccctgacttgcgctgga

SEQ ID NO: 4979 - DNA, 25 bp, synthetic construct
  misc_feature 1..25: note = Oligonucleotide
  source 1..25: mol_type = other DNA
cttccaggccaccctgacttgcgct

SEQ ID NO: 4980 - DNA, 25 bp, synthetic construct
  misc_feature 1..25: note = Oligonucleotide
  source 1..25: mol_type = other DNA
aggcttccaggccaccctgacttgc

SEQ ID NO: 4981 - DNA, 25 bp, synthetic construct
  misc_feature 1..25: note = Oligonucleotide
  source 1..25: mol_type = other DNA
cccaggcttccaggccaccctgact

SEQ ID NO: 4982 - DNA, 25 bp, synthetic construct
  misc_feature 1..25: note = Oligonucleotide
  source 1..25: mol_type = other DNA
cagcccaggcttccaggccaccctg

SEQ ID NO: 4983 - DNA, 25 bp, synthetic construct
  misc_feature 1..25: note = Oligonucleotide
  source 1..25: mol_type = other DNA
gtgcagcccaggcttccaggccacc

SEQ ID NO: 4984 - DNA, 25 bp, synthetic construct
  misc_feature 1..25: note = Oligonucleotide
  source 1..25: mol_type = other DNA
agggtgcagcccaggcttccaggcc

SEQ ID NO: 4985 - DNA, 25 bp, synthetic construct
  misc_feature 1..25: note = Oligonucleotide
  source 1..25: mol_type = other DNA
aggagggtgcagcccaggcttccag

SEQ ID NO: 4986 - DNA, 25 bp, synthetic construct
  misc_feature 1..25: note = Oligonucleotide
  source 1..25: mol_type = other DNA
aacaggagggtgcagcccaggcttc

SEQ ID NO: 4987 - DNA, 25 bp, synthetic construct
  misc_feature 1..25: note = Oligonucleotide
  source 1..25: mol_type = other DNA
gccaacaggagggtgcagcccaggc

SEQ ID NO: 4988 - DNA, 25 bp, synthetic construct
  misc_feature 1..25: note = Oligonucleotide
  source 1..25: mol_type = other DNA
aaggccaacaggagggtgcagccca

SEQ ID NO: 4989 - DNA, 25 bp, synthetic construct
  misc_feature 1..25: note = Oligonucleotide
  source 1..25: mol_type = other DNA
gagaaggccaacaggagggtgcagc

SEQ ID NO: 4990 - DNA, 25 bp, synthetic construct
  misc_feature 1..25: note = Oligonucleotide
  source 1..25: mol_type = other DNA
agggagaaggccaacaggagggtgc

SEQ ID NO: 4991 - DNA, 25 bp, synthetic construct
  misc_feature 1..25: note = Oligonucleotide
  source 1..25: mol_type = other DNA
cccagggagaaggccaacaggaggg

SEQ ID NO: 4992 - DNA, 25 bp, synthetic construct
  misc_feature 1..25: note = Oligonucleotide
  source 1..25: mol_type = other DNA
atgcccagggagaaggccaacagga

SEQ ID NO: 4993 - DNA, 25 bp, synthetic construct
  misc_feature 1..25: note = Oligonucleotide
  source 1..25: mol_type = other DNA
cagatgcccagggagaaggccaaca

SEQ ID NO: 4994 - DNA, 25 bp, synthetic construct
  misc_feature 1..25: note = Oligonucleotide
  source 1..25: mol_type = other DNA
taccagatgcccagggagaaggcca

SEQ ID NO: 4995 - DNA, 25 bp, synthetic construct
  misc_feature 1..25: note = Oligonucleotide
  source 1..25: mol_type = other DNA
ccctaccagatgcccagggagaagg

SEQ ID NO: 4996 - DNA, 25 bp, synthetic construct
  misc_feature 1..25: note = Oligonucleotide
  source 1..25: mol_type = other DNA
tgcccctaccagatgcccagggaga

SEQ ID NO: 4997 - DNA, 25 bp, synthetic construct
  misc_feature 1..25: note = Oligonucleotide
  source 1..25: mol_type = other DNA
tcatgcccctaccagatgcccaggg

SEQ ID NO: 4998 - DNA, 25 bp, synthetic construct
  misc_feature 1..25: note = Oligonucleotide
  source 1..25: mol_type = other DNA
ctctcatgcccctaccagatgccca

SEQ ID NO: 4999 - DNA, 25 bp, synthetic construct
  misc_feature 1..25: note = Oligonucleotide
  source 1..25: mol_type = other DNA
cttctctcatgcccctaccagatgc

SEQ ID NO: 5000 - DNA, 25 bp, synthetic construct
  misc_feature 1..25: note = Oligonucleotide
  source 1..25: mol_type = other DNA
gcccttctctcatgcccctaccaga

SEQ ID NO: 5001 - DNA, 25 bp, synthetic construct
  misc_feature 1..25: note = Oligonucleotide
  source 1..25: mol_type = other DNA
caggcccttctctcatgcccctacc

SEQ ID NO: 5002 - DNA, 25 bp, synthetic construct
  misc_feature 1..25: note = Oligonucleotide
  source 1..25: mol_type = other DNA
ttgcaggcccttctctcatgcccct

SEQ ID NO: 5003 - DNA, 25 bp, synthetic construct
  misc_feature 1..25: note = Oligonucleotide
  source 1..25: mol_type = other DNA
tccttgcaggcccttctctcatgcc

SEQ ID NO: 5004 - DNA, 25 bp, synthetic construct
  misc_feature 1..25: note = Oligonucleotide
  source 1..25: mol_type = other DNA
ccatccttgcaggcccttctctcat

SEQ ID NO: 5005 - DNA, 25 bp, synthetic construct
  misc_feature 1..25: note = Oligonucleotide
  source 1..25: mol_type = other DNA
catccatccttgcaggcccttctct

SEQ ID NO: 5006 - DNA, 25 bp, synthetic construct
  misc_feature 1..25: note = Oligonucleotide
  source 1..25: mol_type = other DNA
ccccatccatccttgcaggcccttc

SEQ ID NO: 5007 - DNA, 25 bp, synthetic construct
  misc_feature 1..25: note = Oligonucleotide
  source 1..25: mol_type = other DNA
actccccatccatccttgcaggccc

SEQ ID NO: 5008 - DNA, 25 bp, synthetic construct
  misc_feature 1..25: note = Oligonucleotide
  source 1..25: mol_type = other DNA
ggaactccccatccatccttgcagg

SEQ ID NO: 5009 - DNA, 25 bp, synthetic construct
  misc_feature 1..25: note = Oligonucleotide
  source 1..25: mol_type = other DNA
ctgggaactccccatccatccttgc

SEQ ID NO: 5010 - DNA, 25 bp, synthetic construct
  misc_feature 1..25: note = Oligonucleotide
  source 1..25: mol_type = other DNA
cccctgggaactccccatccatcct

SEQ ID NO: 5011 - DNA, 25 bp, synthetic construct
  misc_feature 1..25: note = Oligonucleotide
  source 1..25: mol_type = other DNA
acacccctgggaactccccatccat

SEQ ID NO: 5012 - DNA, 25 bp, synthetic construct
  misc_feature 1..25: note = Oligonucleotide
  source 1..25: mol_type = other DNA
gtcacacccctgggaactccccatc

SEQ ID NO: 5013 - DNA, 25 bp, synthetic construct
  misc_feature 1..25: note = Oligonucleotide
  source 1..25: mol_type = other DNA
agggtcacacccctgggaactcccc

SEQ ID NO: 5014 - DNA, 25 bp, synthetic construct
  misc_feature 1..25: note = Oligonucleotide
  source 1..25: mol_type = other DNA
cagagggtcacacccctgggaactc

SEQ ID NO: 5015 - DNA, 25 bp, synthetic construct
  misc_feature 1..25: note = Oligonucleotide
  source 1..25: mol_type = other DNA
tctcagagggtcacacccctgggaa

SEQ ID NO: 5016 - DNA, 25 bp, synthetic construct
  misc_feature 1..25: note = Oligonucleotide
  source 1..25: mol_type = other DNA
cagtctcagagggtcacacccctgg

SEQ ID NO: 5017 - DNA, 25 bp, synthetic construct
  misc_feature 1..25: note = Oligonucleotide
  source 1..25: mol_type = other DNA
tcacagtctcagagggtcacacccc

SEQ ID NO: 5018 - DNA, 25 bp, synthetic construct
  misc_feature 1..25: note = Oligonucleotide
  source 1..25: mol_type = other DNA
ccatcacagtctcagagggtcacac

SEQ ID NO: 5019 - DNA, 25 bp, synthetic construct
  misc_feature 1..25: note = Oligonucleotide
  source 1..25: mol_type = other DNA
aggccatcacagtctcagagggtca

SEQ ID NO: 5020 - DNA, 25 bp, synthetic construct
  misc_feature 1..25: note = Oligonucleotide
  source 1..25: mol_type = other DNA
ccaaggccatcacagtctcagaggg

SEQ ID NO: 5021 - DNA, 25 bp, synthetic construct
  misc_feature 1..25: note = Oligonucleotide
  source 1..25: mol_type = other DNA
cccccaaggccatcacagtctcaga

SEQ ID NO: 5022 - DNA, 25 bp, synthetic construct
  misc_feature 1..25: note = Oligonucleotide
  source 1..25: mol_type = other DNA
gagcccccaaggccatcacagtctc

SEQ ID NO: 5023 - DNA, 25 bp, synthetic construct
  misc_feature 1..25: note = Oligonucleotide
  source 1..25: mol_type = other DNA
cctgagcccccaaggccatcacagt

SEQ ID NO: 5024 - DNA, 25 bp, synthetic construct
  misc_feature 1..25: note = Oligonucleotide
  source 1..25: mol_type = other DNA
tcacctgagcccccaaggccatcac

SEQ ID NO: 5025 - DNA, 25 bp, synthetic construct
  misc_feature 1..25: note = Oligonucleotide
  source 1..25: mol_type = other DNA
ggctcacctgagcccccaaggccat

SEQ ID NO: 5026 - DNA, 25 bp, synthetic construct
  misc_feature 1..25: note = Oligonucleotide
  source 1..25: mol_type = other DNA
ccaggctcacctgagcccccaaggc

SEQ ID NO: 5027 - DNA, 25 bp, synthetic construct
  misc_feature 1..25: note = Oligonucleotide
  source 1..25: mol_type = other DNA
gccccaggctcacctgagcccccaa

SEQ ID NO: 5028 - DNA, 25 bp, synthetic construct
  misc_feature 1..25: note = Oligonucleotide
  source 1..25: mol_type = other DNA
caggccccaggctcacctgagcccc

SEQ ID NO: 5029 - DNA, 25 bp, synthetic construct
  misc_feature 1..25: note = Oligonucleotide
  source 1..25: mol_type = other DNA
tcacaggccccaggctcacctgagc

SEQ ID NO: 5030 - DNA, 25 bp, synthetic construct
  misc_feature 1..25: note = Oligonucleotide
  source 1..25: mol_type = other DNA
agctcacaggccccaggctcacctg

SEQ ID NO: 5031 - DNA, 25 bp, synthetic construct
  misc_feature 1..25: note = Oligonucleotide
  source 1..25: mol_type = other DNA
cacagctcacaggccccaggctcac

SEQ ID NO: 5032 - DNA, 25 bp, synthetic construct
  misc_feature 1..25: note = Oligonucleotide
  source 1..25: mol_type = other DNA
ctgcacagctcacaggccccaggct

SEQ ID NO: 5033 - DNA, 25 bp, synthetic construct
  misc_feature 1..25: note = Oligonucleotide
  source 1..25: mol_type = other DNA
tatctgcacagctcacaggccccag

SEQ ID NO: 5034 - DNA, 25 bp, synthetic construct
  misc_feature 1..25: note = Oligonucleotide
  source 1..25: mol_type = other DNA
ggctatctgcacagctcacaggccc

SEQ ID NO: 5035 - DNA, 25 bp, synthetic construct
  misc_feature 1..25: note = Oligonucleotide
  source 1..25: mol_type = other DNA
tcaggctatctgcacagctcacagg

SEQ ID NO: 5036 - DNA, 25 bp, synthetic construct
  misc_feature 1..25: note = Oligonucleotide
  source 1..25: mol_type = other DNA
ccatcaggctatctgcacagctcac

SEQ ID NO: 5037 - DNA, 25 bp, synthetic construct
  misc_feature 1..25: note = Oligonucleotide
  source 1..25: mol_type = other DNA
cctccatcaggctatctgcacagct

SEQ ID NO: 5038 - DNA, 25 bp, synthetic construct
  misc_feature 1..25: note = Oligonucleotide
  source 1..25: mol_type = other DNA
ctgcctccatcaggctatctgcaca

SEQ ID NO: 5039 - DNA, 25 bp, synthetic construct
  misc_feature 1..25: note = Oligonucleotide
  source 1..25: mol_type = other DNA
gggctgcctccatcaggctatctgc

SEQ ID NO: 5040 - DNA, 25 bp, synthetic construct
  misc_feature 1..25: note = Oligonucleotide
  source 1..25: mol_type = other DNA
cacgggctgcctccatcaggctatc

SEQ ID NO: 5041 - DNA, 25 bp, synthetic construct
  misc_feature 1..25: note = Oligonucleotide
  source 1..25: mol_type = other DNA
ccccacgggctgcctccatcaggct

SEQ ID NO: 5042 - DNA, 25 bp, synthetic construct
  misc_feature 1..25: note = Oligonucleotide
  source 1..25: mol_type = other DNA
cctccccacgggctgcctccatcag

SEQ ID NO: 5043 - DNA, 25 bp, synthetic construct
  misc_feature 1..25: note = Oligonucleotide
  source 1..25: mol_type = other DNA
gctcctccccacgggctgcctccat

SEQ ID NO: 5044 - DNA, 25 bp, synthetic construct
  misc_feature 1..25: note = Oligonucleotide
  source 1..25: mol_type = other DNA
ccagctcctccccacgggctgcctc

SEQ ID NO: 5045 - DNA, 25 bp, synthetic construct
  misc_feature 1..25: note = Oligonucleotide
  source 1..25: mol_type = other DNA
ctcccagctcctccccacgggctgc

SEQ ID NO: 5046 - DNA, 25 bp, synthetic construct
  misc_feature 1..25: note = Oligonucleotide
  source 1..25: mol_type = other DNA
gctctcccagctcctccccacgggc

SEQ ID NO: 5047 - DNA, 25 bp, synthetic construct
  misc_feature 1..25: note = Oligonucleotide
  source 1..25: mol_type = other DNA
ggggctctcccagctcctccccacg

SEQ ID NO: 5048 - DNA, 25 bp, synthetic construct
  misc_feature 1..25: note = Oligonucleotide
  source 1..25: mol_type = other DNA
cacggggctctcccagctcctcccc

SEQ ID NO: 5049 - DNA, 25 bp, synthetic construct
  misc_feature 1..25: note = Oligonucleotide
  source 1..25: mol_type = other DNA
ctccacggggctctcccagctcctc

SEQ ID NO: 5050 - DNA, 25 bp, synthetic construct
  misc_feature 1..25: note = Oligonucleotide
  source 1..25: mol_type = other DNA
ggcctccacggggctctcccagctc

SEQ ID NO: 5051 - DNA, 25 bp, synthetic construct
  misc_feature 1..25: note = Oligonucleotide
  source 1..25: mol_type = other DNA
agtggcctccacggggctctcccag

SEQ ID NO: 5052 - DNA, 25 bp, synthetic construct
  misc_feature 1..25: note = Oligonucleotide
  source 1..25: mol_type = other DNA
tgcagtggcctccacggggctctcc

SEQ ID NO: 5053 - DNA, 25 bp, synthetic construct
  misc_feature 1..25: note = Oligonucleotide
  source 1..25: mol_type = other DNA
gcatgcagtggcctccacggggctc

SEQ ID NO: 5054 - DNA, 25 bp, synthetic construct
  misc_feature 1..25: note = Oligonucleotide
  source 1..25: mol_type = other DNA
ggtgcatgcagtggcctccacgggg

SEQ ID NO: 5055 - DNA, 25 bp, synthetic construct
  misc_feature 1..25: note = Oligonucleotide
  source 1..25: mol_type = other DNA
catggtgcatgcagtggcctccacg

SEQ ID NO: 5056 - DNA, 25 bp, synthetic construct
  misc_feature 1..25: note = Oligonucleotide
  source 1..25: mol_type = other DNA
ggccatggtgcatgcagtggcctcc

SEQ ID NO: 5057 - DNA, 25 bp, synthetic construct
  misc_feature 1..25: note = Oligonucleotide
  source 1..25: mol_type = other DNA
ccgggccatggtgcatgcagtggcc

SEQ ID NO: 5058 - DNA, 25 bp, synthetic construct
  misc_feature 1..25: note = Oligonucleotide
  source 1..25: mol_type = other DNA
tgtccgggccatggtgcatgcagtg

SEQ ID NO: 5059 - DNA, 25 bp, synthetic construct
  misc_feature 1..25: note = Oligonucleotide
  source 1..25: mol_type = other DNA
tgctgtccgggccatggtgcatgca

SEQ ID NO: 5060 - DNA, 25 bp, synthetic construct
  misc_feature 1..25: note = Oligonucleotide
  source 1..25: mol_type = other DNA
tcctgctgtccgggccatggtgcat

SEQ ID NO: 5061 - DNA, 25 bp, synthetic construct
  misc_feature 1..25: note = Oligonucleotide
  source 1..25: mol_type = other DNA
ccctcctgctgtccgggccatggtg

SEQ ID NO: 5062 - DNA, 25 bp, synthetic construct
  misc_feature 1..25: note = Oligonucleotide
  source 1..25: mol_type = other DNA
tttccctcctgctgtccgggccatg

SEQ ID NO: 5063 - DNA, 25 bp, synthetic construct
  misc_feature 1..25: note = Oligonucleotide
  source 1..25: mol_type = other DNA
ccctttccctcctgctgtccgggcc

SEQ ID NO: 5064 - DNA, 25 bp, synthetic construct
  misc_feature 1..25: note = Oligonucleotide
  source 1..25: mol_type = other DNA
gagccctttccctcctgctgtccgg

SEQ ID NO: 5065 - DNA, 25 bp, synthetic construct
  misc_feature 1..25: note = Oligonucleotide
  source 1..25: mol_type = other DNA
tcggagccctttccctcctgctgtc

SEQ ID NO: 5066 - DNA, 25 bp, synthetic construct
  misc_feature 1..25: note = Oligonucleotide
  source 1..25: mol_type = other DNA
ccctcggagccctttccctcctgct

SEQ ID NO: 5067 - DNA, 25 bp, synthetic construct
  misc_feature 1..25: note = Oligonucleotide
  source 1..25: mol_type = other DNA
ggaccctcggagccctttccctcct

SEQ ID NO: 5068 - DNA, 25 bp, synthetic construct
  misc_feature 1..25: note = Oligonucleotide
  source 1..25: mol_type = other DNA
ctgggaccctcggagccctttccct

SEQ ID NO: 5069 - DNA, 25 bp, synthetic construct
  misc_feature 1..25: note = Oligonucleotide
  source 1..25: mol_type = other DNA
cctctgggaccctcggagccctttc

SEQ ID NO: 5070 - DNA, 25 bp, synthetic construct
  misc_feature 1..25: note = Oligonucleotide
  source 1..25: mol_type = other DNA
ccccctctgggaccctcggagccct

SEQ ID NO: 5071 - DNA, 25 bp, synthetic construct
  misc_feature 1..25: note = Oligonucleotide
  source 1..25: mol_type = other DNA
gctccccctctgggaccctcggagc

SEQ ID NO: 5072 - DNA, 25 bp, synthetic construct
  misc_feature 1..25: note = Oligonucleotide
  source 1..25: mol_type = other DNA
agagctccccctctgggaccctcgg

SEQ ID NO: 5073 - DNA, 25 bp, synthetic construct
  misc_feature 1..25: note = Oligonucleotide
  source 1..25: mol_type = other DNA
cctagagctccccctctgggaccct

SEQ ID NO: 5074 - DNA, 25 bp, synthetic construct
  misc_feature 1..25: note = Oligonucleotide
  source 1..25: mol_type = other DNA
ctccctagagctccccctctgggac

SEQ ID NO: 5075 - DNA, 25 bp, synthetic construct
  misc_feature 1..25: note = Oligonucleotide
  source 1..25: mol_type = other DNA
ctgctccctagagctccccctctgg

SEQ ID NO: 5076 - DNA, 25 bp, synthetic construct
  misc_feature 1..25: note = Oligonucleotide
  source 1..25: mol_type = other DNA
tccctgctccctagagctccccctc

SEQ ID NO: 5077 - DNA, 25 bp, synthetic construct
  misc_feature 1..25: note = Oligonucleotide
  source 1..25: mol_type = other DNA
gtctccctgctccctagagctcccc

SEQ ID NO: 5078 - DNA, 25 bp, synthetic construct
  misc_feature 1..25: note = Oligonucleotide
  source 1..25: mol_type = other DNA
ccagtctccctgctccctagagctc

SEQ ID NO: 5079 - DNA, 25 bp, synthetic construct
  misc_feature 1..25: note = Oligonucleotide
  source 1..25: mol_type = other DNA
ggcccagtctccctgctccctagag

SEQ ID NO: 5080 - DNA, 25 bp, synthetic construct
  misc_feature 1..25: note = Oligonucleotide
  source 1..25: mol_type = other DNA
cacggcccagtctccctgctcccta

SEQ ID NO: 5081 - DNA, 25 bp, synthetic construct
  misc_feature 1..25: note = Oligonucleotide
  source 1..25: mol_type = other DNA
caacacggcccagtctccctgctcc

SEQ ID NO: 5082 - DNA, 25 bp, synthetic construct
  misc_feature 1..25: note = Oligonucleotide
  source 1..25: mol_type = other DNA
cgccaacacggcccagtctccctgc

SEQ ID NO: 5083 - DNA, 25 bp, synthetic construct
  misc_feature 1..25: note = Oligonucleotide
  source 1..25: mol_type = other DNA
gcacgccaacacggcccagtctccc

SEQ ID NO: 5084 - DNA, 25 bp, synthetic construct
  misc_feature 1..25: note = Oligonucleotide
  source 1..25: mol_type = other DNA
cgtgcacgccaacacggcccagtct

SEQ ID NO: 5085 - DNA, 25 bp, synthetic construct
  misc_feature 1..25: note = Oligonucleotide
  source 1..25: mol_type = other DNA
caacgtgcacgccaacacggcccag

SEQ ID NO: 5086 - DNA, 25 bp, synthetic construct
  misc_feature 1..25: note = Oligonucleotide
  source 1..25: mol_type = other DNA
aagcaacgtgcacgccaacacggcc

SEQ ID NO: 5087 - DNA, 25 bp, synthetic construct
  misc_feature 1..25: note = Oligonucleotide
  source 1..25: mol_type = other DNA
aagaagcaacgtgcacgccaacacg

SEQ ID NO: 5088 - DNA, 25 bp, synthetic construct
  misc_feature 1..25: note = Oligonucleotide
  source 1..25: mol_type = other DNA
agaaagaagcaacgtgcacgccaac

SEQ ID NO: 5089 - DNA, 25 bp, synthetic construct
  misc_feature 1..25: note = Oligonucleotide
  source 1..25: mol_type = other DNA
agcagaaagaagcaacgtgcacgcc

SEQ ID NO: 5090 - DNA, 25 bp, synthetic construct
  misc_feature 1..25: note = Oligonucleotide
  source 1..25: mol_type = other DNA
accagcagaaagaagcaacgtgcac

SEQ ID NO: 5091 - DNA, 25 bp, synthetic construct
  misc_feature 1..25: note = Oligonucleotide
  source 1..25: mol_type = other DNA
aggaccagcagaaagaagcaacgtg

SEQ ID NO: 5092 - DNA, 25 bp, synthetic construct
  misc_feature 1..25: note = Oligonucleotide
  source 1..25: mol_type = other DNA
gagaggaccagcagaaagaagcaac

SEQ ID NO: 5093 - DNA, 25 bp, synthetic construct
  misc_feature 1..25: note = Oligonucleotide
  source 1..25: mol_type = other DNA
cccgagaggaccagcagaaagaagc

SEQ ID NO: 5094 - DNA, 25 bp, synthetic construct
  misc_feature 1..25: note = Oligonucleotide
  source 1..25: mol_type = other DNA
ggccccgagaggaccagcagaaaga

SEQ ID NO: 5095 - DNA, 25 bp, synthetic construct
  misc_feature 1..25: note = Oligonucleotide
  source 1..25: mol_type = other DNA
acaggccccgagaggaccagcagaa

SEQ ID NO: 5096 - DNA, 25 bp, synthetic construct
  misc_feature 1..25: note = Oligonucleotide
  source 1..25: mol_type = other DNA
agcacaggccccgagaggaccagca

SEQ ID NO: 5097 - DNA, 25 bp, synthetic construct
  misc_feature 1..25: note = Oligonucleotide
  source 1..25: mol_type = other DNA
ccaagcacaggccccgagaggacca

SEQ ID NO: 5098 - DNA, 25 bp, synthetic construct
  misc_feature 1..25: note = Oligonucleotide
  source 1..25: mol_type = other DNA
aacccaagcacaggccccgagagga

SEQ ID NO: 5099 - DNA, 25 bp, synthetic construct
  misc_feature 1..25: note = Oligonucleotide
  source 1..25: mol_type = other DNA
cacaacccaagcacaggccccgaga

SEQ ID NO: 5100 - DNA, 25 bp, synthetic construct
  misc_feature 1..25: note = Oligonucleotide
  source 1..25: mol_type = other DNA
tcccacaacccaagcacaggccccg

SEQ ID NO: 5101 - DNA, 25 bp, synthetic construct
  misc_feature 1..25: note = Oligonucleotide
  source 1..25: mol_type = other DNA
aggtcccacaacccaagcacaggcc

SEQ ID NO: 5102 - DNA, 25 bp, synthetic construct
  misc_feature 1..25: note = Oligonucleotide
  source 1..25: mol_type = other DNA
agtaggtcccacaacccaagcacag

SEQ ID NO: 5103 - DNA, 25 bp, synthetic construct
  misc_feature 1..25: note = Oligonucleotide
  source 1..25: mol_type = other DNA
gggagtaggtcccacaacccaagca

SEQ ID NO: 5104 - DNA, 25 bp, synthetic construct
  misc_feature 1..25: note = Oligonucleotide
  source 1..25: mol_type = other DNA
cacgggagtaggtcccacaacccaa

SEQ ID NO: 5105 - DNA, 25 bp, synthetic construct
  misc_feature 1..25: note = Oligonucleotide
  source 1..25: mol_type = other DNA
cagcacgggagtaggtcccacaacc

SEQ ID NO: 5106 - DNA, 25 bp, synthetic construct
  misc_feature 1..25: note = Oligonucleotide
  source 1..25: mol_type = other DNA
aaccagcacgggagtaggtcccaca

SEQ ID NO: 5107 - DNA, 25 bp, synthetic construct
  misc_feature 1..25: note = Oligonucleotide
  source 1..25: mol_type = other DNA
accaaccagcacgggagtaggtccc

SEQ ID NO: 5108 - DNA, 25 bp, synthetic construct
  misc_feature 1..25: note = Oligonucleotide
  source 1..25: mol_type = other DNA
acaaccaaccagcacgggagtaggt

SEQ ID NO: 5109 - DNA, 25 bp, synthetic construct
  misc_feature 1..25: note = Oligonucleotide
  source 1..25: mol_type = other DNA
cctacaaccaaccagcacgggagta

SEQ ID NO: 5110 - DNA, 25 bp, synthetic construct
  misc_feature 1..25: note = Oligonucleotide
  source 1..25: mol_type = other DNA
ggccctacaaccaaccagcacggga

SEQ ID NO: 5111 - DNA, 25 bp, synthetic construct
  misc_feature 1..25: note = Oligonucleotide
  source 1..25: mol_type = other DNA
cttggccctacaaccaaccagcacg

SEQ ID NO: 5112 - DNA, 25 bp, synthetic construct
  misc_feature 1..25: note = Oligonucleotide
  source 1..25: mol_type = other DNA
gggcttggccctacaaccaaccagc

SEQ ID NO: 5113 - DNA, 25 bp, synthetic construct
  misc_feature 1..25: note = Oligonucleotide
  source 1..25: mol_type = other DNA
tctgggcttggccctacaaccaacc

SEQ ID NO: 5114 - DNA, 25 bp, synthetic construct
  misc_feature 1..25: note = Oligonucleotide
  source 1..25: mol_type = other DNA
agctctgggcttggccctacaacca

SEQ ID NO: 5115 - DNA, 25 bp, synthetic construct
  misc_feature 1..25: note = Oligonucleotide
  source 1..25: mol_type = other DNA
atcagctctgggcttggccctacaa

SEQ ID NO: 5116 - DNA, 25 bp, synthetic construct
  misc_feature 1..25: note = Oligonucleotide
  source 1..25: mol_type = other DNA
accatcagctctgggcttggcccta

SEQ ID NO: 5117 - DNA, 25 bp, synthetic construct
  misc_feature 1..25: note = Oligonucleotide
  source 1..25: mol_type = other DNA
gggaccatcagctctgggcttggcc

SEQ ID NO: 5118 - DNA, 25 bp, synthetic construct
  misc_feature 1..25: note = Oligonucleotide
  source 1..25: mol_type = other DNA
gaagggaccatcagctctgggcttg

SEQ ID NO: 5119 - DNA, 25 bp, synthetic construct
  misc_feature 1..25: note = Oligonucleotide
  source 1..25: mol_type = other DNA
tctgaagggaccatcagctctgggc

SEQ ID NO: 5120 - DNA, 25 bp, synthetic construct
  misc_feature 1..25: note = Oligonucleotide
  source 1..25: mol_type = other DNA
tgctctgaagggaccatcagctctg

SEQ ID NO: 5121 - DNA, 25 bp, synthetic construct
  misc_feature 1..25: note = Oligonucleotide
  source 1..25: mol_type = other DNA
ccctgctctgaagggaccatcagct

SEQ ID NO: 5122 - DNA, 25 bp, synthetic construct
  misc_feature 1..25: note = Oligonucleotide
  source 1..25: mol_type = other DNA
gacccctgctctgaagggaccatca

SEQ ID NO: 5123 - DNA, 25 bp, synthetic construct
  misc_feature 1..25: note = Oligonucleotide
  source 1..25: mol_type = other DNA
tcagacccctgctctgaagggacca

SEQ ID NO: 5124 - DNA, 25 bp, synthetic construct
  misc_feature 1..25: note = Oligonucleotide
  source 1..25: mol_type = other DNA
gactcagacccctgctctgaaggga

SEQ ID NO: 5125 - DNA, 25 bp, synthetic construct
  misc_feature 1..25: note = Oligonucleotide
  source 1..25: mol_type = other DNA
tgggactcagacccctgctctgaag

SEQ ID NO: 5126 - DNA, 25 bp, synthetic construct
  misc_feature 1..25: note = Oligonucleotide
  source 1..25: mol_type = other DNA
ctgtgggactcagacccctgctctg

SEQ ID NO: 5127 - DNA, 25 bp, synthetic construct
  misc_feature 1..25: note = Oligonucleotide
  source 1..25: mol_type = other DNA
gtgctgtgggactcagacccctgct

SEQ ID NO: 5128 - DNA, 25 bp, synthetic construct
  misc_feature 1..25: note = Oligonucleotide
  source 1..25: mol_type = other DNA
ccagtgctgtgggactcagacccct

SEQ ID NO: 5129 - DNA, 25 bp, synthetic construct
  misc_feature 1..25: note = Oligonucleotide
  source 1..25: mol_type = other DNA
tccccagtgctgtgggactcagacc

SEQ ID NO: 5130 - DNA, 25 bp, synthetic construct
  misc_feature 1..25: note = Oligonucleotide
  source 1..25: mol_type = other DNA
ccttccccagtgctgtgggactcag

SEQ ID NO: 5131 - DNA, 25 bp, synthetic construct
  misc_feature 1..25: note = Oligonucleotide
  source 1..25: mol_type = other DNA
gctccttccccagtgctgtgggact

SEQ ID NO: 5132 - DNA, 25 bp, synthetic construct
  misc_feature 1..25: note = Oligonucleotide
  source 1..25: mol_type = other DNA
caagctccttccccagtgctgtggg

SEQ ID NO: 5133 - DNA, 25 bp, synthetic construct
  misc_feature 1..25: note = Oligonucleotide
  source 1..25: mol_type = other DNA
ctccaagctccttccccagtgctgt

SEQ ID NO: 5134 - DNA, 25 bp, synthetic construct
  misc_feature 1..25: note = Oligonucleotide
  source 1..25: mol_type = other DNA
gagctccaagctccttccccagtgc

SEQ ID NO: 5135 - DNA, 25 bp, synthetic construct
  misc_feature 1..25: note = Oligonucleotide
  source 1..25: mol_type = other DNA
ggggagctccaagctccttccccag

SEQ ID NO: 5136 - DNA, 25 bp, synthetic construct
  misc_feature 1..25: note = Oligonucleotide
  source 1..25: mol_type = other DNA
ccaggggagctccaagctccttccc

SEQ ID NO: 5137 - DNA, 25 bp, synthetic construct
  misc_feature 1..25: note = Oligonucleotide
  source 1..25: mol_type = other DNA
tggccaggggagctccaagctcctt

SEQ ID NO: 5138 - DNA, 25 bp, synthetic construct
  misc_feature 1..25: note = Oligonucleotide
  source 1..25: mol_type = other DNA
ctttggccaggggagctccaagctc

SEQ ID NO: 5139 - DNA, 25 bp, synthetic construct
  misc_feature 1..25: note = Oligonucleotide
  source 1..25: mol_type = other DNA
ggtctttggccaggggagctccaag

SEQ ID NO: 5140 - DNA, 25 bp, synthetic construct
  misc_feature 1..25: note = Oligonucleotide
  source 1..25: mol_type = other DNA
tggggtctttggccaggggagctcc

SEQ ID NO: 5141 - DNA, 25 bp, synthetic construct
  misc_feature 1..25: note = Oligonucleotide
  source 1..25: mol_type = other DNA
gcctggggtctttggccaggggagc

SEQ ID NO: 5142 - DNA, 25 bp, synthetic construct
  misc_feature 1..25: note = Oligonucleotide
  source 1..25: mol_type = other DNA
acagcctggggtctttggccagggg

SEQ ID NO: 5143 - DNA, 25 bp, synthetic construct
  misc_feature 1..25: note = Oligonucleotide
  source 1..25: mol_type = other DNA
tcaacagcctggggtctttggccag

SEQ ID NO: 5144 - DNA, 25 bp, synthetic construct
  misc_feature 1..25: note = Oligonucleotide
  source 1..25: mol_type = other DNA
tagtcaacagcctggggtctttggc

SEQ ID NO: 5145 - DNA, 25 bp, synthetic construct
  misc_feature 1..25: note = Oligonucleotide
  source 1..25: mol_type = other DNA
gggtagtcaacagcctggggtcttt

SEQ ID NO: 5146 - DNA, 25 bp, synthetic construct
  misc_feature 1..25: note = Oligonucleotide
  source 1..25: mol_type = other DNA
ggagggtagtcaacagcctggggtc

SEQ ID NO: 5147 - DNA, 25 bp, synthetic construct
  misc_feature 1..25: note = Oligonucleotide
  source 1..25: mol_type = other DNA
tcaggagggtagtcaacagcctggg

SEQ ID NO: 5148 - DNA, 25 bp, synthetic construct
  misc_feature 1..25: note = Oligonucleotide
  source 1..25: mol_type = other DNA
ggttcaggagggtagtcaacagcct

SEQ ID NO: 5149 - DNA, 25 bp, synthetic construct
  misc_feature 1..25: note = Oligonucleotide
  source 1..25: mol_type = other DNA
gggggttcaggagggtagtcaacag

SEQ ID NO: 5150 - DNA, 25 bp, synthetic construct
  misc_feature 1..25: note = Oligonucleotide
  source 1..25: mol_type = other DNA
aacgggggttcaggagggtagtcaa

SEQ ID NO: 5151 - DNA, 25 bp, synthetic construct
  misc_feature 1..25: note = Oligonucleotide
  source 1..25: mol_type = other DNA
ctgaacgggggttcaggagggtagt

SEQ ID NO: 5152 - DNA, 25 bp, synthetic construct
  misc_feature 1..25: note = Oligonucleotide
  source 1..25: mol_type = other DNA
ggcctgaacgggggttcaggagggt

SEQ ID NO: 5153 - DNA, 25 bp, synthetic construct
  misc_feature 1..25: note = Oligonucleotide
  source 1..25: mol_type = other DNA
ggaggcctgaacgggggttcaggag

SEQ ID NO: 5154 - DNA, 25 bp, synthetic construct
  misc_feature 1..25: note = Oligonucleotide
  source 1..25: mol_type = other DNA
gagggaggcctgaacgggggttcag

SEQ ID NO: 5155 - DNA, 25 bp, synthetic construct
  misc_feature 1..25: note = Oligonucleotide
  source 1..25: mol_type = other DNA
gtagagggaggcctgaacgggggtt

SEQ ID NO: 5156 - DNA, 25 bp, synthetic construct
  misc_feature 1..25: note = Oligonucleotide
  source 1..25: mol_type = other DNA
agggtagagggaggcctgaacgggg

SEQ ID NO: 5157 - DNA, 25 bp, synthetic construct
  misc_feature 1..25: note = Oligonucleotide
  source 1..25: mol_type = other DNA
caaagggtagagggaggcctgaacg

SEQ ID NO: 5158 - DNA, 25 bp, synthetic construct
  misc_feature 1..25: note = Oligonucleotide
  source 1..25: mol_type = other DNA
ccccaaagggtagagggaggcctga

SEQ ID NO: 5159 - DNA, 25 bp, synthetic construct
  misc_feature 1..25: note = Oligonucleotide
  source 1..25: mol_type = other DNA
cagccccaaagggtagagggaggcc

SEQ ID NO: 5160 - DNA, 25 bp, synthetic construct
  misc_feature 1..25: note = Oligonucleotide
  source 1..25: mol_type = other DNA
gagcagccccaaagggtagagggag

SEQ ID NO: 5161 - DNA, 25 bp, synthetic construct
  misc_feature 1..25: note = Oligonucleotide
  source 1..25: mol_type = other DNA
agggagcagccccaaagggtagagg

SEQ ID NO: 5162 - DNA, 25 bp, synthetic construct
  misc_feature 1..25: note = Oligonucleotide
  source 1..25: mol_type = other DNA
tacagggagcagccccaaagggtag

SEQ ID NO: 5163 - DNA, 25 bp, synthetic construct
  misc_feature 1..25: note = Oligonucleotide
  source 1..25: mol_type = other DNA
acatacagggagcagccccaaaggg

SEQ ID NO: 5164 - DNA, 25 bp, synthetic construct
  misc_feature 1..25: note = Oligonucleotide
  source 1..25: mol_type = other DNA
aggacatacagggagcagccccaaa

SEQ ID NO: 5165 - DNA, 25 bp, synthetic construct
  misc_feature 1..25: note = Oligonucleotide
  source 1..25: mol_type = other DNA
taaaggacatacagggagcagcccc

SEQ ID NO: 5166 - DNA, 25 bp, synthetic construct
  misc_feature 1..25: note = Oligonucleotide
  source 1..25: mol_type = other DNA
acataaaggacatacagggagcagc

SEQ ID NO: 5167 - DNA, 25 bp, synthetic construct
  misc_feature 1..25: note = Oligonucleotide
  source 1..25: mol_type = other DNA
tgaacataaaggacatacagggagc

SEQ ID NO: 5168 - DNA, 25 bp, synthetic construct
  misc_feature 1..25: note = Oligonucleotide
  source 1..25: mol_type = other DNA
ggctgaacataaaggacatacaggg

SEQ ID NO: 5169 - DNA, 25 bp, synthetic construct
  misc_feature 1..25: note = Oligonucleotide
  source 1..25: mol_type = other DNA
ccaggctgaacataaaggacataca

SEQ ID NO: 5170 - DNA, 25 bp, synthetic construct
  misc_feature 1..25: note = Oligonucleotide
  source 1..25: mol_type = other DNA
caaccaggctgaacataaaggacat

SEQ ID NO: 5171 - DNA, 25 bp, synthetic construct
  misc_feature 1..25: note = Oligonucleotide
  source 1..25: mol_type = other DNA
ctgcaaccaggctgaacataaagga

SEQ ID NO: 5172 - DNA, 25 bp, synthetic construct
  misc_feature 1..25: note = Oligonucleotide
  source 1..25: mol_type = other DNA
cccctgcaaccaggctgaacataaa

SEQ ID NO: 5173 - DNA, 25 bp, synthetic construct
  misc_feature 1..25: note = Oligonucleotide
  source 1..25: mol_type = other DNA
cctcccctgcaaccaggctgaacat

SEQ ID NO: 5174 - DNA, 25 bp, synthetic construct
  misc_feature 1..25: note = Oligonucleotide
  source 1..25: mol_type = other DNA
cgccctcccctgcaaccaggctgaa

SEQ ID NO: 5175 - DNA, 25 bp, synthetic construct
  misc_feature 1..25: note = Oligonucleotide
  source 1..25: mol_type = other DNA
atgcgccctcccctgcaaccaggct

SEQ ID NO: 5176 - DNA, 25 bp, synthetic construct
  misc_feature 1..25: note = Oligonucleotide
  source 1..25: mol_type = other DNA
tgaatgcgccctcccctgcaaccag

SEQ ID NO: 5177 - DNA, 25 bp, synthetic construct
  misc_feature 1..25: note = Oligonucleotide
  source 1..25: mol_type = other DNA
acctgaatgcgccctcccctgcaac

SEQ ID NO: 5178 - DNA, 25 bp, synthetic construct
  misc_feature 1..25: note = Oligonucleotide
  source 1..25: mol_type = other DNA
cccacctgaatgcgccctcccctgc

SEQ ID NO: 5179 - DNA, 25 bp, synthetic construct
  misc_feature 1..25: note = Oligonucleotide
  source 1..25: mol_type = other DNA
gtccccacctgaatgcgccctcccc

SEQ ID NO: 5180 - DNA, 25 bp, synthetic construct
  misc_feature 1..25: note = Oligonucleotide
  source 1..25: mol_type = other DNA
actgtccccacctgaatgcgccctc

SEQ ID NO: 5181 - DNA, 25 bp, synthetic construct
  misc_feature 1..25: note = Oligonucleotide
  source 1..25: mol_type = other DNA
gtgactgtccccacctgaatgcgcc

SEQ ID NO: 5182 - DNA, 25 bp, synthetic construct
  misc_feature 1..25: note = Oligonucleotide
  source 1..25: mol_type = other DNA
caggtgactgtccccacctgaatgc

SEQ ID NO: 5183 - DNA, 25 bp, synthetic construct
  misc_feature 1..25: note = Oligonucleotide
  source 1..25: mol_type = other DNA
gcccaggtgactgtccccacctgaa

SEQ ID NO: 5184 - DNA, 25 bp, synthetic construct
  misc_feature 1..25: note = Oligonucleotide
  source 1..25: mol_type = other DNA
caggcccaggtgactgtccccacct

SEQ ID NO: 5185 - DNA, 25 bp, synthetic construct
  misc_feature 1..25: note = Oligonucleotide
  source 1..25: mol_type = other DNA
acccaggcccaggtgactgtcccca

SEQ ID NO: 5186 - DNA, 25 bp, synthetic construct
  misc_feature 1..25: note = Oligonucleotide
  source 1..25: mol_type = other DNA
agtacccaggcccaggtgactgtcc

SEQ ID NO: 5187 - DNA, 25 bp, synthetic construct
  misc_feature 1..25: note = Oligonucleotide
  source 1..25: mol_type = other DNA
ctcagtacccaggcccaggtgactg

SEQ ID NO: 5188 - DNA, 25 bp, synthetic construct
  misc_feature 1..25: note = Oligonucleotide
  source 1..25: mol_type = other DNA
gacctcagtacccaggcccaggtga

SEQ ID NO: 5189 - DNA, 25 bp, synthetic construct
  misc_feature 1..25: note = Oligonucleotide
  source 1..25: mol_type = other DNA
gtggacctcagtacccaggcccagg

SEQ ID NO: 5190 - DNA, 25 bp, synthetic construct
  misc_feature 1..25: note = Oligonucleotide
  source 1..25: mol_type = other DNA
acagtggacctcagtacccaggccc

SEQ ID NO: 5191 - DNA, 25 bp, synthetic construct
  misc_feature 1..25: note = Oligonucleotide
  source 1..25: mol_type = other DNA
cagacagtggacctcagtacccagg

SEQ ID NO: 5192 - DNA, 25 bp, synthetic construct
  misc_feature 1..25: note = Oligonucleotide
  source 1..25: mol_type = other DNA
caccagacagtggacctcagtaccc

SEQ ID NO: 5193 - DNA, 25 bp, synthetic construct
  misc_feature 1..25: note = Oligonucleotide
  source 1..25: mol_type = other DNA
cttcaccagacagtggacctcagta

SEQ ID NO: 5194 - DNA, 25 bp, synthetic construct
  misc_feature 1..25: note = Oligonucleotide
  source 1..25: mol_type = other DNA
ggacttcaccagacagtggacctca

SEQ ID NO: 5195 - DNA, 25 bp, synthetic construct
  misc_feature 1..25: note = Oligonucleotide
  source 1..25: mol_type = other DNA
ccaggacttcaccagacagtggacc

SEQ ID NO: 5196 - DNA, 25 bp, synthetic construct
  misc_feature 1..25: note = Oligonucleotide
  source 1..25: mol_type = other DNA
gtcccaggacttcaccagacagtgg

SEQ ID NO: 5197 - DNA, 25 bp, synthetic construct
  misc_feature 1..25: note = Oligonucleotide
  source 1..25: mol_type = other DNA
cgggtcccaggacttcaccagacag

SEQ ID NO: 5198 - DNA, 25 bp, synthetic construct
  misc_feature 1..25: note = Oligonucleotide
  source 1..25: mol_type = other DNA
agccgggtcccaggacttcaccaga

SEQ ID NO: 5199 - DNA, 25 bp, synthetic construct
  misc_feature 1..25: note = Oligonucleotide
  source 1..25: mol_type = other DNA
ggaagccgggtcccaggacttcacc

SEQ ID NO: 5200 - DNA, 25 bp, synthetic construct
  misc_feature 1..25: note = Oligonucleotide
  source 1..25: mol_type = other DNA
gccggaagccgggtcccaggacttc

SEQ ID NO: 5201 - DNA, 25 bp, synthetic construct
  misc_feature 1..25: note = Oligonucleotide
  source 1..25: mol_type = other DNA
gctgccggaagccgggtcccaggac

SEQ ID NO: 5202 - DNA, 25 bp, synthetic construct
  misc_feature 1..25: note = Oligonucleotide
  source 1..25: mol_type = other DNA
gaggctgccggaagccgggtcccag

SEQ ID NO: 5203 - DNA, 25 bp, synthetic construct
  misc_feature 1..25: note = Oligonucleotide
  source 1..25: mol_type = other DNA
gaggaggctgccggaagccgggtcc

SEQ ID NO: 5204 - DNA, 25 bp, synthetic construct
  misc_feature 1..25: note = Oligonucleotide
  source 1..25: mol_type = other DNA
gcagaggaggctgccggaagccggg

SEQ ID NO: 5205 - DNA, 25 bp, synthetic construct
  misc_feature 1..25: note = Oligonucleotide
  source 1..25: mol_type = other DNA
gaggcagaggaggctgccggaagcc

SEQ ID NO: 5206 - DNA, 25 bp, synthetic construct
  misc_feature 1..25: note = Oligonucleotide
  source 1..25: mol_type = other DNA
cgagaggcagaggaggctgccggaa

SEQ ID NO: 5207 - DNA, 25 bp, synthetic construct
  misc_feature 1..25: note = Oligonucleotide
  source 1..25: mol_type = other DNA
acccgagaggcagaggaggctgccg

SEQ ID NO: 5208 - DNA, 25 bp, synthetic construct
  misc_feature 1..25: note = Oligonucleotide
  source 1..25: mol_type = other DNA
tccacccgagaggcagaggaggctg

SEQ ID NO: 5209 - DNA, 25 bp, synthetic construct
  misc_feature 1..25: note = Oligonucleotide
  source 1..25: mol_type = other DNA
ccatccacccgagaggcagaggagg

SEQ ID NO: 5210 - DNA, 25 bp, synthetic construct
  misc_feature 1..25: note = Oligonucleotide
  source 1..25: mol_type = other DNA
ttcccatccacccgagaggcagagg

SEQ ID NO: 5211 - DNA, 25 bp, synthetic construct
  misc_feature 1..25: note = Oligonucleotide
  source 1..25: mol_type = other DNA
tgattcccatccacccgagaggcag

SEQ ID NO: 5212 - DNA, 25 bp, synthetic construct
  misc_feature 1..25: note = Oligonucleotide
  source 1..25: mol_type = other DNA
ccctgattcccatccacccgagagg

SEQ ID NO: 5213 - DNA, 25 bp, synthetic construct
  misc_feature 1..25: note = Oligonucleotide
  source 1..25: mol_type = other DNA
gggccctgattcccatccacccgag

SEQ ID NO: 5214 - DNA, 25 bp, synthetic construct
  misc_feature 1..25: note = Oligonucleotide
  source 1..25: mol_type = other DNA
tctgggccctgattcccatccaccc

SEQ ID NO: 5215 - DNA, 25 bp, synthetic construct
  misc_feature 1..25: note = Oligonucleotide
  source 1..25: mol_type = other DNA
ctgtctgggccctgattcccatcca

SEQ ID NO: 5216 - DNA, 25 bp, synthetic construct
  misc_feature 1..25: note = Oligonucleotide
  source 1..25: mol_type = other DNA
cctctgtctgggccctgattcccat

SEQ ID NO: 5217 - DNA, 25 bp, synthetic construct
  misc_feature 1..25: note = Oligonucleotide
  source 1..25: mol_type = other DNA
aagcctctgtctgggccctgattcc

SEQ ID NO: 5218 - DNA, 25 bp, synthetic construct
  misc_feature 1..25: note = Oligonucleotide
  source 1..25: mol_type = other DNA
ctcaagcctctgtctgggccctgat

SEQ ID NO: 5219 - DNA, 25 bp, synthetic construct
  misc_feature 1..25: note = Oligonucleotide
  source 1..25: mol_type = other DNA
cacctcaagcctctgtctgggccct

SEQ ID NO: 5220 - DNA, 25 bp, synthetic construct
  misc_feature 1..25: note = Oligonucleotide
  source 1..25: mol_type = other DNA
agccacctcaagcctctgtctgggc

SEQ ID NO: 5221 - DNA, 25 bp, synthetic construct
  misc_feature 1..25: note = Oligonucleotide
  source 1..25: mol_type = other DNA
gaaagccacctcaagcctctgtctg

SEQ ID NO: 5222 - DNA, 25 bp, synthetic construct
  misc_feature 1..25: note = Oligonucleotide
  source 1..25: mol_type = other DNA
ggagaaagccacctcaagcctctgt

SEQ ID NO: 5223 - DNA, 25 bp, synthetic construct
  misc_feature 1..25: note = Oligonucleotide
  source 1..25: mol_type = other DNA
ggtggagaaagccacctcaagcctc

SEQ ID NO: 5224 - DNA, 25 bp, synthetic construct
  misc_feature 1..25: note = Oligonucleotide
  source 1..25: mol_type = other DNA
ctgggtggagaaagccacctcaagc

SEQ ID NO: 5225 - DNA, 25 bp, synthetic construct
  misc_feature 1..25: note = Oligonucleotide
  source 1..25: mol_type = other DNA
ggcctgggtggagaaagccacctca

SEQ ID NO: 5226 - DNA, 25 bp, synthetic construct
  misc_feature 1..25: note = Oligonucleotide
  source 1..25: mol_type = other DNA
acaggcctgggtggagaaagccacc

SEQ ID NO: 5227 - DNA, 25 bp, synthetic construct
  misc_feature 1..25: note = Oligonucleotide
  source 1..25: mol_type = other DNA
tatacaggcctgggtggagaaagcc

SEQ ID NO: 5228 - DNA, 25 bp, synthetic construct
  misc_feature 1..25: note = Oligonucleotide
  source 1..25: mol_type = other DNA
aaatatacaggcctgggtggagaaa

SEQ ID NO: 5229 - DNA, 25 bp, synthetic construct
  misc_feature 1..25: note = Oligonucleotide
  source 1..25: mol_type = other DNA
agcaaatatacaggcctgggtggag

SEQ ID NO: 5230 - DNA, 25 bp, synthetic construct
  misc_feature 1..25: note = Oligonucleotide
  source 1..25: mol_type = other DNA
tggagcaaatatacaggcctgggtg

SEQ ID NO: 5231 - DNA, 25 bp, synthetic construct
  misc_feature 1..25: note = Oligonucleotide
  source 1..25: mol_type = other DNA
acgtggagcaaatatacaggcctgg

SEQ ID NO: 5232 - DNA, 25 bp, synthetic construct
  misc_feature 1..25: note = Oligonucleotide
  source 1..25: mol_type = other DNA
cggacgtggagcaaatatacaggcc

SEQ ID NO: 5233 - DNA, 25 bp, synthetic construct
  misc_feature 1..25: note = Oligonucleotide
  source 1..25: mol_type = other DNA
acacggacgtggagcaaatatacag

SEQ ID NO: 5234 - DNA, 25 bp, synthetic construct
  misc_feature 1..25: note = Oligonucleotide
  source 1..25: mol_type = other DNA
ggtacacggacgtggagcaaatata

SEQ ID NO: 5235 - DNA, 25 bp, synthetic construct
  misc_feature 1..25: note = Oligonucleotide
  source 1..25: mol_type = other DNA
tcaggtacacggacgtggagcaaat

SEQ ID NO: 5236 - DNA, 25 bp, synthetic construct
  misc_feature 1..25: note = Oligonucleotide
  source 1..25: mol_type = other DNA
gcatcaggtacacggacgtggagca

SEQ ID NO: 5237 - DNA, 25 bp, synthetic construct
  misc_feature 1..25: note = Oligonucleotide
  source 1..25: mol_type = other DNA
tgggcatcaggtacacggacgtgga

SEQ ID NO: 5238 - DNA, 25 bp, synthetic construct
  misc_feature 1..25: note = Oligonucleotide
  source 1..25: mol_type = other DNA
ggatgggcatcaggtacacggacgt

SEQ ID NO: 5239 - DNA, 25 bp, synthetic construct
  misc_feature 1..25: note = Oligonucleotide
  source 1..25: mol_type = other DNA
gagggatgggcatcaggtacacgga

SEQ ID NO: 5240 - DNA, 25 bp, synthetic construct
  misc_feature 1..25: note = Oligonucleotide
  source 1..25: mol_type = other DNA
agggagggatgggcatcaggtacac

SEQ ID NO: 5241 - DNA, 25 bp, synthetic construct
  misc_feature 1..25: note = Oligonucleotide
  source 1..25: mol_type = other DNA
gagagggagggatgggcatcaggta

SEQ ID NO: 5242 - DNA, 25 bp, synthetic construct
  misc_feature 1..25: note = Oligonucleotide
  source 1..25: mol_type = other DNA
agagagagggagggatgggcatcag

SEQ ID NO: 5243 - DNA, 25 bp, synthetic construct
  misc_feature 1..25: note = Oligonucleotide
  source 1..25: mol_type = other DNA
tcgagagagagggagggatgggcat

SEQ ID NO: 5244 - DNA, 25 bp, synthetic construct
  misc_feature 1..25: note = Oligonucleotide
  source 1..25: mol_type = other DNA
gggtcgagagagagggagggatggg

SEQ ID NO: 5245 - DNA, 25 bp, synthetic construct
  misc_feature 1..25: note = Oligonucleotide
  source 1..25: mol_type = other DNA
agtgggtcgagagagagggagggat

SEQ ID NO: 5246 - DNA, 25 bp, synthetic construct
  misc_feature 1..25: note = Oligonucleotide
  source 1..25: mol_type = other DNA
cccagtgggtcgagagagagggagg

SEQ ID NO: 5247 - DNA, 25 bp, synthetic construct
  misc_feature 1..25: note = Oligonucleotide
  source 1..25: mol_type = other DNA
aagcccagtgggtcgagagagaggg

SEQ ID NO: 5248 - DNA, 25 bp, synthetic construct
  misc_feature 1..25: note = Oligonucleotide
  source 1..25: mol_type = other DNA
ggaaagcccagtgggtcgagagaga

SEQ ID NO: 5249 - DNA, 25 bp, synthetic construct
  misc_feature 1..25: note = Oligonucleotide
  source 1..25: mol_type = other DNA
cagggaaagcccagtgggtcgagag

SEQ ID NO: 5250 - DNA, 25 bp, synthetic construct
  misc_feature 1..25: note = Oligonucleotide
  source 1..25: mol_type = other DNA
acccagggaaagcccagtgggtcga

SEQ ID NO: 5251 - DNA, 25 bp, synthetic construct
  misc_feature 1..25: note = Oligonucleotide
  source 1..25: mol_type = other DNA
ctcacccagggaaagcccagtgggt

SEQ ID NO: 5252 - DNA, 25 bp, synthetic construct
  misc_feature 1..25: note = Oligonucleotide
  source 1..25: mol_type = other DNA
gtcctcacccagggaaagcccagtg

SEQ ID NO: 5253 - DNA, 25 bp, synthetic construct
  misc_feature 1..25: note = Oligonucleotide
  source 1..25: mol_type = other DNA
tgtgtcctcacccagggaaagccca

SEQ ID NO: 5254 - DNA, 25 bp, synthetic construct
  misc_feature 1..25: note = Oligonucleotide
  source 1..25: mol_type = other DNA
agatgtgtcctcacccagggaaagc

SEQ ID NO: 5255 - DNA, 25 bp, synthetic construct
  misc_feature 1..25: note = Oligonucleotide
  source 1..25: mol_type = other DNA
ggcagatgtgtcctcacccagggaa

SEQ ID NO: 5256 - DNA, 25 bp, synthetic construct
  misc_feature 1..25: note = Oligonucleotide
  source 1..25: mol_type = other DNA
cctggcagatgtgtcctcacccagg

SEQ ID NO: 5257 - DNA, 25 bp, synthetic construct
  misc_feature 1..25: note = Oligonucleotide
  source 1..25: mol_type = other DNA
gggcctggcagatgtgtcctcaccc

SEQ ID NO: 5258 - DNA, 25 bp, synthetic construct
  misc_feature 1..25: note = Oligonucleotide
  source 1..25: mol_type = other DNA
caagggcctggcagatgtgtcctca

SEQ ID NO: 5259 - DNA, 25 bp, synthetic construct
  misc_feature 1..25: note = Oligonucleotide
  source 1..25: mol_type = other DNA
ggccaagggcctggcagatgtgtcc

SEQ ID NO: 5260 - DNA, 25 bp, synthetic construct
  misc_feature 1..25: note = Oligonucleotide
  source 1..25: mol_type = other DNA
ctgggccaagggcctggcagatgtg

SEQ ID NO: 5261 - DNA, 25 bp, synthetic construct
  misc_feature 1..25: note = Oligonucleotide
  source 1..25: mol_type = other DNA
gggctgggccaagggcctggcagat

SEQ ID NO: 5262 - DNA, 25 bp, synthetic construct
  misc_feature 1..25: note = Oligonucleotide
  source 1..25: mol_type = other DNA
agagggctgggccaagggcctggca

SEQ ID NO: 5263 - DNA, 25 bp, synthetic construct
  misc_feature 1..25: note = Oligonucleotide
  source 1..25: mol_type = other DNA
tcaagagggctgggccaagggcctg

SEQ ID NO: 5264 - DNA, 25 bp, synthetic construct
  misc_feature 1..25: note = Oligonucleotide
  source 1..25: mol_type = other DNA
acctcaagagggctgggccaagggc

SEQ ID NO: 5265 - DNA, 25 bp, synthetic construct
  misc_feature 1..25: note = Oligonucleotide
  source 1..25: mol_type = other DNA
gggacctcaagagggctgggccaag

SEQ ID NO: 5266 - DNA, 25 bp, synthetic construct
  misc_feature 1..25: note = Oligonucleotide
  source 1..25: mol_type = other DNA
aaggggacctcaagagggctgggcc

SEQ ID NO: 5267 - DNA, 25 bp, synthetic construct
  misc_feature 1..25: note = Oligonucleotide
  source 1..25: mol_type = other DNA
agcaaggggacctcaagagggctgg

SEQ ID NO: 5268 - DNA, 25 bp, synthetic construct
  misc_feature 1..25: note = Oligonucleotide
  source 1..25: mol_type = other DNA
ggcagcaaggggacctcaagagggc

SEQ ID NO: 5269 - DNA, 25 bp, synthetic construct
  misc_feature 1..25: note = Oligonucleotide
  source 1..25: mol_type = other DNA
agaggcagcaaggggacctcaagag

SEQ ID NO: 5270 - DNA, 25 bp, synthetic construct
  misc_feature 1..25: note = Oligonucleotide
  source 1..25: mol_type = other DNA
gcaagaggcagcaaggggacctcaa

SEQ ID NO: 5271 - DNA, 25 bp, synthetic construct
  misc_feature 1..25: note = Oligonucleotide
  source 1..25: mol_type = other DNA
ggggcaagaggcagcaaggggacct

SEQ ID NO: 5272 - DNA, 25 bp, synthetic construct
  misc_feature 1..25: note = Oligonucleotide
  source 1..25: mol_type = other DNA
gctggggcaagaggcagcaagggga

SEQ ID NO: 5273 - DNA, 25 bp, synthetic construct
  misc_feature 1..25: note = Oligonucleotide
  source 1..25: mol_type = other DNA
tgggctggggcaagaggcagcaagg

SEQ ID NO: 5274 - DNA, 25 bp, synthetic construct
  misc_feature 1..25: note = Oligonucleotide
  source 1..25: mol_type = other DNA
acctgggctggggcaagaggcagca

SEQ ID NO: 5275 - DNA, 25 bp, synthetic construct
  misc_feature 1..25: note = Oligonucleotide
  source 1..25: mol_type = other DNA
ttcacctgggctggggcaagaggca

SEQ ID NO: 5276 - DNA, 25 bp, synthetic construct
  misc_feature 1..25: note = Oligonucleotide
  source 1..25: mol_type = other DNA
cccttcacctgggctggggcaagag

SEQ ID NO: 5277 - DNA, 25 bp, synthetic construct
  misc_feature 1..25: note = Oligonucleotide
  source 1..25: mol_type = other DNA
aagcccttcacctgggctggggcaa

SEQ ID NO: 5278 - DNA, 25 bp, synthetic construct
  misc_feature 1..25: note = Oligonucleotide
  source 1..25: mol_type = other DNA
gggaagcccttcacctgggctgggg

SEQ ID NO: 5279 - DNA, 25 bp, synthetic construct
  misc_feature 1..25: note = Oligonucleotide
  source 1..25: mol_type = other DNA
ctggggaagcccttcacctgggctg

SEQ ID NO: 5280 - DNA, 25 bp, synthetic construct
  misc_feature 1..25: note = Oligonucleotide
  source 1..25: mol_type = other DNA
acactggggaagcccttcacctggg

SEQ ID NO: 5281 - DNA, 25 bp, synthetic construct
  misc_feature 1..25: note = Oligonucleotide
  source 1..25: mol_type = other DNA
aagacactggggaagcccttcacct

SEQ ID NO: 5282 - DNA, 25 bp, synthetic construct
  misc_feature 1..25: note = Oligonucleotide
  source 1..25: mol_type = other DNA
gagaagacactggggaagcccttca

SEQ ID NO: 5283 - DNA, 25 bp, synthetic construct
  misc_feature 1..25: note = Oligonucleotide
  source 1..25: mol_type = other DNA
cctgagaagacactggggaagccct

SEQ ID NO: 5284 - DNA, 25 bp, synthetic construct
  misc_feature 1..25: note = Oligonucleotide
  source 1..25: mol_type = other DNA
atacctgagaagacactggggaagc

SEQ ID NO: 5285 - DNA, 25 bp, synthetic construct
  misc_feature 1..25: note = Oligonucleotide
  source 1..25: mol_type = other DNA
ttaatacctgagaagacactgggga

SEQ ID NO: 5286 - DNA, 25 bp, synthetic construct
  misc_feature 1..25: note = Oligonucleotide
  source 1..25: mol_type = other DNA
tttttaatacctgagaagacactgg

SEQ ID NO: 5287 - DNA, 25 bp, synthetic construct
  misc_feature 1..25: note = Oligonucleotide
  source 1..25: mol_type = other DNA
ctgtttttaatacctgagaagacac

SEQ ID NO: 5288 - DNA, 25 bp, synthetic construct
  misc_feature 1..25: note = Oligonucleotide
  source 1..25: mol_type = other DNA
cacctgtttttaatacctgagaaga

SEQ ID NO: 5289 - DNA, 25 bp, synthetic construct
  misc_feature 1..25: note = Oligonucleotide
  source 1..25: mol_type = other DNA
tgtcacctgtttttaatacctgaga

SEQ ID NO: 5290 - DNA, 25 bp, synthetic construct
  misc_feature 1..25: note = Oligonucleotide
  source 1..25: mol_type = other DNA
ccttgtcacctgtttttaatacctg

SEQ ID NO: 5291 - DNA, 25 bp, synthetic construct
  misc_feature 1..25: note = Oligonucleotide
  source 1..25: mol_type = other DNA
agaccttgtcacctgtttttaatac

SEQ ID NO: 5292 - DNA, 25 bp, synthetic construct
  misc_feature 1..25: note = Oligonucleotide
  source 1..25: mol_type = other DNA
aggagaccttgtcacctgtttttaa

SEQ ID NO: 5293 - DNA, 25 bp, synthetic construct
  misc_feature 1..25: note = Oligonucleotide
  source 1..25: mol_type = other DNA
tggaggagaccttgtcacctgtttt

SEQ ID NO: 5294 - DNA, 25 bp, synthetic construct
  misc_feature 1..25: note = Oligonucleotide
  source 1..25: mol_type = other DNA
cactggaggagaccttgtcacctgt

SEQ ID NO: 5295 - DNA, 25 bp, synthetic construct
  misc_feature 1..25: note = Oligonucleotide
  source 1..25: mol_type = other DNA
ggtcactggaggagaccttgtcacc

SEQ ID NO: 5296 - DNA, 25 bp, synthetic construct
  misc_feature 1..25: note = Oligonucleotide
  source 1..25: mol_type = other DNA
aaaggtcactggaggagaccttgtc

SEQ ID NO: 5297 - DNA, 25 bp, synthetic construct
  misc_feature 1..25: note = Oligonucleotide
  source 1..25: mol_type = other DNA
agaaaaggtcactggaggagacctt

SEQ ID NO: 5298 - DNA, 25 bp, synthetic construct
  misc_feature 1..25: note = Oligonucleotide
  source 1..25: mol_type = other DNA
tgcagaaaaggtcactggaggagac

SEQ ID NO: 5299 - DNA, 25 bp, synthetic construct
  misc_feature 1..25: note = Oligonucleotide
  source 1..25: mol_type = other DNA
gcatgcagaaaaggtcactggagga

SEQ ID NO: 5300 - DNA, 25 bp, synthetic construct
  misc_feature 1..25: note = Oligonucleotide
  source 1..25: mol_type = other DNA
aaggcatgcagaaaaggtcactgga

SEQ ID NO: 5301 - DNA, 25 bp, synthetic construct
  misc_feature 1..25: note = Oligonucleotide
  source 1..25: mol_type = other DNA
ccaaaggcatgcagaaaaggtcact

SEQ ID NO: 5302 - DNA, 25 bp, synthetic construct
  misc_feature 1..25: note = Oligonucleotide
  source 1..25: mol_type = other DNA
gccccaaaggcatgcagaaaaggtc

SEQ ID NO: 5303 - DNA, 25 bp, synthetic construct
  misc_feature 1..25: note = Oligonucleotide
  source 1..25: mol_type = other DNA
tctgccccaaaggcatgcagaaaag

SEQ ID NO: 5304 - DNA, 25 bp, synthetic construct
  misc_feature 1..25: note = Oligonucleotide
  source 1..25: mol_type = other DNA
atgtctgccccaaaggcatgcagaa

SEQ ID NO: 5305 - DNA, 25 bp, synthetic construct
  misc_feature 1..25: note = Oligonucleotide
  source 1..25: mol_type = other DNA
tgtatgtctgccccaaaggcatgca

SEQ ID NO: 5306 - DNA, 25 bp, synthetic construct
  misc_feature 1..25: note = Oligonucleotide
  source 1..25: mol_type = other DNA
gcttgtatgtctgccccaaaggcat

SEQ ID NO: 5307 - DNA, 25 bp, synthetic construct
  misc_feature 1..25: note = Oligonucleotide
  source 1..25: mol_type = other DNA
atagcttgtatgtctgccccaaagg

SEQ ID NO: 5308 - DNA, 25 bp, synthetic construct
  misc_feature 1..25: note = Oligonucleotide
  source 1..25: mol_type = other DNA
gaaatagcttgtatgtctgccccaa

SEQ ID NO: 5309 - DNA, 25 bp, synthetic construct
  misc_feature 1..25: note = Oligonucleotide
  source 1..25: mol_type = other DNA
ccagaaatagcttgtatgtctgccc

SEQ ID NO: 5310 - DNA, 25 bp, synthetic construct
  misc_feature 1..25: note = Oligonucleotide
  source 1..25: mol_type = other DNA
attccagaaatagcttgtatgtctg

SEQ ID NO: 5311 - DNA, 25 bp, synthetic construct
  misc_feature 1..25: note = Oligonucleotide
  source 1..25: mol_type = other DNA
aagattccagaaatagcttgtatgt

SEQ ID NO: 5312 - DNA, 25 bp, synthetic construct
  misc_feature 1..25: note = Oligonucleotide
  source 1..25: mol_type = other DNA
cagaagattccagaaatagcttgta

SEQ ID NO: 5313 - DNA, 25 bp, synthetic construct
  misc_feature 1..25: note = Oligonucleotide
  source 1..25: mol_type = other DNA
agccagaagattccagaaatagctt

SEQ ID NO: 5314 - DNA, 25 bp, synthetic construct
  misc_feature 1..25: note = Oligonucleotide
  source 1..25: mol_type = other DNA
cagagccagaagattccagaaatag

SEQ ID NO: 5315 - DNA, 25 bp, synthetic construct
  misc_feature 1..25: note = Oligonucleotide
  source 1..25: mol_type = other DNA
gggcagagccagaagattccagaaa

SEQ ID NO: 5316 - DNA, 25 bp, synthetic construct
  misc_feature 1..25: note = Oligonucleotide
  source 1..25: mol_type = other DNA
agagggcagagccagaagattccag

SEQ ID NO: 5317 - DNA, 25 bp, synthetic construct
  misc_feature 1..25: note = Oligonucleotide
  source 1..25: mol_type = other DNA
gctagagggcagagccagaagattc

SEQ ID NO: 5318 - DNA, 25 bp, synthetic construct
  misc_feature 1..25: note = Oligonucleotide
  source 1..25: mol_type = other DNA
cgagctagagggcagagccagaaga

SEQ ID NO: 5319 - DNA, 25 bp, synthetic construct
  misc_feature 1..25: note = Oligonucleotide
  source 1..25: mol_type = other DNA
taacgagctagagggcagagccaga

SEQ ID NO: 5320 - DNA, 25 bp, synthetic construct
  misc_feature 1..25: note = Oligonucleotide
  source 1..25: mol_type = other DNA
cactaacgagctagagggcagagcc

SEQ ID NO: 5321 - DNA, 25 bp, synthetic construct
  misc_feature 1..25: note = Oligonucleotide
  source 1..25: mol_type = other DNA
ccccactaacgagctagagggcaga

SEQ ID NO: 5322 - DNA, 25 bp, synthetic construct
  misc_feature 1..25: note = Oligonucleotide
  source 1..25: mol_type = other DNA
gagccccactaacgagctagagggc

SEQ ID NO: 5323 - DNA, 25 bp, synthetic construct
  misc_feature 1..25: note = Oligonucleotide
  source 1..25: mol_type = other DNA
tgggagccccactaacgagctagag

SEQ ID NO: 5324 - DNA, 25 bp, synthetic construct
  misc_feature 1..25: note = Oligonucleotide
  source 1..25: mol_type = other DNA
ccctgggagccccactaacgagcta

SEQ ID NO: 5325 - DNA, 25 bp, synthetic construct
  misc_feature 1..25: note = Oligonucleotide
  source 1..25: mol_type = other DNA
gcaccctgggagccccactaacgag

SEQ ID NO: 5326 - DNA, 25 bp, synthetic construct
  misc_feature 1..25: note = Oligonucleotide
  source 1..25: mol_type = other DNA
acagcaccctgggagccccactaac

SEQ ID NO: 5327 - DNA, 25 bp, synthetic construct
  misc_feature 1..25: note = Oligonucleotide
  source 1..25: mol_type = other DNA
aacacagcaccctgggagccccact

SEQ ID NO: 5328 - DNA, 25 bp, synthetic construct
  misc_feature 1..25: note = Oligonucleotide
  source 1..25: mol_type = other DNA
tgcaacacagcaccctgggagcccc

SEQ ID NO: 5329 - DNA, 25 bp, synthetic construct
  misc_feature 1..25: note = Oligonucleotide
  source 1..25: mol_type = other DNA
ggctgcaacacagcaccctgggagc

SEQ ID NO: 5330 - DNA, 25 bp, synthetic construct
  misc_feature 1..25: note = Oligonucleotide
  source 1..25: mol_type = other DNA
ctgggctgcaacacagcaccctggg

SEQ ID NO: 5331 - DNA, 25 bp, synthetic construct
  misc_feature 1..25: note = Oligonucleotide
  source 1..25: mol_type = other DNA
cacctgggctgcaacacagcaccct

SEQ ID NO: 5332 - DNA, 25 bp, synthetic construct
  misc_feature 1..25: note = Oligonucleotide
  source 1..25: mol_type = other DNA
cagcacctgggctgcaacacagcac

SEQ ID NO: 5333 - DNA, 25 bp, synthetic construct
  misc_feature 1..25: note = Oligonucleotide
  source 1..25: mol_type = other DNA
gagcagcacctgggctgcaacacag

SEQ ID NO: 5334 - DNA, 25 bp, synthetic construct
  misc_feature 1..25: note = Oligonucleotide
  source 1..25: mol_type = other DNA
ctggagcagcacctgggctgcaaca

SEQ ID NO: 5335 - DNA, 25 bp, synthetic construct
  misc_feature 1..25: note = Oligonucleotide
  source 1..25: mol_type = other DNA
caactggagcagcacctgggctgca

SEQ ID NO: 5336 - DNA, 25 bp, synthetic construct
  misc_feature 1..25: note = Oligonucleotide
  source 1..25: mol_type = other DNA
ccacaactggagcagcacctgggct

SEQ ID NO: 5337 - DNA, 25 bp, synthetic construct
  misc_feature 1..25: note = Oligonucleotide
  source 1..25: mol_type = other DNA
cttccacaactggagcagcacctgg

SEQ ID NO: 5338 - DNA, 25 bp, synthetic construct
  misc_feature 1..25: note = Oligonucleotide
  source 1..25: mol_type = other DNA
cttcttccacaactggagcagcacc

SEQ ID NO: 5339 - DNA, 25 bp, synthetic construct
  misc_feature 1..25: note = Oligonucleotide
  source 1..25: mol_type = other DNA
tcacttcttccacaactggagcagc

SEQ ID NO: 5340 - DNA, 25 bp, synthetic construct
  misc_feature 1..25: note = Oligonucleotide
  source 1..25: mol_type = other DNA
ccatcacttcttccacaactggagc

SEQ ID NO: 5341 - DNA, 25 bp, synthetic construct
  misc_feature 1..25: note = Oligonucleotide
  source 1..25: mol_type = other DNA
cagccatcacttcttccacaactgg

SEQ ID NO: 5342 - DNA, 25 bp, synthetic construct
  misc_feature 1..25: note = Oligonucleotide
  source 1..25: mol_type = other DNA
aaccagccatcacttcttccacaac

SEQ ID NO: 5343 - DNA, 25 bp, synthetic construct
  misc_feature 1..25: note = Oligonucleotide
  source 1..25: mol_type = other DNA
atcaaccagccatcacttcttccac

SEQ ID NO: 5344 - DNA, 25 bp, synthetic construct
  misc_feature 1..25: note = Oligonucleotide
  source 1..25: mol_type = other DNA
atgatcaaccagccatcacttcttc

SEQ ID NO: 5345 - DNA, 25 bp, synthetic construct
  misc_feature 1..25: note = Oligonucleotide
  source 1..25: mol_type = other DNA
gggatgatcaaccagccatcacttc

SEQ ID NO: 5346 - DNA, 25 bp, synthetic construct
  misc_feature 1..25: note = Oligonucleotide
  source 1..25: mol_type = other DNA
tgcgggatgatcaaccagccatcac

SEQ ID NO: 5347 - DNA, 25 bp, synthetic construct
  misc_feature 1..25: note = Oligonucleotide
  source 1..25: mol_type = other DNA
gcctgcgggatgatcaaccagccat

SEQ ID NO: 5348 - DNA, 25 bp, synthetic construct
  misc_feature 1..25: note = Oligonucleotide
  source 1..25: mol_type = other DNA
ccagcctgcgggatgatcaaccagc

SEQ ID NO: 5349 - DNA, 25 bp, synthetic construct
  misc_feature 1..25: note = Oligonucleotide
  source 1..25: mol_type = other DNA
gccccagcctgcgggatgatcaacc

SEQ ID NO: 5350 - DNA, 25 bp, synthetic construct
  misc_feature 1..25: note = Oligonucleotide
  source 1..25: mol_type = other DNA
agggccccagcctgcgggatgatca

SEQ ID NO: 5351 - DNA, 25 bp, synthetic construct
  misc_feature 1..25: note = Oligonucleotide
  source 1..25: mol_type = other DNA
aacagggccccagcctgcgggatga

SEQ ID NO: 5352 - DNA, 25 bp, synthetic construct
  misc_feature 1..25: note = Oligonucleotide
  source 1..25: mol_type = other DNA
atcaacagggccccagcctgcggga

SEQ ID NO: 5353 - DNA, 25 bp, synthetic construct
  misc_feature 1..25: note = Oligonucleotide
  source 1..25: mol_type = other DNA
ttgatcaacagggccccagcctgcg

SEQ ID NO: 5354 - DNA, 25 bp, synthetic construct
  misc_feature 1..25: note = Oligonucleotide
  source 1..25: mol_type = other DNA
tgtttgatcaacagggccccagcct

SEQ ID NO: 5355 - DNA, 25 bp, synthetic construct
  misc_feature 1..25: note = Oligonucleotide
  source 1..25: mol_type = other DNA
agctgtttgatcaacagggccccag

SEQ ID NO: 5356 - DNA, 25 bp, synthetic construct
  misc_feature 1..25: note = Oligonucleotide
  source 1..25: mol_type = other DNA
tgcagctgtttgatcaacagggccc

SEQ ID NO: 5357 - DNA, 25 bp, synthetic construct
  misc_feature 1..25: note = Oligonucleotide
  source 1..25: mol_type = other DNA
gtttgcagctgtttgatcaacaggg

SEQ ID NO: 5358 - DNA, 25 bp, synthetic construct
  misc_feature 1..25: note = Oligonucleotide
  source 1..25: mol_type = other DNA
tgggtttgcagctgtttgatcaaca

SEQ ID NO: 5359 - DNA, 25 bp, synthetic construct
  misc_feature 1..25: note = Oligonucleotide
  source 1..25: mol_type = other DNA
agctgggtttgcagctgtttgatca

SEQ ID NO: 5360 - DNA, 25 bp, synthetic construct
  misc_feature 1..25: note = Oligonucleotide
  source 1..25: mol_type = other DNA
cacagctgggtttgcagctgtttga

SEQ ID NO: 5361 - DNA, 25 bp, synthetic construct
  misc_feature 1..25: note = Oligonucleotide
  source 1..25: mol_type = other DNA
ggacacagctgggtttgcagctgtt

SEQ ID NO: 5362 - DNA, 25 bp, synthetic construct
  misc_feature 1..25: note = Oligonucleotide
  source 1..25: mol_type = other DNA
gcaggacacagctgggtttgcagct

SEQ ID NO: 5363 - DNA, 25 bp, synthetic construct
  misc_feature 1..25: note = Oligonucleotide
  source 1..25: mol_type = other DNA
acagcaggacacagctgggtttgca

SEQ ID NO: 5364 - DNA, 25 bp, synthetic construct
  misc_feature 1..25: note = Oligonucleotide
  source 1..25: mol_type = other DNA
tgcacagcaggacacagctgggttt

SEQ ID NO: 5365 - DNA, 25 bp, synthetic construct
  misc_feature 1..25: note = Oligonucleotide
  source 1..25: mol_type = other DNA
gggtgcacagcaggacacagctggg

SEQ ID NO: 5366 - DNA, 25 bp, synthetic construct
  misc_feature 1..25: note = Oligonucleotide
  source 1..25: mol_type = other DNA
tctgggtgcacagcaggacacagct

SEQ ID NO: 5367 - DNA, 25 bp, synthetic construct
  misc_feature 1..25: note = Oligonucleotide
  source 1..25: mol_type = other DNA
ccctctgggtgcacagcaggacaca

SEQ ID NO: 5368 - DNA, 25 bp, synthetic construct
  misc_feature 1..25: note = Oligonucleotide
  source 1..25: mol_type = other DNA
gggccctctgggtgcacagcaggac

SEQ ID NO: 5369 - DNA, 25 bp, synthetic construct
  misc_feature 1..25: note = Oligonucleotide
  source 1..25: mol_type = other DNA
ccagggccctctgggtgcacagcag

SEQ ID NO: 5370 - DNA, 25 bp, synthetic construct
  misc_feature 1..25: note = Oligonucleotide
  source 1..25: mol_type = other DNA
ctcccagggccctctgggtgcacag

SEQ ID NO: 5371 - DNA, 25 bp, synthetic construct
  misc_feature 1..25: note = Oligonucleotide
  source 1..25: mol_type = other DNA
tcactcccagggccctctgggtgca

SEQ ID NO: 5372 - DNA, 25 bp, synthetic construct
  misc_feature 1..25: note = Oligonucleotide
  source 1..25: mol_type = other DNA
cgctcactcccagggccctctgggt

SEQ ID NO: 5373 - DNA, 25 bp, synthetic construct
  misc_feature 1..25: note = Oligonucleotide
  source 1..25: mol_type = other DNA
acccgctcactcccagggccctctg

SEQ ID NO: 5374 - DNA, 25 bp, synthetic construct
  misc_feature 1..25: note = Oligonucleotide
  source 1..25: mol_type = other DNA
tggacccgctcactcccagggccct

SEQ ID NO: 5375 - DNA, 25 bp, synthetic construct
  misc_feature 1..25: note = Oligonucleotide
  source 1..25: mol_type = other DNA
aagtggacccgctcactcccagggc

SEQ ID NO: 5376 - DNA, 25 bp, synthetic construct
  misc_feature 1..25: note = Oligonucleotide
  source 1..25: mol_type = other DNA
accaagtggacccgctcactcccag

SEQ ID NO: 5377 - DNA, 25 bp, synthetic construct
  misc_feature 1..25: note = Oligonucleotide
  source 1..25: mol_type = other DNA
ggaaccaagtggacccgctcactcc

SEQ ID NO: 5378 - DNA, 25 bp, synthetic construct
  misc_feature 1..25: note = Oligonucleotide
  source 1..25: mol_type = other DNA
tcaggaaccaagtggacccgctcac

SEQ ID NO: 5379 - DNA, 25 bp, synthetic construct
  misc_feature 1..25: note = Oligonucleotide
  source 1..25: mol_type = other DNA
ccatcaggaaccaagtggacccgct

SEQ ID NO: 5380 - DNA, 25 bp, synthetic construct
  misc_feature 1..25: note = Oligonucleotide
  source 1..25: mol_type = other DNA
agcccatcaggaaccaagtggaccc

SEQ ID NO: 5381 - DNA, 25 bp, synthetic construct
  misc_feature 1..25: note = Oligonucleotide
  source 1..25: mol_type = other DNA
caaagcccatcaggaaccaagtgga

SEQ ID NO: 5382 - DNA, 25 bp, synthetic construct
  misc_feature 1..25: note = Oligonucleotide
  source 1..25: mol_type = other DNA
aaacaaagcccatcaggaaccaagt

SEQ ID NO: 5383 - DNA, 25 bp, synthetic construct
  misc_feature 1..25: note = Oligonucleotide
  source 1..25: mol_type = other DNA
gggaaacaaagcccatcaggaacca

SEQ ID NO: 5384 - DNA, 25 bp, synthetic construct
  misc_feature 1..25: note = Oligonucleotide
  source 1..25: mol_type = other DNA
taagggaaacaaagcccatcaggaa

SEQ ID NO: 5385 - DNA, 25 bp, synthetic construct
  misc_feature 1..25: note = Oligonucleotide
  source 1..25: mol_type = other DNA
aattaagggaaacaaagcccatcag

SEQ ID NO: 5386 - DNA, 25 bp, synthetic construct
  misc_feature 1..25: note = Oligonucleotide
  source 1..25: mol_type = other DNA
gataattaagggaaacaaagcccat

SEQ ID NO: 5387 - DNA, 25 bp, synthetic construct
  misc_feature 1..25: note = Oligonucleotide
  source 1..25: mol_type = other DNA
ttagataattaagggaaacaaagcc

SEQ ID NO: 5388 - DNA, 25 bp, synthetic construct
  misc_feature 1..25: note = Oligonucleotide
  source 1..25: mol_type = other DNA
attttagataattaagggaaacaaa

SEQ ID NO: 5389 - DNA, 25 bp, synthetic construct
  misc_feature 1..25: note = Oligonucleotide
  source 1..25: mol_type = other DNA
ataattttagataattaagggaaac

SEQ ID NO: 5390 - DNA, 25 bp, synthetic construct
  misc_feature 1..25: note = Oligonucleotide
  source 1..25: mol_type = other DNA
taaataattttagataattaaggga

SEQ ID NO: 5391 - DNA, 25 bp, synthetic construct
  misc_feature 1..25: note = Oligonucleotide
  source 1..25: mol_type = other DNA
aaataaataattttagataattaag

SEQ ID NO: 5392 - DNA, 25 bp, synthetic construct
  misc_feature 1..25: note = Oligonucleotide
  source 1..25: mol_type = other DNA
cttaaataaataattttagataatt

SEQ ID NO: 5393 - DNA, 25 bp, synthetic construct
  misc_feature 1..25: note = Oligonucleotide
  source 1..25: mol_type = other DNA
attcttaaataaataattttagata

SEQ ID NO: 5394 - DNA, 25 bp, synthetic construct
  misc_feature 1..25: note = Oligonucleotide
  source 1..25: mol_type = other DNA
tatattcttaaataaataattttag

SEQ ID NO: 5395 - DNA, 25 bp, synthetic construct
  misc_feature 1..25: note = Oligonucleotide
  source 1..25: mol_type = other DNA
ggatatattcttaaataaataattt

SEQ ID NO: 5396 - DNA, 25 bp, synthetic construct
  misc_feature 1..25: note = Oligonucleotide
  source 1..25: mol_type = other DNA
agaggatatattcttaaataaataa

SEQ ID NO: 5397 - DNA, 25 bp, synthetic construct
  misc_feature 1..25: note = Oligonucleotide
  source 1..25: mol_type = other DNA
attagaggatatattcttaaataaa

SEQ ID NO: 5398 - DNA, 25 bp, synthetic construct
  misc_feature 1..25: note = Oligonucleotide
  source 1..25: mol_type = other DNA
aatattagaggatatattcttaaat

SEQ ID NO: 5399 - DNA, 25 bp, synthetic construct
  misc_feature 1..25: note = Oligonucleotide
  source 1..25: mol_type = other DNA
cccaatattagaggatatattctta

SEQ ID NO: 5400 - DNA, 25 bp, synthetic construct
  misc_feature 1..25: note = Oligonucleotide
  source 1..25: mol_type = other DNA
ccccccaatattagaggatatattc

SEQ ID NO: 5401 - DNA, 25 bp, synthetic construct
  misc_feature 1..25: note = Oligonucleotide
  source 1..25: mol_type = other DNA
tctccccccaatattagaggatata

SEQ ID NO: 5402 - DNA, 25 bp, synthetic construct
  misc_feature 1..25: note = Oligonucleotide
  source 1..25: mol_type = other DNA
aaatctccccccaatattagaggat

SEQ ID NO: 5403 - DNA, 25 bp, synthetic construct
  misc_feature 1..25: note = Oligonucleotide
  source 1..25: mol_type = other DNA
cataaatctccccccaatattagag

SEQ ID NO: 5404 - DNA, 25 bp, synthetic construct
  misc_feature 1..25: note = Oligonucleotide
  source 1..25: mol_type = other DNA
tgacataaatctccccccaatatta

SEQ ID NO: 5405 - DNA, 25 bp, synthetic construct
  misc_feature 1..25: note = Oligonucleotide
  source 1..25: mol_type = other DNA
ggttgacataaatctccccccaata

SEQ ID NO: 5406 - DNA, 25 bp, synthetic construct
  misc_feature 1..25: note = Oligonucleotide
  source 1..25: mol_type = other DNA
tgaggttgacataaatctcccccca

SEQ ID NO: 5407 - DNA, 25 bp, synthetic construct
  misc_feature 1..25: note = Oligonucleotide
  source 1..25: mol_type = other DNA
tgatgaggttgacataaatctcccc

SEQ ID NO: 5408 - DNA, 25 bp, synthetic construct
  misc_feature 1..25: note = Oligonucleotide
  source 1..25: mol_type = other DNA
aactgatgaggttgacataaatctc

SEQ ID NO: 5409 - DNA, 25 bp, synthetic construct
  misc_feature 1..25: note = Oligonucleotide
  source 1..25: mol_type = other DNA
acaaactgatgaggttgacataaat

SEQ ID NO: 5410 - DNA, 25 bp, synthetic construct
  misc_feature 1..25: note = Oligonucleotide
  source 1..25: mol_type = other DNA
attacaaactgatgaggttgacata

SEQ ID NO: 5411 - DNA, 25 bp, synthetic construct
  misc_feature 1..25: note = Oligonucleotide
  source 1..25: mol_type = other DNA
caaattacaaactgatgaggttgac

SEQ ID NO: 5412 - DNA, 25 bp, synthetic construct
  misc_feature 1..25: note = Oligonucleotide
  source 1..25: mol_type = other DNA
ctgcaaattacaaactgatgaggtt

SEQ ID NO: 5413 - DNA, 25 bp, synthetic construct
  misc_feature 1..25: note = Oligonucleotide
  source 1..25: mol_type = other DNA
attctgcaaattacaaactgatgag

SEQ ID NO: 5414 - DNA, 25 bp, synthetic construct
  misc_feature 1..25: note = Oligonucleotide
  source 1..25: mol_type = other DNA
agaattctgcaaattacaaactgat

SEQ ID NO: 5415 - DNA, 25 bp, synthetic construct
  misc_feature 1..25: note = Oligonucleotide
  source 1..25: mol_type = other DNA
tcaagaattctgcaaattacaaact

SEQ ID NO: 5416 - DNA, 25 bp, synthetic construct
  misc_feature 1..25: note = Oligonucleotide
  source 1..25: mol_type = other DNA
tcatcaagaattctgcaaattacaa

SEQ ID NO: 5417 - DNA, 25 bp, synthetic construct
  misc_feature 1..25: note = Oligonucleotide
  source 1..25: mol_type = other DNA
gattcatcaagaattctgcaaatta

SEQ ID NO: 5418 - DNA, 25 bp, synthetic construct
  misc_feature 1..25: note = Oligonucleotide
  source 1..25: mol_type = other DNA
aaggattcatcaagaattctgcaaa

SEQ ID NO: 5419 - DNA, 25 bp, synthetic construct
  misc_feature 1..25: note = Oligonucleotide
  source 1..25: mol_type = other DNA
ggaaaggattcatcaagaattctgc

SEQ ID NO: 5420 - DNA, 25 bp, synthetic construct
  misc_feature 1..25: note = Oligonucleotide
  source 1..25: mol_type = other DNA
aagggaaaggattcatcaagaattc

SEQ ID NO: 5421 - DNA, 25 bp, synthetic construct
  misc_feature 1..25: note = Oligonucleotide
  source 1..25: mol_type = other DNA
caaaagggaaaggattcatcaagaa

SEQ ID NO: 5422 - DNA, 25 bp, synthetic construct
  misc_feature 1..25: note = Oligonucleotide
  source 1..25: mol_type = other DNA
tttcaaaagggaaaggattcatcaa

SEQ ID NO: 5423 - DNA, 25 bp, synthetic construct
  misc_feature 1..25: note = Oligonucleotide
  source 1..25: mol_type = other DNA
tgttttcaaaagggaaaggattcat

SEQ ID NO: 5424 - DNA, 25 bp, synthetic construct
  misc_feature 1..25: note = Oligonucleotide
  source 1..25: mol_type = other DNA
aagtgttttcaaaagggaaaggatt

SEQ ID NO: 5425 - DNA, 25 bp, synthetic construct
  misc_feature 1..25: note = Oligonucleotide
  source 1..25: mol_type = other DNA
gagaagtgttttcaaaagggaaagg

SEQ ID NO: 5426 - DNA, 25 bp, synthetic construct
  misc_feature 1..25: note = Oligonucleotide
  source 1..25: mol_type = other DNA
ggtgagaagtgttttcaaaagggaa

SEQ ID NO: 5427 - DNA, 25 bp, synthetic construct
  misc_feature 1..25: note = Oligonucleotide
  source 1..25: mol_type = other DNA
ccgggtgagaagtgttttcaaaagg

SEQ ID NO: 5428 - DNA, 25 bp, synthetic construct
  misc_feature 1..25: note = Oligonucleotide
  source 1..25: mol_type = other DNA
gagccgggtgagaagtgttttcaaa

SEQ ID NO: 5429 - DNA, 25 bp, synthetic construct
  misc_feature 1..25: note = Oligonucleotide
  source 1..25: mol_type = other DNA
ctggagccgggtgagaagtgttttc

SEQ ID NO: 5430 - DNA, 25 bp, synthetic construct
  misc_feature 1..25: note = Oligonucleotide
  source 1..25: mol_type = other DNA
gtgctggagccgggtgagaagtgtt

SEQ ID NO: 5431 - DNA, 25 bp, synthetic construct
  misc_feature 1..25: note = Oligonucleotide
  source 1..25: mol_type = other DNA
atggtgctggagccgggtgagaagt

SEQ ID NO: 5432 - DNA, 25 bp, synthetic construct
  misc_feature 1..25: note = Oligonucleotide
  source 1..25: mol_type = other DNA
gcgatggtgctggagccgggtgaga

SEQ ID NO: 5433 - DNA, 25 bp, synthetic construct
  misc_feature 1..25: note = Oligonucleotide
  source 1..25: mol_type = other DNA
ccggcgatggtgctggagccgggtg

SEQ ID NO: 5434 - DNA, 25 bp, synthetic construct
  misc_feature 1..25: note = Oligonucleotide
  source 1..25: mol_type = other DNA
catccggcgatggtgctggagccgg

SEQ ID NO: 5435 - DNA, 25 bp, synthetic construct
  misc_feature 1..25: note = Oligonucleotide
  source 1..25: mol_type = other DNA
ggtcatccggcgatggtgctggagc

SEQ ID NO: 5436 - DNA, 25 bp, synthetic construct
  misc_feature 1..25: note = Oligonucleotide
  source 1..25: mol_type = other DNA
tctggtcatccggcgatggtgctgg

SEQ ID NO: 5437 - DNA, 25 bp, synthetic construct
  misc_feature 1..25: note = Oligonucleotide
  source 1..25: mol_type = other DNA
gtttctggtcatccggcgatggtgc

SEQ ID NO: 5438 - DNA, 25 bp, synthetic construct
  misc_feature 1..25: note = Oligonucleotide
  source 1..25: mol_type = other DNA
gctgtttctggtcatccggcgatgg

SEQ ID NO: 5439 - DNA, 25 bp, synthetic construct
  misc_feature 1..25: note = Oligonucleotide
  source 1..25: mol_type = other DNA
gcagctgtttctggtcatccggcga

SEQ ID NO: 5440 - DNA, 25 bp, synthetic construct
  misc_feature 1..25: note = Oligonucleotide
  source 1..25: mol_type = other DNA
tgagcagctgtttctggtcatccgg

SEQ ID NO: 5441 - DNA, 25 bp, synthetic construct
  misc_feature 1..25: note = Oligonucleotide
  source 1..25: mol_type = other DNA
tagtgagcagctgtttctggtcatc

SEQ ID NO: 5442 - DNA, 25 bp, synthetic construct
  misc_feature 1..25: note = Oligonucleotide
  source 1..25: mol_type = other DNA
gtttagtgagcagctgtttctggtc

SEQ ID NO: 5443 - DNA, 25 bp, synthetic construct
  misc_feature 1..25: note = Oligonucleotide
  source 1..25: mol_type = other DNA
aacgtttagtgagcagctgtttctg

SEQ ID NO: 5444 - DNA, 25 bp, synthetic construct
  misc_feature 1..25: note = Oligonucleotide
  source 1..25: mol_type = other DNA
cataacgtttagtgagcagctgttt

SEQ ID NO: 5445 - DNA, 25 bp, synthetic construct
  misc_feature 1..25: note = Oligonucleotide
  source 1..25: mol_type = other DNA
gcacataacgtttagtgagcagctg

SEQ ID NO: 5446 - DNA, 25 bp, synthetic construct
  misc_feature 1..25: note = Oligonucleotide
  source 1..25: mol_type = other DNA
gacgcacataacgtttagtgagcag

SEQ ID NO: 5447 - DNA, 25 bp, synthetic construct
  misc_feature 1..25: note = Oligonucleotide
  source 1..25: mol_type = other DNA
cgggacgcacataacgtttagtgag

SEQ ID NO: 5448 - DNA, 25 bp, synthetic construct
  misc_feature 1..25: note = Oligonucleotide
  source 1..25: mol_type = other DNA
cagcgggacgcacataacgtttagt

SEQ ID NO: 5449 - DNA, 25 bp, synthetic construct
  misc_feature 1..25: note = Oligonucleotide
  source 1..25: mol_type = other DNA
ccacagcgggacgcacataacgttt

SEQ ID NO: 5450 - DNA, 25 bp, synthetic construct
  misc_feature 1..25: note = Oligonucleotide
  source 1..25: mol_type = other DNA
gacccacagcgggacgcacataacg

SEQ ID NO: 5451 - DNA, 25 bp, synthetic construct
  misc_feature 1..25: note = Oligonucleotide
  source 1..25: mol_type = other DNA
agagacccacagcgggacgcacata

SEQ ID NO: 5452 - DNA, 25 bp, synthetic construct
  misc_feature 1..25: note = Oligonucleotide
  source 1..25: mol_type = other DNA
cccagagacccacagcgggacgcac

SEQ ID NO: 5453 - DNA, 25 bp, synthetic construct
  misc_feature 1..25: note = Oligonucleotide
  source 1..25: mol_type = other DNA
catcccagagacccacagcgggacg

SEQ ID NO: 5454 - DNA, 25 bp, synthetic construct
  misc_feature 1..25: note = Oligonucleotide
  source 1..25: mol_type = other DNA
acccatcccagagacccacagcggg

SEQ ID NO: 5455 - DNA, 25 bp, synthetic construct
  misc_feature 1..25: note = Oligonucleotide
  source 1..25: mol_type = other DNA
aagacccatcccagagacccacagc

SEQ ID NO: 5456 - DNA, 25 bp, synthetic construct
  misc_feature 1..25: note = Oligonucleotide
  source 1..25: mol_type = other DNA
tggaagacccatcccagagacccac

SEQ ID NO: 5457 - DNA, 25 bp, synthetic construct
  misc_feature 1..25: note = Oligonucleotide
  source 1..25: mol_type = other DNA
gtctggaagacccatcccagagacc

SEQ ID NO: 5458 - DNA, 25 bp, synthetic construct
  misc_feature 1..25: note = Oligonucleotide
  source 1..25: mol_type = other DNA
taggtctggaagacccatcccagag

SEQ ID NO: 5459 - DNA, 25 bp, synthetic construct
  misc_feature 1..25: note = Oligonucleotide
  source 1..25: mol_type = other DNA
ctctaggtctggaagacccatccca

SEQ ID NO: 5460 - DNA, 25 bp, synthetic construct
  misc_feature 1..25: note = Oligonucleotide
  source 1..25: mol_type = other DNA
tctctctaggtctggaagacccatc

SEQ ID NO: 5461 - DNA, 25 bp, synthetic construct
  misc_feature 1..25: note = Oligonucleotide
  source 1..25: mol_type = other DNA
ctgtctctctaggtctggaagaccc

SEQ ID NO: 5462 - DNA, 25 bp, synthetic construct
  misc_feature 1..25: note = Oligonucleotide
  source 1..25: mol_type = other DNA
aggctgtctctctaggtctggaaga

SEQ ID NO: 5463 - DNA, 25 bp, synthetic construct
  misc_feature 1..25: note = Oligonucleotide
  source 1..25: mol_type = other DNA
gagaggctgtctctctaggtctgga

SEQ ID NO: 5464 - DNA, 25 bp, synthetic construct
  misc_feature 1..25: note = Oligonucleotide
  source 1..25: mol_type = other DNA
taggagaggctgtctctctaggtct

SEQ ID NO: 5465 - DNA, 25 bp, synthetic construct
  misc_feature 1..25: note = Oligonucleotide
  source 1..25: mol_type = other DNA
ggctaggagaggctgtctctctagg

SEQ ID NO: 5466 - DNA, 25 bp, synthetic construct
  misc_feature 1..25: note = Oligonucleotide
  source 1..25: mol_type = other DNA
acgggctaggagaggctgtctctct

SEQ ID NO: 5467 - DNA, 25 bp, synthetic construct
  misc_feature 1..25: note = Oligonucleotide
  source 1..25: mol_type = other DNA
gccacgggctaggagaggctgtctc

SEQ ID NO: 5468 - DNA, 25 bp, synthetic construct
  misc_feature 1..25: note = Oligonucleotide
  source 1..25: mol_type = other DNA
tgagccacgggctaggagaggctgt

SEQ ID NO: 5469 - DNA, 25 bp, synthetic construct
  misc_feature 1..25: note = Oligonucleotide
  source 1..25: mol_type = other DNA
gcctgagccacgggctaggagaggc

SEQ ID NO: 5470 - DNA, 25 bp, synthetic construct
  misc_feature 1..25: note = Oligonucleotide
  source 1..25: mol_type = other DNA
gccgcctgagccacgggctaggaga

SEQ ID NO: 5471 - DNA, 25 bp, synthetic construct
  misc_feature 1..25: note = Oligonucleotide
  source 1..25: mol_type = other DNA
gttgccgcctgagccacgggctagg

SEQ ID NO: 5472 - DNA, 25 bp, synthetic construct
  misc_feature 1..25: note = Oligonucleotide
  source 1..25: mol_type = other DNA
cacgttgccgcctgagccacgggct

SEQ ID NO: 5473 - DNA, 25 bp, synthetic construct
  misc_feature 1..25: note = Oligonucleotide
  source 1..25: mol_type = other DNA
agacacgttgccgcctgagccacgg

SEQ ID NO: 5474 - DNA, 25 bp, synthetic construct
  misc_feature 1..25: note = Oligonucleotide
  source 1..25: mol_type = other DNA
gggagacacgttgccgcctgagcca

SEQ ID NO: 5475 - DNA, 25 bp, synthetic construct
  misc_feature 1..25: note = Oligonucleotide
  source 1..25: mol_type = other DNA
catgggagacacgttgccgcctgag

SEQ ID NO: 5476 - DNA, 25 bp, synthetic construct
  misc_feature 1..25: note = Oligonucleotide
  source 1..25: mol_type = other DNA
catcatgggagacacgttgccgcct

SEQ ID NO: 5477 - DNA, 25 bp, synthetic construct
  misc_feature 1..25: note = Oligonucleotide
  source 1..25: mol_type = other DNA
cagcatcatgggagacacgttgccg

SEQ ID NO: 5478 - DNA, 25 bp, synthetic construct
  misc_feature 1..25: note = Oligonucleotide
  source 1..25: mol_type = other DNA
gctcagcatcatgggagacacgttg

SEQ ID NO: 5479 - DNA, 25 bp, synthetic construct
  misc_feature 1..25: note = Oligonucleotide
  source 1..25: mol_type = other DNA
acggctcagcatcatgggagacacg

SEQ ID NO: 5480 - DNA, 25 bp, synthetic construct
  misc_feature 1..25: note = Oligonucleotide
  source 1..25: mol_type = other DNA
cacacggctcagcatcatgggagac

SEQ ID NO: 5481 - DNA, 25 bp, synthetic construct
  misc_feature 1..25: note = Oligonucleotide
  source 1..25: mol_type = other DNA
gcacacacggctcagcatcatggga

SEQ ID NO: 5482 - DNA, 25 bp, synthetic construct
  misc_feature 1..25: note = Oligonucleotide
  source 1..25: mol_type = other DNA
gaggcacacacggctcagcatcatg

SEQ ID NO: 5483 - DNA, 25 bp, synthetic construct
  misc_feature 1..25: note = Oligonucleotide
  source 1..25: mol_type = other DNA
cgtgaggcacacacggctcagcatc

SEQ ID NO: 5484 - DNA, 25 bp, synthetic construct
  misc_feature 1..25: note = Oligonucleotide
  source 1..25: mol_type = other DNA
ctccgtgaggcacacacggctcagc

SEQ ID NO: 5485 - DNA, 25 bp, synthetic construct
  misc_feature 1..25: note = Oligonucleotide
  source 1..25: mol_type = other DNA
aaactccgtgaggcacacacggctc

SEQ ID NO: 5486 - DNA, 25 bp, synthetic construct
  misc_feature 1..25: note = Oligonucleotide
  source 1..25: mol_type = other DNA
agaaaactccgtgaggcacacacgg

SEQ ID NO: 5487 - DNA, 25 bp, synthetic construct
  misc_feature 1..25: note = Oligonucleotide
  source 1..25: mol_type = other DNA
gagagaaaactccgtgaggcacaca

SEQ ID NO: 5488 - DNA, 25 bp, synthetic construct
  misc_feature 1..25: note = Oligonucleotide
  source 1..25: mol_type = other DNA
atggagagaaaactccgtgaggcac

SEQ ID NO: 5489 - DNA, 25 bp, synthetic construct
  misc_feature 1..25: note = Oligonucleotide
  source 1..25: mol_type = other DNA
tgaatggagagaaaactccgtgagg

SEQ ID NO: 5490 - DNA, 25 bp, synthetic construct
  misc_feature 1..25: note = Oligonucleotide
  source 1..25: mol_type = other DNA
atatgaatggagagaaaactccgtg

SEQ ID NO: 5491 - DNA, 25 bp, synthetic construct
  misc_feature 1..25: note = Oligonucleotide
  source 1..25: mol_type = other DNA
aagatatgaatggagagaaaactcc

SEQ ID NO: 5492 - DNA, 25 bp, synthetic construct
  misc_feature 1..25: note = Oligonucleotide
  source 1..25: mol_type = other DNA
gtaaagatatgaatggagagaaaac

SEQ ID NO: 5493 - DNA, 25 bp, synthetic construct
  misc_feature 1..25: note = Oligonucleotide
  source 1..25: mol_type = other DNA
gaagtaaagatatgaatggagagaa

SEQ ID NO: 5494 - DNA, 25 bp, synthetic construct
  misc_feature 1..25: note = Oligonucleotide
  source 1..25: mol_type = other DNA
gcagaagtaaagatatgaatggaga

SEQ ID NO: 5495 - DNA, 25 bp, synthetic construct
  misc_feature 1..25: note = Oligonucleotide
  source 1..25: mol_type = other DNA
actgcagaagtaaagatatgaatgg

SEQ ID NO: 5496 - DNA, 25 bp, synthetic construct
  misc_feature 1..25: note = Oligonucleotide
  source 1..25: mol_type = other DNA
gaaactgcagaagtaaagatatgaa

SEQ ID NO: 5497 - DNA, 25 bp, synthetic construct
  misc_feature 1..25: note = Oligonucleotide
  source 1..25: mol_type = other DNA
ccggaaactgcagaagtaaagatat

SEQ ID NO: 5498 - DNA, 25 bp, synthetic construct
  misc_feature 1..25: note = Oligonucleotide
  source 1..25: mol_type = other DNA
tccccggaaactgcagaagtaaaga

SEQ ID NO: 5499 - DNA, 25 bp, synthetic construct
  misc_feature 1..25: note = Oligonucleotide
  source 1..25: mol_type = other DNA
tactccccggaaactgcagaagtaa

SEQ ID NO: 5500 - DNA, 25 bp, synthetic construct
  misc_feature 1..25: note = Oligonucleotide
  source 1..25: mol_type = other DNA
ccatactccccggaaactgcagaag

SEQ ID NO: 5501 - DNA, 25 bp, synthetic construct
  misc_feature 1..25: note = Oligonucleotide
  source 1..25: mol_type = other DNA
gcaccatactccccggaaactgcag

SEQ ID NO: 5502 - DNA, 25 bp, synthetic construct
  misc_feature 1..25: note = Oligonucleotide
  source 1..25: mol_type = other DNA
taagcaccatactccccggaaactg

SEQ ID NO: 5503 - DNA, 25 bp, synthetic construct
  misc_feature 1..25: note = Oligonucleotide
  source 1..25: mol_type = other DNA
acttaagcaccatactccccggaaa

SEQ ID NO: 5504 - DNA, 25 bp, synthetic construct
  misc_feature 1..25: note = Oligonucleotide
  source 1..25: mol_type = other DNA
gagacttaagcaccatactccccgg

SEQ ID NO: 5505 - DNA, 25 bp, synthetic construct
  misc_feature 1..25: note = Oligonucleotide
  source 1..25: mol_type = other DNA
gatgagacttaagcaccatactccc

SEQ ID NO: 5506 - DNA, 25 bp, synthetic construct
  misc_feature 1..25: note = Oligonucleotide
  source 1..25: mol_type = other DNA
agagatgagacttaagcaccatact

SEQ ID NO: 5507 - DNA, 25 bp, synthetic construct
  misc_feature 1..25: note = Oligonucleotide
  source 1..25: mol_type = other DNA
gtaagagatgagacttaagcaccat

SEQ ID NO: 5508 - DNA, 25 bp, synthetic construct
  misc_feature 1..25: note = Oligonucleotide
  source 1..25: mol_type = other DNA
gaagtaagagatgagacttaagcac

SEQ ID NO: 5509 - DNA, 25 bp, synthetic construct
  misc_feature 1..25: note = Oligonucleotide
  source 1..25: mol_type = other DNA
taggaagtaagagatgagacttaag

SEQ ID NO: 5510 - DNA, 25 bp, synthetic construct
  misc_feature 1..25: note = Oligonucleotide
  source 1..25: mol_type = other DNA
gactaggaagtaagagatgagactt

SEQ ID NO: 5511 - DNA, 25 bp, synthetic construct
  misc_feature 1..25: note = Oligonucleotide
  source 1..25: mol_type = other DNA
tctgactaggaagtaagagatgaga

SEQ ID NO: 5512 - DNA, 25 bp, synthetic construct
  misc_feature 1..25: note = Oligonucleotide
  source 1..25: mol_type = other DNA
atctctgactaggaagtaagagatg

SEQ ID NO: 5513 - DNA, 25 bp, synthetic construct
  misc_feature 1..25: note = Oligonucleotide
  source 1..25: mol_type = other DNA
taaatctctgactaggaagtaagag

SEQ ID NO: 5514 - DNA, 25 bp, synthetic construct
  misc_feature 1..25: note = Oligonucleotide
  source 1..25: mol_type = other DNA
ccataaatctctgactaggaagtaa

SEQ ID NO: 5515 - DNA, 25 bp, synthetic construct
  misc_feature 1..25: note = Oligonucleotide
  source 1..25: mol_type = other DNA
ttgccataaatctctgactaggaag

SEQ ID NO: 5516 - DNA, 25 bp, synthetic construct
  misc_feature 1..25: note = Oligonucleotide
  source 1..25: mol_type = other DNA
aaattgccataaatctctgactagg

SEQ ID NO: 5517 - DNA, 25 bp, synthetic construct
  misc_feature 1..25: note = Oligonucleotide
  source 1..25: mol_type = other DNA
gcgaaattgccataaatctctgact

SEQ ID NO: 5518 - DNA, 25 bp, synthetic construct
  misc_feature 1..25: note = Oligonucleotide
  source 1..25: mol_type = other DNA
gaagcgaaattgccataaatctctg

SEQ ID NO: 5519 - DNA, 25 bp, synthetic construct
  misc_feature 1..25: note = Oligonucleotide
  source 1..25: mol_type = other DNA
actgaagcgaaattgccataaatct

SEQ ID NO: 5520 - DNA, 25 bp, synthetic construct
  misc_feature 1..25: note = Oligonucleotide
  source 1..25: mol_type = other DNA
caaactgaagcgaaattgccataaa

SEQ ID NO: 5521 - DNA, 25 bp, synthetic construct
  misc_feature 1..25: note = Oligonucleotide
  source 1..25: mol_type = other DNA
gagcaaactgaagcgaaattgccat

SEQ ID NO: 5522 - DNA, 25 bp, synthetic construct
  misc_feature 1..25: note = Oligonucleotide
  source 1..25: mol_type = other DNA
caggagcaaactgaagcgaaattgc

SEQ ID NO: 5523 - DNA, 25 bp, synthetic construct
  misc_feature 1..25: note = Oligonucleotide
  source 1..25: mol_type = other DNA
acccaggagcaaactgaagcgaaat

SEQ ID NO: 5524 - DNA, 25 bp, synthetic construct
  misc_feature 1..25: note = Oligonucleotide
  source 1..25: mol_type = other DNA
ccaacccaggagcaaactgaagcga

SEQ ID NO: 5525 - DNA, 25 bp, synthetic construct
  misc_feature 1..25: note = Oligonucleotide
  source 1..25: mol_type = other DNA
tatccaacccaggagcaaactgaag

SEQ ID NO: 5526 - DNA, 25 bp, synthetic construct
  misc_feature 1..25: note = Oligonucleotide
  source 1..25: mol_type = other DNA
ccttatccaacccaggagcaaactg

SEQ ID NO: 5527 - DNA, 25 bp, synthetic construct
  misc_feature 1..25: note = Oligonucleotide
  source 1..25: mol_type = other DNA
cacccttatccaacccaggagcaaa

SEQ ID NO: 5528 - DNA, 25 bp, synthetic construct
  misc_feature 1..25: note = Oligonucleotide
  source 1..25: mol_type = other DNA
catcacccttatccaacccaggagc

SEQ ID NO: 5529 - DNA, 25 bp, synthetic construct
  misc_feature 1..25: note = Oligonucleotide
  source 1..25: mol_type = other DNA
tatcatcacccttatccaacccagg

SEQ ID NO: 5530 - DNA, 25 bp, synthetic construct
  misc_feature 1..25: note = Oligonucleotide
  source 1..25: mol_type = other DNA
ttttatcatcacccttatccaaccc

SEQ ID NO: 5531 - DNA, 25 bp, synthetic construct
  misc_feature 1..25: note = Oligonucleotide
  source 1..25: mol_type = other DNA
ggattttatcatcacccttatccaa

SEQ ID NO: 5532 - DNA, 25 bp, synthetic construct
  misc_feature 1..25: note = Oligonucleotide
  source 1..25: mol_type = other DNA
cgaggattttatcatcacccttatc

SEQ ID NO: 5533 - DNA, 25 bp, synthetic construct
  misc_feature 1..25: note = Oligonucleotide
  source 1..25: mol_type = other DNA
acacgaggattttatcatcaccctt

SEQ ID NO: 5534 - DNA, 25 bp, synthetic construct
  misc_feature 1..25: note = Oligonucleotide
  source 1..25: mol_type = other DNA
actacacgaggattttatcatcacc

SEQ ID NO: 5535 - DNA, 25 bp, synthetic construct
  misc_feature 1..25: note = Oligonucleotide
  source 1..25: mol_type = other DNA
acaactacacgaggattttatcatc

SEQ ID NO: 5536 - DNA, 25 bp, synthetic construct
  misc_feature 1..25: note = Oligonucleotide
  source 1..25: mol_type = other DNA
cccacaactacacgaggattttatc

SEQ ID NO: 5537 - DNA, 25 bp, synthetic construct
  misc_feature 1..25: note = Oligonucleotide
  source 1..25: mol_type = other DNA
catcccacaactacacgaggatttt

SEQ ID NO: 5538 - DNA, 25 bp, synthetic construct
  misc_feature 1..25: note = Oligonucleotide
  source 1..25: mol_type = other DNA
tctcatcccacaactacacgaggat

SEQ ID NO: 5539 - DNA, 25 bp, synthetic construct
  misc_feature 1..25: note = Oligonucleotide
  source 1..25: mol_type = other DNA
tcctctcatcccacaactacacgag

SEQ ID NO: 5540 - DNA, 25 bp, synthetic construct
  misc_feature 1..25: note = Oligonucleotide
  source 1..25: mol_type = other DNA
cactcctctcatcccacaactacac

SEQ ID NO: 5541 - DNA, 25 bp, synthetic construct
  misc_feature 1..25: note = Oligonucleotide
  source 1..25: mol_type = other DNA
aaccactcctctcatcccacaacta

SEQ ID NO: 5542 - DNA, 25 bp, synthetic construct
  misc_feature 1..25: note = Oligonucleotide
  source 1..25: mol_type = other DNA
gcaaaccactcctctcatcccacaa

SEQ ID NO: 5543 - DNA, 25 bp, synthetic construct
  misc_feature 1..25: note = Oligonucleotide
  source 1..25: mol_type = other DNA
tatgcaaaccactcctctcatccca

SEQ ID NO: 5544 - DNA, 25 bp, synthetic construct
  misc_feature 1..25: note = Oligonucleotide
  source 1..25: mol_type = other DNA
ctttatgcaaaccactcctctcatc

SEQ ID NO: 5545 - DNA, 25 bp, synthetic construct
  misc_feature 1..25: note = Oligonucleotide
  source 1..25: mol_type = other DNA
ggactttatgcaaaccactcctctc

SEQ ID NO: 5546 - DNA, 25 bp, synthetic construct
  misc_feature 1..25: note = Oligonucleotide
  source 1..25: mol_type = other DNA
gcgggactttatgcaaaccactcct

SEQ ID NO: 5547 - DNA, 25 bp, synthetic construct
  misc_feature 1..25: note = Oligonucleotide
  source 1..25: mol_type = other DNA
tatgcgggactttatgcaaaccact

SEQ ID NO: 5548 - DNA, 25 bp, synthetic construct
  misc_feature 1..25: note = Oligonucleotide
  source 1..25: mol_type = other DNA
gagtatgcgggactttatgcaaacc

SEQ ID NO: 5549 - DNA, 25 bp, synthetic construct
  misc_feature 1..25: note = Oligonucleotide
  source 1..25: mol_type = other DNA
ctagagtatgcgggactttatgcaa

SEQ ID NO: 5550 - DNA, 25 bp, synthetic construct
  misc_feature 1..25: note = Oligonucleotide
  source 1..25: mol_type = other DNA
tttctagagtatgcgggactttatg

SEQ ID NO: 5551 - DNA, 25 bp, synthetic construct
  misc_feature 1..25: note = Oligonucleotide
  source 1..25: mol_type = other DNA
tgatttctagagtatgcgggacttt

SEQ ID NO: 5552 - DNA, 25 bp, synthetic construct
  misc_feature 1..25: note = Oligonucleotide
  source 1..25: mol_type = other DNA
tggtgatttctagagtatgcgggac

SEQ ID NO: 5553 - DNA, 25 bp, synthetic construct
  misc_feature 1..25: note = Oligonucleotide
  source 1..25: mol_type = other DNA
tcttggtgatttctagagtatgcgg

SEQ ID NO: 5554 - DNA, 25 bp, synthetic construct
  misc_feature 1..25: note = Oligonucleotide
  source 1..25: mol_type = other DNA
agttcttggtgatttctagagtatg

SEQ ID NO: 5555 - DNA, 25 bp, synthetic construct
  misc_feature 1..25: note = Oligonucleotide
  source 1..25: mol_type = other DNA
ttaagttcttggtgatttctagagt

SEQ ID NO: 5556 - DNA, 25 bp, synthetic construct
  misc_feature 1..25: note = Oligonucleotide
  source 1..25: mol_type = other DNA
ctgttaagttcttggtgatttctag

SEQ ID NO: 5557 - DNA, 25 bp, synthetic construct
  misc_feature 1..25: note = Oligonucleotide
  source 1..25: mol_type = other DNA
catctgttaagttcttggtgatttc

SEQ ID NO: 5558 - DNA, 25 bp, synthetic construct
  misc_feature 1..25: note = Oligonucleotide
  source 1..25: mol_type = other DNA
caccatctgttaagttcttggtgat

SEQ ID NO: 5559 - DNA, 25 bp, synthetic construct
  misc_feature 1..25: note = Oligonucleotide
  source 1..25: mol_type = other DNA
tgccaccatctgttaagttcttggt

SEQ ID NO: 5560 - DNA, 25 bp, synthetic construct
  misc_feature 1..25: note = Oligonucleotide
  source 1..25: mol_type = other DNA
cattgccaccatctgttaagttctt

SEQ ID NO: 5561 - DNA, 25 bp, synthetic construct
  misc_feature 1..25: note = Oligonucleotide
  source 1..25: mol_type = other DNA
caccattgccaccatctgttaagtt

SEQ ID NO: 5562 - DNA, 25 bp, synthetic construct
  misc_feature 1..25: note = Oligonucleotide
  source 1..25: mol_type = other DNA
agtcaccattgccaccatctgttaa

SEQ ID NO: 5563 - DNA, 25 bp, synthetic construct
  misc_feature 1..25: note = Oligonucleotide
  source 1..25: mol_type = other DNA
tgaagtcaccattgccaccatctgt

SEQ ID NO: 5564 - DNA, 25 bp, synthetic construct
  misc_feature 1..25: note = Oligonucleotide
  source 1..25: mol_type = other DNA
agttgaagtcaccattgccaccatc

SEQ ID NO: 5565 - DNA, 25 bp, synthetic construct
  misc_feature 1..25: note = Oligonucleotide
  source 1..25: mol_type = other DNA
gggagttgaagtcaccattgccacc

SEQ ID NO: 5566 - DNA, 25 bp, synthetic construct
  misc_feature 1..25: note = Oligonucleotide
  source 1..25: mol_type = other DNA
tttgggagttgaagtcaccattgcc

SEQ ID NO: 5567 - DNA, 25 bp, synthetic construct
  misc_feature 1..25: note = Oligonucleotide
  source 1..25: mol_type = other DNA
ctttttgggagttgaagtcaccatt

SEQ ID NO: 5568 - DNA, 25 bp, synthetic construct
  misc_feature 1..25: note = Oligonucleotide
  source 1..25: mol_type = other DNA
tttctttttgggagttgaagtcacc

SEQ ID NO: 5569 - DNA, 25 bp, synthetic construct
  misc_feature 1..25: note = Oligonucleotide
  source 1..25: mol_type = other DNA
tgatttctttttgggagttgaagtc

SEQ ID NO: 5570 - DNA, 25 bp, synthetic construct
  misc_feature 1..25: note = Oligonucleotide
  source 1..25: mol_type = other DNA
gaatgatttctttttgggagttgaa

SEQ ID NO: 5571 - DNA, 25 bp, synthetic construct
  misc_feature 1..25: note = Oligonucleotide
  source 1..25: mol_type = other DNA
agtgaatgatttctttttgggagtt

SEQ ID NO: 5572 - DNA, 25 bp, synthetic construct
  misc_feature 1..25: note = Oligonucleotide
  source 1..25: mol_type = other DNA
tgaagtgaatgatttctttttggga

SEQ ID NO: 5573 - DNA, 25 bp, synthetic construct
  misc_feature 1..25: note = Oligonucleotide
  source 1..25: mol_type = other DNA
tcatgaagtgaatgatttctttttg

SEQ ID NO: 5574 - DNA, 25 bp, synthetic construct
  misc_feature 1..25: note = Oligonucleotide
  source 1..25: mol_type = other DNA
ttgtcatgaagtgaatgatttcttt

SEQ ID NO: 5575 - DNA, 25 bp, synthetic construct
  misc_feature 1..25: note = Oligonucleotide
  source 1..25: mol_type = other DNA
cttttgtcatgaagtgaatgatttc

SEQ ID NO: 5576 - DNA, 25 bp, synthetic construct
  misc_feature 1..25: note = Oligonucleotide
  source 1..25: mol_type = other DNA
ttgcttttgtcatgaagtgaatgat

SEQ ID NO: 5577 - DNA, 25 bp, synthetic construct
  misc_feature 1..25: note = Oligonucleotide
  source 1..25: mol_type = other DNA
catttgcttttgtcatgaagtgaat

SEQ ID NO: 5578 - DNA, 25 bp, synthetic construct
  misc_feature 1..25: note = Oligonucleotide
  source 1..25: mol_type = other DNA
tctcatttgcttttgtcatgaagtg

SEQ ID NO: 5579 - DNA, 25 bp, synthetic construct
  misc_feature 1..25: note = Oligonucleotide
  source 1..25: mol_type = other DNA
acttctcatttgcttttgtcatgaa

SEQ ID NO: 5580 - DNA, 25 bp, synthetic construct
  misc_feature 1..25: note = Oligonucleotide
  source 1..25: mol_type = other DNA
gggacttctcatttgcttttgtcat

SEQ ID NO: 5581 - DNA, 25 bp, synthetic construct
  misc_feature 1..25: note = Oligonucleotide
  source 1..25: mol_type = other DNA
gaggggacttctcatttgcttttgt

SEQ ID NO: 5582 - DNA, 25 bp, synthetic construct
  misc_feature 1..25: note = Oligonucleotide
  source 1..25: mol_type = other DNA
tttgaggggacttctcatttgcttt

SEQ ID NO: 5583 - DNA, 25 bp, synthetic construct
  misc_feature 1..25: note = Oligonucleotide
  source 1..25: mol_type = other DNA
tggtttgaggggacttctcatttgc

SEQ ID NO: 5584 - DNA, 25 bp, synthetic construct
  misc_feature 1..25: note = Oligonucleotide
  source 1..25: mol_type = other DNA
tgctggtttgaggggacttctcatt

SEQ ID NO: 5585 - DNA, 25 bp, synthetic construct
  misc_feature 1..25: note = Oligonucleotide
  source 1..25: mol_type = other DNA
ggctgctggtttgaggggacttctc

SEQ ID NO: 5586 - DNA, 25 bp, synthetic construct
  misc_feature 1..25: note = Oligonucleotide
  source 1..25: mol_type = other DNA
aggggctgctggtttgaggggactt

SEQ ID NO: 5587 - DNA, 25 bp, synthetic construct
  misc_feature 1..25: note = Oligonucleotide
  source 1..25: mol_type = other DNA
accaggggctgctggtttgagggga

SEQ ID NO: 5588 - DNA, 25 bp, synthetic construct
  misc_feature 1..25: note = Oligonucleotide
  source 1..25: mol_type = other DNA
cagaccaggggctgctggtttgagg

SEQ ID NO: 5589 - DNA, 25 bp, synthetic construct
  misc_feature 1..25: note = Oligonucleotide
  source 1..25: mol_type = other DNA
gtacagaccaggggctgctggtttg

SEQ ID NO: 5590 - DNA, 25 bp, synthetic construct
  misc_feature 1..25: note = Oligonucleotide
  source 1..25: mol_type = other DNA
caggtacagaccaggggctgctggt

SEQ ID NO: 5591 - DNA, 25 bp, synthetic construct
  misc_feature 1..25: note = Oligonucleotide
  source 1..25: mol_type = other DNA
gcccaggtacagaccaggggctgct

SEQ ID NO: 5592 - DNA, 25 bp, synthetic construct
  misc_feature 1..25: note = Oligonucleotide
  source 1..25: mol_type = other DNA
ggggcccaggtacagaccaggggct

SEQ ID NO: 5593 - DNA, 25 bp, synthetic construct
  misc_feature 1..25: note = Oligonucleotide
  source 1..25: mol_type = other DNA
acaggggcccaggtacagaccaggg

SEQ ID NO: 5594 - DNA, 25 bp, synthetic construct
  misc_feature 1..25: note = Oligonucleotide
  source 1..25: mol_type = other DNA
gtgacaggggcccaggtacagacca

SEQ ID NO: 5595 - DNA, 25 bp, synthetic construct
  misc_feature 1..25: note = Oligonucleotide
  source 1..25: mol_type = other DNA
caggtgacaggggcccaggtacaga

SEQ ID NO: 5596 - DNA, 25 bp, synthetic construct
  misc_feature 1..25: note = Oligonucleotide
  source 1..25: mol_type = other DNA
caccaggtgacaggggcccaggtac

SEQ ID NO: 5597 - DNA, 25 bp, synthetic construct
  misc_feature 1..25: note = Oligonucleotide
  source 1..25: mol_type = other DNA
tgccaccaggtgacaggggcccagg

SEQ ID NO: 5598 - DNA, 25 bp, synthetic construct
  misc_feature 1..25: note = Oligonucleotide
  source 1..25: mol_type = other DNA
cagtgccaccaggtgacaggggccc

SEQ ID NO: 5599 - DNA, 25 bp, synthetic construct
  misc_feature 1..25: note = Oligonucleotide
  source 1..25: mol_type = other DNA
tcccagtgccaccaggtgacagggg

SEQ ID NO: 5600 - DNA, 25 bp, synthetic construct
  misc_feature 1..25: note = Oligonucleotide
  source 1..25: mol_type = other DNA
agctcccagtgccaccaggtgacag

SEQ ID NO: 5601 - DNA, 25 bp, synthetic construct
  misc_feature 1..25: note = Oligonucleotide
  source 1..25: mol_type = other DNA
cacagctcccagtgccaccaggtga

SEQ ID NO: 5602 - DNA, 25 bp, synthetic construct
  misc_feature 1..25: note = Oligonucleotide
  source 1..25: mol_type = other DNA
gtgcacagctcccagtgccaccagg

SEQ ID NO: 5603 - DNA, 25 bp, synthetic construct
  misc_feature 1..25: note = Oligonucleotide
  source 1..25: mol_type = other DNA
cctgtgcacagctcccagtgccacc

SEQ ID NO: 5604 - DNA, 25 bp, synthetic construct
  misc_feature 1..25: note = Oligonucleotide
  source 1..25: mol_type = other DNA
gggcctgtgcacagctcccagtgcc

SEQ ID NO: 5605 - DNA, 25 bp, synthetic construct
  misc_feature 1..25: note = Oligonucleotide
  source 1..25: mol_type = other DNA
tctgggcctgtgcacagctcccagt

SEQ ID NO: 5606 - DNA, 25 bp, synthetic construct
  misc_feature 1..25: note = Oligonucleotide
  source 1..25: mol_type = other DNA
atatctgggcctgtgcacagctccc

SEQ ID NO: 5607 - DNA, 25 bp, synthetic construct
  misc_feature 1..25: note = Oligonucleotide
  source 1..25: mol_type = other DNA
cagatatctgggcctgtgcacagct

SEQ ID NO: 5608 - DNA, 25 bp, synthetic construct
  misc_feature 1..25: note = Oligonucleotide
  source 1..25: mol_type = other DNA
ctgcagatatctgggcctgtgcaca

SEQ ID NO: 5609 - DNA, 25 bp, synthetic construct
  misc_feature 1..25: note = Oligonucleotide
  source 1..25: mol_type = other DNA
caactgcagatatctgggcctgtgc

SEQ ID NO: 5610 - DNA, 25 bp, synthetic construct
  misc_feature 1..25: note = Oligonucleotide
  source 1..25: mol_type = other DNA
ctccaactgcagatatctgggcctg

SEQ ID NO: 5611 - DNA, 25 bp, synthetic construct
  misc_feature 1..25: note = Oligonucleotide
  source 1..25: mol_type = other DNA
aggctccaactgcagatatctgggc

SEQ ID NO: 5612 - DNA, 25 bp, synthetic construct
  misc_feature 1..25: note = Oligonucleotide
  source 1..25: mol_type = other DNA
aacaggctccaactgcagatatctg

SEQ ID NO: 5613 - DNA, 25 bp, synthetic construct
  misc_feature 1..25: note = Oligonucleotide
  source 1..25: mol_type = other DNA
caaaacaggctccaactgcagatat

SEQ ID NO: 5614 - DNA, 25 bp, synthetic construct
  misc_feature 1..25: note = Oligonucleotide
  source 1..25: mol_type = other DNA
cagcaaaacaggctccaactgcaga

SEQ ID NO: 5615 - DNA, 25 bp, synthetic construct
  misc_feature 1..25: note = Oligonucleotide
  source 1..25: mol_type = other DNA
taccagcaaaacaggctccaactgc

SEQ ID NO: 5616 - DNA, 25 bp, synthetic construct
  misc_feature 1..25: note = Oligonucleotide
  source 1..25: mol_type = other DNA
gtttaccagcaaaacaggctccaac

SEQ ID NO: 5617 - DNA, 25 bp, synthetic construct
  misc_feature 1..25: note = Oligonucleotide
  source 1..25: mol_type = other DNA
agagtttaccagcaaaacaggctcc

SEQ ID NO: 5618 - DNA, 25 bp, synthetic construct
  misc_feature 1..25: note = Oligonucleotide
  source 1..25: mol_type = other DNA
acaagagtttaccagcaaaacaggc

SEQ ID NO: 5619 - DNA, 25 bp, synthetic construct
  misc_feature 1..25: note = Oligonucleotide
  source 1..25: mol_type = other DNA
gatacaagagtttaccagcaaaaca

SEQ ID NO: 5620 - DNA, 25 bp, synthetic construct
  misc_feature 1..25: note = Oligonucleotide
  source 1..25: mol_type = other DNA
aacgatacaagagtttaccagcaaa

SEQ ID NO: 5621 - DNA, 25 bp, synthetic construct
  misc_feature 1..25: note = Oligonucleotide
  source 1..25: mol_type = other DNA
ctgaacgatacaagagtttaccagc

SEQ ID NO: 5622 - DNA, 25 bp, synthetic construct
  misc_feature 1..25: note = Oligonucleotide
  source 1..25: mol_type = other DNA
gtcctgaacgatacaagagtttacc

SEQ ID NO: 5623 - DNA, 25 bp, synthetic construct
  misc_feature 1..25: note = Oligonucleotide
  source 1..25: mol_type = other DNA
tgtgtcctgaacgatacaagagttt

SEQ ID NO: 5624 - DNA, 25 bp, synthetic construct
  misc_feature 1..25: note = Oligonucleotide
  source 1..25: mol_type = other DNA
gcctgtgtcctgaacgatacaagag

SEQ ID NO: 5625 - DNA, 25 bp, synthetic construct
  misc_feature 1..25: note = Oligonucleotide
  source 1..25: mol_type = other DNA
ccagcctgtgtcctgaacgatacaa

SEQ ID NO: 5626 - DNA, 25 bp, synthetic construct
  misc_feature 1..25: note = Oligonucleotide
  source 1..25: mol_type = other DNA
cgcccagcctgtgtcctgaacgata

SEQ ID NO: 5627 - DNA, 25 bp, synthetic construct
  misc_feature 1..25: note = Oligonucleotide
  source 1..25: mol_type = other DNA
cagcgcccagcctgtgtcctgaacg

SEQ ID NO: 5628 - DNA, 25 bp, synthetic construct
  misc_feature 1..25: note = Oligonucleotide
  source 1..25: mol_type = other DNA
catcagcgcccagcctgtgtcctga

SEQ ID NO: 5629 - DNA, 25 bp, synthetic construct
  misc_feature 1..25: note = Oligonucleotide
  source 1..25: mol_type = other DNA
ttccatcagcgcccagcctgtgtcc

SEQ ID NO: 5630 - DNA, 25 bp, synthetic construct
  misc_feature 1..25: note = Oligonucleotide
  source 1..25: mol_type = other DNA
gtgttccatcagcgcccagcctgtg

SEQ ID NO: 5631 - DNA, 25 bp, synthetic construct
  misc_feature 1..25: note = Oligonucleotide
  source 1..25: mol_type = other DNA
tctgtgttccatcagcgcccagcct

SEQ ID NO: 5632 - DNA, 25 bp, synthetic construct
  misc_feature 1..25: note = Oligonucleotide
  source 1..25: mol_type = other DNA
ttctctgtgttccatcagcgcccag

SEQ ID NO: 5633 - DNA, 25 bp, synthetic construct
  misc_feature 1..25: note = Oligonucleotide
  source 1..25: mol_type = other DNA
ctgttctctgtgttccatcagcgcc

SEQ ID NO: 5634 - DNA, 25 bp, synthetic construct
  misc_feature 1..25: note = Oligonucleotide
  source 1..25: mol_type = other DNA
atactgttctctgtgttccatcagc

SEQ ID NO: 5635 - DNA, 25 bp, synthetic construct
  misc_feature 1..25: note = Oligonucleotide
  source 1..25: mol_type = other DNA
caaatactgttctctgtgttccatc

SEQ ID NO: 5636 - DNA, 25 bp, synthetic construct
  misc_feature 1..25: note = Oligonucleotide
  source 1..25: mol_type = other DNA
gagcaaatactgttctctgtgttcc

SEQ ID NO: 5637 - DNA, 25 bp, synthetic construct
  misc_feature 1..25: note = Oligonucleotide
  source 1..25: mol_type = other DNA
acagagcaaatactgttctctgtgt

SEQ ID NO: 5638 - DNA, 25 bp, synthetic construct
  misc_feature 1..25: note = Oligonucleotide
  source 1..25: mol_type = other DNA
agaacagagcaaatactgttctctg

SEQ ID NO: 5639 - DNA, 25 bp, synthetic construct
  misc_feature 1..25: note = Oligonucleotide
  source 1..25: mol_type = other DNA
tgcagaacagagcaaatactgttct

SEQ ID NO: 5640 - DNA, 25 bp, synthetic construct
  misc_feature 1..25: note = Oligonucleotide
  source 1..25: mol_type = other DNA
gtctgcagaacagagcaaatactgt

SEQ ID NO: 5641 - DNA, 25 bp, synthetic construct
  misc_feature 1..25: note = Oligonucleotide
  source 1..25: mol_type = other DNA
cgggtctgcagaacagagcaaatac

SEQ ID NO: 5642 - DNA, 25 bp, synthetic construct
  misc_feature 1..25: note = Oligonucleotide
  source 1..25: mol_type = other DNA
ttccgggtctgcagaacagagcaaa

SEQ ID NO: 5643 - DNA, 25 bp, synthetic construct
  misc_feature 1..25: note = Oligonucleotide
  source 1..25: mol_type = other DNA
agcttccgggtctgcagaacagagc

SEQ ID NO: 5644 - DNA, 25 bp, synthetic construct
  misc_feature 1..25: note = Oligonucleotide
  source 1..25: mol_type = other DNA
gacagcttccgggtctgcagaacag

SEQ ID NO: 5645 - DNA, 25 bp, synthetic construct
  misc_feature 1..25: note = Oligonucleotide
  source 1..25: mol_type = other DNA
ccagacagcttccgggtctgcagaa

SEQ ID NO: 5646 - DNA, 25 bp, synthetic construct
  misc_feature 1..25: note = Oligonucleotide
  source 1..25: mol_type = other DNA
tccccagacagcttccgggtctgca

SEQ ID NO: 5647 - DNA, 25 bp, synthetic construct
  misc_feature 1..25: note = Oligonucleotide
  source 1..25: mol_type = other DNA
atctccccagacagcttccgggtct

SEQ ID NO: 5648 - DNA, 25 bp, synthetic construct
  misc_feature 1..25: note = Oligonucleotide
  source 1..25: mol_type = other DNA
cccatctccccagacagcttccggg

SEQ ID NO: 5649 - DNA, 25 bp, synthetic construct
  misc_feature 1..25: note = Oligonucleotide
  source 1..25: mol_type = other DNA
tgccccatctccccagacagcttcc

SEQ ID NO: 5650 - DNA, 25 bp, synthetic construct
  misc_feature 1..25: note = Oligonucleotide
  source 1..25: mol_type = other DNA
gtgtgccccatctccccagacagct

SEQ ID NO: 5651 - DNA, 25 bp, synthetic construct
  misc_feature 1..25: note = Oligonucleotide
  source 1..25: mol_type = other DNA
tctgtgtgccccatctccccagaca

SEQ ID NO: 5652 - DNA, 25 bp, synthetic construct
  misc_feature 1..25: note = Oligonucleotide
  source 1..25: mol_type = other DNA
atgtctgtgtgccccatctccccag

SEQ ID NO: 5653 - DNA, 25 bp, synthetic construct
  misc_feature 1..25: note = Oligonucleotide
  source 1..25: mol_type = other DNA
ttcatgtctgtgtgccccatctccc

SEQ ID NO: 5654 - DNA, 25 bp, synthetic construct
  misc_feature 1..25: note = Oligonucleotide
  source 1..25: mol_type = other DNA
caattcatgtctgtgtgccccatct

SEQ ID NO: 5655 - DNA, 25 bp, synthetic construct
  misc_feature 1..25: note = Oligonucleotide
  source 1..25: mol_type = other DNA
gtacaattcatgtctgtgtgcccca

SEQ ID NO: 5656 - DNA, 25 bp, synthetic construct
  misc_feature 1..25: note = Oligonucleotide
  source 1..25: mol_type = other DNA
tcagtacaattcatgtctgtgtgcc

SEQ ID NO: 5657 - DNA, 25 bp, synthetic construct
  misc_feature 1..25: note = Oligonucleotide
  source 1..25: mol_type = other DNA
aattcagtacaattcatgtctgtgt

SEQ ID NO: 5658 - DNA, 25 bp, synthetic construct
  misc_feature 1..25: note = Oligonucleotide
  source 1..25: mol_type = other DNA
cacaattcagtacaattcatgtctg

SEQ ID NO: 5659 - DNA, 25 bp, synthetic construct
  misc_feature 1..25: note = Oligonucleotide
  source 1..25: mol_type = other DNA
ggacacaattcagtacaattcatgt

SEQ ID NO: 5660 - DNA, 25 bp, synthetic construct
  misc_feature 1..25: note = Oligonucleotide
  source 1..25: mol_type = other DNA
actggacacaattcagtacaattca

SEQ ID NO: 5661 - DNA, 25 bp, synthetic construct
  misc_feature 1..25: note = Oligonucleotide
  source 1..25: mol_type = other DNA
ggcactggacacaattcagtacaat

SEQ ID NO: 5662 - DNA, 25 bp, synthetic construct
  misc_feature 1..25: note = Oligonucleotide
  source 1..25: mol_type = other DNA
gctggcactggacacaattcagtac

SEQ ID NO: 5663 - DNA, 25 bp, synthetic construct
  misc_feature 1..25: note = Oligonucleotide
  source 1..25: mol_type = other DNA
tgtgctggcactggacacaattcag

SEQ ID NO: 5664 - DNA, 25 bp, synthetic construct
  misc_feature 1..25: note = Oligonucleotide
  source 1..25: mol_type = other DNA
aactgtgctggcactggacacaatt

SEQ ID NO: 5665 - DNA, 25 bp, synthetic construct
  misc_feature 1..25: note = Oligonucleotide
  source 1..25: mol_type = other DNA
tacaactgtgctggcactggacaca

SEQ ID NO: 5666 - DNA, 25 bp, synthetic construct
  misc_feature 1..25: note = Oligonucleotide
  source 1..25: mol_type = other DNA
gcttacaactgtgctggcactggac

SEQ ID NO: 5667 - DNA, 25 bp, synthetic construct
  misc_feature 1..25: note = Oligonucleotide
  source 1..25: mol_type = other DNA
aaggcttacaactgtgctggcactg

SEQ ID NO: 5668 - DNA, 25 bp, synthetic construct
  misc_feature 1..25: note = Oligonucleotide
  source 1..25: mol_type = other DNA
agaaaggcttacaactgtgctggca

SEQ ID NO: 5669 - DNA, 25 bp, synthetic construct
  misc_feature 1..25: note = Oligonucleotide
  source 1..25: mol_type = other DNA
agaagaaaggcttacaactgtgctg

SEQ ID NO: 5670 - DNA, 25 bp, synthetic construct
  misc_feature 1..25: note = Oligonucleotide
  source 1..25: mol_type = other DNA
cacagaagaaaggcttacaactgtg

SEQ ID NO: 5671 - DNA, 25 bp, synthetic construct
  misc_feature 1..25: note = Oligonucleotide
  source 1..25: mol_type = other DNA
tagcacagaagaaaggcttacaact

SEQ ID NO: 5672 - DNA, 25 bp, synthetic construct
  misc_feature 1..25: note = Oligonucleotide
  source 1..25: mol_type = other DNA
aattagcacagaagaaaggcttaca

SEQ ID NO: 5673 - DNA, 25 bp, synthetic construct
  misc_feature 1..25: note = Oligonucleotide
  source 1..25: mol_type = other DNA
gagaattagcacagaagaaaggctt

SEQ ID NO: 5674 - DNA, 25 bp, synthetic construct
  misc_feature 1..25: note = Oligonucleotide
  source 1..25: mol_type = other DNA
agtgagaattagcacagaagaaagg

SEQ ID NO: 5675 - DNA, 25 bp, synthetic construct
  misc_feature 1..25: note = Oligonucleotide
  source 1..25: mol_type = other DNA
tctagtgagaattagcacagaagaa

SEQ ID NO: 5676 - DNA, 25 bp, synthetic construct
  misc_feature 1..25: note = Oligonucleotide
  source 1..25: mol_type = other DNA
gtctctagtgagaattagcacagaa

SEQ ID NO: 5677 - DNA, 25 bp, synthetic construct
  misc_feature 1..25: note = Oligonucleotide
  source 1..25: mol_type = other DNA
cgtgtctctagtgagaattagcaca

SEQ ID NO: 5678 - DNA, 25 bp, synthetic construct
  misc_feature 1..25: note = Oligonucleotide
  source 1..25: mol_type = other DNA
tcacgtgtctctagtgagaattagc

SEQ ID NO: 5679 - DNA, 25 bp, synthetic construct
  misc_feature 1..25: note = Oligonucleotide
  source 1..25: mol_type = other DNA
cgctcacgtgtctctagtgagaatt

SEQ ID NO: 5680 - DNA, 25 bp, synthetic construct
  misc_feature 1..25: note = Oligonucleotide
  source 1..25: mol_type = other DNA
gctcgctcacgtgtctctagtgaga

SEQ ID NO: 5681 - DNA, 25 bp, synthetic construct
  misc_feature 1..25: note = Oligonucleotide
  source 1..25: mol_type = other DNA
agtgctcgctcacgtgtctctagtg

SEQ ID NO: 5682 - DNA, 25 bp, synthetic construct
  misc_feature 1..25: note = Oligonucleotide
  source 1..25: mol_type = other DNA
aacagtgctcgctcacgtgtctcta

SEQ ID NO: 5683 - DNA, 25 bp, synthetic construct
  misc_feature 1..25: note = Oligonucleotide
  source 1..25: mol_type = other DNA
aaaaacagtgctcgctcacgtgtct

SEQ ID NO: 5684 - DNA, 25 bp, synthetic construct
  misc_feature 1..25: note = Oligonucleotide
  source 1..25: mol_type = other DNA
cataaaaacagtgctcgctcacgtg

SEQ ID NO: 5685 - DNA, 25 bp, synthetic construct
  misc_feature 1..25: note = Oligonucleotide
  source 1..25: mol_type = other DNA
aggcataaaaacagtgctcgctcac

SEQ ID NO: 5686 - DNA, 25 bp, synthetic construct
  misc_feature 1..25: note = Oligonucleotide
  source 1..25: mol_type = other DNA
aacaggcataaaaacagtgctcgct

SEQ ID NO: 5687 - DNA, 25 bp, synthetic construct
  misc_feature 1..25: note = Oligonucleotide
  source 1..25: mol_type = other DNA
taaaacaggcataaaaacagtgctc

SEQ ID NO: 5688 - DNA, 25 bp, synthetic construct
  misc_feature 1..25: note = Oligonucleotide
  source 1..25: mol_type = other DNA
tgataaaacaggcataaaaacagtg

SEQ ID NO: 5689 - DNA, 25 bp, synthetic construct
  misc_feature 1..25: note = Oligonucleotide
  source 1..25: mol_type = other DNA
cattgataaaacaggcataaaaaca

SEQ ID NO: 5690 - DNA, 25 bp, synthetic construct
  misc_feature 1..25: note = Oligonucleotide
  source 1..25: mol_type = other DNA
cctcattgataaaacaggcataaaa

SEQ ID NO: 5691 - DNA, 25 bp, synthetic construct
  misc_feature 1..25: note = Oligonucleotide
  source 1..25: mol_type = other DNA
tgtcctcattgataaaacaggcata

SEQ ID NO: 5692 - DNA, 25 bp, synthetic construct
  misc_feature 1..25: note = Oligonucleotide
  source 1..25: mol_type = other DNA
ctgtgtcctcattgataaaacaggc

SEQ ID NO: 5693 - DNA, 25 bp, synthetic construct
  misc_feature 1..25: note = Oligonucleotide
  source 1..25: mol_type = other DNA
cctctgtgtcctcattgataaaaca

SEQ ID NO: 5694 - DNA, 25 bp, synthetic construct
  misc_feature 1..25: note = Oligonucleotide
  source 1..25: mol_type = other DNA
tgacctctgtgtcctcattgataaa

SEQ ID NO: 5695 - DNA, 25 bp, synthetic construct
  misc_feature 1..25: note = Oligonucleotide
  source 1..25: mol_type = other DNA
ttgtgacctctgtgtcctcattgat

SEQ ID NO: 5696 - DNA, 25 bp, synthetic construct
  misc_feature 1..25: note = Oligonucleotide
  source 1..25: mol_type = other DNA
tctttgtgacctctgtgtcctcatt

SEQ ID NO: 5697 - DNA, 25 bp, synthetic construct
  misc_feature 1..25: note = Oligonucleotide
  source 1..25: mol_type = other DNA
acctctttgtgacctctgtgtcctc

SEQ ID NO: 5698 - DNA, 25 bp, synthetic construct
  misc_feature 1..25: note = Oligonucleotide
  source 1..25: mol_type = other DNA
ataacctctttgtgacctctgtgtc

SEQ ID NO: 5699 - DNA, 25 bp, synthetic construct
  misc_feature 1..25: note = Oligonucleotide
  source 1..25: mol_type = other DNA
gacataacctctttgtgacctctgt

SEQ ID NO: 5700 - DNA, 25 bp, synthetic construct
  misc_feature 1..25: note = Oligonucleotide
  source 1..25: mol_type = other DNA
cctgacataacctctttgtgacctc

SEQ ID NO: 5701 - DNA, 25 bp, synthetic construct
  misc_feature 1..25: note = Oligonucleotide
  source 1..25: mol_type = other DNA
tgtcctgacataacctctttgtgac

SEQ ID NO: 5702 - DNA, 25 bp, synthetic construct
  misc_feature 1..25: note = Oligonucleotide
  source 1..25: mol_type = other DNA
ctctgtcctgacataacctctttgt

SEQ ID NO: 5703 - DNA, 25 bp, synthetic construct
  misc_feature 1..25: note = Oligonucleotide
  source 1..25: mol_type = other DNA
tgactctgtcctgacataacctctt

SEQ ID NO: 5704 - DNA, 25 bp, synthetic construct
  misc_feature 1..25: note = Oligonucleotide
  source 1..25: mol_type = other DNA
cactgactctgtcctgacataacct

SEQ ID NO: 5705 - DNA, 25 bp, synthetic construct
  misc_feature 1..25: note = Oligonucleotide
  source 1..25: mol_type = other DNA
gtacactgactctgtcctgacataa

SEQ ID NO: 5706 - DNA, 25 bp, synthetic construct
  misc_feature 1..25: note = Oligonucleotide
  source 1..25: mol_type = other DNA
cctgtacactgactctgtcctgaca

SEQ ID NO: 5707 - DNA, 25 bp, synthetic construct
  misc_feature 1..25: note = Oligonucleotide
  source 1..25: mol_type = other DNA
caccctgtacactgactctgtcctg

SEQ ID NO: 5708 - DNA, 25 bp, synthetic construct
  misc_feature 1..25: note = Oligonucleotide
  source 1..25: mol_type = other DNA
acccaccctgtacactgactctgtc

SEQ ID NO: 5709 - DNA, 25 bp, synthetic construct
  misc_feature 1..25: note = Oligonucleotide
  source 1..25: mol_type = other DNA
cagacccaccctgtacactgactct

SEQ ID NO: 5710 - DNA, 25 bp, synthetic construct
  misc_feature 1..25: note = Oligonucleotide
  source 1..25: mol_type = other DNA
gaccagacccaccctgtacactgac

SEQ ID NO: 5711 - DNA, 25 bp, synthetic construct
  misc_feature 1..25: note = Oligonucleotide
  source 1..25: mol_type = other DNA
ccagaccagacccaccctgtacact

SEQ ID NO: 5712 - DNA, 25 bp, synthetic construct
  misc_feature 1..25: note = Oligonucleotide
  source 1..25: mol_type = other DNA
aacccagaccagacccaccctgtac

SEQ ID NO: 5713 - DNA, 25 bp, synthetic construct
  misc_feature 1..25: note = Oligonucleotide
  source 1..25: mol_type = other DNA
cccaacccagaccagacccaccctg

SEQ ID NO: 5714 - DNA, 25 bp, synthetic construct
  misc_feature 1..25: note = Oligonucleotide
  source 1..25: mol_type = other DNA
gtacccaacccagaccagacccacc

SEQ ID NO: 5715 - DNA, 25 bp, synthetic construct
  misc_feature 1..25: note = Oligonucleotide
  source 1..25: mol_type = other DNA
cctgtacccaacccagaccagaccc

SEQ ID NO: 5716 - DNA, 25 bp, synthetic construct
  misc_feature 1..25: note = Oligonucleotide
  source 1..25: mol_type = other DNA
tgtcctgtacccaacccagaccaga

SEQ ID NO: 5717 - DNA, 25 bp, synthetic construct
  misc_feature 1..25: note = Oligonucleotide
  source 1..25: mol_type = other DNA
gactgtcctgtacccaacccagacc

SEQ ID NO: 5718 - DNA, 25 bp, synthetic construct
  misc_feature 1..25: note = Oligonucleotide
  source 1..25: mol_type = other DNA
caagactgtcctgtacccaacccag

SEQ ID NO: 5719 - DNA, 25 bp, synthetic construct
  misc_feature 1..25: note = Oligonucleotide
  source 1..25: mol_type = other DNA
ccccaagactgtcctgtacccaacc

SEQ ID NO: 5720 - DNA, 25 bp, synthetic construct
  misc_feature 1..25: note = Oligonucleotide
  source 1..25: mol_type = other DNA
actccccaagactgtcctgtaccca

SEQ ID NO: 5721 - DNA, 25 bp, synthetic construct
  misc_feature 1..25: note = Oligonucleotide
  source 1..25: mol_type = other DNA
ggaactccccaagactgtcctgtac

SEQ ID NO: 5722 - DNA, 25 bp, synthetic construct
  misc_feature 1..25: note = Oligonucleotide
  source 1..25: mol_type = other DNA
gaaggaactccccaagactgtcctg

SEQ ID NO: 5723 - DNA, 25 bp, synthetic construct
  misc_feature 1..25: note = Oligonucleotide
  source 1..25: mol_type = other DNA
aaggaaggaactccccaagactgtc

SEQ ID NO: 5724 - DNA, 25 bp, synthetic construct
  misc_feature 1..25: note = Oligonucleotide
  source 1..25: mol_type = other DNA
tggaaggaaggaactccccaagact

SEQ ID NO: 5725 - DNA, 25 bp, synthetic construct
  misc_feature 1..25: note = Oligonucleotide
  source 1..25: mol_type = other DNA
tgctggaaggaaggaactccccaag

SEQ ID NO: 5726 - DNA, 25 bp, synthetic construct
  misc_feature 1..25: note = Oligonucleotide
  source 1..25: mol_type = other DNA
cattgctggaaggaaggaactcccc

SEQ ID NO: 5727 - DNA, 25 bp, synthetic construct
  misc_feature 1..25: note = Oligonucleotide
  source 1..25: mol_type = other DNA
tagcattgctggaaggaaggaactc

SEQ ID NO: 5728 - DNA, 25 bp, synthetic construct
  misc_feature 1..25: note = Oligonucleotide
  source 1..25: mol_type = other DNA
gcttagcattgctggaaggaaggaa

SEQ ID NO: 5729 - DNA, 25 bp, synthetic construct
  misc_feature 1..25: note = Oligonucleotide
  source 1..25: mol_type = other DNA
caagcttagcattgctggaaggaag

SEQ ID NO: 5730 - DNA, 25 bp, synthetic construct
  misc_feature 1..25: note = Oligonucleotide
  source 1..25: mol_type = other DNA
ccccaagcttagcattgctggaagg

SEQ ID NO: 5731 - DNA, 25 bp, synthetic construct
  misc_feature 1..25: note = Oligonucleotide
  source 1..25: mol_type = other DNA
actccccaagcttagcattgctgga

SEQ ID NO: 5732 - DNA, 25 bp, synthetic construct
  misc_feature 1..25: note = Oligonucleotide
  source 1..25: mol_type = other DNA
ggaactccccaagcttagcattgct

SEQ ID NO: 5733 - DNA, 25 bp, synthetic construct
  misc_feature 1..25: note = Oligonucleotide
  source 1..25: mol_type = other DNA
gaaggaactccccaagcttagcatt

SEQ ID NO: 5734 - DNA, 25 bp, synthetic construct
  misc_feature 1..25: note = Oligonucleotide
  source 1..25: mol_type = other DNA
aaggaaggaactccccaagcttagc

SEQ ID NO: 5735 - DNA, 25 bp, synthetic construct
  misc_feature 1..25: note = Oligonucleotide
  source 1..25: mol_type = other DNA
aggaaggaaggaactccccaagctt

SEQ ID NO: 5736 - DNA, 25 bp, synthetic construct
  misc_feature 1..25: note = Oligonucleotide
  source 1..25: mol_type = other DNA
ggaaggaaggaaggaactccccaag

SEQ ID NO: 5737 - DNA, 25 bp, synthetic construct
  misc_feature 1..25: note = Oligonucleotide
  source 1..25: mol_type = other DNA
gctggaaggaaggaaggaactcccc

SEQ ID NO: 5738 - DNA, 25 bp, synthetic construct
  misc_feature 1..25: note = Oligonucleotide
  source 1..25: mol_type = other DNA
attgctggaaggaaggaaggaactc

SEQ ID NO: 5739 - DNA, 25 bp, synthetic construct
  misc_feature 1..25: note = Oligonucleotide
  source 1..25: mol_type = other DNA
agcattgctggaaggaaggaaggaa

SEQ ID NO: 5740 - DNA, 25 bp, synthetic construct
  misc_feature 1..25: note = Oligonucleotide
  source 1..25: mol_type = other DNA
cttagcattgctggaaggaaggaag

SEQ ID NO: 5741 - DNA, 25 bp, synthetic construct
  misc_feature 1..25: note = Oligonucleotide
  source 1..25: mol_type = other DNA
ctgcttagcattgctggaaggaagg

SEQ ID NO: 5742 - DNA, 25 bp, synthetic construct
  misc_feature 1..25: note = Oligonucleotide
  source 1..25: mol_type = other DNA
aatctgcttagcattgctggaagga

SEQ ID NO: 5743 - DNA, 25 bp, synthetic construct
  misc_feature 1..25: note = Oligonucleotide
  source 1..25: mol_type = other DNA
tgcaatctgcttagcattgctggaa

SEQ ID NO: 5744 - DNA, 25 bp, synthetic construct
  misc_feature 1..25: note = Oligonucleotide
  source 1..25: mol_type = other DNA
ctctgcaatctgcttagcattgctg

SEQ ID NO: 5745 - DNA, 25 bp, synthetic construct
  misc_feature 1..25: note = Oligonucleotide
  source 1..25: mol_type = other DNA
tacctctgcaatctgcttagcattg

SEQ ID NO: 5746 - DNA, 25 bp, synthetic construct
  misc_feature 1..25: note = Oligonucleotide
  source 1..25: mol_type = other DNA
ttctacctctgcaatctgcttagca

SEQ ID NO: 5747 - DNA, 25 bp, synthetic construct
  misc_feature 1..25: note = Oligonucleotide
  source 1..25: mol_type = other DNA
tgattctacctctgcaatctgctta

SEQ ID NO: 5748 - DNA, 25 bp, synthetic construct
  misc_feature 1..25: note = Oligonucleotide
  source 1..25: mol_type = other DNA
tgctgattctacctctgcaatctgc

SEQ ID NO: 5749 - DNA, 25 bp, synthetic construct
  misc_feature 1..25: note = Oligonucleotide
  source 1..25: mol_type = other DNA
acctgctgattctacctctgcaatc

SEQ ID NO: 5750 - DNA, 25 bp, synthetic construct
  misc_feature 1..25: note = Oligonucleotide
  source 1..25: mol_type = other DNA
agcacctgctgattctacctctgca

SEQ ID NO: 5751 - DNA, 25 bp, synthetic construct
  misc_feature 1..25: note = Oligonucleotide
  source 1..25: mol_type = other DNA
cacagcacctgctgattctacctct

SEQ ID NO: 5752 - DNA, 25 bp, synthetic construct
  misc_feature 1..25: note = Oligonucleotide
  source 1..25: mol_type = other DNA
gttcacagcacctgctgattctacc

SEQ ID NO: 5753 - DNA, 25 bp, synthetic construct
  misc_feature 1..25: note = Oligonucleotide
  source 1..25: mol_type = other DNA
gctgttcacagcacctgctgattct

SEQ ID NO: 5754 - DNA, 25 bp, synthetic construct
  misc_feature 1..25: note = Oligonucleotide
  source 1..25: mol_type = other DNA
gcagctgttcacagcacctgctgat

SEQ ID NO: 5755 - DNA, 25 bp, synthetic construct
  misc_feature 1..25: note = Oligonucleotide
  source 1..25: mol_type = other DNA
tctgcagctgttcacagcacctgct

SEQ ID NO: 5756 - DNA, 25 bp, synthetic construct
  misc_feature 1..25: note = Oligonucleotide
  source 1..25: mol_type = other DNA
caatctgcagctgttcacagcacct

SEQ ID NO: 5757 - DNA, 25 bp, synthetic construct
  misc_feature 1..25: note = Oligonucleotide
  source 1..25: mol_type = other DNA
ctccaatctgcagctgttcacagca

SEQ ID NO: 5758 - DNA, 25 bp, synthetic construct
  misc_feature 1..25: note = Oligonucleotide
  source 1..25: mol_type = other DNA
caactccaatctgcagctgttcaca

SEQ ID NO: 5759 - DNA, 25 bp, synthetic construct
  misc_feature 1..25: note = Oligonucleotide
  source 1..25: mol_type = other DNA
ttccaactccaatctgcagctgttc

SEQ ID NO: 5760 - DNA, 25 bp, synthetic construct
  misc_feature 1..25: note = Oligonucleotide
  source 1..25: mol_type = other DNA
tccttccaactccaatctgcagctg

SEQ ID NO: 5761 - DNA, 25 bp, synthetic construct
  misc_feature 1..25: note = Oligonucleotide
  source 1..25: mol_type = other DNA
tactccttccaactccaatctgcag

SEQ ID NO: 5762 - DNA, 25 bp, synthetic construct
  misc_feature 1..25: note = Oligonucleotide
  source 1..25: mol_type = other DNA
tcctactccttccaactccaatctg

SEQ ID NO: 5763 - DNA, 25 bp, synthetic construct
  misc_feature 1..25: note = Oligonucleotide
  source 1..25: mol_type = other DNA
acctcctactccttccaactccaat

SEQ ID NO: 5764 - DNA, 25 bp, synthetic construct
  misc_feature 1..25: note = Oligonucleotide
  source 1..25: mol_type = other DNA
gacacctcctactccttccaactcc

SEQ ID NO: 5765 - DNA, 25 bp, synthetic construct
  misc_feature 1..25: note = Oligonucleotide
  source 1..25: mol_type = other DNA
ctggacacctcctactccttccaac

SEQ ID NO: 5766 - DNA, 25 bp, synthetic construct
  misc_feature 1..25: note = Oligonucleotide
  source 1..25: mol_type = other DNA
agactggacacctcctactccttcc

SEQ ID NO: 5767 - DNA, 25 bp, synthetic construct
  misc_feature 1..25: note = Oligonucleotide
  source 1..25: mol_type = other DNA
gtcagactggacacctcctactcct

SEQ ID NO: 5768 - DNA, 25 bp, synthetic construct
  misc_feature 1..25: note = Oligonucleotide
  source 1..25: mol_type = other DNA
acggtcagactggacacctcctact

SEQ ID NO: 5769 - DNA, 25 bp, synthetic construct
  misc_feature 1..25: note = Oligonucleotide
  source 1..25: mol_type = other DNA
tcaacggtcagactggacacctcct

SEQ ID NO: 5770 - DNA, 25 bp, synthetic construct
  misc_feature 1..25: note = Oligonucleotide
  source 1..25: mol_type = other DNA
atttcaacggtcagactggacacct

SEQ ID NO: 5771 - DNA, 25 bp, synthetic construct
  misc_feature 1..25: note = Oligonucleotide
  source 1..25: mol_type = other DNA
agaatttcaacggtcagactggaca

SEQ ID NO: 5772 - DNA, 25 bp, synthetic construct
  misc_feature 1..25: note = Oligonucleotide
  source 1..25: mol_type = other DNA
tggagaatttcaacggtcagactgg

SEQ ID NO: 5773 - DNA, 25 bp, synthetic construct
  misc_feature 1..25: note = Oligonucleotide
  source 1..25: mol_type = other DNA
tgttggagaatttcaacggtcagac

SEQ ID NO: 5774 - DNA, 25 bp, synthetic construct
  misc_feature 1..25: note = Oligonucleotide
  source 1..25: mol_type = other DNA
ccttgttggagaatttcaacggtca

SEQ ID NO: 5775 - DNA, 25 bp, synthetic construct
  misc_feature 1..25: note = Oligonucleotide
  source 1..25: mol_type = other DNA
gccccttgttggagaatttcaacgg

SEQ ID NO: 5776 - DNA, 25 bp, synthetic construct
  misc_feature 1..25: note = Oligonucleotide
  source 1..25: mol_type = other DNA
ttggccccttgttggagaatttcaa

SEQ ID NO: 5777 - DNA, 25 bp, synthetic construct
  misc_feature 1..25: note = Oligonucleotide
  source 1..25: mol_type = other DNA
gtcttggccccttgttggagaattt

SEQ ID NO: 5778 - DNA, 25 bp, synthetic construct
  misc_feature 1..25: note = Oligonucleotide
  source 1..25: mol_type = other DNA
cttgtcttggccccttgttggagaa

SEQ ID NO: 5779 - DNA, 25 bp, synthetic construct
  misc_feature 1..25: note = Oligonucleotide
  source 1..25: mol_type = other DNA
actcttgtcttggccccttgttgga

SEQ ID NO: 5780 - DNA, 25 bp, synthetic construct
  misc_feature 1..25: note = Oligonucleotide
  source 1..25: mol_type = other DNA
ttcactcttgtcttggccccttgtt

SEQ ID NO: 5781 - DNA, 25 bp, synthetic construct
  misc_feature 1..25: note = Oligonucleotide
  source 1..25: mol_type = other DNA
cctttcactcttgtcttggcccctt

SEQ ID NO: 5782 - DNA, 25 bp, synthetic construct
  misc_feature 1..25: note = Oligonucleotide
  source 1..25: mol_type = other DNA
gcacctttcactcttgtcttggccc

SEQ ID NO: 5783 - DNA, 25 bp, synthetic construct
  misc_feature 1..25: note = Oligonucleotide
  source 1..25: mol_type = other DNA
ttggcacctttcactcttgtcttgg

SEQ ID NO: 5784 - DNA, 25 bp, synthetic construct
  misc_feature 1..25: note = Oligonucleotide
  source 1..25: mol_type = other DNA
gtcttggcacctttcactcttgtct

SEQ ID NO: 5785 - DNA, 25 bp, synthetic construct
  misc_feature 1..25: note = Oligonucleotide
  source 1..25: mol_type = other DNA
cttgtcttggcacctttcactcttg

SEQ ID NO: 5786 - DNA, 25 bp, synthetic construct
  misc_feature 1..25: note = Oligonucleotide
  source 1..25: mol_type = other DNA
acacttgtcttggcacctttcactc

SEQ ID NO: 5787 - DNA, 25 bp, synthetic construct
  misc_feature 1..25: note = Oligonucleotide
  source 1..25: mol_type = other DNA
gccacacttgtcttggcacctttca

SEQ ID NO: 5788 - DNA, 25 bp, synthetic construct
  misc_feature 1..25: note = Oligonucleotide
  source 1..25: mol_type = other DNA
ctggccacacttgtcttggcacctt

SEQ ID NO: 5789 - DNA, 25 bp, synthetic construct
  misc_feature 1..25: note = Oligonucleotide
  source 1..25: mol_type = other DNA
tgtctggccacacttgtcttggcac

SEQ ID NO: 5790 - DNA, 25 bp, synthetic construct
  misc_feature 1..25: note = Oligonucleotide
  source 1..25: mol_type = other DNA
cactgtctggccacacttgtcttgg

SEQ ID NO: 5791 - DNA, 25 bp, synthetic construct
  misc_feature 1..25: note = Oligonucleotide
  source 1..25: mol_type = other DNA
gaccactgtctggccacacttgtct

SEQ ID NO: 5792 - DNA, 25 bp, synthetic construct
  misc_feature 1..25: note = Oligonucleotide
  source 1..25: mol_type = other DNA
agggaccactgtctggccacacttg

SEQ ID NO: 5793 - DNA, 25 bp, synthetic construct
  misc_feature 1..25: note = Oligonucleotide
  source 1..25: mol_type = other DNA
tagagggaccactgtctggccacac

SEQ ID NO: 5794 - DNA, 25 bp, synthetic construct
  misc_feature 1..25: note = Oligonucleotide
  source 1..25: mol_type = other DNA
ccctagagggaccactgtctggcca

SEQ ID NO: 5795 - DNA, 25 bp, synthetic construct
  misc_feature 1..25: note = Oligonucleotide
  source 1..25: mol_type = other DNA
caaccctagagggaccactgtctgg

SEQ ID NO: 5796 - DNA, 25 bp, synthetic construct
  misc_feature 1..25: note = Oligonucleotide
  source 1..25: mol_type = other DNA
tgccaaccctagagggaccactgtc

SEQ ID NO: 5797 - DNA, 25 bp, synthetic construct
  misc_feature 1..25: note = Oligonucleotide
  source 1..25: mol_type = other DNA
ctatgccaaccctagagggaccact

SEQ ID NO: 5798 - DNA, 25 bp, synthetic construct
  misc_feature 1..25: note = Oligonucleotide
  source 1..25: mol_type = other DNA
gggctatgccaaccctagagggacc

SEQ ID NO: 5799 - DNA, 25 bp, synthetic construct
  misc_feature 1..25: note = Oligonucleotide
  source 1..25: mol_type = other DNA
ttggggctatgccaaccctagaggg

SEQ ID NO: 5800 - DNA, 25 bp, synthetic construct
  misc_feature 1..25: note = Oligonucleotide
  source 1..25: mol_type = other DNA
tctttggggctatgccaaccctaga

SEQ ID NO: 5801 - DNA, 25 bp, synthetic construct
  misc_feature 1..25: note = Oligonucleotide
  source 1..25: mol_type = other DNA
cactctttggggctatgccaaccct

SEQ ID NO: 5802 - DNA, 25 bp, synthetic construct
  misc_feature 1..25: note = Oligonucleotide
  source 1..25: mol_type = other DNA
ctccactctttggggctatgccaac

SEQ ID NO: 5803 - DNA, 25 bp, synthetic construct
  misc_feature 1..25: note = Oligonucleotide
  source 1..25: mol_type = other DNA
cttctccactctttggggctatgcc

SEQ ID NO: 5804 - DNA, 25 bp, synthetic construct
  misc_feature 1..25: note = Oligonucleotide
  source 1..25: mol_type = other DNA
gcccttctccactctttggggctat

SEQ ID NO: 5805 - DNA, 25 bp, synthetic construct
  misc_feature 1..25: note = Oligonucleotide
  source 1..25: mol_type = other DNA
caagcccttctccactctttggggc

SEQ ID NO: 5806 - DNA, 25 bp, synthetic construct
  misc_feature 1..25: note = Oligonucleotide
  source 1..25: mol_type = other DNA
ccccaagcccttctccactctttgg

SEQ ID NO: 5807 - DNA, 25 bp, synthetic construct
  misc_feature 1..25: note = Oligonucleotide
  source 1..25: mol_type = other DNA
caaccccaagcccttctccactctt

SEQ ID NO: 5808 - DNA, 25 bp, synthetic construct
  misc_feature 1..25: note = Oligonucleotide
  source 1..25: mol_type = other DNA
acccaaccccaagcccttctccact

SEQ ID NO: 5809 - DNA, 25 bp, synthetic construct
  misc_feature 1..25: note = Oligonucleotide
  source 1..25: mol_type = other DNA
tgcacccaaccccaagcccttctcc

SEQ ID NO: 5810 - DNA, 25 bp, synthetic construct
  misc_feature 1..25: note = Oligonucleotide
  source 1..25: mol_type = other DNA
ggctgcacccaaccccaagcccttc

SEQ ID NO: 5811 - DNA, 25 bp, synthetic construct
  misc_feature 1..25: note = Oligonucleotide
  source 1..25: mol_type = other DNA
tcaggctgcacccaaccccaagccc

SEQ ID NO: 5812 - DNA, 25 bp, synthetic construct
  misc_feature 1..25: note = Oligonucleotide
  source 1..25: mol_type = other DNA
cactcaggctgcacccaaccccaag

SEQ ID NO: 5813 - DNA, 25 bp, synthetic construct
  misc_feature 1..25: note = Oligonucleotide
  source 1..25: mol_type = other DNA
catcactcaggctgcacccaacccc

SEQ ID NO: 5814 - DNA, 25 bp, synthetic construct
  misc_feature 1..25: note = Oligonucleotide
  source 1..25: mol_type = other DNA
acccatcactcaggctgcacccaac

SEQ ID NO: 5815 - DNA, 25 bp, synthetic construct
  misc_feature 1..25: note = Oligonucleotide
  source 1..25: mol_type = other DNA
cccacccatcactcaggctgcaccc

SEQ ID NO: 5816 - DNA, 25 bp, synthetic construct
  misc_feature 1..25: note = Oligonucleotide
  source 1..25: mol_type = other DNA
caccccacccatcactcaggctgca

SEQ ID NO: 5817 - DNA, 25 bp, synthetic construct
  misc_feature 1..25: note = Oligonucleotide
  source 1..25: mol_type = other DNA
ctgcaccccacccatcactcaggct

SEQ ID NO: 5818 - DNA, 25 bp, synthetic construct
  misc_feature 1..25: note = Oligonucleotide
  source 1..25: mol_type = other DNA
ccactgcaccccacccatcactcag

SEQ ID NO: 5819 - DNA, 25 bp, synthetic construct
  misc_feature 1..25: note = Oligonucleotide
  source 1..25: mol_type = other DNA
gccccactgcaccccacccatcact

SEQ ID NO: 5820 - DNA, 25 bp, synthetic construct
  misc_feature 1..25: note = Oligonucleotide
  source 1..25: mol_type = other DNA
gcagccccactgcaccccacccatc

SEQ ID NO: 5821 - DNA, 25 bp, synthetic construct
  misc_feature 1..25: note = Oligonucleotide
  source 1..25: mol_type = other DNA
tcagcagccccactgcaccccaccc

SEQ ID NO: 5822 - DNA, 25 bp, synthetic construct
  misc_feature 1..25: note = Oligonucleotide
  source 1..25: mol_type = other DNA
cattcagcagccccactgcacccca

SEQ ID NO: 5823 - DNA, 25 bp, synthetic construct
  misc_feature 1..25: note = Oligonucleotide
  source 1..25: mol_type = other DNA
tctcattcagcagccccactgcacc

SEQ ID NO: 5824 - DNA, 25 bp, synthetic construct
  misc_feature 1..25: note = Oligonucleotide
  source 1..25: mol_type = other DNA
ccctctcattcagcagccccactgc

SEQ ID NO: 5825 - DNA, 25 bp, synthetic construct
  misc_feature 1..25: note = Oligonucleotide
  source 1..25: mol_type = other DNA
cggccctctcattcagcagccccac

SEQ ID NO: 5826 - DNA, 25 bp, synthetic construct
  misc_feature 1..25: note = Oligonucleotide
  source 1..25: mol_type = other DNA
caccggccctctcattcagcagccc

SEQ ID NO: 5827 - DNA, 25 bp, synthetic construct
  misc_feature 1..25: note = Oligonucleotide
  source 1..25: mol_type = other DNA
ctgcaccggccctctcattcagcag

SEQ ID NO: 5828 - DNA, 25 bp, synthetic construct
  misc_feature 1..25: note = Oligonucleotide
  source 1..25: mol_type = other DNA
ctgctgcaccggccctctcattcag

SEQ ID NO: 5829 - DNA, 25 bp, synthetic construct
  misc_feature 1..25: note = Oligonucleotide
  source 1..25: mol_type = other DNA
tggctgctgcaccggccctctcatt

SEQ ID NO: 5830 - DNA, 25 bp, synthetic construct
  misc_feature 1..25: note = Oligonucleotide
  source 1..25: mol_type = other DNA
acctggctgctgcaccggccctctc

SEQ ID NO: 5831 - DNA, 25 bp, synthetic construct
  misc_feature 1..25: note = Oligonucleotide
  source 1..25: mol_type = other DNA
tccacctggctgctgcaccggccct

SEQ ID NO: 5832 - DNA, 25 bp, synthetic construct
  misc_feature 1..25: note = Oligonucleotide
  source 1..25: mol_type = other DNA
atgtccacctggctgctgcaccggc

SEQ ID NO: 5833 - DNA, 25 bp, synthetic construct
  misc_feature 1..25: note = Oligonucleotide
  source 1..25: mol_type = other DNA
ctcatgtccacctggctgctgcacc

SEQ ID NO: 5834 - DNA, 25 bp, synthetic construct
  misc_feature 1..25: note = Oligonucleotide
  source 1..25: mol_type = other DNA
gcactcatgtccacctggctgctgc

SEQ ID NO: 5835 - DNA, 25 bp, synthetic construct
  misc_feature 1..25: note = Oligonucleotide
  source 1..25: mol_type = other DNA
gcagcactcatgtccacctggctgc

SEQ ID NO: 5836 - DNA, 25 bp, synthetic construct
  misc_feature 1..25: note = Oligonucleotide
  source 1..25: mol_type = other DNA
ggggcagcactcatgtccacctggc

SEQ ID NO: 5837 - DNA, 25 bp, synthetic construct
  misc_feature 1..25: note = Oligonucleotide
  source 1..25: mol_type = other DNA
gctggggcagcactcatgtccacct

SEQ ID NO: 5838 - DNA, 25 bp, synthetic construct
  misc_feature 1..25: note = Oligonucleotide
  source 1..25: mol_type = other DNA
agggctggggcagcactcatgtcca

SEQ ID NO: 5839 - DNA, 25 bp, synthetic construct
  misc_feature 1..25: note = Oligonucleotide
  source 1..25: mol_type = other DNA
gcaagggctggggcagcactcatgt

SEQ ID NO: 5840 - DNA, 25 bp, synthetic construct
  misc_feature 1..25: note = Oligonucleotide
  source 1..25: mol_type = other DNA
gcagcaagggctggggcagcactca

SEQ ID NO: 5841 - DNA, 25 bp, synthetic construct
  misc_feature 1..25: note = Oligonucleotide
  source 1..25: mol_type = other DNA
catgcagcaagggctggggcagcac

SEQ ID NO: 5842 - DNA, 25 bp, synthetic construct
  misc_feature 1..25: note = Oligonucleotide
  source 1..25: mol_type = other DNA
cagcatgcagcaagggctggggcag

SEQ ID NO: 5843 - DNA, 25 bp, synthetic construct
  misc_feature 1..25: note = Oligonucleotide
  source 1..25: mol_type = other DNA
gtgcagcatgcagcaagggctgggg

SEQ ID NO: 5844 - DNA, 25 bp, synthetic construct
  misc_feature 1..25: note = Oligonucleotide
  source 1..25: mol_type = other DNA
tgcgtgcagcatgcagcaagggctg

SEQ ID NO: 5845 - DNA, 25 bp, synthetic construct
  misc_feature 1..25: note = Oligonucleotide
  source 1..25: mol_type = other DNA
cagtgcgtgcagcatgcagcaaggg

SEQ ID NO: 5846 - DNA, 25 bp, synthetic construct
  misc_feature 1..25: note = Oligonucleotide
  source 1..25: mol_type = other DNA
gaccagtgcgtgcagcatgcagcaa

SEQ ID NO: 5847 - DNA, 25 bp, synthetic construct
  misc_feature 1..25: note = Oligonucleotide
  source 1..25: mol_type = other DNA
gaggaccagtgcgtgcagcatgcag

SEQ ID NO: 5848 - DNA, 25 bp, synthetic construct
  misc_feature 1..25: note = Oligonucleotide
  source 1..25: mol_type = other DNA
actgaggaccagtgcgtgcagcatg

SEQ ID NO: 5849 - DNA, 25 bp, synthetic construct
  misc_feature 1..25: note = Oligonucleotide
  source 1..25: mol_type = other DNA
tccactgaggaccagtgcgtgcagc

SEQ ID NO: 5850 - DNA, 25 bp, synthetic construct
  misc_feature 1..25: note = Oligonucleotide
  source 1..25: mol_type = other DNA
gggtccactgaggaccagtgcgtgc

SEQ ID NO: 5851 - DNA, 25 bp, synthetic construct
  misc_feature 1..25: note = Oligonucleotide
  source 1..25: mol_type = other DNA
tgtgggtccactgaggaccagtgcg

SEQ ID NO: 5852 - DNA, 25 bp, synthetic construct
  misc_feature 1..25: note = Oligonucleotide
  source 1..25: mol_type = other DNA
ccctgtgggtccactgaggaccagt

SEQ ID NO: 5853 - DNA, 25 bp, synthetic construct
  misc_feature 1..25: note = Oligonucleotide
  source 1..25: mol_type = other DNA
gccccctgtgggtccactgaggacc

SEQ ID NO: 5854 - DNA, 25 bp, synthetic construct
  misc_feature 1..25: note = Oligonucleotide
  source 1..25: mol_type = other DNA
ctcgccccctgtgggtccactgagg

SEQ ID NO: 5855 - DNA, 25 bp, synthetic construct
  misc_feature 1..25: note = Oligonucleotide
  source 1..25: mol_type = other DNA
gctctcgccccctgtgggtccactg

SEQ ID NO: 5856 - DNA, 25 bp, synthetic construct
  misc_feature 1..25: note = Oligonucleotide
  source 1..25: mol_type = other DNA
gcagctctcgccccctgtgggtcca

SEQ ID NO: 5857 - DNA, 25 bp, synthetic construct
  misc_feature 1..25: note = Oligonucleotide
  source 1..25: mol_type = other DNA
taagcagctctcgccccctgtgggt

SEQ ID NO: 5858 - DNA, 25 bp, synthetic construct
  misc_feature 1..25: note = Oligonucleotide
  source 1..25: mol_type = other DNA
acataagcagctctcgccccctgtg

SEQ ID NO: 5859 - DNA, 25 bp, synthetic construct
  misc_feature 1..25: note = Oligonucleotide
  source 1..25: mol_type = other DNA
aggacataagcagctctcgccccct

SEQ ID NO: 5860 - DNA, 25 bp, synthetic construct
  misc_feature 1..25: note = Oligonucleotide
  source 1..25: mol_type = other DNA
cccaggacataagcagctctcgccc

SEQ ID NO: 5861 - DNA, 25 bp, synthetic construct
  misc_feature 1..25: note = Oligonucleotide
  source 1..25: mol_type = other DNA
tcccccaggacataagcagctctcg

SEQ ID NO: 5862 - DNA, 25 bp, synthetic construct
  misc_feature 1..25: note = Oligonucleotide
  source 1..25: mol_type = other DNA
ggctcccccaggacataagcagctc

SEQ ID NO: 5863 - DNA, 25 bp, synthetic construct
  misc_feature 1..25: note = Oligonucleotide
  source 1..25: mol_type = other DNA
gatggctcccccaggacataagcag

SEQ ID NO: 5864 - DNA, 25 bp, synthetic construct
  misc_feature 1..25: note = Oligonucleotide
  source 1..25: mol_type = other DNA
ttggatggctcccccaggacataag

SEQ ID NO: 5865 - DNA, 25 bp, synthetic construct
  misc_feature 1..25: note = Oligonucleotide
  source 1..25: mol_type = other DNA
tggttggatggctcccccaggacat

SEQ ID NO: 5866 - DNA, 25 bp, synthetic construct
  misc_feature 1..25: note = Oligonucleotide
  source 1..25: mol_type = other DNA
ccctggttggatggctcccccagga

SEQ ID NO: 5867 - DNA, 25 bp, synthetic construct
  misc_feature 1..25: note = Oligonucleotide
  source 1..25: mol_type = other DNA
gagccctggttggatggctccccca

SEQ ID NO: 5868 - DNA, 25 bp, synthetic construct
  misc_feature 1..25: note = Oligonucleotide
  source 1..25: mol_type = other DNA
tcagagccctggttggatggctccc

SEQ ID NO: 5869 - DNA, 25 bp, synthetic construct
  misc_feature 1..25: note = Oligonucleotide
  source 1..25: mol_type = other DNA
ccatcagagccctggttggatggct

SEQ ID NO: 5870 - DNA, 25 bp, synthetic construct
  misc_feature 1..25: note = Oligonucleotide
  source 1..25: mol_type = other DNA
ggaccatcagagccctggttggatg

SEQ ID NO: 5871 - DNA, 25 bp, synthetic construct
  misc_feature 1..25: note = Oligonucleotide
  source 1..25: mol_type = other DNA
tcaggaccatcagagccctggttgg

SEQ ID NO: 5872 - DNA, 25 bp, synthetic construct
  misc_feature 1..25: note = Oligonucleotide
  source 1..25: mol_type = other DNA
atctcaggaccatcagagccctggt

SEQ ID NO: 5873 - DNA, 25 bp, synthetic construct
  misc_feature 1..25: note = Oligonucleotide
  source 1..25: mol_type = other DNA
tgtatctcaggaccatcagagccct

SEQ ID NO: 5874 - DNA, 25 bp, synthetic construct
  misc_feature 1..25: note = Oligonucleotide
  source 1..25: mol_type = other DNA
acgtgtatctcaggaccatcagagc

SEQ ID NO: 5875 - DNA, 25 bp, synthetic construct
  misc_feature 1..25: note = Oligonucleotide
  source 1..25: mol_type = other DNA
aatacgtgtatctcaggaccatcag

SEQ ID NO: 5876 - DNA, 25 bp, synthetic construct
  misc_feature 1..25: note = Oligonucleotide
  source 1..25: mol_type = other DNA
actaatacgtgtatctcaggaccat

SEQ ID NO: 5877 - DNA, 25 bp, synthetic construct
  misc_feature 1..25: note = Oligonucleotide
  source 1..25: mol_type = other DNA
taaactaatacgtgtatctcaggac

SEQ ID NO: 5878 - DNA, 25 bp, synthetic construct
  misc_feature 1..25: note = Oligonucleotide
  source 1..25: mol_type = other DNA
tgttaaactaatacgtgtatctcag

SEQ ID NO: 5879 - DNA, 25 bp, synthetic construct
  misc_feature 1..25: note = Oligonucleotide
  source 1..25: mol_type = other DNA
aactgttaaactaatacgtgtatct

SEQ ID NO: 5880 - DNA, 25 bp, synthetic construct
  misc_feature 1..25: note = Oligonucleotide
  source 1..25: mol_type = other DNA
ggaaactgttaaactaatacgtgta

SEQ ID NO: 5881 - DNA, 25 bp, synthetic construct
  misc_feature 1..25: note = Oligonucleotide
  source 1..25: mol_type = other DNA
cttggaaactgttaaactaatacgt

SEQ ID NO: 5882 - DNA, 25 bp, synthetic construct
  misc_feature 1..25: note = Oligonucleotide
  source 1..25: mol_type = other DNA
tgacttggaaactgttaaactaata

SEQ ID NO: 5883 - DNA, 25 bp, synthetic construct
  misc_feature 1..25: note = Oligonucleotide
  source 1..25: mol_type = other DNA
aagtgacttggaaactgttaaacta

SEQ ID NO: 5884 - DNA, 25 bp, synthetic construct
  misc_feature 1..25: note = Oligonucleotide
  source 1..25: mol_type = other DNA
tcaaagtgacttggaaactgttaaa

SEQ ID NO: 5885 - DNA, 25 bp, synthetic construct
  misc_feature 1..25: note = Oligonucleotide
  source 1..25: mol_type = other DNA
agatcaaagtgacttggaaactgtt

SEQ ID NO: 5886 - DNA, 25 bp, synthetic construct
  misc_feature 1..25: note = Oligonucleotide
  source 1..25: mol_type = other DNA
agaagatcaaagtgacttggaaact

SEQ ID NO: 5887 - DNA, 25 bp, synthetic construct
  misc_feature 1..25: note = Oligonucleotide
  source 1..25: mol_type = other DNA
cacagaagatcaaagtgacttggaa

SEQ ID NO: 5888 - DNA, 25 bp, synthetic construct
  misc_feature 1..25: note = Oligonucleotide
  source 1..25: mol_type = other DNA
ttccacagaagatcaaagtgacttg

SEQ ID NO: 5889 - DNA, 25 bp, synthetic construct
  misc_feature 1..25: note = Oligonucleotide
  source 1..25: mol_type = other DNA
ggtttccacagaagatcaaagtgac

SEQ ID NO: 5890 - DNA, 25 bp, synthetic construct
  misc_feature 1..25: note = Oligonucleotide
  source 1..25: mol_type = other DNA
gcaggtttccacagaagatcaaagt

SEQ ID NO: 5891 - DNA, 25 bp, synthetic construct
  misc_feature 1..25: note = Oligonucleotide
  source 1..25: mol_type = other DNA
caagcaggtttccacagaagatcaa

SEQ ID NO: 5892 - DNA, 25 bp, synthetic construct
  misc_feature 1..25: note = Oligonucleotide
  source 1..25: mol_type = other DNA
gtacaagcaggtttccacagaagat

SEQ ID NO: 5893 - DNA, 25 bp, synthetic construct
  misc_feature 1..25: note = Oligonucleotide
  source 1..25: mol_type = other DNA
gatgtacaagcaggtttccacagaa

SEQ ID NO: 5894 - DNA, 25 bp, synthetic construct
  misc_feature 1..25: note = Oligonucleotide
  source 1..25: mol_type = other DNA
cctgatgtacaagcaggtttccaca

SEQ ID NO: 5895 - DNA, 25 bp, synthetic construct
  misc_feature 1..25: note = Oligonucleotide
  source 1..25: mol_type = other DNA
gaccctgatgtacaagcaggtttcc

SEQ ID NO: 5896 - DNA, 25 bp, synthetic construct
  misc_feature 1..25: note = Oligonucleotide
  source 1..25: mol_type = other DNA
acagaccctgatgtacaagcaggtt

SEQ ID NO: 5897 - DNA, 25 bp, synthetic construct
  misc_feature 1..25: note = Oligonucleotide
  source 1..25: mol_type = other DNA
aggacagaccctgatgtacaagcag

SEQ ID NO: 5898 - DNA, 25 bp, synthetic construct
  misc_feature 1..25: note = Oligonucleotide
  source 1..25: mol_type = other DNA
ccgaggacagaccctgatgtacaag

SEQ ID NO: 5899 - DNA, 25 bp, synthetic construct
  misc_feature 1..25: note = Oligonucleotide
  source 1..25: mol_type = other DNA
agcccgaggacagaccctgatgtac

SEQ ID NO: 5900 - DNA, 25 bp, synthetic construct
  misc_feature 1..25: note = Oligonucleotide
  source 1..25: mol_type = other DNA
cacagcccgaggacagaccctgatg

SEQ ID NO: 5901 - DNA, 25 bp, synthetic construct
  misc_feature 1..25: note = Oligonucleotide
  source 1..25: mol_type = other DNA
ggtcacagcccgaggacagaccctg

SEQ ID NO: 5902 - DNA, 25 bp, synthetic construct
  misc_feature 1..25: note = Oligonucleotide
  source 1..25: mol_type = other DNA
gcgggtcacagcccgaggacagacc

SEQ ID NO: 5903 - DNA, 25 bp, synthetic construct
  misc_feature 1..25: note = Oligonucleotide
  source 1..25: mol_type = other DNA
acagcgggtcacagcccgaggacag

SEQ ID NO: 5904 - DNA, 25 bp, synthetic construct
  misc_feature 1..25: note = Oligonucleotide
  source 1..25: mol_type = other DNA
ttcacagcgggtcacagcccgagga

SEQ ID NO: 5905 - DNA, 25 bp, synthetic construct
  misc_feature 1..25: note = Oligonucleotide
  source 1..25: mol_type = other DNA
ctgttcacagcgggtcacagcccga

SEQ ID NO: 5906 - DNA, 25 bp, synthetic construct
  misc_feature 1..25: note = Oligonucleotide
  source 1..25: mol_type = other DNA
aagctgttcacagcgggtcacagcc

SEQ ID NO: 5907 - DNA, 25 bp, synthetic construct
  misc_feature 1..25: note = Oligonucleotide
  source 1..25: mol_type = other DNA
gggaagctgttcacagcgggtcaca

SEQ ID NO: 5908 - DNA, 25 bp, synthetic construct
  misc_feature 1..25: note = Oligonucleotide
  source 1..25: mol_type = other DNA
gaagggaagctgttcacagcgggtc

SEQ ID NO: 5909 - DNA, 25 bp, synthetic construct
  misc_feature 1..25: note = Oligonucleotide
  source 1..25: mol_type = other DNA
ctggaagggaagctgttcacagcgg

SEQ ID NO: 5910 - DNA, 25 bp, synthetic construct
  misc_feature 1..25: note = Oligonucleotide
  source 1..25: mol_type = other DNA
gcactggaagggaagctgttcacag

SEQ ID NO: 5911 - DNA, 25 bp, synthetic construct
  misc_feature 1..25: note = Oligonucleotide
  source 1..25: mol_type = other DNA
accgcactggaagggaagctgttca

SEQ ID NO: 5912 - DNA, 25 bp, synthetic construct
  misc_feature 1..25: note = Oligonucleotide
  source 1..25: mol_type = other DNA
tgtaccgcactggaagggaagctgt

SEQ ID NO: 5913 - DNA, 25 bp, synthetic construct
  misc_feature 1..25: note = Oligonucleotide
  source 1..25: mol_type = other DNA
atctgtaccgcactggaagggaagc

SEQ ID NO: 5914 - DNA, 25 bp, synthetic construct
  misc_feature 1..25: note = Oligonucleotide
  source 1..25: mol_type = other DNA
gctatctgtaccgcactggaaggga

SEQ ID NO: 5915 - DNA, 25 bp, synthetic construct
  misc_feature 1..25: note = Oligonucleotide
  source 1..25: mol_type = other DNA
ttggctatctgtaccgcactggaag

SEQ ID NO: 5916 - DNA, 25 bp, synthetic construct
  misc_feature 1..25: note = Oligonucleotide
  source 1..25: mol_type = other DNA
ctcttggctatctgtaccgcactgg

SEQ ID NO: 5917 - DNA, 25 bp, synthetic construct
  misc_feature 1..25: note = Oligonucleotide
  source 1..25: mol_type = other DNA
ccactcttggctatctgtaccgcac

SEQ ID NO: 5918 - DNA, 25 bp, synthetic construct
  misc_feature 1..25: note = Oligonucleotide
  source 1..25: mol_type = other DNA
aggccactcttggctatctgtaccg

SEQ ID NO: 5919 - DNA, 25 bp, synthetic construct
  misc_feature 1..25: note = Oligonucleotide
  source 1..25: mol_type = other DNA
tacaggccactcttggctatctgta

SEQ ID NO: 5920 - DNA, 25 bp, synthetic construct
  misc_feature 1..25: note = Oligonucleotide
  source 1..25: mol_type = other DNA
acatacaggccactcttggctatct

SEQ ID NO: 5921 - DNA, 25 bp, synthetic construct
  misc_feature 1..25: note = Oligonucleotide
  source 1..25: mol_type = other DNA
agcacatacaggccactcttggcta

SEQ ID NO: 5922 - DNA, 25 bp, synthetic construct
  misc_feature 1..25: note = Oligonucleotide
  source 1..25: mol_type = other DNA
ctcagcacatacaggccactcttgg

SEQ ID NO: 5923 - DNA, 25 bp, synthetic construct
  misc_feature 1..25: note = Oligonucleotide
  source 1..25: mol_type = other DNA
gttctcagcacatacaggccactct

SEQ ID NO: 5924 - DNA, 25 bp, synthetic construct
  misc_feature 1..25: note = Oligonucleotide
  source 1..25: mol_type = other DNA
actgttctcagcacatacaggccac

SEQ ID NO: 5925 - DNA, 25 bp, synthetic construct
  misc_feature 1..25: note = Oligonucleotide
  source 1..25: mol_type = other DNA
gtcactgttctcagcacatacaggc

SEQ ID NO: 5926 - DNA, 25 bp, synthetic construct
  misc_feature 1..25: note = Oligonucleotide
  source 1..25: mol_type = other DNA
cctgtcactgttctcagcacataca

SEQ ID NO: 5927 - DNA, 25 bp, synthetic construct
  misc_feature 1..25: note = Oligonucleotide
  source 1..25: mol_type = other DNA
cgtcctgtcactgttctcagcacat

SEQ ID NO: 5928 - DNA, 25 bp, synthetic construct
  misc_feature 1..25: note = Oligonucleotide
  source 1..25: mol_type = other DNA
cttcgtcctgtcactgttctcagca

SEQ ID NO: 5929 - DNA, 25 bp, synthetic construct
  misc_feature 1..25: note = Oligonucleotide
  source 1..25: mol_type = other DNA
tcccttcgtcctgtcactgttctca

SEQ ID NO: 5930 - DNA, 25 bp, synthetic construct
  misc_feature 1..25: note = Oligonucleotide
  source 1..25: mol_type = other DNA
atttcccttcgtcctgtcactgttc

SEQ ID NO: 5931 - DNA, 25 bp, synthetic construct
  misc_feature 1..25: note = Oligonucleotide
  source 1..25: mol_type = other DNA
tccatttcccttcgtcctgtcactg

SEQ ID NO: 5932 - DNA, 25 bp, synthetic construct
  misc_feature 1..25: note = Oligonucleotide
  source 1..25: mol_type = other DNA
ccctccatttcccttcgtcctgtca

SEQ ID NO: 5933 - DNA, 25 bp, synthetic construct
  misc_feature 1..25: note = Oligonucleotide
  source 1..25: mol_type = other DNA
tttccctccatttcccttcgtcctg

SEQ ID NO: 5934 - DNA, 25 bp, synthetic construct
  misc_feature 1..25: note = Oligonucleotide
  source 1..25: mol_type = other DNA
ggatttccctccatttcccttcgtc

SEQ ID NO: 5935 - DNA, 25 bp, synthetic construct
  misc_feature 1..25: note = Oligonucleotide
  source 1..25: mol_type = other DNA
cctggatttccctccatttcccttc

SEQ ID NO: 5936 - DNA, 25 bp, synthetic construct
  misc_feature 1..25: note = Oligonucleotide
  source 1..25: mol_type = other DNA
ctccctggatttccctccatttccc

SEQ ID NO: 5937 - DNA, 25 bp, synthetic construct
  misc_feature 1..25: note = Oligonucleotide
  source 1..25: mol_type = other DNA
agtctccctggatttccctccattt

SEQ ID NO: 5938 - DNA, 25 bp, synthetic construct
  misc_feature 1..25: note = Oligonucleotide
  source 1..25: mol_type = other DNA
cacagtctccctggatttccctcca

SEQ ID NO: 5939 - DNA, 25 bp, synthetic construct
  misc_feature 1..25: note = Oligonucleotide
  source 1..25: mol_type = other DNA
gaccacagtctccctggatttccct

SEQ ID NO: 5940 - DNA, 25 bp, synthetic construct
  misc_feature 1..25: note = Oligonucleotide
  source 1..25: mol_type = other DNA
agagaccacagtctccctggatttc

SEQ ID NO: 5941 - DNA, 25 bp, synthetic construct
  misc_feature 1..25: note = Oligonucleotide
  source 1..25: mol_type = other DNA
ttcagagaccacagtctccctggat

SEQ ID NO: 5942 - DNA, 25 bp, synthetic construct
  misc_feature 1..25: note = Oligonucleotide
  source 1..25: mol_type = other DNA
cgattcagagaccacagtctccctg

SEQ ID NO: 5943 - DNA, 25 bp, synthetic construct
  misc_feature 1..25: note = Oligonucleotide
  source 1..25: mol_type = other DNA
aaacgattcagagaccacagtctcc

SEQ ID NO: 5944 - DNA, 25 bp, synthetic construct
  misc_feature 1..25: note = Oligonucleotide
  source 1..25: mol_type = other DNA
gacaaacgattcagagaccacagtc

SEQ ID NO: 5945 - DNA, 25 bp, synthetic construct
  misc_feature 1..25: note = Oligonucleotide
  source 1..25: mol_type = other DNA
acagacaaacgattcagagaccaca

SEQ ID NO: 5946 - DNA, 25 bp, synthetic construct
  misc_feature 1..25: note = Oligonucleotide
  source 1..25: mol_type = other DNA
aggacagacaaacgattcagagacc

SEQ ID NO: 5947 - DNA, 25 bp, synthetic construct
  misc_feature 1..25: note = Oligonucleotide
  source 1..25: mol_type = other DNA
cacaggacagacaaacgattcagag

SEQ ID NO: 5948 - DNA, 25 bp, synthetic construct
  misc_feature 1..25: note = Oligonucleotide
  source 1..25: mol_type = other DNA
gggcacaggacagacaaacgattca

SEQ ID NO: 5949 - DNA, 25 bp, synthetic construct
  misc_feature 1..25: note = Oligonucleotide
  source 1..25: mol_type = other DNA
ccagggcacaggacagacaaacgat

SEQ ID NO: 5950 - DNA, 25 bp, synthetic construct
  misc_feature 1..25: note = Oligonucleotide
  source 1..25: mol_type = other DNA
agaccagggcacaggacagacaaac

SEQ ID NO: 5951 - DNA, 25 bp, synthetic construct
  misc_feature 1..25: note = Oligonucleotide
  source 1..25: mol_type = other DNA
agaagaccagggcacaggacagaca

SEQ ID NO: 5952 - DNA, 25 bp, synthetic construct
  misc_feature 1..25: note = Oligonucleotide
  source 1..25: mol_type = other DNA
gggagaagaccagggcacaggacag

SEQ ID NO: 5953 - DNA, 25 bp, synthetic construct
  misc_feature 1..25: note = Oligonucleotide
  source 1..25: mol_type = other DNA
tgagggagaagaccagggcacagga

SEQ ID NO: 5954 - DNA, 25 bp, synthetic construct
  misc_feature 1..25: note = Oligonucleotide
  source 1..25: mol_type = other DNA
ccatgagggagaagaccagggcaca

SEQ ID NO: 5955 - DNA, 25 bp, synthetic construct
  misc_feature 1..25: note = Oligonucleotide
  source 1..25: mol_type = other DNA
tgaccatgagggagaagaccagggc

SEQ ID NO: 5956 - DNA, 25 bp, synthetic construct
  misc_feature 1..25: note = Oligonucleotide
  source 1..25: mol_type = other DNA
ctctgaccatgagggagaagaccag

SEQ ID NO: 5957 - DNA, 25 bp, synthetic construct
  misc_feature 1..25: note = Oligonucleotide
  source 1..25: mol_type = other DNA
ccactctgaccatgagggagaagac

SEQ ID NO: 5958 - DNA, 25 bp, synthetic construct
  misc_feature 1..25: note = Oligonucleotide
  source 1..25: mol_type = other DNA
aggccactctgaccatgagggagaa

SEQ ID NO: 5959 - DNA, 25 bp, synthetic construct
  misc_feature 1..25: note = Oligonucleotide
  source 1..25: mol_type = other DNA
gaaaggccactctgaccatgaggga

SEQ ID NO: 5960 - DNA, 25 bp, synthetic construct
  misc_feature 1..25: note = Oligonucleotide
  source 1..25: mol_type = other DNA
aaggaaaggccactctgaccatgag

SEQ ID NO: 5961 - DNA, 25 bp, synthetic construct
  misc_feature 1..25: note = Oligonucleotide
  source 1..25: mol_type = other DNA
cttaaggaaaggccactctgaccat

SEQ ID NO: 5962 - DNA, 25 bp, synthetic construct
  misc_feature 1..25: note = Oligonucleotide
  source 1..25: mol_type = other DNA
tcacttaaggaaaggccactctgac

SEQ ID NO: 5963 - DNA, 25 bp, synthetic construct
  misc_feature 1..25: note = Oligonucleotide
  source 1..25: mol_type = other DNA
acctcacttaaggaaaggccactct

SEQ ID NO: 5964 - DNA, 25 bp, synthetic construct
  misc_feature 1..25: note = Oligonucleotide
  source 1..25: mol_type = other DNA
tggacctcacttaaggaaaggccac

SEQ ID NO: 5965 - DNA, 25 bp, synthetic construct
  misc_feature 1..25: note = Oligonucleotide
  source 1..25: mol_type = other DNA
ctgtggacctcacttaaggaaaggc

SEQ ID NO: 5966 - DNA, 25 bp, synthetic construct
  misc_feature 1..25: note = Oligonucleotide
  source 1..25: mol_type = other DNA
accctgtggacctcacttaaggaaa

SEQ ID NO: 5967 - DNA, 25 bp, synthetic construct
  misc_feature 1..25: note = Oligonucleotide
  source 1..25: mol_type = other DNA
gtgaccctgtggacctcacttaagg

SEQ ID NO: 5968 - DNA, 25 bp, synthetic construct
  misc_feature 1..25: note = Oligonucleotide
  source 1..25: mol_type = other DNA
caggtgaccctgtggacctcactta

SEQ ID NO: 5969 - DNA, 25 bp, synthetic construct
  misc_feature 1..25: note = Oligonucleotide
  source 1..25: mol_type = other DNA
ctccaggtgaccctgtggacctcac

SEQ ID NO: 5970 - DNA, 25 bp, synthetic construct
  misc_feature 1..25: note = Oligonucleotide
  source 1..25: mol_type = other DNA
agactccaggtgaccctgtggacct

SEQ ID NO: 5971 - DNA, 25 bp, synthetic construct
  misc_feature 1..25: note = Oligonucleotide
  source 1..25: mol_type = other DNA
aggagactccaggtgaccctgtgga

SEQ ID NO: 5972 - DNA, 25 bp, synthetic construct
  misc_feature 1..25: note = Oligonucleotide
  source 1..25: mol_type = other DNA
tcaaggagactccaggtgaccctgt

SEQ ID NO: 5973 - DNA, 25 bp, synthetic construct
  misc_feature 1..25: note = Oligonucleotide
  source 1..25: mol_type = other DNA
gcctcaaggagactccaggtgaccc

SEQ ID NO: 5974 - DNA, 25 bp, synthetic construct
  misc_feature 1..25: note = Oligonucleotide
  source 1..25: mol_type = other DNA
ctagcctcaaggagactccaggtga

SEQ ID NO: 5975 - DNA, 25 bp, synthetic construct
  misc_feature 1..25: note = Oligonucleotide
  source 1..25: mol_type = other DNA
tctctagcctcaaggagactccagg

SEQ ID NO: 5976 - DNA, 25 bp, synthetic construct
  misc_feature 1..25: note = Oligonucleotide
  source 1..25: mol_type = other DNA
gcctctctagcctcaaggagactcc

SEQ ID NO: 5977 - DNA, 25 bp, synthetic construct
  misc_feature 1..25: note = Oligonucleotide
  source 1..25: mol_type = other DNA
gcagcctctctagcctcaaggagac

SEQ ID NO: 5978 - DNA, 25 bp, synthetic construct
  misc_feature 1..25: note = Oligonucleotide
  source 1..25: mol_type = other DNA
caggcagcctctctagcctcaagga

SEQ ID NO: 5979 - DNA, 25 bp, synthetic construct
  misc_feature 1..25: note = Oligonucleotide
  source 1..25: mol_type = other DNA
ccccaggcagcctctctagcctcaa

SEQ ID NO: 5980 - DNA, 25 bp, synthetic construct
  misc_feature 1..25: note = Oligonucleotide
  source 1..25: mol_type = other DNA
ccaccccaggcagcctctctagcct

SEQ ID NO: 5981 - DNA, 25 bp, synthetic construct
  misc_feature 1..25: note = Oligonucleotide
  source 1..25: mol_type = other DNA
accccaccccaggcagcctctctag

SEQ ID NO: 5982 - DNA, 25 bp, synthetic construct
  misc_feature 1..25: note = Oligonucleotide
  source 1..25: mol_type = other DNA
cagaccccaccccaggcagcctctc

SEQ ID NO: 5983 - DNA, 25 bp, synthetic construct
  misc_feature 1..25: note = Oligonucleotide
  source 1..25: mol_type = other DNA
actcagaccccaccccaggcagcct

SEQ ID NO: 5984 - DNA, 25 bp, synthetic construct
  misc_feature 1..25: note = Oligonucleotide
  source 1..25: mol_type = other DNA
agaactcagaccccaccccaggcag

SEQ ID NO: 5985 - DNA, 25 bp, synthetic construct
  misc_feature 1..25: note = Oligonucleotide
  source 1..25: mol_type = other DNA
cccagaactcagaccccaccccagg

SEQ ID NO: 5986 - DNA, 25 bp, synthetic construct
  misc_feature 1..25: note = Oligonucleotide
  source 1..25: mol_type = other DNA
caccccagaactcagaccccacccc

SEQ ID NO: 5987 - DNA, 25 bp, synthetic construct
  misc_feature 1..25: note = Oligonucleotide
  source 1..25: mol_type = other DNA
cctcaccccagaactcagaccccac

SEQ ID NO: 5988 - DNA, 25 bp, synthetic construct
  misc_feature 1..25: note = Oligonucleotide
  source 1..25: mol_type = other DNA
ggccctcaccccagaactcagaccc

SEQ ID NO: 5989 - DNA, 25 bp, synthetic construct
  misc_feature 1..25: note = Oligonucleotide
  source 1..25: mol_type = other DNA
caaggccctcaccccagaactcaga

SEQ ID NO: 5990 - DNA, 25 bp, synthetic construct
  misc_feature 1..25: note = Oligonucleotide
  source 1..25: mol_type = other DNA
agacaaggccctcaccccagaactc

SEQ ID NO: 5991 - DNA, 25 bp, synthetic construct
  misc_feature 1..25: note = Oligonucleotide
  source 1..25: mol_type = other DNA
ccaagacaaggccctcaccccagaa

SEQ ID NO: 5992 - DNA, 25 bp, synthetic construct
  misc_feature 1..25: note = Oligonucleotide
  source 1..25: mol_type = other DNA
ctcccaagacaaggccctcacccca

SEQ ID NO: 5993 - DNA, 25 bp, synthetic construct
  misc_feature 1..25: note = Oligonucleotide
  source 1..25: mol_type = other DNA
aggctcccaagacaaggccctcacc

SEQ ID NO: 5994 - DNA, 25 bp, synthetic construct
  misc_feature 1..25: note = Oligonucleotide
  source 1..25: mol_type = other DNA
cccaggctcccaagacaaggccctc

SEQ ID NO: 5995 - DNA, 25 bp, synthetic construct
  misc_feature 1..25: note = Oligonucleotide
  source 1..25: mol_type = other DNA
caccccaggctcccaagacaaggcc

SEQ ID NO: 5996 - DNA, 25 bp, synthetic construct
  misc_feature 1..25: note = Oligonucleotide
  source 1..25: mol_type = other DNA
tcccaccccaggctcccaagacaag

SEQ ID NO: 5997 - DNA, 25 bp, synthetic construct
  misc_feature 1..25: note = Oligonucleotide
  source 1..25: mol_type = other DNA
agctcccaccccaggctcccaagac

SEQ ID NO: 5998 - DNA, 25 bp, synthetic construct
  misc_feature 1..25: note = Oligonucleotide
  source 1..25: mol_type = other DNA
ttgagctcccaccccaggctcccaa

SEQ ID NO: 5999 - DNA, 25 bp, synthetic construct
  misc_feature 1..25: note = Oligonucleotide
  source 1..25: mol_type = other DNA
tccttgagctcccaccccaggctcc

SEQ ID NO: 6000 - DNA, 25 bp, synthetic construct
  misc_feature 1..25: note = Oligonucleotide
  source 1..25: mol_type = other DNA
ccctccttgagctcccaccccaggc

SEQ ID NO: 6001 - DNA, 25 bp, synthetic construct
  misc_feature 1..25: note = Oligonucleotide
  source 1..25: mol_type = other DNA
cctccctccttgagctcccacccca

SEQ ID NO: 6002 - DNA, 25 bp, synthetic construct
  misc_feature 1..25: note = Oligonucleotide
  source 1..25: mol_type = other DNA
tcccctccctccttgagctcccacc

SEQ ID NO: 6003 - DNA, 25 bp, synthetic construct
  misc_feature 1..25: note = Oligonucleotide
  source 1..25: mol_type = other DNA
cgctcccctccctccttgagctccc

SEQ ID NO: 6004 - DNA, 25 bp, synthetic construct
  misc_feature 1..25: note = Oligonucleotide
  source 1..25: mol_type = other DNA
caccgctcccctccctccttgagct

SEQ ID NO: 6005 - DNA, 25 bp, synthetic construct
  misc_feature 1..25: note = Oligonucleotide
  source 1..25: mol_type = other DNA
ggccaccgctcccctccctccttga

SEQ ID NO: 6006 - DNA, 25 bp, synthetic construct
  misc_feature 1..25: note = Oligonucleotide
  source 1..25: mol_type = other DNA
agaggccaccgctcccctccctcct

SEQ ID NO: 6007 - DNA, 25 bp, synthetic construct
  misc_feature 1..25: note = Oligonucleotide
  source 1..25: mol_type = other DNA
gacagaggccaccgctcccctccct

SEQ ID NO: 6008 - DNA, 25 bp, synthetic construct
  misc_feature 1..25: note = Oligonucleotide
  source 1..25: mol_type = other DNA
gctgacagaggccaccgctcccctc

SEQ ID NO: 6009 - DNA, 25 bp, synthetic construct
  misc_feature 1..25: note = Oligonucleotide
  source 1..25: mol_type = other DNA
gatgctgacagaggccaccgctccc

SEQ ID NO: 6010 - DNA, 25 bp, synthetic construct
  misc_feature 1..25: note = Oligonucleotide
  source 1..25: mol_type = other DNA
cgtgatgctgacagaggccaccgct

SEQ ID NO: 6011 - DNA, 25 bp, synthetic construct
  misc_feature 1..25: note = Oligonucleotide
  source 1..25: mol_type = other DNA
acccgtgatgctgacagaggccacc

SEQ ID NO: 6012 - DNA, 25 bp, synthetic construct
  misc_feature 1..25: note = Oligonucleotide
  source 1..25: mol_type = other DNA
gccacccgtgatgctgacagaggcc

SEQ ID NO: 6013 - DNA, 25 bp, synthetic construct
  misc_feature 1..25: note = Oligonucleotide
  source 1..25: mol_type = other DNA
ccggccacccgtgatgctgacagag

SEQ ID NO: 6014 - DNA, 25 bp, synthetic construct
  misc_feature 1..25: note = Oligonucleotide
  source 1..25: mol_type = other DNA
aacccggccacccgtgatgctgaca

SEQ ID NO: 6015 - DNA, 25 bp, synthetic construct
  misc_feature 1..25: note = Oligonucleotide
  source 1..25: mol_type = other DNA
cccaacccggccacccgtgatgctg

SEQ ID NO: 6016 - DNA, 25 bp, synthetic construct
  misc_feature 1..25: note = Oligonucleotide
  source 1..25: mol_type = other DNA
ctccccaacccggccacccgtgatg

SEQ ID NO: 6017 - DNA, 25 bp, synthetic construct
  misc_feature 1..25: note = Oligonucleotide
  source 1..25: mol_type = other DNA
gtcctccccaacccggccacccgtg

SEQ ID NO: 6018 - DNA, 25 bp, synthetic construct
  misc_feature 1..25: note = Oligonucleotide
  source 1..25: mol_type = other DNA
catgtcctccccaacccggccaccc

SEQ ID NO: 6019 - DNA, 25 bp, synthetic construct
  misc_feature 1..25: note = Oligonucleotide
  source 1..25: mol_type = other DNA
tgccatgtcctccccaacccggcca

SEQ ID NO: 6020 - DNA, 25 bp, synthetic construct
  misc_feature 1..25: note = Oligonucleotide
  source 1..25: mol_type = other DNA
cactgccatgtcctccccaacccgg

SEQ ID NO: 6021 - DNA, 25 bp, synthetic construct
  misc_feature 1..25: note = Oligonucleotide
  source 1..25: mol_type = other DNA
ccccactgccatgtcctccccaacc

SEQ ID NO: 6022 - DNA, 25 bp, synthetic construct
  misc_feature 1..25: note = Oligonucleotide
  source 1..25: mol_type = other DNA
ctgccccactgccatgtcctcccca

SEQ ID NO: 6023 - DNA, 25 bp, synthetic construct
  misc_feature 1..25: note = Oligonucleotide
  source 1..25: mol_type = other DNA
ctcctgccccactgccatgtcctcc

SEQ ID NO: 6024 - DNA, 25 bp, synthetic construct
  misc_feature 1..25: note = Oligonucleotide
  source 1..25: mol_type = other DNA
cacctcctgccccactgccatgtcc

SEQ ID NO: 6025 - DNA, 25 bp, synthetic construct
  misc_feature 1..25: note = Oligonucleotide
  source 1..25: mol_type = other DNA
ggccacctcctgccccactgccatg

SEQ ID NO: 6026 - DNA, 25 bp, synthetic construct
  misc_feature 1..25: note = Oligonucleotide
  source 1..25: mol_type = other DNA
ctgggccacctcctgccccactgcc

SEQ ID NO: 6027 - DNA, 25 bp, synthetic construct
  misc_feature 1..25: note = Oligonucleotide
  source 1..25: mol_type = other DNA
tgcctgggccacctcctgccccact

SEQ ID NO: 6028 - DNA, 25 bp, synthetic construct
  misc_feature 1..25: note = Oligonucleotide
  source 1..25: mol_type = other DNA
agctgcctgggccacctcctgcccc

SEQ ID NO: 6029 - DNA, 25 bp, synthetic construct
  misc_feature 1..25: note = Oligonucleotide
  source 1..25: mol_type = other DNA
ctcagctgcctgggccacctcctgc

SEQ ID NO: 6030 - DNA, 25 bp, synthetic construct
  misc_feature 1..25: note = Oligonucleotide
  source 1..25: mol_type = other DNA
catctcagctgcctgggccacctcc

SEQ ID NO: 6031 - DNA, 25 bp, synthetic construct
  misc_feature 1..25: note = Oligonucleotide
  source 1..25: mol_type = other DNA
ctccatctcagctgcctgggccacc

SEQ ID NO: 6032 - DNA, 25 bp, synthetic construct
  misc_feature 1..25: note = Oligonucleotide
  source 1..25: mol_type = other DNA
aggctccatctcagctgcctgggcc

SEQ ID NO: 6033 - DNA, 25 bp, synthetic construct
  misc_feature 1..25: note = Oligonucleotide
  source 1..25: mol_type = other DNA
aggaggctccatctcagctgcctgg

SEQ ID NO: 6034 - DNA, 25 bp, synthetic construct
  misc_feature 1..25: note = Oligonucleotide
  source 1..25: mol_type = other DNA
gcaaggaggctccatctcagctgcc

SEQ ID NO: 6035 - DNA, 25 bp, synthetic construct
  misc_feature 1..25: note = Oligonucleotide
  source 1..25: mol_type = other DNA
acagcaaggaggctccatctcagct

SEQ ID NO: 6036 - DNA, 25 bp, synthetic construct
  misc_feature 1..25: note = Oligonucleotide
  source 1..25: mol_type = other DNA
tgcacagcaaggaggctccatctca

SEQ ID NO: 6037 - DNA, 17 bp, synthetic construct
  misc_feature 1..17: note = Oligonucleotide
  source 1..17: mol_type = other DNA
acaggcagatgactcac

SEQ ID NO: 6038 - DNA, 17 bp, synthetic construct
  misc_feature 1..17: note = Oligonucleotide
  source 1..17: mol_type = other DNA
gacacaggcagatgact

SEQ ID NO: 6039 - DNA, 17 bp, synthetic construct
  misc_feature 1..17: note = Oligonucleotide
  source 1..17: mol_type = other DNA
ggggacacaggcagatg

SEQ ID NO: 6040 - DNA, 17 bp, synthetic construct
  misc_feature 1..17: note = Oligonucleotide
  source 1..17: mol_type = other DNA
cctggggacacaggcag

SEQ ID NO: 6041 - DNA, 17 bp, synthetic construct
  misc_feature 1..17: note = Oligonucleotide
  source 1..17: mol_type = other DNA
ggccctggggacacagg

SEQ ID NO: 6042 - DNA, 17 bp, synthetic construct
  misc_feature 1..17: note = Oligonucleotide
  source 1..17: mol_type = other DNA
caaggccctggggacac

SEQ ID NO: 6043 - DNA, 17 bp, synthetic construct
  misc_feature 1..17: note = Oligonucleotide
  source 1..17: mol_type = other DNA
agccaaggccctgggga

SEQ ID NO: 6044 - DNA, 17 bp, synthetic construct
  misc_feature 1..17: note = Oligonucleotide
  source 1..17: mol_type = other DNA
caaagccaaggccctgg

SEQ ID NO: 6045 - DNA, 17 bp, synthetic construct
  misc_feature 1..17: note = Oligonucleotide
  source 1..17: mol_type = other DNA
aggcaaagccaaggccc

SEQ ID NO: 6046 - DNA, 17 bp, synthetic construct
  misc_feature 1..17: note = Oligonucleotide
  source 1..17: mol_type = other DNA
gtcaggcaaagccaagg

SEQ ID NO: 6047 - DNA, 17 bp, synthetic construct
  misc_feature 1..17: note = Oligonucleotide
  source 1..17: mol_type = other DNA
ggggtcaggcaaagcca

SEQ ID NO: 6048 - DNA, 17 bp, synthetic construct
  misc_feature 1..17: note = Oligonucleotide
  source 1..17: mol_type = other DNA
acaggggtcaggcaaag

SEQ ID NO: 6049 - DNA, 17 bp, synthetic construct
  misc_feature 1..17: note = Oligonucleotide
  source 1..17: mol_type = other DNA
cagacaggggtcaggca

SEQ ID NO: 6050 - DNA, 17 bp, synthetic construct
  misc_feature 1..17: note = Oligonucleotide
  source 1..17: mol_type = other DNA
ccccagacaggggtcag

SEQ ID NO: 6051 - DNA, 17 bp, synthetic construct
  misc_feature 1..17: note = Oligonucleotide
  source 1..17: mol_type = other DNA
ctcccccagacaggggt

SEQ ID NO: 6052 - DNA, 17 bp, synthetic construct
  misc_feature 1..17: note = Oligonucleotide
  source 1..17: mol_type = other DNA
gcactcccccagacagg

SEQ ID NO: 6053 - DNA, 17 bp, synthetic construct
  misc_feature 1..17: note = Oligonucleotide
  source 1..17: mol_type = other DNA
ccagcactcccccagac

SEQ ID NO: 6054 - DNA, 17 bp, synthetic construct
  misc_feature 1..17: note = Oligonucleotide
  source 1..17: mol_type = other DNA
acaccagcactccccca

SEQ ID NO: 6055 - DNA, 17 bp, synthetic construct
  misc_feature 1..17: note = Oligonucleotide
  source 1..17: mol_type = other DNA
cacacaccagcactccc

SEQ ID NO: 6056 - DNA, 17 bp, synthetic construct
  misc_feature 1..17: note = Oligonucleotide
  source 1..17: mol_type = other DNA
cctcacacaccagcact

SEQ ID NO: 6057 - DNA, 17 bp, synthetic construct
  misc_feature 1..17: note = Oligonucleotide
  source 1..17: mol_type = other DNA
cctcctcacacaccagc

SEQ ID NO: 6058 - DNA, 17 bp, synthetic construct
  misc_feature 1..17: note = Oligonucleotide
  source 1..17: mol_type = other DNA
gaacctcctcacacacc

SEQ ID NO: 6059 - DNA, 17 bp, synthetic construct
  misc_feature 1..17: note = Oligonucleotide
  source 1..17: mol_type = other DNA
ctggaacctcctcacac

SEQ ID NO: 6060 - DNA, 17 bp, synthetic construct
  misc_feature 1..17: note = Oligonucleotide
  source 1..17: mol_type = other DNA
gcgctggaacctcctca

SEQ ID NO: 6061 - DNA, 17 bp, synthetic construct
  misc_feature 1..17: note = Oligonucleotide
  source 1..17: mol_type = other DNA
cttgcgctggaacctcc

SEQ ID NO: 6062 - DNA, 17 bp, synthetic construct
  misc_feature 1..17: note = Oligonucleotide
  source 1..17: mol_type = other DNA
tgacttgcgctggaacc

SEQ ID NO: 6063 - DNA, 17 bp, synthetic construct
  misc_feature 1..17: note = Oligonucleotide
  source 1..17: mol_type = other DNA
ccctgacttgcgctgga

SEQ ID NO: 6064 - DNA, 17 bp, synthetic construct
  misc_feature 1..17: note = Oligonucleotide
  source 1..17: mol_type = other DNA
ccaccctgacttgcgct

SEQ ID NO: 6065 - DNA, 17 bp, synthetic construct
  misc_feature 1..17: note = Oligonucleotide
  source 1..17: mol_type = other DNA
aggccaccctgacttgc

SEQ ID NO: 6066 - DNA, 17 bp, synthetic construct
  misc_feature 1..17: note = Oligonucleotide
  source 1..17: mol_type = other DNA
tccaggccaccctgact

SEQ ID NO: 6067 - DNA, 17 bp, synthetic construct
  misc_feature 1..17: note = Oligonucleotide
  source 1..17: mol_type = other DNA
gcttccaggccaccctg

SEQ ID NO: 6068 - DNA, 17 bp, synthetic construct
  misc_feature 1..17: note = Oligonucleotide
  source 1..17: mol_type = other DNA
caggcttccaggccacc

SEQ ID NO: 6069 - DNA, 17 bp, synthetic construct
  misc_feature 1..17: note = Oligonucleotide
  source 1..17: mol_type = other DNA
gcccaggcttccaggcc

SEQ ID NO: 6070 - DNA, 17 bp, synthetic construct
  misc_feature 1..17: note = Oligonucleotide
  source 1..17: mol_type = other DNA
gcagcccaggcttccag

SEQ ID NO: 6071 - DNA, 17 bp, synthetic construct
  misc_feature 1..17: note = Oligonucleotide
  source 1..17: mol_type = other DNA
ggtgcagcccaggcttc

SEQ ID NO: 6072 - DNA, 17 bp, synthetic construct
  misc_feature 1..17: note = Oligonucleotide
  source 1..17: mol_type = other DNA
gagggtgcagcccaggc

SEQ ID NO: 6073 - DNA, 17 bp, synthetic construct
  misc_feature 1..17: note = Oligonucleotide
  source 1..17: mol_type = other DNA
caggagggtgcagccca

SEQ ID NO: 6074 - DNA, 17 bp, synthetic construct
  misc_feature 1..17: note = Oligonucleotide
  source 1..17: mol_type = other DNA
caacaggagggtgcagc

SEQ ID NO: 6075 - DNA, 17 bp, synthetic construct
  misc_feature 1..17: note = Oligonucleotide
  source 1..17: mol_type = other DNA
ggccaacaggagggtgc

SEQ ID NO: 6076 - DNA, 17 bp, synthetic construct
  misc_feature 1..17: note = Oligonucleotide
  source 1..17: mol_type = other DNA
gaaggccaacaggaggg

SEQ ID NO: 6077 - DNA, 17 bp, synthetic construct
  misc_feature 1..17: note = Oligonucleotide
  source 1..17: mol_type = other DNA
ggagaaggccaacagga

SEQ ID NO: 6078 - DNA, 17 bp, synthetic construct
  misc_feature 1..17: note = Oligonucleotide
  source 1..17: mol_type = other DNA
cagggagaaggccaaca

SEQ ID NO: 6079 - DNA, 17 bp, synthetic construct
  misc_feature 1..17: note = Oligonucleotide
  source 1..17: mol_type = other DNA
gcccagggagaaggcca

SEQ ID NO: 6080 - DNA, 17 bp, synthetic construct
  misc_feature 1..17: note = Oligonucleotide
  source 1..17: mol_type = other DNA
gatgcccagggagaagg

SEQ ID NO: 6081 - DNA, 17 bp, synthetic construct
  misc_feature 1..17: note = Oligonucleotide
  source 1..17: mol_type = other DNA
ccagatgcccagggaga

SEQ ID NO: 6082 - DNA, 17 bp, synthetic construct
  misc_feature 1..17: note = Oligonucleotide
  source 1..17: mol_type = other DNA
ctaccagatgcccaggg

SEQ ID NO: 6083 - DNA, 17 bp, synthetic construct
  misc_feature 1..17: note = Oligonucleotide
  source 1..17: mol_type = other DNA
cccctaccagatgccca

SEQ ID NO: 6084 - DNA, 17 bp, synthetic construct
  misc_feature 1..17: note = Oligonucleotide
  source 1..17: mol_type = other DNA
atgcccctaccagatgc

SEQ ID NO: 6085 - DNA, 17 bp, synthetic construct
  misc_feature 1..17: note = Oligonucleotide
  source 1..17: mol_type = other DNA
ctcatgcccctaccaga

SEQ ID NO: 6086 - DNA, 17 bp, synthetic construct
  misc_feature 1..17: note = Oligonucleotide
  source 1..17: mol_type = other DNA
tctctcatgcccctacc

SEQ ID NO: 6087 - DNA, 17 bp, synthetic construct
  misc_feature 1..17: note = Oligonucleotide
  source 1..17: mol_type = other DNA
ccttctctcatgcccct

SEQ ID NO: 6088 - DNA, 17 bp, synthetic construct
  misc_feature 1..17: note = Oligonucleotide
  source 1..17: mol_type = other DNA
ggcccttctctcatgcc

SEQ ID NO: 6089 - DNA, 17 bp, synthetic construct
  misc_feature 1..17: note = Oligonucleotide
  source 1..17: mol_type = other DNA
gcaggcccttctctcat

SEQ ID NO: 6090 - DNA, 17 bp, synthetic construct
  misc_feature 1..17: note = Oligonucleotide
  source 1..17: mol_type = other DNA
cttgcaggcccttctct

SEQ ID NO: 6091 - DNA, 17 bp, synthetic construct
  misc_feature 1..17: note = Oligonucleotide
  source 1..17: mol_type = other DNA
atccttgcaggcccttc

SEQ ID NO: 6092 - DNA, 17 bp, synthetic construct
  misc_feature 1..17: note = Oligonucleotide
  source 1..17: mol_type = other DNA
tccatccttgcaggccc

SEQ ID NO: 6093 - DNA, 17 bp, synthetic construct
  misc_feature 1..17: note = Oligonucleotide
  source 1..17: mol_type = other DNA
ccatccatccttgcagg

SEQ ID NO: 6094 - DNA, 17 bp, synthetic construct
  misc_feature 1..17: note = Oligonucleotide
  source 1..17: mol_type = other DNA
tccccatccatccttgc

SEQ ID NO: 6095 - DNA, 17 bp, synthetic construct
  misc_feature 1..17: note = Oligonucleotide
  source 1..17: mol_type = other DNA
aactccccatccatcct

SEQ ID NO: 6096 - DNA, 17 bp, synthetic construct
  misc_feature 1..17: note = Oligonucleotide
  source 1..17: mol_type = other DNA
gggaactccccatccat

SEQ ID NO: 6097 - DNA, 17 bp, synthetic construct
  misc_feature 1..17: note = Oligonucleotide
  source 1..17: mol_type = other DNA
cctgggaactccccatc

SEQ ID NO: 6098 - DNA, 17 bp, synthetic construct
  misc_feature 1..17: note = Oligonucleotide
  source 1..17: mol_type = other DNA
acccctgggaactcccc

SEQ ID NO: 6099 - DNA, 17 bp, synthetic construct
  misc_feature 1..17: note = Oligonucleotide
  source 1..17: mol_type = other DNA
cacacccctgggaactc

SEQ ID NO: 6100 - DNA, 17 bp, synthetic construct
  misc_feature 1..17: note = Oligonucleotide
  source 1..17: mol_type = other DNA
ggtcacacccctgggaa

SEQ ID NO: 6101 - DNA, 17 bp, synthetic construct
  misc_feature 1..17: note = Oligonucleotide
  source 1..17: mol_type = other DNA
gagggtcacacccctgg

SEQ ID NO: 6102 - DNA, 17 bp, synthetic construct
  misc_feature 1..17: note = Oligonucleotide
  source 1..17: mol_type = other DNA
tcagagggtcacacccc

SEQ ID NO: 6103 - DNA, 17 bp, synthetic construct
  misc_feature 1..17: note = Oligonucleotide
  source 1..17: mol_type = other DNA
gtctcagagggtcacac

SEQ ID NO: 6104 - DNA, 17 bp, synthetic construct
  misc_feature 1..17: note = Oligonucleotide
  source 1..17: mol_type = other DNA
acagtctcagagggtca

SEQ ID NO: 6105 - DNA, 17 bp, synthetic construct
  misc_feature 1..17: note = Oligonucleotide
  source 1..17: mol_type = other DNA
atcacagtctcagaggg

SEQ ID NO: 6106 - DNA, 17 bp, synthetic construct
  misc_feature 1..17: note = Oligonucleotide
  source 1..17: mol_type = other DNA
gccatcacagtctcaga

SEQ ID NO: 6107 - DNA, 17 bp, synthetic construct
  misc_feature 1..17: note = Oligonucleotide
  source 1..17: mol_type = other DNA
aaggccatcacagtctc

SEQ ID NO: 6108 - DNA, 17 bp, synthetic construct
  misc_feature 1..17: note = Oligonucleotide
  source 1..17: mol_type = other DNA
cccaaggccatcacagt

SEQ ID NO: 6109 - DNA, 17 bp, synthetic construct
  misc_feature 1..17: note = Oligonucleotide
  source 1..17: mol_type = other DNA
gcccccaaggccatcac

SEQ ID NO: 6110 - DNA, 17 bp, synthetic construct
  misc_feature 1..17: note = Oligonucleotide
  source 1..17: mol_type = other DNA
tgagcccccaaggccat

SEQ ID NO: 6111 - DNA, 17 bp, synthetic construct
  misc_feature 1..17: note = Oligonucleotide
  source 1..17: mol_type = other DNA
acctgagcccccaaggc

SEQ ID NO: 6112 - DNA, 17 bp, synthetic construct
  misc_feature 1..17: note = Oligonucleotide
  source 1..17: mol_type = other DNA
ctcacctgagcccccaa

SEQ ID NO: 6113 - DNA, 17 bp, synthetic construct
  misc_feature 1..17: note = Oligonucleotide
  source 1..17: mol_type = other DNA
aggctcacctgagcccc

SEQ ID NO: 6114 - DNA, 17 bp, synthetic construct
  misc_feature 1..17: note = Oligonucleotide
  source 1..17: mol_type = other DNA
cccaggctcacctgagc

SEQ ID NO: 6115 - DNA, 17 bp, synthetic construct
  misc_feature 1..17: note = Oligonucleotide
  source 1..17: mol_type = other DNA
ggccccaggctcacctg

SEQ ID NO: 6116 - DNA, 17 bp, synthetic construct
  misc_feature 1..17: note = Oligonucleotide
  source 1..17: mol_type = other DNA
acaggccccaggctcac

SEQ ID NO: 6117 - DNA, 17 bp, synthetic construct
  misc_feature 1..17: note = Oligonucleotide
  source 1..17: mol_type = other DNA
ctcacaggccccaggct

SEQ ID NO: 6118 - DNA, 17 bp, synthetic construct
  misc_feature 1..17: note = Oligonucleotide
  source 1..17: mol_type = other DNA
cagctcacaggccccag

SEQ ID NO: 6119 - DNA, 17 bp, synthetic construct
  misc_feature 1..17: note = Oligonucleotide
  source 1..17: mol_type = other DNA
gcacagctcacaggccc

SEQ ID NO: 6120 - DNA, 17 bp, synthetic construct
  misc_feature 1..17: note = Oligonucleotide
  source 1..17: mol_type = other DNA
tctgcacagctcacagg

SEQ ID NO: 6121 - DNA, 17 bp, synthetic construct
  misc_feature 1..17: note = Oligonucleotide
  source 1..17: mol_type = other DNA
ctatctgcacagctcac

SEQ ID NO: 6122 - DNA, 17 bp, synthetic construct
  misc_feature 1..17: note = Oligonucleotide
  source 1..17: mol_type = other DNA
aggctatctgcacagct

SEQ ID NO: 6123 - DNA, 17 bp, synthetic construct
  misc_feature 1..17: note = Oligonucleotide
  source 1..17: mol_type = other DNA
atcaggctatctgcaca

SEQ ID NO: 6124 - DNA, 17 bp, synthetic construct
  misc_feature 1..17: note = Oligonucleotide
  source 1..17: mol_type = other DNA
tccatcaggctatctgc

SEQ ID NO: 6125 - DNA, 17 bp, synthetic construct
  misc_feature 1..17: note = Oligonucleotide
  source 1..17: mol_type = other DNA
gcctccatcaggctatc

SEQ ID NO: 6126 - DNA, 17 bp, synthetic construct
  misc_feature 1..17: note = Oligonucleotide
  source 1..17: mol_type = other DNA
gctgcctccatcaggct

SEQ ID NO: 6127 - DNA, 17 bp, synthetic construct
  misc_feature 1..17: note = Oligonucleotide
  source 1..17: mol_type = other DNA
cgggctgcctccatcag

SEQ ID NO: 6128 - DNA, 17 bp, synthetic construct
  misc_feature 1..17: note = Oligonucleotide
  source 1..17: mol_type = other DNA
ccacgggctgcctccat

SEQ ID NO: 6129 - DNA, 17 bp, synthetic construct
  misc_feature 1..17: note = Oligonucleotide
  source 1..17: mol_type = other DNA
tccccacgggctgcctc

SEQ ID NO: 6130 - DNA, 17 bp, synthetic construct
  misc_feature 1..17: note = Oligonucleotide
  source 1..17: mol_type = other DNA
tcctccccacgggctgc

SEQ ID NO: 6131 - DNA, 17 bp, synthetic construct
  misc_feature 1..17: note = Oligonucleotide
  source 1..17: mol_type = other DNA
agctcctccccacgggc

SEQ ID NO: 6132 - DNA, 17 bp, synthetic construct
  misc_feature 1..17: note = Oligonucleotide
  source 1..17: mol_type = other DNA
cccagctcctccccacg

SEQ ID NO: 6133 - DNA, 17 bp, synthetic construct
  misc_feature 1..17: note = Oligonucleotide
  source 1..17: mol_type = other DNA
tctcccagctcctcccc

SEQ ID NO: 6134 - DNA, 17 bp, synthetic construct
  misc_feature 1..17: note = Oligonucleotide
  source 1..17: mol_type = other DNA
ggctctcccagctcctc

SEQ ID NO: 6135 - DNA, 17 bp, synthetic construct
  misc_feature 1..17: note = Oligonucleotide
  source 1..17: mol_type = other DNA
cggggctctcccagctc

SEQ ID NO: 6136 - DNA, 17 bp, synthetic construct
  misc_feature 1..17: note = Oligonucleotide
  source 1..17: mol_type = other DNA
ccacggggctctcccag

SEQ ID NO: 6137 - DNA, 17 bp, synthetic construct
  misc_feature 1..17: note = Oligonucleotide
  source 1..17: mol_type = other DNA
cctccacggggctctcc

SEQ ID NO: 6138 - DNA, 17 bp, synthetic construct
  misc_feature 1..17: note = Oligonucleotide
  source 1..17: mol_type = other DNA
tggcctccacggggctc

SEQ ID NO: 6139 - DNA, 17 bp, synthetic construct
  misc_feature 1..17: note = Oligonucleotide
  source 1..17: mol_type = other DNA
cagtggcctccacgggg

SEQ ID NO: 6140 - DNA, 17 bp, synthetic construct
  misc_feature 1..17: note = Oligonucleotide
  source 1..17: mol_type = other DNA
atgcagtggcctccacg

SEQ ID NO: 6141 - DNA, 17 bp, synthetic construct
  misc_feature 1..17: note = Oligonucleotide
  source 1..17: mol_type = other DNA
tgcatgcagtggcctcc

SEQ ID NO: 6142 - DNA, 17 bp, synthetic construct
  misc_feature 1..17: note = Oligonucleotide
  source 1..17: mol_type = other DNA
tggtgcatgcagtggcc

SEQ ID NO: 6143 - DNA, 17 bp, synthetic construct
  misc_feature 1..17: note = Oligonucleotide
  source 1..17: mol_type = other DNA
ccatggtgcatgcagtg

SEQ ID NO: 6144 - DNA, 17 bp, synthetic construct
  misc_feature 1..17: note = Oligonucleotide
  source 1..17: mol_type = other DNA
gggccatggtgcatgca

SEQ ID NO: 6145 - DNA, 17 bp, synthetic construct
  misc_feature 1..17: note = Oligonucleotide
  source 1..17: mol_type = other DNA
tccgggccatggtgcat

SEQ ID NO: 6146 - DNA, 17 bp, synthetic construct
  misc_feature 1..17: note = Oligonucleotide
  source 1..17: mol_type = other DNA
ctgtccgggccatggtg

SEQ ID NO: 6147 - DNA, 17 bp, synthetic construct
  misc_feature 1..17: note = Oligonucleotide
  source 1..17: mol_type = other DNA
ctgctgtccgggccatg

SEQ ID NO: 6148 - DNA, 17 bp, synthetic construct
  misc_feature 1..17: note = Oligonucleotide
  source 1..17: mol_type = other DNA
ctcctgctgtccgggcc

SEQ ID NO: 6149 - DNA, 17 bp, synthetic construct
  misc_feature 1..17: note = Oligonucleotide
  source 1..17: mol_type = other DNA
tccctcctgctgtccgg

SEQ ID NO: 6150 - DNA, 17 bp, synthetic construct
  misc_feature 1..17: note = Oligonucleotide
  source 1..17: mol_type = other DNA
ctttccctcctgctgtc

SEQ ID NO: 6151 - DNA, 17 bp, synthetic construct
  misc_feature 1..17: note = Oligonucleotide
  source 1..17: mol_type = other DNA
gccctttccctcctgct

SEQ ID NO: 6152 - DNA, 17 bp, synthetic construct
  misc_feature 1..17: note = Oligonucleotide
  source 1..17: mol_type = other DNA
ggagccctttccctcct

SEQ ID NO: 6153 - DNA, 17 bp, synthetic construct
  misc_feature 1..17: note = Oligonucleotide
  source 1..17: mol_type = other DNA
ctcggagccctttccct

SEQ ID NO: 6154 - DNA, 17 bp, synthetic construct
  misc_feature 1..17: note = Oligonucleotide
  source 1..17: mol_type = other DNA
accctcggagccctttc

SEQ ID NO: 6155 - DNA, 17 bp, synthetic construct
  misc_feature 1..17: note = Oligonucleotide
  source 1..17: mol_type = other DNA
gggaccctcggagccct

SEQ ID NO: 6156 - DNA, 17 bp, synthetic construct
  misc_feature 1..17: note = Oligonucleotide
  source 1..17: mol_type = other DNA
tctgggaccctcggagc

SEQ ID NO: 6157 - DNA, 17 bp, synthetic construct
  misc_feature 1..17: note = Oligonucleotide
  source 1..17: mol_type = other DNA
ccctctgggaccctcgg

SEQ ID NO: 6158 - DNA, 17 bp, synthetic construct
  misc_feature 1..17: note = Oligonucleotide
  source 1..17: mol_type = other DNA
tccccctctgggaccct

SEQ ID NO: 6159 - DNA, 17 bp, synthetic construct
  misc_feature 1..17: note = Oligonucleotide
  source 1..17: mol_type = other DNA
agctccccctctgggac

SEQ ID NO: 6160 - DNA, 17 bp, synthetic construct
  misc_feature 1..17: note = Oligonucleotide
  source 1..17: mol_type = other DNA
tagagctccccctctgg

SEQ ID NO: 6161 - DNA, 17 bp, synthetic construct
  misc_feature 1..17: note = Oligonucleotide
  source 1..17: mol_type = other DNA
ccctagagctccccctc

SEQ ID NO: 6162 - DNA, 17 bp, synthetic construct
  misc_feature 1..17: note = Oligonucleotide
  source 1..17: mol_type = other DNA
gctccctagagctcccc

SEQ ID NO: 6163 - DNA, 17 bp, synthetic construct
  misc_feature 1..17: note = Oligonucleotide
  source 1..17: mol_type = other DNA
cctgctccctagagctc

SEQ ID NO: 6164 - DNA, 17 bp, synthetic construct
  misc_feature 1..17: note = Oligonucleotide
  source 1..17: mol_type = other DNA
ctccctgctccctagag

SEQ ID NO: 6165 - DNA, 17 bp, synthetic construct
  misc_feature 1..17: note = Oligonucleotide
  source 1..17: mol_type = other DNA
agtctccctgctcccta

SEQ ID NO: 6166 - DNA, 17 bp, synthetic construct
  misc_feature 1..17: note = Oligonucleotide
  source 1..17: mol_type = other DNA
cccagtctccctgctcc

SEQ ID NO: 6167 - DNA, 17 bp, synthetic construct
  misc_feature 1..17: note = Oligonucleotide
  source 1..17: mol_type = other DNA
cggcccagtctccctgc

SEQ ID NO: 6168 - DNA, 17 bp, synthetic construct
  misc_feature 1..17: note = Oligonucleotide
  source 1..17: mol_type = other DNA
acacggcccagtctccc

SEQ ID NO: 6169 - DNA, 17 bp, synthetic construct
  misc_feature 1..17: note = Oligonucleotide
  source 1..17: mol_type = other DNA
ccaacacggcccagtct

SEQ ID NO: 6170 - DNA, 17 bp, synthetic construct
  misc_feature 1..17: note = Oligonucleotide
  source 1..17: mol_type = other DNA
acgccaacacggcccag

SEQ ID NO: 6171 - DNA, 17 bp, synthetic construct
  misc_feature 1..17: note = Oligonucleotide
  source 1..17: mol_type = other DNA
tgcacgccaacacggcc

SEQ ID NO: 6172 - DNA, 17 bp, synthetic construct
  misc_feature 1..17: note = Oligonucleotide
  source 1..17: mol_type = other DNA
acgtgcacgccaacacg

SEQ ID NO: 6173 - DNA, 17 bp, synthetic construct
  misc_feature 1..17: note = Oligonucleotide
  source 1..17: mol_type = other DNA
gcaacgtgcacgccaac

SEQ ID NO: 6174 - DNA, 17 bp, synthetic construct
  misc_feature 1..17: note = Oligonucleotide
  source 1..17: mol_type = other DNA
gaagcaacgtgcacgcc

SEQ ID NO: 6175 - DNA, 17 bp, synthetic construct
  misc_feature 1..17: note = Oligonucleotide
  source 1..17: mol_type = other DNA
aaagaagcaacgtgcac

SEQ ID NO: 6176 - DNA, 17 bp, synthetic construct
  misc_feature 1..17: note = Oligonucleotide
  source 1..17: mol_type = other DNA
cagaaagaagcaacgtg

SEQ ID NO: 6177 - DNA, 17 bp, synthetic construct
  misc_feature 1..17: note = Oligonucleotide
  source 1..17: mol_type = other DNA
cagcagaaagaagcaac

SEQ ID NO: 6178 - DNA, 17 bp, synthetic construct
  misc_feature 1..17: note = Oligonucleotide
  source 1..17: mol_type = other DNA
gaccagcagaaagaagc

SEQ ID NO: 6179 - DNA, 17 bp, synthetic construct
  misc_feature 1..17: note = Oligonucleotide
  source 1..17: mol_type = other DNA
gaggaccagcagaaaga

SEQ ID NO: 6180 - DNA, 17 bp, synthetic construct
  misc_feature 1..17: note = Oligonucleotide
  source 1..17: mol_type = other DNA
cgagaggaccagcagaa

SEQ ID NO: 6181 - DNA, 17 bp, synthetic construct
  misc_feature 1..17: note = Oligonucleotide
  source 1..17: mol_type = other DNA
ccccgagaggaccagca

SEQ ID NO: 6182 - DNA, 17 bp, synthetic construct
  misc_feature 1..17: note = Oligonucleotide
  source 1..17: mol_type = other DNA
aggccccgagaggacca

SEQ ID NO: 6183 - DNA, 17 bp, synthetic construct
  misc_feature 1..17: note = Oligonucleotide
  source 1..17: mol_type = other DNA
cacaggccccgagagga

SEQ ID NO: 6184 - DNA, 17 bp, synthetic construct
  misc_feature 1..17: note = Oligonucleotide
  source 1..17: mol_type = other DNA
aagcacaggccccgaga

SEQ ID NO: 6185 - DNA, 17 bp, synthetic construct
  misc_feature 1..17: note = Oligonucleotide
  source 1..17: mol_type = other DNA
cccaagcacaggccccg

SEQ ID NO: 6186 - DNA, 17 bp, synthetic construct
  misc_feature 1..17: note = Oligonucleotide
  source 1..17: mol_type = other DNA
caacccaagcacaggcc

SEQ ID NO: 6187 - DNA, 17 bp, synthetic construct
  misc_feature 1..17: note = Oligonucleotide
  source 1..17: mol_type = other DNA
ccacaacccaagcacag

SEQ ID NO: 6188 - DNA, 17 bp, synthetic construct
  misc_feature 1..17: note = Oligonucleotide
  source 1..17: mol_type = other DNA
gtcccacaacccaagca

SEQ ID NO: 6189 - DNA, 17 bp, synthetic construct
  misc_feature 1..17: note = Oligonucleotide
  source 1..17: mol_type = other DNA
taggtcccacaacccaa

SEQ ID NO: 6190 - DNA, 17 bp, synthetic construct
  misc_feature 1..17: note = Oligonucleotide
  source 1..17: mol_type = other DNA
gagtaggtcccacaacc

SEQ ID NO: 6191 - DNA, 17 bp, synthetic construct
  misc_feature 1..17: note = Oligonucleotide
  source 1..17: mol_type = other DNA
cgggagtaggtcccaca

SEQ ID NO: 6192 - DNA, 17 bp, synthetic construct
  misc_feature 1..17: note = Oligonucleotide
  source 1..17: mol_type = other DNA
gcacgggagtaggtccc

SEQ ID NO: 6193 - DNA, 17 bp, synthetic construct
  misc_feature 1..17: note = Oligonucleotide
  source 1..17: mol_type = other DNA
ccagcacgggagtaggt

SEQ ID NO: 6194 - DNA, 17 bp, synthetic construct
  misc_feature 1..17: note = Oligonucleotide
  source 1..17: mol_type = other DNA
caaccagcacgggagta

SEQ ID NO: 6195 - DNA, 17 bp, synthetic construct
  misc_feature 1..17: note = Oligonucleotide
  source 1..17: mol_type = other DNA
aaccaaccagcacggga

SEQ ID NO: 6196 - DNA, 17 bp, synthetic construct
  misc_feature 1..17: note = Oligonucleotide
  source 1..17: mol_type = other DNA
tacaaccaaccagcacg

SEQ ID NO: 6197 - DNA, 17 bp, synthetic construct
  misc_feature 1..17: note = Oligonucleotide
  source 1..17: mol_type = other DNA
ccctacaaccaaccagc

SEQ ID NO: 6198 - DNA, 17 bp, synthetic construct
  misc_feature 1..17: note = Oligonucleotide
  source 1..17: mol_type = other DNA
tggccctacaaccaacc

SEQ ID NO: 6199 - DNA, 17 bp, synthetic construct
  misc_feature 1..17: note = Oligonucleotide
  source 1..17: mol_type = other DNA
gcttggccctacaacca

SEQ ID NO: 6200 - DNA, 17 bp, synthetic construct
  misc_feature 1..17: note = Oligonucleotide
  source 1..17: mol_type = other DNA
tgggcttggccctacaa

SEQ ID NO: 6201 - DNA, 17 bp, synthetic construct
  misc_feature 1..17: note = Oligonucleotide
  source 1..17: mol_type = other DNA
ctctgggcttggcccta

SEQ ID NO: 6202 - DNA, 17 bp, synthetic construct
  misc_feature 1..17: note = Oligonucleotide
  source 1..17: mol_type = other DNA
cagctctgggcttggcc

SEQ ID NO: 6203 - DNA, 17 bp, synthetic construct
  misc_feature 1..17: note = Oligonucleotide
  source 1..17: mol_type = other DNA
catcagctctgggcttg

SEQ ID NO: 6204 - DNA, 17 bp, synthetic construct
  misc_feature 1..17: note = Oligonucleotide
  source 1..17: mol_type = other DNA
gaccatcagctctgggc

SEQ ID NO: 6205 - DNA, 17 bp, synthetic construct
  misc_feature 1..17: note = Oligonucleotide
  source 1..17: mol_type = other DNA
agggaccatcagctctg

SEQ ID NO: 6206 - DNA, 17 bp, synthetic construct
  misc_feature 1..17: note = Oligonucleotide
  source 1..17: mol_type = other DNA
tgaagggaccatcagct

SEQ ID NO: 6207 - DNA, 17 bp, synthetic construct
  misc_feature 1..17: note = Oligonucleotide
  source 1..17: mol_type = other DNA
ctctgaagggaccatca

SEQ ID NO: 6208 - DNA, 17 bp, synthetic construct
  misc_feature 1..17: note = Oligonucleotide
  source 1..17: mol_type = other DNA
ctgctctgaagggacca

SEQ ID NO: 6209 - DNA, 17 bp, synthetic construct
  misc_feature 1..17: note = Oligonucleotide
  source 1..17: mol_type = other DNA
cccctgctctgaaggga

SEQ ID NO: 6210 - DNA, 17 bp, synthetic construct
  misc_feature 1..17: note = Oligonucleotide
  source 1..17: mol_type = other DNA
agacccctgctctgaag

SEQ ID NO: 6211 - DNA, 17 bp, synthetic construct
  misc_feature 1..17: note = Oligonucleotide
  source 1..17: mol_type = other DNA
ctcagacccctgctctg

SEQ ID NO: 6212 - DNA, 17 bp, synthetic construct
  misc_feature 1..17: note = Oligonucleotide
  source 1..17: mol_type = other DNA
ggactcagacccctgct

SEQ ID NO: 6213 - DNA, 17 bp, synthetic construct
  misc_feature 1..17: note = Oligonucleotide
  source 1..17: mol_type = other DNA
gtgggactcagacccct

SEQ ID NO: 6214 - DNA, 17 bp, synthetic construct
  misc_feature 1..17: note = Oligonucleotide
  source 1..17: mol_type = other DNA
gctgtgggactcagacc

SEQ ID NO: 6215 - DNA, 17 bp, synthetic construct
  misc_feature 1..17: note = Oligonucleotide
  source 1..17: mol_type = other DNA
agtgctgtgggactcag

SEQ ID NO: 6216 - DNA, 17 bp, synthetic construct
  misc_feature 1..17: note = Oligonucleotide
  source 1..17: mol_type = other DNA
cccagtgctgtgggact

SEQ ID NO: 6217 - DNA, 17 bp, synthetic construct
  misc_feature 1..17: note = Oligonucleotide
  source 1..17: mol_type = other DNA
ttccccagtgctgtggg

SEQ ID NO: 6218 - DNA, 17 bp, synthetic construct
  misc_feature 1..17: note = Oligonucleotide
  source 1..17: mol_type = other DNA
tccttccccagtgctgt

SEQ ID NO: 6219 - DNA, 17 bp, synthetic construct
  misc_feature 1..17: note = Oligonucleotide
  source 1..17: mol_type = other DNA
agctccttccccagtgc

SEQ ID NO: 6220 - DNA, 17 bp, synthetic construct
  misc_feature 1..17: note = Oligonucleotide
  source 1..17: mol_type = other DNA
ccaagctccttccccag

SEQ ID NO: 6221 - DNA, 17 bp, synthetic construct
  misc_feature 1..17: note = Oligonucleotide
  source 1..17: mol_type = other DNA
gctccaagctccttccc

SEQ ID NO: 6222 - DNA, 17 bp, synthetic construct
  misc_feature 1..17: note = Oligonucleotide
  source 1..17: mol_type = other DNA
ggagctccaagctcctt

SEQ ID NO: 6223 - DNA, 17 bp, synthetic construct
  misc_feature 1..17: note = Oligonucleotide
  source 1..17: mol_type = other DNA
aggggagctccaagctc

SEQ ID NO: 6224 - DNA, 17 bp, synthetic construct
  misc_feature 1..17: note = Oligonucleotide
  source 1..17: mol_type = other DNA
gccaggggagctccaag

SEQ ID NO: 6225 - DNA, 17 bp, synthetic construct
  misc_feature 1..17: note = Oligonucleotide
  source 1..17: mol_type = other DNA
ttggccaggggagctcc

SEQ ID NO: 6226 - DNA, 17 bp, synthetic construct
  misc_feature 1..17: note = Oligonucleotide
  source 1..17: mol_type = other DNA
tctttggccaggggagc

SEQ ID NO: 6227 - DNA, 17 bp, synthetic construct
  misc_feature 1..17: note = Oligonucleotide
  source 1..17: mol_type = other DNA
gggtctttggccagggg

SEQ ID NO: 6228 - DNA, 17 bp, synthetic construct
  misc_feature 1..17: note = Oligonucleotide
  source 1..17: mol_type = other DNA
ctggggtctttggccag

SEQ ID NO: 6229 - DNA, 17 bp, synthetic construct
  misc_feature 1..17: note = Oligonucleotide
  source 1..17: mol_type = other DNA
agcctggggtctttggc

SEQ ID NO: 6230 - DNA, 17 bp, synthetic construct
  misc_feature 1..17: note = Oligonucleotide
  source 1..17: mol_type = other DNA
aacagcctggggtcttt

SEQ ID NO: 6231 - DNA, 17 bp, synthetic construct
  misc_feature 1..17: note = Oligonucleotide
  source 1..17: mol_type = other DNA
gtcaacagcctggggtc

SEQ ID NO: 6232 - DNA, 17 bp, synthetic construct
  misc_feature 1..17: note = Oligonucleotide
  source 1..17: mol_type = other DNA
gtagtcaacagcctggg

SEQ ID NO: 6233 - DNA, 17 bp, synthetic construct
  misc_feature 1..17: note = Oligonucleotide
  source 1..17: mol_type = other DNA
agggtagtcaacagcct

SEQ ID NO: 6234 - DNA, 17 bp, synthetic construct
  misc_feature 1..17: note = Oligonucleotide
  source 1..17: mol_type = other DNA
aggagggtagtcaacag

SEQ ID NO: 6235 - DNA, 17 bp, synthetic construct
  misc_feature 1..17: note = Oligonucleotide
  source 1..17: mol_type = other DNA
ttcaggagggtagtcaa

SEQ ID NO: 6236 - DNA, 17 bp, synthetic construct
  misc_feature 1..17: note = Oligonucleotide
  source 1..17: mol_type = other DNA
gggttcaggagggtagt

SEQ ID NO: 6237 - DNA, 17 bp, synthetic construct
  misc_feature 1..17: note = Oligonucleotide
  source 1..17: mol_type = other DNA
cgggggttcaggagggt

SEQ ID NO: 6238 - DNA, 17 bp, synthetic construct
  misc_feature 1..17: note = Oligonucleotide
  source 1..17: mol_type = other DNA
gaacgggggttcaggag

SEQ ID NO: 6239 - DNA, 17 bp, synthetic construct
  misc_feature 1..17: note = Oligonucleotide
  source 1..17: mol_type = other DNA
cctgaacgggggttcag

SEQ ID NO: 6240 - DNA, 17 bp, synthetic construct
  misc_feature 1..17: note = Oligonucleotide
  source 1..17: mol_type = other DNA
aggcctgaacgggggtt

SEQ ID NO: 6241 - DNA, 17 bp, synthetic construct
  misc_feature 1..17: note = Oligonucleotide
  source 1..17: mol_type = other DNA
gggaggcctgaacgggg

SEQ ID NO: 6242 - DNA, 17 bp, synthetic construct
  misc_feature 1..17: note = Oligonucleotide
  source 1..17: mol_type = other DNA
agagggaggcctgaacg

SEQ ID NO: 6243 - DNA, 17 bp, synthetic construct
  misc_feature 1..17: note = Oligonucleotide
  source 1..17: mol_type = other DNA
ggtagagggaggcctga

SEQ ID NO: 6244 - DNA, 17 bp, synthetic construct
  misc_feature 1..17: note = Oligonucleotide
  source 1..17: mol_type = other DNA
aagggtagagggaggcc

SEQ ID NO: 6245 - DNA, 17 bp, synthetic construct
  misc_feature 1..17: note = Oligonucleotide
  source 1..17: mol_type = other DNA
ccaaagggtagagggag

SEQ ID NO: 6246 - DNA, 17 bp, synthetic construct
  misc_feature 1..17: note = Oligonucleotide
  source 1..17: mol_type = other DNA
gccccaaagggtagagg

SEQ ID NO: 6247 - DNA, 17 bp, synthetic construct
  misc_feature 1..17: note = Oligonucleotide
  source 1..17: mol_type = other DNA
gcagccccaaagggtag

SEQ ID NO: 6248 - DNA, 17 bp, synthetic construct
  misc_feature 1..17: note = Oligonucleotide
  source 1..17: mol_type = other DNA
ggagcagccccaaaggg

SEQ ID NO: 6249 - DNA, 17 bp, synthetic construct
  misc_feature 1..17: note = Oligonucleotide
  source 1..17: mol_type = other DNA
cagggagcagccccaaa

SEQ ID NO: 6250 - DNA, 17 bp, synthetic construct
  misc_feature 1..17: note = Oligonucleotide
  source 1..17: mol_type = other DNA
atacagggagcagcccc

SEQ ID NO: 6251 - DNA, 17 bp, synthetic construct
  misc_feature 1..17: note = Oligonucleotide
  source 1..17: mol_type = other DNA
gacatacagggagcagc

SEQ ID NO: 6252 - DNA, 17 bp, synthetic construct
  misc_feature 1..17: note = Oligonucleotide
  source 1..17: mol_type = other DNA
aaggacatacagggagc

SEQ ID NO: 6253 - DNA, 17 bp, synthetic construct
  misc_feature 1..17: note = Oligonucleotide
  source 1..17: mol_type = other DNA
ataaaggacatacaggg

SEQ ID NO: 6254 - DNA, 17 bp, synthetic construct
  misc_feature 1..17: note = Oligonucleotide
  source 1..17: mol_type = other DNA
aacataaaggacataca

SEQ ID NO: 6255 - DNA, 17 bp, synthetic construct
  misc_feature 1..17: note = Oligonucleotide
  source 1..17: mol_type = other DNA
ctgaacataaaggacat

SEQ ID NO: 6256 - DNA, 17 bp, synthetic construct
  misc_feature 1..17: note = Oligonucleotide
  source 1..17: mol_type = other DNA
aggctgaacataaagga

SEQ ID NO: 6257 - DNA, 17 bp, synthetic construct
  misc_feature 1..17: note = Oligonucleotide
  source 1..17: mol_type = other DNA
accaggctgaacataaa

SEQ ID NO: 6258 - DNA, 17 bp, synthetic construct
  misc_feature 1..17: note = Oligonucleotide
  source 1..17: mol_type = other DNA
gcaaccaggctgaacat

SEQ ID NO: 6259 - DNA, 17 bp, synthetic construct
  misc_feature 1..17: note = Oligonucleotide
  source 1..17: mol_type = other DNA
cctgcaaccaggctgaa

SEQ ID NO: 6260 - DNA, 17 bp, synthetic construct
  misc_feature 1..17: note = Oligonucleotide
  source 1..17: mol_type = other DNA
tcccctgcaaccaggct

SEQ ID NO: 6261 - DNA, 17 bp, synthetic construct
  misc_feature 1..17: note = Oligonucleotide
  source 1..17: mol_type = other DNA
ccctcccctgcaaccag

SEQ ID NO: 6262 - DNA, 17 bp, synthetic construct
  misc_feature 1..17: note = Oligonucleotide
  source 1..17: mol_type = other DNA
gcgccctcccctgcaac

SEQ ID NO: 6263 - DNA, 17 bp, synthetic construct
  misc_feature 1..17: note = Oligonucleotide
  source 1..17: mol_type = other DNA
aatgcgccctcccctgc

SEQ ID NO: 6264 - DNA, 17 bp, synthetic construct
  misc_feature 1..17: note = Oligonucleotide
  source 1..17: mol_type = other DNA
ctgaatgcgccctcccc

SEQ ID NO: 6265 - DNA, 17 bp, synthetic construct
  misc_feature 1..17: note = Oligonucleotide
  source 1..17: mol_type = other DNA
cacctgaatgcgccctc

SEQ ID NO: 6266 - DNA, 17 bp, synthetic construct
  misc_feature 1..17: note = Oligonucleotide
  source 1..17: mol_type = other DNA
ccccacctgaatgcgcc

SEQ ID NO: 6267 - DNA, 17 bp, synthetic construct
  misc_feature 1..17: note = Oligonucleotide
  source 1..17: mol_type = other DNA
tgtccccacctgaatgc

SEQ ID NO: 6268 - DNA, 17 bp, synthetic construct
  misc_feature 1..17: note = Oligonucleotide
  source 1..17: mol_type = other DNA
gactgtccccacctgaa

SEQ ID NO: 6269 - DNA, 17 bp, synthetic construct
  misc_feature 1..17: note = Oligonucleotide
  source 1..17: mol_type = other DNA
ggtgactgtccccacct

SEQ ID NO: 6270 - DNA, 17 bp, synthetic construct
  misc_feature 1..17: note = Oligonucleotide
  source 1..17: mol_type = other DNA
ccaggtgactgtcccca

SEQ ID NO: 6271 - DNA, 17 bp, synthetic construct
  misc_feature 1..17: note = Oligonucleotide
  source 1..17: mol_type = other DNA
ggcccaggtgactgtcc

SEQ ID NO: 6272 - DNA, 17 bp, synthetic construct
  misc_feature 1..17: note = Oligonucleotide
  source 1..17: mol_type = other DNA
ccaggcccaggtgactg

SEQ ID NO: 6273 - DNA, 17 bp, synthetic construct
  misc_feature 1..17: note = Oligonucleotide
  source 1..17: mol_type = other DNA
tacccaggcccaggtga

SEQ ID NO: 6274 - DNA, 17 bp, synthetic construct
  misc_feature 1..17: note = Oligonucleotide
  source 1..17: mol_type = other DNA
cagtacccaggcccagg

SEQ ID NO: 6275 - DNA, 17 bp, synthetic construct
  misc_feature 1..17: note = Oligonucleotide
  source 1..17: mol_type = other DNA
cctcagtacccaggccc

SEQ ID NO: 6276 - DNA, 17 bp, synthetic construct
  misc_feature 1..17: note = Oligonucleotide
  source 1..17: mol_type = other DNA
ggacctcagtacccagg

SEQ ID NO: 6277 - DNA, 17 bp, synthetic construct
  misc_feature 1..17: note = Oligonucleotide
  source 1..17: mol_type = other DNA
agtggacctcagtaccc

SEQ ID NO: 6278 - DNA, 17 bp, synthetic construct
  misc_feature 1..17: note = Oligonucleotide
  source 1..17: mol_type = other DNA
gacagtggacctcagta

SEQ ID NO: 6279 - DNA, 17 bp, synthetic construct
  misc_feature 1..17: note = Oligonucleotide
  source 1..17: mol_type = other DNA
ccagacagtggacctca

SEQ ID NO: 6280 - DNA, 17 bp, synthetic construct
  misc_feature 1..17: note = Oligonucleotide
  source 1..17: mol_type = other DNA
tcaccagacagtggacc

SEQ ID NO: 6281 - DNA, 17 bp, synthetic construct
  misc_feature 1..17: note = Oligonucleotide
  source 1..17: mol_type = other DNA
acttcaccagacagtgg

SEQ ID NO: 6282 - DNA, 17 bp, synthetic construct
  misc_feature 1..17: note = Oligonucleotide
  source 1..17: mol_type = other DNA
aggacttcaccagacag

SEQ ID NO: 6283 - DNA, 17 bp, synthetic construct
  misc_feature 1..17: note = Oligonucleotide
  source 1..17: mol_type = other DNA
cccaggacttcaccaga

SEQ ID NO: 6284 - DNA, 17 bp, synthetic construct
  misc_feature 1..17: note = Oligonucleotide
  source 1..17: mol_type = other DNA
ggtcccaggacttcacc

SEQ ID NO: 6285 - DNA, 17 bp, synthetic construct
  misc_feature 1..17: note = Oligonucleotide
  source 1..17: mol_type = other DNA
ccgggtcccaggacttc

SEQ ID NO: 6286 - DNA, 17 bp, synthetic construct
  misc_feature 1..17: note = Oligonucleotide
  source 1..17: mol_type = other DNA
aagccgggtcccaggac

SEQ ID NO: 6287 - DNA, 17 bp, synthetic construct
  misc_feature 1..17: note = Oligonucleotide
  source 1..17: mol_type = other DNA
cggaagccgggtcccag

SEQ ID NO: 6288 - DNA, 17 bp, synthetic construct
  misc_feature 1..17: note = Oligonucleotide
  source 1..17: mol_type = other DNA
tgccggaagccgggtcc

SEQ ID NO: 6289 - DNA, 17 bp, synthetic construct
  misc_feature 1..17: note = Oligonucleotide
  source 1..17: mol_type = other DNA
ggctgccggaagccggg

SEQ ID NO: 6290 - DNA, 17 bp, synthetic construct
  misc_feature 1..17: note = Oligonucleotide
  source 1..17: mol_type = other DNA
ggaggctgccggaagcc

SEQ ID NO: 6291 - DNA, 17 bp, synthetic construct
  misc_feature 1..17: note = Oligonucleotide
  source 1..17: mol_type = other DNA
agaggaggctgccggaa

SEQ ID NO: 6292 - DNA, 17 bp, synthetic construct
  misc_feature 1..17: note = Oligonucleotide
  source 1..17: mol_type = other DNA
ggcagaggaggctgccg

SEQ ID NO: 6293 - DNA, 17 bp, synthetic construct
  misc_feature 1..17: note = Oligonucleotide
  source 1..17: mol_type = other DNA
agaggcagaggaggctg

SEQ ID NO: 6294 - DNA, 17 bp, synthetic construct
  misc_feature 1..17: note = Oligonucleotide
  source 1..17: mol_type = other DNA
ccgagaggcagaggagg

SEQ ID NO: 6295 - DNA, 17 bp, synthetic construct
  misc_feature 1..17: note = Oligonucleotide
  source 1..17: mol_type = other DNA
cacccgagaggcagagg

SEQ ID NO: 6296 - DNA, 17 bp, synthetic construct
  misc_feature 1..17: note = Oligonucleotide
  source 1..17: mol_type = other DNA
atccacccgagaggcag

SEQ ID NO: 6297 - DNA, 17 bp, synthetic construct
  misc_feature 1..17: note = Oligonucleotide
  source 1..17: mol_type = other DNA
cccatccacccgagagg

SEQ ID NO: 6298 - DNA, 17 bp, synthetic construct
  misc_feature 1..17: note = Oligonucleotide
  source 1..17: mol_type = other DNA
attcccatccacccgag

SEQ ID NO: 6299 - DNA, 17 bp, synthetic construct
  misc_feature 1..17: note = Oligonucleotide
  source 1..17: mol_type = other DNA
ctgattcccatccaccc

SEQ ID NO: 6300 - DNA, 17 bp, synthetic construct
  misc_feature 1..17: note = Oligonucleotide
  source 1..17: mol_type = other DNA
gccctgattcccatcca

SEQ ID NO: 6301 - DNA, 17 bp, synthetic construct
  misc_feature 1..17: note = Oligonucleotide
  source 1..17: mol_type = other DNA
tgggccctgattcccat

SEQ ID NO: 6302 - DNA, 17 bp, synthetic construct
  misc_feature 1..17: note = Oligonucleotide
  source 1..17: mol_type = other DNA
gtctgggccctgattcc

SEQ ID NO: 6303 - DNA, 17 bp, synthetic construct
  misc_feature 1..17: note = Oligonucleotide
  source 1..17: mol_type = other DNA
tctgtctgggccctgat

SEQ ID NO: 6304 - DNA, 17 bp, synthetic construct
  misc_feature 1..17: note = Oligonucleotide
  source 1..17: mol_type = other DNA
gcctctgtctgggccct

SEQ ID NO: 6305 - DNA, 17 bp, synthetic construct
  misc_feature 1..17: note = Oligonucleotide
  source 1..17: mol_type = other DNA
caagcctctgtctgggc

SEQ ID NO: 6306 - DNA, 17 bp, synthetic construct
  misc_feature 1..17: note = Oligonucleotide
  source 1..17: mol_type = other DNA
cctcaagcctctgtctg

SEQ ID NO: 6307 - DNA, 17 bp, synthetic construct
  misc_feature 1..17: note = Oligonucleotide
  source 1..17: mol_type = other DNA
ccacctcaagcctctgt

SEQ ID NO: 6308 - DNA, 17 bp, synthetic construct
  misc_feature 1..17: note = Oligonucleotide
  source 1..17: mol_type = other DNA
aagccacctcaagcctc

SEQ ID NO: 6309 - DNA, 17 bp, synthetic construct
  misc_feature 1..17: note = Oligonucleotide
  source 1..17: mol_type = other DNA
agaaagccacctcaagc

SEQ ID NO: 6310 - DNA, 17 bp, synthetic construct
  misc_feature 1..17: note = Oligonucleotide
  source 1..17: mol_type = other DNA
tggagaaagccacctca

SEQ ID NO: 6311 - DNA, 17 bp, synthetic construct
  misc_feature 1..17: note = Oligonucleotide
  source 1..17: mol_type = other DNA
gggtggagaaagccacc

SEQ ID NO: 6312 - DNA, 17 bp, synthetic construct
  misc_feature 1..17: note = Oligonucleotide
  source 1..17: mol_type = other DNA
cctgggtggagaaagcc

SEQ ID NO: 6313 - DNA, 17 bp, synthetic construct
  misc_feature 1..17: note = Oligonucleotide
  source 1..17: mol_type = other DNA
aggcctgggtggagaaa

SEQ ID NO: 6314 - DNA, 17 bp, synthetic construct
  misc_feature 1..17: note = Oligonucleotide
  source 1..17: mol_type = other DNA
tacaggcctgggtggag

SEQ ID NO: 6315 - DNA, 17 bp, synthetic construct
  misc_feature 1..17: note = Oligonucleotide
  source 1..17: mol_type = other DNA
atatacaggcctgggtg

SEQ ID NO: 6316 - DNA, 17 bp, synthetic construct
  misc_feature 1..17: note = Oligonucleotide
  source 1..17: mol_type = other DNA
caaatatacaggcctgg

SEQ ID NO: 6317 - DNA, 17 bp, synthetic construct
  misc_feature 1..17: note = Oligonucleotide
  source 1..17: mol_type = other DNA
gagcaaatatacaggcc

SEQ ID NO: 6318 - DNA, 17 bp, synthetic construct
  misc_feature 1..17: note = Oligonucleotide
  source 1..17: mol_type = other DNA
gtggagcaaatatacag

SEQ ID NO: 6319 - DNA, 17 bp, synthetic construct
  misc_feature 1..17: note = Oligonucleotide
  source 1..17: mol_type = other DNA
gacgtggagcaaatata

SEQ ID NO: 6320 - DNA, 17 bp, synthetic construct
  misc_feature 1..17: note = Oligonucleotide
  source 1..17: mol_type = other DNA
acggacgtggagcaaat

SEQ ID NO: 6321 - DNA, 17 bp, synthetic construct
  misc_feature 1..17: note = Oligonucleotide
  source 1..17: mol_type = other DNA
tacacggacgtggagca

SEQ ID NO: 6322 - DNA, 17 bp, synthetic construct
  misc_feature 1..17: note = Oligonucleotide
  source 1..17: mol_type = other DNA
aggtacacggacgtgga

SEQ ID NO: 6323 - DNA, 17 bp, synthetic construct
  misc_feature 1..17: note = Oligonucleotide
  source 1..17: mol_type = other DNA
atcaggtacacggacgt

SEQ ID NO: 6324 - DNA, 17 bp, synthetic construct
  misc_feature 1..17: note = Oligonucleotide
  source 1..17: mol_type = other DNA
ggcatcaggtacacgga

SEQ ID NO: 6325 - DNA, 17 bp, synthetic construct
  misc_feature 1..17: note = Oligonucleotide
  source 1..17: mol_type = other DNA
atgggcatcaggtacac

SEQ ID NO: 6326 - DNA, 17 bp, synthetic construct
  misc_feature 1..17: note = Oligonucleotide
  source 1..17: mol_type = other DNA
gggatgggcatcaggta

SEQ ID NO: 6327 - DNA, 17 bp, synthetic construct
  misc_feature 1..17: note = Oligonucleotide
  source 1..17: mol_type = other DNA
ggagggatgggcatcag

SEQ ID NO: 6328 - DNA, 17 bp, synthetic construct
  misc_feature 1..17: note = Oligonucleotide
  source 1..17: mol_type = other DNA
gagggagggatgggcat

SEQ ID NO: 6329 - DNA, 17 bp, synthetic construct
  misc_feature 1..17: note = Oligonucleotide
  source 1..17: mol_type = other DNA
agagagggagggatggg

SEQ ID NO: 6330 - DNA, 17 bp, synthetic construct
  misc_feature 1..17: note = Oligonucleotide
  source 1..17: mol_type = other DNA
gagagagagggagggat

SEQ ID NO: 6331 - DNA, 17 bp, synthetic construct
  misc_feature 1..17: note = Oligonucleotide
  source 1..17: mol_type = other DNA
gtcgagagagagggagg

SEQ ID NO: 6332 - DNA, 17 bp, synthetic construct
  misc_feature 1..17: note = Oligonucleotide
  source 1..17: mol_type = other DNA
tgggtcgagagagaggg

SEQ ID NO: 6333 - DNA, 17 bp, synthetic construct
  misc_feature 1..17: note = Oligonucleotide
  source 1..17: mol_type = other DNA
cagtgggtcgagagaga

SEQ ID NO: 6334 - DNA, 17 bp, synthetic construct
  misc_feature 1..17: note = Oligonucleotide
  source 1..17: mol_type = other DNA
gcccagtgggtcgagag

SEQ ID NO: 6335 - DNA, 17 bp, synthetic construct
  misc_feature 1..17: note = Oligonucleotide
  source 1..17: mol_type = other DNA
aaagcccagtgggtcga

SEQ ID NO: 6336 - DNA, 17 bp, synthetic construct
  misc_feature 1..17: note = Oligonucleotide
  source 1..17: mol_type = other DNA
gggaaagcccagtgggt

SEQ ID NO: 6337 - DNA, 17 bp, synthetic construct
  misc_feature 1..17: note = Oligonucleotide
  source 1..17: mol_type = other DNA
ccagggaaagcccagtg

SEQ ID NO: 6338 - DNA, 17 bp, synthetic construct
  misc_feature 1..17: note = Oligonucleotide
  source 1..17: mol_type = other DNA
cacccagggaaagccca

SEQ ID NO: 6339 - DNA, 17 bp, synthetic construct
  misc_feature 1..17: note = Oligonucleotide
  source 1..17: mol_type = other DNA
cctcacccagggaaagc

SEQ ID NO: 6340 - DNA, 17 bp, synthetic construct
  misc_feature 1..17: note = Oligonucleotide
  source 1..17: mol_type = other DNA
tgtcctcacccagggaa

SEQ ID NO: 6341 - DNA, 17 bp, synthetic construct
  misc_feature 1..17: note = Oligonucleotide
  source 1..17: mol_type = other DNA
atgtgtcctcacccagg

SEQ ID NO: 6342 - DNA, 17 bp, synthetic construct
  misc_feature 1..17: note = Oligonucleotide
  source 1..17: mol_type = other DNA
cagatgtgtcctcaccc

SEQ ID NO: 6343 - DNA, 17 bp, synthetic construct
  misc_feature 1..17: note = Oligonucleotide
  source 1..17: mol_type = other DNA
tggcagatgtgtcctca

SEQ ID NO: 6344 - DNA, 17 bp, synthetic construct
  misc_feature 1..17: note = Oligonucleotide
  source 1..17: mol_type = other DNA
gcctggcagatgtgtcc

SEQ ID NO: 6345 - DNA, 17 bp, synthetic construct
  misc_feature 1..17: note = Oligonucleotide
  source 1..17: mol_type = other DNA
agggcctggcagatgtg

SEQ ID NO: 6346 - DNA, 17 bp, synthetic construct
  misc_feature 1..17: note = Oligonucleotide
  source 1..17: mol_type = other DNA
ccaagggcctggcagat

SEQ ID NO: 6347 - DNA, 17 bp, synthetic construct
  misc_feature 1..17: note = Oligonucleotide
  source 1..17: mol_type = other DNA
gggccaagggcctggca

SEQ ID NO: 6348 - DNA, 17 bp, synthetic construct
  misc_feature 1..17: note = Oligonucleotide
  source 1..17: mol_type = other DNA
gctgggccaagggcctg

SEQ ID NO: 6349 - DNA, 17 bp, synthetic construct
  misc_feature 1..17: note = Oligonucleotide
  source 1..17: mol_type = other DNA
agggctgggccaagggc

SEQ ID NO: 6350 - DNA, 17 bp, synthetic construct
  misc_feature 1..17: note = Oligonucleotide
  source 1..17: mol_type = other DNA
aagagggctgggccaag

SEQ ID NO: 6351 - DNA, 17 bp, synthetic construct
  misc_feature 1..17: note = Oligonucleotide
  source 1..17: mol_type = other DNA
ctcaagagggctgggcc

SEQ ID NO: 6352 - DNA, 17 bp, synthetic construct
  misc_feature 1..17: note = Oligonucleotide
  source 1..17: mol_type = other DNA
gacctcaagagggctgg

SEQ ID NO: 6353 - DNA, 17 bp, synthetic construct
  misc_feature 1..17: note = Oligonucleotide
  source 1..17: mol_type = other DNA
ggggacctcaagagggc

SEQ ID NO: 6354 - DNA, 17 bp, synthetic construct
  misc_feature 1..17: note = Oligonucleotide
  source 1..17: mol_type = other DNA
caaggggacctcaagag

SEQ ID NO: 6355 - DNA, 17 bp, synthetic construct
  misc_feature 1..17: note = Oligonucleotide
  source 1..17: mol_type = other DNA
cagcaaggggacctcaa

SEQ ID NO: 6356 - DNA, 17 bp, synthetic construct
  misc_feature 1..17: note = Oligonucleotide
  source 1..17: mol_type = other DNA
aggcagcaaggggacct

SEQ ID NO: 6357 - DNA, 17 bp, synthetic construct
  misc_feature 1..17: note = Oligonucleotide
  source 1..17: mol_type = other DNA
aagaggcagcaagggga

SEQ ID NO: 6358 - DNA, 17 bp, synthetic construct
  misc_feature 1..17: note = Oligonucleotide
  source 1..17: mol_type = other DNA
ggcaagaggcagcaagg

SEQ ID NO: 6359 - DNA, 17 bp, synthetic construct
  misc_feature 1..17: note = Oligonucleotide
  source 1..17: mol_type = other DNA
tggggcaagaggcagca

SEQ ID NO: 6360 - DNA, 17 bp, synthetic construct
  misc_feature 1..17: note = Oligonucleotide
  source 1..17: mol_type = other DNA
ggctggggcaagaggca

SEQ ID NO: 6361 - DNA, 17 bp, synthetic construct
  misc_feature 1..17: note = Oligonucleotide
  source 1..17: mol_type = other DNA
ctgggctggggcaagag

SEQ ID NO: 6362 - DNA, 17 bp, synthetic construct
  misc_feature 1..17: note = Oligonucleotide
  source 1..17: mol_type = other DNA
cacctgggctggggcaa

SEQ ID NO: 6363 - DNA, 17 bp, synthetic construct
  misc_feature 1..17: note = Oligonucleotide
  source 1..17: mol_type = other DNA
cttcacctgggctgggg

SEQ ID NO: 6364 - DNA, 17 bp, synthetic construct
  misc_feature 1..17: note = Oligonucleotide
  source 1..17: mol_type = other DNA
gcccttcacctgggctg

SEQ ID NO: 6365 - DNA, 17 bp, synthetic construct
  misc_feature 1..17: note = Oligonucleotide
  source 1..17: mol_type = other DNA
gaagcccttcacctggg

SEQ ID NO: 6366 - DNA, 17 bp, synthetic construct
  misc_feature 1..17: note = Oligonucleotide
  source 1..17: mol_type = other DNA
ggggaagcccttcacct

SEQ ID NO: 6367 - DNA, 17 bp, synthetic construct
  misc_feature 1..17: note = Oligonucleotide
  source 1..17: mol_type = other DNA
actggggaagcccttca

SEQ ID NO: 6368 - DNA, 17 bp, synthetic construct
  misc_feature 1..17: note = Oligonucleotide
  source 1..17: mol_type = other DNA
gacactggggaagccct

SEQ ID NO: 6369 - DNA, 17 bp, synthetic construct
  misc_feature 1..17: note = Oligonucleotide
  source 1..17: mol_type = other DNA
gaagacactggggaagc

SEQ ID NO: 6370 - DNA, 17 bp, synthetic construct
  misc_feature 1..17: note = Oligonucleotide
  source 1..17: mol_type = other DNA
tgagaagacactgggga

SEQ ID NO: 6371 - DNA, 17 bp, synthetic construct
  misc_feature 1..17: note = Oligonucleotide
  source 1..17: mol_type = other DNA
acctgagaagacactgg

SEQ ID NO: 6372 - DNA, 17 bp, synthetic construct
  misc_feature 1..17: note = Oligonucleotide
  source 1..17: mol_type = other DNA
aatacctgagaagacac

SEQ ID NO: 6373 - DNA, 17 bp, synthetic construct
  misc_feature 1..17: note = Oligonucleotide
  source 1..17: mol_type = other DNA
tttaatacctgagaaga

SEQ ID NO: 6374 - DNA, 17 bp, synthetic construct
  misc_feature 1..17: note = Oligonucleotide
  source 1..17: mol_type = other DNA
gtttttaatacctgaga

SEQ ID NO: 6375 - DNA, 17 bp, synthetic construct
  misc_feature 1..17: note = Oligonucleotide
  source 1..17: mol_type = other DNA
cctgtttttaatacctg

SEQ ID NO: 6376 - DNA, 17 bp, synthetic construct
  misc_feature 1..17: note = Oligonucleotide
  source 1..17: mol_type = other DNA
tcacctgtttttaatac

SEQ ID NO: 6377 - DNA, 17 bp, synthetic construct
  misc_feature 1..17: note = Oligonucleotide
  source 1..17: mol_type = other DNA
ttgtcacctgtttttaa

SEQ ID NO: 6378 - DNA, 17 bp, synthetic construct
  misc_feature 1..17: note = Oligonucleotide
  source 1..17: mol_type = other DNA
accttgtcacctgtttt

SEQ ID NO: 6379 - DNA, 17 bp, synthetic construct
  misc_feature 1..17: note = Oligonucleotide
  source 1..17: mol_type = other DNA
gagaccttgtcacctgt

SEQ ID NO: 6380 - DNA, 17 bp, synthetic construct
  misc_feature 1..17: note = Oligonucleotide
  source 1..17: mol_type = other DNA
gaggagaccttgtcacc

SEQ ID NO: 6381 - DNA, 17 bp, synthetic construct
  misc_feature 1..17: note = Oligonucleotide
  source 1..17: mol_type = other DNA
ctggaggagaccttgtc

SEQ ID NO: 6382 - DNA, 17 bp, synthetic construct
  misc_feature 1..17: note = Oligonucleotide
  source 1..17: mol_type = other DNA
tcactggaggagacctt

SEQ ID NO: 6383 - DNA, 17 bp, synthetic construct
  misc_feature 1..17: note = Oligonucleotide
  source 1..17: mol_type = other DNA
aggtcactggaggagac

SEQ ID NO: 6384 - DNA, 17 bp, synthetic construct
  misc_feature 1..17: note = Oligonucleotide
  source 1..17: mol_type = other DNA
aaaaggtcactggagga

SEQ ID NO: 6385 - DNA, 17 bp, synthetic construct
  misc_feature 1..17: note = Oligonucleotide
  source 1..17: mol_type = other DNA
cagaaaaggtcactgga

SEQ ID NO: 6386 - DNA, 17 bp, synthetic construct
  misc_feature 1..17: note = Oligonucleotide
  source 1..17: mol_type = other DNA
atgcagaaaaggtcact

SEQ ID NO: 6387 - DNA, 17 bp, synthetic construct
  misc_feature 1..17: note = Oligonucleotide
  source 1..17: mol_type = other DNA
ggcatgcagaaaaggtc

SEQ ID NO: 6388 - DNA, 17 bp, synthetic construct
  misc_feature 1..17: note = Oligonucleotide
  source 1..17: mol_type = other DNA
aaaggcatgcagaaaag

SEQ ID NO: 6389 - DNA, 17 bp, synthetic construct
  misc_feature 1..17: note = Oligonucleotide
  source 1..17: mol_type = other DNA
cccaaaggcatgcagaa

SEQ ID NO: 6390 - DNA, 17 bp, synthetic construct
  misc_feature 1..17: note = Oligonucleotide
  source 1..17: mol_type = other DNA
tgccccaaaggcatgca

SEQ ID NO: 6391 - DNA, 17 bp, synthetic construct
  misc_feature 1..17: note = Oligonucleotide
  source 1..17: mol_type = other DNA
gtctgccccaaaggcat

SEQ ID NO: 6392 - DNA, 17 bp, synthetic construct
  misc_feature 1..17: note = Oligonucleotide
  source 1..17: mol_type = other DNA
tatgtctgccccaaagg

SEQ ID NO: 6393 - DNA, 17 bp, synthetic construct
  misc_feature 1..17: note = Oligonucleotide
  source 1..17: mol_type = other DNA
ttgtatgtctgccccaa

SEQ ID NO: 6394 - DNA, 17 bp, synthetic construct
  misc_feature 1..17: note = Oligonucleotide
  source 1..17: mol_type = other DNA
agcttgtatgtctgccc

SEQ ID NO: 6395 - DNA, 17 bp, synthetic construct
  misc_feature 1..17: note = Oligonucleotide
  source 1..17: mol_type = other DNA
aatagcttgtatgtctg

SEQ ID NO: 6396 - DNA, 17 bp, synthetic construct
  misc_feature 1..17: note = Oligonucleotide
  source 1..17: mol_type = other DNA
agaaatagcttgtatgt

SEQ ID NO: 6397 - DNA, 17 bp, synthetic construct
  misc_feature 1..17: note = Oligonucleotide
  source 1..17: mol_type = other DNA
tccagaaatagcttgta

SEQ ID NO: 6398 - DNA, 17 bp, synthetic construct
  misc_feature 1..17: note = Oligonucleotide
  source 1..17: mol_type = other DNA
gattccagaaatagctt

SEQ ID NO: 6399 - DNA, 17 bp, synthetic construct
  misc_feature 1..17: note = Oligonucleotide
  source 1..17: mol_type = other DNA
gaagattccagaaatag

SEQ ID NO: 6400 - DNA, 17 bp, synthetic construct
  misc_feature 1..17: note = Oligonucleotide
  source 1..17: mol_type = other DNA
ccagaagattccagaaa

SEQ ID NO: 6401 - DNA, 17 bp, synthetic construct
  misc_feature 1..17: note = Oligonucleotide
  source 1..17: mol_type = other DNA
gagccagaagattccag

SEQ ID NO: 6402 - DNA, 17 bp, synthetic construct
  misc_feature 1..17: note = Oligonucleotide
  source 1..17: mol_type = other DNA
gcagagccagaagattc

SEQ ID NO: 6403 - DNA, 17 bp, synthetic construct
  misc_feature 1..17: note = Oligonucleotide
  source 1..17: mol_type = other DNA
agggcagagccagaaga

SEQ ID NO: 6404 - DNA, 17 bp, synthetic construct
  misc_feature 1..17: note = Oligonucleotide
  source 1..17: mol_type = other DNA
tagagggcagagccaga

SEQ ID NO: 6405 - DNA, 17 bp, synthetic construct
  misc_feature 1..17: note = Oligonucleotide
  source 1..17: mol_type = other DNA
agctagagggcagagcc

SEQ ID NO: 6406 - DNA, 17 bp, synthetic construct
  misc_feature 1..17: note = Oligonucleotide
  source 1..17: mol_type = other DNA
acgagctagagggcaga

SEQ ID NO: 6407 - DNA, 17 bp, synthetic construct
  misc_feature 1..17: note = Oligonucleotide
  source 1..17: mol_type = other DNA
ctaacgagctagagggc

SEQ ID NO: 6408 - DNA, 17 bp, synthetic construct
  misc_feature 1..17: note = Oligonucleotide
  source 1..17: mol_type = other DNA
ccactaacgagctagag

SEQ ID NO: 6409 - DNA, 17 bp, synthetic construct
  misc_feature 1..17: note = Oligonucleotide
  source 1..17: mol_type = other DNA
gccccactaacgagcta

SEQ ID NO: 6410 - DNA, 17 bp, synthetic construct
  misc_feature 1..17: note = Oligonucleotide
  source 1..17: mol_type = other DNA
ggagccccactaacgag

SEQ ID NO: 6411 - DNA, 17 bp, synthetic construct
  misc_feature 1..17: note = Oligonucleotide
  source 1..17: mol_type = other DNA
ctgggagccccactaac

SEQ ID NO: 6412 - DNA, 17 bp, synthetic construct
  misc_feature 1..17: note = Oligonucleotide
  source 1..17: mol_type = other DNA
accctgggagccccact

SEQ ID NO: 6413 - DNA, 17 bp, synthetic construct
  misc_feature 1..17: note = Oligonucleotide
  source 1..17: mol_type = other DNA
agcaccctgggagcccc

SEQ ID NO: 6414 - DNA, 17 bp, synthetic construct
  misc_feature 1..17: note = Oligonucleotide
  source 1..17: mol_type = other DNA
cacagcaccctgggagc

SEQ ID NO: 6415 - DNA, 17 bp, synthetic construct
  misc_feature 1..17: note = Oligonucleotide
  source 1..17: mol_type = other DNA
caacacagcaccctggg

SEQ ID NO: 6416 - DNA, 17 bp, synthetic construct
  misc_feature 1..17: note = Oligonucleotide
  source 1..17: mol_type = other DNA
ctgcaacacagcaccct

SEQ ID NO: 6417 - DNA, 17 bp, synthetic construct
  misc_feature 1..17: note = Oligonucleotide
  source 1..17: mol_type = other DNA
gggctgcaacacagcac

SEQ ID NO: 6418 - DNA, 17 bp, synthetic construct
  misc_feature 1..17: note = Oligonucleotide
  source 1..17: mol_type = other DNA
cctgggctgcaacacag

SEQ ID NO: 6419 - DNA, 17 bp, synthetic construct
  misc_feature 1..17: note = Oligonucleotide
  source 1..17: mol_type = other DNA
gcacctgggctgcaaca

SEQ ID NO: 6420 - DNA, 17 bp, synthetic construct
  misc_feature 1..17: note = Oligonucleotide
  source 1..17: mol_type = other DNA
gcagcacctgggctgca

SEQ ID NO: 6421 - DNA, 17 bp, synthetic construct
  misc_feature 1..17: note = Oligonucleotide
  source 1..17: mol_type = other DNA
ggagcagcacctgggct

SEQ ID NO: 6422 - DNA, 17 bp, synthetic construct
  misc_feature 1..17: note = Oligonucleotide
  source 1..17: mol_type = other DNA
actggagcagcacctgg

SEQ ID NO: 6423 - DNA, 17 bp, synthetic construct
  misc_feature 1..17: note = Oligonucleotide
  source 1..17: mol_type = other DNA
acaactggagcagcacc

SEQ ID NO: 6424 - DNA, 17 bp, synthetic construct
  misc_feature 1..17: note = Oligonucleotide
  source 1..17: mol_type = other DNA
tccacaactggagcagc

SEQ ID NO: 6425 - DNA, 17 bp, synthetic construct
  misc_feature 1..17: note = Oligonucleotide
  source 1..17: mol_type = other DNA
tcttccacaactggagc

SEQ ID NO: 6426 - DNA, 17 bp, synthetic construct
  misc_feature 1..17: note = Oligonucleotide
  source 1..17: mol_type = other DNA
acttcttccacaactgg

SEQ ID NO: 6427 - DNA, 17 bp, synthetic construct
  misc_feature 1..17: note = Oligonucleotide
  source 1..17: mol_type = other DNA
atcacttcttccacaac

SEQ ID NO: 6428 - DNA, 17 bp, synthetic construct
  misc_feature 1..17: note = Oligonucleotide
  source 1..17: mol_type = other DNA
gccatcacttcttccac

SEQ ID NO: 6429 - DNA, 17 bp, synthetic construct
  misc_feature 1..17: note = Oligonucleotide
  source 1..17: mol_type = other DNA
ccagccatcacttcttc

SEQ ID NO: 6430 - DNA, 17 bp, synthetic construct
  misc_feature 1..17: note = Oligonucleotide
  source 1..17: mol_type = other DNA
caaccagccatcacttc

SEQ ID NO: 6431 - DNA, 17 bp, synthetic construct
  misc_feature 1..17: note = Oligonucleotide
  source 1..17: mol_type = other DNA
gatcaaccagccatcac

SEQ ID NO: 6432 - DNA, 17 bp, synthetic construct
  misc_feature 1..17: note = Oligonucleotide
  source 1..17: mol_type = other DNA
gatgatcaaccagccat

SEQ ID NO: 6433 - DNA, 17 bp, synthetic construct
  misc_feature 1..17: note = Oligonucleotide
  source 1..17: mol_type = other DNA
cgggatgatcaaccagc

SEQ ID NO: 6434 - DNA, 17 bp, synthetic construct
  misc_feature 1..17: note = Oligonucleotide
  source 1..17: mol_type = other DNA
ctgcgggatgatcaacc

SEQ ID NO: 6435 - DNA, 17 bp, synthetic construct
  misc_feature 1..17: note = Oligonucleotide
  source 1..17: mol_type = other DNA
agcctgcgggatgatca

SEQ ID NO: 6436 - DNA, 17 bp, synthetic construct
  misc_feature 1..17: note = Oligonucleotide
  source 1..17: mol_type = other DNA
cccagcctgcgggatga

SEQ ID NO: 6437 - DNA, 17 bp, synthetic construct
  misc_feature 1..17: note = Oligonucleotide
  source 1..17: mol_type = other DNA
ggccccagcctgcggga

SEQ ID NO: 6438 - DNA, 17 bp, synthetic construct
  misc_feature 1..17: note = Oligonucleotide
  source 1..17: mol_type = other DNA
cagggccccagcctgcg

SEQ ID NO: 6439 - DNA, 17 bp, synthetic construct
  misc_feature 1..17: note = Oligonucleotide
  source 1..17: mol_type = other DNA
caacagggccccagcct

SEQ ID NO: 6440 - DNA, 17 bp, synthetic construct
  misc_feature 1..17: note = Oligonucleotide
  source 1..17: mol_type = other DNA
gatcaacagggccccag

SEQ ID NO: 6441 - DNA, 17 bp, synthetic construct
  misc_feature 1..17: note = Oligonucleotide
  source 1..17: mol_type = other DNA
tttgatcaacagggccc

SEQ ID NO: 6442 - DNA, 17 bp, synthetic construct
  misc_feature 1..17: note = Oligonucleotide
  source 1..17: mol_type = other DNA
ctgtttgatcaacaggg

SEQ ID NO: 6443 - DNA, 17 bp, synthetic construct
  misc_feature 1..17: note = Oligonucleotide
  source 1..17: mol_type = other DNA
cagctgtttgatcaaca

SEQ ID NO: 6444 - DNA, 17 bp, synthetic construct
  misc_feature 1..17: note = Oligonucleotide
  source 1..17: mol_type = other DNA
ttgcagctgtttgatca

SEQ ID NO: 6445 - DNA, 17 bp, synthetic construct
  misc_feature 1..17: note = Oligonucleotide
  source 1..17: mol_type = other DNA
ggtttgcagctgtttga

SEQ ID NO: 6446 - DNA, 17 bp, synthetic construct
  misc_feature 1..17: note = Oligonucleotide
  source 1..17: mol_type = other DNA
ctgggtttgcagctgtt

SEQ ID NO: 6447 - DNA, 17 bp, synthetic construct
  misc_feature 1..17: note = Oligonucleotide
  source 1..17: mol_type = other DNA
cagctgggtttgcagct

SEQ ID NO: 6448 - DNA, 17 bp, synthetic construct
  misc_feature 1..17: note = Oligonucleotide
  source 1..17: mol_type = other DNA
acacagctgggtttgca

SEQ ID NO: 6449 - DNA, 17 bp, synthetic construct
  misc_feature 1..17: note = Oligonucleotide
  source 1..17: mol_type = other DNA
aggacacagctgggttt

SEQ ID NO: 6450 - DNA, 17 bp, synthetic construct
  misc_feature 1..17: note = Oligonucleotide
  source 1..17: mol_type = other DNA
agcaggacacagctggg

SEQ ID NO: 6451 - DNA, 17 bp, synthetic construct
  misc_feature 1..17: note = Oligonucleotide
  source 1..17: mol_type = other DNA
cacagcaggacacagct

SEQ ID NO: 6452 - DNA, 17 bp, synthetic construct
  misc_feature 1..17: note = Oligonucleotide
  source 1..17: mol_type = other DNA
gtgcacagcaggacaca

SEQ ID NO: 6453 - DNA, 17 bp, synthetic construct
  misc_feature 1..17: note = Oligonucleotide
  source 1..17: mol_type = other DNA
tgggtgcacagcaggac

SEQ ID NO: 6454 - DNA, 17 bp, synthetic construct
  misc_feature 1..17: note = Oligonucleotide
  source 1..17: mol_type = other DNA
ctctgggtgcacagcag

SEQ ID NO: 6455 - DNA, 17 bp, synthetic construct
  misc_feature 1..17: note = Oligonucleotide
  source 1..17: mol_type = other DNA
gccctctgggtgcacag

SEQ ID NO: 6456 - DNA, 17 bp, synthetic construct
  misc_feature 1..17: note = Oligonucleotide
  source 1..17: mol_type = other DNA
agggccctctgggtgca

SEQ ID NO: 6457 - DNA, 17 bp, synthetic construct
  misc_feature 1..17: note = Oligonucleotide
  source 1..17: mol_type = other DNA
cccagggccctctgggt

SEQ ID NO: 6458 - DNA, 17 bp, synthetic construct
  misc_feature 1..17: note = Oligonucleotide
  source 1..17: mol_type = other DNA
actcccagggccctctg

SEQ ID NO: 6459 - DNA, 17 bp, synthetic construct
  misc_feature 1..17: note = Oligonucleotide
  source 1..17: mol_type = other DNA
ctcactcccagggccct

SEQ ID NO: 6460 - DNA, 17 bp, synthetic construct
  misc_feature 1..17: note = Oligonucleotide
  source 1..17: mol_type = other DNA
ccgctcactcccagggc

SEQ ID NO: 6461 - DNA, 17 bp, synthetic construct
  misc_feature 1..17: note = Oligonucleotide
  source 1..17: mol_type = other DNA
gacccgctcactcccag

SEQ ID NO: 6462 - DNA, 17 bp, synthetic construct
  misc_feature 1..17: note = Oligonucleotide
  source 1..17: mol_type = other DNA
gtggacccgctcactcc

SEQ ID NO: 6463 - DNA, 17 bp, synthetic construct
  misc_feature 1..17: note = Oligonucleotide
  source 1..17: mol_type = other DNA
caagtggacccgctcac

SEQ ID NO: 6464 - DNA, 17 bp, synthetic construct
  misc_feature 1..17: note = Oligonucleotide
  source 1..17: mol_type = other DNA
aaccaagtggacccgct

SEQ ID NO: 6465 - DNA, 17 bp, synthetic construct
  misc_feature 1..17: note = Oligonucleotide
  source 1..17: mol_type = other DNA
aggaaccaagtggaccc

SEQ ID NO: 6466 - DNA, 17 bp, synthetic construct
  misc_feature 1..17: note = Oligonucleotide
  source 1..17: mol_type = other DNA
atcaggaaccaagtgga

SEQ ID NO: 6467 - DNA, 17 bp, synthetic construct
  misc_feature 1..17: note = Oligonucleotide
  source 1..17: mol_type = other DNA
cccatcaggaaccaagt

SEQ ID NO: 6468 - DNA, 17 bp, synthetic construct
  misc_feature 1..17: note = Oligonucleotide
  source 1..17: mol_type = other DNA
aagcccatcaggaacca

SEQ ID NO: 6469 - DNA, 17 bp, synthetic construct
  misc_feature 1..17: note = Oligonucleotide
  source 1..17: mol_type = other DNA
acaaagcccatcaggaa

SEQ ID NO: 6470 - DNA, 17 bp, synthetic construct
  misc_feature 1..17: note = Oligonucleotide
  source 1..17: mol_type = other DNA
gaaacaaagcccatcag

SEQ ID NO: 6471 - DNA, 17 bp, synthetic construct
  misc_feature 1..17: note = Oligonucleotide
  source 1..17: mol_type = other DNA
agggaaacaaagcccat

SEQ ID NO: 6472 - DNA, 17 bp, synthetic construct
  misc_feature 1..17: note = Oligonucleotide
  source 1..17: mol_type = other DNA
ttaagggaaacaaagcc

SEQ ID NO: 6473 - DNA, 17 bp, synthetic construct
  misc_feature 1..17: note = Oligonucleotide
  source 1..17: mol_type = other DNA
taattaagggaaacaaa

SEQ ID NO: 6474 - DNA, 17 bp, synthetic construct
  misc_feature 1..17: note = Oligonucleotide
  source 1..17: mol_type = other DNA
agataattaagggaaac

SEQ ID NO: 6475 - DNA, 17 bp, synthetic construct
  misc_feature 1..17: note = Oligonucleotide
  source 1..17: mol_type = other DNA
tttagataattaaggga

SEQ ID NO: 6476 - DNA, 17 bp, synthetic construct
  misc_feature 1..17: note = Oligonucleotide
  source 1..17: mol_type = other DNA
aattttagataattaag

SEQ ID NO: 6477 - DNA, 17 bp, synthetic construct
  misc_feature 1..17: note = Oligonucleotide
  source 1..17: mol_type = other DNA
aataattttagataatt

SEQ ID NO: 6478 - DNA, 17 bp, synthetic construct
  misc_feature 1..17: note = Oligonucleotide
  source 1..17: mol_type = other DNA
ataaataattttagata

SEQ ID NO: 6479 - DNA, 17 bp, synthetic construct
  misc_feature 1..17: note = Oligonucleotide
  source 1..17: mol_type = other DNA
taaataaataattttag

SEQ ID NO: 6480 - DNA, 17 bp, synthetic construct
  misc_feature 1..17: note = Oligonucleotide
  source 1..17: mol_type = other DNA
tcttaaataaataattt

SEQ ID NO: 6481 - DNA, 17 bp, synthetic construct
  misc_feature 1..17: note = Oligonucleotide
  source 1..17: mol_type = other DNA
tattcttaaataaataa

SEQ ID NO: 6482 - DNA, 17 bp, synthetic construct
  misc_feature 1..17: note = Oligonucleotide
  source 1..17: mol_type = other DNA
atatattcttaaataaa

SEQ ID NO: 6483 - DNA, 17 bp, synthetic construct
  misc_feature 1..17: note = Oligonucleotide
  source 1..17: mol_type = other DNA
aggatatattcttaaat

SEQ ID NO: 6484 - DNA, 17 bp, synthetic construct
  misc_feature 1..17: note = Oligonucleotide
  source 1..17: mol_type = other DNA
tagaggatatattctta

SEQ ID NO: 6485 - DNA, 17 bp, synthetic construct
  misc_feature 1..17: note = Oligonucleotide
  source 1..17: mol_type = other DNA
tattagaggatatattc

SEQ ID NO: 6486 - DNA, 17 bp, synthetic construct
  misc_feature 1..17: note = Oligonucleotide
  source 1..17: mol_type = other DNA
caatattagaggatata

SEQ ID NO: 6487 - DNA, 17 bp, synthetic construct
  misc_feature 1..17: note = Oligonucleotide
  source 1..17: mol_type = other DNA
ccccaatattagaggat

SEQ ID NO: 6488 - DNA, 17 bp, synthetic construct
  misc_feature 1..17: note = Oligonucleotide
  source 1..17: mol_type = other DNA
tccccccaatattagag

SEQ ID NO: 6489 - DNA, 17 bp, synthetic construct
  misc_feature 1..17: note = Oligonucleotide
  source 1..17: mol_type = other DNA
atctccccccaatatta

SEQ ID NO: 6490 - DNA, 17 bp, synthetic construct
  misc_feature 1..17: note = Oligonucleotide
  source 1..17: mol_type = other DNA
taaatctccccccaata

SEQ ID NO: 6491 - DNA, 17 bp, synthetic construct
  misc_feature 1..17: note = Oligonucleotide
  source 1..17: mol_type = other DNA
acataaatctcccccca

SEQ ID NO: 6492 - DNA, 17 bp, synthetic construct
  misc_feature 1..17: note = Oligonucleotide
  source 1..17: mol_type = other DNA
ttgacataaatctcccc

SEQ ID NO: 6493 - DNA, 17 bp, synthetic construct
  misc_feature 1..17: note = Oligonucleotide
  source 1..17: mol_type = other DNA
aggttgacataaatctc

SEQ ID NO: 6494 - DNA, 17 bp, synthetic construct
  misc_feature 1..17: note = Oligonucleotide
  source 1..17: mol_type = other DNA
atgaggttgacataaat

SEQ ID NO: 6495 - DNA, 17 bp, synthetic construct
  misc_feature 1..17: note = Oligonucleotide
  source 1..17: mol_type = other DNA
ctgatgaggttgacata

SEQ ID NO: 6496 - DNA, 17 bp, synthetic construct
  misc_feature 1..17: note = Oligonucleotide
  source 1..17: mol_type = other DNA
aaactgatgaggttgac

SEQ ID NO: 6497 - DNA, 17 bp, synthetic construct
  misc_feature 1..17: note = Oligonucleotide
  source 1..17: mol_type = other DNA
tacaaactgatgaggtt

SEQ ID NO: 6498 - DNA, 17 bp, synthetic construct
  misc_feature 1..17: note = Oligonucleotide
  source 1..17: mol_type = other DNA
aattacaaactgatgag

SEQ ID NO: 6499 - DNA, 17 bp, synthetic construct
  misc_feature 1..17: note = Oligonucleotide
  source 1..17: mol_type = other DNA
gcaaattacaaactgat

SEQ ID NO: 6500 - DNA, 17 bp, synthetic construct
  misc_feature 1..17: note = Oligonucleotide
  source 1..17: mol_type = other DNA
tctgcaaattacaaact

SEQ ID NO: 6501 - DNA, 17 bp, synthetic construct
  misc_feature 1..17: note = Oligonucleotide
  source 1..17: mol_type = other DNA
aattctgcaaattacaa

SEQ ID NO: 6502 - DNA, 17 bp, synthetic construct
  misc_feature 1..17: note = Oligonucleotide
  source 1..17: mol_type = other DNA
aagaattctgcaaatta

SEQ ID NO: 6503 - DNA, 17 bp, synthetic construct
  misc_feature 1..17: note = Oligonucleotide
  source 1..17: mol_type = other DNA
atcaagaattctgcaaa

SEQ ID NO: 6504 - DNA, 17 bp, synthetic construct
  misc_feature 1..17: note = Oligonucleotide
  source 1..17: mol_type = other DNA
ttcatcaagaattctgc

SEQ ID NO: 6505 - DNA, 17 bp, synthetic construct
  misc_feature 1..17: note = Oligonucleotide
  source 1..17: mol_type = other DNA
ggattcatcaagaattc

SEQ ID NO: 6506 - DNA, 17 bp, synthetic construct
  misc_feature 1..17: note = Oligonucleotide
  source 1..17: mol_type = other DNA
aaaggattcatcaagaa

SEQ ID NO: 6507 - DNA, 17 bp, synthetic construct
  misc_feature 1..17: note = Oligonucleotide
  source 1..17: mol_type = other DNA
gggaaaggattcatcaa

SEQ ID NO: 6508 - DNA, 17 bp, synthetic construct
  misc_feature 1..17: note = Oligonucleotide
  source 1..17: mol_type = other DNA
aaagggaaaggattcat

SEQ ID NO: 6509 - DNA, 17 bp, synthetic construct
  misc_feature 1..17: note = Oligonucleotide
  source 1..17: mol_type = other DNA
tcaaaagggaaaggatt

SEQ ID NO: 6510 - DNA, 17 bp, synthetic construct
  misc_feature 1..17: note = Oligonucleotide
  source 1..17: mol_type = other DNA
ttttcaaaagggaaagg

SEQ ID NO: 6511 - DNA, 17 bp, synthetic construct
  misc_feature 1..17: note = Oligonucleotide
  source 1..17: mol_type = other DNA
gtgttttcaaaagggaa

SEQ ID NO: 6512 - DNA, 17 bp, synthetic construct
  misc_feature 1..17: note = Oligonucleotide
  source 1..17: mol_type = other DNA
gaagtgttttcaaaagg

SEQ ID NO: 6513 - DNA, 17 bp, synthetic construct
  misc_feature 1..17: note = Oligonucleotide
  source 1..17: mol_type = other DNA
tgagaagtgttttcaaa

SEQ ID NO: 6514 - DNA, 17 bp, synthetic construct
  misc_feature 1..17: note = Oligonucleotide
  source 1..17: mol_type = other DNA
gggtgagaagtgttttc

SEQ ID NO: 6515 - DNA, 17 bp, synthetic construct
  misc_feature 1..17: note = Oligonucleotide
  source 1..17: mol_type = other DNA
gccgggtgagaagtgtt

SEQ ID NO: 6516 - DNA, 17 bp, synthetic construct
  misc_feature 1..17: note = Oligonucleotide
  source 1..17: mol_type = other DNA
ggagccgggtgagaagt

SEQ ID NO: 6517 - DNA, 17 bp, synthetic construct
  misc_feature 1..17: note = Oligonucleotide
  source 1..17: mol_type = other DNA
gctggagccgggtgaga

SEQ ID NO: 6518 - DNA, 17 bp, synthetic construct
  misc_feature 1..17: note = Oligonucleotide
  source 1..17: mol_type = other DNA
ggtgctggagccgggtg

SEQ ID NO: 6519 - DNA, 17 bp, synthetic construct
  misc_feature 1..17: note = Oligonucleotide
  source 1..17: mol_type = other DNA
gatggtgctggagccgg

SEQ ID NO: 6520 - DNA, 17 bp, synthetic construct
  misc_feature 1..17: note = Oligonucleotide
  source 1..17: mol_type = other DNA
ggcgatggtgctggagc

SEQ ID NO: 6521 - DNA, 17 bp, synthetic construct
  misc_feature 1..17: note = Oligonucleotide
  source 1..17: mol_type = other DNA
tccggcgatggtgctgg

SEQ ID NO: 6522 - DNA, 17 bp, synthetic construct
  misc_feature 1..17: note = Oligonucleotide
  source 1..17: mol_type = other DNA
tcatccggcgatggtgc

SEQ ID NO: 6523 - DNA, 17 bp, synthetic construct
  misc_feature 1..17: note = Oligonucleotide
  source 1..17: mol_type = other DNA
tggtcatccggcgatgg

SEQ ID NO: 6524 - DNA, 17 bp, synthetic construct
  misc_feature 1..17: note = Oligonucleotide
  source 1..17: mol_type = other DNA
ttctggtcatccggcga

SEQ ID NO: 6525 - DNA, 17 bp, synthetic construct
  misc_feature 1..17: note = Oligonucleotide
  source 1..17: mol_type = other DNA
tgtttctggtcatccgg

SEQ ID NO: 6526 - DNA, 17 bp, synthetic construct
  misc_feature 1..17: note = Oligonucleotide
  source 1..17: mol_type = other DNA
agctgtttctggtcatc

SEQ ID NO: 6527 - DNA, 17 bp, synthetic construct
  misc_feature 1..17: note = Oligonucleotide
  source 1..17: mol_type = other DNA
agcagctgtttctggtc

SEQ ID NO: 6528 - DNA, 17 bp, synthetic construct
  misc_feature 1..17: note = Oligonucleotide
  source 1..17: mol_type = other DNA
gtgagcagctgtttctg

SEQ ID NO: 6529 - DNA, 17 bp, synthetic construct
  misc_feature 1..17: note = Oligonucleotide
  source 1..17: mol_type = other DNA
ttagtgagcagctgttt

SEQ ID NO: 6530 - DNA, 17 bp, synthetic construct
  misc_feature 1..17: note = Oligonucleotide
  source 1..17: mol_type = other DNA
cgtttagtgagcagctg

SEQ ID NO: 6531 - DNA, 17 bp, synthetic construct
  misc_feature 1..17: note = Oligonucleotide
  source 1..17: mol_type = other DNA
taacgtttagtgagcag

SEQ ID NO: 6532 - DNA, 17 bp, synthetic construct
  misc_feature 1..17: note = Oligonucleotide
  source 1..17: mol_type = other DNA
acataacgtttagtgag

SEQ ID NO: 6533 - DNA, 17 bp, synthetic construct
  misc_feature 1..17: note = Oligonucleotide
  source 1..17: mol_type = other DNA
cgcacataacgtttagt

SEQ ID NO: 6534 - DNA, 17 bp, synthetic construct
  misc_feature 1..17: note = Oligonucleotide
  source 1..17: mol_type = other DNA
ggacgcacataacgttt

SEQ ID NO: 6535 - DNA, 17 bp, synthetic construct
  misc_feature 1..17: note = Oligonucleotide
  source 1..17: mol_type = other DNA
gcgggacgcacataacg

SEQ ID NO: 6536 - DNA, 17 bp, synthetic construct
  misc_feature 1..17: note = Oligonucleotide
  source 1..17: mol_type = other DNA
acagcgggacgcacata

SEQ ID NO: 6537 - DNA, 17 bp, synthetic construct
  misc_feature 1..17: note = Oligonucleotide
  source 1..17: mol_type = other DNA
cccacagcgggacgcac

SEQ ID NO: 6538 - DNA, 17 bp, synthetic construct
  misc_feature 1..17: note = Oligonucleotide
  source 1..17: mol_type = other DNA
agacccacagcgggacg

SEQ ID NO: 6539 - DNA, 17 bp, synthetic construct
  misc_feature 1..17: note = Oligonucleotide
  source 1..17: mol_type = other DNA
cagagacccacagcggg

SEQ ID NO: 6540 - DNA, 17 bp, synthetic construct
  misc_feature 1..17: note = Oligonucleotide
  source 1..17: mol_type = other DNA
tcccagagacccacagc

SEQ ID NO: 6541 - DNA, 17 bp, synthetic construct
  misc_feature 1..17: note = Oligonucleotide
  source 1..17: mol_type = other DNA
ccatcccagagacccac

SEQ ID NO: 6542 - DNA, 17 bp, synthetic construct
  misc_feature 1..17: note = Oligonucleotide
  source 1..17: mol_type = other DNA
gacccatcccagagacc

SEQ ID NO: 6543 - DNA, 17 bp, synthetic construct
  misc_feature 1..17: note = Oligonucleotide
  source 1..17: mol_type = other DNA
gaagacccatcccagag

SEQ ID NO: 6544 - DNA, 17 bp, synthetic construct
  misc_feature 1..17: note = Oligonucleotide
  source 1..17: mol_type = other DNA
ctggaagacccatccca

SEQ ID NO: 6545 - DNA, 17 bp, synthetic construct
  misc_feature 1..17: note = Oligonucleotide
  source 1..17: mol_type = other DNA
ggtctggaagacccatc

SEQ ID NO: 6546 - DNA, 17 bp, synthetic construct
  misc_feature 1..17: note = Oligonucleotide
  source 1..17: mol_type = other DNA
ctaggtctggaagaccc

SEQ ID NO: 6547 - DNA, 17 bp, synthetic construct
  misc_feature 1..17: note = Oligonucleotide
  source 1..17: mol_type = other DNA
tctctaggtctggaaga

SEQ ID NO: 6548 - DNA, 17 bp, synthetic construct
  misc_feature 1..17: note = Oligonucleotide
  source 1..17: mol_type = other DNA
gtctctctaggtctgga

SEQ ID NO: 6549 - DNA, 17 bp, synthetic construct
  misc_feature 1..17: note = Oligonucleotide
  source 1..17: mol_type = other DNA
gctgtctctctaggtct

SEQ ID NO: 6550 - DNA, 17 bp, synthetic construct
  misc_feature 1..17: note = Oligonucleotide
  source 1..17: mol_type = other DNA
gaggctgtctctctagg

SEQ ID NO: 6551 - DNA, 17 bp, synthetic construct
  misc_feature 1..17: note = Oligonucleotide
  source 1..17: mol_type = other DNA
ggagaggctgtctctct

SEQ ID NO: 6552 - DNA, 17 bp, synthetic construct
  misc_feature 1..17: note = Oligonucleotide
  source 1..17: mol_type = other DNA
ctaggagaggctgtctc

SEQ ID NO: 6553 - DNA, 17 bp, synthetic construct
  misc_feature 1..17: note = Oligonucleotide
  source 1..17: mol_type = other DNA
gggctaggagaggctgt

SEQ ID NO: 6554 - DNA, 17 bp, synthetic construct
  misc_feature 1..17: note = Oligonucleotide
  source 1..17: mol_type = other DNA
cacgggctaggagaggc

SEQ ID NO: 6555 - DNA, 17 bp, synthetic construct
  misc_feature 1..17: note = Oligonucleotide
  source 1..17: mol_type = other DNA
agccacgggctaggaga

SEQ ID NO: 6556 - DNA, 17 bp, synthetic construct
  misc_feature 1..17: note = Oligonucleotide
  source 1..17: mol_type = other DNA
ctgagccacgggctagg

SEQ ID NO: 6557 - DNA, 17 bp, synthetic construct
  misc_feature 1..17: note = Oligonucleotide
  source 1..17: mol_type = other DNA
cgcctgagccacgggct

SEQ ID NO: 6558 - DNA, 17 bp, synthetic construct
  misc_feature 1..17: note = Oligonucleotide
  source 1..17: mol_type = other DNA
tgccgcctgagccacgg

SEQ ID NO: 6559 - DNA, 17 bp, synthetic construct
  misc_feature 1..17: note = Oligonucleotide
  source 1..17: mol_type = other DNA
cgttgccgcctgagcca

SEQ ID NO: 6560 - DNA, 17 bp, synthetic construct
  misc_feature 1..17: note = Oligonucleotide
  source 1..17: mol_type = other DNA
acacgttgccgcctgag

SEQ ID NO: 6561 - DNA, 17 bp, synthetic construct
  misc_feature 1..17: note = Oligonucleotide
  source 1..17: mol_type = other DNA
gagacacgttgccgcct

SEQ ID NO: 6562 - DNA, 17 bp, synthetic construct
  misc_feature 1..17: note = Oligonucleotide
  source 1..17: mol_type = other DNA
tgggagacacgttgccg

SEQ ID NO: 6563 - DNA, 17 bp, synthetic construct
  misc_feature 1..17: note = Oligonucleotide
  source 1..17: mol_type = other DNA
tcatgggagacacgttg

SEQ ID NO: 6564 - DNA, 17 bp, synthetic construct
  misc_feature 1..17: note = Oligonucleotide
  source 1..17: mol_type = other DNA
gcatcatgggagacacg

SEQ ID NO: 6565 - DNA, 17 bp, synthetic construct
  misc_feature 1..17: note = Oligonucleotide
  source 1..17: mol_type = other DNA
tcagcatcatgggagac

SEQ ID NO: 6566 - DNA, 17 bp, synthetic construct
  misc_feature 1..17: note = Oligonucleotide
  source 1..17: mol_type = other DNA
ggctcagcatcatggga

SEQ ID NO: 6567 - DNA, 17 bp, synthetic construct
  misc_feature 1..17: note = Oligonucleotide
  source 1..17: mol_type = other DNA
cacggctcagcatcatg

SEQ ID NO: 6568 - DNA, 17 bp, synthetic construct
  misc_feature 1..17: note = Oligonucleotide
  source 1..17: mol_type = other DNA
acacacggctcagcatc

SEQ ID NO: 6569 - DNA, 17 bp, synthetic construct
  misc_feature 1..17: note = Oligonucleotide
  source 1..17: mol_type = other DNA
ggcacacacggctcagc

SEQ ID NO: 6570 - DNA, 17 bp, synthetic construct
  misc_feature 1..17: note = Oligonucleotide
  source 1..17: mol_type = other DNA
tgaggcacacacggctc

SEQ ID NO: 6571 - DNA, 17 bp, synthetic construct
  misc_feature 1..17: note = Oligonucleotide
  source 1..17: mol_type = other DNA
ccgtgaggcacacacgg

SEQ ID NO: 6572 - DNA, 17 bp, synthetic construct
  misc_feature 1..17: note = Oligonucleotide
  source 1..17: mol_type = other DNA
actccgtgaggcacaca

SEQ ID NO: 6573 - DNA, 17 bp, synthetic construct
  misc_feature 1..17: note = Oligonucleotide
  source 1..17: mol_type = other DNA
aaaactccgtgaggcac

SEQ ID NO: 6574 - DNA, 17 bp, synthetic construct
  misc_feature 1..17: note = Oligonucleotide
  source 1..17: mol_type = other DNA
gagaaaactccgtgagg

SEQ ID NO: 6575 - DNA, 17 bp, synthetic construct
  misc_feature 1..17: note = Oligonucleotide
  source 1..17: mol_type = other DNA
ggagagaaaactccgtg

SEQ ID NO: 6576 - DNA, 17 bp, synthetic construct
  misc_feature 1..17: note = Oligonucleotide
  source 1..17: mol_type = other DNA
aatggagagaaaactcc

SEQ ID NO: 6577 - DNA, 17 bp, synthetic construct
  misc_feature 1..17: note = Oligonucleotide
  source 1..17: mol_type = other DNA
atgaatggagagaaaac

SEQ ID NO: 6578 - DNA, 17 bp, synthetic construct
  misc_feature 1..17: note = Oligonucleotide
  source 1..17: mol_type = other DNA
gatatgaatggagagaa

SEQ ID NO: 6579 - DNA, 17 bp, synthetic construct
  misc_feature 1..17: note = Oligonucleotide
  source 1..17: mol_type = other DNA
aaagatatgaatggaga

SEQ ID NO: 6580 - DNA, 17 bp, synthetic construct
  misc_feature 1..17: note = Oligonucleotide
  source 1..17: mol_type = other DNA
agtaaagatatgaatgg

SEQ ID NO: 6581 - DNA, 17 bp, synthetic construct
  misc_feature 1..17: note = Oligonucleotide
  source 1..17: mol_type = other DNA
agaagtaaagatatgaa

SEQ ID NO: 6582 - DNA, 17 bp, synthetic construct
  misc_feature 1..17: note = Oligonucleotide
  source 1..17: mol_type = other DNA
tgcagaagtaaagatat

SEQ ID NO: 6583 - DNA, 17 bp, synthetic construct
  misc_feature 1..17: note = Oligonucleotide
  source 1..17: mol_type = other DNA
aactgcagaagtaaaga

SEQ ID NO: 6584 - DNA, 17 bp, synthetic construct
  misc_feature 1..17: note = Oligonucleotide
  source 1..17: mol_type = other DNA
ggaaactgcagaagtaa

SEQ ID NO: 6585 - DNA, 17 bp, synthetic construct
  misc_feature 1..17: note = Oligonucleotide
  source 1..17: mol_type = other DNA
cccggaaactgcagaag

SEQ ID NO: 6586 - DNA, 17 bp, synthetic construct
  misc_feature 1..17: note = Oligonucleotide
  source 1..17: mol_type = other DNA
ctccccggaaactgcag

SEQ ID NO: 6587 - DNA, 17 bp, synthetic construct
  misc_feature 1..17: note = Oligonucleotide
  source 1..17: mol_type = other DNA
atactccccggaaactg

SEQ ID NO: 6588 - DNA, 17 bp, synthetic construct
  misc_feature 1..17: note = Oligonucleotide
  source 1..17: mol_type = other DNA
accatactccccggaaa

SEQ ID NO: 6589 - DNA, 17 bp, synthetic construct
  misc_feature 1..17: note = Oligonucleotide
  source 1..17: mol_type = other DNA
agcaccatactccccgg

SEQ ID NO: 6590 - DNA, 17 bp, synthetic construct
  misc_feature 1..17: note = Oligonucleotide
  source 1..17: mol_type = other DNA
ttaagcaccatactccc

SEQ ID NO: 6591 - DNA, 17 bp, synthetic construct
  misc_feature 1..17: note = Oligonucleotide
  source 1..17: mol_type = other DNA
gacttaagcaccatact

SEQ ID NO: 6592 - DNA, 17 bp, synthetic construct
  misc_feature 1..17: note = Oligonucleotide
  source 1..17: mol_type = other DNA
tgagacttaagcaccat

SEQ ID NO: 6593 - DNA, 17 bp, synthetic construct
  misc_feature 1..17: note = Oligonucleotide
  source 1..17: mol_type = other DNA
agatgagacttaagcac

SEQ ID NO: 6594 - DNA, 17 bp, synthetic construct
  misc_feature 1..17: note = Oligonucleotide
  source 1..17: mol_type = other DNA
aagagatgagacttaag

SEQ ID NO: 6595 - DNA, 17 bp, synthetic construct
  misc_feature 1..17: note = Oligonucleotide
  source 1..17: mol_type = other DNA
agtaagagatgagactt

SEQ ID NO: 6596 - DNA, 17 bp, synthetic construct
  misc_feature 1..17: note = Oligonucleotide
  source 1..17: mol_type = other DNA
ggaagtaagagatgaga

SEQ ID NO: 6597 - DNA, 17 bp, synthetic construct
  misc_feature 1..17: note = Oligonucleotide
  source 1..17: mol_type = other DNA
ctaggaagtaagagatg

SEQ ID NO: 6598 - DNA, 17 bp, synthetic construct
  misc_feature 1..17: note = Oligonucleotide
  source 1..17: mol_type = other DNA
tgactaggaagtaagag

SEQ ID NO: 6599 - DNA, 17 bp, synthetic construct
  misc_feature 1..17: note = Oligonucleotide
  source 1..17: mol_type = other DNA
ctctgactaggaagtaa

SEQ ID NO: 6600 - DNA, 17 bp, synthetic construct
  misc_feature 1..17: note = Oligonucleotide
  source 1..17: mol_type = other DNA
aatctctgactaggaag

SEQ ID NO: 6601 - DNA, 17 bp, synthetic construct
  misc_feature 1..17: note = Oligonucleotide
  source 1..17: mol_type = other DNA
ataaatctctgactagg

SEQ ID NO: 6602 - DNA, 17 bp, synthetic construct
  misc_feature 1..17: note = Oligonucleotide
  source 1..17: mol_type = other DNA
gccataaatctctgact

SEQ ID NO: 6603 - DNA, 17 bp, synthetic construct
  misc_feature 1..17: note = Oligonucleotide
  source 1..17: mol_type = other DNA
attgccataaatctctg

SEQ ID NO: 6604 - DNA, 17 bp, synthetic construct
  misc_feature 1..17: note = Oligonucleotide
  source 1..17: mol_type = other DNA
gaaattgccataaatct

SEQ ID NO: 6605 - DNA, 17 bp, synthetic construct
  misc_feature 1..17: note = Oligonucleotide
  source 1..17: mol_type = other DNA
agcgaaattgccataaa

SEQ ID NO: 6606 - DNA, 17 bp, synthetic construct
  misc_feature 1..17: note = Oligonucleotide
  source 1..17: mol_type = other DNA
tgaagcgaaattgccat

SEQ ID NO: 6607 - DNA, 17 bp, synthetic construct
  misc_feature 1..17: note = Oligonucleotide
  source 1..17: mol_type = other DNA
aactgaagcgaaattgc

SEQ ID NO: 6608 - DNA, 17 bp, synthetic construct
  misc_feature 1..17: note = Oligonucleotide
  source 1..17: mol_type = other DNA
gcaaactgaagcgaaat

SEQ ID NO: 6609 - DNA, 17 bp, synthetic construct
  misc_feature 1..17: note = Oligonucleotide
  source 1..17: mol_type = other DNA
ggagcaaactgaagcga

SEQ ID NO: 6610 - DNA, 17 bp, synthetic construct
  misc_feature 1..17: note = Oligonucleotide
  source 1..17: mol_type = other DNA
ccaggagcaaactgaag

SEQ ID NO: 6611 - DNA, 17 bp, synthetic construct
  misc_feature 1..17: note = Oligonucleotide
  source 1..17: mol_type = other DNA
aacccaggagcaaactg

SEQ ID NO: 6612 - DNA, 17 bp, synthetic construct
  misc_feature 1..17: note = Oligonucleotide
  source 1..17: mol_type = other DNA
tccaacccaggagcaaa

SEQ ID NO: 6613 - DNA, 17 bp, synthetic construct
  misc_feature 1..17: note = Oligonucleotide
  source 1..17: mol_type = other DNA
ttatccaacccaggagc

SEQ ID NO: 6614 - DNA, 17 bp, synthetic construct
  misc_feature 1..17: note = Oligonucleotide
  source 1..17: mol_type = other DNA
cccttatccaacccagg

SEQ ID NO: 6615 - DNA, 17 bp, synthetic construct
  misc_feature 1..17: note = Oligonucleotide
  source 1..17: mol_type = other DNA
tcacccttatccaaccc

SEQ ID NO: 6616 - DNA, 17 bp, synthetic construct
  misc_feature 1..17: note = Oligonucleotide
  source 1..17: mol_type = other DNA
tcatcacccttatccaa

SEQ ID NO: 6617 - DNA, 17 bp, synthetic construct
  misc_feature 1..17: note = Oligonucleotide
  source 1..17: mol_type = other DNA
ttatcatcacccttatc

SEQ ID NO: 6618 - DNA, 17 bp, synthetic construct
  misc_feature 1..17: note = Oligonucleotide
  source 1..17: mol_type = other DNA
attttatcatcaccctt

SEQ ID NO: 6619 - DNA, 17 bp, synthetic construct
  misc_feature 1..17: note = Oligonucleotide
  source 1..17: mol_type = other DNA
aggattttatcatcacc

SEQ ID NO: 6620 - DNA, 17 bp, synthetic construct
  misc_feature 1..17: note = Oligonucleotide
  source 1..17: mol_type = other DNA
acgaggattttatcatc

SEQ ID NO: 6621 - DNA, 17 bp, synthetic construct
  misc_feature 1..17: note = Oligonucleotide
  source 1..17: mol_type = other DNA
tacacgaggattttatc

SEQ ID NO: 6622 - DNA, 17 bp, synthetic construct
  misc_feature 1..17: note = Oligonucleotide
  source 1..17: mol_type = other DNA
aactacacgaggatttt

SEQ ID NO: 6623 - DNA, 17 bp, synthetic construct
  misc_feature 1..17: note = Oligonucleotide
  source 1..17: mol_type = other DNA
cacaactacacgaggat

SEQ ID NO: 6624 - DNA, 17 bp, synthetic construct
  misc_feature 1..17: note = Oligonucleotide
  source 1..17: mol_type = other DNA
tcccacaactacacgag

SEQ ID NO: 6625 - DNA, 17 bp, synthetic construct
  misc_feature 1..17: note = Oligonucleotide
  source 1..17: mol_type = other DNA
tcatcccacaactacac

SEQ ID NO: 6626 - DNA, 17 bp, synthetic construct
  misc_feature 1..17: note = Oligonucleotide
  source 1..17: mol_type = other DNA
ctctcatcccacaacta

SEQ ID NO: 6627 - DNA, 17 bp, synthetic construct
  misc_feature 1..17: note = Oligonucleotide
  source 1..17: mol_type = other DNA
ctcctctcatcccacaa

SEQ ID NO: 6628 - DNA, 17 bp, synthetic construct
  misc_feature 1..17: note = Oligonucleotide
  source 1..17: mol_type = other DNA
ccactcctctcatccca

SEQ ID NO: 6629 - DNA, 17 bp, synthetic construct
  misc_feature 1..17: note = Oligonucleotide
  source 1..17: mol_type = other DNA
aaaccactcctctcatc

SEQ ID NO: 6630 - DNA, 17 bp, synthetic construct
  misc_feature 1..17: note = Oligonucleotide
  source 1..17: mol_type = other DNA
tgcaaaccactcctctc

SEQ ID NO: 6631 - DNA, 17 bp, synthetic construct
  misc_feature 1..17: note = Oligonucleotide
  source 1..17: mol_type = other DNA
ttatgcaaaccactcct

SEQ ID NO: 6632 - DNA, 17 bp, synthetic construct
  misc_feature 1..17: note = Oligonucleotide
  source 1..17: mol_type = other DNA
actttatgcaaaccact

SEQ ID NO: 6633 - DNA, 17 bp, synthetic construct
  misc_feature 1..17: note = Oligonucleotide
  source 1..17: mol_type = other DNA
gggactttatgcaaacc

SEQ ID NO: 6634 - DNA, 17 bp, synthetic construct
  misc_feature 1..17: note = Oligonucleotide
  source 1..17: mol_type = other DNA
tgcgggactttatgcaa

SEQ ID NO: 6635 - DNA, 17 bp, synthetic construct
  misc_feature 1..17: note = Oligonucleotide
  source 1..17: mol_type = other DNA
gtatgcgggactttatg

SEQ ID NO: 6636 - DNA, 17 bp, synthetic construct
  misc_feature 1..17: note = Oligonucleotide
  source 1..17: mol_type = other DNA
agagtatgcgggacttt

SEQ ID NO: 6637 - DNA, 17 bp, synthetic construct
  misc_feature 1..17: note = Oligonucleotide
  source 1..17: mol_type = other DNA
tctagagtatgcgggac

SEQ ID NO: 6638 - DNA, 17 bp, synthetic construct
  misc_feature 1..17: note = Oligonucleotide
  source 1..17: mol_type = other DNA
atttctagagtatgcgg

SEQ ID NO: 6639 - DNA, 17 bp, synthetic construct
  misc_feature 1..17: note = Oligonucleotide
  source 1..17: mol_type = other DNA
gtgatttctagagtatg

SEQ ID NO: 6640 - DNA, 17 bp, synthetic construct
  misc_feature 1..17: note = Oligonucleotide
  source 1..17: mol_type = other DNA
ttggtgatttctagagt

SEQ ID NO: 6641 - DNA, 17 bp, synthetic construct
  misc_feature 1..17: note = Oligonucleotide
  source 1..17: mol_type = other DNA
ttcttggtgatttctag

SEQ ID NO: 6642 - DNA, 17 bp, synthetic construct
  misc_feature 1..17: note = Oligonucleotide
  source 1..17: mol_type = other DNA
aagttcttggtgatttc

SEQ ID NO: 6643 - DNA, 17 bp, synthetic construct
  misc_feature 1..17: note = Oligonucleotide
  source 1..17: mol_type = other DNA
gttaagttcttggtgat

SEQ ID NO: 6644 - DNA, 17 bp, synthetic construct
  misc_feature 1..17: note = Oligonucleotide
  source 1..17: mol_type = other DNA
tctgttaagttcttggt

SEQ ID NO: 6645 - DNA, 17 bp, synthetic construct
  misc_feature 1..17: note = Oligonucleotide
  source 1..17: mol_type = other DNA
ccatctgttaagttctt

SEQ ID NO: 6646 - DNA, 17 bp, synthetic construct
  misc_feature 1..17: note = Oligonucleotide
  source 1..17: mol_type = other DNA
ccaccatctgttaagtt

SEQ ID NO: 6647 - DNA, 17 bp, synthetic construct
  misc_feature 1..17: note = Oligonucleotide
  source 1..17: mol_type = other DNA
ttgccaccatctgttaa

SEQ ID NO: 6648 - DNA, 17 bp, synthetic construct
  misc_feature 1..17: note = Oligonucleotide
  source 1..17: mol_type = other DNA
ccattgccaccatctgt

SEQ ID NO: 6649 - DNA, 17 bp, synthetic construct
  misc_feature 1..17: note = Oligonucleotide
  source 1..17: mol_type = other DNA
tcaccattgccaccatc

SEQ ID NO: 6650 - DNA, 17 bp, synthetic construct
  misc_feature 1..17: note = Oligonucleotide
  source 1..17: mol_type = other DNA
aagtcaccattgccacc

SEQ ID NO: 6651 - DNA, 17 bp, synthetic construct
  misc_feature 1..17: note = Oligonucleotide
  source 1..17: mol_type = other DNA
ttgaagtcaccattgcc

SEQ ID NO: 6652 - DNA, 17 bp, synthetic construct
  misc_feature 1..17: note = Oligonucleotide
  source 1..17: mol_type = other DNA
gagttgaagtcaccatt

SEQ ID NO: 6653 - DNA, 17 bp, synthetic construct
  misc_feature 1..17: note = Oligonucleotide
  source 1..17: mol_type = other DNA
tgggagttgaagtcacc

SEQ ID NO: 6654 - DNA, 17 bp, synthetic construct
  misc_feature 1..17: note = Oligonucleotide
  source 1..17: mol_type = other DNA
ttttgggagttgaagtc

SEQ ID NO: 6655 - DNA, 17 bp, synthetic construct
  misc_feature 1..17: note = Oligonucleotide
  source 1..17: mol_type = other DNA
tctttttgggagttgaa

SEQ ID NO: 6656 - DNA, 17 bp, synthetic construct
  misc_feature 1..17: note = Oligonucleotide
  source 1..17: mol_type = other DNA
atttctttttgggagtt

SEQ ID NO: 6657 - DNA, 17 bp, synthetic construct
  misc_feature 1..17: note = Oligonucleotide
  source 1..17: mol_type = other DNA
atgatttctttttggga

SEQ ID NO: 6658 - DNA, 17 bp, synthetic construct
  misc_feature 1..17: note = Oligonucleotide
  source 1..17: mol_type = other DNA
tgaatgatttctttttg

SEQ ID NO: 6659 - DNA, 17 bp, synthetic construct
  misc_feature 1..17: note = Oligonucleotide
  source 1..17: mol_type = other DNA
aagtgaatgatttcttt

SEQ ID NO: 6660 - DNA, 17 bp, synthetic construct
  misc_feature 1..17: note = Oligonucleotide
  source 1..17: mol_type = other DNA
atgaagtgaatgatttc

SEQ ID NO: 6661 - DNA, 17 bp, synthetic construct
  misc_feature 1..17: note = Oligonucleotide
  source 1..17: mol_type = other DNA
gtcatgaagtgaatgat

SEQ ID NO: 6662 - DNA, 17 bp, synthetic construct
  misc_feature 1..17: note = Oligonucleotide
  source 1..17: mol_type = other DNA
tttgtcatgaagtgaat

SEQ ID NO: 6663 - DNA, 17 bp, synthetic construct
  misc_feature 1..17: note = Oligonucleotide
  source 1..17: mol_type = other DNA
gcttttgtcatgaagtg

SEQ ID NO: 6664 - DNA, 17 bp, synthetic construct
  misc_feature 1..17: note = Oligonucleotide
  source 1..17: mol_type = other DNA
tttgcttttgtcatgaa

SEQ ID NO: 6665 - DNA, 17 bp, synthetic construct
  misc_feature 1..17: note = Oligonucleotide
  source 1..17: mol_type = other DNA
tcatttgcttttgtcat

SEQ ID NO: 6666 - DNA, 17 bp, synthetic construct
  misc_feature 1..17: note = Oligonucleotide
  source 1..17: mol_type = other DNA
ttctcatttgcttttgt

SEQ ID NO: 6667 - DNA, 17 bp, synthetic construct
  misc_feature 1..17: note = Oligonucleotide
  source 1..17: mol_type = other DNA
gacttctcatttgcttt

SEQ ID NO: 6668 - DNA, 17 bp, synthetic construct
  misc_feature 1..17: note = Oligonucleotide
  source 1..17: mol_type = other DNA
ggggacttctcatttgc

SEQ ID NO: 6669 - DNA, 17 bp, synthetic construct
  misc_feature 1..17: note = Oligonucleotide
  source 1..17: mol_type = other DNA
tgaggggacttctcatt

SEQ ID NO: 6670 - DNA, 17 bp, synthetic construct
  misc_feature 1..17: note = Oligonucleotide
  source 1..17: mol_type = other DNA
gtttgaggggacttctc

SEQ ID NO: 6671 - DNA, 17 bp, synthetic construct
  misc_feature 1..17: note = Oligonucleotide
  source 1..17: mol_type = other DNA
ctggtttgaggggactt

SEQ ID NO: 6672 - DNA, 17 bp, synthetic construct
  misc_feature 1..17: note = Oligonucleotide
  source 1..17: mol_type = other DNA
ctgctggtttgagggga

SEQ ID NO: 6673 - DNA, 17 bp, synthetic construct
  misc_feature 1..17: note = Oligonucleotide
  source 1..17: mol_type = other DNA
gggctgctggtttgagg

SEQ ID NO: 6674 - DNA, 17 bp, synthetic construct
  misc_feature 1..17: note = Oligonucleotide
  source 1..17: mol_type = other DNA
caggggctgctggtttg

SEQ ID NO: 6675 - DNA, 17 bp, synthetic construct
  misc_feature 1..17: note = Oligonucleotide
  source 1..17: mol_type = other DNA
gaccaggggctgctggt

SEQ ID NO: 6676 - DNA, 17 bp, synthetic construct
  misc_feature 1..17: note = Oligonucleotide
  source 1..17: mol_type = other DNA
acagaccaggggctgct

SEQ ID NO: 6677 - DNA, 17 bp, synthetic construct
  misc_feature 1..17: note = Oligonucleotide
  source 1..17: mol_type = other DNA
ggtacagaccaggggct

SEQ ID NO: 6678 - DNA, 17 bp, synthetic construct
  misc_feature 1..17: note = Oligonucleotide
  source 1..17: mol_type = other DNA
ccaggtacagaccaggg

SEQ ID NO: 6679 - DNA, 17 bp, synthetic construct
  misc_feature 1..17: note = Oligonucleotide
  source 1..17: mol_type = other DNA
ggcccaggtacagacca

SEQ ID NO: 6680 - DNA, 17 bp, synthetic construct
  misc_feature 1..17: note = Oligonucleotide
  source 1..17: mol_type = other DNA
aggggcccaggtacaga

SEQ ID NO: 6681 - DNA, 17 bp, synthetic construct
  misc_feature 1..17: note = Oligonucleotide
  source 1..17: mol_type = other DNA
gacaggggcccaggtac

SEQ ID NO: 6682 - DNA, 17 bp, synthetic construct
  misc_feature 1..17: note = Oligonucleotide
  source 1..17: mol_type = other DNA
ggtgacaggggcccagg

SEQ ID NO: 6683 - DNA, 17 bp, synthetic construct
  misc_feature 1..17: note = Oligonucleotide
  source 1..17: mol_type = other DNA
ccaggtgacaggggccc

SEQ ID NO: 6684 - DNA, 17 bp, synthetic construct
  misc_feature 1..17: note = Oligonucleotide
  source 1..17: mol_type = other DNA
ccaccaggtgacagggg

SEQ ID NO: 6685 - DNA, 17 bp, synthetic construct
  misc_feature 1..17: note = Oligonucleotide
  source 1..17: mol_type = other DNA
gtgccaccaggtgacag

SEQ ID NO: 6686 - DNA, 17 bp, synthetic construct
  misc_feature 1..17: note = Oligonucleotide
  source 1..17: mol_type = other DNA
ccagtgccaccaggtga

SEQ ID NO: 6687 - DNA, 17 bp, synthetic construct
  misc_feature 1..17: note = Oligonucleotide
  source 1..17: mol_type = other DNA
ctcccagtgccaccagg

SEQ ID NO: 6688 - DNA, 17 bp, synthetic construct
  misc_feature 1..17: note = Oligonucleotide
  source 1..17: mol_type = other DNA
cagctcccagtgccacc

SEQ ID NO: 6689 - DNA, 17 bp, synthetic construct
  misc_feature 1..17: note = Oligonucleotide
  source 1..17: mol_type = other DNA
gcacagctcccagtgcc

SEQ ID NO: 6690 - DNA, 17 bp, synthetic construct
  misc_feature 1..17: note = Oligonucleotide
  source 1..17: mol_type = other DNA
tgtgcacagctcccagt

SEQ ID NO: 6691 - DNA, 17 bp, synthetic construct
  misc_feature 1..17: note = Oligonucleotide
  source 1..17: mol_type = other DNA
gcctgtgcacagctccc

SEQ ID NO: 6692 - DNA, 17 bp, synthetic construct
  misc_feature 1..17: note = Oligonucleotide
  source 1..17: mol_type = other DNA
tgggcctgtgcacagct

SEQ ID NO: 6693 - DNA, 17 bp, synthetic construct
  misc_feature 1..17: note = Oligonucleotide
  source 1..17: mol_type = other DNA
atctgggcctgtgcaca

SEQ ID NO: 6694 - DNA, 17 bp, synthetic construct
  misc_feature 1..17: note = Oligonucleotide
  source 1..17: mol_type = other DNA
gatatctgggcctgtgc

SEQ ID NO: 6695 - DNA, 17 bp, synthetic construct
  misc_feature 1..17: note = Oligonucleotide
  source 1..17: mol_type = other DNA
gcagatatctgggcctg

SEQ ID NO: 6696 - DNA, 17 bp, synthetic construct
  misc_feature 1..17: note = Oligonucleotide
  source 1..17: mol_type = other DNA
actgcagatatctgggc

SEQ ID NO: 6697 - DNA, 17 bp, synthetic construct
  misc_feature 1..17: note = Oligonucleotide
  source 1..17: mol_type = other DNA
ccaactgcagatatctg

SEQ ID NO: 6698 - DNA, 17 bp, synthetic construct
  misc_feature 1..17: note = Oligonucleotide
  source 1..17: mol_type = other DNA
gctccaactgcagatat

SEQ ID NO: 6699 - DNA, 17 bp, synthetic construct
  misc_feature 1..17: note = Oligonucleotide
  source 1..17: mol_type = other DNA
caggctccaactgcaga

SEQ ID NO: 6700 - DNA, 17 bp, synthetic construct
  misc_feature 1..17: note = Oligonucleotide
  source 1..17: mol_type = other DNA
aaacaggctccaactgc

SEQ ID NO: 6701 - DNA, 17 bp, synthetic construct
  misc_feature 1..17: note = Oligonucleotide
  source 1..17: mol_type = other DNA
gcaaaacaggctccaac

SEQ ID NO: 6702 - DNA, 17 bp, synthetic construct
  misc_feature 1..17: note = Oligonucleotide
  source 1..17: mol_type = other DNA
ccagcaaaacaggctcc

SEQ ID NO: 6703 - DNA, 17 bp, synthetic construct
  misc_feature 1..17: note = Oligonucleotide
  source 1..17: mol_type = other DNA
ttaccagcaaaacaggc

SEQ ID NO: 6704 - DNA, 17 bp, synthetic construct
  misc_feature 1..17: note = Oligonucleotide
  source 1..17: mol_type = other DNA
agtttaccagcaaaaca

SEQ ID NO: 6705 - DNA, 17 bp, synthetic construct
  misc_feature 1..17: note = Oligonucleotide
  source 1..17: mol_type = other DNA
aagagtttaccagcaaa

SEQ ID NO: 6706 - DNA, 17 bp, synthetic construct
  misc_feature 1..17: note = Oligonucleotide
  source 1..17: mol_type = other DNA
tacaagagtttaccagc

SEQ ID NO: 6707 - DNA, 17 bp, synthetic construct
  misc_feature 1..17: note = Oligonucleotide
  source 1..17: mol_type = other DNA
cgatacaagagtttacc

SEQ ID NO: 6708 - DNA, 17 bp, synthetic construct
  misc_feature 1..17: note = Oligonucleotide
  source 1..17: mol_type = other DNA
gaacgatacaagagttt

SEQ ID NO: 6709 - DNA, 17 bp, synthetic construct
  misc_feature 1..17: note = Oligonucleotide
  source 1..17: mol_type = other DNA
cctgaacgatacaagag

SEQ ID NO: 6710 - DNA, 17 bp, synthetic construct
  misc_feature 1..17: note = Oligonucleotide
  source 1..17: mol_type = other DNA
tgtcctgaacgatacaa

SEQ ID NO: 6711 - DNA, 17 bp, synthetic construct
  misc_feature 1..17: note = Oligonucleotide
  source 1..17: mol_type = other DNA
ctgtgtcctgaacgata

SEQ ID NO: 6712 - DNA, 17 bp, synthetic construct
  misc_feature 1..17: note = Oligonucleotide
  source 1..17: mol_type = other DNA
agcctgtgtcctgaacg

SEQ ID NO: 6713 - DNA, 17 bp, synthetic construct
  misc_feature 1..17: note = Oligonucleotide
  source 1..17: mol_type = other DNA
cccagcctgtgtcctga

SEQ ID NO: 6714 - DNA, 17 bp, synthetic construct
  misc_feature 1..17: note = Oligonucleotide
  source 1..17: mol_type = other DNA
gcgcccagcctgtgtcc

SEQ ID NO: 6715 - DNA, 17 bp, synthetic construct
  misc_feature 1..17: note = Oligonucleotide
  source 1..17: mol_type = other DNA
tcagcgcccagcctgtg

SEQ ID NO: 6716 - DNA, 17 bp, synthetic construct
  misc_feature 1..17: note = Oligonucleotide
  source 1..17: mol_type = other DNA
ccatcagcgcccagcct

SEQ ID NO: 6717 - DNA, 17 bp, synthetic construct
  misc_feature 1..17: note = Oligonucleotide
  source 1..17: mol_type = other DNA
gttccatcagcgcccag

SEQ ID NO: 6718 - DNA, 17 bp, synthetic construct
  misc_feature 1..17: note = Oligonucleotide
  source 1..17: mol_type = other DNA
tgtgttccatcagcgcc

SEQ ID NO: 6719 - DNA, 17 bp, synthetic construct
  misc_feature 1..17: note = Oligonucleotide
  source 1..17: mol_type = other DNA
ctctgtgttccatcagc

SEQ ID NO: 6720 - DNA, 17 bp, synthetic construct
  misc_feature 1..17: note = Oligonucleotide
  source 1..17: mol_type = other DNA
gttctctgtgttccatc

SEQ ID NO: 6721 - DNA, 17 bp, synthetic construct
  misc_feature 1..17: note = Oligonucleotide
  source 1..17: mol_type = other DNA
actgttctctgtgttcc

SEQ ID NO: 6722 - DNA, 17 bp, synthetic construct
  misc_feature 1..17: note = Oligonucleotide
  source 1..17: mol_type = other DNA
aatactgttctctgtgt

SEQ ID NO: 6723 - DNA, 17 bp, synthetic construct
  misc_feature 1..17: note = Oligonucleotide
  source 1..17: mol_type = other DNA
gcaaatactgttctctg

SEQ ID NO: 6724 - DNA, 17 bp, synthetic construct
  misc_feature 1..17: note = Oligonucleotide
  source 1..17: mol_type = other DNA
agagcaaatactgttct

SEQ ID NO: 6725 - DNA, 17 bp, synthetic construct
  misc_feature 1..17: note = Oligonucleotide
  source 1..17: mol_type = other DNA
aacagagcaaatactgt

SEQ ID NO: 6726 - DNA, 17 bp, synthetic construct
  misc_feature 1..17: note = Oligonucleotide
  source 1..17: mol_type = other DNA
cagaacagagcaaatac

SEQ ID NO: 6727 - DNA, 17 bp, synthetic construct
  misc_feature 1..17: note = Oligonucleotide
  source 1..17: mol_type = other DNA
ctgcagaacagagcaaa

SEQ ID NO: 6728 - DNA, 17 bp, synthetic construct
  misc_feature 1..17: note = Oligonucleotide
  source 1..17: mol_type = other DNA
ggtctgcagaacagagc

SEQ ID NO: 6729 - DNA, 17 bp, synthetic construct
  misc_feature 1..17: note = Oligonucleotide
  source 1..17: mol_type = other DNA
ccgggtctgcagaacag

SEQ ID NO: 6730 - DNA, 17 bp, synthetic construct
  misc_feature 1..17: note = Oligonucleotide
  source 1..17: mol_type = other DNA
cttccgggtctgcagaa

SEQ ID NO: 6731 - DNA, 17 bp, synthetic construct
  misc_feature 1..17: note = Oligonucleotide
  source 1..17: mol_type = other DNA
cagcttccgggtctgca

SEQ ID NO: 6732 - DNA, 17 bp, synthetic construct
  misc_feature 1..17: note = Oligonucleotide
  source 1..17: mol_type = other DNA
agacagcttccgggtct

SEQ ID NO: 6733 - DNA, 17 bp, synthetic construct
  misc_feature 1..17: note = Oligonucleotide
  source 1..17: mol_type = other DNA
cccagacagcttccggg

SEQ ID NO: 6734 - DNA, 17 bp, synthetic construct
  misc_feature 1..17: note = Oligonucleotide
  source 1..17: mol_type = other DNA
ctccccagacagcttcc

SEQ ID NO: 6735 - DNA, 17 bp, synthetic construct
  misc_feature 1..17: note = Oligonucleotide
  source 1..17: mol_type = other DNA
catctccccagacagct

SEQ ID NO: 6736 - DNA, 17 bp, synthetic construct
  misc_feature 1..17: note = Oligonucleotide
  source 1..17: mol_type = other DNA
ccccatctccccagaca

SEQ ID NO: 6737 - DNA, 17 bp, synthetic construct
  misc_feature 1..17: note = Oligonucleotide
  source 1..17: mol_type = other DNA
gtgccccatctccccag

SEQ ID NO: 6738 - DNA, 17 bp, synthetic construct
  misc_feature 1..17: note = Oligonucleotide
  source 1..17: mol_type = other DNA
tgtgtgccccatctccc

SEQ ID NO: 6739 - DNA, 17 bp, synthetic construct
  misc_feature 1..17: note = Oligonucleotide
  source 1..17: mol_type = other DNA
gtctgtgtgccccatct

SEQ ID NO: 6740 - DNA, 17 bp, synthetic construct
  misc_feature 1..17: note = Oligonucleotide
  source 1..17: mol_type = other DNA
catgtctgtgtgcccca

SEQ ID NO: 6741 - DNA, 17 bp, synthetic construct
  misc_feature 1..17: note = Oligonucleotide
  source 1..17: mol_type = other DNA
attcatgtctgtgtgcc

SEQ ID NO: 6742 - DNA, 17 bp, synthetic construct
  misc_feature 1..17: note = Oligonucleotide
  source 1..17: mol_type = other DNA
acaattcatgtctgtgt

SEQ ID NO: 6743 - DNA, 17 bp, synthetic construct
  misc_feature 1..17: note = Oligonucleotide
  source 1..17: mol_type = other DNA
agtacaattcatgtctg

SEQ ID NO: 6744 - DNA, 17 bp, synthetic construct
  misc_feature 1..17: note = Oligonucleotide
  source 1..17: mol_type = other DNA
ttcagtacaattcatgt

SEQ ID NO: 6745 - DNA, 17 bp, synthetic construct
  misc_feature 1..17: note = Oligonucleotide
  source 1..17: mol_type = other DNA
caattcagtacaattca

SEQ ID NO: 6746 - DNA, 17 bp, synthetic construct
  misc_feature 1..17: note = Oligonucleotide
  source 1..17: mol_type = other DNA
acacaattcagtacaat

SEQ ID NO: 6747 - DNA, 17 bp, synthetic construct
  misc_feature 1..17: note = Oligonucleotide
  source 1..17: mol_type = other DNA
tggacacaattcagtac

SEQ ID NO: 6748 - DNA, 17 bp, synthetic construct
  misc_feature 1..17: note = Oligonucleotide
  source 1..17: mol_type = other DNA
cactggacacaattcag

SEQ ID NO: 6749 - DNA, 17 bp, synthetic construct
  misc_feature 1..17: note = Oligonucleotide
  source 1..17: mol_type = other DNA
tggcactggacacaatt

SEQ ID NO: 6750 - DNA, 17 bp, synthetic construct
  misc_feature 1..17: note = Oligonucleotide
  source 1..17: mol_type = other DNA
tgctggcactggacaca

SEQ ID NO: 6751 - DNA, 17 bp, synthetic construct
  misc_feature 1..17: note = Oligonucleotide
  source 1..17: mol_type = other DNA
ctgtgctggcactggac

SEQ ID NO: 6752 - DNA, 17 bp, synthetic construct
  misc_feature 1..17: note = Oligonucleotide
  source 1..17: mol_type = other DNA
caactgtgctggcactg

SEQ ID NO: 6753 - DNA, 17 bp, synthetic construct
  misc_feature 1..17: note = Oligonucleotide
  source 1..17: mol_type = other DNA
ttacaactgtgctggca

SEQ ID NO: 6754 - DNA, 17 bp, synthetic construct
  misc_feature 1..17: note = Oligonucleotide
  source 1..17: mol_type = other DNA
ggcttacaactgtgctg

SEQ ID NO: 6755 - DNA, 17 bp, synthetic construct
  misc_feature 1..17: note = Oligonucleotide
  source 1..17: mol_type = other DNA
aaaggcttacaactgtg

SEQ ID NO: 6756 - DNA, 17 bp, synthetic construct
  misc_feature 1..17: note = Oligonucleotide
  source 1..17: mol_type = other DNA
aagaaaggcttacaact

SEQ ID NO: 6757 - DNA, 17 bp, synthetic construct
  misc_feature 1..17: note = Oligonucleotide
  source 1..17: mol_type = other DNA
cagaagaaaggcttaca

SEQ ID NO: 6758 - DNA, 17 bp, synthetic construct
  misc_feature 1..17: note = Oligonucleotide
  source 1..17: mol_type = other DNA
gcacagaagaaaggctt

SEQ ID NO: 6759 - DNA, 17 bp, synthetic construct
  misc_feature 1..17: note = Oligonucleotide
  source 1..17: mol_type = other DNA
ttagcacagaagaaagg

SEQ ID NO: 6760 - DNA, 17 bp, synthetic construct
  misc_feature 1..17: note = Oligonucleotide
  source 1..17: mol_type = other DNA
gaattagcacagaagaa

SEQ ID NO: 6761 - DNA, 17 bp, synthetic construct
  misc_feature 1..17: note = Oligonucleotide
  source 1..17: mol_type = other DNA
tgagaattagcacagaa

SEQ ID NO: 6762 - DNA, 17 bp, synthetic construct
  misc_feature 1..17: note = Oligonucleotide
  source 1..17: mol_type = other DNA
tagtgagaattagcaca

SEQ ID NO: 6763 - DNA, 17 bp, synthetic construct
  misc_feature 1..17: note = Oligonucleotide
  source 1..17: mol_type = other DNA
ctctagtgagaattagc

SEQ ID NO: 6764 - DNA, 17 bp, synthetic construct
  misc_feature 1..17: note = Oligonucleotide
  source 1..17: mol_type = other DNA
tgtctctagtgagaatt

SEQ ID NO: 6765 - DNA, 17 bp, synthetic construct
  misc_feature 1..17: note = Oligonucleotide
  source 1..17: mol_type = other DNA
acgtgtctctagtgaga

SEQ ID NO: 6766 - DNA, 17 bp, synthetic construct
  misc_feature 1..17: note = Oligonucleotide
  source 1..17: mol_type = other DNA
ctcacgtgtctctagtg

SEQ ID NO: 6767 - DNA, 17 bp, synthetic construct
  misc_feature 1..17: note = Oligonucleotide
  source 1..17: mol_type = other DNA
tcgctcacgtgtctcta

SEQ ID NO: 6768 - DNA, 17 bp, synthetic construct
  misc_feature 1..17: note = Oligonucleotide
  source 1..17: mol_type = other DNA
tgctcgctcacgtgtct

SEQ ID NO: 6769 - DNA, 17 bp, synthetic construct
  misc_feature 1..17: note = Oligonucleotide
  source 1..17: mol_type = other DNA
cagtgctcgctcacgtg

SEQ ID NO: 6770 - DNA, 17 bp, synthetic construct
  misc_feature 1..17: note = Oligonucleotide
  source 1..17: mol_type = other DNA
aaacagtgctcgctcac

SEQ ID NO: 6771 - DNA, 17 bp, synthetic construct
  misc_feature 1..17: note = Oligonucleotide
  source 1..17: mol_type = other DNA
taaaaacagtgctcgct

SEQ ID NO: 6772 - DNA, 17 bp, synthetic construct
  misc_feature 1..17: note = Oligonucleotide
  source 1..17: mol_type = other DNA
gcataaaaacagtgctc

SEQ ID NO: 6773 - DNA, 17 bp, synthetic construct
  misc_feature 1..17: note = Oligonucleotide
  source 1..17: mol_type = other DNA
caggcataaaaacagtg

SEQ ID NO: 6774 - DNA, 17 bp, synthetic construct
  misc_feature 1..17: note = Oligonucleotide
  source 1..17: mol_type = other DNA
aaacaggcataaaaaca

SEQ ID NO: 6775 - DNA, 17 bp, synthetic construct
  misc_feature 1..17: note = Oligonucleotide
  source 1..17: mol_type = other DNA
ataaaacaggcataaaa

SEQ ID NO: 6776 - DNA, 17 bp, synthetic construct
  misc_feature 1..17: note = Oligonucleotide
  source 1..17: mol_type = other DNA
ttgataaaacaggcata

SEQ ID NO: 6777 - DNA, 17 bp, synthetic construct
  misc_feature 1..17: note = Oligonucleotide
  source 1..17: mol_type = other DNA
tcattgataaaacaggc

SEQ ID NO: 6778 - DNA, 17 bp, synthetic construct
  misc_feature 1..17: note = Oligonucleotide
  source 1..17: mol_type = other DNA
tcctcattgataaaaca

SEQ ID NO: 6779 - DNA, 17 bp, synthetic construct
  misc_feature 1..17: note = Oligonucleotide
  source 1..17: mol_type = other DNA
gtgtcctcattgataaa

SEQ ID NO: 6780 - DNA, 17 bp, synthetic construct
  misc_feature 1..17: note = Oligonucleotide
  source 1..17: mol_type = other DNA
tctgtgtcctcattgat

SEQ ID NO: 6781 - DNA, 17 bp, synthetic construct
  misc_feature 1..17: note = Oligonucleotide
  source 1..17: mol_type = other DNA
acctctgtgtcctcatt

SEQ ID NO: 6782 - DNA, 17 bp, synthetic construct
  misc_feature 1..17: note = Oligonucleotide
  source 1..17: mol_type = other DNA
gtgacctctgtgtcctc

SEQ ID NO: 6783 - DNA, 17 bp, synthetic construct
  misc_feature 1..17: note = Oligonucleotide
  source 1..17: mol_type = other DNA
tttgtgacctctgtgtc

SEQ ID NO: 6784 - DNA, 17 bp, synthetic construct
  misc_feature 1..17: note = Oligonucleotide
  source 1..17: mol_type = other DNA
ctctttgtgacctctgt

SEQ ID NO: 6785 - DNA, 17 bp, synthetic construct
  misc_feature 1..17: note = Oligonucleotide
  source 1..17: mol_type = other DNA
aacctctttgtgacctc

SEQ ID NO: 6786 - DNA, 17 bp, synthetic construct
  misc_feature 1..17: note = Oligonucleotide
  source 1..17: mol_type = other DNA
cataacctctttgtgac

SEQ ID NO: 6787 - DNA, 17 bp, synthetic construct
  misc_feature 1..17: note = Oligonucleotide
  source 1..17: mol_type = other DNA
tgacataacctctttgt

SEQ ID NO: 6788 - DNA, 17 bp, synthetic construct
  misc_feature 1..17: note = Oligonucleotide
  source 1..17: mol_type = other DNA
tcctgacataacctctt

SEQ ID NO: 6789 - DNA, 17 bp, synthetic construct
  misc_feature 1..17: note = Oligonucleotide
  source 1..17: mol_type = other DNA
ctgtcctgacataacct

SEQ ID NO: 6790 - DNA, 17 bp, synthetic construct
  misc_feature 1..17: note = Oligonucleotide
  source 1..17: mol_type = other DNA
actctgtcctgacataa

SEQ ID NO: 6791 - DNA, 17 bp, synthetic construct
  misc_feature 1..17: note = Oligonucleotide
  source 1..17: mol_type = other DNA
ctgactctgtcctgaca

SEQ ID NO: 6792 - DNA, 17 bp, synthetic construct
  misc_feature 1..17: note = Oligonucleotide
  source 1..17: mol_type = other DNA
acactgactctgtcctg

SEQ ID NO: 6793 - DNA, 17 bp, synthetic construct
  misc_feature 1..17: note = Oligonucleotide
  source 1..17: mol_type = other DNA
tgtacactgactctgtc

SEQ ID NO: 6794 - DNA, 17 bp, synthetic construct
  misc_feature 1..17: note = Oligonucleotide
  source 1..17: mol_type = other DNA
ccctgtacactgactct

SEQ ID NO: 6795 - DNA, 17 bp, synthetic construct
  misc_feature 1..17: note = Oligonucleotide
  source 1..17: mol_type = other DNA
ccaccctgtacactgac

SEQ ID NO: 6796 - DNA, 17 bp, synthetic construct
  misc_feature 1..17: note = Oligonucleotide
  source 1..17: mol_type = other DNA
gacccaccctgtacact

SEQ ID NO: 6797 - DNA, 17 bp, synthetic construct
  misc_feature 1..17: note = Oligonucleotide
  source 1..17: mol_type = other DNA
ccagacccaccctgtac

SEQ ID NO: 6798 - DNA, 17 bp, synthetic construct
  misc_feature 1..17: note = Oligonucleotide
  source 1..17: mol_type = other DNA
agaccagacccaccctg

SEQ ID NO: 6799 - DNA, 17 bp, synthetic construct
  misc_feature 1..17: note = Oligonucleotide
  source 1..17: mol_type = other DNA
cccagaccagacccacc

SEQ ID NO: 6800 - DNA, 17 bp, synthetic construct
  misc_feature 1..17: note = Oligonucleotide
  source 1..17: mol_type = other DNA
caacccagaccagaccc

SEQ ID NO: 6801 - DNA, 17 bp, synthetic construct
  misc_feature 1..17: note = Oligonucleotide
  source 1..17: mol_type = other DNA
acccaacccagaccaga

SEQ ID NO: 6802 - DNA, 17 bp, synthetic construct
  misc_feature 1..17: note = Oligonucleotide
  source 1..17: mol_type = other DNA
tgtacccaacccagacc

SEQ ID NO: 6803 - DNA, 17 bp, synthetic construct
  misc_feature 1..17: note = Oligonucleotide
  source 1..17: mol_type = other DNA
tcctgtacccaacccag

SEQ ID NO: 6804 - DNA, 17 bp, synthetic construct
  misc_feature 1..17: note = Oligonucleotide
  source 1..17: mol_type = other DNA
ctgtcctgtacccaacc

SEQ ID NO: 6805 - DNA, 17 bp, synthetic construct
  misc_feature 1..17: note = Oligonucleotide
  source 1..17: mol_type = other DNA
agactgtcctgtaccca

SEQ ID NO: 6806 - DNA, 17 bp, synthetic construct
  misc_feature 1..17: note = Oligonucleotide
  source 1..17: mol_type = other DNA
ccaagactgtcctgtac

SEQ ID NO: 6807 - DNA, 17 bp, synthetic construct
  misc_feature 1..17: note = Oligonucleotide
  source 1..17: mol_type = other DNA
tccccaagactgtcctg

SEQ ID NO: 6808 - DNA, 17 bp, synthetic construct
  misc_feature 1..17: note = Oligonucleotide
  source 1..17: mol_type = other DNA
aactccccaagactgtc

SEQ ID NO: 6809 - DNA, 17 bp, synthetic construct
  misc_feature 1..17: note = Oligonucleotide
  source 1..17: mol_type = other DNA
aggaactccccaagact

SEQ ID NO: 6810 - DNA, 17 bp, synthetic construct
  misc_feature 1..17: note = Oligonucleotide
  source 1..17: mol_type = other DNA
ggaaggaactccccaag

SEQ ID NO: 6811 - DNA, 17 bp, synthetic construct
  misc_feature 1..17: note = Oligonucleotide
  source 1..17: mol_type = other DNA
gaaggaaggaactcccc

SEQ ID NO: 6812 - DNA, 17 bp, synthetic construct
  misc_feature 1..17: note = Oligonucleotide
  source 1..17: mol_type = other DNA
ctggaaggaaggaactc

SEQ ID NO: 6813 - DNA, 17 bp, synthetic construct
  misc_feature 1..17: note = Oligonucleotide
  source 1..17: mol_type = other DNA
ttgctggaaggaaggaa

SEQ ID NO: 6814 - DNA, 17 bp, synthetic construct
  misc_feature 1..17: note = Oligonucleotide
  source 1..17: mol_type = other DNA
gcattgctggaaggaag

SEQ ID NO: 6815 - DNA, 17 bp, synthetic construct
  misc_feature 1..17: note = Oligonucleotide
  source 1..17: mol_type = other DNA
ttagcattgctggaagg

SEQ ID NO: 6816 - DNA, 17 bp, synthetic construct
  misc_feature 1..17: note = Oligonucleotide
  source 1..17: mol_type = other DNA
agcttagcattgctgga

SEQ ID NO: 6817 - DNA, 17 bp, synthetic construct
  misc_feature 1..17: note = Oligonucleotide
  source 1..17: mol_type = other DNA
ccaagcttagcattgct

SEQ ID NO: 6818 - DNA, 17 bp, synthetic construct
  misc_feature 1..17: note = Oligonucleotide
  source 1..17: mol_type = other DNA
tccccaagcttagcatt

SEQ ID NO: 6819 - DNA, 17 bp, synthetic construct
  misc_feature 1..17: note = Oligonucleotide
  source 1..17: mol_type = other DNA
aactccccaagcttagc

SEQ ID NO: 6820 - DNA, 17 bp, synthetic construct
  misc_feature 1..17: note = Oligonucleotide
  source 1..17: mol_type = other DNA
aggaactccccaagctt

SEQ ID NO: 6821 - DNA, 17 bp, synthetic construct
  misc_feature 1..17: note = Oligonucleotide
  source 1..17: mol_type = other DNA
ggaaggaactccccaag

SEQ ID NO: 6822 - DNA, 17 bp, synthetic construct
  misc_feature 1..17: note = Oligonucleotide
  source 1..17: mol_type = other DNA
gaaggaaggaactcccc

SEQ ID NO: 6823 - DNA, 17 bp, synthetic construct
  misc_feature 1..17: note = Oligonucleotide
  source 1..17: mol_type = other DNA
aaggaaggaaggaactc

SEQ ID NO: 6824 - DNA, 17 bp, synthetic construct
  misc_feature 1..17: note = Oligonucleotide
  source 1..17: mol_type = other DNA
tggaaggaaggaaggaa

SEQ ID NO: 6825 - DNA, 17 bp, synthetic construct
  misc_feature 1..17: note = Oligonucleotide
  source 1..17: mol_type = other DNA
tgctggaaggaaggaag

SEQ ID NO: 6826 - DNA, 17 bp, synthetic construct
  misc_feature 1..17: note = Oligonucleotide
  source 1..17: mol_type = other DNA
cattgctggaaggaagg

SEQ ID NO: 6827 - DNA, 17 bp, synthetic construct
  misc_feature 1..17: note = Oligonucleotide
  source 1..17: mol_type = other DNA
tagcattgctggaagga

SEQ ID NO: 6828 - DNA, 17 bp, synthetic construct
  misc_feature 1..17: note = Oligonucleotide
  source 1..17: mol_type = other DNA
gcttagcattgctggaa

SEQ ID NO: 6829 - DNA, 17 bp, synthetic construct
  misc_feature 1..17: note = Oligonucleotide
  source 1..17: mol_type = other DNA
tctgcttagcattgctg

SEQ ID NO: 6830 - DNA, 17 bp, synthetic construct
  misc_feature 1..17: note = Oligonucleotide
  source 1..17: mol_type = other DNA
caatctgcttagcattg

SEQ ID NO: 6831 - DNA, 17 bp, synthetic construct
  misc_feature 1..17: note = Oligonucleotide
  source 1..17: mol_type = other DNA
ctgcaatctgcttagca

SEQ ID NO: 6832 - DNA, 17 bp, synthetic construct
  misc_feature 1..17: note = Oligonucleotide
  source 1..17: mol_type = other DNA
cctctgcaatctgctta

SEQ ID NO: 6833 - DNA, 17 bp, synthetic construct
  misc_feature 1..17: note = Oligonucleotide
  source 1..17: mol_type = other DNA
ctacctctgcaatctgc

SEQ ID NO: 6834 - DNA, 17 bp, synthetic construct
  misc_feature 1..17: note = Oligonucleotide
  source 1..17: mol_type = other DNA
attctacctctgcaatc

SEQ ID NO: 6835 - DNA, 17 bp, synthetic construct
  misc_feature 1..17: note = Oligonucleotide
  source 1..17: mol_type = other DNA
ctgattctacctctgca

SEQ ID NO: 6836 - DNA, 17 bp, synthetic construct
  misc_feature 1..17: note = Oligonucleotide
  source 1..17: mol_type = other DNA
ctgctgattctacctct

SEQ ID NO: 6837 - DNA, 17 bp, synthetic construct
  misc_feature 1..17: note = Oligonucleotide
  source 1..17: mol_type = other DNA
cacctgctgattctacc

SEQ ID NO: 6838 - DNA, 17 bp, synthetic construct
  misc_feature 1..17: note = Oligonucleotide
  source 1..17: mol_type = other DNA
cagcacctgctgattct

SEQ ID NO: 6839 - DNA, 17 bp, synthetic construct
  misc_feature 1..17: note = Oligonucleotide
  source 1..17: mol_type = other DNA
tcacagcacctgctgat

SEQ ID NO: 6840 - DNA, 17 bp, synthetic construct
  misc_feature 1..17: note = Oligonucleotide
  source 1..17: mol_type = other DNA
tgttcacagcacctgct

SEQ ID NO: 6841 - DNA, 17 bp, synthetic construct
  misc_feature 1..17: note = Oligonucleotide
  source 1..17: mol_type = other DNA
agctgttcacagcacct

SEQ ID NO: 6842 - DNA, 17 bp, synthetic construct
  misc_feature 1..17: note = Oligonucleotide
  source 1..17: mol_type = other DNA
tgcagctgttcacagca

SEQ ID NO: 6843 - DNA, 17 bp, synthetic construct
  misc_feature 1..17: note = Oligonucleotide
  source 1..17: mol_type = other DNA
atctgcagctgttcaca

SEQ ID NO: 6844 - DNA, 17 bp, synthetic construct
  misc_feature 1..17: note = Oligonucleotide
  source 1..17: mol_type = other DNA
ccaatctgcagctgttc

SEQ ID NO: 6845 - DNA, 17 bp, synthetic construct
  misc_feature 1..17: note = Oligonucleotide
  source 1..17: mol_type = other DNA
actccaatctgcagctg

SEQ ID NO: 6846 - DNA, 17 bp, synthetic construct
  misc_feature 1..17: note = Oligonucleotide
  source 1..17: mol_type = other DNA
ccaactccaatctgcag

SEQ ID NO: 6847 - DNA, 17 bp, synthetic construct
  misc_feature 1..17: note = Oligonucleotide
  source 1..17: mol_type = other DNA
cttccaactccaatctg

SEQ ID NO: 6848 - DNA, 17 bp, synthetic construct
  misc_feature 1..17: note = Oligonucleotide
  source 1..17: mol_type = other DNA
ctccttccaactccaat

SEQ ID NO: 6849 - DNA, 17 bp, synthetic construct
  misc_feature 1..17: note = Oligonucleotide
  source 1..17: mol_type = other DNA
ctactccttccaactcc

SEQ ID NO: 6850 - DNA, 17 bp, synthetic construct
  misc_feature 1..17: note = Oligonucleotide
  source 1..17: mol_type = other DNA
ctcctactccttccaac

SEQ ID NO: 6851 - DNA, 17 bp, synthetic construct
  misc_feature 1..17: note = Oligonucleotide
  source 1..17: mol_type = other DNA
cacctcctactccttcc

SEQ ID NO: 6852 - DNA, 17 bp, synthetic construct
  misc_feature 1..17: note = Oligonucleotide
  source 1..17: mol_type = other DNA
ggacacctcctactcct

SEQ ID NO: 6853 - DNA, 17 bp, synthetic construct
  misc_feature 1..17: note = Oligonucleotide
  source 1..17: mol_type = other DNA
actggacacctcctact

SEQ ID NO: 6854 - DNA, 17 bp, synthetic construct
  misc_feature 1..17: note = Oligonucleotide
  source 1..17: mol_type = other DNA
cagactggacacctcct

SEQ ID NO: 6855 - DNA, 17 bp, synthetic construct
  misc_feature 1..17: note = Oligonucleotide
  source 1..17: mol_type = other DNA
ggtcagactggacacct

SEQ ID NO: 6856 - DNA, 17 bp, synthetic construct
  misc_feature 1..17: note = Oligonucleotide
  source 1..17: mol_type = other DNA
aacggtcagactggaca

SEQ ID NO: 6857 - DNA, 17 bp, synthetic construct
  misc_feature 1..17: note = Oligonucleotide
  source 1..17: mol_type = other DNA
ttcaacggtcagactgg

SEQ ID NO: 6858 - DNA, 17 bp, synthetic construct
  misc_feature 1..17: note = Oligonucleotide
  source 1..17: mol_type = other DNA
aatttcaacggtcagac

SEQ ID NO: 6859 - DNA, 17 bp, synthetic construct
  misc_feature 1..17: note = Oligonucleotide
  source 1..17: mol_type = other DNA
gagaatttcaacggtca

SEQ ID NO: 6860 - DNA, 17 bp, synthetic construct
  misc_feature 1..17: note = Oligonucleotide
  source 1..17: mol_type = other DNA
ttggagaatttcaacgg

SEQ ID NO: 6861 - DNA, 17 bp, synthetic construct
  misc_feature 1..17: note = Oligonucleotide
  source 1..17: mol_type = other DNA
ttgttggagaatttcaa

SEQ ID NO: 6862 - DNA, 17 bp, synthetic construct
  misc_feature 1..17: note = Oligonucleotide
  source 1..17: mol_type = other DNA
cccttgttggagaattt

SEQ ID NO: 6863 - DNA, 17 bp, synthetic construct
  misc_feature 1..17: note = Oligonucleotide
  source 1..17: mol_type = other DNA
ggccccttgttggagaa

SEQ ID NO: 6864 - DNA, 17 bp, synthetic construct
  misc_feature 1..17: note = Oligonucleotide
  source 1..17: mol_type = other DNA
cttggccccttgttgga

SEQ ID NO: 6865 - DNA, 17 bp, synthetic construct
  misc_feature 1..17: note = Oligonucleotide
  source 1..17: mol_type = other DNA
tgtcttggccccttgtt

SEQ ID NO: 6866 - DNA, 17 bp, synthetic construct
  misc_feature 1..17: note = Oligonucleotide
  source 1..17: mol_type = other DNA
tcttgtcttggcccctt

SEQ ID NO: 6867 - DNA, 17 bp, synthetic construct
  misc_feature 1..17: note = Oligonucleotide
  source 1..17: mol_type = other DNA
cactcttgtcttggccc

SEQ ID NO: 6868 - DNA, 17 bp, synthetic construct
  misc_feature 1..17: note = Oligonucleotide
  source 1..17: mol_type = other DNA
tttcactcttgtcttgg

SEQ ID NO: 6869 - DNA, 17 bp, synthetic construct
  misc_feature 1..17: note = Oligonucleotide
  source 1..17: mol_type = other DNA
acctttcactcttgtct

SEQ ID NO: 6870 - DNA, 17 bp, synthetic construct
  misc_feature 1..17: note = Oligonucleotide
  source 1..17: mol_type = other DNA
ggcacctttcactcttg

SEQ ID NO: 6871 - DNA, 17 bp, synthetic construct
  misc_feature 1..17: note = Oligonucleotide
  source 1..17: mol_type = other DNA
cttggcacctttcactc

SEQ ID NO: 6872 - DNA, 17 bp, synthetic construct
  misc_feature 1..17: note = Oligonucleotide
  source 1..17: mol_type = other DNA
tgtcttggcacctttca

SEQ ID NO: 6873 - DNA, 17 bp, synthetic construct
  misc_feature 1..17: note = Oligonucleotide
  source 1..17: mol_type = other DNA
acttgtcttggcacctt

SEQ ID NO: 6874 - DNA, 17 bp, synthetic construct
  misc_feature 1..17: note = Oligonucleotide
  source 1..17: mol_type = other DNA
cacacttgtcttggcac

SEQ ID NO: 6875 - DNA, 17 bp, synthetic construct
  misc_feature 1..17: note = Oligonucleotide
  source 1..17: mol_type = other DNA
ggccacacttgtcttgg

SEQ ID NO: 6876 - DNA, 17 bp, synthetic construct
  misc_feature 1..17: note = Oligonucleotide
  source 1..17: mol_type = other DNA
tctggccacacttgtct

SEQ ID NO: 6877 - DNA, 17 bp, synthetic construct
  misc_feature 1..17: note = Oligonucleotide
  source 1..17: mol_type = other DNA
ctgtctggccacacttg

SEQ ID NO: 6878 - DNA, 17 bp, synthetic construct
  misc_feature 1..17: note = Oligonucleotide
  source 1..17: mol_type = other DNA
ccactgtctggccacac

SEQ ID NO: 6879 - DNA, 17 bp, synthetic construct
  misc_feature 1..17: note = Oligonucleotide
  source 1..17: mol_type = other DNA
ggaccactgtctggcca

SEQ ID NO: 6880 - DNA, 17 bp, synthetic construct
  misc_feature 1..17: note = Oligonucleotide
  source 1..17: mol_type = other DNA
gagggaccactgtctgg

SEQ ID NO: 6881 - DNA, 17 bp, synthetic construct
  misc_feature 1..17: note = Oligonucleotide
  source 1..17: mol_type = other DNA
ctagagggaccactgtc

SEQ ID NO: 6882 - DNA, 17 bp, synthetic construct
  misc_feature 1..17: note = Oligonucleotide
  source 1..17: mol_type = other DNA
accctagagggaccact

SEQ ID NO: 6883 - DNA, 17 bp, synthetic construct
  misc_feature 1..17: note = Oligonucleotide
  source 1..17: mol_type = other DNA
ccaaccctagagggacc

SEQ ID NO: 6884 - DNA, 17 bp, synthetic construct
  misc_feature 1..17: note = Oligonucleotide
  source 1..17: mol_type = other DNA
atgccaaccctagaggg

SEQ ID NO: 6885 - DNA, 17 bp, synthetic construct
  misc_feature 1..17: note = Oligonucleotide
  source 1..17: mol_type = other DNA
gctatgccaaccctaga

SEQ ID NO: 6886 - DNA, 17 bp, synthetic construct
  misc_feature 1..17: note = Oligonucleotide
  source 1..17: mol_type = other DNA
ggggctatgccaaccct

SEQ ID NO: 6887 - DNA, 17 bp, synthetic construct
  misc_feature 1..17: note = Oligonucleotide
  source 1..17: mol_type = other DNA
tttggggctatgccaac

SEQ ID NO: 6888 - DNA, 17 bp, synthetic construct
  misc_feature 1..17: note = Oligonucleotide
  source 1..17: mol_type = other DNA
ctctttggggctatgcc

SEQ ID NO: 6889 - DNA, 17 bp, synthetic construct
  misc_feature 1..17: note = Oligonucleotide
  source 1..17: mol_type = other DNA
ccactctttggggctat

SEQ ID NO: 6890 - DNA, 17 bp, synthetic construct
  misc_feature 1..17: note = Oligonucleotide
  source 1..17: mol_type = other DNA
tctccactctttggggc

SEQ ID NO: 6891 - DNA, 17 bp, synthetic construct
  misc_feature 1..17: note = Oligonucleotide
  source 1..17: mol_type = other DNA
ccttctccactctttgg

SEQ ID NO: 6892 - DNA, 17 bp, synthetic construct
  misc_feature 1..17: note = Oligonucleotide
  source 1..17: mol_type = other DNA
agcccttctccactctt

SEQ ID NO: 6893 - DNA, 17 bp, synthetic construct
  misc_feature 1..17: note = Oligonucleotide
  source 1..17: mol_type = other DNA
ccaagcccttctccact

SEQ ID NO: 6894 - DNA, 17 bp, synthetic construct
  misc_feature 1..17: note = Oligonucleotide
  source 1..17: mol_type = other DNA
accccaagcccttctcc

SEQ ID NO: 6895 - DNA, 17 bp, synthetic construct
  misc_feature 1..17: note = Oligonucleotide
  source 1..17: mol_type = other DNA
ccaaccccaagcccttc

SEQ ID NO: 6896 - DNA, 17 bp, synthetic construct
  misc_feature 1..17: note = Oligonucleotide
  source 1..17: mol_type = other DNA
cacccaaccccaagccc

SEQ ID NO: 6897 - DNA, 17 bp, synthetic construct
  misc_feature 1..17: note = Oligonucleotide
  source 1..17: mol_type = other DNA
ctgcacccaaccccaag

SEQ ID NO: 6898 - DNA, 17 bp, synthetic construct
  misc_feature 1..17: note = Oligonucleotide
  source 1..17: mol_type = other DNA
aggctgcacccaacccc

SEQ ID NO: 6899 - DNA, 17 bp, synthetic construct
  misc_feature 1..17: note = Oligonucleotide
  source 1..17: mol_type = other DNA
ctcaggctgcacccaac

SEQ ID NO: 6900 - DNA, 17 bp, synthetic construct
  misc_feature 1..17: note = Oligonucleotide
  source 1..17: mol_type = other DNA
tcactcaggctgcaccc

SEQ ID NO: 6901 - DNA, 17 bp, synthetic construct
  misc_feature 1..17: note = Oligonucleotide
  source 1..17: mol_type = other DNA
ccatcactcaggctgca

SEQ ID NO: 6902 - DNA, 17 bp, synthetic construct
  misc_feature 1..17: note = Oligonucleotide
  source 1..17: mol_type = other DNA
cacccatcactcaggct

SEQ ID NO: 6903 - DNA, 17 bp, synthetic construct
  misc_feature 1..17: note = Oligonucleotide
  source 1..17: mol_type = other DNA
ccccacccatcactcag

SEQ ID NO: 6904 - DNA, 17 bp, synthetic construct
  misc_feature 1..17: note = Oligonucleotide
  source 1..17: mol_type = other DNA
gcaccccacccatcact

SEQ ID NO: 6905 - DNA, 17 bp, synthetic construct
  misc_feature 1..17: note = Oligonucleotide
  source 1..17: mol_type = other DNA
actgcaccccacccatc

SEQ ID NO: 6906 - DNA, 17 bp, synthetic construct
  misc_feature 1..17: note = Oligonucleotide
  source 1..17: mol_type = other DNA
cccactgcaccccaccc

SEQ ID NO: 6907 - DNA, 17 bp, synthetic construct
  misc_feature 1..17: note = Oligonucleotide
  source 1..17: mol_type = other DNA
agccccactgcacccca

SEQ ID NO: 6908 - DNA, 17 bp, synthetic construct
  misc_feature 1..17: note = Oligonucleotide
  source 1..17: mol_type = other DNA
agcagccccactgcacc

SEQ ID NO: 6909 - DNA, 17 bp, synthetic construct
  misc_feature 1..17: note = Oligonucleotide
  source 1..17: mol_type = other DNA
ttcagcagccccactgc

SEQ ID NO: 6910 - DNA, 17 bp, synthetic construct
  misc_feature 1..17: note = Oligonucleotide
  source 1..17: mol_type = other DNA
tcattcagcagccccac

SEQ ID NO: 6911 - DNA, 17 bp, synthetic construct
  misc_feature 1..17: note = Oligonucleotide
  source 1..17: mol_type = other DNA
ctctcattcagcagccc

SEQ ID NO: 6912 - DNA, 17 bp, synthetic construct
  misc_feature 1..17: note = Oligonucleotide
  source 1..17: mol_type = other DNA
gccctctcattcagcag

SEQ ID NO: 6913 - DNA, 17 bp, synthetic construct
  misc_feature 1..17: note = Oligonucleotide
  source 1..17: mol_type = other DNA
ccggccctctcattcag

SEQ ID NO: 6914 - DNA, 17 bp, synthetic construct
  misc_feature 1..17: note = Oligonucleotide
  source 1..17: mol_type = other DNA
gcaccggccctctcatt

SEQ ID NO: 6915 - DNA, 17 bp, synthetic construct
  misc_feature 1..17: note = Oligonucleotide
  source 1..17: mol_type = other DNA
gctgcaccggccctctc

SEQ ID NO: 6916 - DNA, 17 bp, synthetic construct
  misc_feature 1..17: note = Oligonucleotide
  source 1..17: mol_type = other DNA
gctgctgcaccggccct

SEQ ID NO: 6917 - DNA, 17 bp, synthetic construct
  misc_feature 1..17: note = Oligonucleotide
  source 1..17: mol_type = other DNA
ctggctgctgcaccggc

SEQ ID NO: 6918 - DNA, 17 bp, synthetic construct
  misc_feature 1..17: note = Oligonucleotide
  source 1..17: mol_type = other DNA
cacctggctgctgcacc

SEQ ID NO: 6919 - DNA, 17 bp, synthetic construct
  misc_feature 1..17: note = Oligonucleotide
  source 1..17: mol_type = other DNA
gtccacctggctgctgc

SEQ ID NO: 6920 - DNA, 17 bp, synthetic construct
  misc_feature 1..17: note = Oligonucleotide
  source 1..17: mol_type = other DNA
catgtccacctggctgc

SEQ ID NO: 6921 - DNA, 17 bp, synthetic construct
  misc_feature 1..17: note = Oligonucleotide
  source 1..17: mol_type = other DNA
actcatgtccacctggc

SEQ ID NO: 6922 - DNA, 17 bp, synthetic construct
  misc_feature 1..17: note = Oligonucleotide
  source 1..17: mol_type = other DNA
agcactcatgtccacct

SEQ ID NO: 6923 - DNA, 17 bp, synthetic construct
  misc_feature 1..17: note = Oligonucleotide
  source 1..17: mol_type = other DNA
ggcagcactcatgtcca

SEQ ID NO: 6924 - DNA, 17 bp, synthetic construct
  misc_feature 1..17: note = Oligonucleotide
  source 1..17: mol_type = other DNA
tggggcagcactcatgt

SEQ ID NO: 6925 - DNA, 17 bp, synthetic construct
  misc_feature 1..17: note = Oligonucleotide
  source 1..17: mol_type = other DNA
ggctggggcagcactca

SEQ ID NO: 6926 - DNA, 17 bp, synthetic construct
  misc_feature 1..17: note = Oligonucleotide
  source 1..17: mol_type = other DNA
aagggctggggcagcac

SEQ ID NO: 6927 - DNA, 17 bp, synthetic construct
  misc_feature 1..17: note = Oligonucleotide
  source 1..17: mol_type = other DNA
agcaagggctggggcag

SEQ ID NO: 6928 - DNA, 17 bp, synthetic construct
  misc_feature 1..17: note = Oligonucleotide
  source 1..17: mol_type = other DNA
tgcagcaagggctgggg

SEQ ID NO: 6929 - DNA, 17 bp, synthetic construct
  misc_feature 1..17: note = Oligonucleotide
  source 1..17: mol_type = other DNA
gcatgcagcaagggctg

SEQ ID NO: 6930 - DNA, 17 bp, synthetic construct
  misc_feature 1..17: note = Oligonucleotide
  source 1..17: mol_type = other DNA
gcagcatgcagcaaggg

SEQ ID NO: 6931 - DNA, 17 bp, synthetic construct
  misc_feature 1..17: note = Oligonucleotide
  source 1..17: mol_type = other DNA
cgtgcagcatgcagcaa

SEQ ID NO: 6932 - DNA, 17 bp, synthetic construct
  misc_feature 1..17: note = Oligonucleotide
  source 1..17: mol_type = other DNA
gtgcgtgcagcatgcag

SEQ ID NO: 6933 - DNA, 17 bp, synthetic construct
  misc_feature 1..17: note = Oligonucleotide
  source 1..17: mol_type = other DNA
ccagtgcgtgcagcatg

SEQ ID NO: 6934 - DNA, 17 bp, synthetic construct
  misc_feature 1..17: note = Oligonucleotide
  source 1..17: mol_type = other DNA
ggaccagtgcgtgcagc

SEQ ID NO: 6935 - DNA, 17 bp, synthetic construct
  misc_feature 1..17: note = Oligonucleotide
  source 1..17: mol_type = other DNA
tgaggaccagtgcgtgc

SEQ ID NO: 6936 - DNA, 17 bp, synthetic construct
  misc_feature 1..17: note = Oligonucleotide
  source 1..17: mol_type = other DNA
cactgaggaccagtgcg

SEQ ID NO: 6937 - DNA, 17 bp, synthetic construct
  misc_feature 1..17: note = Oligonucleotide
  source 1..17: mol_type = other DNA
gtccactgaggaccagt

SEQ ID NO: 6938 - DNA, 17 bp, synthetic construct
  misc_feature 1..17: note = Oligonucleotide
  source 1..17: mol_type = other DNA
tgggtccactgaggacc

SEQ ID NO: 6939 - DNA, 17 bp, synthetic construct
  misc_feature 1..17: note = Oligonucleotide
  source 1..17: mol_type = other DNA
ctgtgggtccactgagg

SEQ ID NO: 6940 - DNA, 17 bp, synthetic construct
  misc_feature 1..17: note = Oligonucleotide
  source 1..17: mol_type = other DNA
cccctgtgggtccactg

SEQ ID NO: 6941 - DNA, 17 bp, synthetic construct
  misc_feature 1..17: note = Oligonucleotide
  source 1..17: mol_type = other DNA
cgccccctgtgggtcca

SEQ ID NO: 6942 - DNA, 17 bp, synthetic construct
  misc_feature 1..17: note = Oligonucleotide
  source 1..17: mol_type = other DNA
tctcgccccctgtgggt

SEQ ID NO: 6943 - DNA, 17 bp, synthetic construct
  misc_feature 1..17: note = Oligonucleotide
  source 1..17: mol_type = other DNA
agctctcgccccctgtg

SEQ ID NO: 6944 - DNA, 17 bp, synthetic construct
  misc_feature 1..17: note = Oligonucleotide
  source 1..17: mol_type = other DNA
agcagctctcgccccct

SEQ ID NO: 6945 - DNA, 17 bp, synthetic construct
  misc_feature 1..17: note = Oligonucleotide
  source 1..17: mol_type = other DNA
ataagcagctctcgccc

SEQ ID NO: 6946 - DNA, 17 bp, synthetic construct
  misc_feature 1..17: note = Oligonucleotide
  source 1..17: mol_type = other DNA
gacataagcagctctcg

SEQ ID NO: 6947 - DNA, 17 bp, synthetic construct
  misc_feature 1..17: note = Oligonucleotide
  source 1..17: mol_type = other DNA
caggacataagcagctc

SEQ ID NO: 6948 - DNA, 17 bp, synthetic construct
  misc_feature 1..17: note = Oligonucleotide
  source 1..17: mol_type = other DNA
ccccaggacataagcag

SEQ ID NO: 6949 - DNA, 17 bp, synthetic construct
  misc_feature 1..17: note = Oligonucleotide
  source 1..17: mol_type = other DNA
ctcccccaggacataag

SEQ ID NO: 6950 - DNA, 17 bp, synthetic construct
  misc_feature 1..17: note = Oligonucleotide
  source 1..17: mol_type = other DNA
tggctcccccaggacat

SEQ ID NO: 6951 - DNA, 17 bp, synthetic construct
  misc_feature 1..17: note = Oligonucleotide
  source 1..17: mol_type = other DNA
ggatggctcccccagga

SEQ ID NO: 6952 - DNA, 17 bp, synthetic construct
  misc_feature 1..17: note = Oligonucleotide
  source 1..17: mol_type = other DNA
gttggatggctccccca

SEQ ID NO: 6953 - DNA, 17 bp, synthetic construct
  misc_feature 1..17: note = Oligonucleotide
  source 1..17: mol_type = other DNA
ctggttggatggctccc

SEQ ID NO: 6954 - DNA, 17 bp, synthetic construct
  misc_feature 1..17: note = Oligonucleotide
  source 1..17: mol_type = other DNA
gccctggttggatggct

SEQ ID NO: 6955 - DNA, 17 bp, synthetic construct
  misc_feature 1..17: note = Oligonucleotide
  source 1..17: mol_type = other DNA
agagccctggttggatg

SEQ ID NO: 6956 - DNA, 17 bp, synthetic construct
  misc_feature 1..17: note = Oligonucleotide
  source 1..17: mol_type = other DNA
atcagagccctggttgg

SEQ ID NO: 6957 - DNA, 17 bp, synthetic construct
  misc_feature 1..17: note = Oligonucleotide
  source 1..17: mol_type = other DNA
accatcagagccctggt

SEQ ID NO: 6958 - DNA, 17 bp, synthetic construct
  misc_feature 1..17: note = Oligonucleotide
  source 1..17: mol_type = other DNA
aggaccatcagagccct

SEQ ID NO: 6959 - DNA, 17 bp, synthetic construct
  misc_feature 1..17: note = Oligonucleotide
  source 1..17: mol_type = other DNA
ctcaggaccatcagagc

SEQ ID NO: 6960 - DNA, 17 bp, synthetic construct
  misc_feature 1..17: note = Oligonucleotide
  source 1..17: mol_type = other DNA
tatctcaggaccatcag

SEQ ID NO: 6961 - DNA, 17 bp, synthetic construct
  misc_feature 1..17: note = Oligonucleotide
  source 1..17: mol_type = other DNA
gtgtatctcaggaccat

SEQ ID NO: 6962 - DNA, 17 bp, synthetic construct
  misc_feature 1..17: note = Oligonucleotide
  source 1..17: mol_type = other DNA
tacgtgtatctcaggac

SEQ ID NO: 6963 - DNA, 17 bp, synthetic construct
  misc_feature 1..17: note = Oligonucleotide
  source 1..17: mol_type = other DNA
taatacgtgtatctcag

SEQ ID NO: 6964 - DNA, 17 bp, synthetic construct
  misc_feature 1..17: note = Oligonucleotide
  source 1..17: mol_type = other DNA
aactaatacgtgtatct

SEQ ID NO: 6965 - DNA, 17 bp, synthetic construct
  misc_feature 1..17: note = Oligonucleotide
  source 1..17: mol_type = other DNA
ttaaactaatacgtgta

SEQ ID NO: 6966 - DNA, 17 bp, synthetic construct
  misc_feature 1..17: note = Oligonucleotide
  source 1..17: mol_type = other DNA
ctgttaaactaatacgt

SEQ ID NO: 6967 - DNA, 17 bp, synthetic construct
  misc_feature 1..17: note = Oligonucleotide
  source 1..17: mol_type = other DNA
aaactgttaaactaata

SEQ ID NO: 6968 - DNA, 17 bp, synthetic construct
  misc_feature 1..17: note = Oligonucleotide
  source 1..17: mol_type = other DNA
tggaaactgttaaacta

SEQ ID NO: 6969 - DNA, 17 bp, synthetic construct
  misc_feature 1..17: note = Oligonucleotide
  source 1..17: mol_type = other DNA
acttggaaactgttaaa

SEQ ID NO: 6970 - DNA, 17 bp, synthetic construct
  misc_feature 1..17: note = Oligonucleotide
  source 1..17: mol_type = other DNA
gtgacttggaaactgtt

SEQ ID NO: 6971 - DNA, 17 bp, synthetic construct
  misc_feature 1..17: note = Oligonucleotide
  source 1..17: mol_type = other DNA
aaagtgacttggaaact

SEQ ID NO: 6972 - DNA, 17 bp, synthetic construct
  misc_feature 1..17: note = Oligonucleotide
  source 1..17: mol_type = other DNA
atcaaagtgacttggaa

SEQ ID NO: 6973 - DNA, 17 bp, synthetic construct
  misc_feature 1..17: note = Oligonucleotide
  source 1..17: mol_type = other DNA
aagatcaaagtgacttg

SEQ ID NO: 6974 - DNA, 17 bp, synthetic construct
  misc_feature 1..17: note = Oligonucleotide
  source 1..17: mol_type = other DNA
cagaagatcaaagtgac

SEQ ID NO: 6975 - DNA, 17 bp, synthetic construct
  misc_feature 1..17: note = Oligonucleotide
  source 1..17: mol_type = other DNA
ccacagaagatcaaagt

SEQ ID NO: 6976 - DNA, 17 bp, synthetic construct
  misc_feature 1..17: note = Oligonucleotide
  source 1..17: mol_type = other DNA
tttccacagaagatcaa

SEQ ID NO: 6977 - DNA, 17 bp, synthetic construct
  misc_feature 1..17: note = Oligonucleotide
  source 1..17: mol_type = other DNA
aggtttccacagaagat

SEQ ID NO: 6978 - DNA, 17 bp, synthetic construct
  misc_feature 1..17: note = Oligonucleotide
  source 1..17: mol_type = other DNA
agcaggtttccacagaa

SEQ ID NO: 6979 - DNA, 17 bp, synthetic construct
  misc_feature 1..17: note = Oligonucleotide
  source 1..17: mol_type = other DNA
acaagcaggtttccaca

SEQ ID NO: 6980 - DNA, 17 bp, synthetic construct
  misc_feature 1..17: note = Oligonucleotide
  source 1..17: mol_type = other DNA
tgtacaagcaggtttcc

SEQ ID NO: 6981 - DNA, 17 bp, synthetic construct
  misc_feature 1..17: note = Oligonucleotide
  source 1..17: mol_type = other DNA
tgatgtacaagcaggtt

SEQ ID NO: 6982 - DNA, 17 bp, synthetic construct
  misc_feature 1..17: note = Oligonucleotide
  source 1..17: mol_type = other DNA
ccctgatgtacaagcag

SEQ ID NO: 6983 - DNA, 17 bp, synthetic construct
  misc_feature 1..17: note = Oligonucleotide
  source 1..17: mol_type = other DNA
agaccctgatgtacaag

SEQ ID NO: 6984 - DNA, 17 bp, synthetic construct
  misc_feature 1..17: note = Oligonucleotide
  source 1..17: mol_type = other DNA
gacagaccctgatgtac

SEQ ID NO: 6985 - DNA, 17 bp, synthetic construct
  misc_feature 1..17: note = Oligonucleotide
  source 1..17: mol_type = other DNA
gaggacagaccctgatg

SEQ ID NO: 6986 - DNA, 17 bp, synthetic construct
  misc_feature 1..17: note = Oligonucleotide
  source 1..17: mol_type = other DNA
cccgaggacagaccctg

SEQ ID NO: 6987 - DNA, 17 bp, synthetic construct
  misc_feature 1..17: note = Oligonucleotide
  source 1..17: mol_type = other DNA
cagcccgaggacagacc

SEQ ID NO: 6988 - DNA, 17 bp, synthetic construct
  misc_feature 1..17: note = Oligonucleotide
  source 1..17: mol_type = other DNA
tcacagcccgaggacag

SEQ ID NO: 6989 - DNA, 17 bp, synthetic construct
  misc_feature 1..17: note = Oligonucleotide
  source 1..17: mol_type = other DNA
gggtcacagcccgagga

SEQ ID NO: 6990 - DNA, 17 bp, synthetic construct
  misc_feature 1..17: note = Oligonucleotide
  source 1..17: mol_type = other DNA
agcgggtcacagcccga

SEQ ID NO: 6991 - DNA, 17 bp, synthetic construct
  misc_feature 1..17: note = Oligonucleotide
  source 1..17: mol_type = other DNA
cacagcgggtcacagcc

SEQ ID NO: 6992 - DNA, 17 bp, synthetic construct
  misc_feature 1..17: note = Oligonucleotide
  source 1..17: mol_type = other DNA
gttcacagcgggtcaca

SEQ ID NO: 6993 - DNA, 17 bp, synthetic construct
  misc_feature 1..17: note = Oligonucleotide
  source 1..17: mol_type = other DNA
gctgttcacagcgggtc

SEQ ID NO: 6994 - DNA, 17 bp, synthetic construct
  misc_feature 1..17: note = Oligonucleotide
  source 1..17: mol_type = other DNA
gaagctgttcacagcgg

SEQ ID NO: 6995 - DNA, 17 bp, synthetic construct
  misc_feature 1..17: note = Oligonucleotide
  source 1..17: mol_type = other DNA
agggaagctgttcacag

SEQ ID NO: 6996 - DNA, 17 bp, synthetic construct
  misc_feature 1..17: note = Oligonucleotide
  source 1..17: mol_type = other DNA
ggaagggaagctgttca

SEQ ID NO: 6997 - DNA, 17 bp, synthetic construct
  misc_feature 1..17: note = Oligonucleotide
  source 1..17: mol_type = other DNA
actggaagggaagctgt

SEQ ID NO: 6998 - DNA, 17 bp, synthetic construct
  misc_feature 1..17: note = Oligonucleotide
  source 1..17: mol_type = other DNA
cgcactggaagggaagc

SEQ ID NO: 6999 - DNA, 17 bp, synthetic construct
  misc_feature 1..17: note = Oligonucleotide
  source 1..17: mol_type = other DNA
taccgcactggaaggga

SEQ ID NO: 7000 - DNA, 17 bp, synthetic construct
  misc_feature 1..17: note = Oligonucleotide
  source 1..17: mol_type = other DNA
ctgtaccgcactggaag

SEQ ID NO: 7001 - DNA, 17 bp, synthetic construct
  misc_feature 1..17: note = Oligonucleotide
  source 1..17: mol_type = other DNA
tatctgtaccgcactgg

SEQ ID NO: 7002 - DNA, 17 bp, synthetic construct
  misc_feature 1..17: note = Oligonucleotide
  source 1..17: mol_type = other DNA
ggctatctgtaccgcac

SEQ ID NO: 7003 - DNA, 17 bp, synthetic construct
  misc_feature 1..17: note = Oligonucleotide
  source 1..17: mol_type = other DNA
cttggctatctgtaccg

SEQ ID NO: 7004 - DNA, 17 bp, synthetic construct
  misc_feature 1..17: note = Oligonucleotide
  source 1..17: mol_type = other DNA
actcttggctatctgta

SEQ ID NO: 7005 - DNA, 17 bp, synthetic construct
  misc_feature 1..17: note = Oligonucleotide
  source 1..17: mol_type = other DNA
gccactcttggctatct

SEQ ID NO: 7006 - DNA, 17 bp, synthetic construct
  misc_feature 1..17: note = Oligonucleotide
  source 1..17: mol_type = other DNA
caggccactcttggcta

SEQ ID NO: 7007 - DNA, 17 bp, synthetic construct
  misc_feature 1..17: note = Oligonucleotide
  source 1..17: mol_type = other DNA
atacaggccactcttgg

SEQ ID NO: 7008 - DNA, 17 bp, synthetic construct
  misc_feature 1..17: note = Oligonucleotide
  source 1..17: mol_type = other DNA
cacatacaggccactct

SEQ ID NO: 7009 - DNA, 17 bp, synthetic construct
  misc_feature 1..17: note = Oligonucleotide
  source 1..17: mol_type = other DNA
cagcacatacaggccac

SEQ ID NO: 7010 - DNA, 17 bp, synthetic construct
  misc_feature 1..17: note = Oligonucleotide
  source 1..17: mol_type = other DNA
tctcagcacatacaggc

SEQ ID NO: 7011 - DNA, 17 bp, synthetic construct
  misc_feature 1..17: note = Oligonucleotide
  source 1..17: mol_type = other DNA
tgttctcagcacataca

SEQ ID NO: 7012 - DNA, 17 bp, synthetic construct
  misc_feature 1..17: note = Oligonucleotide
  source 1..17: mol_type = other DNA
cactgttctcagcacat

SEQ ID NO: 7013 - DNA, 17 bp, synthetic construct
  misc_feature 1..17: note = Oligonucleotide
  source 1..17: mol_type = other DNA
tgtcactgttctcagca

SEQ ID NO: 7014 - DNA, 17 bp, synthetic construct
  misc_feature 1..17: note = Oligonucleotide
  source 1..17: mol_type = other DNA
tcctgtcactgttctca

SEQ ID NO: 7015 - DNA, 17 bp, synthetic construct
  misc_feature 1..17: note = Oligonucleotide
  source 1..17: mol_type = other DNA
tcgtcctgtcactgttc

SEQ ID NO: 7016 - DNA, 17 bp, synthetic construct
  misc_feature 1..17: note = Oligonucleotide
  source 1..17: mol_type = other DNA
ccttcgtcctgtcactg

SEQ ID NO: 7017 - DNA, 17 bp, synthetic construct
  misc_feature 1..17: note = Oligonucleotide
  source 1..17: mol_type = other DNA
ttcccttcgtcctgtca

SEQ ID NO: 7018 - DNA, 17 bp, synthetic construct
  misc_feature 1..17: note = Oligonucleotide
  source 1..17: mol_type = other DNA
catttcccttcgtcctg

SEQ ID NO: 7019 - DNA, 17 bp, synthetic construct
  misc_feature 1..17: note = Oligonucleotide
  source 1..17: mol_type = other DNA
ctccatttcccttcgtc

SEQ ID NO: 7020 - DNA, 17 bp, synthetic construct
  misc_feature 1..17: note = Oligonucleotide
  source 1..17: mol_type = other DNA
tccctccatttcccttc

SEQ ID NO: 7021 - DNA, 17 bp, synthetic construct
  misc_feature 1..17: note = Oligonucleotide
  source 1..17: mol_type = other DNA
atttccctccatttccc

SEQ ID NO: 7022 - DNA, 17 bp, synthetic construct
  misc_feature 1..17: note = Oligonucleotide
  source 1..17: mol_type = other DNA
tggatttccctccattt

SEQ ID NO: 7023 - DNA, 17 bp, synthetic construct
  misc_feature 1..17: note = Oligonucleotide
  source 1..17: mol_type = other DNA
ccctggatttccctcca

SEQ ID NO: 7024 - DNA, 17 bp, synthetic construct
  misc_feature 1..17: note = Oligonucleotide
  source 1..17: mol_type = other DNA
tctccctggatttccct

SEQ ID NO: 7025 - DNA, 17 bp, synthetic construct
  misc_feature 1..17: note = Oligonucleotide
  source 1..17: mol_type = other DNA
cagtctccctggatttc

SEQ ID NO: 7026 - DNA, 17 bp, synthetic construct
  misc_feature 1..17: note = Oligonucleotide
  source 1..17: mol_type = other DNA
ccacagtctccctggat

SEQ ID NO: 7027 - DNA, 17 bp, synthetic construct
  misc_feature 1..17: note = Oligonucleotide
  source 1..17: mol_type = other DNA
agaccacagtctccctg

SEQ ID NO: 7028 - DNA, 17 bp, synthetic construct
  misc_feature 1..17: note = Oligonucleotide
  source 1..17: mol_type = other DNA
cagagaccacagtctcc

SEQ ID NO: 7029 - DNA, 17 bp, synthetic construct
  misc_feature 1..17: note = Oligonucleotide
  source 1..17: mol_type = other DNA
attcagagaccacagtc

SEQ ID NO: 7030 - DNA, 17 bp, synthetic construct
  misc_feature 1..17: note = Oligonucleotide
  source 1..17: mol_type = other DNA
acgattcagagaccaca

SEQ ID NO: 7031 - DNA, 17 bp, synthetic construct
  misc_feature 1..17: note = Oligonucleotide
  source 1..17: mol_type = other DNA
caaacgattcagagacc

SEQ ID NO: 7032 - DNA, 17 bp, synthetic construct
  misc_feature 1..17: note = Oligonucleotide
  source 1..17: mol_type = other DNA
agacaaacgattcagag

SEQ ID NO: 7033 - DNA, 17 bp, synthetic construct
  misc_feature 1..17: note = Oligonucleotide
  source 1..17: mol_type = other DNA
gacagacaaacgattca

SEQ ID NO: 7034 - DNA, 17 bp, synthetic construct
  misc_feature 1..17: note = Oligonucleotide
  source 1..17: mol_type = other DNA
caggacagacaaacgat

SEQ ID NO: 7035 - DNA, 17 bp, synthetic construct
  misc_feature 1..17: note = Oligonucleotide
  source 1..17: mol_type = other DNA
gcacaggacagacaaac

SEQ ID NO: 7036 - DNA, 17 bp, synthetic construct
  misc_feature 1..17: note = Oligonucleotide
  source 1..17: mol_type = other DNA
agggcacaggacagaca

SEQ ID NO: 7037 - DNA, 17 bp, synthetic construct
  misc_feature 1..17: note = Oligonucleotide
  source 1..17: mol_type = other DNA
accagggcacaggacag

SEQ ID NO: 7038 - DNA, 17 bp, synthetic construct
  misc_feature 1..17: note = Oligonucleotide
  source 1..17: mol_type = other DNA
aagaccagggcacagga

SEQ ID NO: 7039 - DNA, 17 bp, synthetic construct
  misc_feature 1..17: note = Oligonucleotide
  source 1..17: mol_type = other DNA
gagaagaccagggcaca

SEQ ID NO: 7040 - DNA, 17 bp, synthetic construct
  misc_feature 1..17: note = Oligonucleotide
  source 1..17: mol_type = other DNA
agggagaagaccagggc

SEQ ID NO: 7041 - DNA, 17 bp, synthetic construct
  misc_feature 1..17: note = Oligonucleotide
  source 1..17: mol_type = other DNA
atgagggagaagaccag

SEQ ID NO: 7042 - DNA, 17 bp, synthetic construct
  misc_feature 1..17: note = Oligonucleotide
  source 1..17: mol_type = other DNA
accatgagggagaagac

SEQ ID NO: 7043 - DNA, 17 bp, synthetic construct
  misc_feature 1..17: note = Oligonucleotide
  source 1..17: mol_type = other DNA
ctgaccatgagggagaa

SEQ ID NO: 7044 - DNA, 17 bp, synthetic construct
  misc_feature 1..17: note = Oligonucleotide
  source 1..17: mol_type = other DNA
actctgaccatgaggga

SEQ ID NO: 7045 - DNA, 17 bp, synthetic construct
  misc_feature 1..17: note = Oligonucleotide
  source 1..17: mol_type = other DNA
gccactctgaccatgag

SEQ ID NO: 7046 - DNA, 17 bp, synthetic construct
  misc_feature 1..17: note = Oligonucleotide
  source 1..17: mol_type = other DNA
aaggccactctgaccat

SEQ ID NO: 7047 - DNA, 17 bp, synthetic construct
  misc_feature 1..17: note = Oligonucleotide
  source 1..17: mol_type = other DNA
ggaaaggccactctgac

SEQ ID NO: 7048 - DNA, 17 bp, synthetic construct
  misc_feature 1..17: note = Oligonucleotide
  source 1..17: mol_type = other DNA
taaggaaaggccactct

SEQ ID NO: 7049 - DNA, 17 bp, synthetic construct
  misc_feature 1..17: note = Oligonucleotide
  source 1..17: mol_type = other DNA
acttaaggaaaggccac

SEQ ID NO: 7050 - DNA, 17 bp, synthetic construct
  misc_feature 1..17: note = Oligonucleotide
  source 1..17: mol_type = other DNA
ctcacttaaggaaaggc

SEQ ID NO: 7051 - DNA, 17 bp, synthetic construct
  misc_feature 1..17: note = Oligonucleotide
  source 1..17: mol_type = other DNA
gacctcacttaaggaaa

SEQ ID NO: 7052 - DNA, 17 bp, synthetic construct
  misc_feature 1..17: note = Oligonucleotide
  source 1..17: mol_type = other DNA
gtggacctcacttaagg

SEQ ID NO: 7053 - DNA, 17 bp, synthetic construct
  misc_feature 1..17: note = Oligonucleotide
  source 1..17: mol_type = other DNA
cctgtggacctcactta

SEQ ID NO: 7054 - DNA, 17 bp, synthetic construct
  misc_feature 1..17: note = Oligonucleotide
  source 1..17: mol_type = other DNA
gaccctgtggacctcac

SEQ ID NO: 7055 - DNA, 17 bp, synthetic construct
  misc_feature 1..17: note = Oligonucleotide
  source 1..17: mol_type = other DNA
ggtgaccctgtggacct

SEQ ID NO: 7056 - DNA, 17 bp, synthetic construct
  misc_feature 1..17: note = Oligonucleotide
  source 1..17: mol_type = other DNA
ccaggtgaccctgtgga

SEQ ID NO: 7057 - DNA, 17 bp, synthetic construct
  misc_feature 1..17: note = Oligonucleotide
  source 1..17: mol_type = other DNA
actccaggtgaccctgt

SEQ ID NO: 7058 - DNA, 17 bp, synthetic construct
  misc_feature 1..17: note = Oligonucleotide
  source 1..17: mol_type = other DNA
gagactccaggtgaccc

SEQ ID NO: 7059 - DNA, 17 bp, synthetic construct
  misc_feature 1..17: note = Oligonucleotide
  source 1..17: mol_type = other DNA
aaggagactccaggtga

SEQ ID NO: 7060 - DNA, 17 bp, synthetic construct
  misc_feature 1..17: note = Oligonucleotide
  source 1..17: mol_type = other DNA
ctcaaggagactccagg

SEQ ID NO: 7061 - DNA, 17 bp, synthetic construct
  misc_feature 1..17: note = Oligonucleotide
  source 1..17: mol_type = other DNA
agcctcaaggagactcc

SEQ ID NO: 7062 - DNA, 17 bp, synthetic construct
  misc_feature 1..17: note = Oligonucleotide
  source 1..17: mol_type = other DNA
tctagcctcaaggagac

SEQ ID NO: 7063 - DNA, 17 bp, synthetic construct
  misc_feature 1..17: note = Oligonucleotide
  source 1..17: mol_type = other DNA
ctctctagcctcaagga

SEQ ID NO: 7064 - DNA, 17 bp, synthetic construct
  misc_feature 1..17: note = Oligonucleotide
  source 1..17: mol_type = other DNA
agcctctctagcctcaa

SEQ ID NO: 7065 - DNA, 17 bp, synthetic construct
  misc_feature 1..17: note = Oligonucleotide
  source 1..17: mol_type = other DNA
ggcagcctctctagcct

SEQ ID NO: 7066 - DNA, 17 bp, synthetic construct
  misc_feature 1..17: note = Oligonucleotide
  source 1..17: mol_type = other DNA
ccaggcagcctctctag

SEQ ID NO: 7067 - DNA, 17 bp, synthetic construct
  misc_feature 1..17: note = Oligonucleotide
  source 1..17: mol_type = other DNA
accccaggcagcctctc

SEQ ID NO: 7068 - DNA, 17 bp, synthetic construct
  misc_feature 1..17: note = Oligonucleotide
  source 1..17: mol_type = other DNA
cccaccccaggcagcct

SEQ ID NO: 7069 - DNA, 17 bp, synthetic construct
  misc_feature 1..17: note = Oligonucleotide
  source 1..17: mol_type = other DNA
gaccccaccccaggcag

SEQ ID NO: 7070 - DNA, 17 bp, synthetic construct
  misc_feature 1..17: note = Oligonucleotide
  source 1..17: mol_type = other DNA
tcagaccccaccccagg

SEQ ID NO: 7071 - DNA, 17 bp, synthetic construct
  misc_feature 1..17: note = Oligonucleotide
  source 1..17: mol_type = other DNA
aactcagaccccacccc

SEQ ID NO: 7072 - DNA, 17 bp, synthetic construct
  misc_feature 1..17: note = Oligonucleotide
  source 1..17: mol_type = other DNA
cagaactcagaccccac

SEQ ID NO: 7073 - DNA, 17 bp, synthetic construct
  misc_feature 1..17: note = Oligonucleotide
  source 1..17: mol_type = other DNA
ccccagaactcagaccc

SEQ ID NO: 7074 - DNA, 17 bp, synthetic construct
  misc_feature 1..17: note = Oligonucleotide
  source 1..17: mol_type = other DNA
tcaccccagaactcaga

SEQ ID NO: 7075 - DNA, 17 bp, synthetic construct
  misc_feature 1..17: note = Oligonucleotide
  source 1..17: mol_type = other DNA
ccctcaccccagaactc

SEQ ID NO: 7076 - DNA, 17 bp, synthetic construct
  misc_feature 1..17: note = Oligonucleotide
  source 1..17: mol_type = other DNA
aggccctcaccccagaa

SEQ ID NO: 7077 - DNA, 17 bp, synthetic construct
  misc_feature 1..17: note = Oligonucleotide
  source 1..17: mol_type = other DNA
acaaggccctcacccca

SEQ ID NO: 7078 - DNA, 17 bp, synthetic construct
  misc_feature 1..17: note = Oligonucleotide
  source 1..17: mol_type = other DNA
aagacaaggccctcacc

SEQ ID NO: 7079 - DNA, 17 bp, synthetic construct
  misc_feature 1..17: note = Oligonucleotide
  source 1..17: mol_type = other DNA
cccaagacaaggccctc

SEQ ID NO: 7080 - DNA, 17 bp, synthetic construct
  misc_feature 1..17: note = Oligonucleotide
  source 1..17: mol_type = other DNA
gctcccaagacaaggcc

SEQ ID NO: 7081 - DNA, 17 bp, synthetic construct
  misc_feature 1..17: note = Oligonucleotide
  source 1..17: mol_type = other DNA
caggctcccaagacaag

SEQ ID NO: 7082 - DNA, 17 bp, synthetic construct
  misc_feature 1..17: note = Oligonucleotide
  source 1..17: mol_type = other DNA
ccccaggctcccaagac

SEQ ID NO: 7083 - DNA, 17 bp, synthetic construct
  misc_feature 1..17: note = Oligonucleotide
  source 1..17: mol_type = other DNA
ccaccccaggctcccaa

SEQ ID NO: 7084 - DNA, 17 bp, synthetic construct
  misc_feature 1..17: note = Oligonucleotide
  source 1..17: mol_type = other DNA
ctcccaccccaggctcc

SEQ ID NO: 7085 - DNA, 17 bp, synthetic construct
  misc_feature 1..17: note = Oligonucleotide
  source 1..17: mol_type = other DNA
gagctcccaccccaggc

SEQ ID NO: 7086 - DNA, 17 bp, synthetic construct
  misc_feature 1..17: note = Oligonucleotide
  source 1..17: mol_type = other DNA
cttgagctcccacccca

SEQ ID NO: 7087 - DNA, 17 bp, synthetic construct
  misc_feature 1..17: note = Oligonucleotide
  source 1..17: mol_type = other DNA
ctccttgagctcccacc

SEQ ID NO: 7088 - DNA, 17 bp, synthetic construct
  misc_feature 1..17: note = Oligonucleotide
  source 1..17: mol_type = other DNA
tccctccttgagctccc

SEQ ID NO: 7089 - DNA, 17 bp, synthetic construct
  misc_feature 1..17: note = Oligonucleotide
  source 1..17: mol_type = other DNA
ccctccctccttgagct

SEQ ID NO: 7090 - DNA, 17 bp, synthetic construct
  misc_feature 1..17: note = Oligonucleotide
  source 1..17: mol_type = other DNA
ctcccctccctccttga

SEQ ID NO: 7091 - DNA, 17 bp, synthetic construct
  misc_feature 1..17: note = Oligonucleotide
  source 1..17: mol_type = other DNA
ccgctcccctccctcct

SEQ ID NO: 7092 - DNA, 17 bp, synthetic construct
  misc_feature 1..17: note = Oligonucleotide
  source 1..17: mol_type = other DNA
ccaccgctcccctccct

SEQ ID NO: 7093 - DNA, 17 bp, synthetic construct
  misc_feature 1..17: note = Oligonucleotide
  source 1..17: mol_type = other DNA
aggccaccgctcccctc

SEQ ID NO: 7094 - DNA, 17 bp, synthetic construct
  misc_feature 1..17: note = Oligonucleotide
  source 1..17: mol_type = other DNA
cagaggccaccgctccc

SEQ ID NO: 7095 - DNA, 17 bp, synthetic construct
  misc_feature 1..17: note = Oligonucleotide
  source 1..17: mol_type = other DNA
tgacagaggccaccgct

SEQ ID NO: 7096 - DNA, 17 bp, synthetic construct
  misc_feature 1..17: note = Oligonucleotide
  source 1..17: mol_type = other DNA
tgctgacagaggccacc

SEQ ID NO: 7097 - DNA, 17 bp, synthetic construct
  misc_feature 1..17: note = Oligonucleotide
  source 1..17: mol_type = other DNA
tgatgctgacagaggcc

SEQ ID NO: 7098 - DNA, 17 bp, synthetic construct
  misc_feature 1..17: note = Oligonucleotide
  source 1..17: mol_type = other DNA
ccgtgatgctgacagag

SEQ ID NO: 7099 - DNA, 17 bp, synthetic construct
  misc_feature 1..17: note = Oligonucleotide
  source 1..17: mol_type = other DNA
cacccgtgatgctgaca

SEQ ID NO: 7100 - DNA, 17 bp, synthetic construct
  misc_feature 1..17: note = Oligonucleotide
  source 1..17: mol_type = other DNA
ggccacccgtgatgctg

SEQ ID NO: 7101 - DNA, 17 bp, synthetic construct
  misc_feature 1..17: note = Oligonucleotide
  source 1..17: mol_type = other DNA
cccggccacccgtgatg

SEQ ID NO: 7102 - DNA, 17 bp, synthetic construct
  misc_feature 1..17: note = Oligonucleotide
  source 1..17: mol_type = other DNA
caacccggccacccgtg

SEQ ID NO: 7103 - DNA, 17 bp, synthetic construct
  misc_feature 1..17: note = Oligonucleotide
  source 1..17: mol_type = other DNA
ccccaacccggccaccc

SEQ ID NO: 7104 - DNA, 17 bp, synthetic construct
  misc_feature 1..17: note = Oligonucleotide
  source 1..17: mol_type = other DNA
cctccccaacccggcca

SEQ ID NO: 7105 - DNA, 17 bp, synthetic construct
  misc_feature 1..17: note = Oligonucleotide
  source 1..17: mol_type = other DNA
tgtcctccccaacccgg

SEQ ID NO: 7106 - DNA, 17 bp, synthetic construct
  misc_feature 1..17: note = Oligonucleotide
  source 1..17: mol_type = other DNA
ccatgtcctccccaacc

SEQ ID NO: 7107 - DNA, 17 bp, synthetic construct
  misc_feature 1..17: note = Oligonucleotide
  source 1..17: mol_type = other DNA
ctgccatgtcctcccca

SEQ ID NO: 7108 - DNA, 17 bp, synthetic construct
  misc_feature 1..17: note = Oligonucleotide
  source 1..17: mol_type = other DNA
ccactgccatgtcctcc

SEQ ID NO: 7109 - DNA, 17 bp, synthetic construct
  misc_feature 1..17: note = Oligonucleotide
  source 1..17: mol_type = other DNA
gccccactgccatgtcc

SEQ ID NO: 7110 - DNA, 17 bp, synthetic construct
  misc_feature 1..17: note = Oligonucleotide
  source 1..17: mol_type = other DNA
cctgccccactgccatg

SEQ ID NO: 7111 - DNA, 17 bp, synthetic construct
  misc_feature 1..17: note = Oligonucleotide
  source 1..17: mol_type = other DNA
cctcctgccccactgcc

SEQ ID NO: 7112 - DNA, 17 bp, synthetic construct
  misc_feature 1..17: note = Oligonucleotide
  source 1..17: mol_type = other DNA
ccacctcctgccccact

SEQ ID NO: 7113 - DNA, 17 bp, synthetic construct
  misc_feature 1..17: note = Oligonucleotide
  source 1..17: mol_type = other DNA
gggccacctcctgcccc

SEQ ID NO: 7114 - DNA, 17 bp, synthetic construct
  misc_feature 1..17: note = Oligonucleotide
  source 1..17: mol_type = other DNA
cctgggccacctcctgc

SEQ ID NO: 7115 - DNA, 17 bp, synthetic construct
  misc_feature 1..17: note = Oligonucleotide
  source 1..17: mol_type = other DNA
ctgcctgggccacctcc

SEQ ID NO: 7116 - DNA, 17 bp, synthetic construct
  misc_feature 1..17: note = Oligonucleotide
  source 1..17: mol_type = other DNA
cagctgcctgggccacc

SEQ ID NO: 7117 - DNA, 17 bp, synthetic construct
  misc_feature 1..17: note = Oligonucleotide
  source 1..17: mol_type = other DNA
tctcagctgcctgggcc

SEQ ID NO: 7118 - DNA, 17 bp, synthetic construct
  misc_feature 1..17: note = Oligonucleotide
  source 1..17: mol_type = other DNA
ccatctcagctgcctgg

SEQ ID NO: 7119 - DNA, 17 bp, synthetic construct
  misc_feature 1..17: note = Oligonucleotide
  source 1..17: mol_type = other DNA
gctccatctcagctgcc

SEQ ID NO: 7120 - DNA, 17 bp, synthetic construct
  misc_feature 1..17: note = Oligonucleotide
  source 1..17: mol_type = other DNA
gaggctccatctcagct

SEQ ID NO: 7121 - DNA, 17 bp, synthetic construct
  misc_feature 1..17: note = Oligonucleotide
  source 1..17: mol_type = other DNA
aaggaggctccatctca

SEQ ID NO: 7122 - DNA, 17 bp, synthetic construct
  misc_feature 1..17: note = Oligonucleotide
  source 1..17: mol_type = other DNA
agcaaggaggctccatc

SEQ ID NO: 7123 - DNA, 17 bp, synthetic construct
  misc_feature 1..17: note = Oligonucleotide
  source 1..17: mol_type = other DNA
cacagcaaggaggctcc

SEQ ID NO: 7124 - DNA, 17 bp, synthetic construct
  misc_feature 1..17: note = Oligonucleotide
  source 1..17: mol_type = other DNA
ctgcacagcaaggaggc

SEQ ID NO: 7125 - DNA, 25 bp, synthetic construct
  misc_feature 1..25: note = Oligonucleotide
  source 1..25: mol_type = other DNA
agccaatgacgagacctgggcccac

SEQ ID NO: 7126 - DNA, 25 bp, synthetic construct
  misc_feature 1..25: note = Oligonucleotide
  source 1..25: mol_type = other DNA
cagagccaatgacgagacctgggcc

SEQ ID NO: 7127 - DNA, 25 bp, synthetic construct
  misc_feature 1..25: note = Oligonucleotide
  source 1..25: mol_type = other DNA
ggacagagccaatgacgagacctgg

SEQ ID NO: 7128 - DNA, 25 bp, synthetic construct
  misc_feature 1..25: note = Oligonucleotide
  source 1..25: mol_type = other DNA
agaggacagagccaatgacgagacc

SEQ ID NO: 7129 - DNA, 25 bp, synthetic construct
  misc_feature 1..25: note = Oligonucleotide
  source 1..25: mol_type = other DNA
aggagaggacagagccaatgacgag

SEQ ID NO: 7130 - DNA, 25 bp, synthetic construct
  misc_feature 1..25: note = Oligonucleotide
  source 1..25: mol_type = other DNA
cacaggagaggacagagccaatgac

SEQ ID NO: 7131 - DNA, 25 bp, synthetic construct
  misc_feature 1..25: note = Oligonucleotide
  source 1..25: mol_type = other DNA
cctcacaggagaggacagagccaat

SEQ ID NO: 7132 - DNA, 25 bp, synthetic construct
  misc_feature 1..25: note = Oligonucleotide
  source 1..25: mol_type = other DNA
ctgcctcacaggagaggacagagcc

SEQ ID NO: 7133 - DNA, 25 bp, synthetic construct
  misc_feature 1..25: note = Oligonucleotide
  source 1..25: mol_type = other DNA
cagctgcctcacaggagaggacaga

SEQ ID NO: 7134 - DNA, 25 bp, synthetic construct
  misc_feature 1..25: note = Oligonucleotide
  source 1..25: mol_type = other DNA
ctgcagctgcctcacaggagaggac

SEQ ID NO: 7135 - DNA, 25 bp, synthetic construct
  misc_feature 1..25: note = Oligonucleotide
  source 1..25: mol_type = other DNA
ctgctgcagctgcctcacaggagag

SEQ ID NO: 7136 - DNA, 25 bp, synthetic construct
  misc_feature 1..25: note = Oligonucleotide
  source 1..25: mol_type = other DNA
caactgctgcagctgcctcacagga

SEQ ID NO: 7137 - DNA, 25 bp, synthetic construct
  misc_feature 1..25: note = Oligonucleotide
  source 1..25: mol_type = other DNA
ctgcaactgctgcagctgcctcaca

SEQ ID NO: 7138 - DNA, 25 bp, synthetic construct
  misc_feature 1..25: note = Oligonucleotide
  source 1..25: mol_type = other DNA
gccctgcaactgctgcagctgcctc

SEQ ID NO: 7139 - DNA, 25 bp, synthetic construct
  misc_feature 1..25: note = Oligonucleotide
  source 1..25: mol_type = other DNA
cctgccctgcaactgctgcagctgc

SEQ ID NO: 7140 - DNA, 25 bp, synthetic construct
  misc_feature 1..25: note = Oligonucleotide
  source 1..25: mol_type = other DNA
gaccctgccctgcaactgctgcagc

SEQ ID NO: 7141 - DNA, 25 bp, synthetic construct
  misc_feature 1..25: note = Oligonucleotide
  source 1..25: mol_type = other DNA
cctgaccctgccctgcaactgctgc

SEQ ID NO: 7142 - DNA, 25 bp, synthetic construct
  misc_feature 1..25: note = Oligonucleotide
  source 1..25: mol_type = other DNA
tcccctgaccctgccctgcaactgc

SEQ ID NO: 7143 - DNA, 25 bp, synthetic construct
  misc_feature 1..25: note = Oligonucleotide
  source 1..25: mol_type = other DNA
gaatcccctgaccctgccctgcaac

SEQ ID NO: 7144 - DNA, 25 bp, synthetic construct
  misc_feature 1..25: note = Oligonucleotide
  source 1..25: mol_type = other DNA
gaggaatcccctgaccctgccctgc

SEQ ID NO: 7145 - DNA, 25 bp, synthetic construct
  misc_feature 1..25: note = Oligonucleotide
  source 1..25: mol_type = other DNA
gctgaggaatcccctgaccctgccc

SEQ ID NO: 7146 - DNA, 25 bp, synthetic construct
  misc_feature 1..25: note = Oligonucleotide
  source 1..25: mol_type = other DNA
ccggctgaggaatcccctgaccctg

SEQ ID NO: 7147 - DNA, 25 bp, synthetic construct
  misc_feature 1..25: note = Oligonucleotide
  source 1..25: mol_type = other DNA
gttccggctgaggaatcccctgacc

SEQ ID NO: 7148 - DNA, 25 bp, synthetic construct
  misc_feature 1..25: note = Oligonucleotide
  source 1..25: mol_type = other DNA
gaggttccggctgaggaatcccctg

SEQ ID NO: 7149 - DNA, 25 bp, synthetic construct
  misc_feature 1..25: note = Oligonucleotide
  source 1..25: mol_type = other DNA
ccagaggttccggctgaggaatccc

SEQ ID NO: 7150 - DNA, 25 bp, synthetic construct
  misc_feature 1..25: note = Oligonucleotide
  source 1..25: mol_type = other DNA
gtgccagaggttccggctgaggaat

SEQ ID NO: 7151 - DNA, 25 bp, synthetic construct
  misc_feature 1..25: note = Oligonucleotide
  source 1..25: mol_type = other DNA
gaagtgccagaggttccggctgagg

SEQ ID NO: 7152 - DNA, 25 bp, synthetic construct
  misc_feature 1..25: note = Oligonucleotide
  source 1..25: mol_type = other DNA
ggggaagtgccagaggttccggctg

SEQ ID NO: 7153 - DNA, 25 bp, synthetic construct
  misc_feature 1..25: note = Oligonucleotide
  source 1..25: mol_type = other DNA
gaaggggaagtgccagaggttccgg

SEQ ID NO: 7154 - DNA, 25 bp, synthetic construct
  misc_feature 1..25: note = Oligonucleotide
  source 1..25: mol_type = other DNA
agagaaggggaagtgccagaggttc

SEQ ID NO: 7155 - DNA, 25 bp, synthetic construct
  misc_feature 1..25: note = Oligonucleotide
  source 1..25: mol_type = other DNA
ctcagagaaggggaagtgccagagg

SEQ ID NO: 7156 - DNA, 25 bp, synthetic construct
  misc_feature 1..25: note = Oligonucleotide
  source 1..25: mol_type = other DNA
gaactcagagaaggggaagtgccag

SEQ ID NO: 7157 - DNA, 25 bp, synthetic construct
  misc_feature 1..25: note = Oligonucleotide
  source 1..25: mol_type = other DNA
gatgaactcagagaaggggaagtgc

SEQ ID NO: 7158 - DNA, 25 bp, synthetic construct
  misc_feature 1..25: note = Oligonucleotide
  source 1..25: mol_type = other DNA
gaggatgaactcagagaaggggaag

SEQ ID NO: 7159 - DNA, 25 bp, synthetic construct
  misc_feature 1..25: note = Oligonucleotide
  source 1..25: mol_type = other DNA
tgggaggatgaactcagagaagggg

SEQ ID NO: 7160 - DNA, 25 bp, synthetic construct
  misc_feature 1..25: note = Oligonucleotide
  source 1..25: mol_type = other DNA
ccgtgggaggatgaactcagagaag

SEQ ID NO: 7161 - DNA, 25 bp, synthetic construct
  misc_feature 1..25: note = Oligonucleotide
  source 1..25: mol_type = other DNA
gcaccgtgggaggatgaactcagag

SEQ ID NO: 7162 - DNA, 25 bp, synthetic construct
  misc_feature 1..25: note = Oligonucleotide
  source 1..25: mol_type = other DNA
agagcaccgtgggaggatgaactca

SEQ ID NO: 7163 - DNA, 25 bp, synthetic construct
  misc_feature 1..25: note = Oligonucleotide
  source 1..25: mol_type = other DNA
taaagagcaccgtgggaggatgaac

SEQ ID NO: 7164 - DNA, 25 bp, synthetic construct
  misc_feature 1..25: note = Oligonucleotide
  source 1..25: mol_type = other DNA
tgctaaagagcaccgtgggaggatg

SEQ ID NO: 7165 - DNA, 25 bp, synthetic construct
  misc_feature 1..25: note = Oligonucleotide
  source 1..25: mol_type = other DNA
gaatgctaaagagcaccgtgggagg

SEQ ID NO: 7166 - DNA, 25 bp, synthetic construct
  misc_feature 1..25: note = Oligonucleotide
  source 1..25: mol_type = other DNA
acagaatgctaaagagcaccgtggg

SEQ ID NO: 7167 - DNA, 25 bp, synthetic construct
  misc_feature 1..25: note = Oligonucleotide
  source 1..25: mol_type = other DNA
aagacagaatgctaaagagcaccgt

SEQ ID NO: 7168 - DNA, 25 bp, synthetic construct
  misc_feature 1..25: note = Oligonucleotide
  source 1..25: mol_type = other DNA
atcaagacagaatgctaaagagcac

SEQ ID NO: 7169 - DNA, 25 bp, synthetic construct
  misc_feature 1..25: note = Oligonucleotide
  source 1..25: mol_type = other DNA
ctgatcaagacagaatgctaaagag

SEQ ID NO: 7170 - DNA, 25 bp, synthetic construct
  misc_feature 1..25: note = Oligonucleotide
  source 1..25: mol_type = other DNA
accctgatcaagacagaatgctaaa

SEQ ID NO: 7171 - DNA, 25 bp, synthetic construct
  misc_feature 1..25: note = Oligonucleotide
  source 1..25: mol_type = other DNA
cgtaccctgatcaagacagaatgct

SEQ ID NO: 7172 - DNA, 25 bp, synthetic construct
  misc_feature 1..25: note = Oligonucleotide
  source 1..25: mol_type = other DNA
aaccgtaccctgatcaagacagaat

SEQ ID NO: 7173 - DNA, 25 bp, synthetic construct
  misc_feature 1..25: note = Oligonucleotide
  source 1..25: mol_type = other DNA
gagaaccgtaccctgatcaagacag

SEQ ID NO: 7174 - DNA, 25 bp, synthetic construct
  misc_feature 1..25: note = Oligonucleotide
  source 1..25: mol_type = other DNA
taagagaaccgtaccctgatcaaga

SEQ ID NO: 7175 - DNA, 25 bp, synthetic construct
  misc_feature 1..25: note = Oligonucleotide
  source 1..25: mol_type = other DNA
ggctaagagaaccgtaccctgatca

SEQ ID NO: 7176 - DNA, 25 bp, synthetic construct
  misc_feature 1..25: note = Oligonucleotide
  source 1..25: mol_type = other DNA
aagggctaagagaaccgtaccctga

SEQ ID NO: 7177 - DNA, 25 bp, synthetic construct
  misc_feature 1..25: note = Oligonucleotide
  source 1..25: mol_type = other DNA
gccaagggctaagagaaccgtaccc

SEQ ID NO: 7178 - DNA, 25 bp, synthetic construct
  misc_feature 1..25: note = Oligonucleotide
  source 1..25: mol_type = other DNA
agagccaagggctaagagaaccgta

SEQ ID NO: 7179 - DNA, 25 bp, synthetic construct
  misc_feature 1..25: note = Oligonucleotide
  source 1..25: mol_type = other DNA
gccagagccaagggctaagagaacc

SEQ ID NO: 7180 - DNA, 25 bp, synthetic construct
  misc_feature 1..25: note = Oligonucleotide
  source 1..25: mol_type = other DNA
aaagccagagccaagggctaagaga

SEQ ID NO: 7181 - DNA, 25 bp, synthetic construct
  misc_feature 1..25: note = Oligonucleotide
  source 1..25: mol_type = other DNA
gtgaaagccagagccaagggctaag

SEQ ID NO: 7182 - DNA, 25 bp, synthetic construct
  misc_feature 1..25: note = Oligonucleotide
  source 1..25: mol_type = other DNA
ctggtgaaagccagagccaagggct

SEQ ID NO: 7183 - DNA, 25 bp, synthetic construct
  misc_feature 1..25: note = Oligonucleotide
  source 1..25: mol_type = other DNA
gtcctggtgaaagccagagccaagg

SEQ ID NO: 7184 - DNA, 25 bp, synthetic construct
  misc_feature 1..25: note = Oligonucleotide
  source 1..25: mol_type = other DNA
agggtcctggtgaaagccagagcca

SEQ ID NO: 7185 - DNA, 25 bp, synthetic construct
  misc_feature 1..25: note = Oligonucleotide
  source 1..25: mol_type = other DNA
aacagggtcctggtgaaagccagag

SEQ ID NO: 7186 - DNA, 25 bp, synthetic construct
  misc_feature 1..25: note = Oligonucleotide
  source 1..25: mol_type = other DNA
acaaacagggtcctggtgaaagcca

SEQ ID NO: 7187 - DNA, 25 bp, synthetic construct
  misc_feature 1..25: note = Oligonucleotide
  source 1..25: mol_type = other DNA
aaaacaaacagggtcctggtgaaag

SEQ ID NO: 7188 - DNA, 25 bp, synthetic construct
  misc_feature 1..25: note = Oligonucleotide
  source 1..25: mol_type = other DNA
agaaaaacaaacagggtcctggtga

SEQ ID NO: 7189 - DNA, 25 bp, synthetic construct
  misc_feature 1..25: note = Oligonucleotide
  source 1..25: mol_type = other DNA
gaaagaaaaacaaacagggtcctgg

SEQ ID NO: 7190 - DNA, 25 bp, synthetic construct
  misc_feature 1..25: note = Oligonucleotide
  source 1..25: mol_type = other DNA
tgagaaagaaaaacaaacagggtcc

SEQ ID NO: 7191 - DNA, 25 bp, synthetic construct
  misc_feature 1..25: note = Oligonucleotide
  source 1..25: mol_type = other DNA
atctgagaaagaaaaacaaacaggg

SEQ ID NO: 7192 - DNA, 25 bp, synthetic construct
  misc_feature 1..25: note = Oligonucleotide
  source 1..25: mol_type = other DNA
cacatctgagaaagaaaaacaaaca

SEQ ID NO: 7193 - DNA, 25 bp, synthetic construct
  misc_feature 1..25: note = Oligonucleotide
  source 1..25: mol_type = other DNA
tcccacatctgagaaagaaaaacaa

SEQ ID NO: 7194 - DNA, 25 bp, synthetic construct
  misc_feature 1..25: note = Oligonucleotide
  source 1..25: mol_type = other DNA
ccatcccacatctgagaaagaaaaa

SEQ ID NO: 7195 - DNA, 25 bp, synthetic construct
  misc_feature 1..25: note = Oligonucleotide
  source 1..25: mol_type = other DNA
tccccatcccacatctgagaaagaa

SEQ ID NO: 7196 - DNA, 25 bp, synthetic construct
  misc_feature 1..25: note = Oligonucleotide
  source 1..25: mol_type = other DNA
ccttccccatcccacatctgagaaa

SEQ ID NO: 7197 - DNA, 25 bp, synthetic construct
  misc_feature 1..25: note = Oligonucleotide
  source 1..25: mol_type = other DNA
tgtccttccccatcccacatctgag

SEQ ID NO: 7198 - DNA, 25 bp, synthetic construct
  misc_feature 1..25: note = Oligonucleotide
  source 1..25: mol_type = other DNA
tcttgtccttccccatcccacatct

SEQ ID NO: 7199 - DNA, 25 bp, synthetic construct
  misc_feature 1..25: note = Oligonucleotide
  source 1..25: mol_type = other DNA
tggtcttgtccttccccatcccaca

SEQ ID NO: 7200 - DNA, 25 bp, synthetic construct
  misc_feature 1..25: note = Oligonucleotide
  source 1..25: mol_type = other DNA
tgctggtcttgtccttccccatccc

SEQ ID NO: 7201 - DNA, 25 bp, synthetic construct
  misc_feature 1..25: note = Oligonucleotide
  source 1..25: mol_type = other DNA
ggctgctggtcttgtccttccccat

SEQ ID NO: 7202 - DNA, 25 bp, synthetic construct
  misc_feature 1..25: note = Oligonucleotide
  source 1..25: mol_type = other DNA
cagggctgctggtcttgtccttccc

SEQ ID NO: 7203 - DNA, 25 bp, synthetic construct
  misc_feature 1..25: note = Oligonucleotide
  source 1..25: mol_type = other DNA
ggtcagggctgctggtcttgtcctt

SEQ ID NO: 7204 - DNA, 25 bp, synthetic construct
  misc_feature 1..25: note = Oligonucleotide
  source 1..25: mol_type = other DNA
aagggtcagggctgctggtcttgtc

SEQ ID NO: 7205 - DNA, 25 bp, synthetic construct
  misc_feature 1..25: note = Oligonucleotide
  source 1..25: mol_type = other DNA
cgtaagggtcagggctgctggtctt

SEQ ID NO: 7206 - DNA, 25 bp, synthetic construct
  misc_feature 1..25: note = Oligonucleotide
  source 1..25: mol_type = other DNA
tcacgtaagggtcagggctgctggt

SEQ ID NO: 7207 - DNA, 25 bp, synthetic construct
  misc_feature 1..25: note = Oligonucleotide
  source 1..25: mol_type = other DNA
acgtcacgtaagggtcagggctgct

SEQ ID NO: 7208 - DNA, 25 bp, synthetic construct
  misc_feature 1..25: note = Oligonucleotide
  source 1..25: mol_type = other DNA
cagacgtcacgtaagggtcagggct

SEQ ID NO: 7209 - DNA, 25 bp, synthetic construct
  misc_feature 1..25: note = Oligonucleotide
  source 1..25: mol_type = other DNA
gaacagacgtcacgtaagggtcagg

SEQ ID NO: 7210 - DNA, 25 bp, synthetic construct
  misc_feature 1..25: note = Oligonucleotide
  source 1..25: mol_type = other DNA
aaagaacagacgtcacgtaagggtc

SEQ ID NO: 7211 - DNA, 25 bp, synthetic construct
  misc_feature 1..25: note = Oligonucleotide
  source 1..25: mol_type = other DNA
gtaaaagaacagacgtcacgtaagg

SEQ ID NO: 7212 - DNA, 25 bp, synthetic construct
  misc_feature 1..25: note = Oligonucleotide
  source 1..25: mol_type = other DNA
tgagtaaaagaacagacgtcacgta

SEQ ID NO: 7213 - DNA, 25 bp, synthetic construct
  misc_feature 1..25: note = Oligonucleotide
  source 1..25: mol_type = other DNA
tactgagtaaaagaacagacgtcac

SEQ ID NO: 7214 - DNA, 25 bp, synthetic construct
  misc_feature 1..25: note = Oligonucleotide
  source 1..25: mol_type = other DNA
aactactgagtaaaagaacagacgt

SEQ ID NO: 7215 - DNA, 25 bp, synthetic construct
  misc_feature 1..25: note = Oligonucleotide
  source 1..25: mol_type = other DNA
aggaactactgagtaaaagaacaga

SEQ ID NO: 7216 - DNA, 25 bp, synthetic construct
  misc_feature 1..25: note = Oligonucleotide
  source 1..25: mol_type = other DNA
tgcaggaactactgagtaaaagaac

SEQ ID NO: 7217 - DNA, 25 bp, synthetic construct
  misc_feature 1..25: note = Oligonucleotide
  source 1..25: mol_type = other DNA
ttttgcaggaactactgagtaaaag

SEQ ID NO: 7218 - DNA, 25 bp, synthetic construct
  misc_feature 1..25: note = Oligonucleotide
  source 1..25: mol_type = other DNA
gaattttgcaggaactactgagtaa

SEQ ID NO: 7219 - DNA, 25 bp, synthetic construct
  misc_feature 1..25: note = Oligonucleotide
  source 1..25: mol_type = other DNA
tcagaattttgcaggaactactgag

SEQ ID NO: 7220 - DNA, 25 bp, synthetic construct
  misc_feature 1..25: note = Oligonucleotide
  source 1..25: mol_type = other DNA
agatcagaattttgcaggaactact

SEQ ID NO: 7221 - DNA, 25 bp, synthetic construct
  misc_feature 1..25: note = Oligonucleotide
  source 1..25: mol_type = other DNA
cagagatcagaattttgcaggaact

SEQ ID NO: 7222 - DNA, 25 bp, synthetic construct
  misc_feature 1..25: note = Oligonucleotide
  source 1..25: mol_type = other DNA
aatcagagatcagaattttgcagga

SEQ ID NO: 7223 - DNA, 25 bp, synthetic construct
  misc_feature 1..25: note = Oligonucleotide
  source 1..25: mol_type = other DNA
cccaatcagagatcagaattttgca

SEQ ID NO: 7224 - DNA, 25 bp, synthetic construct
  misc_feature 1..25: note = Oligonucleotide
  source 1..25: mol_type = other DNA
gaacccaatcagagatcagaatttt

SEQ ID NO: 7225 - DNA, 25 bp, synthetic construct
  misc_feature 1..25: note = Oligonucleotide
  source 1..25: mol_type = other DNA
catgaacccaatcagagatcagaat

SEQ ID NO: 7226 - DNA, 25 bp, synthetic construct
  misc_feature 1..25: note = Oligonucleotide
  source 1..25: mol_type = other DNA
ccacatgaacccaatcagagatcag

SEQ ID NO: 7227 - DNA, 25 bp, synthetic construct
  misc_feature 1..25: note = Oligonucleotide
  source 1..25: mol_type = other DNA
gacccacatgaacccaatcagagat

SEQ ID NO: 7228 - DNA, 25 bp, synthetic construct
  misc_feature 1..25: note = Oligonucleotide
  source 1..25: mol_type = other DNA
gaggacccacatgaacccaatcaga

SEQ ID NO: 7229 - DNA, 25 bp, synthetic construct
  misc_feature 1..25: note = Oligonucleotide
  source 1..25: mol_type = other DNA
gcagaggacccacatgaacccaatc

SEQ ID NO: 7230 - DNA, 25 bp, synthetic construct
  misc_feature 1..25: note = Oligonucleotide
  source 1..25: mol_type = other DNA
aaagcagaggacccacatgaaccca

SEQ ID NO: 7231 - DNA, 25 bp, synthetic construct
  misc_feature 1..25: note = Oligonucleotide
  source 1..25: mol_type = other DNA
ggaaaagcagaggacccacatgaac

SEQ ID NO: 7232 - DNA, 25 bp, synthetic construct
  misc_feature 1..25: note = Oligonucleotide
  source 1..25: mol_type = other DNA
cagggaaaagcagaggacccacatg

SEQ ID NO: 7233 - DNA, 25 bp, synthetic construct
  misc_feature 1..25: note = Oligonucleotide
  source 1..25: mol_type = other DNA
agtcagggaaaagcagaggacccac

SEQ ID NO: 7234 - DNA, 25 bp, synthetic construct
  misc_feature 1..25: note = Oligonucleotide
  source 1..25: mol_type = other DNA
atcagtcagggaaaagcagaggacc

SEQ ID NO: 7235 - DNA, 25 bp, synthetic construct
  misc_feature 1..25: note = Oligonucleotide
  source 1..25: mol_type = other DNA
gtgatcagtcagggaaaagcagagg

SEQ ID NO: 7236 - DNA, 25 bp, synthetic construct
  misc_feature 1..25: note = Oligonucleotide
  source 1..25: mol_type = other DNA
ccagtgatcagtcagggaaaagcag

SEQ ID NO: 7237 - DNA, 25 bp, synthetic construct
  misc_feature 1..25: note = Oligonucleotide
  source 1..25: mol_type = other DNA
accccagtgatcagtcagggaaaag

SEQ ID NO: 7238 - DNA, 25 bp, synthetic construct
  misc_feature 1..25: note = Oligonucleotide
  source 1..25: mol_type = other DNA
cagaccccagtgatcagtcagggaa

SEQ ID NO: 7239 - DNA, 25 bp, synthetic construct
  misc_feature 1..25: note = Oligonucleotide
  source 1..25: mol_type = other DNA
ccccagaccccagtgatcagtcagg

SEQ ID NO: 7240 - DNA, 25 bp, synthetic construct
  misc_feature 1..25: note = Oligonucleotide
  source 1..25: mol_type = other DNA
tgtccccagaccccagtgatcagtc

SEQ ID NO: 7241 - DNA, 25 bp, synthetic construct
  misc_feature 1..25: note = Oligonucleotide
  source 1..25: mol_type = other DNA
ctatgtccccagaccccagtgatca

SEQ ID NO: 7242 - DNA, 25 bp, synthetic construct
  misc_feature 1..25: note = Oligonucleotide
  source 1..25: mol_type = other DNA
gccctatgtccccagaccccagtga

SEQ ID NO: 7243 - DNA, 25 bp, synthetic construct
  misc_feature 1..25: note = Oligonucleotide
  source 1..25: mol_type = other DNA
acagccctatgtccccagaccccag

SEQ ID NO: 7244 - DNA, 25 bp, synthetic construct
  misc_feature 1..25: note = Oligonucleotide
  source 1..25: mol_type = other DNA
atgacagccctatgtccccagaccc

SEQ ID NO: 7245 - DNA, 25 bp, synthetic construct
  misc_feature 1..25: note = Oligonucleotide
  source 1..25: mol_type = other DNA
ccgatgacagccctatgtccccaga

SEQ ID NO: 7246 - DNA, 25 bp, synthetic construct
  misc_feature 1..25: note = Oligonucleotide
  source 1..25: mol_type = other DNA
tggccgatgacagccctatgtcccc

SEQ ID NO: 7247 - DNA, 25 bp, synthetic construct
  misc_feature 1..25: note = Oligonucleotide
  source 1..25: mol_type = other DNA
gcttggccgatgacagccctatgtc

SEQ ID NO: 7248 - DNA, 25 bp, synthetic construct
  misc_feature 1..25: note = Oligonucleotide
  source 1..25: mol_type = other DNA
caagcttggccgatgacagccctat

SEQ ID NO: 7249 - DNA, 25 bp, synthetic construct
  misc_feature 1..25: note = Oligonucleotide
  source 1..25: mol_type = other DNA
actcaagcttggccgatgacagccc

SEQ ID NO: 7250 - DNA, 25 bp, synthetic construct
  misc_feature 1..25: note = Oligonucleotide
  source 1..25: mol_type = other DNA
aggactcaagcttggccgatgacag

SEQ ID NO: 7251 - DNA, 25 bp, synthetic construct
  misc_feature 1..25: note = Oligonucleotide
  source 1..25: mol_type = other DNA
cagaggactcaagcttggccgatga

SEQ ID NO: 7252 - DNA, 25 bp, synthetic construct
  misc_feature 1..25: note = Oligonucleotide
  source 1..25: mol_type = other DNA
gaacagaggactcaagcttggccga

SEQ ID NO: 7253 - DNA, 25 bp, synthetic construct
  misc_feature 1..25: note = Oligonucleotide
  source 1..25: mol_type = other DNA
ggagaacagaggactcaagcttggc

SEQ ID NO: 7254 - DNA, 25 bp, synthetic construct
  misc_feature 1..25: note = Oligonucleotide
  source 1..25: mol_type = other DNA
ctgggagaacagaggactcaagctt

SEQ ID NO: 7255 - DNA, 25 bp, synthetic construct
  misc_feature 1..25: note = Oligonucleotide
  source 1..25: mol_type = other DNA
ctcctgggagaacagaggactcaag

SEQ ID NO: 7256 - DNA, 25 bp, synthetic construct
  misc_feature 1..25: note = Oligonucleotide
  source 1..25: mol_type = other DNA
tggctcctgggagaacagaggactc

SEQ ID NO: 7257 - DNA, 25 bp, synthetic construct
  misc_feature 1..25: note = Oligonucleotide
  source 1..25: mol_type = other DNA
ccctggctcctgggagaacagagga

SEQ ID NO: 7258 - DNA, 25 bp, synthetic construct
  misc_feature 1..25: note = Oligonucleotide
  source 1..25: mol_type = other DNA
tccccctggctcctgggagaacaga

SEQ ID NO: 7259 - DNA, 25 bp, synthetic construct
  misc_feature 1..25: note = Oligonucleotide
  source 1..25: mol_type = other DNA
ccatccccctggctcctgggagaac

SEQ ID NO: 7260 - DNA, 25 bp, synthetic construct
  misc_feature 1..25: note = Oligonucleotide
  source 1..25: mol_type = other DNA
gacccatccccctggctcctgggag

SEQ ID NO: 7261 - DNA, 25 bp, synthetic construct
  misc_feature 1..25: note = Oligonucleotide
  source 1..25: mol_type = other DNA
gcggacccatccccctggctcctgg

SEQ ID NO: 7262 - DNA, 25 bp, synthetic construct
  misc_feature 1..25: note = Oligonucleotide
  source 1..25: mol_type = other DNA
tgggcggacccatccccctggctcc

SEQ ID NO: 7263 - DNA, 25 bp, synthetic construct
  misc_feature 1..25: note = Oligonucleotide
  source 1..25: mol_type = other DNA
aggtgggcggacccatccccctggc

SEQ ID NO: 7264 - DNA, 25 bp, synthetic construct
  misc_feature 1..25: note = Oligonucleotide
  source 1..25: mol_type = other DNA
gctaggtgggcggacccatccccct

SEQ ID NO: 7265 - DNA, 25 bp, synthetic construct
  misc_feature 1..25: note = Oligonucleotide
  source 1..25: mol_type = other DNA
cttgctaggtgggcggacccatccc

SEQ ID NO: 7266 - DNA, 25 bp, synthetic construct
  misc_feature 1..25: note = Oligonucleotide
  source 1..25: mol_type = other DNA
ctgcttgctaggtgggcggacccat

SEQ ID NO: 7267 - DNA, 25 bp, synthetic construct
  misc_feature 1..25: note = Oligonucleotide
  source 1..25: mol_type = other DNA
cacctgcttgctaggtgggcggacc

SEQ ID NO: 7268 - DNA, 25 bp, synthetic construct
  misc_feature 1..25: note = Oligonucleotide
  source 1..25: mol_type = other DNA
cagcacctgcttgctaggtgggcgg

SEQ ID NO: 7269 - DNA, 25 bp, synthetic construct
  misc_feature 1..25: note = Oligonucleotide
  source 1..25: mol_type = other DNA
tctcagcacctgcttgctaggtggg

SEQ ID NO: 7270 - DNA, 25 bp, synthetic construct
  misc_feature 1..25: note = Oligonucleotide
  source 1..25: mol_type = other DNA
cactctcagcacctgcttgctaggt

SEQ ID NO: 7271 - DNA, 25 bp, synthetic construct
  misc_feature 1..25: note = Oligonucleotide
  source 1..25: mol_type = other DNA
cctcactctcagcacctgcttgcta

SEQ ID NO: 7272 - DNA, 25 bp, synthetic construct
  misc_feature 1..25: note = Oligonucleotide
  source 1..25: mol_type = other DNA
tcccctcactctcagcacctgcttg

SEQ ID NO: 7273 - DNA, 25 bp, synthetic construct
  misc_feature 1..25: note = Oligonucleotide
  source 1..25: mol_type = other DNA
ccctcccctcactctcagcacctgc

SEQ ID NO: 7274 - DNA, 25 bp, synthetic construct
  misc_feature 1..25: note = Oligonucleotide
  source 1..25: mol_type = other DNA
gccccctcccctcactctcagcacc

SEQ ID NO: 7275 - DNA, 25 bp, synthetic construct
  misc_feature 1..25: note = Oligonucleotide
  source 1..25: mol_type = other DNA
agagccccctcccctcactctcagc

SEQ ID NO: 7276 - DNA, 25 bp, synthetic construct
  misc_feature 1..25: note = Oligonucleotide
  source 1..25: mol_type = other DNA
tggagagccccctcccctcactctc

SEQ ID NO: 7277 - DNA, 25 bp, synthetic construct
  misc_feature 1..25: note = Oligonucleotide
  source 1..25: mol_type = other DNA
atctggagagccccctcccctcact

SEQ ID NO: 7278 - DNA, 25 bp, synthetic construct
  misc_feature 1..25: note = Oligonucleotide
  source 1..25: mol_type = other DNA
tccatctggagagccccctcccctc

SEQ ID NO: 7279 - DNA, 25 bp, synthetic construct
  misc_feature 1..25: note = Oligonucleotide
  source 1..25: mol_type = other DNA
acttccatctggagagccccctccc

SEQ ID NO: 7280 - DNA, 25 bp, synthetic construct
  misc_feature 1..25: note = Oligonucleotide
  source 1..25: mol_type = other DNA
tggacttccatctggagagccccct

SEQ ID NO: 7281 - DNA, 25 bp, synthetic construct
  misc_feature 1..25: note = Oligonucleotide
  source 1..25: mol_type = other DNA
cactggacttccatctggagagccc

SEQ ID NO: 7282 - DNA, 25 bp, synthetic construct
  misc_feature 1..25: note = Oligonucleotide
  source 1..25: mol_type = other DNA
cagcactggacttccatctggagag

SEQ ID NO: 7283 - DNA, 25 bp, synthetic construct
  misc_feature 1..25: note = Oligonucleotide
  source 1..25: mol_type = other DNA
ggacagcactggacttccatctgga

SEQ ID NO: 7284 - DNA, 25 bp, synthetic construct
  misc_feature 1..25: note = Oligonucleotide
  source 1..25: mol_type = other DNA
aagggacagcactggacttccatct

SEQ ID NO: 7285 - DNA, 25 bp, synthetic construct
  misc_feature 1..25: note = Oligonucleotide
  source 1..25: mol_type = other DNA
ctcaagggacagcactggacttcca

SEQ ID NO: 7286 - DNA, 25 bp, synthetic construct
  misc_feature 1..25: note = Oligonucleotide
  source 1..25: mol_type = other DNA
ttactcaagggacagcactggactt

SEQ ID NO: 7287 - DNA, 25 bp, synthetic construct
  misc_feature 1..25: note = Oligonucleotide
  source 1..25: mol_type = other DNA
tacttactcaagggacagcactgga

SEQ ID NO: 7288 - DNA, 25 bp, synthetic construct
  misc_feature 1..25: note = Oligonucleotide
  source 1..25: mol_type = other DNA
atctacttactcaagggacagcact

SEQ ID NO: 7289 - DNA, 25 bp, synthetic construct
  misc_feature 1..25: note = Oligonucleotide
  source 1..25: mol_type = other DNA
agcatctacttactcaagggacagc

SEQ ID NO: 7290 - DNA, 25 bp, synthetic construct
  misc_feature 1..25: note = Oligonucleotide
  source 1..25: mol_type = other DNA
tccagcatctacttactcaagggac

SEQ ID NO: 7291 - DNA, 25 bp, synthetic construct
  misc_feature 1..25: note = Oligonucleotide
  source 1..25: mol_type = other DNA
ctgtccagcatctacttactcaagg

SEQ ID NO: 7292 - DNA, 25 bp, synthetic construct
  misc_feature 1..25: note = Oligonucleotide
  source 1..25: mol_type = other DNA
aggctgtccagcatctacttactca

SEQ ID NO: 7293 - DNA, 25 bp, synthetic construct
  misc_feature 1..25: note = Oligonucleotide
  source 1..25: mol_type = other DNA
tacaggctgtccagcatctacttac

SEQ ID NO: 7294 - DNA, 25 bp, synthetic construct
  misc_feature 1..25: note = Oligonucleotide
  source 1..25: mol_type = other DNA
tgctacaggctgtccagcatctact

SEQ ID NO: 7295 - DNA, 25 bp, synthetic construct
  misc_feature 1..25: note = Oligonucleotide
  source 1..25: mol_type = other DNA
ggttgctacaggctgtccagcatct

SEQ ID NO: 7296 - DNA, 25 bp, synthetic construct
  misc_feature 1..25: note = Oligonucleotide
  source 1..25: mol_type = other DNA
attggttgctacaggctgtccagca

SEQ ID NO: 7297 - DNA, 25 bp, synthetic construct
  misc_feature 1..25: note = Oligonucleotide
  source 1..25: mol_type = other DNA
aacattggttgctacaggctgtcca

SEQ ID NO: 7298 - DNA, 25 bp, synthetic construct
  misc_feature 1..25: note = Oligonucleotide
  source 1..25: mol_type = other DNA
cagaacattggttgctacaggctgt

SEQ ID NO: 7299 - DNA, 25 bp, synthetic construct
  misc_feature 1..25: note = Oligonucleotide
  source 1..25: mol_type = other DNA
tcacagaacattggttgctacaggc

SEQ ID NO: 7300 - DNA, 25 bp, synthetic construct
  misc_feature 1..25: note = Oligonucleotide
  source 1..25: mol_type = other DNA
gtgtcacagaacattggttgctaca

SEQ ID NO: 7301 - DNA, 25 bp, synthetic construct
  misc_feature 1..25: note = Oligonucleotide
  source 1..25: mol_type = other DNA
gccgtgtcacagaacattggttgct

SEQ ID NO: 7302 - DNA, 25 bp, synthetic construct
  misc_feature 1..25: note = Oligonucleotide
  source 1..25: mol_type = other DNA
ggggccgtgtcacagaacattggtt

SEQ ID NO: 7303 - DNA, 25 bp, synthetic construct
  misc_feature 1..25: note = Oligonucleotide
  source 1..25: mol_type = other DNA
gtgggggccgtgtcacagaacattg

SEQ ID NO: 7304 - DNA, 25 bp, synthetic construct
  misc_feature 1..25: note = Oligonucleotide
  source 1..25: mol_type = other DNA
ccagtgggggccgtgtcacagaaca

SEQ ID NO: 7305 - DNA, 25 bp, synthetic construct
  misc_feature 1..25: note = Oligonucleotide
  source 1..25: mol_type = other DNA
atgccagtgggggccgtgtcacaga

SEQ ID NO: 7306 - DNA, 25 bp, synthetic construct
  misc_feature 1..25: note = Oligonucleotide
  source 1..25: mol_type = other DNA
ctgatgccagtgggggccgtgtcac

SEQ ID NO: 7307 - DNA, 25 bp, synthetic construct
  misc_feature 1..25: note = Oligonucleotide
  source 1..25: mol_type = other DNA
ttgctgatgccagtgggggccgtgt

SEQ ID NO: 7308 - DNA, 25 bp, synthetic construct
  misc_feature 1..25: note = Oligonucleotide
  source 1..25: mol_type = other DNA
gagttgctgatgccagtgggggccg

SEQ ID NO: 7309 - DNA, 25 bp, synthetic construct
  misc_feature 1..25: note = Oligonucleotide
  source 1..25: mol_type = other DNA
agtgagttgctgatgccagtggggg

SEQ ID NO: 7310 - DNA, 25 bp, synthetic construct
  misc_feature 1..25: note = Oligonucleotide
  source 1..25: mol_type = other DNA
ggaagtgagttgctgatgccagtgg

SEQ ID NO: 7311 - DNA, 25 bp, synthetic construct
  misc_feature 1..25: note = Oligonucleotide
  source 1..25: mol_type = other DNA
caaggaagtgagttgctgatgccag

SEQ ID NO: 7312 - DNA, 25 bp, synthetic construct
  misc_feature 1..25: note = Oligonucleotide
  source 1..25: mol_type = other DNA
cggcaaggaagtgagttgctgatgc

SEQ ID NO: 7313 - DNA, 25 bp, synthetic construct
  misc_feature 1..25: note = Oligonucleotide
  source 1..25: mol_type = other DNA
gaccggcaaggaagtgagttgctga

SEQ ID NO: 7314 - DNA, 25 bp, synthetic construct
  misc_feature 1..25: note = Oligonucleotide
  source 1..25: mol_type = other DNA
aatgaccggcaaggaagtgagttgc

SEQ ID NO: 7315 - DNA, 25 bp, synthetic construct
  misc_feature 1..25: note = Oligonucleotide
  source 1..25: mol_type = other DNA
gccaatgaccggcaaggaagtgagt

SEQ ID NO: 7316 - DNA, 25 bp, synthetic construct
  misc_feature 1..25: note = Oligonucleotide
  source 1..25: mol_type = other DNA
caagccaatgaccggcaaggaagtg

SEQ ID NO: 7317 - DNA, 25 bp, synthetic construct
  misc_feature 1..25: note = Oligonucleotide
  source 1..25: mol_type = other DNA
ctccaagccaatgaccggcaaggaa

SEQ ID NO: 7318 - DNA, 25 bp, synthetic construct
  misc_feature 1..25: note = Oligonucleotide
  source 1..25: mol_type = other DNA
tggctccaagccaatgaccggcaag

SEQ ID NO: 7319 - DNA, 25 bp, synthetic construct
  misc_feature 1..25: note = Oligonucleotide
  source 1..25: mol_type = other DNA
tgatggctccaagccaatgaccggc

SEQ ID NO: 7320 - DNA, 25 bp, synthetic construct
  misc_feature 1..25: note = Oligonucleotide
  source 1..25: mol_type = other DNA
ctctgatggctccaagccaatgacc

SEQ ID NO: 7321 - DNA, 25 bp, synthetic construct
  misc_feature 1..25: note = Oligonucleotide
  source 1..25: mol_type = other DNA
gccctctgatggctccaagccaatg

SEQ ID NO: 7322 - DNA, 25 bp, synthetic construct
  misc_feature 1..25: note = Oligonucleotide
  source 1..25: mol_type = other DNA
agggccctctgatggctccaagcca

SEQ ID NO: 7323 - DNA, 25 bp, synthetic construct
  misc_feature 1..25: note = Oligonucleotide
  source 1..25: mol_type = other DNA
atcagggccctctgatggctccaag

SEQ ID NO: 7324 - DNA, 25 bp, synthetic construct
  misc_feature 1..25: note = Oligonucleotide
  source 1..25: mol_type = other DNA
gacatcagggccctctgatggctcc

SEQ ID NO: 7325 - DNA, 25 bp, synthetic construct
  misc_feature 1..25: note = Oligonucleotide
  source 1..25: mol_type = other DNA
accgacatcagggccctctgatggc

SEQ ID NO: 7326 - DNA, 25 bp, synthetic construct
  misc_feature 1..25: note = Oligonucleotide
  source 1..25: mol_type = other DNA
agcaccgacatcagggccctctgat

SEQ ID NO: 7327 - DNA, 25 bp, synthetic construct
  misc_feature 1..25: note = Oligonucleotide
  source 1..25: mol_type = other DNA
ctgagcaccgacatcagggccctct

SEQ ID NO: 7328 - DNA, 25 bp, synthetic construct
  misc_feature 1..25: note = Oligonucleotide
  source 1..25: mol_type = other DNA
ctcctgagcaccgacatcagggccc

SEQ ID NO: 7329 - DNA, 25 bp, synthetic construct
  misc_feature 1..25: note = Oligonucleotide
  source 1..25: mol_type = other DNA
gacctcctgagcaccgacatcaggg

SEQ ID NO: 7330 - DNA, 25 bp, synthetic construct
  misc_feature 1..25: note = Oligonucleotide
  source 1..25: mol_type = other DNA
tgtgacctcctgagcaccgacatca

SEQ ID NO: 7331 - DNA, 25 bp, synthetic construct
  misc_feature 1..25: note = Oligonucleotide
  source 1..25: mol_type = other DNA
agctgtgacctcctgagcaccgaca

SEQ ID NO: 7332 - DNA, 25 bp, synthetic construct
  misc_feature 1..25: note = Oligonucleotide
  source 1..25: mol_type = other DNA
ctaagctgtgacctcctgagcaccg

SEQ ID NO: 7333 - DNA, 25 bp, synthetic construct
  misc_feature 1..25: note = Oligonucleotide
  source 1..25: mol_type = other DNA
gcactaagctgtgacctcctgagca

SEQ ID NO: 7334 - DNA, 25 bp, synthetic construct
  misc_feature 1..25: note = Oligonucleotide
  source 1..25: mol_type = other DNA
acagcactaagctgtgacctcctga

SEQ ID NO: 7335 - DNA, 25 bp, synthetic construct
  misc_feature 1..25: note = Oligonucleotide
  source 1..25: mol_type = other DNA
gatacagcactaagctgtgacctcc

SEQ ID NO: 7336 - DNA, 25 bp, synthetic construct
  misc_feature 1..25: note = Oligonucleotide
  source 1..25: mol_type = other DNA
agggatacagcactaagctgtgacc

SEQ ID NO: 7337 - DNA, 25 bp, synthetic construct
  misc_feature 1..25: note = Oligonucleotide
  source 1..25: mol_type = other DNA
gggagggatacagcactaagctgtg

SEQ ID NO: 7338 - DNA, 25 bp, synthetic construct
  misc_feature 1..25: note = Oligonucleotide
  source 1..25: mol_type = other DNA
caggggagggatacagcactaagct

SEQ ID NO: 7339 - DNA, 25 bp, synthetic construct
  misc_feature 1..25: note = Oligonucleotide
  source 1..25: mol_type = other DNA
tcacaggggagggatacagcactaa

SEQ ID NO: 7340 - DNA, 25 bp, synthetic construct
  misc_feature 1..25: note = Oligonucleotide
  source 1..25: mol_type = other DNA
acttcacaggggagggatacagcac

SEQ ID NO: 7341 - DNA, 25 bp, synthetic construct
  misc_feature 1..25: note = Oligonucleotide
  source 1..25: mol_type = other DNA
tacacttcacaggggagggatacag

SEQ ID NO: 7342 - DNA, 25 bp, synthetic construct
  misc_feature 1..25: note = Oligonucleotide
  source 1..25: mol_type = other DNA
aaatacacttcacaggggagggata

SEQ ID NO: 7343 - DNA, 25 bp, synthetic construct
  misc_feature 1..25: note = Oligonucleotide
  source 1..25: mol_type = other DNA
tgtaaatacacttcacaggggaggg

SEQ ID NO: 7344 - DNA, 25 bp, synthetic construct
  misc_feature 1..25: note = Oligonucleotide
  source 1..25: mol_type = other DNA
cgctgtaaatacacttcacagggga

SEQ ID NO: 7345 - DNA, 25 bp, synthetic construct
  misc_feature 1..25: note = Oligonucleotide
  source 1..25: mol_type = other DNA
gctcgctgtaaatacacttcacagg

SEQ ID NO: 7346 - DNA, 25 bp, synthetic construct
  misc_feature 1..25: note = Oligonucleotide
  source 1..25: mol_type = other DNA
ttggctcgctgtaaatacacttcac

SEQ ID NO: 7347 - DNA, 25 bp, synthetic construct
  misc_feature 1..25: note = Oligonucleotide
  source 1..25: mol_type = other DNA
cagttggctcgctgtaaatacactt

SEQ ID NO: 7348 - DNA, 25 bp, synthetic construct
  misc_feature 1..25: note = Oligonucleotide
  source 1..25: mol_type = other DNA
gtgcagttggctcgctgtaaataca

SEQ ID NO: 7349 - DNA, 25 bp, synthetic construct
  misc_feature 1..25: note = Oligonucleotide
  source 1..25: mol_type = other DNA
cctgtgcagttggctcgctgtaaat

SEQ ID NO: 7350 - DNA, 25 bp, synthetic construct
  misc_feature 1..25: note = Oligonucleotide
  source 1..25: mol_type = other DNA
tagcctgtgcagttggctcgctgta

SEQ ID NO: 7351 - DNA, 25 bp, synthetic construct
  misc_feature 1..25: note = Oligonucleotide
  source 1..25: mol_type = other DNA
cgatagcctgtgcagttggctcgct

SEQ ID NO: 7352 - DNA, 25 bp, synthetic construct
  misc_feature 1..25: note = Oligonucleotide
  source 1..25: mol_type = other DNA
tcgcgatagcctgtgcagttggctc

SEQ ID NO: 7353 - DNA, 25 bp, synthetic construct
  misc_feature 1..25: note = Oligonucleotide
  source 1..25: mol_type = other DNA
gcctcgcgatagcctgtgcagttgg

SEQ ID NO: 7354 - DNA, 25 bp, synthetic construct
  misc_feature 1..25: note = Oligonucleotide
  source 1..25: mol_type = other DNA
gcagcctcgcgatagcctgtgcagt

SEQ ID NO: 7355 - DNA, 25 bp, synthetic construct
  misc_feature 1..25: note = Oligonucleotide
  source 1..25: mol_type = other DNA
tgtgcagcctcgcgatagcctgtgc

SEQ ID NO: 7356 - DNA, 25 bp, synthetic construct
  misc_feature 1..25: note = Oligonucleotide
  source 1..25: mol_type = other DNA
ccgtgtgcagcctcgcgatagcctg

SEQ ID NO: 7357 - DNA, 25 bp, synthetic construct
  misc_feature 1..25: note = Oligonucleotide
  source 1..25: mol_type = other DNA
atgccgtgtgcagcctcgcgatagc

SEQ ID NO: 7358 - DNA, 25 bp, synthetic construct
  misc_feature 1..25: note = Oligonucleotide
  source 1..25: mol_type = other DNA
gtgatgccgtgtgcagcctcgcgat

SEQ ID NO: 7359 - DNA, 25 bp, synthetic construct
  misc_feature 1..25: note = Oligonucleotide
  source 1..25: mol_type = other DNA
caggtgatgccgtgtgcagcctcgc

SEQ ID NO: 7360 - DNA, 25 bp, synthetic construct
  misc_feature 1..25: note = Oligonucleotide
  source 1..25: mol_type = other DNA
tcacaggtgatgccgtgtgcagcct

SEQ ID NO: 7361 - DNA, 25 bp, synthetic construct
  misc_feature 1..25: note = Oligonucleotide
  source 1..25: mol_type = other DNA
gcttcacaggtgatgccgtgtgcag

SEQ ID NO: 7362 - DNA, 25 bp, synthetic construct
  misc_feature 1..25: note = Oligonucleotide
  source 1..25: mol_type = other DNA
ggtgcttcacaggtgatgccgtgtg

SEQ ID NO: 7363 - DNA, 25 bp, synthetic construct
  misc_feature 1..25: note = Oligonucleotide
  source 1..25: mol_type = other DNA
ccaggtgcttcacaggtgatgccgt

SEQ ID NO: 7364 - DNA, 25 bp, synthetic construct
  misc_feature 1..25: note = Oligonucleotide
  source 1..25: mol_type = other DNA
ctaccaggtgcttcacaggtgatgc

SEQ ID NO: 7365 - DNA, 25 bp, synthetic construct
  misc_feature 1..25: note = Oligonucleotide
  source 1..25: mol_type = other DNA
ggcctaccaggtgcttcacaggtga

SEQ ID NO: 7366 - DNA, 25 bp, synthetic construct
  misc_feature 1..25: note = Oligonucleotide
  source 1..25: mol_type = other DNA
ctgggcctaccaggtgcttcacagg

SEQ ID NO: 7367 - DNA, 25 bp, synthetic construct
  misc_feature 1..25: note = Oligonucleotide
  source 1..25: mol_type = other DNA
gccctgggcctaccaggtgcttcac

SEQ ID NO: 7368 - DNA, 25 bp, synthetic construct
  misc_feature 1..25: note = Oligonucleotide
  source 1..25: mol_type = other DNA
ccagccctgggcctaccaggtgctt

SEQ ID NO: 7369 - DNA, 25 bp, synthetic construct
  misc_feature 1..25: note = Oligonucleotide
  source 1..25: mol_type = other DNA
gccccagccctgggcctaccaggtg

SEQ ID NO: 7370 - DNA, 25 bp, synthetic construct
  misc_feature 1..25: note = Oligonucleotide
  source 1..25: mol_type = other DNA
caggccccagccctgggcctaccag

SEQ ID NO: 7371 - DNA, 25 bp, synthetic construct
  misc_feature 1..25: note = Oligonucleotide
  source 1..25: mol_type = other DNA
ccacaggccccagccctgggcctac

SEQ ID NO: 7372 - DNA, 25 bp, synthetic construct
  misc_feature 1..25: note = Oligonucleotide
  source 1..25: mol_type = other DNA
ggtccacaggccccagccctgggcc

SEQ ID NO: 7373 - DNA, 25 bp, synthetic construct
  misc_feature 1..25: note = Oligonucleotide
  source 1..25: mol_type = other DNA
aggggtccacaggccccagccctgg

SEQ ID NO: 7374 - DNA, 25 bp, synthetic construct
  misc_feature 1..25: note = Oligonucleotide
  source 1..25: mol_type = other DNA
gtgaggggtccacaggccccagccc

SEQ ID NO: 7375 - DNA, 25 bp, synthetic construct
  misc_feature 1..25: note = Oligonucleotide
  source 1..25: mol_type = other DNA
ccagtgaggggtccacaggccccag

SEQ ID NO: 7376 - DNA, 25 bp, synthetic construct
  misc_feature 1..25: note = Oligonucleotide
  source 1..25: mol_type = other DNA
acaccagtgaggggtccacaggccc

SEQ ID NO: 7377 - DNA, 25 bp, synthetic construct
  misc_feature 1..25: note = Oligonucleotide
  source 1..25: mol_type = other DNA
ctcacaccagtgaggggtccacagg

SEQ ID NO: 7378 - DNA, 25 bp, synthetic construct
  misc_feature 1..25: note = Oligonucleotide
  source 1..25: mol_type = other DNA
cagctcacaccagtgaggggtccac

SEQ ID NO: 7379 - DNA, 25 bp, synthetic construct
  misc_feature 1..25: note = Oligonucleotide
  source 1..25: mol_type = other DNA
tggcagctcacaccagtgaggggtc

SEQ ID NO: 7380 - DNA, 25 bp, synthetic construct
  misc_feature 1..25: note = Oligonucleotide
  source 1..25: mol_type = other DNA
caatggcagctcacaccagtgaggg

SEQ ID NO: 7381 - DNA, 25 bp, synthetic construct
  misc_feature 1..25: note = Oligonucleotide
  source 1..25: mol_type = other DNA
agacaatggcagctcacaccagtga

SEQ ID NO: 7382 - DNA, 25 bp, synthetic construct
  misc_feature 1..25: note = Oligonucleotide
  source 1..25: mol_type = other DNA
caaagacaatggcagctcacaccag

SEQ ID NO: 7383 - DNA, 25 bp, synthetic construct
  misc_feature 1..25: note = Oligonucleotide
  source 1..25: mol_type = other DNA
cagcaaagacaatggcagctcacac

SEQ ID NO: 7384 - DNA, 25 bp, synthetic construct
  misc_feature 1..25: note = Oligonucleotide
  source 1..25: mol_type = other DNA
tgacagcaaagacaatggcagctca

SEQ ID NO: 7385 - DNA, 25 bp, synthetic construct
  misc_feature 1..25: note = Oligonucleotide
  source 1..25: mol_type = other DNA
cagtgacagcaaagacaatggcagc

SEQ ID NO: 7386 - DNA, 25 bp, synthetic construct
  misc_feature 1..25: note = Oligonucleotide
  source 1..25: mol_type = other DNA
cgtcagtgacagcaaagacaatggc

SEQ ID NO: 7387 - DNA, 25 bp, synthetic construct
  misc_feature 1..25: note = Oligonucleotide
  source 1..25: mol_type = other DNA
tgtcgtcagtgacagcaaagacaat

SEQ ID NO: 7388 - DNA, 25 bp, synthetic construct
  misc_feature 1..25: note = Oligonucleotide
  source 1..25: mol_type = other DNA
aggtgtcgtcagtgacagcaaagac

SEQ ID NO: 7389 - DNA, 25 bp, synthetic construct
  misc_feature 1..25: note = Oligonucleotide
  source 1..25: mol_type = other DNA
cctaggtgtcgtcagtgacagcaaa

SEQ ID NO: 7390 - DNA, 25 bp, synthetic construct
  misc_feature 1..25: note = Oligonucleotide
  source 1..25: mol_type = other DNA
tcacctaggtgtcgtcagtgacagc

SEQ ID NO: 7391 - DNA, 25 bp, synthetic construct
  misc_feature 1..25: note = Oligonucleotide
  source 1..25: mol_type = other DNA
acctcacctaggtgtcgtcagtgac

SEQ ID NO: 7392 - DNA, 25 bp, synthetic construct
  misc_feature 1..25: note = Oligonucleotide
  source 1..25: mol_type = other DNA
aagacctcacctaggtgtcgtcagt

SEQ ID NO: 7393 - DNA, 25 bp, synthetic construct
  misc_feature 1..25: note = Oligonucleotide
  source 1..25: mol_type = other DNA
tctaagacctcacctaggtgtcgtc

SEQ ID NO: 7394 - DNA, 25 bp, synthetic construct
  misc_feature 1..25: note = Oligonucleotide
  source 1..25: mol_type = other DNA
gactctaagacctcacctaggtgtc

SEQ ID NO: 7395 - DNA, 25 bp, synthetic construct
  misc_feature 1..25: note = Oligonucleotide
  source 1..25: mol_type = other DNA
aaggactctaagacctcacctaggt

SEQ ID NO: 7396 - DNA, 25 bp, synthetic construct
  misc_feature 1..25: note = Oligonucleotide
  source 1..25: mol_type = other DNA
acaaaggactctaagacctcaccta

SEQ ID NO: 7397 - DNA, 25 bp, synthetic construct
  misc_feature 1..25: note = Oligonucleotide
  source 1..25: mol_type = other DNA
cccacaaaggactctaagacctcac

SEQ ID NO: 7398 - DNA, 25 bp, synthetic construct
  misc_feature 1..25: note = Oligonucleotide
  source 1..25: mol_type = other DNA
tttcccacaaaggactctaagacct

SEQ ID NO: 7399 - DNA, 25 bp, synthetic construct
  misc_feature 1..25: note = Oligonucleotide
  source 1..25: mol_type = other DNA
tgttttcccacaaaggactctaaga

SEQ ID NO: 7400 - DNA, 25 bp, synthetic construct
  misc_feature 1..25: note = Oligonucleotide
  source 1..25: mol_type = other DNA
gcttgttttcccacaaaggactcta

SEQ ID NO: 7401 - DNA, 25 bp, synthetic construct
  misc_feature 1..25: note = Oligonucleotide
  source 1..25: mol_type = other DNA
caggcttgttttcccacaaaggact

SEQ ID NO: 7402 - DNA, 25 bp, synthetic construct
  misc_feature 1..25: note = Oligonucleotide
  source 1..25: mol_type = other DNA
caacaggcttgttttcccacaaagg

SEQ ID NO: 7403 - DNA, 25 bp, synthetic construct
  misc_feature 1..25: note = Oligonucleotide
  source 1..25: mol_type = other DNA
atccaacaggcttgttttcccacaa

SEQ ID NO: 7404 - DNA, 25 bp, synthetic construct
  misc_feature 1..25: note = Oligonucleotide
  source 1..25: mol_type = other DNA
tgcatccaacaggcttgttttccca

SEQ ID NO: 7405 - DNA, 25 bp, synthetic construct
  misc_feature 1..25: note = Oligonucleotide
  source 1..25: mol_type = other DNA
tgctgcatccaacaggcttgttttc

SEQ ID NO: 7406 - DNA, 25 bp, synthetic construct
  misc_feature 1..25: note = Oligonucleotide
  source 1..25: mol_type = other DNA
cagtgctgcatccaacaggcttgtt

SEQ ID NO: 7407 - DNA, 25 bp, synthetic construct
  misc_feature 1..25: note = Oligonucleotide
  source 1..25: mol_type = other DNA
ctccagtgctgcatccaacaggctt

SEQ ID NO: 7408 - DNA, 25 bp, synthetic construct
  misc_feature 1..25: note = Oligonucleotide
  source 1..25: mol_type = other DNA
cgtctccagtgctgcatccaacagg

SEQ ID NO: 7409 - DNA, 25 bp, synthetic construct
  misc_feature 1..25: note = Oligonucleotide
  source 1..25: mol_type = other DNA
gaccgtctccagtgctgcatccaac

SEQ ID NO: 7410 - DNA, 25 bp, synthetic construct
  misc_feature 1..25: note = Oligonucleotide
  source 1..25: mol_type = other DNA
caggaccgtctccagtgctgcatcc

SEQ ID NO: 7411 - DNA, 25 bp, synthetic construct
  misc_feature 1..25: note = Oligonucleotide
  source 1..25: mol_type = other DNA
cggcaggaccgtctccagtgctgca

SEQ ID NO: 7412 - DNA, 25 bp, synthetic construct
  misc_feature 1..25: note = Oligonucleotide
  source 1..25: mol_type = other DNA
atacggcaggaccgtctccagtgct

SEQ ID NO: 7413 - DNA, 25 bp, synthetic construct
  misc_feature 1..25: note = Oligonucleotide
  source 1..25: mol_type = other DNA
ctgatacggcaggaccgtctccagt

SEQ ID NO: 7414 - DNA, 25 bp, synthetic construct
  misc_feature 1..25: note = Oligonucleotide
  source 1..25: mol_type = other DNA
aaactgatacggcaggaccgtctcc

SEQ ID NO: 7415 - DNA, 25 bp, synthetic construct
  misc_feature 1..25: note = Oligonucleotide
  source 1..25: mol_type = other DNA
gacaaactgatacggcaggaccgtc

SEQ ID NO: 7416 - DNA, 25 bp, synthetic construct
  misc_feature 1..25: note = Oligonucleotide
  source 1..25: mol_type = other DNA
gaagacaaactgatacggcaggacc

SEQ ID NO: 7417 - DNA, 25 bp, synthetic construct
  misc_feature 1..25: note = Oligonucleotide
  source 1..25: mol_type = other DNA
tgtgaagacaaactgatacggcagg

SEQ ID NO: 7418 - DNA, 25 bp, synthetic construct
  misc_feature 1..25: note = Oligonucleotide
  source 1..25: mol_type = other DNA
cggtgtgaagacaaactgatacggc

SEQ ID NO: 7419 - DNA, 25 bp, synthetic construct
  misc_feature 1..25: note = Oligonucleotide
  source 1..25: mol_type = other DNA
gaacggtgtgaagacaaactgatac

SEQ ID NO: 7420 - DNA, 25 bp, synthetic construct
  misc_feature 1..25: note = Oligonucleotide
  source 1..25: mol_type = other DNA
acagaacggtgtgaagacaaactga

SEQ ID NO: 7421 - DNA, 25 bp, synthetic construct
  misc_feature 1..25: note = Oligonucleotide
  source 1..25: mol_type = other DNA
ctaacagaacggtgtgaagacaaac

SEQ ID NO: 7422 - DNA, 25 bp, synthetic construct
  misc_feature 1..25: note = Oligonucleotide
  source 1..25: mol_type = other DNA
cgtctaacagaacggtgtgaagaca

SEQ ID NO: 7423 - DNA, 25 bp, synthetic construct
  misc_feature 1..25: note = Oligonucleotide
  source 1..25: mol_type = other DNA
gtccgtctaacagaacggtgtgaag

SEQ ID NO: 7424 - DNA, 25 bp, synthetic construct
  misc_feature 1..25: note = Oligonucleotide
  source 1..25: mol_type = other DNA
agtgtccgtctaacagaacggtgtg

SEQ ID NO: 7425 - DNA, 25 bp, synthetic construct
  misc_feature 1..25: note = Oligonucleotide
  source 1..25: mol_type = other DNA
gttagtgtccgtctaacagaacggt

SEQ ID NO: 7426 - DNA, 25 bp, synthetic construct
  misc_feature 1..25: note = Oligonucleotide
  source 1..25: mol_type = other DNA
tctgttagtgtccgtctaacagaac

SEQ ID NO: 7427 - DNA, 25 bp, synthetic construct
  misc_feature 1..25: note = Oligonucleotide
  source 1..25: mol_type = other DNA
gattctgttagtgtccgtctaacag

SEQ ID NO: 7428 - DNA, 25 bp, synthetic construct
  misc_feature 1..25: note = Oligonucleotide
  source 1..25: mol_type = other DNA
gaggattctgttagtgtccgtctaa

SEQ ID NO: 7429 - DNA, 25 bp, synthetic construct
  misc_feature 1..25: note = Oligonucleotide
  source 1..25: mol_type = other DNA
catgaggattctgttagtgtccgtc

SEQ ID NO: 7430 - DNA, 25 bp, synthetic construct
  misc_feature 1..25: note = Oligonucleotide
  source 1..25: mol_type = other DNA
gaacatgaggattctgttagtgtcc

SEQ ID NO: 7431 - DNA, 25 bp, synthetic construct
  misc_feature 1..25: note = Oligonucleotide
  source 1..25: mol_type = other DNA
ctggaacatgaggattctgttagtg

SEQ ID NO: 7432 - DNA, 25 bp, synthetic construct
  misc_feature 1..25: note = Oligonucleotide
  source 1..25: mol_type = other DNA
tgtctggaacatgaggattctgtta

SEQ ID NO: 7433 - DNA, 25 bp, synthetic construct
  misc_feature 1..25: note = Oligonucleotide
  source 1..25: mol_type = other DNA
cattgtctggaacatgaggattctg

SEQ ID NO: 7434 - DNA, 25 bp, synthetic construct
  misc_feature 1..25: note = Oligonucleotide
  source 1..25: mol_type = other DNA
tttcattgtctggaacatgaggatt

SEQ ID NO: 7435 - DNA, 25 bp, synthetic construct
  misc_feature 1..25: note = Oligonucleotide
  source 1..25: mol_type = other DNA
cagtttcattgtctggaacatgagg

SEQ ID NO: 7436 - DNA, 25 bp, synthetic construct
  misc_feature 1..25: note = Oligonucleotide
  source 1..25: mol_type = other DNA
cctcagtttcattgtctggaacatg

SEQ ID NO: 7437 - DNA, 25 bp, synthetic construct
  misc_feature 1..25: note = Oligonucleotide
  source 1..25: mol_type = other DNA
gtacctcagtttcattgtctggaac

SEQ ID NO: 7438 - DNA, 25 bp, synthetic construct
  misc_feature 1..25: note = Oligonucleotide
  source 1..25: mol_type = other DNA
ctggtacctcagtttcattgtctgg

SEQ ID NO: 7439 - DNA, 25 bp, synthetic construct
  misc_feature 1..25: note = Oligonucleotide
  source 1..25: mol_type = other DNA
tctctggtacctcagtttcattgtc

SEQ ID NO: 7440 - DNA, 25 bp, synthetic construct
  misc_feature 1..25: note = Oligonucleotide
  source 1..25: mol_type = other DNA
agctctctggtacctcagtttcatt

SEQ ID NO: 7441 - DNA, 25 bp, synthetic construct
  misc_feature 1..25: note = Oligonucleotide
  source 1..25: mol_type = other DNA
ggaagctctctggtacctcagtttc

SEQ ID NO: 7442 - DNA, 25 bp, synthetic construct
  misc_feature 1..25: note = Oligonucleotide
  source 1..25: mol_type = other DNA
caaggaagctctctggtacctcagt

SEQ ID NO: 7443 - DNA, 25 bp, synthetic construct
  misc_feature 1..25: note = Oligonucleotide
  source 1..25: mol_type = other DNA
ctgcaaggaagctctctggtacctc

SEQ ID NO: 7444 - DNA, 25 bp, synthetic construct
  misc_feature 1..25: note = Oligonucleotide
  source 1..25: mol_type = other DNA
tgtctgcaaggaagctctctggtac

SEQ ID NO: 7445 - DNA, 25 bp, synthetic construct
  misc_feature 1..25: note = Oligonucleotide
  source 1..25: mol_type = other DNA
ttctgtctgcaaggaagctctctgg

SEQ ID NO: 7446 - DNA, 25 bp, synthetic construct
  misc_feature 1..25: note = Oligonucleotide
  source 1..25: mol_type = other DNA
gttttctgtctgcaaggaagctctc

SEQ ID NO: 7447 - DNA, 25 bp, synthetic construct
  misc_feature 1..25: note = Oligonucleotide
  source 1..25: mol_type = other DNA
accgttttctgtctgcaaggaagct

SEQ ID NO: 7448 - DNA, 25 bp, synthetic construct
  misc_feature 1..25: note = Oligonucleotide
  source 1..25: mol_type = other DNA
accaccgttttctgtctgcaaggaa

SEQ ID NO: 7449 - DNA, 25 bp, synthetic construct
  misc_feature 1..25: note = Oligonucleotide
  source 1..25: mol_type = other DNA
cagaccaccgttttctgtctgcaag

SEQ ID NO: 7450 - DNA, 25 bp, synthetic construct
  misc_feature 1..25: note = Oligonucleotide
  source 1..25: mol_type = other DNA
aggcagaccaccgttttctgtctgc

SEQ ID NO: 7451 - DNA, 25 bp, synthetic construct
  misc_feature 1..25: note = Oligonucleotide
  source 1..25: mol_type = other DNA
gtcaggcagaccaccgttttctgtc

SEQ ID NO: 7452 - DNA, 25 bp, synthetic construct
  misc_feature 1..25: note = Oligonucleotide
  source 1..25: mol_type = other DNA
atggtcaggcagaccaccgttttct

SEQ ID NO: 7453 - DNA, 25 bp, synthetic construct
  misc_feature 1..25: note = Oligonucleotide
  source 1..25: mol_type = other DNA
ctcatggtcaggcagaccaccgttt

SEQ ID NO: 7454 - DNA, 25 bp, synthetic construct
  misc_feature 1..25: note = Oligonucleotide
  source 1..25: mol_type = other DNA
gggctcatggtcaggcagaccaccg

SEQ ID NO: 7455 - DNA, 25 bp, synthetic construct
  misc_feature 1..25: note = Oligonucleotide
  source 1..25: mol_type = other DNA
gcagggctcatggtcaggcagacca

SEQ ID NO: 7456 - DNA, 25 bp, synthetic construct
  misc_feature 1..25: note = Oligonucleotide
  source 1..25: mol_type = other DNA
agagcagggctcatggtcaggcaga

SEQ ID NO: 7457 - DNA, 25 bp, synthetic construct
  misc_feature 1..25: note = Oligonucleotide
  source 1..25: mol_type = other DNA
cagagagcagggctcatggtcaggc

SEQ ID NO: 7458 - DNA, 25 bp, synthetic construct
  misc_feature 1..25: note = Oligonucleotide
  source 1..25: mol_type = other DNA
agccagagagcagggctcatggtca

SEQ ID NO: 7459 - DNA, 25 bp, synthetic construct
  misc_feature 1..25: note = Oligonucleotide
  source 1..25: mol_type = other DNA
ggcagccagagagcagggctcatgg

SEQ ID NO: 7460 - DNA, 25 bp, synthetic construct
  misc_feature 1..25: note = Oligonucleotide
  source 1..25: mol_type = other DNA
tacggcagccagagagcagggctca

SEQ ID NO: 7461 - DNA, 25 bp, synthetic construct
  misc_feature 1..25: note = Oligonucleotide
  source 1..25: mol_type = other DNA
ggttacggcagccagagagcagggc

SEQ ID NO: 7462 - DNA, 25 bp, synthetic construct
  misc_feature 1..25: note = Oligonucleotide
  source 1..25: mol_type = other DNA
cctggttacggcagccagagagcag

SEQ ID NO: 7463 - DNA, 25 bp, synthetic construct
  misc_feature 1..25: note = Oligonucleotide
  source 1..25: mol_type = other DNA
ggccctggttacggcagccagagag

SEQ ID NO: 7464 - DNA, 25 bp, synthetic construct
  misc_feature 1..25: note = Oligonucleotide
  source 1..25: mol_type = other DNA
agcggccctggttacggcagccaga

SEQ ID NO: 7465 - DNA, 25 bp, synthetic construct
  misc_feature 1..25: note = Oligonucleotide
  source 1..25: mol_type = other DNA
aacagcggccctggttacggcagcc

SEQ ID NO: 7466 - DNA, 25 bp, synthetic construct
  misc_feature 1..25: note = Oligonucleotide
  source 1..25: mol_type = other DNA
aacaacagcggccctggttacggca

SEQ ID NO: 7467 - DNA, 25 bp, synthetic construct
  misc_feature 1..25: note = Oligonucleotide
  source 1..25: mol_type = other DNA
cttaacaacagcggccctggttacg

SEQ ID NO: 7468 - DNA, 25 bp, synthetic construct
  misc_feature 1..25: note = Oligonucleotide
  source 1..25: mol_type = other DNA
gggcttaacaacagcggccctggtt

SEQ ID NO: 7469 - DNA, 25 bp, synthetic construct
  misc_feature 1..25: note = Oligonucleotide
  source 1..25: mol_type = other DNA
aaggggcttaacaacagcggccctg

SEQ ID NO: 7470 - DNA, 25 bp, synthetic construct
  misc_feature 1..25: note = Oligonucleotide
  source 1..25: mol_type = other DNA
cagaaggggcttaacaacagcggcc

SEQ ID NO: 7471 - DNA, 25 bp, synthetic construct
  misc_feature 1..25: note = Oligonucleotide
  source 1..25: mol_type = other DNA
catcagaaggggcttaacaacagcg

SEQ ID NO: 7472 - DNA, 25 bp, synthetic construct
  misc_feature 1..25: note = Oligonucleotide
  source 1..25: mol_type = other DNA
tgtcatcagaaggggcttaacaaca

SEQ ID NO: 7473 - DNA, 25 bp, synthetic construct
  misc_feature 1..25: note = Oligonucleotide
  source 1..25: mol_type = other DNA
gtgtgtcatcagaaggggcttaaca

SEQ ID NO: 7474 - DNA, 25 bp, synthetic construct
  misc_feature 1..25: note = Oligonucleotide
  source 1..25: mol_type = other DNA
attgtgtgtcatcagaaggggctta

SEQ ID NO: 7475 - DNA, 25 bp, synthetic construct
  misc_feature 1..25: note = Oligonucleotide
  source 1..25: mol_type = other DNA
cccattgtgtgtcatcagaaggggc

SEQ ID NO: 7476 - DNA, 25 bp, synthetic construct
  misc_feature 1..25: note = Oligonucleotide
  source 1..25: mol_type = other DNA
aagcccattgtgtgtcatcagaagg

SEQ ID NO: 7477 - DNA, 25 bp, synthetic construct
  misc_feature 1..25: note = Oligonucleotide
  source 1..25: mol_type = other DNA
caaaagcccattgtgtgtcatcaga

SEQ ID NO: 7478 - DNA, 25 bp, synthetic construct
  misc_feature 1..25: note = Oligonucleotide
  source 1..25: mol_type = other DNA
gggcaaaagcccattgtgtgtcatc

SEQ ID NO: 7479 - DNA, 25 bp, synthetic construct
  misc_feature 1..25: note = Oligonucleotide
  source 1..25: mol_type = other DNA
actgggcaaaagcccattgtgtgtc

SEQ ID NO: 7480 - DNA, 25 bp, synthetic construct
  misc_feature 1..25: note = Oligonucleotide
  source 1..25: mol_type = other DNA
gttactgggcaaaagcccattgtgt

SEQ ID NO: 7481 - DNA, 25 bp, synthetic construct
  misc_feature 1..25: note = Oligonucleotide
  source 1..25: mol_type = other DNA
ggcgttactgggcaaaagcccattg

SEQ ID NO: 7482 - DNA, 25 bp, synthetic construct
  misc_feature 1..25: note = Oligonucleotide
  source 1..25: mol_type = other DNA
aggggcgttactgggcaaaagccca

SEQ ID NO: 7483 - DNA, 25 bp, synthetic construct
  misc_feature 1..25: note = Oligonucleotide
  source 1..25: mol_type = other DNA
tggaggggcgttactgggcaaaagc

SEQ ID NO: 7484 - DNA, 25 bp, synthetic construct
  misc_feature 1..25: note = Oligonucleotide
  source 1..25: mol_type = other DNA
ctgtggaggggcgttactgggcaaa

SEQ ID NO: 7485 - DNA, 25 bp, synthetic construct
  misc_feature 1..25: note = Oligonucleotide
  source 1..25: mol_type = other DNA
cttctgtggaggggcgttactgggc

SEQ ID NO: 7486 - DNA, 25 bp, synthetic construct
  misc_feature 1..25: note = Oligonucleotide
  source 1..25: mol_type = other DNA
ccacttctgtggaggggcgttactg

SEQ ID NO: 7487 - DNA, 25 bp, synthetic construct
  misc_feature 1..25: note = Oligonucleotide
  source 1..25: mol_type = other DNA
ctgccacttctgtggaggggcgtta

SEQ ID NO: 7488 - DNA, 25 bp, synthetic construct
  misc_feature 1..25: note = Oligonucleotide
  source 1..25: mol_type = other DNA
cacctgccacttctgtggaggggcg

SEQ ID NO: 7489 - DNA, 25 bp, synthetic construct
  misc_feature 1..25: note = Oligonucleotide
  source 1..25: mol_type = other DNA
acacacctgccacttctgtggaggg

SEQ ID NO: 7490 - DNA, 25 bp, synthetic construct
  misc_feature 1..25: note = Oligonucleotide
  source 1..25: mol_type = other DNA
tgcacacacctgccacttctgtgga

SEQ ID NO: 7491 - DNA, 25 bp, synthetic construct
  misc_feature 1..25: note = Oligonucleotide
  source 1..25: mol_type = other DNA
ccatgcacacacctgccacttctgt

SEQ ID NO: 7492 - DNA, 25 bp, synthetic construct
  misc_feature 1..25: note = Oligonucleotide
  source 1..25: mol_type = other DNA
gtgccatgcacacacctgccacttc

SEQ ID NO: 7493 - DNA, 25 bp, synthetic construct
  misc_feature 1..25: note = Oligonucleotide
  source 1..25: mol_type = other DNA
tctgtgccatgcacacacctgccac

SEQ ID NO: 7494 - DNA, 25 bp, synthetic construct
  misc_feature 1..25: note = Oligonucleotide
  source 1..25: mol_type = other DNA
gagtctgtgccatgcacacacctgc

SEQ ID NO: 7495 - DNA, 25 bp, synthetic construct
  misc_feature 1..25: note = Oligonucleotide
  source 1..25: mol_type = other DNA
ggtgagtctgtgccatgcacacacc

SEQ ID NO: 7496 - DNA, 25 bp, synthetic construct
  misc_feature 1..25: note = Oligonucleotide
  source 1..25: mol_type = other DNA
gggggtgagtctgtgccatgcacac

SEQ ID NO: 7497 - DNA, 25 bp, synthetic construct
  misc_feature 1..25: note = Oligonucleotide
  source 1..25: mol_type = other DNA
agcgggggtgagtctgtgccatgca

SEQ ID NO: 7498 - DNA, 25 bp, synthetic construct
  misc_feature 1..25: note = Oligonucleotide
  source 1..25: mol_type = other DNA
aacagcgggggtgagtctgtgccat

SEQ ID NO: 7499 - DNA, 25 bp, synthetic construct
  misc_feature 1..25: note = Oligonucleotide
  source 1..25: mol_type = other DNA
gtaaacagcgggggtgagtctgtgc

SEQ ID NO: 7500 - DNA, 25 bp, synthetic construct
  misc_feature 1..25: note = Oligonucleotide
  source 1..25: mol_type = other DNA
ccagtaaacagcgggggtgagtctg

SEQ ID NO: 7501 - DNA, 25 bp, synthetic construct
  misc_feature 1..25: note = Oligonucleotide
  source 1..25: mol_type = other DNA
tgaccagtaaacagcgggggtgagt

SEQ ID NO: 7502 - DNA, 25 bp, synthetic construct
  misc_feature 1..25: note = Oligonucleotide
  source 1..25: mol_type = other DNA
acatgaccagtaaacagcgggggtg

SEQ ID NO: 7503 - DNA, 25 bp, synthetic construct
  misc_feature 1..25: note = Oligonucleotide
  source 1..25: mol_type = other DNA
caaacatgaccagtaaacagcgggg

SEQ ID NO: 7504 - DNA, 25 bp, synthetic construct
  misc_feature 1..25: note = Oligonucleotide
  source 1..25: mol_type = other DNA
tgacaaacatgaccagtaaacagcg

SEQ ID NO: 7505 - DNA, 25 bp, synthetic construct
  misc_feature 1..25: note = Oligonucleotide
  source 1..25: mol_type = other DNA
ttatgacaaacatgaccagtaaaca

SEQ ID NO: 7506 - DNA, 25 bp, synthetic construct
  misc_feature 1..25: note = Oligonucleotide
  source 1..25: mol_type = other DNA
tacttatgacaaacatgaccagtaa

SEQ ID NO: 7507 - DNA, 25 bp, synthetic construct
  misc_feature 1..25: note = Oligonucleotide
  source 1..25: mol_type = other DNA
tgctacttatgacaaacatgaccag

SEQ ID NO: 7508 - DNA, 25 bp, synthetic construct
  misc_feature 1..25: note = Oligonucleotide
  source 1..25: mol_type = other DNA
aggtgctacttatgacaaacatgac

SEQ ID NO: 7509 - DNA, 25 bp, synthetic construct
  misc_feature 1..25: note = Oligonucleotide
  source 1..25: mol_type = other DNA
accaggtgctacttatgacaaacat

SEQ ID NO: 7510 - DNA, 25 bp, synthetic construct
  misc_feature 1..25: note = Oligonucleotide
  source 1..25: mol_type = other DNA
ggcaccaggtgctacttatgacaaa

SEQ ID NO: 7511 - DNA, 25 bp, synthetic construct
  misc_feature 1..25: note = Oligonucleotide
  source 1..25: mol_type = other DNA
ggtggcaccaggtgctacttatgac

SEQ ID NO: 7512 - DNA, 25 bp, synthetic construct
  misc_feature 1..25: note = Oligonucleotide
  source 1..25: mol_type = other DNA
tcaggtggcaccaggtgctacttat

SEQ ID NO: 7513 - DNA, 25 bp, synthetic construct
  misc_feature 1..25: note = Oligonucleotide
  source 1..25: mol_type = other DNA
cactcaggtggcaccaggtgctact

SEQ ID NO: 7514 - DNA, 25 bp, synthetic construct
  misc_feature 1..25: note = Oligonucleotide
  source 1..25: mol_type = other DNA
ggccactcaggtggcaccaggtgct

SEQ ID NO: 7515 - DNA, 25 bp, synthetic construct
  misc_feature 1..25: note = Oligonucleotide
  source 1..25: mol_type = other DNA
gtaggccactcaggtggcaccaggt

SEQ ID NO: 7516 - DNA, 25 bp, synthetic construct
  misc_feature 1..25: note = Oligonucleotide
  source 1..25: mol_type = other DNA
cgggtaggccactcaggtggcacca

SEQ ID NO: 7517 - DNA, 25 bp, synthetic construct
  misc_feature 1..25: note = Oligonucleotide
  source 1..25: mol_type = other DNA
gcccgggtaggccactcaggtggca

SEQ ID NO: 7518 - DNA, 25 bp, synthetic construct
  misc_feature 1..25: note = Oligonucleotide
  source 1..25: mol_type = other DNA
caggcccgggtaggccactcaggtg

SEQ ID NO: 7519 - DNA, 25 bp, synthetic construct
  misc_feature 1..25: note = Oligonucleotide
  source 1..25: mol_type = other DNA
aagcaggcccgggtaggccactcag

SEQ ID NO: 7520 - DNA, 25 bp, synthetic construct
  misc_feature 1..25: note = Oligonucleotide
  source 1..25: mol_type = other DNA
gaaaagcaggcccgggtaggccact

SEQ ID NO: 7521 - DNA, 25 bp, synthetic construct
  misc_feature 1..25: note = Oligonucleotide
  source 1..25: mol_type = other DNA
aaggaaaagcaggcccgggtaggcc

SEQ ID NO: 7522 - DNA, 25 bp, synthetic construct
  misc_feature 1..25: note = Oligonucleotide
  source 1..25: mol_type = other DNA
gagaaggaaaagcaggcccgggtag

SEQ ID NO: 7523 - DNA, 25 bp, synthetic construct
  misc_feature 1..25: note = Oligonucleotide
  source 1..25: mol_type = other DNA
actgagaaggaaaagcaggcccggg

SEQ ID NO: 7524 - DNA, 25 bp, synthetic construct
  misc_feature 1..25: note = Oligonucleotide
  source 1..25: mol_type = other DNA
caaactgagaaggaaaagcaggccc

SEQ ID NO: 7525 - DNA, 25 bp, synthetic construct
  misc_feature 1..25: note = Oligonucleotide
  source 1..25: mol_type = other DNA
aggcaaactgagaaggaaaagcagg

SEQ ID NO: 7526 - DNA, 25 bp, synthetic construct
  misc_feature 1..25: note = Oligonucleotide
  source 1..25: mol_type = other DNA
cagaggcaaactgagaaggaaaagc

SEQ ID NO: 7527 - DNA, 25 bp, synthetic construct
  misc_feature 1..25: note = Oligonucleotide
  source 1..25: mol_type = other DNA
acacagaggcaaactgagaaggaaa

SEQ ID NO: 7528 - DNA, 25 bp, synthetic construct
  misc_feature 1..25: note = Oligonucleotide
  source 1..25: mol_type = other DNA
gtaacacagaggcaaactgagaagg

SEQ ID NO: 7529 - DNA, 25 bp, synthetic construct
  misc_feature 1..25: note = Oligonucleotide
  source 1..25: mol_type = other DNA
aaggtaacacagaggcaaactgaga

SEQ ID NO: 7530 - DNA, 25 bp, synthetic construct
  misc_feature 1..25: note = Oligonucleotide
  source 1..25: mol_type = other DNA
cagaaggtaacacagaggcaaactg

SEQ ID NO: 7531 - DNA, 25 bp, synthetic construct
  misc_feature 1..25: note = Oligonucleotide
  source 1..25: mol_type = other DNA
gaacagaaggtaacacagaggcaaa

SEQ ID NO: 7532 - DNA, 25 bp, synthetic construct
  misc_feature 1..25: note = Oligonucleotide
  source 1..25: mol_type = other DNA
ctggaacagaaggtaacacagaggc

SEQ ID NO: 7533 - DNA, 25 bp, synthetic construct
  misc_feature 1..25: note = Oligonucleotide
  source 1..25: mol_type = other DNA
gagctggaacagaaggtaacacaga

SEQ ID NO: 7534 - DNA, 25 bp, synthetic construct
  misc_feature 1..25: note = Oligonucleotide
  source 1..25: mol_type = other DNA
agtgagctggaacagaaggtaacac

SEQ ID NO: 7535 - DNA, 25 bp, synthetic construct
  misc_feature 1..25: note = Oligonucleotide
  source 1..25: mol_type = other DNA
aagagtgagctggaacagaaggtaa

SEQ ID NO: 7536 - DNA, 25 bp, synthetic construct
  misc_feature 1..25: note = Oligonucleotide
  source 1..25: mol_type = other DNA
aggaagagtgagctggaacagaagg

SEQ ID NO: 7537 - DNA, 25 bp, synthetic construct
  misc_feature 1..25: note = Oligonucleotide
  source 1..25: mol_type = other DNA
gaaaggaagagtgagctggaacaga

SEQ ID NO: 7538 - DNA, 25 bp, synthetic construct
  misc_feature 1..25: note = Oligonucleotide
  source 1..25: mol_type = other DNA
ggtgaaaggaagagtgagctggaac

SEQ ID NO: 7539 - DNA, 25 bp, synthetic construct
  misc_feature 1..25: note = Oligonucleotide
  source 1..25: mol_type = other DNA
gagggtgaaaggaagagtgagctgg

SEQ ID NO: 7540 - DNA, 25 bp, synthetic construct
  misc_feature 1..25: note = Oligonucleotide
  source 1..25: mol_type = other DNA
caagagggtgaaaggaagagtgagc

SEQ ID NO: 7541 - DNA, 25 bp, synthetic construct
  misc_feature 1..25: note = Oligonucleotide
  source 1..25: mol_type = other DNA
gcgcaagagggtgaaaggaagagtg

SEQ ID NO: 7542 - DNA, 25 bp, synthetic construct
  misc_feature 1..25: note = Oligonucleotide
  source 1..25: mol_type = other DNA
ggagcgcaagagggtgaaaggaaga

SEQ ID NO: 7543 - DNA, 25 bp, synthetic construct
  misc_feature 1..25: note = Oligonucleotide
  source 1..25: mol_type = other DNA
gaaggagcgcaagagggtgaaagga

SEQ ID NO: 7544 - DNA, 25 bp, synthetic construct
  misc_feature 1..25: note = Oligonucleotide
  source 1..25: mol_type = other DNA
cgagaaggagcgcaagagggtgaaa

SEQ ID NO: 7545 - DNA, 25 bp, synthetic construct
  misc_feature 1..25: note = Oligonucleotide
  source 1..25: mol_type = other DNA
gggcgagaaggagcgcaagagggtg

SEQ ID NO: 7546 - DNA, 25 bp, synthetic construct
  misc_feature 1..25: note = Oligonucleotide
  source 1..25: mol_type = other DNA
tgagggcgagaaggagcgcaagagg

SEQ ID NO: 7547 - DNA, 25 bp, synthetic construct
  misc_feature 1..25: note = Oligonucleotide
  source 1..25: mol_type = other DNA
gtctgagggcgagaaggagcgcaag

SEQ ID NO: 7548 - DNA, 25 bp, synthetic construct
  misc_feature 1..25: note = Oligonucleotide
  source 1..25: mol_type = other DNA
caggtctgagggcgagaaggagcgc

SEQ ID NO: 7549 - DNA, 25 bp, synthetic construct
  misc_feature 1..25: note = Oligonucleotide
  source 1..25: mol_type = other DNA
gcccaggtctgagggcgagaaggag

SEQ ID NO: 7550 - DNA, 25 bp, synthetic construct
  misc_feature 1..25: note = Oligonucleotide
  source 1..25: mol_type = other DNA
tcagcccaggtctgagggcgagaag

SEQ ID NO: 7551 - DNA, 25 bp, synthetic construct
  misc_feature 1..25: note = Oligonucleotide
  source 1..25: mol_type = other DNA
agttcagcccaggtctgagggcgag

SEQ ID NO: 7552 - DNA, 25 bp, synthetic construct
  misc_feature 1..25: note = Oligonucleotide
  source 1..25: mol_type = other DNA
tgtagttcagcccaggtctgagggc

SEQ ID NO: 7553 - DNA, 25 bp, synthetic construct
  misc_feature 1..25: note = Oligonucleotide
  source 1..25: mol_type = other DNA
ggctgtagttcagcccaggtctgag

SEQ ID NO: 7554 - DNA, 25 bp, synthetic construct
  misc_feature 1..25: note = Oligonucleotide
  source 1..25: mol_type = other DNA
gatggctgtagttcagcccaggtct

SEQ ID NO: 7555 - DNA, 25 bp, synthetic construct
  misc_feature 1..25: note = Oligonucleotide
  source 1..25: mol_type = other DNA
ccagatggctgtagttcagcccagg

SEQ ID NO: 7556 - DNA, 25 bp, synthetic construct
  misc_feature 1..25: note = Oligonucleotide
  source 1..25: mol_type = other DNA
cctccagatggctgtagttcagccc

SEQ ID NO: 7557 - DNA, 25 bp, synthetic construct
  misc_feature 1..25: note = Oligonucleotide
  source 1..25: mol_type = other DNA
gcccctccagatggctgtagttcag

SEQ ID NO: 7558 - DNA, 25 bp, synthetic construct
  misc_feature 1..25: note = Oligonucleotide
  source 1..25: mol_type = other DNA
ggggcccctccagatggctgtagtt

SEQ ID NO: 7559 - DNA, 25 bp, synthetic construct
  misc_feature 1..25: note = Oligonucleotide
  source 1..25: mol_type = other DNA
gcaggggcccctccagatggctgta

SEQ ID NO: 7560 - DNA, 25 bp, synthetic construct
  misc_feature 1..25: note = Oligonucleotide
  source 1..25: mol_type = other DNA
tgggcaggggcccctccagatggct

SEQ ID NO: 7561 - DNA, 25 bp, synthetic construct
  misc_feature 1..25: note = Oligonucleotide
  source 1..25: mol_type = other DNA
gggtgggcaggggcccctccagatg

SEQ ID NO: 7562 - DNA, 25 bp, synthetic construct
  misc_feature 1..25: note = Oligonucleotide
  source 1..25: mol_type = other DNA
ccagggtgggcaggggcccctccag

SEQ ID NO: 7563 - DNA, 25 bp, synthetic construct
  misc_feature 1..25: note = Oligonucleotide
  source 1..25: mol_type = other DNA
ggcccagggtgggcaggggcccctc

SEQ ID NO: 7564 - DNA, 25 bp, synthetic construct
  misc_feature 1..25: note = Oligonucleotide
  source 1..25: mol_type = other DNA
aagggcccagggtgggcaggggccc

SEQ ID NO: 7565 - DNA, 25 bp, synthetic construct
  misc_feature 1..25: note = Oligonucleotide
  source 1..25: mol_type = other DNA
gttaagggcccagggtgggcagggg

SEQ ID NO: 7566 - DNA, 25 bp, synthetic construct
  misc_feature 1..25: note = Oligonucleotide
  source 1..25: mol_type = other DNA
gaagttaagggcccagggtgggcag

SEQ ID NO: 7567 - DNA, 25 bp, synthetic construct
  misc_feature 1..25: note = Oligonucleotide
  source 1..25: mol_type = other DNA
ccggaagttaagggcccagggtggg

SEQ ID NO: 7568 - DNA, 25 bp, synthetic construct
  misc_feature 1..25: note = Oligonucleotide
  source 1..25: mol_type = other DNA
gcaccggaagttaagggcccagggt

SEQ ID NO: 7569 - DNA, 25 bp, synthetic construct
  misc_feature 1..25: note = Oligonucleotide
  source 1..25: mol_type = other DNA
gaagcaccggaagttaagggcccag

SEQ ID NO: 7570 - DNA, 25 bp, synthetic construct
  misc_feature 1..25: note = Oligonucleotide
  source 1..25: mol_type = other DNA
ccagaagcaccggaagttaagggcc

SEQ ID NO: 7571 - DNA, 25 bp, synthetic construct
  misc_feature 1..25: note = Oligonucleotide
  source 1..25: mol_type = other DNA
cagccagaagcaccggaagttaagg

SEQ ID NO: 7572 - DNA, 25 bp, synthetic construct
  misc_feature 1..25: note = Oligonucleotide
  source 1..25: mol_type = other DNA
ctgcagccagaagcaccggaagtta

SEQ ID NO: 7573 - DNA, 25 bp, synthetic construct
  misc_feature 1..25: note = Oligonucleotide
  source 1..25: mol_type = other DNA
tgcctgcagccagaagcaccggaag

SEQ ID NO: 7574 - DNA, 25 bp, synthetic construct
  misc_feature 1..25: note = Oligonucleotide
  source 1..25: mol_type = other DNA
cgctgcctgcagccagaagcaccgg

SEQ ID NO: 7575 - DNA, 25 bp, synthetic construct
  misc_feature 1..25: note = Oligonucleotide
  source 1..25: mol_type = other DNA
ctccgctgcctgcagccagaagcac

SEQ ID NO: 7576 - DNA, 25 bp, synthetic construct
  misc_feature 1..25: note = Oligonucleotide
  source 1..25: mol_type = other DNA
ccgctccgctgcctgcagccagaag

SEQ ID NO: 7577 - DNA, 25 bp, synthetic construct
  misc_feature 1..25: note = Oligonucleotide
  source 1..25: mol_type = other DNA
gctccgctccgctgcctgcagccag

SEQ ID NO: 7578 - DNA, 25 bp, synthetic construct
  misc_feature 1..25: note = Oligonucleotide
  source 1..25: mol_type = other DNA
tgtgctccgctccgctgcctgcagc

SEQ ID NO: 7579 - DNA, 25 bp, synthetic construct
  misc_feature 1..25: note = Oligonucleotide
  source 1..25: mol_type = other DNA
tcctgtgctccgctccgctgcctgc

SEQ ID NO: 7580 - DNA, 25 bp, synthetic construct
  misc_feature 1..25: note = Oligonucleotide
  source 1..25: mol_type = other DNA
gtgtcctgtgctccgctccgctgcc

SEQ ID NO: 7581 - DNA, 25 bp, synthetic construct
  misc_feature 1..25: note = Oligonucleotide
  source 1..25: mol_type = other DNA
caagtgtcctgtgctccgctccgct

SEQ ID NO: 7582 - DNA, 25 bp, synthetic construct
  misc_feature 1..25: note = Oligonucleotide
  source 1..25: mol_type = other DNA
caccaagtgtcctgtgctccgctcc

SEQ ID NO: 7583 - DNA, 25 bp, synthetic construct
  misc_feature 1..25: note = Oligonucleotide
  source 1..25: mol_type = other DNA
catcaccaagtgtcctgtgctccgc

SEQ ID NO: 7584 - DNA, 25 bp, synthetic construct
  misc_feature 1..25: note = Oligonucleotide
  source 1..25: mol_type = other DNA
agacatcaccaagtgtcctgtgctc

SEQ ID NO: 7585 - DNA, 25 bp, synthetic construct
  misc_feature 1..25: note = Oligonucleotide
  source 1..25: mol_type = other DNA
ctcagacatcaccaagtgtcctgtg

SEQ ID NO: 7586 - DNA, 25 bp, synthetic construct
  misc_feature 1..25: note = Oligonucleotide
  source 1..25: mol_type = other DNA
ggactcagacatcaccaagtgtcct

SEQ ID NO: 7587 - DNA, 25 bp, synthetic construct
  misc_feature 1..25: note = Oligonucleotide
  source 1..25: mol_type = other DNA
actggactcagacatcaccaagtgt

SEQ ID NO: 7588 - DNA, 25 bp, synthetic construct
  misc_feature 1..25: note = Oligonucleotide
  source 1..25: mol_type = other DNA
aggactggactcagacatcaccaag

SEQ ID NO: 7589 - DNA, 25 bp, synthetic construct
  misc_feature 1..25: note = Oligonucleotide
  source 1..25: mol_type = other DNA
aacaggactggactcagacatcacc

SEQ ID NO: 7590 - DNA, 25 bp, synthetic construct
  misc_feature 1..25: note = Oligonucleotide
  source 1..25: mol_type = other DNA
tgaaacaggactggactcagacatc

SEQ ID NO: 7591 - DNA, 25 bp, synthetic construct
  misc_feature 1..25: note = Oligonucleotide
  source 1..25: mol_type = other DNA
atctgaaacaggactggactcagac

SEQ ID NO: 7592 - DNA, 25 bp, synthetic construct
  misc_feature 1..25: note = Oligonucleotide
  source 1..25: mol_type = other DNA
cagatctgaaacaggactggactca

SEQ ID NO: 7593 - DNA, 25 bp, synthetic construct
  misc_feature 1..25: note = Oligonucleotide
  source 1..25: mol_type = other DNA
gaccagatctgaaacaggactggac

SEQ ID NO: 7594 - DNA, 25 bp, synthetic construct
  misc_feature 1..25: note = Oligonucleotide
  source 1..25: mol_type = other DNA
aaggaccagatctgaaacaggactg

SEQ ID NO: 7595 - DNA, 25 bp, synthetic construct
  misc_feature 1..25: note = Oligonucleotide
  source 1..25: mol_type = other DNA
cacaaggaccagatctgaaacagga

SEQ ID NO: 7596 - DNA, 25 bp, synthetic construct
  misc_feature 1..25: note = Oligonucleotide
  source 1..25: mol_type = other DNA
gcacacaaggaccagatctgaaaca

SEQ ID NO: 7597 - DNA, 25 bp, synthetic construct
  misc_feature 1..25: note = Oligonucleotide
  source 1..25: mol_type = other DNA
tgggcacacaaggaccagatctgaa

SEQ ID NO: 7598 - DNA, 25 bp, synthetic construct
  misc_feature 1..25: note = Oligonucleotide
  source 1..25: mol_type = other DNA
cggtgggcacacaaggaccagatct

SEQ ID NO: 7599 - DNA, 25 bp, synthetic construct
  misc_feature 1..25: note = Oligonucleotide
  source 1..25: mol_type = other DNA
ccacggtgggcacacaaggaccaga

SEQ ID NO: 7600 - DNA, 25 bp, synthetic construct
  misc_feature 1..25: note = Oligonucleotide
  source 1..25: mol_type = other DNA
cagccacggtgggcacacaaggacc

SEQ ID NO: 7601 - DNA, 25 bp, synthetic construct
  misc_feature 1..25: note = Oligonucleotide
  source 1..25: mol_type = other DNA
caacagccacggtgggcacacaagg

SEQ ID NO: 7602 - DNA, 25 bp, synthetic construct
  misc_feature 1..25: note = Oligonucleotide
  source 1..25: mol_type = other DNA
tgacaacagccacggtgggcacaca

SEQ ID NO: 7603 - DNA, 25 bp, synthetic construct
  misc_feature 1..25: note = Oligonucleotide
  source 1..25: mol_type = other DNA
agctgacaacagccacggtgggcac

SEQ ID NO: 7604 - DNA, 25 bp, synthetic construct
  misc_feature 1..25: note = Oligonucleotide
  source 1..25: mol_type = other DNA
aagagctgacaacagccacggtggg

SEQ ID NO: 7605 - DNA, 25 bp, synthetic construct
  misc_feature 1..25: note = Oligonucleotide
  source 1..25: mol_type = other DNA
gacaagagctgacaacagccacggt

SEQ ID NO: 7606 - DNA, 25 bp, synthetic construct
  misc_feature 1..25: note = Oligonucleotide
  source 1..25: mol_type = other DNA
caggacaagagctgacaacagccac

SEQ ID NO: 7607 - DNA, 25 bp, synthetic construct
  misc_feature 1..25: note = Oligonucleotide
  source 1..25: mol_type = other DNA
ccgcaggacaagagctgacaacagc

SEQ ID NO: 7608 - DNA, 25 bp, synthetic construct
  misc_feature 1..25: note = Oligonucleotide
  source 1..25: mol_type = other DNA
gggccgcaggacaagagctgacaac

SEQ ID NO: 7609 - DNA, 25 bp, synthetic construct
  misc_feature 1..25: note = Oligonucleotide
  source 1..25: mol_type = other DNA
taggggccgcaggacaagagctgac

SEQ ID NO: 7610 - DNA, 25 bp, synthetic construct
  misc_feature 1..25: note = Oligonucleotide
  source 1..25: mol_type = other DNA
cattaggggccgcaggacaagagct

SEQ ID NO: 7611 - DNA, 25 bp, synthetic construct
  misc_feature 1..25: note = Oligonucleotide
  source 1..25: mol_type = other DNA
agccattaggggccgcaggacaaga

SEQ ID NO: 7612 - DNA, 25 bp, synthetic construct
  misc_feature 1..25: note = Oligonucleotide
  source 1..25: mol_type = other DNA
tccagccattaggggccgcaggaca

SEQ ID NO: 7613 - DNA, 25 bp, synthetic construct
  misc_feature 1..25: note = Oligonucleotide
  source 1..25: mol_type = other DNA
gactccagccattaggggccgcagg

SEQ ID NO: 7614 - DNA, 25 bp, synthetic construct
  misc_feature 1..25: note = Oligonucleotide
  source 1..25: mol_type = other DNA
ccggactccagccattaggggccgc

SEQ ID NO: 7615 - DNA, 25 bp, synthetic construct
  misc_feature 1..25: note = Oligonucleotide
  source 1..25: mol_type = other DNA
gtaccggactccagccattaggggc

SEQ ID NO: 7616 - DNA, 25 bp, synthetic construct
  misc_feature 1..25: note = Oligonucleotide
  source 1..25: mol_type = other DNA
tgagtaccggactccagccattagg

SEQ ID NO: 7617 - DNA, 25 bp, synthetic construct
  misc_feature 1..25: note = Oligonucleotide
  source 1..25: mol_type = other DNA
cagtgagtaccggactccagccatt

SEQ ID NO: 7618 - DNA, 25 bp, synthetic construct
  misc_feature 1..25: note = Oligonucleotide
  source 1..25: mol_type = other DNA
gagcagtgagtaccggactccagcc

SEQ ID NO: 7619 - DNA, 25 bp, synthetic construct
  misc_feature 1..25: note = Oligonucleotide
  source 1..25: mol_type = other DNA
agtgagcagtgagtaccggactcca

SEQ ID NO: 7620 - DNA, 25 bp, synthetic construct
  misc_feature 1..25: note = Oligonucleotide
  source 1..25: mol_type = other DNA
ctaagtgagcagtgagtaccggact

SEQ ID NO: 7621 - DNA, 25 bp, synthetic construct
  misc_feature 1..25: note = Oligonucleotide
  source 1..25: mol_type = other DNA
tccctaagtgagcagtgagtaccgg

SEQ ID NO: 7622 - DNA, 25 bp, synthetic construct
  misc_feature 1..25: note = Oligonucleotide
  source 1..25: mol_type = other DNA
ttatccctaagtgagcagtgagtac

SEQ ID NO: 7623 - DNA, 25 bp, synthetic construct
  misc_feature 1..25: note = Oligonucleotide
  source 1..25: mol_type = other DNA
gttttatccctaagtgagcagtgag

SEQ ID NO: 7624 - DNA, 25 bp, synthetic construct
  misc_feature 1..25: note = Oligonucleotide
  source 1..25: mol_type = other DNA
gcagttttatccctaagtgagcagt

SEQ ID NO: 7625 - DNA, 25 bp, synthetic construct
  misc_feature 1..25: note = Oligonucleotide
  source 1..25: mol_type = other DNA
ccagcagttttatccctaagtgagc

SEQ ID NO: 7626 - DNA, 25 bp, synthetic construct
  misc_feature 1..25: note = Oligonucleotide
  source 1..25: mol_type = other DNA
ccaccagcagttttatccctaagtg

SEQ ID NO: 7627 - DNA, 25 bp, synthetic construct
  misc_feature 1..25: note = Oligonucleotide
  source 1..25: mol_type = other DNA
gttccaccagcagttttatccctaa

SEQ ID NO: 7628 - DNA, 25 bp, synthetic construct
  misc_feature 1..25: note = Oligonucleotide
  source 1..25: mol_type = other DNA
gcagttccaccagcagttttatccc

SEQ ID NO: 7629 - DNA, 25 bp, synthetic construct
  misc_feature 1..25: note = Oligonucleotide
  source 1..25: mol_type = other DNA
taggcagttccaccagcagttttat

SEQ ID NO: 7630 - DNA, 25 bp, synthetic construct
  misc_feature 1..25: note = Oligonucleotide
  source 1..25: mol_type = other DNA
ctttaggcagttccaccagcagttt

SEQ ID NO: 7631 - DNA, 25 bp, synthetic construct
  misc_feature 1..25: note = Oligonucleotide
  source 1..25: mol_type = other DNA
acactttaggcagttccaccagcag

SEQ ID NO: 7632 - DNA, 25 bp, synthetic construct
  misc_feature 1..25: note = Oligonucleotide
  source 1..25: mol_type = other DNA
cccacactttaggcagttccaccag

SEQ ID NO: 7633 - DNA, 25 bp, synthetic construct
  misc_feature 1..25: note = Oligonucleotide
  source 1..25: mol_type = other DNA
cctcccacactttaggcagttccac

SEQ ID NO: 7634 - DNA, 25 bp, synthetic construct
  misc_feature 1..25: note = Oligonucleotide
  source 1..25: mol_type = other DNA
gaacctcccacactttaggcagttc

SEQ ID NO: 7635 - DNA, 25 bp, synthetic construct
  misc_feature 1..25: note = Oligonucleotide
  source 1..25: mol_type = other DNA
tcagaacctcccacactttaggcag

SEQ ID NO: 7636 - DNA, 25 bp, synthetic construct
  misc_feature 1..25: note = Oligonucleotide
  source 1..25: mol_type = other DNA
atgtcagaacctcccacactttagg

SEQ ID NO: 7637 - DNA, 25 bp, synthetic construct
  misc_feature 1..25: note = Oligonucleotide
  source 1..25: mol_type = other DNA
tggatgtcagaacctcccacacttt

SEQ ID NO: 7638 - DNA, 25 bp, synthetic construct
  misc_feature 1..25: note = Oligonucleotide
  source 1..25: mol_type = other DNA
acctggatgtcagaacctcccacac

SEQ ID NO: 7639 - DNA, 25 bp, synthetic construct
  misc_feature 1..25: note = Oligonucleotide
  source 1..25: mol_type = other DNA
catacctggatgtcagaacctccca

SEQ ID NO: 7640 - DNA, 25 bp, synthetic construct
  misc_feature 1..25: note = Oligonucleotide
  source 1..25: mol_type = other DNA
agccatacctggatgtcagaacctc

SEQ ID NO: 7641 - DNA, 25 bp, synthetic construct
  misc_feature 1..25: note = Oligonucleotide
  source 1..25: mol_type = other DNA
agcagccatacctggatgtcagaac

SEQ ID NO: 7642 - DNA, 25 bp, synthetic construct
  misc_feature 1..25: note = Oligonucleotide
  source 1..25: mol_type = other DNA
ggaagcagccatacctggatgtcag

SEQ ID NO: 7643 - DNA, 25 bp, synthetic construct
  misc_feature 1..25: note = Oligonucleotide
  source 1..25: mol_type = other DNA
gaaggaagcagccatacctggatgt

SEQ ID NO: 7644 - DNA, 25 bp, synthetic construct
  misc_feature 1..25: note = Oligonucleotide
  source 1..25: mol_type = other DNA
tgggaaggaagcagccatacctgga

SEQ ID NO: 7645 - DNA, 25 bp, synthetic construct
  misc_feature 1..25: note = Oligonucleotide
  source 1..25: mol_type = other DNA
ccctgggaaggaagcagccatacct

SEQ ID NO: 7646 - DNA, 25 bp, synthetic construct
  misc_feature 1..25: note = Oligonucleotide
  source 1..25: mol_type = other DNA
tggccctgggaaggaagcagccata

SEQ ID NO: 7647 - DNA, 25 bp, synthetic construct
  misc_feature 1..25: note = Oligonucleotide
  source 1..25: mol_type = other DNA
gactggccctgggaaggaagcagcc

SEQ ID NO: 7648 - DNA, 25 bp, synthetic construct
  misc_feature 1..25: note = Oligonucleotide
  source 1..25: mol_type = other DNA
cacgactggccctgggaaggaagca

SEQ ID NO: 7649 - DNA, 25 bp, synthetic construct
  misc_feature 1..25: note = Oligonucleotide
  source 1..25: mol_type = other DNA
tgccacgactggccctgggaaggaa

SEQ ID NO: 7650 - DNA, 25 bp, synthetic construct
  misc_feature 1..25: note = Oligonucleotide
  source 1..25: mol_type = other DNA
ctctgccacgactggccctgggaag

SEQ ID NO: 7651 - DNA, 25 bp, synthetic construct
  misc_feature 1..25: note = Oligonucleotide
  source 1..25: mol_type = other DNA
cgcctctgccacgactggccctggg

SEQ ID NO: 7652 - DNA, 25 bp, synthetic construct
  misc_feature 1..25: note = Oligonucleotide
  source 1..25: mol_type = other DNA
tagcgcctctgccacgactggccct

SEQ ID NO: 7653 - DNA, 25 bp, synthetic construct
  misc_feature 1..25: note = Oligonucleotide
  source 1..25: mol_type = other DNA
acctagcgcctctgccacgactggc

SEQ ID NO: 7654 - DNA, 25 bp, synthetic construct
  misc_feature 1..25: note = Oligonucleotide
  source 1..25: mol_type = other DNA
gtgacctagcgcctctgccacgact

SEQ ID NO: 7655 - DNA, 25 bp, synthetic construct
  misc_feature 1..25: note = Oligonucleotide
  source 1..25: mol_type = other DNA
agggtgacctagcgcctctgccacg

SEQ ID NO: 7656 - DNA, 25 bp, synthetic construct
  misc_feature 1..25: note = Oligonucleotide
  source 1..25: mol_type = other DNA
ctgagggtgacctagcgcctctgcc

SEQ ID NO: 7657 - DNA, 25 bp, synthetic construct
  misc_feature 1..25: note = Oligonucleotide
  source 1..25: mol_type = other DNA
gccctgagggtgacctagcgcctct

SEQ ID NO: 7658 - DNA, 25 bp, synthetic construct
  misc_feature 1..25: note = Oligonucleotide
  source 1..25: mol_type = other DNA
atggccctgagggtgacctagcgcc

SEQ ID NO: 7659 - DNA, 25 bp, synthetic construct
  misc_feature 1..25: note = Oligonucleotide
  source 1..25: mol_type = other DNA
ggtatggccctgagggtgacctagc

SEQ ID NO: 7660 - DNA, 25 bp, synthetic construct
  misc_feature 1..25: note = Oligonucleotide
  source 1..25: mol_type = other DNA
cagggtatggccctgagggtgacct

SEQ ID NO: 7661 - DNA, 25 bp, synthetic construct
  misc_feature 1..25: note = Oligonucleotide
  source 1..25: mol_type = other DNA
gctcagggtatggccctgagggtga

SEQ ID NO: 7662 - DNA, 25 bp, synthetic construct
  misc_feature 1..25: note = Oligonucleotide
  source 1..25: mol_type = other DNA
acagctcagggtatggccctgaggg

SEQ ID NO: 7663 - DNA, 25 bp, synthetic construct
  misc_feature 1..25: note = Oligonucleotide
  source 1..25: mol_type = other DNA
gacacagctcagggtatggccctga

SEQ ID NO: 7664 - DNA, 25 bp, synthetic construct
  misc_feature 1..25: note = Oligonucleotide
  source 1..25: mol_type = other DNA
ggagacacagctcagggtatggccc

SEQ ID NO: 7665 - DNA, 25 bp, synthetic construct
  misc_feature 1..25: note = Oligonucleotide
  source 1..25: mol_type = other DNA
gctggagacacagctcagggtatgg

SEQ ID NO: 7666 - DNA, 25 bp, synthetic construct
  misc_feature 1..25: note = Oligonucleotide
  source 1..25: mol_type = other DNA
ggggctggagacacagctcagggta

SEQ ID NO: 7667 - DNA, 25 bp, synthetic construct
  misc_feature 1..25: note = Oligonucleotide
  source 1..25: mol_type = other DNA
caaggggctggagacacagctcagg

SEQ ID NO: 7668 - DNA, 25 bp, synthetic construct
  misc_feature 1..25: note = Oligonucleotide
  source 1..25: mol_type = other DNA
acacaaggggctggagacacagctc

SEQ ID NO: 7669 - DNA, 25 bp, synthetic construct
  misc_feature 1..25: note = Oligonucleotide
  source 1..25: mol_type = other DNA
ggaacacaaggggctggagacacag

SEQ ID NO: 7670 - DNA, 25 bp, synthetic construct
  misc_feature 1..25: note = Oligonucleotide
  source 1..25: mol_type = other DNA
tgtggaacacaaggggctggagaca

SEQ ID NO: 7671 - DNA, 25 bp, synthetic construct
  misc_feature 1..25: note = Oligonucleotide
  source 1..25: mol_type = other DNA
cactgtggaacacaaggggctggag

SEQ ID NO: 7672 - DNA, 25 bp, synthetic construct
  misc_feature 1..25: note = Oligonucleotide
  source 1..25: mol_type = other DNA
aaacactgtggaacacaaggggctg

SEQ ID NO: 7673 - DNA, 25 bp, synthetic construct
  misc_feature 1..25: note = Oligonucleotide
  source 1..25: mol_type = other DNA
gacaaacactgtggaacacaagggg

SEQ ID NO: 7674 - DNA, 25 bp, synthetic construct
  misc_feature 1..25: note = Oligonucleotide
  source 1..25: mol_type = other DNA
ggagacaaacactgtggaacacaag

SEQ ID NO: 7675 - DNA, 25 bp, synthetic construct
  misc_feature 1..25: note = Oligonucleotide
  source 1..25: mol_type = other DNA
ctgggagacaaacactgtggaacac

SEQ ID NO: 7676 - DNA, 25 bp, synthetic construct
  misc_feature 1..25: note = Oligonucleotide
  source 1..25: mol_type = other DNA
ggcctgggagacaaacactgtggaa

SEQ ID NO: 7677 - DNA, 25 bp, synthetic construct
  misc_feature 1..25: note = Oligonucleotide
  source 1..25: mol_type = other DNA
atgggcctgggagacaaacactgtg

SEQ ID NO: 7678 - DNA, 25 bp, synthetic construct
  misc_feature 1..25: note = Oligonucleotide
  source 1..25: mol_type = other DNA
aggatgggcctgggagacaaacact

SEQ ID NO: 7679 - DNA, 25 bp, synthetic construct
  misc_feature 1..25: note = Oligonucleotide
  source 1..25: mol_type = other DNA
agaaggatgggcctgggagacaaac

SEQ ID NO: 7680 - DNA, 25 bp, synthetic construct
  misc_feature 1..25: note = Oligonucleotide
  source 1..25: mol_type = other DNA
aggagaaggatgggcctgggagaca

SEQ ID NO: 7681 - DNA, 25 bp, synthetic construct
  misc_feature 1..25: note = Oligonucleotide
  source 1..25: mol_type = other DNA
gggaggagaaggatgggcctgggag

SEQ ID NO: 7682 - DNA, 25 bp, synthetic construct
  misc_feature 1..25: note = Oligonucleotide
  source 1..25: mol_type = other DNA
tcagggaggagaaggatgggcctgg

SEQ ID NO: 7683 - DNA, 25 bp, synthetic construct
  misc_feature 1..25: note = Oligonucleotide
  source 1..25: mol_type = other DNA
cggtcagggaggagaaggatgggcc

SEQ ID NO: 7684 - DNA, 25 bp, synthetic construct
  misc_feature 1..25: note = Oligonucleotide
  source 1..25: mol_type = other DNA
tgtcggtcagggaggagaaggatgg

SEQ ID NO: 7685 - DNA, 25 bp, synthetic construct
  misc_feature 1..25: note = Oligonucleotide
  source 1..25: mol_type = other DNA
tggtgtcggtcagggaggagaagga

SEQ ID NO: 7686 - DNA, 25 bp, synthetic construct
  misc_feature 1..25: note = Oligonucleotide
  source 1..25: mol_type = other DNA
tcatggtgtcggtcagggaggagaa

SEQ ID NO: 7687 - DNA, 25 bp, synthetic construct
  misc_feature 1..25: note = Oligonucleotide
  source 1..25: mol_type = other DNA
tcctcatggtgtcggtcagggagga

SEQ ID NO: 7688 - DNA, 25 bp, synthetic construct
  misc_feature 1..25: note = Oligonucleotide
  source 1..25: mol_type = other DNA
ccttcctcatggtgtcggtcaggga

SEQ ID NO: 7689 - DNA, 25 bp, synthetic construct
  misc_feature 1..25: note = Oligonucleotide
  source 1..25: mol_type = other DNA
ttcccttcctcatggtgtcggtcag

SEQ ID NO: 7690 - DNA, 25 bp, synthetic construct
  misc_feature 1..25: note = Oligonucleotide
  source 1..25: mol_type = other DNA
gcattcccttcctcatggtgtcggt

SEQ ID NO: 7691 - DNA, 25 bp, synthetic construct
  misc_feature 1..25: note = Oligonucleotide
  source 1..25: mol_type = other DNA
tgggcattcccttcctcatggtgtc

SEQ ID NO: 7692 - DNA, 25 bp, synthetic construct
  misc_feature 1..25: note = Oligonucleotide
  source 1..25: mol_type = other DNA
gggtgggcattcccttcctcatggt

SEQ ID NO: 7693 - DNA, 25 bp, synthetic construct
  misc_feature 1..25: note = Oligonucleotide
  source 1..25: mol_type = other DNA
ggtgggtgggcattcccttcctcat

SEQ ID NO: 7694 - DNA, 25 bp, synthetic construct
  misc_feature 1..25: note = Oligonucleotide
  source 1..25: mol_type = other DNA
aaaggtgggtgggcattcccttcct

SEQ ID NO: 7695 - DNA, 25 bp, synthetic construct
  misc_feature 1..25: note = Oligonucleotide
  source 1..25: mol_type = other DNA
ggaaaaggtgggtgggcattccctt

SEQ ID NO: 7696 - DNA, 25 bp, synthetic construct
  misc_feature 1..25: note = Oligonucleotide
  source 1..25: mol_type = other DNA
tctggaaaaggtgggtgggcattcc

SEQ ID NO: 7697 - DNA, 25 bp, synthetic construct
  misc_feature 1..25: note = Oligonucleotide
  source 1..25: mol_type = other DNA
atctctggaaaaggtgggtgggcat

SEQ ID NO: 7698 - DNA, 25 bp, synthetic construct
  misc_feature 1..25: note = Oligonucleotide
  source 1..25: mol_type = other DNA
gccatctctggaaaaggtgggtggg

SEQ ID NO: 7699 - DNA, 25 bp, synthetic construct
  misc_feature 1..25: note = Oligonucleotide
  source 1..25: mol_type = other DNA
tgagccatctctggaaaaggtgggt

SEQ ID NO: 7700 - DNA, 25 bp, synthetic construct
  misc_feature 1..25: note = Oligonucleotide
  source 1..25: mol_type = other DNA
gaatgagccatctctggaaaaggtg

SEQ ID NO: 7701 - DNA, 25 bp, synthetic construct
  misc_feature 1..25: note = Oligonucleotide
  source 1..25: mol_type = other DNA
caggaatgagccatctctggaaaag

SEQ ID NO: 7702 - DNA, 25 bp, synthetic construct
  misc_feature 1..25: note = Oligonucleotide
  source 1..25: mol_type = other DNA
catcaggaatgagccatctctggaa

SEQ ID NO: 7703 - DNA, 25 bp, synthetic construct
  misc_feature 1..25: note = Oligonucleotide
  source 1..25: mol_type = other DNA
gcacatcaggaatgagccatctctg

SEQ ID NO: 7704 - DNA, 25 bp, synthetic construct
  misc_feature 1..25: note = Oligonucleotide
  source 1..25: mol_type = other DNA
aaagcacatcaggaatgagccatct

SEQ ID NO: 7705 - DNA, 25 bp, synthetic construct
  misc_feature 1..25: note = Oligonucleotide
  source 1..25: mol_type = other DNA
gctaaagcacatcaggaatgagcca

SEQ ID NO: 7706 - DNA, 25 bp, synthetic construct
  misc_feature 1..25: note = Oligonucleotide
  source 1..25: mol_type = other DNA
gtggctaaagcacatcaggaatgag

SEQ ID NO: 7707 - DNA, 25 bp, synthetic construct
  misc_feature 1..25: note = Oligonucleotide
  source 1..25: mol_type = other DNA
cttgtggctaaagcacatcaggaat

SEQ ID NO: 7708 - DNA, 25 bp, synthetic construct
  misc_feature 1..25: note = Oligonucleotide
  source 1..25: mol_type = other DNA
caccttgtggctaaagcacatcagg

SEQ ID NO: 7709 - DNA, 25 bp, synthetic construct
  misc_feature 1..25: note = Oligonucleotide
  source 1..25: mol_type = other DNA
gaacaccttgtggctaaagcacatc

SEQ ID NO: 7710 - DNA, 25 bp, synthetic construct
  misc_feature 1..25: note = Oligonucleotide
  source 1..25: mol_type = other DNA
acagaacaccttgtggctaaagcac

SEQ ID NO: 7711 - DNA, 25 bp, synthetic construct
  misc_feature 1..25: note = Oligonucleotide
  source 1..25: mol_type = other DNA
gccacagaacaccttgtggctaaag

SEQ ID NO: 7712 - DNA, 25 bp, synthetic construct
  misc_feature 1..25: note = Oligonucleotide
  source 1..25: mol_type = other DNA
caggccacagaacaccttgtggcta

SEQ ID NO: 7713 - DNA, 25 bp, synthetic construct
  misc_feature 1..25: note = Oligonucleotide
  source 1..25: mol_type = other DNA
tctcaggccacagaacaccttgtgg

SEQ ID NO: 7714 - DNA, 25 bp, synthetic construct
  misc_feature 1..25: note = Oligonucleotide
  source 1..25: mol_type = other DNA
agctctcaggccacagaacaccttg

SEQ ID NO: 7715 - DNA, 25 bp, synthetic construct
  misc_feature 1..25: note = Oligonucleotide
  source 1..25: mol_type = other DNA
gaaagctctcaggccacagaacacc

SEQ ID NO: 7716 - DNA, 25 bp, synthetic construct
  misc_feature 1..25: note = Oligonucleotide
  source 1..25: mol_type = other DNA
ccagaaagctctcaggccacagaac

SEQ ID NO: 7717 - DNA, 25 bp, synthetic construct
  misc_feature 1..25: note = Oligonucleotide
  source 1..25: mol_type = other DNA
tgtccagaaagctctcaggccacag

SEQ ID NO: 7718 - DNA, 25 bp, synthetic construct
  misc_feature 1..25: note = Oligonucleotide
  source 1..25: mol_type = other DNA
acttgtccagaaagctctcaggcca

SEQ ID NO: 7719 - DNA, 25 bp, synthetic construct
  misc_feature 1..25: note = Oligonucleotide
  source 1..25: mol_type = other DNA
ttaacttgtccagaaagctctcagg

SEQ ID NO: 7720 - DNA, 25 bp, synthetic construct
  misc_feature 1..25: note = Oligonucleotide
  source 1..25: mol_type = other DNA
agcttaacttgtccagaaagctctc

SEQ ID NO: 7721 - DNA, 25 bp, synthetic construct
  misc_feature 1..25: note = Oligonucleotide
  source 1..25: mol_type = other DNA
gacagcttaacttgtccagaaagct

SEQ ID NO: 7722 - DNA, 25 bp, synthetic construct
  misc_feature 1..25: note = Oligonucleotide
  source 1..25: mol_type = other DNA
caggacagcttaacttgtccagaaa

SEQ ID NO: 7723 - DNA, 25 bp, synthetic construct
  misc_feature 1..25: note = Oligonucleotide
  source 1..25: mol_type = other DNA
atacaggacagcttaacttgtccag

SEQ ID NO: 7724 - DNA, 25 bp, synthetic construct
  misc_feature 1..25: note = Oligonucleotide
  source 1..25: mol_type = other DNA
gacatacaggacagcttaacttgtc

SEQ ID NO: 7725 - DNA, 25 bp, synthetic construct
  misc_feature 1..25: note = Oligonucleotide
  source 1..25: mol_type = other DNA
cacgacatacaggacagcttaactt

SEQ ID NO: 7726 - DNA, 25 bp, synthetic construct
  misc_feature 1..25: note = Oligonucleotide
  source 1..25: mol_type = other DNA
ttccacgacatacaggacagcttaa

SEQ ID NO: 7727 - DNA, 25 bp, synthetic construct
  misc_feature 1..25: note = Oligonucleotide
  source 1..25: mol_type = other DNA
tggttccacgacatacaggacagct

SEQ ID NO: 7728 - DNA, 25 bp, synthetic construct
  misc_feature 1..25: note = Oligonucleotide
  source 1..25: mol_type = other DNA
ctttggttccacgacatacaggaca

SEQ ID NO: 7729 - DNA, 25 bp, synthetic construct
  misc_feature 1..25: note = Oligonucleotide
  source 1..25: mol_type = other DNA
gagctttggttccacgacatacagg

SEQ ID NO: 7730 - DNA, 25 bp, synthetic construct
  misc_feature 1..25: note = Oligonucleotide
  source 1..25: mol_type = other DNA
accgagctttggttccacgacatac

SEQ ID NO: 7731 - DNA, 25 bp, synthetic construct
  misc_feature 1..25: note = Oligonucleotide
  source 1..25: mol_type = other DNA
gttaccgagctttggttccacgaca

SEQ ID NO: 7732 - DNA, 25 bp, synthetic construct
  misc_feature 1..25: note = Oligonucleotide
  source 1..25: mol_type = other DNA
caggttaccgagctttggttccacg

SEQ ID NO: 7733 - DNA, 25 bp, synthetic construct
  misc_feature 1..25: note = Oligonucleotide
  source 1..25: mol_type = other DNA
ccacaggttaccgagctttggttcc

SEQ ID NO: 7734 - DNA, 25 bp, synthetic construct
  misc_feature 1..25: note = Oligonucleotide
  source 1..25: mol_type = other DNA
tttccacaggttaccgagctttggt

SEQ ID NO: 7735 - DNA, 25 bp, synthetic construct
  misc_feature 1..25: note = Oligonucleotide
  source 1..25: mol_type = other DNA
atttttccacaggttaccgagcttt

SEQ ID NO: 7736 - DNA, 25 bp, synthetic construct
  misc_feature 1..25: note = Oligonucleotide
  source 1..25: mol_type = other DNA
atcatttttccacaggttaccgagc

SEQ ID NO: 7737 - DNA, 25 bp, synthetic construct
  misc_feature 1..25: note = Oligonucleotide
  source 1..25: mol_type = other DNA
ctcatcatttttccacaggttaccg

SEQ ID NO: 7738 - DNA, 25 bp, synthetic construct
  misc_feature 1..25: note = Oligonucleotide
  source 1..25: mol_type = other DNA
gagctcatcatttttccacaggtta

SEQ ID NO: 7739 - DNA, 25 bp, synthetic construct
  misc_feature 1..25: note = Oligonucleotide
  source 1..25: mol_type = other DNA
ccagagctcatcatttttccacagg

SEQ ID NO: 7740 - DNA, 25 bp, synthetic construct
  misc_feature 1..25: note = Oligonucleotide
  source 1..25: mol_type = other DNA
gccccagagctcatcatttttccac

SEQ ID NO: 7741 - DNA, 25 bp, synthetic construct
  misc_feature 1..25: note = Oligonucleotide
  source 1..25: mol_type = other DNA
gtggccccagagctcatcatttttc

SEQ ID NO: 7742 - DNA, 25 bp, synthetic construct
  misc_feature 1..25: note = Oligonucleotide
  source 1..25: mol_type = other DNA
aaggtggccccagagctcatcattt

SEQ ID NO: 7743 - DNA, 25 bp, synthetic construct
  misc_feature 1..25: note = Oligonucleotide
  source 1..25: mol_type = other DNA
tcaaaggtggccccagagctcatca

SEQ ID NO: 7744 - DNA, 25 bp, synthetic construct
  misc_feature 1..25: note = Oligonucleotide
  source 1..25: mol_type = other DNA
aaatcaaaggtggccccagagctca

SEQ ID NO: 7745 - DNA, 25 bp, synthetic construct
  misc_feature 1..25: note = Oligonucleotide
  source 1..25: mol_type = other DNA
tgaaaatcaaaggtggccccagagc

SEQ ID NO: 7746 - DNA, 25 bp, synthetic construct
  misc_feature 1..25: note = Oligonucleotide
  source 1..25: mol_type = other DNA
ccctgaaaatcaaaggtggccccag

SEQ ID NO: 7747 - DNA, 25 bp, synthetic construct
  misc_feature 1..25: note = Oligonucleotide
  source 1..25: mol_type = other DNA
ttcccctgaaaatcaaaggtggccc

SEQ ID NO: 7748 - DNA, 25 bp, synthetic construct
  misc_feature 1..25: note = Oligonucleotide
  source 1..25: mol_type = other DNA
aggttcccctgaaaatcaaaggtgg

SEQ ID NO: 7749 - DNA, 25 bp, synthetic construct
  misc_feature 1..25: note = Oligonucleotide
  source 1..25: mol_type = other DNA
tccaggttcccctgaaaatcaaagg

SEQ ID NO: 7750 - DNA, 25 bp, synthetic construct
  misc_feature 1..25: note = Oligonucleotide
  source 1..25: mol_type = other DNA
tcctccaggttcccctgaaaatcaa

SEQ ID NO: 7751 - DNA, 25 bp, synthetic construct
  misc_feature 1..25: note = Oligonucleotide
  source 1..25: mol_type = other DNA
acatcctccaggttcccctgaaaat

SEQ ID NO: 7752 - DNA, 25 bp, synthetic construct
  misc_feature 1..25: note = Oligonucleotide
  source 1..25: mol_type = other DNA
gccacatcctccaggttcccctgaa

SEQ ID NO: 7753 - DNA, 25 bp, synthetic construct
  misc_feature 1..25: note = Oligonucleotide
  source 1..25: mol_type = other DNA
agtgccacatcctccaggttcccct

SEQ ID NO: 7754 - DNA, 25 bp, synthetic construct
  misc_feature 1..25: note = Oligonucleotide
  source 1..25: mol_type = other DNA
gagagtgccacatcctccaggttcc

SEQ ID NO: 7755 - DNA, 25 bp, synthetic construct
  misc_feature 1..25: note = Oligonucleotide
  source 1..25: mol_type = other DNA
catgagagtgccacatcctccaggt

SEQ ID NO: 7756 - DNA, 25 bp, synthetic construct
  misc_feature 1..25: note = Oligonucleotide
  source 1..25: mol_type = other DNA
cagcatgagagtgccacatcctcca

SEQ ID NO: 7757 - DNA, 25 bp, synthetic construct
  misc_feature 1..25: note = Oligonucleotide
  source 1..25: mol_type = other DNA
aggcagcatgagagtgccacatcct

SEQ ID NO: 7758 - DNA, 25 bp, synthetic construct
  misc_feature 1..25: note = Oligonucleotide
  source 1..25: mol_type = other DNA
cagaggcagcatgagagtgccacat

SEQ ID NO: 7759 - DNA, 25 bp, synthetic construct
  misc_feature 1..25: note = Oligonucleotide
  source 1..25: mol_type = other DNA
ttccagaggcagcatgagagtgcca

SEQ ID NO: 7760 - DNA, 25 bp, synthetic construct
  misc_feature 1..25: note = Oligonucleotide
  source 1..25: mol_type = other DNA
accttccagaggcagcatgagagtg

SEQ ID NO: 7761 - DNA, 25 bp, synthetic construct
  misc_feature 1..25: note = Oligonucleotide
  source 1..25: mol_type = other DNA
tggaccttccagaggcagcatgaga

SEQ ID NO: 7762 - DNA, 25 bp, synthetic construct
  misc_feature 1..25: note = Oligonucleotide
  source 1..25: mol_type = other DNA
tcctggaccttccagaggcagcatg

SEQ ID NO: 7763 - DNA, 25 bp, synthetic construct
  misc_feature 1..25: note = Oligonucleotide
  source 1..25: mol_type = other DNA
aggtcctggaccttccagaggcagc

SEQ ID NO: 7764 - DNA, 25 bp, synthetic construct
  misc_feature 1..25: note = Oligonucleotide
  source 1..25: mol_type = other DNA
cgaaggtcctggaccttccagaggc

SEQ ID NO: 7765 - DNA, 25 bp, synthetic construct
  misc_feature 1..25: note = Oligonucleotide
  source 1..25: mol_type = other DNA
ggccgaaggtcctggaccttccaga

SEQ ID NO: 7766 - DNA, 25 bp, synthetic construct
  misc_feature 1..25: note = Oligonucleotide
  source 1..25: mol_type = other DNA
aaaggccgaaggtcctggaccttcc

SEQ ID NO: 7767 - DNA, 25 bp, synthetic construct
  misc_feature 1..25: note = Oligonucleotide
  source 1..25: mol_type = other DNA
tcaaaaggccgaaggtcctggacct

SEQ ID NO: 7768 - DNA, 25 bp, synthetic construct
  misc_feature 1..25: note = Oligonucleotide
  source 1..25: mol_type = other DNA
gattcaaaaggccgaaggtcctgga

SEQ ID NO: 7769 - DNA, 25 bp, synthetic construct
  misc_feature 1..25: note = Oligonucleotide
  source 1..25: mol_type = other DNA
gaggattcaaaaggccgaaggtcct

SEQ ID NO: 7770 - DNA, 25 bp, synthetic construct
  misc_feature 1..25: note = Oligonucleotide
  source 1..25: mol_type = other DNA
atcgaggattcaaaaggccgaaggt

SEQ ID NO: 7771 - DNA, 25 bp, synthetic construct
  misc_feature 1..25: note = Oligonucleotide
  source 1..25: mol_type = other DNA
gggatcgaggattcaaaaggccgaa

SEQ ID NO: 7772 - DNA, 25 bp, synthetic construct
  misc_feature 1..25: note = Oligonucleotide
  source 1..25: mol_type = other DNA
tctgggatcgaggattcaaaaggcc

SEQ ID NO: 7773 - DNA, 25 bp, synthetic construct
  misc_feature 1..25: note = Oligonucleotide
  source 1..25: mol_type = other DNA
caatctgggatcgaggattcaaaag

SEQ ID NO: 7774 - DNA, 25 bp, synthetic construct
  misc_feature 1..25: note = Oligonucleotide
  source 1..25: mol_type = other DNA
ggacaatctgggatcgaggattcaa

SEQ ID NO: 7775 - DNA, 25 bp, synthetic construct
  misc_feature 1..25: note = Oligonucleotide
  source 1..25: mol_type = other DNA
ggtggacaatctgggatcgaggatt

SEQ ID NO: 7776 - DNA, 25 bp, synthetic construct
  misc_feature 1..25: note = Oligonucleotide
  source 1..25: mol_type = other DNA
gcaggtggacaatctgggatcgagg

SEQ ID NO: 7777 - DNA, 25 bp, synthetic construct
  misc_feature 1..25: note = Oligonucleotide
  source 1..25: mol_type = other DNA
agagcaggtggacaatctgggatcg

SEQ ID NO: 7778 - DNA, 25 bp, synthetic construct
  misc_feature 1..25: note = Oligonucleotide
  source 1..25: mol_type = other DNA
cacagagcaggtggacaatctggga

SEQ ID NO: 7779 - DNA, 25 bp, synthetic construct
  misc_feature 1..25: note = Oligonucleotide
  source 1..25: mol_type = other DNA
gagcacagagcaggtggacaatctg

SEQ ID NO: 7780 - DNA, 25 bp, synthetic construct
  misc_feature 1..25: note = Oligonucleotide
  source 1..25: mol_type = other DNA
tgggagcacagagcaggtggacaat

SEQ ID NO: 7781 - DNA, 25 bp, synthetic construct
  misc_feature 1..25: note = Oligonucleotide
  source 1..25: mol_type = other DNA
agctgggagcacagagcaggtggac

SEQ ID NO: 7782 - DNA, 25 bp, synthetic construct
  misc_feature 1..25: note = Oligonucleotide
  source 1..25: mol_type = other DNA
tggagctgggagcacagagcaggtg

SEQ ID NO: 7783 - DNA, 25 bp, synthetic construct
  misc_feature 1..25: note = Oligonucleotide
  source 1..25: mol_type = other DNA
acttggagctgggagcacagagcag

SEQ ID NO: 7784 - DNA, 25 bp, synthetic construct
  misc_feature 1..25: note = Oligonucleotide
  source 1..25: mol_type = other DNA
tagacttggagctgggagcacagag

SEQ ID NO: 7785 - DNA, 25 bp, synthetic construct
  misc_feature 1..25: note = Oligonucleotide
  source 1..25: mol_type = other DNA
agctagacttggagctgggagcaca

SEQ ID NO: 7786 - DNA, 25 bp, synthetic construct
  misc_feature 1..25: note = Oligonucleotide
  source 1..25: mol_type = other DNA
cagagctagacttggagctgggagc

SEQ ID NO: 7787 - DNA, 25 bp, synthetic construct
  misc_feature 1..25: note = Oligonucleotide
  source 1..25: mol_type = other DNA
cagcagagctagacttggagctggg

SEQ ID NO: 7788 - DNA, 25 bp, synthetic construct
  misc_feature 1..25: note = Oligonucleotide
  source 1..25: mol_type = other DNA
gtccagcagagctagacttggagct

SEQ ID NO: 7789 - DNA, 25 bp, synthetic construct
  misc_feature 1..25: note = Oligonucleotide
  source 1..25: mol_type = other DNA
tctgtccagcagagctagacttgga

SEQ ID NO: 7790 - DNA, 25 bp, synthetic construct
  misc_feature 1..25: note = Oligonucleotide
  source 1..25: mol_type = other DNA
tggtctgtccagcagagctagactt

SEQ ID NO: 7791 - DNA, 25 bp, synthetic construct
  misc_feature 1..25: note = Oligonucleotide
  source 1..25: mol_type = other DNA
gaatggtctgtccagcagagctaga

SEQ ID NO: 7792 - DNA, 25 bp, synthetic construct
  misc_feature 1..25: note = Oligonucleotide
  source 1..25: mol_type = other DNA
gatgaatggtctgtccagcagagct

SEQ ID NO: 7793 - DNA, 25 bp, synthetic construct
  misc_feature 1..25: note = Oligonucleotide
  source 1..25: mol_type = other DNA
gcagatgaatggtctgtccagcaga

SEQ ID NO: 7794 - DNA, 25 bp, synthetic construct
  misc_feature 1..25: note = Oligonucleotide
  source 1..25: mol_type = other DNA
tgggcagatgaatggtctgtccagc

SEQ ID NO: 7795 - DNA, 25 bp, synthetic construct
  misc_feature 1..25: note = Oligonucleotide
  source 1..25: mol_type = other DNA
ctctgggcagatgaatggtctgtcc

SEQ ID NO: 7796 - DNA, 25 bp, synthetic construct
  misc_feature 1..25: note = Oligonucleotide
  source 1..25: mol_type = other DNA
gggctctgggcagatgaatggtctg

SEQ ID NO: 7797 - DNA, 25 bp, synthetic construct
  misc_feature 1..25: note = Oligonucleotide
  source 1..25: mol_type = other DNA
gaggggctctgggcagatgaatggt

SEQ ID NO: 7798 - DNA, 25 bp, synthetic construct
  misc_feature 1..25: note = Oligonucleotide
  source 1..25: mol_type = other DNA
gaggaggggctctgggcagatgaat

SEQ ID NO: 7799 - DNA, 25 bp, synthetic construct
  misc_feature 1..25: note = Oligonucleotide
  source 1..25: mol_type = other DNA
accgaggaggggctctgggcagatg

SEQ ID NO: 7800 - DNA, 25 bp, synthetic construct
  misc_feature 1..25: note = Oligonucleotide
  source 1..25: mol_type = other DNA
gagaccgaggaggggctctgggcag

SEQ ID NO: 7801 - DNA, 25 bp, synthetic construct
  misc_feature 1..25: note = Oligonucleotide
  source 1..25: mol_type = other DNA
ccagagaccgaggaggggctctggg

SEQ ID NO: 7802 - DNA, 25 bp, synthetic construct
  misc_feature 1..25: note = Oligonucleotide
  source 1..25: mol_type = other DNA
ggcccagagaccgaggaggggctct

SEQ ID NO: 7803 - DNA, 25 bp, synthetic construct
  misc_feature 1..25: note = Oligonucleotide
  source 1..25: mol_type = other DNA
tggggcccagagaccgaggaggggc

SEQ ID NO: 7804 - DNA, 25 bp, synthetic construct
  misc_feature 1..25: note = Oligonucleotide
  source 1..25: mol_type = other DNA
gtgtggggcccagagaccgaggagg

SEQ ID NO: 7805 - DNA, 25 bp, synthetic construct
  misc_feature 1..25: note = Oligonucleotide
  source 1..25: mol_type = other DNA
caggtgtggggcccagagaccgagg

SEQ ID NO: 7806 - DNA, 25 bp, synthetic construct
  misc_feature 1..25: note = Oligonucleotide
  source 1..25: mol_type = other DNA
agtcaggtgtggggcccagagaccg

SEQ ID NO: 7807 - DNA, 25 bp, synthetic construct
  misc_feature 1..25: note = Oligonucleotide
  source 1..25: mol_type = other DNA
cagagtcaggtgtggggcccagaga

SEQ ID NO: 7808 - DNA, 25 bp, synthetic construct
  misc_feature 1..25: note = Oligonucleotide
  source 1..25: mol_type = other DNA
cctcagagtcaggtgtggggcccag

SEQ ID NO: 7809 - DNA, 25 bp, synthetic construct
  misc_feature 1..25: note = Oligonucleotide
  source 1..25: mol_type = other DNA
tagcctcagagtcaggtgtggggcc

SEQ ID NO: 7810 - DNA, 25 bp, synthetic construct
  misc_feature 1..25: note = Oligonucleotide
  source 1..25: mol_type = other DNA
atgtagcctcagagtcaggtgtggg

SEQ ID NO: 7811 - DNA, 25 bp, synthetic construct
  misc_feature 1..25: note = Oligonucleotide
  source 1..25: mol_type = other DNA
caaatgtagcctcagagtcaggtgt

SEQ ID NO: 7812 - DNA, 25 bp, synthetic construct
  misc_feature 1..25: note = Oligonucleotide
  source 1..25: mol_type = other DNA
gcccaaatgtagcctcagagtcagg

SEQ ID NO: 7813 - DNA, 25 bp, synthetic construct
  misc_feature 1..25: note = Oligonucleotide
  source 1..25: mol_type = other DNA
catgcccaaatgtagcctcagagtc

SEQ ID NO: 7814 - DNA, 25 bp, synthetic construct
  misc_feature 1..25: note = Oligonucleotide
  source 1..25: mol_type = other DNA
aatcatgcccaaatgtagcctcaga

SEQ ID NO: 7815 - DNA, 25 bp, synthetic construct
  misc_feature 1..25: note = Oligonucleotide
  source 1..25: mol_type = other DNA
ctgaatcatgcccaaatgtagcctc

SEQ ID NO: 7816 - DNA, 25 bp, synthetic construct
  misc_feature 1..25: note = Oligonucleotide
  source 1..25: mol_type = other DNA
ggtctgaatcatgcccaaatgtagc

SEQ ID NO: 7817 - DNA, 25 bp, synthetic construct
  misc_feature 1..25: note = Oligonucleotide
  source 1..25: mol_type = other DNA
tcaggtctgaatcatgcccaaatgt

SEQ ID NO: 7818 - DNA, 25 bp, synthetic construct
  misc_feature 1..25: note = Oligonucleotide
  source 1..25: mol_type = other DNA
gagtcaggtctgaatcatgcccaaa

SEQ ID NO: 7819 - DNA, 25 bp, synthetic construct
  misc_feature 1..25: note = Oligonucleotide
  source 1..25: mol_type = other DNA
tcggagtcaggtctgaatcatgccc

SEQ ID NO: 7820 - DNA, 25 bp, synthetic construct
  misc_feature 1..25: note = Oligonucleotide
  source 1..25: mol_type = other DNA
ggctcggagtcaggtctgaatcatg

SEQ ID NO: 7821 - DNA, 25 bp, synthetic construct
  misc_feature 1..25: note = Oligonucleotide
  source 1..25: mol_type = other DNA
tggggctcggagtcaggtctgaatc

SEQ ID NO: 7822 - DNA, 25 bp, synthetic construct
  misc_feature 1..25: note = Oligonucleotide
  source 1..25: mol_type = other DNA
ttgtggggctcggagtcaggtctga

SEQ ID NO: 7823 - DNA, 25 bp, synthetic construct
  misc_feature 1..25: note = Oligonucleotide
  source 1..25: mol_type = other DNA
cagttgtggggctcggagtcaggtc

SEQ ID NO: 7824 - DNA, 25 bp, synthetic construct
  misc_feature 1..25: note = Oligonucleotide
  source 1..25: mol_type = other DNA
ggccagttgtggggctcggagtcag

SEQ ID NO: 7825 - DNA, 25 bp, synthetic construct
  misc_feature 1..25: note = Oligonucleotide
  source 1..25: mol_type = other DNA
tgtggccagttgtggggctcggagt

SEQ ID NO: 7826 - DNA, 25 bp, synthetic construct
  misc_feature 1..25: note = Oligonucleotide
  source 1..25: mol_type = other DNA
gcctgtggccagttgtggggctcgg

SEQ ID NO: 7827 - DNA, 25 bp, synthetic construct
  misc_feature 1..25: note = Oligonucleotide
  source 1..25: mol_type = other DNA
ggtgcctgtggccagttgtggggct

SEQ ID NO: 7828 - DNA, 25 bp, synthetic construct
  misc_feature 1..25: note = Oligonucleotide
  source 1..25: mol_type = other DNA
tggggtgcctgtggccagttgtggg

SEQ ID NO: 7829 - DNA, 25 bp, synthetic construct
  misc_feature 1..25: note = Oligonucleotide
  source 1..25: mol_type = other DNA
agatggggtgcctgtggccagttgt

SEQ ID NO: 7830 - DNA, 25 bp, synthetic construct
  misc_feature 1..25: note = Oligonucleotide
  source 1..25: mol_type = other DNA
gacagatggggtgcctgtggccagt

SEQ ID NO: 7831 - DNA, 25 bp, synthetic construct
  misc_feature 1..25: note = Oligonucleotide
  source 1..25: mol_type = other DNA
tcagacagatggggtgcctgtggcc

SEQ ID NO: 7832 - DNA, 25 bp, synthetic construct
  misc_feature 1..25: note = Oligonucleotide
  source 1..25: mol_type = other DNA
gcctcagacagatggggtgcctgtg

SEQ ID NO: 7833 - DNA, 25 bp, synthetic construct
  misc_feature 1..25: note = Oligonucleotide
  source 1..25: mol_type = other DNA
agagcctcagacagatggggtgcct

SEQ ID NO: 7834 - DNA, 25 bp, synthetic construct
  misc_feature 1..25: note = Oligonucleotide
  source 1..25: mol_type = other DNA
gtgagagcctcagacagatggggtg

SEQ ID NO: 7835 - DNA, 25 bp, synthetic construct
  misc_feature 1..25: note = Oligonucleotide
  source 1..25: mol_type = other DNA
caagtgagagcctcagacagatggg

SEQ ID NO: 7836 - DNA, 25 bp, synthetic construct
  misc_feature 1..25: note = Oligonucleotide
  source 1..25: mol_type = other DNA
agacaagtgagagcctcagacagat

SEQ ID NO: 7837 - DNA, 25 bp, synthetic construct
  misc_feature 1..25: note = Oligonucleotide
  source 1..25: mol_type = other DNA
cagagacaagtgagagcctcagaca

SEQ ID NO: 7838 - DNA, 25 bp, synthetic construct
  misc_feature 1..25: note = Oligonucleotide
  source 1..25: mol_type = other DNA
tctcagagacaagtgagagcctcag

SEQ ID NO: 7839 - DNA, 25 bp, synthetic construct
  misc_feature 1..25: note = Oligonucleotide
  source 1..25: mol_type = other DNA
gggtctcagagacaagtgagagcct

SEQ ID NO: 7840 - DNA, 25 bp, synthetic construct
  misc_feature 1..25: note = Oligonucleotide
  source 1..25: mol_type = other DNA
ccagggtctcagagacaagtgagag

SEQ ID NO: 7841 - DNA, 25 bp, synthetic construct
  misc_feature 1..25: note = Oligonucleotide
  source 1..25: mol_type = other DNA
aagccagggtctcagagacaagtga

SEQ ID NO: 7842 - DNA, 25 bp, synthetic construct
  misc_feature 1..25: note = Oligonucleotide
  source 1..25: mol_type = other DNA
gtgaagccagggtctcagagacaag

SEQ ID NO: 7843 - DNA, 25 bp, synthetic construct
  misc_feature 1..25: note = Oligonucleotide
  source 1..25: mol_type = other DNA
ggtgtgaagccagggtctcagagac

SEQ ID NO: 7844 - DNA, 25 bp, synthetic construct
  misc_feature 1..25: note = Oligonucleotide
  source 1..25: mol_type = other DNA
ccaggtgtgaagccagggtctcaga

SEQ ID NO: 7845 - DNA, 25 bp, synthetic construct
  misc_feature 1..25: note = Oligonucleotide
  source 1..25: mol_type = other DNA
gagccaggtgtgaagccagggtctc

SEQ ID NO: 7846 - DNA, 25 bp, synthetic construct
  misc_feature 1..25: note = Oligonucleotide
  source 1..25: mol_type = other DNA
ttagagccaggtgtgaagccagggt

SEQ ID NO: 7847 - DNA, 25 bp, synthetic construct
  misc_feature 1..25: note = Oligonucleotide
  source 1..25: mol_type = other DNA
agtttagagccaggtgtgaagccag

SEQ ID NO: 7848 - DNA, 25 bp, synthetic construct
  misc_feature 1..25: note = Oligonucleotide
  source 1..25: mol_type = other DNA
tggagtttagagccaggtgtgaagc

SEQ ID NO: 7849 - DNA, 25 bp, synthetic construct
  misc_feature 1..25: note = Oligonucleotide
  source 1..25: mol_type = other DNA
aaatggagtttagagccaggtgtga

SEQ ID NO: 7850 - DNA, 25 bp, synthetic construct
  misc_feature 1..25: note = Oligonucleotide
  source 1..25: mol_type = other DNA
gacaaatggagtttagagccaggtg

SEQ ID NO: 7851 - DNA, 25 bp, synthetic construct
  misc_feature 1..25: note = Oligonucleotide
  source 1..25: mol_type = other DNA
gaagacaaatggagtttagagccag

SEQ ID NO: 7852 - DNA, 25 bp, synthetic construct
  misc_feature 1..25: note = Oligonucleotide
  source 1..25: mol_type = other DNA
ctggaagacaaatggagtttagagc

SEQ ID NO: 7853 - DNA, 25 bp, synthetic construct
  misc_feature 1..25: note = Oligonucleotide
  source 1..25: mol_type = other DNA
ggcctggaagacaaatggagtttag

SEQ ID NO: 7854 - DNA, 25 bp, synthetic construct
  misc_feature 1..25: note = Oligonucleotide
  source 1..25: mol_type = other DNA
cggggcctggaagacaaatggagtt

SEQ ID NO: 7855 - DNA, 25 bp, synthetic construct
  misc_feature 1..25: note = Oligonucleotide
  source 1..25: mol_type = other DNA
gcacggggcctggaagacaaatgga

SEQ ID NO: 7856 - DNA, 25 bp, synthetic construct
  misc_feature 1..25: note = Oligonucleotide
  source 1..25: mol_type = other DNA
cgagcacggggcctggaagacaaat

SEQ ID NO: 7857 - DNA, 25 bp, synthetic construct
  misc_feature 1..25: note = Oligonucleotide
  source 1..25: mol_type = other DNA
atccgagcacggggcctggaagaca

SEQ ID NO: 7858 - DNA, 25 bp, synthetic construct
  misc_feature 1..25: note = Oligonucleotide
  source 1..25: mol_type = other DNA
cagatccgagcacggggcctggaag

SEQ ID NO: 7859 - DNA, 25 bp, synthetic construct
  misc_feature 1..25: note = Oligonucleotide
  source 1..25: mol_type = other DNA
attcagatccgagcacggggcctgg

SEQ ID NO: 7860 - DNA, 25 bp, synthetic construct
  misc_feature 1..25: note = Oligonucleotide
  source 1..25: mol_type = other DNA
gggattcagatccgagcacggggcc

SEQ ID NO: 7861 - DNA, 25 bp, synthetic construct
  misc_feature 1..25: note = Oligonucleotide
  source 1..25: mol_type = other DNA
catgggattcagatccgagcacggg

SEQ ID NO: 7862 - DNA, 25 bp, synthetic construct
  misc_feature 1..25: note = Oligonucleotide
  source 1..25: mol_type = other DNA
ccacatgggattcagatccgagcac

SEQ ID NO: 7863 - DNA, 25 bp, synthetic construct
  misc_feature 1..25: note = Oligonucleotide
  source 1..25: mol_type = other DNA
accccacatgggattcagatccgag

SEQ ID NO: 7864 - DNA, 25 bp, synthetic construct
  misc_feature 1..25: note = Oligonucleotide
  source 1..25: mol_type = other DNA
cagaccccacatgggattcagatcc

SEQ ID NO: 7865 - DNA, 25 bp, synthetic construct
  misc_feature 1..25: note = Oligonucleotide
  source 1..25: mol_type = other DNA
cctcagaccccacatgggattcaga

SEQ ID NO: 7866 - DNA, 25 bp, synthetic construct
  misc_feature 1..25: note = Oligonucleotide
  source 1..25: mol_type = other DNA
ggacctcagaccccacatgggattc

SEQ ID NO: 7867 - DNA, 25 bp, synthetic construct
  misc_feature 1..25: note = Oligonucleotide
  source 1..25: mol_type = other DNA
tatggacctcagaccccacatggga

SEQ ID NO: 7868 - DNA, 25 bp, synthetic construct
  misc_feature 1..25: note = Oligonucleotide
  source 1..25: mol_type = other DNA
tactatggacctcagaccccacatg

SEQ ID NO: 7869 - DNA, 25 bp, synthetic construct
  misc_feature 1..25: note = Oligonucleotide
  source 1..25: mol_type = other DNA
ccttactatggacctcagaccccac

SEQ ID NO: 7870 - DNA, 25 bp, synthetic construct
  misc_feature 1..25: note = Oligonucleotide
  source 1..25: mol_type = other DNA
gagccttactatggacctcagaccc

SEQ ID NO: 7871 - DNA, 25 bp, synthetic construct
  misc_feature 1..25: note = Oligonucleotide
  source 1..25: mol_type = other DNA
cgtgagccttactatggacctcaga

SEQ ID NO: 7872 - DNA, 25 bp, synthetic construct
  misc_feature 1..25: note = Oligonucleotide
  source 1..25: mol_type = other DNA
agacgtgagccttactatggacctc

SEQ ID NO: 7873 - DNA, 25 bp, synthetic construct
  misc_feature 1..25: note = Oligonucleotide
  source 1..25: mol_type = other DNA
ggcagacgtgagccttactatggac

SEQ ID NO: 7874 - DNA, 25 bp, synthetic construct
  misc_feature 1..25: note = Oligonucleotide
  source 1..25: mol_type = other DNA
caaggcagacgtgagccttactatg

SEQ ID NO: 7875 - DNA, 25 bp, synthetic construct
  misc_feature 1..25: note = Oligonucleotide
  source 1..25: mol_type = other DNA
tgccaaggcagacgtgagccttact

SEQ ID NO: 7876 - DNA, 25 bp, synthetic construct
  misc_feature 1..25: note = Oligonucleotide
  source 1..25: mol_type = other DNA
aagtgccaaggcagacgtgagcctt

SEQ ID NO: 7877 - DNA, 25 bp, synthetic construct
  misc_feature 1..25: note = Oligonucleotide
  source 1..25: mol_type = other DNA
gctaagtgccaaggcagacgtgagc

SEQ ID NO: 7878 - DNA, 25 bp, synthetic construct
  misc_feature 1..25: note = Oligonucleotide
  source 1..25: mol_type = other DNA
aaagctaagtgccaaggcagacgtg

SEQ ID NO: 7879 - DNA, 25 bp, synthetic construct
  misc_feature 1..25: note = Oligonucleotide
  source 1..25: mol_type = other DNA
tgtaaagctaagtgccaaggcagac

SEQ ID NO: 7880 - DNA, 25 bp, synthetic construct
  misc_feature 1..25: note = Oligonucleotide
  source 1..25: mol_type = other DNA
ccatgtaaagctaagtgccaaggca

SEQ ID NO: 7881 - DNA, 25 bp, synthetic construct
  misc_feature 1..25: note = Oligonucleotide
  source 1..25: mol_type = other DNA
gtcccatgtaaagctaagtgccaag

SEQ ID NO: 7882 - DNA, 25 bp, synthetic construct
  misc_feature 1..25: note = Oligonucleotide
  source 1..25: mol_type = other DNA
agagtcccatgtaaagctaagtgcc

SEQ ID NO: 7883 - DNA, 25 bp, synthetic construct
  misc_feature 1..25: note = Oligonucleotide
  source 1..25: mol_type = other DNA
gtgagagtcccatgtaaagctaagt

SEQ ID NO: 7884 - DNA, 25 bp, synthetic construct
  misc_feature 1..25: note = Oligonucleotide
  source 1..25: mol_type = other DNA
gatgtgagagtcccatgtaaagcta

SEQ ID NO: 7885 - DNA, 25 bp, synthetic construct
  misc_feature 1..25: note = Oligonucleotide
  source 1..25: mol_type = other DNA
ccagatgtgagagtcccatgtaaag

SEQ ID NO: 7886 - DNA, 25 bp, synthetic construct
  misc_feature 1..25: note = Oligonucleotide
  source 1..25: mol_type = other DNA
aaaccagatgtgagagtcccatgta

SEQ ID NO: 7887 - DNA, 25 bp, synthetic construct
  misc_feature 1..25: note = Oligonucleotide
  source 1..25: mol_type = other DNA
acaaaaccagatgtgagagtcccat

SEQ ID NO: 7888 - DNA, 25 bp, synthetic construct
  misc_feature 1..25: note = Oligonucleotide
  source 1..25: mol_type = other DNA
cctacaaaaccagatgtgagagtcc

SEQ ID NO: 7889 - DNA, 25 bp, synthetic construct
  misc_feature 1..25: note = Oligonucleotide
  source 1..25: mol_type = other DNA
ttacctacaaaaccagatgtgagag

SEQ ID NO: 7890 - DNA, 25 bp, synthetic construct
  misc_feature 1..25: note = Oligonucleotide
  source 1..25: mol_type = other DNA
actttacctacaaaaccagatgtga

SEQ ID NO: 7891 - DNA, 25 bp, synthetic construct
  misc_feature 1..25: note = Oligonucleotide
  source 1..25: mol_type = other DNA
tgaactttacctacaaaaccagatg

SEQ ID NO: 7892 - DNA, 25 bp, synthetic construct
  misc_feature 1..25: note = Oligonucleotide
  source 1..25: mol_type = other DNA
ccatgaactttacctacaaaaccag

SEQ ID NO: 7893 - DNA, 25 bp, synthetic construct
  misc_feature 1..25: note = Oligonucleotide
  source 1..25: mol_type = other DNA
ttgccatgaactttacctacaaaac

SEQ ID NO: 7894 - DNA, 25 bp, synthetic construct
  misc_feature 1..25: note = Oligonucleotide
  source 1..25: mol_type = other DNA
actttgccatgaactttacctacaa

SEQ ID NO: 7895 - DNA, 25 bp, synthetic construct
  misc_feature 1..25: note = Oligonucleotide
  source 1..25: mol_type = other DNA
gctactttgccatgaactttaccta

SEQ ID NO: 7896 - DNA, 25 bp, synthetic construct
  misc_feature 1..25: note = Oligonucleotide
  source 1..25: mol_type = other DNA
aaagctactttgccatgaactttac

SEQ ID NO: 7897 - DNA, 25 bp, synthetic construct
  misc_feature 1..25: note = Oligonucleotide
  source 1..25: mol_type = other DNA
tccaaagctactttgccatgaactt

SEQ ID NO: 7898 - DNA, 25 bp, synthetic construct
  misc_feature 1..25: note = Oligonucleotide
  source 1..25: mol_type = other DNA
gtttccaaagctactttgccatgaa

SEQ ID NO: 7899 - DNA, 25 bp, synthetic construct
  misc_feature 1..25: note = Oligonucleotide
  source 1..25: mol_type = other DNA
tgtgtttccaaagctactttgccat

SEQ ID NO: 7900 - DNA, 25 bp, synthetic construct
  misc_feature 1..25: note = Oligonucleotide
  source 1..25: mol_type = other DNA
ttttgtgtttccaaagctactttgc

SEQ ID NO: 7901 - DNA, 25 bp, synthetic construct
  misc_feature 1..25: note = Oligonucleotide
  source 1..25: mol_type = other DNA
tctttttgtgtttccaaagctactt

SEQ ID NO: 7902 - DNA, 25 bp, synthetic construct
  misc_feature 1..25: note = Oligonucleotide
  source 1..25: mol_type = other DNA
acctctttttgtgtttccaaagcta

SEQ ID NO: 7903 - DNA, 25 bp, synthetic construct
  misc_feature 1..25: note = Oligonucleotide
  source 1..25: mol_type = other DNA
agaacctctttttgtgtttccaaag

SEQ ID NO: 7904 - DNA, 25 bp, synthetic construct
  misc_feature 1..25: note = Oligonucleotide
  source 1..25: mol_type = other DNA
caaagaacctctttttgtgtttcca

SEQ ID NO: 7905 - DNA, 25 bp, synthetic construct
  misc_feature 1..25: note = Oligonucleotide
  source 1..25: mol_type = other DNA
cagcaaagaacctctttttgtgttt

SEQ ID NO: 7906 - DNA, 25 bp, synthetic construct
  misc_feature 1..25: note = Oligonucleotide
  source 1..25: mol_type = other DNA
ctgcagcaaagaacctctttttgtg

SEQ ID NO: 7907 - DNA, 25 bp, synthetic construct
  misc_feature 1..25: note = Oligonucleotide
  source 1..25: mol_type = other DNA
gtactgcagcaaagaacctcttttt

SEQ ID NO: 7908 - DNA, 25 bp, synthetic construct
  misc_feature 1..25: note = Oligonucleotide
  source 1..25: mol_type = other DNA
gaagtactgcagcaaagaacctctt

SEQ ID NO: 7909 - DNA, 25 bp, synthetic construct
  misc_feature 1..25: note = Oligonucleotide
  source 1..25: mol_type = other DNA
ccagaagtactgcagcaaagaacct

SEQ ID NO: 7910 - DNA, 25 bp, synthetic construct
  misc_feature 1..25: note = Oligonucleotide
  source 1..25: mol_type = other DNA
gcaccagaagtactgcagcaaagaa

SEQ ID NO: 7911 - DNA, 25 bp, synthetic construct
  misc_feature 1..25: note = Oligonucleotide
  source 1..25: mol_type = other DNA
aaggcaccagaagtactgcagcaaa

SEQ ID NO: 7912 - DNA, 25 bp, synthetic construct
  misc_feature 1..25: note = Oligonucleotide
  source 1..25: mol_type = other DNA
tcaaaggcaccagaagtactgcagc

SEQ ID NO: 7913 - DNA, 25 bp, synthetic construct
  misc_feature 1..25: note = Oligonucleotide
  source 1..25: mol_type = other DNA
ttgtcaaaggcaccagaagtactgc

SEQ ID NO: 7914 - DNA, 25 bp, synthetic construct
  misc_feature 1..25: note = Oligonucleotide
  source 1..25: mol_type = other DNA
agcttgtcaaaggcaccagaagtac

SEQ ID NO: 7915 - DNA, 25 bp, synthetic construct
  misc_feature 1..25: note = Oligonucleotide
  source 1..25: mol_type = other DNA
acaagcttgtcaaaggcaccagaag

SEQ ID NO: 7916 - DNA, 25 bp, synthetic construct
  misc_feature 1..25: note = Oligonucleotide
  source 1..25: mol_type = other DNA
cacacaagcttgtcaaaggcaccag

SEQ ID NO: 7917 - DNA, 25 bp, synthetic construct
  misc_feature 1..25: note = Oligonucleotide
  source 1..25: mol_type = other DNA
ctccacacaagcttgtcaaaggcac

SEQ ID NO: 7918 - DNA, 25 bp, synthetic construct
  misc_feature 1..25: note = Oligonucleotide
  source 1..25: mol_type = other DNA
ctcctccacacaagcttgtcaaagg

SEQ ID NO: 7919 - DNA, 25 bp, synthetic construct
  misc_feature 1..25: note = Oligonucleotide
  source 1..25: mol_type = other DNA
gccctcctccacacaagcttgtcaa

SEQ ID NO: 7920 - DNA, 25 bp, synthetic construct
  misc_feature 1..25: note = Oligonucleotide
  source 1..25: mol_type = other DNA
agtgccctcctccacacaagcttgt

SEQ ID NO: 7921 - DNA, 25 bp, synthetic construct
  misc_feature 1..25: note = Oligonucleotide
  source 1..25: mol_type = other DNA
cacagtgccctcctccacacaagct

SEQ ID NO: 7922 - DNA, 25 bp, synthetic construct
  misc_feature 1..25: note = Oligonucleotide
  source 1..25: mol_type = other DNA
gcacacagtgccctcctccacacaa

SEQ ID NO: 7923 - DNA, 25 bp, synthetic construct
  misc_feature 1..25: note = Oligonucleotide
  source 1..25: mol_type = other DNA
acggcacacagtgccctcctccaca

SEQ ID NO: 7924 - DNA, 25 bp, synthetic construct
  misc_feature 1..25: note = Oligonucleotide
  source 1..25: mol_type = other DNA
accacggcacacagtgccctcctcc

SEQ ID NO: 7925 - DNA, 25 bp, synthetic construct
  misc_feature 1..25: note = Oligonucleotide
  source 1..25: mol_type = other DNA
gagaccacggcacacagtgccctcc

SEQ ID NO: 7926 - DNA, 25 bp, synthetic construct
  misc_feature 1..25: note = Oligonucleotide
  source 1..25: mol_type = other DNA
ctggagaccacggcacacagtgccc

SEQ ID NO: 7927 - DNA, 25 bp, synthetic construct
  misc_feature 1..25: note = Oligonucleotide
  source 1..25: mol_type = other DNA
ggtctggagaccacggcacacagtg

SEQ ID NO: 7928 - DNA, 25 bp, synthetic construct
  misc_feature 1..25: note = Oligonucleotide
  source 1..25: mol_type = other DNA
gcaggtctggagaccacggcacaca

SEQ ID NO: 7929 - DNA, 25 bp, synthetic construct
  misc_feature 1..25: note = Oligonucleotide
  source 1..25: mol_type = other DNA
ctagcaggtctggagaccacggcac

SEQ ID NO: 7930 - DNA, 25 bp, synthetic construct
  misc_feature 1..25: note = Oligonucleotide
  source 1..25: mol_type = other DNA
actctagcaggtctggagaccacgg

SEQ ID NO: 7931 - DNA, 25 bp, synthetic construct
  misc_feature 1..25: note = Oligonucleotide
  source 1..25: mol_type = other DNA
ctgactctagcaggtctggagacca

SEQ ID NO: 7932 - DNA, 25 bp, synthetic construct
  misc_feature 1..25: note = Oligonucleotide
  source 1..25: mol_type = other DNA
gaactgactctagcaggtctggaga

SEQ ID NO: 7933 - DNA, 25 bp, synthetic construct
  misc_feature 1..25: note = Oligonucleotide
  source 1..25: mol_type = other DNA
taggaactgactctagcaggtctgg

SEQ ID NO: 7934 - DNA, 25 bp, synthetic construct
  misc_feature 1..25: note = Oligonucleotide
  source 1..25: mol_type = other DNA
acctaggaactgactctagcaggtc

SEQ ID NO: 7935 - DNA, 25 bp, synthetic construct
  misc_feature 1..25: note = Oligonucleotide
  source 1..25: mol_type = other DNA
gagacctaggaactgactctagcag

SEQ ID NO: 7936 - DNA, 25 bp, synthetic construct
  misc_feature 1..25: note = Oligonucleotide
  source 1..25: mol_type = other DNA
tgggagacctaggaactgactctag

SEQ ID NO: 7937 - DNA, 25 bp, synthetic construct
  misc_feature 1..25: note = Oligonucleotide
  source 1..25: mol_type = other DNA
ttctgggagacctaggaactgactc

SEQ ID NO: 7938 - DNA, 25 bp, synthetic construct
  misc_feature 1..25: note = Oligonucleotide
  source 1..25: mol_type = other DNA
gtcttctgggagacctaggaactga

SEQ ID NO: 7939 - DNA, 25 bp, synthetic construct
  misc_feature 1..25: note = Oligonucleotide
  source 1..25: mol_type = other DNA
tgggtcttctgggagacctaggaac

SEQ ID NO: 7940 - DNA, 25 bp, synthetic construct
  misc_feature 1..25: note = Oligonucleotide
  source 1..25: mol_type = other DNA
acatgggtcttctgggagacctagg

SEQ ID NO: 7941 - DNA, 25 bp, synthetic construct
  misc_feature 1..25: note = Oligonucleotide
  source 1..25: mol_type = other DNA
ggaacatgggtcttctgggagacct

SEQ ID NO: 7942 - DNA, 25 bp, synthetic construct
  misc_feature 1..25: note = Oligonucleotide
  source 1..25: mol_type = other DNA
tgaggaacatgggtcttctgggaga

SEQ ID NO: 7943 - DNA, 25 bp, synthetic construct
  misc_feature 1..25: note = Oligonucleotide
  source 1..25: mol_type = other DNA
ttttgaggaacatgggtcttctggg

SEQ ID NO: 7944 - DNA, 25 bp, synthetic construct
  misc_feature 1..25: note = Oligonucleotide
  source 1..25: mol_type = other DNA
ccattttgaggaacatgggtcttct

SEQ ID NO: 7945 - DNA, 25 bp, synthetic construct
  misc_feature 1..25: note = Oligonucleotide
  source 1..25: mol_type = other DNA
tgaccattttgaggaacatgggtct

SEQ ID NO: 7946 - DNA, 25 bp, synthetic construct
  misc_feature 1..25: note = Oligonucleotide
  source 1..25: mol_type = other DNA
tcttgaccattttgaggaacatggg

SEQ ID NO: 7947 - DNA, 25 bp, synthetic construct
  misc_feature 1..25: note = Oligonucleotide
  source 1..25: mol_type = other DNA
gcttcttgaccattttgaggaacat

SEQ ID NO: 7948 - DNA, 25 bp, synthetic construct
  misc_feature 1..25: note = Oligonucleotide
  source 1..25: mol_type = other DNA
agggcttcttgaccattttgaggaa

SEQ ID NO: 7949 - DNA, 25 bp, synthetic construct
  misc_feature 1..25: note = Oligonucleotide
  source 1..25: mol_type = other DNA
ggcagggcttcttgaccattttgag

SEQ ID NO: 7950 - DNA, 25 bp, synthetic construct
  misc_feature 1..25: note = Oligonucleotide
  source 1..25: mol_type = other DNA
cagggcagggcttcttgaccatttt

SEQ ID NO: 7951 - DNA, 25 bp, synthetic construct
  misc_feature 1..25: note = Oligonucleotide
  source 1..25: mol_type = other DNA
caccagggcagggcttcttgaccat

SEQ ID NO: 7952 - DNA, 25 bp, synthetic construct
  misc_feature 1..25: note = Oligonucleotide
  source 1..25: mol_type = other DNA
ggccaccagggcagggcttcttgac

SEQ ID NO: 7953 - DNA, 25 bp, synthetic construct
  misc_feature 1..25: note = Oligonucleotide
  source 1..25: mol_type = other DNA
gcaggccaccagggcagggcttctt

SEQ ID NO: 7954 - DNA, 25 bp, synthetic construct
  misc_feature 1..25: note = Oligonucleotide
  source 1..25: mol_type = other DNA
gcagcaggccaccagggcagggctt

SEQ ID NO: 7955 - DNA, 25 bp, synthetic construct
  misc_feature 1..25: note = Oligonucleotide
  source 1..25: mol_type = other DNA
tctgcagcaggccaccagggcaggg

SEQ ID NO: 7956 - DNA, 25 bp, synthetic construct
  misc_feature 1..25: note = Oligonucleotide
  source 1..25: mol_type = other DNA
gggtctgcagcaggccaccagggca

SEQ ID NO: 7957 - DNA, 25 bp, synthetic construct
  misc_feature 1..25: note = Oligonucleotide
  source 1..25: mol_type = other DNA
gcagggtctgcagcaggccaccagg

SEQ ID NO: 7958 - DNA, 25 bp, synthetic construct
  misc_feature 1..25: note = Oligonucleotide
  source 1..25: mol_type = other DNA
caggcagggtctgcagcaggccacc

SEQ ID NO: 7959 - DNA, 25 bp, synthetic construct
  misc_feature 1..25: note = Oligonucleotide
  source 1..25: mol_type = other DNA
tagcaggcagggtctgcagcaggcc

SEQ ID NO: 7960 - DNA, 25 bp, synthetic construct
  misc_feature 1..25: note = Oligonucleotide
  source 1..25: mol_type = other DNA
tattagcaggcagggtctgcagcag

SEQ ID NO: 7961 - DNA, 25 bp, synthetic construct
  misc_feature 1..25: note = Oligonucleotide
  source 1..25: mol_type = other DNA
atatattagcaggcagggtctgcag

SEQ ID NO: 7962 - DNA, 25 bp, synthetic construct
  misc_feature 1..25: note = Oligonucleotide
  source 1..25: mol_type = other DNA
caaatatattagcaggcagggtctg

SEQ ID NO: 7963 - DNA, 25 bp, synthetic construct
  misc_feature 1..25: note = Oligonucleotide
  source 1..25: mol_type = other DNA
tgacaaatatattagcaggcagggt

SEQ ID NO: 7964 - DNA, 25 bp, synthetic construct
  misc_feature 1..25: note = Oligonucleotide
  source 1..25: mol_type = other DNA
ccctgacaaatatattagcaggcag

SEQ ID NO: 7965 - DNA, 25 bp, synthetic construct
  misc_feature 1..25: note = Oligonucleotide
  source 1..25: mol_type = other DNA
gagccctgacaaatatattagcagg

SEQ ID NO: 7966 - DNA, 25 bp, synthetic construct
  misc_feature 1..25: note = Oligonucleotide
  source 1..25: mol_type = other DNA
ccagagccctgacaaatatattagc

SEQ ID NO: 7967 - DNA, 25 bp, synthetic construct
  misc_feature 1..25: note = Oligonucleotide
  source 1..25: mol_type = other DNA
tgtccagagccctgacaaatatatt

SEQ ID NO: 7968 - DNA, 25 bp, synthetic construct
  misc_feature 1..25: note = Oligonucleotide
  source 1..25: mol_type = other DNA
ctttgtccagagccctgacaaatat

SEQ ID NO: 7969 - DNA, 25 bp, synthetic construct
  misc_feature 1..25: note = Oligonucleotide
  source 1..25: mol_type = other DNA
gtgctttgtccagagccctgacaaa

SEQ ID NO: 7970 - DNA, 25 bp, synthetic construct
  misc_feature 1..25: note = Oligonucleotide
  source 1..25: mol_type = other DNA
acagtgctttgtccagagccctgac

SEQ ID NO: 7971 - DNA, 25 bp, synthetic construct
  misc_feature 1..25: note = Oligonucleotide
  source 1..25: mol_type = other DNA
cacacagtgctttgtccagagccct

SEQ ID NO: 7972 - DNA, 25 bp, synthetic construct
  misc_feature 1..25: note = Oligonucleotide
  source 1..25: mol_type = other DNA
aagcacacagtgctttgtccagagc

SEQ ID NO: 7973 - DNA, 25 bp, synthetic construct
  misc_feature 1..25: note = Oligonucleotide
  source 1..25: mol_type = other DNA
accaagcacacagtgctttgtccag

SEQ ID NO: 7974 - DNA, 25 bp, synthetic construct
  misc_feature 1..25: note = Oligonucleotide
  source 1..25: mol_type = other DNA
tccaccaagcacacagtgctttgtc

SEQ ID NO: 7975 - DNA, 25 bp, synthetic construct
  misc_feature 1..25: note = Oligonucleotide
  source 1..25: mol_type = other DNA
tgatccaccaagcacacagtgcttt

SEQ ID NO: 7976 - DNA, 25 bp, synthetic construct
  misc_feature 1..25: note = Oligonucleotide
  source 1..25: mol_type = other DNA
gtgtgatccaccaagcacacagtgc

SEQ ID NO: 7977 - DNA, 25 bp, synthetic construct
  misc_feature 1..25: note = Oligonucleotide
  source 1..25: mol_type = other DNA
ccagtgtgatccaccaagcacacag

SEQ ID NO: 7978 - DNA, 25 bp, synthetic construct
  misc_feature 1..25: note = Oligonucleotide
  source 1..25: mol_type = other DNA
ttaccagtgtgatccaccaagcaca

SEQ ID NO: 7979 - DNA, 25 bp, synthetic construct
  misc_feature 1..25: note = Oligonucleotide
  source 1..25: mol_type = other DNA
tgcttaccagtgtgatccaccaagc

SEQ ID NO: 7980 - DNA, 25 bp, synthetic construct
  misc_feature 1..25: note = Oligonucleotide
  source 1..25: mol_type = other DNA
ccctgcttaccagtgtgatccacca

SEQ ID NO: 7981 - DNA, 25 bp, synthetic construct
  misc_feature 1..25: note = Oligonucleotide
  source 1..25: mol_type = other DNA
tggccctgcttaccagtgtgatcca

SEQ ID NO: 7982 - DNA, 25 bp, synthetic construct
  misc_feature 1..25: note = Oligonucleotide
  source 1..25: mol_type = other DNA
ccttggccctgcttaccagtgtgat

SEQ ID NO: 7983 - DNA, 25 bp, synthetic construct
  misc_feature 1..25: note = Oligonucleotide
  source 1..25: mol_type = other DNA
tggccttggccctgcttaccagtgt

SEQ ID NO: 7984 - DNA, 25 bp, synthetic construct
  misc_feature 1..25: note = Oligonucleotide
  source 1..25: mol_type = other DNA
tgctggccttggccctgcttaccag

SEQ ID NO: 7985 - DNA, 25 bp, synthetic construct
  misc_feature 1..25: note = Oligonucleotide
  source 1..25: mol_type = other DNA
ccctgctggccttggccctgcttac

SEQ ID NO: 7986 - DNA, 25 bp, synthetic construct
  misc_feature 1..25: note = Oligonucleotide
  source 1..25: mol_type = other DNA
aggccctgctggccttggccctgct

SEQ ID NO: 7987 - DNA, 25 bp, synthetic construct
  misc_feature 1..25: note = Oligonucleotide
  source 1..25: mol_type = other DNA
agcaggccctgctggccttggccct

SEQ ID NO: 7988 - DNA, 25 bp, synthetic construct
  misc_feature 1..25: note = Oligonucleotide
  source 1..25: mol_type = other DNA
aagagcaggccctgctggccttggc

SEQ ID NO: 7989 - DNA, 25 bp, synthetic construct
  misc_feature 1..25: note = Oligonucleotide
  source 1..25: mol_type = other DNA
caaaagagcaggccctgctggcctt

SEQ ID NO: 7990 - DNA, 25 bp, synthetic construct
  misc_feature 1..25: note = Oligonucleotide
  source 1..25: mol_type = other DNA
tttcaaaagagcaggccctgctggc

SEQ ID NO: 7991 - DNA, 25 bp, synthetic construct
  misc_feature 1..25: note = Oligonucleotide
  source 1..25: mol_type = other DNA
gggtttcaaaagagcaggccctgct

SEQ ID NO: 7992 - DNA, 25 bp, synthetic construct
  misc_feature 1..25: note = Oligonucleotide
  source 1..25: mol_type = other DNA
tctgggtttcaaaagagcaggccct

SEQ ID NO: 7993 - DNA, 25 bp, synthetic construct
  misc_feature 1..25: note = Oligonucleotide
  source 1..25: mol_type = other DNA
cagtctgggtttcaaaagagcaggc

SEQ ID NO: 7994 - DNA, 25 bp, synthetic construct
  misc_feature 1..25: note = Oligonucleotide
  source 1..25: mol_type = other DNA
attcagtctgggtttcaaaagagca

SEQ ID NO: 7995 - DNA, 25 bp, synthetic construct
  misc_feature 1..25: note = Oligonucleotide
  source 1..25: mol_type = other DNA
cacattcagtctgggtttcaaaaga

SEQ ID NO: 7996 - DNA, 25 bp, synthetic construct
  misc_feature 1..25: note = Oligonucleotide
  source 1..25: mol_type = other DNA
tgacacattcagtctgggtttcaaa

SEQ ID NO: 7997 - DNA, 25 bp, synthetic construct
  misc_feature 1..25: note = Oligonucleotide
  source 1..25: mol_type = other DNA
atgtgacacattcagtctgggtttc

SEQ ID NO: 7998 - DNA, 25 bp, synthetic construct
  misc_feature 1..25: note = Oligonucleotide
  source 1..25: mol_type = other DNA
ggtatgtgacacattcagtctgggt

SEQ ID NO: 7999 - DNA, 25 bp, synthetic construct
  misc_feature 1..25: note = Oligonucleotide
  source 1..25: mol_type = other DNA
gcaggtatgtgacacattcagtctg

SEQ ID NO: 8000 - DNA, 25 bp, synthetic construct
  misc_feature 1..25: note = Oligonucleotide
  source 1..25: mol_type = other DNA
ctggcaggtatgtgacacattcagt

SEQ ID NO: 8001 - DNA, 25 bp, synthetic construct
  misc_feature 1..25: note = Oligonucleotide
  source 1..25: mol_type = other DNA
ccactggcaggtatgtgacacattc

SEQ ID NO: 8002 - DNA, 25 bp, synthetic construct
  misc_feature 1..25: note = Oligonucleotide
  source 1..25: mol_type = other DNA
cccccactggcaggtatgtgacaca

SEQ ID NO: 8003 - DNA, 25 bp, synthetic construct
  misc_feature 1..25: note = Oligonucleotide
  source 1..25: mol_type = other DNA
gggcccccactggcaggtatgtgac

SEQ ID NO: 8004 - DNA, 25 bp, synthetic construct
  misc_feature 1..25: note = Oligonucleotide
  source 1..25: mol_type = other DNA
caggggcccccactggcaggtatgt

SEQ ID NO: 8005 - DNA, 25 bp, synthetic construct
  misc_feature 1..25: note = Oligonucleotide
  source 1..25: mol_type = other DNA
ctgcaggggcccccactggcaggta

SEQ ID NO: 8006 - DNA, 25 bp, synthetic construct
  misc_feature 1..25: note = Oligonucleotide
  source 1..25: mol_type = other DNA
ggcctgcaggggcccccactggcag

SEQ ID NO: 8007 - DNA, 25 bp, synthetic construct
  misc_feature 1..25: note = Oligonucleotide
  source 1..25: mol_type = other DNA
tgtggcctgcaggggcccccactgg

SEQ ID NO: 8008 - DNA, 25 bp, synthetic construct
  misc_feature 1..25: note = Oligonucleotide
  source 1..25: mol_type = other DNA
gcatgtggcctgcaggggcccccac

SEQ ID NO: 8009 - DNA, 25 bp, synthetic construct
  misc_feature 1..25: note = Oligonucleotide
  source 1..25: mol_type = other DNA
gctgcatgtggcctgcaggggcccc

SEQ ID NO: 8010 - DNA, 25 bp, synthetic construct
  misc_feature 1..25: note = Oligonucleotide
  source 1..25: mol_type = other DNA
ccagctgcatgtggcctgcaggggc

SEQ ID NO: 8011 - DNA, 25 bp, synthetic construct
  misc_feature 1..25: note = Oligonucleotide
  source 1..25: mol_type = other DNA
gccccagctgcatgtggcctgcagg

SEQ ID NO: 8012 - DNA, 25 bp, synthetic construct
  misc_feature 1..25: note = Oligonucleotide
  source 1..25: mol_type = other DNA
cctgccccagctgcatgtggcctgc

SEQ ID NO: 8013 - DNA, 25 bp, synthetic construct
  misc_feature 1..25: note = Oligonucleotide
  source 1..25: mol_type = other DNA
acacctgccccagctgcatgtggcc

SEQ ID NO: 8014 - DNA, 25 bp, synthetic construct
  misc_feature 1..25: note = Oligonucleotide
  source 1..25: mol_type = other DNA
aacacacctgccccagctgcatgtg

SEQ ID NO: 8015 - DNA, 25 bp, synthetic construct
  misc_feature 1..25: note = Oligonucleotide
  source 1..25: mol_type = other DNA
gggaacacacctgccccagctgcat

SEQ ID NO: 8016 - DNA, 25 bp, synthetic construct
  misc_feature 1..25: note = Oligonucleotide
  source 1..25: mol_type = other DNA
cctgggaacacacctgccccagctg

SEQ ID NO: 8017 - DNA, 25 bp, synthetic construct
  misc_feature 1..25: note = Oligonucleotide
  source 1..25: mol_type = other DNA
gatcctgggaacacacctgccccag

SEQ ID NO: 8018 - DNA, 25 bp, synthetic construct
  misc_feature 1..25: note = Oligonucleotide
  source 1..25: mol_type = other DNA
agggatcctgggaacacacctgccc

SEQ ID NO: 8019 - DNA, 25 bp, synthetic construct
  misc_feature 1..25: note = Oligonucleotide
  source 1..25: mol_type = other DNA
ttcagggatcctgggaacacacctg

SEQ ID NO: 8020 - DNA, 25 bp, synthetic construct
  misc_feature 1..25: note = Oligonucleotide
  source 1..25: mol_type = other DNA
gggttcagggatcctgggaacacac

SEQ ID NO: 8021 - DNA, 25 bp, synthetic construct
  misc_feature 1..25: note = Oligonucleotide
  source 1..25: mol_type = other DNA
acagggttcagggatcctgggaaca

SEQ ID NO: 8022 - DNA, 25 bp, synthetic construct
  misc_feature 1..25: note = Oligonucleotide
  source 1..25: mol_type = other DNA
cgaacagggttcagggatcctggga

SEQ ID NO: 8023 - DNA, 25 bp, synthetic construct
  misc_feature 1..25: note = Oligonucleotide
  source 1..25: mol_type = other DNA
ccccgaacagggttcagggatcctg

SEQ ID NO: 8024 - DNA, 25 bp, synthetic construct
  misc_feature 1..25: note = Oligonucleotide
  source 1..25: mol_type = other DNA
actccccgaacagggttcagggatc

SEQ ID NO: 8025 - DNA, 25 bp, synthetic construct
  misc_feature 1..25: note = Oligonucleotide
  source 1..25: mol_type = other DNA
cctactccccgaacagggttcaggg

SEQ ID NO: 8026 - DNA, 25 bp, synthetic construct
  misc_feature 1..25: note = Oligonucleotide
  source 1..25: mol_type = other DNA
cttcctactccccgaacagggttca

SEQ ID NO: 8027 - DNA, 25 bp, synthetic construct
  misc_feature 1..25: note = Oligonucleotide
  source 1..25: mol_type = other DNA
ctccttcctactccccgaacagggt

SEQ ID NO: 8028 - DNA, 25 bp, synthetic construct
  misc_feature 1..25: note = Oligonucleotide
  source 1..25: mol_type = other DNA
tacctccttcctactccccgaacag

SEQ ID NO: 8029 - DNA, 25 bp, synthetic construct
  misc_feature 1..25: note = Oligonucleotide
  source 1..25: mol_type = other DNA
ctgtacctccttcctactccccgaa

SEQ ID NO: 8030 - DNA, 25 bp, synthetic construct
  misc_feature 1..25: note = Oligonucleotide
  source 1..25: mol_type = other DNA
cctctgtacctccttcctactcccc

SEQ ID NO: 8031 - DNA, 25 bp, synthetic construct
  misc_feature 1..25: note = Oligonucleotide
  source 1..25: mol_type = other DNA
cctcctctgtacctccttcctactc

SEQ ID NO: 8032 - DNA, 25 bp, synthetic construct
  misc_feature 1..25: note = Oligonucleotide
  source 1..25: mol_type = other DNA
acccctcctctgtacctccttccta

SEQ ID NO: 8033 - DNA, 25 bp, synthetic construct
  misc_feature 1..25: note = Oligonucleotide
  source 1..25: mol_type = other DNA
atgacccctcctctgtacctccttc

SEQ ID NO: 8034 - DNA, 25 bp, synthetic construct
  misc_feature 1..25: note = Oligonucleotide
  source 1..25: mol_type = other DNA
cctatgacccctcctctgtacctcc

SEQ ID NO: 8035 - DNA, 25 bp, synthetic construct
  misc_feature 1..25: note = Oligonucleotide
  source 1..25: mol_type = other DNA
tgtcctatgacccctcctctgtacc

SEQ ID NO: 8036 - DNA, 25 bp, synthetic construct
  misc_feature 1..25: note = Oligonucleotide
  source 1..25: mol_type = other DNA
cagtgtcctatgacccctcctctgt

SEQ ID NO: 8037 - DNA, 25 bp, synthetic construct
  misc_feature 1..25: note = Oligonucleotide
  source 1..25: mol_type = other DNA
ccccagtgtcctatgacccctcctc

SEQ ID NO: 8038 - DNA, 25 bp, synthetic construct
  misc_feature 1..25: note = Oligonucleotide
  source 1..25: mol_type = other DNA
gggccccagtgtcctatgacccctc

SEQ ID NO: 8039 - DNA, 25 bp, synthetic construct
  misc_feature 1..25: note = Oligonucleotide
  source 1..25: mol_type = other DNA
gatgggccccagtgtcctatgaccc

SEQ ID NO: 8040 - DNA, 25 bp, synthetic construct
  misc_feature 1..25: note = Oligonucleotide
  source 1..25: mol_type = other DNA
tctgatgggccccagtgtcctatga

SEQ ID NO: 8041 - DNA, 25 bp, synthetic construct
  misc_feature 1..25: note = Oligonucleotide
  source 1..25: mol_type = other DNA
agctctgatgggccccagtgtccta

SEQ ID NO: 8042 - DNA, 25 bp, synthetic construct
  misc_feature 1..25: note = Oligonucleotide
  source 1..25: mol_type = other DNA
tccagctctgatgggccccagtgtc

SEQ ID NO: 8043 - DNA, 25 bp, synthetic construct
  misc_feature 1..25: note = Oligonucleotide
  source 1..25: mol_type = other DNA
agctccagctctgatgggccccagt

SEQ ID NO: 8044 - DNA, 25 bp, synthetic construct
  misc_feature 1..25: note = Oligonucleotide
  source 1..25: mol_type = other DNA
cccagctccagctctgatgggcccc

SEQ ID NO: 8045 - DNA, 25 bp, synthetic construct
  misc_feature 1..25: note = Oligonucleotide
  source 1..25: mol_type = other DNA
gttcccagctccagctctgatgggc

SEQ ID NO: 8046 - DNA, 25 bp, synthetic construct
  misc_feature 1..25: note = Oligonucleotide
  source 1..25: mol_type = other DNA
cctgttcccagctccagctctgatg

SEQ ID NO: 8047 - DNA, 25 bp, synthetic construct
  misc_feature 1..25: note = Oligonucleotide
  source 1..25: mol_type = other DNA
ccgcctgttcccagctccagctctg

SEQ ID NO: 8048 - DNA, 25 bp, synthetic construct
  misc_feature 1..25: note = Oligonucleotide
  source 1..25: mol_type = other DNA
accccgcctgttcccagctccagct

SEQ ID NO: 8049 - DNA, 25 bp, synthetic construct
  misc_feature 1..25: note = Oligonucleotide
  source 1..25: mol_type = other DNA
ggcaccccgcctgttcccagctcca

SEQ ID NO: 8050 - DNA, 25 bp, synthetic construct
  misc_feature 1..25: note = Oligonucleotide
  source 1..25: mol_type = other DNA
ctcggcaccccgcctgttcccagct

SEQ ID NO: 8051 - DNA, 25 bp, synthetic construct
  misc_feature 1..25: note = Oligonucleotide
  source 1..25: mol_type = other DNA
ctcctcggcaccccgcctgttccca

SEQ ID NO: 8052 - DNA, 25 bp, synthetic construct
  misc_feature 1..25: note = Oligonucleotide
  source 1..25: mol_type = other DNA
ttgctcctcggcaccccgcctgttc

SEQ ID NO: 8053 - DNA, 25 bp, synthetic construct
  misc_feature 1..25: note = Oligonucleotide
  source 1..25: mol_type = other DNA
gtcttgctcctcggcaccccgcctg

SEQ ID NO: 8054 - DNA, 25 bp, synthetic construct
  misc_feature 1..25: note = Oligonucleotide
  source 1..25: mol_type = other DNA
cacgtcttgctcctcggcaccccgc

SEQ ID NO: 8055 - DNA, 25 bp, synthetic construct
  misc_feature 1..25: note = Oligonucleotide
  source 1..25: mol_type = other DNA
taacacgtcttgctcctcggcaccc

SEQ ID NO: 8056 - DNA, 25 bp, synthetic construct
  misc_feature 1..25: note = Oligonucleotide
  source 1..25: mol_type = other DNA
cggtaacacgtcttgctcctcggca

SEQ ID NO: 8057 - DNA, 25 bp, synthetic construct
  misc_feature 1..25: note = Oligonucleotide
  source 1..25: mol_type = other DNA
ctgcggtaacacgtcttgctcctcg

SEQ ID NO: 8058 - DNA, 25 bp, synthetic construct
  misc_feature 1..25: note = Oligonucleotide
  source 1..25: mol_type = other DNA
cctctgcggtaacacgtcttgctcc

SEQ ID NO: 8059 - DNA, 25 bp, synthetic construct
  misc_feature 1..25: note = Oligonucleotide
  source 1..25: mol_type = other DNA
catcctctgcggtaacacgtcttgc

SEQ ID NO: 8060 - DNA, 25 bp, synthetic construct
  misc_feature 1..25: note = Oligonucleotide
  source 1..25: mol_type = other DNA
gtgcatcctctgcggtaacacgtct

SEQ ID NO: 8061 - DNA, 25 bp, synthetic construct
  misc_feature 1..25: note = Oligonucleotide
  source 1..25: mol_type = other DNA
ccagtgcatcctctgcggtaacacg

SEQ ID NO: 8062 - DNA, 25 bp, synthetic construct
  misc_feature 1..25: note = Oligonucleotide
  source 1..25: mol_type = other DNA
cttccagtgcatcctctgcggtaac

SEQ ID NO: 8063 - DNA, 25 bp, synthetic construct
  misc_feature 1..25: note = Oligonucleotide
  source 1..25: mol_type = other DNA
aagcttccagtgcatcctctgcggt

SEQ ID NO: 8064 - DNA, 25 bp, synthetic construct
  misc_feature 1..25: note = Oligonucleotide
  source 1..25: mol_type = other DNA
cggaagcttccagtgcatcctctgc

SEQ ID NO: 8065 - DNA, 25 bp, synthetic construct
  misc_feature 1..25: note = Oligonucleotide
  source 1..25: mol_type = other DNA
gctcggaagcttccagtgcatcctc

SEQ ID NO: 8066 - DNA, 25 bp, synthetic construct
  misc_feature 1..25: note = Oligonucleotide
  source 1..25: mol_type = other DNA
tgggctcggaagcttccagtgcatc

SEQ ID NO: 8067 - DNA, 25 bp, synthetic construct
  misc_feature 1..25: note = Oligonucleotide
  source 1..25: mol_type = other DNA
acatgggctcggaagcttccagtgc

SEQ ID NO: 8068 - DNA, 25 bp, synthetic construct
  misc_feature 1..25: note = Oligonucleotide
  source 1..25: mol_type = other DNA
cagacatgggctcggaagcttccag

SEQ ID NO: 8069 - DNA, 25 bp, synthetic construct
  misc_feature 1..25: note = Oligonucleotide
  source 1..25: mol_type = other DNA
aaccagacatgggctcggaagcttc

SEQ ID NO: 8070 - DNA, 25 bp, synthetic construct
  misc_feature 1..25: note = Oligonucleotide
  source 1..25: mol_type = other DNA
caaaaccagacatgggctcggaagc

SEQ ID NO: 8071 - DNA, 25 bp, synthetic construct
  misc_feature 1..25: note = Oligonucleotide
  source 1..25: mol_type = other DNA
gcacaaaaccagacatgggctcgga

SEQ ID NO: 8072 - DNA, 25 bp, synthetic construct
  misc_feature 1..25: note = Oligonucleotide
  source 1..25: mol_type = other DNA
ggagcacaaaaccagacatgggctc

SEQ ID NO: 8073 - DNA, 25 bp, synthetic construct
  misc_feature 1..25: note = Oligonucleotide
  source 1..25: mol_type = other DNA
agaggagcacaaaaccagacatggg

SEQ ID NO: 8074 - DNA, 25 bp, synthetic construct
  misc_feature 1..25: note = Oligonucleotide
  source 1..25: mol_type = other DNA
ctcagaggagcacaaaaccagacat

SEQ ID NO: 8075 - DNA, 25 bp, synthetic construct
  misc_feature 1..25: note = Oligonucleotide
  source 1..25: mol_type = other DNA
attctcagaggagcacaaaaccaga

SEQ ID NO: 8076 - DNA, 25 bp, synthetic construct
  misc_feature 1..25: note = Oligonucleotide
  source 1..25: mol_type = other DNA
ctaattctcagaggagcacaaaacc

SEQ ID NO: 8077 - DNA, 25 bp, synthetic construct
  misc_feature 1..25: note = Oligonucleotide
  source 1..25: mol_type = other DNA
gaactaattctcagaggagcacaaa

SEQ ID NO: 8078 - DNA, 25 bp, synthetic construct
  misc_feature 1..25: note = Oligonucleotide
  source 1..25: mol_type = other DNA
agggaactaattctcagaggagcac

SEQ ID NO: 8079 - DNA, 25 bp, synthetic construct
  misc_feature 1..25: note = Oligonucleotide
  source 1..25: mol_type = other DNA
ttaagggaactaattctcagaggag

SEQ ID NO: 8080 - DNA, 25 bp, synthetic construct
  misc_feature 1..25: note = Oligonucleotide
  source 1..25: mol_type = other DNA
tcattaagggaactaattctcagag

SEQ ID NO: 8081 - DNA, 25 bp, synthetic construct
  misc_feature 1..25: note = Oligonucleotide
  source 1..25: mol_type = other DNA
gcctcattaagggaactaattctca

SEQ ID NO: 8082 - DNA, 25 bp, synthetic construct
  misc_feature 1..25: note = Oligonucleotide
  source 1..25: mol_type = other DNA
ggggcctcattaagggaactaattc

SEQ ID NO: 8083 - DNA, 25 bp, synthetic construct
  misc_feature 1..25: note = Oligonucleotide
  source 1..25: mol_type = other DNA
ctaggggcctcattaagggaactaa

SEQ ID NO: 8084 - DNA, 25 bp, synthetic construct
  misc_feature 1..25: note = Oligonucleotide
  source 1..25: mol_type = other DNA
aaactaggggcctcattaagggaac

SEQ ID NO: 8085 - DNA, 25 bp, synthetic construct
  misc_feature 1..25: note = Oligonucleotide
  source 1..25: mol_type = other DNA
tgcaaactaggggcctcattaaggg

SEQ ID NO: 8086 - DNA, 25 bp, synthetic construct
  misc_feature 1..25: note = Oligonucleotide
  source 1..25: mol_type = other DNA
ttttgcaaactaggggcctcattaa

SEQ ID NO: 8087 - DNA, 25 bp, synthetic construct
  misc_feature 1..25: note = Oligonucleotide
  source 1..25: mol_type = other DNA
gccttttgcaaactaggggcctcat

SEQ ID NO: 8088 - DNA, 25 bp, synthetic construct
  misc_feature 1..25: note = Oligonucleotide
  source 1..25: mol_type = other DNA
gtggccttttgcaaactaggggcct

SEQ ID NO: 8089 - DNA, 25 bp, synthetic construct
  misc_feature 1..25: note = Oligonucleotide
  source 1..25: mol_type = other DNA
cctgtggccttttgcaaactagggg

SEQ ID NO: 8090 - DNA, 25 bp, synthetic construct
  misc_feature 1..25: note = Oligonucleotide
  source 1..25: mol_type = other DNA
aggcctgtggccttttgcaaactag

SEQ ID NO: 8091 - DNA, 25 bp, synthetic construct
  misc_feature 1..25: note = Oligonucleotide
  source 1..25: mol_type = other DNA
tctaggcctgtggccttttgcaaac

SEQ ID NO: 8092 - DNA, 25 bp, synthetic construct
  misc_feature 1..25: note = Oligonucleotide
  source 1..25: mol_type = other DNA
cggtctaggcctgtggccttttgca

SEQ ID NO: 8093 - DNA, 25 bp, synthetic construct
  misc_feature 1..25: note = Oligonucleotide
  source 1..25: mol_type = other DNA
ggccggtctaggcctgtggcctttt

SEQ ID NO: 8094 - DNA, 25 bp, synthetic construct
  misc_feature 1..25: note = Oligonucleotide
  source 1..25: mol_type = other DNA
tggggccggtctaggcctgtggcct

SEQ ID NO: 8095 - DNA, 25 bp, synthetic construct
  misc_feature 1..25: note = Oligonucleotide
  source 1..25: mol_type = other DNA
acgtggggccggtctaggcctgtgg

SEQ ID NO: 8096 - DNA, 25 bp, synthetic construct
  misc_feature 1..25: note = Oligonucleotide
  source 1..25: mol_type = other DNA
ctcacgtggggccggtctaggcctg

SEQ ID NO: 8097 - DNA, 25 bp, synthetic construct
  misc_feature 1..25: note = Oligonucleotide
  source 1..25: mol_type = other DNA
gcactcacgtggggccggtctaggc

SEQ ID NO: 8098 - DNA, 25 bp, synthetic construct
  misc_feature 1..25: note = Oligonucleotide
  source 1..25: mol_type = other DNA
actgcactcacgtggggccggtcta

SEQ ID NO: 8099 - DNA, 25 bp, synthetic construct
  misc_feature 1..25: note = Oligonucleotide
  source 1..25: mol_type = other DNA
gccactgcactcacgtggggccggt

SEQ ID NO: 8100 - DNA, 25 bp, synthetic construct
  misc_feature 1..25: note = Oligonucleotide
  source 1..25: mol_type = other DNA
tctgccactgcactcacgtggggcc

SEQ ID NO: 8101 - DNA, 25 bp, synthetic construct
  misc_feature 1..25: note = Oligonucleotide
  source 1..25: mol_type = other DNA
ccttctgccactgcactcacgtggg

SEQ ID NO: 8102 - DNA, 25 bp, synthetic construct
  misc_feature 1..25: note = Oligonucleotide
  source 1..25: mol_type = other DNA
gggccttctgccactgcactcacgt

SEQ ID NO: 8103 - DNA, 25 bp, synthetic construct
  misc_feature 1..25: note = Oligonucleotide
  source 1..25: mol_type = other DNA
ctcgggccttctgccactgcactca

SEQ ID NO: 8104 - DNA, 25 bp, synthetic construct
  misc_feature 1..25: note = Oligonucleotide
  source 1..25: mol_type = other DNA
tgcctcgggccttctgccactgcac

SEQ ID NO: 8105 - DNA, 25 bp, synthetic construct
  misc_feature 1..25: note = Oligonucleotide
  source 1..25: mol_type = other DNA
tactgcctcgggccttctgccactg

SEQ ID NO: 8106 - DNA, 25 bp, synthetic construct
  misc_feature 1..25: note = Oligonucleotide
  source 1..25: mol_type = other DNA
ggatactgcctcgggccttctgcca

SEQ ID NO: 8107 - DNA, 25 bp, synthetic construct
  misc_feature 1..25: note = Oligonucleotide
  source 1..25: mol_type = other DNA
ccgggatactgcctcgggccttctg

SEQ ID NO: 8108 - DNA, 25 bp, synthetic construct
  misc_feature 1..25: note = Oligonucleotide
  source 1..25: mol_type = other DNA
ggcccgggatactgcctcgggcctt

SEQ ID NO: 8109 - DNA, 25 bp, synthetic construct
  misc_feature 1..25: note = Oligonucleotide
  source 1..25: mol_type = other DNA
tcgggcccgggatactgcctcgggc

SEQ ID NO: 8110 - DNA, 25 bp, synthetic construct
  misc_feature 1..25: note = Oligonucleotide
  source 1..25: mol_type = other DNA
cactcgggcccgggatactgcctcg

SEQ ID NO: 8111 - DNA, 25 bp, synthetic construct
  misc_feature 1..25: note = Oligonucleotide
  source 1..25: mol_type = other DNA
ccacactcgggcccgggatactgcc

SEQ ID NO: 8112 - DNA, 25 bp, synthetic construct
  misc_feature 1..25: note = Oligonucleotide
  source 1..25: mol_type = other DNA
tgtccacactcgggcccgggatact

SEQ ID NO: 8113 - DNA, 25 bp, synthetic construct
  misc_feature 1..25: note = Oligonucleotide
  source 1..25: mol_type = other DNA
aaatgtccacactcgggcccgggat

SEQ ID NO: 8114 - DNA, 25 bp, synthetic construct
  misc_feature 1..25: note = Oligonucleotide
  source 1..25: mol_type = other DNA
ggaaaatgtccacactcgggcccgg

SEQ ID NO: 8115 - DNA, 25 bp, synthetic construct
  misc_feature 1..25: note = Oligonucleotide
  source 1..25: mol_type = other DNA
gcaggaaaatgtccacactcgggcc

SEQ ID NO: 8116 - DNA, 25 bp, synthetic construct
  misc_feature 1..25: note = Oligonucleotide
  source 1..25: mol_type = other DNA
caggcaggaaaatgtccacactcgg

SEQ ID NO: 8117 - DNA, 25 bp, synthetic construct
  misc_feature 1..25: note = Oligonucleotide
  source 1..25: mol_type = other DNA
caacaggcaggaaaatgtccacact

SEQ ID NO: 8118 - DNA, 25 bp, synthetic construct
  misc_feature 1..25: note = Oligonucleotide
  source 1..25: mol_type = other DNA
ggccaacaggcaggaaaatgtccac

SEQ ID NO: 8119 - DNA, 25 bp, synthetic construct
  misc_feature 1..25: note = Oligonucleotide
  source 1..25: mol_type = other DNA
tagggccaacaggcaggaaaatgtc

SEQ ID NO: 8120 - DNA, 25 bp, synthetic construct
  misc_feature 1..25: note = Oligonucleotide
  source 1..25: mol_type = other DNA
cactagggccaacaggcaggaaaat

SEQ ID NO: 8121 - DNA, 25 bp, synthetic construct
  misc_feature 1..25: note = Oligonucleotide
  source 1..25: mol_type = other DNA
gcccactagggccaacaggcaggaa

SEQ ID NO: 8122 - DNA, 25 bp, synthetic construct
  misc_feature 1..25: note = Oligonucleotide
  source 1..25: mol_type = other DNA
tcagcccactagggccaacaggcag

SEQ ID NO: 8123 - DNA, 25 bp, synthetic construct
  misc_feature 1..25: note = Oligonucleotide
  source 1..25: mol_type = other DNA
cagtcagcccactagggccaacagg

SEQ ID NO: 8124 - DNA, 25 bp, synthetic construct
  misc_feature 1..25: note = Oligonucleotide
  source 1..25: mol_type = other DNA
actcagtcagcccactagggccaac

SEQ ID NO: 8125 - DNA, 25 bp, synthetic construct
  misc_feature 1..25: note = Oligonucleotide
  source 1..25: mol_type = other DNA
ccaactcagtcagcccactagggcc

SEQ ID NO: 8126 - DNA, 25 bp, synthetic construct
  misc_feature 1..25: note = Oligonucleotide
  source 1..25: mol_type = other DNA
tgcccaactcagtcagcccactagg

SEQ ID NO: 8127 - DNA, 25 bp, synthetic construct
  misc_feature 1..25: note = Oligonucleotide
  source 1..25: mol_type = other DNA
gcgtgcccaactcagtcagcccact

SEQ ID NO: 8128 - DNA, 25 bp, synthetic construct
  misc_feature 1..25: note = Oligonucleotide
  source 1..25: mol_type = other DNA
caggcgtgcccaactcagtcagccc

SEQ ID NO: 8129 - DNA, 25 bp, synthetic construct
  misc_feature 1..25: note = Oligonucleotide
  source 1..25: mol_type = other DNA
tgccaggcgtgcccaactcagtcag

SEQ ID NO: 8130 - DNA, 25 bp, synthetic construct
  misc_feature 1..25: note = Oligonucleotide
  source 1..25: mol_type = other DNA
ccctgccaggcgtgcccaactcagt

SEQ ID NO: 8131 - DNA, 25 bp, synthetic construct
  misc_feature 1..25: note = Oligonucleotide
  source 1..25: mol_type = other DNA
tgtccctgccaggcgtgcccaactc

SEQ ID NO: 8132 - DNA, 25 bp, synthetic construct
  misc_feature 1..25: note = Oligonucleotide
  source 1..25: mol_type = other DNA
acatgtccctgccaggcgtgcccaa

SEQ ID NO: 8133 - DNA, 25 bp, synthetic construct
  misc_feature 1..25: note = Oligonucleotide
  source 1..25: mol_type = other DNA
atgacatgtccctgccaggcgtgcc

SEQ ID NO: 8134 - DNA, 25 bp, synthetic construct
  misc_feature 1..25: note = Oligonucleotide
  source 1..25: mol_type = other DNA
tgtatgacatgtccctgccaggcgt

SEQ ID NO: 8135 - DNA, 25 bp, synthetic construct
  misc_feature 1..25: note = Oligonucleotide
  source 1..25: mol_type = other DNA
gtatgtatgacatgtccctgccagg

SEQ ID NO: 8136 - DNA, 25 bp, synthetic construct
  misc_feature 1..25: note = Oligonucleotide
  source 1..25: mol_type = other DNA
atagtatgtatgacatgtccctgcc

SEQ ID NO: 8137 - DNA, 25 bp, synthetic construct
  misc_feature 1..25: note = Oligonucleotide
  source 1..25: mol_type = other DNA
aaaatagtatgtatgacatgtccct

SEQ ID NO: 8138 - DNA, 25 bp, synthetic construct
  misc_feature 1..25: note = Oligonucleotide
  source 1..25: mol_type = other DNA
gcaaaaatagtatgtatgacatgtc

SEQ ID NO: 8139 - DNA, 25 bp, synthetic construct
  misc_feature 1..25: note = Oligonucleotide
  source 1..25: mol_type = other DNA
aatgcaaaaatagtatgtatgacat

SEQ ID NO: 8140 - DNA, 25 bp, synthetic construct
  misc_feature 1..25: note = Oligonucleotide
  source 1..25: mol_type = other DNA
caaaatgcaaaaatagtatgtatga

SEQ ID NO: 8141 - DNA, 25 bp, synthetic construct
  misc_feature 1..25: note = Oligonucleotide
  source 1..25: mol_type = other DNA
taacaaaatgcaaaaatagtatgta

SEQ ID NO: 8142 - DNA, 25 bp, synthetic construct
  misc_feature 1..25: note = Oligonucleotide
  source 1..25: mol_type = other DNA
cactaacaaaatgcaaaaatagtat

SEQ ID NO: 8143 - DNA, 25 bp, synthetic construct
  misc_feature 1..25: note = Oligonucleotide
  source 1..25: mol_type = other DNA
atgcactaacaaaatgcaaaaatag

SEQ ID NO: 8144 - DNA, 25 bp, synthetic construct
  misc_feature 1..25: note = Oligonucleotide
  source 1..25: mol_type = other DNA
gagatgcactaacaaaatgcaaaaa

SEQ ID NO: 8145 - DNA, 25 bp, synthetic construct
  misc_feature 1..25: note = Oligonucleotide
  source 1..25: mol_type = other DNA
tacgagatgcactaacaaaatgcaa

SEQ ID NO: 8146 - DNA, 25 bp, synthetic construct
  misc_feature 1..25: note = Oligonucleotide
  source 1..25: mol_type = other DNA
gaatacgagatgcactaacaaaatg

SEQ ID NO: 8147 - DNA, 25 bp, synthetic construct
  misc_feature 1..25: note = Oligonucleotide
  source 1..25: mol_type = other DNA
caggaatacgagatgcactaacaaa

SEQ ID NO: 8148 - DNA, 25 bp, synthetic construct
  misc_feature 1..25: note = Oligonucleotide
  source 1..25: mol_type = other DNA
agccaggaatacgagatgcactaac

SEQ ID NO: 8149 - DNA, 25 bp, synthetic construct
  misc_feature 1..25: note = Oligonucleotide
  source 1..25: mol_type = other DNA
caaagccaggaatacgagatgcact

SEQ ID NO: 8150 - DNA, 25 bp, synthetic construct
  misc_feature 1..25: note = Oligonucleotide
  source 1..25: mol_type = other DNA
gcacaaagccaggaatacgagatgc

SEQ ID NO: 8151 - DNA, 25 bp, synthetic construct
  misc_feature 1..25: note = Oligonucleotide
  source 1..25: mol_type = other DNA
ctagcacaaagccaggaatacgaga

SEQ ID NO: 8152 - DNA, 25 bp, synthetic construct
  misc_feature 1..25: note = Oligonucleotide
  source 1..25: mol_type = other DNA
tacctagcacaaagccaggaatacg

SEQ ID NO: 8153 - DNA, 25 bp, synthetic construct
  misc_feature 1..25: note = Oligonucleotide
  source 1..25: mol_type = other DNA
tggtacctagcacaaagccaggaat

SEQ ID NO: 8154 - DNA, 25 bp, synthetic construct
  misc_feature 1..25: note = Oligonucleotide
  source 1..25: mol_type = other DNA
tcctggtacctagcacaaagccagg

SEQ ID NO: 8155 - DNA, 25 bp, synthetic construct
  misc_feature 1..25: note = Oligonucleotide
  source 1..25: mol_type = other DNA
gcctcctggtacctagcacaaagcc

SEQ ID NO: 8156 - DNA, 25 bp, synthetic construct
  misc_feature 1..25: note = Oligonucleotide
  source 1..25: mol_type = other DNA
cttgcctcctggtacctagcacaaa

SEQ ID NO: 8157 - DNA, 25 bp, synthetic construct
  misc_feature 1..25: note = Oligonucleotide
  source 1..25: mol_type = other DNA
ctccttgcctcctggtacctagcac

SEQ ID NO: 8158 - DNA, 25 bp, synthetic construct
  misc_feature 1..25: note = Oligonucleotide
  source 1..25: mol_type = other DNA
gttctccttgcctcctggtacctag

SEQ ID NO: 8159 - DNA, 25 bp, synthetic construct
  misc_feature 1..25: note = Oligonucleotide
  source 1..25: mol_type = other DNA
ccagttctccttgcctcctggtacc

SEQ ID NO: 8160 - DNA, 25 bp, synthetic construct
  misc_feature 1..25: note = Oligonucleotide
  source 1..25: mol_type = other DNA
ttaccagttctccttgcctcctggt

SEQ ID NO: 8161 - DNA, 25 bp, synthetic construct
  misc_feature 1..25: note = Oligonucleotide
  source 1..25: mol_type = other DNA
ttcttaccagttctccttgcctcct

SEQ ID NO: 8162 - DNA, 25 bp, synthetic construct
  misc_feature 1..25: note = Oligonucleotide
  source 1..25: mol_type = other DNA
cacttcttaccagttctccttgcct

SEQ ID NO: 8163 - DNA, 25 bp, synthetic construct
  misc_feature 1..25: note = Oligonucleotide
  source 1..25: mol_type = other DNA
ccccacttcttaccagttctccttg

SEQ ID NO: 8164 - DNA, 25 bp, synthetic construct
  misc_feature 1..25: note = Oligonucleotide
  source 1..25: mol_type = other DNA
tcaccccacttcttaccagttctcc

SEQ ID NO: 8165 - DNA, 25 bp, synthetic construct
  misc_feature 1..25: note = Oligonucleotide
  source 1..25: mol_type = other DNA
ccttcaccccacttcttaccagttc

SEQ ID NO: 8166 - DNA, 25 bp, synthetic construct
  misc_feature 1..25: note = Oligonucleotide
  source 1..25: mol_type = other DNA
ggcccttcaccccacttcttaccag

SEQ ID NO: 8167 - DNA, 25 bp, synthetic construct
  misc_feature 1..25: note = Oligonucleotide
  source 1..25: mol_type = other DNA
tcaggcccttcaccccacttcttac

SEQ ID NO: 8168 - DNA, 25 bp, synthetic construct
  misc_feature 1..25: note = Oligonucleotide
  source 1..25: mol_type = other DNA
gtctcaggcccttcaccccacttct

SEQ ID NO: 8169 - DNA, 25 bp, synthetic construct
  misc_feature 1..25: note = Oligonucleotide
  source 1..25: mol_type = other DNA
atggtctcaggcccttcaccccact

SEQ ID NO: 8170 - DNA, 25 bp, synthetic construct
  misc_feature 1..25: note = Oligonucleotide
  source 1..25: mol_type = other DNA
ttcatggtctcaggcccttcacccc

SEQ ID NO: 8171 - DNA, 25 bp, synthetic construct
  misc_feature 1..25: note = Oligonucleotide
  source 1..25: mol_type = other DNA
ccgttcatggtctcaggcccttcac

SEQ ID NO: 8172 - DNA, 25 bp, synthetic construct
  misc_feature 1..25: note = Oligonucleotide
  source 1..25: mol_type = other DNA
agaccgttcatggtctcaggccctt

SEQ ID NO: 8173 - DNA, 25 bp, synthetic construct
  misc_feature 1..25: note = Oligonucleotide
  source 1..25: mol_type = other DNA
tccagaccgttcatggtctcaggcc

SEQ ID NO: 8174 - DNA, 25 bp, synthetic construct
  misc_feature 1..25: note = Oligonucleotide
  source 1..25: mol_type = other DNA
ggatccagaccgttcatggtctcag

SEQ ID NO: 8175 - DNA, 25 bp, synthetic construct
  misc_feature 1..25: note = Oligonucleotide
  source 1..25: mol_type = other DNA
tctggatccagaccgttcatggtct

SEQ ID NO: 8176 - DNA, 25 bp, synthetic construct
  misc_feature 1..25: note = Oligonucleotide
  source 1..25: mol_type = other DNA
atttctggatccagaccgttcatgg

SEQ ID NO: 8177 - DNA, 25 bp, synthetic construct
  misc_feature 1..25: note = Oligonucleotide
  source 1..25: mol_type = other DNA
gccatttctggatccagaccgttca

SEQ ID NO: 8178 - DNA, 25 bp, synthetic construct
  misc_feature 1..25: note = Oligonucleotide
  source 1..25: mol_type = other DNA
cttgccatttctggatccagaccgt

SEQ ID NO: 8179 - DNA, 25 bp, synthetic construct
  misc_feature 1..25: note = Oligonucleotide
  source 1..25: mol_type = other DNA
ccccttgccatttctggatccagac

SEQ ID NO: 8180 - DNA, 25 bp, synthetic construct
  misc_feature 1..25: note = Oligonucleotide
  source 1..25: mol_type = other DNA
ttaccccttgccatttctggatcca

SEQ ID NO: 8181 - DNA, 25 bp, synthetic construct
  misc_feature 1..25: note = Oligonucleotide
  source 1..25: mol_type = other DNA
tctttaccccttgccatttctggat

SEQ ID NO: 8182 - DNA, 25 bp, synthetic construct
  misc_feature 1..25: note = Oligonucleotide
  source 1..25: mol_type = other DNA
ttctctttaccccttgccatttctg

SEQ ID NO: 8183 - DNA, 25 bp, synthetic construct
  misc_feature 1..25: note = Oligonucleotide
  source 1..25: mol_type = other DNA
accttctctttaccccttgccattt

SEQ ID NO: 8184 - DNA, 25 bp, synthetic construct
  misc_feature 1..25: note = Oligonucleotide
  source 1..25: mol_type = other DNA
cagaccttctctttaccccttgcca

SEQ ID NO: 8185 - DNA, 25 bp, synthetic construct
  misc_feature 1..25: note = Oligonucleotide
  source 1..25: mol_type = other DNA
acccagaccttctctttaccccttg

SEQ ID NO: 8186 - DNA, 25 bp, synthetic construct
  misc_feature 1..25: note = Oligonucleotide
  source 1..25: mol_type = other DNA
tcaacccagaccttctctttacccc

SEQ ID NO: 8187 - DNA, 25 bp, synthetic construct
  misc_feature 1..25: note = Oligonucleotide
  source 1..25: mol_type = other DNA
atatcaacccagaccttctctttac

SEQ ID NO: 8188 - DNA, 25 bp, synthetic construct
  misc_feature 1..25: note = Oligonucleotide
  source 1..25: mol_type = other DNA
ctaatatcaacccagaccttctctt

SEQ ID NO: 8189 - DNA, 25 bp, synthetic construct
  misc_feature 1..25: note = Oligonucleotide
  source 1..25: mol_type = other DNA
ctcctaatatcaacccagaccttct

SEQ ID NO: 8190 - DNA, 25 bp, synthetic construct
  misc_feature 1..25: note = Oligonucleotide
  source 1..25: mol_type = other DNA
taactcctaatatcaacccagacct

SEQ ID NO: 8191 - DNA, 25 bp, synthetic construct
  misc_feature 1..25: note = Oligonucleotide
  source 1..25: mol_type = other DNA
ggctaactcctaatatcaacccaga

SEQ ID NO: 8192 - DNA, 25 bp, synthetic construct
  misc_feature 1..25: note = Oligonucleotide
  source 1..25: mol_type = other DNA
aatggctaactcctaatatcaaccc

SEQ ID NO: 8193 - DNA, 25 bp, synthetic construct
  misc_feature 1..25: note = Oligonucleotide
  source 1..25: mol_type = other DNA
gccaatggctaactcctaatatcaa

SEQ ID NO: 8194 - DNA, 25 bp, synthetic construct
  misc_feature 1..25: note = Oligonucleotide
  source 1..25: mol_type = other DNA
acagccaatggctaactcctaatat

SEQ ID NO: 8195 - DNA, 25 bp, synthetic construct
  misc_feature 1..25: note = Oligonucleotide
  source 1..25: mol_type = other DNA
cctacagccaatggctaactcctaa

SEQ ID NO: 8196 - DNA, 25 bp, synthetic construct
  misc_feature 1..25: note = Oligonucleotide
  source 1..25: mol_type = other DNA
taccctacagccaatggctaactcc

SEQ ID NO: 8197 - DNA, 25 bp, synthetic construct
  misc_feature 1..25: note = Oligonucleotide
  source 1..25: mol_type = other DNA
ttttaccctacagccaatggctaac

SEQ ID NO: 8198 - DNA, 25 bp, synthetic construct
  misc_feature 1..25: note = Oligonucleotide
  source 1..25: mol_type = other DNA
tctttttaccctacagccaatggct

SEQ ID NO: 8199 - DNA, 25 bp, synthetic construct
  misc_feature 1..25: note = Oligonucleotide
  source 1..25: mol_type = other DNA
tcctctttttaccctacagccaatg

SEQ ID NO: 8200 - DNA, 25 bp, synthetic construct
  misc_feature 1..25: note = Oligonucleotide
  source 1..25: mol_type = other DNA
agctcctctttttaccctacagcca

SEQ ID NO: 8201 - DNA, 25 bp, synthetic construct
  misc_feature 1..25: note = Oligonucleotide
  source 1..25: mol_type = other DNA
atcagctcctctttttaccctacag

SEQ ID NO: 8202 - DNA, 25 bp, synthetic construct
  misc_feature 1..25: note = Oligonucleotide
  source 1..25: mol_type = other DNA
accatcagctcctctttttacccta

SEQ ID NO: 8203 - DNA, 25 bp, synthetic construct
  misc_feature 1..25: note = Oligonucleotide
  source 1..25: mol_type = other DNA
gccaccatcagctcctctttttacc

SEQ ID NO: 8204 - DNA, 25 bp, synthetic construct
  misc_feature 1..25: note = Oligonucleotide
  source 1..25: mol_type = other DNA
ggagccaccatcagctcctcttttt

SEQ ID NO: 8205 - DNA, 25 bp, synthetic construct
  misc_feature 1..25: note = Oligonucleotide
  source 1..25: mol_type = other DNA
ctgggagccaccatcagctcctctt

SEQ ID NO: 8206 - DNA, 25 bp, synthetic construct
  misc_feature 1..25: note = Oligonucleotide
  source 1..25: mol_type = other DNA
agcctgggagccaccatcagctcct

SEQ ID NO: 8207 - DNA, 25 bp, synthetic construct
  misc_feature 1..25: note = Oligonucleotide
  source 1..25: mol_type = other DNA
cagagcctgggagccaccatcagct

SEQ ID NO: 8208 - DNA, 25 bp, synthetic construct
  misc_feature 1..25: note = Oligonucleotide
  source 1..25: mol_type = other DNA
acacagagcctgggagccaccatca

SEQ ID NO: 8209 - DNA, 25 bp, synthetic construct
  misc_feature 1..25: note = Oligonucleotide
  source 1..25: mol_type = other DNA
cacacacagagcctgggagccacca

SEQ ID NO: 8210 - DNA, 25 bp, synthetic construct
  misc_feature 1..25: note = Oligonucleotide
  source 1..25: mol_type = other DNA
tgccacacacagagcctgggagcca

SEQ ID NO: 8211 - DNA, 25 bp, synthetic construct
  misc_feature 1..25: note = Oligonucleotide
  source 1..25: mol_type = other DNA
cattgccacacacagagcctgggag

SEQ ID NO: 8212 - DNA, 25 bp, synthetic construct
  misc_feature 1..25: note = Oligonucleotide
  source 1..25: mol_type = other DNA
tgtcattgccacacacagagcctgg

SEQ ID NO: 8213 - DNA, 25 bp, synthetic construct
  misc_feature 1..25: note = Oligonucleotide
  source 1..25: mol_type = other DNA
ccctgtcattgccacacacagagcc

SEQ ID NO: 8214 - DNA, 25 bp, synthetic construct
  misc_feature 1..25: note = Oligonucleotide
  source 1..25: mol_type = other DNA
gcaccctgtcattgccacacacaga

SEQ ID NO: 8215 - DNA, 25 bp, synthetic construct
  misc_feature 1..25: note = Oligonucleotide
  source 1..25: mol_type = other DNA
acggcaccctgtcattgccacacac

SEQ ID NO: 8216 - DNA, 25 bp, synthetic construct
  misc_feature 1..25: note = Oligonucleotide
  source 1..25: mol_type = other DNA
tgaacggcaccctgtcattgccaca

SEQ ID NO: 8217 - DNA, 25 bp, synthetic construct
  misc_feature 1..25: note = Oligonucleotide
  source 1..25: mol_type = other DNA
cagtgaacggcaccctgtcattgcc

SEQ ID NO: 8218 - DNA, 25 bp, synthetic construct
  misc_feature 1..25: note = Oligonucleotide
  source 1..25: mol_type = other DNA
actcagtgaacggcaccctgtcatt

SEQ ID NO: 8219 - DNA, 25 bp, synthetic construct
  misc_feature 1..25: note = Oligonucleotide
  source 1..25: mol_type = other DNA
ccaactcagtgaacggcaccctgtc

SEQ ID NO: 8220 - DNA, 25 bp, synthetic construct
  misc_feature 1..25: note = Oligonucleotide
  source 1..25: mol_type = other DNA
tccccaactcagtgaacggcaccct

SEQ ID NO: 8221 - DNA, 25 bp, synthetic construct
  misc_feature 1..25: note = Oligonucleotide
  source 1..25: mol_type = other DNA
ccatccccaactcagtgaacggcac

SEQ ID NO: 8222 - DNA, 25 bp, synthetic construct
  misc_feature 1..25: note = Oligonucleotide
  source 1..25: mol_type = other DNA
cctccatccccaactcagtgaacgg

SEQ ID NO: 8223 - DNA, 25 bp, synthetic construct
  misc_feature 1..25: note = Oligonucleotide
  source 1..25: mol_type = other DNA
gtccctccatccccaactcagtgaa

SEQ ID NO: 8224 - DNA, 25 bp, synthetic construct
  misc_feature 1..25: note = Oligonucleotide
  source 1..25: mol_type = other DNA
catgtccctccatccccaactcagt

SEQ ID NO: 8225 - DNA, 25 bp, synthetic construct
  misc_feature 1..25: note = Oligonucleotide
  source 1..25: mol_type = other DNA
acacatgtccctccatccccaactc

SEQ ID NO: 8226 - DNA, 25 bp, synthetic construct
  misc_feature 1..25: note = Oligonucleotide
  source 1..25: mol_type = other DNA
tccacacatgtccctccatccccaa

SEQ ID NO: 8227 - DNA, 25 bp, synthetic construct
  misc_feature 1..25: note = Oligonucleotide
  source 1..25: mol_type = other DNA
gtatccacacatgtccctccatccc

SEQ ID NO: 8228 - DNA, 25 bp, synthetic construct
  misc_feature 1..25: note = Oligonucleotide
  source 1..25: mol_type = other DNA
ggggtatccacacatgtccctccat

SEQ ID NO: 8229 - DNA, 25 bp, synthetic construct
  misc_feature 1..25: note = Oligonucleotide
  source 1..25: mol_type = other DNA
actggggtatccacacatgtccctc

SEQ ID NO: 8230 - DNA, 25 bp, synthetic construct
  misc_feature 1..25: note = Oligonucleotide
  source 1..25: mol_type = other DNA
tctactggggtatccacacatgtcc

SEQ ID NO: 8231 - DNA, 25 bp, synthetic construct
  misc_feature 1..25: note = Oligonucleotide
  source 1..25: mol_type = other DNA
acctctactggggtatccacacatg

SEQ ID NO: 8232 - DNA, 25 bp, synthetic construct
  misc_feature 1..25: note = Oligonucleotide
  source 1..25: mol_type = other DNA
aacacctctactggggtatccacac

SEQ ID NO: 8233 - DNA, 25 bp, synthetic construct
  misc_feature 1..25: note = Oligonucleotide
  source 1..25: mol_type = other DNA
tccaacacctctactggggtatcca

SEQ ID NO: 8234 - DNA, 25 bp, synthetic construct
  misc_feature 1..25: note = Oligonucleotide
  source 1..25: mol_type = other DNA
gagtccaacacctctactggggtat

SEQ ID NO: 8235 - DNA, 25 bp, synthetic construct
  misc_feature 1..25: note = Oligonucleotide
  source 1..25: mol_type = other DNA
gatgagtccaacacctctactgggg

SEQ ID NO: 8236 - DNA, 25 bp, synthetic construct
  misc_feature 1..25: note = Oligonucleotide
  source 1..25: mol_type = other DNA
tctgatgagtccaacacctctactg

SEQ ID NO: 8237 - DNA, 25 bp, synthetic construct
  misc_feature 1..25: note = Oligonucleotide
  source 1..25: mol_type = other DNA
gcctctgatgagtccaacacctcta

SEQ ID NO: 8238 - DNA, 25 bp, synthetic construct
  misc_feature 1..25: note = Oligonucleotide
  source 1..25: mol_type = other DNA
acagcctctgatgagtccaacacct

SEQ ID NO: 8239 - DNA, 25 bp, synthetic construct
  misc_feature 1..25: note = Oligonucleotide
  source 1..25: mol_type = other DNA
cagacagcctctgatgagtccaaca

SEQ ID NO: 8240 - DNA, 25 bp, synthetic construct
  misc_feature 1..25: note = Oligonucleotide
  source 1..25: mol_type = other DNA
acccagacagcctctgatgagtcca

SEQ ID NO: 8241 - DNA, 25 bp, synthetic construct
  misc_feature 1..25: note = Oligonucleotide
  source 1..25: mol_type = other DNA
gagacccagacagcctctgatgagt

SEQ ID NO: 8242 - DNA, 25 bp, synthetic construct
  misc_feature 1..25: note = Oligonucleotide
  source 1..25: mol_type = other DNA
tgtgagacccagacagcctctgatg

SEQ ID NO: 8243 - DNA, 25 bp, synthetic construct
  misc_feature 1..25: note = Oligonucleotide
  source 1..25: mol_type = other DNA
acatgtgagacccagacagcctctg

SEQ ID NO: 8244 - DNA, 25 bp, synthetic construct
  misc_feature 1..25: note = Oligonucleotide
  source 1..25: mol_type = other DNA
gctacatgtgagacccagacagcct

SEQ ID NO: 8245 - DNA, 25 bp, synthetic construct
  misc_feature 1..25: note = Oligonucleotide
  source 1..25: mol_type = other DNA
aatgctacatgtgagacccagacag

SEQ ID NO: 8246 - DNA, 25 bp, synthetic construct
  misc_feature 1..25: note = Oligonucleotide
  source 1..25: mol_type = other DNA
aggaatgctacatgtgagacccaga

SEQ ID NO: 8247 - DNA, 25 bp, synthetic construct
  misc_feature 1..25: note = Oligonucleotide
  source 1..25: mol_type = other DNA
cccaggaatgctacatgtgagaccc

SEQ ID NO: 8248 - DNA, 25 bp, synthetic construct
  misc_feature 1..25: note = Oligonucleotide
  source 1..25: mol_type = other DNA
gtgcccaggaatgctacatgtgaga

SEQ ID NO: 8249 - DNA, 25 bp, synthetic construct
  misc_feature 1..25: note = Oligonucleotide
  source 1..25: mol_type = other DNA
agtgtgcccaggaatgctacatgtg

SEQ ID NO: 8250 - DNA, 25 bp, synthetic construct
  misc_feature 1..25: note = Oligonucleotide
  source 1..25: mol_type = other DNA
gccagtgtgcccaggaatgctacat

SEQ ID NO: 8251 - DNA, 25 bp, synthetic construct
  misc_feature 1..25: note = Oligonucleotide
  source 1..25: mol_type = other DNA
atggccagtgtgcccaggaatgcta

SEQ ID NO: 8252 - DNA, 25 bp, synthetic construct
  misc_feature 1..25: note = Oligonucleotide
  source 1..25: mol_type = other DNA
gctatggccagtgtgcccaggaatg

SEQ ID NO: 8253 - DNA, 25 bp, synthetic construct
  misc_feature 1..25: note = Oligonucleotide
  source 1..25: mol_type = other DNA
tttgctatggccagtgtgcccagga

SEQ ID NO: 8254 - DNA, 25 bp, synthetic construct
  misc_feature 1..25: note = Oligonucleotide
  source 1..25: mol_type = other DNA
ccctttgctatggccagtgtgccca

SEQ ID NO: 8255 - DNA, 25 bp, synthetic construct
  misc_feature 1..25: note = Oligonucleotide
  source 1..25: mol_type = other DNA
acaccctttgctatggccagtgtgc

SEQ ID NO: 8256 - DNA, 25 bp, synthetic construct
  misc_feature 1..25: note = Oligonucleotide
  source 1..25: mol_type = other DNA
ctcacaccctttgctatggccagtg

SEQ ID NO: 8257 - DNA, 25 bp, synthetic construct
  misc_feature 1..25: note = Oligonucleotide
  source 1..25: mol_type = other DNA
ccactcacaccctttgctatggcca

SEQ ID NO: 8258 - DNA, 25 bp, synthetic construct
  misc_feature 1..25: note = Oligonucleotide
  source 1..25: mol_type = other DNA
tatccactcacaccctttgctatgg

SEQ ID NO: 8259 - DNA, 25 bp, synthetic construct
  misc_feature 1..25: note = Oligonucleotide
  source 1..25: mol_type = other DNA
cattatccactcacaccctttgcta

SEQ ID NO: 8260 - DNA, 25 bp, synthetic construct
  misc_feature 1..25: note = Oligonucleotide
  source 1..25: mol_type = other DNA
caacattatccactcacaccctttg

SEQ ID NO: 8261 - DNA, 25 bp, synthetic construct
  misc_feature 1..25: note = Oligonucleotide
  source 1..25: mol_type = other DNA
gggcaacattatccactcacaccct

SEQ ID NO: 8262 - DNA, 25 bp, synthetic construct
  misc_feature 1..25: note = Oligonucleotide
  source 1..25: mol_type = other DNA
cctgggcaacattatccactcacac

SEQ ID NO: 8263 - DNA, 25 bp, synthetic construct
  misc_feature 1..25: note = Oligonucleotide
  source 1..25: mol_type = other DNA
tctcctgggcaacattatccactca

SEQ ID NO: 8264 - DNA, 25 bp, synthetic construct
  misc_feature 1..25: note = Oligonucleotide
  source 1..25: mol_type = other DNA
gtttctcctgggcaacattatccac

SEQ ID NO: 8265 - DNA, 25 bp, synthetic construct
  misc_feature 1..25: note = Oligonucleotide
  source 1..25: mol_type = other DNA
gcagtttctcctgggcaacattatc

SEQ ID NO: 8266 - DNA, 25 bp, synthetic construct
  misc_feature 1..25: note = Oligonucleotide
  source 1..25: mol_type = other DNA
tttgcagtttctcctgggcaacatt

SEQ ID NO: 8267 - DNA, 25 bp, synthetic construct
  misc_feature 1..25: note = Oligonucleotide
  source 1..25: mol_type = other DNA
tagtttgcagtttctcctgggcaac

SEQ ID NO: 8268 - DNA, 25 bp, synthetic construct
  misc_feature 1..25: note = Oligonucleotide
  source 1..25: mol_type = other DNA
tcttagtttgcagtttctcctgggc

SEQ ID NO: 8269 - DNA, 25 bp, synthetic construct
  misc_feature 1..25: note = Oligonucleotide
  source 1..25: mol_type = other DNA
ccctcttagtttgcagtttctcctg

SEQ ID NO: 8270 - DNA, 25 bp, synthetic construct
  misc_feature 1..25: note = Oligonucleotide
  source 1..25: mol_type = other DNA
ctcccctcttagtttgcagtttctc

SEQ ID NO: 8271 - DNA, 25 bp, synthetic construct
  misc_feature 1..25: note = Oligonucleotide
  source 1..25: mol_type = other DNA
gagctcccctcttagtttgcagttt

SEQ ID NO: 8272 - DNA, 25 bp, synthetic construct
  misc_feature 1..25: note = Oligonucleotide
  source 1..25: mol_type = other DNA
ggagagctcccctcttagtttgcag

SEQ ID NO: 8273 - DNA, 25 bp, synthetic construct
  misc_feature 1..25: note = Oligonucleotide
  source 1..25: mol_type = other DNA
ttcggagagctcccctcttagtttg

SEQ ID NO: 8274 - DNA, 25 bp, synthetic construct
  misc_feature 1..25: note = Oligonucleotide
  source 1..25: mol_type = other DNA
attttcggagagctcccctcttagt

SEQ ID NO: 8275 - DNA, 25 bp, synthetic construct
  misc_feature 1..25: note = Oligonucleotide
  source 1..25: mol_type = other DNA
tggattttcggagagctcccctctt

SEQ ID NO: 8276 - DNA, 25 bp, synthetic construct
  misc_feature 1..25: note = Oligonucleotide
  source 1..25: mol_type = other DNA
agatggattttcggagagctcccct

SEQ ID NO: 8277 - DNA, 25 bp, synthetic construct
  misc_feature 1..25: note = Oligonucleotide
  source 1..25: mol_type = other DNA
cctagatggattttcggagagctcc

SEQ ID NO: 8278 - DNA, 25 bp, synthetic construct
  misc_feature 1..25: note = Oligonucleotide
  source 1..25: mol_type = other DNA
cttcctagatggattttcggagagc

SEQ ID NO: 8279 - DNA, 25 bp, synthetic construct
  misc_feature 1..25: note = Oligonucleotide
  source 1..25: mol_type = other DNA
ttccttcctagatggattttcggag

SEQ ID NO: 8280 - DNA, 25 bp, synthetic construct
  misc_feature 1..25: note = Oligonucleotide
  source 1..25: mol_type = other DNA
ctcttccttcctagatggattttcg

SEQ ID NO: 8281 - DNA, 25 bp, synthetic construct
  misc_feature 1..25: note = Oligonucleotide
  source 1..25: mol_type = other DNA
ggcctcttccttcctagatggattt

SEQ ID NO: 8282 - DNA, 25 bp, synthetic construct
  misc_feature 1..25: note = Oligonucleotide
  source 1..25: mol_type = other DNA
ccaggcctcttccttcctagatgga

SEQ ID NO: 8283 - DNA, 25 bp, synthetic construct
  misc_feature 1..25: note = Oligonucleotide
  source 1..25: mol_type = other DNA
ttcccaggcctcttccttcctagat

SEQ ID NO: 8284 - DNA, 25 bp, synthetic construct
  misc_feature 1..25: note = Oligonucleotide
  source 1..25: mol_type = other DNA
tctttcccaggcctcttccttccta

SEQ ID NO: 8285 - DNA, 25 bp, synthetic construct
  misc_feature 1..25: note = Oligonucleotide
  source 1..25: mol_type = other DNA
cattctttcccaggcctcttccttc

SEQ ID NO: 8286 - DNA, 25 bp, synthetic construct
  misc_feature 1..25: note = Oligonucleotide
  source 1..25: mol_type = other DNA
agacattctttcccaggcctcttcc

SEQ ID NO: 8287 - DNA, 25 bp, synthetic construct
  misc_feature 1..25: note = Oligonucleotide
  source 1..25: mol_type = other DNA
tcgagacattctttcccaggcctct

SEQ ID NO: 8288 - DNA, 25 bp, synthetic construct
  misc_feature 1..25: note = Oligonucleotide
  source 1..25: mol_type = other DNA
ccttcgagacattctttcccaggcc

SEQ ID NO: 8289 - DNA, 25 bp, synthetic construct
  misc_feature 1..25: note = Oligonucleotide
  source 1..25: mol_type = other DNA
ttcccttcgagacattctttcccag

SEQ ID NO: 8290 - DNA, 25 bp, synthetic construct
  misc_feature 1..25: note = Oligonucleotide
  source 1..25: mol_type = other DNA
tgtttcccttcgagacattctttcc

SEQ ID NO: 8291 - DNA, 25 bp, synthetic construct
  misc_feature 1..25: note = Oligonucleotide
  source 1..25: mol_type = other DNA
tcatgtttcccttcgagacattctt

SEQ ID NO: 8292 - DNA, 25 bp, synthetic construct
  misc_feature 1..25: note = Oligonucleotide
  source 1..25: mol_type = other DNA
tgttcatgtttcccttcgagacatt

SEQ ID NO: 8293 - DNA, 25 bp, synthetic construct
  misc_feature 1..25: note = Oligonucleotide
  source 1..25: mol_type = other DNA
acctgttcatgtttcccttcgagac

SEQ ID NO: 8294 - DNA, 25 bp, synthetic construct
  misc_feature 1..25: note = Oligonucleotide
  source 1..25: mol_type = other DNA
ctgacctgttcatgtttcccttcga

SEQ ID NO: 8295 - DNA, 25 bp, synthetic construct
  misc_feature 1..25: note = Oligonucleotide
  source 1..25: mol_type = other DNA
ctgctgacctgttcatgtttccctt

SEQ ID NO: 8296 - DNA, 25 bp, synthetic construct
  misc_feature 1..25: note = Oligonucleotide
  source 1..25: mol_type = other DNA
ccgctgctgacctgttcatgtttcc

SEQ ID NO: 8297 - DNA, 25 bp, synthetic construct
  misc_feature 1..25: note = Oligonucleotide
  source 1..25: mol_type = other DNA
accccgctgctgacctgttcatgtt

SEQ ID NO: 8298 - DNA, 25 bp, synthetic construct
  misc_feature 1..25: note = Oligonucleotide
  source 1..25: mol_type = other DNA
aagaccccgctgctgacctgttcat

SEQ ID NO: 8299 - DNA, 25 bp, synthetic construct
  misc_feature 1..25: note = Oligonucleotide
  source 1..25: mol_type = other DNA
agcaagaccccgctgctgacctgtt

SEQ ID NO: 8300 - DNA, 25 bp, synthetic construct
  misc_feature 1..25: note = Oligonucleotide
  source 1..25: mol_type = other DNA
gtcagcaagaccccgctgctgacct

SEQ ID NO: 8301 - DNA, 25 bp, synthetic construct
  misc_feature 1..25: note = Oligonucleotide
  source 1..25: mol_type = other DNA
gcggtcagcaagaccccgctgctga

SEQ ID NO: 8302 - DNA, 25 bp, synthetic construct
  misc_feature 1..25: note = Oligonucleotide
  source 1..25: mol_type = other DNA
caggcggtcagcaagaccccgctgc

SEQ ID NO: 8303 - DNA, 25 bp, synthetic construct
  misc_feature 1..25: note = Oligonucleotide
  source 1..25: mol_type = other DNA
ggccaggcggtcagcaagaccccgc

SEQ ID NO: 8304 - DNA, 25 bp, synthetic construct
  misc_feature 1..25: note = Oligonucleotide
  source 1..25: mol_type = other DNA
gttggccaggcggtcagcaagaccc

SEQ ID NO: 8305 - DNA, 25 bp, synthetic construct
  misc_feature 1..25: note = Oligonucleotide
  source 1..25: mol_type = other DNA
acagttggccaggcggtcagcaaga

SEQ ID NO: 8306 - DNA, 25 bp, synthetic construct
  misc_feature 1..25: note = Oligonucleotide
  source 1..25: mol_type = other DNA
cccacagttggccaggcggtcagca

SEQ ID NO: 8307 - DNA, 25 bp, synthetic construct
  misc_feature 1..25: note = Oligonucleotide
  source 1..25: mol_type = other DNA
tgccccacagttggccaggcggtca

SEQ ID NO: 8308 - DNA, 25 bp, synthetic construct
  misc_feature 1..25: note = Oligonucleotide
  source 1..25: mol_type = other DNA
ctctgccccacagttggccaggcgg

SEQ ID NO: 8309 - DNA, 25 bp, synthetic construct
  misc_feature 1..25: note = Oligonucleotide
  source 1..25: mol_type = other DNA
gccctctgccccacagttggccagg

SEQ ID NO: 8310 - DNA, 25 bp, synthetic construct
  misc_feature 1..25: note = Oligonucleotide
  source 1..25: mol_type = other DNA
tccgccctctgccccacagttggcc

SEQ ID NO: 8311 - DNA, 25 bp, synthetic construct
  misc_feature 1..25: note = Oligonucleotide
  source 1..25: mol_type = other DNA
cactccgccctctgccccacagttg

SEQ ID NO: 8312 - DNA, 25 bp, synthetic construct
  misc_feature 1..25: note = Oligonucleotide
  source 1..25: mol_type = other DNA
ccccactccgccctctgccccacag

SEQ ID NO: 8313 - DNA, 25 bp, synthetic construct
  misc_feature 1..25: note = Oligonucleotide
  source 1..25: mol_type = other DNA
cctccccactccgccctctgcccca

SEQ ID NO: 8314 - DNA, 25 bp, synthetic construct
  misc_feature 1..25: note = Oligonucleotide
  source 1..25: mol_type = other DNA
caccctccccactccgccctctgcc

SEQ ID NO: 8315 - DNA, 25 bp, synthetic construct
  misc_feature 1..25: note = Oligonucleotide
  source 1..25: mol_type = other DNA
ccacaccctccccactccgccctct

SEQ ID NO: 8316 - DNA, 25 bp, synthetic construct
  misc_feature 1..25: note = Oligonucleotide
  source 1..25: mol_type = other DNA
ttgccacaccctccccactccgccc

SEQ ID NO: 8317 - DNA, 25 bp, synthetic construct
  misc_feature 1..25: note = Oligonucleotide
  source 1..25: mol_type = other DNA
gccttgccacaccctccccactccg

SEQ ID NO: 8318 - DNA, 25 bp, synthetic construct
  misc_feature 1..25: note = Oligonucleotide
  source 1..25: mol_type = other DNA
ctggccttgccacaccctccccact

SEQ ID NO: 8319 - DNA, 25 bp, synthetic construct
  misc_feature 1..25: note = Oligonucleotide
  source 1..25: mol_type = other DNA
ggtctggccttgccacaccctcccc

SEQ ID NO: 8320 - DNA, 25 bp, synthetic construct
  misc_feature 1..25: note = Oligonucleotide
  source 1..25: mol_type = other DNA
agaggtctggccttgccacaccctc

SEQ ID NO: 8321 - DNA, 25 bp, synthetic construct
  misc_feature 1..25: note = Oligonucleotide
  source 1..25: mol_type = other DNA
gagagaggtctggccttgccacacc

SEQ ID NO: 8322 - DNA, 25 bp, synthetic construct
  misc_feature 1..25: note = Oligonucleotide
  source 1..25: mol_type = other DNA
agtgagagaggtctggccttgccac

SEQ ID NO: 8323 - DNA, 25 bp, synthetic construct
  misc_feature 1..25: note = Oligonucleotide
  source 1..25: mol_type = other DNA
gccagtgagagaggtctggccttgc

SEQ ID NO: 8324 - DNA, 25 bp, synthetic construct
  misc_feature 1..25: note = Oligonucleotide
  source 1..25: mol_type = other DNA
tcagccagtgagagaggtctggcct

SEQ ID NO: 8325 - DNA, 25 bp, synthetic construct
  misc_feature 1..25: note = Oligonucleotide
  source 1..25: mol_type = other DNA
ctctcagccagtgagagaggtctgg

SEQ ID NO: 8326 - DNA, 25 bp, synthetic construct
  misc_feature 1..25: note = Oligonucleotide
  source 1..25: mol_type = other DNA
tgactctcagccagtgagagaggtc

SEQ ID NO: 8327 - DNA, 25 bp, synthetic construct
  misc_feature 1..25: note = Oligonucleotide
  source 1..25: mol_type = other DNA
cagtgactctcagccagtgagagag

SEQ ID NO: 8328 - DNA, 25 bp, synthetic construct
  misc_feature 1..25: note = Oligonucleotide
  source 1..25: mol_type = other DNA
tcccagtgactctcagccagtgaga

SEQ ID NO: 8329 - DNA, 25 bp, synthetic construct
  misc_feature 1..25: note = Oligonucleotide
  source 1..25: mol_type = other DNA
gtttcccagtgactctcagccagtg

SEQ ID NO: 8330 - DNA, 25 bp, synthetic construct
  misc_feature 1..25: note = Oligonucleotide
  source 1..25: mol_type = other DNA
actgtttcccagtgactctcagcca

SEQ ID NO: 8331 - DNA, 25 bp, synthetic construct
  misc_feature 1..25: note = Oligonucleotide
  source 1..25: mol_type = other DNA
ctcactgtttcccagtgactctcag

SEQ ID NO: 8332 - DNA, 25 bp, synthetic construct
  misc_feature 1..25: note = Oligonucleotide
  source 1..25: mol_type = other DNA
cgtctcactgtttcccagtgactct

SEQ ID NO: 8333 - DNA, 25 bp, synthetic construct
  misc_feature 1..25: note = Oligonucleotide
  source 1..25: mol_type = other DNA
caccgtctcactgtttcccagtgac

SEQ ID NO: 8334 - DNA, 25 bp, synthetic construct
  misc_feature 1..25: note = Oligonucleotide
  source 1..25: mol_type = other DNA
ctgcaccgtctcactgtttcccagt

SEQ ID NO: 8335 - DNA, 25 bp, synthetic construct
  misc_feature 1..25: note = Oligonucleotide
  source 1..25: mol_type = other DNA
atcctgcaccgtctcactgtttccc

SEQ ID NO: 8336 - DNA, 25 bp, synthetic construct
  misc_feature 1..25: note = Oligonucleotide
  source 1..25: mol_type = other DNA
tgaatcctgcaccgtctcactgttt

SEQ ID NO: 8337 - DNA, 25 bp, synthetic construct
  misc_feature 1..25: note = Oligonucleotide
  source 1..25: mol_type = other DNA
atttgaatcctgcaccgtctcactg

SEQ ID NO: 8338 - DNA, 25 bp, synthetic construct
  misc_feature 1..25: note = Oligonucleotide
  source 1..25: mol_type = other DNA
tacatttgaatcctgcaccgtctca

SEQ ID NO: 8339 - DNA, 25 bp, synthetic construct
  misc_feature 1..25: note = Oligonucleotide
  source 1..25: mol_type = other DNA
acctacatttgaatcctgcaccgtc

SEQ ID NO: 8340 - DNA, 25 bp, synthetic construct
  misc_feature 1..25: note = Oligonucleotide
  source 1..25: mol_type = other DNA
tccacctacatttgaatcctgcacc

SEQ ID NO: 8341 - DNA, 25 bp, synthetic construct
  misc_feature 1..25: note = Oligonucleotide
  source 1..25: mol_type = other DNA
ctttccacctacatttgaatcctgc

SEQ ID NO: 8342 - DNA, 25 bp, synthetic construct
  misc_feature 1..25: note = Oligonucleotide
  source 1..25: mol_type = other DNA
cgtctttccacctacatttgaatcc

SEQ ID NO: 8343 - DNA, 25 bp, synthetic construct
  misc_feature 1..25: note = Oligonucleotide
  source 1..25: mol_type = other DNA
ccacgtctttccacctacatttgaa

SEQ ID NO: 8344 - DNA, 25 bp, synthetic construct
  misc_feature 1..25: note = Oligonucleotide
  source 1..25: mol_type = other DNA
gccccacgtctttccacctacattt

SEQ ID NO: 8345 - DNA, 25 bp, synthetic construct
  misc_feature 1..25: note = Oligonucleotide
  source 1..25: mol_type = other DNA
acggccccacgtctttccacctaca

SEQ ID NO: 8346 - DNA, 25 bp, synthetic construct
  misc_feature 1..25: note = Oligonucleotide
  source 1..25: mol_type = other DNA
cccacggccccacgtctttccacct

SEQ ID NO: 8347 - DNA, 25 bp, synthetic construct
  misc_feature 1..25: note = Oligonucleotide
  source 1..25: mol_type = other DNA
gcccccacggccccacgtctttcca

SEQ ID NO: 8348 - DNA, 25 bp, synthetic construct
  misc_feature 1..25: note = Oligonucleotide
  source 1..25: mol_type = other DNA
gaggcccccacggccccacgtcttt

SEQ ID NO: 8349 - DNA, 25 bp, synthetic construct
  misc_feature 1..25: note = Oligonucleotide
  source 1..25: mol_type = other DNA
actgaggcccccacggccccacgtc

SEQ ID NO: 8350 - DNA, 25 bp, synthetic construct
  misc_feature 1..25: note = Oligonucleotide
  source 1..25: mol_type = other DNA
cacactgaggcccccacggccccac

SEQ ID NO: 8351 - DNA, 25 bp, synthetic construct
  misc_feature 1..25: note = Oligonucleotide
  source 1..25: mol_type = other DNA
gatcacactgaggcccccacggccc

SEQ ID NO: 8352 - DNA, 25 bp, synthetic construct
  misc_feature 1..25: note = Oligonucleotide
  source 1..25: mol_type = other DNA
ccagatcacactgaggcccccacgg

SEQ ID NO: 8353 - DNA, 25 bp, synthetic construct
  misc_feature 1..25: note = Oligonucleotide
  source 1..25: mol_type = other DNA
agtccagatcacactgaggccccca

SEQ ID NO: 8354 - DNA, 25 bp, synthetic construct
  misc_feature 1..25: note = Oligonucleotide
  source 1..25: mol_type = other DNA
ctgagtccagatcacactgaggccc

SEQ ID NO: 8355 - DNA, 25 bp, synthetic construct
  misc_feature 1..25: note = Oligonucleotide
  source 1..25: mol_type = other DNA
aggctgagtccagatcacactgagg

SEQ ID NO: 8356 - DNA, 25 bp, synthetic construct
  misc_feature 1..25: note = Oligonucleotide
  source 1..25: mol_type = other DNA
aagaggctgagtccagatcacactg

SEQ ID NO: 8357 - DNA, 25 bp, synthetic construct
  misc_feature 1..25: note = Oligonucleotide
  source 1..25: mol_type = other DNA
ctgaagaggctgagtccagatcaca

SEQ ID NO: 8358 - DNA, 25 bp, synthetic construct
  misc_feature 1..25: note = Oligonucleotide
  source 1..25: mol_type = other DNA
acgctgaagaggctgagtccagatc

SEQ ID NO: 8359 - DNA, 25 bp, synthetic construct
  misc_feature 1..25: note = Oligonucleotide
  source 1..25: mol_type = other DNA
gccacgctgaagaggctgagtccag

SEQ ID NO: 8360 - DNA, 25 bp, synthetic construct
  misc_feature 1..25: note = Oligonucleotide
  source 1..25: mol_type = other DNA
gcagccacgctgaagaggctgagtc

SEQ ID NO: 8361 - DNA, 25 bp, synthetic construct
  misc_feature 1..25: note = Oligonucleotide
  source 1..25: mol_type = other DNA
ccagcagccacgctgaagaggctga

SEQ ID NO: 8362 - DNA, 25 bp, synthetic construct
  misc_feature 1..25: note = Oligonucleotide
  source 1..25: mol_type = other DNA
cctccagcagccacgctgaagaggc

SEQ ID NO: 8363 - DNA, 25 bp, synthetic construct
  misc_feature 1..25: note = Oligonucleotide
  source 1..25: mol_type = other DNA
acacctccagcagccacgctgaaga

SEQ ID NO: 8364 - DNA, 25 bp, synthetic construct
  misc_feature 1..25: note = Oligonucleotide
  source 1..25: mol_type = other DNA
cgaacacctccagcagccacgctga

SEQ ID NO: 8365 - DNA, 25 bp, synthetic construct
  misc_feature 1..25: note = Oligonucleotide
  source 1..25: mol_type = other DNA
ccacgaacacctccagcagccacgc

SEQ ID NO: 8366 - DNA, 25 bp, synthetic construct
  misc_feature 1..25: note = Oligonucleotide
  source 1..25: mol_type = other DNA
cacccacgaacacctccagcagcca

SEQ ID NO: 8367 - DNA, 25 bp, synthetic construct
  misc_feature 1..25: note = Oligonucleotide
  source 1..25: mol_type = other DNA
cgtcacccacgaacacctccagcag

SEQ ID NO: 8368 - DNA, 25 bp, synthetic construct
  misc_feature 1..25: note = Oligonucleotide
  source 1..25: mol_type = other DNA
caccgtcacccacgaacacctccag

SEQ ID NO: 8369 - DNA, 25 bp, synthetic construct
  misc_feature 1..25: note = Oligonucleotide
  source 1..25: mol_type = other DNA
aggcaccgtcacccacgaacacctc

SEQ ID NO: 8370 - DNA, 25 bp, synthetic construct
  misc_feature 1..25: note = Oligonucleotide
  source 1..25: mol_type = other DNA
accaggcaccgtcacccacgaacac

SEQ ID NO: 8371 - DNA, 25 bp, synthetic construct
  misc_feature 1..25: note = Oligonucleotide
  source 1..25: mol_type = other DNA
ttcaccaggcaccgtcacccacgaa

SEQ ID NO: 8372 - DNA, 25 bp, synthetic construct
  misc_feature 1..25: note = Oligonucleotide
  source 1..25: mol_type = other DNA
tacttcaccaggcaccgtcacccac

SEQ ID NO: 8373 - DNA, 25 bp, synthetic construct
  misc_feature 1..25: note = Oligonucleotide
  source 1..25: mol_type = other DNA
tgatacttcaccaggcaccgtcacc

SEQ ID NO: 8374 - DNA, 25 bp, synthetic construct
  misc_feature 1..25: note = Oligonucleotide
  source 1..25: mol_type = other DNA
acatgatacttcaccaggcaccgtc

SEQ ID NO: 8375 - DNA, 25 bp, synthetic construct
  misc_feature 1..25: note = Oligonucleotide
  source 1..25: mol_type = other DNA
aacacatgatacttcaccaggcacc

SEQ ID NO: 8376 - DNA, 25 bp, synthetic construct
  misc_feature 1..25: note = Oligonucleotide
  source 1..25: mol_type = other DNA
tctaacacatgatacttcaccaggc

SEQ ID NO: 8377 - DNA, 25 bp, synthetic construct
  misc_feature 1..25: note = Oligonucleotide
  source 1..25: mol_type = other DNA
ccctctaacacatgatacttcacca

SEQ ID NO: 8378 - DNA, 25 bp, synthetic construct
  misc_feature 1..25: note = Oligonucleotide
  source 1..25: mol_type = other DNA
ccaccctctaacacatgatacttca

SEQ ID NO: 8379 - DNA, 25 bp, synthetic construct
  misc_feature 1..25: note = Oligonucleotide
  source 1..25: mol_type = other DNA
cacccaccctctaacacatgatact

SEQ ID NO: 8380 - DNA, 25 bp, synthetic construct
  misc_feature 1..25: note = Oligonucleotide
  source 1..25: mol_type = other DNA
ggccacccaccctctaacacatgat

SEQ ID NO: 8381 - DNA, 25 bp, synthetic construct
  misc_feature 1..25: note = Oligonucleotide
  source 1..25: mol_type = other DNA
ctgggccacccaccctctaacacat

SEQ ID NO: 8382 - DNA, 25 bp, synthetic construct
  misc_feature 1..25: note = Oligonucleotide
  source 1..25: mol_type = other DNA
cttctgggccacccaccctctaaca

SEQ ID NO: 8383 - DNA, 25 bp, synthetic construct
  misc_feature 1..25: note = Oligonucleotide
  source 1..25: mol_type = other DNA
gagcttctgggccacccaccctcta

SEQ ID NO: 8384 - DNA, 25 bp, synthetic construct
  misc_feature 1..25: note = Oligonucleotide
  source 1..25: mol_type = other DNA
agagagcttctgggccacccaccct

SEQ ID NO: 8385 - DNA, 25 bp, synthetic construct
  misc_feature 1..25: note = Oligonucleotide
  source 1..25: mol_type = other DNA
cccagagagcttctgggccacccac

SEQ ID NO: 8386 - DNA, 25 bp, synthetic construct
  misc_feature 1..25: note = Oligonucleotide
  source 1..25: mol_type = other DNA
cctcccagagagcttctgggccacc

SEQ ID NO: 8387 - DNA, 25 bp, synthetic construct
  misc_feature 1..25: note = Oligonucleotide
  source 1..25: mol_type = other DNA
cagcctcccagagagcttctgggcc

SEQ ID NO: 8388 - DNA, 25 bp, synthetic construct
  misc_feature 1..25: note = Oligonucleotide
  source 1..25: mol_type = other DNA
tgccagcctcccagagagcttctgg

SEQ ID NO: 8389 - DNA, 25 bp, synthetic construct
  misc_feature 1..25: note = Oligonucleotide
  source 1..25: mol_type = other DNA
acctgccagcctcccagagagcttc

SEQ ID NO: 8390 - DNA, 25 bp, synthetic construct
  misc_feature 1..25: note = Oligonucleotide
  source 1..25: mol_type = other DNA
agcacctgccagcctcccagagagc

SEQ ID NO: 8391 - DNA, 25 bp, synthetic construct
  misc_feature 1..25: note = Oligonucleotide
  source 1..25: mol_type = other DNA
cacagcacctgccagcctcccagag

SEQ ID NO: 8392 - DNA, 25 bp, synthetic construct
  misc_feature 1..25: note = Oligonucleotide
  source 1..25: mol_type = other DNA
catcacagcacctgccagcctccca

SEQ ID NO: 8393 - DNA, 25 bp, synthetic construct
  misc_feature 1..25: note = Oligonucleotide
  source 1..25: mol_type = other DNA
ccacatcacagcacctgccagcctc

SEQ ID NO: 8394 - DNA, 25 bp, synthetic construct
  misc_feature 1..25: note = Oligonucleotide
  source 1..25: mol_type = other DNA
cagccacatcacagcacctgccagc

SEQ ID NO: 8395 - DNA, 25 bp, synthetic construct
  misc_feature 1..25: note = Oligonucleotide
  source 1..25: mol_type = other DNA
aaacagccacatcacagcacctgcc

SEQ ID NO: 8396 - DNA, 25 bp, synthetic construct
  misc_feature 1..25: note = Oligonucleotide
  source 1..25: mol_type = other DNA
gccaaacagccacatcacagcacct

SEQ ID NO: 8397 - DNA, 25 bp, synthetic construct
  misc_feature 1..25: note = Oligonucleotide
  source 1..25: mol_type = other DNA
gccgccaaacagccacatcacagca

SEQ ID NO: 8398 - DNA, 25 bp, synthetic construct
  misc_feature 1..25: note = Oligonucleotide
  source 1..25: mol_type = other DNA
ccggccgccaaacagccacatcaca

SEQ ID NO: 8399 - DNA, 25 bp, synthetic construct
  misc_feature 1..25: note = Oligonucleotide
  source 1..25: mol_type = other DNA
gctccggccgccaaacagccacatc

SEQ ID NO: 8400 - DNA, 25 bp, synthetic construct
  misc_feature 1..25: note = Oligonucleotide
  source 1..25: mol_type = other DNA
caggctccggccgccaaacagccac

SEQ ID NO: 8401 - DNA, 25 bp, synthetic construct
  misc_feature 1..25: note = Oligonucleotide
  source 1..25: mol_type = other DNA
ggccaggctccggccgccaaacagc

SEQ ID NO: 8402 - DNA, 25 bp, synthetic construct
  misc_feature 1..25: note = Oligonucleotide
  source 1..25: mol_type = other DNA
cctggccaggctccggccgccaaac

SEQ ID NO: 8403 - DNA, 25 bp, synthetic construct
  misc_feature 1..25: note = Oligonucleotide
  source 1..25: mol_type = other DNA
ctccctggccaggctccggccgcca

SEQ ID NO: 8404 - DNA, 25 bp, synthetic construct
  misc_feature 1..25: note = Oligonucleotide
  source 1..25: mol_type = other DNA
cacctccctggccaggctccggccg

SEQ ID NO: 8405 - DNA, 25 bp, synthetic construct
  misc_feature 1..25: note = Oligonucleotide
  source 1..25: mol_type = other DNA
ggccacctccctggccaggctccgg

SEQ ID NO: 8406 - DNA, 25 bp, synthetic construct
  misc_feature 1..25: note = Oligonucleotide
  source 1..25: mol_type = other DNA
tctggccacctccctggccaggctc

SEQ ID NO: 8407 - DNA, 25 bp, synthetic construct
  misc_feature 1..25: note = Oligonucleotide
  source 1..25: mol_type = other DNA
ccgtctggccacctccctggccagg

SEQ ID NO: 8408 - DNA, 25 bp, synthetic construct
  misc_feature 1..25: note = Oligonucleotide
  source 1..25: mol_type = other DNA
cagccgtctggccacctccctggcc

SEQ ID NO: 8409 - DNA, 25 bp, synthetic construct
  misc_feature 1..25: note = Oligonucleotide
  source 1..25: mol_type = other DNA
tctcagccgtctggccacctccctg

SEQ ID NO: 8410 - DNA, 25 bp, synthetic construct
  misc_feature 1..25: note = Oligonucleotide
  source 1..25: mol_type = other DNA
cactctcagccgtctggccacctcc

SEQ ID NO: 8411 - DNA, 25 bp, synthetic construct
  misc_feature 1..25: note = Oligonucleotide
  source 1..25: mol_type = other DNA
tgtcactctcagccgtctggccacc

SEQ ID NO: 8412 - DNA, 25 bp, synthetic construct
  misc_feature 1..25: note = Oligonucleotide
  source 1..25: mol_type = other DNA
cactgtcactctcagccgtctggcc

SEQ ID NO: 8413 - DNA, 25 bp, synthetic construct
  misc_feature 1..25: note = Oligonucleotide
  source 1..25: mol_type = other DNA
acccactgtcactctcagccgtctg

SEQ ID NO: 8414 - DNA, 25 bp, synthetic construct
  misc_feature 1..25: note = Oligonucleotide
  source 1..25: mol_type = other DNA
cacacccactgtcactctcagccgt

SEQ ID NO: 8415 - DNA, 25 bp, synthetic construct
  misc_feature 1..25: note = Oligonucleotide
  source 1..25: mol_type = other DNA
ctgcacacccactgtcactctcagc

SEQ ID NO: 8416 - DNA, 25 bp, synthetic construct
  misc_feature 1..25: note = Oligonucleotide
  source 1..25: mol_type = other DNA
tctctgcacacccactgtcactctc

SEQ ID NO: 8417 - DNA, 25 bp, synthetic construct
  misc_feature 1..25: note = Oligonucleotide
  source 1..25: mol_type = other DNA
gcctctctgcacacccactgtcact

SEQ ID NO: 8418 - DNA, 25 bp, synthetic construct
  misc_feature 1..25: note = Oligonucleotide
  source 1..25: mol_type = other DNA
atggcctctctgcacacccactgtc

SEQ ID NO: 8419 - DNA, 25 bp, synthetic construct
  misc_feature 1..25: note = Oligonucleotide
  source 1..25: mol_type = other DNA
tccatggcctctctgcacacccact

SEQ ID NO: 8420 - DNA, 25 bp, synthetic construct
  misc_feature 1..25: note = Oligonucleotide
  source 1..25: mol_type = other DNA
gtttccatggcctctctgcacaccc

SEQ ID NO: 8421 - DNA, 25 bp, synthetic construct
  misc_feature 1..25: note = Oligonucleotide
  source 1..25: mol_type = other DNA
catgtttccatggcctctctgcaca

SEQ ID NO: 8422 - DNA, 25 bp, synthetic construct
  misc_feature 1..25: note = Oligonucleotide
  source 1..25: mol_type = other DNA
ttccatgtttccatggcctctctgc

SEQ ID NO: 8423 - DNA, 25 bp, synthetic construct
  misc_feature 1..25: note = Oligonucleotide
  source 1..25: mol_type = other DNA
gacttccatgtttccatggcctctc

SEQ ID NO: 8424 - DNA, 25 bp, synthetic construct
  misc_feature 1..25: note = Oligonucleotide
  source 1..25: mol_type = other DNA
tctgacttccatgtttccatggcct

SEQ ID NO: 8425 - DNA, 25 bp, synthetic construct
  misc_feature 1..25: note = Oligonucleotide
  source 1..25: mol_type = other DNA
atgtctgacttccatgtttccatgg

SEQ ID NO: 8426 - DNA, 25 bp, synthetic construct
  misc_feature 1..25: note = Oligonucleotide
  source 1..25: mol_type = other DNA
tccatgtctgacttccatgtttcca

SEQ ID NO: 8427 - DNA, 25 bp, synthetic construct
  misc_feature 1..25: note = Oligonucleotide
  source 1..25: mol_type = other DNA
gtgtccatgtctgacttccatgttt

SEQ ID NO: 8428 - DNA, 25 bp, synthetic construct
  misc_feature 1..25: note = Oligonucleotide
  source 1..25: mol_type = other DNA
gcagtgtccatgtctgacttccatg

SEQ ID NO: 8429 - DNA, 25 bp, synthetic construct
  misc_feature 1..25: note = Oligonucleotide
  source 1..25: mol_type = other DNA
cgagcagtgtccatgtctgacttcc

SEQ ID NO: 8430 - DNA, 25 bp, synthetic construct
  misc_feature 1..25: note = Oligonucleotide
  source 1..25: mol_type = other DNA
acccgagcagtgtccatgtctgact

SEQ ID NO: 8431 - DNA, 25 bp, synthetic construct
  misc_feature 1..25: note = Oligonucleotide
  source 1..25: mol_type = other DNA
caaacccgagcagtgtccatgtctg

SEQ ID NO: 8432 - DNA, 25 bp, synthetic construct
  misc_feature 1..25: note = Oligonucleotide
  source 1..25: mol_type = other DNA
gcacaaacccgagcagtgtccatgt

SEQ ID NO: 8433 - DNA, 25 bp, synthetic construct
  misc_feature 1..25: note = Oligonucleotide
  source 1..25: mol_type = other DNA
agggcacaaacccgagcagtgtcca

SEQ ID NO: 8434 - DNA, 25 bp, synthetic construct
  misc_feature 1..25: note = Oligonucleotide
  source 1..25: mol_type = other DNA
cccagggcacaaacccgagcagtgt

SEQ ID NO: 8435 - DNA, 25 bp, synthetic construct
  misc_feature 1..25: note = Oligonucleotide
  source 1..25: mol_type = other DNA
atccccagggcacaaacccgagcag

SEQ ID NO: 8436 - DNA, 25 bp, synthetic construct
  misc_feature 1..25: note = Oligonucleotide
  source 1..25: mol_type = other DNA
accatccccagggcacaaacccgag

SEQ ID NO: 8437 - DNA, 25 bp, synthetic construct
  misc_feature 1..25: note = Oligonucleotide
  source 1..25: mol_type = other DNA
cacaccatccccagggcacaaaccc

SEQ ID NO: 8438 - DNA, 25 bp, synthetic construct
  misc_feature 1..25: note = Oligonucleotide
  source 1..25: mol_type = other DNA
gcccacaccatccccagggcacaaa

SEQ ID NO: 8439 - DNA, 25 bp, synthetic construct
  misc_feature 1..25: note = Oligonucleotide
  source 1..25: mol_type = other DNA
actgcccacaccatccccagggcac

SEQ ID NO: 8440 - DNA, 25 bp, synthetic construct
  misc_feature 1..25: note = Oligonucleotide
  source 1..25: mol_type = other DNA
ggtactgcccacaccatccccaggg

SEQ ID NO: 8441 - DNA, 25 bp, synthetic construct
  misc_feature 1..25: note = Oligonucleotide
  source 1..25: mol_type = other DNA
gagggtactgcccacaccatcccca

SEQ ID NO: 8442 - DNA, 25 bp, synthetic construct
  misc_feature 1..25: note = Oligonucleotide
  source 1..25: mol_type = other DNA
gaagagggtactgcccacaccatcc

SEQ ID NO: 8443 - DNA, 25 bp, synthetic construct
  misc_feature 1..25: note = Oligonucleotide
  source 1..25: mol_type = other DNA
ggggaagagggtactgcccacacca

SEQ ID NO: 8444 - DNA, 25 bp, synthetic construct
  misc_feature 1..25: note = Oligonucleotide
  source 1..25: mol_type = other DNA
cttggggaagagggtactgcccaca

SEQ ID NO: 8445 - DNA, 25 bp, synthetic construct
  misc_feature 1..25: note = Oligonucleotide
  source 1..25: mol_type = other DNA
tctcttggggaagagggtactgccc

SEQ ID NO: 8446 - DNA, 25 bp, synthetic construct
  misc_feature 1..25: note = Oligonucleotide
  source 1..25: mol_type = other DNA
ctttctcttggggaagagggtactg

SEQ ID NO: 8447 - DNA, 25 bp, synthetic construct
  misc_feature 1..25: note = Oligonucleotide
  source 1..25: mol_type = other DNA
cctctttctcttggggaagagggta

SEQ ID NO: 8448 - DNA, 25 bp, synthetic construct
  misc_feature 1..25: note = Oligonucleotide
  source 1..25: mol_type = other DNA
tctcctctttctcttggggaagagg

SEQ ID NO: 8449 - DNA, 25 bp, synthetic construct
  misc_feature 1..25: note = Oligonucleotide
  source 1..25: mol_type = other DNA
gcttctcctctttctcttggggaag

SEQ ID NO: 8450 - DNA, 25 bp, synthetic construct
  misc_feature 1..25: note = Oligonucleotide
  source 1..25: mol_type = other DNA
tctgcttctcctctttctcttgggg

SEQ ID NO: 8451 - DNA, 25 bp, synthetic construct
  misc_feature 1..25: note = Oligonucleotide
  source 1..25: mol_type = other DNA
gtgtctgcttctcctctttctcttg

SEQ ID NO: 8452 - DNA, 25 bp, synthetic construct
  misc_feature 1..25: note = Oligonucleotide
  source 1..25: mol_type = other DNA
caggtgtctgcttctcctctttctc

SEQ ID NO: 8453 - DNA, 25 bp, synthetic construct
  misc_feature 1..25: note = Oligonucleotide
  source 1..25: mol_type = other DNA
gcccaggtgtctgcttctcctcttt

SEQ ID NO: 8454 - DNA, 25 bp, synthetic construct
  misc_feature 1..25: note = Oligonucleotide
  source 1..25: mol_type = other DNA
atggcccaggtgtctgcttctcctc

SEQ ID NO: 8455 - DNA, 25 bp, synthetic construct
  misc_feature 1..25: note = Oligonucleotide
  source 1..25: mol_type = other DNA
cccatggcccaggtgtctgcttctc

SEQ ID NO: 8456 - DNA, 25 bp, synthetic construct
  misc_feature 1..25: note = Oligonucleotide
  source 1..25: mol_type = other DNA
tcacccatggcccaggtgtctgctt

SEQ ID NO: 8457 - DNA, 25 bp, synthetic construct
  misc_feature 1..25: note = Oligonucleotide
  source 1..25: mol_type = other DNA
gggtcacccatggcccaggtgtctg

SEQ ID NO: 8458 - DNA, 25 bp, synthetic construct
  misc_feature 1..25: note = Oligonucleotide
  source 1..25: mol_type = other DNA
ctggggtcacccatggcccaggtgt

SEQ ID NO: 8459 - DNA, 25 bp, synthetic construct
  misc_feature 1..25: note = Oligonucleotide
  source 1..25: mol_type = other DNA
ggcctggggtcacccatggcccagg

SEQ ID NO: 8460 - DNA, 25 bp, synthetic construct
  misc_feature 1..25: note = Oligonucleotide
  source 1..25: mol_type = other DNA
aggggcctggggtcacccatggccc

SEQ ID NO: 8461 - DNA, 25 bp, synthetic construct
  misc_feature 1..25: note = Oligonucleotide
  source 1..25: mol_type = other DNA
gggaggggcctggggtcacccatgg

SEQ ID NO: 8462 - DNA, 25 bp, synthetic construct
  misc_feature 1..25: note = Oligonucleotide
  source 1..25: mol_type = other DNA
ggagggaggggcctggggtcaccca

SEQ ID NO: 8463 - DNA, 25 bp, synthetic construct
  misc_feature 1..25: note = Oligonucleotide
  source 1..25: mol_type = other DNA
acaggagggaggggcctggggtcac

SEQ ID NO: 8464 - DNA, 25 bp, synthetic construct
  misc_feature 1..25: note = Oligonucleotide
  source 1..25: mol_type = other DNA
ggcacaggagggaggggcctggggt

SEQ ID NO: 8465 - DNA, 25 bp, synthetic construct
  misc_feature 1..25: note = Oligonucleotide
  source 1..25: mol_type = other DNA
cagggcacaggagggaggggcctgg

SEQ ID NO: 8466 - DNA, 25 bp, synthetic construct
  misc_feature 1..25: note = Oligonucleotide
  source 1..25: mol_type = other DNA
ccccagggcacaggagggaggggcc

SEQ ID NO: 8467 - DNA, 25 bp, synthetic construct
  misc_feature 1..25: note = Oligonucleotide
  source 1..25: mol_type = other DNA
aggccccagggcacaggagggaggg

SEQ ID NO: 8468 - DNA, 25 bp, synthetic construct
  misc_feature 1..25: note = Oligonucleotide
  source 1..25: mol_type = other DNA
caaaggccccagggcacaggaggga

SEQ ID NO: 8469 - DNA, 25 bp, synthetic construct
  misc_feature 1..25: note = Oligonucleotide
  source 1..25: mol_type = other DNA
tgccaaaggccccagggcacaggag

SEQ ID NO: 8470 - DNA, 25 bp, synthetic construct
  misc_feature 1..25: note = Oligonucleotide
  source 1..25: mol_type = other DNA
gcctgccaaaggccccagggcacag

SEQ ID NO: 8471 - DNA, 25 bp, synthetic construct
  misc_feature 1..25: note = Oligonucleotide
  source 1..25: mol_type = other DNA
tgtgcctgccaaaggccccagggca

SEQ ID NO: 8472 - DNA, 25 bp, synthetic construct
  misc_feature 1..25: note = Oligonucleotide
  source 1..25: mol_type = other DNA
ggctgtgcctgccaaaggccccagg

SEQ ID NO: 8473 - DNA, 25 bp, synthetic construct
  misc_feature 1..25: note = Oligonucleotide
  source 1..25: mol_type = other DNA
gaaggctgtgcctgccaaaggcccc

SEQ ID NO: 8474 - DNA, 25 bp, synthetic construct
  misc_feature 1..25: note = Oligonucleotide
  source 1..25: mol_type = other DNA
aaggaaggctgtgcctgccaaaggc

SEQ ID NO: 8475 - DNA, 25 bp, synthetic construct
  misc_feature 1..25: note = Oligonucleotide
  source 1..25: mol_type = other DNA
cccaaggaaggctgtgcctgccaaa

SEQ ID NO: 8476 - DNA, 25 bp, synthetic construct
  misc_feature 1..25: note = Oligonucleotide
  source 1..25: mol_type = other DNA
acgcccaaggaaggctgtgcctgcc

SEQ ID NO: 8477 - DNA, 25 bp, synthetic construct
  misc_feature 1..25: note = Oligonucleotide
  source 1..25: mol_type = other DNA
aaaacgcccaaggaaggctgtgcct

SEQ ID NO: 8478 - DNA, 25 bp, synthetic construct
  misc_feature 1..25: note = Oligonucleotide
  source 1..25: mol_type = other DNA
gagaaaacgcccaaggaaggctgtg

SEQ ID NO: 8479 - DNA, 25 bp, synthetic construct
  misc_feature 1..25: note = Oligonucleotide
  source 1..25: mol_type = other DNA
caagagaaaacgcccaaggaaggct

SEQ ID NO: 8480 - DNA, 25 bp, synthetic construct
  misc_feature 1..25: note = Oligonucleotide
  source 1..25: mol_type = other DNA
ggccaagagaaaacgcccaaggaag

SEQ ID NO: 8481 - DNA, 25 bp, synthetic construct
  misc_feature 1..25: note = Oligonucleotide
  source 1..25: mol_type = other DNA
ggaggccaagagaaaacgcccaagg

SEQ ID NO: 8482 - DNA, 25 bp, synthetic construct
  misc_feature 1..25: note = Oligonucleotide
  source 1..25: mol_type = other DNA
tcaggaggccaagagaaaacgccca

SEQ ID NO: 8483 - DNA, 25 bp, synthetic construct
  misc_feature 1..25: note = Oligonucleotide
  source 1..25: mol_type = other DNA
atgtcaggaggccaagagaaaacgc

SEQ ID NO: 8484 - DNA, 25 bp, synthetic construct
  misc_feature 1..25: note = Oligonucleotide
  source 1..25: mol_type = other DNA
gagatgtcaggaggccaagagaaaa

SEQ ID NO: 8485 - DNA, 25 bp, synthetic construct
  misc_feature 1..25: note = Oligonucleotide
  source 1..25: mol_type = other DNA
ctggagatgtcaggaggccaagaga

SEQ ID NO: 8486 - DNA, 25 bp, synthetic construct
  misc_feature 1..25: note = Oligonucleotide
  source 1..25: mol_type = other DNA
atgctggagatgtcaggaggccaag

SEQ ID NO: 8487 - DNA, 25 bp, synthetic construct
  misc_feature 1..25: note = Oligonucleotide
  source 1..25: mol_type = other DNA
agcatgctggagatgtcaggaggcc

SEQ ID NO: 8488 - DNA, 25 bp, synthetic construct
  misc_feature 1..25: note = Oligonucleotide
  source 1..25: mol_type = other DNA
cagagcatgctggagatgtcaggag

SEQ ID NO: 8489 - DNA, 25 bp, synthetic construct
  misc_feature 1..25: note = Oligonucleotide
  source 1..25: mol_type = other DNA
tcccagagcatgctggagatgtcag

SEQ ID NO: 8490 - DNA, 25 bp, synthetic construct
  misc_feature 1..25: note = Oligonucleotide
  source 1..25: mol_type = other DNA
gcctcccagagcatgctggagatgt

SEQ ID NO: 8491 - DNA, 25 bp, synthetic construct
  misc_feature 1..25: note = Oligonucleotide
  source 1..25: mol_type = other DNA
cccgcctcccagagcatgctggaga

SEQ ID NO: 8492 - DNA, 25 bp, synthetic construct
  misc_feature 1..25: note = Oligonucleotide
  source 1..25: mol_type = other DNA
gctcccgcctcccagagcatgctgg

SEQ ID NO: 8493 - DNA, 25 bp, synthetic construct
  misc_feature 1..25: note = Oligonucleotide
  source 1..25: mol_type = other DNA
attgctcccgcctcccagagcatgc

SEQ ID NO: 8494 - DNA, 25 bp, synthetic construct
  misc_feature 1..25: note = Oligonucleotide
  source 1..25: mol_type = other DNA
cacattgctcccgcctcccagagca

SEQ ID NO: 8495 - DNA, 25 bp, synthetic construct
  misc_feature 1..25: note = Oligonucleotide
  source 1..25: mol_type = other DNA
attcacattgctcccgcctcccaga

SEQ ID NO: 8496 - DNA, 25 bp, synthetic construct
  misc_feature 1..25: note = Oligonucleotide
  source 1..25: mol_type = other DNA
gccattcacattgctcccgcctccc

SEQ ID NO: 8497 - DNA, 25 bp, synthetic construct
  misc_feature 1..25: note = Oligonucleotide
  source 1..25: mol_type = other DNA
agagccattcacattgctcccgcct

SEQ ID NO: 8498 - DNA, 25 bp, synthetic construct
  misc_feature 1..25: note = Oligonucleotide
  source 1..25: mol_type = other DNA
aggagagccattcacattgctcccg

SEQ ID NO: 8499 - DNA, 25 bp, synthetic construct
  misc_feature 1..25: note = Oligonucleotide
  source 1..25: mol_type = other DNA
gtgaggagagccattcacattgctc

SEQ ID NO: 8500 - DNA, 25 bp, synthetic construct
  misc_feature 1..25: note = Oligonucleotide
  source 1..25: mol_type = other DNA
gatgtgaggagagccattcacattg

SEQ ID NO: 8501 - DNA, 25 bp, synthetic construct
  misc_feature 1..25: note = Oligonucleotide
  source 1..25: mol_type = other DNA
agagatgtgaggagagccattcaca

SEQ ID NO: 8502 - DNA, 25 bp, synthetic construct
  misc_feature 1..25: note = Oligonucleotide
  source 1..25: mol_type = other DNA
gcaagagatgtgaggagagccattc

SEQ ID NO: 8503 - DNA, 25 bp, synthetic construct
  misc_feature 1..25: note = Oligonucleotide
  source 1..25: mol_type = other DNA
agggcaagagatgtgaggagagcca

SEQ ID NO: 8504 - DNA, 25 bp, synthetic construct
  misc_feature 1..25: note = Oligonucleotide
  source 1..25: mol_type = other DNA
ccgagggcaagagatgtgaggagag

SEQ ID NO: 8505 - DNA, 25 bp, synthetic construct
  misc_feature 1..25: note = Oligonucleotide
  source 1..25: mol_type = other DNA
ggcccgagggcaagagatgtgagga

SEQ ID NO: 8506 - DNA, 25 bp, synthetic construct
  misc_feature 1..25: note = Oligonucleotide
  source 1..25: mol_type = other DNA
aggggcccgagggcaagagatgtga

SEQ ID NO: 8507 - DNA, 25 bp, synthetic construct
  misc_feature 1..25: note = Oligonucleotide
  source 1..25: mol_type = other DNA
gccaggggcccgagggcaagagatg

SEQ ID NO: 8508 - DNA, 25 bp, synthetic construct
  misc_feature 1..25: note = Oligonucleotide
  source 1..25: mol_type = other DNA
ggagccaggggcccgagggcaagag

SEQ ID NO: 8509 - DNA, 25 bp, synthetic construct
  misc_feature 1..25: note = Oligonucleotide
  source 1..25: mol_type = other DNA
cacggagccaggggcccgagggcaa

SEQ ID NO: 8510 - DNA, 25 bp, synthetic construct
  misc_feature 1..25: note = Oligonucleotide
  source 1..25: mol_type = other DNA
acccacggagccaggggcccgaggg

SEQ ID NO: 8511 - DNA, 25 bp, synthetic construct
  misc_feature 1..25: note = Oligonucleotide
  source 1..25: mol_type = other DNA
ggcacccacggagccaggggcccga

SEQ ID NO: 8512 - DNA, 25 bp, synthetic construct
  misc_feature 1..25: note = Oligonucleotide
  source 1..25: mol_type = other DNA
agaggcacccacggagccaggggcc

SEQ ID NO: 8513 - DNA, 25 bp, synthetic construct
  misc_feature 1..25: note = Oligonucleotide
  source 1..25: mol_type = other DNA
tccagaggcacccacggagccaggg

SEQ ID NO: 8514 - DNA, 25 bp, synthetic construct
  misc_feature 1..25: note = Oligonucleotide
  source 1..25: mol_type = other DNA
ggctccagaggcacccacggagcca

SEQ ID NO: 8515 - DNA, 25 bp, synthetic construct
  misc_feature 1..25: note = Oligonucleotide
  source 1..25: mol_type = other DNA
gctggctccagaggcacccacggag

SEQ ID NO: 8516 - DNA, 25 bp, synthetic construct
  misc_feature 1..25: note = Oligonucleotide
  source 1..25: mol_type = other DNA
caggctggctccagaggcacccacg

SEQ ID NO: 8517 - DNA, 25 bp, synthetic construct
  misc_feature 1..25: note = Oligonucleotide
  source 1..25: mol_type = other DNA
gggcaggctggctccagaggcaccc

SEQ ID NO: 8518 - DNA, 25 bp, synthetic construct
  misc_feature 1..25: note = Oligonucleotide
  source 1..25: mol_type = other DNA
agagggcaggctggctccagaggca

SEQ ID NO: 8519 - DNA, 25 bp, synthetic construct
  misc_feature 1..25: note = Oligonucleotide
  source 1..25: mol_type = other DNA
ggcagagggcaggctggctccagag

SEQ ID NO: 8520 - DNA, 25 bp, synthetic construct
  misc_feature 1..25: note = Oligonucleotide
  source 1..25: mol_type = other DNA
ctgggcagagggcaggctggctcca

SEQ ID NO: 8521 - DNA, 25 bp, synthetic construct
  misc_feature 1..25: note = Oligonucleotide
  source 1..25: mol_type = other DNA
gacctgggcagagggcaggctggct

SEQ ID NO: 8522 - DNA, 25 bp, synthetic construct
  misc_feature 1..25: note = Oligonucleotide
  source 1..25: mol_type = other DNA
ggagacctgggcagagggcaggctg

SEQ ID NO: 8523 - DNA, 25 bp, synthetic construct
  misc_feature 1..25: note = Oligonucleotide
  source 1..25: mol_type = other DNA
gctggagacctgggcagagggcagg

SEQ ID NO: 8524 - DNA, 25 bp, synthetic construct
  misc_feature 1..25: note = Oligonucleotide
  source 1..25: mol_type = other DNA
tgagctggagacctgggcagagggc

SEQ ID NO: 8525 - DNA, 25 bp, synthetic construct
  misc_feature 1..25: note = Oligonucleotide
  source 1..25: mol_type = other DNA
ggctgagctggagacctgggcagag

SEQ ID NO: 8526 - DNA, 25 bp, synthetic construct
  misc_feature 1..25: note = Oligonucleotide
  source 1..25: mol_type = other DNA
aggggctgagctggagacctgggca

SEQ ID NO: 8527 - DNA, 25 bp, synthetic construct
  misc_feature 1..25: note = Oligonucleotide
  source 1..25: mol_type = other DNA
ggcaggggctgagctggagacctgg

SEQ ID NO: 8528 - DNA, 25 bp, synthetic construct
  misc_feature 1..25: note = Oligonucleotide
  source 1..25: mol_type = other DNA
actggcaggggctgagctggagacc

SEQ ID NO: 8529 - DNA, 25 bp, synthetic construct
  misc_feature 1..25: note = Oligonucleotide
  source 1..25: mol_type = other DNA
agtactggcaggggctgagctggag

SEQ ID NO: 8530 - DNA, 25 bp, synthetic construct
  misc_feature 1..25: note = Oligonucleotide
  source 1..25: mol_type = other DNA
ggtagtactggcaggggctgagctg

SEQ ID NO: 8531 - DNA, 25 bp, synthetic construct
  misc_feature 1..25: note = Oligonucleotide
  source 1..25: mol_type = other DNA
ctgggtagtactggcaggggctgag

SEQ ID NO: 8532 - DNA, 25 bp, synthetic construct
  misc_feature 1..25: note = Oligonucleotide
  source 1..25: mol_type = other DNA
tgtctgggtagtactggcaggggct

SEQ ID NO: 8533 - DNA, 25 bp, synthetic construct
  misc_feature 1..25: note = Oligonucleotide
  source 1..25: mol_type = other DNA
gcctgtctgggtagtactggcaggg

SEQ ID NO: 8534 - DNA, 25 bp, synthetic construct
  misc_feature 1..25: note = Oligonucleotide
  source 1..25: mol_type = other DNA
tgtgcctgtctgggtagtactggca

SEQ ID NO: 8535 - DNA, 25 bp, synthetic construct
  misc_feature 1..25: note = Oligonucleotide
  source 1..25: mol_type = other DNA
agttgtgcctgtctgggtagtactg

SEQ ID NO: 8536 - DNA, 25 bp, synthetic construct
  misc_feature 1..25: note = Oligonucleotide
  source 1..25: mol_type = other DNA
cagagttgtgcctgtctgggtagta

SEQ ID NO: 8537 - DNA, 25 bp, synthetic construct
  misc_feature 1..25: note = Oligonucleotide
  source 1..25: mol_type = other DNA
gagcagagttgtgcctgtctgggta

SEQ ID NO: 8538 - DNA, 25 bp, synthetic construct
  misc_feature 1..25: note = Oligonucleotide
  source 1..25: mol_type = other DNA
gcagagcagagttgtgcctgtctgg

SEQ ID NO: 8539 - DNA, 25 bp, synthetic construct
  misc_feature 1..25: note = Oligonucleotide
  source 1..25: mol_type = other DNA
tgggcagagcagagttgtgcctgtc

SEQ ID NO: 8540 - DNA, 25 bp, synthetic construct
  misc_feature 1..25: note = Oligonucleotide
  source 1..25: mol_type = other DNA
agctgggcagagcagagttgtgcct

SEQ ID NO: 8541 - DNA, 25 bp, synthetic construct
  misc_feature 1..25: note = Oligonucleotide
  source 1..25: mol_type = other DNA
ccgagctgggcagagcagagttgtg

SEQ ID NO: 8542 - DNA, 25 bp, synthetic construct
  misc_feature 1..25: note = Oligonucleotide
  source 1..25: mol_type = other DNA
ggtccgagctgggcagagcagagtt

SEQ ID NO: 8543 - DNA, 25 bp, synthetic construct
  misc_feature 1..25: note = Oligonucleotide
  source 1..25: mol_type = other DNA
ggaggtccgagctgggcagagcaga

SEQ ID NO: 8544 - DNA, 25 bp, synthetic construct
  misc_feature 1..25: note = Oligonucleotide
  source 1..25: mol_type = other DNA
ccaggaggtccgagctgggcagagc

SEQ ID NO: 8545 - DNA, 25 bp, synthetic construct
  misc_feature 1..25: note = Oligonucleotide
  source 1..25: mol_type = other DNA
gctccaggaggtccgagctgggcag

SEQ ID NO: 8546 - DNA, 25 bp, synthetic construct
  misc_feature 1..25: note = Oligonucleotide
  source 1..25: mol_type = other DNA
tgggctccaggaggtccgagctggg

SEQ ID NO: 8547 - DNA, 25 bp, synthetic construct
  misc_feature 1..25: note = Oligonucleotide
  source 1..25: mol_type = other DNA
gtctgggctccaggaggtccgagct

SEQ ID NO: 8548 - DNA, 25 bp, synthetic construct
  misc_feature 1..25: note = Oligonucleotide
  source 1..25: mol_type = other DNA
agggtctgggctccaggaggtccga

SEQ ID NO: 8549 - DNA, 25 bp, synthetic construct
  misc_feature 1..25: note = Oligonucleotide
  source 1..25: mol_type = other DNA
agcagggtctgggctccaggaggtc

SEQ ID NO: 8550 - DNA, 25 bp, synthetic construct
  misc_feature 1..25: note = Oligonucleotide
  source 1..25: mol_type = other DNA
cagagcagggtctgggctccaggag

SEQ ID NO: 8551 - DNA, 25 bp, synthetic construct
  misc_feature 1..25: note = Oligonucleotide
  source 1..25: mol_type = other DNA
gcccagagcagggtctgggctccag

SEQ ID NO: 8552 - DNA, 25 bp, synthetic construct
  misc_feature 1..25: note = Oligonucleotide
  source 1..25: mol_type = other DNA
ggagcccagagcagggtctgggctc

SEQ ID NO: 8553 - DNA, 25 bp, synthetic construct
  misc_feature 1..25: note = Oligonucleotide
  source 1..25: mol_type = other DNA
gccggagcccagagcagggtctggg

SEQ ID NO: 8554 - DNA, 25 bp, synthetic construct
  misc_feature 1..25: note = Oligonucleotide
  source 1..25: mol_type = other DNA
tcggccggagcccagagcagggtct

SEQ ID NO: 8555 - DNA, 25 bp, synthetic construct
  misc_feature 1..25: note = Oligonucleotide
  source 1..25: mol_type = other DNA
ggctcggccggagcccagagcaggg

SEQ ID NO: 8556 - DNA, 25 bp, synthetic construct
  misc_feature 1..25: note = Oligonucleotide
  source 1..25: mol_type = other DNA
ggaggctcggccggagcccagagca

SEQ ID NO: 8557 - DNA, 25 bp, synthetic construct
  misc_feature 1..25: note = Oligonucleotide
  source 1..25: mol_type = other DNA
ccaggaggctcggccggagcccaga

SEQ ID NO: 8558 - DNA, 25 bp, synthetic construct
  misc_feature 1..25: note = Oligonucleotide
  source 1..25: mol_type = other DNA
cagccaggaggctcggccggagccc

SEQ ID NO: 8559 - DNA, 25 bp, synthetic construct
  misc_feature 1..25: note = Oligonucleotide
  source 1..25: mol_type = other DNA
gcgcagccaggaggctcggccggag

SEQ ID NO: 8560 - DNA, 25 bp, synthetic construct
  misc_feature 1..25: note = Oligonucleotide
  source 1..25: mol_type = other DNA
gcagcgcagccaggaggctcggccg

SEQ ID NO: 8561 - DNA, 25 bp, synthetic construct
  misc_feature 1..25: note = Oligonucleotide
  source 1..25: mol_type = other DNA
cgggcagcgcagccaggaggctcgg

SEQ ID NO: 8562 - DNA, 25 bp, synthetic construct
  misc_feature 1..25: note = Oligonucleotide
  source 1..25: mol_type = other DNA
gcgcgggcagcgcagccaggaggct

SEQ ID NO: 8563 - DNA, 25 bp, synthetic construct
  misc_feature 1..25: note = Oligonucleotide
  source 1..25: mol_type = other DNA
caggcgcgggcagcgcagccaggag

SEQ ID NO: 8564 - DNA, 25 bp, synthetic construct
  misc_feature 1..25: note = Oligonucleotide
  source 1..25: mol_type = other DNA
gggcaggcgcgggcagcgcagccag

SEQ ID NO: 8565 - DNA, 25 bp, synthetic construct
  misc_feature 1..25: note = Oligonucleotide
  source 1..25: mol_type = other DNA
acagggcaggcgcgggcagcgcagc

SEQ ID NO: 8566 - DNA, 25 bp, synthetic construct
  misc_feature 1..25: note = Oligonucleotide
  source 1..25: mol_type = other DNA
ggcacagggcaggcgcgggcagcgc

SEQ ID NO: 8567 - DNA, 25 bp, synthetic construct
  misc_feature 1..25: note = Oligonucleotide
  source 1..25: mol_type = other DNA
agaggcacagggcaggcgcgggcag

SEQ ID NO: 8568 - DNA, 25 bp, synthetic construct
  misc_feature 1..25: note = Oligonucleotide
  source 1..25: mol_type = other DNA
ggcagaggcacagggcaggcgcggg

SEQ ID NO: 8569 - DNA, 25 bp, synthetic construct
  misc_feature 1..25: note = Oligonucleotide
  source 1..25: mol_type = other DNA
gaaggcagaggcacagggcaggcgc

SEQ ID NO: 8570 - DNA, 25 bp, synthetic construct
  misc_feature 1..25: note = Oligonucleotide
  source 1..25: mol_type = other DNA
agtgaaggcagaggcacagggcagg

SEQ ID NO: 8571 - DNA, 25 bp, synthetic construct
  misc_feature 1..25: note = Oligonucleotide
  source 1..25: mol_type = other DNA
agcagtgaaggcagaggcacagggc

SEQ ID NO: 8572 - DNA, 25 bp, synthetic construct
  misc_feature 1..25: note = Oligonucleotide
  source 1..25: mol_type = other DNA
cacagcagtgaaggcagaggcacag

SEQ ID NO: 8573 - DNA, 25 bp, synthetic construct
  misc_feature 1..25: note = Oligonucleotide
  source 1..25: mol_type = other DNA
gaccacagcagtgaaggcagaggca

SEQ ID NO: 8574 - DNA, 25 bp, synthetic construct
  misc_feature 1..25: note = Oligonucleotide
  source 1..25: mol_type = other DNA
caggaccacagcagtgaaggcagag

SEQ ID NO: 8575 - DNA, 25 bp, synthetic construct
  misc_feature 1..25: note = Oligonucleotide
  source 1..25: mol_type = other DNA
ttgcaggaccacagcagtgaaggca

SEQ ID NO: 8576 - DNA, 25 bp, synthetic construct
  misc_feature 1..25: note = Oligonucleotide
  source 1..25: mol_type = other DNA
gagttgcaggaccacagcagtgaag

SEQ ID NO: 8577 - DNA, 25 bp, synthetic construct
  misc_feature 1..25: note = Oligonucleotide
  source 1..25: mol_type = other DNA
gatgagttgcaggaccacagcagtg

SEQ ID NO: 8578 - DNA, 25 bp, synthetic construct
  misc_feature 1..25: note = Oligonucleotide
  source 1..25: mol_type = other DNA
actgatgagttgcaggaccacagca

SEQ ID NO: 8579 - DNA, 25 bp, synthetic construct
  misc_feature 1..25: note = Oligonucleotide
  source 1..25: mol_type = other DNA
cacactgatgagttgcaggaccaca

SEQ ID NO: 8580 - DNA, 25 bp, synthetic construct
  misc_feature 1..25: note = Oligonucleotide
  source 1..25: mol_type = other DNA
aagcacactgatgagttgcaggacc

SEQ ID NO: 8581 - DNA, 25 bp, synthetic construct
  misc_feature 1..25: note = Oligonucleotide
  source 1..25: mol_type = other DNA
ctgaagcacactgatgagttgcagg

SEQ ID NO: 8582 - DNA, 25 bp, synthetic construct
  misc_feature 1..25: note = Oligonucleotide
  source 1..25: mol_type = other DNA
tgactgaagcacactgatgagttgc

SEQ ID NO: 8583 - DNA, 25 bp, synthetic construct
  misc_feature 1..25: note = Oligonucleotide
  source 1..25: mol_type = other DNA
gtgtgactgaagcacactgatgagt

SEQ ID NO: 8584 - DNA, 25 bp, synthetic construct
  misc_feature 1..25: note = Oligonucleotide
  source 1..25: mol_type = other DNA
caggtgtgactgaagcacactgatg

SEQ ID NO: 8585 - DNA, 25 bp, synthetic construct
  misc_feature 1..25: note = Oligonucleotide
  source 1..25: mol_type = other DNA
tctcaggtgtgactgaagcacactg

SEQ ID NO: 8586 - DNA, 25 bp, synthetic construct
  misc_feature 1..25: note = Oligonucleotide
  source 1..25: mol_type = other DNA
gagtctcaggtgtgactgaagcaca

SEQ ID NO: 8587 - DNA, 25 bp, synthetic construct
  misc_feature 1..25: note = Oligonucleotide
  source 1..25: mol_type = other DNA
ctggagtctcaggtgtgactgaagc

SEQ ID NO: 8588 - DNA, 25 bp, synthetic construct
  misc_feature 1..25: note = Oligonucleotide
  source 1..25: mol_type = other DNA
tacctggagtctcaggtgtgactga

SEQ ID NO: 8589 - DNA, 25 bp, synthetic construct
  misc_feature 1..25: note = Oligonucleotide
  source 1..25: mol_type = other DNA
gtgtacctggagtctcaggtgtgac

SEQ ID NO: 8590 - DNA, 25 bp, synthetic construct
  misc_feature 1..25: note = Oligonucleotide
  source 1..25: mol_type = other DNA
caggtgtacctggagtctcaggtgt

SEQ ID NO: 8591 - DNA, 25 bp, synthetic construct
  misc_feature 1..25: note = Oligonucleotide
  source 1..25: mol_type = other DNA
tggcaggtgtacctggagtctcagg

SEQ ID NO: 8592 - DNA, 25 bp, synthetic construct
  misc_feature 1..25: note = Oligonucleotide
  source 1..25: mol_type = other DNA
tgatggcaggtgtacctggagtctc

SEQ ID NO: 8593 - DNA, 25 bp, synthetic construct
  misc_feature 1..25: note = Oligonucleotide
  source 1..25: mol_type = other DNA
ttgtgatggcaggtgtacctggagt

SEQ ID NO: 8594 - DNA, 25 bp, synthetic construct
  misc_feature 1..25: note = Oligonucleotide
  source 1..25: mol_type = other DNA
gagttgtgatggcaggtgtacctgg

SEQ ID NO: 8595 - DNA, 25 bp, synthetic construct
  misc_feature 1..25: note = Oligonucleotide
  source 1..25: mol_type = other DNA
gtggagttgtgatggcaggtgtacc

SEQ ID NO: 8596 - DNA, 25 bp, synthetic construct
  misc_feature 1..25: note = Oligonucleotide
  source 1..25: mol_type = other DNA
tcagtggagttgtgatggcaggtgt

SEQ ID NO: 8597 - DNA, 25 bp, synthetic construct
  misc_feature 1..25: note = Oligonucleotide
  source 1..25: mol_type = other DNA
ctttcagtggagttgtgatggcagg

SEQ ID NO: 8598 - DNA, 25 bp, synthetic construct
  misc_feature 1..25: note = Oligonucleotide
  source 1..25: mol_type = other DNA
tagctttcagtggagttgtgatggc

SEQ ID NO: 8599 - DNA, 25 bp, synthetic construct
  misc_feature 1..25: note = Oligonucleotide
  source 1..25: mol_type = other DNA
gcttagctttcagtggagttgtgat

SEQ ID NO: 8600 - DNA, 25 bp, synthetic construct
  misc_feature 1..25: note = Oligonucleotide
  source 1..25: mol_type = other DNA
aaggcttagctttcagtggagttgt

SEQ ID NO: 8601 - DNA, 25 bp, synthetic construct
  misc_feature 1..25: note = Oligonucleotide
  source 1..25: mol_type = other DNA
cccaaggcttagctttcagtggagt

SEQ ID NO: 8602 - DNA, 25 bp, synthetic construct
  misc_feature 1..25: note = Oligonucleotide
  source 1..25: mol_type = other DNA
tgccccaaggcttagctttcagtgg

SEQ ID NO: 8603 - DNA, 25 bp, synthetic construct
  misc_feature 1..25: note = Oligonucleotide
  source 1..25: mol_type = other DNA
ccctgccccaaggcttagctttcag

SEQ ID NO: 8604 - DNA, 25 bp, synthetic construct
  misc_feature 1..25: note = Oligonucleotide
  source 1..25: mol_type = other DNA
tgcccctgccccaaggcttagcttt

SEQ ID NO: 8605 - DNA, 25 bp, synthetic construct
  misc_feature 1..25: note = Oligonucleotide
  source 1..25: mol_type = other DNA
ccctgcccctgccccaaggcttagc

SEQ ID NO: 8606 - DNA, 25 bp, synthetic construct
  misc_feature 1..25: note = Oligonucleotide
  source 1..25: mol_type = other DNA
tggccctgcccctgccccaaggctt

SEQ ID NO: 8607 - DNA, 25 bp, synthetic construct
  misc_feature 1..25: note = Oligonucleotide
  source 1..25: mol_type = other DNA
ccctggccctgcccctgccccaagg

SEQ ID NO: 8608 - DNA, 25 bp, synthetic construct
  misc_feature 1..25: note = Oligonucleotide
  source 1..25: mol_type = other DNA
ctaccctggccctgcccctgcccca

SEQ ID NO: 8609 - DNA, 25 bp, synthetic construct
  misc_feature 1..25: note = Oligonucleotide
  source 1..25: mol_type = other DNA
cacctaccctggccctgcccctgcc

SEQ ID NO: 8610 - DNA, 25 bp, synthetic construct
  misc_feature 1..25: note = Oligonucleotide
  source 1..25: mol_type = other DNA
ggacacctaccctggccctgcccct

SEQ ID NO: 8611 - DNA, 25 bp, synthetic construct
  misc_feature 1..25: note = Oligonucleotide
  source 1..25: mol_type = other DNA
gatggacacctaccctggccctgcc

SEQ ID NO: 8612 - DNA, 25 bp, synthetic construct
  misc_feature 1..25: note = Oligonucleotide
  source 1..25: mol_type = other DNA
caggatggacacctaccctggccct

SEQ ID NO: 8613 - DNA, 25 bp, synthetic construct
  misc_feature 1..25: note = Oligonucleotide
  source 1..25: mol_type = other DNA
tcacaggatggacacctaccctggc

SEQ ID NO: 8614 - DNA, 25 bp, synthetic construct
  misc_feature 1..25: note = Oligonucleotide
  source 1..25: mol_type = other DNA
gtatcacaggatggacacctaccct

SEQ ID NO: 8615 - DNA, 25 bp, synthetic construct
  misc_feature 1..25: note = Oligonucleotide
  source 1..25: mol_type = other DNA
cctgtatcacaggatggacacctac

SEQ ID NO: 8616 - DNA, 25 bp, synthetic construct
  misc_feature 1..25: note = Oligonucleotide
  source 1..25: mol_type = other DNA
ggacctgtatcacaggatggacacc

SEQ ID NO: 8617 - DNA, 25 bp, synthetic construct
  misc_feature 1..25: note = Oligonucleotide
  source 1..25: mol_type = other DNA
tggggacctgtatcacaggatggac

SEQ ID NO: 8618 - DNA, 25 bp, synthetic construct
  misc_feature 1..25: note = Oligonucleotide
  source 1..25: mol_type = other DNA
gcctggggacctgtatcacaggatg

SEQ ID NO: 8619 - DNA, 25 bp, synthetic construct
  misc_feature 1..25: note = Oligonucleotide
  source 1..25: mol_type = other DNA
ctggcctggggacctgtatcacagg

SEQ ID NO: 8620 - DNA, 25 bp, synthetic construct
  misc_feature 1..25: note = Oligonucleotide
  source 1..25: mol_type = other DNA
gccctggcctggggacctgtatcac

SEQ ID NO: 8621 - DNA, 25 bp, synthetic construct
  misc_feature 1..25: note = Oligonucleotide
  source 1..25: mol_type = other DNA
gtggccctggcctggggacctgtat

SEQ ID NO: 8622 - DNA, 25 bp, synthetic construct
  misc_feature 1..25: note = Oligonucleotide
  source 1..25: mol_type = other DNA
aaagtggccctggcctggggacctg

SEQ ID NO: 8623 - DNA, 25 bp, synthetic construct
  misc_feature 1..25: note = Oligonucleotide
  source 1..25: mol_type = other DNA
aacaaagtggccctggcctggggac

SEQ ID NO: 8624 - DNA, 25 bp, synthetic construct
  misc_feature 1..25: note = Oligonucleotide
  source 1..25: mol_type = other DNA
cccaacaaagtggccctggcctggg

SEQ ID NO: 8625 - DNA, 25 bp, synthetic construct
  misc_feature 1..25: note = Oligonucleotide
  source 1..25: mol_type = other DNA
agccccaacaaagtggccctggcct

SEQ ID NO: 8626 - DNA, 25 bp, synthetic construct
  misc_feature 1..25: note = Oligonucleotide
  source 1..25: mol_type = other DNA
accagccccaacaaagtggccctgg

SEQ ID NO: 8627 - DNA, 25 bp, synthetic construct
  misc_feature 1..25: note = Oligonucleotide
  source 1..25: mol_type = other DNA
cccaccagccccaacaaagtggccc

SEQ ID NO: 8628 - DNA, 25 bp, synthetic construct
  misc_feature 1..25: note = Oligonucleotide
  source 1..25: mol_type = other DNA
ccacccaccagccccaacaaagtgg

SEQ ID NO: 8629 - DNA, 25 bp, synthetic construct
  misc_feature 1..25: note = Oligonucleotide
  source 1..25: mol_type = other DNA
cctccacccaccagccccaacaaag

SEQ ID NO: 8630 - DNA, 25 bp, synthetic construct
  misc_feature 1..25: note = Oligonucleotide
  source 1..25: mol_type = other DNA
tggcctccacccaccagccccaaca

SEQ ID NO: 8631 - DNA, 25 bp, synthetic construct
  misc_feature 1..25: note = Oligonucleotide
  source 1..25: mol_type = other DNA
acctggcctccacccaccagcccca

SEQ ID NO: 8632 - DNA, 25 bp, synthetic construct
  misc_feature 1..25: note = Oligonucleotide
  source 1..25: mol_type = other DNA
tgcacctggcctccacccaccagcc

SEQ ID NO: 8633 - DNA, 25 bp, synthetic construct
  misc_feature 1..25: note = Oligonucleotide
  source 1..25: mol_type = other DNA
atatgcacctggcctccacccacca

SEQ ID NO: 8634 - DNA, 25 bp, synthetic construct
  misc_feature 1..25: note = Oligonucleotide
  source 1..25: mol_type = other DNA
ggaatatgcacctggcctccaccca

SEQ ID NO: 8635 - DNA, 25 bp, synthetic construct
  misc_feature 1..25: note = Oligonucleotide
  source 1..25: mol_type = other DNA
ccaggaatatgcacctggcctccac

SEQ ID NO: 8636 - DNA, 25 bp, synthetic construct
  misc_feature 1..25: note = Oligonucleotide
  source 1..25: mol_type = other DNA
ggaccaggaatatgcacctggcctc

SEQ ID NO: 8637 - DNA, 25 bp, synthetic construct
  misc_feature 1..25: note = Oligonucleotide
  source 1..25: mol_type = other DNA
gcaggaccaggaatatgcacctggc

SEQ ID NO: 8638 - DNA, 25 bp, synthetic construct
  misc_feature 1..25: note = Oligonucleotide
  source 1..25: mol_type = other DNA
ggggcaggaccaggaatatgcacct

SEQ ID NO: 8639 - DNA, 25 bp, synthetic construct
  misc_feature 1..25: note = Oligonucleotide
  source 1..25: mol_type = other DNA
agaggggcaggaccaggaatatgca

SEQ ID NO: 8640 - DNA, 25 bp, synthetic construct
  misc_feature 1..25: note = Oligonucleotide
  source 1..25: mol_type = other DNA
cagagaggggcaggaccaggaatat

SEQ ID NO: 8641 - DNA, 25 bp, synthetic construct
  misc_feature 1..25: note = Oligonucleotide
  source 1..25: mol_type = other DNA
acccagagaggggcaggaccaggaa

SEQ ID NO: 8642 - DNA, 25 bp, synthetic construct
  misc_feature 1..25: note = Oligonucleotide
  source 1..25: mol_type = other DNA
gacacccagagaggggcaggaccag

SEQ ID NO: 8643 - DNA, 25 bp, synthetic construct
  misc_feature 1..25: note = Oligonucleotide
  source 1..25: mol_type = other DNA
gtggacacccagagaggggcaggac

SEQ ID NO: 8644 - DNA, 25 bp, synthetic construct
  misc_feature 1..25: note = Oligonucleotide
  source 1..25: mol_type = other DNA
actgtggacacccagagaggggcag

SEQ ID NO: 8645 - DNA, 25 bp, synthetic construct
  misc_feature 1..25: note = Oligonucleotide
  source 1..25: mol_type = other DNA
ctgactgtggacacccagagagggg

SEQ ID NO: 8646 - DNA, 25 bp, synthetic construct
  misc_feature 1..25: note = Oligonucleotide
  source 1..25: mol_type = other DNA
gacctgactgtggacacccagagag

SEQ ID NO: 8647 - DNA, 25 bp, synthetic construct
  misc_feature 1..25: note = Oligonucleotide
  source 1..25: mol_type = other DNA
agggacctgactgtggacacccaga

SEQ ID NO: 8648 - DNA, 25 bp, synthetic construct
  misc_feature 1..25: note = Oligonucleotide
  source 1..25: mol_type = other DNA
cagagggacctgactgtggacaccc

SEQ ID NO: 8649 - DNA, 25 bp, synthetic construct
  misc_feature 1..25: note = Oligonucleotide
  source 1..25: mol_type = other DNA
actcagagggacctgactgtggaca

SEQ ID NO: 8650 - DNA, 25 bp, synthetic construct
  misc_feature 1..25: note = Oligonucleotide
  source 1..25: mol_type = other DNA
atcactcagagggacctgactgtgg

SEQ ID NO: 8651 - DNA, 25 bp, synthetic construct
  misc_feature 1..25: note = Oligonucleotide
  source 1..25: mol_type = other DNA
agaatcactcagagggacctgactg

SEQ ID NO: 8652 - DNA, 25 bp, synthetic construct
  misc_feature 1..25: note = Oligonucleotide
  source 1..25: mol_type = other DNA
gagagaatcactcagagggacctga

SEQ ID NO: 8653 - DNA, 25 bp, synthetic construct
  misc_feature 1..25: note = Oligonucleotide
  source 1..25: mol_type = other DNA
tccgagagaatcactcagagggacc

SEQ ID NO: 8654 - DNA, 25 bp, synthetic construct
  misc_feature 1..25: note = Oligonucleotide
  source 1..25: mol_type = other DNA
gactccgagagaatcactcagaggg

SEQ ID NO: 8655 - DNA, 25 bp, synthetic construct
  misc_feature 1..25: note = Oligonucleotide
  source 1..25: mol_type = other DNA
ggagactccgagagaatcactcaga

SEQ ID NO: 8656 - DNA, 25 bp, synthetic construct
  misc_feature 1..25: note = Oligonucleotide
  source 1..25: mol_type = other DNA
agaggagactccgagagaatcactc

SEQ ID NO: 8657 - DNA, 25 bp, synthetic construct
  misc_feature 1..25: note = Oligonucleotide
  source 1..25: mol_type = other DNA
gccagaggagactccgagagaatca

SEQ ID NO: 8658 - DNA, 25 bp, synthetic construct
  misc_feature 1..25: note = Oligonucleotide
  source 1..25: mol_type = other DNA
cttgccagaggagactccgagagaa

SEQ ID NO: 8659 - DNA, 25 bp, synthetic construct
  misc_feature 1..25: note = Oligonucleotide
  source 1..25: mol_type = other DNA
gggcttgccagaggagactccgaga

SEQ ID NO: 8660 - DNA, 25 bp, synthetic construct
  misc_feature 1..25: note = Oligonucleotide
  source 1..25: mol_type = other DNA
gaggggcttgccagaggagactccg

SEQ ID NO: 8661 - DNA, 25 bp, synthetic construct
  misc_feature 1..25: note = Oligonucleotide
  source 1..25: mol_type = other DNA
ctggaggggcttgccagaggagact

SEQ ID NO: 8662 - DNA, 25 bp, synthetic construct
  misc_feature 1..25: note = Oligonucleotide
  source 1..25: mol_type = other DNA
ctgctggaggggcttgccagaggag

SEQ ID NO: 8663 - DNA, 25 bp, synthetic construct
  misc_feature 1..25: note = Oligonucleotide
  source 1..25: mol_type = other DNA
tgactgctggaggggcttgccagag

SEQ ID NO: 8664 - DNA, 25 bp, synthetic construct
  misc_feature 1..25: note = Oligonucleotide
  source 1..25: mol_type = other DNA
tggtgactgctggaggggcttgcca

SEQ ID NO: 8665 - DNA, 25 bp, synthetic construct
  misc_feature 1..25: note = Oligonucleotide
  source 1..25: mol_type = other DNA
tggtggtgactgctggaggggcttg

SEQ ID NO: 8666 - DNA, 25 bp, synthetic construct
  misc_feature 1..25: note = Oligonucleotide
  source 1..25: mol_type = other DNA
aggtggtggtgactgctggaggggc

SEQ ID NO: 8667 - DNA, 25 bp, synthetic construct
  misc_feature 1..25: note = Oligonucleotide
  source 1..25: mol_type = other DNA
cccaggtggtggtgactgctggagg

SEQ ID NO: 8668 - DNA, 25 bp, synthetic construct
  misc_feature 1..25: note = Oligonucleotide
  source 1..25: mol_type = other DNA
gtgcccaggtggtggtgactgctgg

SEQ ID NO: 8669 - DNA, 25 bp, synthetic construct
  misc_feature 1..25: note = Oligonucleotide
  source 1..25: mol_type = other DNA
tgggtgcccaggtggtggtgactgc

SEQ ID NO: 8670 - DNA, 25 bp, synthetic construct
  misc_feature 1..25: note = Oligonucleotide
  source 1..25: mol_type = other DNA
gggtgggtgcccaggtggtggtgac

SEQ ID NO: 8671 - DNA, 25 bp, synthetic construct
  misc_feature 1..25: note = Oligonucleotide
  source 1..25: mol_type = other DNA
tgggggtgggtgcccaggtggtggt

SEQ ID NO: 8672 - DNA, 25 bp, synthetic construct
  misc_feature 1..25: note = Oligonucleotide
  source 1..25: mol_type = other DNA
ccctgggggtgggtgcccaggtggt

SEQ ID NO: 8673 - DNA, 25 bp, synthetic construct
  misc_feature 1..25: note = Oligonucleotide
  source 1..25: mol_type = other DNA
gtcccctgggggtgggtgcccaggt

SEQ ID NO: 8674 - DNA, 25 bp, synthetic construct
  misc_feature 1..25: note = Oligonucleotide
  source 1..25: mol_type = other DNA
ggggtcccctgggggtgggtgccca

SEQ ID NO: 8675 - DNA, 25 bp, synthetic construct
  misc_feature 1..25: note = Oligonucleotide
  source 1..25: mol_type = other DNA
cggggggtcccctgggggtgggtgc

SEQ ID NO: 8676 - DNA, 25 bp, synthetic construct
  misc_feature 1..25: note = Oligonucleotide
  source 1..25: mol_type = other DNA
ggtcggggggtcccctgggggtggg

SEQ ID NO: 8677 - DNA, 25 bp, synthetic construct
  misc_feature 1..25: note = Oligonucleotide
  source 1..25: mol_type = other DNA
ttgggtcggggggtcccctgggggt

SEQ ID NO: 8678 - DNA, 25 bp, synthetic construct
  misc_feature 1..25: note = Oligonucleotide
  source 1..25: mol_type = other DNA
gtgttgggtcggggggtcccctggg

SEQ ID NO: 8679 - DNA, 25 bp, synthetic construct
  misc_feature 1..25: note = Oligonucleotide
  source 1..25: mol_type = other DNA
gtggtgttgggtcggggggtcccct

SEQ ID NO: 8680 - DNA, 25 bp, synthetic construct
  misc_feature 1..25: note = Oligonucleotide
  source 1..25: mol_type = other DNA
caggtggtgttgggtcggggggtcc

SEQ ID NO: 8681 - DNA, 25 bp, synthetic construct
  misc_feature 1..25: note = Oligonucleotide
  source 1..25: mol_type = other DNA
tgccaggtggtgttgggtcgggggg

SEQ ID NO: 8682 - DNA, 25 bp, synthetic construct
  misc_feature 1..25: note = Oligonucleotide
  source 1..25: mol_type = other DNA
aggtgccaggtggtgttgggtcggg

SEQ ID NO: 8683 - DNA, 25 bp, synthetic construct
  misc_feature 1..25: note = Oligonucleotide
  source 1..25: mol_type = other DNA
gggaggtgccaggtggtgttgggtc

SEQ ID NO: 8684 - DNA, 25 bp, synthetic construct
  misc_feature 1..25: note = Oligonucleotide
  source 1..25: mol_type = other DNA
aaggggaggtgccaggtggtgttgg

SEQ ID NO: 8685 - DNA, 25 bp, synthetic construct
  misc_feature 1..25: note = Oligonucleotide
  source 1..25: mol_type = other DNA
cccaaggggaggtgccaggtggtgt

SEQ ID NO: 8686 - DNA, 25 bp, synthetic construct
  misc_feature 1..25: note = Oligonucleotide
  source 1..25: mol_type = other DNA
attcccaaggggaggtgccaggtgg

SEQ ID NO: 8687 - DNA, 25 bp, synthetic construct
  misc_feature 1..25: note = Oligonucleotide
  source 1..25: mol_type = other DNA
gggattcccaaggggaggtgccagg

SEQ ID NO: 8688 - DNA, 25 bp, synthetic construct
  misc_feature 1..25: note = Oligonucleotide
  source 1..25: mol_type = other DNA
ggggggattcccaaggggaggtgcc

SEQ ID NO: 8689 - DNA, 25 bp, synthetic construct
  misc_feature 1..25: note = Oligonucleotide
  source 1..25: mol_type = other DNA
gttggggggattcccaaggggaggt

SEQ ID NO: 8690 - DNA, 25 bp, synthetic construct
  misc_feature 1..25: note = Oligonucleotide
  source 1..25: mol_type = other DNA
aaggttggggggattcccaagggga

SEQ ID NO: 8691 - DNA, 25 bp, synthetic construct
  misc_feature 1..25: note = Oligonucleotide
  source 1..25: mol_type = other DNA
gccaaggttggggggattcccaagg

SEQ ID NO: 8692 - DNA, 25 bp, synthetic construct
  misc_feature 1..25: note = Oligonucleotide
  source 1..25: mol_type = other DNA
gcagccaaggttggggggattccca

SEQ ID NO: 8693 - DNA, 25 bp, synthetic construct
  misc_feature 1..25: note = Oligonucleotide
  source 1..25: mol_type = other DNA
gaggcagccaaggttggggggattc

SEQ ID NO: 8694 - DNA, 25 bp, synthetic construct
  misc_feature 1..25: note = Oligonucleotide
  source 1..25: mol_type = other DNA
ggggaggcagccaaggttgggggga

SEQ ID NO: 8695 - DNA, 25 bp, synthetic construct
  misc_feature 1..25: note = Oligonucleotide
  source 1..25: mol_type = other DNA
agtggggaggcagccaaggttgggg

SEQ ID NO: 8696 - DNA, 25 bp, synthetic construct
  misc_feature 1..25: note = Oligonucleotide
  source 1..25: mol_type = other DNA
caaagtggggaggcagccaaggttg

SEQ ID NO: 8697 - DNA, 25 bp, synthetic construct
  misc_feature 1..25: note = Oligonucleotide
  source 1..25: mol_type = other DNA
ggccaaagtggggaggcagccaagg

SEQ ID NO: 8698 - DNA, 25 bp, synthetic construct
  misc_feature 1..25: note = Oligonucleotide
  source 1..25: mol_type = other DNA
gtgggccaaagtggggaggcagcca

SEQ ID NO: 8699 - DNA, 25 bp, synthetic construct
  misc_feature 1..25: note = Oligonucleotide
  source 1..25: mol_type = other DNA
acagtgggccaaagtggggaggcag

SEQ ID NO: 8700 - DNA, 25 bp, synthetic construct
  misc_feature 1..25: note = Oligonucleotide
  source 1..25: mol_type = other DNA
tgcacagtgggccaaagtggggagg

SEQ ID NO: 8701 - DNA, 25 bp, synthetic construct
  misc_feature 1..25: note = Oligonucleotide
  source 1..25: mol_type = other DNA
acctgcacagtgggccaaagtgggg

SEQ ID NO: 8702 - DNA, 25 bp, synthetic construct
  misc_feature 1..25: note = Oligonucleotide
  source 1..25: mol_type = other DNA
tccacctgcacagtgggccaaagtg

SEQ ID NO: 8703 - DNA, 25 bp, synthetic construct
  misc_feature 1..25: note = Oligonucleotide
  source 1..25: mol_type = other DNA
ggatccacctgcacagtgggccaaa

SEQ ID NO: 8704 - DNA, 25 bp, synthetic construct
  misc_feature 1..25: note = Oligonucleotide
  source 1..25: mol_type = other DNA
catggatccacctgcacagtgggcc

SEQ ID NO: 8705 - DNA, 25 bp, synthetic construct
  misc_feature 1..25: note = Oligonucleotide
  source 1..25: mol_type = other DNA
ctccatggatccacctgcacagtgg

SEQ ID NO: 8706 - DNA, 25 bp, synthetic construct
  misc_feature 1..25: note = Oligonucleotide
  source 1..25: mol_type = other DNA
ggcctccatggatccacctgcacag

SEQ ID NO: 8707 - DNA, 25 bp, synthetic construct
  misc_feature 1..25: note = Oligonucleotide
  source 1..25: mol_type = other DNA
cctggcctccatggatccacctgca

SEQ ID NO: 8708 - DNA, 25 bp, synthetic construct
  misc_feature 1..25: note = Oligonucleotide
  source 1..25: mol_type = other DNA
ggacctggcctccatggatccacct

SEQ ID NO: 8709 - DNA, 25 bp, synthetic construct
  misc_feature 1..25: note = Oligonucleotide
  source 1..25: mol_type = other DNA
attggacctggcctccatggatcca

SEQ ID NO: 8710 - DNA, 25 bp, synthetic construct
  misc_feature 1..25: note = Oligonucleotide
  source 1..25: mol_type = other DNA
cccattggacctggcctccatggat

SEQ ID NO: 8711 - DNA, 25 bp, synthetic construct
  misc_feature 1..25: note = Oligonucleotide
  source 1..25: mol_type = other DNA
gctcccattggacctggcctccatg

SEQ ID NO: 8712 - DNA, 25 bp, synthetic construct
  misc_feature 1..25: note = Oligonucleotide
  source 1..25: mol_type = other DNA
tttgctcccattggacctggcctcc

SEQ ID NO: 8713 - DNA, 25 bp, synthetic construct
  misc_feature 1..25: note = Oligonucleotide
  source 1..25: mol_type = other DNA
gtctttgctcccattggacctggcc

SEQ ID NO: 8714 - DNA, 25 bp, synthetic construct
  misc_feature 1..25: note = Oligonucleotide
  source 1..25: mol_type = other DNA
gctgtctttgctcccattggacctg

SEQ ID NO: 8715 - DNA, 25 bp, synthetic construct
  misc_feature 1..25: note = Oligonucleotide
  source 1..25: mol_type = other DNA
taagctgtctttgctcccattggac

SEQ ID NO: 8716 - DNA, 25 bp, synthetic construct
  misc_feature 1..25: note = Oligonucleotide
  source 1..25: mol_type = other DNA
gaataagctgtctttgctcccattg

SEQ ID NO: 8717 - DNA, 25 bp, synthetic construct
  misc_feature 1..25: note = Oligonucleotide
  source 1..25: mol_type = other DNA
ccagaataagctgtctttgctccca

SEQ ID NO: 8718 - DNA, 25 bp, synthetic construct
  misc_feature 1..25: note = Oligonucleotide
  source 1..25: mol_type = other DNA
ccaccagaataagctgtctttgctc

SEQ ID NO: 8719 - DNA, 25 bp, synthetic construct
  misc_feature 1..25: note = Oligonucleotide
  source 1..25: mol_type = other DNA
caaccaccagaataagctgtctttg

SEQ ID NO: 8720 - DNA, 25 bp, synthetic construct
  misc_feature 1..25: note = Oligonucleotide
  source 1..25: mol_type = other DNA
caccaaccaccagaataagctgtct

SEQ ID NO: 8721 - DNA, 25 bp, synthetic construct
  misc_feature 1..25: note = Oligonucleotide
  source 1..25: mol_type = other DNA
aggcaccaaccaccagaataagctg

SEQ ID NO: 8722 - DNA, 25 bp, synthetic construct
  misc_feature 1..25: note = Oligonucleotide
  source 1..25: mol_type = other DNA
cacaggcaccaaccaccagaataag

SEQ ID NO: 8723 - DNA, 25 bp, synthetic construct
  misc_feature 1..25: note = Oligonucleotide
  source 1..25: mol_type = other DNA
cagcacaggcaccaaccaccagaat

SEQ ID NO: 8724 - DNA, 25 bp, synthetic construct
  misc_feature 1..25: note = Oligonucleotide
  source 1..25: mol_type = other DNA
cctcagcacaggcaccaaccaccag

SEQ ID NO: 8725 - DNA, 25 bp, synthetic construct
  misc_feature 1..25: note = Oligonucleotide
  source 1..25: mol_type = other DNA
gggcctcagcacaggcaccaaccac

SEQ ID NO: 8726 - DNA, 25 bp, synthetic construct
  misc_feature 1..25: note = Oligonucleotide
  source 1..25: mol_type = other DNA
ggtgggcctcagcacaggcaccaac

SEQ ID NO: 8727 - DNA, 25 bp, synthetic construct
  misc_feature 1..25: note = Oligonucleotide
  source 1..25: mol_type = other DNA
tgaggtgggcctcagcacaggcacc

SEQ ID NO: 8728 - DNA, 25 bp, synthetic construct
  misc_feature 1..25: note = Oligonucleotide
  source 1..25: mol_type = other DNA
acctgaggtgggcctcagcacaggc

SEQ ID NO: 8729 - DNA, 25 bp, synthetic construct
  misc_feature 1..25: note = Oligonucleotide
  source 1..25: mol_type = other DNA
aacacctgaggtgggcctcagcaca

SEQ ID NO: 8730 - DNA, 25 bp, synthetic construct
  misc_feature 1..25: note = Oligonucleotide
  source 1..25: mol_type = other DNA
aagaacacctgaggtgggcctcagc

SEQ ID NO: 8731 - DNA, 25 bp, synthetic construct
  misc_feature 1..25: note = Oligonucleotide
  source 1..25: mol_type = other DNA
ttcaagaacacctgaggtgggcctc

SEQ ID NO: 8732 - DNA, 25 bp, synthetic construct
  misc_feature 1..25: note = Oligonucleotide
  source 1..25: mol_type = other DNA
ggcttcaagaacacctgaggtgggc

SEQ ID NO: 8733 - DNA, 25 bp, synthetic construct
  misc_feature 1..25: note = Oligonucleotide
  source 1..25: mol_type = other DNA
aggggcttcaagaacacctgaggtg

SEQ ID NO: 8734 - DNA, 25 bp, synthetic construct
  misc_feature 1..25: note = Oligonucleotide
  source 1..25: mol_type = other DNA
gaaaggggcttcaagaacacctgag

SEQ ID NO: 8735 - DNA, 25 bp, synthetic construct
  misc_feature 1..25: note = Oligonucleotide
  source 1..25: mol_type = other DNA
acagaaaggggcttcaagaacacct

SEQ ID NO: 8736 - DNA, 25 bp, synthetic construct
  misc_feature 1..25: note = Oligonucleotide
  source 1..25: mol_type = other DNA
caaacagaaaggggcttcaagaaca

SEQ ID NO: 8737 - DNA, 25 bp, synthetic construct
  misc_feature 1..25: note = Oligonucleotide
  source 1..25: mol_type = other DNA
ccccaaacagaaaggggcttcaaga

SEQ ID NO: 8738 - DNA, 25 bp, synthetic construct
  misc_feature 1..25: note = Oligonucleotide
  source 1..25: mol_type = other DNA
tgcccccaaacagaaaggggcttca

SEQ ID NO: 8739 - DNA, 25 bp, synthetic construct
  misc_feature 1..25: note = Oligonucleotide
  source 1..25: mol_type = other DNA
ctgtgcccccaaacagaaaggggct

SEQ ID NO: 8740 - DNA, 25 bp, synthetic construct
  misc_feature 1..25: note = Oligonucleotide
  source 1..25: mol_type = other DNA
acactgtgcccccaaacagaaaggg

SEQ ID NO: 8741 - DNA, 25 bp, synthetic construct
  misc_feature 1..25: note = Oligonucleotide
  source 1..25: mol_type = other DNA
gccacactgtgcccccaaacagaaa

SEQ ID NO: 8742 - DNA, 25 bp, synthetic construct
  misc_feature 1..25: note = Oligonucleotide
  source 1..25: mol_type = other DNA
gaggccacactgtgcccccaaacag

SEQ ID NO: 8743 - DNA, 25 bp, synthetic construct
  misc_feature 1..25: note = Oligonucleotide
  source 1..25: mol_type = other DNA
gaagaggccacactgtgcccccaaa

SEQ ID NO: 8744 - DNA, 25 bp, synthetic construct
  misc_feature 1..25: note = Oligonucleotide
  source 1..25: mol_type = other DNA
cctgaagaggccacactgtgccccc

SEQ ID NO: 8745 - DNA, 25 bp, synthetic construct
  misc_feature 1..25: note = Oligonucleotide
  source 1..25: mol_type = other DNA
cttcctgaagaggccacactgtgcc

SEQ ID NO: 8746 - DNA, 25 bp, synthetic construct
  misc_feature 1..25: note = Oligonucleotide
  source 1..25: mol_type = other DNA
gaacttcctgaagaggccacactgt

SEQ ID NO: 8747 - DNA, 25 bp, synthetic construct
  misc_feature 1..25: note = Oligonucleotide
  source 1..25: mol_type = other DNA
gcagaacttcctgaagaggccacac

SEQ ID NO: 8748 - DNA, 25 bp, synthetic construct
  misc_feature 1..25: note = Oligonucleotide
  source 1..25: mol_type = other DNA
agagcagaacttcctgaagaggcca

SEQ ID NO: 8749 - DNA, 25 bp, synthetic construct
  misc_feature 1..25: note = Oligonucleotide
  source 1..25: mol_type = other DNA
tccagagcagaacttcctgaagagg

SEQ ID NO: 8750 - DNA, 25 bp, synthetic construct
  misc_feature 1..25: note = Oligonucleotide
  source 1..25: mol_type = other DNA
agatccagagcagaacttcctgaag

SEQ ID NO: 8751 - DNA, 25 bp, synthetic construct
  misc_feature 1..25: note = Oligonucleotide
  source 1..25: mol_type = other DNA
ctcagatccagagcagaacttcctg

SEQ ID NO: 8752 - DNA, 25 bp, synthetic construct
  misc_feature 1..25: note = Oligonucleotide
  source 1..25: mol_type = other DNA
ctgctcagatccagagcagaacttc

SEQ ID NO: 8753 - DNA, 25 bp, synthetic construct
  misc_feature 1..25: note = Oligonucleotide
  source 1..25: mol_type = other DNA
cagctgctcagatccagagcagaac

SEQ ID NO: 8754 - DNA, 25 bp, synthetic construct
  misc_feature 1..25: note = Oligonucleotide
  source 1..25: mol_type = other DNA
tcccagctgctcagatccagagcag

SEQ ID NO: 8755 - DNA, 25 bp, synthetic construct
  misc_feature 1..25: note = Oligonucleotide
  source 1..25: mol_type = other DNA
tcctcccagctgctcagatccagag

SEQ ID NO: 8756 - DNA, 25 bp, synthetic construct
  misc_feature 1..25: note = Oligonucleotide
  source 1..25: mol_type = other DNA
gcctcctcccagctgctcagatcca

SEQ ID NO: 8757 - DNA, 25 bp, synthetic construct
  misc_feature 1..25: note = Oligonucleotide
  source 1..25: mol_type = other DNA
actgcctcctcccagctgctcagat

SEQ ID NO: 8758 - DNA, 25 bp, synthetic construct
  misc_feature 1..25: note = Oligonucleotide
  source 1..25: mol_type = other DNA
cctactgcctcctcccagctgctca

SEQ ID NO: 8759 - DNA, 25 bp, synthetic construct
  misc_feature 1..25: note = Oligonucleotide
  source 1..25: mol_type = other DNA
gtccctactgcctcctcccagctgc

SEQ ID NO: 8760 - DNA, 25 bp, synthetic construct
  misc_feature 1..25: note = Oligonucleotide
  source 1..25: mol_type = other DNA
tctgtccctactgcctcctcccagc

SEQ ID NO: 8761 - DNA, 25 bp, synthetic construct
  misc_feature 1..25: note = Oligonucleotide
  source 1..25: mol_type = other DNA
gcctctgtccctactgcctcctccc

SEQ ID NO: 8762 - DNA, 25 bp, synthetic construct
  misc_feature 1..25: note = Oligonucleotide
  source 1..25: mol_type = other DNA
tcagcctctgtccctactgcctcct

SEQ ID NO: 8763 - DNA, 25 bp, synthetic construct
  misc_feature 1..25: note = Oligonucleotide
  source 1..25: mol_type = other DNA
tcctcagcctctgtccctactgcct

SEQ ID NO: 8764 - DNA, 25 bp, synthetic construct
  misc_feature 1..25: note = Oligonucleotide
  source 1..25: mol_type = other DNA
ctctcctcagcctctgtccctactg

SEQ ID NO: 8765 - DNA, 25 bp, synthetic construct
  misc_feature 1..25: note = Oligonucleotide
  source 1..25: mol_type = other DNA
gtcctctcctcagcctctgtcccta

SEQ ID NO: 8766 - DNA, 25 bp, synthetic construct
  misc_feature 1..25: note = Oligonucleotide
  source 1..25: mol_type = other DNA
tctgtcctctcctcagcctctgtcc

SEQ ID NO: 8767 - DNA, 25 bp, synthetic construct
  misc_feature 1..25: note = Oligonucleotide
  source 1..25: mol_type = other DNA
atttctgtcctctcctcagcctctg

SEQ ID NO: 8768 - DNA, 25 bp, synthetic construct
  misc_feature 1..25: note = Oligonucleotide
  source 1..25: mol_type = other DNA
ctcatttctgtcctctcctcagcct

SEQ ID NO: 8769 - DNA, 25 bp, synthetic construct
  misc_feature 1..25: note = Oligonucleotide
  source 1..25: mol_type = other DNA
gacctcatttctgtcctctcctcag

SEQ ID NO: 8770 - DNA, 25 bp, synthetic construct
  misc_feature 1..25: note = Oligonucleotide
  source 1..25: mol_type = other DNA
tgggacctcatttctgtcctctcct

SEQ ID NO: 8771 - DNA, 25 bp, synthetic construct
  misc_feature 1..25: note = Oligonucleotide
  source 1..25: mol_type = other DNA
ccatgggacctcatttctgtcctct

SEQ ID NO: 8772 - DNA, 25 bp, synthetic construct
  misc_feature 1..25: note = Oligonucleotide
  source 1..25: mol_type = other DNA
ctcccatgggacctcatttctgtcc

SEQ ID NO: 8773 - DNA, 25 bp, synthetic construct
  misc_feature 1..25: note = Oligonucleotide
  source 1..25: mol_type = other DNA
tctctcccatgggacctcatttctg

SEQ ID NO: 8774 - DNA, 25 bp, synthetic construct
  misc_feature 1..25: note = Oligonucleotide
  source 1..25: mol_type = other DNA
ctgtctctcccatgggacctcattt

SEQ ID NO: 8775 - DNA, 25 bp, synthetic construct
  misc_feature 1..25: note = Oligonucleotide
  source 1..25: mol_type = other DNA
gctctgtctctcccatgggacctca

SEQ ID NO: 8776 - DNA, 25 bp, synthetic construct
  misc_feature 1..25: note = Oligonucleotide
  source 1..25: mol_type = other DNA
tgagctctgtctctcccatgggacc

SEQ ID NO: 8777 - DNA, 25 bp, synthetic construct
  misc_feature 1..25: note = Oligonucleotide
  source 1..25: mol_type = other DNA
atctgagctctgtctctcccatggg

SEQ ID NO: 8778 - DNA, 25 bp, synthetic construct
  misc_feature 1..25: note = Oligonucleotide
  source 1..25: mol_type = other DNA
gagatctgagctctgtctctcccat

SEQ ID NO: 8779 - DNA, 25 bp, synthetic construct
  misc_feature 1..25: note = Oligonucleotide
  source 1..25: mol_type = other DNA
gtggagatctgagctctgtctctcc

SEQ ID NO: 8780 - DNA, 25 bp, synthetic construct
  misc_feature 1..25: note = Oligonucleotide
  source 1..25: mol_type = other DNA
tctgtggagatctgagctctgtctc

SEQ ID NO: 8781 - DNA, 25 bp, synthetic construct
  misc_feature 1..25: note = Oligonucleotide
  source 1..25: mol_type = other DNA
ccctctgtggagatctgagctctgt

SEQ ID NO: 8782 - DNA, 25 bp, synthetic construct
  misc_feature 1..25: note = Oligonucleotide
  source 1..25: mol_type = other DNA
cagccctctgtggagatctgagctc

SEQ ID NO: 8783 - DNA, 25 bp, synthetic construct
  misc_feature 1..25: note = Oligonucleotide
  source 1..25: mol_type = other DNA
ggtcagccctctgtggagatctgag

SEQ ID NO: 8784 - DNA, 25 bp, synthetic construct
  misc_feature 1..25: note = Oligonucleotide
  source 1..25: mol_type = other DNA
agaggtcagccctctgtggagatct

SEQ ID NO: 8785 - DNA, 25 bp, synthetic construct
  misc_feature 1..25: note = Oligonucleotide
  source 1..25: mol_type = other DNA
gtgagaggtcagccctctgtggaga

SEQ ID NO: 8786 - DNA, 25 bp, synthetic construct
  misc_feature 1..25: note = Oligonucleotide
  source 1..25: mol_type = other DNA
cctgtgagaggtcagccctctgtgg

SEQ ID NO: 8787 - DNA, 25 bp, synthetic construct
  misc_feature 1..25: note = Oligonucleotide
  source 1..25: mol_type = other DNA
ccacctgtgagaggtcagccctctg

SEQ ID NO: 8788 - DNA, 25 bp, synthetic construct
  misc_feature 1..25: note = Oligonucleotide
  source 1..25: mol_type = other DNA
ctcccacctgtgagaggtcagccct

SEQ ID NO: 8789 - DNA, 25 bp, synthetic construct
  misc_feature 1..25: note = Oligonucleotide
  source 1..25: mol_type = other DNA
tgtctcccacctgtgagaggtcagc

SEQ ID NO: 8790 - DNA, 25 bp, synthetic construct
  misc_feature 1..25: note = Oligonucleotide
  source 1..25: mol_type = other DNA
ttttgtctcccacctgtgagaggtc

SEQ ID NO: 8791 - DNA, 25 bp, synthetic construct
  misc_feature 1..25: note = Oligonucleotide
  source 1..25: mol_type = other DNA
gtcttttgtctcccacctgtgagag

SEQ ID NO: 8792 - DNA, 25 bp, synthetic construct
  misc_feature 1..25: note = Oligonucleotide
  source 1..25: mol_type = other DNA
ttcgtcttttgtctcccacctgtga

SEQ ID NO: 8793 - DNA, 25 bp, synthetic construct
  misc_feature 1..25: note = Oligonucleotide
  source 1..25: mol_type = other DNA
ggtttcgtcttttgtctcccacctg

SEQ ID NO: 8794 - DNA, 25 bp, synthetic construct
  misc_feature 1..25: note = Oligonucleotide
  source 1..25: mol_type = other DNA
gcaggtttcgtcttttgtctcccac

SEQ ID NO: 8795 - DNA, 25 bp, synthetic construct
  misc_feature 1..25: note = Oligonucleotide
  source 1..25: mol_type = other DNA
aaagcaggtttcgtcttttgtctcc

SEQ ID NO: 8796 - DNA, 25 bp, synthetic construct
  misc_feature 1..25: note = Oligonucleotide
  source 1..25: mol_type = other DNA
cttaaagcaggtttcgtcttttgtc

SEQ ID NO: 8797 - DNA, 25 bp, synthetic construct
  misc_feature 1..25: note = Oligonucleotide
  source 1..25: mol_type = other DNA
ccccttaaagcaggtttcgtctttt

SEQ ID NO: 8798 - DNA, 25 bp, synthetic construct
  misc_feature 1..25: note = Oligonucleotide
  source 1..25: mol_type = other DNA
gctccccttaaagcaggtttcgtct

SEQ ID NO: 8799 - DNA, 25 bp, synthetic construct
  misc_feature 1..25: note = Oligonucleotide
  source 1..25: mol_type = other DNA
ggggctccccttaaagcaggtttcg

SEQ ID NO: 8800 - DNA, 25 bp, synthetic construct
  misc_feature 1..25: note = Oligonucleotide
  source 1..25: mol_type = other DNA
catggggctccccttaaagcaggtt

SEQ ID NO: 8801 - DNA, 25 bp, synthetic construct
  misc_feature 1..25: note = Oligonucleotide
  source 1..25: mol_type = other DNA
acgcatggggctccccttaaagcag

SEQ ID NO: 8802 - DNA, 25 bp, synthetic construct
  misc_feature 1..25: note = Oligonucleotide
  source 1..25: mol_type = other DNA
cacacgcatggggctccccttaaag

SEQ ID NO: 8803 - DNA, 25 bp, synthetic construct
  misc_feature 1..25: note = Oligonucleotide
  source 1..25: mol_type = other DNA
ccacacacgcatggggctcccctta

SEQ ID NO: 8804 - DNA, 25 bp, synthetic construct
  misc_feature 1..25: note = Oligonucleotide
  source 1..25: mol_type = other DNA
gccccacacacgcatggggctcccc

SEQ ID NO: 8805 - DNA, 25 bp, synthetic construct
  misc_feature 1..25: note = Oligonucleotide
  source 1..25: mol_type = other DNA
cctgccccacacacgcatggggctc

SEQ ID NO: 8806 - DNA, 25 bp, synthetic construct
  misc_feature 1..25: note = Oligonucleotide
  source 1..25: mol_type = other DNA
gtgcctgccccacacacgcatgggg

SEQ ID NO: 8807 - DNA, 25 bp, synthetic construct
  misc_feature 1..25: note = Oligonucleotide
  source 1..25: mol_type = other DNA
ccagtgcctgccccacacacgcatg

SEQ ID NO: 8808 - DNA, 25 bp, synthetic construct
  misc_feature 1..25: note = Oligonucleotide
  source 1..25: mol_type = other DNA
tcaccagtgcctgccccacacacgc

SEQ ID NO: 8809 - DNA, 25 bp, synthetic construct
  misc_feature 1..25: note = Oligonucleotide
  source 1..25: mol_type = other DNA
gcatcaccagtgcctgccccacaca

SEQ ID NO: 8810 - DNA, 25 bp, synthetic construct
  misc_feature 1..25: note = Oligonucleotide
  source 1..25: mol_type = other DNA
acagcatcaccagtgcctgccccac

SEQ ID NO: 8811 - DNA, 25 bp, synthetic construct
  misc_feature 1..25: note = Oligonucleotide
  source 1..25: mol_type = other DNA
cacacagcatcaccagtgcctgccc

SEQ ID NO: 8812 - DNA, 25 bp, synthetic construct
  misc_feature 1..25: note = Oligonucleotide
  source 1..25: mol_type = other DNA
caccacacagcatcaccagtgcctg

SEQ ID NO: 8813 - DNA, 25 bp, synthetic construct
  misc_feature 1..25: note = Oligonucleotide
  source 1..25: mol_type = other DNA
cctcaccacacagcatcaccagtgc

SEQ ID NO: 8814 - DNA, 25 bp, synthetic construct
  misc_feature 1..25: note = Oligonucleotide
  source 1..25: mol_type = other DNA
tgtcctcaccacacagcatcaccag

SEQ ID NO: 8815 - DNA, 25 bp, synthetic construct
  misc_feature 1..25: note = Oligonucleotide
  source 1..25: mol_type = other DNA
ggctgtcctcaccacacagcatcac

SEQ ID NO: 8816 - DNA, 25 bp, synthetic construct
  misc_feature 1..25: note = Oligonucleotide
  source 1..25: mol_type = other DNA
aaaggctgtcctcaccacacagcat

SEQ ID NO: 8817 - DNA, 25 bp, synthetic construct
  misc_feature 1..25: note = Oligonucleotide
  source 1..25: mol_type = other DNA
cttaaaggctgtcctcaccacacag

SEQ ID NO: 8818 - DNA, 25 bp, synthetic construct
  misc_feature 1..25: note = Oligonucleotide
  source 1..25: mol_type = other DNA
ccccttaaaggctgtcctcaccaca

SEQ ID NO: 8819 - DNA, 25 bp, synthetic construct
  misc_feature 1..25: note = Oligonucleotide
  source 1..25: mol_type = other DNA
gctccccttaaaggctgtcctcacc

SEQ ID NO: 8820 - DNA, 25 bp, synthetic construct
  misc_feature 1..25: note = Oligonucleotide
  source 1..25: mol_type = other DNA
ggggctccccttaaaggctgtcctc

SEQ ID NO: 8821 - DNA, 25 bp, synthetic construct
  misc_feature 1..25: note = Oligonucleotide
  source 1..25: mol_type = other DNA
catggggctccccttaaaggctgtc

SEQ ID NO: 8822 - DNA, 25 bp, synthetic construct
  misc_feature 1..25: note = Oligonucleotide
  source 1..25: mol_type = other DNA
aggcatggggctccccttaaaggct

SEQ ID NO: 8823 - DNA, 25 bp, synthetic construct
  misc_feature 1..25: note = Oligonucleotide
  source 1..25: mol_type = other DNA
tacaggcatggggctccccttaaag

SEQ ID NO: 8824 - DNA, 25 bp, synthetic construct
  misc_feature 1..25: note = Oligonucleotide
  source 1..25: mol_type = other DNA
ccatacaggcatggggctcccctta

SEQ ID NO: 8825 - DNA, 25 bp, synthetic construct
  misc_feature 1..25: note = Oligonucleotide
  source 1..25: mol_type = other DNA
gccccatacaggcatggggctcccc

SEQ ID NO: 8826 - DNA, 25 bp, synthetic construct
  misc_feature 1..25: note = Oligonucleotide
  source 1..25: mol_type = other DNA
cctgccccatacaggcatggggctc

SEQ ID NO: 8827 - DNA, 25 bp, synthetic construct
  misc_feature 1..25: note = Oligonucleotide
  source 1..25: mol_type = other DNA
gtccctgccccatacaggcatgggg

SEQ ID NO: 8828 - DNA, 25 bp, synthetic construct
  misc_feature 1..25: note = Oligonucleotide
  source 1..25: mol_type = other DNA
ccagtccctgccccatacaggcatg

SEQ ID NO: 8829 - DNA, 25 bp, synthetic construct
  misc_feature 1..25: note = Oligonucleotide
  source 1..25: mol_type = other DNA
tcaccagtccctgccccatacaggc

SEQ ID NO: 8830 - DNA, 25 bp, synthetic construct
  misc_feature 1..25: note = Oligonucleotide
  source 1..25: mol_type = other DNA
gcatcaccagtccctgccccataca

SEQ ID NO: 8831 - DNA, 25 bp, synthetic construct
  misc_feature 1..25: note = Oligonucleotide
  source 1..25: mol_type = other DNA
acagcatcaccagtccctgccccat

SEQ ID NO: 8832 - DNA, 25 bp, synthetic construct
  misc_feature 1..25: note = Oligonucleotide
  source 1..25: mol_type = other DNA
cacacagcatcaccagtccctgccc

SEQ ID NO: 8833 - DNA, 25 bp, synthetic construct
  misc_feature 1..25: note = Oligonucleotide
  source 1..25: mol_type = other DNA
caccacacagcatcaccagtccctg

SEQ ID NO: 8834 - DNA, 25 bp, synthetic construct
  misc_feature 1..25: note = Oligonucleotide
  source 1..25: mol_type = other DNA
cctcaccacacagcatcaccagtcc

SEQ ID NO: 8835 - DNA, 25 bp, synthetic construct
  misc_feature 1..25: note = Oligonucleotide
  source 1..25: mol_type = other DNA
tgtcctcaccacacagcatcaccag

SEQ ID NO: 8836 - DNA, 25 bp, synthetic construct
  misc_feature 1..25: note = Oligonucleotide
  source 1..25: mol_type = other DNA
tgctgtcctcaccacacagcatcac

SEQ ID NO: 8837 - DNA, 25 bp, synthetic construct
  misc_feature 1..25: note = Oligonucleotide
  source 1..25: mol_type = other DNA
ctgtgctgtcctcaccacacagcat

SEQ ID NO: 8838 - DNA, 25 bp, synthetic construct
  misc_feature 1..25: note = Oligonucleotide
  source 1..25: mol_type = other DNA
cctctgtgctgtcctcaccacacag

SEQ ID NO: 8839 - DNA, 25 bp, synthetic construct
  misc_feature 1..25: note = Oligonucleotide
  source 1..25: mol_type = other DNA
caacctctgtgctgtcctcaccaca

SEQ ID NO: 8840 - DNA, 25 bp, synthetic construct
  misc_feature 1..25: note = Oligonucleotide
  source 1..25: mol_type = other DNA
ccccaacctctgtgctgtcctcacc

SEQ ID NO: 8841 - DNA, 25 bp, synthetic construct
  misc_feature 1..25: note = Oligonucleotide
  source 1..25: mol_type = other DNA
ccaccccaacctctgtgctgtcctc

SEQ ID NO: 8842 - DNA, 25 bp, synthetic construct
  misc_feature 1..25: note = Oligonucleotide
  source 1..25: mol_type = other DNA
cccccaccccaacctctgtgctgtc

SEQ ID NO: 8843 - DNA, 25 bp, synthetic construct
  misc_feature 1..25: note = Oligonucleotide
  source 1..25: mol_type = other DNA
gtccccccaccccaacctctgtgct

SEQ ID NO: 8844 - DNA, 25 bp, synthetic construct
  misc_feature 1..25: note = Oligonucleotide
  source 1..25: mol_type = other DNA
tgagtccccccaccccaacctctgt

SEQ ID NO: 8845 - DNA, 25 bp, synthetic construct
  misc_feature 1..25: note = Oligonucleotide
  source 1..25: mol_type = other DNA
ggctgagtccccccaccccaacctc

SEQ ID NO: 8846 - DNA, 25 bp, synthetic construct
  misc_feature 1..25: note = Oligonucleotide
  source 1..25: mol_type = other DNA
ccaggctgagtccccccaccccaac

SEQ ID NO: 8847 - DNA, 25 bp, synthetic construct
  misc_feature 1..25: note = Oligonucleotide
  source 1..25: mol_type = other DNA
tgcccaggctgagtccccccacccc

SEQ ID NO: 8848 - DNA, 25 bp, synthetic construct
  misc_feature 1..25: note = Oligonucleotide
  source 1..25: mol_type = other DNA
ccctgcccaggctgagtccccccac

SEQ ID NO: 8849 - DNA, 25 bp, synthetic construct
  misc_feature 1..25: note = Oligonucleotide
  source 1..25: mol_type = other DNA
tgcccctgcccaggctgagtccccc

SEQ ID NO: 8850 - DNA, 25 bp, synthetic construct
  misc_feature 1..25: note = Oligonucleotide
  source 1..25: mol_type = other DNA
ccctgcccctgcccaggctgagtcc

SEQ ID NO: 8851 - DNA, 25 bp, synthetic construct
  misc_feature 1..25: note = Oligonucleotide
  source 1..25: mol_type = other DNA
tctccctgcccctgcccaggctgag

SEQ ID NO: 8852 - DNA, 25 bp, synthetic construct
  misc_feature 1..25: note = Oligonucleotide
  source 1..25: mol_type = other DNA
ccctctccctgcccctgcccaggct

SEQ ID NO: 8853 - DNA, 25 bp, synthetic construct
  misc_feature 1..25: note = Oligonucleotide
  source 1..25: mol_type = other DNA
accccctctccctgcccctgcccag

SEQ ID NO: 8854 - DNA, 25 bp, synthetic construct
  misc_feature 1..25: note = Oligonucleotide
  source 1..25: mol_type = other DNA
cccaccccctctccctgcccctgcc

SEQ ID NO: 8855 - DNA, 25 bp, synthetic construct
  misc_feature 1..25: note = Oligonucleotide
  source 1..25: mol_type = other DNA
cctcccaccccctctccctgcccct

SEQ ID NO: 8856 - DNA, 25 bp, synthetic construct
  misc_feature 1..25: note = Oligonucleotide
  source 1..25: mol_type = other DNA
ggccctcccaccccctctccctgcc

SEQ ID NO: 8857 - DNA, 25 bp, synthetic construct
  misc_feature 1..25: note = Oligonucleotide
  source 1..25: mol_type = other DNA
agtggccctcccaccccctctccct

SEQ ID NO: 8858 - DNA, 25 bp, synthetic construct
  misc_feature 1..25: note = Oligonucleotide
  source 1..25: mol_type = other DNA
tccagtggccctcccaccccctctc

SEQ ID NO: 8859 - DNA, 25 bp, synthetic construct
  misc_feature 1..25: note = Oligonucleotide
  source 1..25: mol_type = other DNA
ctctccagtggccctcccaccccct

SEQ ID NO: 8860 - DNA, 25 bp, synthetic construct
  misc_feature 1..25: note = Oligonucleotide
  source 1..25: mol_type = other DNA
cccctctccagtggccctcccaccc

SEQ ID NO: 8861 - DNA, 25 bp, synthetic construct
  misc_feature 1..25: note = Oligonucleotide
  source 1..25: mol_type = other DNA
gggcccctctccagtggccctccca

SEQ ID NO: 8862 - DNA, 25 bp, synthetic construct
  misc_feature 1..25: note = Oligonucleotide
  source 1..25: mol_type = other DNA
gccgggcccctctccagtggccctc

SEQ ID NO: 8863 - DNA, 25 bp, synthetic construct
  misc_feature 1..25: note = Oligonucleotide
  source 1..25: mol_type = other DNA
ttggccgggcccctctccagtggcc

SEQ ID NO: 8864 - DNA, 25 bp, synthetic construct
  misc_feature 1..25: note = Oligonucleotide
  source 1..25: mol_type = other DNA
tctttggccgggcccctctccagtg

SEQ ID NO: 8865 - DNA, 25 bp, synthetic construct
  misc_feature 1..25: note = Oligonucleotide
  source 1..25: mol_type = other DNA
tcctctttggccgggcccctctcca

SEQ ID NO: 8866 - DNA, 25 bp, synthetic construct
  misc_feature 1..25: note = Oligonucleotide
  source 1..25: mol_type = other DNA
acatcctctttggccgggcccctct

SEQ ID NO: 8867 - DNA, 25 bp, synthetic construct
  misc_feature 1..25: note = Oligonucleotide
  source 1..25: mol_type = other DNA
ctgacatcctctttggccgggcccc

SEQ ID NO: 8868 - DNA, 25 bp, synthetic construct
  misc_feature 1..25: note = Oligonucleotide
  source 1..25: mol_type = other DNA
cccctgacatcctctttggccgggc

SEQ ID NO: 8869 - DNA, 25 bp, synthetic construct
  misc_feature 1..25: note = Oligonucleotide
  source 1..25: mol_type = other DNA
gagcccctgacatcctctttggccg

SEQ ID NO: 8870 - DNA, 25 bp, synthetic construct
  misc_feature 1..25: note = Oligonucleotide
  source 1..25: mol_type = other DNA
gctgagcccctgacatcctctttgg

SEQ ID NO: 8871 - DNA, 25 bp, synthetic construct
  misc_feature 1..25: note = Oligonucleotide
  source 1..25: mol_type = other DNA
ggtgctgagcccctgacatcctctt

SEQ ID NO: 8872 - DNA, 25 bp, synthetic construct
  misc_feature 1..25: note = Oligonucleotide
  source 1..25: mol_type = other DNA
gggggtgctgagcccctgacatcct

SEQ ID NO: 8873 - DNA, 25 bp, synthetic construct
  misc_feature 1..25: note = Oligonucleotide
  source 1..25: mol_type = other DNA
cctgggggtgctgagcccctgacat

SEQ ID NO: 8874 - DNA, 25 bp, synthetic construct
  misc_feature 1..25: note = Oligonucleotide
  source 1..25: mol_type = other DNA
ccgcctgggggtgctgagcccctga

SEQ ID NO: 8875 - DNA, 25 bp, synthetic construct
  misc_feature 1..25: note = Oligonucleotide
  source 1..25: mol_type = other DNA
tggccgcctgggggtgctgagcccc

SEQ ID NO: 8876 - DNA, 25 bp, synthetic construct
  misc_feature 1..25: note = Oligonucleotide
  source 1..25: mol_type = other DNA
gcctggccgcctgggggtgctgagc

SEQ ID NO: 8877 - DNA, 25 bp, synthetic construct
  misc_feature 1..25: note = Oligonucleotide
  source 1..25: mol_type = other DNA
ggtgcctggccgcctgggggtgctg

SEQ ID NO: 8878 - DNA, 25 bp, synthetic construct
  misc_feature 1..25: note = Oligonucleotide
  source 1..25: mol_type = other DNA
gcaggtgcctggccgcctgggggtg

SEQ ID NO: 8879 - DNA, 25 bp, synthetic construct
  misc_feature 1..25: note = Oligonucleotide
  source 1..25: mol_type = other DNA
tcggcaggtgcctggccgcctgggg

SEQ ID NO: 8880 - DNA, 25 bp, synthetic construct
  misc_feature 1..25: note = Oligonucleotide
  source 1..25: mol_type = other DNA
tgctcggcaggtgcctggccgcctg

SEQ ID NO: 8881 - DNA, 25 bp, synthetic construct
  misc_feature 1..25: note = Oligonucleotide
  source 1..25: mol_type = other DNA
cagtgctcggcaggtgcctggccgc

SEQ ID NO: 8882 - DNA, 25 bp, synthetic construct
  misc_feature 1..25: note = Oligonucleotide
  source 1..25: mol_type = other DNA
ctgcagtgctcggcaggtgcctggc

SEQ ID NO: 8883 - DNA, 25 bp, synthetic construct
  misc_feature 1..25: note = Oligonucleotide
  source 1..25: mol_type = other DNA
tggctgcagtgctcggcaggtgcct

SEQ ID NO: 8884 - DNA, 25 bp, synthetic construct
  misc_feature 1..25: note = Oligonucleotide
  source 1..25: mol_type = other DNA
gcgtggctgcagtgctcggcaggtg

SEQ ID NO: 8885 - DNA, 25 bp, synthetic construct
  misc_feature 1..25: note = Oligonucleotide
  source 1..25: mol_type = other DNA
caagcgtggctgcagtgctcggcag

SEQ ID NO: 8886 - DNA, 25 bp, synthetic construct
  misc_feature 1..25: note = Oligonucleotide
  source 1..25: mol_type = other DNA
ccacaagcgtggctgcagtgctcgg

SEQ ID NO: 8887 - DNA, 25 bp, synthetic construct
  misc_feature 1..25: note = Oligonucleotide
  source 1..25: mol_type = other DNA
gaaccacaagcgtggctgcagtgct

SEQ ID NO: 8888 - DNA, 25 bp, synthetic construct
  misc_feature 1..25: note = Oligonucleotide
  source 1..25: mol_type = other DNA
ggtgaaccacaagcgtggctgcagt

SEQ ID NO: 8889 - DNA, 25 bp, synthetic construct
  misc_feature 1..25: note = Oligonucleotide
  source 1..25: mol_type = other DNA
gcaggtgaaccacaagcgtggctgc

SEQ ID NO: 8890 - DNA, 25 bp, synthetic construct
  misc_feature 1..25: note = Oligonucleotide
  source 1..25: mol_type = other DNA
agtgcaggtgaaccacaagcgtggc

SEQ ID NO: 8891 - DNA, 25 bp, synthetic construct
  misc_feature 1..25: note = Oligonucleotide
  source 1..25: mol_type = other DNA
ccaagtgcaggtgaaccacaagcgt

SEQ ID NO: 8892 - DNA, 25 bp, synthetic construct
  misc_feature 1..25: note = Oligonucleotide
  source 1..25: mol_type = other DNA
tctccaagtgcaggtgaaccacaag

SEQ ID NO: 8893 - DNA, 25 bp, synthetic construct
  misc_feature 1..25: note = Oligonucleotide
  source 1..25: mol_type = other DNA
gagtctccaagtgcaggtgaaccac

SEQ ID NO: 8894 - DNA, 25 bp, synthetic construct
  misc_feature 1..25: note = Oligonucleotide
  source 1..25: mol_type = other DNA
cgagagtctccaagtgcaggtgaac

SEQ ID NO: 8895 - DNA, 25 bp, synthetic construct
  misc_feature 1..25: note = Oligonucleotide
  source 1..25: mol_type = other DNA
gtgcgagagtctccaagtgcaggtg

SEQ ID NO: 8896 - DNA, 25 bp, synthetic construct
  misc_feature 1..25: note = Oligonucleotide
  source 1..25: mol_type = other DNA
cctgtgcgagagtctccaagtgcag

SEQ ID NO: 8897 - DNA, 25 bp, synthetic construct
  misc_feature 1..25: note = Oligonucleotide
  source 1..25: mol_type = other DNA
gcgcctgtgcgagagtctccaagtg

SEQ ID NO: 8898 - DNA, 25 bp, synthetic construct
  misc_feature 1..25: note = Oligonucleotide
  source 1..25: mol_type = other DNA
gaggcgcctgtgcgagagtctccaa

SEQ ID NO: 8899 - DNA, 25 bp, synthetic construct
  misc_feature 1..25: note = Oligonucleotide
  source 1..25: mol_type = other DNA
ggagaggcgcctgtgcgagagtctc

SEQ ID NO: 8900 - DNA, 25 bp, synthetic construct
  misc_feature 1..25: note = Oligonucleotide
  source 1..25: mol_type = other DNA
ggaggagaggcgcctgtgcgagagt

SEQ ID NO: 8901 - DNA, 25 bp, synthetic construct
  misc_feature 1..25: note = Oligonucleotide
  source 1..25: mol_type = other DNA
ggtggaggagaggcgcctgtgcgag

SEQ ID NO: 8902 - DNA, 25 bp, synthetic construct
  misc_feature 1..25: note = Oligonucleotide
  source 1..25: mol_type = other DNA
gctggtggaggagaggcgcctgtgc

SEQ ID NO: 8903 - DNA, 25 bp, synthetic construct
  misc_feature 1..25: note = Oligonucleotide
  source 1..25: mol_type = other DNA
gctgctggtggaggagaggcgcctg

SEQ ID NO: 8904 - DNA, 25 bp, synthetic construct
  misc_feature 1..25: note = Oligonucleotide
  source 1..25: mol_type = other DNA
ggagctgctggtggaggagaggcgc

SEQ ID NO: 8905 - DNA, 25 bp, synthetic construct
  misc_feature 1..25: note = Oligonucleotide
  source 1..25: mol_type = other DNA
gctggagctgctggtggaggagagg

SEQ ID NO: 8906 - DNA, 25 bp, synthetic construct
  misc_feature 1..25: note = Oligonucleotide
  source 1..25: mol_type = other DNA
aaagctggagctgctggtggaggag

SEQ ID NO: 8907 - DNA, 25 bp, synthetic construct
  misc_feature 1..25: note = Oligonucleotide
  source 1..25: mol_type = other DNA
gacaaagctggagctgctggtggag

SEQ ID NO: 8908 - DNA, 25 bp, synthetic construct
  misc_feature 1..25: note = Oligonucleotide
  source 1..25: mol_type = other DNA
agggacaaagctggagctgctggtg

SEQ ID NO: 8909 - DNA, 25 bp, synthetic construct
  misc_feature 1..25: note = Oligonucleotide
  source 1..25: mol_type = other DNA
gggagggacaaagctggagctgctg

SEQ ID NO: 8910 - DNA, 25 bp, synthetic construct
  misc_feature 1..25: note = Oligonucleotide
  source 1..25: mol_type = other DNA
tgtgggagggacaaagctggagctg

SEQ ID NO: 8911 - DNA, 25 bp, synthetic construct
  misc_feature 1..25: note = Oligonucleotide
  source 1..25: mol_type = other DNA
tgctgtgggagggacaaagctggag

SEQ ID NO: 8912 - DNA, 25 bp, synthetic construct
  misc_feature 1..25: note = Oligonucleotide
  source 1..25: mol_type = other DNA
agctgctgtgggagggacaaagctg

SEQ ID NO: 8913 - DNA, 25 bp, synthetic construct
  misc_feature 1..25: note = Oligonucleotide
  source 1..25: mol_type = other DNA
cccagctgctgtgggagggacaaag

SEQ ID NO: 8914 - DNA, 25 bp, synthetic construct
  misc_feature 1..25: note = Oligonucleotide
  source 1..25: mol_type = other DNA
gggcccagctgctgtgggagggaca

SEQ ID NO: 8915 - DNA, 25 bp, synthetic construct
  misc_feature 1..25: note = Oligonucleotide
  source 1..25: mol_type = other DNA
agagggcccagctgctgtgggaggg

SEQ ID NO: 8916 - DNA, 25 bp, synthetic construct
  misc_feature 1..25: note = Oligonucleotide
  source 1..25: mol_type = other DNA
tgcagagggcccagctgctgtggga

SEQ ID NO: 8917 - DNA, 25 bp, synthetic construct
  misc_feature 1..25: note = Oligonucleotide
  source 1..25: mol_type = other DNA
aggtgcagagggcccagctgctgtg

SEQ ID NO: 8918 - DNA, 25 bp, synthetic construct
  misc_feature 1..25: note = Oligonucleotide
  source 1..25: mol_type = other DNA
ctcaggtgcagagggcccagctgct

SEQ ID NO: 8919 - DNA, 25 bp, synthetic construct
  misc_feature 1..25: note = Oligonucleotide
  source 1..25: mol_type = other DNA
gaactcaggtgcagagggcccagct

SEQ ID NO: 8920 - DNA, 25 bp, synthetic construct
  misc_feature 1..25: note = Oligonucleotide
  source 1..25: mol_type = other DNA
gaggaactcaggtgcagagggccca

SEQ ID NO: 8921 - DNA, 25 bp, synthetic construct
  misc_feature 1..25: note = Oligonucleotide
  source 1..25: mol_type = other DNA
agggaggaactcaggtgcagagggc

SEQ ID NO: 8922 - DNA, 25 bp, synthetic construct
  misc_feature 1..25: note = Oligonucleotide
  source 1..25: mol_type = other DNA
tggagggaggaactcaggtgcagag

SEQ ID NO: 8923 - DNA, 25 bp, synthetic construct
  misc_feature 1..25: note = Oligonucleotide
  source 1..25: mol_type = other DNA
gtgtggagggaggaactcaggtgca

SEQ ID NO: 8924 - DNA, 25 bp, synthetic construct
  misc_feature 1..25: note = Oligonucleotide
  source 1..25: mol_type = other DNA
caggtgtggagggaggaactcaggt

SEQ ID NO: 8925 - DNA, 25 bp, synthetic construct
  misc_feature 1..25: note = Oligonucleotide
  source 1..25: mol_type = other DNA
agccaggtgtggagggaggaactca

SEQ ID NO: 8926 - DNA, 25 bp, synthetic construct
  misc_feature 1..25: note = Oligonucleotide
  source 1..25: mol_type = other DNA
ggcagccaggtgtggagggaggaac

SEQ ID NO: 8927 - DNA, 25 bp, synthetic construct
  misc_feature 1..25: note = Oligonucleotide
  source 1..25: mol_type = other DNA
atgggcagccaggtgtggagggagg

SEQ ID NO: 8928 - DNA, 25 bp, synthetic construct
  misc_feature 1..25: note = Oligonucleotide
  source 1..25: mol_type = other DNA
acaatgggcagccaggtgtggaggg

SEQ ID NO: 8929 - DNA, 25 bp, synthetic construct
  misc_feature 1..25: note = Oligonucleotide
  source 1..25: mol_type = other DNA
cacacaatgggcagccaggtgtgga

SEQ ID NO: 8930 - DNA, 25 bp, synthetic construct
  misc_feature 1..25: note = Oligonucleotide
  source 1..25: mol_type = other DNA
aaccacacaatgggcagccaggtgt

SEQ ID NO: 8931 - DNA, 25 bp, synthetic construct
  misc_feature 1..25: note = Oligonucleotide
  source 1..25: mol_type = other DNA
tgcaaccacacaatgggcagccagg

SEQ ID NO: 8932 - DNA, 25 bp, synthetic construct
  misc_feature 1..25: note = Oligonucleotide
  source 1..25: mol_type = other DNA
agctgcaaccacacaatgggcagcc

SEQ ID NO: 8933 - DNA, 25 bp, synthetic construct
  misc_feature 1..25: note = Oligonucleotide
  source 1..25: mol_type = other DNA
cacagctgcaaccacacaatgggca

SEQ ID NO: 8934 - DNA, 25 bp, synthetic construct
  misc_feature 1..25: note = Oligonucleotide
  source 1..25: mol_type = other DNA
acccacagctgcaaccacacaatgg

SEQ ID NO: 8935 - DNA, 25 bp, synthetic construct
  misc_feature 1..25: note = Oligonucleotide
  source 1..25: mol_type = other DNA
gcgacccacagctgcaaccacacaa

SEQ ID NO: 8936 - DNA, 25 bp, synthetic construct
  misc_feature 1..25: note = Oligonucleotide
  source 1..25: mol_type = other DNA
cacgcgacccacagctgcaaccaca

SEQ ID NO: 8937 - DNA, 25 bp, synthetic construct
  misc_feature 1..25: note = Oligonucleotide
  source 1..25: mol_type = other DNA
gcccacgcgacccacagctgcaacc

SEQ ID NO: 8938 - DNA, 25 bp, synthetic construct
  misc_feature 1..25: note = Oligonucleotide
  source 1..25: mol_type = other DNA
caggcccacgcgacccacagctgca

SEQ ID NO: 8939 - DNA, 25 bp, synthetic construct
  misc_feature 1..25: note = Oligonucleotide
  source 1..25: mol_type = other DNA
ggccaggcccacgcgacccacagct

SEQ ID NO: 8940 - DNA, 25 bp, synthetic construct
  misc_feature 1..25: note = Oligonucleotide
  source 1..25: mol_type = other DNA
gccggccaggcccacgcgacccaca

SEQ ID NO: 8941 - DNA, 25 bp, synthetic construct
  misc_feature 1..25: note = Oligonucleotide
  source 1..25: mol_type = other DNA
ttagccggccaggcccacgcgaccc

SEQ ID NO: 8942 - DNA, 25 bp, synthetic construct
  misc_feature 1..25: note = Oligonucleotide
  source 1..25: mol_type = other DNA
gagttagccggccaggcccacgcga

SEQ ID NO: 8943 - DNA, 25 bp, synthetic construct
  misc_feature 1..25: note = Oligonucleotide
  source 1..25: mol_type = other DNA
agagagttagccggccaggcccacg

SEQ ID NO: 8944 - DNA, 25 bp, synthetic construct
  misc_feature 1..25: note = Oligonucleotide
  source 1..25: mol_type = other DNA
gagagagagttagccggccaggccc

SEQ ID NO: 8945 - DNA, 25 bp, synthetic construct
  misc_feature 1..25: note = Oligonucleotide
  source 1..25: mol_type = other DNA
tgagagagagagttagccggccagg

SEQ ID NO: 8946 - DNA, 25 bp, synthetic construct
  misc_feature 1..25: note = Oligonucleotide
  source 1..25: mol_type = other DNA
caatgagagagagagttagccggcc

SEQ ID NO: 8947 - DNA, 25 bp, synthetic construct
  misc_feature 1..25: note = Oligonucleotide
  source 1..25: mol_type = other DNA
gagcaatgagagagagagttagccg

SEQ ID NO: 8948 - DNA, 25 bp, synthetic construct
  misc_feature 1..25: note = Oligonucleotide
  source 1..25: mol_type = other DNA
agagagcaatgagagagagagttag

SEQ ID NO: 8949 - DNA, 25 bp, synthetic construct
  misc_feature 1..25: note = Oligonucleotide
  source 1..25: mol_type = other DNA
aggagagagcaatgagagagagagt

SEQ ID NO: 8950 - DNA, 25 bp, synthetic construct
  misc_feature 1..25: note = Oligonucleotide
  source 1..25: mol_type = other DNA
ggcaggagagagcaatgagagagag

SEQ ID NO: 8951 - DNA, 25 bp, synthetic construct
  misc_feature 1..25: note = Oligonucleotide
  source 1..25: mol_type = other DNA
atgggcaggagagagcaatgagaga

SEQ ID NO: 8952 - DNA, 25 bp, synthetic construct
  misc_feature 1..25: note = Oligonucleotide
  source 1..25: mol_type = other DNA
cagatgggcaggagagagcaatgag

SEQ ID NO: 8953 - DNA, 25 bp, synthetic construct
  misc_feature 1..25: note = Oligonucleotide
  source 1..25: mol_type = other DNA
atgcagatgggcaggagagagcaat

SEQ ID NO: 8954 - DNA, 25 bp, synthetic construct
  misc_feature 1..25: note = Oligonucleotide
  source 1..25: mol_type = other DNA
cacatgcagatgggcaggagagagc

SEQ ID NO: 8955 - DNA, 25 bp, synthetic construct
  misc_feature 1..25: note = Oligonucleotide
  source 1..25: mol_type = other DNA
agccacatgcagatgggcaggagag

SEQ ID NO: 8956 - DNA, 25 bp, synthetic construct
  misc_feature 1..25: note = Oligonucleotide
  source 1..25: mol_type = other DNA
agcagccacatgcagatgggcagga

SEQ ID NO: 8957 - DNA, 25 bp, synthetic construct
  misc_feature 1..25: note = Oligonucleotide
  source 1..25: mol_type = other DNA
cagagcagccacatgcagatgggca

SEQ ID NO: 8958 - DNA, 25 bp, synthetic construct
  misc_feature 1..25: note = Oligonucleotide
  source 1..25: mol_type = other DNA
cgacagagcagccacatgcagatgg

SEQ ID NO: 8959 - DNA, 25 bp, synthetic construct
  misc_feature 1..25: note = Oligonucleotide
  source 1..25: mol_type = other DNA
gctcgacagagcagccacatgcaga

SEQ ID NO: 8960 - DNA, 25 bp, synthetic construct
  misc_feature 1..25: note = Oligonucleotide
  source 1..25: mol_type = other DNA
gcagctcgacagagcagccacatgc

SEQ ID NO: 8961 - DNA, 25 bp, synthetic construct
  misc_feature 1..25: note = Oligonucleotide
  source 1..25: mol_type = other DNA
ggcgcagctcgacagagcagccaca

SEQ ID NO: 8962 - DNA, 25 bp, synthetic construct
  misc_feature 1..25: note = Oligonucleotide
  source 1..25: mol_type = other DNA
cacggcgcagctcgacagagcagcc

SEQ ID NO: 8963 - DNA, 25 bp, synthetic construct
  misc_feature 1..25: note = Oligonucleotide
  source 1..25: mol_type = other DNA
gaccacggcgcagctcgacagagca

SEQ ID NO: 8964 - DNA, 25 bp, synthetic construct
  misc_feature 1..25: note = Oligonucleotide
  source 1..25: mol_type = other DNA
cgggaccacggcgcagctcgacaga

SEQ ID NO: 8965 - DNA, 25 bp, synthetic construct
  misc_feature 1..25: note = Oligonucleotide
  source 1..25: mol_type = other DNA
gctcgggaccacggcgcagctcgac

SEQ ID NO: 8966 - DNA, 25 bp, synthetic construct
  misc_feature 1..25: note = Oligonucleotide
  source 1..25: mol_type = other DNA
ggcgctcgggaccacggcgcagctc

SEQ ID NO: 8967 - DNA, 25 bp, synthetic construct
  misc_feature 1..25: note = Oligonucleotide
  source 1..25: mol_type = other DNA
gccggcgctcgggaccacggcgcag

SEQ ID NO: 8968 - DNA, 25 bp, synthetic construct
  misc_feature 1..25: note = Oligonucleotide
  source 1..25: mol_type = other DNA
acagccggcgctcgggaccacggcg

SEQ ID NO: 8969 - DNA, 25 bp, synthetic construct
  misc_feature 1..25: note = Oligonucleotide
  source 1..25: mol_type = other DNA
tacacagccggcgctcgggaccacg

SEQ ID NO: 8970 - DNA, 25 bp, synthetic construct
  misc_feature 1..25: note = Oligonucleotide
  source 1..25: mol_type = other DNA
acttacacagccggcgctcgggacc

SEQ ID NO: 8971 - DNA, 25 bp, synthetic construct
  misc_feature 1..25: note = Oligonucleotide
  source 1..25: mol_type = other DNA
ctcacttacacagccggcgctcggg

SEQ ID NO: 8972 - DNA, 25 bp, synthetic construct
  misc_feature 1..25: note = Oligonucleotide
  source 1..25: mol_type = other DNA
atgctcacttacacagccggcgctc

SEQ ID NO: 8973 - DNA, 25 bp, synthetic construct
  misc_feature 1..25: note = Oligonucleotide
  source 1..25: mol_type = other DNA
ggcatgctcacttacacagccggcg

SEQ ID NO: 8974 - DNA, 25 bp, synthetic construct
  misc_feature 1..25: note = Oligonucleotide
  source 1..25: mol_type = other DNA
atgggcatgctcacttacacagccg

SEQ ID NO: 8975 - DNA, 25 bp, synthetic construct
  misc_feature 1..25: note = Oligonucleotide
  source 1..25: mol_type = other DNA
gggatgggcatgctcacttacacag

SEQ ID NO: 8976 - DNA, 25 bp, synthetic construct
  misc_feature 1..25: note = Oligonucleotide
  source 1..25: mol_type = other DNA
catgggatgggcatgctcacttaca

SEQ ID NO: 8977 - DNA, 25 bp, synthetic construct
  misc_feature 1..25: note = Oligonucleotide
  source 1..25: mol_type = other DNA
aggcatgggatgggcatgctcactt

SEQ ID NO: 8978 - DNA, 25 bp, synthetic construct
  misc_feature 1..25: note = Oligonucleotide
  source 1..25: mol_type = other DNA
aagaggcatgggatgggcatgctca

SEQ ID NO: 8979 - DNA, 25 bp, synthetic construct
  misc_feature 1..25: note = Oligonucleotide
  source 1..25: mol_type = other DNA
ggcaagaggcatgggatgggcatgc

SEQ ID NO: 8980 - DNA, 25 bp, synthetic construct
  misc_feature 1..25: note = Oligonucleotide
  source 1..25: mol_type = other DNA
gacggcaagaggcatgggatgggca

SEQ ID NO: 8981 - DNA, 25 bp, synthetic construct
  misc_feature 1..25: note = Oligonucleotide
  source 1..25: mol_type = other DNA
gtggacggcaagaggcatgggatgg

SEQ ID NO: 8982 - DNA, 25 bp, synthetic construct
  misc_feature 1..25: note = Oligonucleotide
  source 1..25: mol_type = other DNA
cgtgtggacggcaagaggcatggga

SEQ ID NO: 8983 - DNA, 25 bp, synthetic construct
  misc_feature 1..25: note = Oligonucleotide
  source 1..25: mol_type = other DNA
cagcgtgtggacggcaagaggcatg

SEQ ID NO: 8984 - DNA, 25 bp, synthetic construct
  misc_feature 1..25: note = Oligonucleotide
  source 1..25: mol_type = other DNA
gcacagcgtgtggacggcaagaggc

SEQ ID NO: 8985 - DNA, 25 bp, synthetic construct
  misc_feature 1..25: note = Oligonucleotide
  source 1..25: mol_type = other DNA
caggcacagcgtgtggacggcaaga

SEQ ID NO: 8986 - DNA, 25 bp, synthetic construct
  misc_feature 1..25: note = Oligonucleotide
  source 1..25: mol_type = other DNA
agacaggcacagcgtgtggacggca

SEQ ID NO: 8987 - DNA, 25 bp, synthetic construct
  misc_feature 1..25: note = Oligonucleotide
  source 1..25: mol_type = other DNA
ggcagacaggcacagcgtgtggacg

SEQ ID NO: 8988 - DNA, 25 bp, synthetic construct
  misc_feature 1..25: note = Oligonucleotide
  source 1..25: mol_type = other DNA
ccaggcagacaggcacagcgtgtgg

SEQ ID NO: 8989 - DNA, 25 bp, synthetic construct
  misc_feature 1..25: note = Oligonucleotide
  source 1..25: mol_type = other DNA
gacccaggcagacaggcacagcgtg

SEQ ID NO: 8990 - DNA, 25 bp, synthetic construct
  misc_feature 1..25: note = Oligonucleotide
  source 1..25: mol_type = other DNA
agagacccaggcagacaggcacagc

SEQ ID NO: 8991 - DNA, 25 bp, synthetic construct
  misc_feature 1..25: note = Oligonucleotide
  source 1..25: mol_type = other DNA
agcagagacccaggcagacaggcac

SEQ ID NO: 8992 - DNA, 25 bp, synthetic construct
  misc_feature 1..25: note = Oligonucleotide
  source 1..25: mol_type = other DNA
cagagcagagacccaggcagacagg

SEQ ID NO: 8993 - DNA, 25 bp, synthetic construct
  misc_feature 1..25: note = Oligonucleotide
  source 1..25: mol_type = other DNA
acgcagagcagagacccaggcagac

SEQ ID NO: 8994 - DNA, 25 bp, synthetic construct
  misc_feature 1..25: note = Oligonucleotide
  source 1..25: mol_type = other DNA
gccacgcagagcagagacccaggca

SEQ ID NO: 8995 - DNA, 25 bp, synthetic construct
  misc_feature 1..25: note = Oligonucleotide
  source 1..25: mol_type = other DNA
acagccacgcagagcagagacccag

SEQ ID NO: 8996 - DNA, 25 bp, synthetic construct
  misc_feature 1..25: note = Oligonucleotide
  source 1..25: mol_type = other DNA
ctcacagccacgcagagcagagacc

SEQ ID NO: 8997 - DNA, 25 bp, synthetic construct
  misc_feature 1..25: note = Oligonucleotide
  source 1..25: mol_type = other DNA
cctctcacagccacgcagagcagag

SEQ ID NO: 8998 - DNA, 25 bp, synthetic construct
  misc_feature 1..25: note = Oligonucleotide
  source 1..25: mol_type = other DNA
gagcctctcacagccacgcagagca

SEQ ID NO: 8999 - DNA, 25 bp, synthetic construct
  misc_feature 1..25: note = Oligonucleotide
  source 1..25: mol_type = other DNA
ccagagcctctcacagccacgcaga

SEQ ID NO: 9000 - DNA, 25 bp, synthetic construct
  misc_feature 1..25: note = Oligonucleotide
  source 1..25: mol_type = other DNA
gcaccagagcctctcacagccacgc

SEQ ID NO: 9001 - DNA, 25 bp, synthetic construct
  misc_feature 1..25: note = Oligonucleotide
  source 1..25: mol_type = other DNA
gtggcaccagagcctctcacagcca

SEQ ID NO: 9002 - DNA, 25 bp, synthetic construct
  misc_feature 1..25: note = Oligonucleotide
  source 1..25: mol_type = other DNA
tcagtggcaccagagcctctcacag

SEQ ID NO: 9003 - DNA, 25 bp, synthetic construct
  misc_feature 1..25: note = Oligonucleotide
  source 1..25: mol_type = other DNA
ctgtcagtggcaccagagcctctca

SEQ ID NO: 9004 - DNA, 25 bp, synthetic construct
  misc_feature 1..25: note = Oligonucleotide
  source 1..25: mol_type = other DNA
gggctgtcagtggcaccagagcctc

SEQ ID NO: 9005 - DNA, 25 bp, synthetic construct
  misc_feature 1..25: note = Oligonucleotide
  source 1..25: mol_type = other DNA
aaggggctgtcagtggcaccagagc

SEQ ID NO: 9006 - DNA, 25 bp, synthetic construct
  misc_feature 1..25: note = Oligonucleotide
  source 1..25: mol_type = other DNA
ctcaaggggctgtcagtggcaccag

SEQ ID NO: 9007 - DNA, 25 bp, synthetic construct
  misc_feature 1..25: note = Oligonucleotide
  source 1..25: mol_type = other DNA
agcctcaaggggctgtcagtggcac

SEQ ID NO: 9008 - DNA, 25 bp, synthetic construct
  misc_feature 1..25: note = Oligonucleotide
  source 1..25: mol_type = other DNA
ggaagcctcaaggggctgtcagtgg

SEQ ID NO: 9009 - DNA, 25 bp, synthetic construct
  misc_feature 1..25: note = Oligonucleotide
  source 1..25: mol_type = other DNA
aggggaagcctcaaggggctgtcag

SEQ ID NO: 9010 - DNA, 25 bp, synthetic construct
  misc_feature 1..25: note = Oligonucleotide
  source 1..25: mol_type = other DNA
gtcaggggaagcctcaaggggctgt

SEQ ID NO: 9011 - DNA, 25 bp, synthetic construct
  misc_feature 1..25: note = Oligonucleotide
  source 1..25: mol_type = other DNA
tgtgtcaggggaagcctcaaggggc

SEQ ID NO: 9012 - DNA, 25 bp, synthetic construct
  misc_feature 1..25: note = Oligonucleotide
  source 1..25: mol_type = other DNA
cactgtgtcaggggaagcctcaagg

SEQ ID NO: 9013 - DNA, 25 bp, synthetic construct
  misc_feature 1..25: note = Oligonucleotide
  source 1..25: mol_type = other DNA
ccccactgtgtcaggggaagcctca

SEQ ID NO: 9014 - DNA, 25 bp, synthetic construct
  misc_feature 1..25: note = Oligonucleotide
  source 1..25: mol_type = other DNA
tatccccactgtgtcaggggaagcc

SEQ ID NO: 9015 - DNA, 25 bp, synthetic construct
  misc_feature 1..25: note = Oligonucleotide
  source 1..25: mol_type = other DNA
ccctatccccactgtgtcaggggaa

SEQ ID NO: 9016 - DNA, 25 bp, synthetic construct
  misc_feature 1..25: note = Oligonucleotide
  source 1..25: mol_type = other DNA
catccctatccccactgtgtcaggg

SEQ ID NO: 9017 - DNA, 25 bp, synthetic construct
  misc_feature 1..25: note = Oligonucleotide
  source 1..25: mol_type = other DNA
tcccatccctatccccactgtgtca

SEQ ID NO: 9018 - DNA, 25 bp, synthetic construct
  misc_feature 1..25: note = Oligonucleotide
  source 1..25: mol_type = other DNA
cattcccatccctatccccactgtg

SEQ ID NO: 9019 - DNA, 25 bp, synthetic construct
  misc_feature 1..25: note = Oligonucleotide
  source 1..25: mol_type = other DNA
tcccattcccatccctatccccact

SEQ ID NO: 9020 - DNA, 25 bp, synthetic construct
  misc_feature 1..25: note = Oligonucleotide
  source 1..25: mol_type = other DNA
tcctcccattcccatccctatcccc

SEQ ID NO: 9021 - DNA, 25 bp, synthetic construct
  misc_feature 1..25: note = Oligonucleotide
  source 1..25: mol_type = other DNA
atgtcctcccattcccatccctatc

SEQ ID NO: 9022 - DNA, 25 bp, synthetic construct
  misc_feature 1..25: note = Oligonucleotide
  source 1..25: mol_type = other DNA
cccatgtcctcccattcccatccct

SEQ ID NO: 9023 - DNA, 25 bp, synthetic construct
  misc_feature 1..25: note = Oligonucleotide
  source 1..25: mol_type = other DNA
actcccatgtcctcccattcccatc

SEQ ID NO: 9024 - DNA, 25 bp, synthetic construct
  misc_feature 1..25: note = Oligonucleotide
  source 1..25: mol_type = other DNA
cccactcccatgtcctcccattccc

SEQ ID NO: 9025 - DNA, 25 bp, synthetic construct
  misc_feature 1..25: note = Oligonucleotide
  source 1..25: mol_type = other DNA
aaacccactcccatgtcctcccatt

SEQ ID NO: 9026 - DNA, 25 bp, synthetic construct
  misc_feature 1..25: note = Oligonucleotide
  source 1..25: mol_type = other DNA
agaaaacccactcccatgtcctccc

SEQ ID NO: 9027 - DNA, 25 bp, synthetic construct
  misc_feature 1..25: note = Oligonucleotide
  source 1..25: mol_type = other DNA
cagagaaaacccactcccatgtcct

SEQ ID NO: 9028 - DNA, 25 bp, synthetic construct
  misc_feature 1..25: note = Oligonucleotide
  source 1..25: mol_type = other DNA
ctccagagaaaacccactcccatgt

SEQ ID NO: 9029 - DNA, 25 bp, synthetic construct
  misc_feature 1..25: note = Oligonucleotide
  source 1..25: mol_type = other DNA
tagctccagagaaaacccactccca

SEQ ID NO: 9030 - DNA, 25 bp, synthetic construct
  misc_feature 1..25: note = Oligonucleotide
  source 1..25: mol_type = other DNA
tgatagctccagagaaaacccactc

SEQ ID NO: 9031 - DNA, 25 bp, synthetic construct
  misc_feature 1..25: note = Oligonucleotide
  source 1..25: mol_type = other DNA
gggtgatagctccagagaaaaccca

SEQ ID NO: 9032 - DNA, 25 bp, synthetic construct
  misc_feature 1..25: note = Oligonucleotide
  source 1..25: mol_type = other DNA
ctggggtgatagctccagagaaaac

SEQ ID NO: 9033 - DNA, 25 bp, synthetic construct
  misc_feature 1..25: note = Oligonucleotide
  source 1..25: mol_type = other DNA
tacctggggtgatagctccagagaa

SEQ ID NO: 9034 - DNA, 25 bp, synthetic construct
  misc_feature 1..25: note = Oligonucleotide
  source 1..25: mol_type = other DNA
gcctacctggggtgatagctccaga

SEQ ID NO: 9035 - DNA, 25 bp, synthetic construct
  misc_feature 1..25: note = Oligonucleotide
  source 1..25: mol_type = other DNA
gaggcctacctggggtgatagctcc

SEQ ID NO: 9036 - DNA, 25 bp, synthetic construct
  misc_feature 1..25: note = Oligonucleotide
  source 1..25: mol_type = other DNA
tgggaggcctacctggggtgatagc

SEQ ID NO: 9037 - DNA, 25 bp, synthetic construct
  misc_feature 1..25: note = Oligonucleotide
  source 1..25: mol_type = other DNA
tggtgggaggcctacctggggtgat

SEQ ID NO: 9038 - DNA, 25 bp, synthetic construct
  misc_feature 1..25: note = Oligonucleotide
  source 1..25: mol_type = other DNA
ccgtggtgggaggcctacctggggt

SEQ ID NO: 9039 - DNA, 25 bp, synthetic construct
  misc_feature 1..25: note = Oligonucleotide
  source 1..25: mol_type = other DNA
ctgccgtggtgggaggcctacctgg

SEQ ID NO: 9040 - DNA, 25 bp, synthetic construct
  misc_feature 1..25: note = Oligonucleotide
  source 1..25: mol_type = other DNA
gctctgccgtggtgggaggcctacc

SEQ ID NO: 9041 - DNA, 25 bp, synthetic construct
  misc_feature 1..25: note = Oligonucleotide
  source 1..25: mol_type = other DNA
ttggctctgccgtggtgggaggcct

SEQ ID NO: 9042 - DNA, 25 bp, synthetic construct
  misc_feature 1..25: note = Oligonucleotide
  source 1..25: mol_type = other DNA
tccttggctctgccgtggtgggagg

SEQ ID NO: 9043 - DNA, 25 bp, synthetic construct
  misc_feature 1..25: note = Oligonucleotide
  source 1..25: mol_type = other DNA
ccctccttggctctgccgtggtggg

SEQ ID NO: 9044 - DNA, 25 bp, synthetic construct
  misc_feature 1..25: note = Oligonucleotide
  source 1..25: mol_type = other DNA
agcccctccttggctctgccgtggt

SEQ ID NO: 9045 - DNA, 25 bp, synthetic construct
  misc_feature 1..25: note = Oligonucleotide
  source 1..25: mol_type = other DNA
tctagcccctccttggctctgccgt

SEQ ID NO: 9046 - DNA, 25 bp, synthetic construct
  misc_feature 1..25: note = Oligonucleotide
  source 1..25: mol_type = other DNA
agctctagcccctccttggctctgc

SEQ ID NO: 9047 - DNA, 25 bp, synthetic construct
  misc_feature 1..25: note = Oligonucleotide
  source 1..25: mol_type = other DNA
tagagctctagcccctccttggctc

SEQ ID NO: 9048 - DNA, 25 bp, synthetic construct
  misc_feature 1..25: note = Oligonucleotide
  source 1..25: mol_type = other DNA
ccctagagctctagcccctccttgg

SEQ ID NO: 9049 - DNA, 25 bp, synthetic construct
  misc_feature 1..25: note = Oligonucleotide
  source 1..25: mol_type = other DNA
ggaccctagagctctagcccctcct

SEQ ID NO: 9050 - DNA, 25 bp, synthetic construct
  misc_feature 1..25: note = Oligonucleotide
  source 1..25: mol_type = other DNA
acaggaccctagagctctagcccct

SEQ ID NO: 9051 - DNA, 25 bp, synthetic construct
  misc_feature 1..25: note = Oligonucleotide
  source 1..25: mol_type = other DNA
ctgacaggaccctagagctctagcc

SEQ ID NO: 9052 - DNA, 25 bp, synthetic construct
  misc_feature 1..25: note = Oligonucleotide
  source 1..25: mol_type = other DNA
cacctgacaggaccctagagctcta

SEQ ID NO: 9053 - DNA, 25 bp, synthetic construct
  misc_feature 1..25: note = Oligonucleotide
  source 1..25: mol_type = other DNA
cctcacctgacaggaccctagagct

SEQ ID NO: 9054 - DNA, 25 bp, synthetic construct
  misc_feature 1..25: note = Oligonucleotide
  source 1..25: mol_type = other DNA
cagcctcacctgacaggaccctaga

SEQ ID NO: 9055 - DNA, 25 bp, synthetic construct
  misc_feature 1..25: note = Oligonucleotide
  source 1..25: mol_type = other DNA
tcccagcctcacctgacaggaccct

SEQ ID NO: 9056 - DNA, 25 bp, synthetic construct
  misc_feature 1..25: note = Oligonucleotide
  source 1..25: mol_type = other DNA
acttcccagcctcacctgacaggac

SEQ ID NO: 9057 - DNA, 25 bp, synthetic construct
  misc_feature 1..25: note = Oligonucleotide
  source 1..25: mol_type = other DNA
ctcacttcccagcctcacctgacag

SEQ ID NO: 9058 - DNA, 25 bp, synthetic construct
  misc_feature 1..25: note = Oligonucleotide
  source 1..25: mol_type = other DNA
cagctcacttcccagcctcacctga

SEQ ID NO: 9059 - DNA, 25 bp, synthetic construct
  misc_feature 1..25: note = Oligonucleotide
  source 1..25: mol_type = other DNA
tggcagctcacttcccagcctcacc

SEQ ID NO: 9060 - DNA, 25 bp, synthetic construct
  misc_feature 1..25: note = Oligonucleotide
  source 1..25: mol_type = other DNA
cgatggcagctcacttcccagcctc

SEQ ID NO: 9061 - DNA, 25 bp, synthetic construct
  misc_feature 1..25: note = Oligonucleotide
  source 1..25: mol_type = other DNA
aaccgatggcagctcacttcccagc

SEQ ID NO: 9062 - DNA, 25 bp, synthetic construct
  misc_feature 1..25: note = Oligonucleotide
  source 1..25: mol_type = other DNA
aagaaccgatggcagctcacttccc

SEQ ID NO: 9063 - DNA, 25 bp, synthetic construct
  misc_feature 1..25: note = Oligonucleotide
  source 1..25: mol_type = other DNA
cacaagaaccgatggcagctcactt

SEQ ID NO: 9064 - DNA, 25 bp, synthetic construct
  misc_feature 1..25: note = Oligonucleotide
  source 1..25: mol_type = other DNA
acacacaagaaccgatggcagctca

SEQ ID NO: 9065 - DNA, 25 bp, synthetic construct
  misc_feature 1..25: note = Oligonucleotide
  source 1..25: mol_type = other DNA
cacacacacaagaaccgatggcagc

SEQ ID NO: 9066 - DNA, 25 bp, synthetic construct
  misc_feature 1..25: note = Oligonucleotide
  source 1..25: mol_type = other DNA
acgcacacacacaagaaccgatggc

SEQ ID NO: 9067 - DNA, 25 bp, synthetic construct
  misc_feature 1..25: note = Oligonucleotide
  source 1..25: mol_type = other DNA
cgcacgcacacacacaagaaccgat

SEQ ID NO: 9068 - DNA, 25 bp, synthetic construct
  misc_feature 1..25: note = Oligonucleotide
  source 1..25: mol_type = other DNA
gcacgcacgcacacacacaagaacc

SEQ ID NO: 9069 - DNA, 25 bp, synthetic construct
  misc_feature 1..25: note = Oligonucleotide
  source 1..25: mol_type = other DNA
catgcacgcacgcacacacacaaga

SEQ ID NO: 9070 - DNA, 25 bp, synthetic construct
  misc_feature 1..25: note = Oligonucleotide
  source 1..25: mol_type = other DNA
acacatgcacgcacgcacacacaca

SEQ ID NO: 9071 - DNA, 25 bp, synthetic construct
  misc_feature 1..25: note = Oligonucleotide
  source 1..25: mol_type = other DNA
cgcacacatgcacgcacgcacacac

SEQ ID NO: 9072 - DNA, 25 bp, synthetic construct
  misc_feature 1..25: note = Oligonucleotide
  source 1..25: mol_type = other DNA
acacgcacacatgcacgcacgcaca

SEQ ID NO: 9073 - DNA, 25 bp, synthetic construct
  misc_feature 1..25: note = Oligonucleotide
  source 1..25: mol_type = other DNA
gcaacacgcacacatgcacgcacgc

SEQ ID NO: 9074 - DNA, 25 bp, synthetic construct
  misc_feature 1..25: note = Oligonucleotide
  source 1..25: mol_type = other DNA
cacgcaacacgcacacatgcacgca

SEQ ID NO: 9075 - DNA, 25 bp, synthetic construct
  misc_feature 1..25: note = Oligonucleotide
  source 1..25: mol_type = other DNA
agacacgcaacacgcacacatgcac

SEQ ID NO: 9076 - DNA, 25 bp, synthetic construct
  misc_feature 1..25: note = Oligonucleotide
  source 1..25: mol_type = other DNA
cgcagacacgcaacacgcacacatg

SEQ ID NO: 9077 - DNA, 25 bp, synthetic construct
  misc_feature 1..25: note = Oligonucleotide
  source 1..25: mol_type = other DNA
acacgcagacacgcaacacgcacac

SEQ ID NO: 9078 - DNA, 25 bp, synthetic construct
  misc_feature 1..25: note = Oligonucleotide
  source 1..25: mol_type = other DNA
cacacacgcagacacgcaacacgca

SEQ ID NO: 9079 - DNA, 25 bp, synthetic construct
  misc_feature 1..25: note = Oligonucleotide
  source 1..25: mol_type = other DNA
gcacacacacgcagacacgcaacac

SEQ ID NO: 9080 - DNA, 25 bp, synthetic construct
  misc_feature 1..25: note = Oligonucleotide
  source 1..25: mol_type = other DNA
gcagcacacacacgcagacacgcaa

SEQ ID NO: 9081 - DNA, 25 bp, synthetic construct
  misc_feature 1..25: note = Oligonucleotide
  source 1..25: mol_type = other DNA
gcagcagcacacacacgcagacacg

SEQ ID NO: 9082 - DNA, 25 bp, synthetic construct
  misc_feature 1..25: note = Oligonucleotide
  source 1..25: mol_type = other DNA
gtggcagcagcacacacacgcagac

SEQ ID NO: 9083 - DNA, 25 bp, synthetic construct
  misc_feature 1..25: note = Oligonucleotide
  source 1..25: mol_type = other DNA
gcggtggcagcagcacacacacgca

SEQ ID NO: 9084 - DNA, 25 bp, synthetic construct
  misc_feature 1..25: note = Oligonucleotide
  source 1..25: mol_type = other DNA
gctgcggtggcagcagcacacacac

SEQ ID NO: 9085 - DNA, 25 bp, synthetic construct
  misc_feature 1..25: note = Oligonucleotide
  source 1..25: mol_type = other DNA
catgctgcggtggcagcagcacaca

SEQ ID NO: 9086 - DNA, 25 bp, synthetic construct
  misc_feature 1..25: note = Oligonucleotide
  source 1..25: mol_type = other DNA
agacatgctgcggtggcagcagcac

SEQ ID NO: 9087 - DNA, 25 bp, synthetic construct
  misc_feature 1..25: note = Oligonucleotide
  source 1..25: mol_type = other DNA
tacagacatgctgcggtggcagcag

SEQ ID NO: 9088 - DNA, 25 bp, synthetic construct
  misc_feature 1..25: note = Oligonucleotide
  source 1..25: mol_type = other DNA
cgttacagacatgctgcggtggcag

SEQ ID NO: 9089 - DNA, 25 bp, synthetic construct
  misc_feature 1..25: note = Oligonucleotide
  source 1..25: mol_type = other DNA
acgcgttacagacatgctgcggtgg

SEQ ID NO: 9090 - DNA, 25 bp, synthetic construct
  misc_feature 1..25: note = Oligonucleotide
  source 1..25: mol_type = other DNA
cacacgcgttacagacatgctgcgg

SEQ ID NO: 9091 - DNA, 25 bp, synthetic construct
  misc_feature 1..25: note = Oligonucleotide
  source 1..25: mol_type = other DNA
gcccacacgcgttacagacatgctg

SEQ ID NO: 9092 - DNA, 25 bp, synthetic construct
  misc_feature 1..25: note = Oligonucleotide
  source 1..25: mol_type = other DNA
ggtgcccacacgcgttacagacatg

SEQ ID NO: 9093 - DNA, 25 bp, synthetic construct
  misc_feature 1..25: note = Oligonucleotide
  source 1..25: mol_type = other DNA
aacggtgcccacacgcgttacagac

SEQ ID NO: 9094 - DNA, 25 bp, synthetic construct
  misc_feature 1..25: note = Oligonucleotide
  source 1..25: mol_type = other DNA
agcaacggtgcccacacgcgttaca

SEQ ID NO: 9095 - DNA, 25 bp, synthetic construct
  misc_feature 1..25: note = Oligonucleotide
  source 1..25: mol_type = other DNA
agcagcaacggtgcccacacgcgtt

SEQ ID NO: 9096 - DNA, 25 bp, synthetic construct
  misc_feature 1..25: note = Oligonucleotide
  source 1..25: mol_type = other DNA
aacagcagcaacggtgcccacacgc

SEQ ID NO: 9097 - DNA, 25 bp, synthetic construct
  misc_feature 1..25: note = Oligonucleotide
  source 1..25: mol_type = other DNA
cacaacagcagcaacggtgcccaca

SEQ ID NO: 9098 - DNA, 25 bp, synthetic construct
  misc_feature 1..25: note = Oligonucleotide
  source 1..25: mol_type = other DNA
gcacacaacagcagcaacggtgccc

SEQ ID NO: 9099 - DNA, 25 bp, synthetic construct
  misc_feature 1..25: note = Oligonucleotide
  source 1..25: mol_type = other DNA
acggcacacaacagcagcaacggtg

SEQ ID NO: 9100 - DNA, 25 bp, synthetic construct
  misc_feature 1..25: note = Oligonucleotide
  source 1..25: mol_type = other DNA
cagacggcacacaacagcagcaacg

SEQ ID NO: 9101 - DNA, 25 bp, synthetic construct
  misc_feature 1..25: note = Oligonucleotide
  source 1..25: mol_type = other DNA
gcacagacggcacacaacagcagca

SEQ ID NO: 9102 - DNA, 25 bp, synthetic construct
  misc_feature 1..25: note = Oligonucleotide
  source 1..25: mol_type = other DNA
cctgcacagacggcacacaacagca

SEQ ID NO: 9103 - DNA, 25 bp, synthetic construct
  misc_feature 1..25: note = Oligonucleotide
  source 1..25: mol_type = other DNA
cctcctgcacagacggcacacaaca

SEQ ID NO: 9104 - DNA, 25 bp, synthetic construct
  misc_feature 1..25: note = Oligonucleotide
  source 1..25: mol_type = other DNA
cagcctcctgcacagacggcacaca

SEQ ID NO: 9105 - DNA, 25 bp, synthetic construct
  misc_feature 1..25: note = Oligonucleotide
  source 1..25: mol_type = other DNA
aggcagcctcctgcacagacggcac

SEQ ID NO: 9106 - DNA, 25 bp, synthetic construct
  misc_feature 1..25: note = Oligonucleotide
  source 1..25: mol_type = other DNA
caaaggcagcctcctgcacagacgg

SEQ ID NO: 9107 - DNA, 25 bp, synthetic construct
  misc_feature 1..25: note = Oligonucleotide
  source 1..25: mol_type = other DNA
acacaaaggcagcctcctgcacaga

SEQ ID NO: 9108 - DNA, 25 bp, synthetic construct
  misc_feature 1..25: note = Oligonucleotide
  source 1..25: mol_type = other DNA
tcaacacaaaggcagcctcctgcac

SEQ ID NO: 9109 - DNA, 25 bp, synthetic construct
  misc_feature 1..25: note = Oligonucleotide
  source 1..25: mol_type = other DNA
ccctcaacacaaaggcagcctcctg

SEQ ID NO: 9110 - DNA, 25 bp, synthetic construct
  misc_feature 1..25: note = Oligonucleotide
  source 1..25: mol_type = other DNA
acaccctcaacacaaaggcagcctc

SEQ ID NO: 9111 - DNA, 25 bp, synthetic construct
  misc_feature 1..25: note = Oligonucleotide
  source 1..25: mol_type = other DNA
tgcacaccctcaacacaaaggcagc

SEQ ID NO: 9112 - DNA, 25 bp, synthetic construct
  misc_feature 1..25: note = Oligonucleotide
  source 1..25: mol_type = other DNA
ccgtgcacaccctcaacacaaaggc

SEQ ID NO: 9113 - DNA, 25 bp, synthetic construct
  misc_feature 1..25: note = Oligonucleotide
  source 1..25: mol_type = other DNA
aggccgtgcacaccctcaacacaaa

SEQ ID NO: 9114 - DNA, 25 bp, synthetic construct
  misc_feature 1..25: note = Oligonucleotide
  source 1..25: mol_type = other DNA
gtgaggccgtgcacaccctcaacac

SEQ ID NO: 9115 - DNA, 25 bp, synthetic construct
  misc_feature 1..25: note = Oligonucleotide
  source 1..25: mol_type = other DNA
ggtgtgaggccgtgcacaccctcaa

SEQ ID NO: 9116 - DNA, 25 bp, synthetic construct
  misc_feature 1..25: note = Oligonucleotide
  source 1..25: mol_type = other DNA
gcaggtgtgaggccgtgcacaccct

SEQ ID NO: 9117 - DNA, 25 bp, synthetic construct
  misc_feature 1..25: note = Oligonucleotide
  source 1..25: mol_type = other DNA
agggcaggtgtgaggccgtgcacac

SEQ ID NO: 9118 - DNA, 25 bp, synthetic construct
  misc_feature 1..25: note = Oligonucleotide
  source 1..25: mol_type = other DNA
tgcagggcaggtgtgaggccgtgca

SEQ ID NO: 9119 - DNA, 25 bp, synthetic construct
  misc_feature 1..25: note = Oligonucleotide
  source 1..25: mol_type = other DNA
acatgcagggcaggtgtgaggccgt

SEQ ID NO: 9120 - DNA, 25 bp, synthetic construct
  misc_feature 1..25: note = Oligonucleotide
  source 1..25: mol_type = other DNA
agcacatgcagggcaggtgtgaggc

SEQ ID NO: 9121 - DNA, 25 bp, synthetic construct
  misc_feature 1..25: note = Oligonucleotide
  source 1..25: mol_type = other DNA
agcagcacatgcagggcaggtgtga

SEQ ID NO: 9122 - DNA, 25 bp, synthetic construct
  misc_feature 1..25: note = Oligonucleotide
  source 1..25: mol_type = other DNA
agcagcagcacatgcagggcaggtg

SEQ ID NO: 9123 - DNA, 25 bp, synthetic construct
  misc_feature 1..25: note = Oligonucleotide
  source 1..25: mol_type = other DNA
tggagcagcagcacatgcagggcag

SEQ ID NO: 9124 - DNA, 25 bp, synthetic construct
  misc_feature 1..25: note = Oligonucleotide
  source 1..25: mol_type = other DNA
gtatggagcagcagcacatgcaggg

SEQ ID NO: 9125 - DNA, 25 bp, synthetic construct
  misc_feature 1..25: note = Oligonucleotide
  source 1..25: mol_type = other DNA
cccgtatggagcagcagcacatgca

SEQ ID NO: 9126 - DNA, 25 bp, synthetic construct
  misc_feature 1..25: note = Oligonucleotide
  source 1..25: mol_type = other DNA
gtacccgtatggagcagcagcacat

SEQ ID NO: 9127 - DNA, 25 bp, synthetic construct
  misc_feature 1..25: note = Oligonucleotide
  source 1..25: mol_type = other DNA
ctcgtacccgtatggagcagcagca

SEQ ID NO: 9128 - DNA, 25 bp, synthetic construct
  misc_feature 1..25: note = Oligonucleotide
  source 1..25: mol_type = other DNA
gggctcgtacccgtatggagcagca

SEQ ID NO: 9129 - DNA, 25 bp, synthetic construct
  misc_feature 1..25: note = Oligonucleotide
  source 1..25: mol_type = other DNA
gcagggctcgtacccgtatggagca

SEQ ID NO: 9130 - DNA, 25 bp, synthetic construct
  misc_feature 1..25: note = Oligonucleotide
  source 1..25: mol_type = other DNA
taggcagggctcgtacccgtatgga

SEQ ID NO: 9131 - DNA, 25 bp, synthetic construct
  misc_feature 1..25: note = Oligonucleotide
  source 1..25: mol_type = other DNA
cactaggcagggctcgtacccgtat

SEQ ID NO: 9132 - DNA, 25 bp, synthetic construct
  misc_feature 1..25: note = Oligonucleotide
  source 1..25: mol_type = other DNA
agacactaggcagggctcgtacccg

SEQ ID NO: 9133 - DNA, 25 bp, synthetic construct
  misc_feature 1..25: note = Oligonucleotide
  source 1..25: mol_type = other DNA
gacagacactaggcagggctcgtac

SEQ ID NO: 9134 - DNA, 25 bp, synthetic construct
  misc_feature 1..25: note = Oligonucleotide
  source 1..25: mol_type = other DNA
ggagacagacactaggcagggctcg

SEQ ID NO: 9135 - DNA, 25 bp, synthetic construct
  misc_feature 1..25: note = Oligonucleotide
  source 1..25: mol_type = other DNA
acaggagacagacactaggcagggc

SEQ ID NO: 9136 - DNA, 25 bp, synthetic construct
  misc_feature 1..25: note = Oligonucleotide
  source 1..25: mol_type = other DNA
gacacaggagacagacactaggcag

SEQ ID NO: 9137 - DNA, 25 bp, synthetic construct
  misc_feature 1..25: note = Oligonucleotide
  source 1..25: mol_type = other DNA
cgtgacacaggagacagacactagg

SEQ ID NO: 9138 - DNA, 25 bp, synthetic construct
  misc_feature 1..25: note = Oligonucleotide
  source 1..25: mol_type = other DNA
gtccgtgacacaggagacagacact

SEQ ID NO: 9139 - DNA, 25 bp, synthetic construct
  misc_feature 1..25: note = Oligonucleotide
  source 1..25: mol_type = other DNA
caggtccgtgacacaggagacagac

SEQ ID NO: 9140 - DNA, 25 bp, synthetic construct
  misc_feature 1..25: note = Oligonucleotide
  source 1..25: mol_type = other DNA
gaacaggtccgtgacacaggagaca

SEQ ID NO: 9141 - DNA, 25 bp, synthetic construct
  misc_feature 1..25: note = Oligonucleotide
  source 1..25: mol_type = other DNA
gttgaacaggtccgtgacacaggag

SEQ ID NO: 9142 - DNA, 25 bp, synthetic construct
  misc_feature 1..25: note = Oligonucleotide
  source 1..25: mol_type = other DNA
gaggttgaacaggtccgtgacacag

SEQ ID NO: 9143 - DNA, 25 bp, synthetic construct
  misc_feature 1..25: note = Oligonucleotide
  source 1..25: mol_type = other DNA
cacgaggttgaacaggtccgtgaca

SEQ ID NO: 9144 - DNA, 25 bp, synthetic construct
  misc_feature 1..25: note = Oligonucleotide
  source 1..25: mol_type = other DNA
cagcacgaggttgaacaggtccgtg

SEQ ID NO: 9145 - DNA, 25 bp, synthetic construct
  misc_feature 1..25: note = Oligonucleotide
  source 1..25: mol_type = other DNA
cagcagcacgaggttgaacaggtcc

SEQ ID NO: 9146 - DNA, 25 bp, synthetic construct
  misc_feature 1..25: note = Oligonucleotide
  source 1..25: mol_type = other DNA
tggcagcagcacgaggttgaacagg

SEQ ID NO: 9147 - DNA, 25 bp, synthetic construct
  misc_feature 1..25: note = Oligonucleotide
  source 1..25: mol_type = other DNA
ggctggcagcagcacgaggttgaac

SEQ ID NO: 9148 - DNA, 25 bp, synthetic construct
  misc_feature 1..25: note = Oligonucleotide
  source 1..25: mol_type = other DNA
aaaggctggcagcagcacgaggttg

SEQ ID NO: 9149 - DNA, 25 bp, synthetic construct
  misc_feature 1..25: note = Oligonucleotide
  source 1..25: mol_type = other DNA
gataaaggctggcagcagcacgagg

SEQ ID NO: 9150 - DNA, 25 bp, synthetic construct
  misc_feature 1..25: note = Oligonucleotide
  source 1..25: mol_type = other DNA
cgcgataaaggctggcagcagcacg

SEQ ID NO: 9151 - DNA, 25 bp, synthetic construct
  misc_feature 1..25: note = Oligonucleotide
  source 1..25: mol_type = other DNA
agtcgcgataaaggctggcagcagc

SEQ ID NO: 9152 - DNA, 25 bp, synthetic construct
  misc_feature 1..25: note = Oligonucleotide
  source 1..25: mol_type = other DNA
ctgagtcgcgataaaggctggcagc

SEQ ID NO: 9153 - DNA, 25 bp, synthetic construct
  misc_feature 1..25: note = Oligonucleotide
  source 1..25: mol_type = other DNA
cagctgagtcgcgataaaggctggc

SEQ ID NO: 9154 - DNA, 25 bp, synthetic construct
  misc_feature 1..25: note = Oligonucleotide
  source 1..25: mol_type = other DNA
ggacagctgagtcgcgataaaggct

SEQ ID NO: 9155 - DNA, 25 bp, synthetic construct
  misc_feature 1..25: note = Oligonucleotide
  source 1..25: mol_type = other DNA
cagggacagctgagtcgcgataaag

SEQ ID NO: 9156 - DNA, 25 bp, synthetic construct
  misc_feature 1..25: note = Oligonucleotide
  source 1..25: mol_type = other DNA
ttccagggacagctgagtcgcgata

SEQ ID NO: 9157 - DNA, 25 bp, synthetic construct
  misc_feature 1..25: note = Oligonucleotide
  source 1..25: mol_type = other DNA
aggttccagggacagctgagtcgcg

SEQ ID NO: 9158 - DNA, 25 bp, synthetic construct
  misc_feature 1..25: note = Oligonucleotide
  source 1..25: mol_type = other DNA
ggcaggttccagggacagctgagtc

SEQ ID NO: 9159 - DNA, 25 bp, synthetic construct
  misc_feature 1..25: note = Oligonucleotide
  source 1..25: mol_type = other DNA
ctgggcaggttccagggacagctga

SEQ ID NO: 9160 - DNA, 25 bp, synthetic construct
  misc_feature 1..25: note = Oligonucleotide
  source 1..25: mol_type = other DNA
atcctgggcaggttccagggacagc

SEQ ID NO: 9161 - DNA, 25 bp, synthetic construct
  misc_feature 1..25: note = Oligonucleotide
  source 1..25: mol_type = other DNA
gggatcctgggcaggttccagggac

SEQ ID NO: 9162 - DNA, 25 bp, synthetic construct
  misc_feature 1..25: note = Oligonucleotide
  source 1..25: mol_type = other DNA
caggggatcctgggcaggttccagg

SEQ ID NO: 9163 - DNA, 25 bp, synthetic construct
  misc_feature 1..25: note = Oligonucleotide
  source 1..25: mol_type = other DNA
acccaggggatcctgggcaggttcc

SEQ ID NO: 9164 - DNA, 25 bp, synthetic construct
  misc_feature 1..25: note = Oligonucleotide
  source 1..25: mol_type = other DNA
aagacccaggggatcctgggcaggt

SEQ ID NO: 9165 - DNA, 25 bp, synthetic construct
  misc_feature 1..25: note = Oligonucleotide
  source 1..25: mol_type = other DNA
gagaagacccaggggatcctgggca

SEQ ID NO: 9166 - DNA, 25 bp, synthetic construct
  misc_feature 1..25: note = Oligonucleotide
  source 1..25: mol_type = other DNA
catgagaagacccaggggatcctgg

SEQ ID NO: 9167 - DNA, 25 bp, synthetic construct
  misc_feature 1..25: note = Oligonucleotide
  source 1..25: mol_type = other DNA
tctcatgagaagacccaggggatcc

SEQ ID NO: 9168 - DNA, 25 bp, synthetic construct
  misc_feature 1..25: note = Oligonucleotide
  source 1..25: mol_type = other DNA
tgctctcatgagaagacccagggga

SEQ ID NO: 9169 - DNA, 25 bp, synthetic construct
  misc_feature 1..25: note = Oligonucleotide
  source 1..25: mol_type = other DNA
ctctgctctcatgagaagacccagg

SEQ ID NO: 9170 - DNA, 25 bp, synthetic construct
  misc_feature 1..25: note = Oligonucleotide
  source 1..25: mol_type = other DNA
cagctctgctctcatgagaagaccc

SEQ ID NO: 9171 - DNA, 25 bp, synthetic construct
  misc_feature 1..25: note = Oligonucleotide
  source 1..25: mol_type = other DNA
acacagctctgctctcatgagaaga

SEQ ID NO: 9172 - DNA, 25 bp, synthetic construct
  misc_feature 1..25: note = Oligonucleotide
  source 1..25: mol_type = other DNA
cccacacagctctgctctcatgaga

SEQ ID NO: 9173 - DNA, 25 bp, synthetic construct
  misc_feature 1..25: note = Oligonucleotide
  source 1..25: mol_type = other DNA
ccccccacacagctctgctctcatg

SEQ ID NO: 9174 - DNA, 25 bp, synthetic construct
  misc_feature 1..25: note = Oligonucleotide
  source 1..25: mol_type = other DNA
ccaccccccacacagctctgctctc

SEQ ID NO: 9175 - DNA, 25 bp, synthetic construct
  misc_feature 1..25: note = Oligonucleotide
  source 1..25: mol_type = other DNA
cgcccaccccccacacagctctgct

SEQ ID NO: 9176 - DNA, 25 bp, synthetic construct
  misc_feature 1..25: note = Oligonucleotide
  source 1..25: mol_type = other DNA
caccgcccaccccccacacagctct

SEQ ID NO: 9177 - DNA, 25 bp, synthetic construct
  misc_feature 1..25: note = Oligonucleotide
  source 1..25: mol_type = other DNA
cttcaccgcccaccccccacacagc

SEQ ID NO: 9178 - DNA, 25 bp, synthetic construct
  misc_feature 1..25: note = Oligonucleotide
  source 1..25: mol_type = other DNA
acccttcaccgcccaccccccacac

SEQ ID NO: 9179 - DNA, 25 bp, synthetic construct
  misc_feature 1..25: note = Oligonucleotide
  source 1..25: mol_type = other DNA
agtacccttcaccgcccacccccca

SEQ ID NO: 9180 - DNA, 25 bp, synthetic construct
  misc_feature 1..25: note = Oligonucleotide
  source 1..25: mol_type = other DNA
ggcagtacccttcaccgcccacccc

SEQ ID NO: 9181 - DNA, 25 bp, synthetic construct
  misc_feature 1..25: note = Oligonucleotide
  source 1..25: mol_type = other DNA
ttgggcagtacccttcaccgcccac

SEQ ID NO: 9182 - DNA, 25 bp, synthetic construct
  misc_feature 1..25: note = Oligonucleotide
  source 1..25: mol_type = other DNA
gacttgggcagtacccttcaccgcc

SEQ ID NO: 9183 - DNA, 25 bp, synthetic construct
  misc_feature 1..25: note = Oligonucleotide
  source 1..25: mol_type = other DNA
tgagacttgggcagtacccttcacc

SEQ ID NO: 9184 - DNA, 25 bp, synthetic construct
  misc_feature 1..25: note = Oligonucleotide
  source 1..25: mol_type = other DNA
cgctgagacttgggcagtacccttc

SEQ ID NO: 9185 - DNA, 25 bp, synthetic construct
  misc_feature 1..25: note = Oligonucleotide
  source 1..25: mol_type = other DNA
ggacgctgagacttgggcagtaccc

SEQ ID NO: 9186 - DNA, 25 bp, synthetic construct
  misc_feature 1..25: note = Oligonucleotide
  source 1..25: mol_type = other DNA
ccgggacgctgagacttgggcagta

SEQ ID NO: 9187 - DNA, 25 bp, synthetic construct
  misc_feature 1..25: note = Oligonucleotide
  source 1..25: mol_type = other DNA
tacccgggacgctgagacttgggca

SEQ ID NO: 9188 - DNA, 25 bp, synthetic construct
  misc_feature 1..25: note = Oligonucleotide
  source 1..25: mol_type = other DNA
agatacccgggacgctgagacttgg

SEQ ID NO: 9189 - DNA, 25 bp, synthetic construct
  misc_feature 1..25: note = Oligonucleotide
  source 1..25: mol_type = other DNA
cacagatacccgggacgctgagact

SEQ ID NO: 9190 - DNA, 25 bp, synthetic construct
  misc_feature 1..25: note = Oligonucleotide
  source 1..25: mol_type = other DNA
atccacagatacccgggacgctgag

SEQ ID NO: 9191 - DNA, 25 bp, synthetic construct
  misc_feature 1..25: note = Oligonucleotide
  source 1..25: mol_type = other DNA
gggatccacagatacccgggacgct

SEQ ID NO: 9192 - DNA, 25 bp, synthetic construct
  misc_feature 1..25: note = Oligonucleotide
  source 1..25: mol_type = other DNA
ggcgggatccacagatacccgggac

SEQ ID NO: 9193 - DNA, 25 bp, synthetic construct
  misc_feature 1..25: note = Oligonucleotide
  source 1..25: mol_type = other DNA
catggcgggatccacagatacccgg

SEQ ID NO: 9194 - DNA, 25 bp, synthetic construct
  misc_feature 1..25: note = Oligonucleotide
  source 1..25: mol_type = other DNA
gggcatggcgggatccacagatacc

SEQ ID NO: 9195 - DNA, 25 bp, synthetic construct
  misc_feature 1..25: note = Oligonucleotide
  source 1..25: mol_type = other DNA
tctgggcatggcgggatccacagat

SEQ ID NO: 9196 - DNA, 25 bp, synthetic construct
  misc_feature 1..25: note = Oligonucleotide
  source 1..25: mol_type = other DNA
ggctctgggcatggcgggatccaca

SEQ ID NO: 9197 - DNA, 25 bp, synthetic construct
  misc_feature 1..25: note = Oligonucleotide
  source 1..25: mol_type = other DNA
accggctctgggcatggcgggatcc

SEQ ID NO: 9198 - DNA, 25 bp, synthetic construct
  misc_feature 1..25: note = Oligonucleotide
  source 1..25: mol_type = other DNA
gacaccggctctgggcatggcggga

SEQ ID NO: 9199 - DNA, 25 bp, synthetic construct
  misc_feature 1..25: note = Oligonucleotide
  source 1..25: mol_type = other DNA
tccgacaccggctctgggcatggcg

SEQ ID NO: 9200 - DNA, 25 bp, synthetic construct
  misc_feature 1..25: note = Oligonucleotide
  source 1..25: mol_type = other DNA
gcctccgacaccggctctgggcatg

SEQ ID NO: 9201 - DNA, 25 bp, synthetic construct
  misc_feature 1..25: note = Oligonucleotide
  source 1..25: mol_type = other DNA
ccagcctccgacaccggctctgggc

SEQ ID NO: 9202 - DNA, 25 bp, synthetic construct
  misc_feature 1..25: note = Oligonucleotide
  source 1..25: mol_type = other DNA
ctgccagcctccgacaccggctctg

SEQ ID NO: 9203 - DNA, 25 bp, synthetic construct
  misc_feature 1..25: note = Oligonucleotide
  source 1..25: mol_type = other DNA
ctcctgccagcctccgacaccggct

SEQ ID NO: 9204 - DNA, 25 bp, synthetic construct
  misc_feature 1..25: note = Oligonucleotide
  source 1..25: mol_type = other DNA
tccctcctgccagcctccgacaccg

SEQ ID NO: 9205 - DNA, 25 bp, synthetic construct
  misc_feature 1..25: note = Oligonucleotide
  source 1..25: mol_type = other DNA
ttctccctcctgccagcctccgaca

SEQ ID NO: 9206 - DNA, 25 bp, synthetic construct
  misc_feature 1..25: note = Oligonucleotide
  source 1..25: mol_type = other DNA
ggcttctccctcctgccagcctccg

SEQ ID NO: 9207 - DNA, 25 bp, synthetic construct
  misc_feature 1..25: note = Oligonucleotide
  source 1..25: mol_type = other DNA
gcgggcttctccctcctgccagcct

SEQ ID NO: 9208 - DNA, 25 bp, synthetic construct
  misc_feature 1..25: note = Oligonucleotide
  source 1..25: mol_type = other DNA
agggcgggcttctccctcctgccag

SEQ ID NO: 9209 - DNA, 25 bp, synthetic construct
  misc_feature 1..25: note = Oligonucleotide
  source 1..25: mol_type = other DNA
caaagggcgggcttctccctcctgc

SEQ ID NO: 9210 - DNA, 25 bp, synthetic construct
  misc_feature 1..25: note = Oligonucleotide
  source 1..25: mol_type = other DNA
tggcaaagggcgggcttctccctcc

SEQ ID NO: 9211 - DNA, 25 bp, synthetic construct
  misc_feature 1..25: note = Oligonucleotide
  source 1..25: mol_type = other DNA
tcatggcaaagggcgggcttctccc

SEQ ID NO: 9212 - DNA, 25 bp, synthetic construct
  misc_feature 1..25: note = Oligonucleotide
  source 1..25: mol_type = other DNA
ctctcatggcaaagggcgggcttct

SEQ ID NO: 9213 - DNA, 25 bp, synthetic construct
  misc_feature 1..25: note = Oligonucleotide
  source 1..25: mol_type = other DNA
agcctctcatggcaaagggcgggct

SEQ ID NO: 9214 - DNA, 25 bp, synthetic construct
  misc_feature 1..25: note = Oligonucleotide
  source 1..25: mol_type = other DNA
gacagcctctcatggcaaagggcgg

SEQ ID NO: 9215 - DNA, 25 bp, synthetic construct
  misc_feature 1..25: note = Oligonucleotide
  source 1..25: mol_type = other DNA
aaagacagcctctcatggcaaaggg

SEQ ID NO: 9216 - DNA, 25 bp, synthetic construct
  misc_feature 1..25: note = Oligonucleotide
  source 1..25: mol_type = other DNA
agaaaagacagcctctcatggcaaa

SEQ ID NO: 9217 - DNA, 25 bp, synthetic construct
  misc_feature 1..25: note = Oligonucleotide
  source 1..25: mol_type = other DNA
caaagaaaagacagcctctcatggc

SEQ ID NO: 9218 - DNA, 25 bp, synthetic construct
  misc_feature 1..25: note = Oligonucleotide
  source 1..25: mol_type = other DNA
aaccaaagaaaagacagcctctcat

SEQ ID NO: 9219 - DNA, 25 bp, synthetic construct
  misc_feature 1..25: note = Oligonucleotide
  source 1..25: mol_type = other DNA
cccaaccaaagaaaagacagcctct

SEQ ID NO: 9220 - DNA, 25 bp, synthetic construct
  misc_feature 1..25: note = Oligonucleotide
  source 1..25: mol_type = other DNA
cagcccaaccaaagaaaagacagcc

SEQ ID NO: 9221 - DNA, 25 bp, synthetic construct
  misc_feature 1..25: note = Oligonucleotide
  source 1..25: mol_type = other DNA
gtgcagcccaaccaaagaaaagaca

SEQ ID NO: 9222 - DNA, 25 bp, synthetic construct
  misc_feature 1..25: note = Oligonucleotide
  source 1..25: mol_type = other DNA
caagtgcagcccaaccaaagaaaag

SEQ ID NO: 9223 - DNA, 25 bp, synthetic construct
  misc_feature 1..25: note = Oligonucleotide
  source 1..25: mol_type = other DNA
ctccaagtgcagcccaaccaaagaa

SEQ ID NO: 9224 - DNA, 25 bp, synthetic construct
  misc_feature 1..25: note = Oligonucleotide
  source 1..25: mol_type = other DNA
aggctccaagtgcagcccaaccaaa

SEQ ID NO: 9225 - DNA, 25 bp, synthetic construct
  misc_feature 1..25: note = Oligonucleotide
  source 1..25: mol_type = other DNA
tccaggctccaagtgcagcccaacc

SEQ ID NO: 9226 - DNA, 25 bp, synthetic construct
  misc_feature 1..25: note = Oligonucleotide
  source 1..25: mol_type = other DNA
ccatccaggctccaagtgcagccca

SEQ ID NO: 9227 - DNA, 25 bp, synthetic construct
  misc_feature 1..25: note = Oligonucleotide
  source 1..25: mol_type = other DNA
actccatccaggctccaagtgcagc

SEQ ID NO: 9228 - DNA, 25 bp, synthetic construct
  misc_feature 1..25: note = Oligonucleotide
  source 1..25: mol_type = other DNA
tccactccatccaggctccaagtgc

SEQ ID NO: 9229 - DNA, 25 bp, synthetic construct
  misc_feature 1..25: note = Oligonucleotide
  source 1..25: mol_type = other DNA
ccctccactccatccaggctccaag

SEQ ID NO: 9230 - DNA, 25 bp, synthetic construct
  misc_feature 1..25: note = Oligonucleotide
  source 1..25: mol_type = other DNA
gccccctccactccatccaggctcc

SEQ ID NO: 9231 - DNA, 25 bp, synthetic construct
  misc_feature 1..25: note = Oligonucleotide
  source 1..25: mol_type = other DNA
gtggccccctccactccatccaggc

SEQ ID NO: 9232 - DNA, 25 bp, synthetic construct
  misc_feature 1..25: note = Oligonucleotide
  source 1..25: mol_type = other DNA
ctggtggccccctccactccatcca

SEQ ID NO: 9233 - DNA, 25 bp, synthetic construct
  misc_feature 1..25: note = Oligonucleotide
  source 1..25: mol_type = other DNA
tgactggtggccccctccactccat

SEQ ID NO: 9234 - DNA, 25 bp, synthetic construct
  misc_feature 1..25: note = Oligonucleotide
  source 1..25: mol_type = other DNA
gaatgactggtggccccctccactc

SEQ ID NO: 9235 - DNA, 25 bp, synthetic construct
  misc_feature 1..25: note = Oligonucleotide
  source 1..25: mol_type = other DNA
gaggaatgactggtggccccctcca

SEQ ID NO: 9236 - DNA, 25 bp, synthetic construct
  misc_feature 1..25: note = Oligonucleotide
  source 1..25: mol_type = other DNA
tatgaggaatgactggtggccccct

SEQ ID NO: 9237 - DNA, 25 bp, synthetic construct
  misc_feature 1..25: note = Oligonucleotide
  source 1..25: mol_type = other DNA
gaatatgaggaatgactggtggccc

SEQ ID NO: 9238 - DNA, 25 bp, synthetic construct
  misc_feature 1..25: note = Oligonucleotide
  source 1..25: mol_type = other DNA
ctggaatatgaggaatgactggtgg

SEQ ID NO: 9239 - DNA, 25 bp, synthetic construct
  misc_feature 1..25: note = Oligonucleotide
  source 1..25: mol_type = other DNA
tggctggaatatgaggaatgactgg

SEQ ID NO: 9240 - DNA, 25 bp, synthetic construct
  misc_feature 1..25: note = Oligonucleotide
  source 1..25: mol_type = other DNA
gactggctggaatatgaggaatgac

SEQ ID NO: 9241 - DNA, 25 bp, synthetic construct
  misc_feature 1..25: note = Oligonucleotide
  source 1..25: mol_type = other DNA
agcgactggctggaatatgaggaat

SEQ ID NO: 9242 - DNA, 25 bp, synthetic construct
  misc_feature 1..25: note = Oligonucleotide
  source 1..25: mol_type = other DNA
gccagcgactggctggaatatgagg

SEQ ID NO: 9243 - DNA, 25 bp, synthetic construct
  misc_feature 1..25: note = Oligonucleotide
  source 1..25: mol_type = other DNA
agagccagcgactggctggaatatg

SEQ ID NO: 9244 - DNA, 25 bp, synthetic construct
  misc_feature 1..25: note = Oligonucleotide
  source 1..25: mol_type = other DNA
accagagccagcgactggctggaat

SEQ ID NO: 9245 - DNA, 25 bp, synthetic construct
  misc_feature 1..25: note = Oligonucleotide
  source 1..25: mol_type = other DNA
gggaccagagccagcgactggctgg

SEQ ID NO: 9246 - DNA, 25 bp, synthetic construct
  misc_feature 1..25: note = Oligonucleotide
  source 1..25: mol_type = other DNA
cctgggaccagagccagcgactggc

SEQ ID NO: 9247 - DNA, 25 bp, synthetic construct
  misc_feature 1..25: note = Oligonucleotide
  source 1..25: mol_type = other DNA
gcccctgggaccagagccagcgact

SEQ ID NO: 9248 - DNA, 25 bp, synthetic construct
  misc_feature 1..25: note = Oligonucleotide
  source 1..25: mol_type = other DNA
ttggcccctgggaccagagccagcg

SEQ ID NO: 9249 - DNA, 25 bp, synthetic construct
  misc_feature 1..25: note = Oligonucleotide
  source 1..25: mol_type = other DNA
tctttggcccctgggaccagagcca

SEQ ID NO: 9250 - DNA, 25 bp, synthetic construct
  misc_feature 1..25: note = Oligonucleotide
  source 1..25: mol_type = other DNA
ttttctttggcccctgggaccagag

SEQ ID NO: 9251 - DNA, 25 bp, synthetic construct
  misc_feature 1..25: note = Oligonucleotide
  source 1..25: mol_type = other DNA
cccttttctttggcccctgggacca

SEQ ID NO: 9252 - DNA, 25 bp, synthetic construct
  misc_feature 1..25: note = Oligonucleotide
  source 1..25: mol_type = other DNA
tggcccttttctttggcccctggga

SEQ ID NO: 9253 - DNA, 25 bp, synthetic construct
  misc_feature 1..25: note = Oligonucleotide
  source 1..25: mol_type = other DNA
ccctggcccttttctttggcccctg

SEQ ID NO: 9254 - DNA, 25 bp, synthetic construct
  misc_feature 1..25: note = Oligonucleotide
  source 1..25: mol_type = other DNA
ttaccctggcccttttctttggccc

SEQ ID NO: 9255 - DNA, 25 bp, synthetic construct
  misc_feature 1..25: note = Oligonucleotide
  source 1..25: mol_type = other DNA
cggttaccctggcccttttctttgg

SEQ ID NO: 9256 - DNA, 25 bp, synthetic construct
  misc_feature 1..25: note = Oligonucleotide
  source 1..25: mol_type = other DNA
ctacggttaccctggcccttttctt

SEQ ID NO: 9257 - DNA, 25 bp, synthetic construct
  misc_feature 1..25: note = Oligonucleotide
  source 1..25: mol_type = other DNA
atcctacggttaccctggccctttt

SEQ ID NO: 9258 - DNA, 25 bp, synthetic construct
  misc_feature 1..25: note = Oligonucleotide
  source 1..25: mol_type = other DNA
gggatcctacggttaccctggccct

SEQ ID NO: 9259 - DNA, 25 bp, synthetic construct
  misc_feature 1..25: note = Oligonucleotide
  source 1..25: mol_type = other DNA
ggtgggatcctacggttaccctggc

SEQ ID NO: 9260 - DNA, 25 bp, synthetic construct
  misc_feature 1..25: note = Oligonucleotide
  source 1..25: mol_type = other DNA
aagggtgggatcctacggttaccct

SEQ ID NO: 9261 - DNA, 25 bp, synthetic construct
  misc_feature 1..25: note = Oligonucleotide
  source 1..25: mol_type = other DNA
ataaagggtgggatcctacggttac

SEQ ID NO: 9262 - DNA, 25 bp, synthetic construct
  misc_feature 1..25: note = Oligonucleotide
  source 1..25: mol_type = other DNA
gaaataaagggtgggatcctacggt

SEQ ID NO: 9263 - DNA, 25 bp, synthetic construct
  misc_feature 1..25: note = Oligonucleotide
  source 1..25: mol_type = other DNA
gaagaaataaagggtgggatcctac

SEQ ID NO: 9264 - DNA, 25 bp, synthetic construct
  misc_feature 1..25: note = Oligonucleotide
  source 1..25: mol_type = other DNA
gaggaagaaataaagggtgggatcc

SEQ ID NO: 9265 - DNA, 25 bp, synthetic construct
  misc_feature 1..25: note = Oligonucleotide
  source 1..25: mol_type = other DNA
ccagaggaagaaataaagggtggga

SEQ ID NO: 9266 - DNA, 25 bp, synthetic construct
  misc_feature 1..25: note = Oligonucleotide
  source 1..25: mol_type = other DNA
cggccagaggaagaaataaagggtg

SEQ ID NO: 9267 - DNA, 25 bp, synthetic construct
  misc_feature 1..25: note = Oligonucleotide
  source 1..25: mol_type = other DNA
gcccggccagaggaagaaataaagg

SEQ ID NO: 9268 - DNA, 25 bp, synthetic construct
  misc_feature 1..25: note = Oligonucleotide
  source 1..25: mol_type = other DNA
gtagcccggccagaggaagaaataa

SEQ ID NO: 9269 - DNA, 25 bp, synthetic construct
  misc_feature 1..25: note = Oligonucleotide
  source 1..25: mol_type = other DNA
ggagtagcccggccagaggaagaaa

SEQ ID NO: 9270 - DNA, 25 bp, synthetic construct
  misc_feature 1..25: note = Oligonucleotide
  source 1..25: mol_type = other DNA
gcgggagtagcccggccagaggaag

SEQ ID NO: 9271 - DNA, 25 bp, synthetic construct
  misc_feature 1..25: note = Oligonucleotide
  source 1..25: mol_type = other DNA
ctggcgggagtagcccggccagagg

SEQ ID NO: 9272 - DNA, 25 bp, synthetic construct
  misc_feature 1..25: note = Oligonucleotide
  source 1..25: mol_type = other DNA
cggctggcgggagtagcccggccag

SEQ ID NO: 9273 - DNA, 25 bp, synthetic construct
  misc_feature 1..25: note = Oligonucleotide
  source 1..25: mol_type = other DNA
ctgcggctggcgggagtagcccggc

SEQ ID NO: 9274 - DNA, 25 bp, synthetic construct
  misc_feature 1..25: note = Oligonucleotide
  source 1..25: mol_type = other DNA
gggctgcggctggcgggagtagccc

SEQ ID NO: 9275 - DNA, 25 bp, synthetic construct
  misc_feature 1..25: note = Oligonucleotide
  source 1..25: mol_type = other DNA
ctggggctgcggctggcgggagtag

SEQ ID NO: 9276 - DNA, 25 bp, synthetic construct
  misc_feature 1..25: note = Oligonucleotide
  source 1..25: mol_type = other DNA
gggctggggctgcggctggcgggag

SEQ ID NO: 9277 - DNA, 25 bp, synthetic construct
  misc_feature 1..25: note = Oligonucleotide
  source 1..25: mol_type = other DNA
aacgggctggggctgcggctggcgg

SEQ ID NO: 9278 - DNA, 25 bp, synthetic construct
  misc_feature 1..25: note = Oligonucleotide
  source 1..25: mol_type = other DNA
ggaaacgggctggggctgcggctgg

SEQ ID NO: 9279 - DNA, 25 bp, synthetic construct
  misc_feature 1..25: note = Oligonucleotide
  source 1..25: mol_type = other DNA
ggaggaaacgggctggggctgcggc

SEQ ID NO: 9280 - DNA, 25 bp, synthetic construct
  misc_feature 1..25: note = Oligonucleotide
  source 1..25: mol_type = other DNA
ccaggaggaaacgggctggggctgc

SEQ ID NO: 9281 - DNA, 25 bp, synthetic construct
  misc_feature 1..25: note = Oligonucleotide
  source 1..25: mol_type = other DNA
ggtccaggaggaaacgggctggggc

SEQ ID NO: 9282 - DNA, 25 bp, synthetic construct
  misc_feature 1..25: note = Oligonucleotide
  source 1..25: mol_type = other DNA
cagggtccaggaggaaacgggctgg

SEQ ID NO: 9283 - DNA, 25 bp, synthetic construct
  misc_feature 1..25: note = Oligonucleotide
  source 1..25: mol_type = other DNA
gggcagggtccaggaggaaacgggc

SEQ ID NO: 9284 - DNA, 25 bp, synthetic construct
  misc_feature 1..25: note = Oligonucleotide
  source 1..25: mol_type = other DNA
agcgggcagggtccaggaggaaacg

SEQ ID NO: 9285 - DNA, 25 bp, synthetic construct
  misc_feature 1..25: note = Oligonucleotide
  source 1..25: mol_type = other DNA
gggagcgggcagggtccaggaggaa

SEQ ID NO: 9286 - DNA, 25 bp, synthetic construct
  misc_feature 1..25: note = Oligonucleotide
  source 1..25: mol_type = other DNA
gaggggagcgggcagggtccaggag

SEQ ID NO: 9287 - DNA, 25 bp, synthetic construct
  misc_feature 1..25: note = Oligonucleotide
  source 1..25: mol_type = other DNA
gcggaggggagcgggcagggtccag

SEQ ID NO: 9288 - DNA, 25 bp, synthetic construct
  misc_feature 1..25: note = Oligonucleotide
  source 1..25: mol_type = other DNA
cgggcggaggggagcgggcagggtc

SEQ ID NO: 9289 - DNA, 25 bp, synthetic construct
  misc_feature 1..25: note = Oligonucleotide
  source 1..25: mol_type = other DNA
ggacgggcggaggggagcgggcagg

SEQ ID NO: 9290 - DNA, 25 bp, synthetic construct
  misc_feature 1..25: note = Oligonucleotide
  source 1..25: mol_type = other DNA
gggggacgggcggaggggagcgggc

SEQ ID NO: 9291 - DNA, 25 bp, synthetic construct
  misc_feature 1..25: note = Oligonucleotide
  source 1..25: mol_type = other DNA
aaggggggacgggcggaggggagcg

SEQ ID NO: 9292 - DNA, 25 bp, synthetic construct
  misc_feature 1..25: note = Oligonucleotide
  source 1..25: mol_type = other DNA
gccaaggggggacgggcggagggga

SEQ ID NO: 9293 - DNA, 25 bp, synthetic construct
  misc_feature 1..25: note = Oligonucleotide
  source 1..25: mol_type = other DNA
acagccaaggggggacgggcggagg

SEQ ID NO: 9294 - DNA, 25 bp, synthetic construct
  misc_feature 1..25: note = Oligonucleotide
  source 1..25: mol_type = other DNA
cgcacagccaaggggggacgggcgg

SEQ ID NO: 9295 - DNA, 25 bp, synthetic construct
  misc_feature 1..25: note = Oligonucleotide
  source 1..25: mol_type = other DNA
gggcgcacagccaaggggggacggg

SEQ ID NO: 9296 - DNA, 25 bp, synthetic construct
  misc_feature 1..25: note = Oligonucleotide
  source 1..25: mol_type = other DNA
gaggggcgcacagccaaggggggac

SEQ ID NO: 9297 - DNA, 25 bp, synthetic construct
  misc_feature 1..25: note = Oligonucleotide
  source 1..25: mol_type = other DNA
ggtgaggggcgcacagccaaggggg

SEQ ID NO: 9298 - DNA, 25 bp, synthetic construct
  misc_feature 1..25: note = Oligonucleotide
  source 1..25: mol_type = other DNA
ccaggtgaggggcgcacagccaagg

SEQ ID NO: 9299 - DNA, 25 bp, synthetic construct
  misc_feature 1..25: note = Oligonucleotide
  source 1..25: mol_type = other DNA
gcgccaggtgaggggcgcacagcca

SEQ ID NO: 9300 - DNA, 25 bp, synthetic construct
  misc_feature 1..25: note = Oligonucleotide
  source 1..25: mol_type = other DNA
tcagcgccaggtgaggggcgcacag

SEQ ID NO: 9301 - DNA, 25 bp, synthetic construct
  misc_feature 1..25: note = Oligonucleotide
  source 1..25: mol_type = other DNA
gggtcagcgccaggtgaggggcgca

SEQ ID NO: 9302 - DNA, 25 bp, synthetic construct
  misc_feature 1..25: note = Oligonucleotide
  source 1..25: mol_type = other DNA
gaggggtcagcgccaggtgaggggc

SEQ ID NO: 9303 - DNA, 25 bp, synthetic construct
  misc_feature 1..25: note = Oligonucleotide
  source 1..25: mol_type = other DNA
ggagaggggtcagcgccaggtgagg

SEQ ID NO: 9304 - DNA, 25 bp, synthetic construct
  misc_feature 1..25: note = Oligonucleotide
  source 1..25: mol_type = other DNA
gagggagaggggtcagcgccaggtg

SEQ ID NO: 9305 - DNA, 25 bp, synthetic construct
  misc_feature 1..25: note = Oligonucleotide
  source 1..25: mol_type = other DNA
gcggagggagaggggtcagcgccag

SEQ ID NO: 9306 - DNA, 17 bp, synthetic construct
  misc_feature 1..17: note = Oligonucleotide
  source 1..17: mol_type = other DNA
acgagacctgggcccac

SEQ ID NO: 9307 - DNA, 17 bp, synthetic construct
  misc_feature 1..17: note = Oligonucleotide
  source 1..17: mol_type = other DNA
atgacgagacctgggcc

SEQ ID NO: 9308 - DNA, 17 bp, synthetic construct
  misc_feature 1..17: note = Oligonucleotide
  source 1..17: mol_type = other DNA
ccaatgacgagacctgg

SEQ ID NO: 9309 - DNA, 17 bp, synthetic construct
  misc_feature 1..17: note = Oligonucleotide
  source 1..17: mol_type = other DNA
gagccaatgacgagacc

SEQ ID NO: 9310 - DNA, 17 bp, synthetic construct
  misc_feature 1..17: note = Oligonucleotide
  source 1..17: mol_type = other DNA
acagagccaatgacgag

SEQ ID NO: 9311 - DNA, 17 bp, synthetic construct
  misc_feature 1..17: note = Oligonucleotide
  source 1..17: mol_type = other DNA
aggacagagccaatgac

SEQ ID NO: 9312 - DNA, 17 bp, synthetic construct
  misc_feature 1..17: note = Oligonucleotide
  source 1..17: mol_type = other DNA
gagaggacagagccaat

SEQ ID NO: 9313 - DNA, 17 bp, synthetic construct
  misc_feature 1..17: note = Oligonucleotide
  source 1..17: mol_type = other DNA
caggagaggacagagcc

SEQ ID NO: 9314 - DNA, 17 bp, synthetic construct
  misc_feature 1..17: note = Oligonucleotide
  source 1..17: mol_type = other DNA
tcacaggagaggacaga

SEQ ID NO: 9315 - DNA, 17 bp, synthetic construct
  misc_feature 1..17: note = Oligonucleotide
  source 1..17: mol_type = other DNA
gcctcacaggagaggac

SEQ ID NO: 9316 - DNA, 17 bp, synthetic construct
  misc_feature 1..17: note = Oligonucleotide
  source 1..17: mol_type = other DNA
gctgcctcacaggagag

SEQ ID NO: 9317 - DNA, 17 bp, synthetic construct
  misc_feature 1..17: note = Oligonucleotide
  source 1..17: mol_type = other DNA
gcagctgcctcacagga

SEQ ID NO: 9318 - DNA, 17 bp, synthetic construct
  misc_feature 1..17: note = Oligonucleotide
  source 1..17: mol_type = other DNA
gctgcagctgcctcaca

SEQ ID NO: 9319 - DNA, 17 bp, synthetic construct
  misc_feature 1..17: note = Oligonucleotide
  source 1..17: mol_type = other DNA
actgctgcagctgcctc

SEQ ID NO: 9320 - DNA, 17 bp, synthetic construct
  misc_feature 1..17: note = Oligonucleotide
  source 1..17: mol_type = other DNA
gcaactgctgcagctgc

SEQ ID NO: 9321 - DNA, 17 bp, synthetic construct
  misc_feature 1..17: note = Oligonucleotide
  source 1..17: mol_type = other DNA
cctgcaactgctgcagc

SEQ ID NO: 9322 - DNA, 17 bp, synthetic construct
  misc_feature 1..17: note = Oligonucleotide
  source 1..17: mol_type = other DNA
tgccctgcaactgctgc

SEQ ID NO: 9323 - DNA, 17 bp, synthetic construct
  misc_feature 1..17: note = Oligonucleotide
  source 1..17: mol_type = other DNA
ccctgccctgcaactgc

SEQ ID NO: 9324 - DNA, 17 bp, synthetic construct
  misc_feature 1..17: note = Oligonucleotide
  source 1..17: mol_type = other DNA
tgaccctgccctgcaac

SEQ ID NO: 9325 - DNA, 17 bp, synthetic construct
  misc_feature 1..17: note = Oligonucleotide
  source 1..17: mol_type = other DNA
ccctgaccctgccctgc

SEQ ID NO: 9326 - DNA, 17 bp, synthetic construct
  misc_feature 1..17: note = Oligonucleotide
  source 1..17: mol_type = other DNA
atcccctgaccctgccc

SEQ ID NO: 9327 - DNA, 17 bp, synthetic construct
  misc_feature 1..17: note = Oligonucleotide
  source 1..17: mol_type = other DNA
ggaatcccctgaccctg

SEQ ID NO: 9328 - DNA, 17 bp, synthetic construct
  misc_feature 1..17: note = Oligonucleotide
  source 1..17: mol_type = other DNA
tgaggaatcccctgacc

SEQ ID NO: 9329 - DNA, 17 bp, synthetic construct
  misc_feature 1..17: note = Oligonucleotide
  source 1..17: mol_type = other DNA
ggctgaggaatcccctg

SEQ ID NO: 9330 - DNA, 17 bp, synthetic construct
  misc_feature 1..17: note = Oligonucleotide
  source 1..17: mol_type = other DNA
tccggctgaggaatccc

SEQ ID NO: 9331 - DNA, 17 bp, synthetic construct
  misc_feature 1..17: note = Oligonucleotide
  source 1..17: mol_type = other DNA
ggttccggctgaggaat

SEQ ID NO: 9332 - DNA, 17 bp, synthetic construct
  misc_feature 1..17: note = Oligonucleotide
  source 1..17: mol_type = other DNA
agaggttccggctgagg

SEQ ID NO: 9333 - DNA, 17 bp, synthetic construct
  misc_feature 1..17: note = Oligonucleotide
  source 1..17: mol_type = other DNA
gccagaggttccggctg

SEQ ID NO: 9334 - DNA, 17 bp, synthetic construct
  misc_feature 1..17: note = Oligonucleotide
  source 1..17: mol_type = other DNA
agtgccagaggttccgg

SEQ ID NO: 9335 - DNA, 17 bp, synthetic construct
  misc_feature 1..17: note = Oligonucleotide
  source 1..17: mol_type = other DNA
ggaagtgccagaggttc

SEQ ID NO: 9336 - DNA, 17 bp, synthetic construct
  misc_feature 1..17: note = Oligonucleotide
  source 1..17: mol_type = other DNA
aggggaagtgccagagg

SEQ ID NO: 9337 - DNA, 17 bp, synthetic construct
  misc_feature 1..17: note = Oligonucleotide
  source 1..17: mol_type = other DNA
agaaggggaagtgccag

SEQ ID NO: 9338 - DNA, 17 bp, synthetic construct
  misc_feature 1..17: note = Oligonucleotide
  source 1..17: mol_type = other DNA
cagagaaggggaagtgc

SEQ ID NO: 9339 - DNA, 17 bp, synthetic construct
  misc_feature 1..17: note = Oligonucleotide
  source 1..17: mol_type = other DNA
actcagagaaggggaag

SEQ ID NO: 9340 - DNA, 17 bp, synthetic construct
  misc_feature 1..17: note = Oligonucleotide
  source 1..17: mol_type = other DNA
tgaactcagagaagggg

SEQ ID NO: 9341 - DNA, 17 bp, synthetic construct
  misc_feature 1..17: note = Oligonucleotide
  source 1..17: mol_type = other DNA
ggatgaactcagagaag

SEQ ID NO: 9342 - DNA, 17 bp, synthetic construct
  misc_feature 1..17: note = Oligonucleotide
  source 1..17: mol_type = other DNA
ggaggatgaactcagag

SEQ ID NO: 9343 - DNA, 17 bp, synthetic construct
  misc_feature 1..17: note = Oligonucleotide
  source 1..17: mol_type = other DNA
gtgggaggatgaactca

SEQ ID NO: 9344 - DNA, 17 bp, synthetic construct
  misc_feature 1..17: note = Oligonucleotide
  source 1..17: mol_type = other DNA
accgtgggaggatgaac

SEQ ID NO: 9345 - DNA, 17 bp, synthetic construct
  misc_feature 1..17: note = Oligonucleotide
  source 1..17: mol_type = other DNA
agcaccgtgggaggatg

SEQ ID NO: 9346 - DNA, 17 bp, synthetic construct
  misc_feature 1..17: note = Oligonucleotide
  source 1..17: mol_type = other DNA
aagagcaccgtgggagg

SEQ ID NO: 9347 - DNA, 17 bp, synthetic construct
  misc_feature 1..17: note = Oligonucleotide
  source 1..17: mol_type = other DNA
ctaaagagcaccgtggg

SEQ ID NO: 9348 - DNA, 17 bp, synthetic construct
  misc_feature 1..17: note = Oligonucleotide
  source 1..17: mol_type = other DNA
atgctaaagagcaccgt

SEQ ID NO: 9349 - DNA, 17 bp, synthetic construct
  misc_feature 1..17: note = Oligonucleotide
  source 1..17: mol_type = other DNA
agaatgctaaagagcac

SEQ ID NO: 9350 - DNA, 17 bp, synthetic construct
  misc_feature 1..17: note = Oligonucleotide
  source 1..17: mol_type = other DNA
gacagaatgctaaagag

SEQ ID NO: 9351 - DNA, 17 bp, synthetic construct
  misc_feature 1..17: note = Oligonucleotide
  source 1..17: mol_type = other DNA
caagacagaatgctaaa

SEQ ID NO: 9352 - DNA, 17 bp, synthetic construct
  misc_feature 1..17: note = Oligonucleotide
  source 1..17: mol_type = other DNA
gatcaagacagaatgct

SEQ ID NO: 9353 - DNA, 17 bp, synthetic construct
  misc_feature 1..17: note = Oligonucleotide
  source 1..17: mol_type = other DNA
cctgatcaagacagaat

SEQ ID NO: 9354 - DNA, 17 bp, synthetic construct
  misc_feature 1..17: note = Oligonucleotide
  source 1..17: mol_type = other DNA
taccctgatcaagacag

SEQ ID NO: 9355 - DNA, 17 bp, synthetic construct
  misc_feature 1..17: note = Oligonucleotide
  source 1..17: mol_type = other DNA
ccgtaccctgatcaaga

SEQ ID NO: 9356 - DNA, 17 bp, synthetic construct
  misc_feature 1..17: note = Oligonucleotide
  source 1..17: mol_type = other DNA
gaaccgtaccctgatca

SEQ ID NO: 9357 - DNA, 17 bp, synthetic construct
  misc_feature 1..17: note = Oligonucleotide
  source 1..17: mol_type = other DNA
agagaaccgtaccctga

SEQ ID NO: 9358 - DNA, 17 bp, synthetic construct
  misc_feature 1..17: note = Oligonucleotide
  source 1..17: mol_type = other DNA
ctaagagaaccgtaccc

SEQ ID NO: 9359 - DNA, 17 bp, synthetic construct
  misc_feature 1..17: note = Oligonucleotide
  source 1..17: mol_type = other DNA
gggctaagagaaccgta

SEQ ID NO: 9360 - DNA, 17 bp, synthetic construct
  misc_feature 1..17: note = Oligonucleotide
  source 1..17: mol_type = other DNA
caagggctaagagaacc

SEQ ID NO: 9361 - DNA, 17 bp, synthetic construct
  misc_feature 1..17: note = Oligonucleotide
  source 1..17: mol_type = other DNA
agccaagggctaagaga

SEQ ID NO: 9362 - DNA, 17 bp, synthetic construct
  misc_feature 1..17: note = Oligonucleotide
  source 1..17: mol_type = other DNA
cagagccaagggctaag

SEQ ID NO: 9363 - DNA, 17 bp, synthetic construct
  misc_feature 1..17: note = Oligonucleotide
  source 1..17: mol_type = other DNA
agccagagccaagggct

SEQ ID NO: 9364 - DNA, 17 bp, synthetic construct
  misc_feature 1..17: note = Oligonucleotide
  source 1..17: mol_type = other DNA
gaaagccagagccaagg

SEQ ID NO: 9365 - DNA, 17 bp, synthetic construct
  misc_feature 1..17: note = Oligonucleotide
  source 1..17: mol_type = other DNA
ggtgaaagccagagcca

SEQ ID NO: 9366 - DNA, 17 bp, synthetic construct
  misc_feature 1..17: note = Oligonucleotide
  source 1..17: mol_type = other DNA
cctggtgaaagccagag

SEQ ID NO: 9367 - DNA, 17 bp, synthetic construct
  misc_feature 1..17: note = Oligonucleotide
  source 1..17: mol_type = other DNA
ggtcctggtgaaagcca

SEQ ID NO: 9368 - DNA, 17 bp, synthetic construct
  misc_feature 1..17: note = Oligonucleotide
  source 1..17: mol_type = other DNA
cagggtcctggtgaaag

SEQ ID NO: 9369 - DNA, 17 bp, synthetic construct
  misc_feature 1..17: note = Oligonucleotide
  source 1..17: mol_type = other DNA
aaacagggtcctggtga

SEQ ID NO: 9370 - DNA, 17 bp, synthetic construct
  misc_feature 1..17: note = Oligonucleotide
  source 1..17: mol_type = other DNA
aacaaacagggtcctgg

SEQ ID NO: 9371 - DNA, 17 bp, synthetic construct
  misc_feature 1..17: note = Oligonucleotide
  source 1..17: mol_type = other DNA
aaaaacaaacagggtcc

SEQ ID NO: 9372 - DNA, 17 bp, synthetic construct
  misc_feature 1..17: note = Oligonucleotide
  source 1..17: mol_type = other DNA
aagaaaaacaaacaggg

SEQ ID NO: 9373 - DNA, 17 bp, synthetic construct
  misc_feature 1..17: note = Oligonucleotide
  source 1..17: mol_type = other DNA
agaaagaaaaacaaaca

SEQ ID NO: 9374 - DNA, 17 bp, synthetic construct
  misc_feature 1..17: note = Oligonucleotide
  source 1..17: mol_type = other DNA
ctgagaaagaaaaacaa

SEQ ID NO: 9375 - DNA, 17 bp, synthetic construct
  misc_feature 1..17: note = Oligonucleotide
  source 1..17: mol_type = other DNA
catctgagaaagaaaaa

SEQ ID NO: 9376 - DNA, 17 bp, synthetic construct
  misc_feature 1..17: note = Oligonucleotide
  source 1..17: mol_type = other DNA
ccacatctgagaaagaa

SEQ ID NO: 9377 - DNA, 17 bp, synthetic construct
  misc_feature 1..17: note = Oligonucleotide
  source 1..17: mol_type = other DNA
atcccacatctgagaaa

SEQ ID NO: 9378 - DNA, 17 bp, synthetic construct
  misc_feature 1..17: note = Oligonucleotide
  source 1..17: mol_type = other DNA
cccatcccacatctgag

SEQ ID NO: 9379 - DNA, 17 bp, synthetic construct
  misc_feature 1..17: note = Oligonucleotide
  source 1..17: mol_type = other DNA
ttccccatcccacatct

SEQ ID NO: 9380 - DNA, 17 bp, synthetic construct
  misc_feature 1..17: note = Oligonucleotide
  source 1..17: mol_type = other DNA
tccttccccatcccaca

SEQ ID NO: 9381 - DNA, 17 bp, synthetic construct
  misc_feature 1..17: note = Oligonucleotide
  source 1..17: mol_type = other DNA
ttgtccttccccatccc

SEQ ID NO: 9382 - DNA, 17 bp, synthetic construct
  misc_feature 1..17: note = Oligonucleotide
  source 1..17: mol_type = other DNA
gtcttgtccttccccat

SEQ ID NO: 9383 - DNA, 17 bp, synthetic construct
  misc_feature 1..17: note = Oligonucleotide
  source 1..17: mol_type = other DNA
ctggtcttgtccttccc

SEQ ID NO: 9384 - DNA, 17 bp, synthetic construct
  misc_feature 1..17: note = Oligonucleotide
  source 1..17: mol_type = other DNA
ctgctggtcttgtcctt

SEQ ID NO: 9385 - DNA, 17 bp, synthetic construct
  misc_feature 1..17: note = Oligonucleotide
  source 1..17: mol_type = other DNA
gggctgctggtcttgtc

SEQ ID NO: 9386 - DNA, 17 bp, synthetic construct
  misc_feature 1..17: note = Oligonucleotide
  source 1..17: mol_type = other DNA
tcagggctgctggtctt

SEQ ID NO: 9387 - DNA, 17 bp, synthetic construct
  misc_feature 1..17: note = Oligonucleotide
  source 1..17: mol_type = other DNA
gggtcagggctgctggt

SEQ ID NO: 9388 - DNA, 17 bp, synthetic construct
  misc_feature 1..17: note = Oligonucleotide
  source 1..17: mol_type = other DNA
taagggtcagggctgct

SEQ ID NO: 9389 - DNA, 17 bp, synthetic construct
  misc_feature 1..17: note = Oligonucleotide
  source 1..17: mol_type = other DNA
acgtaagggtcagggct

SEQ ID NO: 9390 - DNA, 17 bp, synthetic construct
  misc_feature 1..17: note = Oligonucleotide
  source 1..17: mol_type = other DNA
gtcacgtaagggtcagg

SEQ ID NO: 9391 - DNA, 17 bp, synthetic construct
  misc_feature 1..17: note = Oligonucleotide
  source 1..17: mol_type = other DNA
gacgtcacgtaagggtc

SEQ ID NO: 9392 - DNA, 17 bp, synthetic construct
  misc_feature 1..17: note = Oligonucleotide
  source 1..17: mol_type = other DNA
acagacgtcacgtaagg

SEQ ID NO: 9393 - DNA, 17 bp, synthetic construct
  misc_feature 1..17: note = Oligonucleotide
  source 1..17: mol_type = other DNA
agaacagacgtcacgta

SEQ ID NO: 9394 - DNA, 17 bp, synthetic construct
  misc_feature 1..17: note = Oligonucleotide
  source 1..17: mol_type = other DNA
aaaagaacagacgtcac

SEQ ID NO: 9395 - DNA, 17 bp, synthetic construct
  misc_feature 1..17: note = Oligonucleotide
  source 1..17: mol_type = other DNA
agtaaaagaacagacgt

SEQ ID NO: 9396 - DNA, 17 bp, synthetic construct
  misc_feature 1..17: note = Oligonucleotide
  source 1..17: mol_type = other DNA
ctgagtaaaagaacaga

SEQ ID NO: 9397 - DNA, 17 bp, synthetic construct
  misc_feature 1..17: note = Oligonucleotide
  source 1..17: mol_type = other DNA
ctactgagtaaaagaac

SEQ ID NO: 9398 - DNA, 17 bp, synthetic construct
  misc_feature 1..17: note = Oligonucleotide
  source 1..17: mol_type = other DNA
gaactactgagtaaaag

SEQ ID NO: 9399 - DNA, 17 bp, synthetic construct
  misc_feature 1..17: note = Oligonucleotide
  source 1..17: mol_type = other DNA
caggaactactgagtaa

SEQ ID NO: 9400 - DNA, 17 bp, synthetic construct
  misc_feature 1..17: note = Oligonucleotide
  source 1..17: mol_type = other DNA
ttgcaggaactactgag

SEQ ID NO: 9401 - DNA, 17 bp, synthetic construct
  misc_feature 1..17: note = Oligonucleotide
  source 1..17: mol_type = other DNA
attttgcaggaactact

SEQ ID NO: 9402 - DNA, 17 bp, synthetic construct
  misc_feature 1..17: note = Oligonucleotide
  source 1..17: mol_type = other DNA
agaattttgcaggaact

SEQ ID NO: 9403 - DNA, 17 bp, synthetic construct
  misc_feature 1..17: note = Oligonucleotide
  source 1..17: mol_type = other DNA
atcagaattttgcagga

SEQ ID NO: 9404 - DNA, 17 bp, synthetic construct
  misc_feature 1..17: note = Oligonucleotide
  source 1..17: mol_type = other DNA
gagatcagaattttgca

SEQ ID NO: 9405 - DNA, 17 bp, synthetic construct
  misc_feature 1..17: note = Oligonucleotide
  source 1..17: mol_type = other DNA
tcagagatcagaatttt

SEQ ID NO: 9406 - DNA, 17 bp, synthetic construct
  misc_feature 1..17: note = Oligonucleotide
  source 1..17: mol_type = other DNA
caatcagagatcagaat

SEQ ID NO: 9407 - DNA, 17 bp, synthetic construct
  misc_feature 1..17: note = Oligonucleotide
  source 1..17: mol_type = other DNA
acccaatcagagatcag

SEQ ID NO: 9408 - DNA, 17 bp, synthetic construct
  misc_feature 1..17: note = Oligonucleotide
  source 1..17: mol_type = other DNA
tgaacccaatcagagat

SEQ ID NO: 9409 - DNA, 17 bp, synthetic construct
  misc_feature 1..17: note = Oligonucleotide
  source 1..17: mol_type = other DNA
acatgaacccaatcaga

SEQ ID NO: 9410 - DNA, 17 bp, synthetic construct
  misc_feature 1..17: note = Oligonucleotide
  source 1..17: mol_type = other DNA
cccacatgaacccaatc

SEQ ID NO: 9411 - DNA, 17 bp, synthetic construct
  misc_feature 1..17: note = Oligonucleotide
  source 1..17: mol_type = other DNA
ggacccacatgaaccca

SEQ ID NO: 9412 - DNA, 17 bp, synthetic construct
  misc_feature 1..17: note = Oligonucleotide
  source 1..17: mol_type = other DNA
agaggacccacatgaac

SEQ ID NO: 9413 - DNA, 17 bp, synthetic construct
  misc_feature 1..17: note = Oligonucleotide
  source 1..17: mol_type = other DNA
agcagaggacccacatg

SEQ ID NO: 9414 - DNA, 17 bp, synthetic construct
  misc_feature 1..17: note = Oligonucleotide
  source 1..17: mol_type = other DNA
aaaagcagaggacccac

SEQ ID NO: 9415 - DNA, 17 bp, synthetic construct
  misc_feature 1..17: note = Oligonucleotide
  source 1..17: mol_type = other DNA
gggaaaagcagaggacc

SEQ ID NO: 9416 - DNA, 17 bp, synthetic construct
  misc_feature 1..17: note = Oligonucleotide
  source 1..17: mol_type = other DNA
tcagggaaaagcagagg

SEQ ID NO: 9417 - DNA, 17 bp, synthetic construct
  misc_feature 1..17: note = Oligonucleotide
  source 1..17: mol_type = other DNA
cagtcagggaaaagcag

SEQ ID NO: 9418 - DNA, 17 bp, synthetic construct
  misc_feature 1..17: note = Oligonucleotide
  source 1..17: mol_type = other DNA
gatcagtcagggaaaag

SEQ ID NO: 9419 - DNA, 17 bp, synthetic construct
  misc_feature 1..17: note = Oligonucleotide
  source 1..17: mol_type = other DNA
agtgatcagtcagggaa

SEQ ID NO: 9420 - DNA, 17 bp, synthetic construct
  misc_feature 1..17: note = Oligonucleotide
  source 1..17: mol_type = other DNA
cccagtgatcagtcagg

SEQ ID NO: 9421 - DNA, 17 bp, synthetic construct
  misc_feature 1..17: note = Oligonucleotide
  source 1..17: mol_type = other DNA
gaccccagtgatcagtc

SEQ ID NO: 9422 - DNA, 17 bp, synthetic construct
  misc_feature 1..17: note = Oligonucleotide
  source 1..17: mol_type = other DNA
ccagaccccagtgatca

SEQ ID NO: 9423 - DNA, 17 bp, synthetic construct
  misc_feature 1..17: note = Oligonucleotide
  source 1..17: mol_type = other DNA
tccccagaccccagtga

SEQ ID NO: 9424 - DNA, 17 bp, synthetic construct
  misc_feature 1..17: note = Oligonucleotide
  source 1..17: mol_type = other DNA
atgtccccagaccccag

SEQ ID NO: 9425 - DNA, 17 bp, synthetic construct
  misc_feature 1..17: note = Oligonucleotide
  source 1..17: mol_type = other DNA
cctatgtccccagaccc

SEQ ID NO: 9426 - DNA, 17 bp, synthetic construct
  misc_feature 1..17: note = Oligonucleotide
  source 1..17: mol_type = other DNA
agccctatgtccccaga

SEQ ID NO: 9427 - DNA, 17 bp, synthetic construct
  misc_feature 1..17: note = Oligonucleotide
  source 1..17: mol_type = other DNA
gacagccctatgtcccc

SEQ ID NO: 9428 - DNA, 17 bp, synthetic construct
  misc_feature 1..17: note = Oligonucleotide
  source 1..17: mol_type = other DNA
gatgacagccctatgtc

SEQ ID NO: 9429 - DNA, 17 bp, synthetic construct
  misc_feature 1..17: note = Oligonucleotide
  source 1..17: mol_type = other DNA
gccgatgacagccctat

SEQ ID NO: 9430 - DNA, 17 bp, synthetic construct
  misc_feature 1..17: note = Oligonucleotide
  source 1..17: mol_type = other DNA
ttggccgatgacagccc

SEQ ID NO: 9431 - DNA, 17 bp, synthetic construct
  misc_feature 1..17: note = Oligonucleotide
  source 1..17: mol_type = other DNA
agcttggccgatgacag

SEQ ID NO: 9432 - DNA, 17 bp, synthetic construct
  misc_feature 1..17: note = Oligonucleotide
  source 1..17: mol_type = other DNA
tcaagcttggccgatga

SEQ ID NO: 9433 - DNA, 17 bp, synthetic construct
  misc_feature 1..17: note = Oligonucleotide
  source 1..17: mol_type = other DNA
gactcaagcttggccga

SEQ ID NO: 9434 - DNA, 17 bp, synthetic construct
  misc_feature 1..17: note = Oligonucleotide
  source 1..17: mol_type = other DNA
gaggactcaagcttggc

SEQ ID NO: 9435 - DNA, 17 bp, synthetic construct
  misc_feature 1..17: note = Oligonucleotide
  source 1..17: mol_type = other DNA
acagaggactcaagctt

SEQ ID NO: 9436 - DNA, 17 bp, synthetic construct
  misc_feature 1..17: note = Oligonucleotide
  source 1..17: mol_type = other DNA
agaacagaggactcaag

SEQ ID NO: 9437 - DNA, 17 bp, synthetic construct
  misc_feature 1..17: note = Oligonucleotide
  source 1..17: mol_type = other DNA
gggagaacagaggactc

SEQ ID NO: 9438 - DNA, 17 bp, synthetic construct
  misc_feature 1..17: note = Oligonucleotide
  source 1..17: mol_type = other DNA
cctgggagaacagagga

SEQ ID NO: 9439 - DNA, 17 bp, synthetic construct
  misc_feature 1..17: note = Oligonucleotide
  source 1..17: mol_type = other DNA
gctcctgggagaacaga

SEQ ID NO: 9440 - DNA, 17 bp, synthetic construct
  misc_feature 1..17: note = Oligonucleotide
  source 1..17: mol_type = other DNA
ctggctcctgggagaac

SEQ ID NO: 9441 - DNA, 17 bp, synthetic construct
  misc_feature 1..17: note = Oligonucleotide
  source 1..17: mol_type = other DNA
cccctggctcctgggag

SEQ ID NO: 9442 - DNA, 17 bp, synthetic construct
  misc_feature 1..17: note = Oligonucleotide
  source 1..17: mol_type = other DNA
atccccctggctcctgg

SEQ ID NO: 9443 - DNA, 17 bp, synthetic construct
  misc_feature 1..17: note = Oligonucleotide
  source 1..17: mol_type = other DNA
cccatccccctggctcc

SEQ ID NO: 9444 - DNA, 17 bp, synthetic construct
  misc_feature 1..17: note = Oligonucleotide
  source 1..17: mol_type = other DNA
ggacccatccccctggc

SEQ ID NO: 9445 - DNA, 17 bp, synthetic construct
  misc_feature 1..17: note = Oligonucleotide
  source 1..17: mol_type = other DNA
ggcggacccatccccct

SEQ ID NO: 9446 - DNA, 17 bp, synthetic construct
  misc_feature 1..17: note = Oligonucleotide
  source 1..17: mol_type = other DNA
gtgggcggacccatccc

SEQ ID NO: 9447 - DNA, 17 bp, synthetic construct
  misc_feature 1..17: note = Oligonucleotide
  source 1..17: mol_type = other DNA
taggtgggcggacccat

SEQ ID NO: 9448 - DNA, 17 bp, synthetic construct
  misc_feature 1..17: note = Oligonucleotide
  source 1..17: mol_type = other DNA
tgctaggtgggcggacc

SEQ ID NO: 9449 - DNA, 17 bp, synthetic construct
  misc_feature 1..17: note = Oligonucleotide
  source 1..17: mol_type = other DNA
gcttgctaggtgggcgg

SEQ ID NO: 9450 - DNA, 17 bp, synthetic construct
  misc_feature 1..17: note = Oligonucleotide
  source 1..17: mol_type = other DNA
cctgcttgctaggtggg

SEQ ID NO: 9451 - DNA, 17 bp, synthetic construct
  misc_feature 1..17: note = Oligonucleotide
  source 1..17: mol_type = other DNA
gcacctgcttgctaggt

SEQ ID NO: 9452 - DNA, 17 bp, synthetic construct
  misc_feature 1..17: note = Oligonucleotide
  source 1..17: mol_type = other DNA
tcagcacctgcttgcta

SEQ ID NO: 9453 - DNA, 17 bp, synthetic construct
  misc_feature 1..17: note = Oligonucleotide
  source 1..17: mol_type = other DNA
ctctcagcacctgcttg

SEQ ID NO: 9454 - DNA, 17 bp, synthetic construct
  misc_feature 1..17: note = Oligonucleotide
  source 1..17: mol_type = other DNA
tcactctcagcacctgc

SEQ ID NO: 9455 - DNA, 17 bp, synthetic construct
  misc_feature 1..17: note = Oligonucleotide
  source 1..17: mol_type = other DNA
ccctcactctcagcacc

SEQ ID NO: 9456 - DNA, 17 bp, synthetic construct
  misc_feature 1..17: note = Oligonucleotide
  source 1..17: mol_type = other DNA
ctcccctcactctcagc

SEQ ID NO: 9457 - DNA, 17 bp, synthetic construct
  misc_feature 1..17: note = Oligonucleotide
  source 1..17: mol_type = other DNA
cccctcccctcactctc

SEQ ID NO: 9458 - DNA, 17 bp, synthetic construct
  misc_feature 1..17: note = Oligonucleotide
  source 1..17: mol_type = other DNA
agccccctcccctcact

SEQ ID NO: 9459 - DNA, 17 bp, synthetic construct
  misc_feature 1..17: note = Oligonucleotide
  source 1..17: mol_type = other DNA
gagagccccctcccctc

SEQ ID NO: 9460 - DNA, 17 bp, synthetic construct
  misc_feature 1..17: note = Oligonucleotide
  source 1..17: mol_type = other DNA
ctggagagccccctccc

SEQ ID NO: 9461 - DNA, 17 bp, synthetic construct
  misc_feature 1..17: note = Oligonucleotide
  source 1..17: mol_type = other DNA
catctggagagccccct

SEQ ID NO: 9462 - DNA, 17 bp, synthetic construct
  misc_feature 1..17: note = Oligonucleotide
  source 1..17: mol_type = other DNA
ttccatctggagagccc

SEQ ID NO: 9463 - DNA, 17 bp, synthetic construct
  misc_feature 1..17: note = Oligonucleotide
  source 1..17: mol_type = other DNA
gacttccatctggagag

SEQ ID NO: 9464 - DNA, 17 bp, synthetic construct
  misc_feature 1..17: note = Oligonucleotide
  source 1..17: mol_type = other DNA
ctggacttccatctgga

SEQ ID NO: 9465 - DNA, 17 bp, synthetic construct
  misc_feature 1..17: note = Oligonucleotide
  source 1..17: mol_type = other DNA
gcactggacttccatct

SEQ ID NO: 9466 - DNA, 17 bp, synthetic construct
  misc_feature 1..17: note = Oligonucleotide
  source 1..17: mol_type = other DNA
acagcactggacttcca

SEQ ID NO: 9467 - DNA, 17 bp, synthetic construct
  misc_feature 1..17: note = Oligonucleotide
  source 1..17: mol_type = other DNA
gggacagcactggactt

SEQ ID NO: 9468 - DNA, 17 bp, synthetic construct
  misc_feature 1..17: note = Oligonucleotide
  source 1..17: mol_type = other DNA
caagggacagcactgga

SEQ ID NO: 9469 - DNA, 17 bp, synthetic construct
  misc_feature 1..17: note = Oligonucleotide
  source 1..17: mol_type = other DNA
actcaagggacagcact

SEQ ID NO: 9470 - DNA, 17 bp, synthetic construct
  misc_feature 1..17: note = Oligonucleotide
  source 1..17: mol_type = other DNA
cttactcaagggacagc

SEQ ID NO: 9471 - DNA, 17 bp, synthetic construct
  misc_feature 1..17: note = Oligonucleotide
  source 1..17: mol_type = other DNA
ctacttactcaagggac

SEQ ID NO: 9472 - DNA, 17 bp, synthetic construct
  misc_feature 1..17: note = Oligonucleotide
  source 1..17: mol_type = other DNA
catctacttactcaagg

SEQ ID NO: 9473 - DNA, 17 bp, synthetic construct
  misc_feature 1..17: note = Oligonucleotide
  source 1..17: mol_type = other DNA
cagcatctacttactca

SEQ ID NO: 9474 - DNA, 17 bp, synthetic construct
  misc_feature 1..17: note = Oligonucleotide
  source 1..17: mol_type = other DNA
gtccagcatctacttac

SEQ ID NO: 9475 - DNA, 17 bp, synthetic construct
  misc_feature 1..17: note = Oligonucleotide
  source 1..17: mol_type = other DNA
gctgtccagcatctact

SEQ ID NO: 9476 - DNA, 17 bp, synthetic construct
  misc_feature 1..17: note = Oligonucleotide
  source 1..17: mol_type = other DNA
caggctgtccagcatct

SEQ ID NO: 9477 - DNA, 17 bp, synthetic construct
  misc_feature 1..17: note = Oligonucleotide
  source 1..17: mol_type = other DNA
ctacaggctgtccagca

SEQ ID NO: 9478 - DNA, 17 bp, synthetic construct
  misc_feature 1..17: note = Oligonucleotide
  source 1..17: mol_type = other DNA
ttgctacaggctgtcca

SEQ ID NO: 9479 - DNA, 17 bp, synthetic construct
  misc_feature 1..17: note = Oligonucleotide
  source 1..17: mol_type = other DNA
tggttgctacaggctgt

SEQ ID NO: 9480 - DNA, 17 bp, synthetic construct
  misc_feature 1..17: note = Oligonucleotide
  source 1..17: mol_type = other DNA
cattggttgctacaggc

SEQ ID NO: 9481 - DNA, 17 bp, synthetic construct
  misc_feature 1..17: note = Oligonucleotide
  source 1..17: mol_type = other DNA
gaacattggttgctaca

SEQ ID NO: 9482 - DNA, 17 bp, synthetic construct
  misc_feature 1..17: note = Oligonucleotide
  source 1..17: mol_type = other DNA
acagaacattggttgct

SEQ ID NO: 9483 - DNA, 17 bp, synthetic construct
  misc_feature 1..17: note = Oligonucleotide
  source 1..17: mol_type = other DNA
gtcacagaacattggtt

SEQ ID NO: 9484 - DNA, 17 bp, synthetic construct
  misc_feature 1..17: note = Oligonucleotide
  source 1..17: mol_type = other DNA
cgtgtcacagaacattg

SEQ ID NO: 9485 - DNA, 17 bp, synthetic construct
  misc_feature 1..17: note = Oligonucleotide
  source 1..17: mol_type = other DNA
ggccgtgtcacagaaca

SEQ ID NO: 9486 - DNA, 17 bp, synthetic construct
  misc_feature 1..17: note = Oligonucleotide
  source 1..17: mol_type = other DNA
gggggccgtgtcacaga

SEQ ID NO: 9487 - DNA, 17 bp, synthetic construct
  misc_feature 1..17: note = Oligonucleotide
  source 1..17: mol_type = other DNA
agtgggggccgtgtcac

SEQ ID NO: 9488 - DNA, 17 bp, synthetic construct
  misc_feature 1..17: note = Oligonucleotide
  source 1..17: mol_type = other DNA
gccagtgggggccgtgt

SEQ ID NO: 9489 - DNA, 17 bp, synthetic construct
  misc_feature 1..17: note = Oligonucleotide
  source 1..17: mol_type = other DNA
gatgccagtgggggccg

SEQ ID NO: 9490 - DNA, 17 bp, synthetic construct
  misc_feature 1..17: note = Oligonucleotide
  source 1..17: mol_type = other DNA
gctgatgccagtggggg

SEQ ID NO: 9491 - DNA, 17 bp, synthetic construct
  misc_feature 1..17: note = Oligonucleotide
  source 1..17: mol_type = other DNA
gttgctgatgccagtgg

SEQ ID NO: 9492 - DNA, 17 bp, synthetic construct
  misc_feature 1..17: note = Oligonucleotide
  source 1..17: mol_type = other DNA
tgagttgctgatgccag

SEQ ID NO: 9493 - DNA, 17 bp, synthetic construct
  misc_feature 1..17: note = Oligonucleotide
  source 1..17: mol_type = other DNA
aagtgagttgctgatgc

SEQ ID NO: 9494 - DNA, 17 bp, synthetic construct
  misc_feature 1..17: note = Oligonucleotide
  source 1..17: mol_type = other DNA
aggaagtgagttgctga

SEQ ID NO: 9495 - DNA, 17 bp, synthetic construct
  misc_feature 1..17: note = Oligonucleotide
  source 1..17: mol_type = other DNA
gcaaggaagtgagttgc

SEQ ID NO: 9496 - DNA, 17 bp, synthetic construct
  misc_feature 1..17: note = Oligonucleotide
  source 1..17: mol_type = other DNA
ccggcaaggaagtgagt

SEQ ID NO: 9497 - DNA, 17 bp, synthetic construct
  misc_feature 1..17: note = Oligonucleotide
  source 1..17: mol_type = other DNA
tgaccggcaaggaagtg

SEQ ID NO: 9498 - DNA, 17 bp, synthetic construct
  misc_feature 1..17: note = Oligonucleotide
  source 1..17: mol_type = other DNA
caatgaccggcaaggaa

SEQ ID NO: 9499 - DNA, 17 bp, synthetic construct
  misc_feature 1..17: note = Oligonucleotide
  source 1..17: mol_type = other DNA
agccaatgaccggcaag

SEQ ID NO: 9500 - DNA, 17 bp, synthetic construct
  misc_feature 1..17: note = Oligonucleotide
  source 1..17: mol_type = other DNA
ccaagccaatgaccggc

SEQ ID NO: 9501 - DNA, 17 bp, synthetic construct
  misc_feature 1..17: note = Oligonucleotide
  source 1..17: mol_type = other DNA
gctccaagccaatgacc

SEQ ID NO: 9502 - DNA, 17 bp, synthetic construct
  misc_feature 1..17: note = Oligonucleotide
  source 1..17: mol_type = other DNA
atggctccaagccaatg

SEQ ID NO: 9503 - DNA, 17 bp, synthetic construct
  misc_feature 1..17: note = Oligonucleotide
  source 1..17: mol_type = other DNA
ctgatggctccaagcca

SEQ ID NO: 9504 - DNA, 17 bp, synthetic construct
  misc_feature 1..17: note = Oligonucleotide
  source 1..17: mol_type = other DNA
cctctgatggctccaag

SEQ ID NO: 9505 - DNA, 17 bp, synthetic construct
  misc_feature 1..17: note = Oligonucleotide
  source 1..17: mol_type = other DNA
ggccctctgatggctcc

SEQ ID NO: 9506 - DNA, 17 bp, synthetic construct
  misc_feature 1..17: note = Oligonucleotide
  source 1..17: mol_type = other DNA
cagggccctctgatggc

SEQ ID NO: 9507 - DNA, 17 bp, synthetic construct
  misc_feature 1..17: note = Oligonucleotide
  source 1..17: mol_type = other DNA
catcagggccctctgat

SEQ ID NO: 9508 - DNA, 17 bp, synthetic construct
  misc_feature 1..17: note = Oligonucleotide
  source 1..17: mol_type = other DNA
cgacatcagggccctct

SEQ ID NO: 9509 - DNA, 17 bp, synthetic construct
  misc_feature 1..17: note = Oligonucleotide
  source 1..17: mol_type = other DNA
caccgacatcagggccc

SEQ ID NO: 9510 - DNA, 17 bp, synthetic construct
  misc_feature 1..17: note = Oligonucleotide
  source 1..17: mol_type = other DNA
gagcaccgacatcaggg

SEQ ID NO: 9511 - DNA, 17 bp, synthetic construct
  misc_feature 1..17: note = Oligonucleotide
  source 1..17: mol_type = other DNA
cctgagcaccgacatca

SEQ ID NO: 9512 - DNA, 17 bp, synthetic construct
  misc_feature 1..17: note = Oligonucleotide
  source 1..17: mol_type = other DNA
cctcctgagcaccgaca

SEQ ID NO: 9513 - DNA, 17 bp, synthetic construct
  misc_feature 1..17: note = Oligonucleotide
  source 1..17: mol_type = other DNA
tgacctcctgagcaccg

SEQ ID NO: 9514 - DNA, 17 bp, synthetic construct
  misc_feature 1..17: note = Oligonucleotide
  source 1..17: mol_type = other DNA
ctgtgacctcctgagca

SEQ ID NO: 9515 - DNA, 17 bp, synthetic construct
  misc_feature 1..17: note = Oligonucleotide
  source 1..17: mol_type = other DNA
aagctgtgacctcctga

SEQ ID NO: 9516 - DNA, 17 bp, synthetic construct
  misc_feature 1..17: note = Oligonucleotide
  source 1..17: mol_type = other DNA
actaagctgtgacctcc

SEQ ID NO: 9517 - DNA, 17 bp, synthetic construct
  misc_feature 1..17: note = Oligonucleotide
  source 1..17: mol_type = other DNA
agcactaagctgtgacc

SEQ ID NO: 9518 - DNA, 17 bp, synthetic construct
  misc_feature 1..17: note = Oligonucleotide
  source 1..17: mol_type = other DNA
tacagcactaagctgtg

SEQ ID NO: 9519 - DNA, 17 bp, synthetic construct
  misc_feature 1..17: note = Oligonucleotide
  source 1..17: mol_type = other DNA
ggatacagcactaagct

SEQ ID NO: 9520 - DNA, 17 bp, synthetic construct
  misc_feature 1..17: note = Oligonucleotide
  source 1..17: mol_type = other DNA
gagggatacagcactaa

SEQ ID NO: 9521 - DNA, 17 bp, synthetic construct
  misc_feature 1..17: note = Oligonucleotide
  source 1..17: mol_type = other DNA
ggggagggatacagcac

SEQ ID NO: 9522 - DNA, 17 bp, synthetic construct
  misc_feature 1..17: note = Oligonucleotide
  source 1..17: mol_type = other DNA
acaggggagggatacag

SEQ ID NO: 9523 - DNA, 17 bp, synthetic construct
  misc_feature 1..17: note = Oligonucleotide
  source 1..17: mol_type = other DNA
ttcacaggggagggata

SEQ ID NO: 9524 - DNA, 17 bp, synthetic construct
  misc_feature 1..17: note = Oligonucleotide
  source 1..17: mol_type = other DNA
cacttcacaggggaggg

SEQ ID NO: 9525 - DNA, 17 bp, synthetic construct
  misc_feature 1..17: note = Oligonucleotide
  source 1..17: mol_type = other DNA
atacacttcacagggga

SEQ ID NO: 9526 - DNA, 17 bp, synthetic construct
  misc_feature 1..17: note = Oligonucleotide
  source 1..17: mol_type = other DNA
taaatacacttcacagg

SEQ ID NO: 9527 - DNA, 17 bp, synthetic construct
  misc_feature 1..17: note = Oligonucleotide
  source 1..17: mol_type = other DNA
ctgtaaatacacttcac

SEQ ID NO: 9528 - DNA, 17 bp, synthetic construct
  misc_feature 1..17: note = Oligonucleotide
  source 1..17: mol_type = other DNA
tcgctgtaaatacactt

SEQ ID NO: 9529 - DNA, 17 bp, synthetic construct
  misc_feature 1..17: note = Oligonucleotide
  source 1..17: mol_type = other DNA
ggctcgctgtaaataca

SEQ ID NO: 9530 - DNA, 17 bp, synthetic construct
  misc_feature 1..17: note = Oligonucleotide
  source 1..17: mol_type = other DNA
gttggctcgctgtaaat

SEQ ID NO: 9531 - DNA, 17 bp, synthetic construct
  misc_feature 1..17: note = Oligonucleotide
  source 1..17: mol_type = other DNA
gcagttggctcgctgta

SEQ ID NO: 9532 - DNA, 17 bp, synthetic construct
  misc_feature 1..17: note = Oligonucleotide
  source 1..17: mol_type = other DNA
tgtgcagttggctcgct

SEQ ID NO: 9533 - DNA, 17 bp, synthetic construct
  misc_feature 1..17: note = Oligonucleotide
  source 1..17: mol_type = other DNA
gcctgtgcagttggctc

SEQ ID NO: 9534 - DNA, 17 bp, synthetic construct
  misc_feature 1..17: note = Oligonucleotide
  source 1..17: mol_type = other DNA
atagcctgtgcagttgg

SEQ ID NO: 9535 - DNA, 17 bp, synthetic construct
  misc_feature 1..17: note = Oligonucleotide
  source 1..17: mol_type = other DNA
gcgatagcctgtgcagt

SEQ ID NO: 9536 - DNA, 17 bp, synthetic construct
  misc_feature 1..17: note = Oligonucleotide
  source 1..17: mol_type = other DNA
ctcgcgatagcctgtgc

SEQ ID NO: 9537 - DNA, 17 bp, synthetic construct
  misc_feature 1..17: note = Oligonucleotide
  source 1..17: mol_type = other DNA
agcctcgcgatagcctg

SEQ ID NO: 9538 - DNA, 17 bp, synthetic construct
  misc_feature 1..17: note = Oligonucleotide
  source 1..17: mol_type = other DNA
tgcagcctcgcgatagc

SEQ ID NO: 9539 - DNA, 17 bp, synthetic construct
  misc_feature 1..17: note = Oligonucleotide
  source 1..17: mol_type = other DNA
gtgtgcagcctcgcgat

SEQ ID NO: 9540 - DNA, 17 bp, synthetic construct
  misc_feature 1..17: note = Oligonucleotide
  source 1..17: mol_type = other DNA
gccgtgtgcagcctcgc

SEQ ID NO: 9541 - DNA, 17 bp, synthetic construct
  misc_feature 1..17: note = Oligonucleotide
  source 1..17: mol_type = other DNA
gatgccgtgtgcagcct

SEQ ID NO: 9542 - DNA, 17 bp, synthetic construct
  misc_feature 1..17: note = Oligonucleotide
  source 1..17: mol_type = other DNA
ggtgatgccgtgtgcag

SEQ ID NO: 9543 - DNA, 17 bp, synthetic construct
  misc_feature 1..17: note = Oligonucleotide
  source 1..17: mol_type = other DNA
acaggtgatgccgtgtg

SEQ ID NO: 9544 - DNA, 17 bp, synthetic construct
  misc_feature 1..17: note = Oligonucleotide
  source 1..17: mol_type = other DNA
ttcacaggtgatgccgt

SEQ ID NO: 9545 - DNA, 17 bp, synthetic construct
  misc_feature 1..17: note = Oligonucleotide
  source 1..17: mol_type = other DNA
tgcttcacaggtgatgc

SEQ ID NO: 9546 - DNA, 17 bp, synthetic construct
  misc_feature 1..17: note = Oligonucleotide
  source 1..17: mol_type = other DNA
aggtgcttcacaggtga

SEQ ID NO: 9547 - DNA, 17 bp, synthetic construct
  misc_feature 1..17: note = Oligonucleotide
  source 1..17: mol_type = other DNA
accaggtgcttcacagg

SEQ ID NO: 9548 - DNA, 17 bp, synthetic construct
  misc_feature 1..17: note = Oligonucleotide
  source 1..17: mol_type = other DNA
cctaccaggtgcttcac

SEQ ID NO: 9549 - DNA, 17 bp, synthetic construct
  misc_feature 1..17: note = Oligonucleotide
  source 1..17: mol_type = other DNA
gggcctaccaggtgctt

SEQ ID NO: 9550 - DNA, 17 bp, synthetic construct
  misc_feature 1..17: note = Oligonucleotide
  source 1..17: mol_type = other DNA
cctgggcctaccaggtg

SEQ ID NO: 9551 - DNA, 17 bp, synthetic construct
  misc_feature 1..17: note = Oligonucleotide
  source 1..17: mol_type = other DNA
agccctgggcctaccag

SEQ ID NO: 9552 - DNA, 17 bp, synthetic construct
  misc_feature 1..17: note = Oligonucleotide
  source 1..17: mol_type = other DNA
cccagccctgggcctac

SEQ ID NO: 9553 - DNA, 17 bp, synthetic construct
  misc_feature 1..17: note = Oligonucleotide
  source 1..17: mol_type = other DNA
ggccccagccctgggcc

SEQ ID NO: 9554 - DNA, 17 bp, synthetic construct
  misc_feature 1..17: note = Oligonucleotide
  source 1..17: mol_type = other DNA
acaggccccagccctgg

SEQ ID NO: 9555 - DNA, 17 bp, synthetic construct
  misc_feature 1..17: note = Oligonucleotide
  source 1..17: mol_type = other DNA
tccacaggccccagccc

SEQ ID NO: 9556 - DNA, 17 bp, synthetic construct
  misc_feature 1..17: note = Oligonucleotide
  source 1..17: mol_type = other DNA
gggtccacaggccccag

SEQ ID NO: 9557 - DNA, 17 bp, synthetic construct
  misc_feature 1..17: note = Oligonucleotide
  source 1..17: mol_type = other DNA
gaggggtccacaggccc

SEQ ID NO: 9558 - DNA, 17 bp, synthetic construct
  misc_feature 1..17: note = Oligonucleotide
  source 1..17: mol_type = other DNA
agtgaggggtccacagg

SEQ ID NO: 9559 - DNA, 17 bp, synthetic construct
  misc_feature 1..17: note = Oligonucleotide
  source 1..17: mol_type = other DNA
accagtgaggggtccac

SEQ ID NO: 9560 - DNA, 17 bp, synthetic construct
  misc_feature 1..17: note = Oligonucleotide
  source 1..17: mol_type = other DNA
cacaccagtgaggggtc

SEQ ID NO: 9561 - DNA, 17 bp, synthetic construct
  misc_feature 1..17: note = Oligonucleotide
  source 1..17: mol_type = other DNA
gctcacaccagtgaggg

SEQ ID NO: 9562 - DNA, 17 bp, synthetic construct
  misc_feature 1..17: note = Oligonucleotide
  source 1..17: mol_type = other DNA
gcagctcacaccagtga

SEQ ID NO: 9563 - DNA, 17 bp, synthetic construct
  misc_feature 1..17: note = Oligonucleotide
  source 1..17: mol_type = other DNA
atggcagctcacaccag

SEQ ID NO: 9564 - DNA, 17 bp, synthetic construct
  misc_feature 1..17: note = Oligonucleotide
  source 1..17: mol_type = other DNA
acaatggcagctcacac

SEQ ID NO: 9565 - DNA, 17 bp, synthetic construct
  misc_feature 1..17: note = Oligonucleotide
  source 1..17: mol_type = other DNA
aagacaatggcagctca

SEQ ID NO: 9566 - DNA, 17 bp, synthetic construct
  misc_feature 1..17: note = Oligonucleotide
  source 1..17: mol_type = other DNA
gcaaagacaatggcagc

SEQ ID NO: 9567 - DNA, 17 bp, synthetic construct
  misc_feature 1..17: note = Oligonucleotide
  source 1..17: mol_type = other DNA
acagcaaagacaatggc

SEQ ID NO: 9568 - DNA, 17 bp, synthetic construct
  misc_feature 1..17: note = Oligonucleotide
  source 1..17: mol_type = other DNA
gtgacagcaaagacaat

SEQ ID NO: 9569 - DNA, 17 bp, synthetic construct
  misc_feature 1..17: note = Oligonucleotide
  source 1..17: mol_type = other DNA
tcagtgacagcaaagac

SEQ ID NO: 9570 - DNA, 17 bp, synthetic construct
  misc_feature 1..17: note = Oligonucleotide
  source 1..17: mol_type = other DNA
tcgtcagtgacagcaaa

SEQ ID NO: 9571 - DNA, 17 bp, synthetic construct
  misc_feature 1..17: note = Oligonucleotide
  source 1..17: mol_type = other DNA
gtgtcgtcagtgacagc

SEQ ID NO: 9572 - DNA, 17 bp, synthetic construct
  misc_feature 1..17: note = Oligonucleotide
  source 1..17: mol_type = other DNA
taggtgtcgtcagtgac

SEQ ID NO: 9573 - DNA, 17 bp, synthetic construct
  misc_feature 1..17: note = Oligonucleotide
  source 1..17: mol_type = other DNA
acctaggtgtcgtcagt

SEQ ID NO: 9574 - DNA, 17 bp, synthetic construct
  misc_feature 1..17: note = Oligonucleotide
  source 1..17: mol_type = other DNA
ctcacctaggtgtcgtc

SEQ ID NO: 9575 - DNA, 17 bp, synthetic construct
  misc_feature 1..17: note = Oligonucleotide
  source 1..17: mol_type = other DNA
gacctcacctaggtgtc

SEQ ID NO: 9576 - DNA, 17 bp, synthetic construct
  misc_feature 1..17: note = Oligonucleotide
  source 1..17: mol_type = other DNA
taagacctcacctaggt

SEQ ID NO: 9577 - DNA, 17 bp, synthetic construct
  misc_feature 1..17: note = Oligonucleotide
  source 1..17: mol_type = other DNA
ctctaagacctcaccta

SEQ ID NO: 9578 - DNA, 17 bp, synthetic construct
  misc_feature 1..17: note = Oligonucleotide
  source 1..17: mol_type = other DNA
ggactctaagacctcac

SEQ ID NO: 9579 - DNA, 17 bp, synthetic construct
  misc_feature 1..17: note = Oligonucleotide
  source 1..17: mol_type = other DNA
aaaggactctaagacct

SEQ ID NO: 9580 - DNA, 17 bp, synthetic construct
  misc_feature 1..17: note = Oligonucleotide
  source 1..17: mol_type = other DNA
cacaaaggactctaaga

SEQ ID NO: 9581 - DNA, 17 bp, synthetic construct
  misc_feature 1..17: note = Oligonucleotide
  source 1..17: mol_type = other DNA
tcccacaaaggactcta

SEQ ID NO: 9582 - DNA, 17 bp, synthetic construct
  misc_feature 1..17: note = Oligonucleotide
  source 1..17: mol_type = other DNA
ttttcccacaaaggact

SEQ ID NO: 9583 - DNA, 17 bp, synthetic construct
  misc_feature 1..17: note = Oligonucleotide
  source 1..17: mol_type = other DNA
ttgttttcccacaaagg

SEQ ID NO: 9584 - DNA, 17 bp, synthetic construct
  misc_feature 1..17: note = Oligonucleotide
  source 1..17: mol_type = other DNA
ggcttgttttcccacaa

SEQ ID NO: 9585 - DNA, 17 bp, synthetic construct
  misc_feature 1..17: note = Oligonucleotide
  source 1..17: mol_type = other DNA
acaggcttgttttccca

SEQ ID NO: 9586 - DNA, 17 bp, synthetic construct
  misc_feature 1..17: note = Oligonucleotide
  source 1..17: mol_type = other DNA
ccaacaggcttgttttc

SEQ ID NO: 9587 - DNA, 17 bp, synthetic construct
  misc_feature 1..17: note = Oligonucleotide
  source 1..17: mol_type = other DNA
catccaacaggcttgtt

SEQ ID NO: 9588 - DNA, 17 bp, synthetic construct
  misc_feature 1..17: note = Oligonucleotide
  source 1..17: mol_type = other DNA
ctgcatccaacaggctt

SEQ ID NO: 9589 - DNA, 17 bp, synthetic construct
  misc_feature 1..17: note = Oligonucleotide
  source 1..17: mol_type = other DNA
gtgctgcatccaacagg

SEQ ID NO: 9590 - DNA, 17 bp, synthetic construct
  misc_feature 1..17: note = Oligonucleotide
  source 1..17: mol_type = other DNA
ccagtgctgcatccaac

SEQ ID NO: 9591 - DNA, 17 bp, synthetic construct
  misc_feature 1..17: note = Oligonucleotide
  source 1..17: mol_type = other DNA
tctccagtgctgcatcc

SEQ ID NO: 9592 - DNA, 17 bp, synthetic construct
  misc_feature 1..17: note = Oligonucleotide
  source 1..17: mol_type = other DNA
ccgtctccagtgctgca

SEQ ID NO: 9593 - DNA, 17 bp, synthetic construct
  misc_feature 1..17: note = Oligonucleotide
  source 1..17: mol_type = other DNA
ggaccgtctccagtgct

SEQ ID NO: 9594 - DNA, 17 bp, synthetic construct
  misc_feature 1..17: note = Oligonucleotide
  source 1..17: mol_type = other DNA
gcaggaccgtctccagt

SEQ ID NO: 9595 - DNA, 17 bp, synthetic construct
  misc_feature 1..17: note = Oligonucleotide
  source 1..17: mol_type = other DNA
acggcaggaccgtctcc

SEQ ID NO: 9596 - DNA, 17 bp, synthetic construct
  misc_feature 1..17: note = Oligonucleotide
  source 1..17: mol_type = other DNA
gatacggcaggaccgtc

SEQ ID NO: 9597 - DNA, 17 bp, synthetic construct
  misc_feature 1..17: note = Oligonucleotide
  source 1..17: mol_type = other DNA
actgatacggcaggacc

SEQ ID NO: 9598 - DNA, 17 bp, synthetic construct
  misc_feature 1..17: note = Oligonucleotide
  source 1..17: mol_type = other DNA
caaactgatacggcagg

SEQ ID NO: 9599 - DNA, 17 bp, synthetic construct
  misc_feature 1..17: note = Oligonucleotide
  source 1..17: mol_type = other DNA
agacaaactgatacggc

SEQ ID NO: 9600 - DNA, 17 bp, synthetic construct
  misc_feature 1..17: note = Oligonucleotide
  source 1..17: mol_type = other DNA
tgaagacaaactgatac

SEQ ID NO: 9601 - DNA, 17 bp, synthetic construct
  misc_feature 1..17: note = Oligonucleotide
  source 1..17: mol_type = other DNA
gtgtgaagacaaactga

SEQ ID NO: 9602 - DNA, 17 bp, synthetic construct
  misc_feature 1..17: note = Oligonucleotide
  source 1..17: mol_type = other DNA
acggtgtgaagacaaac

SEQ ID NO: 9603 - DNA, 17 bp, synthetic construct
  misc_feature 1..17: note = Oligonucleotide
  source 1..17: mol_type = other DNA
agaacggtgtgaagaca

SEQ ID NO: 9604 - DNA, 17 bp, synthetic construct
  misc_feature 1..17: note = Oligonucleotide
  source 1..17: mol_type = other DNA
aacagaacggtgtgaag

SEQ ID NO: 9605 - DNA, 17 bp, synthetic construct
  misc_feature 1..17: note = Oligonucleotide
  source 1..17: mol_type = other DNA
tctaacagaacggtgtg

SEQ ID NO: 9606 - DNA, 17 bp, synthetic construct
  misc_feature 1..17: note = Oligonucleotide
  source 1..17: mol_type = other DNA
ccgtctaacagaacggt

SEQ ID NO: 9607 - DNA, 17 bp, synthetic construct
  misc_feature 1..17: note = Oligonucleotide
  source 1..17: mol_type = other DNA
tgtccgtctaacagaac

SEQ ID NO: 9608 - DNA, 17 bp, synthetic construct
  misc_feature 1..17: note = Oligonucleotide
  source 1..17: mol_type = other DNA
tagtgtccgtctaacag

SEQ ID NO: 9609 - DNA, 17 bp, synthetic construct
  misc_feature 1..17: note = Oligonucleotide
  source 1..17: mol_type = other DNA
tgttagtgtccgtctaa

SEQ ID NO: 9610 - DNA, 17 bp, synthetic construct
  misc_feature 1..17: note = Oligonucleotide
  source 1..17: mol_type = other DNA
ttctgttagtgtccgtc

SEQ ID NO: 9611 - DNA, 17 bp, synthetic construct
  misc_feature 1..17: note = Oligonucleotide
  source 1..17: mol_type = other DNA
ggattctgttagtgtcc

SEQ ID NO: 9612 - DNA, 17 bp, synthetic construct
  misc_feature 1..17: note = Oligonucleotide
  source 1..17: mol_type = other DNA
tgaggattctgttagtg

SEQ ID NO: 9613 - DNA, 17 bp, synthetic construct
  misc_feature 1..17: note = Oligonucleotide
  source 1..17: mol_type = other DNA
acatgaggattctgtta

SEQ ID NO: 9614 - DNA, 17 bp, synthetic construct
  misc_feature 1..17: note = Oligonucleotide
  source 1..17: mol_type = other DNA
ggaacatgaggattctg

SEQ ID NO: 9615 - DNA, 17 bp, synthetic construct
  misc_feature 1..17: note = Oligonucleotide
  source 1..17: mol_type = other DNA
tctggaacatgaggatt

SEQ ID NO: 9616 - DNA, 17 bp, synthetic construct
  misc_feature 1..17: note = Oligonucleotide
  source 1..17: mol_type = other DNA
ttgtctggaacatgagg

SEQ ID NO: 9617 - DNA, 17 bp, synthetic construct
  misc_feature 1..17: note = Oligonucleotide
  source 1..17: mol_type = other DNA
tcattgtctggaacatg

SEQ ID NO: 9618 - DNA, 17 bp, synthetic construct
  misc_feature 1..17: note = Oligonucleotide
  source 1..17: mol_type = other DNA
gtttcattgtctggaac

SEQ ID NO: 9619 - DNA, 17 bp, synthetic construct
  misc_feature 1..17: note = Oligonucleotide
  source 1..17: mol_type = other DNA
tcagtttcattgtctgg

SEQ ID NO: 9620 - DNA, 17 bp, synthetic construct
  misc_feature 1..17: note = Oligonucleotide
  source 1..17: mol_type = other DNA
acctcagtttcattgtc

SEQ ID NO: 9621 - DNA, 17 bp, synthetic construct
  misc_feature 1..17: note = Oligonucleotide
  source 1..17: mol_type = other DNA
ggtacctcagtttcatt

SEQ ID NO: 9622 - DNA, 17 bp, synthetic construct
  misc_feature 1..17: note = Oligonucleotide
  source 1..17: mol_type = other DNA
tctggtacctcagtttc

SEQ ID NO: 9623 - DNA, 17 bp, synthetic construct
  misc_feature 1..17: note = Oligonucleotide
  source 1..17: mol_type = other DNA
ctctctggtacctcagt

SEQ ID NO: 9624 - DNA, 17 bp, synthetic construct
  misc_feature 1..17: note = Oligonucleotide
  source 1..17: mol_type = other DNA
aagctctctggtacctc

SEQ ID NO: 9625 - DNA, 17 bp, synthetic construct
  misc_feature 1..17: note = Oligonucleotide
  source 1..17: mol_type = other DNA
aggaagctctctggtac

SEQ ID NO: 9626 - DNA, 17 bp, synthetic construct
  misc_feature 1..17: note = Oligonucleotide
  source 1..17: mol_type = other DNA
gcaaggaagctctctgg

SEQ ID NO: 9627 - DNA, 17 bp, synthetic construct
  misc_feature 1..17: note = Oligonucleotide
  source 1..17: mol_type = other DNA
tctgcaaggaagctctc

SEQ ID NO: 9628 - DNA, 17 bp, synthetic construct
  misc_feature 1..17: note = Oligonucleotide
  source 1..17: mol_type = other DNA
ctgtctgcaaggaagct

SEQ ID NO: 9629 - DNA, 17 bp, synthetic construct
  misc_feature 1..17: note = Oligonucleotide
  source 1..17: mol_type = other DNA
tttctgtctgcaaggaa

SEQ ID NO: 9630 - DNA, 17 bp, synthetic construct
  misc_feature 1..17: note = Oligonucleotide
  source 1..17: mol_type = other DNA
cgttttctgtctgcaag

SEQ ID NO: 9631 - DNA, 17 bp, synthetic construct
  misc_feature 1..17: note = Oligonucleotide
  source 1..17: mol_type = other DNA
caccgttttctgtctgc

SEQ ID NO: 9632 - DNA, 17 bp, synthetic construct
  misc_feature 1..17: note = Oligonucleotide
  source 1..17: mol_type = other DNA
gaccaccgttttctgtc

SEQ ID NO: 9633 - DNA, 17 bp, synthetic construct
  misc_feature 1..17: note = Oligonucleotide
  source 1..17: mol_type = other DNA
gcagaccaccgttttct

SEQ ID NO: 9634 - DNA, 17 bp, synthetic construct
  misc_feature 1..17: note = Oligonucleotide
  source 1..17: mol_type = other DNA
caggcagaccaccgttt

SEQ ID NO: 9635 - DNA, 17 bp, synthetic construct
  misc_feature 1..17: note = Oligonucleotide
  source 1..17: mol_type = other DNA
ggtcaggcagaccaccg

SEQ ID NO: 9636 - DNA, 17 bp, synthetic construct
  misc_feature 1..17: note = Oligonucleotide
  source 1..17: mol_type = other DNA
catggtcaggcagacca

SEQ ID NO: 9637 - DNA, 17 bp, synthetic construct
  misc_feature 1..17: note = Oligonucleotide
  source 1..17: mol_type = other DNA
gctcatggtcaggcaga

SEQ ID NO: 9638 - DNA, 17 bp, synthetic construct
  misc_feature 1..17: note = Oligonucleotide
  source 1..17: mol_type = other DNA
agggctcatggtcaggc

SEQ ID NO: 9639 - DNA, 17 bp, synthetic construct
  misc_feature 1..17: note = Oligonucleotide
  source 1..17: mol_type = other DNA
agcagggctcatggtca

SEQ ID NO: 9640 - DNA, 17 bp, synthetic construct
  misc_feature 1..17: note = Oligonucleotide
  source 1..17: mol_type = other DNA
gagagcagggctcatgg

SEQ ID NO: 9641 - DNA, 17 bp, synthetic construct
  misc_feature 1..17: note = Oligonucleotide
  source 1..17: mol_type = other DNA
ccagagagcagggctca

SEQ ID NO: 9642 - DNA, 17 bp, synthetic construct
  misc_feature 1..17: note = Oligonucleotide
  source 1..17: mol_type = other DNA
cagccagagagcagggc

SEQ ID NO: 9643 - DNA, 17 bp, synthetic construct
  misc_feature 1..17: note = Oligonucleotide
  source 1..17: mol_type = other DNA
cggcagccagagagcag

SEQ ID NO: 9644 - DNA, 17 bp, synthetic construct
  misc_feature 1..17: note = Oligonucleotide
  source 1..17: mol_type = other DNA
ttacggcagccagagag

SEQ ID NO: 9645 - DNA, 17 bp, synthetic construct
  misc_feature 1..17: note = Oligonucleotide
  source 1..17: mol_type = other DNA
tggttacggcagccaga

SEQ ID NO: 9646 - DNA, 17 bp, synthetic construct
  misc_feature 1..17: note = Oligonucleotide
  source 1..17: mol_type = other DNA
ccctggttacggcagcc

SEQ ID NO: 9647 - DNA, 17 bp, synthetic construct
  misc_feature 1..17: note = Oligonucleotide
  source 1..17: mol_type = other DNA
cggccctggttacggca

SEQ ID NO: 9648 - DNA, 17 bp, synthetic construct
  misc_feature 1..17: note = Oligonucleotide
  source 1..17: mol_type = other DNA
cagcggccctggttacg

SEQ ID NO: 9649 - DNA, 17 bp, synthetic construct
  misc_feature 1..17: note = Oligonucleotide
  source 1..17: mol_type = other DNA
caacagcggccctggtt

SEQ ID NO: 9650 - DNA, 17 bp, synthetic construct
  misc_feature 1..17: note = Oligonucleotide
  source 1..17: mol_type = other DNA
taacaacagcggccctg

SEQ ID NO: 9651 - DNA, 17 bp, synthetic construct
  misc_feature 1..17: note = Oligonucleotide
  source 1..17: mol_type = other DNA
gcttaacaacagcggcc

SEQ ID NO: 9652 - DNA, 17 bp, synthetic construct
  misc_feature 1..17: note = Oligonucleotide
  source 1..17: mol_type = other DNA
ggggcttaacaacagcg

SEQ ID NO: 9653 - DNA, 17 bp, synthetic construct
  misc_feature 1..17: note = Oligonucleotide
  source 1..17: mol_type = other DNA
gaaggggcttaacaaca

SEQ ID NO: 9654 - DNA, 17 bp, synthetic construct
  misc_feature 1..17: note = Oligonucleotide
  source 1..17: mol_type = other DNA
tcagaaggggcttaaca

SEQ ID NO: 9655 - DNA, 17 bp, synthetic construct
  misc_feature 1..17: note = Oligonucleotide
  source 1..17: mol_type = other DNA
tcatcagaaggggctta

SEQ ID NO: 9656 - DNA, 17 bp, synthetic construct
  misc_feature 1..17: note = Oligonucleotide
  source 1..17: mol_type = other DNA
gtgtcatcagaaggggc

SEQ ID NO: 9657 - DNA, 17 bp, synthetic construct
  misc_feature 1..17: note = Oligonucleotide
  source 1..17: mol_type = other DNA
tgtgtgtcatcagaagg

SEQ ID NO: 9658 - DNA, 17 bp, synthetic construct
  misc_feature 1..17: note = Oligonucleotide
  source 1..17: mol_type = other DNA
cattgtgtgtcatcaga

SEQ ID NO: 9659 - DNA, 17 bp, synthetic construct
  misc_feature 1..17: note = Oligonucleotide
  source 1..17: mol_type = other DNA
gcccattgtgtgtcatc

SEQ ID NO: 9660 - DNA, 17 bp, synthetic construct
  misc_feature 1..17: note = Oligonucleotide
  source 1..17: mol_type = other DNA
aaagcccattgtgtgtc

SEQ ID NO: 9661 - DNA, 17 bp, synthetic construct
  misc_feature 1..17: note = Oligonucleotide
  source 1..17: mol_type = other DNA
gcaaaagcccattgtgt

SEQ ID NO: 9662 - DNA, 17 bp, synthetic construct
  misc_feature 1..17: note = Oligonucleotide
  source 1..17: mol_type = other DNA
tgggcaaaagcccattg

SEQ ID NO: 9663 - DNA, 17 bp, synthetic construct
  misc_feature 1..17: note = Oligonucleotide
  source 1..17: mol_type = other DNA
tactgggcaaaagccca

SEQ ID NO: 9664 - DNA, 17 bp, synthetic construct
  misc_feature 1..17: note = Oligonucleotide
  source 1..17: mol_type = other DNA
cgttactgggcaaaagc

SEQ ID NO: 9665 - DNA, 17 bp, synthetic construct
  misc_feature 1..17: note = Oligonucleotide
  source 1..17: mol_type = other DNA
gggcgttactgggcaaa

SEQ ID NO: 9666 - DNA, 17 bp, synthetic construct
  misc_feature 1..17: note = Oligonucleotide
  source 1..17: mol_type = other DNA
gaggggcgttactgggc

SEQ ID NO: 9667 - DNA, 17 bp, synthetic construct
  misc_feature 1..17: note = Oligonucleotide
  source 1..17: mol_type = other DNA
gtggaggggcgttactg

SEQ ID NO: 9668 - DNA, 17 bp, synthetic construct
  misc_feature 1..17: note = Oligonucleotide
  source 1..17: mol_type = other DNA
tctgtggaggggcgtta

SEQ ID NO: 9669 - DNA, 17 bp, synthetic construct
  misc_feature 1..17: note = Oligonucleotide
  source 1..17: mol_type = other DNA
acttctgtggaggggcg

SEQ ID NO: 9670 - DNA, 17 bp, synthetic construct
  misc_feature 1..17: note = Oligonucleotide
  source 1..17: mol_type = other DNA
gccacttctgtggaggg

SEQ ID NO: 9671 - DNA, 17 bp, synthetic construct
  misc_feature 1..17: note = Oligonucleotide
  source 1..17: mol_type = other DNA
cctgccacttctgtgga

SEQ ID NO: 9672 - DNA, 17 bp, synthetic construct
  misc_feature 1..17: note = Oligonucleotide
  source 1..17: mol_type = other DNA
acacctgccacttctgt

SEQ ID NO: 9673 - DNA, 17 bp, synthetic construct
  misc_feature 1..17: note = Oligonucleotide
  source 1..17: mol_type = other DNA
cacacacctgccacttc

SEQ ID NO: 9674 - DNA, 17 bp, synthetic construct
  misc_feature 1..17: note = Oligonucleotide
  source 1..17: mol_type = other DNA
atgcacacacctgccac

SEQ ID NO: 9675 - DNA, 17 bp, synthetic construct
  misc_feature 1..17: note = Oligonucleotide
  source 1..17: mol_type = other DNA
gccatgcacacacctgc

SEQ ID NO: 9676 - DNA, 17 bp, synthetic construct
  misc_feature 1..17: note = Oligonucleotide
  source 1..17: mol_type = other DNA
tgtgccatgcacacacc

SEQ ID NO: 9677 - DNA, 17 bp, synthetic construct
  misc_feature 1..17: note = Oligonucleotide
  source 1..17: mol_type = other DNA
gtctgtgccatgcacac

SEQ ID NO: 9678 - DNA, 17 bp, synthetic construct
  misc_feature 1..17: note = Oligonucleotide
  source 1..17: mol_type = other DNA
tgagtctgtgccatgca

SEQ ID NO: 9679 - DNA, 17 bp, synthetic construct
  misc_feature 1..17: note = Oligonucleotide
  source 1..17: mol_type = other DNA
gggtgagtctgtgccat

SEQ ID NO: 9680 - DNA, 17 bp, synthetic construct
  misc_feature 1..17: note = Oligonucleotide
  source 1..17: mol_type = other DNA
cgggggtgagtctgtgc

SEQ ID NO: 9681 - DNA, 17 bp, synthetic construct
  misc_feature 1..17: note = Oligonucleotide
  source 1..17: mol_type = other DNA
cagcgggggtgagtctg

SEQ ID NO: 9682 - DNA, 17 bp, synthetic construct
  misc_feature 1..17: note = Oligonucleotide
  source 1..17: mol_type = other DNA
aaacagcgggggtgagt

SEQ ID NO: 9683 - DNA, 17 bp, synthetic construct
  misc_feature 1..17: note = Oligonucleotide
  source 1..17: mol_type = other DNA
agtaaacagcgggggtg

SEQ ID NO: 9684 - DNA, 17 bp, synthetic construct
  misc_feature 1..17: note = Oligonucleotide
  source 1..17: mol_type = other DNA
accagtaaacagcgggg

SEQ ID NO: 9685 - DNA, 17 bp, synthetic construct
  misc_feature 1..17: note = Oligonucleotide
  source 1..17: mol_type = other DNA
atgaccagtaaacagcg

SEQ ID NO: 9686 - DNA, 17 bp, synthetic construct
  misc_feature 1..17: note = Oligonucleotide
  source 1..17: mol_type = other DNA
aacatgaccagtaaaca

SEQ ID NO: 9687 - DNA, 17 bp, synthetic construct
  misc_feature 1..17: note = Oligonucleotide
  source 1..17: mol_type = other DNA
acaaacatgaccagtaa

SEQ ID NO: 9688 - DNA, 17 bp, synthetic construct
  misc_feature 1..17: note = Oligonucleotide
  source 1..17: mol_type = other DNA
atgacaaacatgaccag

SEQ ID NO: 9689 - DNA, 17 bp, synthetic construct
  misc_feature 1..17: note = Oligonucleotide
  source 1..17: mol_type = other DNA
cttatgacaaacatgac

SEQ ID NO: 9690 - DNA, 17 bp, synthetic construct
  misc_feature 1..17: note = Oligonucleotide
  source 1..17: mol_type = other DNA
ctacttatgacaaacat

SEQ ID NO: 9691 - DNA, 17 bp, synthetic construct
  misc_feature 1..17: note = Oligonucleotide
  source 1..17: mol_type = other DNA
gtgctacttatgacaaa

SEQ ID NO: 9692 - DNA, 17 bp, synthetic construct
  misc_feature 1..17: note = Oligonucleotide
  source 1..17: mol_type = other DNA
caggtgctacttatgac

SEQ ID NO: 9693 - DNA, 17 bp, synthetic construct
  misc_feature 1..17: note = Oligonucleotide
  source 1..17: mol_type = other DNA
caccaggtgctacttat

SEQ ID NO: 9694 - DNA, 17 bp, synthetic construct
  misc_feature 1..17: note = Oligonucleotide
  source 1..17: mol_type = other DNA
tggcaccaggtgctact

SEQ ID NO: 9695 - DNA, 17 bp, synthetic construct
  misc_feature 1..17: note = Oligonucleotide
  source 1..17: mol_type = other DNA
aggtggcaccaggtgct

SEQ ID NO: 9696 - DNA, 17 bp, synthetic construct
  misc_feature 1..17: note = Oligonucleotide
  source 1..17: mol_type = other DNA
ctcaggtggcaccaggt

SEQ ID NO: 9697 - DNA, 17 bp, synthetic construct
  misc_feature 1..17: note = Oligonucleotide
  source 1..17: mol_type = other DNA
ccactcaggtggcacca

SEQ ID NO: 9698 - DNA, 17 bp, synthetic construct
  misc_feature 1..17: note = Oligonucleotide
  source 1..17: mol_type = other DNA
aggccactcaggtggca

SEQ ID NO: 9699 - DNA, 17 bp, synthetic construct
  misc_feature 1..17: note = Oligonucleotide
  source 1..17: mol_type = other DNA
ggtaggccactcaggtg

SEQ ID NO: 9700 - DNA, 17 bp, synthetic construct
  misc_feature 1..17: note = Oligonucleotide
  source 1..17: mol_type = other DNA
ccgggtaggccactcag

SEQ ID NO: 9701 - DNA, 17 bp, synthetic construct
  misc_feature 1..17: note = Oligonucleotide
  source 1..17: mol_type = other DNA
ggcccgggtaggccact

SEQ ID NO: 9702 - DNA, 17 bp, synthetic construct
  misc_feature 1..17: note = Oligonucleotide
  source 1..17: mol_type = other DNA
gcaggcccgggtaggcc

SEQ ID NO: 9703 - DNA, 17 bp, synthetic construct
  misc_feature 1..17: note = Oligonucleotide
  source 1..17: mol_type = other DNA
aaagcaggcccgggtag

SEQ ID NO: 9704 - DNA, 17 bp, synthetic construct
  misc_feature 1..17: note = Oligonucleotide
  source 1..17: mol_type = other DNA
ggaaaagcaggcccggg

SEQ ID NO: 9705 - DNA, 17 bp, synthetic construct
  misc_feature 1..17: note = Oligonucleotide
  source 1..17: mol_type = other DNA
gaaggaaaagcaggccc

SEQ ID NO: 9706 - DNA, 17 bp, synthetic construct
  misc_feature 1..17: note = Oligonucleotide
  source 1..17: mol_type = other DNA
tgagaaggaaaagcagg

SEQ ID NO: 9707 - DNA, 17 bp, synthetic construct
  misc_feature 1..17: note = Oligonucleotide
  source 1..17: mol_type = other DNA
aactgagaaggaaaagc

SEQ ID NO: 9708 - DNA, 17 bp, synthetic construct
  misc_feature 1..17: note = Oligonucleotide
  source 1..17: mol_type = other DNA
gcaaactgagaaggaaa

SEQ ID NO: 9709 - DNA, 17 bp, synthetic construct
  misc_feature 1..17: note = Oligonucleotide
  source 1..17: mol_type = other DNA
gaggcaaactgagaagg

SEQ ID NO: 9710 - DNA, 17 bp, synthetic construct
  misc_feature 1..17: note = Oligonucleotide
  source 1..17: mol_type = other DNA
acagaggcaaactgaga

SEQ ID NO: 9711 - DNA, 17 bp, synthetic construct
  misc_feature 1..17: note = Oligonucleotide
  source 1..17: mol_type = other DNA
aacacagaggcaaactg

SEQ ID NO: 9712 - DNA, 17 bp, synthetic construct
  misc_feature 1..17: note = Oligonucleotide
  source 1..17: mol_type = other DNA
ggtaacacagaggcaaa

SEQ ID NO: 9713 - DNA, 17 bp, synthetic construct
  misc_feature 1..17: note = Oligonucleotide
  source 1..17: mol_type = other DNA
gaaggtaacacagaggc

SEQ ID NO: 9714 - DNA, 17 bp, synthetic construct
  misc_feature 1..17: note = Oligonucleotide
  source 1..17: mol_type = other DNA
acagaaggtaacacaga

SEQ ID NO: 9715 - DNA, 17 bp, synthetic construct
  misc_feature 1..17: note = Oligonucleotide
  source 1..17: mol_type = other DNA
ggaacagaaggtaacac

SEQ ID NO: 9716 - DNA, 17 bp, synthetic construct
  misc_feature 1..17: note = Oligonucleotide
  source 1..17: mol_type = other DNA
gctggaacagaaggtaa

SEQ ID NO: 9717 - DNA, 17 bp, synthetic construct
  misc_feature 1..17: note = Oligonucleotide
  source 1..17: mol_type = other DNA
tgagctggaacagaagg

SEQ ID NO: 9718 - DNA, 17 bp, synthetic construct
  misc_feature 1..17: note = Oligonucleotide
  source 1..17: mol_type = other DNA
gagtgagctggaacaga

SEQ ID NO: 9719 - DNA, 17 bp, synthetic construct
  misc_feature 1..17: note = Oligonucleotide
  source 1..17: mol_type = other DNA
gaagagtgagctggaac

SEQ ID NO: 9720 - DNA, 17 bp, synthetic construct
  misc_feature 1..17: note = Oligonucleotide
  source 1..17: mol_type = other DNA
aaggaagagtgagctgg

SEQ ID NO: 9721 - DNA, 17 bp, synthetic construct
  misc_feature 1..17: note = Oligonucleotide
  source 1..17: mol_type = other DNA
tgaaaggaagagtgagc

SEQ ID NO: 9722 - DNA, 17 bp, synthetic construct
  misc_feature 1..17: note = Oligonucleotide
  source 1..17: mol_type = other DNA
gggtgaaaggaagagtg

SEQ ID NO: 9723 - DNA, 17 bp, synthetic construct
  misc_feature 1..17: note = Oligonucleotide
  source 1..17: mol_type = other DNA
agagggtgaaaggaaga

SEQ ID NO: 9724 - DNA, 17 bp, synthetic construct
  misc_feature 1..17: note = Oligonucleotide
  source 1..17: mol_type = other DNA
gcaagagggtgaaagga

SEQ ID NO: 9725 - DNA, 17 bp, synthetic construct
  misc_feature 1..17: note = Oligonucleotide
  source 1..17: mol_type = other DNA
agcgcaagagggtgaaa

SEQ ID NO: 9726 - DNA, 17 bp, synthetic construct
  misc_feature 1..17: note = Oligonucleotide
  source 1..17: mol_type = other DNA
aggagcgcaagagggtg

SEQ ID NO: 9727 - DNA, 17 bp, synthetic construct
  misc_feature 1..17: note = Oligonucleotide
  source 1..17: mol_type = other DNA
agaaggagcgcaagagg

SEQ ID NO: 9728 - DNA, 17 bp, synthetic construct
  misc_feature 1..17: note = Oligonucleotide
  source 1..17: mol_type = other DNA
gcgagaaggagcgcaag

SEQ ID NO: 9729 - DNA, 17 bp, synthetic construct
  misc_feature 1..17: note = Oligonucleotide
  source 1..17: mol_type = other DNA
agggcgagaaggagcgc

SEQ ID NO: 9730 - DNA, 17 bp, synthetic construct
  misc_feature 1..17: note = Oligonucleotide
  source 1..17: mol_type = other DNA
ctgagggcgagaaggag

SEQ ID NO: 9731 - DNA, 17 bp, synthetic construct
  misc_feature 1..17: note = Oligonucleotide
  source 1..17: mol_type = other DNA
ggtctgagggcgagaag

SEQ ID NO: 9732 - DNA, 17 bp, synthetic construct
  misc_feature 1..17: note = Oligonucleotide
  source 1..17: mol_type = other DNA
ccaggtctgagggcgag

SEQ ID NO: 9733 - DNA, 17 bp, synthetic construct
  misc_feature 1..17: note = Oligonucleotide
  source 1..17: mol_type = other DNA
agcccaggtctgagggc

SEQ ID NO: 9734 - DNA, 17 bp, synthetic construct
  misc_feature 1..17: note = Oligonucleotide
  source 1..17: mol_type = other DNA
ttcagcccaggtctgag

SEQ ID NO: 9735 - DNA, 17 bp, synthetic construct
  misc_feature 1..17: note = Oligonucleotide
  source 1..17: mol_type = other DNA
tagttcagcccaggtct

SEQ ID NO: 9736 - DNA, 17 bp, synthetic construct
  misc_feature 1..17: note = Oligonucleotide
  source 1..17: mol_type = other DNA
ctgtagttcagcccagg

SEQ ID NO: 9737 - DNA, 17 bp, synthetic construct
  misc_feature 1..17: note = Oligonucleotide
  source 1..17: mol_type = other DNA
tggctgtagttcagccc

SEQ ID NO: 9738 - DNA, 17 bp, synthetic construct
  misc_feature 1..17: note = Oligonucleotide
  source 1..17: mol_type = other DNA
agatggctgtagttcag

SEQ ID NO: 9739 - DNA, 17 bp, synthetic construct
  misc_feature 1..17: note = Oligonucleotide
  source 1..17: mol_type = other DNA
tccagatggctgtagtt

SEQ ID NO: 9740 - DNA, 17 bp, synthetic construct
  misc_feature 1..17: note = Oligonucleotide
  source 1..17: mol_type = other DNA
ccctccagatggctgta

SEQ ID NO: 9741 - DNA, 17 bp, synthetic construct
  misc_feature 1..17: note = Oligonucleotide
  source 1..17: mol_type = other DNA
ggcccctccagatggct

SEQ ID NO: 9742 - DNA, 17 bp, synthetic construct
  misc_feature 1..17: note = Oligonucleotide
  source 1..17: mol_type = other DNA
aggggcccctccagatg

SEQ ID NO: 9743 - DNA, 17 bp, synthetic construct
  misc_feature 1..17: note = Oligonucleotide
  source 1..17: mol_type = other DNA
ggcaggggcccctccag

SEQ ID NO: 9744 - DNA, 17 bp, synthetic construct
  misc_feature 1..17: note = Oligonucleotide
  source 1..17: mol_type = other DNA
gtgggcaggggcccctc

SEQ ID NO: 9745 - DNA, 17 bp, synthetic construct
  misc_feature 1..17: note = Oligonucleotide
  source 1..17: mol_type = other DNA
agggtgggcaggggccc

SEQ ID NO: 9746 - DNA, 17 bp, synthetic construct
  misc_feature 1..17: note = Oligonucleotide
  source 1..17: mol_type = other DNA
cccagggtgggcagggg

SEQ ID NO: 9747 - DNA, 17 bp, synthetic construct
  misc_feature 1..17: note = Oligonucleotide
  source 1..17: mol_type = other DNA
gggcccagggtgggcag

SEQ ID NO: 9748 - DNA, 17 bp, synthetic construct
  misc_feature 1..17: note = Oligonucleotide
  source 1..17: mol_type = other DNA
taagggcccagggtggg

SEQ ID NO: 9749 - DNA, 17 bp, synthetic construct
  misc_feature 1..17: note = Oligonucleotide
  source 1..17: mol_type = other DNA
agttaagggcccagggt

SEQ ID NO: 9750 - DNA, 17 bp, synthetic construct
  misc_feature 1..17: note = Oligonucleotide
  source 1..17: mol_type = other DNA
ggaagttaagggcccag

SEQ ID NO: 9751 - DNA, 17 bp, synthetic construct
  misc_feature 1..17: note = Oligonucleotide
  source 1..17: mol_type = other DNA
accggaagttaagggcc

SEQ ID NO: 9752 - DNA, 17 bp, synthetic construct
  misc_feature 1..17: note = Oligonucleotide
  source 1..17: mol_type = other DNA
agcaccggaagttaagg

SEQ ID NO: 9753 - DNA, 17 bp, synthetic construct
  misc_feature 1..17: note = Oligonucleotide
  source 1..17: mol_type = other DNA
agaagcaccggaagtta

SEQ ID NO: 9754 - DNA, 17 bp, synthetic construct
  misc_feature 1..17: note = Oligonucleotide
  source 1..17: mol_type = other DNA
gccagaagcaccggaag

SEQ ID NO: 9755 - DNA, 17 bp, synthetic construct
  misc_feature 1..17: note = Oligonucleotide
  source 1..17: mol_type = other DNA
gcagccagaagcaccgg

SEQ ID NO: 9756 - DNA, 17 bp, synthetic construct
  misc_feature 1..17: note = Oligonucleotide
  source 1..17: mol_type = other DNA
cctgcagccagaagcac

SEQ ID NO: 9757 - DNA, 17 bp, synthetic construct
  misc_feature 1..17: note = Oligonucleotide
  source 1..17: mol_type = other DNA
ctgcctgcagccagaag

SEQ ID NO: 9758 - DNA, 17 bp, synthetic construct
  misc_feature 1..17: note = Oligonucleotide
  source 1..17: mol_type = other DNA
ccgctgcctgcagccag

SEQ ID NO: 9759 - DNA, 17 bp, synthetic construct
  misc_feature 1..17: note = Oligonucleotide
  source 1..17: mol_type = other DNA
gctccgctgcctgcagc

SEQ ID NO: 9760 - DNA, 17 bp, synthetic construct
  misc_feature 1..17: note = Oligonucleotide
  source 1..17: mol_type = other DNA
tccgctccgctgcctgc

SEQ ID NO: 9761 - DNA, 17 bp, synthetic construct
  misc_feature 1..17: note = Oligonucleotide
  source 1..17: mol_type = other DNA
tgctccgctccgctgcc

SEQ ID NO: 9762 - DNA, 17 bp, synthetic construct
  misc_feature 1..17: note = Oligonucleotide
  source 1..17: mol_type = other DNA
ctgtgctccgctccgct

SEQ ID NO: 9763 - DNA, 17 bp, synthetic construct
  misc_feature 1..17: note = Oligonucleotide
  source 1..17: mol_type = other DNA
gtcctgtgctccgctcc

SEQ ID NO: 9764 - DNA, 17 bp, synthetic construct
  misc_feature 1..17: note = Oligonucleotide
  source 1..17: mol_type = other DNA
agtgtcctgtgctccgc

SEQ ID NO: 9765 - DNA, 17 bp, synthetic construct
  misc_feature 1..17: note = Oligonucleotide
  source 1..17: mol_type = other DNA
ccaagtgtcctgtgctc

SEQ ID NO: 9766 - DNA, 17 bp, synthetic construct
  misc_feature 1..17: note = Oligonucleotide
  source 1..17: mol_type = other DNA
tcaccaagtgtcctgtg

SEQ ID NO: 9767 - DNA, 17 bp, synthetic construct
  misc_feature 1..17: note = Oligonucleotide
  source 1..17: mol_type = other DNA
acatcaccaagtgtcct

SEQ ID NO: 9768 - DNA, 17 bp, synthetic construct
  misc_feature 1..17: note = Oligonucleotide
  source 1..17: mol_type = other DNA
cagacatcaccaagtgt

SEQ ID NO: 9769 - DNA, 17 bp, synthetic construct
  misc_feature 1..17: note = Oligonucleotide
  source 1..17: mol_type = other DNA
actcagacatcaccaag

SEQ ID NO: 9770 - DNA, 17 bp, synthetic construct
  misc_feature 1..17: note = Oligonucleotide
  source 1..17: mol_type = other DNA
tggactcagacatcacc

SEQ ID NO: 9771 - DNA, 17 bp, synthetic construct
  misc_feature 1..17: note = Oligonucleotide
  source 1..17: mol_type = other DNA
gactggactcagacatc

SEQ ID NO: 9772 - DNA, 17 bp, synthetic construct
  misc_feature 1..17: note = Oligonucleotide
  source 1..17: mol_type = other DNA
caggactggactcagac

SEQ ID NO: 9773 - DNA, 17 bp, synthetic construct
  misc_feature 1..17: note = Oligonucleotide
  source 1..17: mol_type = other DNA
aaacaggactggactca

SEQ ID NO: 9774 - DNA, 17 bp, synthetic construct
  misc_feature 1..17: note = Oligonucleotide
  source 1..17: mol_type = other DNA
ctgaaacaggactggac

SEQ ID NO: 9775 - DNA, 17 bp, synthetic construct
  misc_feature 1..17: note = Oligonucleotide
  source 1..17: mol_type = other DNA
gatctgaaacaggactg

SEQ ID NO: 9776 - DNA, 17 bp, synthetic construct
  misc_feature 1..17: note = Oligonucleotide
  source 1..17: mol_type = other DNA
ccagatctgaaacagga

SEQ ID NO: 9777 - DNA, 17 bp, synthetic construct
  misc_feature 1..17: note = Oligonucleotide
  source 1..17: mol_type = other DNA
ggaccagatctgaaaca

SEQ ID NO: 9778 - DNA, 17 bp, synthetic construct
  misc_feature 1..17: note = Oligonucleotide
  source 1..17: mol_type = other DNA
caaggaccagatctgaa

SEQ ID NO: 9779 - DNA, 17 bp, synthetic construct
  misc_feature 1..17: note = Oligonucleotide
  source 1..17: mol_type = other DNA
acacaaggaccagatct

SEQ ID NO: 9780 - DNA, 17 bp, synthetic construct
  misc_feature 1..17: note = Oligonucleotide
  source 1..17: mol_type = other DNA
ggcacacaaggaccaga

SEQ ID NO: 9781 - DNA, 17 bp, synthetic construct
  misc_feature 1..17: note = Oligonucleotide
  source 1..17: mol_type = other DNA
gtgggcacacaaggacc

SEQ ID NO: 9782 - DNA, 17 bp, synthetic construct
  misc_feature 1..17: note = Oligonucleotide
  source 1..17: mol_type = other DNA
acggtgggcacacaagg

SEQ ID NO: 9783 - DNA, 17 bp, synthetic construct
  misc_feature 1..17: note = Oligonucleotide
  source 1..17: mol_type = other DNA
gccacggtgggcacaca

SEQ ID NO: 9784 - DNA, 17 bp, synthetic construct
  misc_feature 1..17: note = Oligonucleotide
  source 1..17: mol_type = other DNA
acagccacggtgggcac

SEQ ID NO: 9785 - DNA, 17 bp, synthetic construct
  misc_feature 1..17: note = Oligonucleotide
  source 1..17: mol_type = other DNA
acaacagccacggtggg

SEQ ID NO: 9786 - DNA, 17 bp, synthetic construct
  misc_feature 1..17: note = Oligonucleotide
  source 1..17: mol_type = other DNA
ctgacaacagccacggt

SEQ ID NO: 9787 - DNA, 17 bp, synthetic construct
  misc_feature 1..17: note = Oligonucleotide
  source 1..17: mol_type = other DNA
gagctgacaacagccac

SEQ ID NO: 9788 - DNA, 17 bp, synthetic construct
  misc_feature 1..17: note = Oligonucleotide
  source 1..17: mol_type = other DNA
caagagctgacaacagc

SEQ ID NO: 9789 - DNA, 17 bp, synthetic construct
  misc_feature 1..17: note = Oligonucleotide
  source 1..17: mol_type = other DNA
ggacaagagctgacaac

SEQ ID NO: 9790 - DNA, 17 bp, synthetic construct
  misc_feature 1..17: note = Oligonucleotide
  source 1..17: mol_type = other DNA
gcaggacaagagctgac

SEQ ID NO: 9791 - DNA, 17 bp, synthetic construct
  misc_feature 1..17: note = Oligonucleotide
  source 1..17: mol_type = other DNA
gccgcaggacaagagct

SEQ ID NO: 9792 - DNA, 17 bp, synthetic construct
  misc_feature 1..17: note = Oligonucleotide
  source 1..17: mol_type = other DNA
ggggccgcaggacaaga

SEQ ID NO: 9793 - DNA, 17 bp, synthetic construct
  misc_feature 1..17: note = Oligonucleotide
  source 1..17: mol_type = other DNA
ttaggggccgcaggaca

SEQ ID NO: 9794 - DNA, 17 bp, synthetic construct
  misc_feature 1..17: note = Oligonucleotide
  source 1..17: mol_type = other DNA
ccattaggggccgcagg

SEQ ID NO: 9795 - DNA, 17 bp, synthetic construct
  misc_feature 1..17: note = Oligonucleotide
  source 1..17: mol_type = other DNA
cagccattaggggccgc

SEQ ID NO: 9796 - DNA, 17 bp, synthetic construct
  misc_feature 1..17: note = Oligonucleotide
  source 1..17: mol_type = other DNA
ctccagccattaggggc

SEQ ID NO: 9797 - DNA, 17 bp, synthetic construct
  misc_feature 1..17: note = Oligonucleotide
  source 1..17: mol_type = other DNA
ggactccagccattagg

SEQ ID NO: 9798 - DNA, 17 bp, synthetic construct
  misc_feature 1..17: note = Oligonucleotide
  source 1..17: mol_type = other DNA
accggactccagccatt

SEQ ID NO: 9799 - DNA, 17 bp, synthetic construct
  misc_feature 1..17: note = Oligonucleotide
  source 1..17: mol_type = other DNA
agtaccggactccagcc

SEQ ID NO: 9800 - DNA, 17 bp, synthetic construct
  misc_feature 1..17: note = Oligonucleotide
  source 1..17: mol_type = other DNA
gtgagtaccggactcca

SEQ ID NO: 9801 - DNA, 17 bp, synthetic construct
  misc_feature 1..17: note = Oligonucleotide
  source 1..17: mol_type = other DNA
gcagtgagtaccggact

SEQ ID NO: 9802 - DNA, 17 bp, synthetic construct
  misc_feature 1..17: note = Oligonucleotide
  source 1..17: mol_type = other DNA
tgagcagtgagtaccgg

SEQ ID NO: 9803 - DNA, 17 bp, synthetic construct
  misc_feature 1..17: note = Oligonucleotide
  source 1..17: mol_type = other DNA
aagtgagcagtgagtac

SEQ ID NO: 9804 - DNA, 17 bp, synthetic construct
  misc_feature 1..17: note = Oligonucleotide
  source 1..17: mol_type = other DNA
cctaagtgagcagtgag

SEQ ID NO: 9805 - DNA, 17 bp, synthetic construct
  misc_feature 1..17: note = Oligonucleotide
  source 1..17: mol_type = other DNA
atccctaagtgagcagt

SEQ ID NO: 9806 - DNA, 17 bp, synthetic construct
  misc_feature 1..17: note = Oligonucleotide
  source 1..17: mol_type = other DNA
tttatccctaagtgagc

SEQ ID NO: 9807 - DNA, 17 bp, synthetic construct
  misc_feature 1..17: note = Oligonucleotide
  source 1..17: mol_type = other DNA
agttttatccctaagtg

SEQ ID NO: 9808 - DNA, 17 bp, synthetic construct
  misc_feature 1..17: note = Oligonucleotide
  source 1..17: mol_type = other DNA
agcagttttatccctaa

SEQ ID NO: 9809 - DNA, 17 bp, synthetic construct
  misc_feature 1..17: note = Oligonucleotide
  source 1..17: mol_type = other DNA
accagcagttttatccc

SEQ ID NO: 9810 - DNA, 17 bp, synthetic construct
  misc_feature 1..17: note = Oligonucleotide
  source 1..17: mol_type = other DNA
tccaccagcagttttat

SEQ ID NO: 9811 - DNA, 17 bp, synthetic construct
  misc_feature 1..17: note = Oligonucleotide
  source 1..17: mol_type = other DNA
agttccaccagcagttt

SEQ ID NO: 9812 - DNA, 17 bp, synthetic construct
  misc_feature 1..17: note = Oligonucleotide
  source 1..17: mol_type = other DNA
ggcagttccaccagcag

SEQ ID NO: 9813 - DNA, 17 bp, synthetic construct
  misc_feature 1..17: note = Oligonucleotide
  source 1..17: mol_type = other DNA
ttaggcagttccaccag

SEQ ID NO: 9814 - DNA, 17 bp, synthetic construct
  misc_feature 1..17: note = Oligonucleotide
  source 1..17: mol_type = other DNA
actttaggcagttccac

SEQ ID NO: 9815 - DNA, 17 bp, synthetic construct
  misc_feature 1..17: note = Oligonucleotide
  source 1..17: mol_type = other DNA
cacactttaggcagttc

SEQ ID NO: 9816 - DNA, 17 bp, synthetic construct
  misc_feature 1..17: note = Oligonucleotide
  source 1..17: mol_type = other DNA
tcccacactttaggcag

SEQ ID NO: 9817 - DNA, 17 bp, synthetic construct
  misc_feature 1..17: note = Oligonucleotide
  source 1..17: mol_type = other DNA
acctcccacactttagg

SEQ ID NO: 9818 - DNA, 17 bp, synthetic construct
  misc_feature 1..17: note = Oligonucleotide
  source 1..17: mol_type = other DNA
agaacctcccacacttt

SEQ ID NO: 9819 - DNA, 17 bp, synthetic construct
  misc_feature 1..17: note = Oligonucleotide
  source 1..17: mol_type = other DNA
gtcagaacctcccacac

SEQ ID NO: 9820 - DNA, 17 bp, synthetic construct
  misc_feature 1..17: note = Oligonucleotide
  source 1..17: mol_type = other DNA
gatgtcagaacctccca

SEQ ID NO: 9821 - DNA, 17 bp, synthetic construct
  misc_feature 1..17: note = Oligonucleotide
  source 1..17: mol_type = other DNA
ctggatgtcagaacctc

SEQ ID NO: 9822 - DNA, 17 bp, synthetic construct
  misc_feature 1..17: note = Oligonucleotide
  source 1..17: mol_type = other DNA
tacctggatgtcagaac

SEQ ID NO: 9823 - DNA, 17 bp, synthetic construct
  misc_feature 1..17: note = Oligonucleotide
  source 1..17: mol_type = other DNA
ccatacctggatgtcag

SEQ ID NO: 9824 - DNA, 17 bp, synthetic construct
  misc_feature 1..17: note = Oligonucleotide
  source 1..17: mol_type = other DNA
cagccatacctggatgt

SEQ ID NO: 9825 - DNA, 17 bp, synthetic construct
  misc_feature 1..17: note = Oligonucleotide
  source 1..17: mol_type = other DNA
aagcagccatacctgga

SEQ ID NO: 9826 - DNA, 17 bp, synthetic construct
  misc_feature 1..17: note = Oligonucleotide
  source 1..17: mol_type = other DNA
aggaagcagccatacct

SEQ ID NO: 9827 - DNA, 17 bp, synthetic construct
  misc_feature 1..17: note = Oligonucleotide
  source 1..17: mol_type = other DNA
ggaaggaagcagccata

SEQ ID NO: 9828 - DNA, 17 bp, synthetic construct
  misc_feature 1..17: note = Oligonucleotide
  source 1..17: mol_type = other DNA
ctgggaaggaagcagcc

SEQ ID NO: 9829 - DNA, 17 bp, synthetic construct
  misc_feature 1..17: note = Oligonucleotide
  source 1..17: mol_type = other DNA
gccctgggaaggaagca

SEQ ID NO: 9830 - DNA, 17 bp, synthetic construct
  misc_feature 1..17: note = Oligonucleotide
  source 1..17: mol_type = other DNA
ctggccctgggaaggaa

SEQ ID NO: 9831 - DNA, 17 bp, synthetic construct
  misc_feature 1..17: note = Oligonucleotide
  source 1..17: mol_type = other DNA
cgactggccctgggaag

SEQ ID NO: 9832 - DNA, 17 bp, synthetic construct
  misc_feature 1..17: note = Oligonucleotide
  source 1..17: mol_type = other DNA
ccacgactggccctggg

SEQ ID NO: 9833 - DNA, 17 bp, synthetic construct
  misc_feature 1..17: note = Oligonucleotide
  source 1..17: mol_type = other DNA
ctgccacgactggccct

SEQ ID NO: 9834 - DNA, 17 bp, synthetic construct
  misc_feature 1..17: note = Oligonucleotide
  source 1..17: mol_type = other DNA
cctctgccacgactggc

SEQ ID NO: 9835 - DNA, 17 bp, synthetic construct
  misc_feature 1..17: note = Oligonucleotide
  source 1..17: mol_type = other DNA
gcgcctctgccacgact

SEQ ID NO: 9836 - DNA, 17 bp, synthetic construct
  misc_feature 1..17: note = Oligonucleotide
  source 1..17: mol_type = other DNA
ctagcgcctctgccacg

SEQ ID NO: 9837 - DNA, 17 bp, synthetic construct
  misc_feature 1..17: note = Oligonucleotide
  source 1..17: mol_type = other DNA
gacctagcgcctctgcc

SEQ ID NO: 9838 - DNA, 17 bp, synthetic construct
  misc_feature 1..17: note = Oligonucleotide
  source 1..17: mol_type = other DNA
ggtgacctagcgcctct

SEQ ID NO: 9839 - DNA, 17 bp, synthetic construct
  misc_feature 1..17: note = Oligonucleotide
  source 1..17: mol_type = other DNA
gagggtgacctagcgcc

SEQ ID NO: 9840 - DNA, 17 bp, synthetic construct
  misc_feature 1..17: note = Oligonucleotide
  source 1..17: mol_type = other DNA
cctgagggtgacctagc

SEQ ID NO: 9841 - DNA, 17 bp, synthetic construct
  misc_feature 1..17: note = Oligonucleotide
  source 1..17: mol_type = other DNA
ggccctgagggtgacct

SEQ ID NO: 9842 - DNA, 17 bp, synthetic construct
  misc_feature 1..17: note = Oligonucleotide
  source 1..17: mol_type = other DNA
tatggccctgagggtga

SEQ ID NO: 9843 - DNA, 17 bp, synthetic construct
  misc_feature 1..17: note = Oligonucleotide
  source 1..17: mol_type = other DNA
gggtatggccctgaggg

SEQ ID NO: 9844 - DNA, 17 bp, synthetic construct
  misc_feature 1..17: note = Oligonucleotide
  source 1..17: mol_type = other DNA
tcagggtatggccctga

SEQ ID NO: 9845 - DNA, 17 bp, synthetic construct
  misc_feature 1..17: note = Oligonucleotide
  source 1..17: mol_type = other DNA
agctcagggtatggccc

SEQ ID NO: 9846 - DNA, 17 bp, synthetic construct
  misc_feature 1..17: note = Oligonucleotide
  source 1..17: mol_type = other DNA
cacagctcagggtatgg

SEQ ID NO: 9847 - DNA, 17 bp, synthetic construct
  misc_feature 1..17: note = Oligonucleotide
  source 1..17: mol_type = other DNA
agacacagctcagggta

SEQ ID NO: 9848 - DNA, 17 bp, synthetic construct
  misc_feature 1..17: note = Oligonucleotide
  source 1..17: mol_type = other DNA
tggagacacagctcagg

SEQ ID NO: 9849 - DNA, 17 bp, synthetic construct
  misc_feature 1..17: note = Oligonucleotide
  source 1..17: mol_type = other DNA
ggctggagacacagctc

SEQ ID NO: 9850 - DNA, 17 bp, synthetic construct
  misc_feature 1..17: note = Oligonucleotide
  source 1..17: mol_type = other DNA
aggggctggagacacag

SEQ ID NO: 9851 - DNA, 17 bp, synthetic construct
  misc_feature 1..17: note = Oligonucleotide
  source 1..17: mol_type = other DNA
acaaggggctggagaca

SEQ ID NO: 9852 - DNA, 17 bp, synthetic construct
  misc_feature 1..17: note = Oligonucleotide
  source 1..17: mol_type = other DNA
aacacaaggggctggag

SEQ ID NO: 9853 - DNA, 17 bp, synthetic construct
  misc_feature 1..17: note = Oligonucleotide
  source 1..17: mol_type = other DNA
tggaacacaaggggctg

SEQ ID NO: 9854 - DNA, 17 bp, synthetic construct
  misc_feature 1..17: note = Oligonucleotide
  source 1..17: mol_type = other DNA
ctgtggaacacaagggg

SEQ ID NO: 9855 - DNA, 17 bp, synthetic construct
  misc_feature 1..17: note = Oligonucleotide
  source 1..17: mol_type = other DNA
acactgtggaacacaag

SEQ ID NO: 9856 - DNA, 17 bp, synthetic construct
  misc_feature 1..17: note = Oligonucleotide
  source 1..17: mol_type = other DNA
caaacactgtggaacac

SEQ ID NO: 9857 - DNA, 17 bp, synthetic construct
  misc_feature 1..17: note = Oligonucleotide
  source 1..17: mol_type = other DNA
agacaaacactgtggaa

SEQ ID NO: 9858 - DNA, 17 bp, synthetic construct
  misc_feature 1..17: note = Oligonucleotide
  source 1..17: mol_type = other DNA
gggagacaaacactgtg

SEQ ID NO: 9859 - DNA, 17 bp, synthetic construct
  misc_feature 1..17: note = Oligonucleotide
  source 1..17: mol_type = other DNA
cctgggagacaaacact

SEQ ID NO: 9860 - DNA, 17 bp, synthetic construct
  misc_feature 1..17: note = Oligonucleotide
  source 1..17: mol_type = other DNA
gggcctgggagacaaac

SEQ ID NO: 9861 - DNA, 17 bp, synthetic construct
  misc_feature 1..17: note = Oligonucleotide
  source 1..17: mol_type = other DNA
gatgggcctgggagaca

SEQ ID NO: 9862 - DNA, 17 bp, synthetic construct
  misc_feature 1..17: note = Oligonucleotide
  source 1..17: mol_type = other DNA
aaggatgggcctgggag

SEQ ID NO: 9863 - DNA, 17 bp, synthetic construct
  misc_feature 1..17: note = Oligonucleotide
  source 1..17: mol_type = other DNA
gagaaggatgggcctgg

SEQ ID NO: 9864 - DNA, 17 bp, synthetic construct
  misc_feature 1..17: note = Oligonucleotide
  source 1..17: mol_type = other DNA
gaggagaaggatgggcc

SEQ ID NO: 9865 - DNA, 17 bp, synthetic construct
  misc_feature 1..17: note = Oligonucleotide
  source 1..17: mol_type = other DNA
agggaggagaaggatgg

SEQ ID NO: 9866 - DNA, 17 bp, synthetic construct
  misc_feature 1..17: note = Oligonucleotide
  source 1..17: mol_type = other DNA
gtcagggaggagaagga

SEQ ID NO: 9867 - DNA, 17 bp, synthetic construct
  misc_feature 1..17: note = Oligonucleotide
  source 1..17: mol_type = other DNA
tcggtcagggaggagaa

SEQ ID NO: 9868 - DNA, 17 bp, synthetic construct
  misc_feature 1..17: note = Oligonucleotide
  source 1..17: mol_type = other DNA
gtgtcggtcagggagga

SEQ ID NO: 9869 - DNA, 17 bp, synthetic construct
  misc_feature 1..17: note = Oligonucleotide
  source 1..17: mol_type = other DNA
atggtgtcggtcaggga

SEQ ID NO: 9870 - DNA, 17 bp, synthetic construct
  misc_feature 1..17: note = Oligonucleotide
  source 1..17: mol_type = other DNA
ctcatggtgtcggtcag

SEQ ID NO: 9871 - DNA, 17 bp, synthetic construct
  misc_feature 1..17: note = Oligonucleotide
  source 1..17: mol_type = other DNA
ttcctcatggtgtcggt

SEQ ID NO: 9872 - DNA, 17 bp, synthetic construct
  misc_feature 1..17: note = Oligonucleotide
  source 1..17: mol_type = other DNA
cccttcctcatggtgtc

SEQ ID NO: 9873 - DNA, 17 bp, synthetic construct
  misc_feature 1..17: note = Oligonucleotide
  source 1..17: mol_type = other DNA
attcccttcctcatggt

SEQ ID NO: 9874 - DNA, 17 bp, synthetic construct
  misc_feature 1..17: note = Oligonucleotide
  source 1..17: mol_type = other DNA
ggcattcccttcctcat

SEQ ID NO: 9875 - DNA, 17 bp, synthetic construct
  misc_feature 1..17: note = Oligonucleotide
  source 1..17: mol_type = other DNA
gtgggcattcccttcct

SEQ ID NO: 9876 - DNA, 17 bp, synthetic construct
  misc_feature 1..17: note = Oligonucleotide
  source 1..17: mol_type = other DNA
tgggtgggcattccctt

SEQ ID NO: 9877 - DNA, 17 bp, synthetic construct
  misc_feature 1..17: note = Oligonucleotide
  source 1..17: mol_type = other DNA
aggtgggtgggcattcc

SEQ ID NO: 9878 - DNA, 17 bp, synthetic construct
  misc_feature 1..17: note = Oligonucleotide
  source 1..17: mol_type = other DNA
aaaaggtgggtgggcat

SEQ ID NO: 9879 - DNA, 17 bp, synthetic construct
  misc_feature 1..17: note = Oligonucleotide
  source 1..17: mol_type = other DNA
tggaaaaggtgggtggg

SEQ ID NO: 9880 - DNA, 17 bp, synthetic construct
  misc_feature 1..17: note = Oligonucleotide
  source 1..17: mol_type = other DNA
ctctggaaaaggtgggt

SEQ ID NO: 9881 - DNA, 17 bp, synthetic construct
  misc_feature 1..17: note = Oligonucleotide
  source 1..17: mol_type = other DNA
catctctggaaaaggtg

SEQ ID NO: 9882 - DNA, 17 bp, synthetic construct
  misc_feature 1..17: note = Oligonucleotide
  source 1..17: mol_type = other DNA
agccatctctggaaaag

SEQ ID NO: 9883 - DNA, 17 bp, synthetic construct
  misc_feature 1..17: note = Oligonucleotide
  source 1..17: mol_type = other DNA
atgagccatctctggaa

SEQ ID NO: 9884 - DNA, 17 bp, synthetic construct
  misc_feature 1..17: note = Oligonucleotide
  source 1..17: mol_type = other DNA
ggaatgagccatctctg

SEQ ID NO: 9885 - DNA, 17 bp, synthetic construct
  misc_feature 1..17: note = Oligonucleotide
  source 1..17: mol_type = other DNA
tcaggaatgagccatct

SEQ ID NO: 9886 - DNA, 17 bp, synthetic construct
  misc_feature 1..17: note = Oligonucleotide
  source 1..17: mol_type = other DNA
acatcaggaatgagcca

SEQ ID NO: 9887 - DNA, 17 bp, synthetic construct
  misc_feature 1..17: note = Oligonucleotide
  source 1..17: mol_type = other DNA
agcacatcaggaatgag

SEQ ID NO: 9888 - DNA, 17 bp, synthetic construct
  misc_feature 1..17: note = Oligonucleotide
  source 1..17: mol_type = other DNA
taaagcacatcaggaat

SEQ ID NO: 9889 - DNA, 17 bp, synthetic construct
  misc_feature 1..17: note = Oligonucleotide
  source 1..17: mol_type = other DNA
ggctaaagcacatcagg

SEQ ID NO: 9890 - DNA, 17 bp, synthetic construct
  misc_feature 1..17: note = Oligonucleotide
  source 1..17: mol_type = other DNA
tgtggctaaagcacatc

SEQ ID NO: 9891 - DNA, 17 bp, synthetic construct
  misc_feature 1..17: note = Oligonucleotide
  source 1..17: mol_type = other DNA
ccttgtggctaaagcac

SEQ ID NO: 9892 - DNA, 17 bp, synthetic construct
  misc_feature 1..17: note = Oligonucleotide
  source 1..17: mol_type = other DNA
acaccttgtggctaaag

SEQ ID NO: 9893 - DNA, 17 bp, synthetic construct
  misc_feature 1..17: note = Oligonucleotide
  source 1..17: mol_type = other DNA
agaacaccttgtggcta

SEQ ID NO: 9894 - DNA, 17 bp, synthetic construct
  misc_feature 1..17: note = Oligonucleotide
  source 1..17: mol_type = other DNA
cacagaacaccttgtgg

SEQ ID NO: 9895 - DNA, 17 bp, synthetic construct
  misc_feature 1..17: note = Oligonucleotide
  source 1..17: mol_type = other DNA
ggccacagaacaccttg

SEQ ID NO: 9896 - DNA, 17 bp, synthetic construct
  misc_feature 1..17: note = Oligonucleotide
  source 1..17: mol_type = other DNA
tcaggccacagaacacc

SEQ ID NO: 9897 - DNA, 17 bp, synthetic construct
  misc_feature 1..17: note = Oligonucleotide
  source 1..17: mol_type = other DNA
ctctcaggccacagaac

SEQ ID NO: 9898 - DNA, 17 bp, synthetic construct
  misc_feature 1..17: note = Oligonucleotide
  source 1..17: mol_type = other DNA
aagctctcaggccacag

SEQ ID NO: 9899 - DNA, 17 bp, synthetic construct
  misc_feature 1..17: note = Oligonucleotide
  source 1..17: mol_type = other DNA
agaaagctctcaggcca

SEQ ID NO: 9900 - DNA, 17 bp, synthetic construct
  misc_feature 1..17: note = Oligonucleotide
  source 1..17: mol_type = other DNA
tccagaaagctctcagg

SEQ ID NO: 9901 - DNA, 17 bp, synthetic construct
  misc_feature 1..17: note = Oligonucleotide
  source 1..17: mol_type = other DNA
ttgtccagaaagctctc

SEQ ID NO: 9902 - DNA, 17 bp, synthetic construct
  misc_feature 1..17: note = Oligonucleotide
  source 1..17: mol_type = other DNA
aacttgtccagaaagct

SEQ ID NO: 9903 - DNA, 17 bp, synthetic construct
  misc_feature 1..17: note = Oligonucleotide
  source 1..17: mol_type = other DNA
cttaacttgtccagaaa

SEQ ID NO: 9904 - DNA, 17 bp, synthetic construct
  misc_feature 1..17: note = Oligonucleotide
  source 1..17: mol_type = other DNA
cagcttaacttgtccag

SEQ ID NO: 9905 - DNA, 17 bp, synthetic construct
  misc_feature 1..17: note = Oligonucleotide
  source 1..17: mol_type = other DNA
ggacagcttaacttgtc

SEQ ID NO: 9906 - DNA, 17 bp, synthetic construct
  misc_feature 1..17: note = Oligonucleotide
  source 1..17: mol_type = other DNA
acaggacagcttaactt

SEQ ID NO: 9907 - DNA, 17 bp, synthetic construct
  misc_feature 1..17: note = Oligonucleotide
  source 1..17: mol_type = other DNA
catacaggacagcttaa

SEQ ID NO: 9908 - DNA, 17 bp, synthetic construct
  misc_feature 1..17: note = Oligonucleotide
  source 1..17: mol_type = other DNA
cgacatacaggacagct

SEQ ID NO: 9909 - DNA, 17 bp, synthetic construct
  misc_feature 1..17: note = Oligonucleotide
  source 1..17: mol_type = other DNA
ccacgacatacaggaca

SEQ ID NO: 9910 - DNA, 17 bp, synthetic construct
  misc_feature 1..17: note = Oligonucleotide
  source 1..17: mol_type = other DNA
gttccacgacatacagg

SEQ ID NO: 9911 - DNA, 17 bp, synthetic construct
  misc_feature 1..17: note = Oligonucleotide
  source 1..17: mol_type = other DNA
ttggttccacgacatac

SEQ ID NO: 9912 - DNA, 17 bp, synthetic construct
  misc_feature 1..17: note = Oligonucleotide
  source 1..17: mol_type = other DNA
gctttggttccacgaca

SEQ ID NO: 9913 - DNA, 17 bp, synthetic construct
  misc_feature 1..17: note = Oligonucleotide
  source 1..17: mol_type = other DNA
cgagctttggttccacg

SEQ ID NO: 9914 - DNA, 17 bp, synthetic construct
  misc_feature 1..17: note = Oligonucleotide
  source 1..17: mol_type = other DNA
taccgagctttggttcc

SEQ ID NO: 9915 - DNA, 17 bp, synthetic construct
  misc_feature 1..17: note = Oligonucleotide
  source 1..17: mol_type = other DNA
ggttaccgagctttggt

SEQ ID NO: 9916 - DNA, 17 bp, synthetic construct
  misc_feature 1..17: note = Oligonucleotide
  source 1..17: mol_type = other DNA
acaggttaccgagcttt

SEQ ID NO: 9917 - DNA, 17 bp, synthetic construct
  misc_feature 1..17: note = Oligonucleotide
  source 1..17: mol_type = other DNA
tccacaggttaccgagc

SEQ ID NO: 9918 - DNA, 17 bp, synthetic construct
  misc_feature 1..17: note = Oligonucleotide
  source 1..17: mol_type = other DNA
ttttccacaggttaccg

SEQ ID NO: 9919 - DNA, 17 bp, synthetic construct
  misc_feature 1..17: note = Oligonucleotide
  source 1..17: mol_type = other DNA
catttttccacaggtta

SEQ ID NO: 9920 - DNA, 17 bp, synthetic construct
  misc_feature 1..17: note = Oligonucleotide
  source 1..17: mol_type = other DNA
catcatttttccacagg

SEQ ID NO: 9921 - DNA, 17 bp, synthetic construct
  misc_feature 1..17: note = Oligonucleotide
  source 1..17: mol_type = other DNA
gctcatcatttttccac

SEQ ID NO: 9922 - DNA, 17 bp, synthetic construct
  misc_feature 1..17: note = Oligonucleotide
  source 1..17: mol_type = other DNA
agagctcatcatttttc

SEQ ID NO: 9923 - DNA, 17 bp, synthetic construct
  misc_feature 1..17: note = Oligonucleotide
  source 1..17: mol_type = other DNA
cccagagctcatcattt

SEQ ID NO: 9924 - DNA, 17 bp, synthetic construct
  misc_feature 1..17: note = Oligonucleotide
  source 1..17: mol_type = other DNA
ggccccagagctcatca

SEQ ID NO: 9925 - DNA, 17 bp, synthetic construct
  misc_feature 1..17: note = Oligonucleotide
  source 1..17: mol_type = other DNA
ggtggccccagagctca

SEQ ID NO: 9926 - DNA, 17 bp, synthetic construct
  misc_feature 1..17: note = Oligonucleotide
  source 1..17: mol_type = other DNA
aaaggtggccccagagc

SEQ ID NO: 9927 - DNA, 17 bp, synthetic construct
  misc_feature 1..17: note = Oligonucleotide
  source 1..17: mol_type = other DNA
atcaaaggtggccccag

SEQ ID NO: 9928 - DNA, 17 bp, synthetic construct
  misc_feature 1..17: note = Oligonucleotide
  source 1..17: mol_type = other DNA
aaaatcaaaggtggccc

SEQ ID NO: 9929 - DNA, 17 bp, synthetic construct
  misc_feature 1..17: note = Oligonucleotide
  source 1..17: mol_type = other DNA
ctgaaaatcaaaggtgg

SEQ ID NO: 9930 - DNA, 17 bp, synthetic construct
  misc_feature 1..17: note = Oligonucleotide
  source 1..17: mol_type = other DNA
cccctgaaaatcaaagg

SEQ ID NO: 9931 - DNA, 17 bp, synthetic construct
  misc_feature 1..17: note = Oligonucleotide
  source 1..17: mol_type = other DNA
gttcccctgaaaatcaa

SEQ ID NO: 9932 - DNA, 17 bp, synthetic construct
  misc_feature 1..17: note = Oligonucleotide
  source 1..17: mol_type = other DNA
caggttcccctgaaaat

SEQ ID NO: 9933 - DNA, 17 bp, synthetic construct
  misc_feature 1..17: note = Oligonucleotide
  source 1..17: mol_type = other DNA
ctccaggttcccctgaa

SEQ ID NO: 9934 - DNA, 17 bp, synthetic construct
  misc_feature 1..17: note = Oligonucleotide
  source 1..17: mol_type = other DNA
atcctccaggttcccct

SEQ ID NO: 9935 - DNA, 17 bp, synthetic construct
  misc_feature 1..17: note = Oligonucleotide
  source 1..17: mol_type = other DNA
cacatcctccaggttcc

SEQ ID NO: 9936 - DNA, 17 bp, synthetic construct
  misc_feature 1..17: note = Oligonucleotide
  source 1..17: mol_type = other DNA
tgccacatcctccaggt

SEQ ID NO: 9937 - DNA, 17 bp, synthetic construct
  misc_feature 1..17: note = Oligonucleotide
  source 1..17: mol_type = other DNA
gagtgccacatcctcca

SEQ ID NO: 9938 - DNA, 17 bp, synthetic construct
  misc_feature 1..17: note = Oligonucleotide
  source 1..17: mol_type = other DNA
tgagagtgccacatcct

SEQ ID NO: 9939 - DNA, 17 bp, synthetic construct
  misc_feature 1..17: note = Oligonucleotide
  source 1..17: mol_type = other DNA
gcatgagagtgccacat

SEQ ID NO: 9940 - DNA, 17 bp, synthetic construct
  misc_feature 1..17: note = Oligonucleotide
  source 1..17: mol_type = other DNA
gcagcatgagagtgcca

SEQ ID NO: 9941 - DNA, 17 bp, synthetic construct
  misc_feature 1..17: note = Oligonucleotide
  source 1..17: mol_type = other DNA
gaggcagcatgagagtg

SEQ ID NO: 9942 - DNA, 17 bp, synthetic construct
  misc_feature 1..17: note = Oligonucleotide
  source 1..17: mol_type = other DNA
ccagaggcagcatgaga

SEQ ID NO: 9943 - DNA, 17 bp, synthetic construct
  misc_feature 1..17: note = Oligonucleotide
  source 1..17: mol_type = other DNA
cttccagaggcagcatg

SEQ ID NO: 9944 - DNA, 17 bp, synthetic construct
  misc_feature 1..17: note = Oligonucleotide
  source 1..17: mol_type = other DNA
gaccttccagaggcagc

SEQ ID NO: 9945 - DNA, 17 bp, synthetic construct
  misc_feature 1..17: note = Oligonucleotide
  source 1..17: mol_type = other DNA
ctggaccttccagaggc

SEQ ID NO: 9946 - DNA, 17 bp, synthetic construct
  misc_feature 1..17: note = Oligonucleotide
  source 1..17: mol_type = other DNA
gtcctggaccttccaga

SEQ ID NO: 9947 - DNA, 17 bp, synthetic construct
  misc_feature 1..17: note = Oligonucleotide
  source 1..17: mol_type = other DNA
aaggtcctggaccttcc

SEQ ID NO: 9948 - DNA, 17 bp, synthetic construct
  misc_feature 1..17: note = Oligonucleotide
  source 1..17: mol_type = other DNA
ccgaaggtcctggacct

SEQ ID NO: 9949 - DNA, 17 bp, synthetic construct
  misc_feature 1..17: note = Oligonucleotide
  source 1..17: mol_type = other DNA
aggccgaaggtcctgga

SEQ ID NO: 9950 - DNA, 17 bp, synthetic construct
  misc_feature 1..17: note = Oligonucleotide
  source 1..17: mol_type = other DNA
aaaaggccgaaggtcct

SEQ ID NO: 9951 - DNA, 17 bp, synthetic construct
  misc_feature 1..17: note = Oligonucleotide
  source 1..17: mol_type = other DNA
ttcaaaaggccgaaggt

SEQ ID NO: 9952 - DNA, 17 bp, synthetic construct
  misc_feature 1..17: note = Oligonucleotide
  source 1..17: mol_type = other DNA
ggattcaaaaggccgaa

SEQ ID NO: 9953 - DNA, 17 bp, synthetic construct
  misc_feature 1..17: note = Oligonucleotide
  source 1..17: mol_type = other DNA
cgaggattcaaaaggcc

SEQ ID NO: 9954 - DNA, 17 bp, synthetic construct
  misc_feature 1..17: note = Oligonucleotide
  source 1..17: mol_type = other DNA
gatcgaggattcaaaag

SEQ ID NO: 9955 - DNA, 17 bp, synthetic construct
  misc_feature 1..17: note = Oligonucleotide
  source 1..17: mol_type = other DNA
tgggatcgaggattcaa

SEQ ID NO: 9956 - DNA, 17 bp, synthetic construct
  misc_feature 1..17: note = Oligonucleotide
  source 1..17: mol_type = other DNA
atctgggatcgaggatt

SEQ ID NO: 9957 - DNA, 17 bp, synthetic construct
  misc_feature 1..17: note = Oligonucleotide
  source 1..17: mol_type = other DNA
acaatctgggatcgagg

SEQ ID NO: 9958 - DNA, 17 bp, synthetic construct
  misc_feature 1..17: note = Oligonucleotide
  source 1..17: mol_type = other DNA
tggacaatctgggatcg

SEQ ID NO: 9959 - DNA, 17 bp, synthetic construct
  misc_feature 1..17: note = Oligonucleotide
  source 1..17: mol_type = other DNA
aggtggacaatctggga

SEQ ID NO: 9960 - DNA, 17 bp, synthetic construct
  misc_feature 1..17: note = Oligonucleotide
  source 1..17: mol_type = other DNA
agcaggtggacaatctg

SEQ ID NO: 9961 - DNA, 17 bp, synthetic construct
  misc_feature 1..17: note = Oligonucleotide
  source 1..17: mol_type = other DNA
cagagcaggtggacaat

SEQ ID NO: 9962 - DNA, 17 bp, synthetic construct
  misc_feature 1..17: note = Oligonucleotide
  source 1..17: mol_type = other DNA
gcacagagcaggtggac

SEQ ID NO: 9963 - DNA, 17 bp, synthetic construct
  misc_feature 1..17: note = Oligonucleotide
  source 1..17: mol_type = other DNA
ggagcacagagcaggtg

SEQ ID NO: 9964 - DNA, 17 bp, synthetic construct
  misc_feature 1..17: note = Oligonucleotide
  source 1..17: mol_type = other DNA
ctgggagcacagagcag

SEQ ID NO: 9965 - DNA, 17 bp, synthetic construct
  misc_feature 1..17: note = Oligonucleotide
  source 1..17: mol_type = other DNA
gagctgggagcacagag

SEQ ID NO: 9966 - DNA, 17 bp, synthetic construct
  misc_feature 1..17: note = Oligonucleotide
  source 1..17: mol_type = other DNA
ttggagctgggagcaca

SEQ ID NO: 9967 - DNA, 17 bp, synthetic construct
  misc_feature 1..17: note = Oligonucleotide
  source 1..17: mol_type = other DNA
gacttggagctgggagc

SEQ ID NO: 9968 - DNA, 17 bp, synthetic construct
  misc_feature 1..17: note = Oligonucleotide
  source 1..17: mol_type = other DNA
ctagacttggagctggg

SEQ ID NO: 9969 - DNA, 17 bp, synthetic construct
  misc_feature 1..17: note = Oligonucleotide
  source 1..17: mol_type = other DNA
gagctagacttggagct

SEQ ID NO: 9970 - DNA, 17 bp, synthetic construct
  misc_feature 1..17: note = Oligonucleotide
  source 1..17: mol_type = other DNA
gcagagctagacttgga

SEQ ID NO: 9971 - DNA, 17 bp, synthetic construct
  misc_feature 1..17: note = Oligonucleotide
  source 1..17: mol_type = other DNA
ccagcagagctagactt

SEQ ID NO: 9972 - DNA, 17 bp, synthetic construct
  misc_feature 1..17: note = Oligonucleotide
  source 1..17: mol_type = other DNA
tgtccagcagagctaga

SEQ ID NO: 9973 - DNA, 17 bp, synthetic construct
  misc_feature 1..17: note = Oligonucleotide
  source 1..17: mol_type = other DNA
gtctgtccagcagagct

SEQ ID NO: 9974 - DNA, 17 bp, synthetic construct
  misc_feature 1..17: note = Oligonucleotide
  source 1..17: mol_type = other DNA
atggtctgtccagcaga

SEQ ID NO: 9975 - DNA, 17 bp, synthetic construct
  misc_feature 1..17: note = Oligonucleotide
  source 1..17: mol_type = other DNA
tgaatggtctgtccagc

SEQ ID NO: 9976 - DNA, 17 bp, synthetic construct
  misc_feature 1..17: note = Oligonucleotide
  source 1..17: mol_type = other DNA
agatgaatggtctgtcc

SEQ ID NO: 9977 - DNA, 17 bp, synthetic construct
  misc_feature 1..17: note = Oligonucleotide
  source 1..17: mol_type = other DNA
ggcagatgaatggtctg

SEQ ID NO: 9978 - DNA, 17 bp, synthetic construct
  misc_feature 1..17: note = Oligonucleotide
  source 1..17: mol_type = other DNA
ctgggcagatgaatggt

SEQ ID NO: 9979 - DNA, 17 bp, synthetic construct
  misc_feature 1..17: note = Oligonucleotide
  source 1..17: mol_type = other DNA
gctctgggcagatgaat

SEQ ID NO: 9980 - DNA, 17 bp, synthetic construct
  misc_feature 1..17: note = Oligonucleotide
  source 1..17: mol_type = other DNA
ggggctctgggcagatg

SEQ ID NO: 9981 - DNA, 17 bp, synthetic construct
  misc_feature 1..17: note = Oligonucleotide
  source 1..17: mol_type = other DNA
ggaggggctctgggcag

SEQ ID NO: 9982 - DNA, 17 bp, synthetic construct
  misc_feature 1..17: note = Oligonucleotide
  source 1..17: mol_type = other DNA
cgaggaggggctctggg

SEQ ID NO: 9983 - DNA, 17 bp, synthetic construct
  misc_feature 1..17: note = Oligonucleotide
  source 1..17: mol_type = other DNA
gaccgaggaggggctct

SEQ ID NO: 9984 - DNA, 17 bp, synthetic construct
  misc_feature 1..17: note = Oligonucleotide
  source 1..17: mol_type = other DNA
agagaccgaggaggggc

SEQ ID NO: 9985 - DNA, 17 bp, synthetic construct
  misc_feature 1..17: note = Oligonucleotide
  source 1..17: mol_type = other DNA
cccagagaccgaggagg

SEQ ID NO: 9986 - DNA, 17 bp, synthetic construct
  misc_feature 1..17: note = Oligonucleotide
  source 1..17: mol_type = other DNA
gggcccagagaccgagg

SEQ ID NO: 9987 - DNA, 17 bp, synthetic construct
  misc_feature 1..17: note = Oligonucleotide
  source 1..17: mol_type = other DNA
gtggggcccagagaccg

SEQ ID NO: 9988 - DNA, 17 bp, synthetic construct
  misc_feature 1..17: note = Oligonucleotide
  source 1..17: mol_type = other DNA
ggtgtggggcccagaga

SEQ ID NO: 9989 - DNA, 17 bp, synthetic construct
  misc_feature 1..17: note = Oligonucleotide
  source 1..17: mol_type = other DNA
tcaggtgtggggcccag

SEQ ID NO: 9990 - DNA, 17 bp, synthetic construct
  misc_feature 1..17: note = Oligonucleotide
  source 1..17: mol_type = other DNA
gagtcaggtgtggggcc

SEQ ID NO: 9991 - DNA, 17 bp, synthetic construct
  misc_feature 1..17: note = Oligonucleotide
  source 1..17: mol_type = other DNA
tcagagtcaggtgtggg

SEQ ID NO: 9992 - DNA, 17 bp, synthetic construct
  misc_feature 1..17: note = Oligonucleotide
  source 1..17: mol_type = other DNA
gcctcagagtcaggtgt

SEQ ID NO: 9993 - DNA, 17 bp, synthetic construct
  misc_feature 1..17: note = Oligonucleotide
  source 1..17: mol_type = other DNA
gtagcctcagagtcagg

SEQ ID NO: 9994 - DNA, 17 bp, synthetic construct
  misc_feature 1..17: note = Oligonucleotide
  source 1..17: mol_type = other DNA
aatgtagcctcagagtc

SEQ ID NO: 9995 - DNA, 17 bp, synthetic construct
  misc_feature 1..17: note = Oligonucleotide
  source 1..17: mol_type = other DNA
ccaaatgtagcctcaga

SEQ ID NO: 9996 - DNA, 17 bp, synthetic construct
  misc_feature 1..17: note = Oligonucleotide
  source 1..17: mol_type = other DNA
tgcccaaatgtagcctc

SEQ ID NO: 9997 - DNA, 17 bp, synthetic construct
  misc_feature 1..17: note = Oligonucleotide
  source 1..17: mol_type = other DNA
tcatgcccaaatgtagc

SEQ ID NO: 9998 - DNA, 17 bp, synthetic construct
  misc_feature 1..17: note = Oligonucleotide
  source 1..17: mol_type = other DNA
gaatcatgcccaaatgt

SEQ ID NO: 9999 - DNA, 17 bp, synthetic construct
  misc_feature 1..17: note = Oligonucleotide
  source 1..17: mol_type = other DNA
tctgaatcatgcccaaa

SEQ ID NO: 10000 - DNA, 17 bp, synthetic construct
  misc_feature 1..17: note = Oligonucleotide
  source 1..17: mol_type = other DNA
aggtctgaatcatgccc

SEQ ID NO: 10001 - DNA, 17 bp, synthetic construct
  misc_feature 1..17: note = Oligonucleotide
  source 1..17: mol_type = other DNA
gtcaggtctgaatcatg

SEQ ID NO: 10002 - DNA, 17 bp, synthetic construct
  misc_feature 1..17: note = Oligonucleotide
  source 1..17: mol_type = other DNA
ggagtcaggtctgaatc

SEQ ID NO: 10003 - DNA, 17 bp, synthetic construct
  misc_feature 1..17: note = Oligonucleotide
  source 1..17: mol_type = other DNA
ctcggagtcaggtctga

SEQ ID NO: 10004 - DNA, 17 bp, synthetic construct
  misc_feature 1..17: note = Oligonucleotide
  source 1..17: mol_type = other DNA
gggctcggagtcaggtc

SEQ ID NO: 10005 - DNA, 17 bp, synthetic construct
  misc_feature 1..17: note = Oligonucleotide
  source 1..17: mol_type = other DNA
gtggggctcggagtcag

SEQ ID NO: 10006 - DNA, 17 bp, synthetic construct
  misc_feature 1..17: note = Oligonucleotide
  source 1..17: mol_type = other DNA
gttgtggggctcggagt

SEQ ID NO: 10007 - DNA, 17 bp, synthetic construct
  misc_feature 1..17: note = Oligonucleotide
  source 1..17: mol_type = other DNA
ccagttgtggggctcgg

SEQ ID NO: 10008 - DNA, 17 bp, synthetic construct
  misc_feature 1..17: note = Oligonucleotide
  source 1..17: mol_type = other DNA
tggccagttgtggggct

SEQ ID NO: 10009 - DNA, 17 bp, synthetic construct
  misc_feature 1..17: note = Oligonucleotide
  source 1..17: mol_type = other DNA
ctgtggccagttgtggg

SEQ ID NO: 10010 - DNA, 17 bp, synthetic construct
  misc_feature 1..17: note = Oligonucleotide
  source 1..17: mol_type = other DNA
tgcctgtggccagttgt

SEQ ID NO: 10011 - DNA, 17 bp, synthetic construct
  misc_feature 1..17: note = Oligonucleotide
  source 1..17: mol_type = other DNA
gggtgcctgtggccagt

SEQ ID NO: 10012 - DNA, 17 bp, synthetic construct
  misc_feature 1..17: note = Oligonucleotide
  source 1..17: mol_type = other DNA
atggggtgcctgtggcc

SEQ ID NO: 10013 - DNA, 17 bp, synthetic construct
  misc_feature 1..17: note = Oligonucleotide
  source 1..17: mol_type = other DNA
cagatggggtgcctgtg

SEQ ID NO: 10014 - DNA, 17 bp, synthetic construct
  misc_feature 1..17: note = Oligonucleotide
  source 1..17: mol_type = other DNA
agacagatggggtgcct

SEQ ID NO: 10015 - DNA, 17 bp, synthetic construct
  misc_feature 1..17: note = Oligonucleotide
  source 1..17: mol_type = other DNA
ctcagacagatggggtg

SEQ ID NO: 10016 - DNA, 17 bp, synthetic construct
  misc_feature 1..17: note = Oligonucleotide
  source 1..17: mol_type = other DNA
agcctcagacagatggg

SEQ ID NO: 10017 - DNA, 17 bp, synthetic construct
  misc_feature 1..17: note = Oligonucleotide
  source 1..17: mol_type = other DNA
gagagcctcagacagat

SEQ ID NO: 10018 - DNA, 17 bp, synthetic construct
  misc_feature 1..17: note = Oligonucleotide
  source 1..17: mol_type = other DNA
agtgagagcctcagaca

SEQ ID NO: 10019 - DNA, 17 bp, synthetic construct
  misc_feature 1..17: note = Oligonucleotide
  source 1..17: mol_type = other DNA
acaagtgagagcctcag

SEQ ID NO: 10020 - DNA, 17 bp, synthetic construct
  misc_feature 1..17: note = Oligonucleotide
  source 1..17: mol_type = other DNA
gagacaagtgagagcct

SEQ ID NO: 10021 - DNA, 17 bp, synthetic construct
  misc_feature 1..17: note = Oligonucleotide
  source 1..17: mol_type = other DNA
tcagagacaagtgagag

SEQ ID NO: 10022 - DNA, 17 bp, synthetic construct
  misc_feature 1..17: note = Oligonucleotide
  source 1..17: mol_type = other DNA
gtctcagagacaagtga

SEQ ID NO: 10023 - DNA, 17 bp, synthetic construct
  misc_feature 1..17: note = Oligonucleotide
  source 1..17: mol_type = other DNA
agggtctcagagacaag

SEQ ID NO: 10024 - DNA, 17 bp, synthetic construct
  misc_feature 1..17: note = Oligonucleotide
  source 1..17: mol_type = other DNA
gccagggtctcagagac

SEQ ID NO: 10025 - DNA, 17 bp, synthetic construct
  misc_feature 1..17: note = Oligonucleotide
  source 1..17: mol_type = other DNA
gaagccagggtctcaga

SEQ ID NO: 10026 - DNA, 17 bp, synthetic construct
  misc_feature 1..17: note = Oligonucleotide
  source 1..17: mol_type = other DNA
tgtgaagccagggtctc

SEQ ID NO: 10027 - DNA, 17 bp, synthetic construct
  misc_feature 1..17: note = Oligonucleotide
  source 1..17: mol_type = other DNA
aggtgtgaagccagggt

SEQ ID NO: 10028 - DNA, 17 bp, synthetic construct
  misc_feature 1..17: note = Oligonucleotide
  source 1..17: mol_type = other DNA
gccaggtgtgaagccag

SEQ ID NO: 10029 - DNA, 17 bp, synthetic construct
  misc_feature 1..17: note = Oligonucleotide
  source 1..17: mol_type = other DNA
agagccaggtgtgaagc

SEQ ID NO: 10030 - DNA, 17 bp, synthetic construct
  misc_feature 1..17: note = Oligonucleotide
  source 1..17: mol_type = other DNA
tttagagccaggtgtga

SEQ ID NO: 10031 - DNA, 17 bp, synthetic construct
  misc_feature 1..17: note = Oligonucleotide
  source 1..17: mol_type = other DNA
gagtttagagccaggtg

SEQ ID NO: 10032 - DNA, 17 bp, synthetic construct
  misc_feature 1..17: note = Oligonucleotide
  source 1..17: mol_type = other DNA
atggagtttagagccag

SEQ ID NO: 10033 - DNA, 17 bp, synthetic construct
  misc_feature 1..17: note = Oligonucleotide
  source 1..17: mol_type = other DNA
caaatggagtttagagc

SEQ ID NO: 10034 - DNA, 17 bp, synthetic construct
  misc_feature 1..17: note = Oligonucleotide
  source 1..17: mol_type = other DNA
agacaaatggagtttag

SEQ ID NO: 10035 - DNA, 17 bp, synthetic construct
  misc_feature 1..17: note = Oligonucleotide
  source 1..17: mol_type = other DNA
ggaagacaaatggagtt

SEQ ID NO: 10036 - DNA, 17 bp, synthetic construct
  misc_feature 1..17: note = Oligonucleotide
  source 1..17: mol_type = other DNA
cctggaagacaaatgga

SEQ ID NO: 10037 - DNA, 17 bp, synthetic construct
  misc_feature 1..17: note = Oligonucleotide
  source 1..17: mol_type = other DNA
gggcctggaagacaaat

SEQ ID NO: 10038 - DNA, 17 bp, synthetic construct
  misc_feature 1..17: note = Oligonucleotide
  source 1..17: mol_type = other DNA
acggggcctggaagaca

SEQ ID NO: 10039 - DNA, 17 bp, synthetic construct
  misc_feature 1..17: note = Oligonucleotide
  source 1..17: mol_type = other DNA
agcacggggcctggaag

SEQ ID NO: 10040 - DNA, 17 bp, synthetic construct
  misc_feature 1..17: note = Oligonucleotide
  source 1..17: mol_type = other DNA
ccgagcacggggcctgg

SEQ ID NO: 10041 - DNA, 17 bp, synthetic construct
  misc_feature 1..17: note = Oligonucleotide
  source 1..17: mol_type = other DNA
gatccgagcacggggcc

SEQ ID NO: 10042 - DNA, 17 bp, synthetic construct
  misc_feature 1..17: note = Oligonucleotide
  source 1..17: mol_type = other DNA
tcagatccgagcacggg

SEQ ID NO: 10043 - DNA, 17 bp, synthetic construct
  misc_feature 1..17: note = Oligonucleotide
  source 1..17: mol_type = other DNA
gattcagatccgagcac

SEQ ID NO: 10044 - DNA, 17 bp, synthetic construct
  misc_feature 1..17: note = Oligonucleotide
  source 1..17: mol_type = other DNA
tgggattcagatccgag

SEQ ID NO: 10045 - DNA, 17 bp, synthetic construct
  misc_feature 1..17: note = Oligonucleotide
  source 1..17: mol_type = other DNA
acatgggattcagatcc

SEQ ID NO: 10046 - DNA, 17 bp, synthetic construct
  misc_feature 1..17: note = Oligonucleotide
  source 1..17: mol_type = other DNA
cccacatgggattcaga

SEQ ID NO: 10047 - DNA, 17 bp, synthetic construct
  misc_feature 1..17: note = Oligonucleotide
  source 1..17: mol_type = other DNA
gaccccacatgggattc

SEQ ID NO: 10048 - DNA, 17 bp, synthetic construct
  misc_feature 1..17: note = Oligonucleotide
  source 1..17: mol_type = other DNA
tcagaccccacatggga

SEQ ID NO: 10049 - DNA, 17 bp, synthetic construct
  misc_feature 1..17: note = Oligonucleotide
  source 1..17: mol_type = other DNA
acctcagaccccacatg

SEQ ID NO: 10050 - DNA, 17 bp, synthetic construct
  misc_feature 1..17: note = Oligonucleotide
  source 1..17: mol_type = other DNA
tggacctcagaccccac

SEQ ID NO: 10051 - DNA, 17 bp, synthetic construct
  misc_feature 1..17: note = Oligonucleotide
  source 1..17: mol_type = other DNA
ctatggacctcagaccc

SEQ ID NO: 10052 - DNA, 17 bp, synthetic construct
  misc_feature 1..17: note = Oligonucleotide
  source 1..17: mol_type = other DNA
ttactatggacctcaga

SEQ ID NO: 10053 - DNA, 17 bp, synthetic construct
  misc_feature 1..17: note = Oligonucleotide
  source 1..17: mol_type = other DNA
gccttactatggacctc

SEQ ID NO: 10054 - DNA, 17 bp, synthetic construct
  misc_feature 1..17: note = Oligonucleotide
  source 1..17: mol_type = other DNA
tgagccttactatggac

SEQ ID NO: 10055 - DNA, 17 bp, synthetic construct
  misc_feature 1..17: note = Oligonucleotide
  source 1..17: mol_type = other DNA
acgtgagccttactatg

SEQ ID NO: 10056 - DNA, 17 bp, synthetic construct
  misc_feature 1..17: note = Oligonucleotide
  source 1..17: mol_type = other DNA
cagacgtgagccttact

SEQ ID NO: 10057 - DNA, 17 bp, synthetic construct
  misc_feature 1..17: note = Oligonucleotide
  source 1..17: mol_type = other DNA
aggcagacgtgagcctt

SEQ ID NO: 10058 - DNA, 17 bp, synthetic construct
  misc_feature 1..17: note = Oligonucleotide
  source 1..17: mol_type = other DNA
ccaaggcagacgtgagc

SEQ ID NO: 10059 - DNA, 17 bp, synthetic construct
  misc_feature 1..17: note = Oligonucleotide
  source 1..17: mol_type = other DNA
gtgccaaggcagacgtg

SEQ ID NO: 10060 - DNA, 17 bp, synthetic construct
  misc_feature 1..17: note = Oligonucleotide
  source 1..17: mol_type = other DNA
taagtgccaaggcagac

SEQ ID NO: 10061 - DNA, 17 bp, synthetic construct
  misc_feature 1..17: note = Oligonucleotide
  source 1..17: mol_type = other DNA
agctaagtgccaaggca

SEQ ID NO: 10062 - DNA, 17 bp, synthetic construct
  misc_feature 1..17: note = Oligonucleotide
  source 1..17: mol_type = other DNA
taaagctaagtgccaag

SEQ ID NO: 10063 - DNA, 17 bp, synthetic construct
  misc_feature 1..17: note = Oligonucleotide
  source 1..17: mol_type = other DNA
atgtaaagctaagtgcc

SEQ ID NO: 10064 - DNA, 17 bp, synthetic construct
  misc_feature 1..17: note = Oligonucleotide
  source 1..17: mol_type = other DNA
cccatgtaaagctaagt

SEQ ID NO: 10065 - DNA, 17 bp, synthetic construct
  misc_feature 1..17: note = Oligonucleotide
  source 1..17: mol_type = other DNA
agtcccatgtaaagcta

SEQ ID NO: 10066 - DNA, 17 bp, synthetic construct
  misc_feature 1..17: note = Oligonucleotide
  source 1..17: mol_type = other DNA
gagagtcccatgtaaag

SEQ ID NO: 10067 - DNA, 17 bp, synthetic construct
  misc_feature 1..17: note = Oligonucleotide
  source 1..17: mol_type = other DNA
tgtgagagtcccatgta

SEQ ID NO: 10068 - DNA, 17 bp, synthetic construct
  misc_feature 1..17: note = Oligonucleotide
  source 1..17: mol_type = other DNA
agatgtgagagtcccat

SEQ ID NO: 10069 - DNA, 17 bp, synthetic construct
  misc_feature 1..17: note = Oligonucleotide
  source 1..17: mol_type = other DNA
accagatgtgagagtcc

SEQ ID NO: 10070 - DNA, 17 bp, synthetic construct
  misc_feature 1..17: note = Oligonucleotide
  source 1..17: mol_type = other DNA
aaaaccagatgtgagag

SEQ ID NO: 10071 - DNA, 17 bp, synthetic construct
  misc_feature 1..17: note = Oligonucleotide
  source 1..17: mol_type = other DNA
tacaaaaccagatgtga

SEQ ID NO: 10072 - DNA, 17 bp, synthetic construct
  misc_feature 1..17: note = Oligonucleotide
  source 1..17: mol_type = other DNA
acctacaaaaccagatg

SEQ ID NO: 10073 - DNA, 17 bp, synthetic construct
  misc_feature 1..17: note = Oligonucleotide
  source 1..17: mol_type = other DNA
tttacctacaaaaccag

SEQ ID NO: 10074 - DNA, 17 bp, synthetic construct
  misc_feature 1..17: note = Oligonucleotide
  source 1..17: mol_type = other DNA
aactttacctacaaaac

SEQ ID NO: 10075 - DNA, 17 bp, synthetic construct
  misc_feature 1..17: note = Oligonucleotide
  source 1..17: mol_type = other DNA
atgaactttacctacaa

SEQ ID NO: 10076 - DNA, 17 bp, synthetic construct
  misc_feature 1..17: note = Oligonucleotide
  source 1..17: mol_type = other DNA
gccatgaactttaccta

SEQ ID NO: 10077 - DNA, 17 bp, synthetic construct
  misc_feature 1..17: note = Oligonucleotide
  source 1..17: mol_type = other DNA
tttgccatgaactttac

SEQ ID NO: 10078 - DNA, 17 bp, synthetic construct
  misc_feature 1..17: note = Oligonucleotide
  source 1..17: mol_type = other DNA
tactttgccatgaactt

SEQ ID NO: 10079 - DNA, 17 bp, synthetic construct
  misc_feature 1..17: note = Oligonucleotide
  source 1..17: mol_type = other DNA
agctactttgccatgaa

SEQ ID NO: 10080 - DNA, 17 bp, synthetic construct
  misc_feature 1..17: note = Oligonucleotide
  source 1..17: mol_type = other DNA
caaagctactttgccat

SEQ ID NO: 10081 - DNA, 17 bp, synthetic construct
  misc_feature 1..17: note = Oligonucleotide
  source 1..17: mol_type = other DNA
ttccaaagctactttgc

SEQ ID NO: 10082 - DNA, 17 bp, synthetic construct
  misc_feature 1..17: note = Oligonucleotide
  source 1..17: mol_type = other DNA
tgtttccaaagctactt

SEQ ID NO: 10083 - DNA, 17 bp, synthetic construct
  misc_feature 1..17: note = Oligonucleotide
  source 1..17: mol_type = other DNA
ttgtgtttccaaagcta

SEQ ID NO: 10084 - DNA, 17 bp, synthetic construct
  misc_feature 1..17: note = Oligonucleotide
  source 1..17: mol_type = other DNA
tttttgtgtttccaaag

SEQ ID NO: 10085 - DNA, 17 bp, synthetic construct
  misc_feature 1..17: note = Oligonucleotide
  source 1..17: mol_type = other DNA
ctctttttgtgtttcca

SEQ ID NO: 10086 - DNA, 17 bp, synthetic construct
  misc_feature 1..17: note = Oligonucleotide
  source 1..17: mol_type = other DNA
aacctctttttgtgttt

SEQ ID NO: 10087 - DNA, 17 bp, synthetic construct
  misc_feature 1..17: note = Oligonucleotide
  source 1..17: mol_type = other DNA
aagaacctctttttgtg

SEQ ID NO: 10088 - DNA, 17 bp, synthetic construct
  misc_feature 1..17: note = Oligonucleotide
  source 1..17: mol_type = other DNA
gcaaagaacctcttttt

SEQ ID NO: 10089 - DNA, 17 bp, synthetic construct
  misc_feature 1..17: note = Oligonucleotide
  source 1..17: mol_type = other DNA
gcagcaaagaacctctt

SEQ ID NO: 10090 - DNA, 17 bp, synthetic construct
  misc_feature 1..17: note = Oligonucleotide
  source 1..17: mol_type = other DNA
actgcagcaaagaacct

SEQ ID NO: 10091 - DNA, 17 bp, synthetic construct
  misc_feature 1..17: note = Oligonucleotide
  source 1..17: mol_type = other DNA
agtactgcagcaaagaa

SEQ ID NO: 10092 - DNA, 17 bp, synthetic construct
  misc_feature 1..17: note = Oligonucleotide
  source 1..17: mol_type = other DNA
agaagtactgcagcaaa

SEQ ID NO: 10093 - DNA, 17 bp, synthetic construct
  misc_feature 1..17: note = Oligonucleotide
  source 1..17: mol_type = other DNA
accagaagtactgcagc

SEQ ID NO: 10094 - DNA, 17 bp, synthetic construct
  misc_feature 1..17: note = Oligonucleotide
  source 1..17: mol_type = other DNA
ggcaccagaagtactgc

SEQ ID NO: 10095 - DNA, 17 bp, synthetic construct
  misc_feature 1..17: note = Oligonucleotide
  source 1..17: mol_type = other DNA
aaaggcaccagaagtac

SEQ ID NO: 10096 - DNA, 17 bp, synthetic construct
  misc_feature 1..17: note = Oligonucleotide
  source 1..17: mol_type = other DNA
gtcaaaggcaccagaag

SEQ ID NO: 10097 - DNA, 17 bp, synthetic construct
  misc_feature 1..17: note = Oligonucleotide
  source 1..17: mol_type = other DNA
cttgtcaaaggcaccag

SEQ ID NO: 10098 - DNA, 17 bp, synthetic construct
  misc_feature 1..17: note = Oligonucleotide
  source 1..17: mol_type = other DNA
aagcttgtcaaaggcac

SEQ ID NO: 10099 - DNA, 17 bp, synthetic construct
  misc_feature 1..17: note = Oligonucleotide
  source 1..17: mol_type = other DNA
cacaagcttgtcaaagg

SEQ ID NO: 10100 - DNA, 17 bp, synthetic construct
  misc_feature 1..17: note = Oligonucleotide
  source 1..17: mol_type = other DNA
ccacacaagcttgtcaa

SEQ ID NO: 10101 - DNA, 17 bp, synthetic construct
  misc_feature 1..17: note = Oligonucleotide
  source 1..17: mol_type = other DNA
cctccacacaagcttgt

SEQ ID NO: 10102 - DNA, 17 bp, synthetic construct
  misc_feature 1..17: note = Oligonucleotide
  source 1..17: mol_type = other DNA
cctcctccacacaagct

SEQ ID NO: 10103 - DNA, 17 bp, synthetic construct
  misc_feature 1..17: note = Oligonucleotide
  source 1..17: mol_type = other DNA
tgccctcctccacacaa

SEQ ID NO: 10104 - DNA, 17 bp, synthetic construct
  misc_feature 1..17: note = Oligonucleotide
  source 1..17: mol_type = other DNA
cagtgccctcctccaca

SEQ ID NO: 10105 - DNA, 17 bp, synthetic construct
  misc_feature 1..17: note = Oligonucleotide
  source 1..17: mol_type = other DNA
acacagtgccctcctcc

SEQ ID NO: 10106 - DNA, 17 bp, synthetic construct
  misc_feature 1..17: note = Oligonucleotide
  source 1..17: mol_type = other DNA
ggcacacagtgccctcc

SEQ ID NO: 10107 - DNA, 17 bp, synthetic construct
  misc_feature 1..17: note = Oligonucleotide
  source 1..17: mol_type = other DNA
cacggcacacagtgccc

SEQ ID NO: 10108 - DNA, 17 bp, synthetic construct
  misc_feature 1..17: note = Oligonucleotide
  source 1..17: mol_type = other DNA
gaccacggcacacagtg

SEQ ID NO: 10109 - DNA, 17 bp, synthetic construct
  misc_feature 1..17: note = Oligonucleotide
  source 1..17: mol_type = other DNA
ggagaccacggcacaca

SEQ ID NO: 10110 - DNA, 17 bp, synthetic construct
  misc_feature 1..17: note = Oligonucleotide
  source 1..17: mol_type = other DNA
tctggagaccacggcac

SEQ ID NO: 10111 - DNA, 17 bp, synthetic construct
  misc_feature 1..17: note = Oligonucleotide
  source 1..17: mol_type = other DNA
aggtctggagaccacgg

SEQ ID NO: 10112 - DNA, 17 bp, synthetic construct
  misc_feature 1..17: note = Oligonucleotide
  source 1..17: mol_type = other DNA
agcaggtctggagacca

SEQ ID NO: 10113 - DNA, 17 bp, synthetic construct
  misc_feature 1..17: note = Oligonucleotide
  source 1..17: mol_type = other DNA
tctagcaggtctggaga

SEQ ID NO: 10114 - DNA, 17 bp, synthetic construct
  misc_feature 1..17: note = Oligonucleotide
  source 1..17: mol_type = other DNA
gactctagcaggtctgg

SEQ ID NO: 10115 - DNA, 17 bp, synthetic construct
  misc_feature 1..17: note = Oligonucleotide
  source 1..17: mol_type = other DNA
actgactctagcaggtc

SEQ ID NO: 10116 - DNA, 17 bp, synthetic construct
  misc_feature 1..17: note = Oligonucleotide
  source 1..17: mol_type = other DNA
ggaactgactctagcag

SEQ ID NO: 10117 - DNA, 17 bp, synthetic construct
  misc_feature 1..17: note = Oligonucleotide
  source 1..17: mol_type = other DNA
ctaggaactgactctag

SEQ ID NO: 10118 - DNA, 17 bp, synthetic construct
  misc_feature 1..17: note = Oligonucleotide
  source 1..17: mol_type = other DNA
gacctaggaactgactc

SEQ ID NO: 10119 - DNA, 17 bp, synthetic construct
  misc_feature 1..17: note = Oligonucleotide
  source 1..17: mol_type = other DNA
ggagacctaggaactga

SEQ ID NO: 10120 - DNA, 17 bp, synthetic construct
  misc_feature 1..17: note = Oligonucleotide
  source 1..17: mol_type = other DNA
ctgggagacctaggaac

SEQ ID NO: 10121 - DNA, 17 bp, synthetic construct
  misc_feature 1..17: note = Oligonucleotide
  source 1..17: mol_type = other DNA
cttctgggagacctagg

SEQ ID NO: 10122 - DNA, 17 bp, synthetic construct
  misc_feature 1..17: note = Oligonucleotide
  source 1..17: mol_type = other DNA
ggtcttctgggagacct

SEQ ID NO: 10123 - DNA, 17 bp, synthetic construct
  misc_feature 1..17: note = Oligonucleotide
  source 1..17: mol_type = other DNA
atgggtcttctgggaga

SEQ ID NO: 10124 - DNA, 17 bp, synthetic construct
  misc_feature 1..17: note = Oligonucleotide
  source 1..17: mol_type = other DNA
aacatgggtcttctggg

SEQ ID NO: 10125 - DNA, 17 bp, synthetic construct
  misc_feature 1..17: note = Oligonucleotide
  source 1..17: mol_type = other DNA
aggaacatgggtcttct

SEQ ID NO: 10126 - DNA, 17 bp, synthetic construct
  misc_feature 1..17: note = Oligonucleotide
  source 1..17: mol_type = other DNA
ttgaggaacatgggtct

SEQ ID NO: 10127 - DNA, 17 bp, synthetic construct
  misc_feature 1..17: note = Oligonucleotide
  source 1..17: mol_type = other DNA
attttgaggaacatggg

SEQ ID NO: 10128 - DNA, 17 bp, synthetic construct
  misc_feature 1..17: note = Oligonucleotide
  source 1..17: mol_type = other DNA
accattttgaggaacat

SEQ ID NO: 10129 - DNA, 17 bp, synthetic construct
  misc_feature 1..17: note = Oligonucleotide
  source 1..17: mol_type = other DNA
ttgaccattttgaggaa

SEQ ID NO: 10130 - DNA, 17 bp, synthetic construct
  misc_feature 1..17: note = Oligonucleotide
  source 1..17: mol_type = other DNA
ttcttgaccattttgag

SEQ ID NO: 10131 - DNA, 17 bp, synthetic construct
  misc_feature 1..17: note = Oligonucleotide
  source 1..17: mol_type = other DNA
ggcttcttgaccatttt

SEQ ID NO: 10132 - DNA, 17 bp, synthetic construct
  misc_feature 1..17: note = Oligonucleotide
  source 1..17: mol_type = other DNA
cagggcttcttgaccat

SEQ ID NO: 10133 - DNA, 17 bp, synthetic construct
  misc_feature 1..17: note = Oligonucleotide
  source 1..17: mol_type = other DNA
gggcagggcttcttgac

SEQ ID NO: 10134 - DNA, 17 bp, synthetic construct
  misc_feature 1..17: note = Oligonucleotide
  source 1..17: mol_type = other DNA
ccagggcagggcttctt

SEQ ID NO: 10135 - DNA, 17 bp, synthetic construct
  misc_feature 1..17: note = Oligonucleotide
  source 1..17: mol_type = other DNA
ccaccagggcagggctt

SEQ ID NO: 10136 - DNA, 17 bp, synthetic construct
  misc_feature 1..17: note = Oligonucleotide
  source 1..17: mol_type = other DNA
aggccaccagggcaggg

SEQ ID NO: 10137 - DNA, 17 bp, synthetic construct
  misc_feature 1..17: note = Oligonucleotide
  source 1..17: mol_type = other DNA
agcaggccaccagggca

SEQ ID NO: 10138 - DNA, 17 bp, synthetic construct
  misc_feature 1..17: note = Oligonucleotide
  source 1..17: mol_type = other DNA
tgcagcaggccaccagg

SEQ ID NO: 10139 - DNA, 17 bp, synthetic construct
  misc_feature 1..17: note = Oligonucleotide
  source 1..17: mol_type = other DNA
gtctgcagcaggccacc

SEQ ID NO: 10140 - DNA, 17 bp, synthetic construct
  misc_feature 1..17: note = Oligonucleotide
  source 1..17: mol_type = other DNA
agggtctgcagcaggcc

SEQ ID NO: 10141 - DNA, 17 bp, synthetic construct
  misc_feature 1..17: note = Oligonucleotide
  source 1..17: mol_type = other DNA
ggcagggtctgcagcag

SEQ ID NO: 10142 - DNA, 17 bp, synthetic construct
  misc_feature 1..17: note = Oligonucleotide
  source 1..17: mol_type = other DNA
gcaggcagggtctgcag

SEQ ID NO: 10143 - DNA, 17 bp, synthetic construct
  misc_feature 1..17: note = Oligonucleotide
  source 1..17: mol_type = other DNA
ttagcaggcagggtctg

SEQ ID NO: 10144 - DNA, 17 bp, synthetic construct
  misc_feature 1..17: note = Oligonucleotide
  source 1..17: mol_type = other DNA
atattagcaggcagggt

SEQ ID NO: 10145 - DNA, 17 bp, synthetic construct
  misc_feature 1..17: note = Oligonucleotide
  source 1..17: mol_type = other DNA
aatatattagcaggcag

SEQ ID NO: 10146 - DNA, 17 bp, synthetic construct
  misc_feature 1..17: note = Oligonucleotide
  source 1..17: mol_type = other DNA
acaaatatattagcagg

SEQ ID NO: 10147 - DNA, 17 bp, synthetic construct
  misc_feature 1..17: note = Oligonucleotide
  source 1..17: mol_type = other DNA
ctgacaaatatattagc

SEQ ID NO: 10148 - DNA, 17 bp, synthetic construct
  misc_feature 1..17: note = Oligonucleotide
  source 1..17: mol_type = other DNA
gccctgacaaatatatt

SEQ ID NO: 10149 - DNA, 17 bp, synthetic construct
  misc_feature 1..17: note = Oligonucleotide
  source 1..17: mol_type = other DNA
agagccctgacaaatat

SEQ ID NO: 10150 - DNA, 17 bp, synthetic construct
  misc_feature 1..17: note = Oligonucleotide
  source 1..17: mol_type = other DNA
tccagagccctgacaaa

SEQ ID NO: 10151 - DNA, 17 bp, synthetic construct
  misc_feature 1..17: note = Oligonucleotide
  source 1..17: mol_type = other DNA
ttgtccagagccctgac

SEQ ID NO: 10152 - DNA, 17 bp, synthetic construct
  misc_feature 1..17: note = Oligonucleotide
  source 1..17: mol_type = other DNA
gctttgtccagagccct

SEQ ID NO: 10153 - DNA, 17 bp, synthetic construct
  misc_feature 1..17: note = Oligonucleotide
  source 1..17: mol_type = other DNA
agtgctttgtccagagc

SEQ ID NO: 10154 - DNA, 17 bp, synthetic construct
  misc_feature 1..17: note = Oligonucleotide
  source 1..17: mol_type = other DNA
cacagtgctttgtccag

SEQ ID NO: 10155 - DNA, 17 bp, synthetic construct
  misc_feature 1..17: note = Oligonucleotide
  source 1..17: mol_type = other DNA
gcacacagtgctttgtc

SEQ ID NO: 10156 - DNA, 17 bp, synthetic construct
  misc_feature 1..17: note = Oligonucleotide
  source 1..17: mol_type = other DNA
caagcacacagtgcttt

SEQ ID NO: 10157 - DNA, 17 bp, synthetic construct
  misc_feature 1..17: note = Oligonucleotide
  source 1..17: mol_type = other DNA
caccaagcacacagtgc

SEQ ID NO: 10158 - DNA, 17 bp, synthetic construct
  misc_feature 1..17: note = Oligonucleotide
  source 1..17: mol_type = other DNA
atccaccaagcacacag

SEQ ID NO: 10159 - DNA, 17 bp, synthetic construct
  misc_feature 1..17: note = Oligonucleotide
  source 1..17: mol_type = other DNA
gtgatccaccaagcaca

SEQ ID NO: 10160 - DNA, 17 bp, synthetic construct
  misc_feature 1..17: note = Oligonucleotide
  source 1..17: mol_type = other DNA
agtgtgatccaccaagc

SEQ ID NO: 10161 - DNA, 17 bp, synthetic construct
  misc_feature 1..17: note = Oligonucleotide
  source 1..17: mol_type = other DNA
accagtgtgatccacca

SEQ ID NO: 10162 - DNA, 17 bp, synthetic construct
  misc_feature 1..17: note = Oligonucleotide
  source 1..17: mol_type = other DNA
cttaccagtgtgatcca

SEQ ID NO: 10163 - DNA, 17 bp, synthetic construct
  misc_feature 1..17: note = Oligonucleotide
  source 1..17: mol_type = other DNA
ctgcttaccagtgtgat

SEQ ID NO: 10164 - DNA, 17 bp, synthetic construct
  misc_feature 1..17: note = Oligonucleotide
  source 1..17: mol_type = other DNA
gccctgcttaccagtgt

SEQ ID NO: 10165 - DNA, 17 bp, synthetic construct
  misc_feature 1..17: note = Oligonucleotide
  source 1..17: mol_type = other DNA
ttggccctgcttaccag

SEQ ID NO: 10166 - DNA, 17 bp, synthetic construct
  misc_feature 1..17: note = Oligonucleotide
  source 1..17: mol_type = other DNA
gccttggccctgcttac

SEQ ID NO: 10167 - DNA, 17 bp, synthetic construct
  misc_feature 1..17: note = Oligonucleotide
  source 1..17: mol_type = other DNA
ctggccttggccctgct

SEQ ID NO: 10168 - DNA, 17 bp, synthetic construct
  misc_feature 1..17: note = Oligonucleotide
  source 1..17: mol_type = other DNA
ctgctggccttggccct

SEQ ID NO: 10169 - DNA, 17 bp, synthetic construct
  misc_feature 1..17: note = Oligonucleotide
  source 1..17: mol_type = other DNA
gccctgctggccttggc

SEQ ID NO: 10170 - DNA, 17 bp, synthetic construct
  misc_feature 1..17: note = Oligonucleotide
  source 1..17: mol_type = other DNA
caggccctgctggcctt

SEQ ID NO: 10171 - DNA, 17 bp, synthetic construct
  misc_feature 1..17: note = Oligonucleotide
  source 1..17: mol_type = other DNA
gagcaggccctgctggc

SEQ ID NO: 10172 - DNA, 17 bp, synthetic construct
  misc_feature 1..17: note = Oligonucleotide
  source 1..17: mol_type = other DNA
aaagagcaggccctgct

SEQ ID NO: 10173 - DNA, 17 bp, synthetic construct
  misc_feature 1..17: note = Oligonucleotide
  source 1..17: mol_type = other DNA
tcaaaagagcaggccct

SEQ ID NO: 10174 - DNA, 17 bp, synthetic construct
  misc_feature 1..17: note = Oligonucleotide
  source 1..17: mol_type = other DNA
gtttcaaaagagcaggc

SEQ ID NO: 10175 - DNA, 17 bp, synthetic construct
  misc_feature 1..17: note = Oligonucleotide
  source 1..17: mol_type = other DNA
tgggtttcaaaagagca

SEQ ID NO: 10176 - DNA, 17 bp, synthetic construct
  misc_feature 1..17: note = Oligonucleotide
  source 1..17: mol_type = other DNA
gtctgggtttcaaaaga

SEQ ID NO: 10177 - DNA, 17 bp, synthetic construct
  misc_feature 1..17: note = Oligonucleotide
  source 1..17: mol_type = other DNA
tcagtctgggtttcaaa

SEQ ID NO: 10178 - DNA, 17 bp, synthetic construct
  misc_feature 1..17: note = Oligonucleotide
  source 1..17: mol_type = other DNA
cattcagtctgggtttc

SEQ ID NO: 10179 - DNA, 17 bp, synthetic construct
  misc_feature 1..17: note = Oligonucleotide
  source 1..17: mol_type = other DNA
acacattcagtctgggt

SEQ ID NO: 10180 - DNA, 17 bp, synthetic construct
  misc_feature 1..17: note = Oligonucleotide
  source 1..17: mol_type = other DNA
gtgacacattcagtctg

SEQ ID NO: 10181 - DNA, 17 bp, synthetic construct
  misc_feature 1..17: note = Oligonucleotide
  source 1..17: mol_type = other DNA
tatgtgacacattcagt

SEQ ID NO: 10182 - DNA, 17 bp, synthetic construct
  misc_feature 1..17: note = Oligonucleotide
  source 1..17: mol_type = other DNA
aggtatgtgacacattc

SEQ ID NO: 10183 - DNA, 17 bp, synthetic construct
  misc_feature 1..17: note = Oligonucleotide
  source 1..17: mol_type = other DNA
ggcaggtatgtgacaca

SEQ ID NO: 10184 - DNA, 17 bp, synthetic construct
  misc_feature 1..17: note = Oligonucleotide
  source 1..17: mol_type = other DNA
actggcaggtatgtgac

SEQ ID NO: 10185 - DNA, 17 bp, synthetic construct
  misc_feature 1..17: note = Oligonucleotide
  source 1..17: mol_type = other DNA
cccactggcaggtatgt

SEQ ID NO: 10186 - DNA, 17 bp, synthetic construct
  misc_feature 1..17: note = Oligonucleotide
  source 1..17: mol_type = other DNA
gcccccactggcaggta

SEQ ID NO: 10187 - DNA, 17 bp, synthetic construct
  misc_feature 1..17: note = Oligonucleotide
  source 1..17: mol_type = other DNA
ggggcccccactggcag

SEQ ID NO: 10188 - DNA, 17 bp, synthetic construct
  misc_feature 1..17: note = Oligonucleotide
  source 1..17: mol_type = other DNA
gcaggggcccccactgg

SEQ ID NO: 10189 - DNA, 17 bp, synthetic construct
  misc_feature 1..17: note = Oligonucleotide
  source 1..17: mol_type = other DNA
cctgcaggggcccccac

SEQ ID NO: 10190 - DNA, 17 bp, synthetic construct
  misc_feature 1..17: note = Oligonucleotide
  source 1..17: mol_type = other DNA
tggcctgcaggggcccc

SEQ ID NO: 10191 - DNA, 17 bp, synthetic construct
  misc_feature 1..17: note = Oligonucleotide
  source 1..17: mol_type = other DNA
atgtggcctgcaggggc

SEQ ID NO: 10192 - DNA, 17 bp, synthetic construct
  misc_feature 1..17: note = Oligonucleotide
  source 1..17: mol_type = other DNA
tgcatgtggcctgcagg

SEQ ID NO: 10193 - DNA, 17 bp, synthetic construct
  misc_feature 1..17: note = Oligonucleotide
  source 1..17: mol_type = other DNA
agctgcatgtggcctgc

SEQ ID NO: 10194 - DNA, 17 bp, synthetic construct
  misc_feature 1..17: note = Oligonucleotide
  source 1..17: mol_type = other DNA
cccagctgcatgtggcc

SEQ ID NO: 10195 - DNA, 17 bp, synthetic construct
  misc_feature 1..17: note = Oligonucleotide
  source 1..17: mol_type = other DNA
tgccccagctgcatgtg

SEQ ID NO: 10196 - DNA, 17 bp, synthetic construct
  misc_feature 1..17: note = Oligonucleotide
  source 1..17: mol_type = other DNA
acctgccccagctgcat

SEQ ID NO: 10197 - DNA, 17 bp, synthetic construct
  misc_feature 1..17: note = Oligonucleotide
  source 1..17: mol_type = other DNA
cacacctgccccagctg

SEQ ID NO: 10198 - DNA, 17 bp, synthetic construct
  misc_feature 1..17: note = Oligonucleotide
  source 1..17: mol_type = other DNA
gaacacacctgccccag

SEQ ID NO: 10199 - DNA, 17 bp, synthetic construct
  misc_feature 1..17: note = Oligonucleotide
  source 1..17: mol_type = other DNA
tgggaacacacctgccc

SEQ ID NO: 10200 - DNA, 17 bp, synthetic construct
  misc_feature 1..17: note = Oligonucleotide
  source 1..17: mol_type = other DNA
tcctgggaacacacctg

SEQ ID NO: 10201 - DNA, 17 bp, synthetic construct
  misc_feature 1..17: note = Oligonucleotide
  source 1..17: mol_type = other DNA
ggatcctgggaacacac

SEQ ID NO: 10202 - DNA, 17 bp, synthetic construct
  misc_feature 1..17: note = Oligonucleotide
  source 1..17: mol_type = other DNA
cagggatcctgggaaca

SEQ ID NO: 10203 - DNA, 17 bp, synthetic construct
  misc_feature 1..17: note = Oligonucleotide
  source 1..17: mol_type = other DNA
gttcagggatcctggga

SEQ ID NO: 10204 - DNA, 17 bp, synthetic construct
  misc_feature 1..17: note = Oligonucleotide
  source 1..17: mol_type = other DNA
agggttcagggatcctg

SEQ ID NO: 10205 - DNA, 17 bp, synthetic construct
  misc_feature 1..17: note = Oligonucleotide
  source 1..17: mol_type = other DNA
aacagggttcagggatc

SEQ ID NO: 10206 - DNA, 17 bp, synthetic construct
  misc_feature 1..17: note = Oligonucleotide
  source 1..17: mol_type = other DNA
ccgaacagggttcaggg

SEQ ID NO: 10207 - DNA, 17 bp, synthetic construct
  misc_feature 1..17: note = Oligonucleotide
  source 1..17: mol_type = other DNA
tccccgaacagggttca

SEQ ID NO: 10208 - DNA, 17 bp, synthetic construct
  misc_feature 1..17: note = Oligonucleotide
  source 1..17: mol_type = other DNA
tactccccgaacagggt

SEQ ID NO: 10209 - DNA, 17 bp, synthetic construct
  misc_feature 1..17: note = Oligonucleotide
  source 1..17: mol_type = other DNA
tcctactccccgaacag

SEQ ID NO: 10210 - DNA, 17 bp, synthetic construct
  misc_feature 1..17: note = Oligonucleotide
  source 1..17: mol_type = other DNA
ccttcctactccccgaa

SEQ ID NO: 10211 - DNA, 17 bp, synthetic construct
  misc_feature 1..17: note = Oligonucleotide
  source 1..17: mol_type = other DNA
cctccttcctactcccc

SEQ ID NO: 10212 - DNA, 17 bp, synthetic construct
  misc_feature 1..17: note = Oligonucleotide
  source 1..17: mol_type = other DNA
gtacctccttcctactc

SEQ ID NO: 10213 - DNA, 17 bp, synthetic construct
  misc_feature 1..17: note = Oligonucleotide
  source 1..17: mol_type = other DNA
tctgtacctccttccta

SEQ ID NO: 10214 - DNA, 17 bp, synthetic construct
  misc_feature 1..17: note = Oligonucleotide
  source 1..17: mol_type = other DNA
tcctctgtacctccttc

SEQ ID NO: 10215 - DNA, 17 bp, synthetic construct
  misc_feature 1..17: note = Oligonucleotide
  source 1..17: mol_type = other DNA
ccctcctctgtacctcc

SEQ ID NO: 10216 - DNA, 17 bp, synthetic construct
  misc_feature 1..17: note = Oligonucleotide
  source 1..17: mol_type = other DNA
gacccctcctctgtacc

SEQ ID NO: 10217 - DNA, 17 bp, synthetic construct
  misc_feature 1..17: note = Oligonucleotide
  source 1..17: mol_type = other DNA
tatgacccctcctctgt

SEQ ID NO: 10218 - DNA, 17 bp, synthetic construct
  misc_feature 1..17: note = Oligonucleotide
  source 1..17: mol_type = other DNA
tcctatgacccctcctc

SEQ ID NO: 10219 - DNA, 17 bp, synthetic construct
  misc_feature 1..17: note = Oligonucleotide
  source 1..17: mol_type = other DNA
gtgtcctatgacccctc

SEQ ID NO: 10220 - DNA, 17 bp, synthetic construct
  misc_feature 1..17: note = Oligonucleotide
  source 1..17: mol_type = other DNA
ccagtgtcctatgaccc

SEQ ID NO: 10221 - DNA, 17 bp, synthetic construct
  misc_feature 1..17: note = Oligonucleotide
  source 1..17: mol_type = other DNA
gccccagtgtcctatga

SEQ ID NO: 10222 - DNA, 17 bp, synthetic construct
  misc_feature 1..17: note = Oligonucleotide
  source 1..17: mol_type = other DNA
tgggccccagtgtccta

SEQ ID NO: 10223 - DNA, 17 bp, synthetic construct
  misc_feature 1..17: note = Oligonucleotide
  source 1..17: mol_type = other DNA
tgatgggccccagtgtc

SEQ ID NO: 10224 - DNA, 17 bp, synthetic construct
  misc_feature 1..17: note = Oligonucleotide
  source 1..17: mol_type = other DNA
ctctgatgggccccagt

SEQ ID NO: 10225 - DNA, 17 bp, synthetic construct
  misc_feature 1..17: note = Oligonucleotide
  source 1..17: mol_type = other DNA
cagctctgatgggcccc

SEQ ID NO: 10226 - DNA, 17 bp, synthetic construct
  misc_feature 1..17: note = Oligonucleotide
  source 1..17: mol_type = other DNA
ctccagctctgatgggc

SEQ ID NO: 10227 - DNA, 17 bp, synthetic construct
  misc_feature 1..17: note = Oligonucleotide
  source 1..17: mol_type = other DNA
cagctccagctctgatg

SEQ ID NO: 10228 - DNA, 17 bp, synthetic construct
  misc_feature 1..17: note = Oligonucleotide
  source 1..17: mol_type = other DNA
tcccagctccagctctg

SEQ ID NO: 10229 - DNA, 17 bp, synthetic construct
  misc_feature 1..17: note = Oligonucleotide
  source 1..17: mol_type = other DNA
tgttcccagctccagct

SEQ ID NO: 10230 - DNA, 17 bp, synthetic construct
  misc_feature 1..17: note = Oligonucleotide
  source 1..17: mol_type = other DNA
gcctgttcccagctcca

SEQ ID NO: 10231 - DNA, 17 bp, synthetic construct
  misc_feature 1..17: note = Oligonucleotide
  source 1..17: mol_type = other DNA
cccgcctgttcccagct

SEQ ID NO: 10232 - DNA, 17 bp, synthetic construct
  misc_feature 1..17: note = Oligonucleotide
  source 1..17: mol_type = other DNA
caccccgcctgttccca

SEQ ID NO: 10233 - DNA, 17 bp, synthetic construct
  misc_feature 1..17: note = Oligonucleotide
  source 1..17: mol_type = other DNA
cggcaccccgcctgttc

SEQ ID NO: 10234 - DNA, 17 bp, synthetic construct
  misc_feature 1..17: note = Oligonucleotide
  source 1..17: mol_type = other DNA
cctcggcaccccgcctg

SEQ ID NO: 10235 - DNA, 17 bp, synthetic construct
  misc_feature 1..17: note = Oligonucleotide
  source 1..17: mol_type = other DNA
gctcctcggcaccccgc

SEQ ID NO: 10236 - DNA, 17 bp, synthetic construct
  misc_feature 1..17: note = Oligonucleotide
  source 1..17: mol_type = other DNA
cttgctcctcggcaccc

SEQ ID NO: 10237 - DNA, 17 bp, synthetic construct
  misc_feature 1..17: note = Oligonucleotide
  source 1..17: mol_type = other DNA
cgtcttgctcctcggca

SEQ ID NO: 10238 - DNA, 17 bp, synthetic construct
  misc_feature 1..17: note = Oligonucleotide
  source 1..17: mol_type = other DNA
acacgtcttgctcctcg

SEQ ID NO: 10239 - DNA, 17 bp, synthetic construct
  misc_feature 1..17: note = Oligonucleotide
  source 1..17: mol_type = other DNA
gtaacacgtcttgctcc

SEQ ID NO: 10240 - DNA, 17 bp, synthetic construct
  misc_feature 1..17: note = Oligonucleotide
  source 1..17: mol_type = other DNA
gcggtaacacgtcttgc

SEQ ID NO: 10241 - DNA, 17 bp, synthetic construct
  misc_feature 1..17: note = Oligonucleotide
  source 1..17: mol_type = other DNA
tctgcggtaacacgtct

SEQ ID NO: 10242 - DNA, 17 bp, synthetic construct
  misc_feature 1..17: note = Oligonucleotide
  source 1..17: mol_type = other DNA
tcctctgcggtaacacg

SEQ ID NO: 10243 - DNA, 17 bp, synthetic construct
  misc_feature 1..17: note = Oligonucleotide
  source 1..17: mol_type = other DNA
gcatcctctgcggtaac

SEQ ID NO: 10244 - DNA, 17 bp, synthetic construct
  misc_feature 1..17: note = Oligonucleotide
  source 1..17: mol_type = other DNA
agtgcatcctctgcggt

SEQ ID NO: 10245 - DNA, 17 bp, synthetic construct
  misc_feature 1..17: note = Oligonucleotide
  source 1..17: mol_type = other DNA
tccagtgcatcctctgc

SEQ ID NO: 10246 - DNA, 17 bp, synthetic construct
  misc_feature 1..17: note = Oligonucleotide
  source 1..17: mol_type = other DNA
gcttccagtgcatcctc

SEQ ID NO: 10247 - DNA, 17 bp, synthetic construct
  misc_feature 1..17: note = Oligonucleotide
  source 1..17: mol_type = other DNA
gaagcttccagtgcatc

SEQ ID NO: 10248 - DNA, 17 bp, synthetic construct
  misc_feature 1..17: note = Oligonucleotide
  source 1..17: mol_type = other DNA
tcggaagcttccagtgc

SEQ ID NO: 10249 - DNA, 17 bp, synthetic construct
  misc_feature 1..17: note = Oligonucleotide
  source 1..17: mol_type = other DNA
ggctcggaagcttccag

SEQ ID NO: 10250 - DNA, 17 bp, synthetic construct
  misc_feature 1..17: note = Oligonucleotide
  source 1..17: mol_type = other DNA
atgggctcggaagcttc

SEQ ID NO: 10251 - DNA, 17 bp, synthetic construct
  misc_feature 1..17: note = Oligonucleotide
  source 1..17: mol_type = other DNA
gacatgggctcggaagc

SEQ ID NO: 10252 - DNA, 17 bp, synthetic construct
  misc_feature 1..17: note = Oligonucleotide
  source 1..17: mol_type = other DNA
ccagacatgggctcgga

SEQ ID NO: 10253 - DNA, 17 bp, synthetic construct
  misc_feature 1..17: note = Oligonucleotide
  source 1..17: mol_type = other DNA
aaaccagacatgggctc

SEQ ID NO: 10254 - DNA, 17 bp, synthetic construct
  misc_feature 1..17: note = Oligonucleotide
  source 1..17: mol_type = other DNA
acaaaaccagacatggg

SEQ ID NO: 10255 - DNA, 17 bp, synthetic construct
  misc_feature 1..17: note = Oligonucleotide
  source 1..17: mol_type = other DNA
agcacaaaaccagacat

SEQ ID NO: 10256 - DNA, 17 bp, synthetic construct
  misc_feature 1..17: note = Oligonucleotide
  source 1..17: mol_type = other DNA
aggagcacaaaaccaga

SEQ ID NO: 10257 - DNA, 17 bp, synthetic construct
  misc_feature 1..17: note = Oligonucleotide
  source 1..17: mol_type = other DNA
cagaggagcacaaaacc

SEQ ID NO: 10258 - DNA, 17 bp, synthetic construct
  misc_feature 1..17: note = Oligonucleotide
  source 1..17: mol_type = other DNA
tctcagaggagcacaaa

SEQ ID NO: 10259 - DNA, 17 bp, synthetic construct
  misc_feature 1..17: note = Oligonucleotide
  source 1..17: mol_type = other DNA
aattctcagaggagcac

SEQ ID NO: 10260 - DNA, 17 bp, synthetic construct
  misc_feature 1..17: note = Oligonucleotide
  source 1..17: mol_type = other DNA
actaattctcagaggag

SEQ ID NO: 10261 - DNA, 17 bp, synthetic construct
  misc_feature 1..17: note = Oligonucleotide
  source 1..17: mol_type = other DNA
ggaactaattctcagag

SEQ ID NO: 10262 - DNA, 17 bp, synthetic construct
  misc_feature 1..17: note = Oligonucleotide
  source 1..17: mol_type = other DNA
aagggaactaattctca

SEQ ID NO: 10263 - DNA, 17 bp, synthetic construct
  misc_feature 1..17: note = Oligonucleotide
  source 1..17: mol_type = other DNA
attaagggaactaattc

SEQ ID NO: 10264 - DNA, 17 bp, synthetic construct
  misc_feature 1..17: note = Oligonucleotide
  source 1..17: mol_type = other DNA
ctcattaagggaactaa

SEQ ID NO: 10265 - DNA, 17 bp, synthetic construct
  misc_feature 1..17: note = Oligonucleotide
  source 1..17: mol_type = other DNA
ggcctcattaagggaac

SEQ ID NO: 10266 - DNA, 17 bp, synthetic construct
  misc_feature 1..17: note = Oligonucleotide
  source 1..17: mol_type = other DNA
aggggcctcattaaggg

SEQ ID NO: 10267 - DNA, 17 bp, synthetic construct
  misc_feature 1..17: note = Oligonucleotide
  source 1..17: mol_type = other DNA
actaggggcctcattaa

SEQ ID NO: 10268 - DNA, 17 bp, synthetic construct
  misc_feature 1..17: note = Oligonucleotide
  source 1..17: mol_type = other DNA
caaactaggggcctcat

SEQ ID NO: 10269 - DNA, 17 bp, synthetic construct
  misc_feature 1..17: note = Oligonucleotide
  source 1..17: mol_type = other DNA
ttgcaaactaggggcct

SEQ ID NO: 10270 - DNA, 17 bp, synthetic construct
  misc_feature 1..17: note = Oligonucleotide
  source 1..17: mol_type = other DNA
cttttgcaaactagggg

SEQ ID NO: 10271 - DNA, 17 bp, synthetic construct
  misc_feature 1..17: note = Oligonucleotide
  source 1..17: mol_type = other DNA
ggccttttgcaaactag

SEQ ID NO: 10272 - DNA, 17 bp, synthetic construct
  misc_feature 1..17: note = Oligonucleotide
  source 1..17: mol_type = other DNA
tgtggccttttgcaaac

SEQ ID NO: 10273 - DNA, 17 bp, synthetic construct
  misc_feature 1..17: note = Oligonucleotide
  source 1..17: mol_type = other DNA
gcctgtggccttttgca

SEQ ID NO: 10274 - DNA, 17 bp, synthetic construct
  misc_feature 1..17: note = Oligonucleotide
  source 1..17: mol_type = other DNA
taggcctgtggcctttt

SEQ ID NO: 10275 - DNA, 17 bp, synthetic construct
  misc_feature 1..17: note = Oligonucleotide
  source 1..17: mol_type = other DNA
gtctaggcctgtggcct

SEQ ID NO: 10276 - DNA, 17 bp, synthetic construct
  misc_feature 1..17: note = Oligonucleotide
  source 1..17: mol_type = other DNA
ccggtctaggcctgtgg

SEQ ID NO: 10277 - DNA, 17 bp, synthetic construct
  misc_feature 1..17: note = Oligonucleotide
  source 1..17: mol_type = other DNA
gggccggtctaggcctg

SEQ ID NO: 10278 - DNA, 17 bp, synthetic construct
  misc_feature 1..17: note = Oligonucleotide
  source 1..17: mol_type = other DNA
gtggggccggtctaggc

SEQ ID NO: 10279 - DNA, 17 bp, synthetic construct
  misc_feature 1..17: note = Oligonucleotide
  source 1..17: mol_type = other DNA
cacgtggggccggtcta

SEQ ID NO: 10280 - DNA, 17 bp, synthetic construct
  misc_feature 1..17: note = Oligonucleotide
  source 1..17: mol_type = other DNA
actcacgtggggccggt

SEQ ID NO: 10281 - DNA, 17 bp, synthetic construct
  misc_feature 1..17: note = Oligonucleotide
  source 1..17: mol_type = other DNA
tgcactcacgtggggcc

SEQ ID NO: 10282 - DNA, 17 bp, synthetic construct
  misc_feature 1..17: note = Oligonucleotide
  source 1..17: mol_type = other DNA
cactgcactcacgtggg

SEQ ID NO: 10283 - DNA, 17 bp, synthetic construct
  misc_feature 1..17: note = Oligonucleotide
  source 1..17: mol_type = other DNA
tgccactgcactcacgt

SEQ ID NO: 10284 - DNA, 17 bp, synthetic construct
  misc_feature 1..17: note = Oligonucleotide
  source 1..17: mol_type = other DNA
ttctgccactgcactca

SEQ ID NO: 10285 - DNA, 17 bp, synthetic construct
  misc_feature 1..17: note = Oligonucleotide
  source 1..17: mol_type = other DNA
gccttctgccactgcac

SEQ ID NO: 10286 - DNA, 17 bp, synthetic construct
  misc_feature 1..17: note = Oligonucleotide
  source 1..17: mol_type = other DNA
cgggccttctgccactg

SEQ ID NO: 10287 - DNA, 17 bp, synthetic construct
  misc_feature 1..17: note = Oligonucleotide
  source 1..17: mol_type = other DNA
cctcgggccttctgcca

SEQ ID NO: 10288 - DNA, 17 bp, synthetic construct
  misc_feature 1..17: note = Oligonucleotide
  source 1..17: mol_type = other DNA
ctgcctcgggccttctg

SEQ ID NO: 10289 - DNA, 17 bp, synthetic construct
  misc_feature 1..17: note = Oligonucleotide
  source 1..17: mol_type = other DNA
atactgcctcgggcctt

SEQ ID NO: 10290 - DNA, 17 bp, synthetic construct
  misc_feature 1..17: note = Oligonucleotide
  source 1..17: mol_type = other DNA
gggatactgcctcgggc

SEQ ID NO: 10291 - DNA, 17 bp, synthetic construct
  misc_feature 1..17: note = Oligonucleotide
  source 1..17: mol_type = other DNA
cccgggatactgcctcg

SEQ ID NO: 10292 - DNA, 17 bp, synthetic construct
  misc_feature 1..17: note = Oligonucleotide
  source 1..17: mol_type = other DNA
gggcccgggatactgcc

SEQ ID NO: 10293 - DNA, 17 bp, synthetic construct
  misc_feature 1..17: note = Oligonucleotide
  source 1..17: mol_type = other DNA
ctcgggcccgggatact

SEQ ID NO: 10294 - DNA, 17 bp, synthetic construct
  misc_feature 1..17: note = Oligonucleotide
  source 1..17: mol_type = other DNA
acactcgggcccgggat

SEQ ID NO: 10295 - DNA, 17 bp, synthetic construct
  misc_feature 1..17: note = Oligonucleotide
  source 1..17: mol_type = other DNA
tccacactcgggcccgg

SEQ ID NO: 10296 - DNA, 17 bp, synthetic construct
  misc_feature 1..17: note = Oligonucleotide
  source 1..17: mol_type = other DNA
atgtccacactcgggcc

SEQ ID NO: 10297 - DNA, 17 bp, synthetic construct
  misc_feature 1..17: note = Oligonucleotide
  source 1..17: mol_type = other DNA
aaaatgtccacactcgg

SEQ ID NO: 10298 - DNA, 17 bp, synthetic construct
  misc_feature 1..17: note = Oligonucleotide
  source 1..17: mol_type = other DNA
aggaaaatgtccacact

SEQ ID NO: 10299 - DNA, 17 bp, synthetic construct
  misc_feature 1..17: note = Oligonucleotide
  source 1..17: mol_type = other DNA
ggcaggaaaatgtccac

SEQ ID NO: 10300 - DNA, 17 bp, synthetic construct
  misc_feature 1..17: note = Oligonucleotide
  source 1..17: mol_type = other DNA
acaggcaggaaaatgtc

SEQ ID NO: 10301 - DNA, 17 bp, synthetic construct
  misc_feature 1..17: note = Oligonucleotide
  source 1..17: mol_type = other DNA
ccaacaggcaggaaaat

SEQ ID NO: 10302 - DNA, 17 bp, synthetic construct
  misc_feature 1..17: note = Oligonucleotide
  source 1..17: mol_type = other DNA
gggccaacaggcaggaa

SEQ ID NO: 10303 - DNA, 17 bp, synthetic construct
  misc_feature 1..17: note = Oligonucleotide
  source 1..17: mol_type = other DNA
ctagggccaacaggcag

SEQ ID NO: 10304 - DNA, 17 bp, synthetic construct
  misc_feature 1..17: note = Oligonucleotide
  source 1..17: mol_type = other DNA
ccactagggccaacagg

SEQ ID NO: 10305 - DNA, 17 bp, synthetic construct
  misc_feature 1..17: note = Oligonucleotide
  source 1..17: mol_type = other DNA
agcccactagggccaac

SEQ ID NO: 10306 - DNA, 17 bp, synthetic construct
  misc_feature 1..17: note = Oligonucleotide
  source 1..17: mol_type = other DNA
gtcagcccactagggcc

SEQ ID NO: 10307 - DNA, 17 bp, synthetic construct
  misc_feature 1..17: note = Oligonucleotide
  source 1..17: mol_type = other DNA
tcagtcagcccactagg

SEQ ID NO: 10308 - DNA, 17 bp, synthetic construct
  misc_feature 1..17: note = Oligonucleotide
  source 1..17: mol_type = other DNA
aactcagtcagcccact

SEQ ID NO: 10309 - DNA, 17 bp, synthetic construct
  misc_feature 1..17: note = Oligonucleotide
  source 1..17: mol_type = other DNA
cccaactcagtcagccc

SEQ ID NO: 10310 - DNA, 17 bp, synthetic construct
  misc_feature 1..17: note = Oligonucleotide
  source 1..17: mol_type = other DNA
gtgcccaactcagtcag

SEQ ID NO: 10311 - DNA, 17 bp, synthetic construct
  misc_feature 1..17: note = Oligonucleotide
  source 1..17: mol_type = other DNA
ggcgtgcccaactcagt

SEQ ID NO: 10312 - DNA, 17 bp, synthetic construct
  misc_feature 1..17: note = Oligonucleotide
  source 1..17: mol_type = other DNA
ccaggcgtgcccaactc

SEQ ID NO: 10313 - DNA, 17 bp, synthetic construct
  misc_feature 1..17: note = Oligonucleotide
  source 1..17: mol_type = other DNA
ctgccaggcgtgcccaa

SEQ ID NO: 10314 - DNA, 17 bp, synthetic construct
  misc_feature 1..17: note = Oligonucleotide
  source 1..17: mol_type = other DNA
tccctgccaggcgtgcc

SEQ ID NO: 10315 - DNA, 17 bp, synthetic construct
  misc_feature 1..17: note = Oligonucleotide
  source 1..17: mol_type = other DNA
atgtccctgccaggcgt

SEQ ID NO: 10316 - DNA, 17 bp, synthetic construct
  misc_feature 1..17: note = Oligonucleotide
  source 1..17: mol_type = other DNA
gacatgtccctgccagg

SEQ ID NO: 10317 - DNA, 17 bp, synthetic construct
  misc_feature 1..17: note = Oligonucleotide
  source 1..17: mol_type = other DNA
tatgacatgtccctgcc

SEQ ID NO: 10318 - DNA, 17 bp, synthetic construct
  misc_feature 1..17: note = Oligonucleotide
  source 1..17: mol_type = other DNA
atgtatgacatgtccct

SEQ ID NO: 10319 - DNA, 17 bp, synthetic construct
  misc_feature 1..17: note = Oligonucleotide
  source 1..17: mol_type = other DNA
agtatgtatgacatgtc

SEQ ID NO: 10320 - DNA, 17 bp, synthetic construct
  misc_feature 1..17: note = Oligonucleotide
  source 1..17: mol_type = other DNA
aatagtatgtatgacat

SEQ ID NO: 10321 - DNA, 17 bp, synthetic construct
  misc_feature 1..17: note = Oligonucleotide
  source 1..17: mol_type = other DNA
aaaaatagtatgtatga

SEQ ID NO: 10322 - DNA, 17 bp, synthetic construct
  misc_feature 1..17: note = Oligonucleotide
  source 1..17: mol_type = other DNA
tgcaaaaatagtatgta

SEQ ID NO: 10323 - DNA, 17 bp, synthetic construct
  misc_feature 1..17: note = Oligonucleotide
  source 1..17: mol_type = other DNA
aaatgcaaaaatagtat

SEQ ID NO: 10324 - DNA, 17 bp, synthetic construct
  misc_feature 1..17: note = Oligonucleotide
  source 1..17: mol_type = other DNA
acaaaatgcaaaaatag

SEQ ID NO: 10325 - DNA, 17 bp, synthetic construct
  misc_feature 1..17: note = Oligonucleotide
  source 1..17: mol_type = other DNA
ctaacaaaatgcaaaaa

SEQ ID NO: 10326 - DNA, 17 bp, synthetic construct
  misc_feature 1..17: note = Oligonucleotide
  source 1..17: mol_type = other DNA
gcactaacaaaatgcaa

SEQ ID NO: 10327 - DNA, 17 bp, synthetic construct
  misc_feature 1..17: note = Oligonucleotide
  source 1..17: mol_type = other DNA
gatgcactaacaaaatg

SEQ ID NO: 10328 - DNA, 17 bp, synthetic construct
  misc_feature 1..17: note = Oligonucleotide
  source 1..17: mol_type = other DNA
cgagatgcactaacaaa

SEQ ID NO: 10329 - DNA, 17 bp, synthetic construct
  misc_feature 1..17: note = Oligonucleotide
  source 1..17: mol_type = other DNA
atacgagatgcactaac

SEQ ID NO: 10330 - DNA, 17 bp, synthetic construct
  misc_feature 1..17: note = Oligonucleotide
  source 1..17: mol_type = other DNA
ggaatacgagatgcact

SEQ ID NO: 10331 - DNA, 17 bp, synthetic construct
  misc_feature 1..17: note = Oligonucleotide
  source 1..17: mol_type = other DNA
ccaggaatacgagatgc

SEQ ID NO: 10332 - DNA, 17 bp, synthetic construct
  misc_feature 1..17: note = Oligonucleotide
  source 1..17: mol_type = other DNA
aagccaggaatacgaga

SEQ ID NO: 10333 - DNA, 17 bp, synthetic construct
  misc_feature 1..17: note = Oligonucleotide
  source 1..17: mol_type = other DNA
acaaagccaggaatacg

SEQ ID NO: 10334 - DNA, 17 bp, synthetic construct
  misc_feature 1..17: note = Oligonucleotide
  source 1..17: mol_type = other DNA
agcacaaagccaggaat

SEQ ID NO: 10335 - DNA, 17 bp, synthetic construct
  misc_feature 1..17: note = Oligonucleotide
  source 1..17: mol_type = other DNA
cctagcacaaagccagg

SEQ ID NO: 10336 - DNA, 17 bp, synthetic construct
  misc_feature 1..17: note = Oligonucleotide
  source 1..17: mol_type = other DNA
gtacctagcacaaagcc

SEQ ID NO: 10337 - DNA, 17 bp, synthetic construct
  misc_feature 1..17: note = Oligonucleotide
  source 1..17: mol_type = other DNA
ctggtacctagcacaaa

SEQ ID NO: 10338 - DNA, 17 bp, synthetic construct
  misc_feature 1..17: note = Oligonucleotide
  source 1..17: mol_type = other DNA
ctcctggtacctagcac

SEQ ID NO: 10339 - DNA, 17 bp, synthetic construct
  misc_feature 1..17: note = Oligonucleotide
  source 1..17: mol_type = other DNA
tgcctcctggtacctag

SEQ ID NO: 10340 - DNA, 17 bp, synthetic construct
  misc_feature 1..17: note = Oligonucleotide
  source 1..17: mol_type = other DNA
ccttgcctcctggtacc

SEQ ID NO: 10341 - DNA, 17 bp, synthetic construct
  misc_feature 1..17: note = Oligonucleotide
  source 1..17: mol_type = other DNA
tctccttgcctcctggt

SEQ ID NO: 10342 - DNA, 17 bp, synthetic construct
  misc_feature 1..17: note = Oligonucleotide
  source 1..17: mol_type = other DNA
agttctccttgcctcct

SEQ ID NO: 10343 - DNA, 17 bp, synthetic construct
  misc_feature 1..17: note = Oligonucleotide
  source 1..17: mol_type = other DNA
accagttctccttgcct

SEQ ID NO: 10344 - DNA, 17 bp, synthetic construct
  misc_feature 1..17: note = Oligonucleotide
  source 1..17: mol_type = other DNA
cttaccagttctccttg

SEQ ID NO: 10345 - DNA, 17 bp, synthetic construct
  misc_feature 1..17: note = Oligonucleotide
  source 1..17: mol_type = other DNA
cttcttaccagttctcc

SEQ ID NO: 10346 - DNA, 17 bp, synthetic construct
  misc_feature 1..17: note = Oligonucleotide
  source 1..17: mol_type = other DNA
ccacttcttaccagttc

SEQ ID NO: 10347 - DNA, 17 bp, synthetic construct
  misc_feature 1..17: note = Oligonucleotide
  source 1..17: mol_type = other DNA
accccacttcttaccag

SEQ ID NO: 10348 - DNA, 17 bp, synthetic construct
  misc_feature 1..17: note = Oligonucleotide
  source 1..17: mol_type = other DNA
ttcaccccacttcttac

SEQ ID NO: 10349 - DNA, 17 bp, synthetic construct
  misc_feature 1..17: note = Oligonucleotide
  source 1..17: mol_type = other DNA
cccttcaccccacttct

SEQ ID NO: 10350 - DNA, 17 bp, synthetic construct
  misc_feature 1..17: note = Oligonucleotide
  source 1..17: mol_type = other DNA
aggcccttcaccccact

SEQ ID NO: 10351 - DNA, 17 bp, synthetic construct
  misc_feature 1..17: note = Oligonucleotide
  source 1..17: mol_type = other DNA
ctcaggcccttcacccc

SEQ ID NO: 10352 - DNA, 17 bp, synthetic construct
  misc_feature 1..17: note = Oligonucleotide
  source 1..17: mol_type = other DNA
ggtctcaggcccttcac

SEQ ID NO: 10353 - DNA, 17 bp, synthetic construct
  misc_feature 1..17: note = Oligonucleotide
  source 1..17: mol_type = other DNA
catggtctcaggccctt

SEQ ID NO: 10354 - DNA, 17 bp, synthetic construct
  misc_feature 1..17: note = Oligonucleotide
  source 1..17: mol_type = other DNA
gttcatggtctcaggcc

SEQ ID NO: 10355 - DNA, 17 bp, synthetic construct
  misc_feature 1..17: note = Oligonucleotide
  source 1..17: mol_type = other DNA
accgttcatggtctcag

SEQ ID NO: 10356 - DNA, 17 bp, synthetic construct
  misc_feature 1..17: note = Oligonucleotide
  source 1..17: mol_type = other DNA
cagaccgttcatggtct

SEQ ID NO: 10357 - DNA, 17 bp, synthetic construct
  misc_feature 1..17: note = Oligonucleotide
  source 1..17: mol_type = other DNA
atccagaccgttcatgg

SEQ ID NO: 10358 - DNA, 17 bp, synthetic construct
  misc_feature 1..17: note = Oligonucleotide
  source 1..17: mol_type = other DNA
tggatccagaccgttca

SEQ ID NO: 10359 - DNA, 17 bp, synthetic construct
  misc_feature 1..17: note = Oligonucleotide
  source 1..17: mol_type = other DNA
ttctggatccagaccgt

SEQ ID NO: 10360 - DNA, 17 bp, synthetic construct
  misc_feature 1..17: note = Oligonucleotide
  source 1..17: mol_type = other DNA
catttctggatccagac

SEQ ID NO: 10361 - DNA, 17 bp, synthetic construct
  misc_feature 1..17: note = Oligonucleotide
  source 1..17: mol_type = other DNA
tgccatttctggatcca

SEQ ID NO: 10362 - DNA, 17 bp, synthetic construct
  misc_feature 1..17: note = Oligonucleotide
  source 1..17: mol_type = other DNA
ccttgccatttctggat

SEQ ID NO: 10363 - DNA, 17 bp, synthetic construct
  misc_feature 1..17: note = Oligonucleotide
  source 1..17: mol_type = other DNA
accccttgccatttctg

SEQ ID NO: 10364 - DNA, 17 bp, synthetic construct
  misc_feature 1..17: note = Oligonucleotide
  source 1..17: mol_type = other DNA
tttaccccttgccattt

SEQ ID NO: 10365 - DNA, 17 bp, synthetic construct
  misc_feature 1..17: note = Oligonucleotide
  source 1..17: mol_type = other DNA
ctctttaccccttgcca

SEQ ID NO: 10366 - DNA, 17 bp, synthetic construct
  misc_feature 1..17: note = Oligonucleotide
  source 1..17: mol_type = other DNA
cttctctttaccccttg

SEQ ID NO: 10367 - DNA, 17 bp, synthetic construct
  misc_feature 1..17: note = Oligonucleotide
  source 1..17: mol_type = other DNA
gaccttctctttacccc

SEQ ID NO: 10368 - DNA, 17 bp, synthetic construct
  misc_feature 1..17: note = Oligonucleotide
  source 1..17: mol_type = other DNA
ccagaccttctctttac

SEQ ID NO: 10369 - DNA, 17 bp, synthetic construct
  misc_feature 1..17: note = Oligonucleotide
  source 1..17: mol_type = other DNA
aacccagaccttctctt

SEQ ID NO: 10370 - DNA, 17 bp, synthetic construct
  misc_feature 1..17: note = Oligonucleotide
  source 1..17: mol_type = other DNA
atcaacccagaccttct

SEQ ID NO: 10371 - DNA, 17 bp, synthetic construct
  misc_feature 1..17: note = Oligonucleotide
  source 1..17: mol_type = other DNA
aatatcaacccagacct

SEQ ID NO: 10372 - DNA, 17 bp, synthetic construct
  misc_feature 1..17: note = Oligonucleotide
  source 1..17: mol_type = other DNA
cctaatatcaacccaga

SEQ ID NO: 10373 - DNA, 17 bp, synthetic construct
  misc_feature 1..17: note = Oligonucleotide
  source 1..17: mol_type = other DNA
actcctaatatcaaccc

SEQ ID NO: 10374 - DNA, 17 bp, synthetic construct
  misc_feature 1..17: note = Oligonucleotide
  source 1..17: mol_type = other DNA
ctaactcctaatatcaa

SEQ ID NO: 10375 - DNA, 17 bp, synthetic construct
  misc_feature 1..17: note = Oligonucleotide
  source 1..17: mol_type = other DNA
tggctaactcctaatat

SEQ ID NO: 10376 - DNA, 17 bp, synthetic construct
  misc_feature 1..17: note = Oligonucleotide
  source 1..17: mol_type = other DNA
caatggctaactcctaa

SEQ ID NO: 10377 - DNA, 17 bp, synthetic construct
  misc_feature 1..17: note = Oligonucleotide
  source 1..17: mol_type = other DNA
agccaatggctaactcc

SEQ ID NO: 10378 - DNA, 17 bp, synthetic construct
  misc_feature 1..17: note = Oligonucleotide
  source 1..17: mol_type = other DNA
tacagccaatggctaac

SEQ ID NO: 10379 - DNA, 17 bp, synthetic construct
  misc_feature 1..17: note = Oligonucleotide
  source 1..17: mol_type = other DNA
ccctacagccaatggct

SEQ ID NO: 10380 - DNA, 17 bp, synthetic construct
  misc_feature 1..17: note = Oligonucleotide
  source 1..17: mol_type = other DNA
ttaccctacagccaatg

SEQ ID NO: 10381 - DNA, 17 bp, synthetic construct
  misc_feature 1..17: note = Oligonucleotide
  source 1..17: mol_type = other DNA
tttttaccctacagcca

SEQ ID NO: 10382 - DNA, 17 bp, synthetic construct
  misc_feature 1..17: note = Oligonucleotide
  source 1..17: mol_type = other DNA
ctctttttaccctacag

SEQ ID NO: 10383 - DNA, 17 bp, synthetic construct
  misc_feature 1..17: note = Oligonucleotide
  source 1..17: mol_type = other DNA
ctcctctttttacccta

SEQ ID NO: 10384 - DNA, 17 bp, synthetic construct
  misc_feature 1..17: note = Oligonucleotide
  source 1..17: mol_type = other DNA
cagctcctctttttacc

SEQ ID NO: 10385 - DNA, 17 bp, synthetic construct
  misc_feature 1..17: note = Oligonucleotide
  source 1..17: mol_type = other DNA
catcagctcctcttttt

SEQ ID NO: 10386 - DNA, 17 bp, synthetic construct
  misc_feature 1..17: note = Oligonucleotide
  source 1..17: mol_type = other DNA
caccatcagctcctctt

SEQ ID NO: 10387 - DNA, 17 bp, synthetic construct
  misc_feature 1..17: note = Oligonucleotide
  source 1..17: mol_type = other DNA
agccaccatcagctcct

SEQ ID NO: 10388 - DNA, 17 bp, synthetic construct
  misc_feature 1..17: note = Oligonucleotide
  source 1..17: mol_type = other DNA
gggagccaccatcagct

SEQ ID NO: 10389 - DNA, 17 bp, synthetic construct
  misc_feature 1..17: note = Oligonucleotide
  source 1..17: mol_type = other DNA
cctgggagccaccatca

SEQ ID NO: 10390 - DNA, 17 bp, synthetic construct
  misc_feature 1..17: note = Oligonucleotide
  source 1..17: mol_type = other DNA
gagcctgggagccacca

SEQ ID NO: 10391 - DNA, 17 bp, synthetic construct
  misc_feature 1..17: note = Oligonucleotide
  source 1..17: mol_type = other DNA
acagagcctgggagcca

SEQ ID NO: 10392 - DNA, 17 bp, synthetic construct
  misc_feature 1..17: note = Oligonucleotide
  source 1..17: mol_type = other DNA
cacacagagcctgggag

SEQ ID NO: 10393 - DNA, 17 bp, synthetic construct
  misc_feature 1..17: note = Oligonucleotide
  source 1..17: mol_type = other DNA
ccacacacagagcctgg

SEQ ID NO: 10394 - DNA, 17 bp, synthetic construct
  misc_feature 1..17: note = Oligonucleotide
  source 1..17: mol_type = other DNA
ttgccacacacagagcc

SEQ ID NO: 10395 - DNA, 17 bp, synthetic construct
  misc_feature 1..17: note = Oligonucleotide
  source 1..17: mol_type = other DNA
tcattgccacacacaga

SEQ ID NO: 10396 - DNA, 17 bp, synthetic construct
  misc_feature 1..17: note = Oligonucleotide
  source 1..17: mol_type = other DNA
ctgtcattgccacacac

SEQ ID NO: 10397 - DNA, 17 bp, synthetic construct
  misc_feature 1..17: note = Oligonucleotide
  source 1..17: mol_type = other DNA
accctgtcattgccaca

SEQ ID NO: 10398 - DNA, 17 bp, synthetic construct
  misc_feature 1..17: note = Oligonucleotide
  source 1..17: mol_type = other DNA
ggcaccctgtcattgcc

SEQ ID NO: 10399 - DNA, 17 bp, synthetic construct
  misc_feature 1..17: note = Oligonucleotide
  source 1..17: mol_type = other DNA
aacggcaccctgtcatt

SEQ ID NO: 10400 - DNA, 17 bp, synthetic construct
  misc_feature 1..17: note = Oligonucleotide
  source 1..17: mol_type = other DNA
gtgaacggcaccctgtc

SEQ ID NO: 10401 - DNA, 17 bp, synthetic construct
  misc_feature 1..17: note = Oligonucleotide
  source 1..17: mol_type = other DNA
tcagtgaacggcaccct

SEQ ID NO: 10402 - DNA, 17 bp, synthetic construct
  misc_feature 1..17: note = Oligonucleotide
  source 1..17: mol_type = other DNA
aactcagtgaacggcac

SEQ ID NO: 10403 - DNA, 17 bp, synthetic construct
  misc_feature 1..17: note = Oligonucleotide
  source 1..17: mol_type = other DNA
cccaactcagtgaacgg

SEQ ID NO: 10404 - DNA, 17 bp, synthetic construct
  misc_feature 1..17: note = Oligonucleotide
  source 1..17: mol_type = other DNA
atccccaactcagtgaa

SEQ ID NO: 10405 - DNA, 17 bp, synthetic construct
  misc_feature 1..17: note = Oligonucleotide
  source 1..17: mol_type = other DNA
tccatccccaactcagt

SEQ ID NO: 10406 - DNA, 17 bp, synthetic construct
  misc_feature 1..17: note = Oligonucleotide
  source 1..17: mol_type = other DNA
ccctccatccccaactc

SEQ ID NO: 10407 - DNA, 17 bp, synthetic construct
  misc_feature 1..17: note = Oligonucleotide
  source 1..17: mol_type = other DNA
tgtccctccatccccaa

SEQ ID NO: 10408 - DNA, 17 bp, synthetic construct
  misc_feature 1..17: note = Oligonucleotide
  source 1..17: mol_type = other DNA
acatgtccctccatccc

SEQ ID NO: 10409 - DNA, 17 bp, synthetic construct
  misc_feature 1..17: note = Oligonucleotide
  source 1..17: mol_type = other DNA
cacacatgtccctccat

SEQ ID NO: 10410 - DNA, 17 bp, synthetic construct
  misc_feature 1..17: note = Oligonucleotide
  source 1..17: mol_type = other DNA
atccacacatgtccctc

SEQ ID NO: 10411 - DNA, 17 bp, synthetic construct
  misc_feature 1..17: note = Oligonucleotide
  source 1..17: mol_type = other DNA
ggtatccacacatgtcc

SEQ ID NO: 10412 - DNA, 17 bp, synthetic construct
  misc_feature 1..17: note = Oligonucleotide
  source 1..17: mol_type = other DNA
tggggtatccacacatg

SEQ ID NO: 10413 - DNA, 17 bp, synthetic construct
  misc_feature 1..17: note = Oligonucleotide
  source 1..17: mol_type = other DNA
tactggggtatccacac

SEQ ID NO: 10414 - DNA, 17 bp, synthetic construct
  misc_feature 1..17: note = Oligonucleotide
  source 1..17: mol_type = other DNA
ctctactggggtatcca

SEQ ID NO: 10415 - DNA, 17 bp, synthetic construct
  misc_feature 1..17: note = Oligonucleotide
  source 1..17: mol_type = other DNA
cacctctactggggtat

SEQ ID NO: 10416 - DNA, 17 bp, synthetic construct
  misc_feature 1..17: note = Oligonucleotide
  source 1..17: mol_type = other DNA
caacacctctactgggg

SEQ ID NO: 10417 - DNA, 17 bp, synthetic construct
  misc_feature 1..17: note = Oligonucleotide
  source 1..17: mol_type = other DNA
gtccaacacctctactg

SEQ ID NO: 10418 - DNA, 17 bp, synthetic construct
  misc_feature 1..17: note = Oligonucleotide
  source 1..17: mol_type = other DNA
tgagtccaacacctcta

SEQ ID NO: 10419 - DNA, 17 bp, synthetic construct
  misc_feature 1..17: note = Oligonucleotide
  source 1..17: mol_type = other DNA
tgatgagtccaacacct

SEQ ID NO: 10420 - DNA, 17 bp, synthetic construct
  misc_feature 1..17: note = Oligonucleotide
  source 1..17: mol_type = other DNA
ctctgatgagtccaaca

SEQ ID NO: 10421 - DNA, 17 bp, synthetic construct
  misc_feature 1..17: note = Oligonucleotide
  source 1..17: mol_type = other DNA
agcctctgatgagtcca

SEQ ID NO: 10422 - DNA, 17 bp, synthetic construct
  misc_feature 1..17: note = Oligonucleotide
  source 1..17: mol_type = other DNA
gacagcctctgatgagt

SEQ ID NO: 10423 - DNA, 17 bp, synthetic construct
  misc_feature 1..17: note = Oligonucleotide
  source 1..17: mol_type = other DNA
ccagacagcctctgatg

SEQ ID NO: 10424 - DNA, 17 bp, synthetic construct
  misc_feature 1..17: note = Oligonucleotide
  source 1..17: mol_type = other DNA
gacccagacagcctctg

SEQ ID NO: 10425 - DNA, 17 bp, synthetic construct
  misc_feature 1..17: note = Oligonucleotide
  source 1..17: mol_type = other DNA
tgagacccagacagcct

SEQ ID NO: 10426 - DNA, 17 bp, synthetic construct
  misc_feature 1..17: note = Oligonucleotide
  source 1..17: mol_type = other DNA
atgtgagacccagacag

SEQ ID NO: 10427 - DNA, 17 bp, synthetic construct
  misc_feature 1..17: note = Oligonucleotide
  source 1..17: mol_type = other DNA
tacatgtgagacccaga

SEQ ID NO: 10428 - DNA, 17 bp, synthetic construct
  misc_feature 1..17: note = Oligonucleotide
  source 1..17: mol_type = other DNA
tgctacatgtgagaccc

SEQ ID NO: 10429 - DNA, 17 bp, synthetic construct
  misc_feature 1..17: note = Oligonucleotide
  source 1..17: mol_type = other DNA
gaatgctacatgtgaga

SEQ ID NO: 10430 - DNA, 17 bp, synthetic construct
  misc_feature 1..17: note = Oligonucleotide
  source 1..17: mol_type = other DNA
caggaatgctacatgtg

SEQ ID NO: 10431 - DNA, 17 bp, synthetic construct
  misc_feature 1..17: note = Oligonucleotide
  source 1..17: mol_type = other DNA
gcccaggaatgctacat

SEQ ID NO: 10432 - DNA, 17 bp, synthetic construct
  misc_feature 1..17: note = Oligonucleotide
  source 1..17: mol_type = other DNA
tgtgcccaggaatgcta

SEQ ID NO: 10433 - DNA, 17 bp, synthetic construct
  misc_feature 1..17: note = Oligonucleotide
  source 1..17: mol_type = other DNA
cagtgtgcccaggaatg

SEQ ID NO: 10434 - DNA, 17 bp, synthetic construct
  misc_feature 1..17: note = Oligonucleotide
  source 1..17: mol_type = other DNA
ggccagtgtgcccagga

SEQ ID NO: 10435 - DNA, 17 bp, synthetic construct
  misc_feature 1..17: note = Oligonucleotide
  source 1..17: mol_type = other DNA
tatggccagtgtgccca

SEQ ID NO: 10436 - DNA, 17 bp, synthetic construct
  misc_feature 1..17: note = Oligonucleotide
  source 1..17: mol_type = other DNA
tgctatggccagtgtgc

SEQ ID NO: 10437 - DNA, 17 bp, synthetic construct
  misc_feature 1..17: note = Oligonucleotide
  source 1..17: mol_type = other DNA
ctttgctatggccagtg

SEQ ID NO: 10438 - DNA, 17 bp, synthetic construct
  misc_feature 1..17: note = Oligonucleotide
  source 1..17: mol_type = other DNA
accctttgctatggcca

SEQ ID NO: 10439 - DNA, 17 bp, synthetic construct
  misc_feature 1..17: note = Oligonucleotide
  source 1..17: mol_type = other DNA
cacaccctttgctatgg

SEQ ID NO: 10440 - DNA, 17 bp, synthetic construct
  misc_feature 1..17: note = Oligonucleotide
  source 1..17: mol_type = other DNA
actcacaccctttgcta

SEQ ID NO: 10441 - DNA, 17 bp, synthetic construct
  misc_feature 1..17: note = Oligonucleotide
  source 1..17: mol_type = other DNA
tccactcacaccctttg

SEQ ID NO: 10442 - DNA, 17 bp, synthetic construct
  misc_feature 1..17: note = Oligonucleotide
  source 1..17: mol_type = other DNA
ttatccactcacaccct

SEQ ID NO: 10443 - DNA, 17 bp, synthetic construct
  misc_feature 1..17: note = Oligonucleotide
  source 1..17: mol_type = other DNA
acattatccactcacac

SEQ ID NO: 10444 - DNA, 17 bp, synthetic construct
  misc_feature 1..17: note = Oligonucleotide
  source 1..17: mol_type = other DNA
gcaacattatccactca

SEQ ID NO: 10445 - DNA, 17 bp, synthetic construct
  misc_feature 1..17: note = Oligonucleotide
  source 1..17: mol_type = other DNA
tgggcaacattatccac

SEQ ID NO: 10446 - DNA, 17 bp, synthetic construct
  misc_feature 1..17: note = Oligonucleotide
  source 1..17: mol_type = other DNA
tcctgggcaacattatc

SEQ ID NO: 10447 - DNA, 17 bp, synthetic construct
  misc_feature 1..17: note = Oligonucleotide
  source 1..17: mol_type = other DNA
ttctcctgggcaacatt

SEQ ID NO: 10448 - DNA, 17 bp, synthetic construct
  misc_feature 1..17: note = Oligonucleotide
  source 1..17: mol_type = other DNA
agtttctcctgggcaac

SEQ ID NO: 10449 - DNA, 17 bp, synthetic construct
  misc_feature 1..17: note = Oligonucleotide
  source 1..17: mol_type = other DNA
tgcagtttctcctgggc

SEQ ID NO: 10450 - DNA, 17 bp, synthetic construct
  misc_feature 1..17: note = Oligonucleotide
  source 1..17: mol_type = other DNA
gtttgcagtttctcctg

SEQ ID NO: 10451 - DNA, 17 bp, synthetic construct
  misc_feature 1..17: note = Oligonucleotide
  source 1..17: mol_type = other DNA
ttagtttgcagtttctc

SEQ ID NO: 10452 - DNA, 17 bp, synthetic construct
  misc_feature 1..17: note = Oligonucleotide
  source 1..17: mol_type = other DNA
ctcttagtttgcagttt

SEQ ID NO: 10453 - DNA, 17 bp, synthetic construct
  misc_feature 1..17: note = Oligonucleotide
  source 1..17: mol_type = other DNA
cccctcttagtttgcag

SEQ ID NO: 10454 - DNA, 17 bp, synthetic construct
  misc_feature 1..17: note = Oligonucleotide
  source 1..17: mol_type = other DNA
gctcccctcttagtttg

SEQ ID NO: 10455 - DNA, 17 bp, synthetic construct
  misc_feature 1..17: note = Oligonucleotide
  source 1..17: mol_type = other DNA
agagctcccctcttagt

SEQ ID NO: 10456 - DNA, 17 bp, synthetic construct
  misc_feature 1..17: note = Oligonucleotide
  source 1..17: mol_type = other DNA
cggagagctcccctctt

SEQ ID NO: 10457 - DNA, 17 bp, synthetic construct
  misc_feature 1..17: note = Oligonucleotide
  source 1..17: mol_type = other DNA
tttcggagagctcccct

SEQ ID NO: 10458 - DNA, 17 bp, synthetic construct
  misc_feature 1..17: note = Oligonucleotide
  source 1..17: mol_type = other DNA
gattttcggagagctcc

SEQ ID NO: 10459 - DNA, 17 bp, synthetic construct
  misc_feature 1..17: note = Oligonucleotide
  source 1..17: mol_type = other DNA
atggattttcggagagc

SEQ ID NO: 10460 - DNA, 17 bp, synthetic construct
  misc_feature 1..17: note = Oligonucleotide
  source 1..17: mol_type = other DNA
tagatggattttcggag

SEQ ID NO: 10461 - DNA, 17 bp, synthetic construct
  misc_feature 1..17: note = Oligonucleotide
  source 1..17: mol_type = other DNA
tcctagatggattttcg

SEQ ID NO: 10462 - DNA, 17 bp, synthetic construct
  misc_feature 1..17: note = Oligonucleotide
  source 1..17: mol_type = other DNA
ccttcctagatggattt

SEQ ID NO: 10463 - DNA, 17 bp, synthetic construct
  misc_feature 1..17: note = Oligonucleotide
  source 1..17: mol_type = other DNA
cttccttcctagatgga

SEQ ID NO: 10464 - DNA, 17 bp, synthetic construct
  misc_feature 1..17: note = Oligonucleotide
  source 1..17: mol_type = other DNA
cctcttccttcctagat

SEQ ID NO: 10465 - DNA, 17 bp, synthetic construct
  misc_feature 1..17: note = Oligonucleotide
  source 1..17: mol_type = other DNA
aggcctcttccttccta

SEQ ID NO: 10466 - DNA, 17 bp, synthetic construct
  misc_feature 1..17: note = Oligonucleotide
  source 1..17: mol_type = other DNA
cccaggcctcttccttc

SEQ ID NO: 10467 - DNA, 17 bp, synthetic construct
  misc_feature 1..17: note = Oligonucleotide
  source 1..17: mol_type = other DNA
tttcccaggcctcttcc

SEQ ID NO: 10468 - DNA, 17 bp, synthetic construct
  misc_feature 1..17: note = Oligonucleotide
  source 1..17: mol_type = other DNA
ttctttcccaggcctct

SEQ ID NO: 10469 - DNA, 17 bp, synthetic construct
  misc_feature 1..17: note = Oligonucleotide
  source 1..17: mol_type = other DNA
acattctttcccaggcc

SEQ ID NO: 10470 - DNA, 17 bp, synthetic construct
  misc_feature 1..17: note = Oligonucleotide
  source 1..17: mol_type = other DNA
gagacattctttcccag

SEQ ID NO: 10471 - DNA, 17 bp, synthetic construct
  misc_feature 1..17: note = Oligonucleotide
  source 1..17: mol_type = other DNA
ttcgagacattctttcc

SEQ ID NO: 10472 - DNA, 17 bp, synthetic construct
  misc_feature 1..17: note = Oligonucleotide
  source 1..17: mol_type = other DNA
cccttcgagacattctt

SEQ ID NO: 10473 - DNA, 17 bp, synthetic construct
  misc_feature 1..17: note = Oligonucleotide
  source 1..17: mol_type = other DNA
tttcccttcgagacatt

SEQ ID NO: 10474 - DNA, 17 bp, synthetic construct
  misc_feature 1..17: note = Oligonucleotide
  source 1..17: mol_type = other DNA
atgtttcccttcgagac

SEQ ID NO: 10475 - DNA, 17 bp, synthetic construct
  misc_feature 1..17: note = Oligonucleotide
  source 1..17: mol_type = other DNA
ttcatgtttcccttcga

SEQ ID NO: 10476 - DNA, 17 bp, synthetic construct
  misc_feature 1..17: note = Oligonucleotide
  source 1..17: mol_type = other DNA
ctgttcatgtttccctt

SEQ ID NO: 10477 - DNA, 17 bp, synthetic construct
  misc_feature 1..17: note = Oligonucleotide
  source 1..17: mol_type = other DNA
gacctgttcatgtttcc

SEQ ID NO: 10478 - DNA, 17 bp, synthetic construct
  misc_feature 1..17: note = Oligonucleotide
  source 1..17: mol_type = other DNA
gctgacctgttcatgtt

SEQ ID NO: 10479 - DNA, 17 bp, synthetic construct
  misc_feature 1..17: note = Oligonucleotide
  source 1..17: mol_type = other DNA
gctgctgacctgttcat

SEQ ID NO: 10480 - DNA, 17 bp, synthetic construct
  misc_feature 1..17: note = Oligonucleotide
  source 1..17: mol_type = other DNA
cccgctgctgacctgtt

SEQ ID NO: 10481 - DNA, 17 bp, synthetic construct
  misc_feature 1..17: note = Oligonucleotide
  source 1..17: mol_type = other DNA
gaccccgctgctgacct

SEQ ID NO: 10482 - DNA, 17 bp, synthetic construct
  misc_feature 1..17: note = Oligonucleotide
  source 1..17: mol_type = other DNA
caagaccccgctgctga

SEQ ID NO: 10483 - DNA, 17 bp, synthetic construct
  misc_feature 1..17: note = Oligonucleotide
  source 1..17: mol_type = other DNA
cagcaagaccccgctgc

SEQ ID NO: 10484 - DNA, 17 bp, synthetic construct
  misc_feature 1..17: note = Oligonucleotide
  source 1..17: mol_type = other DNA
ggtcagcaagaccccgc

SEQ ID NO: 10485 - DNA, 17 bp, synthetic construct
  misc_feature 1..17: note = Oligonucleotide
  source 1..17: mol_type = other DNA
ggcggtcagcaagaccc

SEQ ID NO: 10486 - DNA, 17 bp, synthetic construct
  misc_feature 1..17: note = Oligonucleotide
  source 1..17: mol_type = other DNA
ccaggcggtcagcaaga

SEQ ID NO: 10487 - DNA, 17 bp, synthetic construct
  misc_feature 1..17: note = Oligonucleotide
  source 1..17: mol_type = other DNA
tggccaggcggtcagca

SEQ ID NO: 10488 - DNA, 17 bp, synthetic construct
  misc_feature 1..17: note = Oligonucleotide
  source 1..17: mol_type = other DNA
agttggccaggcggtca

SEQ ID NO: 10489 - DNA, 17 bp, synthetic construct
  misc_feature 1..17: note = Oligonucleotide
  source 1..17: mol_type = other DNA
cacagttggccaggcgg

SEQ ID NO: 10490 - DNA, 17 bp, synthetic construct
  misc_feature 1..17: note = Oligonucleotide
  source 1..17: mol_type = other DNA
ccccacagttggccagg

SEQ ID NO: 10491 - DNA, 17 bp, synthetic construct
  misc_feature 1..17: note = Oligonucleotide
  source 1..17: mol_type = other DNA
ctgccccacagttggcc

SEQ ID NO: 10492 - DNA, 17 bp, synthetic construct
  misc_feature 1..17: note = Oligonucleotide
  source 1..17: mol_type = other DNA
cctctgccccacagttg

SEQ ID NO: 10493 - DNA, 17 bp, synthetic construct
  misc_feature 1..17: note = Oligonucleotide
  source 1..17: mol_type = other DNA
cgccctctgccccacag

SEQ ID NO: 10494 - DNA, 17 bp, synthetic construct
  misc_feature 1..17: note = Oligonucleotide
  source 1..17: mol_type = other DNA
ctccgccctctgcccca

SEQ ID NO: 10495 - DNA, 17 bp, synthetic construct
  misc_feature 1..17: note = Oligonucleotide
  source 1..17: mol_type = other DNA
ccactccgccctctgcc

SEQ ID NO: 10496 - DNA, 17 bp, synthetic construct
  misc_feature 1..17: note = Oligonucleotide
  source 1..17: mol_type = other DNA
tccccactccgccctct

SEQ ID NO: 10497 - DNA, 17 bp, synthetic construct
  misc_feature 1..17: note = Oligonucleotide
  source 1..17: mol_type = other DNA
ccctccccactccgccc

SEQ ID NO: 10498 - DNA, 17 bp, synthetic construct
  misc_feature 1..17: note = Oligonucleotide
  source 1..17: mol_type = other DNA
acaccctccccactccg

SEQ ID NO: 10499 - DNA, 17 bp, synthetic construct
  misc_feature 1..17: note = Oligonucleotide
  source 1..17: mol_type = other DNA
gccacaccctccccact

SEQ ID NO: 10500 - DNA, 17 bp, synthetic construct
  misc_feature 1..17: note = Oligonucleotide
  source 1..17: mol_type = other DNA
cttgccacaccctcccc

SEQ ID NO: 10501 - DNA, 17 bp, synthetic construct
  misc_feature 1..17: note = Oligonucleotide
  source 1..17: mol_type = other DNA
ggccttgccacaccctc

SEQ ID NO: 10502 - DNA, 17 bp, synthetic construct
  misc_feature 1..17: note = Oligonucleotide
  source 1..17: mol_type = other DNA
tctggccttgccacacc

SEQ ID NO: 10503 - DNA, 17 bp, synthetic construct
  misc_feature 1..17: note = Oligonucleotide
  source 1..17: mol_type = other DNA
aggtctggccttgccac

SEQ ID NO: 10504 - DNA, 17 bp, synthetic construct
  misc_feature 1..17: note = Oligonucleotide
  source 1..17: mol_type = other DNA
gagaggtctggccttgc

SEQ ID NO: 10505 - DNA, 17 bp, synthetic construct
  misc_feature 1..17: note = Oligonucleotide
  source 1..17: mol_type = other DNA
tgagagaggtctggcct

SEQ ID NO: 10506 - DNA, 17 bp, synthetic construct
  misc_feature 1..17: note = Oligonucleotide
  source 1..17: mol_type = other DNA
cagtgagagaggtctgg

SEQ ID NO: 10507 - DNA, 17 bp, synthetic construct
  misc_feature 1..17: note = Oligonucleotide
  source 1..17: mol_type = other DNA
agccagtgagagaggtc

SEQ ID NO: 10508 - DNA, 17 bp, synthetic construct
  misc_feature 1..17: note = Oligonucleotide
  source 1..17: mol_type = other DNA
ctcagccagtgagagag

SEQ ID NO: 10509 - DNA, 17 bp, synthetic construct
  misc_feature 1..17: note = Oligonucleotide
  source 1..17: mol_type = other DNA
actctcagccagtgaga

SEQ ID NO: 10510 - DNA, 17 bp, synthetic construct
  misc_feature 1..17: note = Oligonucleotide
  source 1..17: mol_type = other DNA
gtgactctcagccagtg

SEQ ID NO: 10511 - DNA, 17 bp, synthetic construct
  misc_feature 1..17: note = Oligonucleotide
  source 1..17: mol_type = other DNA
ccagtgactctcagcca

SEQ ID NO: 10512 - DNA, 17 bp, synthetic construct
  misc_feature 1..17: note = Oligonucleotide
  source 1..17: mol_type = other DNA
ttcccagtgactctcag

SEQ ID NO: 10513 - DNA, 17 bp, synthetic construct
  misc_feature 1..17: note = Oligonucleotide
  source 1..17: mol_type = other DNA
tgtttcccagtgactct

SEQ ID NO: 10514 - DNA, 17 bp, synthetic construct
  misc_feature 1..17: note = Oligonucleotide
  source 1..17: mol_type = other DNA
cactgtttcccagtgac

SEQ ID NO: 10515 - DNA, 17 bp, synthetic construct
  misc_feature 1..17: note = Oligonucleotide
  source 1..17: mol_type = other DNA
tctcactgtttcccagt

SEQ ID NO: 10516 - DNA, 17 bp, synthetic construct
  misc_feature 1..17: note = Oligonucleotide
  source 1..17: mol_type = other DNA
ccgtctcactgtttccc

SEQ ID NO: 10517 - DNA, 17 bp, synthetic construct
  misc_feature 1..17: note = Oligonucleotide
  source 1..17: mol_type = other DNA
gcaccgtctcactgttt

SEQ ID NO: 10518 - DNA, 17 bp, synthetic construct
  misc_feature 1..17: note = Oligonucleotide
  source 1..17: mol_type = other DNA
cctgcaccgtctcactg

SEQ ID NO: 10519 - DNA, 17 bp, synthetic construct
  misc_feature 1..17: note = Oligonucleotide
  source 1..17: mol_type = other DNA
aatcctgcaccgtctca

SEQ ID NO: 10520 - DNA, 17 bp, synthetic construct
  misc_feature 1..17: note = Oligonucleotide
  source 1..17: mol_type = other DNA
ttgaatcctgcaccgtc

SEQ ID NO: 10521 - DNA, 17 bp, synthetic construct
  misc_feature 1..17: note = Oligonucleotide
  source 1..17: mol_type = other DNA
catttgaatcctgcacc

SEQ ID NO: 10522 - DNA, 17 bp, synthetic construct
  misc_feature 1..17: note = Oligonucleotide
  source 1..17: mol_type = other DNA
ctacatttgaatcctgc

SEQ ID NO: 10523 - DNA, 17 bp, synthetic construct
  misc_feature 1..17: note = Oligonucleotide
  source 1..17: mol_type = other DNA
cacctacatttgaatcc

SEQ ID NO: 10524 - DNA, 17 bp, synthetic construct
  misc_feature 1..17: note = Oligonucleotide
  source 1..17: mol_type = other DNA
ttccacctacatttgaa

SEQ ID NO: 10525 - DNA, 17 bp, synthetic construct
  misc_feature 1..17: note = Oligonucleotide
  source 1..17: mol_type = other DNA
tctttccacctacattt

SEQ ID NO: 10526 - DNA, 17 bp, synthetic construct
  misc_feature 1..17: note = Oligonucleotide
  source 1..17: mol_type = other DNA
acgtctttccacctaca

SEQ ID NO: 10527 - DNA, 17 bp, synthetic construct
  misc_feature 1..17: note = Oligonucleotide
  source 1..17: mol_type = other DNA
cccacgtctttccacct

SEQ ID NO: 10528 - DNA, 17 bp, synthetic construct
  misc_feature 1..17: note = Oligonucleotide
  source 1..17: mol_type = other DNA
ggccccacgtctttcca

SEQ ID NO: 10529 - DNA, 17 bp, synthetic construct
  misc_feature 1..17: note = Oligonucleotide
  source 1..17: mol_type = other DNA
cacggccccacgtcttt

SEQ ID NO: 10530 - DNA, 17 bp, synthetic construct
  misc_feature 1..17: note = Oligonucleotide
  source 1..17: mol_type = other DNA
ccccacggccccacgtc

SEQ ID NO: 10531 - DNA, 17 bp, synthetic construct
  misc_feature 1..17: note = Oligonucleotide
  source 1..17: mol_type = other DNA
ggcccccacggccccac

SEQ ID NO: 10532 - DNA, 17 bp, synthetic construct
  misc_feature 1..17: note = Oligonucleotide
  source 1..17: mol_type = other DNA
tgaggcccccacggccc

SEQ ID NO: 10533 - DNA, 17 bp, synthetic construct
  misc_feature 1..17: note = Oligonucleotide
  source 1..17: mol_type = other DNA
cactgaggcccccacgg

SEQ ID NO: 10534 - DNA, 17 bp, synthetic construct
  misc_feature 1..17: note = Oligonucleotide
  source 1..17: mol_type = other DNA
tcacactgaggccccca

SEQ ID NO: 10535 - DNA, 17 bp, synthetic construct
  misc_feature 1..17: note = Oligonucleotide
  source 1..17: mol_type = other DNA
agatcacactgaggccc

SEQ ID NO: 10536 - DNA, 17 bp, synthetic construct
  misc_feature 1..17: note = Oligonucleotide
  source 1..17: mol_type = other DNA
tccagatcacactgagg

SEQ ID NO: 10537 - DNA, 17 bp, synthetic construct
  misc_feature 1..17: note = Oligonucleotide
  source 1..17: mol_type = other DNA
gagtccagatcacactg

SEQ ID NO: 10538 - DNA, 17 bp, synthetic construct
  misc_feature 1..17: note = Oligonucleotide
  source 1..17: mol_type = other DNA
gctgagtccagatcaca

SEQ ID NO: 10539 - DNA, 17 bp, synthetic construct
  misc_feature 1..17: note = Oligonucleotide
  source 1..17: mol_type = other DNA
gaggctgagtccagatc

SEQ ID NO: 10540 - DNA, 17 bp, synthetic construct
  misc_feature 1..17: note = Oligonucleotide
  source 1..17: mol_type = other DNA
gaagaggctgagtccag

SEQ ID NO: 10541 - DNA, 17 bp, synthetic construct
  misc_feature 1..17: note = Oligonucleotide
  source 1..17: mol_type = other DNA
gctgaagaggctgagtc

SEQ ID NO: 10542 - DNA, 17 bp, synthetic construct
  misc_feature 1..17: note = Oligonucleotide
  source 1..17: mol_type = other DNA
cacgctgaagaggctga

SEQ ID NO: 10543 - DNA, 17 bp, synthetic construct
  misc_feature 1..17: note = Oligonucleotide
  source 1..17: mol_type = other DNA
agccacgctgaagaggc

SEQ ID NO: 10544 - DNA, 17 bp, synthetic construct
  misc_feature 1..17: note = Oligonucleotide
  source 1..17: mol_type = other DNA
agcagccacgctgaaga

SEQ ID NO: 10545 - DNA, 17 bp, synthetic construct
  misc_feature 1..17: note = Oligonucleotide
  source 1..17: mol_type = other DNA
tccagcagccacgctga

SEQ ID NO: 10546 - DNA, 17 bp, synthetic construct
  misc_feature 1..17: note = Oligonucleotide
  source 1..17: mol_type = other DNA
acctccagcagccacgc

SEQ ID NO: 10547 - DNA, 17 bp, synthetic construct
  misc_feature 1..17: note = Oligonucleotide
  source 1..17: mol_type = other DNA
aacacctccagcagcca

SEQ ID NO: 10548 - DNA, 17 bp, synthetic construct
  misc_feature 1..17: note = Oligonucleotide
  source 1..17: mol_type = other DNA
acgaacacctccagcag

SEQ ID NO: 10549 - DNA, 17 bp, synthetic construct
  misc_feature 1..17: note = Oligonucleotide
  source 1..17: mol_type = other DNA
cccacgaacacctccag

SEQ ID NO: 10550 - DNA, 17 bp, synthetic construct
  misc_feature 1..17: note = Oligonucleotide
  source 1..17: mol_type = other DNA
tcacccacgaacacctc

SEQ ID NO: 10551 - DNA, 17 bp, synthetic construct
  misc_feature 1..17: note = Oligonucleotide
  source 1..17: mol_type = other DNA
ccgtcacccacgaacac

SEQ ID NO: 10552 - DNA, 17 bp, synthetic construct
  misc_feature 1..17: note = Oligonucleotide
  source 1..17: mol_type = other DNA
gcaccgtcacccacgaa

SEQ ID NO: 10553 - DNA, 17 bp, synthetic construct
  misc_feature 1..17: note = Oligonucleotide
  source 1..17: mol_type = other DNA
caggcaccgtcacccac

SEQ ID NO: 10554 - DNA, 17 bp, synthetic construct
  misc_feature 1..17: note = Oligonucleotide
  source 1..17: mol_type = other DNA
caccaggcaccgtcacc

SEQ ID NO: 10555 - DNA, 17 bp, synthetic construct
  misc_feature 1..17: note = Oligonucleotide
  source 1..17: mol_type = other DNA
cttcaccaggcaccgtc

SEQ ID NO: 10556 - DNA, 17 bp, synthetic construct
  misc_feature 1..17: note = Oligonucleotide
  source 1..17: mol_type = other DNA
atacttcaccaggcacc

SEQ ID NO: 10557 - DNA, 17 bp, synthetic construct
  misc_feature 1..17: note = Oligonucleotide
  source 1..17: mol_type = other DNA
atgatacttcaccaggc

SEQ ID NO: 10558 - DNA, 17 bp, synthetic construct
  misc_feature 1..17: note = Oligonucleotide
  source 1..17: mol_type = other DNA
cacatgatacttcacca

SEQ ID NO: 10559 - DNA, 17 bp, synthetic construct
  misc_feature 1..17: note = Oligonucleotide
  source 1..17: mol_type = other DNA
taacacatgatacttca

SEQ ID NO: 10560 - DNA, 17 bp, synthetic construct
  misc_feature 1..17: note = Oligonucleotide
  source 1..17: mol_type = other DNA
ctctaacacatgatact

SEQ ID NO: 10561 - DNA, 17 bp, synthetic construct
  misc_feature 1..17: note = Oligonucleotide
  source 1..17: mol_type = other DNA
accctctaacacatgat

SEQ ID NO: 10562 - DNA, 17 bp, synthetic construct
  misc_feature 1..17: note = Oligonucleotide
  source 1..17: mol_type = other DNA
cccaccctctaacacat

SEQ ID NO: 10563 - DNA, 17 bp, synthetic construct
  misc_feature 1..17: note = Oligonucleotide
  source 1..17: mol_type = other DNA
ccacccaccctctaaca

SEQ ID NO: 10564 - DNA, 17 bp, synthetic construct
  misc_feature 1..17: note = Oligonucleotide
  source 1..17: mol_type = other DNA
gggccacccaccctcta

SEQ ID NO: 10565 - DNA, 17 bp, synthetic construct
  misc_feature 1..17: note = Oligonucleotide
  source 1..17: mol_type = other DNA
tctgggccacccaccct

SEQ ID NO: 10566 - DNA, 17 bp, synthetic construct
  misc_feature 1..17: note = Oligonucleotide
  source 1..17: mol_type = other DNA
gcttctgggccacccac

SEQ ID NO: 10567 - DNA, 17 bp, synthetic construct
  misc_feature 1..17: note = Oligonucleotide
  source 1..17: mol_type = other DNA
agagcttctgggccacc

SEQ ID NO: 10568 - DNA, 17 bp, synthetic construct
  misc_feature 1..17: note = Oligonucleotide
  source 1..17: mol_type = other DNA
cagagagcttctgggcc

SEQ ID NO: 10569 - DNA, 17 bp, synthetic construct
  misc_feature 1..17: note = Oligonucleotide
  source 1..17: mol_type = other DNA
tcccagagagcttctgg

SEQ ID NO: 10570 - DNA, 17 bp, synthetic construct
  misc_feature 1..17: note = Oligonucleotide
  source 1..17: mol_type = other DNA
gcctcccagagagcttc

SEQ ID NO: 10571 - DNA, 17 bp, synthetic construct
  misc_feature 1..17: note = Oligonucleotide
  source 1..17: mol_type = other DNA
ccagcctcccagagagc

SEQ ID NO: 10572 - DNA, 17 bp, synthetic construct
  misc_feature 1..17: note = Oligonucleotide
  source 1..17: mol_type = other DNA
ctgccagcctcccagag

SEQ ID NO: 10573 - DNA, 17 bp, synthetic construct
  misc_feature 1..17: note = Oligonucleotide
  source 1..17: mol_type = other DNA
cacctgccagcctccca

SEQ ID NO: 10574 - DNA, 17 bp, synthetic construct
  misc_feature 1..17: note = Oligonucleotide
  source 1..17: mol_type = other DNA
cagcacctgccagcctc

SEQ ID NO: 10575 - DNA, 17 bp, synthetic construct
  misc_feature 1..17: note = Oligonucleotide
  source 1..17: mol_type = other DNA
tcacagcacctgccagc

SEQ ID NO: 10576 - DNA, 17 bp, synthetic construct
  misc_feature 1..17: note = Oligonucleotide
  source 1..17: mol_type = other DNA
acatcacagcacctgcc

SEQ ID NO: 10577 - DNA, 17 bp, synthetic construct
  misc_feature 1..17: note = Oligonucleotide
  source 1..17: mol_type = other DNA
gccacatcacagcacct

SEQ ID NO: 10578 - DNA, 17 bp, synthetic construct
  misc_feature 1..17: note = Oligonucleotide
  source 1..17: mol_type = other DNA
acagccacatcacagca

SEQ ID NO: 10579 - DNA, 17 bp, synthetic construct
  misc_feature 1..17: note = Oligonucleotide
  source 1..17: mol_type = other DNA
caaacagccacatcaca

SEQ ID NO: 10580 - DNA, 17 bp, synthetic construct
  misc_feature 1..17: note = Oligonucleotide
  source 1..17: mol_type = other DNA
cgccaaacagccacatc

SEQ ID NO: 10581 - DNA, 17 bp, synthetic construct
  misc_feature 1..17: note = Oligonucleotide
  source 1..17: mol_type = other DNA
ggccgccaaacagccac

SEQ ID NO: 10582 - DNA, 17 bp, synthetic construct
  misc_feature 1..17: note = Oligonucleotide
  source 1..17: mol_type = other DNA
tccggccgccaaacagc

SEQ ID NO: 10583 - DNA, 17 bp, synthetic construct
  misc_feature 1..17: note = Oligonucleotide
  source 1..17: mol_type = other DNA
ggctccggccgccaaac

SEQ ID NO: 10584 - DNA, 17 bp, synthetic construct
  misc_feature 1..17: note = Oligonucleotide
  source 1..17: mol_type = other DNA
ccaggctccggccgcca

SEQ ID NO: 10585 - DNA, 17 bp, synthetic construct
  misc_feature 1..17: note = Oligonucleotide
  source 1..17: mol_type = other DNA
tggccaggctccggccg

SEQ ID NO: 10586 - DNA, 17 bp, synthetic construct
  misc_feature 1..17: note = Oligonucleotide
  source 1..17: mol_type = other DNA
ccctggccaggctccgg

SEQ ID NO: 10587 - DNA, 17 bp, synthetic construct
  misc_feature 1..17: note = Oligonucleotide
  source 1..17: mol_type = other DNA
cctccctggccaggctc

SEQ ID NO: 10588 - DNA, 17 bp, synthetic construct
  misc_feature 1..17: note = Oligonucleotide
  source 1..17: mol_type = other DNA
ccacctccctggccagg

SEQ ID NO: 10589 - DNA, 17 bp, synthetic construct
  misc_feature 1..17: note = Oligonucleotide
  source 1..17: mol_type = other DNA
tggccacctccctggcc

SEQ ID NO: 10590 - DNA, 17 bp, synthetic construct
  misc_feature 1..17: note = Oligonucleotide
  source 1..17: mol_type = other DNA
gtctggccacctccctg

SEQ ID NO: 10591 - DNA, 17 bp, synthetic construct
  misc_feature 1..17: note = Oligonucleotide
  source 1..17: mol_type = other DNA
gccgtctggccacctcc

SEQ ID NO: 10592 - DNA, 17 bp, synthetic construct
  misc_feature 1..17: note = Oligonucleotide
  source 1..17: mol_type = other DNA
tcagccgtctggccacc

SEQ ID NO: 10593 - DNA, 17 bp, synthetic construct
  misc_feature 1..17: note = Oligonucleotide
  source 1..17: mol_type = other DNA
ctctcagccgtctggcc

SEQ ID NO: 10594 - DNA, 17 bp, synthetic construct
  misc_feature 1..17: note = Oligonucleotide
  source 1..17: mol_type = other DNA
tcactctcagccgtctg

SEQ ID NO: 10595 - DNA, 17 bp, synthetic construct
  misc_feature 1..17: note = Oligonucleotide
  source 1..17: mol_type = other DNA
ctgtcactctcagccgt

SEQ ID NO: 10596 - DNA, 17 bp, synthetic construct
  misc_feature 1..17: note = Oligonucleotide
  source 1..17: mol_type = other DNA
ccactgtcactctcagc

SEQ ID NO: 10597 - DNA, 17 bp, synthetic construct
  misc_feature 1..17: note = Oligonucleotide
  source 1..17: mol_type = other DNA
cacccactgtcactctc

SEQ ID NO: 10598 - DNA, 17 bp, synthetic construct
  misc_feature 1..17: note = Oligonucleotide
  source 1..17: mol_type = other DNA
gcacacccactgtcact

SEQ ID NO: 10599 - DNA, 17 bp, synthetic construct
  misc_feature 1..17: note = Oligonucleotide
  source 1..17: mol_type = other DNA
tctgcacacccactgtc

SEQ ID NO: 10600 - DNA, 17 bp, synthetic construct
  misc_feature 1..17: note = Oligonucleotide
  source 1..17: mol_type = other DNA
ctctctgcacacccact

SEQ ID NO: 10601 - DNA, 17 bp, synthetic construct
  misc_feature 1..17: note = Oligonucleotide
  source 1..17: mol_type = other DNA
ggcctctctgcacaccc

SEQ ID NO: 10602 - DNA, 17 bp, synthetic construct
  misc_feature 1..17: note = Oligonucleotide
  source 1..17: mol_type = other DNA
catggcctctctgcaca

SEQ ID NO: 10603 - DNA, 17 bp, synthetic construct
  misc_feature 1..17: note = Oligonucleotide
  source 1..17: mol_type = other DNA
ttccatggcctctctgc

SEQ ID NO: 10604 - DNA, 17 bp, synthetic construct
  misc_feature 1..17: note = Oligonucleotide
  source 1..17: mol_type = other DNA
tgtttccatggcctctc

SEQ ID NO: 10605 - DNA, 17 bp, synthetic construct
  misc_feature 1..17: note = Oligonucleotide
  source 1..17: mol_type = other DNA
ccatgtttccatggcct

SEQ ID NO: 10606 - DNA, 17 bp, synthetic construct
  misc_feature 1..17: note = Oligonucleotide
  source 1..17: mol_type = other DNA
cttccatgtttccatgg

SEQ ID NO: 10607 - DNA, 17 bp, synthetic construct
  misc_feature 1..17: note = Oligonucleotide
  source 1..17: mol_type = other DNA
tgacttccatgtttcca

SEQ ID NO: 10608 - DNA, 17 bp, synthetic construct
  misc_feature 1..17: note = Oligonucleotide
  source 1..17: mol_type = other DNA
gtctgacttccatgttt

SEQ ID NO: 10609 - DNA, 17 bp, synthetic construct
  misc_feature 1..17: note = Oligonucleotide
  source 1..17: mol_type = other DNA
catgtctgacttccatg

SEQ ID NO: 10610 - DNA, 17 bp, synthetic construct
  misc_feature 1..17: note = Oligonucleotide
  source 1..17: mol_type = other DNA
gtccatgtctgacttcc

SEQ ID NO: 10611 - DNA, 17 bp, synthetic construct
  misc_feature 1..17: note = Oligonucleotide
  source 1..17: mol_type = other DNA
agtgtccatgtctgact

SEQ ID NO: 10612 - DNA, 17 bp, synthetic construct
  misc_feature 1..17: note = Oligonucleotide
  source 1..17: mol_type = other DNA
agcagtgtccatgtctg

SEQ ID NO: 10613 - DNA, 17 bp, synthetic construct
  misc_feature 1..17: note = Oligonucleotide
  source 1..17: mol_type = other DNA
ccgagcagtgtccatgt

SEQ ID NO: 10614 - DNA, 17 bp, synthetic construct
  misc_feature 1..17: note = Oligonucleotide
  source 1..17: mol_type = other DNA
aacccgagcagtgtcca

SEQ ID NO: 10615 - DNA, 17 bp, synthetic construct
  misc_feature 1..17: note = Oligonucleotide
  source 1..17: mol_type = other DNA
acaaacccgagcagtgt

SEQ ID NO: 10616 - DNA, 17 bp, synthetic construct
  misc_feature 1..17: note = Oligonucleotide
  source 1..17: mol_type = other DNA
ggcacaaacccgagcag

SEQ ID NO: 10617 - DNA, 17 bp, synthetic construct
  misc_feature 1..17: note = Oligonucleotide
  source 1..17: mol_type = other DNA
cagggcacaaacccgag

SEQ ID NO: 10618 - DNA, 17 bp, synthetic construct
  misc_feature 1..17: note = Oligonucleotide
  source 1..17: mol_type = other DNA
ccccagggcacaaaccc

SEQ ID NO: 10619 - DNA, 17 bp, synthetic construct
  misc_feature 1..17: note = Oligonucleotide
  source 1..17: mol_type = other DNA
catccccagggcacaaa

SEQ ID NO: 10620 - DNA, 17 bp, synthetic construct
  misc_feature 1..17: note = Oligonucleotide
  source 1..17: mol_type = other DNA
caccatccccagggcac

SEQ ID NO: 10621 - DNA, 17 bp, synthetic construct
  misc_feature 1..17: note = Oligonucleotide
  source 1..17: mol_type = other DNA
ccacaccatccccaggg

SEQ ID NO: 10622 - DNA, 17 bp, synthetic construct
  misc_feature 1..17: note = Oligonucleotide
  source 1..17: mol_type = other DNA
tgcccacaccatcccca

SEQ ID NO: 10623 - DNA, 17 bp, synthetic construct
  misc_feature 1..17: note = Oligonucleotide
  source 1..17: mol_type = other DNA
tactgcccacaccatcc

SEQ ID NO: 10624 - DNA, 17 bp, synthetic construct
  misc_feature 1..17: note = Oligonucleotide
  source 1..17: mol_type = other DNA
gggtactgcccacacca

SEQ ID NO: 10625 - DNA, 17 bp, synthetic construct
  misc_feature 1..17: note = Oligonucleotide
  source 1..17: mol_type = other DNA
agagggtactgcccaca

SEQ ID NO: 10626 - DNA, 17 bp, synthetic construct
  misc_feature 1..17: note = Oligonucleotide
  source 1..17: mol_type = other DNA
ggaagagggtactgccc

SEQ ID NO: 10627 - DNA, 17 bp, synthetic construct
  misc_feature 1..17: note = Oligonucleotide
  source 1..17: mol_type = other DNA
tggggaagagggtactg

SEQ ID NO: 10628 - DNA, 17 bp, synthetic construct
  misc_feature 1..17: note = Oligonucleotide
  source 1..17: mol_type = other DNA
tcttggggaagagggta

SEQ ID NO: 10629 - DNA, 17 bp, synthetic construct
  misc_feature 1..17: note = Oligonucleotide
  source 1..17: mol_type = other DNA
ttctcttggggaagagg

SEQ ID NO: 10630 - DNA, 17 bp, synthetic construct
  misc_feature 1..17: note = Oligonucleotide
  source 1..17: mol_type = other DNA
tctttctcttggggaag

SEQ ID NO: 10631 - DNA, 17 bp, synthetic construct
  misc_feature 1..17: note = Oligonucleotide
  source 1..17: mol_type = other DNA
tcctctttctcttgggg

SEQ ID NO: 10632 - DNA, 17 bp, synthetic construct
  misc_feature 1..17: note = Oligonucleotide
  source 1..17: mol_type = other DNA
ttctcctctttctcttg

SEQ ID NO: 10633 - DNA, 17 bp, synthetic construct
  misc_feature 1..17: note = Oligonucleotide
  source 1..17: mol_type = other DNA
tgcttctcctctttctc

SEQ ID NO: 10634 - DNA, 17 bp, synthetic construct
  misc_feature 1..17: note = Oligonucleotide
  source 1..17: mol_type = other DNA
gtctgcttctcctcttt

SEQ ID NO: 10635 - DNA, 17 bp, synthetic construct
  misc_feature 1..17: note = Oligonucleotide
  source 1..17: mol_type = other DNA
ggtgtctgcttctcctc

SEQ ID NO: 10636 - DNA, 17 bp, synthetic construct
  misc_feature 1..17: note = Oligonucleotide
  source 1..17: mol_type = other DNA
ccaggtgtctgcttctc

SEQ ID NO: 10637 - DNA, 17 bp, synthetic construct
  misc_feature 1..17: note = Oligonucleotide
  source 1..17: mol_type = other DNA
ggcccaggtgtctgctt

SEQ ID NO: 10638 - DNA, 17 bp, synthetic construct
  misc_feature 1..17: note = Oligonucleotide
  source 1..17: mol_type = other DNA
catggcccaggtgtctg

SEQ ID NO: 10639 - DNA, 17 bp, synthetic construct
  misc_feature 1..17: note = Oligonucleotide
  source 1..17: mol_type = other DNA
acccatggcccaggtgt

SEQ ID NO: 10640 - DNA, 17 bp, synthetic construct
  misc_feature 1..17: note = Oligonucleotide
  source 1..17: mol_type = other DNA
gtcacccatggcccagg

SEQ ID NO: 10641 - DNA, 17 bp, synthetic construct
  misc_feature 1..17: note = Oligonucleotide
  source 1..17: mol_type = other DNA
ggggtcacccatggccc

SEQ ID NO: 10642 - DNA, 17 bp, synthetic construct
  misc_feature 1..17: note = Oligonucleotide
  source 1..17: mol_type = other DNA
cctggggtcacccatgg

SEQ ID NO: 10643 - DNA, 17 bp, synthetic construct
  misc_feature 1..17: note = Oligonucleotide
  source 1..17: mol_type = other DNA
gggcctggggtcaccca

SEQ ID NO: 10644 - DNA, 17 bp, synthetic construct
  misc_feature 1..17: note = Oligonucleotide
  source 1..17: mol_type = other DNA
gaggggcctggggtcac

SEQ ID NO: 10645 - DNA, 17 bp, synthetic construct
  misc_feature 1..17: note = Oligonucleotide
  source 1..17: mol_type = other DNA
agggaggggcctggggt

SEQ ID NO: 10646 - DNA, 17 bp, synthetic construct
  misc_feature 1..17: note = Oligonucleotide
  source 1..17: mol_type = other DNA
aggagggaggggcctgg

SEQ ID NO: 10647 - DNA, 17 bp, synthetic construct
  misc_feature 1..17: note = Oligonucleotide
  source 1..17: mol_type = other DNA
cacaggagggaggggcc

SEQ ID NO: 10648 - DNA, 17 bp, synthetic construct
  misc_feature 1..17: note = Oligonucleotide
  source 1..17: mol_type = other DNA
gggcacaggagggaggg

SEQ ID NO: 10649 - DNA, 17 bp, synthetic construct
  misc_feature 1..17: note = Oligonucleotide
  source 1..17: mol_type = other DNA
ccagggcacaggaggga

SEQ ID NO: 10650 - DNA, 17 bp, synthetic construct
  misc_feature 1..17: note = Oligonucleotide
  source 1..17: mol_type = other DNA
gccccagggcacaggag

SEQ ID NO: 10651 - DNA, 17 bp, synthetic construct
  misc_feature 1..17: note = Oligonucleotide
  source 1..17: mol_type = other DNA
aaggccccagggcacag

SEQ ID NO: 10652 - DNA, 17 bp, synthetic construct
  misc_feature 1..17: note = Oligonucleotide
  source 1..17: mol_type = other DNA
ccaaaggccccagggca

SEQ ID NO: 10653 - DNA, 17 bp, synthetic construct
  misc_feature 1..17: note = Oligonucleotide
  source 1..17: mol_type = other DNA
ctgccaaaggccccagg

SEQ ID NO: 10654 - DNA, 17 bp, synthetic construct
  misc_feature 1..17: note = Oligonucleotide
  source 1..17: mol_type = other DNA
tgcctgccaaaggcccc

SEQ ID NO: 10655 - DNA, 17 bp, synthetic construct
  misc_feature 1..17: note = Oligonucleotide
  source 1..17: mol_type = other DNA
ctgtgcctgccaaaggc

SEQ ID NO: 10656 - DNA, 17 bp, synthetic construct
  misc_feature 1..17: note = Oligonucleotide
  source 1..17: mol_type = other DNA
aggctgtgcctgccaaa

SEQ ID NO: 10657 - DNA, 17 bp, synthetic construct
  misc_feature 1..17: note = Oligonucleotide
  source 1..17: mol_type = other DNA
ggaaggctgtgcctgcc

SEQ ID NO: 10658 - DNA, 17 bp, synthetic construct
  misc_feature 1..17: note = Oligonucleotide
  source 1..17: mol_type = other DNA
caaggaaggctgtgcct

SEQ ID NO: 10659 - DNA, 17 bp, synthetic construct
  misc_feature 1..17: note = Oligonucleotide
  source 1..17: mol_type = other DNA
gcccaaggaaggctgtg

SEQ ID NO: 10660 - DNA, 17 bp, synthetic construct
  misc_feature 1..17: note = Oligonucleotide
  source 1..17: mol_type = other DNA
aacgcccaaggaaggct

SEQ ID NO: 10661 - DNA, 17 bp, synthetic construct
  misc_feature 1..17: note = Oligonucleotide
  source 1..17: mol_type = other DNA
gaaaacgcccaaggaag

SEQ ID NO: 10662 - DNA, 17 bp, synthetic construct
  misc_feature 1..17: note = Oligonucleotide
  source 1..17: mol_type = other DNA
agagaaaacgcccaagg

SEQ ID NO: 10663 - DNA, 17 bp, synthetic construct
  misc_feature 1..17: note = Oligonucleotide
  source 1..17: mol_type = other DNA
ccaagagaaaacgccca

SEQ ID NO: 10664 - DNA, 17 bp, synthetic construct
  misc_feature 1..17: note = Oligonucleotide
  source 1..17: mol_type = other DNA
aggccaagagaaaacgc

SEQ ID NO: 10665 - DNA, 17 bp, synthetic construct
  misc_feature 1..17: note = Oligonucleotide
  source 1..17: mol_type = other DNA
aggaggccaagagaaaa

SEQ ID NO: 10666 - DNA, 17 bp, synthetic construct
  misc_feature 1..17: note = Oligonucleotide
  source 1..17: mol_type = other DNA
gtcaggaggccaagaga

SEQ ID NO: 10667 - DNA, 17 bp, synthetic construct
  misc_feature 1..17: note = Oligonucleotide
  source 1..17: mol_type = other DNA
gatgtcaggaggccaag

SEQ ID NO: 10668 - DNA, 17 bp, synthetic construct
  misc_feature 1..17: note = Oligonucleotide
  source 1..17: mol_type = other DNA
ggagatgtcaggaggcc

SEQ ID NO: 10669 - DNA, 17 bp, synthetic construct
  misc_feature 1..17: note = Oligonucleotide
  source 1..17: mol_type = other DNA
gctggagatgtcaggag

SEQ ID NO: 10670 - DNA, 17 bp, synthetic construct
  misc_feature 1..17: note = Oligonucleotide
  source 1..17: mol_type = other DNA
catgctggagatgtcag

SEQ ID NO: 10671 - DNA, 17 bp, synthetic construct
  misc_feature 1..17: note = Oligonucleotide
  source 1..17: mol_type = other DNA
gagcatgctggagatgt

SEQ ID NO: 10672 - DNA, 17 bp, synthetic construct
  misc_feature 1..17: note = Oligonucleotide
  source 1..17: mol_type = other DNA
ccagagcatgctggaga

SEQ ID NO: 10673 - DNA, 17 bp, synthetic construct
  misc_feature 1..17: note = Oligonucleotide
  source 1..17: mol_type = other DNA
ctcccagagcatgctgg

SEQ ID NO: 10674 - DNA, 17 bp, synthetic construct
  misc_feature 1..17: note = Oligonucleotide
  source 1..17: mol_type = other DNA
cgcctcccagagcatgc

SEQ ID NO: 10675 - DNA, 17 bp, synthetic construct
  misc_feature 1..17: note = Oligonucleotide
  source 1..17: mol_type = other DNA
tcccgcctcccagagca

SEQ ID NO: 10676 - DNA, 17 bp, synthetic construct
  misc_feature 1..17: note = Oligonucleotide
  source 1..17: mol_type = other DNA
tgctcccgcctcccaga

SEQ ID NO: 10677 - DNA, 17 bp, synthetic construct
  misc_feature 1..17: note = Oligonucleotide
  source 1..17: mol_type = other DNA
cattgctcccgcctccc

SEQ ID NO: 10678 - DNA, 17 bp, synthetic construct
  misc_feature 1..17: note = Oligonucleotide
  source 1..17: mol_type = other DNA
tcacattgctcccgcct

SEQ ID NO: 10679 - DNA, 17 bp, synthetic construct
  misc_feature 1..17: note = Oligonucleotide
  source 1..17: mol_type = other DNA
cattcacattgctcccg

SEQ ID NO: 10680 - DNA, 17 bp, synthetic construct
  misc_feature 1..17: note = Oligonucleotide
  source 1..17: mol_type = other DNA
agccattcacattgctc

SEQ ID NO: 10681 - DNA, 17 bp, synthetic construct
  misc_feature 1..17: note = Oligonucleotide
  source 1..17: mol_type = other DNA
gagagccattcacattg

SEQ ID NO: 10682 - DNA, 17 bp, synthetic construct
  misc_feature 1..17: note = Oligonucleotide
  source 1..17: mol_type = other DNA
gaggagagccattcaca

SEQ ID NO: 10683 - DNA, 17 bp, synthetic construct
  misc_feature 1..17: note = Oligonucleotide
  source 1..17: mol_type = other DNA
tgtgaggagagccattc

SEQ ID NO: 10684 - DNA, 17 bp, synthetic construct
  misc_feature 1..17: note = Oligonucleotide
  source 1..17: mol_type = other DNA
agatgtgaggagagcca

SEQ ID NO: 10685 - DNA, 17 bp, synthetic construct
  misc_feature 1..17: note = Oligonucleotide
  source 1..17: mol_type = other DNA
aagagatgtgaggagag

SEQ ID NO: 10686 - DNA, 17 bp, synthetic construct
  misc_feature 1..17: note = Oligonucleotide
  source 1..17: mol_type = other DNA
ggcaagagatgtgagga

SEQ ID NO: 10687 - DNA, 17 bp, synthetic construct
  misc_feature 1..17: note = Oligonucleotide
  source 1..17: mol_type = other DNA
gagggcaagagatgtga

SEQ ID NO: 10688 - DNA, 17 bp, synthetic construct
  misc_feature 1..17: note = Oligonucleotide
  source 1..17: mol_type = other DNA
cccgagggcaagagatg

SEQ ID NO: 10689 - DNA, 17 bp, synthetic construct
  misc_feature 1..17: note = Oligonucleotide
  source 1..17: mol_type = other DNA
gggcccgagggcaagag

SEQ ID NO: 10690 - DNA, 17 bp, synthetic construct
  misc_feature 1..17: note = Oligonucleotide
  source 1..17: mol_type = other DNA
caggggcccgagggcaa

SEQ ID NO: 10691 - DNA, 17 bp, synthetic construct
  misc_feature 1..17: note = Oligonucleotide
  source 1..17: mol_type = other DNA
agccaggggcccgaggg

SEQ ID NO: 10692 - DNA, 17 bp, synthetic construct
  misc_feature 1..17: note = Oligonucleotide
  source 1..17: mol_type = other DNA
cggagccaggggcccga

SEQ ID NO: 10693 - DNA, 17 bp, synthetic construct
  misc_feature 1..17: note = Oligonucleotide
  source 1..17: mol_type = other DNA
ccacggagccaggggcc

SEQ ID NO: 10694 - DNA, 17 bp, synthetic construct
  misc_feature 1..17: note = Oligonucleotide
  source 1..17: mol_type = other DNA
cacccacggagccaggg

SEQ ID NO: 10695 - DNA, 17 bp, synthetic construct
  misc_feature 1..17: note = Oligonucleotide
  source 1..17: mol_type = other DNA
aggcacccacggagcca

SEQ ID NO: 10696 - DNA, 17 bp, synthetic construct
  misc_feature 1..17: note = Oligonucleotide
  source 1..17: mol_type = other DNA
cagaggcacccacggag

SEQ ID NO: 10697 - DNA, 17 bp, synthetic construct
  misc_feature 1..17: note = Oligonucleotide
  source 1..17: mol_type = other DNA
ctccagaggcacccacg

SEQ ID NO: 10698 - DNA, 17 bp, synthetic construct
  misc_feature 1..17: note = Oligonucleotide
  source 1..17: mol_type = other DNA
tggctccagaggcaccc

SEQ ID NO: 10699 - DNA, 17 bp, synthetic construct
  misc_feature 1..17: note = Oligonucleotide
  source 1..17: mol_type = other DNA
ggctggctccagaggca

SEQ ID NO: 10700 - DNA, 17 bp, synthetic construct
  misc_feature 1..17: note = Oligonucleotide
  source 1..17: mol_type = other DNA
gcaggctggctccagag

SEQ ID NO: 10701 - DNA, 17 bp, synthetic construct
  misc_feature 1..17: note = Oligonucleotide
  source 1..17: mol_type = other DNA
agggcaggctggctcca

SEQ ID NO: 10702 - DNA, 17 bp, synthetic construct
  misc_feature 1..17: note = Oligonucleotide
  source 1..17: mol_type = other DNA
cagagggcaggctggct

SEQ ID NO: 10703 - DNA, 17 bp, synthetic construct
  misc_feature 1..17: note = Oligonucleotide
  source 1..17: mol_type = other DNA
gggcagagggcaggctg

SEQ ID NO: 10704 - DNA, 17 bp, synthetic construct
  misc_feature 1..17: note = Oligonucleotide
  source 1..17: mol_type = other DNA
cctgggcagagggcagg

SEQ ID NO: 10705 - DNA, 17 bp, synthetic construct
  misc_feature 1..17: note = Oligonucleotide
  source 1..17: mol_type = other DNA
agacctgggcagagggc

SEQ ID NO: 10706 - DNA, 17 bp, synthetic construct
  misc_feature 1..17: note = Oligonucleotide
  source 1..17: mol_type = other DNA
tggagacctgggcagag

SEQ ID NO: 10707 - DNA, 17 bp, synthetic construct
  misc_feature 1..17: note = Oligonucleotide
  source 1..17: mol_type = other DNA
agctggagacctgggca

SEQ ID NO: 10708 - DNA, 17 bp, synthetic construct
  misc_feature 1..17: note = Oligonucleotide
  source 1..17: mol_type = other DNA
ctgagctggagacctgg

SEQ ID NO: 10709 - DNA, 17 bp, synthetic construct
  misc_feature 1..17: note = Oligonucleotide
  source 1..17: mol_type = other DNA
gggctgagctggagacc

SEQ ID NO: 10710 - DNA, 17 bp, synthetic construct
  misc_feature 1..17: note = Oligonucleotide
  source 1..17: mol_type = other DNA
caggggctgagctggag

SEQ ID NO: 10711 - DNA, 17 bp, synthetic construct
  misc_feature 1..17: note = Oligonucleotide
  source 1..17: mol_type = other DNA
tggcaggggctgagctg

SEQ ID NO: 10712 - DNA, 17 bp, synthetic construct
  misc_feature 1..17: note = Oligonucleotide
  source 1..17: mol_type = other DNA
tactggcaggggctgag

SEQ ID NO: 10713 - DNA, 17 bp, synthetic construct
  misc_feature 1..17: note = Oligonucleotide
  source 1..17: mol_type = other DNA
tagtactggcaggggct

SEQ ID NO: 10714 - DNA, 17 bp, synthetic construct
  misc_feature 1..17: note = Oligonucleotide
  source 1..17: mol_type = other DNA
gggtagtactggcaggg

SEQ ID NO: 10715 - DNA, 17 bp, synthetic construct
  misc_feature 1..17: note = Oligonucleotide
  source 1..17: mol_type = other DNA
tctgggtagtactggca

SEQ ID NO: 10716 - DNA, 17 bp, synthetic construct
  misc_feature 1..17: note = Oligonucleotide
  source 1..17: mol_type = other DNA
ctgtctgggtagtactg

SEQ ID NO: 10717 - DNA, 17 bp, synthetic construct
  misc_feature 1..17: note = Oligonucleotide
  source 1..17: mol_type = other DNA
tgcctgtctgggtagta

SEQ ID NO: 10718 - DNA, 17 bp, synthetic construct
  misc_feature 1..17: note = Oligonucleotide
  source 1..17: mol_type = other DNA
ttgtgcctgtctgggta

SEQ ID NO: 10719 - DNA, 17 bp, synthetic construct
  misc_feature 1..17: note = Oligonucleotide
  source 1..17: mol_type = other DNA
gagttgtgcctgtctgg

SEQ ID NO: 10720 - DNA, 17 bp, synthetic construct
  misc_feature 1..17: note = Oligonucleotide
  source 1..17: mol_type = other DNA
gcagagttgtgcctgtc

SEQ ID NO: 10721 - DNA, 17 bp, synthetic construct
  misc_feature 1..17: note = Oligonucleotide
  source 1..17: mol_type = other DNA
agagcagagttgtgcct

SEQ ID NO: 10722 - DNA, 17 bp, synthetic construct
  misc_feature 1..17: note = Oligonucleotide
  source 1..17: mol_type = other DNA
ggcagagcagagttgtg

SEQ ID NO: 10723 - DNA, 17 bp, synthetic construct
  misc_feature 1..17: note = Oligonucleotide
  source 1..17: mol_type = other DNA
ctgggcagagcagagtt

SEQ ID NO: 10724 - DNA, 17 bp, synthetic construct
  misc_feature 1..17: note = Oligonucleotide
  source 1..17: mol_type = other DNA
gagctgggcagagcaga

SEQ ID NO: 10725 - DNA, 17 bp, synthetic construct
  misc_feature 1..17: note = Oligonucleotide
  source 1..17: mol_type = other DNA
tccgagctgggcagagc

SEQ ID NO: 10726 - DNA, 17 bp, synthetic construct
  misc_feature 1..17: note = Oligonucleotide
  source 1..17: mol_type = other DNA
aggtccgagctgggcag

SEQ ID NO: 10727 - DNA, 17 bp, synthetic construct
  misc_feature 1..17: note = Oligonucleotide
  source 1..17: mol_type = other DNA
aggaggtccgagctggg

SEQ ID NO: 10728 - DNA, 17 bp, synthetic construct
  misc_feature 1..17: note = Oligonucleotide
  source 1..17: mol_type = other DNA
tccaggaggtccgagct

SEQ ID NO: 10729 - DNA, 17 bp, synthetic construct
  misc_feature 1..17: note = Oligonucleotide
  source 1..17: mol_type = other DNA
ggctccaggaggtccga

SEQ ID NO: 10730 - DNA, 17 bp, synthetic construct
  misc_feature 1..17: note = Oligonucleotide
  source 1..17: mol_type = other DNA
ctgggctccaggaggtc

SEQ ID NO: 10731 - DNA, 17 bp, synthetic construct
  misc_feature 1..17: note = Oligonucleotide
  source 1..17: mol_type = other DNA
ggtctgggctccaggag

SEQ ID NO: 10732 - DNA, 17 bp, synthetic construct
  misc_feature 1..17: note = Oligonucleotide
  source 1..17: mol_type = other DNA
cagggtctgggctccag

SEQ ID NO: 10733 - DNA, 17 bp, synthetic construct
  misc_feature 1..17: note = Oligonucleotide
  source 1..17: mol_type = other DNA
gagcagggtctgggctc

SEQ ID NO: 10734 - DNA, 17 bp, synthetic construct
  misc_feature 1..17: note = Oligonucleotide
  source 1..17: mol_type = other DNA
ccagagcagggtctggg

SEQ ID NO: 10735 - DNA, 17 bp, synthetic construct
  misc_feature 1..17: note = Oligonucleotide
  source 1..17: mol_type = other DNA
agcccagagcagggtct

SEQ ID NO: 10736 - DNA, 17 bp, synthetic construct
  misc_feature 1..17: note = Oligonucleotide
  source 1..17: mol_type = other DNA
cggagcccagagcaggg

SEQ ID NO: 10737 - DNA, 17 bp, synthetic construct
  misc_feature 1..17: note = Oligonucleotide
  source 1..17: mol_type = other DNA
ggccggagcccagagca

SEQ ID NO: 10738 - DNA, 17 bp, synthetic construct
  misc_feature 1..17: note = Oligonucleotide
  source 1..17: mol_type = other DNA
ctcggccggagcccaga

SEQ ID NO: 10739 - DNA, 17 bp, synthetic construct
  misc_feature 1..17: note = Oligonucleotide
  source 1..17: mol_type = other DNA
aggctcggccggagccc

SEQ ID NO: 10740 - DNA, 17 bp, synthetic construct
  misc_feature 1..17: note = Oligonucleotide
  source 1..17: mol_type = other DNA
aggaggctcggccggag

SEQ ID NO: 10741 - DNA, 17 bp, synthetic construct
  misc_feature 1..17: note = Oligonucleotide
  source 1..17: mol_type = other DNA
gccaggaggctcggccg

SEQ ID NO: 10742 - DNA, 17 bp, synthetic construct
  misc_feature 1..17: note = Oligonucleotide
  source 1..17: mol_type = other DNA
gcagccaggaggctcgg

SEQ ID NO: 10743 - DNA, 17 bp, synthetic construct
  misc_feature 1..17: note = Oligonucleotide
  source 1..17: mol_type = other DNA
agcgcagccaggaggct

SEQ ID NO: 10744 - DNA, 17 bp, synthetic construct
  misc_feature 1..17: note = Oligonucleotide
  source 1..17: mol_type = other DNA
ggcagcgcagccaggag

SEQ ID NO: 10745 - DNA, 17 bp, synthetic construct
  misc_feature 1..17: note = Oligonucleotide
  source 1..17: mol_type = other DNA
gcgggcagcgcagccag

SEQ ID NO: 10746 - DNA, 17 bp, synthetic construct
  misc_feature 1..17: note = Oligonucleotide
  source 1..17: mol_type = other DNA
ggcgcgggcagcgcagc

SEQ ID NO: 10747 - DNA, 17 bp, synthetic construct
  misc_feature 1..17: note = Oligonucleotide
  source 1..17: mol_type = other DNA
gcaggcgcgggcagcgc

SEQ ID NO: 10748 - DNA, 17 bp, synthetic construct
  misc_feature 1..17: note = Oligonucleotide
  source 1..17: mol_type = other DNA
agggcaggcgcgggcag

SEQ ID NO: 10749 - DNA, 17 bp, synthetic construct
  misc_feature 1..17: note = Oligonucleotide
  source 1..17: mol_type = other DNA
cacagggcaggcgcggg

SEQ ID NO: 10750 - DNA, 17 bp, synthetic construct
  misc_feature 1..17: note = Oligonucleotide
  source 1..17: mol_type = other DNA
aggcacagggcaggcgc

SEQ ID NO: 10751 - DNA, 17 bp, synthetic construct
  misc_feature 1..17: note = Oligonucleotide
  source 1..17: mol_type = other DNA
cagaggcacagggcagg

SEQ ID NO: 10752 - DNA, 17 bp, synthetic construct
  misc_feature 1..17: note = Oligonucleotide
  source 1..17: mol_type = other DNA
aggcagaggcacagggc

SEQ ID NO: 10753 - DNA, 17 bp, synthetic construct
  misc_feature 1..17: note = Oligonucleotide
  source 1..17: mol_type = other DNA
tgaaggcagaggcacag

SEQ ID NO: 10754 - DNA, 17 bp, synthetic construct
  misc_feature 1..17: note = Oligonucleotide
  source 1..17: mol_type = other DNA
cagtgaaggcagaggca

SEQ ID NO: 10755 - DNA, 17 bp, synthetic construct
  misc_feature 1..17: note = Oligonucleotide
  source 1..17: mol_type = other DNA
cagcagtgaaggcagag

SEQ ID NO: 10756 - DNA, 17 bp, synthetic construct
  misc_feature 1..17: note = Oligonucleotide
  source 1..17: mol_type = other DNA
ccacagcagtgaaggca

SEQ ID NO: 10757 - DNA, 17 bp, synthetic construct
  misc_feature 1..17: note = Oligonucleotide
  source 1..17: mol_type = other DNA
ggaccacagcagtgaag

SEQ ID NO: 10758 - DNA, 17 bp, synthetic construct
  misc_feature 1..17: note = Oligonucleotide
  source 1..17: mol_type = other DNA
gcaggaccacagcagtg

SEQ ID NO: 10759 - DNA, 17 bp, synthetic construct
  misc_feature 1..17: note = Oligonucleotide
  source 1..17: mol_type = other DNA
gttgcaggaccacagca

SEQ ID NO: 10760 - DNA, 17 bp, synthetic construct
  misc_feature 1..17: note = Oligonucleotide
  source 1..17: mol_type = other DNA
tgagttgcaggaccaca

SEQ ID NO: 10761 - DNA, 17 bp, synthetic construct
  misc_feature 1..17: note = Oligonucleotide
  source 1..17: mol_type = other DNA
tgatgagttgcaggacc

SEQ ID NO: 10762 - DNA, 17 bp, synthetic construct
  misc_feature 1..17: note = Oligonucleotide
  source 1..17: mol_type = other DNA
cactgatgagttgcagg

SEQ ID NO: 10763 - DNA, 17 bp, synthetic construct
  misc_feature 1..17: note = Oligonucleotide
  source 1..17: mol_type = other DNA
gcacactgatgagttgc

SEQ ID NO: 10764 - DNA, 17 bp, synthetic construct
  misc_feature 1..17: note = Oligonucleotide
  source 1..17: mol_type = other DNA
gaagcacactgatgagt

SEQ ID NO: 10765 - DNA, 17 bp, synthetic construct
  misc_feature 1..17: note = Oligonucleotide
  source 1..17: mol_type = other DNA
actgaagcacactgatg

SEQ ID NO: 10766 - DNA, 17 bp, synthetic construct
  misc_feature 1..17: note = Oligonucleotide
  source 1..17: mol_type = other DNA
gtgactgaagcacactg

SEQ ID NO: 10767 - DNA, 17 bp, synthetic construct
  misc_feature 1..17: note = Oligonucleotide
  source 1..17: mol_type = other DNA
ggtgtgactgaagcaca

SEQ ID NO: 10768 - DNA, 17 bp, synthetic construct
  misc_feature 1..17: note = Oligonucleotide
  source 1..17: mol_type = other DNA
tcaggtgtgactgaagc

SEQ ID NO: 10769 - DNA, 17 bp, synthetic construct
  misc_feature 1..17: note = Oligonucleotide
  source 1..17: mol_type = other DNA
gtctcaggtgtgactga

SEQ ID NO: 10770 - DNA, 17 bp, synthetic construct
  misc_feature 1..17: note = Oligonucleotide
  source 1..17: mol_type = other DNA
ggagtctcaggtgtgac

SEQ ID NO: 10771 - DNA, 17 bp, synthetic construct
  misc_feature 1..17: note = Oligonucleotide
  source 1..17: mol_type = other DNA
cctggagtctcaggtgt

SEQ ID NO: 10772 - DNA, 17 bp, synthetic construct
  misc_feature 1..17: note = Oligonucleotide
  source 1..17: mol_type = other DNA
gtacctggagtctcagg

SEQ ID NO: 10773 - DNA, 17 bp, synthetic construct
  misc_feature 1..17: note = Oligonucleotide
  source 1..17: mol_type = other DNA
ggtgtacctggagtctc

SEQ ID NO: 10774 - DNA, 17 bp, synthetic construct
  misc_feature 1..17: note = Oligonucleotide
  source 1..17: mol_type = other DNA
gcaggtgtacctggagt

SEQ ID NO: 10775 - DNA, 17 bp, synthetic construct
  misc_feature 1..17: note = Oligonucleotide
  source 1..17: mol_type = other DNA
atggcaggtgtacctgg

SEQ ID NO: 10776 - DNA, 17 bp, synthetic construct
  misc_feature 1..17: note = Oligonucleotide
  source 1..17: mol_type = other DNA
gtgatggcaggtgtacc

SEQ ID NO: 10777 - DNA, 17 bp, synthetic construct
  misc_feature 1..17: note = Oligonucleotide
  source 1..17: mol_type = other DNA
gttgtgatggcaggtgt

SEQ ID NO: 10778 - DNA, 17 bp, synthetic construct
  misc_feature 1..17: note = Oligonucleotide
  source 1..17: mol_type = other DNA
ggagttgtgatggcagg

SEQ ID NO: 10779 - DNA, 17 bp, synthetic construct
  misc_feature 1..17: note = Oligonucleotide
  source 1..17: mol_type = other DNA
agtggagttgtgatggc

SEQ ID NO: 10780 - DNA, 17 bp, synthetic construct
  misc_feature 1..17: note = Oligonucleotide
  source 1..17: mol_type = other DNA
ttcagtggagttgtgat

SEQ ID NO: 10781 - DNA, 17 bp, synthetic construct
  misc_feature 1..17: note = Oligonucleotide
  source 1..17: mol_type = other DNA
gctttcagtggagttgt

SEQ ID NO: 10782 - DNA, 17 bp, synthetic construct
  misc_feature 1..17: note = Oligonucleotide
  source 1..17: mol_type = other DNA
ttagctttcagtggagt

SEQ ID NO: 10783 - DNA, 17 bp, synthetic construct
  misc_feature 1..17: note = Oligonucleotide
  source 1..17: mol_type = other DNA
ggcttagctttcagtgg

SEQ ID NO: 10784 - DNA, 17 bp, synthetic construct
  misc_feature 1..17: note = Oligonucleotide
  source 1..17: mol_type = other DNA
caaggcttagctttcag

SEQ ID NO: 10785 - DNA, 17 bp, synthetic construct
  misc_feature 1..17: note = Oligonucleotide
  source 1..17: mol_type = other DNA
ccccaaggcttagcttt

SEQ ID NO: 10786 - DNA, 17 bp, synthetic construct
  misc_feature 1..17: note = Oligonucleotide
  source 1..17: mol_type = other DNA
ctgccccaaggcttagc

SEQ ID NO: 10787 - DNA, 17 bp, synthetic construct
  misc_feature 1..17: note = Oligonucleotide
  source 1..17: mol_type = other DNA
cccctgccccaaggctt

SEQ ID NO: 10788 - DNA, 17 bp, synthetic construct
  misc_feature 1..17: note = Oligonucleotide
  source 1..17: mol_type = other DNA
ctgcccctgccccaagg

SEQ ID NO: 10789 - DNA, 17 bp, synthetic construct
  misc_feature 1..17: note = Oligonucleotide
  source 1..17: mol_type = other DNA
gccctgcccctgcccca

SEQ ID NO: 10790 - DNA, 17 bp, synthetic construct
  misc_feature 1..17: note = Oligonucleotide
  source 1..17: mol_type = other DNA
ctggccctgcccctgcc

SEQ ID NO: 10791 - DNA, 17 bp, synthetic construct
  misc_feature 1..17: note = Oligonucleotide
  source 1..17: mol_type = other DNA
accctggccctgcccct

SEQ ID NO: 10792 - DNA, 17 bp, synthetic construct
  misc_feature 1..17: note = Oligonucleotide
  source 1..17: mol_type = other DNA
cctaccctggccctgcc

SEQ ID NO: 10793 - DNA, 17 bp, synthetic construct
  misc_feature 1..17: note = Oligonucleotide
  source 1..17: mol_type = other DNA
acacctaccctggccct

SEQ ID NO: 10794 - DNA, 17 bp, synthetic construct
  misc_feature 1..17: note = Oligonucleotide
  source 1..17: mol_type = other DNA
tggacacctaccctggc

SEQ ID NO: 10795 - DNA, 17 bp, synthetic construct
  misc_feature 1..17: note = Oligonucleotide
  source 1..17: mol_type = other DNA
ggatggacacctaccct

SEQ ID NO: 10796 - DNA, 17 bp, synthetic construct
  misc_feature 1..17: note = Oligonucleotide
  source 1..17: mol_type = other DNA
acaggatggacacctac

SEQ ID NO: 10797 - DNA, 17 bp, synthetic construct
  misc_feature 1..17: note = Oligonucleotide
  source 1..17: mol_type = other DNA
atcacaggatggacacc

SEQ ID NO: 10798 - DNA, 17 bp, synthetic construct
  misc_feature 1..17: note = Oligonucleotide
  source 1..17: mol_type = other DNA
tgtatcacaggatggac

SEQ ID NO: 10799 - DNA, 17 bp, synthetic construct
  misc_feature 1..17: note = Oligonucleotide
  source 1..17: mol_type = other DNA
acctgtatcacaggatg

SEQ ID NO: 10800 - DNA, 17 bp, synthetic construct
  misc_feature 1..17: note = Oligonucleotide
  source 1..17: mol_type = other DNA
gggacctgtatcacagg

SEQ ID NO: 10801 - DNA, 17 bp, synthetic construct
  misc_feature 1..17: note = Oligonucleotide
  source 1..17: mol_type = other DNA
ctggggacctgtatcac

SEQ ID NO: 10802 - DNA, 17 bp, synthetic construct
  misc_feature 1..17: note = Oligonucleotide
  source 1..17: mol_type = other DNA
ggcctggggacctgtat

SEQ ID NO: 10803 - DNA, 17 bp, synthetic construct
  misc_feature 1..17: note = Oligonucleotide
  source 1..17: mol_type = other DNA
cctggcctggggacctg

SEQ ID NO: 10804 - DNA, 17 bp, synthetic construct
  misc_feature 1..17: note = Oligonucleotide
  source 1..17: mol_type = other DNA
ggccctggcctggggac

SEQ ID NO: 10805 - DNA, 17 bp, synthetic construct
  misc_feature 1..17: note = Oligonucleotide
  source 1..17: mol_type = other DNA
agtggccctggcctggg

SEQ ID NO: 10806 - DNA, 17 bp, synthetic construct
  misc_feature 1..17: note = Oligonucleotide
  source 1..17: mol_type = other DNA
caaagtggccctggcct

SEQ ID NO: 10807 - DNA, 17 bp, synthetic construct
  misc_feature 1..17: note = Oligonucleotide
  source 1..17: mol_type = other DNA
caacaaagtggccctgg

SEQ ID NO: 10808 - DNA, 17 bp, synthetic construct
  misc_feature 1..17: note = Oligonucleotide
  source 1..17: mol_type = other DNA
ccccaacaaagtggccc

SEQ ID NO: 10809 - DNA, 17 bp, synthetic construct
  misc_feature 1..17: note = Oligonucleotide
  source 1..17: mol_type = other DNA
cagccccaacaaagtgg

SEQ ID NO: 10810 - DNA, 17 bp, synthetic construct
  misc_feature 1..17: note = Oligonucleotide
  source 1..17: mol_type = other DNA
caccagccccaacaaag

SEQ ID NO: 10811 - DNA, 17 bp, synthetic construct
  misc_feature 1..17: note = Oligonucleotide
  source 1..17: mol_type = other DNA
acccaccagccccaaca

SEQ ID NO: 10812 - DNA, 17 bp, synthetic construct
  misc_feature 1..17: note = Oligonucleotide
  source 1..17: mol_type = other DNA
tccacccaccagcccca

SEQ ID NO: 10813 - DNA, 17 bp, synthetic construct
  misc_feature 1..17: note = Oligonucleotide
  source 1..17: mol_type = other DNA
gcctccacccaccagcc

SEQ ID NO: 10814 - DNA, 17 bp, synthetic construct
  misc_feature 1..17: note = Oligonucleotide
  source 1..17: mol_type = other DNA
ctggcctccacccacca

SEQ ID NO: 10815 - DNA, 17 bp, synthetic construct
  misc_feature 1..17: note = Oligonucleotide
  source 1..17: mol_type = other DNA
cacctggcctccaccca

SEQ ID NO: 10816 - DNA, 17 bp, synthetic construct
  misc_feature 1..17: note = Oligonucleotide
  source 1..17: mol_type = other DNA
atgcacctggcctccac

SEQ ID NO: 10817 - DNA, 17 bp, synthetic construct
  misc_feature 1..17: note = Oligonucleotide
  source 1..17: mol_type = other DNA
aatatgcacctggcctc

SEQ ID NO: 10818 - DNA, 17 bp, synthetic construct
  misc_feature 1..17: note = Oligonucleotide
  source 1..17: mol_type = other DNA
aggaatatgcacctggc

SEQ ID NO: 10819 - DNA, 17 bp, synthetic construct
  misc_feature 1..17: note = Oligonucleotide
  source 1..17: mol_type = other DNA
accaggaatatgcacct

SEQ ID NO: 10820 - DNA, 17 bp, synthetic construct
  misc_feature 1..17: note = Oligonucleotide
  source 1..17: mol_type = other DNA
aggaccaggaatatgca

SEQ ID NO: 10821 - DNA, 17 bp, synthetic construct
  misc_feature 1..17: note = Oligonucleotide
  source 1..17: mol_type = other DNA
ggcaggaccaggaatat

SEQ ID NO: 10822 - DNA, 17 bp, synthetic construct
  misc_feature 1..17: note = Oligonucleotide
  source 1..17: mol_type = other DNA
aggggcaggaccaggaa

SEQ ID NO: 10823 - DNA, 17 bp, synthetic construct
  misc_feature 1..17: note = Oligonucleotide
  source 1..17: mol_type = other DNA
gagaggggcaggaccag

SEQ ID NO: 10824 - DNA, 17 bp, synthetic construct
  misc_feature 1..17: note = Oligonucleotide
  source 1..17: mol_type = other DNA
ccagagaggggcaggac

SEQ ID NO: 10825 - DNA, 17 bp, synthetic construct
  misc_feature 1..17: note = Oligonucleotide
  source 1..17: mol_type = other DNA
cacccagagaggggcag

SEQ ID NO: 10826 - DNA, 17 bp, synthetic construct
  misc_feature 1..17: note = Oligonucleotide
  source 1..17: mol_type = other DNA
ggacacccagagagggg

SEQ ID NO: 10827 - DNA, 17 bp, synthetic construct
  misc_feature 1..17: note = Oligonucleotide
  source 1..17: mol_type = other DNA
tgtggacacccagagag

SEQ ID NO: 10828 - DNA, 17 bp, synthetic construct
  misc_feature 1..17: note = Oligonucleotide
  source 1..17: mol_type = other DNA
gactgtggacacccaga

SEQ ID NO: 10829 - DNA, 17 bp, synthetic construct
  misc_feature 1..17: note = Oligonucleotide
  source 1..17: mol_type = other DNA
cctgactgtggacaccc

SEQ ID NO: 10830 - DNA, 17 bp, synthetic construct
  misc_feature 1..17: note = Oligonucleotide
  source 1..17: mol_type = other DNA
ggacctgactgtggaca

SEQ ID NO: 10831 - DNA, 17 bp, synthetic construct
  misc_feature 1..17: note = Oligonucleotide
  source 1..17: mol_type = other DNA
gagggacctgactgtgg

SEQ ID NO: 10832 - DNA, 17 bp, synthetic construct
  misc_feature 1..17: note = Oligonucleotide
  source 1..17: mol_type = other DNA
tcagagggacctgactg

SEQ ID NO: 10833 - DNA, 17 bp, synthetic construct
  misc_feature 1..17: note = Oligonucleotide
  source 1..17: mol_type = other DNA
cactcagagggacctga

SEQ ID NO: 10834 - DNA, 17 bp, synthetic construct
  misc_feature 1..17: note = Oligonucleotide
  source 1..17: mol_type = other DNA
aatcactcagagggacc

SEQ ID NO: 10835 - DNA, 17 bp, synthetic construct
  misc_feature 1..17: note = Oligonucleotide
  source 1..17: mol_type = other DNA
gagaatcactcagaggg

SEQ ID NO: 10836 - DNA, 17 bp, synthetic construct
  misc_feature 1..17: note = Oligonucleotide
  source 1..17: mol_type = other DNA
cgagagaatcactcaga

SEQ ID NO: 10837 - DNA, 17 bp, synthetic construct
  misc_feature 1..17: note = Oligonucleotide
  source 1..17: mol_type = other DNA
ctccgagagaatcactc

SEQ ID NO: 10838 - DNA, 17 bp, synthetic construct
  misc_feature 1..17: note = Oligonucleotide
  source 1..17: mol_type = other DNA
agactccgagagaatca

SEQ ID NO: 10839 - DNA, 17 bp, synthetic construct
  misc_feature 1..17: note = Oligonucleotide
  source 1..17: mol_type = other DNA
aggagactccgagagaa

SEQ ID NO: 10840 - DNA, 17 bp, synthetic construct
  misc_feature 1..17: note = Oligonucleotide
  source 1..17: mol_type = other DNA
cagaggagactccgaga

SEQ ID NO: 10841 - DNA, 17 bp, synthetic construct
  misc_feature 1..17: note = Oligonucleotide
  source 1..17: mol_type = other DNA
tgccagaggagactccg

SEQ ID NO: 10842 - DNA, 17 bp, synthetic construct
  misc_feature 1..17: note = Oligonucleotide
  source 1..17: mol_type = other DNA
gcttgccagaggagact

SEQ ID NO: 10843 - DNA, 17 bp, synthetic construct
  misc_feature 1..17: note = Oligonucleotide
  source 1..17: mol_type = other DNA
ggggcttgccagaggag

SEQ ID NO: 10844 - DNA, 17 bp, synthetic construct
  misc_feature 1..17: note = Oligonucleotide
  source 1..17: mol_type = other DNA
ggaggggcttgccagag

SEQ ID NO: 10845 - DNA, 17 bp, synthetic construct
  misc_feature 1..17: note = Oligonucleotide
  source 1..17: mol_type = other DNA
gctggaggggcttgcca

SEQ ID NO: 10846 - DNA, 17 bp, synthetic construct
  misc_feature 1..17: note = Oligonucleotide
  source 1..17: mol_type = other DNA
actgctggaggggcttg

SEQ ID NO: 10847 - DNA, 17 bp, synthetic construct
  misc_feature 1..17: note = Oligonucleotide
  source 1..17: mol_type = other DNA
gtgactgctggaggggc

SEQ ID NO: 10848 - DNA, 17 bp, synthetic construct
  misc_feature 1..17: note = Oligonucleotide
  source 1..17: mol_type = other DNA
gtggtgactgctggagg

SEQ ID NO: 10849 - DNA, 17 bp, synthetic construct
  misc_feature 1..17: note = Oligonucleotide
  source 1..17: mol_type = other DNA
gtggtggtgactgctgg

SEQ ID NO: 10850 - DNA, 17 bp, synthetic construct
  misc_feature 1..17: note = Oligonucleotide
  source 1..17: mol_type = other DNA
caggtggtggtgactgc

SEQ ID NO: 10851 - DNA, 17 bp, synthetic construct
  misc_feature 1..17: note = Oligonucleotide
  source 1..17: mol_type = other DNA
gcccaggtggtggtgac

SEQ ID NO: 10852 - DNA, 17 bp, synthetic construct
  misc_feature 1..17: note = Oligonucleotide
  source 1..17: mol_type = other DNA
ggtgcccaggtggtggt

SEQ ID NO: 10853 - DNA, 17 bp, synthetic construct
  misc_feature 1..17: note = Oligonucleotide
  source 1..17: mol_type = other DNA
gtgggtgcccaggtggt

SEQ ID NO: 10854 - DNA, 17 bp, synthetic construct
  misc_feature 1..17: note = Oligonucleotide
  source 1..17: mol_type = other DNA
ggggtgggtgcccaggt

SEQ ID NO: 10855 - DNA, 17 bp, synthetic construct
  misc_feature 1..17: note = Oligonucleotide
  source 1..17: mol_type = other DNA
ctgggggtgggtgccca

SEQ ID NO: 10856 - DNA, 17 bp, synthetic construct
  misc_feature 1..17: note = Oligonucleotide
  source 1..17: mol_type = other DNA
cccctgggggtgggtgc

SEQ ID NO: 10857 - DNA, 17 bp, synthetic construct
  misc_feature 1..17: note = Oligonucleotide
  source 1..17: mol_type = other DNA
ggtcccctgggggtggg

SEQ ID NO: 10858 - DNA, 17 bp, synthetic construct
  misc_feature 1..17: note = Oligonucleotide
  source 1..17: mol_type = other DNA
gggggtcccctgggggt

SEQ ID NO: 10859 - DNA, 17 bp, synthetic construct
  misc_feature 1..17: note = Oligonucleotide
  source 1..17: mol_type = other DNA
tcggggggtcccctggg

SEQ ID NO: 10860 - DNA, 17 bp, synthetic construct
  misc_feature 1..17: note = Oligonucleotide
  source 1..17: mol_type = other DNA
gggtcggggggtcccct

SEQ ID NO: 10861 - DNA, 17 bp, synthetic construct
  misc_feature 1..17: note = Oligonucleotide
  source 1..17: mol_type = other DNA
gttgggtcggggggtcc

SEQ ID NO: 10862 - DNA, 17 bp, synthetic construct
  misc_feature 1..17: note = Oligonucleotide
  source 1..17: mol_type = other DNA
ggtgttgggtcgggggg

SEQ ID NO: 10863 - DNA, 17 bp, synthetic construct
  misc_feature 1..17: note = Oligonucleotide
  source 1..17: mol_type = other DNA
ggtggtgttgggtcggg

SEQ ID NO: 10864 - DNA, 17 bp, synthetic construct
  misc_feature 1..17: note = Oligonucleotide
  source 1..17: mol_type = other DNA
ccaggtggtgttgggtc

SEQ ID NO: 10865 - DNA, 17 bp, synthetic construct
  misc_feature 1..17: note = Oligonucleotide
  source 1..17: mol_type = other DNA
gtgccaggtggtgttgg

SEQ ID NO: 10866 - DNA, 17 bp, synthetic construct
  misc_feature 1..17: note = Oligonucleotide
  source 1..17: mol_type = other DNA
gaggtgccaggtggtgt

SEQ ID NO: 10867 - DNA, 17 bp, synthetic construct
  misc_feature 1..17: note = Oligonucleotide
  source 1..17: mol_type = other DNA
ggggaggtgccaggtgg

SEQ ID NO: 10868 - DNA, 17 bp, synthetic construct
  misc_feature 1..17: note = Oligonucleotide
  source 1..17: mol_type = other DNA
caaggggaggtgccagg

SEQ ID NO: 10869 - DNA, 17 bp, synthetic construct
  misc_feature 1..17: note = Oligonucleotide
  source 1..17: mol_type = other DNA
tcccaaggggaggtgcc

SEQ ID NO: 10870 - DNA, 17 bp, synthetic construct
  misc_feature 1..17: note = Oligonucleotide
  source 1..17: mol_type = other DNA
gattcccaaggggaggt

SEQ ID NO: 10871 - DNA, 17 bp, synthetic construct
  misc_feature 1..17: note = Oligonucleotide
  source 1..17: mol_type = other DNA
ggggattcccaagggga

SEQ ID NO: 10872 - DNA, 17 bp, synthetic construct
  misc_feature 1..17: note = Oligonucleotide
  source 1..17: mol_type = other DNA
tggggggattcccaagg

SEQ ID NO: 10873 - DNA, 17 bp, synthetic construct
  misc_feature 1..17: note = Oligonucleotide
  source 1..17: mol_type = other DNA
ggttggggggattccca

SEQ ID NO: 10874 - DNA, 17 bp, synthetic construct
  misc_feature 1..17: note = Oligonucleotide
  source 1..17: mol_type = other DNA
caaggttggggggattc

SEQ ID NO: 10875 - DNA, 17 bp, synthetic construct
  misc_feature 1..17: note = Oligonucleotide
  source 1..17: mol_type = other DNA
agccaaggttgggggga

SEQ ID NO: 10876 - DNA, 17 bp, synthetic construct
  misc_feature 1..17: note = Oligonucleotide
  source 1..17: mol_type = other DNA
ggcagccaaggttgggg

SEQ ID NO: 10877 - DNA, 17 bp, synthetic construct
  misc_feature 1..17: note = Oligonucleotide
  source 1..17: mol_type = other DNA
ggaggcagccaaggttg

SEQ ID NO: 10878 - DNA, 17 bp, synthetic construct
  misc_feature 1..17: note = Oligonucleotide
  source 1..17: mol_type = other DNA
tggggaggcagccaagg

SEQ ID NO: 10879 - DNA, 17 bp, synthetic construct
  misc_feature 1..17: note = Oligonucleotide
  source 1..17: mol_type = other DNA
aagtggggaggcagcca

SEQ ID NO: 10880 - DNA, 17 bp, synthetic construct
  misc_feature 1..17: note = Oligonucleotide
  source 1..17: mol_type = other DNA
ccaaagtggggaggcag

SEQ ID NO: 10881 - DNA, 17 bp, synthetic construct
  misc_feature 1..17: note = Oligonucleotide
  source 1..17: mol_type = other DNA
gggccaaagtggggagg

SEQ ID NO: 10882 - DNA, 17 bp, synthetic construct
  misc_feature 1..17: note = Oligonucleotide
  source 1..17: mol_type = other DNA
agtgggccaaagtgggg

SEQ ID NO: 10883 - DNA, 17 bp, synthetic construct
  misc_feature 1..17: note = Oligonucleotide
  source 1..17: mol_type = other DNA
cacagtgggccaaagtg

SEQ ID NO: 10884 - DNA, 17 bp, synthetic construct
  misc_feature 1..17: note = Oligonucleotide
  source 1..17: mol_type = other DNA
ctgcacagtgggccaaa

SEQ ID NO: 10885 - DNA, 17 bp, synthetic construct
  misc_feature 1..17: note = Oligonucleotide
  source 1..17: mol_type = other DNA
cacctgcacagtgggcc

SEQ ID NO: 10886 - DNA, 17 bp, synthetic construct
  misc_feature 1..17: note = Oligonucleotide
  source 1..17: mol_type = other DNA
atccacctgcacagtgg

SEQ ID NO: 10887 - DNA, 17 bp, synthetic construct
  misc_feature 1..17: note = Oligonucleotide
  source 1..17: mol_type = other DNA
tggatccacctgcacag

SEQ ID NO: 10888 - DNA, 17 bp, synthetic construct
  misc_feature 1..17: note = Oligonucleotide
  source 1..17: mol_type = other DNA
ccatggatccacctgca

SEQ ID NO: 10889 - DNA, 17 bp, synthetic construct
  misc_feature 1..17: note = Oligonucleotide
  source 1..17: mol_type = other DNA
cctccatggatccacct

SEQ ID NO: 10890 - DNA, 17 bp, synthetic construct
  misc_feature 1..17: note = Oligonucleotide
  source 1..17: mol_type = other DNA
tggcctccatggatcca

SEQ ID NO: 10891 - DNA, 17 bp, synthetic construct
  misc_feature 1..17: note = Oligonucleotide
  source 1..17: mol_type = other DNA
acctggcctccatggat

SEQ ID NO: 10892 - DNA, 17 bp, synthetic construct
  misc_feature 1..17: note = Oligonucleotide
  source 1..17: mol_type = other DNA
tggacctggcctccatg

SEQ ID NO: 10893 - DNA, 17 bp, synthetic construct
  misc_feature 1..17: note = Oligonucleotide
  source 1..17: mol_type = other DNA
cattggacctggcctcc

SEQ ID NO: 10894 - DNA, 17 bp, synthetic construct
  misc_feature 1..17: note = Oligonucleotide
  source 1..17: mol_type = other DNA
tcccattggacctggcc

SEQ ID NO: 10895 - DNA, 17 bp, synthetic construct
  misc_feature 1..17: note = Oligonucleotide
  source 1..17: mol_type = other DNA
tgctcccattggacctg

SEQ ID NO: 10896 - DNA, 17 bp, synthetic construct
  misc_feature 1..17: note = Oligonucleotide
  source 1..17: mol_type = other DNA
ctttgctcccattggac

SEQ ID NO: 10897 - DNA, 17 bp, synthetic construct
  misc_feature 1..17: note = Oligonucleotide
  source 1..17: mol_type = other DNA
tgtctttgctcccattg

SEQ ID NO: 10898 - DNA, 17 bp, synthetic construct
  misc_feature 1..17: note = Oligonucleotide
  source 1..17: mol_type = other DNA
agctgtctttgctccca

SEQ ID NO: 10899 - DNA, 17 bp, synthetic construct
  misc_feature 1..17: note = Oligonucleotide
  source 1..17: mol_type = other DNA
ataagctgtctttgctc

SEQ ID NO: 10900 - DNA, 17 bp, synthetic construct
  misc_feature 1..17: note = Oligonucleotide
  source 1..17: mol_type = other DNA
agaataagctgtctttg

SEQ ID NO: 10901 - DNA, 17 bp, synthetic construct
  misc_feature 1..17: note = Oligonucleotide
  source 1..17: mol_type = other DNA
accagaataagctgtct

SEQ ID NO: 10902 - DNA, 17 bp, synthetic construct
  misc_feature 1..17: note = Oligonucleotide
  source 1..17: mol_type = other DNA
accaccagaataagctg

SEQ ID NO: 10903 - DNA, 17 bp, synthetic construct
  misc_feature 1..17: note = Oligonucleotide
  source 1..17: mol_type = other DNA
ccaaccaccagaataag

SEQ ID NO: 10904 - DNA, 17 bp, synthetic construct
  misc_feature 1..17: note = Oligonucleotide
  source 1..17: mol_type = other DNA
gcaccaaccaccagaat

SEQ ID NO: 10905 - DNA, 17 bp, synthetic construct
  misc_feature 1..17: note = Oligonucleotide
  source 1..17: mol_type = other DNA
caggcaccaaccaccag

SEQ ID NO: 10906 - DNA, 17 bp, synthetic construct
  misc_feature 1..17: note = Oligonucleotide
  source 1..17: mol_type = other DNA
gcacaggcaccaaccac

SEQ ID NO: 10907 - DNA, 17 bp, synthetic construct
  misc_feature 1..17: note = Oligonucleotide
  source 1..17: mol_type = other DNA
tcagcacaggcaccaac

SEQ ID NO: 10908 - DNA, 17 bp, synthetic construct
  misc_feature 1..17: note = Oligonucleotide
  source 1..17: mol_type = other DNA
gcctcagcacaggcacc

SEQ ID NO: 10909 - DNA, 17 bp, synthetic construct
  misc_feature 1..17: note = Oligonucleotide
  source 1..17: mol_type = other DNA
tgggcctcagcacaggc

SEQ ID NO: 10910 - DNA, 17 bp, synthetic construct
  misc_feature 1..17: note = Oligonucleotide
  source 1..17: mol_type = other DNA
aggtgggcctcagcaca

SEQ ID NO: 10911 - DNA, 17 bp, synthetic construct
  misc_feature 1..17: note = Oligonucleotide
  source 1..17: mol_type = other DNA
ctgaggtgggcctcagc

SEQ ID NO: 10912 - DNA, 17 bp, synthetic construct
  misc_feature 1..17: note = Oligonucleotide
  source 1..17: mol_type = other DNA
cacctgaggtgggcctc

SEQ ID NO: 10913 - DNA, 17 bp, synthetic construct
  misc_feature 1..17: note = Oligonucleotide
  source 1..17: mol_type = other DNA
gaacacctgaggtgggc

SEQ ID NO: 10914 - DNA, 17 bp, synthetic construct
  misc_feature 1..17: note = Oligonucleotide
  source 1..17: mol_type = other DNA
caagaacacctgaggtg

SEQ ID NO: 10915 - DNA, 17 bp, synthetic construct
  misc_feature 1..17: note = Oligonucleotide
  source 1..17: mol_type = other DNA
cttcaagaacacctgag

SEQ ID NO: 10916 - DNA, 17 bp, synthetic construct
  misc_feature 1..17: note = Oligonucleotide
  source 1..17: mol_type = other DNA
gggcttcaagaacacct

SEQ ID NO: 10917 - DNA, 17 bp, synthetic construct
  misc_feature 1..17: note = Oligonucleotide
  source 1..17: mol_type = other DNA
aaggggcttcaagaaca

SEQ ID NO: 10918 - DNA, 17 bp, synthetic construct
  misc_feature 1..17: note = Oligonucleotide
  source 1..17: mol_type = other DNA
agaaaggggcttcaaga

SEQ ID NO: 10919 - DNA, 17 bp, synthetic construct
  misc_feature 1..17: note = Oligonucleotide
  source 1..17: mol_type = other DNA
aacagaaaggggcttca

SEQ ID NO: 10920 - DNA, 17 bp, synthetic construct
  misc_feature 1..17: note = Oligonucleotide
  source 1..17: mol_type = other DNA
ccaaacagaaaggggct

SEQ ID NO: 10921 - DNA, 17 bp, synthetic construct
  misc_feature 1..17: note = Oligonucleotide
  source 1..17: mol_type = other DNA
cccccaaacagaaaggg

SEQ ID NO: 10922 - DNA, 17 bp, synthetic construct
  misc_feature 1..17: note = Oligonucleotide
  source 1..17: mol_type = other DNA
gtgcccccaaacagaaa

SEQ ID NO: 10923 - DNA, 17 bp, synthetic construct
  misc_feature 1..17: note = Oligonucleotide
  source 1..17: mol_type = other DNA
actgtgcccccaaacag

SEQ ID NO: 10924 - DNA, 17 bp, synthetic construct
  misc_feature 1..17: note = Oligonucleotide
  source 1..17: mol_type = other DNA
cacactgtgcccccaaa

SEQ ID NO: 10925 - DNA, 17 bp, synthetic construct
  misc_feature 1..17: note = Oligonucleotide
  source 1..17: mol_type = other DNA
ggccacactgtgccccc

SEQ ID NO: 10926 - DNA, 17 bp, synthetic construct
  misc_feature 1..17: note = Oligonucleotide
  source 1..17: mol_type = other DNA
agaggccacactgtgcc

SEQ ID NO: 10927 - DNA, 17 bp, synthetic construct
  misc_feature 1..17: note = Oligonucleotide
  source 1..17: mol_type = other DNA
tgaagaggccacactgt

SEQ ID NO: 10928 - DNA, 17 bp, synthetic construct
  misc_feature 1..17: note = Oligonucleotide
  source 1..17: mol_type = other DNA
tcctgaagaggccacac

SEQ ID NO: 10929 - DNA, 17 bp, synthetic construct
  misc_feature 1..17: note = Oligonucleotide
  source 1..17: mol_type = other DNA
acttcctgaagaggcca

SEQ ID NO: 10930 - DNA, 17 bp, synthetic construct
  misc_feature 1..17: note = Oligonucleotide
  source 1..17: mol_type = other DNA
agaacttcctgaagagg

SEQ ID NO: 10931 - DNA, 17 bp, synthetic construct
  misc_feature 1..17: note = Oligonucleotide
  source 1..17: mol_type = other DNA
agcagaacttcctgaag

SEQ ID NO: 10932 - DNA, 17 bp, synthetic construct
  misc_feature 1..17: note = Oligonucleotide
  source 1..17: mol_type = other DNA
cagagcagaacttcctg

SEQ ID NO: 10933 - DNA, 17 bp, synthetic construct
  misc_feature 1..17: note = Oligonucleotide
  source 1..17: mol_type = other DNA
atccagagcagaacttc

SEQ ID NO: 10934 - DNA, 17 bp, synthetic construct
  misc_feature 1..17: note = Oligonucleotide
  source 1..17: mol_type = other DNA
cagatccagagcagaac

SEQ ID NO: 10935 - DNA, 17 bp, synthetic construct
  misc_feature 1..17: note = Oligonucleotide
  source 1..17: mol_type = other DNA
gctcagatccagagcag

SEQ ID NO: 10936 - DNA, 17 bp, synthetic construct
  misc_feature 1..17: note = Oligonucleotide
  source 1..17: mol_type = other DNA
gctgctcagatccagag

SEQ ID NO: 10937 - DNA, 17 bp, synthetic construct
  misc_feature 1..17: note = Oligonucleotide
  source 1..17: mol_type = other DNA
ccagctgctcagatcca

SEQ ID NO: 10938 - DNA, 17 bp, synthetic construct
  misc_feature 1..17: note = Oligonucleotide
  source 1..17: mol_type = other DNA
ctcccagctgctcagat

SEQ ID NO: 10939 - DNA, 17 bp, synthetic construct
  misc_feature 1..17: note = Oligonucleotide
  source 1..17: mol_type = other DNA
ctcctcccagctgctca

SEQ ID NO: 10940 - DNA, 17 bp, synthetic construct
  misc_feature 1..17: note = Oligonucleotide
  source 1..17: mol_type = other DNA
tgcctcctcccagctgc

SEQ ID NO: 10941 - DNA, 17 bp, synthetic construct
  misc_feature 1..17: note = Oligonucleotide
  source 1..17: mol_type = other DNA
tactgcctcctcccagc

SEQ ID NO: 10942 - DNA, 17 bp, synthetic construct
  misc_feature 1..17: note = Oligonucleotide
  source 1..17: mol_type = other DNA
ccctactgcctcctccc

SEQ ID NO: 10943 - DNA, 17 bp, synthetic construct
  misc_feature 1..17: note = Oligonucleotide
  source 1..17: mol_type = other DNA
tgtccctactgcctcct

SEQ ID NO: 10944 - DNA, 17 bp, synthetic construct
  misc_feature 1..17: note = Oligonucleotide
  source 1..17: mol_type = other DNA
ctctgtccctactgcct

SEQ ID NO: 10945 - DNA, 17 bp, synthetic construct
  misc_feature 1..17: note = Oligonucleotide
  source 1..17: mol_type = other DNA
agcctctgtccctactg

SEQ ID NO: 10946 - DNA, 17 bp, synthetic construct
  misc_feature 1..17: note = Oligonucleotide
  source 1..17: mol_type = other DNA
ctcagcctctgtcccta

SEQ ID NO: 10947 - DNA, 17 bp, synthetic construct
  misc_feature 1..17: note = Oligonucleotide
  source 1..17: mol_type = other DNA
ctcctcagcctctgtcc

SEQ ID NO: 10948 - DNA, 17 bp, synthetic construct
  misc_feature 1..17: note = Oligonucleotide
  source 1..17: mol_type = other DNA
cctctcctcagcctctg

SEQ ID NO: 10949 - DNA, 17 bp, synthetic construct
  misc_feature 1..17: note = Oligonucleotide
  source 1..17: mol_type = other DNA
tgtcctctcctcagcct

SEQ ID NO: 10950 - DNA, 17 bp, synthetic construct
  misc_feature 1..17: note = Oligonucleotide
  source 1..17: mol_type = other DNA
ttctgtcctctcctcag

SEQ ID NO: 10951 - DNA, 17 bp, synthetic construct
  misc_feature 1..17: note = Oligonucleotide
  source 1..17: mol_type = other DNA
catttctgtcctctcct

SEQ ID NO: 10952 - DNA, 17 bp, synthetic construct
  misc_feature 1..17: note = Oligonucleotide
  source 1..17: mol_type = other DNA
cctcatttctgtcctct

SEQ ID NO: 10953 - DNA, 17 bp, synthetic construct
  misc_feature 1..17: note = Oligonucleotide
  source 1..17: mol_type = other DNA
ggacctcatttctgtcc

SEQ ID NO: 10954 - DNA, 17 bp, synthetic construct
  misc_feature 1..17: note = Oligonucleotide
  source 1..17: mol_type = other DNA
atgggacctcatttctg

SEQ ID NO: 10955 - DNA, 17 bp, synthetic construct
  misc_feature 1..17: note = Oligonucleotide
  source 1..17: mol_type = other DNA
cccatgggacctcattt

SEQ ID NO: 10956 - DNA, 17 bp, synthetic construct
  misc_feature 1..17: note = Oligonucleotide
  source 1..17: mol_type = other DNA
tctcccatgggacctca

SEQ ID NO: 10957 - DNA, 17 bp, synthetic construct
  misc_feature 1..17: note = Oligonucleotide
  source 1..17: mol_type = other DNA
gtctctcccatgggacc

SEQ ID NO: 10958 - DNA, 17 bp, synthetic construct
  misc_feature 1..17: note = Oligonucleotide
  source 1..17: mol_type = other DNA
tctgtctctcccatggg

SEQ ID NO: 10959 - DNA, 17 bp, synthetic construct
  misc_feature 1..17: note = Oligonucleotide
  source 1..17: mol_type = other DNA
agctctgtctctcccat

SEQ ID NO: 10960 - DNA, 17 bp, synthetic construct
  misc_feature 1..17: note = Oligonucleotide
  source 1..17: mol_type = other DNA
ctgagctctgtctctcc

SEQ ID NO: 10961 - DNA, 17 bp, synthetic construct
  misc_feature 1..17: note = Oligonucleotide
  source 1..17: mol_type = other DNA
gatctgagctctgtctc

SEQ ID NO: 10962 - DNA, 17 bp, synthetic construct
  misc_feature 1..17: note = Oligonucleotide
  source 1..17: mol_type = other DNA
ggagatctgagctctgt

SEQ ID NO: 10963 - DNA, 17 bp, synthetic construct
  misc_feature 1..17: note = Oligonucleotide
  source 1..17: mol_type = other DNA
tgtggagatctgagctc

SEQ ID NO: 10964 - DNA, 17 bp, synthetic construct
  misc_feature 1..17: note = Oligonucleotide
  source 1..17: mol_type = other DNA
ctctgtggagatctgag

SEQ ID NO: 10965 - DNA, 17 bp, synthetic construct
  misc_feature 1..17: note = Oligonucleotide
  source 1..17: mol_type = other DNA
gccctctgtggagatct

SEQ ID NO: 10966 - DNA, 17 bp, synthetic construct
  misc_feature 1..17: note = Oligonucleotide
  source 1..17: mol_type = other DNA
tcagccctctgtggaga

SEQ ID NO: 10967 - DNA, 17 bp, synthetic construct
  misc_feature 1..17: note = Oligonucleotide
  source 1..17: mol_type = other DNA
aggtcagccctctgtgg

SEQ ID NO: 10968 - DNA, 17 bp, synthetic construct
  misc_feature 1..17: note = Oligonucleotide
  source 1..17: mol_type = other DNA
gagaggtcagccctctg

SEQ ID NO: 10969 - DNA, 17 bp, synthetic construct
  misc_feature 1..17: note = Oligonucleotide
  source 1..17: mol_type = other DNA
tgtgagaggtcagccct

SEQ ID NO: 10970 - DNA, 17 bp, synthetic construct
  misc_feature 1..17: note = Oligonucleotide
  source 1..17: mol_type = other DNA
acctgtgagaggtcagc

SEQ ID NO: 10971 - DNA, 17 bp, synthetic construct
  misc_feature 1..17: note = Oligonucleotide
  source 1..17: mol_type = other DNA
cccacctgtgagaggtc

SEQ ID NO: 10972 - DNA, 17 bp, synthetic construct
  misc_feature 1..17: note = Oligonucleotide
  source 1..17: mol_type = other DNA
tctcccacctgtgagag

SEQ ID NO: 10973 - DNA, 17 bp, synthetic construct
  misc_feature 1..17: note = Oligonucleotide
  source 1..17: mol_type = other DNA
ttgtctcccacctgtga

SEQ ID NO: 10974 - DNA, 17 bp, synthetic construct
  misc_feature 1..17: note = Oligonucleotide
  source 1..17: mol_type = other DNA
cttttgtctcccacctg

SEQ ID NO: 10975 - DNA, 17 bp, synthetic construct
  misc_feature 1..17: note = Oligonucleotide
  source 1..17: mol_type = other DNA
cgtcttttgtctcccac

SEQ ID NO: 10976 - DNA, 17 bp, synthetic construct
  misc_feature 1..17: note = Oligonucleotide
  source 1..17: mol_type = other DNA
tttcgtcttttgtctcc

SEQ ID NO: 10977 - DNA, 17 bp, synthetic construct
  misc_feature 1..17: note = Oligonucleotide
  source 1..17: mol_type = other DNA
aggtttcgtcttttgtc

SEQ ID NO: 10978 - DNA, 17 bp, synthetic construct
  misc_feature 1..17: note = Oligonucleotide
  source 1..17: mol_type = other DNA
agcaggtttcgtctttt

SEQ ID NO: 10979 - DNA, 17 bp, synthetic construct
  misc_feature 1..17: note = Oligonucleotide
  source 1..17: mol_type = other DNA
taaagcaggtttcgtct

SEQ ID NO: 10980 - DNA, 17 bp, synthetic construct
  misc_feature 1..17: note = Oligonucleotide
  source 1..17: mol_type = other DNA
ccttaaagcaggtttcg

SEQ ID NO: 10981 - DNA, 17 bp, synthetic construct
  misc_feature 1..17: note = Oligonucleotide
  source 1..17: mol_type = other DNA
tccccttaaagcaggtt

SEQ ID NO: 10982 - DNA, 17 bp, synthetic construct
  misc_feature 1..17: note = Oligonucleotide
  source 1..17: mol_type = other DNA
ggctccccttaaagcag

SEQ ID NO: 10983 - DNA, 17 bp, synthetic construct
  misc_feature 1..17: note = Oligonucleotide
  source 1..17: mol_type = other DNA
tggggctccccttaaag

SEQ ID NO: 10984 - DNA, 17 bp, synthetic construct
  misc_feature 1..17: note = Oligonucleotide
  source 1..17: mol_type = other DNA
gcatggggctcccctta

SEQ ID NO: 10985 - DNA, 17 bp, synthetic construct
  misc_feature 1..17: note = Oligonucleotide
  source 1..17: mol_type = other DNA
cacgcatggggctcccc

SEQ ID NO: 10986 - DNA, 17 bp, synthetic construct
  misc_feature 1..17: note = Oligonucleotide
  source 1..17: mol_type = other DNA
acacacgcatggggctc

SEQ ID NO: 10987 - DNA, 17 bp, synthetic construct
  misc_feature 1..17: note = Oligonucleotide
  source 1..17: mol_type = other DNA
cccacacacgcatgggg

SEQ ID NO: 10988 - DNA, 17 bp, synthetic construct
  misc_feature 1..17: note = Oligonucleotide
  source 1..17: mol_type = other DNA
tgccccacacacgcatg

SEQ ID NO: 10989 - DNA, 17 bp, synthetic construct
  misc_feature 1..17: note = Oligonucleotide
  source 1..17: mol_type = other DNA
gcctgccccacacacgc

SEQ ID NO: 10990 - DNA, 17 bp, synthetic construct
  misc_feature 1..17: note = Oligonucleotide
  source 1..17: mol_type = other DNA
agtgcctgccccacaca

SEQ ID NO: 10991 - DNA, 17 bp, synthetic construct
  misc_feature 1..17: note = Oligonucleotide
  source 1..17: mol_type = other DNA
accagtgcctgccccac

SEQ ID NO: 10992 - DNA, 17 bp, synthetic construct
  misc_feature 1..17: note = Oligonucleotide
  source 1..17: mol_type = other DNA
atcaccagtgcctgccc

SEQ ID NO: 10993 - DNA, 17 bp, synthetic construct
  misc_feature 1..17: note = Oligonucleotide
  source 1..17: mol_type = other DNA
agcatcaccagtgcctg

SEQ ID NO: 10994 - DNA, 17 bp, synthetic construct
  misc_feature 1..17: note = Oligonucleotide
  source 1..17: mol_type = other DNA
cacagcatcaccagtgc

SEQ ID NO: 10995 - DNA, 17 bp, synthetic construct
  misc_feature 1..17: note = Oligonucleotide
  source 1..17: mol_type = other DNA
ccacacagcatcaccag

SEQ ID NO: 10996 - DNA, 17 bp, synthetic construct
  misc_feature 1..17: note = Oligonucleotide
  source 1..17: mol_type = other DNA
tcaccacacagcatcac

SEQ ID NO: 10997 - DNA, 17 bp, synthetic construct
  misc_feature 1..17: note = Oligonucleotide
  source 1..17: mol_type = other DNA
tcctcaccacacagcat

SEQ ID NO: 10998 - DNA, 17 bp, synthetic construct
  misc_feature 1..17: note = Oligonucleotide
  source 1..17: mol_type = other DNA
ctgtcctcaccacacag

SEQ ID NO: 10999 - DNA, 17 bp, synthetic construct
  misc_feature 1..17: note = Oligonucleotide
  source 1..17: mol_type = other DNA
aggctgtcctcaccaca

SEQ ID NO: 11000 - DNA, 17 bp, synthetic construct
  misc_feature 1..17: note = Oligonucleotide
  source 1..17: mol_type = other DNA
taaaggctgtcctcacc

SEQ ID NO: 11001 - DNA, 17 bp, synthetic construct
  misc_feature 1..17: note = Oligonucleotide
  source 1..17: mol_type = other DNA
ccttaaaggctgtcctc

SEQ ID NO: 11002 - DNA, 17 bp, synthetic construct
  misc_feature 1..17: note = Oligonucleotide
  source 1..17: mol_type = other DNA
tccccttaaaggctgtc

SEQ ID NO: 11003 - DNA, 17 bp, synthetic construct
  misc_feature 1..17: note = Oligonucleotide
  source 1..17: mol_type = other DNA
ggctccccttaaaggct

SEQ ID NO: 11004 - DNA, 17 bp, synthetic construct
  misc_feature 1..17: note = Oligonucleotide
  source 1..17: mol_type = other DNA
tggggctccccttaaag

SEQ ID NO: 11005 - DNA, 17 bp, synthetic construct
  misc_feature 1..17: note = Oligonucleotide
  source 1..17: mol_type = other DNA
gcatggggctcccctta

SEQ ID NO: 11006 - DNA, 17 bp, synthetic construct
  misc_feature 1..17: note = Oligonucleotide
  source 1..17: mol_type = other DNA
caggcatggggctcccc

SEQ ID NO: 11007 - DNA, 17 bp, synthetic construct
  misc_feature 1..17: note = Oligonucleotide
  source 1..17: mol_type = other DNA
atacaggcatggggctc

SEQ ID NO: 11008 - DNA, 17 bp, synthetic construct
  misc_feature 1..17: note = Oligonucleotide
  source 1..17: mol_type = other DNA
cccatacaggcatgggg

SEQ ID NO: 11009 - DNA, 17 bp, synthetic construct
  misc_feature 1..17: note = Oligonucleotide
  source 1..17: mol_type = other DNA
tgccccatacaggcatg

SEQ ID NO: 11010 - DNA, 17 bp, synthetic construct
  misc_feature 1..17: note = Oligonucleotide
  source 1..17: mol_type = other DNA
ccctgccccatacaggc

SEQ ID NO: 11011 - DNA, 17 bp, synthetic construct
  misc_feature 1..17: note = Oligonucleotide
  source 1..17: mol_type = other DNA
agtccctgccccataca

SEQ ID NO: 11012 - DNA, 17 bp, synthetic construct
  misc_feature 1..17: note = Oligonucleotide
  source 1..17: mol_type = other DNA
accagtccctgccccat

SEQ ID NO: 11013 - DNA, 17 bp, synthetic construct
  misc_feature 1..17: note = Oligonucleotide
  source 1..17: mol_type = other DNA
atcaccagtccctgccc

SEQ ID NO: 11014 - DNA, 17 bp, synthetic construct
  misc_feature 1..17: note = Oligonucleotide
  source 1..17: mol_type = other DNA
agcatcaccagtccctg

SEQ ID NO: 11015 - DNA, 17 bp, synthetic construct
  misc_feature 1..17: note = Oligonucleotide
  source 1..17: mol_type = other DNA
cacagcatcaccagtcc

SEQ ID NO: 11016 - DNA, 17 bp, synthetic construct
  misc_feature 1..17: note = Oligonucleotide
  source 1..17: mol_type = other DNA
ccacacagcatcaccag

SEQ ID NO: 11017 - DNA, 17 bp, synthetic construct
  misc_feature 1..17: note = Oligonucleotide
  source 1..17: mol_type = other DNA
tcaccacacagcatcac

SEQ ID NO: 11018 - DNA, 17 bp, synthetic construct
  misc_feature 1..17: note = Oligonucleotide
  source 1..17: mol_type = other DNA
tcctcaccacacagcat

SEQ ID NO: 11019 - DNA, 17 bp, synthetic construct
  misc_feature 1..17: note = Oligonucleotide
  source 1..17: mol_type = other DNA
ctgtcctcaccacacag

SEQ ID NO: 11020 - DNA, 17 bp, synthetic construct
  misc_feature 1..17: note = Oligonucleotide
  source 1..17: mol_type = other DNA
gtgctgtcctcaccaca

SEQ ID NO: 11021 - DNA, 17 bp, synthetic construct
  misc_feature 1..17: note = Oligonucleotide
  source 1..17: mol_type = other DNA
tctgtgctgtcctcacc

SEQ ID NO: 11022 - DNA, 17 bp, synthetic construct
  misc_feature 1..17: note = Oligonucleotide
  source 1..17: mol_type = other DNA
acctctgtgctgtcctc

SEQ ID NO: 11023 - DNA, 17 bp, synthetic construct
  misc_feature 1..17: note = Oligonucleotide
  source 1..17: mol_type = other DNA
ccaacctctgtgctgtc

SEQ ID NO: 11024 - DNA, 17 bp, synthetic construct
  misc_feature 1..17: note = Oligonucleotide
  source 1..17: mol_type = other DNA
accccaacctctgtgct

SEQ ID NO: 11025 - DNA, 17 bp, synthetic construct
  misc_feature 1..17: note = Oligonucleotide
  source 1..17: mol_type = other DNA
cccaccccaacctctgt

SEQ ID NO: 11026 - DNA, 17 bp, synthetic construct
  misc_feature 1..17: note = Oligonucleotide
  source 1..17: mol_type = other DNA
ccccccaccccaacctc

SEQ ID NO: 11027 - DNA, 17 bp, synthetic construct
  misc_feature 1..17: note = Oligonucleotide
  source 1..17: mol_type = other DNA
agtccccccaccccaac

SEQ ID NO: 11028 - DNA, 17 bp, synthetic construct
  misc_feature 1..17: note = Oligonucleotide
  source 1..17: mol_type = other DNA
ctgagtccccccacccc

SEQ ID NO: 11029 - DNA, 17 bp, synthetic construct
  misc_feature 1..17: note = Oligonucleotide
  source 1..17: mol_type = other DNA
aggctgagtccccccac

SEQ ID NO: 11030 - DNA, 17 bp, synthetic construct
  misc_feature 1..17: note = Oligonucleotide
  source 1..17: mol_type = other DNA
cccaggctgagtccccc

SEQ ID NO: 11031 - DNA, 17 bp, synthetic construct
  misc_feature 1..17: note = Oligonucleotide
  source 1..17: mol_type = other DNA
ctgcccaggctgagtcc

SEQ ID NO: 11032 - DNA, 17 bp, synthetic construct
  misc_feature 1..17: note = Oligonucleotide
  source 1..17: mol_type = other DNA
cccctgcccaggctgag

SEQ ID NO: 11033 - DNA, 17 bp, synthetic construct
  misc_feature 1..17: note = Oligonucleotide
  source 1..17: mol_type = other DNA
ctgcccctgcccaggct

SEQ ID NO: 11034 - DNA, 17 bp, synthetic construct
  misc_feature 1..17: note = Oligonucleotide
  source 1..17: mol_type = other DNA
tccctgcccctgcccag

SEQ ID NO: 11035 - DNA, 17 bp, synthetic construct
  misc_feature 1..17: note = Oligonucleotide
  source 1..17: mol_type = other DNA
ctctccctgcccctgcc

SEQ ID NO: 11036 - DNA, 17 bp, synthetic construct
  misc_feature 1..17: note = Oligonucleotide
  source 1..17: mol_type = other DNA
cccctctccctgcccct

SEQ ID NO: 11037 - DNA, 17 bp, synthetic construct
  misc_feature 1..17: note = Oligonucleotide
  source 1..17: mol_type = other DNA
caccccctctccctgcc

SEQ ID NO: 11038 - DNA, 17 bp, synthetic construct
  misc_feature 1..17: note = Oligonucleotide
  source 1..17: mol_type = other DNA
tcccaccccctctccct

SEQ ID NO: 11039 - DNA, 17 bp, synthetic construct
  misc_feature 1..17: note = Oligonucleotide
  source 1..17: mol_type = other DNA
ccctcccaccccctctc

SEQ ID NO: 11040 - DNA, 17 bp, synthetic construct
  misc_feature 1..17: note = Oligonucleotide
  source 1..17: mol_type = other DNA
tggccctcccaccccct

SEQ ID NO: 11041 - DNA, 17 bp, synthetic construct
  misc_feature 1..17: note = Oligonucleotide
  source 1..17: mol_type = other DNA
cagtggccctcccaccc

SEQ ID NO: 11042 - DNA, 17 bp, synthetic construct
  misc_feature 1..17: note = Oligonucleotide
  source 1..17: mol_type = other DNA
ctccagtggccctccca

SEQ ID NO: 11043 - DNA, 17 bp, synthetic construct
  misc_feature 1..17: note = Oligonucleotide
  source 1..17: mol_type = other DNA
cctctccagtggccctc

SEQ ID NO: 11044 - DNA, 17 bp, synthetic construct
  misc_feature 1..17: note = Oligonucleotide
  source 1..17: mol_type = other DNA
gcccctctccagtggcc

SEQ ID NO: 11045 - DNA, 17 bp, synthetic construct
  misc_feature 1..17: note = Oligonucleotide
  source 1..17: mol_type = other DNA
cgggcccctctccagtg

SEQ ID NO: 11046 - DNA, 17 bp, synthetic construct
  misc_feature 1..17: note = Oligonucleotide
  source 1..17: mol_type = other DNA
ggccgggcccctctcca

SEQ ID NO: 11047 - DNA, 17 bp, synthetic construct
  misc_feature 1..17: note = Oligonucleotide
  source 1..17: mol_type = other DNA
tttggccgggcccctct

SEQ ID NO: 11048 - DNA, 17 bp, synthetic construct
  misc_feature 1..17: note = Oligonucleotide
  source 1..17: mol_type = other DNA
ctctttggccgggcccc

SEQ ID NO: 11049 - DNA, 17 bp, synthetic construct
  misc_feature 1..17: note = Oligonucleotide
  source 1..17: mol_type = other DNA
atcctctttggccgggc

SEQ ID NO: 11050 - DNA, 17 bp, synthetic construct
  misc_feature 1..17: note = Oligonucleotide
  source 1..17: mol_type = other DNA
gacatcctctttggccg

SEQ ID NO: 11051 - DNA, 17 bp, synthetic construct
  misc_feature 1..17: note = Oligonucleotide
  source 1..17: mol_type = other DNA
cctgacatcctctttgg

SEQ ID NO: 11052 - DNA, 17 bp, synthetic construct
  misc_feature 1..17: note = Oligonucleotide
  source 1..17: mol_type = other DNA
gcccctgacatcctctt

SEQ ID NO: 11053 - DNA, 17 bp, synthetic construct
  misc_feature 1..17: note = Oligonucleotide
  source 1..17: mol_type = other DNA
tgagcccctgacatcct

SEQ ID NO: 11054 - DNA, 17 bp, synthetic construct
  misc_feature 1..17: note = Oligonucleotide
  source 1..17: mol_type = other DNA
tgctgagcccctgacat

SEQ ID NO: 11055 - DNA, 17 bp, synthetic construct
  misc_feature 1..17: note = Oligonucleotide
  source 1..17: mol_type = other DNA
gggtgctgagcccctga

SEQ ID NO: 11056 - DNA, 17 bp, synthetic construct
  misc_feature 1..17: note = Oligonucleotide
  source 1..17: mol_type = other DNA
tgggggtgctgagcccc

SEQ ID NO: 11057 - DNA, 17 bp, synthetic construct
  misc_feature 1..17: note = Oligonucleotide
  source 1..17: mol_type = other DNA
gcctgggggtgctgagc

SEQ ID NO: 11058 - DNA, 17 bp, synthetic construct
  misc_feature 1..17: note = Oligonucleotide
  source 1..17: mol_type = other DNA
gccgcctgggggtgctg

SEQ ID NO: 11059 - DNA, 17 bp, synthetic construct
  misc_feature 1..17: note = Oligonucleotide
  source 1..17: mol_type = other DNA
ctggccgcctgggggtg

SEQ ID NO: 11060 - DNA, 17 bp, synthetic construct
  misc_feature 1..17: note = Oligonucleotide
  source 1..17: mol_type = other DNA
tgcctggccgcctgggg

SEQ ID NO: 11061 - DNA, 17 bp, synthetic construct
  misc_feature 1..17: note = Oligonucleotide
  source 1..17: mol_type = other DNA
aggtgcctggccgcctg

SEQ ID NO: 11062 - DNA, 17 bp, synthetic construct
  misc_feature 1..17: note = Oligonucleotide
  source 1..17: mol_type = other DNA
ggcaggtgcctggccgc

SEQ ID NO: 11063 - DNA, 17 bp, synthetic construct
  misc_feature 1..17: note = Oligonucleotide
  source 1..17: mol_type = other DNA
ctcggcaggtgcctggc

SEQ ID NO: 11064 - DNA, 17 bp, synthetic construct
  misc_feature 1..17: note = Oligonucleotide
  source 1..17: mol_type = other DNA
gtgctcggcaggtgcct

SEQ ID NO: 11065 - DNA, 17 bp, synthetic construct
  misc_feature 1..17: note = Oligonucleotide
  source 1..17: mol_type = other DNA
gcagtgctcggcaggtg

SEQ ID NO: 11066 - DNA, 17 bp, synthetic construct
  misc_feature 1..17: note = Oligonucleotide
  source 1..17: mol_type = other DNA
gctgcagtgctcggcag

SEQ ID NO: 11067 - DNA, 17 bp, synthetic construct
  misc_feature 1..17: note = Oligonucleotide
  source 1..17: mol_type = other DNA
gtggctgcagtgctcgg

SEQ ID NO: 11068 - DNA, 17 bp, synthetic construct
  misc_feature 1..17: note = Oligonucleotide
  source 1..17: mol_type = other DNA
agcgtggctgcagtgct

SEQ ID NO: 11069 - DNA, 17 bp, synthetic construct
  misc_feature 1..17: note = Oligonucleotide
  source 1..17: mol_type = other DNA
acaagcgtggctgcagt

SEQ ID NO: 11070 - DNA, 17 bp, synthetic construct
  misc_feature 1..17: note = Oligonucleotide
  source 1..17: mol_type = other DNA
accacaagcgtggctgc

SEQ ID NO: 11071 - DNA, 17 bp, synthetic construct
  misc_feature 1..17: note = Oligonucleotide
  source 1..17: mol_type = other DNA
tgaaccacaagcgtggc

SEQ ID NO: 11072 - DNA, 17 bp, synthetic construct
  misc_feature 1..17: note = Oligonucleotide
  source 1..17: mol_type = other DNA
aggtgaaccacaagcgt

SEQ ID NO: 11073 - DNA, 17 bp, synthetic construct
  misc_feature 1..17: note = Oligonucleotide
  source 1..17: mol_type = other DNA
tgcaggtgaaccacaag

SEQ ID NO: 11074 - DNA, 17 bp, synthetic construct
  misc_feature 1..17: note = Oligonucleotide
  source 1..17: mol_type = other DNA
aagtgcaggtgaaccac

SEQ ID NO: 11075 - DNA, 17 bp, synthetic construct
  misc_feature 1..17: note = Oligonucleotide
  source 1..17: mol_type = other DNA
tccaagtgcaggtgaac

SEQ ID NO: 11076 - DNA, 17 bp, synthetic construct
  misc_feature 1..17: note = Oligonucleotide
  source 1..17: mol_type = other DNA
gtctccaagtgcaggtg

SEQ ID NO: 11077 - DNA, 17 bp, synthetic construct
  misc_feature 1..17: note = Oligonucleotide
  source 1..17: mol_type = other DNA
agagtctccaagtgcag

SEQ ID NO: 11078 - DNA, 17 bp, synthetic construct
  misc_feature 1..17: note = Oligonucleotide
  source 1..17: mol_type = other DNA
gcgagagtctccaagtg

SEQ ID NO: 11079 - DNA, 17 bp, synthetic construct
  misc_feature 1..17: note = Oligonucleotide
  source 1..17: mol_type = other DNA
tgtgcgagagtctccaa

SEQ ID NO: 11080 - DNA, 17 bp, synthetic construct
  misc_feature 1..17: note = Oligonucleotide
  source 1..17: mol_type = other DNA
gcctgtgcgagagtctc

SEQ ID NO: 11081 - DNA, 17 bp, synthetic construct
  misc_feature 1..17: note = Oligonucleotide
  source 1..17: mol_type = other DNA
ggcgcctgtgcgagagt

SEQ ID NO: 11082 - DNA, 17 bp, synthetic construct
  misc_feature 1..17: note = Oligonucleotide
  source 1..17: mol_type = other DNA
agaggcgcctgtgcgag

SEQ ID NO: 11083 - DNA, 17 bp, synthetic construct
  misc_feature 1..17: note = Oligonucleotide
  source 1..17: mol_type = other DNA
aggagaggcgcctgtgc

SEQ ID NO: 11084 - DNA, 17 bp, synthetic construct
  misc_feature 1..17: note = Oligonucleotide
  source 1..17: mol_type = other DNA
tggaggagaggcgcctg

SEQ ID NO: 11085 - DNA, 17 bp, synthetic construct
  misc_feature 1..17: note = Oligonucleotide
  source 1..17: mol_type = other DNA
tggtggaggagaggcgc

SEQ ID NO: 11086 - DNA, 17 bp, synthetic construct
  misc_feature 1..17: note = Oligonucleotide
  source 1..17: mol_type = other DNA
tgctggtggaggagagg

SEQ ID NO: 11087 - DNA, 17 bp, synthetic construct
  misc_feature 1..17: note = Oligonucleotide
  source 1..17: mol_type = other DNA
agctgctggtggaggag

SEQ ID NO: 11088 - DNA, 17 bp, synthetic construct
  misc_feature 1..17: note = Oligonucleotide
  source 1..17: mol_type = other DNA
tggagctgctggtggag

SEQ ID NO: 11089 - DNA, 17 bp, synthetic construct
  misc_feature 1..17: note = Oligonucleotide
  source 1..17: mol_type = other DNA
agctggagctgctggtg

SEQ ID NO: 11090 - DNA, 17 bp, synthetic construct
  misc_feature 1..17: note = Oligonucleotide
  source 1..17: mol_type = other DNA
caaagctggagctgctg

SEQ ID NO: 11091 - DNA, 17 bp, synthetic construct
  misc_feature 1..17: note = Oligonucleotide
  source 1..17: mol_type = other DNA
ggacaaagctggagctg

SEQ ID NO: 11092 - DNA, 17 bp, synthetic construct
  misc_feature 1..17: note = Oligonucleotide
  source 1..17: mol_type = other DNA
gagggacaaagctggag

SEQ ID NO: 11093 - DNA, 17 bp, synthetic construct
  misc_feature 1..17: note = Oligonucleotide
  source 1..17: mol_type = other DNA
tgggagggacaaagctg

SEQ ID NO: 11094 - DNA, 17 bp, synthetic construct
  misc_feature 1..17: note = Oligonucleotide
  source 1..17: mol_type = other DNA
ctgtgggagggacaaag

SEQ ID NO: 11095 - DNA, 17 bp, synthetic construct
  misc_feature 1..17: note = Oligonucleotide
  source 1..17: mol_type = other DNA
ctgctgtgggagggaca

SEQ ID NO: 11096 - DNA, 17 bp, synthetic construct
  misc_feature 1..17: note = Oligonucleotide
  source 1..17: mol_type = other DNA
cagctgctgtgggaggg

SEQ ID NO: 11097 - DNA, 17 bp, synthetic construct
  misc_feature 1..17: note = Oligonucleotide
  source 1..17: mol_type = other DNA
gcccagctgctgtggga

SEQ ID NO: 11098 - DNA, 17 bp, synthetic construct
  misc_feature 1..17: note = Oligonucleotide
  source 1..17: mol_type = other DNA
agggcccagctgctgtg

SEQ ID NO: 11099 - DNA, 17 bp, synthetic construct
  misc_feature 1..17: note = Oligonucleotide
  source 1..17: mol_type = other DNA
cagagggcccagctgct

SEQ ID NO: 11100 - DNA, 17 bp, synthetic construct
  misc_feature 1..17: note = Oligonucleotide
  source 1..17: mol_type = other DNA
gtgcagagggcccagct

SEQ ID NO: 11101 - DNA, 17 bp, synthetic construct
  misc_feature 1..17: note = Oligonucleotide
  source 1..17: mol_type = other DNA
caggtgcagagggccca

SEQ ID NO: 11102 - DNA, 17 bp, synthetic construct
  misc_feature 1..17: note = Oligonucleotide
  source 1..17: mol_type = other DNA
actcaggtgcagagggc

SEQ ID NO: 11103 - DNA, 17 bp, synthetic construct
  misc_feature 1..17: note = Oligonucleotide
  source 1..17: mol_type = other DNA
ggaactcaggtgcagag

SEQ ID NO: 11104 - DNA, 17 bp, synthetic construct
  misc_feature 1..17: note = Oligonucleotide
  source 1..17: mol_type = other DNA
ggaggaactcaggtgca

SEQ ID NO: 11105 - DNA, 17 bp, synthetic construct
  misc_feature 1..17: note = Oligonucleotide
  source 1..17: mol_type = other DNA
gagggaggaactcaggt

SEQ ID NO: 11106 - DNA, 17 bp, synthetic construct
  misc_feature 1..17: note = Oligonucleotide
  source 1..17: mol_type = other DNA
gtggagggaggaactca

SEQ ID NO: 11107 - DNA, 17 bp, synthetic construct
  misc_feature 1..17: note = Oligonucleotide
  source 1..17: mol_type = other DNA
ggtgtggagggaggaac

SEQ ID NO: 11108 - DNA, 17 bp, synthetic construct
  misc_feature 1..17: note = Oligonucleotide
  source 1..17: mol_type = other DNA
ccaggtgtggagggagg

SEQ ID NO: 11109 - DNA, 17 bp, synthetic construct
  misc_feature 1..17: note = Oligonucleotide
  source 1..17: mol_type = other DNA
cagccaggtgtggaggg

SEQ ID NO: 11110 - DNA, 17 bp, synthetic construct
  misc_feature 1..17: note = Oligonucleotide
  source 1..17: mol_type = other DNA
gggcagccaggtgtgga

SEQ ID NO: 11111 - DNA, 17 bp, synthetic construct
  misc_feature 1..17: note = Oligonucleotide
  source 1..17: mol_type = other DNA
aatgggcagccaggtgt

SEQ ID NO: 11112 - DNA, 17 bp, synthetic construct
  misc_feature 1..17: note = Oligonucleotide
  source 1..17: mol_type = other DNA
cacaatgggcagccagg

SEQ ID NO: 11113 - DNA, 17 bp, synthetic construct
  misc_feature 1..17: note = Oligonucleotide
  source 1..17: mol_type = other DNA
ccacacaatgggcagcc

SEQ ID NO: 11114 - DNA, 17 bp, synthetic construct
  misc_feature 1..17: note = Oligonucleotide
  source 1..17: mol_type = other DNA
caaccacacaatgggca

SEQ ID NO: 11115 - DNA, 17 bp, synthetic construct
  misc_feature 1..17: note = Oligonucleotide
  source 1..17: mol_type = other DNA
ctgcaaccacacaatgg

SEQ ID NO: 11116 - DNA, 17 bp, synthetic construct
  misc_feature 1..17: note = Oligonucleotide
  source 1..17: mol_type = other DNA
cagctgcaaccacacaa

SEQ ID NO: 11117 - DNA, 17 bp, synthetic construct
  misc_feature 1..17: note = Oligonucleotide
  source 1..17: mol_type = other DNA
ccacagctgcaaccaca

SEQ ID NO: 11118 - DNA, 17 bp, synthetic construct
  misc_feature 1..17: note = Oligonucleotide
  source 1..17: mol_type = other DNA
gacccacagctgcaacc

SEQ ID NO: 11119 - DNA, 17 bp, synthetic construct
  misc_feature 1..17: note = Oligonucleotide
  source 1..17: mol_type = other DNA
cgcgacccacagctgca

SEQ ID NO: 11120 - DNA, 17 bp, synthetic construct
  misc_feature 1..17: note = Oligonucleotide
  source 1..17: mol_type = other DNA
ccacgcgacccacagct

SEQ ID NO: 11121 - DNA, 17 bp, synthetic construct
  misc_feature 1..17: note = Oligonucleotide
  source 1..17: mol_type = other DNA
ggcccacgcgacccaca

SEQ ID NO: 11122 - DNA, 17 bp, synthetic construct
  misc_feature 1..17: note = Oligonucleotide
  source 1..17: mol_type = other DNA
ccaggcccacgcgaccc

SEQ ID NO: 11123 - DNA, 17 bp, synthetic construct
  misc_feature 1..17: note = Oligonucleotide
  source 1..17: mol_type = other DNA
cggccaggcccacgcga

SEQ ID NO: 11124 - DNA, 17 bp, synthetic construct
  misc_feature 1..17: note = Oligonucleotide
  source 1..17: mol_type = other DNA
agccggccaggcccacg

SEQ ID NO: 11125 - DNA, 17 bp, synthetic construct
  misc_feature 1..17: note = Oligonucleotide
  source 1..17: mol_type = other DNA
gttagccggccaggccc

SEQ ID NO: 11126 - DNA, 17 bp, synthetic construct
  misc_feature 1..17: note = Oligonucleotide
  source 1..17: mol_type = other DNA
agagttagccggccagg

SEQ ID NO: 11127 - DNA, 17 bp, synthetic construct
  misc_feature 1..17: note = Oligonucleotide
  source 1..17: mol_type = other DNA
gagagagttagccggcc

SEQ ID NO: 11128 - DNA, 17 bp, synthetic construct
  misc_feature 1..17: note = Oligonucleotide
  source 1..17: mol_type = other DNA
agagagagagttagccg

SEQ ID NO: 11129 - DNA, 17 bp, synthetic construct
  misc_feature 1..17: note = Oligonucleotide
  source 1..17: mol_type = other DNA
atgagagagagagttag

SEQ ID NO: 11130 - DNA, 17 bp, synthetic construct
  misc_feature 1..17: note = Oligonucleotide
  source 1..17: mol_type = other DNA
gcaatgagagagagagt

SEQ ID NO: 11131 - DNA, 17 bp, synthetic construct
  misc_feature 1..17: note = Oligonucleotide
  source 1..17: mol_type = other DNA
agagcaatgagagagag

SEQ ID NO: 11132 - DNA, 17 bp, synthetic construct
  misc_feature 1..17: note = Oligonucleotide
  source 1..17: mol_type = other DNA
gagagagcaatgagaga

SEQ ID NO: 11133 - DNA, 17 bp, synthetic construct
  misc_feature 1..17: note = Oligonucleotide
  source 1..17: mol_type = other DNA
caggagagagcaatgag

SEQ ID NO: 11134 - DNA, 17 bp, synthetic construct
  misc_feature 1..17: note = Oligonucleotide
  source 1..17: mol_type = other DNA
gggcaggagagagcaat

SEQ ID NO: 11135 - DNA, 17 bp, synthetic construct
  misc_feature 1..17: note = Oligonucleotide
  source 1..17: mol_type = other DNA
gatgggcaggagagagc

SEQ ID NO: 11136 - DNA, 17 bp, synthetic construct
  misc_feature 1..17: note = Oligonucleotide
  source 1..17: mol_type = other DNA
gcagatgggcaggagag

SEQ ID NO: 11137 - DNA, 17 bp, synthetic construct
  misc_feature 1..17: note = Oligonucleotide
  source 1..17: mol_type = other DNA
catgcagatgggcagga

SEQ ID NO: 11138 - DNA, 17 bp, synthetic construct
  misc_feature 1..17: note = Oligonucleotide
  source 1..17: mol_type = other DNA
ccacatgcagatgggca

SEQ ID NO: 11139 - DNA, 17 bp, synthetic construct
  misc_feature 1..17: note = Oligonucleotide
  source 1..17: mol_type = other DNA
cagccacatgcagatgg

SEQ ID NO: 11140 - DNA, 17 bp, synthetic construct
  misc_feature 1..17: note = Oligonucleotide
  source 1..17: mol_type = other DNA
gagcagccacatgcaga

SEQ ID NO: 11141 - DNA, 17 bp, synthetic construct
  misc_feature 1..17: note = Oligonucleotide
  source 1..17: mol_type = other DNA
acagagcagccacatgc

SEQ ID NO: 11142 - DNA, 17 bp, synthetic construct
  misc_feature 1..17: note = Oligonucleotide
  source 1..17: mol_type = other DNA
tcgacagagcagccaca

SEQ ID NO: 11143 - DNA, 17 bp, synthetic construct
  misc_feature 1..17: note = Oligonucleotide
  source 1..17: mol_type = other DNA
agctcgacagagcagcc

SEQ ID NO: 11144 - DNA, 17 bp, synthetic construct
  misc_feature 1..17: note = Oligonucleotide
  source 1..17: mol_type = other DNA
cgcagctcgacagagca

SEQ ID NO: 11145 - DNA, 17 bp, synthetic construct
  misc_feature 1..17: note = Oligonucleotide
  source 1..17: mol_type = other DNA
cggcgcagctcgacaga

SEQ ID NO: 11146 - DNA, 17 bp, synthetic construct
  misc_feature 1..17: note = Oligonucleotide
  source 1..17: mol_type = other DNA
ccacggcgcagctcgac

SEQ ID NO: 11147 - DNA, 17 bp, synthetic construct
  misc_feature 1..17: note = Oligonucleotide
  source 1..17: mol_type = other DNA
ggaccacggcgcagctc

SEQ ID NO: 11148 - DNA, 17 bp, synthetic construct
  misc_feature 1..17: note = Oligonucleotide
  source 1..17: mol_type = other DNA
tcgggaccacggcgcag

SEQ ID NO: 11149 - DNA, 17 bp, synthetic construct
  misc_feature 1..17: note = Oligonucleotide
  source 1..17: mol_type = other DNA
cgctcgggaccacggcg

SEQ ID NO: 11150 - DNA, 17 bp, synthetic construct
  misc_feature 1..17: note = Oligonucleotide
  source 1..17: mol_type = other DNA
cggcgctcgggaccacg

SEQ ID NO: 11151 - DNA, 17 bp, synthetic construct
  misc_feature 1..17: note = Oligonucleotide
  source 1..17: mol_type = other DNA
agccggcgctcgggacc

SEQ ID NO: 11152 - DNA, 17 bp, synthetic construct
  misc_feature 1..17: note = Oligonucleotide
  source 1..17: mol_type = other DNA
cacagccggcgctcggg

SEQ ID NO: 11153 - DNA, 17 bp, synthetic construct
  misc_feature 1..17: note = Oligonucleotide
  source 1..17: mol_type = other DNA
ttacacagccggcgctc

SEQ ID NO: 11154 - DNA, 17 bp, synthetic construct
  misc_feature 1..17: note = Oligonucleotide
  source 1..17: mol_type = other DNA
cacttacacagccggcg

SEQ ID NO: 11155 - DNA, 17 bp, synthetic construct
  misc_feature 1..17: note = Oligonucleotide
  source 1..17: mol_type = other DNA
gctcacttacacagccg

SEQ ID NO: 11156 - DNA, 17 bp, synthetic construct
  misc_feature 1..17: note = Oligonucleotide
  source 1..17: mol_type = other DNA
catgctcacttacacag

SEQ ID NO: 11157 - DNA, 17 bp, synthetic construct
  misc_feature 1..17: note = Oligonucleotide
  source 1..17: mol_type = other DNA
gggcatgctcacttaca

SEQ ID NO: 11158 - DNA, 17 bp, synthetic construct
  misc_feature 1..17: note = Oligonucleotide
  source 1..17: mol_type = other DNA
gatgggcatgctcactt

SEQ ID NO: 11159 - DNA, 17 bp, synthetic construct
  misc_feature 1..17: note = Oligonucleotide
  source 1..17: mol_type = other DNA
tgggatgggcatgctca

SEQ ID NO: 11160 - DNA, 17 bp, synthetic construct
  misc_feature 1..17: note = Oligonucleotide
  source 1..17: mol_type = other DNA
gcatgggatgggcatgc

SEQ ID NO: 11161 - DNA, 17 bp, synthetic construct
  misc_feature 1..17: note = Oligonucleotide
  source 1..17: mol_type = other DNA
gaggcatgggatgggca

SEQ ID NO: 11162 - DNA, 17 bp, synthetic construct
  misc_feature 1..17: note = Oligonucleotide
  source 1..17: mol_type = other DNA
caagaggcatgggatgg

SEQ ID NO: 11163 - DNA, 17 bp, synthetic construct
  misc_feature 1..17: note = Oligonucleotide
  source 1..17: mol_type = other DNA
cggcaagaggcatggga

SEQ ID NO: 11164 - DNA, 17 bp, synthetic construct
  misc_feature 1..17: note = Oligonucleotide
  source 1..17: mol_type = other DNA
ggacggcaagaggcatg

SEQ ID NO: 11165 - DNA, 17 bp, synthetic construct
  misc_feature 1..17: note = Oligonucleotide
  source 1..17: mol_type = other DNA
tgtggacggcaagaggc

SEQ ID NO: 11166 - DNA, 17 bp, synthetic construct
  misc_feature 1..17: note = Oligonucleotide
  source 1..17: mol_type = other DNA
gcgtgtggacggcaaga

SEQ ID NO: 11167 - DNA, 17 bp, synthetic construct
  misc_feature 1..17: note = Oligonucleotide
  source 1..17: mol_type = other DNA
acagcgtgtggacggca

SEQ ID NO: 11168 - DNA, 17 bp, synthetic construct
  misc_feature 1..17: note = Oligonucleotide
  source 1..17: mol_type = other DNA
ggcacagcgtgtggacg

SEQ ID NO: 11169 - DNA, 17 bp, synthetic construct
  misc_feature 1..17: note = Oligonucleotide
  source 1..17: mol_type = other DNA
acaggcacagcgtgtgg

SEQ ID NO: 11170 - DNA, 17 bp, synthetic construct
  misc_feature 1..17: note = Oligonucleotide
  source 1..17: mol_type = other DNA
cagacaggcacagcgtg

SEQ ID NO: 11171 - DNA, 17 bp, synthetic construct
  misc_feature 1..17: note = Oligonucleotide
  source 1..17: mol_type = other DNA
aggcagacaggcacagc

SEQ ID NO: 11172 - DNA, 17 bp, synthetic construct
  misc_feature 1..17: note = Oligonucleotide
  source 1..17: mol_type = other DNA
cccaggcagacaggcac

SEQ ID NO: 11173 - DNA, 17 bp, synthetic construct
  misc_feature 1..17: note = Oligonucleotide
  source 1..17: mol_type = other DNA
agacccaggcagacagg

SEQ ID NO: 11174 - DNA, 17 bp, synthetic construct
  misc_feature 1..17: note = Oligonucleotide
  source 1..17: mol_type = other DNA
cagagacccaggcagac

SEQ ID NO: 11175 - DNA, 17 bp, synthetic construct
  misc_feature 1..17: note = Oligonucleotide
  source 1..17: mol_type = other DNA
gagcagagacccaggca

SEQ ID NO: 11176 - DNA, 17 bp, synthetic construct
  misc_feature 1..17: note = Oligonucleotide
  source 1..17: mol_type = other DNA
gcagagcagagacccag

SEQ ID NO: 11177 - DNA, 17 bp, synthetic construct
  misc_feature 1..17: note = Oligonucleotide
  source 1..17: mol_type = other DNA
cacgcagagcagagacc

SEQ ID NO: 11178 - DNA, 17 bp, synthetic construct
  misc_feature 1..17: note = Oligonucleotide
  source 1..17: mol_type = other DNA
agccacgcagagcagag

SEQ ID NO: 11179 - DNA, 17 bp, synthetic construct
  misc_feature 1..17: note = Oligonucleotide
  source 1..17: mol_type = other DNA
cacagccacgcagagca

SEQ ID NO: 11180 - DNA, 17 bp, synthetic construct
  misc_feature 1..17: note = Oligonucleotide
  source 1..17: mol_type = other DNA
tctcacagccacgcaga

SEQ ID NO: 11181 - DNA, 17 bp, synthetic construct
  misc_feature 1..17: note = Oligonucleotide
  source 1..17: mol_type = other DNA
gcctctcacagccacgc

SEQ ID NO: 11182 - DNA, 17 bp, synthetic construct
  misc_feature 1..17: note = Oligonucleotide
  source 1..17: mol_type = other DNA
agagcctctcacagcca

SEQ ID NO: 11183 - DNA, 17 bp, synthetic construct
  misc_feature 1..17: note = Oligonucleotide
  source 1..17: mol_type = other DNA
accagagcctctcacag

SEQ ID NO: 11184 - DNA, 17 bp, synthetic construct
  misc_feature 1..17: note = Oligonucleotide
  source 1..17: mol_type = other DNA
ggcaccagagcctctca

SEQ ID NO: 11185 - DNA, 17 bp, synthetic construct
  misc_feature 1..17: note = Oligonucleotide
  source 1..17: mol_type = other DNA
agtggcaccagagcctc

SEQ ID NO: 11186 - DNA, 17 bp, synthetic construct
  misc_feature 1..17: note = Oligonucleotide
  source 1..17: mol_type = other DNA
gtcagtggcaccagagc

SEQ ID NO: 11187 - DNA, 17 bp, synthetic construct
  misc_feature 1..17: note = Oligonucleotide
  source 1..17: mol_type = other DNA
gctgtcagtggcaccag

SEQ ID NO: 11188 - DNA, 17 bp, synthetic construct
  misc_feature 1..17: note = Oligonucleotide
  source 1..17: mol_type = other DNA
ggggctgtcagtggcac

SEQ ID NO: 11189 - DNA, 17 bp, synthetic construct
  misc_feature 1..17: note = Oligonucleotide
  source 1..17: mol_type = other DNA
caaggggctgtcagtgg

SEQ ID NO: 11190 - DNA, 17 bp, synthetic construct
  misc_feature 1..17: note = Oligonucleotide
  source 1..17: mol_type = other DNA
cctcaaggggctgtcag

SEQ ID NO: 11191 - DNA, 17 bp, synthetic construct
  misc_feature 1..17: note = Oligonucleotide
  source 1..17: mol_type = other DNA
aagcctcaaggggctgt

SEQ ID NO: 11192 - DNA, 17 bp, synthetic construct
  misc_feature 1..17: note = Oligonucleotide
  source 1..17: mol_type = other DNA
gggaagcctcaaggggc

SEQ ID NO: 11193 - DNA, 17 bp, synthetic construct
  misc_feature 1..17: note = Oligonucleotide
  source 1..17: mol_type = other DNA
caggggaagcctcaagg

SEQ ID NO: 11194 - DNA, 17 bp, synthetic construct
  misc_feature 1..17: note = Oligonucleotide
  source 1..17: mol_type = other DNA
tgtcaggggaagcctca

SEQ ID NO: 11195 - DNA, 17 bp, synthetic construct
  misc_feature 1..17: note = Oligonucleotide
  source 1..17: mol_type = other DNA
ctgtgtcaggggaagcc

SEQ ID NO: 11196 - DNA, 17 bp, synthetic construct
  misc_feature 1..17: note = Oligonucleotide
  source 1..17: mol_type = other DNA
ccactgtgtcaggggaa

SEQ ID NO: 11197 - DNA, 17 bp, synthetic construct
  misc_feature 1..17: note = Oligonucleotide
  source 1..17: mol_type = other DNA
tccccactgtgtcaggg

SEQ ID NO: 11198 - DNA, 17 bp, synthetic construct
  misc_feature 1..17: note = Oligonucleotide
  source 1..17: mol_type = other DNA
ctatccccactgtgtca

SEQ ID NO: 11199 - DNA, 17 bp, synthetic construct
  misc_feature 1..17: note = Oligonucleotide
  source 1..17: mol_type = other DNA
tccctatccccactgtg

SEQ ID NO: 11200 - DNA, 17 bp, synthetic construct
  misc_feature 1..17: note = Oligonucleotide
  source 1..17: mol_type = other DNA
ccatccctatccccact

SEQ ID NO: 11201 - DNA, 17 bp, synthetic construct
  misc_feature 1..17: note = Oligonucleotide
  source 1..17: mol_type = other DNA
ttcccatccctatcccc

SEQ ID NO: 11202 - DNA, 17 bp, synthetic construct
  misc_feature 1..17: note = Oligonucleotide
  source 1..17: mol_type = other DNA
ccattcccatccctatc

SEQ ID NO: 11203 - DNA, 17 bp, synthetic construct
  misc_feature 1..17: note = Oligonucleotide
  source 1..17: mol_type = other DNA
ctcccattcccatccct

SEQ ID NO: 11204 - DNA, 17 bp, synthetic construct
  misc_feature 1..17: note = Oligonucleotide
  source 1..17: mol_type = other DNA
gtcctcccattcccatc

SEQ ID NO: 11205 - DNA, 17 bp, synthetic construct
  misc_feature 1..17: note = Oligonucleotide
  source 1..17: mol_type = other DNA
catgtcctcccattccc

SEQ ID NO: 11206 - DNA, 17 bp, synthetic construct
  misc_feature 1..17: note = Oligonucleotide
  source 1..17: mol_type = other DNA
tcccatgtcctcccatt

SEQ ID NO: 11207 - DNA, 17 bp, synthetic construct
  misc_feature 1..17: note = Oligonucleotide
  source 1..17: mol_type = other DNA
cactcccatgtcctccc

SEQ ID NO: 11208 - DNA, 17 bp, synthetic construct
  misc_feature 1..17: note = Oligonucleotide
  source 1..17: mol_type = other DNA
acccactcccatgtcct

SEQ ID NO: 11209 - DNA, 17 bp, synthetic construct
  misc_feature 1..17: note = Oligonucleotide
  source 1..17: mol_type = other DNA
aaaacccactcccatgt

SEQ ID NO: 11210 - DNA, 17 bp, synthetic construct
  misc_feature 1..17: note = Oligonucleotide
  source 1..17: mol_type = other DNA
gagaaaacccactccca

SEQ ID NO: 11211 - DNA, 17 bp, synthetic construct
  misc_feature 1..17: note = Oligonucleotide
  source 1..17: mol_type = other DNA
ccagagaaaacccactc

SEQ ID NO: 11212 - DNA, 17 bp, synthetic construct
  misc_feature 1..17: note = Oligonucleotide
  source 1..17: mol_type = other DNA
gctccagagaaaaccca

SEQ ID NO: 11213 - DNA, 17 bp, synthetic construct
  misc_feature 1..17: note = Oligonucleotide
  source 1..17: mol_type = other DNA
atagctccagagaaaac

SEQ ID NO: 11214 - DNA, 17 bp, synthetic construct
  misc_feature 1..17: note = Oligonucleotide
  source 1..17: mol_type = other DNA
gtgatagctccagagaa

SEQ ID NO: 11215 - DNA, 17 bp, synthetic construct
  misc_feature 1..17: note = Oligonucleotide
  source 1..17: mol_type = other DNA
ggggtgatagctccaga

SEQ ID NO: 11216 - DNA, 17 bp, synthetic construct
  misc_feature 1..17: note = Oligonucleotide
  source 1..17: mol_type = other DNA
cctggggtgatagctcc

SEQ ID NO: 11217 - DNA, 17 bp, synthetic construct
  misc_feature 1..17: note = Oligonucleotide
  source 1..17: mol_type = other DNA
ctacctggggtgatagc

SEQ ID NO: 11218 - DNA, 17 bp, synthetic construct
  misc_feature 1..17: note = Oligonucleotide
  source 1..17: mol_type = other DNA
ggcctacctggggtgat

SEQ ID NO: 11219 - DNA, 17 bp, synthetic construct
  misc_feature 1..17: note = Oligonucleotide
  source 1..17: mol_type = other DNA
ggaggcctacctggggt

SEQ ID NO: 11220 - DNA, 17 bp, synthetic construct
  misc_feature 1..17: note = Oligonucleotide
  source 1..17: mol_type = other DNA
gtgggaggcctacctgg

SEQ ID NO: 11221 - DNA, 17 bp, synthetic construct
  misc_feature 1..17: note = Oligonucleotide
  source 1..17: mol_type = other DNA
gtggtgggaggcctacc

SEQ ID NO: 11222 - DNA, 17 bp, synthetic construct
  misc_feature 1..17: note = Oligonucleotide
  source 1..17: mol_type = other DNA
gccgtggtgggaggcct

SEQ ID NO: 11223 - DNA, 17 bp, synthetic construct
  misc_feature 1..17: note = Oligonucleotide
  source 1..17: mol_type = other DNA
tctgccgtggtgggagg

SEQ ID NO: 11224 - DNA, 17 bp, synthetic construct
  misc_feature 1..17: note = Oligonucleotide
  source 1..17: mol_type = other DNA
ggctctgccgtggtggg

SEQ ID NO: 11225 - DNA, 17 bp, synthetic construct
  misc_feature 1..17: note = Oligonucleotide
  source 1..17: mol_type = other DNA
cttggctctgccgtggt

SEQ ID NO: 11226 - DNA, 17 bp, synthetic construct
  misc_feature 1..17: note = Oligonucleotide
  source 1..17: mol_type = other DNA
ctccttggctctgccgt

SEQ ID NO: 11227 - DNA, 17 bp, synthetic construct
  misc_feature 1..17: note = Oligonucleotide
  source 1..17: mol_type = other DNA
cccctccttggctctgc

SEQ ID NO: 11228 - DNA, 17 bp, synthetic construct
  misc_feature 1..17: note = Oligonucleotide
  source 1..17: mol_type = other DNA
tagcccctccttggctc

SEQ ID NO: 11229 - DNA, 17 bp, synthetic construct
  misc_feature 1..17: note = Oligonucleotide
  source 1..17: mol_type = other DNA
ctctagcccctccttgg

SEQ ID NO: 11230 - DNA, 17 bp, synthetic construct
  misc_feature 1..17: note = Oligonucleotide
  source 1..17: mol_type = other DNA
gagctctagcccctcct

SEQ ID NO: 11231 - DNA, 17 bp, synthetic construct
  misc_feature 1..17: note = Oligonucleotide
  source 1..17: mol_type = other DNA
ctagagctctagcccct

SEQ ID NO: 11232 - DNA, 17 bp, synthetic construct
  misc_feature 1..17: note = Oligonucleotide
  source 1..17: mol_type = other DNA
accctagagctctagcc

SEQ ID NO: 11233 - DNA, 17 bp, synthetic construct
  misc_feature 1..17: note = Oligonucleotide
  source 1..17: mol_type = other DNA
aggaccctagagctcta

SEQ ID NO: 11234 - DNA, 17 bp, synthetic construct
  misc_feature 1..17: note = Oligonucleotide
  source 1..17: mol_type = other DNA
gacaggaccctagagct

SEQ ID NO: 11235 - DNA, 17 bp, synthetic construct
  misc_feature 1..17: note = Oligonucleotide
  source 1..17: mol_type = other DNA
cctgacaggaccctaga

SEQ ID NO: 11236 - DNA, 17 bp, synthetic construct
  misc_feature 1..17: note = Oligonucleotide
  source 1..17: mol_type = other DNA
tcacctgacaggaccct

SEQ ID NO: 11237 - DNA, 17 bp, synthetic construct
  misc_feature 1..17: note = Oligonucleotide
  source 1..17: mol_type = other DNA
gcctcacctgacaggac

SEQ ID NO: 11238 - DNA, 17 bp, synthetic construct
  misc_feature 1..17: note = Oligonucleotide
  source 1..17: mol_type = other DNA
ccagcctcacctgacag

SEQ ID NO: 11239 - DNA, 17 bp, synthetic construct
  misc_feature 1..17: note = Oligonucleotide
  source 1..17: mol_type = other DNA
ttcccagcctcacctga

SEQ ID NO: 11240 - DNA, 17 bp, synthetic construct
  misc_feature 1..17: note = Oligonucleotide
  source 1..17: mol_type = other DNA
cacttcccagcctcacc

SEQ ID NO: 11241 - DNA, 17 bp, synthetic construct
  misc_feature 1..17: note = Oligonucleotide
  source 1..17: mol_type = other DNA
gctcacttcccagcctc

SEQ ID NO: 11242 - DNA, 17 bp, synthetic construct
  misc_feature 1..17: note = Oligonucleotide
  source 1..17: mol_type = other DNA
gcagctcacttcccagc

SEQ ID NO: 11243 - DNA, 17 bp, synthetic construct
  misc_feature 1..17: note = Oligonucleotide
  source 1..17: mol_type = other DNA
atggcagctcacttccc

SEQ ID NO: 11244 - DNA, 17 bp, synthetic construct
  misc_feature 1..17: note = Oligonucleotide
  source 1..17: mol_type = other DNA
ccgatggcagctcactt

SEQ ID NO: 11245 - DNA, 17 bp, synthetic construct
  misc_feature 1..17: note = Oligonucleotide
  source 1..17: mol_type = other DNA
gaaccgatggcagctca

SEQ ID NO: 11246 - DNA, 17 bp, synthetic construct
  misc_feature 1..17: note = Oligonucleotide
  source 1..17: mol_type = other DNA
caagaaccgatggcagc

SEQ ID NO: 11247 - DNA, 17 bp, synthetic construct
  misc_feature 1..17: note = Oligonucleotide
  source 1..17: mol_type = other DNA
acacaagaaccgatggc

SEQ ID NO: 11248 - DNA, 17 bp, synthetic construct
  misc_feature 1..17: note = Oligonucleotide
  source 1..17: mol_type = other DNA
cacacacaagaaccgat

SEQ ID NO: 11249 - DNA, 17 bp, synthetic construct
  misc_feature 1..17: note = Oligonucleotide
  source 1..17: mol_type = other DNA
gcacacacacaagaacc

SEQ ID NO: 11250 - DNA, 17 bp, synthetic construct
  misc_feature 1..17: note = Oligonucleotide
  source 1..17: mol_type = other DNA
cacgcacacacacaaga

SEQ ID NO: 11251 - DNA, 17 bp, synthetic construct
  misc_feature 1..17: note = Oligonucleotide
  source 1..17: mol_type = other DNA
acgcacgcacacacaca

SEQ ID NO: 11252 - DNA, 17 bp, synthetic construct
  misc_feature 1..17: note = Oligonucleotide
  source 1..17: mol_type = other DNA
tgcacgcacgcacacac

SEQ ID NO: 11253 - DNA, 17 bp, synthetic construct
  misc_feature 1..17: note = Oligonucleotide
  source 1..17: mol_type = other DNA
acatgcacgcacgcaca

SEQ ID NO: 11254 - DNA, 17 bp, synthetic construct
  misc_feature 1..17: note = Oligonucleotide
  source 1..17: mol_type = other DNA
cacacatgcacgcacgc

SEQ ID NO: 11255 - DNA, 17 bp, synthetic construct
  misc_feature 1..17: note = Oligonucleotide
  source 1..17: mol_type = other DNA
acgcacacatgcacgca

SEQ ID NO: 11256 - DNA, 17 bp, synthetic construct
  misc_feature 1..17: note = Oligonucleotide
  source 1..17: mol_type = other DNA
aacacgcacacatgcac

SEQ ID NO: 11257 - DNA, 17 bp, synthetic construct
  misc_feature 1..17: note = Oligonucleotide
  source 1..17: mol_type = other DNA
cgcaacacgcacacatg

SEQ ID NO: 11258 - DNA, 17 bp, synthetic construct
  misc_feature 1..17: note = Oligonucleotide
  source 1..17: mol_type = other DNA
acacgcaacacgcacac

SEQ ID NO: 11259 - DNA, 17 bp, synthetic construct
  misc_feature 1..17: note = Oligonucleotide
  source 1..17: mol_type = other DNA
cagacacgcaacacgca

SEQ ID NO: 11260 - DNA, 17 bp, synthetic construct
  misc_feature 1..17: note = Oligonucleotide
  source 1..17: mol_type = other DNA
acgcagacacgcaacac

SEQ ID NO: 11261 - DNA, 17 bp, synthetic construct
  misc_feature 1..17: note = Oligonucleotide
  source 1..17: mol_type = other DNA
cacacgcagacacgcaa

SEQ ID NO: 11262 - DNA, 17 bp, synthetic construct
  misc_feature 1..17: note = Oligonucleotide
  source 1..17: mol_type = other DNA
acacacacgcagacacg

SEQ ID NO: 11263 - DNA, 17 bp, synthetic construct
  misc_feature 1..17: note = Oligonucleotide
  source 1..17: mol_type = other DNA
agcacacacacgcagac

SEQ ID NO: 11264 - DNA, 17 bp, synthetic construct
  misc_feature 1..17: note = Oligonucleotide
  source 1..17: mol_type = other DNA
agcagcacacacacgca

SEQ ID NO: 11265 - DNA, 17 bp, synthetic construct
  misc_feature 1..17: note = Oligonucleotide
  source 1..17: mol_type = other DNA
ggcagcagcacacacac

SEQ ID NO: 11266 - DNA, 17 bp, synthetic construct
  misc_feature 1..17: note = Oligonucleotide
  source 1..17: mol_type = other DNA
ggtggcagcagcacaca

SEQ ID NO: 11267 - DNA, 17 bp, synthetic construct
  misc_feature 1..17: note = Oligonucleotide
  source 1..17: mol_type = other DNA
tgcggtggcagcagcac

SEQ ID NO: 11268 - DNA, 17 bp, synthetic construct
  misc_feature 1..17: note = Oligonucleotide
  source 1..17: mol_type = other DNA
tgctgcggtggcagcag

SEQ ID NO: 11269 - DNA, 17 bp, synthetic construct
  misc_feature 1..17: note = Oligonucleotide
  source 1..17: mol_type = other DNA
acatgctgcggtggcag

SEQ ID NO: 11270 - DNA, 17 bp, synthetic construct
  misc_feature 1..17: note = Oligonucleotide
  source 1..17: mol_type = other DNA
cagacatgctgcggtgg

SEQ ID NO: 11271 - DNA, 17 bp, synthetic construct
  misc_feature 1..17: note = Oligonucleotide
  source 1..17: mol_type = other DNA
ttacagacatgctgcgg

SEQ ID NO: 11272 - DNA, 17 bp, synthetic construct
  misc_feature 1..17: note = Oligonucleotide
  source 1..17: mol_type = other DNA
gcgttacagacatgctg

SEQ ID NO: 11273 - DNA, 17 bp, synthetic construct
  misc_feature 1..17: note = Oligonucleotide
  source 1..17: mol_type = other DNA
cacgcgttacagacatg

SEQ ID NO: 11274 - DNA, 17 bp, synthetic construct
  misc_feature 1..17: note = Oligonucleotide
  source 1..17: mol_type = other DNA
ccacacgcgttacagac

SEQ ID NO: 11275 - DNA, 17 bp, synthetic construct
  misc_feature 1..17: note = Oligonucleotide
  source 1..17: mol_type = other DNA
tgcccacacgcgttaca

SEQ ID NO: 11276 - DNA, 17 bp, synthetic construct
  misc_feature 1..17: note = Oligonucleotide
  source 1..17: mol_type = other DNA
cggtgcccacacgcgtt

SEQ ID NO: 11277 - DNA, 17 bp, synthetic construct
  misc_feature 1..17: note = Oligonucleotide
  source 1..17: mol_type = other DNA
caacggtgcccacacgc

SEQ ID NO: 11278 - DNA, 17 bp, synthetic construct
  misc_feature 1..17: note = Oligonucleotide
  source 1..17: mol_type = other DNA
cagcaacggtgcccaca

SEQ ID NO: 11279 - DNA, 17 bp, synthetic construct
  misc_feature 1..17: note = Oligonucleotide
  source 1..17: mol_type = other DNA
cagcagcaacggtgccc

SEQ ID NO: 11280 - DNA, 17 bp, synthetic construct
  misc_feature 1..17: note = Oligonucleotide
  source 1..17: mol_type = other DNA
caacagcagcaacggtg

SEQ ID NO: 11281 - DNA, 17 bp, synthetic construct
  misc_feature 1..17: note = Oligonucleotide
  source 1..17: mol_type = other DNA
acacaacagcagcaacg

SEQ ID NO: 11282 - DNA, 17 bp, synthetic construct
  misc_feature 1..17: note = Oligonucleotide
  source 1..17: mol_type = other DNA
ggcacacaacagcagca

SEQ ID NO: 11283 - DNA, 17 bp, synthetic construct
  misc_feature 1..17: note = Oligonucleotide
  source 1..17: mol_type = other DNA
gacggcacacaacagca

SEQ ID NO: 11284 - DNA, 17 bp, synthetic construct
  misc_feature 1..17: note = Oligonucleotide
  source 1..17: mol_type = other DNA
acagacggcacacaaca

SEQ ID NO: 11285 - DNA, 17 bp, synthetic construct
  misc_feature 1..17: note = Oligonucleotide
  source 1..17: mol_type = other DNA
tgcacagacggcacaca

SEQ ID NO: 11286 - DNA, 17 bp, synthetic construct
  misc_feature 1..17: note = Oligonucleotide
  source 1..17: mol_type = other DNA
tcctgcacagacggcac

SEQ ID NO: 11287 - DNA, 17 bp, synthetic construct
  misc_feature 1..17: note = Oligonucleotide
  source 1..17: mol_type = other DNA
gcctcctgcacagacgg

SEQ ID NO: 11288 - DNA, 17 bp, synthetic construct
  misc_feature 1..17: note = Oligonucleotide
  source 1..17: mol_type = other DNA
gcagcctcctgcacaga

SEQ ID NO: 11289 - DNA, 17 bp, synthetic construct
  misc_feature 1..17: note = Oligonucleotide
  source 1..17: mol_type = other DNA
aaggcagcctcctgcac

SEQ ID NO: 11290 - DNA, 17 bp, synthetic construct
  misc_feature 1..17: note = Oligonucleotide
  source 1..17: mol_type = other DNA
acaaaggcagcctcctg

SEQ ID NO: 11291 - DNA, 17 bp, synthetic construct
  misc_feature 1..17: note = Oligonucleotide
  source 1..17: mol_type = other DNA
aacacaaaggcagcctc

SEQ ID NO: 11292 - DNA, 17 bp, synthetic construct
  misc_feature 1..17: note = Oligonucleotide
  source 1..17: mol_type = other DNA
ctcaacacaaaggcagc

SEQ ID NO: 11293 - DNA, 17 bp, synthetic construct
  misc_feature 1..17: note = Oligonucleotide
  source 1..17: mol_type = other DNA
accctcaacacaaaggc

SEQ ID NO: 11294 - DNA, 17 bp, synthetic construct
  misc_feature 1..17: note = Oligonucleotide
  source 1..17: mol_type = other DNA
cacaccctcaacacaaa

SEQ ID NO: 11295 - DNA, 17 bp, synthetic construct
  misc_feature 1..17: note = Oligonucleotide
  source 1..17: mol_type = other DNA
gtgcacaccctcaacac

SEQ ID NO: 11296 - DNA, 17 bp, synthetic construct
  misc_feature 1..17: note = Oligonucleotide
  source 1..17: mol_type = other DNA
gccgtgcacaccctcaa

SEQ ID NO: 11297 - DNA, 17 bp, synthetic construct
  misc_feature 1..17: note = Oligonucleotide
  source 1..17: mol_type = other DNA
gaggccgtgcacaccct

SEQ ID NO: 11298 - DNA, 17 bp, synthetic construct
  misc_feature 1..17: note = Oligonucleotide
  source 1..17: mol_type = other DNA
tgtgaggccgtgcacac

SEQ ID NO: 11299 - DNA, 17 bp, synthetic construct
  misc_feature 1..17: note = Oligonucleotide
  source 1..17: mol_type = other DNA
aggtgtgaggccgtgca

SEQ ID NO: 11300 - DNA, 17 bp, synthetic construct
  misc_feature 1..17: note = Oligonucleotide
  source 1..17: mol_type = other DNA
ggcaggtgtgaggccgt

SEQ ID NO: 11301 - DNA, 17 bp, synthetic construct
  misc_feature 1..17: note = Oligonucleotide
  source 1..17: mol_type = other DNA
cagggcaggtgtgaggc

SEQ ID NO: 11302 - DNA, 17 bp, synthetic construct
  misc_feature 1..17: note = Oligonucleotide
  source 1..17: mol_type = other DNA
atgcagggcaggtgtga

SEQ ID NO: 11303 - DNA, 17 bp, synthetic construct
  misc_feature 1..17: note = Oligonucleotide
  source 1..17: mol_type = other DNA
cacatgcagggcaggtg

SEQ ID NO: 11304 - DNA, 17 bp, synthetic construct
  misc_feature 1..17: note = Oligonucleotide
  source 1..17: mol_type = other DNA
cagcacatgcagggcag

SEQ ID NO: 11305 - DNA, 17 bp, synthetic construct
  misc_feature 1..17: note = Oligonucleotide
  source 1..17: mol_type = other DNA
cagcagcacatgcaggg

SEQ ID NO: 11306 - DNA, 17 bp, synthetic construct
  misc_feature 1..17: note = Oligonucleotide
  source 1..17: mol_type = other DNA
gagcagcagcacatgca

SEQ ID NO: 11307 - DNA, 17 bp, synthetic construct
  misc_feature 1..17: note = Oligonucleotide
  source 1..17: mol_type = other DNA
atggagcagcagcacat

SEQ ID NO: 11308 - DNA, 17 bp, synthetic construct
  misc_feature 1..17: note = Oligonucleotide
  source 1..17: mol_type = other DNA
cgtatggagcagcagca

SEQ ID NO: 11309 - DNA, 17 bp, synthetic construct
  misc_feature 1..17: note = Oligonucleotide
  source 1..17: mol_type = other DNA
acccgtatggagcagca

SEQ ID NO: 11310 - DNA, 17 bp, synthetic construct
  misc_feature 1..17: note = Oligonucleotide
  source 1..17: mol_type = other DNA
cgtacccgtatggagca

SEQ ID NO: 11311 - DNA, 17 bp, synthetic construct
  misc_feature 1..17: note = Oligonucleotide
  source 1..17: mol_type = other DNA
gctcgtacccgtatgga

SEQ ID NO: 11312 - DNA, 17 bp, synthetic construct
  misc_feature 1..17: note = Oligonucleotide
  source 1..17: mol_type = other DNA
agggctcgtacccgtat

SEQ ID NO: 11313 - DNA, 17 bp, synthetic construct
  misc_feature 1..17: note = Oligonucleotide
  source 1..17: mol_type = other DNA
ggcagggctcgtacccg

SEQ ID NO: 11314 - DNA, 17 bp, synthetic construct
  misc_feature 1..17: note = Oligonucleotide
  source 1..17: mol_type = other DNA
ctaggcagggctcgtac

SEQ ID NO: 11315 - DNA, 17 bp, synthetic construct
  misc_feature 1..17: note = Oligonucleotide
  source 1..17: mol_type = other DNA
acactaggcagggctcg

SEQ ID NO: 11316 - DNA, 17 bp, synthetic construct
  misc_feature 1..17: note = Oligonucleotide
  source 1..17: mol_type = other DNA
cagacactaggcagggc

SEQ ID NO: 11317 - DNA, 17 bp, synthetic construct
  misc_feature 1..17: note = Oligonucleotide
  source 1..17: mol_type = other DNA
agacagacactaggcag

SEQ ID NO: 11318 - DNA, 17 bp, synthetic construct
  misc_feature 1..17: note = Oligonucleotide
  source 1..17: mol_type = other DNA
aggagacagacactagg

SEQ ID NO: 11319 - DNA, 17 bp, synthetic construct
  misc_feature 1..17: note = Oligonucleotide
  source 1..17: mol_type = other DNA
cacaggagacagacact

SEQ ID NO: 11320 - DNA, 17 bp, synthetic construct
  misc_feature 1..17: note = Oligonucleotide
  source 1..17: mol_type = other DNA
tgacacaggagacagac

SEQ ID NO: 11321 - DNA, 17 bp, synthetic construct
  misc_feature 1..17: note = Oligonucleotide
  source 1..17: mol_type = other DNA
ccgtgacacaggagaca

SEQ ID NO: 11322 - DNA, 17 bp, synthetic construct
  misc_feature 1..17: note = Oligonucleotide
  source 1..17: mol_type = other DNA
ggtccgtgacacaggag

SEQ ID NO: 11323 - DNA, 17 bp, synthetic construct
  misc_feature 1..17: note = Oligonucleotide
  source 1..17: mol_type = other DNA
acaggtccgtgacacag

SEQ ID NO: 11324 - DNA, 17 bp, synthetic construct
  misc_feature 1..17: note = Oligonucleotide
  source 1..17: mol_type = other DNA
tgaacaggtccgtgaca

SEQ ID NO: 11325 - DNA, 17 bp, synthetic construct
  misc_feature 1..17: note = Oligonucleotide
  source 1..17: mol_type = other DNA
ggttgaacaggtccgtg

SEQ ID NO: 11326 - DNA, 17 bp, synthetic construct
  misc_feature 1..17: note = Oligonucleotide
  source 1..17: mol_type = other DNA
cgaggttgaacaggtcc

SEQ ID NO: 11327 - DNA, 17 bp, synthetic construct
  misc_feature 1..17: note = Oligonucleotide
  source 1..17: mol_type = other DNA
gcacgaggttgaacagg

SEQ ID NO: 11328 - DNA, 17 bp, synthetic construct
  misc_feature 1..17: note = Oligonucleotide
  source 1..17: mol_type = other DNA
gcagcacgaggttgaac

SEQ ID NO: 11329 - DNA, 17 bp, synthetic construct
  misc_feature 1..17: note = Oligonucleotide
  source 1..17: mol_type = other DNA
gcagcagcacgaggttg

SEQ ID NO: 11330 - DNA, 17 bp, synthetic construct
  misc_feature 1..17: note = Oligonucleotide
  source 1..17: mol_type = other DNA
ctggcagcagcacgagg

SEQ ID NO: 11331 - DNA, 17 bp, synthetic construct
  misc_feature 1..17: note = Oligonucleotide
  source 1..17: mol_type = other DNA
aggctggcagcagcacg

SEQ ID NO: 11332 - DNA, 17 bp, synthetic construct
  misc_feature 1..17: note = Oligonucleotide
  source 1..17: mol_type = other DNA
taaaggctggcagcagc

SEQ ID NO: 11333 - DNA, 17 bp, synthetic construct
  misc_feature 1..17: note = Oligonucleotide
  source 1..17: mol_type = other DNA
cgataaaggctggcagc

SEQ ID NO: 11334 - DNA, 17 bp, synthetic construct
  misc_feature 1..17: note = Oligonucleotide
  source 1..17: mol_type = other DNA
tcgcgataaaggctggc

SEQ ID NO: 11335 - DNA, 17 bp, synthetic construct
  misc_feature 1..17: note = Oligonucleotide
  source 1..17: mol_type = other DNA
gagtcgcgataaaggct

SEQ ID NO: 11336 - DNA, 17 bp, synthetic construct
  misc_feature 1..17: note = Oligonucleotide
  source 1..17: mol_type = other DNA
gctgagtcgcgataaag

SEQ ID NO: 11337 - DNA, 17 bp, synthetic construct
  misc_feature 1..17: note = Oligonucleotide
  source 1..17: mol_type = other DNA
acagctgagtcgcgata

SEQ ID NO: 11338 - DNA, 17 bp, synthetic construct
  misc_feature 1..17: note = Oligonucleotide
  source 1..17: mol_type = other DNA
gggacagctgagtcgcg

SEQ ID NO: 11339 - DNA, 17 bp, synthetic construct
  misc_feature 1..17: note = Oligonucleotide
  source 1..17: mol_type = other DNA
ccagggacagctgagtc

SEQ ID NO: 11340 - DNA, 17 bp, synthetic construct
  misc_feature 1..17: note = Oligonucleotide
  source 1..17: mol_type = other DNA
gttccagggacagctga

SEQ ID NO: 11341 - DNA, 17 bp, synthetic construct
  misc_feature 1..17: note = Oligonucleotide
  source 1..17: mol_type = other DNA
caggttccagggacagc

SEQ ID NO: 11342 - DNA, 17 bp, synthetic construct
  misc_feature 1..17: note = Oligonucleotide
  source 1..17: mol_type = other DNA
gggcaggttccagggac

SEQ ID NO: 11343 - DNA, 17 bp, synthetic construct
  misc_feature 1..17: note = Oligonucleotide
  source 1..17: mol_type = other DNA
cctgggcaggttccagg

SEQ ID NO: 11344 - DNA, 17 bp, synthetic construct
  misc_feature 1..17: note = Oligonucleotide
  source 1..17: mol_type = other DNA
gatcctgggcaggttcc

SEQ ID NO: 11345 - DNA, 17 bp, synthetic construct
  misc_feature 1..17: note = Oligonucleotide
  source 1..17: mol_type = other DNA
ggggatcctgggcaggt

SEQ ID NO: 11346 - DNA, 17 bp, synthetic construct
  misc_feature 1..17: note = Oligonucleotide
  source 1..17: mol_type = other DNA
ccaggggatcctgggca

SEQ ID NO: 11347 - DNA, 17 bp, synthetic construct
  misc_feature 1..17: note = Oligonucleotide
  source 1..17: mol_type = other DNA
gacccaggggatcctgg

SEQ ID NO: 11348 - DNA, 17 bp, synthetic construct
  misc_feature 1..17: note = Oligonucleotide
  source 1..17: mol_type = other DNA
gaagacccaggggatcc

SEQ ID NO: 11349 - DNA, 17 bp, synthetic construct
  misc_feature 1..17: note = Oligonucleotide
  source 1..17: mol_type = other DNA
tgagaagacccagggga

SEQ ID NO: 11350 - DNA, 17 bp, synthetic construct
  misc_feature 1..17: note = Oligonucleotide
  source 1..17: mol_type = other DNA
tcatgagaagacccagg

SEQ ID NO: 11351 - DNA, 17 bp, synthetic construct
  misc_feature 1..17: note = Oligonucleotide
  source 1..17: mol_type = other DNA
ctctcatgagaagaccc

SEQ ID NO: 11352 - DNA, 17 bp, synthetic construct
  misc_feature 1..17: note = Oligonucleotide
  source 1..17: mol_type = other DNA
ctgctctcatgagaaga

SEQ ID NO: 11353 - DNA, 17 bp, synthetic construct
  misc_feature 1..17: note = Oligonucleotide
  source 1..17: mol_type = other DNA
gctctgctctcatgaga

SEQ ID NO: 11354 - DNA, 17 bp, synthetic construct
  misc_feature 1..17: note = Oligonucleotide
  source 1..17: mol_type = other DNA
acagctctgctctcatg

SEQ ID NO: 11355 - DNA, 17 bp, synthetic construct
  misc_feature 1..17: note = Oligonucleotide
  source 1..17: mol_type = other DNA
cacacagctctgctctc

SEQ ID NO: 11356 - DNA, 17 bp, synthetic construct
  misc_feature 1..17: note = Oligonucleotide
  source 1..17: mol_type = other DNA
ccccacacagctctgct

SEQ ID NO: 11357 - DNA, 17 bp, synthetic construct
  misc_feature 1..17: note = Oligonucleotide
  source 1..17: mol_type = other DNA
accccccacacagctct

SEQ ID NO: 11358 - DNA, 17 bp, synthetic construct
  misc_feature 1..17: note = Oligonucleotide
  source 1..17: mol_type = other DNA
cccaccccccacacagc

SEQ ID NO: 11359 - DNA, 17 bp, synthetic construct
  misc_feature 1..17: note = Oligonucleotide
  source 1..17: mol_type = other DNA
ccgcccaccccccacac

SEQ ID NO: 11360 - DNA, 17 bp, synthetic construct
  misc_feature 1..17: note = Oligonucleotide
  source 1..17: mol_type = other DNA
tcaccgcccacccccca

SEQ ID NO: 11361 - DNA, 17 bp, synthetic construct
  misc_feature 1..17: note = Oligonucleotide
  source 1..17: mol_type = other DNA
ccttcaccgcccacccc

SEQ ID NO: 11362 - DNA, 17 bp, synthetic construct
  misc_feature 1..17: note = Oligonucleotide
  source 1..17: mol_type = other DNA
tacccttcaccgcccac

SEQ ID NO: 11363 - DNA, 17 bp, synthetic construct
  misc_feature 1..17: note = Oligonucleotide
  source 1..17: mol_type = other DNA
cagtacccttcaccgcc

SEQ ID NO: 11364 - DNA, 17 bp, synthetic construct
  misc_feature 1..17: note = Oligonucleotide
  source 1..17: mol_type = other DNA
gggcagtacccttcacc

SEQ ID NO: 11365 - DNA, 17 bp, synthetic construct
  misc_feature 1..17: note = Oligonucleotide
  source 1..17: mol_type = other DNA
cttgggcagtacccttc

SEQ ID NO: 11366 - DNA, 17 bp, synthetic construct
  misc_feature 1..17: note = Oligonucleotide
  source 1..17: mol_type = other DNA
agacttgggcagtaccc

SEQ ID NO: 11367 - DNA, 17 bp, synthetic construct
  misc_feature 1..17: note = Oligonucleotide
  source 1..17: mol_type = other DNA
ctgagacttgggcagta

SEQ ID NO: 11368 - DNA, 17 bp, synthetic construct
  misc_feature 1..17: note = Oligonucleotide
  source 1..17: mol_type = other DNA
acgctgagacttgggca

SEQ ID NO: 11369 - DNA, 17 bp, synthetic construct
  misc_feature 1..17: note = Oligonucleotide
  source 1..17: mol_type = other DNA
gggacgctgagacttgg

SEQ ID NO: 11370 - DNA, 17 bp, synthetic construct
  misc_feature 1..17: note = Oligonucleotide
  source 1..17: mol_type = other DNA
cccgggacgctgagact

SEQ ID NO: 11371 - DNA, 17 bp, synthetic construct
  misc_feature 1..17: note = Oligonucleotide
  source 1..17: mol_type = other DNA
atacccgggacgctgag

SEQ ID NO: 11372 - DNA, 17 bp, synthetic construct
  misc_feature 1..17: note = Oligonucleotide
  source 1..17: mol_type = other DNA
cagatacccgggacgct

SEQ ID NO: 11373 - DNA, 17 bp, synthetic construct
  misc_feature 1..17: note = Oligonucleotide
  source 1..17: mol_type = other DNA
ccacagatacccgggac

SEQ ID NO: 11374 - DNA, 17 bp, synthetic construct
  misc_feature 1..17: note = Oligonucleotide
  source 1..17: mol_type = other DNA
gatccacagatacccgg

SEQ ID NO: 11375 - DNA, 17 bp, synthetic construct
  misc_feature 1..17: note = Oligonucleotide
  source 1..17: mol_type = other DNA
cgggatccacagatacc

SEQ ID NO: 11376 - DNA, 17 bp, synthetic construct
  misc_feature 1..17: note = Oligonucleotide
  source 1..17: mol_type = other DNA
tggcgggatccacagat

SEQ ID NO: 11377 - DNA, 17 bp, synthetic construct
  misc_feature 1..17: note = Oligonucleotide
  source 1..17: mol_type = other DNA
gcatggcgggatccaca

SEQ ID NO: 11378 - DNA, 17 bp, synthetic construct
  misc_feature 1..17: note = Oligonucleotide
  source 1..17: mol_type = other DNA
tgggcatggcgggatcc

SEQ ID NO: 11379 - DNA, 17 bp, synthetic construct
  misc_feature 1..17: note = Oligonucleotide
  source 1..17: mol_type = other DNA
ctctgggcatggcggga

SEQ ID NO: 11380 - DNA, 17 bp, synthetic construct
  misc_feature 1..17: note = Oligonucleotide
  source 1..17: mol_type = other DNA
cggctctgggcatggcg

SEQ ID NO: 11381 - DNA, 17 bp, synthetic construct
  misc_feature 1..17: note = Oligonucleotide
  source 1..17: mol_type = other DNA
caccggctctgggcatg

SEQ ID NO: 11382 - DNA, 17 bp, synthetic construct
  misc_feature 1..17: note = Oligonucleotide
  source 1..17: mol_type = other DNA
cgacaccggctctgggc

SEQ ID NO: 11383 - DNA, 17 bp, synthetic construct
  misc_feature 1..17: note = Oligonucleotide
  source 1..17: mol_type = other DNA
ctccgacaccggctctg

SEQ ID NO: 11384 - DNA, 17 bp, synthetic construct
  misc_feature 1..17: note = Oligonucleotide
  source 1..17: mol_type = other DNA
agcctccgacaccggct

SEQ ID NO: 11385 - DNA, 17 bp, synthetic construct
  misc_feature 1..17: note = Oligonucleotide
  source 1..17: mol_type = other DNA
gccagcctccgacaccg

SEQ ID NO: 11386 - DNA, 17 bp, synthetic construct
  misc_feature 1..17: note = Oligonucleotide
  source 1..17: mol_type = other DNA
cctgccagcctccgaca

SEQ ID NO: 11387 - DNA, 17 bp, synthetic construct
  misc_feature 1..17: note = Oligonucleotide
  source 1..17: mol_type = other DNA
cctcctgccagcctccg

SEQ ID NO: 11388 - DNA, 17 bp, synthetic construct
  misc_feature 1..17: note = Oligonucleotide
  source 1..17: mol_type = other DNA
ctccctcctgccagcct

SEQ ID NO: 11389 - DNA, 17 bp, synthetic construct
  misc_feature 1..17: note = Oligonucleotide
  source 1..17: mol_type = other DNA
cttctccctcctgccag

SEQ ID NO: 11390 - DNA, 17 bp, synthetic construct
  misc_feature 1..17: note = Oligonucleotide
  source 1..17: mol_type = other DNA
gggcttctccctcctgc

SEQ ID NO: 11391 - DNA, 17 bp, synthetic construct
  misc_feature 1..17: note = Oligonucleotide
  source 1..17: mol_type = other DNA
ggcgggcttctccctcc

SEQ ID NO: 11392 - DNA, 17 bp, synthetic construct
  misc_feature 1..17: note = Oligonucleotide
  source 1..17: mol_type = other DNA
aagggcgggcttctccc

SEQ ID NO: 11393 - DNA, 17 bp, synthetic construct
  misc_feature 1..17: note = Oligonucleotide
  source 1..17: mol_type = other DNA
gcaaagggcgggcttct

SEQ ID NO: 11394 - DNA, 17 bp, synthetic construct
  misc_feature 1..17: note = Oligonucleotide
  source 1..17: mol_type = other DNA
atggcaaagggcgggct

SEQ ID NO: 11395 - DNA, 17 bp, synthetic construct
  misc_feature 1..17: note = Oligonucleotide
  source 1..17: mol_type = other DNA
ctcatggcaaagggcgg

SEQ ID NO: 11396 - DNA, 17 bp, synthetic construct
  misc_feature 1..17: note = Oligonucleotide
  source 1..17: mol_type = other DNA
cctctcatggcaaaggg

SEQ ID NO: 11397 - DNA, 17 bp, synthetic construct
  misc_feature 1..17: note = Oligonucleotide
  source 1..17: mol_type = other DNA
cagcctctcatggcaaa

SEQ ID NO: 11398 - DNA, 17 bp, synthetic construct
  misc_feature 1..17: note = Oligonucleotide
  source 1..17: mol_type = other DNA
agacagcctctcatggc

SEQ ID NO: 11399 - DNA, 17 bp, synthetic construct
  misc_feature 1..17: note = Oligonucleotide
  source 1..17: mol_type = other DNA
aaaagacagcctctcat

SEQ ID NO: 11400 - DNA, 17 bp, synthetic construct
  misc_feature 1..17: note = Oligonucleotide
  source 1..17: mol_type = other DNA
aagaaaagacagcctct

SEQ ID NO: 11401 - DNA, 17 bp, synthetic construct
  misc_feature 1..17: note = Oligonucleotide
  source 1..17: mol_type = other DNA
ccaaagaaaagacagcc

SEQ ID NO: 11402 - DNA, 17 bp, synthetic construct
  misc_feature 1..17: note = Oligonucleotide
  source 1..17: mol_type = other DNA
caaccaaagaaaagaca

SEQ ID NO: 11403 - DNA, 17 bp, synthetic construct
  misc_feature 1..17: note = Oligonucleotide
  source 1..17: mol_type = other DNA
gcccaaccaaagaaaag

SEQ ID NO: 11404 - DNA, 17 bp, synthetic construct
  misc_feature 1..17: note = Oligonucleotide
  source 1..17: mol_type = other DNA
gcagcccaaccaaagaa

SEQ ID NO: 11405 - DNA, 17 bp, synthetic construct
  misc_feature 1..17: note = Oligonucleotide
  source 1..17: mol_type = other DNA
agtgcagcccaaccaaa

SEQ ID NO: 11406 - DNA, 17 bp, synthetic construct
  misc_feature 1..17: note = Oligonucleotide
  source 1..17: mol_type = other DNA
ccaagtgcagcccaacc

SEQ ID NO: 11407 - DNA, 17 bp, synthetic construct
  misc_feature 1..17: note = Oligonucleotide
  source 1..17: mol_type = other DNA
gctccaagtgcagccca

SEQ ID NO: 11408 - DNA, 17 bp, synthetic construct
  misc_feature 1..17: note = Oligonucleotide
  source 1..17: mol_type = other DNA
caggctccaagtgcagc

SEQ ID NO: 11409 - DNA, 17 bp, synthetic construct
  misc_feature 1..17: note = Oligonucleotide
  source 1..17: mol_type = other DNA
atccaggctccaagtgc

SEQ ID NO: 11410 - DNA, 17 bp, synthetic construct
  misc_feature 1..17: note = Oligonucleotide
  source 1..17: mol_type = other DNA
tccatccaggctccaag

SEQ ID NO: 11411 - DNA, 17 bp, synthetic construct
  misc_feature 1..17: note = Oligonucleotide
  source 1..17: mol_type = other DNA
cactccatccaggctcc

SEQ ID NO: 11412 - DNA, 17 bp, synthetic construct
  misc_feature 1..17: note = Oligonucleotide
  source 1..17: mol_type = other DNA
ctccactccatccaggc

SEQ ID NO: 11413 - DNA, 17 bp, synthetic construct
  misc_feature 1..17: note = Oligonucleotide
  source 1..17: mol_type = other DNA
cccctccactccatcca

SEQ ID NO: 11414 - DNA, 17 bp, synthetic construct
  misc_feature 1..17: note = Oligonucleotide
  source 1..17: mol_type = other DNA
ggccccctccactccat

SEQ ID NO: 11415 - DNA, 17 bp, synthetic construct
  misc_feature 1..17: note = Oligonucleotide
  source 1..17: mol_type = other DNA
ggtggccccctccactc

SEQ ID NO: 11416 - DNA, 17 bp, synthetic construct
  misc_feature 1..17: note = Oligonucleotide
  source 1..17: mol_type = other DNA
actggtggccccctcca

SEQ ID NO: 11417 - DNA, 17 bp, synthetic construct
  misc_feature 1..17: note = Oligonucleotide
  source 1..17: mol_type = other DNA
atgactggtggccccct

SEQ ID NO: 11418 - DNA, 17 bp, synthetic construct
  misc_feature 1..17: note = Oligonucleotide
  source 1..17: mol_type = other DNA
ggaatgactggtggccc

SEQ ID NO: 11419 - DNA, 17 bp, synthetic construct
  misc_feature 1..17: note = Oligonucleotide
  source 1..17: mol_type = other DNA
tgaggaatgactggtgg

SEQ ID NO: 11420 - DNA, 17 bp, synthetic construct
  misc_feature 1..17: note = Oligonucleotide
  source 1..17: mol_type = other DNA
atatgaggaatgactgg

SEQ ID NO: 11421 - DNA, 17 bp, synthetic construct
  misc_feature 1..17: note = Oligonucleotide
  source 1..17: mol_type = other DNA
ggaatatgaggaatgac

SEQ ID NO: 11422 - DNA, 17 bp, synthetic construct
  misc_feature 1..17: note = Oligonucleotide
  source 1..17: mol_type = other DNA
gctggaatatgaggaat

SEQ ID NO: 11423 - DNA, 17 bp, synthetic construct
  misc_feature 1..17: note = Oligonucleotide
  source 1..17: mol_type = other DNA
ctggctggaatatgagg

SEQ ID NO: 11424 - DNA, 17 bp, synthetic construct
  misc_feature 1..17: note = Oligonucleotide
  source 1..17: mol_type = other DNA
cgactggctggaatatg

SEQ ID NO: 11425 - DNA, 17 bp, synthetic construct
  misc_feature 1..17: note = Oligonucleotide
  source 1..17: mol_type = other DNA
cagcgactggctggaat

SEQ ID NO: 11426 - DNA, 17 bp, synthetic construct
  misc_feature 1..17: note = Oligonucleotide
  source 1..17: mol_type = other DNA
agccagcgactggctgg

SEQ ID NO: 11427 - DNA, 17 bp, synthetic construct
  misc_feature 1..17: note = Oligonucleotide
  source 1..17: mol_type = other DNA
cagagccagcgactggc

SEQ ID NO: 11428 - DNA, 17 bp, synthetic construct
  misc_feature 1..17: note = Oligonucleotide
  source 1..17: mol_type = other DNA
gaccagagccagcgact

SEQ ID NO: 11429 - DNA, 17 bp, synthetic construct
  misc_feature 1..17: note = Oligonucleotide
  source 1..17: mol_type = other DNA
tgggaccagagccagcg

SEQ ID NO: 11430 - DNA, 17 bp, synthetic construct
  misc_feature 1..17: note = Oligonucleotide
  source 1..17: mol_type = other DNA
ccctgggaccagagcca

SEQ ID NO: 11431 - DNA, 17 bp, synthetic construct
  misc_feature 1..17: note = Oligonucleotide
  source 1..17: mol_type = other DNA
ggcccctgggaccagag

SEQ ID NO: 11432 - DNA, 17 bp, synthetic construct
  misc_feature 1..17: note = Oligonucleotide
  source 1..17: mol_type = other DNA
tttggcccctgggacca

SEQ ID NO: 11433 - DNA, 17 bp, synthetic construct
  misc_feature 1..17: note = Oligonucleotide
  source 1..17: mol_type = other DNA
ttctttggcccctggga

SEQ ID NO: 11434 - DNA, 17 bp, synthetic construct
  misc_feature 1..17: note = Oligonucleotide
  source 1..17: mol_type = other DNA
cttttctttggcccctg

SEQ ID NO: 11435 - DNA, 17 bp, synthetic construct
  misc_feature 1..17: note = Oligonucleotide
  source 1..17: mol_type = other DNA
gcccttttctttggccc

SEQ ID NO: 11436 - DNA, 17 bp, synthetic construct
  misc_feature 1..17: note = Oligonucleotide
  source 1..17: mol_type = other DNA
ctggcccttttctttgg

SEQ ID NO: 11437 - DNA, 17 bp, synthetic construct
  misc_feature 1..17: note = Oligonucleotide
  source 1..17: mol_type = other DNA
accctggcccttttctt

SEQ ID NO: 11438 - DNA, 17 bp, synthetic construct
  misc_feature 1..17: note = Oligonucleotide
  source 1..17: mol_type = other DNA
gttaccctggccctttt

SEQ ID NO: 11439 - DNA, 17 bp, synthetic construct
  misc_feature 1..17: note = Oligonucleotide
  source 1..17: mol_type = other DNA
acggttaccctggccct

SEQ ID NO: 11440 - DNA, 17 bp, synthetic construct
  misc_feature 1..17: note = Oligonucleotide
  source 1..17: mol_type = other DNA
cctacggttaccctggc

SEQ ID NO: 11441 - DNA, 17 bp, synthetic construct
  misc_feature 1..17: note = Oligonucleotide
  source 1..17: mol_type = other DNA
gatcctacggttaccct

SEQ ID NO: 11442 - DNA, 17 bp, synthetic construct
  misc_feature 1..17: note = Oligonucleotide
  source 1..17: mol_type = other DNA
tgggatcctacggttac

SEQ ID NO: 11443 - DNA, 17 bp, synthetic construct
  misc_feature 1..17: note = Oligonucleotide
  source 1..17: mol_type = other DNA
gggtgggatcctacggt

SEQ ID NO: 11444 - DNA, 17 bp, synthetic construct
  misc_feature 1..17: note = Oligonucleotide
  source 1..17: mol_type = other DNA
aaagggtgggatcctac

SEQ ID NO: 11445 - DNA, 17 bp, synthetic construct
  misc_feature 1..17: note = Oligonucleotide
  source 1..17: mol_type = other DNA
aataaagggtgggatcc

SEQ ID NO: 11446 - DNA, 17 bp, synthetic construct
  misc_feature 1..17: note = Oligonucleotide
  source 1..17: mol_type = other DNA
agaaataaagggtggga

SEQ ID NO: 11447 - DNA, 17 bp, synthetic construct
  misc_feature 1..17: note = Oligonucleotide
  source 1..17: mol_type = other DNA
ggaagaaataaagggtg

SEQ ID NO: 11448 - DNA, 17 bp, synthetic construct
  misc_feature 1..17: note = Oligonucleotide
  source 1..17: mol_type = other DNA
agaggaagaaataaagg

SEQ ID NO: 11449 - DNA, 17 bp, synthetic construct
  misc_feature 1..17: note = Oligonucleotide
  source 1..17: mol_type = other DNA
gccagaggaagaaataa

SEQ ID NO: 11450 - DNA, 17 bp, synthetic construct
  misc_feature 1..17: note = Oligonucleotide
  source 1..17: mol_type = other DNA
ccggccagaggaagaaa

SEQ ID NO: 11451 - DNA, 17 bp, synthetic construct
  misc_feature 1..17: note = Oligonucleotide
  source 1..17: mol_type = other DNA
agcccggccagaggaag

SEQ ID NO: 11452 - DNA, 17 bp, synthetic construct
  misc_feature 1..17: note = Oligonucleotide
  source 1..17: mol_type = other DNA
agtagcccggccagagg

SEQ ID NO: 11453 - DNA, 17 bp, synthetic construct
  misc_feature 1..17: note = Oligonucleotide
  source 1..17: mol_type = other DNA
gggagtagcccggccag

SEQ ID NO: 11454 - DNA, 17 bp, synthetic construct
  misc_feature 1..17: note = Oligonucleotide
  source 1..17: mol_type = other DNA
ggcgggagtagcccggc

SEQ ID NO: 11455 - DNA, 17 bp, synthetic construct
  misc_feature 1..17: note = Oligonucleotide
  source 1..17: mol_type = other DNA
gctggcgggagtagccc

SEQ ID NO: 11456 - DNA, 17 bp, synthetic construct
  misc_feature 1..17: note = Oligonucleotide
  source 1..17: mol_type = other DNA
gcggctggcgggagtag

SEQ ID NO: 11457 - DNA, 17 bp, synthetic construct
  misc_feature 1..17: note = Oligonucleotide
  source 1..17: mol_type = other DNA
gctgcggctggcgggag

SEQ ID NO: 11458 - DNA, 17 bp, synthetic construct
  misc_feature 1..17: note = Oligonucleotide
  source 1..17: mol_type = other DNA
ggggctgcggctggcgg

SEQ ID NO: 11459 - DNA, 17 bp, synthetic construct
  misc_feature 1..17: note = Oligonucleotide
  source 1..17: mol_type = other DNA
gctggggctgcggctgg

SEQ ID NO: 11460 - DNA, 17 bp, synthetic construct
  misc_feature 1..17: note = Oligonucleotide
  source 1..17: mol_type = other DNA
cgggctggggctgcggc

SEQ ID NO: 11461 - DNA, 17 bp, synthetic construct
  misc_feature 1..17: note = Oligonucleotide
  source 1..17: mol_type = other DNA
aaacgggctggggctgc

SEQ ID NO: 11462 - DNA, 17 bp, synthetic construct
  misc_feature 1..17: note = Oligonucleotide
  source 1..17: mol_type = other DNA
aggaaacgggctggggc

SEQ ID NO: 11463 - DNA, 17 bp, synthetic construct
  misc_feature 1..17: note = Oligonucleotide
  source 1..17: mol_type = other DNA
aggaggaaacgggctgg

SEQ ID NO: 11464 - DNA, 17 bp, synthetic construct
  misc_feature 1..17: note = Oligonucleotide
  source 1..17: mol_type = other DNA
tccaggaggaaacgggc

SEQ ID NO: 11465 - DNA, 17 bp, synthetic construct
  misc_feature 1..17: note = Oligonucleotide
  source 1..17: mol_type = other DNA
gggtccaggaggaaacg

SEQ ID NO: 11466 - DNA, 17 bp, synthetic construct
  misc_feature 1..17: note = Oligonucleotide
  source 1..17: mol_type = other DNA
gcagggtccaggaggaa

SEQ ID NO: 11467 - DNA, 17 bp, synthetic construct
  misc_feature 1..17: note = Oligonucleotide
  source 1..17: mol_type = other DNA
cgggcagggtccaggag

SEQ ID NO: 11468 - DNA, 17 bp, synthetic construct
  misc_feature 1..17: note = Oligonucleotide
  source 1..17: mol_type = other DNA
gagcgggcagggtccag

SEQ ID NO: 11469 - DNA, 17 bp, synthetic construct
  misc_feature 1..17: note = Oligonucleotide
  source 1..17: mol_type = other DNA
ggggagcgggcagggtc

SEQ ID NO: 11470 - DNA, 17 bp, synthetic construct
  misc_feature 1..17: note = Oligonucleotide
  source 1..17: mol_type = other DNA
ggaggggagcgggcagg

SEQ ID NO: 11471 - DNA, 17 bp, synthetic construct
  misc_feature 1..17: note = Oligonucleotide
  source 1..17: mol_type = other DNA
ggcggaggggagcgggc

SEQ ID NO: 11472 - DNA, 17 bp, synthetic construct
  misc_feature 1..17: note = Oligonucleotide
  source 1..17: mol_type = other DNA
acgggcggaggggagcg

SEQ ID NO: 11473 - DNA, 17 bp, synthetic construct
  misc_feature 1..17: note = Oligonucleotide
  source 1..17: mol_type = other DNA
gggacgggcggagggga

SEQ ID NO: 11474 - DNA, 17 bp, synthetic construct
  misc_feature 1..17: note = Oligonucleotide
  source 1..17: mol_type = other DNA
ggggggacgggcggagg

SEQ ID NO: 11475 - DNA, 17 bp, synthetic construct
  misc_feature 1..17: note = Oligonucleotide
  source 1..17: mol_type = other DNA
caaggggggacgggcgg

SEQ ID NO: 11476 - DNA, 17 bp, synthetic construct
  misc_feature 1..17: note = Oligonucleotide
  source 1..17: mol_type = other DNA
agccaaggggggacggg

SEQ ID NO: 11477 - DNA, 17 bp, synthetic construct
  misc_feature 1..17: note = Oligonucleotide
  source 1..17: mol_type = other DNA
cacagccaaggggggac

SEQ ID NO: 11478 - DNA, 17 bp, synthetic construct
  misc_feature 1..17: note = Oligonucleotide
  source 1..17: mol_type = other DNA
gcgcacagccaaggggg

SEQ ID NO: 11479 - DNA, 17 bp, synthetic construct
  misc_feature 1..17: note = Oligonucleotide
  source 1..17: mol_type = other DNA
ggggcgcacagccaagg

SEQ ID NO: 11480 - DNA, 17 bp, synthetic construct
  misc_feature 1..17: note = Oligonucleotide
  source 1..17: mol_type = other DNA
tgaggggcgcacagcca

SEQ ID NO: 11481 - DNA, 17 bp, synthetic construct
  misc_feature 1..17: note = Oligonucleotide
  source 1..17: mol_type = other DNA
aggtgaggggcgcacag

SEQ ID NO: 11482 - DNA, 17 bp, synthetic construct
  misc_feature 1..17: note = Oligonucleotide
  source 1..17: mol_type = other DNA
gccaggtgaggggcgca

SEQ ID NO: 11483 - DNA, 17 bp, synthetic construct
  misc_feature 1..17: note = Oligonucleotide
  source 1..17: mol_type = other DNA
agcgccaggtgaggggc

SEQ ID NO: 11484 - DNA, 17 bp, synthetic construct
  misc_feature 1..17: note = Oligonucleotide
  source 1..17: mol_type = other DNA
gtcagcgccaggtgagg

SEQ ID NO: 11485 - DNA, 17 bp, synthetic construct
  misc_feature 1..17: note = Oligonucleotide
  source 1..17: mol_type = other DNA
ggggtcagcgccaggtg

SEQ ID NO: 11486 - DNA, 17 bp, synthetic construct
  misc_feature 1..17: note = Oligonucleotide
  source 1..17: mol_type = other DNA
agaggggtcagcgccag

SEQ ID NO: 11487 - DNA, 17 bp, synthetic construct
  misc_feature 1..17: note = Oligonucleotide
  source 1..17: mol_type = other DNA
gggagaggggtcagcgc

SEQ ID NO: 11488 - DNA, 17 bp, synthetic construct
  misc_feature 1..17: note = Oligonucleotide
  source 1..17: mol_type = other DNA
ggagggagaggggtcag

SEQ ID NO: 11489 - DNA, 17 bp, synthetic construct
  misc_feature 1..17: note = Oligonucleotide
  source 1..17: mol_type = other DNA
tgcggagggagaggggt

SEQ ID NO: 11490 - DNA, 25 bp, synthetic construct
  misc_feature 1..25: note = Oligonucleotide
  source 1..25: mol_type = other DNA
tccctccccgcaccgccctgctcac

SEQ ID NO: 11491 - DNA, 25 bp, synthetic construct
  misc_feature 1..25: note = Oligonucleotide
  source 1..25: mol_type = other DNA
ggatccctccccgcaccgccctgct

SEQ ID NO: 11492 - DNA, 25 bp, synthetic construct
  misc_feature 1..25: note = Oligonucleotide
  source 1..25: mol_type = other DNA
cacggatccctccccgcaccgccct

SEQ ID NO: 11493 - DNA, 25 bp, synthetic construct
  misc_feature 1..25: note = Oligonucleotide
  source 1..25: mol_type = other DNA
aggcacggatccctccccgcaccgc

SEQ ID NO: 11494 - DNA, 25 bp, synthetic construct
  misc_feature 1..25: note = Oligonucleotide
  source 1..25: mol_type = other DNA
acaaggcacggatccctccccgcac

SEQ ID NO: 11495 - DNA, 25 bp, synthetic construct
  misc_feature 1..25: note = Oligonucleotide
  source 1..25: mol_type = other DNA
cggacaaggcacggatccctccccg

SEQ ID NO: 11496 - DNA, 25 bp, synthetic construct
  misc_feature 1..25: note = Oligonucleotide
  source 1..25: mol_type = other DNA
ccacggacaaggcacggatccctcc

SEQ ID NO: 11497 - DNA, 25 bp, synthetic construct
  misc_feature 1..25: note = Oligonucleotide
  source 1..25: mol_type = other DNA
gggccacggacaaggcacggatccc

SEQ ID NO: 11498 - DNA, 25 bp, synthetic construct
  misc_feature 1..25: note = Oligonucleotide
  source 1..25: mol_type = other DNA
acggggccacggacaaggcacggat

SEQ ID NO: 11499 - DNA, 25 bp, synthetic construct
  misc_feature 1..25: note = Oligonucleotide
  source 1..25: mol_type = other DNA
cagacggggccacggacaaggcacg

SEQ ID NO: 11500 - DNA, 25 bp, synthetic construct
  misc_feature 1..25: note = Oligonucleotide
  source 1..25: mol_type = other DNA
tgacagacggggccacggacaaggc

SEQ ID NO: 11501 - DNA, 25 bp, synthetic construct
  misc_feature 1..25: note = Oligonucleotide
  source 1..25: mol_type = other DNA
gaatgacagacggggccacggacaa

SEQ ID NO: 11502 - DNA, 25 bp, synthetic construct
  misc_feature 1..25: note = Oligonucleotide
  source 1..25: mol_type = other DNA
gaggaatgacagacggggccacgga

SEQ ID NO: 11503 - DNA, 25 bp, synthetic construct
  misc_feature 1..25: note = Oligonucleotide
  source 1..25: mol_type = other DNA
caagaggaatgacagacggggccac

SEQ ID NO: 11504 - DNA, 25 bp, synthetic construct
  misc_feature 1..25: note = Oligonucleotide
  source 1..25: mol_type = other DNA
agacaagaggaatgacagacggggc

SEQ ID NO: 11505 - DNA, 25 bp, synthetic construct
  misc_feature 1..25: note = Oligonucleotide
  source 1..25: mol_type = other DNA
aacagacaagaggaatgacagacgg

SEQ ID NO: 11506 - DNA, 25 bp, synthetic construct
  misc_feature 1..25: note = Oligonucleotide
  source 1..25: mol_type = other DNA
gagaacagacaagaggaatgacaga

SEQ ID NO: 11507 - DNA, 25 bp, synthetic construct
  misc_feature 1..25: note = Oligonucleotide
  source 1..25: mol_type = other DNA
ccagagaacagacaagaggaatgac

SEQ ID NO: 11508 - DNA, 25 bp, synthetic construct
  misc_feature 1..25: note = Oligonucleotide
  source 1..25: mol_type = other DNA
gagccagagaacagacaagaggaat

SEQ ID NO: 11509 - DNA, 25 bp, synthetic construct
  misc_feature 1..25: note = Oligonucleotide
  source 1..25: mol_type = other DNA
ggagagccagagaacagacaagagg

SEQ ID NO: 11510 - DNA, 25 bp, synthetic construct
  misc_feature 1..25: note = Oligonucleotide
  source 1..25: mol_type = other DNA
acaggagagccagagaacagacaag

SEQ ID NO: 11511 - DNA, 25 bp, synthetic construct
  misc_feature 1..25: note = Oligonucleotide
  source 1..25: mol_type = other DNA
ggaacaggagagccagagaacagac

SEQ ID NO: 11512 - DNA, 25 bp, synthetic construct
  misc_feature 1..25: note = Oligonucleotide
  source 1..25: mol_type = other DNA
ggaggaacaggagagccagagaaca

SEQ ID NO: 11513 - DNA, 25 bp, synthetic construct
  misc_feature 1..25: note = Oligonucleotide
  source 1..25: mol_type = other DNA
caaggaggaacaggagagccagaga

SEQ ID NO: 11514 - DNA, 25 bp, synthetic construct
  misc_feature 1..25: note = Oligonucleotide
  source 1..25: mol_type = other DNA
gaacaaggaggaacaggagagccag

SEQ ID NO: 11515 - DNA, 25 bp, synthetic construct
  misc_feature 1..25: note = Oligonucleotide
  source 1..25: mol_type = other DNA
acagaacaaggaggaacaggagagc

SEQ ID NO: 11516 - DNA, 25 bp, synthetic construct
  misc_feature 1..25: note = Oligonucleotide
  source 1..25: mol_type = other DNA
ggaacagaacaaggaggaacaggag

SEQ ID NO: 11517 - DNA, 25 bp, synthetic construct
  misc_feature 1..25: note = Oligonucleotide
  source 1..25: mol_type = other DNA
aatggaacagaacaaggaggaacag

SEQ ID NO: 11518 - DNA, 25 bp, synthetic construct
  misc_feature 1..25: note = Oligonucleotide
  source 1..25: mol_type = other DNA
aggaatggaacagaacaaggaggaa

SEQ ID NO: 11519 - DNA, 25 bp, synthetic construct
  misc_feature 1..25: note = Oligonucleotide
  source 1..25: mol_type = other DNA
agaaggaatggaacagaacaaggag

SEQ ID NO: 11520 - DNA, 25 bp, synthetic construct
  misc_feature 1..25: note = Oligonucleotide
  source 1..25: mol_type = other DNA
cacagaaggaatggaacagaacaag

SEQ ID NO: 11521 - DNA, 25 bp, synthetic construct
  misc_feature 1..25: note = Oligonucleotide
  source 1..25: mol_type = other DNA
tgccacagaaggaatggaacagaac

SEQ ID NO: 11522 - DNA, 25 bp, synthetic construct
  misc_feature 1..25: note = Oligonucleotide
  source 1..25: mol_type = other DNA
ggttgccacagaaggaatggaacag

SEQ ID NO: 11523 - DNA, 25 bp, synthetic construct
  misc_feature 1..25: note = Oligonucleotide
  source 1..25: mol_type = other DNA
gggggttgccacagaaggaatggaa

SEQ ID NO: 11524 - DNA, 25 bp, synthetic construct
  misc_feature 1..25: note = Oligonucleotide
  source 1..25: mol_type = other DNA
gttgggggttgccacagaaggaatg

SEQ ID NO: 11525 - DNA, 25 bp, synthetic construct
  misc_feature 1..25: note = Oligonucleotide
  source 1..25: mol_type = other DNA
cgggttgggggttgccacagaagga

SEQ ID NO: 11526 - DNA, 25 bp, synthetic construct
  misc_feature 1..25: note = Oligonucleotide
  source 1..25: mol_type = other DNA
gggcgggttgggggttgccacagaa

SEQ ID NO: 11527 - DNA, 25 bp, synthetic construct
  misc_feature 1..25: note = Oligonucleotide
  source 1..25: mol_type = other DNA
cgggggcgggttgggggttgccaca

SEQ ID NO: 11528 - DNA, 25 bp, synthetic construct
  misc_feature 1..25: note = Oligonucleotide
  source 1..25: mol_type = other DNA
tggcgggggcgggttgggggttgcc

SEQ ID NO: 11529 - DNA, 25 bp, synthetic construct
  misc_feature 1..25: note = Oligonucleotide
  source 1..25: mol_type = other DNA
ggatggcgggggcgggttgggggtt

SEQ ID NO: 11530 - DNA, 25 bp, synthetic construct
  misc_feature 1..25: note = Oligonucleotide
  source 1..25: mol_type = other DNA
ggtggatggcgggggcgggttgggg

SEQ ID NO: 11531 - DNA, 25 bp, synthetic construct
  misc_feature 1..25: note = Oligonucleotide
  source 1..25: mol_type = other DNA
agaggtggatggcgggggcgggttg

SEQ ID NO: 11532 - DNA, 25 bp, synthetic construct
  misc_feature 1..25: note = Oligonucleotide
  source 1..25: mol_type = other DNA
ttcagaggtggatggcgggggcggg

SEQ ID NO: 11533 - DNA, 25 bp, synthetic construct
  misc_feature 1..25: note = Oligonucleotide
  source 1..25: mol_type = other DNA
ggattcagaggtggatggcgggggc

SEQ ID NO: 11534 - DNA, 25 bp, synthetic construct
  misc_feature 1..25: note = Oligonucleotide
  source 1..25: mol_type = other DNA
accggattcagaggtggatggcggg

SEQ ID NO: 11535 - DNA, 25 bp, synthetic construct
  misc_feature 1..25: note = Oligonucleotide
  source 1..25: mol_type = other DNA
aagaccggattcagaggtggatggc

SEQ ID NO: 11536 - DNA, 25 bp, synthetic construct
  misc_feature 1..25: note = Oligonucleotide
  source 1..25: mol_type = other DNA
agcaagaccggattcagaggtggat

SEQ ID NO: 11537 - DNA, 25 bp, synthetic construct
  misc_feature 1..25: note = Oligonucleotide
  source 1..25: mol_type = other DNA
ccaagcaagaccggattcagaggtg

SEQ ID NO: 11538 - DNA, 25 bp, synthetic construct
  misc_feature 1..25: note = Oligonucleotide
  source 1..25: mol_type = other DNA
aggccaagcaagaccggattcagag

SEQ ID NO: 11539 - DNA, 25 bp, synthetic construct
  misc_feature 1..25: note = Oligonucleotide
  source 1..25: mol_type = other DNA
ggcaggccaagcaagaccggattca

SEQ ID NO: 11540 - DNA, 25 bp, synthetic construct
  misc_feature 1..25: note = Oligonucleotide
  source 1..25: mol_type = other DNA
tcgggcaggccaagcaagaccggat

SEQ ID NO: 11541 - DNA, 25 bp, synthetic construct
  misc_feature 1..25: note = Oligonucleotide
  source 1..25: mol_type = other DNA
ctctcgggcaggccaagcaagaccg

SEQ ID NO: 11542 - DNA, 25 bp, synthetic construct
  misc_feature 1..25: note = Oligonucleotide
  source 1..25: mol_type = other DNA
cctctctcgggcaggccaagcaaga

SEQ ID NO: 11543 - DNA, 25 bp, synthetic construct
  misc_feature 1..25: note = Oligonucleotide
  source 1..25: mol_type = other DNA
cctcctctctcgggcaggccaagca

SEQ ID NO: 11544 - DNA, 25 bp, synthetic construct
  misc_feature 1..25: note = Oligonucleotide
  source 1..25: mol_type = other DNA
gaacctcctctctcgggcaggccaa

SEQ ID NO: 11545 - DNA, 25 bp, synthetic construct
  misc_feature 1..25: note = Oligonucleotide
  source 1..25: mol_type = other DNA
gaagaacctcctctctcgggcaggc

SEQ ID NO: 11546 - DNA, 25 bp, synthetic construct
  misc_feature 1..25: note = Oligonucleotide
  source 1..25: mol_type = other DNA
ccagaagaacctcctctctcgggca

SEQ ID NO: 11547 - DNA, 25 bp, synthetic construct
  misc_feature 1..25: note = Oligonucleotide
  source 1..25: mol_type = other DNA
cgcccagaagaacctcctctctcgg

SEQ ID NO: 11548 - DNA, 25 bp, synthetic construct
  misc_feature 1..25: note = Oligonucleotide
  source 1..25: mol_type = other DNA
agacgcccagaagaacctcctctct

SEQ ID NO: 11549 - DNA, 25 bp, synthetic construct
  misc_feature 1..25: note = Oligonucleotide
  source 1..25: mol_type = other DNA
gtcagacgcccagaagaacctcctc

SEQ ID NO: 11550 - DNA, 25 bp, synthetic construct
  misc_feature 1..25: note = Oligonucleotide
  source 1..25: mol_type = other DNA
cgtgtcagacgcccagaagaacctc

SEQ ID NO: 11551 - DNA, 25 bp, synthetic construct
  misc_feature 1..25: note = Oligonucleotide
  source 1..25: mol_type = other DNA
tgacgtgtcagacgcccagaagaac

SEQ ID NO: 11552 - DNA, 25 bp, synthetic construct
  misc_feature 1..25: note = Oligonucleotide
  source 1..25: mol_type = other DNA
ccctgacgtgtcagacgcccagaag

SEQ ID NO: 11553 - DNA, 25 bp, synthetic construct
  misc_feature 1..25: note = Oligonucleotide
  source 1..25: mol_type = other DNA
caaccctgacgtgtcagacgcccag

SEQ ID NO: 11554 - DNA, 25 bp, synthetic construct
  misc_feature 1..25: note = Oligonucleotide
  source 1..25: mol_type = other DNA
cagcaaccctgacgtgtcagacgcc

SEQ ID NO: 11555 - DNA, 25 bp, synthetic construct
  misc_feature 1..25: note = Oligonucleotide
  source 1..25: mol_type = other DNA
gagcagcaaccctgacgtgtcagac

SEQ ID NO: 11556 - DNA, 25 bp, synthetic construct
  misc_feature 1..25: note = Oligonucleotide
  source 1..25: mol_type = other DNA
agtgagcagcaaccctgacgtgtca

SEQ ID NO: 11557 - DNA, 25 bp, synthetic construct
  misc_feature 1..25: note = Oligonucleotide
  source 1..25: mol_type = other DNA
cacagtgagcagcaaccctgacgtg

SEQ ID NO: 11558 - DNA, 25 bp, synthetic construct
  misc_feature 1..25: note = Oligonucleotide
  source 1..25: mol_type = other DNA
ggacacagtgagcagcaaccctgac

SEQ ID NO: 11559 - DNA, 25 bp, synthetic construct
  misc_feature 1..25: note = Oligonucleotide
  source 1..25: mol_type = other DNA
cagggacacagtgagcagcaaccct

SEQ ID NO: 11560 - DNA, 25 bp, synthetic construct
  misc_feature 1..25: note = Oligonucleotide
  source 1..25: mol_type = other DNA
caacagggacacagtgagcagcaac

SEQ ID NO: 11561 - DNA, 25 bp, synthetic construct
  misc_feature 1..25: note = Oligonucleotide
  source 1..25: mol_type = other DNA
caccaacagggacacagtgagcagc

SEQ ID NO: 11562 - DNA, 25 bp, synthetic construct
  misc_feature 1..25: note = Oligonucleotide
  source 1..25: mol_type = other DNA
tggcaccaacagggacacagtgagc

SEQ ID NO: 11563 - DNA, 25 bp, synthetic construct
  misc_feature 1..25: note = Oligonucleotide
  source 1..25: mol_type = other DNA
ttctggcaccaacagggacacagtg

SEQ ID NO: 11564 - DNA, 25 bp, synthetic construct
  misc_feature 1..25: note = Oligonucleotide
  source 1..25: mol_type = other DNA
cacttctggcaccaacagggacaca

SEQ ID NO: 11565 - DNA, 25 bp, synthetic construct
  misc_feature 1..25: note = Oligonucleotide
  source 1..25: mol_type = other DNA
tcccacttctggcaccaacagggac

SEQ ID NO: 11566 - DNA, 25 bp, synthetic construct
  misc_feature 1..25: note = Oligonucleotide
  source 1..25: mol_type = other DNA
agctcccacttctggcaccaacagg

SEQ ID NO: 11567 - DNA, 25 bp, synthetic construct
  misc_feature 1..25: note = Oligonucleotide
  source 1..25: mol_type = other DNA
cccagctcccacttctggcaccaac

SEQ ID NO: 11568 - DNA, 25 bp, synthetic construct
  misc_feature 1..25: note = Oligonucleotide
  source 1..25: mol_type = other DNA
gagcccagctcccacttctggcacc

SEQ ID NO: 11569 - DNA, 25 bp, synthetic construct
  misc_feature 1..25: note = Oligonucleotide
  source 1..25: mol_type = other DNA
ggggagcccagctcccacttctggc

SEQ ID NO: 11570 - DNA, 25 bp, synthetic construct
  misc_feature 1..25: note = Oligonucleotide
  source 1..25: mol_type = other DNA
tgaggggagcccagctcccacttct

SEQ ID NO: 11571 - DNA, 25 bp, synthetic construct
  misc_feature 1..25: note = Oligonucleotide
  source 1..25: mol_type = other DNA
ctctgaggggagcccagctcccact

SEQ ID NO: 11572 - DNA, 25 bp, synthetic construct
  misc_feature 1..25: note = Oligonucleotide
  source 1..25: mol_type = other DNA
agtctctgaggggagcccagctccc

SEQ ID NO: 11573 - DNA, 25 bp, synthetic construct
  misc_feature 1..25: note = Oligonucleotide
  source 1..25: mol_type = other DNA
ctgagtctctgaggggagcccagct

SEQ ID NO: 11574 - DNA, 25 bp, synthetic construct
  misc_feature 1..25: note = Oligonucleotide
  source 1..25: mol_type = other DNA
aacctgagtctctgaggggagccca

SEQ ID NO: 11575 - DNA, 25 bp, synthetic construct
  misc_feature 1..25: note = Oligonucleotide
  source 1..25: mol_type = other DNA
cccaacctgagtctctgaggggagc

SEQ ID NO: 11576 - DNA, 25 bp, synthetic construct
  misc_feature 1..25: note = Oligonucleotide
  source 1..25: mol_type = other DNA
atgcccaacctgagtctctgagggg

SEQ ID NO: 11577 - DNA, 25 bp, synthetic construct
  misc_feature 1..25: note = Oligonucleotide
  source 1..25: mol_type = other DNA
ctcatgcccaacctgagtctctgag

SEQ ID NO: 11578 - DNA, 25 bp, synthetic construct
  misc_feature 1..25: note = Oligonucleotide
  source 1..25: mol_type = other DNA
cgcctcatgcccaacctgagtctct

SEQ ID NO: 11579 - DNA, 25 bp, synthetic construct
  misc_feature 1..25: note = Oligonucleotide
  source 1..25: mol_type = other DNA
aggcgcctcatgcccaacctgagtc

SEQ ID NO: 11580 - DNA, 25 bp, synthetic construct
  misc_feature 1..25: note = Oligonucleotide
  source 1..25: mol_type = other DNA
tggaggcgcctcatgcccaacctga

SEQ ID NO: 11581 - DNA, 25 bp, synthetic construct
  misc_feature 1..25: note = Oligonucleotide
  source 1..25: mol_type = other DNA
ccatggaggcgcctcatgcccaacc

SEQ ID NO: 11582 - DNA, 25 bp, synthetic construct
  misc_feature 1..25: note = Oligonucleotide
  source 1..25: mol_type = other DNA
gggccatggaggcgcctcatgccca

SEQ ID NO: 11583 - DNA, 25 bp, synthetic construct
  misc_feature 1..25: note = Oligonucleotide
  source 1..25: mol_type = other DNA
ggagggccatggaggcgcctcatgc

SEQ ID NO: 11584 - DNA, 25 bp, synthetic construct
  misc_feature 1..25: note = Oligonucleotide
  source 1..25: mol_type = other DNA
ccaggagggccatggaggcgcctca

SEQ ID NO: 11585 - DNA, 25 bp, synthetic construct
  misc_feature 1..25: note = Oligonucleotide
  source 1..25: mol_type = other DNA
cctccaggagggccatggaggcgcc

SEQ ID NO: 11586 - DNA, 25 bp, synthetic construct
  misc_feature 1..25: note = Oligonucleotide
  source 1..25: mol_type = other DNA
gagcctccaggagggccatggaggc

SEQ ID NO: 11587 - DNA, 25 bp, synthetic construct
  misc_feature 1..25: note = Oligonucleotide
  source 1..25: mol_type = other DNA
caagagcctccaggagggccatgga

SEQ ID NO: 11588 - DNA, 25 bp, synthetic construct
  misc_feature 1..25: note = Oligonucleotide
  source 1..25: mol_type = other DNA
ggccaagagcctccaggagggccat

SEQ ID NO: 11589 - DNA, 25 bp, synthetic construct
  misc_feature 1..25: note = Oligonucleotide
  source 1..25: mol_type = other DNA
tggggccaagagcctccaggagggc

SEQ ID NO: 11590 - DNA, 25 bp, synthetic construct
  misc_feature 1..25: note = Oligonucleotide
  source 1..25: mol_type = other DNA
ccctggggccaagagcctccaggag

SEQ ID NO: 11591 - DNA, 25 bp, synthetic construct
  misc_feature 1..25: note = Oligonucleotide
  source 1..25: mol_type = other DNA
aatccctggggccaagagcctccag

SEQ ID NO: 11592 - DNA, 25 bp, synthetic construct
  misc_feature 1..25: note = Oligonucleotide
  source 1..25: mol_type = other DNA
aggaatccctggggccaagagcctc

SEQ ID NO: 11593 - DNA, 25 bp, synthetic construct
  misc_feature 1..25: note = Oligonucleotide
  source 1..25: mol_type = other DNA
cacaggaatccctggggccaagagc

SEQ ID NO: 11594 - DNA, 25 bp, synthetic construct
  misc_feature 1..25: note = Oligonucleotide
  source 1..25: mol_type = other DNA
actcacaggaatccctggggccaag

SEQ ID NO: 11595 - DNA, 25 bp, synthetic construct
  misc_feature 1..25: note = Oligonucleotide
  source 1..25: mol_type = other DNA
agaactcacaggaatccctggggcc

SEQ ID NO: 11596 - DNA, 25 bp, synthetic construct
  misc_feature 1..25: note = Oligonucleotide
  source 1..25: mol_type = other DNA
gagagaactcacaggaatccctggg

SEQ ID NO: 11597 - DNA, 25 bp, synthetic construct
  misc_feature 1..25: note = Oligonucleotide
  source 1..25: mol_type = other DNA
agagagagaactcacaggaatccct

SEQ ID NO: 11598 - DNA, 25 bp, synthetic construct
  misc_feature 1..25: note = Oligonucleotide
  source 1..25: mol_type = other DNA
gggagagagagaactcacaggaatc

SEQ ID NO: 11599 - DNA, 25 bp, synthetic construct
  misc_feature 1..25: note = Oligonucleotide
  source 1..25: mol_type = other DNA
ggagggagagagagaactcacagga

SEQ ID NO: 11600 - DNA, 25 bp, synthetic construct
  misc_feature 1..25: note = Oligonucleotide
  source 1..25: mol_type = other DNA
tcgggagggagagagagaactcaca

SEQ ID NO: 11601 - DNA, 25 bp, synthetic construct
  misc_feature 1..25: note = Oligonucleotide
  source 1..25: mol_type = other DNA
gtgtcgggagggagagagagaactc

SEQ ID NO: 11602 - DNA, 25 bp, synthetic construct
  misc_feature 1..25: note = Oligonucleotide
  source 1..25: mol_type = other DNA
cctgtgtcgggagggagagagagaa

SEQ ID NO: 11603 - DNA, 25 bp, synthetic construct
  misc_feature 1..25: note = Oligonucleotide
  source 1..25: mol_type = other DNA
cagcctgtgtcgggagggagagaga

SEQ ID NO: 11604 - DNA, 25 bp, synthetic construct
  misc_feature 1..25: note = Oligonucleotide
  source 1..25: mol_type = other DNA
agacagcctgtgtcgggagggagag

SEQ ID NO: 11605 - DNA, 25 bp, synthetic construct
  misc_feature 1..25: note = Oligonucleotide
  source 1..25: mol_type = other DNA
taaagacagcctgtgtcgggaggga

SEQ ID NO: 11606 - DNA, 25 bp, synthetic construct
  misc_feature 1..25: note = Oligonucleotide
  source 1..25: mol_type = other DNA
tggtaaagacagcctgtgtcgggag

SEQ ID NO: 11607 - DNA, 25 bp, synthetic construct
  misc_feature 1..25: note = Oligonucleotide
  source 1..25: mol_type = other DNA
taatggtaaagacagcctgtgtcgg

SEQ ID NO: 11608 - DNA, 25 bp, synthetic construct
  misc_feature 1..25: note = Oligonucleotide
  source 1..25: mol_type = other DNA
ccttaatggtaaagacagcctgtgt

SEQ ID NO: 11609 - DNA, 25 bp, synthetic construct
  misc_feature 1..25: note = Oligonucleotide
  source 1..25: mol_type = other DNA
aacccttaatggtaaagacagcctg

SEQ ID NO: 11610 - DNA, 25 bp, synthetic construct
  misc_feature 1..25: note = Oligonucleotide
  source 1..25: mol_type = other DNA
aacaacccttaatggtaaagacagc

SEQ ID NO: 11611 - DNA, 25 bp, synthetic construct
  misc_feature 1..25: note = Oligonucleotide
  source 1..25: mol_type = other DNA
caaaacaacccttaatggtaaagac

SEQ ID NO: 11612 - DNA, 25 bp, synthetic construct
  misc_feature 1..25: note = Oligonucleotide
  source 1..25: mol_type = other DNA
acacaaaacaacccttaatggtaaa

SEQ ID NO: 11613 - DNA, 25 bp, synthetic construct
  misc_feature 1..25: note = Oligonucleotide
  source 1..25: mol_type = other DNA
aaaacacaaaacaacccttaatggt

SEQ ID NO: 11614 - DNA, 25 bp, synthetic construct
  misc_feature 1..25: note = Oligonucleotide
  source 1..25: mol_type = other DNA
agtaaaacacaaaacaacccttaat

SEQ ID NO: 11615 - DNA, 25 bp, synthetic construct
  misc_feature 1..25: note = Oligonucleotide
  source 1..25: mol_type = other DNA
caaagtaaaacacaaaacaaccctt

SEQ ID NO: 11616 - DNA, 25 bp, synthetic construct
  misc_feature 1..25: note = Oligonucleotide
  source 1..25: mol_type = other DNA
ctccaaagtaaaacacaaaacaacc

SEQ ID NO: 11617 - DNA, 25 bp, synthetic construct
  misc_feature 1..25: note = Oligonucleotide
  source 1..25: mol_type = other DNA
tacctccaaagtaaaacacaaaaca

SEQ ID NO: 11618 - DNA, 25 bp, synthetic construct
  misc_feature 1..25: note = Oligonucleotide
  source 1..25: mol_type = other DNA
gcgtacctccaaagtaaaacacaaa

SEQ ID NO: 11619 - DNA, 25 bp, synthetic construct
  misc_feature 1..25: note = Oligonucleotide
  source 1..25: mol_type = other DNA
gaggcgtacctccaaagtaaaacac

SEQ ID NO: 11620 - DNA, 25 bp, synthetic construct
  misc_feature 1..25: note = Oligonucleotide
  source 1..25: mol_type = other DNA
agggaggcgtacctccaaagtaaaa

SEQ ID NO: 11621 - DNA, 25 bp, synthetic construct
  misc_feature 1..25: note = Oligonucleotide
  source 1..25: mol_type = other DNA
aggagggaggcgtacctccaaagta

SEQ ID NO: 11622 - DNA, 25 bp, synthetic construct
  misc_feature 1..25: note = Oligonucleotide
  source 1..25: mol_type = other DNA
gggaggagggaggcgtacctccaaa

SEQ ID NO: 11623 - DNA, 25 bp, synthetic construct
  misc_feature 1..25: note = Oligonucleotide
  source 1..25: mol_type = other DNA
gatgggaggagggaggcgtacctcc

SEQ ID NO: 11624 - DNA, 25 bp, synthetic construct
  misc_feature 1..25: note = Oligonucleotide
  source 1..25: mol_type = other DNA
gaggatgggaggagggaggcgtacc

SEQ ID NO: 11625 - DNA, 25 bp, synthetic construct
  misc_feature 1..25: note = Oligonucleotide
  source 1..25: mol_type = other DNA
agagaggatgggaggagggaggcgt

SEQ ID NO: 11626 - DNA, 25 bp, synthetic construct
  misc_feature 1..25: note = Oligonucleotide
  source 1..25: mol_type = other DNA
cacagagaggatgggaggagggagg

SEQ ID NO: 11627 - DNA, 25 bp, synthetic construct
  misc_feature 1..25: note = Oligonucleotide
  source 1..25: mol_type = other DNA
ggccacagagaggatgggaggaggg

SEQ ID NO: 11628 - DNA, 25 bp, synthetic construct
  misc_feature 1..25: note = Oligonucleotide
  source 1..25: mol_type = other DNA
catggccacagagaggatgggagga

SEQ ID NO: 11629 - DNA, 25 bp, synthetic construct
  misc_feature 1..25: note = Oligonucleotide
  source 1..25: mol_type = other DNA
ccacatggccacagagaggatggga

SEQ ID NO: 11630 - DNA, 25 bp, synthetic construct
  misc_feature 1..25: note = Oligonucleotide
  source 1..25: mol_type = other DNA
cagccacatggccacagagaggatg

SEQ ID NO: 11631 - DNA, 25 bp, synthetic construct
  misc_feature 1..25: note = Oligonucleotide
  source 1..25: mol_type = other DNA
gggcagccacatggccacagagagg

SEQ ID NO: 11632 - DNA, 25 bp, synthetic construct
  misc_feature 1..25: note = Oligonucleotide
  source 1..25: mol_type = other DNA
actgggcagccacatggccacagag

SEQ ID NO: 11633 - DNA, 25 bp, synthetic construct
  misc_feature 1..25: note = Oligonucleotide
  source 1..25: mol_type = other DNA
cacactgggcagccacatggccaca

SEQ ID NO: 11634 - DNA, 25 bp, synthetic construct
  misc_feature 1..25: note = Oligonucleotide
  source 1..25: mol_type = other DNA
agccacactgggcagccacatggcc

SEQ ID NO: 11635 - DNA, 25 bp, synthetic construct
  misc_feature 1..25: note = Oligonucleotide
  source 1..25: mol_type = other DNA
atcagccacactgggcagccacatg

SEQ ID NO: 11636 - DNA, 25 bp, synthetic construct
  misc_feature 1..25: note = Oligonucleotide
  source 1..25: mol_type = other DNA
ggtatcagccacactgggcagccac

SEQ ID NO: 11637 - DNA, 25 bp, synthetic construct
  misc_feature 1..25: note = Oligonucleotide
  source 1..25: mol_type = other DNA
gagggtatcagccacactgggcagc

SEQ ID NO: 11638 - DNA, 25 bp, synthetic construct
  misc_feature 1..25: note = Oligonucleotide
  source 1..25: mol_type = other DNA
gcagagggtatcagccacactgggc

SEQ ID NO: 11639 - DNA, 25 bp, synthetic construct
  misc_feature 1..25: note = Oligonucleotide
  source 1..25: mol_type = other DNA
aaggcagagggtatcagccacactg

SEQ ID NO: 11640 - DNA, 25 bp, synthetic construct
  misc_feature 1..25: note = Oligonucleotide
  source 1..25: mol_type = other DNA
tgtaaggcagagggtatcagccaca

SEQ ID NO: 11641 - DNA, 25 bp, synthetic construct
  misc_feature 1..25: note = Oligonucleotide
  source 1..25: mol_type = other DNA
agctgtaaggcagagggtatcagcc

SEQ ID NO: 11642 - DNA, 25 bp, synthetic construct
  misc_feature 1..25: note = Oligonucleotide
  source 1..25: mol_type = other DNA
ggcagctgtaaggcagagggtatca

SEQ ID NO: 11643 - DNA, 25 bp, synthetic construct
  misc_feature 1..25: note = Oligonucleotide
  source 1..25: mol_type = other DNA
ggaggcagctgtaaggcagagggta

SEQ ID NO: 11644 - DNA, 25 bp, synthetic construct
  misc_feature 1..25: note = Oligonucleotide
  source 1..25: mol_type = other DNA
gcaggaggcagctgtaaggcagagg

SEQ ID NO: 11645 - DNA, 25 bp, synthetic construct
  misc_feature 1..25: note = Oligonucleotide
  source 1..25: mol_type = other DNA
aaggcaggaggcagctgtaaggcag

SEQ ID NO: 11646 - DNA, 25 bp, synthetic construct
  misc_feature 1..25: note = Oligonucleotide
  source 1..25: mol_type = other DNA
agcaaggcaggaggcagctgtaagg

SEQ ID NO: 11647 - DNA, 25 bp, synthetic construct
  misc_feature 1..25: note = Oligonucleotide
  source 1..25: mol_type = other DNA
ggaagcaaggcaggaggcagctgta

SEQ ID NO: 11648 - DNA, 25 bp, synthetic construct
  misc_feature 1..25: note = Oligonucleotide
  source 1..25: mol_type = other DNA
agaggaagcaaggcaggaggcagct

SEQ ID NO: 11649 - DNA, 25 bp, synthetic construct
  misc_feature 1..25: note = Oligonucleotide
  source 1..25: mol_type = other DNA
gccagaggaagcaaggcaggaggca

SEQ ID NO: 11650 - DNA, 25 bp, synthetic construct
  misc_feature 1..25: note = Oligonucleotide
  source 1..25: mol_type = other DNA
gccgccagaggaagcaaggcaggag

SEQ ID NO: 11651 - DNA, 25 bp, synthetic construct
  misc_feature 1..25: note = Oligonucleotide
  source 1..25: mol_type = other DNA
caagccgccagaggaagcaaggcag

SEQ ID NO: 11652 - DNA, 25 bp, synthetic construct
  misc_feature 1..25: note = Oligonucleotide
  source 1..25: mol_type = other DNA
ctccaagccgccagaggaagcaagg

SEQ ID NO: 11653 - DNA, 25 bp, synthetic construct
  misc_feature 1..25: note = Oligonucleotide
  source 1..25: mol_type = other DNA
gtgctccaagccgccagaggaagca

SEQ ID NO: 11654 - DNA, 25 bp, synthetic construct
  misc_feature 1..25: note = Oligonucleotide
  source 1..25: mol_type = other DNA
agtgtgctccaagccgccagaggaa

SEQ ID NO: 11655 - DNA, 25 bp, synthetic construct
  misc_feature 1..25: note = Oligonucleotide
  source 1..25: mol_type = other DNA
gtcagtgtgctccaagccgccagag

SEQ ID NO: 11656 - DNA, 25 bp, synthetic construct
  misc_feature 1..25: note = Oligonucleotide
  source 1..25: mol_type = other DNA
ggagtcagtgtgctccaagccgcca

SEQ ID NO: 11657 - DNA, 25 bp, synthetic construct
  misc_feature 1..25: note = Oligonucleotide
  source 1..25: mol_type = other DNA
aaaggagtcagtgtgctccaagccg

SEQ ID NO: 11658 - DNA, 25 bp, synthetic construct
  misc_feature 1..25: note = Oligonucleotide
  source 1..25: mol_type = other DNA
agaaaaggagtcagtgtgctccaag

SEQ ID NO: 11659 - DNA, 25 bp, synthetic construct
  misc_feature 1..25: note = Oligonucleotide
  source 1..25: mol_type = other DNA
aaaagaaaaggagtcagtgtgctcc

SEQ ID NO: 11660 - DNA, 25 bp, synthetic construct
  misc_feature 1..25: note = Oligonucleotide
  source 1..25: mol_type = other DNA
cccaaaagaaaaggagtcagtgtgc

SEQ ID NO: 11661 - DNA, 25 bp, synthetic construct
  misc_feature 1..25: note = Oligonucleotide
  source 1..25: mol_type = other DNA
tcccccaaaagaaaaggagtcagtg

SEQ ID NO: 11662 - DNA, 25 bp, synthetic construct
  misc_feature 1..25: note = Oligonucleotide
  source 1..25: mol_type = other DNA
agatcccccaaaagaaaaggagtca

SEQ ID NO: 11663 - DNA, 25 bp, synthetic construct
  misc_feature 1..25: note = Oligonucleotide
  source 1..25: mol_type = other DNA
ggcagatcccccaaaagaaaaggag

SEQ ID NO: 11664 - DNA, 25 bp, synthetic construct
  misc_feature 1..25: note = Oligonucleotide
  source 1..25: mol_type = other DNA
agtggcagatcccccaaaagaaaag

SEQ ID NO: 11665 - DNA, 25 bp, synthetic construct
  misc_feature 1..25: note = Oligonucleotide
  source 1..25: mol_type = other DNA
gttagtggcagatcccccaaaagaa

SEQ ID NO: 11666 - DNA, 25 bp, synthetic construct
  misc_feature 1..25: note = Oligonucleotide
  source 1..25: mol_type = other DNA
ggagttagtggcagatcccccaaaa

SEQ ID NO: 11667 - DNA, 25 bp, synthetic construct
  misc_feature 1..25: note = Oligonucleotide
  source 1..25: mol_type = other DNA
tagggagttagtggcagatccccca

SEQ ID NO: 11668 - DNA, 25 bp, synthetic construct
  misc_feature 1..25: note = Oligonucleotide
  source 1..25: mol_type = other DNA
aaatagggagttagtggcagatccc

SEQ ID NO: 11669 - DNA, 25 bp, synthetic construct
  misc_feature 1..25: note = Oligonucleotide
  source 1..25: mol_type = other DNA
gggaaatagggagttagtggcagat

SEQ ID NO: 11670 - DNA, 25 bp, synthetic construct
  misc_feature 1..25: note = Oligonucleotide
  source 1..25: mol_type = other DNA
gatgggaaatagggagttagtggca

SEQ ID NO: 11671 - DNA, 25 bp, synthetic construct
  misc_feature 1..25: note = Oligonucleotide
  source 1..25: mol_type = other DNA
tgggatgggaaatagggagttagtg

SEQ ID NO: 11672 - DNA, 25 bp, synthetic construct
  misc_feature 1..25: note = Oligonucleotide
  source 1..25: mol_type = other DNA
ttctgggatgggaaatagggagtta

SEQ ID NO: 11673 - DNA, 25 bp, synthetic construct
  misc_feature 1..25: note = Oligonucleotide
  source 1..25: mol_type = other DNA
tgtttctgggatgggaaatagggag

SEQ ID NO: 11674 - DNA, 25 bp, synthetic construct
  misc_feature 1..25: note = Oligonucleotide
  source 1..25: mol_type = other DNA
aaatgtttctgggatgggaaatagg

SEQ ID NO: 11675 - DNA, 25 bp, synthetic construct
  misc_feature 1..25: note = Oligonucleotide
  source 1..25: mol_type = other DNA
gacaaatgtttctgggatgggaaat

SEQ ID NO: 11676 - DNA, 25 bp, synthetic construct
  misc_feature 1..25: note = Oligonucleotide
  source 1..25: mol_type = other DNA
agagacaaatgtttctgggatggga

SEQ ID NO: 11677 - DNA, 25 bp, synthetic construct
  misc_feature 1..25: note = Oligonucleotide
  source 1..25: mol_type = other DNA
ccaagagacaaatgtttctgggatg

SEQ ID NO: 11678 - DNA, 25 bp, synthetic construct
  misc_feature 1..25: note = Oligonucleotide
  source 1..25: mol_type = other DNA
gtgccaagagacaaatgtttctggg

SEQ ID NO: 11679 - DNA, 25 bp, synthetic construct
  misc_feature 1..25: note = Oligonucleotide
  source 1..25: mol_type = other DNA
gtggtgccaagagacaaatgtttct

SEQ ID NO: 11680 - DNA, 25 bp, synthetic construct
  misc_feature 1..25: note = Oligonucleotide
  source 1..25: mol_type = other DNA
aaggtggtgccaagagacaaatgtt

SEQ ID NO: 11681 - DNA, 25 bp, synthetic construct
  misc_feature 1..25: note = Oligonucleotide
  source 1..25: mol_type = other DNA
tctaaggtggtgccaagagacaaat

SEQ ID NO: 11682 - DNA, 25 bp, synthetic construct
  misc_feature 1..25: note = Oligonucleotide
  source 1..25: mol_type = other DNA
gattctaaggtggtgccaagagaca

SEQ ID NO: 11683 - DNA, 25 bp, synthetic construct
  misc_feature 1..25: note = Oligonucleotide
  source 1..25: mol_type = other DNA
agggattctaaggtggtgccaagag

SEQ ID NO: 11684 - DNA, 25 bp, synthetic construct
  misc_feature 1..25: note = Oligonucleotide
  source 1..25: mol_type = other DNA
ttaagggattctaaggtggtgccaa

SEQ ID NO: 11685 - DNA, 25 bp, synthetic construct
  misc_feature 1..25: note = Oligonucleotide
  source 1..25: mol_type = other DNA
tgtttaagggattctaaggtggtgc

SEQ ID NO: 11686 - DNA, 25 bp, synthetic construct
  misc_feature 1..25: note = Oligonucleotide
  source 1..25: mol_type = other DNA
ccatgtttaagggattctaaggtgg

SEQ ID NO: 11687 - DNA, 25 bp, synthetic construct
  misc_feature 1..25: note = Oligonucleotide
  source 1..25: mol_type = other DNA
aatccatgtttaagggattctaagg

SEQ ID NO: 11688 - DNA, 25 bp, synthetic construct
  misc_feature 1..25: note = Oligonucleotide
  source 1..25: mol_type = other DNA
gggaatccatgtttaagggattcta

SEQ ID NO: 11689 - DNA, 25 bp, synthetic construct
  misc_feature 1..25: note = Oligonucleotide
  source 1..25: mol_type = other DNA
cacgggaatccatgtttaagggatt

SEQ ID NO: 11690 - DNA, 25 bp, synthetic construct
  misc_feature 1..25: note = Oligonucleotide
  source 1..25: mol_type = other DNA
acacacgggaatccatgtttaaggg

SEQ ID NO: 11691 - DNA, 25 bp, synthetic construct
  misc_feature 1..25: note = Oligonucleotide
  source 1..25: mol_type = other DNA
atgacacacgggaatccatgtttaa

SEQ ID NO: 11692 - DNA, 25 bp, synthetic construct
  misc_feature 1..25: note = Oligonucleotide
  source 1..25: mol_type = other DNA
gaaatgacacacgggaatccatgtt

SEQ ID NO: 11693 - DNA, 25 bp, synthetic construct
  misc_feature 1..25: note = Oligonucleotide
  source 1..25: mol_type = other DNA
ttagaaatgacacacgggaatccat

SEQ ID NO: 11694 - DNA, 25 bp, synthetic construct
  misc_feature 1..25: note = Oligonucleotide
  source 1..25: mol_type = other DNA
actttagaaatgacacacgggaatc

SEQ ID NO: 11695 - DNA, 25 bp, synthetic construct
  misc_feature 1..25: note = Oligonucleotide
  source 1..25: mol_type = other DNA
tgcactttagaaatgacacacggga

SEQ ID NO: 11696 - DNA, 25 bp, synthetic construct
  misc_feature 1..25: note = Oligonucleotide
  source 1..25: mol_type = other DNA
tactgcactttagaaatgacacacg

SEQ ID NO: 11697 - DNA, 25 bp, synthetic construct
  misc_feature 1..25: note = Oligonucleotide
  source 1..25: mol_type = other DNA
tcttactgcactttagaaatgacac

SEQ ID NO: 11698 - DNA, 25 bp, synthetic construct
  misc_feature 1..25: note = Oligonucleotide
  source 1..25: mol_type = other DNA
tcttcttactgcactttagaaatga

SEQ ID NO: 11699 - DNA, 25 bp, synthetic construct
  misc_feature 1..25: note = Oligonucleotide
  source 1..25: mol_type = other DNA
ctatcttcttactgcactttagaaa

SEQ ID NO: 11700 - DNA, 25 bp, synthetic construct
  misc_feature 1..25: note = Oligonucleotide
  source 1..25: mol_type = other DNA
catctatcttcttactgcactttag

SEQ ID NO: 11701 - DNA, 25 bp, synthetic construct
  misc_feature 1..25: note = Oligonucleotide
  source 1..25: mol_type = other DNA
ttccatctatcttcttactgcactt

SEQ ID NO: 11702 - DNA, 25 bp, synthetic construct
  misc_feature 1..25: note = Oligonucleotide
  source 1..25: mol_type = other DNA
gacttccatctatcttcttactgca

SEQ ID NO: 11703 - DNA, 25 bp, synthetic construct
  misc_feature 1..25: note = Oligonucleotide
  source 1..25: mol_type = other DNA
cgtgacttccatctatcttcttact

SEQ ID NO: 11704 - DNA, 25 bp, synthetic construct
  misc_feature 1..25: note = Oligonucleotide
  source 1..25: mol_type = other DNA
tggcgtgacttccatctatcttctt

SEQ ID NO: 11705 - DNA, 25 bp, synthetic construct
  misc_feature 1..25: note = Oligonucleotide
  source 1..25: mol_type = other DNA
agatggcgtgacttccatctatctt

SEQ ID NO: 11706 - DNA, 25 bp, synthetic construct
  misc_feature 1..25: note = Oligonucleotide
  source 1..25: mol_type = other DNA
gggagatggcgtgacttccatctat

SEQ ID NO: 11707 - DNA, 25 bp, synthetic construct
  misc_feature 1..25: note = Oligonucleotide
  source 1..25: mol_type = other DNA
gcagggagatggcgtgacttccatc

SEQ ID NO: 11708 - DNA, 25 bp, synthetic construct
  misc_feature 1..25: note = Oligonucleotide
  source 1..25: mol_type = other DNA
agtgcagggagatggcgtgacttcc

SEQ ID NO: 11709 - DNA, 25 bp, synthetic construct
  misc_feature 1..25: note = Oligonucleotide
  source 1..25: mol_type = other DNA
tggagtgcagggagatggcgtgact

SEQ ID NO: 11710 - DNA, 25 bp, synthetic construct
  misc_feature 1..25: note = Oligonucleotide
  source 1..25: mol_type = other DNA
agatggagtgcagggagatggcgtg

SEQ ID NO: 11711 - DNA, 25 bp, synthetic construct
  misc_feature 1..25: note = Oligonucleotide
  source 1..25: mol_type = other DNA
ggcagatggagtgcagggagatggc

SEQ ID NO: 11712 - DNA, 25 bp, synthetic construct
  misc_feature 1..25: note = Oligonucleotide
  source 1..25: mol_type = other DNA
gagggcagatggagtgcagggagat

SEQ ID NO: 11713 - DNA, 25 bp, synthetic construct
  misc_feature 1..25: note = Oligonucleotide
  source 1..25: mol_type = other DNA
caagagggcagatggagtgcaggga

SEQ ID NO: 11714 - DNA, 25 bp, synthetic construct
  misc_feature 1..25: note = Oligonucleotide
  source 1..25: mol_type = other DNA
aggcaagagggcagatggagtgcag

SEQ ID NO: 11715 - DNA, 25 bp, synthetic construct
  misc_feature 1..25: note = Oligonucleotide
  source 1..25: mol_type = other DNA
agaaggcaagagggcagatggagtg

SEQ ID NO: 11716 - DNA, 25 bp, synthetic construct
  misc_feature 1..25: note = Oligonucleotide
  source 1..25: mol_type = other DNA
gggagaaggcaagagggcagatgga

SEQ ID NO: 11717 - DNA, 25 bp, synthetic construct
  misc_feature 1..25: note = Oligonucleotide
  source 1..25: mol_type = other DNA
gtggggagaaggcaagagggcagat

SEQ ID NO: 11718 - DNA, 25 bp, synthetic construct
  misc_feature 1..25: note = Oligonucleotide
  source 1..25: mol_type = other DNA
gtggtggggagaaggcaagagggca

SEQ ID NO: 11719 - DNA, 25 bp, synthetic construct
  misc_feature 1..25: note = Oligonucleotide
  source 1..25: mol_type = other DNA
gaagtggtggggagaaggcaagagg

SEQ ID NO: 11720 - DNA, 25 bp, synthetic construct
  misc_feature 1..25: note = Oligonucleotide
  source 1..25: mol_type = other DNA
ggggaagtggtggggagaaggcaag

SEQ ID NO: 11721 - DNA, 25 bp, synthetic construct
  misc_feature 1..25: note = Oligonucleotide
  source 1..25: mol_type = other DNA
gacggggaagtggtggggagaaggc

SEQ ID NO: 11722 - DNA, 25 bp, synthetic construct
  misc_feature 1..25: note = Oligonucleotide
  source 1..25: mol_type = other DNA
acagacggggaagtggtggggagaa

SEQ ID NO: 11723 - DNA, 25 bp, synthetic construct
  misc_feature 1..25: note = Oligonucleotide
  source 1..25: mol_type = other DNA
aggacagacggggaagtggtgggga

SEQ ID NO: 11724 - DNA, 25 bp, synthetic construct
  misc_feature 1..25: note = Oligonucleotide
  source 1..25: mol_type = other DNA
ggcaggacagacggggaagtggtgg

SEQ ID NO: 11725 - DNA, 25 bp, synthetic construct
  misc_feature 1..25: note = Oligonucleotide
  source 1..25: mol_type = other DNA
aggggcaggacagacggggaagtgg

SEQ ID NO: 11726 - DNA, 25 bp, synthetic construct
  misc_feature 1..25: note = Oligonucleotide
  source 1..25: mol_type = other DNA
ggcaggggcaggacagacggggaag

SEQ ID NO: 11727 - DNA, 25 bp, synthetic construct
  misc_feature 1..25: note = Oligonucleotide
  source 1..25: mol_type = other DNA
ctgggcaggggcaggacagacgggg

SEQ ID NO: 11728 - DNA, 25 bp, synthetic construct
  misc_feature 1..25: note = Oligonucleotide
  source 1..25: mol_type = other DNA
cttctgggcaggggcaggacagacg

SEQ ID NO: 11729 - DNA, 25 bp, synthetic construct
  misc_feature 1..25: note = Oligonucleotide
  source 1..25: mol_type = other DNA
atccttctgggcaggggcaggacag

SEQ ID NO: 11730 - DNA, 25 bp, synthetic construct
  misc_feature 1..25: note = Oligonucleotide
  source 1..25: mol_type = other DNA
cagatccttctgggcaggggcagga

SEQ ID NO: 11731 - DNA, 25 bp, synthetic construct
  misc_feature 1..25: note = Oligonucleotide
  source 1..25: mol_type = other DNA
gctcagatccttctgggcaggggca

SEQ ID NO: 11732 - DNA, 25 bp, synthetic construct
  misc_feature 1..25: note = Oligonucleotide
  source 1..25: mol_type = other DNA
cctgctcagatccttctgggcaggg

SEQ ID NO: 11733 - DNA, 25 bp, synthetic construct
  misc_feature 1..25: note = Oligonucleotide
  source 1..25: mol_type = other DNA
gcccctgctcagatccttctgggca

SEQ ID NO: 11734 - DNA, 25 bp, synthetic construct
  misc_feature 1..25: note = Oligonucleotide
  source 1..25: mol_type = other DNA
caggcccctgctcagatccttctgg

SEQ ID NO: 11735 - DNA, 25 bp, synthetic construct
  misc_feature 1..25: note = Oligonucleotide
  source 1..25: mol_type = other DNA
agccaggcccctgctcagatccttc

SEQ ID NO: 11736 - DNA, 25 bp, synthetic construct
  misc_feature 1..25: note = Oligonucleotide
  source 1..25: mol_type = other DNA
gcaagccaggcccctgctcagatcc

SEQ ID NO: 11737 - DNA, 25 bp, synthetic construct
  misc_feature 1..25: note = Oligonucleotide
  source 1..25: mol_type = other DNA
gcagcaagccaggcccctgctcaga

SEQ ID NO: 11738 - DNA, 25 bp, synthetic construct
  misc_feature 1..25: note = Oligonucleotide
  source 1..25: mol_type = other DNA
tcagcagcaagccaggcccctgctc

SEQ ID NO: 11739 - DNA, 25 bp, synthetic construct
  misc_feature 1..25: note = Oligonucleotide
  source 1..25: mol_type = other DNA
gcctcagcagcaagccaggcccctg

SEQ ID NO: 11740 - DNA, 25 bp, synthetic construct
  misc_feature 1..25: note = Oligonucleotide
  source 1..25: mol_type = other DNA
acagcctcagcagcaagccaggccc

SEQ ID NO: 11741 - DNA, 25 bp, synthetic construct
  misc_feature 1..25: note = Oligonucleotide
  source 1..25: mol_type = other DNA
gtgacagcctcagcagcaagccagg

SEQ ID NO: 11742 - DNA, 25 bp, synthetic construct
  misc_feature 1..25: note = Oligonucleotide
  source 1..25: mol_type = other DNA
gctgtgacagcctcagcagcaagcc

SEQ ID NO: 11743 - DNA, 25 bp, synthetic construct
  misc_feature 1..25: note = Oligonucleotide
  source 1..25: mol_type = other DNA
gcagctgtgacagcctcagcagcaa

SEQ ID NO: 11744 - DNA, 25 bp, synthetic construct
  misc_feature 1..25: note = Oligonucleotide
  source 1..25: mol_type = other DNA
ctggcagctgtgacagcctcagcag

SEQ ID NO: 11745 - DNA, 25 bp, synthetic construct
  misc_feature 1..25: note = Oligonucleotide
  source 1..25: mol_type = other DNA
gctctggcagctgtgacagcctcag

SEQ ID NO: 11746 - DNA, 25 bp, synthetic construct
  misc_feature 1..25: note = Oligonucleotide
  source 1..25: mol_type = other DNA
agggctctggcagctgtgacagcct

SEQ ID NO: 11747 - DNA, 25 bp, synthetic construct
  misc_feature 1..25: note = Oligonucleotide
  source 1..25: mol_type = other DNA
cccagggctctggcagctgtgacag

SEQ ID NO: 11748 - DNA, 25 bp, synthetic construct
  misc_feature 1..25: note = Oligonucleotide
  source 1..25: mol_type = other DNA
cagcccagggctctggcagctgtga

SEQ ID NO: 11749 - DNA, 25 bp, synthetic construct
  misc_feature 1..25: note = Oligonucleotide
  source 1..25: mol_type = other DNA
gatcagcccagggctctggcagctg

SEQ ID NO: 11750 - DNA, 25 bp, synthetic construct
  misc_feature 1..25: note = Oligonucleotide
  source 1..25: mol_type = other DNA
tgggatcagcccagggctctggcag

SEQ ID NO: 11751 - DNA, 25 bp, synthetic construct
  misc_feature 1..25: note = Oligonucleotide
  source 1..25: mol_type = other DNA
ctatgggatcagcccagggctctgg

SEQ ID NO: 11752 - DNA, 25 bp, synthetic construct
  misc_feature 1..25: note = Oligonucleotide
  source 1..25: mol_type = other DNA
gacctatgggatcagcccagggctc

SEQ ID NO: 11753 - DNA, 25 bp, synthetic construct
  misc_feature 1..25: note = Oligonucleotide
  source 1..25: mol_type = other DNA
aaagacctatgggatcagcccaggg

SEQ ID NO: 11754 - DNA, 25 bp, synthetic construct
  misc_feature 1..25: note = Oligonucleotide
  source 1..25: mol_type = other DNA
aggaaagacctatgggatcagccca

SEQ ID NO: 11755 - DNA, 25 bp, synthetic construct
  misc_feature 1..25: note = Oligonucleotide
  source 1..25: mol_type = other DNA
tcaaggaaagacctatgggatcagc

SEQ ID NO: 11756 - DNA, 25 bp, synthetic construct
  misc_feature 1..25: note = Oligonucleotide
  source 1..25: mol_type = other DNA
tcctcaaggaaagacctatgggatc

SEQ ID NO: 11757 - DNA, 25 bp, synthetic construct
  misc_feature 1..25: note = Oligonucleotide
  source 1..25: mol_type = other DNA
gggtcctcaaggaaagacctatggg

SEQ ID NO: 11758 - DNA, 25 bp, synthetic construct
  misc_feature 1..25: note = Oligonucleotide
  source 1..25: mol_type = other DNA
gtcgggtcctcaaggaaagacctat

SEQ ID NO: 11759 - DNA, 25 bp, synthetic construct
  misc_feature 1..25: note = Oligonucleotide
  source 1..25: mol_type = other DNA
ggagtcgggtcctcaaggaaagacc

SEQ ID NO: 11760 - DNA, 25 bp, synthetic construct
  misc_feature 1..25: note = Oligonucleotide
  source 1..25: mol_type = other DNA
ttgggagtcgggtcctcaaggaaag

SEQ ID NO: 11761 - DNA, 25 bp, synthetic construct
  misc_feature 1..25: note = Oligonucleotide
  source 1..25: mol_type = other DNA
gccttgggagtcgggtcctcaagga

SEQ ID NO: 11762 - DNA, 25 bp, synthetic construct
  misc_feature 1..25: note = Oligonucleotide
  source 1..25: mol_type = other DNA
ggagccttgggagtcgggtcctcaa

SEQ ID NO: 11763 - DNA, 25 bp, synthetic construct
  misc_feature 1..25: note = Oligonucleotide
  source 1..25: mol_type = other DNA
gaaggagccttgggagtcgggtcct

SEQ ID NO: 11764 - DNA, 25 bp, synthetic construct
  misc_feature 1..25: note = Oligonucleotide
  source 1..25: mol_type = other DNA
ttggaaggagccttgggagtcgggt

SEQ ID NO: 11765 - DNA, 25 bp, synthetic construct
  misc_feature 1..25: note = Oligonucleotide
  source 1..25: mol_type = other DNA
tctttggaaggagccttgggagtcg

SEQ ID NO: 11766 - DNA, 25 bp, synthetic construct
  misc_feature 1..25: note = Oligonucleotide
  source 1..25: mol_type = other DNA
tcctctttggaaggagccttgggag

SEQ ID NO: 11767 - DNA, 25 bp, synthetic construct
  misc_feature 1..25: note = Oligonucleotide
  source 1..25: mol_type = other DNA
ggctcctctttggaaggagccttgg

SEQ ID NO: 11768 - DNA, 25 bp, synthetic construct
  misc_feature 1..25: note = Oligonucleotide
  source 1..25: mol_type = other DNA
aagggctcctctttggaaggagcct

SEQ ID NO: 11769 - DNA, 25 bp, synthetic construct
  misc_feature 1..25: note = Oligonucleotide
  source 1..25: mol_type = other DNA
ccgaagggctcctctttggaaggag

SEQ ID NO: 11770 - DNA, 25 bp, synthetic construct
  misc_feature 1..25: note = Oligonucleotide
  source 1..25: mol_type = other DNA
ggcccgaagggctcctctttggaag

SEQ ID NO: 11771 - DNA, 25 bp, synthetic construct
  misc_feature 1..25: note = Oligonucleotide
  source 1..25: mol_type = other DNA
acgggcccgaagggctcctctttgg

SEQ ID NO: 11772 - DNA, 25 bp, synthetic construct
  misc_feature 1..25: note = Oligonucleotide
  source 1..25: mol_type = other DNA
cccacgggcccgaagggctcctctt

SEQ ID NO: 11773 - DNA, 25 bp, synthetic construct
  misc_feature 1..25: note = Oligonucleotide
  source 1..25: mol_type = other DNA
cagcccacgggcccgaagggctcct

SEQ ID NO: 11774 - DNA, 25 bp, synthetic construct
  misc_feature 1..25: note = Oligonucleotide
  source 1..25: mol_type = other DNA
atgcagcccacgggcccgaagggct

SEQ ID NO: 11775 - DNA, 25 bp, synthetic construct
  misc_feature 1..25: note = Oligonucleotide
  source 1..25: mol_type = other DNA
tccatgcagcccacgggcccgaagg

SEQ ID NO: 11776 - DNA, 25 bp, synthetic construct
  misc_feature 1..25: note = Oligonucleotide
  source 1..25: mol_type = other DNA
gcatccatgcagcccacgggcccga

SEQ ID NO: 11777 - DNA, 25 bp, synthetic construct
  misc_feature 1..25: note = Oligonucleotide
  source 1..25: mol_type = other DNA
ccagcatccatgcagcccacgggcc

SEQ ID NO: 11778 - DNA, 25 bp, synthetic construct
  misc_feature 1..25: note = Oligonucleotide
  source 1..25: mol_type = other DNA
ccgccagcatccatgcagcccacgg

SEQ ID NO: 11779 - DNA, 25 bp, synthetic construct
  misc_feature 1..25: note = Oligonucleotide
  source 1..25: mol_type = other DNA
ctgccgccagcatccatgcagccca

SEQ ID NO: 11780 - DNA, 25 bp, synthetic construct
  misc_feature 1..25: note = Oligonucleotide
  source 1..25: mol_type = other DNA
gctctgccgccagcatccatgcagc

SEQ ID NO: 11781 - DNA, 25 bp, synthetic construct
  misc_feature 1..25: note = Oligonucleotide
  source 1..25: mol_type = other DNA
ccagctctgccgccagcatccatgc

SEQ ID NO: 11782 - DNA, 25 bp, synthetic construct
  misc_feature 1..25: note = Oligonucleotide
  source 1..25: mol_type = other DNA
tgaccagctctgccgccagcatcca

SEQ ID NO: 11783 - DNA, 25 bp, synthetic construct
  misc_feature 1..25: note = Oligonucleotide
  source 1..25: mol_type = other DNA
ggatgaccagctctgccgccagcat

SEQ ID NO: 11784 - DNA, 25 bp, synthetic construct
  misc_feature 1..25: note = Oligonucleotide
  source 1..25: mol_type = other DNA
gggggatgaccagctctgccgccag

SEQ ID NO: 11785 - DNA, 25 bp, synthetic construct
  misc_feature 1..25: note = Oligonucleotide
  source 1..25: mol_type = other DNA
ggtgggggatgaccagctctgccgc

SEQ ID NO: 11786 - DNA, 25 bp, synthetic construct
  misc_feature 1..25: note = Oligonucleotide
  source 1..25: mol_type = other DNA
gcgggtgggggatgaccagctctgc

SEQ ID NO: 11787 - DNA, 25 bp, synthetic construct
  misc_feature 1..25: note = Oligonucleotide
  source 1..25: mol_type = other DNA
ggggcgggtgggggatgaccagctc

SEQ ID NO: 11788 - DNA, 25 bp, synthetic construct
  misc_feature 1..25: note = Oligonucleotide
  source 1..25: mol_type = other DNA
aagggggcgggtgggggatgaccag

SEQ ID NO: 11789 - DNA, 25 bp, synthetic construct
  misc_feature 1..25: note = Oligonucleotide
  source 1..25: mol_type = other DNA
gacaagggggcgggtgggggatgac

SEQ ID NO: 11790 - DNA, 25 bp, synthetic construct
  misc_feature 1..25: note = Oligonucleotide
  source 1..25: mol_type = other DNA
gcagacaagggggcgggtgggggat

SEQ ID NO: 11791 - DNA, 25 bp, synthetic construct
  misc_feature 1..25: note = Oligonucleotide
  source 1..25: mol_type = other DNA
aaggcagacaagggggcgggtgggg

SEQ ID NO: 11792 - DNA, 25 bp, synthetic construct
  misc_feature 1..25: note = Oligonucleotide
  source 1..25: mol_type = other DNA
aaaaaggcagacaagggggcgggtg

SEQ ID NO: 11793 - DNA, 25 bp, synthetic construct
  misc_feature 1..25: note = Oligonucleotide
  source 1..25: mol_type = other DNA
tttaaaaaggcagacaagggggcgg

SEQ ID NO: 11794 - DNA, 25 bp, synthetic construct
  misc_feature 1..25: note = Oligonucleotide
  source 1..25: mol_type = other DNA
agctttaaaaaggcagacaaggggg

SEQ ID NO: 11795 - DNA, 25 bp, synthetic construct
  misc_feature 1..25: note = Oligonucleotide
  source 1..25: mol_type = other DNA
agcagctttaaaaaggcagacaagg

SEQ ID NO: 11796 - DNA, 25 bp, synthetic construct
  misc_feature 1..25: note = Oligonucleotide
  source 1..25: mol_type = other DNA
aaaagcagctttaaaaaggcagaca

SEQ ID NO: 11797 - DNA, 25 bp, synthetic construct
  misc_feature 1..25: note = Oligonucleotide
  source 1..25: mol_type = other DNA
ggcaaaagcagctttaaaaaggcag

SEQ ID NO: 11798 - DNA, 25 bp, synthetic construct
  misc_feature 1..25: note = Oligonucleotide
  source 1..25: mol_type = other DNA
gaaggcaaaagcagctttaaaaagg

SEQ ID NO: 11799 - DNA, 25 bp, synthetic construct
  misc_feature 1..25: note = Oligonucleotide
  source 1..25: mol_type = other DNA
acagaaggcaaaagcagctttaaaa

SEQ ID NO: 11800 - DNA, 25 bp, synthetic construct
  misc_feature 1..25: note = Oligonucleotide
  source 1..25: mol_type = other DNA
ggcacagaaggcaaaagcagcttta

SEQ ID NO: 11801 - DNA, 25 bp, synthetic construct
  misc_feature 1..25: note = Oligonucleotide
  source 1..25: mol_type = other DNA
aggggcacagaaggcaaaagcagct

SEQ ID NO: 11802 - DNA, 25 bp, synthetic construct
  misc_feature 1..25: note = Oligonucleotide
  source 1..25: mol_type = other DNA
cctaggggcacagaaggcaaaagca

SEQ ID NO: 11803 - DNA, 25 bp, synthetic construct
  misc_feature 1..25: note = Oligonucleotide
  source 1..25: mol_type = other DNA
agacctaggggcacagaaggcaaaa

SEQ ID NO: 11804 - DNA, 25 bp, synthetic construct
  misc_feature 1..25: note = Oligonucleotide
  source 1..25: mol_type = other DNA
gggagacctaggggcacagaaggca

SEQ ID NO: 11805 - DNA, 25 bp, synthetic construct
  misc_feature 1..25: note = Oligonucleotide
  source 1..25: mol_type = other DNA
gaggggagacctaggggcacagaag

SEQ ID NO: 11806 - DNA, 25 bp, synthetic construct
  misc_feature 1..25: note = Oligonucleotide
  source 1..25: mol_type = other DNA
ggagaggggagacctaggggcacag

SEQ ID NO: 11807 - DNA, 25 bp, synthetic construct
  misc_feature 1..25: note = Oligonucleotide
  source 1..25: mol_type = other DNA
agaggagaggggagacctaggggca

SEQ ID NO: 11808 - DNA, 25 bp, synthetic construct
  misc_feature 1..25: note = Oligonucleotide
  source 1..25: mol_type = other DNA
caaagaggagaggggagacctaggg

SEQ ID NO: 11809 - DNA, 25 bp, synthetic construct
  misc_feature 1..25: note = Oligonucleotide
  source 1..25: mol_type = other DNA
acccaaagaggagaggggagaccta

SEQ ID NO: 11810 - DNA, 25 bp, synthetic construct
  misc_feature 1..25: note = Oligonucleotide
  source 1..25: mol_type = other DNA
cagacccaaagaggagaggggagac

SEQ ID NO: 11811 - DNA, 25 bp, synthetic construct
  misc_feature 1..25: note = Oligonucleotide
  source 1..25: mol_type = other DNA
ccccagacccaaagaggagagggga

SEQ ID NO: 11812 - DNA, 25 bp, synthetic construct
  misc_feature 1..25: note = Oligonucleotide
  source 1..25: mol_type = other DNA
cccccccagacccaaagaggagagg

SEQ ID NO: 11813 - DNA, 25 bp, synthetic construct
  misc_feature 1..25: note = Oligonucleotide
  source 1..25: mol_type = other DNA
ccacccccccagacccaaagaggag

SEQ ID NO: 11814 - DNA, 25 bp, synthetic construct
  misc_feature 1..25: note = Oligonucleotide
  source 1..25: mol_type = other DNA
ataccacccccccagacccaaagag

SEQ ID NO: 11815 - DNA, 25 bp, synthetic construct
  misc_feature 1..25: note = Oligonucleotide
  source 1..25: mol_type = other DNA
cacataccacccccccagacccaaa

SEQ ID NO: 11816 - DNA, 25 bp, synthetic construct
  misc_feature 1..25: note = Oligonucleotide
  source 1..25: mol_type = other DNA
atccacataccacccccccagaccc

SEQ ID NO: 11817 - DNA, 25 bp, synthetic construct
  misc_feature 1..25: note = Oligonucleotide
  source 1..25: mol_type = other DNA
ggcatccacataccacccccccaga

SEQ ID NO: 11818 - DNA, 25 bp, synthetic construct
  misc_feature 1..25: note = Oligonucleotide
  source 1..25: mol_type = other DNA
ggtggcatccacataccaccccccc

SEQ ID NO: 11819 - DNA, 25 bp, synthetic construct
  misc_feature 1..25: note = Oligonucleotide
  source 1..25: mol_type = other DNA
agaggtggcatccacataccacccc

SEQ ID NO: 11820 - DNA, 25 bp, synthetic construct
  misc_feature 1..25: note = Oligonucleotide
  source 1..25: mol_type = other DNA
tcaagaggtggcatccacataccac

SEQ ID NO: 11821 - DNA, 25 bp, synthetic construct
  misc_feature 1..25: note = Oligonucleotide
  source 1..25: mol_type = other DNA
gagtcaagaggtggcatccacatac

SEQ ID NO: 11822 - DNA, 25 bp, synthetic construct
  misc_feature 1..25: note = Oligonucleotide
  source 1..25: mol_type = other DNA
caggagtcaagaggtggcatccaca

SEQ ID NO: 11823 - DNA, 25 bp, synthetic construct
  misc_feature 1..25: note = Oligonucleotide
  source 1..25: mol_type = other DNA
aagcaggagtcaagaggtggcatcc

SEQ ID NO: 11824 - DNA, 25 bp, synthetic construct
  misc_feature 1..25: note = Oligonucleotide
  source 1..25: mol_type = other DNA
aagaagcaggagtcaagaggtggca

SEQ ID NO: 11825 - DNA, 25 bp, synthetic construct
  misc_feature 1..25: note = Oligonucleotide
  source 1..25: mol_type = other DNA
agcaagaagcaggagtcaagaggtg

SEQ ID NO: 11826 - DNA, 25 bp, synthetic construct
  misc_feature 1..25: note = Oligonucleotide
  source 1..25: mol_type = other DNA
ggcagcaagaagcaggagtcaagag

SEQ ID NO: 11827 - DNA, 25 bp, synthetic construct
  misc_feature 1..25: note = Oligonucleotide
  source 1..25: mol_type = other DNA
ccaggcagcaagaagcaggagtcaa

SEQ ID NO: 11828 - DNA, 25 bp, synthetic construct
  misc_feature 1..25: note = Oligonucleotide
  source 1..25: mol_type = other DNA
cttccaggcagcaagaagcaggagt

SEQ ID NO: 11829 - DNA, 25 bp, synthetic construct
  misc_feature 1..25: note = Oligonucleotide
  source 1..25: mol_type = other DNA
ggtcttccaggcagcaagaagcagg

SEQ ID NO: 11830 - DNA, 25 bp, synthetic construct
  misc_feature 1..25: note = Oligonucleotide
  source 1..25: mol_type = other DNA
gttggtcttccaggcagcaagaagc

SEQ ID NO: 11831 - DNA, 25 bp, synthetic construct
  misc_feature 1..25: note = Oligonucleotide
  source 1..25: mol_type = other DNA
taggttggtcttccaggcagcaaga

SEQ ID NO: 11832 - DNA, 25 bp, synthetic construct
  misc_feature 1..25: note = Oligonucleotide
  source 1..25: mol_type = other DNA
cactaggttggtcttccaggcagca

SEQ ID NO: 11833 - DNA, 25 bp, synthetic construct
  misc_feature 1..25: note = Oligonucleotide
  source 1..25: mol_type = other DNA
gcccactaggttggtcttccaggca

SEQ ID NO: 11834 - DNA, 25 bp, synthetic construct
  misc_feature 1..25: note = Oligonucleotide
  source 1..25: mol_type = other DNA
ggggcccactaggttggtcttccag

SEQ ID NO: 11835 - DNA, 25 bp, synthetic construct
  misc_feature 1..25: note = Oligonucleotide
  source 1..25: mol_type = other DNA
tacggggcccactaggttggtcttc

SEQ ID NO: 11836 - DNA, 25 bp, synthetic construct
  misc_feature 1..25: note = Oligonucleotide
  source 1..25: mol_type = other DNA
cagtacggggcccactaggttggtc

SEQ ID NO: 11837 - DNA, 25 bp, synthetic construct
  misc_feature 1..25: note = Oligonucleotide
  source 1..25: mol_type = other DNA
tgacagtacggggcccactaggttg

SEQ ID NO: 11838 - DNA, 25 bp, synthetic construct
  misc_feature 1..25: note = Oligonucleotide
  source 1..25: mol_type = other DNA
ggctgacagtacggggcccactagg

SEQ ID NO: 11839 - DNA, 25 bp, synthetic construct
  misc_feature 1..25: note = Oligonucleotide
  source 1..25: mol_type = other DNA
caaggctgacagtacggggcccact

SEQ ID NO: 11840 - DNA, 25 bp, synthetic construct
  misc_feature 1..25: note = Oligonucleotide
  source 1..25: mol_type = other DNA
ctccaaggctgacagtacggggccc

SEQ ID NO: 11841 - DNA, 25 bp, synthetic construct
  misc_feature 1..25: note = Oligonucleotide
  source 1..25: mol_type = other DNA
gtcctccaaggctgacagtacgggg

SEQ ID NO: 11842 - DNA, 25 bp, synthetic construct
  misc_feature 1..25: note = Oligonucleotide
  source 1..25: mol_type = other DNA
tctgtcctccaaggctgacagtacg

SEQ ID NO: 11843 - DNA, 25 bp, synthetic construct
  misc_feature 1..25: note = Oligonucleotide
  source 1..25: mol_type = other DNA
aactctgtcctccaaggctgacagt

SEQ ID NO: 11844 - DNA, 25 bp, synthetic construct
  misc_feature 1..25: note = Oligonucleotide
  source 1..25: mol_type = other DNA
gtgaactctgtcctccaaggctgac

SEQ ID NO: 11845 - DNA, 25 bp, synthetic construct
  misc_feature 1..25: note = Oligonucleotide
  source 1..25: mol_type = other DNA
gctgtgaactctgtcctccaaggct

SEQ ID NO: 11846 - DNA, 25 bp, synthetic construct
  misc_feature 1..25: note = Oligonucleotide
  source 1..25: mol_type = other DNA
tacgctgtgaactctgtcctccaag

SEQ ID NO: 11847 - DNA, 25 bp, synthetic construct
  misc_feature 1..25: note = Oligonucleotide
  source 1..25: mol_type = other DNA
tgctacgctgtgaactctgtcctcc

SEQ ID NO: 11848 - DNA, 25 bp, synthetic construct
  misc_feature 1..25: note = Oligonucleotide
  source 1..25: mol_type = other DNA
cgttgctacgctgtgaactctgtcc

SEQ ID NO: 11849 - DNA, 25 bp, synthetic construct
  misc_feature 1..25: note = Oligonucleotide
  source 1..25: mol_type = other DNA
acacgttgctacgctgtgaactctg

SEQ ID NO: 11850 - DNA, 25 bp, synthetic construct
  misc_feature 1..25: note = Oligonucleotide
  source 1..25: mol_type = other DNA
tgaacacgttgctacgctgtgaact

SEQ ID NO: 11851 - DNA, 25 bp, synthetic construct
  misc_feature 1..25: note = Oligonucleotide
  source 1..25: mol_type = other DNA
ttctgaacacgttgctacgctgtga

SEQ ID NO: 11852 - DNA, 25 bp, synthetic construct
  misc_feature 1..25: note = Oligonucleotide
  source 1..25: mol_type = other DNA
aagttctgaacacgttgctacgctg

SEQ ID NO: 11853 - DNA, 25 bp, synthetic construct
  misc_feature 1..25: note = Oligonucleotide
  source 1..25: mol_type = other DNA
cttaagttctgaacacgttgctacg

SEQ ID NO: 11854 - DNA, 25 bp, synthetic construct
  misc_feature 1..25: note = Oligonucleotide
  source 1..25: mol_type = other DNA
gtccttaagttctgaacacgttgct

SEQ ID NO: 11855 - DNA, 25 bp, synthetic construct
  misc_feature 1..25: note = Oligonucleotide
  source 1..25: mol_type = other DNA
aaagtccttaagttctgaacacgtt

SEQ ID NO: 11856 - DNA, 25 bp, synthetic construct
  misc_feature 1..25: note = Oligonucleotide
  source 1..25: mol_type = other DNA
tgcaaagtccttaagttctgaacac

SEQ ID NO: 11857 - DNA, 25 bp, synthetic construct
  misc_feature 1..25: note = Oligonucleotide
  source 1..25: mol_type = other DNA
acctgcaaagtccttaagttctgaa

SEQ ID NO: 11858 - DNA, 25 bp, synthetic construct
  misc_feature 1..25: note = Oligonucleotide
  source 1..25: mol_type = other DNA
aagacctgcaaagtccttaagttct

SEQ ID NO: 11859 - DNA, 25 bp, synthetic construct
  misc_feature 1..25: note = Oligonucleotide
  source 1..25: mol_type = other DNA
tgtaagacctgcaaagtccttaagt

SEQ ID NO: 11860 - DNA, 25 bp, synthetic construct
  misc_feature 1..25: note = Oligonucleotide
  source 1..25: mol_type = other DNA
ctttgtaagacctgcaaagtcctta

SEQ ID NO: 11861 - DNA, 25 bp, synthetic construct
  misc_feature 1..25: note = Oligonucleotide
  source 1..25: mol_type = other DNA
ggcctttgtaagacctgcaaagtcc

SEQ ID NO: 11862 - DNA, 25 bp, synthetic construct
  misc_feature 1..25: note = Oligonucleotide
  source 1..25: mol_type = other DNA
ccaggcctttgtaagacctgcaaag

SEQ ID NO: 11863 - DNA, 25 bp, synthetic construct
  misc_feature 1..25: note = Oligonucleotide
  source 1..25: mol_type = other DNA
tggccaggcctttgtaagacctgca

SEQ ID NO: 11864 - DNA, 25 bp, synthetic construct
  misc_feature 1..25: note = Oligonucleotide
  source 1..25: mol_type = other DNA
gaatggccaggcctttgtaagacct

SEQ ID NO: 11865 - DNA, 25 bp, synthetic construct
  misc_feature 1..25: note = Oligonucleotide
  source 1..25: mol_type = other DNA
gtagaatggccaggcctttgtaaga

SEQ ID NO: 11866 - DNA, 25 bp, synthetic construct
  misc_feature 1..25: note = Oligonucleotide
  source 1..25: mol_type = other DNA
aaggtagaatggccaggcctttgta

SEQ ID NO: 11867 - DNA, 25 bp, synthetic construct
  misc_feature 1..25: note = Oligonucleotide
  source 1..25: mol_type = other DNA
aagaaggtagaatggccaggccttt

SEQ ID NO: 11868 - DNA, 25 bp, synthetic construct
  misc_feature 1..25: note = Oligonucleotide
  source 1..25: mol_type = other DNA
ctaaagaaggtagaatggccaggcc

SEQ ID NO: 11869 - DNA, 25 bp, synthetic construct
  misc_feature 1..25: note = Oligonucleotide
  source 1..25: mol_type = other DNA
gaactaaagaaggtagaatggccag

SEQ ID NO: 11870 - DNA, 25 bp, synthetic construct
  misc_feature 1..25: note = Oligonucleotide
  source 1..25: mol_type = other DNA
cctgaactaaagaaggtagaatggc

SEQ ID NO: 11871 - DNA, 25 bp, synthetic construct
  misc_feature 1..25: note = Oligonucleotide
  source 1..25: mol_type = other DNA
aatcctgaactaaagaaggtagaat

SEQ ID NO: 11872 - DNA, 25 bp, synthetic construct
  misc_feature 1..25: note = Oligonucleotide
  source 1..25: mol_type = other DNA
ttgaatcctgaactaaagaaggtag

SEQ ID NO: 11873 - DNA, 25 bp, synthetic construct
  misc_feature 1..25: note = Oligonucleotide
  source 1..25: mol_type = other DNA
cttttgaatcctgaactaaagaagg

SEQ ID NO: 11874 - DNA, 25 bp, synthetic construct
  misc_feature 1..25: note = Oligonucleotide
  source 1..25: mol_type = other DNA
tgtcttttgaatcctgaactaaaga

SEQ ID NO: 11875 - DNA, 25 bp, synthetic construct
  misc_feature 1..25: note = Oligonucleotide
  source 1..25: mol_type = other DNA
acctgtcttttgaatcctgaactaa

SEQ ID NO: 11876 - DNA, 25 bp, synthetic construct
  misc_feature 1..25: note = Oligonucleotide
  source 1..25: mol_type = other DNA
cctacctgtcttttgaatcctgaac

SEQ ID NO: 11877 - DNA, 25 bp, synthetic construct
  misc_feature 1..25: note = Oligonucleotide
  source 1..25: mol_type = other DNA
gctcctacctgtcttttgaatcctg

SEQ ID NO: 11878 - DNA, 25 bp, synthetic construct
  misc_feature 1..25: note = Oligonucleotide
  source 1..25: mol_type = other DNA
caagctcctacctgtcttttgaatc

SEQ ID NO: 11879 - DNA, 25 bp, synthetic construct
  misc_feature 1..25: note = Oligonucleotide
  source 1..25: mol_type = other DNA
tcccaagctcctacctgtcttttga

SEQ ID NO: 11880 - DNA, 25 bp, synthetic construct
  misc_feature 1..25: note = Oligonucleotide
  source 1..25: mol_type = other DNA
gcttcccaagctcctacctgtcttt

SEQ ID NO: 11881 - DNA, 25 bp, synthetic construct
  misc_feature 1..25: note = Oligonucleotide
  source 1..25: mol_type = other DNA
tgagcttcccaagctcctacctgtc

SEQ ID NO: 11882 - DNA, 25 bp, synthetic construct
  misc_feature 1..25: note = Oligonucleotide
  source 1..25: mol_type = other DNA
tcatgagcttcccaagctcctacct

SEQ ID NO: 11883 - DNA, 25 bp, synthetic construct
  misc_feature 1..25: note = Oligonucleotide
  source 1..25: mol_type = other DNA
gcctcatgagcttcccaagctccta

SEQ ID NO: 11884 - DNA, 25 bp, synthetic construct
  misc_feature 1..25: note = Oligonucleotide
  source 1..25: mol_type = other DNA
gaggcctcatgagcttcccaagctc

SEQ ID NO: 11885 - DNA, 25 bp, synthetic construct
  misc_feature 1..25: note = Oligonucleotide
  source 1..25: mol_type = other DNA
ggagaggcctcatgagcttcccaag

SEQ ID NO: 11886 - DNA, 25 bp, synthetic construct
  misc_feature 1..25: note = Oligonucleotide
  source 1..25: mol_type = other DNA
ttaggagaggcctcatgagcttccc

SEQ ID NO: 11887 - DNA, 25 bp, synthetic construct
  misc_feature 1..25: note = Oligonucleotide
  source 1..25: mol_type = other DNA
accttaggagaggcctcatgagctt

SEQ ID NO: 11888 - DNA, 25 bp, synthetic construct
  misc_feature 1..25: note = Oligonucleotide
  source 1..25: mol_type = other DNA
gggaccttaggagaggcctcatgag

SEQ ID NO: 11889 - DNA, 25 bp, synthetic construct
  misc_feature 1..25: note = Oligonucleotide
  source 1..25: mol_type = other DNA
cccgggaccttaggagaggcctcat

SEQ ID NO: 11890 - DNA, 25 bp, synthetic construct
  misc_feature 1..25: note = Oligonucleotide
  source 1..25: mol_type = other DNA
catcccgggaccttaggagaggcct

SEQ ID NO: 11891 - DNA, 25 bp, synthetic construct
  misc_feature 1..25: note = Oligonucleotide
  source 1..25: mol_type = other DNA
cagcatcccgggaccttaggagagg

SEQ ID NO: 11892 - DNA, 25 bp, synthetic construct
  misc_feature 1..25: note = Oligonucleotide
  source 1..25: mol_type = other DNA
aggcagcatcccgggaccttaggag

SEQ ID NO: 11893 - DNA, 25 bp, synthetic construct
  misc_feature 1..25: note = Oligonucleotide
  source 1..25: mol_type = other DNA
tggaggcagcatcccgggaccttag

SEQ ID NO: 11894 - DNA, 25 bp, synthetic construct
  misc_feature 1..25: note = Oligonucleotide
  source 1..25: mol_type = other DNA
agctggaggcagcatcccgggacct

SEQ ID NO: 11895 - DNA, 25 bp, synthetic construct
  misc_feature 1..25: note = Oligonucleotide
  source 1..25: mol_type = other DNA
aggagctggaggcagcatcccggga

SEQ ID NO: 11896 - DNA, 25 bp, synthetic construct
  misc_feature 1..25: note = Oligonucleotide
  source 1..25: mol_type = other DNA
gacaggagctggaggcagcatcccg

SEQ ID NO: 11897 - DNA, 25 bp, synthetic construct
  misc_feature 1..25: note = Oligonucleotide
  source 1..25: mol_type = other DNA
gatgacaggagctggaggcagcatc

SEQ ID NO: 11898 - DNA, 25 bp, synthetic construct
  misc_feature 1..25: note = Oligonucleotide
  source 1..25: mol_type = other DNA
caggatgacaggagctggaggcagc

SEQ ID NO: 11899 - DNA, 25 bp, synthetic construct
  misc_feature 1..25: note = Oligonucleotide
  source 1..25: mol_type = other DNA
ccccaggatgacaggagctggaggc

SEQ ID NO: 11900 - DNA, 25 bp, synthetic construct
  misc_feature 1..25: note = Oligonucleotide
  source 1..25: mol_type = other DNA
attccccaggatgacaggagctgga

SEQ ID NO: 11901 - DNA, 25 bp, synthetic construct
  misc_feature 1..25: note = Oligonucleotide
  source 1..25: mol_type = other DNA
gcaattccccaggatgacaggagct

SEQ ID NO: 11902 - DNA, 25 bp, synthetic construct
  misc_feature 1..25: note = Oligonucleotide
  source 1..25: mol_type = other DNA
agagcaattccccaggatgacagga

SEQ ID NO: 11903 - DNA, 25 bp, synthetic construct
  misc_feature 1..25: note = Oligonucleotide
  source 1..25: mol_type = other DNA
cccagagcaattccccaggatgaca

SEQ ID NO: 11904 - DNA, 25 bp, synthetic construct
  misc_feature 1..25: note = Oligonucleotide
  source 1..25: mol_type = other DNA
gaccccagagcaattccccaggatg

SEQ ID NO: 11905 - DNA, 25 bp, synthetic construct
  misc_feature 1..25: note = Oligonucleotide
  source 1..25: mol_type = other DNA
gaggaccccagagcaattccccagg

SEQ ID NO: 11906 - DNA, 25 bp, synthetic construct
  misc_feature 1..25: note = Oligonucleotide
  source 1..25: mol_type = other DNA
ggagaggaccccagagcaattcccc

SEQ ID NO: 11907 - DNA, 25 bp, synthetic construct
  misc_feature 1..25: note = Oligonucleotide
  source 1..25: mol_type = other DNA
aggggagaggaccccagagcaattc

SEQ ID NO: 11908 - DNA, 25 bp, synthetic construct
  misc_feature 1..25: note = Oligonucleotide
  source 1..25: mol_type = other DNA
aaaaggggagaggaccccagagcaa

SEQ ID NO: 11909 - DNA, 25 bp, synthetic construct
  misc_feature 1..25: note = Oligonucleotide
  source 1..25: mol_type = other DNA
gctaaaaggggagaggaccccagag

SEQ ID NO: 11910 - DNA, 25 bp, synthetic construct
  misc_feature 1..25: note = Oligonucleotide
  source 1..25: mol_type = other DNA
aaggctaaaaggggagaggacccca

SEQ ID NO: 11911 - DNA, 25 bp, synthetic construct
  misc_feature 1..25: note = Oligonucleotide
  source 1..25: mol_type = other DNA
gaaaaggctaaaaggggagaggacc

SEQ ID NO: 11912 - DNA, 25 bp, synthetic construct
  misc_feature 1..25: note = Oligonucleotide
  source 1..25: mol_type = other DNA
ttggaaaaggctaaaaggggagagg

SEQ ID NO: 11913 - DNA, 25 bp, synthetic construct
  misc_feature 1..25: note = Oligonucleotide
  source 1..25: mol_type = other DNA
gagttggaaaaggctaaaaggggag

SEQ ID NO: 11914 - DNA, 25 bp, synthetic construct
  misc_feature 1..25: note = Oligonucleotide
  source 1..25: mol_type = other DNA
tgagagttggaaaaggctaaaaggg

SEQ ID NO: 11915 - DNA, 25 bp, synthetic construct
  misc_feature 1..25: note = Oligonucleotide
  source 1..25: mol_type = other DNA
ggctgagagttggaaaaggctaaaa

SEQ ID NO: 11916 - DNA, 25 bp, synthetic construct
  misc_feature 1..25: note = Oligonucleotide
  source 1..25: mol_type = other DNA
tttggctgagagttggaaaaggcta

SEQ ID NO: 11917 - DNA, 25 bp, synthetic construct
  misc_feature 1..25: note = Oligonucleotide
  source 1..25: mol_type = other DNA
cagtttggctgagagttggaaaagg

SEQ ID NO: 11918 - DNA, 25 bp, synthetic construct
  misc_feature 1..25: note = Oligonucleotide
  source 1..25: mol_type = other DNA
ttccagtttggctgagagttggaaa

SEQ ID NO: 11919 - DNA, 25 bp, synthetic construct
  misc_feature 1..25: note = Oligonucleotide
  source 1..25: mol_type = other DNA
gctttccagtttggctgagagttgg

SEQ ID NO: 11920 - DNA, 25 bp, synthetic construct
  misc_feature 1..25: note = Oligonucleotide
  source 1..25: mol_type = other DNA
agggctttccagtttggctgagagt

SEQ ID NO: 11921 - DNA, 25 bp, synthetic construct
  misc_feature 1..25: note = Oligonucleotide
  source 1..25: mol_type = other DNA
aagagggctttccagtttggctgag

SEQ ID NO: 11922 - DNA, 25 bp, synthetic construct
  misc_feature 1..25: note = Oligonucleotide
  source 1..25: mol_type = other DNA
gggaagagggctttccagtttggct

SEQ ID NO: 11923 - DNA, 25 bp, synthetic construct
  misc_feature 1..25: note = Oligonucleotide
  source 1..25: mol_type = other DNA
gctgggaagagggctttccagtttg

SEQ ID NO: 11924 - DNA, 25 bp, synthetic construct
  misc_feature 1..25: note = Oligonucleotide
  source 1..25: mol_type = other DNA
actgctgggaagagggctttccagt

SEQ ID NO: 11925 - DNA, 25 bp, synthetic construct
  misc_feature 1..25: note = Oligonucleotide
  source 1..25: mol_type = other DNA
tgcactgctgggaagagggctttcc

SEQ ID NO: 11926 - DNA, 25 bp, synthetic construct
  misc_feature 1..25: note = Oligonucleotide
  source 1..25: mol_type = other DNA
cactgcactgctgggaagagggctt

SEQ ID NO: 11927 - DNA, 25 bp, synthetic construct
  misc_feature 1..25: note = Oligonucleotide
  source 1..25: mol_type = other DNA
caacactgcactgctgggaagaggg

SEQ ID NO: 11928 - DNA, 25 bp, synthetic construct
  misc_feature 1..25: note = Oligonucleotide
  source 1..25: mol_type = other DNA
cttcaacactgcactgctgggaaga

SEQ ID NO: 11929 - DNA, 25 bp, synthetic construct
  misc_feature 1..25: note = Oligonucleotide
  source 1..25: mol_type = other DNA
caccttcaacactgcactgctggga

SEQ ID NO: 11930 - DNA, 25 bp, synthetic construct
  misc_feature 1..25: note = Oligonucleotide
  source 1..25: mol_type = other DNA
gggcaccttcaacactgcactgctg

SEQ ID NO: 11931 - DNA, 25 bp, synthetic construct
  misc_feature 1..25: note = Oligonucleotide
  source 1..25: mol_type = other DNA
tacgggcaccttcaacactgcactg

SEQ ID NO: 11932 - DNA, 25 bp, synthetic construct
  misc_feature 1..25: note = Oligonucleotide
  source 1..25: mol_type = other DNA
ttctacgggcaccttcaacactgca

SEQ ID NO: 11933 - DNA, 25 bp, synthetic construct
  misc_feature 1..25: note = Oligonucleotide
  source 1..25: mol_type = other DNA
ccattctacgggcaccttcaacact

SEQ ID NO: 11934 - DNA, 25 bp, synthetic construct
  misc_feature 1..25: note = Oligonucleotide
  source 1..25: mol_type = other DNA
cacccattctacgggcaccttcaac

SEQ ID NO: 11935 - DNA, 25 bp, synthetic construct
  misc_feature 1..25: note = Oligonucleotide
  source 1..25: mol_type = other DNA
taacacccattctacgggcaccttc

SEQ ID NO: 11936 - DNA, 25 bp, synthetic construct
  misc_feature 1..25: note = Oligonucleotide
  source 1..25: mol_type = other DNA
ttataacacccattctacgggcacc

SEQ ID NO: 11937 - DNA, 25 bp, synthetic construct
  misc_feature 1..25: note = Oligonucleotide
  source 1..25: mol_type = other DNA
tgattataacacccattctacgggc

SEQ ID NO: 11938 - DNA, 25 bp, synthetic construct
  misc_feature 1..25: note = Oligonucleotide
  source 1..25: mol_type = other DNA
ctctgattataacacccattctacg

SEQ ID NO: 11939 - DNA, 25 bp, synthetic construct
  misc_feature 1..25: note = Oligonucleotide
  source 1..25: mol_type = other DNA
tcactctgattataacacccattct

SEQ ID NO: 11940 - DNA, 25 bp, synthetic construct
  misc_feature 1..25: note = Oligonucleotide
  source 1..25: mol_type = other DNA
tgctcactctgattataacacccat

SEQ ID NO: 11941 - DNA, 25 bp, synthetic construct
  misc_feature 1..25: note = Oligonucleotide
  source 1..25: mol_type = other DNA
ggctgctcactctgattataacacc

SEQ ID NO: 11942 - DNA, 25 bp, synthetic construct
  misc_feature 1..25: note = Oligonucleotide
  source 1..25: mol_type = other DNA
ccaggctgctcactctgattataac

SEQ ID NO: 11943 - DNA, 25 bp, synthetic construct
  misc_feature 1..25: note = Oligonucleotide
  source 1..25: mol_type = other DNA
ggaccaggctgctcactctgattat

SEQ ID NO: 11944 - DNA, 25 bp, synthetic construct
  misc_feature 1..25: note = Oligonucleotide
  source 1..25: mol_type = other DNA
ctaggaccaggctgctcactctgat

SEQ ID NO: 11945 - DNA, 25 bp, synthetic construct
  misc_feature 1..25: note = Oligonucleotide
  source 1..25: mol_type = other DNA
ggcctaggaccaggctgctcactct

SEQ ID NO: 11946 - DNA, 25 bp, synthetic construct
  misc_feature 1..25: note = Oligonucleotide
  source 1..25: mol_type = other DNA
agaggcctaggaccaggctgctcac

SEQ ID NO: 11947 - DNA, 25 bp, synthetic construct
  misc_feature 1..25: note = Oligonucleotide
  source 1..25: mol_type = other DNA
tacagaggcctaggaccaggctgct

SEQ ID NO: 11948 - DNA, 25 bp, synthetic construct
  misc_feature 1..25: note = Oligonucleotide
  source 1..25: mol_type = other DNA
ctgtacagaggcctaggaccaggct

SEQ ID NO: 11949 - DNA, 25 bp, synthetic construct
  misc_feature 1..25: note = Oligonucleotide
  source 1..25: mol_type = other DNA
gtcctgtacagaggcctaggaccag

SEQ ID NO: 11950 - DNA, 25 bp, synthetic construct
  misc_feature 1..25: note = Oligonucleotide
  source 1..25: mol_type = other DNA
ctggtcctgtacagaggcctaggac

SEQ ID NO: 11951 - DNA, 25 bp, synthetic construct
  misc_feature 1..25: note = Oligonucleotide
  source 1..25: mol_type = other DNA
ggtctggtcctgtacagaggcctag

SEQ ID NO: 11952 - DNA, 25 bp, synthetic construct
  misc_feature 1..25: note = Oligonucleotide
  source 1..25: mol_type = other DNA
aggggtctggtcctgtacagaggcc

SEQ ID NO: 11953 - DNA, 25 bp, synthetic construct
  misc_feature 1..25: note = Oligonucleotide
  source 1..25: mol_type = other DNA
ctcaggggtctggtcctgtacagag

SEQ ID NO: 11954 - DNA, 25 bp, synthetic construct
  misc_feature 1..25: note = Oligonucleotide
  source 1..25: mol_type = other DNA
agcctcaggggtctggtcctgtaca

SEQ ID NO: 11955 - DNA, 25 bp, synthetic construct
  misc_feature 1..25: note = Oligonucleotide
  source 1..25: mol_type = other DNA
cccagcctcaggggtctggtcctgt

SEQ ID NO: 11956 - DNA, 25 bp, synthetic construct
  misc_feature 1..25: note = Oligonucleotide
  source 1..25: mol_type = other DNA
gaccccagcctcaggggtctggtcc

SEQ ID NO: 11957 - DNA, 25 bp, synthetic construct
  misc_feature 1..25: note = Oligonucleotide
  source 1..25: mol_type = other DNA
ggagaccccagcctcaggggtctgg

SEQ ID NO: 11958 - DNA, 25 bp, synthetic construct
  misc_feature 1..25: note = Oligonucleotide
  source 1..25: mol_type = other DNA
tcaggagaccccagcctcaggggtc

SEQ ID NO: 11959 - DNA, 25 bp, synthetic construct
  misc_feature 1..25: note = Oligonucleotide
  source 1..25: mol_type = other DNA
gggtcaggagaccccagcctcaggg

SEQ ID NO: 11960 - DNA, 25 bp, synthetic construct
  misc_feature 1..25: note = Oligonucleotide
  source 1..25: mol_type = other DNA
tgtgggtcaggagaccccagcctca

SEQ ID NO: 11961 - DNA, 25 bp, synthetic construct
  misc_feature 1..25: note = Oligonucleotide
  source 1..25: mol_type = other DNA
aggtgtgggtcaggagaccccagcc

SEQ ID NO: 11962 - DNA, 25 bp, synthetic construct
  misc_feature 1..25: note = Oligonucleotide
  source 1..25: mol_type = other DNA
gtcaggtgtgggtcaggagacccca

SEQ ID NO: 11963 - DNA, 25 bp, synthetic construct
  misc_feature 1..25: note = Oligonucleotide
  source 1..25: mol_type = other DNA
ctggtcaggtgtgggtcaggagacc

SEQ ID NO: 11964 - DNA, 25 bp, synthetic construct
  misc_feature 1..25: note = Oligonucleotide
  source 1..25: mol_type = other DNA
gggctggtcaggtgtgggtcaggag

SEQ ID NO: 11965 - DNA, 25 bp, synthetic construct
  misc_feature 1..25: note = Oligonucleotide
  source 1..25: mol_type = other DNA
tgggggctggtcaggtgtgggtcag

SEQ ID NO: 11966 - DNA, 25 bp, synthetic construct
  misc_feature 1..25: note = Oligonucleotide
  source 1..25: mol_type = other DNA
agatgggggctggtcaggtgtgggt

SEQ ID NO: 11967 - DNA, 25 bp, synthetic construct
  misc_feature 1..25: note = Oligonucleotide
  source 1..25: mol_type = other DNA
ggaagatgggggctggtcaggtgtg

SEQ ID NO: 11968 - DNA, 25 bp, synthetic construct
  misc_feature 1..25: note = Oligonucleotide
  source 1..25: mol_type = other DNA
gagggaagatgggggctggtcaggt

SEQ ID NO: 11969 - DNA, 25 bp, synthetic construct
  misc_feature 1..25: note = Oligonucleotide
  source 1..25: mol_type = other DNA
agagagggaagatgggggctggtca

SEQ ID NO: 11970 - DNA, 25 bp, synthetic construct
  misc_feature 1..25: note = Oligonucleotide
  source 1..25: mol_type = other DNA
agcagagagggaagatgggggctgg

SEQ ID NO: 11971 - DNA, 25 bp, synthetic construct
  misc_feature 1..25: note = Oligonucleotide
  source 1..25: mol_type = other DNA
agaagcagagagggaagatgggggc

SEQ ID NO: 11972 - DNA, 25 bp, synthetic construct
  misc_feature 1..25: note = Oligonucleotide
  source 1..25: mol_type = other DNA
gggagaagcagagagggaagatggg

SEQ ID NO: 11973 - DNA, 25 bp, synthetic construct
  misc_feature 1..25: note = Oligonucleotide
  source 1..25: mol_type = other DNA
ggagggagaagcagagagggaagat

SEQ ID NO: 11974 - DNA, 25 bp, synthetic construct
  misc_feature 1..25: note = Oligonucleotide
  source 1..25: mol_type = other DNA
agcggagggagaagcagagagggaa

SEQ ID NO: 11975 - DNA, 25 bp, synthetic construct
  misc_feature 1..25: note = Oligonucleotide
  source 1..25: mol_type = other DNA
aagagcggagggagaagcagagagg

SEQ ID NO: 11976 - DNA, 25 bp, synthetic construct
  misc_feature 1..25: note = Oligonucleotide
  source 1..25: mol_type = other DNA
gagaagagcggagggagaagcagag

SEQ ID NO: 11977 - DNA, 25 bp, synthetic construct
  misc_feature 1..25: note = Oligonucleotide
  source 1..25: mol_type = other DNA
gcagagaagagcggagggagaagca

SEQ ID NO: 11978 - DNA, 25 bp, synthetic construct
  misc_feature 1..25: note = Oligonucleotide
  source 1..25: mol_type = other DNA
gaggcagagaagagcggagggagaa

SEQ ID NO: 11979 - DNA, 25 bp, synthetic construct
  misc_feature 1..25: note = Oligonucleotide
  source 1..25: mol_type = other DNA
caagaggcagagaagagcggaggga

SEQ ID NO: 11980 - DNA, 25 bp, synthetic construct
  misc_feature 1..25: note = Oligonucleotide
  source 1..25: mol_type = other DNA
gaccaagaggcagagaagagcggag

SEQ ID NO: 11981 - DNA, 25 bp, synthetic construct
  misc_feature 1..25: note = Oligonucleotide
  source 1..25: mol_type = other DNA
caagaccaagaggcagagaagagcg

SEQ ID NO: 11982 - DNA, 25 bp, synthetic construct
  misc_feature 1..25: note = Oligonucleotide
  source 1..25: mol_type = other DNA
catcaagaccaagaggcagagaaga

SEQ ID NO: 11983 - DNA, 25 bp, synthetic construct
  misc_feature 1..25: note = Oligonucleotide
  source 1..25: mol_type = other DNA
tttcatcaagaccaagaggcagaga

SEQ ID NO: 11984 - DNA, 25 bp, synthetic construct
  misc_feature 1..25: note = Oligonucleotide
  source 1..25: mol_type = other DNA
gattttcatcaagaccaagaggcag

SEQ ID NO: 11985 - DNA, 25 bp, synthetic construct
  misc_feature 1..25: note = Oligonucleotide
  source 1..25: mol_type = other DNA
tttgattttcatcaagaccaagagg

SEQ ID NO: 11986 - DNA, 25 bp, synthetic construct
  misc_feature 1..25: note = Oligonucleotide
  source 1..25: mol_type = other DNA
ggctttgattttcatcaagaccaag

SEQ ID NO: 11987 - DNA, 25 bp, synthetic construct
  misc_feature 1..25: note = Oligonucleotide
  source 1..25: mol_type = other DNA
aatggctttgattttcatcaagacc

SEQ ID NO: 11988 - DNA, 25 bp, synthetic construct
  misc_feature 1..25: note = Oligonucleotide
  source 1..25: mol_type = other DNA
taaaatggctttgattttcatcaag

SEQ ID NO: 11989 - DNA, 25 bp, synthetic construct
  misc_feature 1..25: note = Oligonucleotide
  source 1..25: mol_type = other DNA
ttttaaaatggctttgattttcatc

SEQ ID NO: 11990 - DNA, 25 bp, synthetic construct
  misc_feature 1..25: note = Oligonucleotide
  source 1..25: mol_type = other DNA
actttttaaaatggctttgattttc

SEQ ID NO: 11991 - DNA, 25 bp, synthetic construct
  misc_feature 1..25: note = Oligonucleotide
  source 1..25: mol_type = other DNA
tgcactttttaaaatggctttgatt

SEQ ID NO: 11992 - DNA, 25 bp, synthetic construct
  misc_feature 1..25: note = Oligonucleotide
  source 1..25: mol_type = other DNA
ctatgcactttttaaaatggctttg

SEQ ID NO: 11993 - DNA, 25 bp, synthetic construct
  misc_feature 1..25: note = Oligonucleotide
  source 1..25: mol_type = other DNA
gtgctatgcactttttaaaatggct

SEQ ID NO: 11994 - DNA, 25 bp, synthetic construct
  misc_feature 1..25: note = Oligonucleotide
  source 1..25: mol_type = other DNA
actgtgctatgcactttttaaaatg

SEQ ID NO: 11995 - DNA, 25 bp, synthetic construct
  misc_feature 1..25: note = Oligonucleotide
  source 1..25: mol_type = other DNA
ggcactgtgctatgcactttttaaa

SEQ ID NO: 11996 - DNA, 25 bp, synthetic construct
  misc_feature 1..25: note = Oligonucleotide
  source 1..25: mol_type = other DNA
ccaggcactgtgctatgcacttttt

SEQ ID NO: 11997 - DNA, 25 bp, synthetic construct
  misc_feature 1..25: note = Oligonucleotide
  source 1..25: mol_type = other DNA
aggccaggcactgtgctatgcactt

SEQ ID NO: 11998 - DNA, 25 bp, synthetic construct
  misc_feature 1..25: note = Oligonucleotide
  source 1..25: mol_type = other DNA
accaggccaggcactgtgctatgca

SEQ ID NO: 11999 - DNA, 25 bp, synthetic construct
  misc_feature 1..25: note = Oligonucleotide
  source 1..25: mol_type = other DNA
cgaaccaggccaggcactgtgctat

SEQ ID NO: 12000 - DNA, 25 bp, synthetic construct
  misc_feature 1..25: note = Oligonucleotide
  source 1..25: mol_type = other DNA
gcccgaaccaggccaggcactgtgc

SEQ ID NO: 12001 - DNA, 25 bp, synthetic construct
  misc_feature 1..25: note = Oligonucleotide
  source 1..25: mol_type = other DNA
agggcccgaaccaggccaggcactg

SEQ ID NO: 12002 - DNA, 25 bp, synthetic construct
  misc_feature 1..25: note = Oligonucleotide
  source 1..25: mol_type = other DNA
ttgagggcccgaaccaggccaggca

SEQ ID NO: 12003 - DNA, 25 bp, synthetic construct
  misc_feature 1..25: note = Oligonucleotide
  source 1..25: mol_type = other DNA
ttattgagggcccgaaccaggccag

SEQ ID NO: 12004 - DNA, 25 bp, synthetic construct
  misc_feature 1..25: note = Oligonucleotide
  source 1..25: mol_type = other DNA
tgtttattgagggcccgaaccaggc

SEQ ID NO: 12005 - DNA, 25 bp, synthetic construct
  misc_feature 1..25: note = Oligonucleotide
  source 1..25: mol_type = other DNA
aaatgtttattgagggcccgaacca

SEQ ID NO: 12006 - DNA, 25 bp, synthetic construct
  misc_feature 1..25: note = Oligonucleotide
  source 1..25: mol_type = other DNA
aagaaatgtttattgagggcccgaa

SEQ ID NO: 12007 - DNA, 25 bp, synthetic construct
  misc_feature 1..25: note = Oligonucleotide
  source 1..25: mol_type = other DNA
tttaagaaatgtttattgagggccc

SEQ ID NO: 12008 - DNA, 25 bp, synthetic construct
  misc_feature 1..25: note = Oligonucleotide
  source 1..25: mol_type = other DNA
ccatttaagaaatgtttattgaggg

SEQ ID NO: 12009 - DNA, 25 bp, synthetic construct
  misc_feature 1..25: note = Oligonucleotide
  source 1..25: mol_type = other DNA
catccatttaagaaatgtttattga

SEQ ID NO: 12010 - DNA, 25 bp, synthetic construct
  misc_feature 1..25: note = Oligonucleotide
  source 1..25: mol_type = other DNA
tttcatccatttaagaaatgtttat

SEQ ID NO: 12011 - DNA, 25 bp, synthetic construct
  misc_feature 1..25: note = Oligonucleotide
  source 1..25: mol_type = other DNA
ttctttcatccatttaagaaatgtt

SEQ ID NO: 12012 - DNA, 25 bp, synthetic construct
  misc_feature 1..25: note = Oligonucleotide
  source 1..25: mol_type = other DNA
ttgttctttcatccatttaagaaat

SEQ ID NO: 12013 - DNA, 25 bp, synthetic construct
  misc_feature 1..25: note = Oligonucleotide
  source 1..25: mol_type = other DNA
gctttgttctttcatccatttaaga

SEQ ID NO: 12014 - DNA, 25 bp, synthetic construct
  misc_feature 1..25: note = Oligonucleotide
  source 1..25: mol_type = other DNA
tttgctttgttctttcatccattta

SEQ ID NO: 12015 - DNA, 25 bp, synthetic construct
  misc_feature 1..25: note = Oligonucleotide
  source 1..25: mol_type = other DNA
cattttgctttgttctttcatccat

SEQ ID NO: 12016 - DNA, 25 bp, synthetic construct
  misc_feature 1..25: note = Oligonucleotide
  source 1..25: mol_type = other DNA
ttgcattttgctttgttctttcatc

SEQ ID NO: 12017 - DNA, 25 bp, synthetic construct
  misc_feature 1..25: note = Oligonucleotide
  source 1..25: mol_type = other DNA
catttgcattttgctttgttctttc

SEQ ID NO: 12018 - DNA, 25 bp, synthetic construct
  misc_feature 1..25: note = Oligonucleotide
  source 1..25: mol_type = other DNA
cagcatttgcattttgctttgttct

SEQ ID NO: 12019 - DNA, 25 bp, synthetic construct
  misc_feature 1..25: note = Oligonucleotide
  source 1..25: mol_type = other DNA
acacagcatttgcattttgctttgt

SEQ ID NO: 12020 - DNA, 25 bp, synthetic construct
  misc_feature 1..25: note = Oligonucleotide
  source 1..25: mol_type = other DNA
aaaacacagcatttgcattttgctt

SEQ ID NO: 12021 - DNA, 25 bp, synthetic construct
  misc_feature 1..25: note = Oligonucleotide
  source 1..25: mol_type = other DNA
cacaaaacacagcatttgcattttg

SEQ ID NO: 12022 - DNA, 25 bp, synthetic construct
  misc_feature 1..25: note = Oligonucleotide
  source 1..25: mol_type = other DNA
aatcacaaaacacagcatttgcatt

SEQ ID NO: 12023 - DNA, 25 bp, synthetic construct
  misc_feature 1..25: note = Oligonucleotide
  source 1..25: mol_type = other DNA
tcaaatcacaaaacacagcatttgc

SEQ ID NO: 12024 - DNA, 25 bp, synthetic construct
  misc_feature 1..25: note = Oligonucleotide
  source 1..25: mol_type = other DNA
atctcaaatcacaaaacacagcatt

SEQ ID NO: 12025 - DNA, 25 bp, synthetic construct
  misc_feature 1..25: note = Oligonucleotide
  source 1..25: mol_type = other DNA
tagatctcaaatcacaaaacacagc

SEQ ID NO: 12026 - DNA, 25 bp, synthetic construct
  misc_feature 1..25: note = Oligonucleotide
  source 1..25: mol_type = other DNA
ccctagatctcaaatcacaaaacac

SEQ ID NO: 12027 - DNA, 25 bp, synthetic construct
  misc_feature 1..25: note = Oligonucleotide
  source 1..25: mol_type = other DNA
cctccctagatctcaaatcacaaaa

SEQ ID NO: 12028 - DNA, 25 bp, synthetic construct
  misc_feature 1..25: note = Oligonucleotide
  source 1..25: mol_type = other DNA
ccacctccctagatctcaaatcaca

SEQ ID NO: 12029 - DNA, 25 bp, synthetic construct
  misc_feature 1..25: note = Oligonucleotide
  source 1..25: mol_type = other DNA
aagccacctccctagatctcaaatc

SEQ ID NO: 12030 - DNA, 25 bp, synthetic construct
  misc_feature 1..25: note = Oligonucleotide
  source 1..25: mol_type = other DNA
cctaagccacctccctagatctcaa

SEQ ID NO: 12031 - DNA, 25 bp, synthetic construct
  misc_feature 1..25: note = Oligonucleotide
  source 1..25: mol_type = other DNA
tgtcctaagccacctccctagatct

SEQ ID NO: 12032 - DNA, 25 bp, synthetic construct
  misc_feature 1..25: note = Oligonucleotide
  source 1..25: mol_type = other DNA
ttttgtcctaagccacctccctaga

SEQ ID NO: 12033 - DNA, 25 bp, synthetic construct
  misc_feature 1..25: note = Oligonucleotide
  source 1..25: mol_type = other DNA
ggtttttgtcctaagccacctccct

SEQ ID NO: 12034 - DNA, 25 bp, synthetic construct
  misc_feature 1..25: note = Oligonucleotide
  source 1..25: mol_type = other DNA
gtgggtttttgtcctaagccacctc

SEQ ID NO: 12035 - DNA, 25 bp, synthetic construct
  misc_feature 1..25: note = Oligonucleotide
  source 1..25: mol_type = other DNA
tctgtgggtttttgtcctaagccac

SEQ ID NO: 12036 - DNA, 25 bp, synthetic construct
  misc_feature 1..25: note = Oligonucleotide
  source 1..25: mol_type = other DNA
ccttctgtgggtttttgtcctaagc

SEQ ID NO: 12037 - DNA, 25 bp, synthetic construct
  misc_feature 1..25: note = Oligonucleotide
  source 1..25: mol_type = other DNA
agtccttctgtgggtttttgtccta

SEQ ID NO: 12038 - DNA, 25 bp, synthetic construct
  misc_feature 1..25: note = Oligonucleotide
  source 1..25: mol_type = other DNA
gtaagtccttctgtgggtttttgtc

SEQ ID NO: 12039 - DNA, 25 bp, synthetic construct
  misc_feature 1..25: note = Oligonucleotide
  source 1..25: mol_type = other DNA
tgagtaagtccttctgtgggttttt

SEQ ID NO: 12040 - DNA, 25 bp, synthetic construct
  misc_feature 1..25: note = Oligonucleotide
  source 1..25: mol_type = other DNA
cgctgagtaagtccttctgtgggtt

SEQ ID NO: 12041 - DNA, 25 bp, synthetic construct
  misc_feature 1..25: note = Oligonucleotide
  source 1..25: mol_type = other DNA
gaacgctgagtaagtccttctgtgg

SEQ ID NO: 12042 - DNA, 25 bp, synthetic construct
  misc_feature 1..25: note = Oligonucleotide
  source 1..25: mol_type = other DNA
tctgaacgctgagtaagtccttctg

SEQ ID NO: 12043 - DNA, 25 bp, synthetic construct
  misc_feature 1..25: note = Oligonucleotide
  source 1..25: mol_type = other DNA
gagtctgaacgctgagtaagtcctt

SEQ ID NO: 12044 - DNA, 25 bp, synthetic construct
  misc_feature 1..25: note = Oligonucleotide
  source 1..25: mol_type = other DNA
gatgagtctgaacgctgagtaagtc

SEQ ID NO: 12045 - DNA, 25 bp, synthetic construct
  misc_feature 1..25: note = Oligonucleotide
  source 1..25: mol_type = other DNA
cctgatgagtctgaacgctgagtaa

SEQ ID NO: 12046 - DNA, 25 bp, synthetic construct
  misc_feature 1..25: note = Oligonucleotide
  source 1..25: mol_type = other DNA
acacctgatgagtctgaacgctgag

SEQ ID NO: 12047 - DNA, 25 bp, synthetic construct
  misc_feature 1..25: note = Oligonucleotide
  source 1..25: mol_type = other DNA
tcgacacctgatgagtctgaacgct

SEQ ID NO: 12048 - DNA, 25 bp, synthetic construct
  misc_feature 1..25: note = Oligonucleotide
  source 1..25: mol_type = other DNA
ggatcgacacctgatgagtctgaac

SEQ ID NO: 12049 - DNA, 25 bp, synthetic construct
  misc_feature 1..25: note = Oligonucleotide
  source 1..25: mol_type = other DNA
gggggatcgacacctgatgagtctg

SEQ ID NO: 12050 - DNA, 25 bp, synthetic construct
  misc_feature 1..25: note = Oligonucleotide
  source 1..25: mol_type = other DNA
catgggggatcgacacctgatgagt

SEQ ID NO: 12051 - DNA, 25 bp, synthetic construct
  misc_feature 1..25: note = Oligonucleotide
  source 1..25: mol_type = other DNA
gaccatgggggatcgacacctgatg

SEQ ID NO: 12052 - DNA, 25 bp, synthetic construct
  misc_feature 1..25: note = Oligonucleotide
  source 1..25: mol_type = other DNA
cccgaccatgggggatcgacacctg

SEQ ID NO: 12053 - DNA, 25 bp, synthetic construct
  misc_feature 1..25: note = Oligonucleotide
  source 1..25: mol_type = other DNA
gagcccgaccatgggggatcgacac

SEQ ID NO: 12054 - DNA, 25 bp, synthetic construct
  misc_feature 1..25: note = Oligonucleotide
  source 1..25: mol_type = other DNA
cctgagcccgaccatgggggatcga

SEQ ID NO: 12055 - DNA, 25 bp, synthetic construct
  misc_feature 1..25: note = Oligonucleotide
  source 1..25: mol_type = other DNA
ccacctgagcccgaccatgggggat

SEQ ID NO: 12056 - DNA, 25 bp, synthetic construct
  misc_feature 1..25: note = Oligonucleotide
  source 1..25: mol_type = other DNA
ggcccacctgagcccgaccatgggg

SEQ ID NO: 12057 - DNA, 25 bp, synthetic construct
  misc_feature 1..25: note = Oligonucleotide
  source 1..25: mol_type = other DNA
ctgggcccacctgagcccgaccatg

SEQ ID NO: 12058 - DNA, 25 bp, synthetic construct
  misc_feature 1..25: note = Oligonucleotide
  source 1..25: mol_type = other DNA
gacctgggcccacctgagcccgacc

SEQ ID NO: 12059 - DNA, 25 bp, synthetic construct
  misc_feature 1..25: note = Oligonucleotide
  source 1..25: mol_type = other DNA
cgagacctgggcccacctgagcccg

SEQ ID NO: 12060 - DNA, 25 bp, synthetic construct
  misc_feature 1..25: note = Oligonucleotide
  source 1..25: mol_type = other DNA
tgacgagacctgggcccacctgagc

SEQ ID NO: 12061 - DNA, 25 bp, synthetic construct
  misc_feature 1..25: note = Oligonucleotide
  source 1..25: mol_type = other DNA
caatgacgagacctgggcccacctg

SEQ ID NO: 12062 - DNA, 17 bp, synthetic construct
  misc_feature 1..17: note = Oligonucleotide
  source 1..17: mol_type = other DNA
cgcaccgccctgctcac

SEQ ID NO: 12063 - DNA, 17 bp, synthetic construct
  misc_feature 1..17: note = Oligonucleotide
  source 1..17: mol_type = other DNA
ccccgcaccgccctgct

SEQ ID NO: 12064 - DNA, 17 bp, synthetic construct
  misc_feature 1..17: note = Oligonucleotide
  source 1..17: mol_type = other DNA
cctccccgcaccgccct

SEQ ID NO: 12065 - DNA, 17 bp, synthetic construct
  misc_feature 1..17: note = Oligonucleotide
  source 1..17: mol_type = other DNA
atccctccccgcaccgc

SEQ ID NO: 12066 - DNA, 17 bp, synthetic construct
  misc_feature 1..17: note = Oligonucleotide
  source 1..17: mol_type = other DNA
cggatccctccccgcac

SEQ ID NO: 12067 - DNA, 17 bp, synthetic construct
  misc_feature 1..17: note = Oligonucleotide
  source 1..17: mol_type = other DNA
gcacggatccctccccg

SEQ ID NO: 12068 - DNA, 17 bp, synthetic construct
  misc_feature 1..17: note = Oligonucleotide
  source 1..17: mol_type = other DNA
aaggcacggatccctcc

SEQ ID NO: 12069 - DNA, 17 bp, synthetic construct
  misc_feature 1..17: note = Oligonucleotide
  source 1..17: mol_type = other DNA
gacaaggcacggatccc

SEQ ID NO: 12070 - DNA, 17 bp, synthetic construct
  misc_feature 1..17: note = Oligonucleotide
  source 1..17: mol_type = other DNA
acggacaaggcacggat

SEQ ID NO: 12071 - DNA, 17 bp, synthetic construct
  misc_feature 1..17: note = Oligonucleotide
  source 1..17: mol_type = other DNA
gccacggacaaggcacg

SEQ ID NO: 12072 - DNA, 17 bp, synthetic construct
  misc_feature 1..17: note = Oligonucleotide
  source 1..17: mol_type = other DNA
ggggccacggacaaggc

SEQ ID NO: 12073 - DNA, 17 bp, synthetic construct
  misc_feature 1..17: note = Oligonucleotide
  source 1..17: mol_type = other DNA
gacggggccacggacaa

SEQ ID NO: 12074 - DNA, 17 bp, synthetic construct
  misc_feature 1..17: note = Oligonucleotide
  source 1..17: mol_type = other DNA
acagacggggccacgga

SEQ ID NO: 12075 - DNA, 17 bp, synthetic construct
  misc_feature 1..17: note = Oligonucleotide
  source 1..17: mol_type = other DNA
atgacagacggggccac

SEQ ID NO: 12076 - DNA, 17 bp, synthetic construct
  misc_feature 1..17: note = Oligonucleotide
  source 1..17: mol_type = other DNA
ggaatgacagacggggc

SEQ ID NO: 12077 - DNA, 17 bp, synthetic construct
  misc_feature 1..17: note = Oligonucleotide
  source 1..17: mol_type = other DNA
agaggaatgacagacgg

SEQ ID NO: 12078 - DNA, 17 bp, synthetic construct
  misc_feature 1..17: note = Oligonucleotide
  source 1..17: mol_type = other DNA
acaagaggaatgacaga

SEQ ID NO: 12079 - DNA, 17 bp, synthetic construct
  misc_feature 1..17: note = Oligonucleotide
  source 1..17: mol_type = other DNA
cagacaagaggaatgac

SEQ ID NO: 12080 - DNA, 17 bp, synthetic construct
  misc_feature 1..17: note = Oligonucleotide
  source 1..17: mol_type = other DNA
gaacagacaagaggaat

SEQ ID NO: 12081 - DNA, 17 bp, synthetic construct
  misc_feature 1..17: note = Oligonucleotide
  source 1..17: mol_type = other DNA
agagaacagacaagagg

SEQ ID NO: 12082 - DNA, 17 bp, synthetic construct
  misc_feature 1..17: note = Oligonucleotide
  source 1..17: mol_type = other DNA
gccagagaacagacaag

SEQ ID NO: 12083 - DNA, 17 bp, synthetic construct
  misc_feature 1..17: note = Oligonucleotide
  source 1..17: mol_type = other DNA
agagccagagaacagac

SEQ ID NO: 12084 - DNA, 17 bp, synthetic construct
  misc_feature 1..17: note = Oligonucleotide
  source 1..17: mol_type = other DNA
aggagagccagagaaca

SEQ ID NO: 12085 - DNA, 17 bp, synthetic construct
  misc_feature 1..17: note = Oligonucleotide
  source 1..17: mol_type = other DNA
aacaggagagccagaga

SEQ ID NO: 12086 - DNA, 17 bp, synthetic construct
  misc_feature 1..17: note = Oligonucleotide
  source 1..17: mol_type = other DNA
aggaacaggagagccag

SEQ ID NO: 12087 - DNA, 17 bp, synthetic construct
  misc_feature 1..17: note = Oligonucleotide
  source 1..17: mol_type = other DNA
aggaggaacaggagagc

SEQ ID NO: 12088 - DNA, 17 bp, synthetic construct
  misc_feature 1..17: note = Oligonucleotide
  source 1..17: mol_type = other DNA
acaaggaggaacaggag

SEQ ID NO: 12089 - DNA, 17 bp, synthetic construct
  misc_feature 1..17: note = Oligonucleotide
  source 1..17: mol_type = other DNA
agaacaaggaggaacag

SEQ ID NO: 12090 - DNA, 17 bp, synthetic construct
  misc_feature 1..17: note = Oligonucleotide
  source 1..17: mol_type = other DNA
aacagaacaaggaggaa

SEQ ID NO: 12091 - DNA, 17 bp, synthetic construct
  misc_feature 1..17: note = Oligonucleotide
  source 1..17: mol_type = other DNA
tggaacagaacaaggag

SEQ ID NO: 12092 - DNA, 17 bp, synthetic construct
  misc_feature 1..17: note = Oligonucleotide
  source 1..17: mol_type = other DNA
gaatggaacagaacaag

SEQ ID NO: 12093 - DNA, 17 bp, synthetic construct
  misc_feature 1..17: note = Oligonucleotide
  source 1..17: mol_type = other DNA
aaggaatggaacagaac

SEQ ID NO: 12094 - DNA, 17 bp, synthetic construct
  misc_feature 1..17: note = Oligonucleotide
  source 1..17: mol_type = other DNA
cagaaggaatggaacag

SEQ ID NO: 12095 - DNA, 17 bp, synthetic construct
  misc_feature 1..17: note = Oligonucleotide
  source 1..17: mol_type = other DNA
ccacagaaggaatggaa

SEQ ID NO: 12096 - DNA, 17 bp, synthetic construct
  misc_feature 1..17: note = Oligonucleotide
  source 1..17: mol_type = other DNA
ttgccacagaaggaatg

SEQ ID NO: 12097 - DNA, 17 bp, synthetic construct
  misc_feature 1..17: note = Oligonucleotide
  source 1..17: mol_type = other DNA
gggttgccacagaagga

SEQ ID NO: 12098 - DNA, 17 bp, synthetic construct
  misc_feature 1..17: note = Oligonucleotide
  source 1..17: mol_type = other DNA
tgggggttgccacagaa

SEQ ID NO: 12099 - DNA, 17 bp, synthetic construct
  misc_feature 1..17: note = Oligonucleotide
  source 1..17: mol_type = other DNA
ggttgggggttgccaca

SEQ ID NO: 12100 - DNA, 17 bp, synthetic construct
  misc_feature 1..17: note = Oligonucleotide
  source 1..17: mol_type = other DNA
gcgggttgggggttgcc

SEQ ID NO: 12101 - DNA, 17 bp, synthetic construct
  misc_feature 1..17: note = Oligonucleotide
  source 1..17: mol_type = other DNA
ggggcgggttgggggtt

SEQ ID NO: 12102 - DNA, 17 bp, synthetic construct
  misc_feature 1..17: note = Oligonucleotide
  source 1..17: mol_type = other DNA
gcgggggcgggttgggg

SEQ ID NO: 12103 - DNA, 17 bp, synthetic construct
  misc_feature 1..17: note = Oligonucleotide
  source 1..17: mol_type = other DNA
atggcgggggcgggttg

SEQ ID NO: 12104 - DNA, 17 bp, synthetic construct
  misc_feature 1..17: note = Oligonucleotide
  source 1..17: mol_type = other DNA
tggatggcgggggcggg

SEQ ID NO: 12105 - DNA, 17 bp, synthetic construct
  misc_feature 1..17: note = Oligonucleotide
  source 1..17: mol_type = other DNA
aggtggatggcgggggc

SEQ ID NO: 12106 - DNA, 17 bp, synthetic construct
  misc_feature 1..17: note = Oligonucleotide
  source 1..17: mol_type = other DNA
cagaggtggatggcggg

SEQ ID NO: 12107 - DNA, 17 bp, synthetic construct
  misc_feature 1..17: note = Oligonucleotide
  source 1..17: mol_type = other DNA
attcagaggtggatggc

SEQ ID NO: 12108 - DNA, 17 bp, synthetic construct
  misc_feature 1..17: note = Oligonucleotide
  source 1..17: mol_type = other DNA
cggattcagaggtggat

SEQ ID NO: 12109 - DNA, 17 bp, synthetic construct
  misc_feature 1..17: note = Oligonucleotide
  source 1..17: mol_type = other DNA
gaccggattcagaggtg

SEQ ID NO: 12110 - DNA, 17 bp, synthetic construct
  misc_feature 1..17: note = Oligonucleotide
  source 1..17: mol_type = other DNA
caagaccggattcagag

SEQ ID NO: 12111 - DNA, 17 bp, synthetic construct
  misc_feature 1..17: note = Oligonucleotide
  source 1..17: mol_type = other DNA
aagcaagaccggattca

SEQ ID NO: 12112 - DNA, 17 bp, synthetic construct
  misc_feature 1..17: note = Oligonucleotide
  source 1..17: mol_type = other DNA
gccaagcaagaccggat

SEQ ID NO: 12113 - DNA, 17 bp, synthetic construct
  misc_feature 1..17: note = Oligonucleotide
  source 1..17: mol_type = other DNA
caggccaagcaagaccg

SEQ ID NO: 12114 - DNA, 17 bp, synthetic construct
  misc_feature 1..17: note = Oligonucleotide
  source 1..17: mol_type = other DNA
gggcaggccaagcaaga

SEQ ID NO: 12115 - DNA, 17 bp, synthetic construct
  misc_feature 1..17: note = Oligonucleotide
  source 1..17: mol_type = other DNA
ctcgggcaggccaagca

SEQ ID NO: 12116 - DNA, 17 bp, synthetic construct
  misc_feature 1..17: note = Oligonucleotide
  source 1..17: mol_type = other DNA
tctctcgggcaggccaa

SEQ ID NO: 12117 - DNA, 17 bp, synthetic construct
  misc_feature 1..17: note = Oligonucleotide
  source 1..17: mol_type = other DNA
tcctctctcgggcaggc

SEQ ID NO: 12118 - DNA, 17 bp, synthetic construct
  misc_feature 1..17: note = Oligonucleotide
  source 1..17: mol_type = other DNA
acctcctctctcgggca

SEQ ID NO: 12119 - DNA, 17 bp, synthetic construct
  misc_feature 1..17: note = Oligonucleotide
  source 1..17: mol_type = other DNA
agaacctcctctctcgg

SEQ ID NO: 12120 - DNA, 17 bp, synthetic construct
  misc_feature 1..17: note = Oligonucleotide
  source 1..17: mol_type = other DNA
agaagaacctcctctct

SEQ ID NO: 12121 - DNA, 17 bp, synthetic construct
  misc_feature 1..17: note = Oligonucleotide
  source 1..17: mol_type = other DNA
cccagaagaacctcctc

SEQ ID NO: 12122 - DNA, 17 bp, synthetic construct
  misc_feature 1..17: note = Oligonucleotide
  source 1..17: mol_type = other DNA
acgcccagaagaacctc

SEQ ID NO: 12123 - DNA, 17 bp, synthetic construct
  misc_feature 1..17: note = Oligonucleotide
  source 1..17: mol_type = other DNA
cagacgcccagaagaac

SEQ ID NO: 12124 - DNA, 17 bp, synthetic construct
  misc_feature 1..17: note = Oligonucleotide
  source 1..17: mol_type = other DNA
tgtcagacgcccagaag

SEQ ID NO: 12125 - DNA, 17 bp, synthetic construct
  misc_feature 1..17: note = Oligonucleotide
  source 1..17: mol_type = other DNA
acgtgtcagacgcccag

SEQ ID NO: 12126 - DNA, 17 bp, synthetic construct
  misc_feature 1..17: note = Oligonucleotide
  source 1..17: mol_type = other DNA
ctgacgtgtcagacgcc

SEQ ID NO: 12127 - DNA, 17 bp, synthetic construct
  misc_feature 1..17: note = Oligonucleotide
  source 1..17: mol_type = other DNA
accctgacgtgtcagac

SEQ ID NO: 12128 - DNA, 17 bp, synthetic construct
  misc_feature 1..17: note = Oligonucleotide
  source 1..17: mol_type = other DNA
gcaaccctgacgtgtca

SEQ ID NO: 12129 - DNA, 17 bp, synthetic construct
  misc_feature 1..17: note = Oligonucleotide
  source 1..17: mol_type = other DNA
gcagcaaccctgacgtg

SEQ ID NO: 12130 - DNA, 17 bp, synthetic construct
  misc_feature 1..17: note = Oligonucleotide
  source 1..17: mol_type = other DNA
tgagcagcaaccctgac

SEQ ID NO: 12131 - DNA, 17 bp, synthetic construct
  misc_feature 1..17: note = Oligonucleotide
  source 1..17: mol_type = other DNA
cagtgagcagcaaccct

SEQ ID NO: 12132 - DNA, 17 bp, synthetic construct
  misc_feature 1..17: note = Oligonucleotide
  source 1..17: mol_type = other DNA
acacagtgagcagcaac

SEQ ID NO: 12133 - DNA, 17 bp, synthetic construct
  misc_feature 1..17: note = Oligonucleotide
  source 1..17: mol_type = other DNA
gggacacagtgagcagc

SEQ ID NO: 12134 - DNA, 17 bp, synthetic construct
  misc_feature 1..17: note = Oligonucleotide
  source 1..17: mol_type = other DNA
acagggacacagtgagc

SEQ ID NO: 12135 - DNA, 17 bp, synthetic construct
  misc_feature 1..17: note = Oligonucleotide
  source 1..17: mol_type = other DNA
ccaacagggacacagtg

SEQ ID NO: 12136 - DNA, 17 bp, synthetic construct
  misc_feature 1..17: note = Oligonucleotide
  source 1..17: mol_type = other DNA
gcaccaacagggacaca

SEQ ID NO: 12137 - DNA, 17 bp, synthetic construct
  misc_feature 1..17: note = Oligonucleotide
  source 1..17: mol_type = other DNA
ctggcaccaacagggac

SEQ ID NO: 12138 - DNA, 17 bp, synthetic construct
  misc_feature 1..17: note = Oligonucleotide
  source 1..17: mol_type = other DNA
cttctggcaccaacagg

SEQ ID NO: 12139 - DNA, 17 bp, synthetic construct
  misc_feature 1..17: note = Oligonucleotide
  source 1..17: mol_type = other DNA
ccacttctggcaccaac

SEQ ID NO: 12140 - DNA, 17 bp, synthetic construct
  misc_feature 1..17: note = Oligonucleotide
  source 1..17: mol_type = other DNA
ctcccacttctggcacc

SEQ ID NO: 12141 - DNA, 17 bp, synthetic construct
  misc_feature 1..17: note = Oligonucleotide
  source 1..17: mol_type = other DNA
cagctcccacttctggc

SEQ ID NO: 12142 - DNA, 17 bp, synthetic construct
  misc_feature 1..17: note = Oligonucleotide
  source 1..17: mol_type = other DNA
gcccagctcccacttct

SEQ ID NO: 12143 - DNA, 17 bp, synthetic construct
  misc_feature 1..17: note = Oligonucleotide
  source 1..17: mol_type = other DNA
ggagcccagctcccact

SEQ ID NO: 12144 - DNA, 17 bp, synthetic construct
  misc_feature 1..17: note = Oligonucleotide
  source 1..17: mol_type = other DNA
aggggagcccagctccc

SEQ ID NO: 12145 - DNA, 17 bp, synthetic construct
  misc_feature 1..17: note = Oligonucleotide
  source 1..17: mol_type = other DNA
ctgaggggagcccagct

SEQ ID NO: 12146 - DNA, 17 bp, synthetic construct
  misc_feature 1..17: note = Oligonucleotide
  source 1..17: mol_type = other DNA
tctctgaggggagccca

SEQ ID NO: 12147 - DNA, 17 bp, synthetic construct
  misc_feature 1..17: note = Oligonucleotide
  source 1..17: mol_type = other DNA
gagtctctgaggggagc

SEQ ID NO: 12148 - DNA, 17 bp, synthetic construct
  misc_feature 1..17: note = Oligonucleotide
  source 1..17: mol_type = other DNA
cctgagtctctgagggg

SEQ ID NO: 12149 - DNA, 17 bp, synthetic construct
  misc_feature 1..17: note = Oligonucleotide
  source 1..17: mol_type = other DNA
caacctgagtctctgag

SEQ ID NO: 12150 - DNA, 17 bp, synthetic construct
  misc_feature 1..17: note = Oligonucleotide
  source 1..17: mol_type = other DNA
gcccaacctgagtctct

SEQ ID NO: 12151 - DNA, 17 bp, synthetic construct
  misc_feature 1..17: note = Oligonucleotide
  source 1..17: mol_type = other DNA
catgcccaacctgagtc

SEQ ID NO: 12152 - DNA, 17 bp, synthetic construct
  misc_feature 1..17: note = Oligonucleotide
  source 1..17: mol_type = other DNA
cctcatgcccaacctga

SEQ ID NO: 12153 - DNA, 17 bp, synthetic construct
  misc_feature 1..17: note = Oligonucleotide
  source 1..17: mol_type = other DNA
gcgcctcatgcccaacc

SEQ ID NO: 12154 - DNA, 17 bp, synthetic construct
  misc_feature 1..17: note = Oligonucleotide
  source 1..17: mol_type = other DNA
gaggcgcctcatgccca

SEQ ID NO: 12155 - DNA, 17 bp, synthetic construct
  misc_feature 1..17: note = Oligonucleotide
  source 1..17: mol_type = other DNA
atggaggcgcctcatgc

SEQ ID NO: 12156 - DNA, 17 bp, synthetic construct
  misc_feature 1..17: note = Oligonucleotide
  source 1..17: mol_type = other DNA
gccatggaggcgcctca

SEQ ID NO: 12157 - DNA, 17 bp, synthetic construct
  misc_feature 1..17: note = Oligonucleotide
  source 1..17: mol_type = other DNA
agggccatggaggcgcc

SEQ ID NO: 12158 - DNA, 17 bp, synthetic construct
  misc_feature 1..17: note = Oligonucleotide
  source 1..17: mol_type = other DNA
aggagggccatggaggc

SEQ ID NO: 12159 - DNA, 17 bp, synthetic construct
  misc_feature 1..17: note = Oligonucleotide
  source 1..17: mol_type = other DNA
tccaggagggccatgga

SEQ ID NO: 12160 - DNA, 17 bp, synthetic construct
  misc_feature 1..17: note = Oligonucleotide
  source 1..17: mol_type = other DNA
gcctccaggagggccat

SEQ ID NO: 12161 - DNA, 17 bp, synthetic construct
  misc_feature 1..17: note = Oligonucleotide
  source 1..17: mol_type = other DNA
agagcctccaggagggc

SEQ ID NO: 12162 - DNA, 17 bp, synthetic construct
  misc_feature 1..17: note = Oligonucleotide
  source 1..17: mol_type = other DNA
ccaagagcctccaggag

SEQ ID NO: 12163 - DNA, 17 bp, synthetic construct
  misc_feature 1..17: note = Oligonucleotide
  source 1..17: mol_type = other DNA
gggccaagagcctccag

SEQ ID NO: 12164 - DNA, 17 bp, synthetic construct
  misc_feature 1..17: note = Oligonucleotide
  source 1..17: mol_type = other DNA
ctggggccaagagcctc

SEQ ID NO: 12165 - DNA, 17 bp, synthetic construct
  misc_feature 1..17: note = Oligonucleotide
  source 1..17: mol_type = other DNA
tccctggggccaagagc

SEQ ID NO: 12166 - DNA, 17 bp, synthetic construct
  misc_feature 1..17: note = Oligonucleotide
  source 1..17: mol_type = other DNA
gaatccctggggccaag

SEQ ID NO: 12167 - DNA, 17 bp, synthetic construct
  misc_feature 1..17: note = Oligonucleotide
  source 1..17: mol_type = other DNA
caggaatccctggggcc

SEQ ID NO: 12168 - DNA, 17 bp, synthetic construct
  misc_feature 1..17: note = Oligonucleotide
  source 1..17: mol_type = other DNA
tcacaggaatccctggg

SEQ ID NO: 12169 - DNA, 17 bp, synthetic construct
  misc_feature 1..17: note = Oligonucleotide
  source 1..17: mol_type = other DNA
aactcacaggaatccct

SEQ ID NO: 12170 - DNA, 17 bp, synthetic construct
  misc_feature 1..17: note = Oligonucleotide
  source 1..17: mol_type = other DNA
gagaactcacaggaatc

SEQ ID NO: 12171 - DNA, 17 bp, synthetic construct
  misc_feature 1..17: note = Oligonucleotide
  source 1..17: mol_type = other DNA
agagagaactcacagga

SEQ ID NO: 12172 - DNA, 17 bp, synthetic construct
  misc_feature 1..17: note = Oligonucleotide
  source 1..17: mol_type = other DNA
gagagagagaactcaca

SEQ ID NO: 12173 - DNA, 17 bp, synthetic construct
  misc_feature 1..17: note = Oligonucleotide
  source 1..17: mol_type = other DNA
agggagagagagaactc

SEQ ID NO: 12174 - DNA, 17 bp, synthetic construct
  misc_feature 1..17: note = Oligonucleotide
  source 1..17: mol_type = other DNA
gggagggagagagagaa

SEQ ID NO: 12175 - DNA, 17 bp, synthetic construct
  misc_feature 1..17: note = Oligonucleotide
  source 1..17: mol_type = other DNA
gtcgggagggagagaga

SEQ ID NO: 12176 - DNA, 17 bp, synthetic construct
  misc_feature 1..17: note = Oligonucleotide
  source 1..17: mol_type = other DNA
tgtgtcgggagggagag

SEQ ID NO: 12177 - DNA, 17 bp, synthetic construct
  misc_feature 1..17: note = Oligonucleotide
  source 1..17: mol_type = other DNA
gcctgtgtcgggaggga

SEQ ID NO: 12178 - DNA, 17 bp, synthetic construct
  misc_feature 1..17: note = Oligonucleotide
  source 1..17: mol_type = other DNA
acagcctgtgtcgggag

SEQ ID NO: 12179 - DNA, 17 bp, synthetic construct
  misc_feature 1..17: note = Oligonucleotide
  source 1..17: mol_type = other DNA
aagacagcctgtgtcgg

SEQ ID NO: 12180 - DNA, 17 bp, synthetic construct
  misc_feature 1..17: note = Oligonucleotide
  source 1..17: mol_type = other DNA
gtaaagacagcctgtgt

SEQ ID NO: 12181 - DNA, 17 bp, synthetic construct
  misc_feature 1..17: note = Oligonucleotide
  source 1..17: mol_type = other DNA
atggtaaagacagcctg

SEQ ID NO: 12182 - DNA, 17 bp, synthetic construct
  misc_feature 1..17: note = Oligonucleotide
  source 1..17: mol_type = other DNA
ttaatggtaaagacagc

SEQ ID NO: 12183 - DNA, 17 bp, synthetic construct
  misc_feature 1..17: note = Oligonucleotide
  source 1..17: mol_type = other DNA
cccttaatggtaaagac

SEQ ID NO: 12184 - DNA, 17 bp, synthetic construct
  misc_feature 1..17: note = Oligonucleotide
  source 1..17: mol_type = other DNA
caacccttaatggtaaa

SEQ ID NO: 12185 - DNA, 17 bp, synthetic construct
  misc_feature 1..17: note = Oligonucleotide
  source 1..17: mol_type = other DNA
aaacaacccttaatggt

SEQ ID NO: 12186 - DNA, 17 bp, synthetic construct
  misc_feature 1..17: note = Oligonucleotide
  source 1..17: mol_type = other DNA
acaaaacaacccttaat

SEQ ID NO: 12187 - DNA, 17 bp, synthetic construct
  misc_feature 1..17: note = Oligonucleotide
  source 1..17: mol_type = other DNA
aacacaaaacaaccctt

SEQ ID NO: 12188 - DNA, 17 bp, synthetic construct
  misc_feature 1..17: note = Oligonucleotide
  source 1..17: mol_type = other DNA
taaaacacaaaacaacc

SEQ ID NO: 12189 - DNA, 17 bp, synthetic construct
  misc_feature 1..17: note = Oligonucleotide
  source 1..17: mol_type = other DNA
aagtaaaacacaaaaca

SEQ ID NO: 12190 - DNA, 17 bp, synthetic construct
  misc_feature 1..17: note = Oligonucleotide
  source 1..17: mol_type = other DNA
ccaaagtaaaacacaaa

SEQ ID NO: 12191 - DNA, 17 bp, synthetic construct
  misc_feature 1..17: note = Oligonucleotide
  source 1..17: mol_type = other DNA
cctccaaagtaaaacac

SEQ ID NO: 12192 - DNA, 17 bp, synthetic construct
  misc_feature 1..17: note = Oligonucleotide
  source 1..17: mol_type = other DNA
gtacctccaaagtaaaa

SEQ ID NO: 12193 - DNA, 17 bp, synthetic construct
  misc_feature 1..17: note = Oligonucleotide
  source 1..17: mol_type = other DNA
ggcgtacctccaaagta

SEQ ID NO: 12194 - DNA, 17 bp, synthetic construct
  misc_feature 1..17: note = Oligonucleotide
  source 1..17: mol_type = other DNA
ggaggcgtacctccaaa

SEQ ID NO: 12195 - DNA, 17 bp, synthetic construct
  misc_feature 1..17: note = Oligonucleotide
  source 1..17: mol_type = other DNA
gagggaggcgtacctcc

SEQ ID NO: 12196 - DNA, 17 bp, synthetic construct
  misc_feature 1..17: note = Oligonucleotide
  source 1..17: mol_type = other DNA
gaggagggaggcgtacc

SEQ ID NO: 12197 - DNA, 17 bp, synthetic construct
  misc_feature 1..17: note = Oligonucleotide
  source 1..17: mol_type = other DNA
tgggaggagggaggcgt

SEQ ID NO: 12198 - DNA, 17 bp, synthetic construct
  misc_feature 1..17: note = Oligonucleotide
  source 1..17: mol_type = other DNA
ggatgggaggagggagg

SEQ ID NO: 12199 - DNA, 17 bp, synthetic construct
  misc_feature 1..17: note = Oligonucleotide
  source 1..17: mol_type = other DNA
agaggatgggaggaggg

SEQ ID NO: 12200 - DNA, 17 bp, synthetic construct
  misc_feature 1..17: note = Oligonucleotide
  source 1..17: mol_type = other DNA
cagagaggatgggagga

SEQ ID NO: 12201 - DNA, 17 bp, synthetic construct
  misc_feature 1..17: note = Oligonucleotide
  source 1..17: mol_type = other DNA
ccacagagaggatggga

SEQ ID NO: 12202 - DNA, 17 bp, synthetic construct
  misc_feature 1..17: note = Oligonucleotide
  source 1..17: mol_type = other DNA
tggccacagagaggatg

SEQ ID NO: 12203 - DNA, 17 bp, synthetic construct
  misc_feature 1..17: note = Oligonucleotide
  source 1..17: mol_type = other DNA
acatggccacagagagg

SEQ ID NO: 12204 - DNA, 17 bp, synthetic construct
  misc_feature 1..17: note = Oligonucleotide
  source 1..17: mol_type = other DNA
gccacatggccacagag

SEQ ID NO: 12205 - DNA, 17 bp, synthetic construct
  misc_feature 1..17: note = Oligonucleotide
  source 1..17: mol_type = other DNA
gcagccacatggccaca

SEQ ID NO: 12206 - DNA, 17 bp, synthetic construct
  misc_feature 1..17: note = Oligonucleotide
  source 1..17: mol_type = other DNA
tgggcagccacatggcc

SEQ ID NO: 12207 - DNA, 17 bp, synthetic construct
  misc_feature 1..17: note = Oligonucleotide
  source 1..17: mol_type = other DNA
cactgggcagccacatg

SEQ ID NO: 12208 - DNA, 17 bp, synthetic construct
  misc_feature 1..17: note = Oligonucleotide
  source 1..17: mol_type = other DNA
ccacactgggcagccac

SEQ ID NO: 12209 - DNA, 17 bp, synthetic construct
  misc_feature 1..17: note = Oligonucleotide
  source 1..17: mol_type = other DNA
cagccacactgggcagc

SEQ ID NO: 12210 - DNA, 17 bp, synthetic construct
  misc_feature 1..17: note = Oligonucleotide
  source 1..17: mol_type = other DNA
tatcagccacactgggc

SEQ ID NO: 12211 - DNA, 17 bp, synthetic construct
  misc_feature 1..17: note = Oligonucleotide
  source 1..17: mol_type = other DNA
gggtatcagccacactg

SEQ ID NO: 12212 - DNA, 17 bp, synthetic construct
  misc_feature 1..17: note = Oligonucleotide
  source 1..17: mol_type = other DNA
agagggtatcagccaca

SEQ ID NO: 12213 - DNA, 17 bp, synthetic construct
  misc_feature 1..17: note = Oligonucleotide
  source 1..17: mol_type = other DNA
ggcagagggtatcagcc

SEQ ID NO: 12214 - DNA, 17 bp, synthetic construct
  misc_feature 1..17: note = Oligonucleotide
  source 1..17: mol_type = other DNA
taaggcagagggtatca

SEQ ID NO: 12215 - DNA, 17 bp, synthetic construct
  misc_feature 1..17: note = Oligonucleotide
  source 1..17: mol_type = other DNA
ctgtaaggcagagggta

SEQ ID NO: 12216 - DNA, 17 bp, synthetic construct
  misc_feature 1..17: note = Oligonucleotide
  source 1..17: mol_type = other DNA
cagctgtaaggcagagg

SEQ ID NO: 12217 - DNA, 17 bp, synthetic construct
  misc_feature 1..17: note = Oligonucleotide
  source 1..17: mol_type = other DNA
aggcagctgtaaggcag

SEQ ID NO: 12218 - DNA, 17 bp, synthetic construct
  misc_feature 1..17: note = Oligonucleotide
  source 1..17: mol_type = other DNA
aggaggcagctgtaagg

SEQ ID NO: 12219 - DNA, 17 bp, synthetic construct
  misc_feature 1..17: note = Oligonucleotide
  source 1..17: mol_type = other DNA
ggcaggaggcagctgta

SEQ ID NO: 12220 - DNA, 17 bp, synthetic construct
  misc_feature 1..17: note = Oligonucleotide
  source 1..17: mol_type = other DNA
caaggcaggaggcagct

SEQ ID NO: 12221 - DNA, 17 bp, synthetic construct
  misc_feature 1..17: note = Oligonucleotide
  source 1..17: mol_type = other DNA
aagcaaggcaggaggca

SEQ ID NO: 12222 - DNA, 17 bp, synthetic construct
  misc_feature 1..17: note = Oligonucleotide
  source 1..17: mol_type = other DNA
aggaagcaaggcaggag

SEQ ID NO: 12223 - DNA, 17 bp, synthetic construct
  misc_feature 1..17: note = Oligonucleotide
  source 1..17: mol_type = other DNA
cagaggaagcaaggcag

SEQ ID NO: 12224 - DNA, 17 bp, synthetic construct
  misc_feature 1..17: note = Oligonucleotide
  source 1..17: mol_type = other DNA
cgccagaggaagcaagg

SEQ ID NO: 12225 - DNA, 17 bp, synthetic construct
  misc_feature 1..17: note = Oligonucleotide
  source 1..17: mol_type = other DNA
agccgccagaggaagca

SEQ ID NO: 12226 - DNA, 17 bp, synthetic construct
  misc_feature 1..17: note = Oligonucleotide
  source 1..17: mol_type = other DNA
ccaagccgccagaggaa

SEQ ID NO: 12227 - DNA, 17 bp, synthetic construct
  misc_feature 1..17: note = Oligonucleotide
  source 1..17: mol_type = other DNA
gctccaagccgccagag

SEQ ID NO: 12228 - DNA, 17 bp, synthetic construct
  misc_feature 1..17: note = Oligonucleotide
  source 1..17: mol_type = other DNA
tgtgctccaagccgcca

SEQ ID NO: 12229 - DNA, 17 bp, synthetic construct
  misc_feature 1..17: note = Oligonucleotide
  source 1..17: mol_type = other DNA
cagtgtgctccaagccg

SEQ ID NO: 12230 - DNA, 17 bp, synthetic construct
  misc_feature 1..17: note = Oligonucleotide
  source 1..17: mol_type = other DNA
agtcagtgtgctccaag

SEQ ID NO: 12231 - DNA, 17 bp, synthetic construct
  misc_feature 1..17: note = Oligonucleotide
  source 1..17: mol_type = other DNA
aggagtcagtgtgctcc

SEQ ID NO: 12232 - DNA, 17 bp, synthetic construct
  misc_feature 1..17: note = Oligonucleotide
  source 1..17: mol_type = other DNA
aaaaggagtcagtgtgc

SEQ ID NO: 12233 - DNA, 17 bp, synthetic construct
  misc_feature 1..17: note = Oligonucleotide
  source 1..17: mol_type = other DNA
aagaaaaggagtcagtg

SEQ ID NO: 12234 - DNA, 17 bp, synthetic construct
  misc_feature 1..17: note = Oligonucleotide
  source 1..17: mol_type = other DNA
caaaagaaaaggagtca

SEQ ID NO: 12235 - DNA, 17 bp, synthetic construct
  misc_feature 1..17: note = Oligonucleotide
  source 1..17: mol_type = other DNA
ccccaaaagaaaaggag

SEQ ID NO: 12236 - DNA, 17 bp, synthetic construct
  misc_feature 1..17: note = Oligonucleotide
  source 1..17: mol_type = other DNA
atcccccaaaagaaaag

SEQ ID NO: 12237 - DNA, 17 bp, synthetic construct
  misc_feature 1..17: note = Oligonucleotide
  source 1..17: mol_type = other DNA
cagatcccccaaaagaa

SEQ ID NO: 12238 - DNA, 17 bp, synthetic construct
  misc_feature 1..17: note = Oligonucleotide
  source 1..17: mol_type = other DNA
tggcagatcccccaaaa

SEQ ID NO: 12239 - DNA, 17 bp, synthetic construct
  misc_feature 1..17: note = Oligonucleotide
  source 1..17: mol_type = other DNA
tagtggcagatccccca

SEQ ID NO: 12240 - DNA, 17 bp, synthetic construct
  misc_feature 1..17: note = Oligonucleotide
  source 1..17: mol_type = other DNA
agttagtggcagatccc

SEQ ID NO: 12241 - DNA, 17 bp, synthetic construct
  misc_feature 1..17: note = Oligonucleotide
  source 1..17: mol_type = other DNA
gggagttagtggcagat

SEQ ID NO: 12242 - DNA, 17 bp, synthetic construct
  misc_feature 1..17: note = Oligonucleotide
  source 1..17: mol_type = other DNA
atagggagttagtggca

SEQ ID NO: 12243 - DNA, 17 bp, synthetic construct
  misc_feature 1..17: note = Oligonucleotide
  source 1..17: mol_type = other DNA
gaaatagggagttagtg

SEQ ID NO: 12244 - DNA, 17 bp, synthetic construct
  misc_feature 1..17: note = Oligonucleotide
  source 1..17: mol_type = other DNA
tgggaaatagggagtta

SEQ ID NO: 12245 - DNA, 17 bp, synthetic construct
  misc_feature 1..17: note = Oligonucleotide
  source 1..17: mol_type = other DNA
ggatgggaaatagggag

SEQ ID NO: 12246 - DNA, 17 bp, synthetic construct
  misc_feature 1..17: note = Oligonucleotide
  source 1..17: mol_type = other DNA
ctgggatgggaaatagg

SEQ ID NO: 12247 - DNA, 17 bp, synthetic construct
  misc_feature 1..17: note = Oligonucleotide
  source 1..17: mol_type = other DNA
tttctgggatgggaaat

SEQ ID NO: 12248 - DNA, 17 bp, synthetic construct
  misc_feature 1..17: note = Oligonucleotide
  source 1..17: mol_type = other DNA
atgtttctgggatggga

SEQ ID NO: 12249 - DNA, 17 bp, synthetic construct
  misc_feature 1..17: note = Oligonucleotide
  source 1..17: mol_type = other DNA
caaatgtttctgggatg

SEQ ID NO: 12250 - DNA, 17 bp, synthetic construct
  misc_feature 1..17: note = Oligonucleotide
  source 1..17: mol_type = other DNA
agacaaatgtttctggg

SEQ ID NO: 12251 - DNA, 17 bp, synthetic construct
  misc_feature 1..17: note = Oligonucleotide
  source 1..17: mol_type = other DNA
aagagacaaatgtttct

SEQ ID NO: 12252 - DNA, 17 bp, synthetic construct
  misc_feature 1..17: note = Oligonucleotide
  source 1..17: mol_type = other DNA
gccaagagacaaatgtt

SEQ ID NO: 12253 - DNA, 17 bp, synthetic construct
  misc_feature 1..17: note = Oligonucleotide
  source 1..17: mol_type = other DNA
ggtgccaagagacaaat

SEQ ID NO: 12254 - DNA, 17 bp, synthetic construct
  misc_feature 1..17: note = Oligonucleotide
  source 1..17: mol_type = other DNA
ggtggtgccaagagaca

SEQ ID NO: 12255 - DNA, 17 bp, synthetic construct
  misc_feature 1..17: note = Oligonucleotide
  source 1..17: mol_type = other DNA
taaggtggtgccaagag

SEQ ID NO: 12256 - DNA, 17 bp, synthetic construct
  misc_feature 1..17: note = Oligonucleotide
  source 1..17: mol_type = other DNA
ttctaaggtggtgccaa

SEQ ID NO: 12257 - DNA, 17 bp, synthetic construct
  misc_feature 1..17: note = Oligonucleotide
  source 1..17: mol_type = other DNA
ggattctaaggtggtgc

SEQ ID NO: 12258 - DNA, 17 bp, synthetic construct
  misc_feature 1..17: note = Oligonucleotide
  source 1..17: mol_type = other DNA
aagggattctaaggtgg

SEQ ID NO: 12259 - DNA, 17 bp, synthetic construct
  misc_feature 1..17: note = Oligonucleotide
  source 1..17: mol_type = other DNA
tttaagggattctaagg

SEQ ID NO: 12260 - DNA, 17 bp, synthetic construct
  misc_feature 1..17: note = Oligonucleotide
  source 1..17: mol_type = other DNA
atgtttaagggattcta

SEQ ID NO: 12261 - DNA, 17 bp, synthetic construct
  misc_feature 1..17: note = Oligonucleotide
  source 1..17: mol_type = other DNA
tccatgtttaagggatt

SEQ ID NO: 12262 - DNA, 17 bp, synthetic construct
  misc_feature 1..17: note = Oligonucleotide
  source 1..17: mol_type = other DNA
gaatccatgtttaaggg

SEQ ID NO: 12263 - DNA, 17 bp, synthetic construct
  misc_feature 1..17: note = Oligonucleotide
  source 1..17: mol_type = other DNA
cgggaatccatgtttaa

SEQ ID NO: 12264 - DNA, 17 bp, synthetic construct
  misc_feature 1..17: note = Oligonucleotide
  source 1..17: mol_type = other DNA
acacgggaatccatgtt

SEQ ID NO: 12265 - DNA, 17 bp, synthetic construct
  misc_feature 1..17: note = Oligonucleotide
  source 1..17: mol_type = other DNA
gacacacgggaatccat

SEQ ID NO: 12266 - DNA, 17 bp, synthetic construct
  misc_feature 1..17: note = Oligonucleotide
  source 1..17: mol_type = other DNA
aatgacacacgggaatc

SEQ ID NO: 12267 - DNA, 17 bp, synthetic construct
  misc_feature 1..17: note = Oligonucleotide
  source 1..17: mol_type = other DNA
agaaatgacacacggga

SEQ ID NO: 12268 - DNA, 17 bp, synthetic construct
  misc_feature 1..17: note = Oligonucleotide
  source 1..17: mol_type = other DNA
tttagaaatgacacacg

SEQ ID NO: 12269 - DNA, 17 bp, synthetic construct
  misc_feature 1..17: note = Oligonucleotide
  source 1..17: mol_type = other DNA
cactttagaaatgacac

SEQ ID NO: 12270 - DNA, 17 bp, synthetic construct
  misc_feature 1..17: note = Oligonucleotide
  source 1..17: mol_type = other DNA
ctgcactttagaaatga

SEQ ID NO: 12271 - DNA, 17 bp, synthetic construct
  misc_feature 1..17: note = Oligonucleotide
  source 1..17: mol_type = other DNA
ttactgcactttagaaa

SEQ ID NO: 12272 - DNA, 17 bp, synthetic construct
  misc_feature 1..17: note = Oligonucleotide
  source 1..17: mol_type = other DNA
ttcttactgcactttag

SEQ ID NO: 12273 - DNA, 17 bp, synthetic construct
  misc_feature 1..17: note = Oligonucleotide
  source 1..17: mol_type = other DNA
atcttcttactgcactt

SEQ ID NO: 12274 - DNA, 17 bp, synthetic construct
  misc_feature 1..17: note = Oligonucleotide
  source 1..17: mol_type = other DNA
tctatcttcttactgca

SEQ ID NO: 12275 - DNA, 17 bp, synthetic construct
  misc_feature 1..17: note = Oligonucleotide
  source 1..17: mol_type = other DNA
ccatctatcttcttact

SEQ ID NO: 12276 - DNA, 17 bp, synthetic construct
  misc_feature 1..17: note = Oligonucleotide
  source 1..17: mol_type = other DNA
cttccatctatcttctt

SEQ ID NO: 12277 - DNA, 17 bp, synthetic construct
  misc_feature 1..17: note = Oligonucleotide
  source 1..17: mol_type = other DNA
tgacttccatctatctt

SEQ ID NO: 12278 - DNA, 17 bp, synthetic construct
  misc_feature 1..17: note = Oligonucleotide
  source 1..17: mol_type = other DNA
gcgtgacttccatctat

SEQ ID NO: 12279 - DNA, 17 bp, synthetic construct
  misc_feature 1..17: note = Oligonucleotide
  source 1..17: mol_type = other DNA
atggcgtgacttccatc

SEQ ID NO: 12280 - DNA, 17 bp, synthetic construct
  misc_feature 1..17: note = Oligonucleotide
  source 1..17: mol_type = other DNA
gagatggcgtgacttcc

SEQ ID NO: 12281 - DNA, 17 bp, synthetic construct
  misc_feature 1..17: note = Oligonucleotide
  source 1..17: mol_type = other DNA
agggagatggcgtgact

SEQ ID NO: 12282 - DNA, 17 bp, synthetic construct
  misc_feature 1..17: note = Oligonucleotide
  source 1..17: mol_type = other DNA
tgcagggagatggcgtg

SEQ ID NO: 12283 - DNA, 17 bp, synthetic construct
  misc_feature 1..17: note = Oligonucleotide
  source 1..17: mol_type = other DNA
gagtgcagggagatggc

SEQ ID NO: 12284 - DNA, 17 bp, synthetic construct
  misc_feature 1..17: note = Oligonucleotide
  source 1..17: mol_type = other DNA
atggagtgcagggagat

SEQ ID NO: 12285 - DNA, 17 bp, synthetic construct
  misc_feature 1..17: note = Oligonucleotide
  source 1..17: mol_type = other DNA
cagatggagtgcaggga

SEQ ID NO: 12286 - DNA, 17 bp, synthetic construct
  misc_feature 1..17: note = Oligonucleotide
  source 1..17: mol_type = other DNA
gggcagatggagtgcag

SEQ ID NO: 12287 - DNA, 17 bp, synthetic construct
  misc_feature 1..17: note = Oligonucleotide
  source 1..17: mol_type = other DNA
agagggcagatggagtg

SEQ ID NO: 12288 - DNA, 17 bp, synthetic construct
  misc_feature 1..17: note = Oligonucleotide
  source 1..17: mol_type = other DNA
gcaagagggcagatgga

SEQ ID NO: 12289 - DNA, 17 bp, synthetic construct
  misc_feature 1..17: note = Oligonucleotide
  source 1..17: mol_type = other DNA
aaggcaagagggcagat

SEQ ID NO: 12290 - DNA, 17 bp, synthetic construct
  misc_feature 1..17: note = Oligonucleotide
  source 1..17: mol_type = other DNA
gagaaggcaagagggca

SEQ ID NO: 12291 - DNA, 17 bp, synthetic construct
  misc_feature 1..17: note = Oligonucleotide
  source 1..17: mol_type = other DNA
ggggagaaggcaagagg

SEQ ID NO: 12292 - DNA, 17 bp, synthetic construct
  misc_feature 1..17: note = Oligonucleotide
  source 1..17: mol_type = other DNA
ggtggggagaaggcaag

SEQ ID NO: 12293 - DNA, 17 bp, synthetic construct
  misc_feature 1..17: note = Oligonucleotide
  source 1..17: mol_type = other DNA
agtggtggggagaaggc

SEQ ID NO: 12294 - DNA, 17 bp, synthetic construct
  misc_feature 1..17: note = Oligonucleotide
  source 1..17: mol_type = other DNA
ggaagtggtggggagaa

SEQ ID NO: 12295 - DNA, 17 bp, synthetic construct
  misc_feature 1..17: note = Oligonucleotide
  source 1..17: mol_type = other DNA
cggggaagtggtgggga

SEQ ID NO: 12296 - DNA, 17 bp, synthetic construct
  misc_feature 1..17: note = Oligonucleotide
  source 1..17: mol_type = other DNA
agacggggaagtggtgg

SEQ ID NO: 12297 - DNA, 17 bp, synthetic construct
  misc_feature 1..17: note = Oligonucleotide
  source 1..17: mol_type = other DNA
gacagacggggaagtgg

SEQ ID NO: 12298 - DNA, 17 bp, synthetic construct
  misc_feature 1..17: note = Oligonucleotide
  source 1..17: mol_type = other DNA
caggacagacggggaag

SEQ ID NO: 12299 - DNA, 17 bp, synthetic construct
  misc_feature 1..17: note = Oligonucleotide
  source 1..17: mol_type = other DNA
gggcaggacagacgggg

SEQ ID NO: 12300 - DNA, 17 bp, synthetic construct
  misc_feature 1..17: note = Oligonucleotide
  source 1..17: mol_type = other DNA
caggggcaggacagacg

SEQ ID NO: 12301 - DNA, 17 bp, synthetic construct
  misc_feature 1..17: note = Oligonucleotide
  source 1..17: mol_type = other DNA
gggcaggggcaggacag

SEQ ID NO: 12302 - DNA, 17 bp, synthetic construct
  misc_feature 1..17: note = Oligonucleotide
  source 1..17: mol_type = other DNA
tctgggcaggggcagga

SEQ ID NO: 12303 - DNA, 17 bp, synthetic construct
  misc_feature 1..17: note = Oligonucleotide
  source 1..17: mol_type = other DNA
ccttctgggcaggggca

SEQ ID NO: 12304 - DNA, 17 bp, synthetic construct
  misc_feature 1..17: note = Oligonucleotide
  source 1..17: mol_type = other DNA
gatccttctgggcaggg

SEQ ID NO: 12305 - DNA, 17 bp, synthetic construct
  misc_feature 1..17: note = Oligonucleotide
  source 1..17: mol_type = other DNA
tcagatccttctgggca

SEQ ID NO: 12306 - DNA, 17 bp, synthetic construct
  misc_feature 1..17: note = Oligonucleotide
  source 1..17: mol_type = other DNA
tgctcagatccttctgg

SEQ ID NO: 12307 - DNA, 17 bp, synthetic construct
  misc_feature 1..17: note = Oligonucleotide
  source 1..17: mol_type = other DNA
ccctgctcagatccttc

SEQ ID NO: 12308 - DNA, 17 bp, synthetic construct
  misc_feature 1..17: note = Oligonucleotide
  source 1..17: mol_type = other DNA
ggcccctgctcagatcc

SEQ ID NO: 12309 - DNA, 17 bp, synthetic construct
  misc_feature 1..17: note = Oligonucleotide
  source 1..17: mol_type = other DNA
ccaggcccctgctcaga

SEQ ID NO: 12310 - DNA, 17 bp, synthetic construct
  misc_feature 1..17: note = Oligonucleotide
  source 1..17: mol_type = other DNA
aagccaggcccctgctc

SEQ ID NO: 12311 - DNA, 17 bp, synthetic construct
  misc_feature 1..17: note = Oligonucleotide
  source 1..17: mol_type = other DNA
agcaagccaggcccctg

SEQ ID NO: 12312 - DNA, 17 bp, synthetic construct
  misc_feature 1..17: note = Oligonucleotide
  source 1..17: mol_type = other DNA
agcagcaagccaggccc

SEQ ID NO: 12313 - DNA, 17 bp, synthetic construct
  misc_feature 1..17: note = Oligonucleotide
  source 1..17: mol_type = other DNA
ctcagcagcaagccagg

SEQ ID NO: 12314 - DNA, 17 bp, synthetic construct
  misc_feature 1..17: note = Oligonucleotide
  source 1..17: mol_type = other DNA
agcctcagcagcaagcc

SEQ ID NO: 12315 - DNA, 17 bp, synthetic construct
  misc_feature 1..17: note = Oligonucleotide
  source 1..17: mol_type = other DNA
gacagcctcagcagcaa

SEQ ID NO: 12316 - DNA, 17 bp, synthetic construct
  misc_feature 1..17: note = Oligonucleotide
  source 1..17: mol_type = other DNA
tgtgacagcctcagcag

SEQ ID NO: 12317 - DNA, 17 bp, synthetic construct
  misc_feature 1..17: note = Oligonucleotide
  source 1..17: mol_type = other DNA
agctgtgacagcctcag

SEQ ID NO: 12318 - DNA, 17 bp, synthetic construct
  misc_feature 1..17: note = Oligonucleotide
  source 1..17: mol_type = other DNA
ggcagctgtgacagcct

SEQ ID NO: 12319 - DNA, 17 bp, synthetic construct
  misc_feature 1..17: note = Oligonucleotide
  source 1..17: mol_type = other DNA
tctggcagctgtgacag

SEQ ID NO: 12320 - DNA, 17 bp, synthetic construct
  misc_feature 1..17: note = Oligonucleotide
  source 1..17: mol_type = other DNA
ggctctggcagctgtga

SEQ ID NO: 12321 - DNA, 17 bp, synthetic construct
  misc_feature 1..17: note = Oligonucleotide
  source 1..17: mol_type = other DNA
cagggctctggcagctg

SEQ ID NO: 12322 - DNA, 17 bp, synthetic construct
  misc_feature 1..17: note = Oligonucleotide
  source 1..17: mol_type = other DNA
gcccagggctctggcag

SEQ ID NO: 12323 - DNA, 17 bp, synthetic construct
  misc_feature 1..17: note = Oligonucleotide
  source 1..17: mol_type = other DNA
tcagcccagggctctgg

SEQ ID NO: 12324 - DNA, 17 bp, synthetic construct
  misc_feature 1..17: note = Oligonucleotide
  source 1..17: mol_type = other DNA
ggatcagcccagggctc

SEQ ID NO: 12325 - DNA, 17 bp, synthetic construct
  misc_feature 1..17: note = Oligonucleotide
  source 1..17: mol_type = other DNA
atgggatcagcccaggg

SEQ ID NO: 12326 - DNA, 17 bp, synthetic construct
  misc_feature 1..17: note = Oligonucleotide
  source 1..17: mol_type = other DNA
cctatgggatcagccca

SEQ ID NO: 12327 - DNA, 17 bp, synthetic construct
  misc_feature 1..17: note = Oligonucleotide
  source 1..17: mol_type = other DNA
agacctatgggatcagc

SEQ ID NO: 12328 - DNA, 17 bp, synthetic construct
  misc_feature 1..17: note = Oligonucleotide
  source 1..17: mol_type = other DNA
gaaagacctatgggatc

SEQ ID NO: 12329 - DNA, 17 bp, synthetic construct
  misc_feature 1..17: note = Oligonucleotide
  source 1..17: mol_type = other DNA
aaggaaagacctatggg

SEQ ID NO: 12330 - DNA, 17 bp, synthetic construct
  misc_feature 1..17: note = Oligonucleotide
  source 1..17: mol_type = other DNA
ctcaaggaaagacctat

SEQ ID NO: 12331 - DNA, 17 bp, synthetic construct
  misc_feature 1..17: note = Oligonucleotide
  source 1..17: mol_type = other DNA
gtcctcaaggaaagacc

SEQ ID NO: 12332 - DNA, 17 bp, synthetic construct
  misc_feature 1..17: note = Oligonucleotide
  source 1..17: mol_type = other DNA
cgggtcctcaaggaaag

SEQ ID NO: 12333 - DNA, 17 bp, synthetic construct
  misc_feature 1..17: note = Oligonucleotide
  source 1..17: mol_type = other DNA
agtcgggtcctcaagga

SEQ ID NO: 12334 - DNA, 17 bp, synthetic construct
  misc_feature 1..17: note = Oligonucleotide
  source 1..17: mol_type = other DNA
gggagtcgggtcctcaa

SEQ ID NO: 12335 - DNA, 17 bp, synthetic construct
  misc_feature 1..17: note = Oligonucleotide
  source 1..17: mol_type = other DNA
cttgggagtcgggtcct

SEQ ID NO: 12336 - DNA, 17 bp, synthetic construct
  misc_feature 1..17: note = Oligonucleotide
  source 1..17: mol_type = other DNA
agccttgggagtcgggt

SEQ ID NO: 12337 - DNA, 17 bp, synthetic construct
  misc_feature 1..17: note = Oligonucleotide
  source 1..17: mol_type = other DNA
aggagccttgggagtcg

SEQ ID NO: 12338 - DNA, 17 bp, synthetic construct
  misc_feature 1..17: note = Oligonucleotide
  source 1..17: mol_type = other DNA
ggaaggagccttgggag

SEQ ID NO: 12339 - DNA, 17 bp, synthetic construct
  misc_feature 1..17: note = Oligonucleotide
  source 1..17: mol_type = other DNA
tttggaaggagccttgg

SEQ ID NO: 12340 - DNA, 17 bp, synthetic construct
  misc_feature 1..17: note = Oligonucleotide
  source 1..17: mol_type = other DNA
ctctttggaaggagcct

SEQ ID NO: 12341 - DNA, 17 bp, synthetic construct
  misc_feature 1..17: note = Oligonucleotide
  source 1..17: mol_type = other DNA
ctcctctttggaaggag

SEQ ID NO: 12342 - DNA, 17 bp, synthetic construct
  misc_feature 1..17: note = Oligonucleotide
  source 1..17: mol_type = other DNA
gggctcctctttggaag

SEQ ID NO: 12343 - DNA, 17 bp, synthetic construct
  misc_feature 1..17: note = Oligonucleotide
  source 1..17: mol_type = other DNA
gaagggctcctctttgg

SEQ ID NO: 12344 - DNA, 17 bp, synthetic construct
  misc_feature 1..17: note = Oligonucleotide
  source 1..17: mol_type = other DNA
cccgaagggctcctctt

SEQ ID NO: 12345 - DNA, 17 bp, synthetic construct
  misc_feature 1..17: note = Oligonucleotide
  source 1..17: mol_type = other DNA
gggcccgaagggctcct

SEQ ID NO: 12346 - DNA, 17 bp, synthetic construct
  misc_feature 1..17: note = Oligonucleotide
  source 1..17: mol_type = other DNA
cacgggcccgaagggct

SEQ ID NO: 12347 - DNA, 17 bp, synthetic construct
  misc_feature 1..17: note = Oligonucleotide
  source 1..17: mol_type = other DNA
gcccacgggcccgaagg

SEQ ID NO: 12348 - DNA, 17 bp, synthetic construct
  misc_feature 1..17: note = Oligonucleotide
  source 1..17: mol_type = other DNA
gcagcccacgggcccga

SEQ ID NO: 12349 - DNA, 17 bp, synthetic construct
  misc_feature 1..17: note = Oligonucleotide
  source 1..17: mol_type = other DNA
catgcagcccacgggcc

SEQ ID NO: 12350 - DNA, 17 bp, synthetic construct
  misc_feature 1..17: note = Oligonucleotide
  source 1..17: mol_type = other DNA
atccatgcagcccacgg

SEQ ID NO: 12351 - DNA, 17 bp, synthetic construct
  misc_feature 1..17: note = Oligonucleotide
  source 1..17: mol_type = other DNA
agcatccatgcagccca

SEQ ID NO: 12352 - DNA, 17 bp, synthetic construct
  misc_feature 1..17: note = Oligonucleotide
  source 1..17: mol_type = other DNA
gccagcatccatgcagc

SEQ ID NO: 12353 - DNA, 17 bp, synthetic construct
  misc_feature 1..17: note = Oligonucleotide
  source 1..17: mol_type = other DNA
gccgccagcatccatgc

SEQ ID NO: 12354 - DNA, 17 bp, synthetic construct
  misc_feature 1..17: note = Oligonucleotide
  source 1..17: mol_type = other DNA
tctgccgccagcatcca

SEQ ID NO: 12355 - DNA, 17 bp, synthetic construct
  misc_feature 1..17: note = Oligonucleotide
  source 1..17: mol_type = other DNA
agctctgccgccagcat

SEQ ID NO: 12356 - DNA, 17 bp, synthetic construct
  misc_feature 1..17: note = Oligonucleotide
  source 1..17: mol_type = other DNA
accagctctgccgccag

SEQ ID NO: 12357 - DNA, 17 bp, synthetic construct
  misc_feature 1..17: note = Oligonucleotide
  source 1..17: mol_type = other DNA
atgaccagctctgccgc

SEQ ID NO: 12358 - DNA, 17 bp, synthetic construct
  misc_feature 1..17: note = Oligonucleotide
  source 1..17: mol_type = other DNA
gggatgaccagctctgc

SEQ ID NO: 12359 - DNA, 17 bp, synthetic construct
  misc_feature 1..17: note = Oligonucleotide
  source 1..17: mol_type = other DNA
tgggggatgaccagctc

SEQ ID NO: 12360 - DNA, 17 bp, synthetic construct
  misc_feature 1..17: note = Oligonucleotide
  source 1..17: mol_type = other DNA
gggtgggggatgaccag

SEQ ID NO: 12361 - DNA, 17 bp, synthetic construct
  misc_feature 1..17: note = Oligonucleotide
  source 1..17: mol_type = other DNA
ggcgggtgggggatgac

SEQ ID NO: 12362 - DNA, 17 bp, synthetic construct
  misc_feature 1..17: note = Oligonucleotide
  source 1..17: mol_type = other DNA
gggggcgggtgggggat

SEQ ID NO: 12363 - DNA, 17 bp, synthetic construct
  misc_feature 1..17: note = Oligonucleotide
  source 1..17: mol_type = other DNA
caagggggcgggtgggg

SEQ ID NO: 12364 - DNA, 17 bp, synthetic construct
  misc_feature 1..17: note = Oligonucleotide
  source 1..17: mol_type = other DNA
agacaagggggcgggtg

SEQ ID NO: 12365 - DNA, 17 bp, synthetic construct
  misc_feature 1..17: note = Oligonucleotide
  source 1..17: mol_type = other DNA
ggcagacaagggggcgg

SEQ ID NO: 12366 - DNA, 17 bp, synthetic construct
  misc_feature 1..17: note = Oligonucleotide
  source 1..17: mol_type = other DNA
aaaggcagacaaggggg

SEQ ID NO: 12367 - DNA, 17 bp, synthetic construct
  misc_feature 1..17: note = Oligonucleotide
  source 1..17: mol_type = other DNA
taaaaaggcagacaagg

SEQ ID NO: 12368 - DNA, 17 bp, synthetic construct
  misc_feature 1..17: note = Oligonucleotide
  source 1..17: mol_type = other DNA
ctttaaaaaggcagaca

SEQ ID NO: 12369 - DNA, 17 bp, synthetic construct
  misc_feature 1..17: note = Oligonucleotide
  source 1..17: mol_type = other DNA
cagctttaaaaaggcag

SEQ ID NO: 12370 - DNA, 17 bp, synthetic construct
  misc_feature 1..17: note = Oligonucleotide
  source 1..17: mol_type = other DNA
aagcagctttaaaaagg

SEQ ID NO: 12371 - DNA, 17 bp, synthetic construct
  misc_feature 1..17: note = Oligonucleotide
  source 1..17: mol_type = other DNA
caaaagcagctttaaaa

SEQ ID NO: 12372 - DNA, 17 bp, synthetic construct
  misc_feature 1..17: note = Oligonucleotide
  source 1..17: mol_type = other DNA
aggcaaaagcagcttta

SEQ ID NO: 12373 - DNA, 17 bp, synthetic construct
  misc_feature 1..17: note = Oligonucleotide
  source 1..17: mol_type = other DNA
agaaggcaaaagcagct

SEQ ID NO: 12374 - DNA, 17 bp, synthetic construct
  misc_feature 1..17: note = Oligonucleotide
  source 1..17: mol_type = other DNA
cacagaaggcaaaagca

SEQ ID NO: 12375 - DNA, 17 bp, synthetic construct
  misc_feature 1..17: note = Oligonucleotide
  source 1..17: mol_type = other DNA
gggcacagaaggcaaaa

SEQ ID NO: 12376 - DNA, 17 bp, synthetic construct
  misc_feature 1..17: note = Oligonucleotide
  source 1..17: mol_type = other DNA
taggggcacagaaggca

SEQ ID NO: 12377 - DNA, 17 bp, synthetic construct
  misc_feature 1..17: note = Oligonucleotide
  source 1..17: mol_type = other DNA
acctaggggcacagaag

SEQ ID NO: 12378 - DNA, 17 bp, synthetic construct
  misc_feature 1..17: note = Oligonucleotide
  source 1..17: mol_type = other DNA
gagacctaggggcacag

SEQ ID NO: 12379 - DNA, 17 bp, synthetic construct
  misc_feature 1..17: note = Oligonucleotide
  source 1..17: mol_type = other DNA
ggggagacctaggggca

SEQ ID NO: 12380 - DNA, 17 bp, synthetic construct
  misc_feature 1..17: note = Oligonucleotide
  source 1..17: mol_type = other DNA
agaggggagacctaggg

SEQ ID NO: 12381 - DNA, 17 bp, synthetic construct
  misc_feature 1..17: note = Oligonucleotide
  source 1..17: mol_type = other DNA
aggagaggggagaccta

SEQ ID NO: 12382 - DNA, 17 bp, synthetic construct
  misc_feature 1..17: note = Oligonucleotide
  source 1..17: mol_type = other DNA
aagaggagaggggagac

SEQ ID NO: 12383 - DNA, 17 bp, synthetic construct
  misc_feature 1..17: note = Oligonucleotide
  source 1..17: mol_type = other DNA
ccaaagaggagagggga

SEQ ID NO: 12384 - DNA, 17 bp, synthetic construct
  misc_feature 1..17: note = Oligonucleotide
  source 1..17: mol_type = other DNA
gacccaaagaggagagg

SEQ ID NO: 12385 - DNA, 17 bp, synthetic construct
  misc_feature 1..17: note = Oligonucleotide
  source 1..17: mol_type = other DNA
ccagacccaaagaggag

SEQ ID NO: 12386 - DNA, 17 bp, synthetic construct
  misc_feature 1..17: note = Oligonucleotide
  source 1..17: mol_type = other DNA
cccccagacccaaagag

SEQ ID NO: 12387 - DNA, 17 bp, synthetic construct
  misc_feature 1..17: note = Oligonucleotide
  source 1..17: mol_type = other DNA
acccccccagacccaaa

SEQ ID NO: 12388 - DNA, 17 bp, synthetic construct
  misc_feature 1..17: note = Oligonucleotide
  source 1..17: mol_type = other DNA
accacccccccagaccc

SEQ ID NO: 12389 - DNA, 17 bp, synthetic construct
  misc_feature 1..17: note = Oligonucleotide
  source 1..17: mol_type = other DNA
cataccacccccccaga

SEQ ID NO: 12390 - DNA, 17 bp, synthetic construct
  misc_feature 1..17: note = Oligonucleotide
  source 1..17: mol_type = other DNA
ccacataccaccccccc

SEQ ID NO: 12391 - DNA, 17 bp, synthetic construct
  misc_feature 1..17: note = Oligonucleotide
  source 1..17: mol_type = other DNA
catccacataccacccc

SEQ ID NO: 12392 - DNA, 17 bp, synthetic construct
  misc_feature 1..17: note = Oligonucleotide
  source 1..17: mol_type = other DNA
tggcatccacataccac

SEQ ID NO: 12393 - DNA, 17 bp, synthetic construct
  misc_feature 1..17: note = Oligonucleotide
  source 1..17: mol_type = other DNA
aggtggcatccacatac

SEQ ID NO: 12394 - DNA, 17 bp, synthetic construct
  misc_feature 1..17: note = Oligonucleotide
  source 1..17: mol_type = other DNA
aagaggtggcatccaca

SEQ ID NO: 12395 - DNA, 17 bp, synthetic construct
  misc_feature 1..17: note = Oligonucleotide
  source 1..17: mol_type = other DNA
gtcaagaggtggcatcc

SEQ ID NO: 12396 - DNA, 17 bp, synthetic construct
  misc_feature 1..17: note = Oligonucleotide
  source 1..17: mol_type = other DNA
ggagtcaagaggtggca

SEQ ID NO: 12397 - DNA, 17 bp, synthetic construct
  misc_feature 1..17: note = Oligonucleotide
  source 1..17: mol_type = other DNA
gcaggagtcaagaggtg

SEQ ID NO: 12398 - DNA, 17 bp, synthetic construct
  misc_feature 1..17: note = Oligonucleotide
  source 1..17: mol_type = other DNA
gaagcaggagtcaagag

SEQ ID NO: 12399 - DNA, 17 bp, synthetic construct
  misc_feature 1..17: note = Oligonucleotide
  source 1..17: mol_type = other DNA
caagaagcaggagtcaa

SEQ ID NO: 12400 - DNA, 17 bp, synthetic construct
  misc_feature 1..17: note = Oligonucleotide
  source 1..17: mol_type = other DNA
cagcaagaagcaggagt

SEQ ID NO: 12401 - DNA, 17 bp, synthetic construct
  misc_feature 1..17: note = Oligonucleotide
  source 1..17: mol_type = other DNA
aggcagcaagaagcagg

SEQ ID NO: 12402 - DNA, 17 bp, synthetic construct
  misc_feature 1..17: note = Oligonucleotide
  source 1..17: mol_type = other DNA
tccaggcagcaagaagc

SEQ ID NO: 12403 - DNA, 17 bp, synthetic construct
  misc_feature 1..17: note = Oligonucleotide
  source 1..17: mol_type = other DNA
tcttccaggcagcaaga

SEQ ID NO: 12404 - DNA, 17 bp, synthetic construct
  misc_feature 1..17: note = Oligonucleotide
  source 1..17: mol_type = other DNA
tggtcttccaggcagca

SEQ ID NO: 12405 - DNA, 17 bp, synthetic construct
  misc_feature 1..17: note = Oligonucleotide
  source 1..17: mol_type = other DNA
ggttggtcttccaggca

SEQ ID NO: 12406 - DNA, 17 bp, synthetic construct
  misc_feature 1..17: note = Oligonucleotide
  source 1..17: mol_type = other DNA
ctaggttggtcttccag

SEQ ID NO: 12407 - DNA, 17 bp, synthetic construct
  misc_feature 1..17: note = Oligonucleotide
  source 1..17: mol_type = other DNA
ccactaggttggtcttc

SEQ ID NO: 12408 - DNA, 17 bp, synthetic construct
  misc_feature 1..17: note = Oligonucleotide
  source 1..17: mol_type = other DNA
ggcccactaggttggtc

SEQ ID NO: 12409 - DNA, 17 bp, synthetic construct
  misc_feature 1..17: note = Oligonucleotide
  source 1..17: mol_type = other DNA
cggggcccactaggttg

SEQ ID NO: 12410 - DNA, 17 bp, synthetic construct
  misc_feature 1..17: note = Oligonucleotide
  source 1..17: mol_type = other DNA
gtacggggcccactagg

SEQ ID NO: 12411 - DNA, 17 bp, synthetic construct
  misc_feature 1..17: note = Oligonucleotide
  source 1..17: mol_type = other DNA
acagtacggggcccact

SEQ ID NO: 12412 - DNA, 17 bp, synthetic construct
  misc_feature 1..17: note = Oligonucleotide
  source 1..17: mol_type = other DNA
ctgacagtacggggccc

SEQ ID NO: 12413 - DNA, 17 bp, synthetic construct
  misc_feature 1..17: note = Oligonucleotide
  source 1..17: mol_type = other DNA
aggctgacagtacgggg

SEQ ID NO: 12414 - DNA, 17 bp, synthetic construct
  misc_feature 1..17: note = Oligonucleotide
  source 1..17: mol_type = other DNA
ccaaggctgacagtacg

SEQ ID NO: 12415 - DNA, 17 bp, synthetic construct
  misc_feature 1..17: note = Oligonucleotide
  source 1..17: mol_type = other DNA
cctccaaggctgacagt

SEQ ID NO: 12416 - DNA, 17 bp, synthetic construct
  misc_feature 1..17: note = Oligonucleotide
  source 1..17: mol_type = other DNA
tgtcctccaaggctgac

SEQ ID NO: 12417 - DNA, 17 bp, synthetic construct
  misc_feature 1..17: note = Oligonucleotide
  source 1..17: mol_type = other DNA
ctctgtcctccaaggct

SEQ ID NO: 12418 - DNA, 17 bp, synthetic construct
  misc_feature 1..17: note = Oligonucleotide
  source 1..17: mol_type = other DNA
gaactctgtcctccaag

SEQ ID NO: 12419 - DNA, 17 bp, synthetic construct
  misc_feature 1..17: note = Oligonucleotide
  source 1..17: mol_type = other DNA
tgtgaactctgtcctcc

SEQ ID NO: 12420 - DNA, 17 bp, synthetic construct
  misc_feature 1..17: note = Oligonucleotide
  source 1..17: mol_type = other DNA
cgctgtgaactctgtcc

SEQ ID NO: 12421 - DNA, 17 bp, synthetic construct
  misc_feature 1..17: note = Oligonucleotide
  source 1..17: mol_type = other DNA
ctacgctgtgaactctg

SEQ ID NO: 12422 - DNA, 17 bp, synthetic construct
  misc_feature 1..17: note = Oligonucleotide
  source 1..17: mol_type = other DNA
ttgctacgctgtgaact

SEQ ID NO: 12423 - DNA, 17 bp, synthetic construct
  misc_feature 1..17: note = Oligonucleotide
  source 1..17: mol_type = other DNA
acgttgctacgctgtga

SEQ ID NO: 12424 - DNA, 17 bp, synthetic construct
  misc_feature 1..17: note = Oligonucleotide
  source 1..17: mol_type = other DNA
aacacgttgctacgctg

SEQ ID NO: 12425 - DNA, 17 bp, synthetic construct
  misc_feature 1..17: note = Oligonucleotide
  source 1..17: mol_type = other DNA
ctgaacacgttgctacg

SEQ ID NO: 12426 - DNA, 17 bp, synthetic construct
  misc_feature 1..17: note = Oligonucleotide
  source 1..17: mol_type = other DNA
gttctgaacacgttgct

SEQ ID NO: 12427 - DNA, 17 bp, synthetic construct
  misc_feature 1..17: note = Oligonucleotide
  source 1..17: mol_type = other DNA
taagttctgaacacgtt

SEQ ID NO: 12428 - DNA, 17 bp, synthetic construct
  misc_feature 1..17: note = Oligonucleotide
  source 1..17: mol_type = other DNA
ccttaagttctgaacac

SEQ ID NO: 12429 - DNA, 17 bp, synthetic construct
  misc_feature 1..17: note = Oligonucleotide
  source 1..17: mol_type = other DNA
agtccttaagttctgaa

SEQ ID NO: 12430 - DNA, 17 bp, synthetic construct
  misc_feature 1..17: note = Oligonucleotide
  source 1..17: mol_type = other DNA
caaagtccttaagttct

SEQ ID NO: 12431 - DNA, 17 bp, synthetic construct
  misc_feature 1..17: note = Oligonucleotide
  source 1..17: mol_type = other DNA
ctgcaaagtccttaagt

SEQ ID NO: 12432 - DNA, 17 bp, synthetic construct
  misc_feature 1..17: note = Oligonucleotide
  source 1..17: mol_type = other DNA
gacctgcaaagtcctta

SEQ ID NO: 12433 - DNA, 17 bp, synthetic construct
  misc_feature 1..17: note = Oligonucleotide
  source 1..17: mol_type = other DNA
taagacctgcaaagtcc

SEQ ID NO: 12434 - DNA, 17 bp, synthetic construct
  misc_feature 1..17: note = Oligonucleotide
  source 1..17: mol_type = other DNA
ttgtaagacctgcaaag

SEQ ID NO: 12435 - DNA, 17 bp, synthetic construct
  misc_feature 1..17: note = Oligonucleotide
  source 1..17: mol_type = other DNA
cctttgtaagacctgca

SEQ ID NO: 12436 - DNA, 17 bp, synthetic construct
  misc_feature 1..17: note = Oligonucleotide
  source 1..17: mol_type = other DNA
aggcctttgtaagacct

SEQ ID NO: 12437 - DNA, 17 bp, synthetic construct
  misc_feature 1..17: note = Oligonucleotide
  source 1..17: mol_type = other DNA
gccaggcctttgtaaga

SEQ ID NO: 12438 - DNA, 17 bp, synthetic construct
  misc_feature 1..17: note = Oligonucleotide
  source 1..17: mol_type = other DNA
atggccaggcctttgta

SEQ ID NO: 12439 - DNA, 17 bp, synthetic construct
  misc_feature 1..17: note = Oligonucleotide
  source 1..17: mol_type = other DNA
agaatggccaggccttt

SEQ ID NO: 12440 - DNA, 17 bp, synthetic construct
  misc_feature 1..17: note = Oligonucleotide
  source 1..17: mol_type = other DNA
ggtagaatggccaggcc

SEQ ID NO: 12441 - DNA, 17 bp, synthetic construct
  misc_feature 1..17: note = Oligonucleotide
  source 1..17: mol_type = other DNA
gaaggtagaatggccag

SEQ ID NO: 12442 - DNA, 17 bp, synthetic construct
  misc_feature 1..17: note = Oligonucleotide
  source 1..17: mol_type = other DNA
aaagaaggtagaatggc

SEQ ID NO: 12443 - DNA, 17 bp, synthetic construct
  misc_feature 1..17: note = Oligonucleotide
  source 1..17: mol_type = other DNA
actaaagaaggtagaat

SEQ ID NO: 12444 - DNA, 17 bp, synthetic construct
  misc_feature 1..17: note = Oligonucleotide
  source 1..17: mol_type = other DNA
tgaactaaagaaggtag

SEQ ID NO: 12445 - DNA, 17 bp, synthetic construct
  misc_feature 1..17: note = Oligonucleotide
  source 1..17: mol_type = other DNA
tcctgaactaaagaagg

SEQ ID NO: 12446 - DNA, 17 bp, synthetic construct
  misc_feature 1..17: note = Oligonucleotide
  source 1..17: mol_type = other DNA
gaatcctgaactaaaga

SEQ ID NO: 12447 - DNA, 17 bp, synthetic construct
  misc_feature 1..17: note = Oligonucleotide
  source 1..17: mol_type = other DNA
tttgaatcctgaactaa

SEQ ID NO: 12448 - DNA, 17 bp, synthetic construct
  misc_feature 1..17: note = Oligonucleotide
  source 1..17: mol_type = other DNA
tcttttgaatcctgaac

SEQ ID NO: 12449 - DNA, 17 bp, synthetic construct
  misc_feature 1..17: note = Oligonucleotide
  source 1..17: mol_type = other DNA
ctgtcttttgaatcctg

SEQ ID NO: 12450 - DNA, 17 bp, synthetic construct
  misc_feature 1..17: note = Oligonucleotide
  source 1..17: mol_type = other DNA
tacctgtcttttgaatc

SEQ ID NO: 12451 - DNA, 17 bp, synthetic construct
  misc_feature 1..17: note = Oligonucleotide
  source 1..17: mol_type = other DNA
tcctacctgtcttttga

SEQ ID NO: 12452 - DNA, 17 bp, synthetic construct
  misc_feature 1..17: note = Oligonucleotide
  source 1..17: mol_type = other DNA
agctcctacctgtcttt

SEQ ID NO: 12453 - DNA, 17 bp, synthetic construct
  misc_feature 1..17: note = Oligonucleotide
  source 1..17: mol_type = other DNA
ccaagctcctacctgtc

SEQ ID NO: 12454 - DNA, 17 bp, synthetic construct
  misc_feature 1..17: note = Oligonucleotide
  source 1..17: mol_type = other DNA
ttcccaagctcctacct

SEQ ID NO: 12455 - DNA, 17 bp, synthetic construct
  misc_feature 1..17: note = Oligonucleotide
  source 1..17: mol_type = other DNA
agcttcccaagctccta

SEQ ID NO: 12456 - DNA, 17 bp, synthetic construct
  misc_feature 1..17: note = Oligonucleotide
  source 1..17: mol_type = other DNA
atgagcttcccaagctc

SEQ ID NO: 12457 - DNA, 17 bp, synthetic construct
  misc_feature 1..17: note = Oligonucleotide
  source 1..17: mol_type = other DNA
ctcatgagcttcccaag

SEQ ID NO: 12458 - DNA, 17 bp, synthetic construct
  misc_feature 1..17: note = Oligonucleotide
  source 1..17: mol_type = other DNA
ggcctcatgagcttccc

SEQ ID NO: 12459 - DNA, 17 bp, synthetic construct
  misc_feature 1..17: note = Oligonucleotide
  source 1..17: mol_type = other DNA
agaggcctcatgagctt

SEQ ID NO: 12460 - DNA, 17 bp, synthetic construct
  misc_feature 1..17: note = Oligonucleotide
  source 1..17: mol_type = other DNA
aggagaggcctcatgag

SEQ ID NO: 12461 - DNA, 17 bp, synthetic construct
  misc_feature 1..17: note = Oligonucleotide
  source 1..17: mol_type = other DNA
cttaggagaggcctcat

SEQ ID NO: 12462 - DNA, 17 bp, synthetic construct
  misc_feature 1..17: note = Oligonucleotide
  source 1..17: mol_type = other DNA
gaccttaggagaggcct

SEQ ID NO: 12463 - DNA, 17 bp, synthetic construct
  misc_feature 1..17: note = Oligonucleotide
  source 1..17: mol_type = other DNA
cgggaccttaggagagg

SEQ ID NO: 12464 - DNA, 17 bp, synthetic construct
  misc_feature 1..17: note = Oligonucleotide
  source 1..17: mol_type = other DNA
tcccgggaccttaggag

SEQ ID NO: 12465 - DNA, 17 bp, synthetic construct
  misc_feature 1..17: note = Oligonucleotide
  source 1..17: mol_type = other DNA
gcatcccgggaccttag

SEQ ID NO: 12466 - DNA, 17 bp, synthetic construct
  misc_feature 1..17: note = Oligonucleotide
  source 1..17: mol_type = other DNA
gcagcatcccgggacct

SEQ ID NO: 12467 - DNA, 17 bp, synthetic construct
  misc_feature 1..17: note = Oligonucleotide
  source 1..17: mol_type = other DNA
gaggcagcatcccggga

SEQ ID NO: 12468 - DNA, 17 bp, synthetic construct
  misc_feature 1..17: note = Oligonucleotide
  source 1..17: mol_type = other DNA
ctggaggcagcatcccg

SEQ ID NO: 12469 - DNA, 17 bp, synthetic construct
  misc_feature 1..17: note = Oligonucleotide
  source 1..17: mol_type = other DNA
gagctggaggcagcatc

SEQ ID NO: 12470 - DNA, 17 bp, synthetic construct
  misc_feature 1..17: note = Oligonucleotide
  source 1..17: mol_type = other DNA
caggagctggaggcagc

SEQ ID NO: 12471 - DNA, 17 bp, synthetic construct
  misc_feature 1..17: note = Oligonucleotide
  source 1..17: mol_type = other DNA
tgacaggagctggaggc

SEQ ID NO: 12472 - DNA, 17 bp, synthetic construct
  misc_feature 1..17: note = Oligonucleotide
  source 1..17: mol_type = other DNA
ggatgacaggagctgga

SEQ ID NO: 12473 - DNA, 17 bp, synthetic construct
  misc_feature 1..17: note = Oligonucleotide
  source 1..17: mol_type = other DNA
ccaggatgacaggagct

SEQ ID NO: 12474 - DNA, 17 bp, synthetic construct
  misc_feature 1..17: note = Oligonucleotide
  source 1..17: mol_type = other DNA
tccccaggatgacagga

SEQ ID NO: 12475 - DNA, 17 bp, synthetic construct
  misc_feature 1..17: note = Oligonucleotide
  source 1..17: mol_type = other DNA
aattccccaggatgaca

SEQ ID NO: 12476 - DNA, 17 bp, synthetic construct
  misc_feature 1..17: note = Oligonucleotide
  source 1..17: mol_type = other DNA
agcaattccccaggatg

SEQ ID NO: 12477 - DNA, 17 bp, synthetic construct
  misc_feature 1..17: note = Oligonucleotide
  source 1..17: mol_type = other DNA
cagagcaattccccagg

SEQ ID NO: 12478 - DNA, 17 bp, synthetic construct
  misc_feature 1..17: note = Oligonucleotide
  source 1..17: mol_type = other DNA
ccccagagcaattcccc

SEQ ID NO: 12479 - DNA, 17 bp, synthetic construct
  misc_feature 1..17: note = Oligonucleotide
  source 1..17: mol_type = other DNA
ggaccccagagcaattc

SEQ ID NO: 12480 - DNA, 17 bp, synthetic construct
  misc_feature 1..17: note = Oligonucleotide
  source 1..17: mol_type = other DNA
agaggaccccagagcaa

SEQ ID NO: 12481 - DNA, 17 bp, synthetic construct
  misc_feature 1..17: note = Oligonucleotide
  source 1..17: mol_type = other DNA
gggagaggaccccagag

SEQ ID NO: 12482 - DNA, 17 bp, synthetic construct
  misc_feature 1..17: note = Oligonucleotide
  source 1..17: mol_type = other DNA
aaggggagaggacccca

SEQ ID NO: 12483 - DNA, 17 bp, synthetic construct
  misc_feature 1..17: note = Oligonucleotide
  source 1..17: mol_type = other DNA
taaaaggggagaggacc

SEQ ID NO: 12484 - DNA, 17 bp, synthetic construct
  misc_feature 1..17: note = Oligonucleotide
  source 1..17: mol_type = other DNA
ggctaaaaggggagagg

SEQ ID NO: 12485 - DNA, 17 bp, synthetic construct
  misc_feature 1..17: note = Oligonucleotide
  source 1..17: mol_type = other DNA
aaaggctaaaaggggag

SEQ ID NO: 12486 - DNA, 17 bp, synthetic construct
  misc_feature 1..17: note = Oligonucleotide
  source 1..17: mol_type = other DNA
ggaaaaggctaaaaggg

SEQ ID NO: 12487 - DNA, 17 bp, synthetic construct
  misc_feature 1..17: note = Oligonucleotide
  source 1..17: mol_type = other DNA
gttggaaaaggctaaaa

SEQ ID NO: 12488 - DNA, 17 bp, synthetic construct
  misc_feature 1..17: note = Oligonucleotide
  source 1..17: mol_type = other DNA
agagttggaaaaggcta

SEQ ID NO: 12489 - DNA, 17 bp, synthetic construct
  misc_feature 1..17: note = Oligonucleotide
  source 1..17: mol_type = other DNA
ctgagagttggaaaagg

SEQ ID NO: 12490 - DNA, 17 bp, synthetic construct
  misc_feature 1..17: note = Oligonucleotide
  source 1..17: mol_type = other DNA
tggctgagagttggaaa

SEQ ID NO: 12491 - DNA, 17 bp, synthetic construct
  misc_feature 1..17: note = Oligonucleotide
  source 1..17: mol_type = other DNA
gtttggctgagagttgg

SEQ ID NO: 12492 - DNA, 17 bp, synthetic construct
  misc_feature 1..17: note = Oligonucleotide
  source 1..17: mol_type = other DNA
ccagtttggctgagagt

SEQ ID NO: 12493 - DNA, 17 bp, synthetic construct
  misc_feature 1..17: note = Oligonucleotide
  source 1..17: mol_type = other DNA
tttccagtttggctgag

SEQ ID NO: 12494 - DNA, 17 bp, synthetic construct
  misc_feature 1..17: note = Oligonucleotide
  source 1..17: mol_type = other DNA
ggctttccagtttggct

SEQ ID NO: 12495 - DNA, 17 bp, synthetic construct
  misc_feature 1..17: note = Oligonucleotide
  source 1..17: mol_type = other DNA
gagggctttccagtttg

SEQ ID NO: 12496 - DNA, 17 bp, synthetic construct
  misc_feature 1..17: note = Oligonucleotide
  source 1..17: mol_type = other DNA
gaagagggctttccagt

SEQ ID NO: 12497 - DNA, 17 bp, synthetic construct
  misc_feature 1..17: note = Oligonucleotide
  source 1..17: mol_type = other DNA
tgggaagagggctttcc

SEQ ID NO: 12498 - DNA, 17 bp, synthetic construct
  misc_feature 1..17: note = Oligonucleotide
  source 1..17: mol_type = other DNA
tgctgggaagagggctt

SEQ ID NO: 12499 - DNA, 17 bp, synthetic construct
  misc_feature 1..17: note = Oligonucleotide
  source 1..17: mol_type = other DNA
cactgctgggaagaggg

SEQ ID NO: 12500 - DNA, 17 bp, synthetic construct
  misc_feature 1..17: note = Oligonucleotide
  source 1..17: mol_type = other DNA
ctgcactgctgggaaga

SEQ ID NO: 12501 - DNA, 17 bp, synthetic construct
  misc_feature 1..17: note = Oligonucleotide
  source 1..17: mol_type = other DNA
acactgcactgctggga

SEQ ID NO: 12502 - DNA, 17 bp, synthetic construct
  misc_feature 1..17: note = Oligonucleotide
  source 1..17: mol_type = other DNA
tcaacactgcactgctg

SEQ ID NO: 12503 - DNA, 17 bp, synthetic construct
  misc_feature 1..17: note = Oligonucleotide
  source 1..17: mol_type = other DNA
ccttcaacactgcactg

SEQ ID NO: 12504 - DNA, 17 bp, synthetic construct
  misc_feature 1..17: note = Oligonucleotide
  source 1..17: mol_type = other DNA
gcaccttcaacactgca

SEQ ID NO: 12505 - DNA, 17 bp, synthetic construct
  misc_feature 1..17: note = Oligonucleotide
  source 1..17: mol_type = other DNA
cgggcaccttcaacact

SEQ ID NO: 12506 - DNA, 17 bp, synthetic construct
  misc_feature 1..17: note = Oligonucleotide
  source 1..17: mol_type = other DNA
ctacgggcaccttcaac

SEQ ID NO: 12507 - DNA, 17 bp, synthetic construct
  misc_feature 1..17: note = Oligonucleotide
  source 1..17: mol_type = other DNA
attctacgggcaccttc

SEQ ID NO: 12508 - DNA, 17 bp, synthetic construct
  misc_feature 1..17: note = Oligonucleotide
  source 1..17: mol_type = other DNA
cccattctacgggcacc

SEQ ID NO: 12509 - DNA, 17 bp, synthetic construct
  misc_feature 1..17: note = Oligonucleotide
  source 1..17: mol_type = other DNA
acacccattctacgggc

SEQ ID NO: 12510 - DNA, 17 bp, synthetic construct
  misc_feature 1..17: note = Oligonucleotide
  source 1..17: mol_type = other DNA
ataacacccattctacg

SEQ ID NO: 12511 - DNA, 17 bp, synthetic construct
  misc_feature 1..17: note = Oligonucleotide
  source 1..17: mol_type = other DNA
attataacacccattct

SEQ ID NO: 12512 - DNA, 17 bp, synthetic construct
  misc_feature 1..17: note = Oligonucleotide
  source 1..17: mol_type = other DNA
ctgattataacacccat

SEQ ID NO: 12513 - DNA, 17 bp, synthetic construct
  misc_feature 1..17: note = Oligonucleotide
  source 1..17: mol_type = other DNA
actctgattataacacc

SEQ ID NO: 12514 - DNA, 17 bp, synthetic construct
  misc_feature 1..17: note = Oligonucleotide
  source 1..17: mol_type = other DNA
ctcactctgattataac

SEQ ID NO: 12515 - DNA, 17 bp, synthetic construct
  misc_feature 1..17: note = Oligonucleotide
  source 1..17: mol_type = other DNA
ctgctcactctgattat

SEQ ID NO: 12516 - DNA, 17 bp, synthetic construct
  misc_feature 1..17: note = Oligonucleotide
  source 1..17: mol_type = other DNA
aggctgctcactctgat

SEQ ID NO: 12517 - DNA, 17 bp, synthetic construct
  misc_feature 1..17: note = Oligonucleotide
  source 1..17: mol_type = other DNA
accaggctgctcactct

SEQ ID NO: 12518 - DNA, 17 bp, synthetic construct
  misc_feature 1..17: note = Oligonucleotide
  source 1..17: mol_type = other DNA
aggaccaggctgctcac

SEQ ID NO: 12519 - DNA, 17 bp, synthetic construct
  misc_feature 1..17: note = Oligonucleotide
  source 1..17: mol_type = other DNA
cctaggaccaggctgct

SEQ ID NO: 12520 - DNA, 17 bp, synthetic construct
  misc_feature 1..17: note = Oligonucleotide
  source 1..17: mol_type = other DNA
aggcctaggaccaggct

SEQ ID NO: 12521 - DNA, 17 bp, synthetic construct
  misc_feature 1..17: note = Oligonucleotide
  source 1..17: mol_type = other DNA
cagaggcctaggaccag

SEQ ID NO: 12522 - DNA, 17 bp, synthetic construct
  misc_feature 1..17: note = Oligonucleotide
  source 1..17: mol_type = other DNA
gtacagaggcctaggac

SEQ ID NO: 12523 - DNA, 17 bp, synthetic construct
  misc_feature 1..17: note = Oligonucleotide
  source 1..17: mol_type = other DNA
cctgtacagaggcctag

SEQ ID NO: 12524 - DNA, 17 bp, synthetic construct
  misc_feature 1..17: note = Oligonucleotide
  source 1..17: mol_type = other DNA
ggtcctgtacagaggcc

SEQ ID NO: 12525 - DNA, 17 bp, synthetic construct
  misc_feature 1..17: note = Oligonucleotide
  source 1..17: mol_type = other DNA
tctggtcctgtacagag

SEQ ID NO: 12526 - DNA, 17 bp, synthetic construct
  misc_feature 1..17: note = Oligonucleotide
  source 1..17: mol_type = other DNA
gggtctggtcctgtaca

SEQ ID NO: 12527 - DNA, 17 bp, synthetic construct
  misc_feature 1..17: note = Oligonucleotide
  source 1..17: mol_type = other DNA
caggggtctggtcctgt

SEQ ID NO: 12528 - DNA, 17 bp, synthetic construct
  misc_feature 1..17: note = Oligonucleotide
  source 1..17: mol_type = other DNA
cctcaggggtctggtcc

SEQ ID NO: 12529 - DNA, 17 bp, synthetic construct
  misc_feature 1..17: note = Oligonucleotide
  source 1..17: mol_type = other DNA
cagcctcaggggtctgg

SEQ ID NO: 12530 - DNA, 17 bp, synthetic construct
  misc_feature 1..17: note = Oligonucleotide
  source 1..17: mol_type = other DNA
ccccagcctcaggggtc

SEQ ID NO: 12531 - DNA, 17 bp, synthetic construct
  misc_feature 1..17: note = Oligonucleotide
  source 1..17: mol_type = other DNA
agaccccagcctcaggg

SEQ ID NO: 12532 - DNA, 17 bp, synthetic construct
  misc_feature 1..17: note = Oligonucleotide
  source 1..17: mol_type = other DNA
aggagaccccagcctca

SEQ ID NO: 12533 - DNA, 17 bp, synthetic construct
  misc_feature 1..17: note = Oligonucleotide
  source 1..17: mol_type = other DNA
gtcaggagaccccagcc

SEQ ID NO: 12534 - DNA, 17 bp, synthetic construct
  misc_feature 1..17: note = Oligonucleotide
  source 1..17: mol_type = other DNA
tgggtcaggagacccca

SEQ ID NO: 12535 - DNA, 17 bp, synthetic construct
  misc_feature 1..17: note = Oligonucleotide
  source 1..17: mol_type = other DNA
gtgtgggtcaggagacc

SEQ ID NO: 12536 - DNA, 17 bp, synthetic construct
  misc_feature 1..17: note = Oligonucleotide
  source 1..17: mol_type = other DNA
caggtgtgggtcaggag

SEQ ID NO: 12537 - DNA, 17 bp, synthetic construct
  misc_feature 1..17: note = Oligonucleotide
  source 1..17: mol_type = other DNA
ggtcaggtgtgggtcag

SEQ ID NO: 12538 - DNA, 17 bp, synthetic construct
  misc_feature 1..17: note = Oligonucleotide
  source 1..17: mol_type = other DNA
gctggtcaggtgtgggt

SEQ ID NO: 12539 - DNA, 17 bp, synthetic construct
  misc_feature 1..17: note = Oligonucleotide
  source 1..17: mol_type = other DNA
ggggctggtcaggtgtg

SEQ ID NO: 12540 - DNA, 17 bp, synthetic construct
  misc_feature 1..17: note = Oligonucleotide
  source 1..17: mol_type = other DNA
atgggggctggtcaggt

SEQ ID NO: 12541 - DNA, 17 bp, synthetic construct
  misc_feature 1..17: note = Oligonucleotide
  source 1..17: mol_type = other DNA
aagatgggggctggtca

SEQ ID NO: 12542 - DNA, 17 bp, synthetic construct
  misc_feature 1..17: note = Oligonucleotide
  source 1..17: mol_type = other DNA
gggaagatgggggctgg

SEQ ID NO: 12543 - DNA, 17 bp, synthetic construct
  misc_feature 1..17: note = Oligonucleotide
  source 1..17: mol_type = other DNA
agagggaagatgggggc

SEQ ID NO: 12544 - DNA, 17 bp, synthetic construct
  misc_feature 1..17: note = Oligonucleotide
  source 1..17: mol_type = other DNA
cagagagggaagatggg

SEQ ID NO: 12545 - DNA, 17 bp, synthetic construct
  misc_feature 1..17: note = Oligonucleotide
  source 1..17: mol_type = other DNA
aagcagagagggaagat

SEQ ID NO: 12546 - DNA, 17 bp, synthetic construct
  misc_feature 1..17: note = Oligonucleotide
  source 1..17: mol_type = other DNA
gagaagcagagagggaa

SEQ ID NO: 12547 - DNA, 17 bp, synthetic construct
  misc_feature 1..17: note = Oligonucleotide
  source 1..17: mol_type = other DNA
agggagaagcagagagg

SEQ ID NO: 12548 - DNA, 17 bp, synthetic construct
  misc_feature 1..17: note = Oligonucleotide
  source 1..17: mol_type = other DNA
cggagggagaagcagag

SEQ ID NO: 12549 - DNA, 17 bp, synthetic construct
  misc_feature 1..17: note = Oligonucleotide
  source 1..17: mol_type = other DNA
gagcggagggagaagca

SEQ ID NO: 12550 - DNA, 17 bp, synthetic construct
  misc_feature 1..17: note = Oligonucleotide
  source 1..17: mol_type = other DNA
gaagagcggagggagaa

SEQ ID NO: 12551 - DNA, 17 bp, synthetic construct
  misc_feature 1..17: note = Oligonucleotide
  source 1..17: mol_type = other DNA
agagaagagcggaggga

SEQ ID NO: 12552 - DNA, 17 bp, synthetic construct
  misc_feature 1..17: note = Oligonucleotide
  source 1..17: mol_type = other DNA
ggcagagaagagcggag

SEQ ID NO: 12553 - DNA, 17 bp, synthetic construct
  misc_feature 1..17: note = Oligonucleotide
  source 1..17: mol_type = other DNA
agaggcagagaagagcg

SEQ ID NO: 12554 - DNA, 17 bp, synthetic construct
  misc_feature 1..17: note = Oligonucleotide
  source 1..17: mol_type = other DNA
ccaagaggcagagaaga

SEQ ID NO: 12555 - DNA, 17 bp, synthetic construct
  misc_feature 1..17: note = Oligonucleotide
  source 1..17: mol_type = other DNA
agaccaagaggcagaga

SEQ ID NO: 12556 - DNA, 17 bp, synthetic construct
  misc_feature 1..17: note = Oligonucleotide
  source 1..17: mol_type = other DNA
tcaagaccaagaggcag

SEQ ID NO: 12557 - DNA, 17 bp, synthetic construct
  misc_feature 1..17: note = Oligonucleotide
  source 1..17: mol_type = other DNA
tcatcaagaccaagagg

SEQ ID NO: 12558 - DNA, 17 bp, synthetic construct
  misc_feature 1..17: note = Oligonucleotide
  source 1..17: mol_type = other DNA
ttttcatcaagaccaag

SEQ ID NO: 12559 - DNA, 17 bp, synthetic construct
  misc_feature 1..17: note = Oligonucleotide
  source 1..17: mol_type = other DNA
tgattttcatcaagacc

SEQ ID NO: 12560 - DNA, 17 bp, synthetic construct
  misc_feature 1..17: note = Oligonucleotide
  source 1..17: mol_type = other DNA
ctttgattttcatcaag

SEQ ID NO: 12561 - DNA, 17 bp, synthetic construct
  misc_feature 1..17: note = Oligonucleotide
  source 1..17: mol_type = other DNA
tggctttgattttcatc

SEQ ID NO: 12562 - DNA, 17 bp, synthetic construct
  misc_feature 1..17: note = Oligonucleotide
  source 1..17: mol_type = other DNA
aaatggctttgattttc

SEQ ID NO: 12563 - DNA, 17 bp, synthetic construct
  misc_feature 1..17: note = Oligonucleotide
  source 1..17: mol_type = other DNA
ttaaaatggctttgatt

SEQ ID NO: 12564 - DNA, 17 bp, synthetic construct
  misc_feature 1..17: note = Oligonucleotide
  source 1..17: mol_type = other DNA
tttttaaaatggctttg

SEQ ID NO: 12565 - DNA, 17 bp, synthetic construct
  misc_feature 1..17: note = Oligonucleotide
  source 1..17: mol_type = other DNA
cactttttaaaatggct

SEQ ID NO: 12566 - DNA, 17 bp, synthetic construct
  misc_feature 1..17: note = Oligonucleotide
  source 1..17: mol_type = other DNA
atgcactttttaaaatg

SEQ ID NO: 12567 - DNA, 17 bp, synthetic construct
  misc_feature 1..17: note = Oligonucleotide
  source 1..17: mol_type = other DNA
gctatgcactttttaaa

SEQ ID NO: 12568 - DNA, 17 bp, synthetic construct
  misc_feature 1..17: note = Oligonucleotide
  source 1..17: mol_type = other DNA
tgtgctatgcacttttt

SEQ ID NO: 12569 - DNA, 17 bp, synthetic construct
  misc_feature 1..17: note = Oligonucleotide
  source 1..17: mol_type = other DNA
cactgtgctatgcactt

SEQ ID NO: 12570 - DNA, 17 bp, synthetic construct
  misc_feature 1..17: note = Oligonucleotide
  source 1..17: mol_type = other DNA
aggcactgtgctatgca

SEQ ID NO: 12571 - DNA, 17 bp, synthetic construct
  misc_feature 1..17: note = Oligonucleotide
  source 1..17: mol_type = other DNA
gccaggcactgtgctat

SEQ ID NO: 12572 - DNA, 17 bp, synthetic construct
  misc_feature 1..17: note = Oligonucleotide
  source 1..17: mol_type = other DNA
caggccaggcactgtgc

SEQ ID NO: 12573 - DNA, 17 bp, synthetic construct
  misc_feature 1..17: note = Oligonucleotide
  source 1..17: mol_type = other DNA
aaccaggccaggcactg

SEQ ID NO: 12574 - DNA, 17 bp, synthetic construct
  misc_feature 1..17: note = Oligonucleotide
  source 1..17: mol_type = other DNA
ccgaaccaggccaggca

SEQ ID NO: 12575 - DNA, 17 bp, synthetic construct
  misc_feature 1..17: note = Oligonucleotide
  source 1..17: mol_type = other DNA
ggcccgaaccaggccag

SEQ ID NO: 12576 - DNA, 17 bp, synthetic construct
  misc_feature 1..17: note = Oligonucleotide
  source 1..17: mol_type = other DNA
gagggcccgaaccaggc

SEQ ID NO: 12577 - DNA, 17 bp, synthetic construct
  misc_feature 1..17: note = Oligonucleotide
  source 1..17: mol_type = other DNA
attgagggcccgaacca

SEQ ID NO: 12578 - DNA, 17 bp, synthetic construct
  misc_feature 1..17: note = Oligonucleotide
  source 1..17: mol_type = other DNA
tttattgagggcccgaa

SEQ ID NO: 12579 - DNA, 17 bp, synthetic construct
  misc_feature 1..17: note = Oligonucleotide
  source 1..17: mol_type = other DNA
atgtttattgagggccc

SEQ ID NO: 12580 - DNA, 17 bp, synthetic construct
  misc_feature 1..17: note = Oligonucleotide
  source 1..17: mol_type = other DNA
gaaatgtttattgaggg

SEQ ID NO: 12581 - DNA, 17 bp, synthetic construct
  misc_feature 1..17: note = Oligonucleotide
  source 1..17: mol_type = other DNA
taagaaatgtttattga

SEQ ID NO: 12582 - DNA, 17 bp, synthetic construct
  misc_feature 1..17: note = Oligonucleotide
  source 1..17: mol_type = other DNA
atttaagaaatgtttat

SEQ ID NO: 12583 - DNA, 17 bp, synthetic construct
  misc_feature 1..17: note = Oligonucleotide
  source 1..17: mol_type = other DNA
tccatttaagaaatgtt

SEQ ID NO: 12584 - DNA, 17 bp, synthetic construct
  misc_feature 1..17: note = Oligonucleotide
  source 1..17: mol_type = other DNA
tcatccatttaagaaat

SEQ ID NO: 12585 - DNA, 17 bp, synthetic construct
  misc_feature 1..17: note = Oligonucleotide
  source 1..17: mol_type = other DNA
ctttcatccatttaaga

SEQ ID NO: 12586 - DNA, 17 bp, synthetic construct
  misc_feature 1..17: note = Oligonucleotide
  source 1..17: mol_type = other DNA
gttctttcatccattta

SEQ ID NO: 12587 - DNA, 17 bp, synthetic construct
  misc_feature 1..17: note = Oligonucleotide
  source 1..17: mol_type = other DNA
tttgttctttcatccat

SEQ ID NO: 12588 - DNA, 17 bp, synthetic construct
  misc_feature 1..17: note = Oligonucleotide
  source 1..17: mol_type = other DNA
tgctttgttctttcatc

SEQ ID NO: 12589 - DNA, 17 bp, synthetic construct
  misc_feature 1..17: note = Oligonucleotide
  source 1..17: mol_type = other DNA
ttttgctttgttctttc

SEQ ID NO: 12590 - DNA, 17 bp, synthetic construct
  misc_feature 1..17: note = Oligonucleotide
  source 1..17: mol_type = other DNA
gcattttgctttgttct

SEQ ID NO: 12591 - DNA, 17 bp, synthetic construct
  misc_feature 1..17: note = Oligonucleotide
  source 1..17: mol_type = other DNA
tttgcattttgctttgt

SEQ ID NO: 12592 - DNA, 17 bp, synthetic construct
  misc_feature 1..17: note = Oligonucleotide
  source 1..17: mol_type = other DNA
gcatttgcattttgctt

SEQ ID NO: 12593 - DNA, 17 bp, synthetic construct
  misc_feature 1..17: note = Oligonucleotide
  source 1..17: mol_type = other DNA
acagcatttgcattttg

SEQ ID NO: 12594 - DNA, 17 bp, synthetic construct
  misc_feature 1..17: note = Oligonucleotide
  source 1..17: mol_type = other DNA
aacacagcatttgcatt

SEQ ID NO: 12595 - DNA, 17 bp, synthetic construct
  misc_feature 1..17: note = Oligonucleotide
  source 1..17: mol_type = other DNA
caaaacacagcatttgc

SEQ ID NO: 12596 - DNA, 17 bp, synthetic construct
  misc_feature 1..17: note = Oligonucleotide
  source 1..17: mol_type = other DNA
tcacaaaacacagcatt

SEQ ID NO: 12597 - DNA, 17 bp, synthetic construct
  misc_feature 1..17: note = Oligonucleotide
  source 1..17: mol_type = other DNA
aaatcacaaaacacagc

SEQ ID NO: 12598 - DNA, 17 bp, synthetic construct
  misc_feature 1..17: note = Oligonucleotide
  source 1..17: mol_type = other DNA
ctcaaatcacaaaacac

SEQ ID NO: 12599 - DNA, 17 bp, synthetic construct
  misc_feature 1..17: note = Oligonucleotide
  source 1..17: mol_type = other DNA
gatctcaaatcacaaaa

SEQ ID NO: 12600 - DNA, 17 bp, synthetic construct
  misc_feature 1..17: note = Oligonucleotide
  source 1..17: mol_type = other DNA
ctagatctcaaatcaca

SEQ ID NO: 12601 - DNA, 17 bp, synthetic construct
  misc_feature 1..17: note = Oligonucleotide
  source 1..17: mol_type = other DNA
tccctagatctcaaatc

SEQ ID NO: 12602 - DNA, 17 bp, synthetic construct
  misc_feature 1..17: note = Oligonucleotide
  source 1..17: mol_type = other DNA
acctccctagatctcaa

SEQ ID NO: 12603 - DNA, 17 bp, synthetic construct
  misc_feature 1..17: note = Oligonucleotide
  source 1..17: mol_type = other DNA
gccacctccctagatct

SEQ ID NO: 12604 - DNA, 17 bp, synthetic construct
  misc_feature 1..17: note = Oligonucleotide
  source 1..17: mol_type = other DNA
taagccacctccctaga

SEQ ID NO: 12605 - DNA, 17 bp, synthetic construct
  misc_feature 1..17: note = Oligonucleotide
  source 1..17: mol_type = other DNA
tcctaagccacctccct

SEQ ID NO: 12606 - DNA, 17 bp, synthetic construct
  misc_feature 1..17: note = Oligonucleotide
  source 1..17: mol_type = other DNA
ttgtcctaagccacctc

SEQ ID NO: 12607 - DNA, 17 bp, synthetic construct
  misc_feature 1..17: note = Oligonucleotide
  source 1..17: mol_type = other DNA
tttttgtcctaagccac

SEQ ID NO: 12608 - DNA, 17 bp, synthetic construct
  misc_feature 1..17: note = Oligonucleotide
  source 1..17: mol_type = other DNA
gggtttttgtcctaagc

SEQ ID NO: 12609 - DNA, 17 bp, synthetic construct
  misc_feature 1..17: note = Oligonucleotide
  source 1..17: mol_type = other DNA
tgtgggtttttgtccta

SEQ ID NO: 12610 - DNA, 17 bp, synthetic construct
  misc_feature 1..17: note = Oligonucleotide
  source 1..17: mol_type = other DNA
ttctgtgggtttttgtc

SEQ ID NO: 12611 - DNA, 17 bp, synthetic construct
  misc_feature 1..17: note = Oligonucleotide
  source 1..17: mol_type = other DNA
tccttctgtgggttttt

SEQ ID NO: 12612 - DNA, 17 bp, synthetic construct
  misc_feature 1..17: note = Oligonucleotide
  source 1..17: mol_type = other DNA
aagtccttctgtgggtt

SEQ ID NO: 12613 - DNA, 17 bp, synthetic construct
  misc_feature 1..17: note = Oligonucleotide
  source 1..17: mol_type = other DNA
agtaagtccttctgtgg

SEQ ID NO: 12614 - DNA, 17 bp, synthetic construct
  misc_feature 1..17: note = Oligonucleotide
  source 1..17: mol_type = other DNA
ctgagtaagtccttctg

SEQ ID NO: 12615 - DNA, 17 bp, synthetic construct
  misc_feature 1..17: note = Oligonucleotide
  source 1..17: mol_type = other DNA
acgctgagtaagtcctt

SEQ ID NO: 12616 - DNA, 17 bp, synthetic construct
  misc_feature 1..17: note = Oligonucleotide
  source 1..17: mol_type = other DNA
tgaacgctgagtaagtc

SEQ ID NO: 12617 - DNA, 17 bp, synthetic construct
  misc_feature 1..17: note = Oligonucleotide
  source 1..17: mol_type = other DNA
gtctgaacgctgagtaa

SEQ ID NO: 12618 - DNA, 17 bp, synthetic construct
  misc_feature 1..17: note = Oligonucleotide
  source 1..17: mol_type = other DNA
tgagtctgaacgctgag

SEQ ID NO: 12619 - DNA, 17 bp, synthetic construct
  misc_feature 1..17: note = Oligonucleotide
  source 1..17: mol_type = other DNA
tgatgagtctgaacgct

SEQ ID NO: 12620 - DNA, 17 bp, synthetic construct
  misc_feature 1..17: note = Oligonucleotide
  source 1..17: mol_type = other DNA
acctgatgagtctgaac

SEQ ID NO: 12621 - DNA, 17 bp, synthetic construct
  misc_feature 1..17: note = Oligonucleotide
  source 1..17: mol_type = other DNA
gacacctgatgagtctg

SEQ ID NO: 12622 - DNA, 17 bp, synthetic construct
  misc_feature 1..17: note = Oligonucleotide
  source 1..17: mol_type = other DNA
atcgacacctgatgagt

SEQ ID NO: 12623 - DNA, 17 bp, synthetic construct
  misc_feature 1..17: note = Oligonucleotide
  source 1..17: mol_type = other DNA
gggatcgacacctgatg

SEQ ID NO: 12624 - DNA, 17 bp, synthetic construct
  misc_feature 1..17: note = Oligonucleotide
  source 1..17: mol_type = other DNA
tgggggatcgacacctg

SEQ ID NO: 12625 - DNA, 17 bp, synthetic construct
  misc_feature 1..17: note = Oligonucleotide
  source 1..17: mol_type = other DNA
ccatgggggatcgacac

SEQ ID NO: 12626 - DNA, 17 bp, synthetic construct
  misc_feature 1..17: note = Oligonucleotide
  source 1..17: mol_type = other DNA
cgaccatgggggatcga

SEQ ID NO: 12627 - DNA, 17 bp, synthetic construct
  misc_feature 1..17: note = Oligonucleotide
  source 1..17: mol_type = other DNA
gcccgaccatgggggat

SEQ ID NO: 12628 - DNA, 17 bp, synthetic construct
  misc_feature 1..17: note = Oligonucleotide
  source 1..17: mol_type = other DNA
tgagcccgaccatgggg

SEQ ID NO: 12629 - DNA, 17 bp, synthetic construct
  misc_feature 1..17: note = Oligonucleotide
  source 1..17: mol_type = other DNA
acctgagcccgaccatg

SEQ ID NO: 12630 - DNA, 17 bp, synthetic construct
  misc_feature 1..17: note = Oligonucleotide
  source 1..17: mol_type = other DNA
cccacctgagcccgacc

SEQ ID NO: 12631 - DNA, 17 bp, synthetic construct
  misc_feature 1..17: note = Oligonucleotide
  source 1..17: mol_type = other DNA
gggcccacctgagcccg

SEQ ID NO: 12632 - DNA, 17 bp, synthetic construct
  misc_feature 1..17: note = Oligonucleotide
  source 1..17: mol_type = other DNA
cctgggcccacctgagc

SEQ ID NO: 12633 - DNA, 17 bp, synthetic construct
  misc_feature 1..17: note = Oligonucleotide
  source 1..17: mol_type = other DNA
agacctgggcccacctg

SEQ ID NO: 12634 - DNA, 24 bp, synthetic construct
  misc_feature 1..24: note = Oligonucleotide
  source 1..24: mol_type = other DNA
acaaggcacggatctctcctcgca

SEQ ID NO: 12635 - DNA, 25 bp, synthetic construct
  misc_feature 1..25: note = Oligonucleotide
  source 1..25: mol_type = other DNA
gaatgacagacggtgccacggacaa

SEQ ID NO: 12636 - DNA, 25 bp, synthetic construct
  misc_feature 1..25: note = Oligonucleotide
  source 1..25: mol_type = other DNA
gagccagagaacagacaagaggaat

SEQ ID NO: 12637 - DNA, 25 bp, synthetic construct
  misc_feature 1..25: note = Oligonucleotide
  source 1..25: mol_type = other DNA
tgagctcctgtaaaccaccggtgta

SEQ ID NO: 12638 - DNA, 25 bp, synthetic construct
  misc_feature 1..25: note = Oligonucleotide
  source 1..25: mol_type = other DNA
gagacagacacctctggggcagcct

SEQ ID NO: 12639 - DNA, 25 bp, synthetic construct
  misc_feature 1..25: note = Oligonucleotide
  source 1..25: mol_type = other DNA
tgccatgtcctcctcaactcggcca

SEQ ID NO: 12640 - DNA, 25 bp, synthetic construct
  misc_feature 1..25: note = Oligonucleotide
  source 1..25: mol_type = other DNA
ctgagcccgaccatggtggatcgac

SEQ ID NO: 12641 - DNA, 25 bp, synthetic construct
  misc_feature 1..25: note = Oligonucleotide
  source 1..25: mol_type = other DNA
atcgacacctgatgagtctgaacgc

SEQ ID NO: 12642 - DNA, 25 bp, synthetic construct
  misc_feature 1..25: note = Oligonucleotide
  source 1..25: mol_type = other DNA
cctgtggacacaggcagatgactca

SEQ ID NO: 12643 - DNA, 25 bp, synthetic construct
  misc_feature 1..25: note = Oligonucleotide
  source 1..25: mol_type = other DNA
gacagtggtcaggcaaagccaaggc

SEQ ID NO: 12644 - DNA, 25 bp, synthetic construct
  misc_feature 1..25: note = Oligonucleotide
  source 1..25: mol_type = other DNA
gcacagcaaggaggctccatctcag

SEQ ID NO: 12645 - DNA, 19 bp, synthetic construct
  misc_feature 1..19: note = Oligonucleotide
  source 1..19: mol_type = other DNA
ctgaccctgtaaagttaaa

SEQ ID NO: 12646 - DNA, 17 bp, synthetic construct
  misc_feature 1..17: note = Oligonucleotide
  source 1..17: mol_type = other DNA
ggcataaactcgcctgt

SEQ ID NO: 12647 - DNA, 19 bp, synthetic construct
  misc_feature 1..19: note = Oligonucleotide
  source 1..19: mol_type = other DNA
ggcataaactcgccgcagg

SEQ ID NO: 12648 - DNA, 19 bp, synthetic construct
  misc_feature 1..19: note = Oligonucleotide
  source 1..19: mol_type = other DNA
ggcataaactcgccgcttg

SEQ ID NO: 12649 - DNA, 17 bp, synthetic construct
  misc_feature 1..17: note = Oligonucleotide
  source 1..17: mol_type = other DNA
ggttctgggcataaact

SEQ ID NO: 12650 - DNA, 19 bp, synthetic construct
  misc_feature 1..19: note = Oligonucleotide
  source 1..19: mol_type = other DNA
ggttctgggcataaactcg

SEQ ID NO: 12651 - DNA, 19 bp, synthetic construct
  misc_feature 1..19: note = Oligonucleotide
  source 1..19: mol_type = other DNA
ttctgggcataaactcgcc

SEQ ID NO: 12652 - DNA, 19 bp, synthetic construct
  misc_feature 1..19: note = Oligonucleotide
  source 1..19: mol_type = other DNA
gcataaactcgccgcttgt

SEQ ID NO: 12653 - DNA, 17 bp, synthetic construct
  misc_feature 1..17: note = Oligonucleotide
  source 1..17: mol_type = other DNA
gcataaactcgccgaat

SEQ ID NO: 12654 - DNA, 19 bp, synthetic construct
  misc_feature 1..19: note = Oligonucleotide
  source 1..19: mol_type = other DNA
gcataaactcgccgctgat

SEQ ID NO: 12655 - DNA, 17 bp, synthetic construct
  misc_feature 1..17: note = Oligonucleotide
  source 1..17: mol_type = other DNA
agcggaactgaccctgt

SEQ ID NO: 12656 - DNA, 19 bp, synthetic construct
  misc_feature 1..19: note = Oligonucleotide
  source 1..19: mol_type = other DNA
gaagcggaactgaccctgt

SEQ ID NO: 12657 - DNA, 17 bp, synthetic construct
  misc_feature 1..17: note = Oligonucleotide
  source 1..17: mol_type = other DNA
agctgaactgactctgt

SEQ ID NO: 12658 - DNA, 19 bp, synthetic construct
  misc_feature 1..19: note = Oligonucleotide
  source 1..19: mol_type = other DNA
gaagctgaactgactctgt

SEQ ID NO: 12659 - DNA, 18 bp, synthetic construct
  misc_feature 1..18: note = Oligonucleotide
  source 1..18: mol_type = other DNA
agggcactaagcaatgta

SEQ ID NO: 12660 - DNA, 18 bp, synthetic construct
  misc_feature 1..18: note = Oligonucleotide
  source 1..18: mol_type = other DNA
tcctgactgtgcgctggg

SEQ ID NO: 12661 - DNA, 25 bp, synthetic construct
  misc_feature 1..25: note = Oligonucleotide
  source 1..25: mol_type = other DNA
ggaggtgaagcggaactgaccctgt

SEQ ID NO: 12662 - DNA, 25 bp, synthetic construct
  misc_feature 1..25: note = Oligonucleotide
  source 1..25: mol_type = other DNA
tgaagcggaactgaccctgtaaagt

SEQ ID NO: 12663 - DNA, 25 bp, synthetic construct
  misc_feature 1..25: note = Oligonucleotide
  source 1..25: mol_type = other DNA
cctgtaaagttaaaaacccaaattg

SEQ ID NO: 12664 - DNA, 25 bp, synthetic construct
  misc_feature 1..25: note = Oligonucleotide
  source 1..25: mol_type = other DNA
cttgtatcgaaactgctcagataaa

SEQ ID NO: 12665 - DNA, 25 bp, synthetic construct
  misc_feature 1..25: note = Oligonucleotide
  source 1..25: mol_type = other DNA
aaactcgccgcttgtatcgaaactg

SEQ ID NO: 12666 - DNA, 25 bp, synthetic construct
  misc_feature 1..25: note = Oligonucleotide
  source 1..25: mol_type = other DNA
ttctgggcataaactcgccgctgtt

SEQ ID NO: 12667 - DNA, 25 bp, synthetic construct
  misc_feature 1..25: note = Oligonucleotide
  source 1..25: mol_type = other DNA
atcatcgatgaggttctgggcacga

SEQ ID NO: 12668 - DNA, 25 bp, synthetic construct
  misc_feature 1..25: note = Oligonucleotide
  source 1..25: mol_type = other DNA
ctttgcaaactgcttatcatcgatg

SEQ ID NO: 12669 - DNA, 25 bp, synthetic construct
  misc_feature 1..25: note = Oligonucleotide
  source 1..25: mol_type = other DNA
cgtgatcctttacctttgtgtgaag

SEQ ID NO: 12670 - DNA, 25 bp, synthetic construct
  misc_feature 1..25: note = Oligonucleotide
  source 1..25: mol_type = other DNA
gccacctcctcgtgatcctttacct

SEQ ID NO: 12671 - DNA, 25 bp, synthetic construct
  misc_feature 1..25: note = Oligonucleotide
  source 1..25: mol_type = other DNA
caggagccacctcctcgtgatcctt

SEQ ID NO: 12672 - DNA, 25 bp, synthetic construct
  misc_feature 1..25: note = Oligonucleotide
  source 1..25: mol_type = other DNA
ccccagacaggagtcaggcaaagcc

SEQ ID NO: 12673 - DNA, 25 bp, synthetic construct
  misc_feature 1..25: note = Oligonucleotide
  source 1..25: mol_type = other DNA
cactcccccagacaggagtcaggca

SEQ ID NO: 12674 - DNA, 25 bp, synthetic construct
  misc_feature 1..25: note = Oligonucleotide
  source 1..25: mol_type = other DNA
accagcactcccccagacaggagtc

SEQ ID NO: 12675 - DNA, 25 bp, synthetic construct
  misc_feature 1..25: note = Oligonucleotide
  source 1..25: mol_type = other DNA
ggaacctcctcacacaccagcactc

SEQ ID NO: 12676 - DNA, 25 bp, synthetic construct
  misc_feature 1..25: note = Oligonucleotide
  source 1..25: mol_type = other DNA
gcgctggaacctcctcacacaccag

SEQ ID NO: 12677 - DNA, 25 bp, synthetic construct
  misc_feature 1..25: note = Oligonucleotide
  source 1..25: mol_type = other DNA
accctgacttgcgctggaacctcct

SEQ ID NO: 12678 - DNA, 25 bp, synthetic construct
  misc_feature 1..25: note = Oligonucleotide
  source 1..25: mol_type = other DNA
ggtgatcgacacctgatgagtctga

SEQ ID NO: 12679 - DNA, 25 bp, synthetic construct
  misc_feature 1..25: note = Oligonucleotide
  source 1..25: mol_type = other DNA
ccatggtggatcgacacctgatgag

SEQ ID NO: 12680 - DNA, 25 bp, synthetic construct
  misc_feature 1..25: note = Oligonucleotide
  source 1..25: mol_type = other DNA
cccgaccatggtggatcgacacctg

SEQ ID NO: 12681 - DNA, 25 bp, synthetic construct
  misc_feature 1..25: note = Oligonucleotide
  source 1..25: mol_type = other DNA
cccacctgagcccgaccatggtgga

SEQ ID NO: 12682 - DNA, 25 bp, synthetic construct
  misc_feature 1..25: note = Oligonucleotide
  source 1..25: mol_type = other DNA
gagacctgggcccacctgagcccga

SEQ ID NO: 12683 - DNA, 25 bp, synthetic construct
  misc_feature 1..25: note = Oligonucleotide
  source 1..25: mol_type = other DNA
cacacaccagcactcctccagacag

SEQ ID NO: 12684 - DNA, 25 bp, synthetic construct
  misc_feature 1..25: note = Oligonucleotide
  source 1..25: mol_type = other DNA
tcacacaccagcactcctccagaca

SEQ ID NO: 12685 - DNA, 25 bp, synthetic construct
  misc_feature 1..25: note = Oligonucleotide
  source 1..25: mol_type = other DNA
ctcagctgtctgtgccacctcctgc

SEQ ID NO: 12686 - DNA, 25 bp, synthetic construct
  misc_feature 1..25: note = Oligonucleotide
  source 1..25: mol_type = other DNA
cgctcccagccgcctgtggtcctta

SEQ ID NO: 12687 - DNA, 25 bp, synthetic construct
  misc_feature 1..25: note = Oligonucleotide
  source 1..25: mol_type = other DNA
ccacatgataggctctcacctccgt

SEQ ID NO: 12688 - DNA, 25 bp, synthetic construct
  misc_feature 1..25: note = Oligonucleotide
  source 1..25: mol_type = other DNA
ggaggtgaagctgaactgactctgt

SEQ ID NO: 12689 - DNA, 25 bp, synthetic construct
  misc_feature 1..25: note = Oligonucleotide
  source 1..25: mol_type = other DNA
gtgtcaggcaaagccaaggctctgg

SEQ ID NO: 12690 - DNA, 25 bp, synthetic construct
  misc_feature 1..25: note = Oligonucleotide
  source 1..25: mol_type = other DNA
aagccaaggccctgtggacacaggc

SEQ ID NO: 12691 - DNA, 25 bp, synthetic construct
  misc_feature 1..25: note = Oligonucleotide
  source 1..25: mol_type = other DNA
aaggccctgtggacacaggcagatg

SEQ ID NO: 12692 - DNA, 25 bp, synthetic construct
  misc_feature 1..25: note = Oligonucleotide
  source 1..25: mol_type = other DNA
gggtcaggcaaagccaaggccctgg

SEQ ID NO: 12693 - DNA, 25 bp, synthetic construct
  misc_feature 1..25: note = Oligonucleotide
  source 1..25: mol_type = other DNA
aggcaaagccaaggccctgtggaca

SEQ ID NO: 12694 - protein, 22 aa, synthetic construct
  REGION 1..22: note = Peptide
RRSRTARAGRPGRNSSRPSAPR

SEQ ID NO: 12695 - DNA, 17 bp, synthetic construct
  misc_feature 1..17: note = Oligonucleotide
  source 1..17: mol_type = other DNA
cagggcggcggggctca

SEQ ID NO: 12696 - DNA, 17 bp, synthetic construct
  misc_feature 1..17: note = Oligonucleotide
  source 1..17: mol_type = other DNA
gcccagggcggcggggc

SEQ ID NO: 12697 - DNA, 17 bp, synthetic construct
  misc_feature 1..17: note = Oligonucleotide
  source 1..17: mol_type = other DNA
cgggcccagggcggcgg

SEQ ID NO: 12698 - DNA, 17 bp, synthetic construct
  misc_feature 1..17: note = Oligonucleotide
  source 1..17: mol_type = other DNA
ggccgggcccagggcgg

SEQ ID NO: 12699 - DNA, 17 bp, synthetic construct
  misc_feature 1..17: note = Oligonucleotide
  source 1..17: mol_type = other DNA
cacggccgggcccaggg

SEQ ID NO: 12700 - DNA, 17 bp, synthetic construct
  misc_feature 1..17: note = Oligonucleotide
  source 1..17: mol_type = other DNA
gggcacggccgggccca

SEQ ID NO: 12701 - DNA, 17 bp, synthetic construct
  misc_feature 1..17: note = Oligonucleotide
  source 1..17: mol_type = other DNA
caggggcacggccgggc

SEQ ID NO: 12702 - DNA, 17 bp, synthetic construct
  misc_feature 1..17: note = Oligonucleotide
  source 1..17: mol_type = other DNA
gcgcaggggcacggccg

SEQ ID NO: 12703 - DNA, 17 bp, synthetic construct
  misc_feature 1..17: note = Oligonucleotide
  source 1..17: mol_type = other DNA
ggagcgcaggggcacgg

SEQ ID NO: 12704 - DNA, 17 bp, synthetic construct
  misc_feature 1..17: note = Oligonucleotide
  source 1..17: mol_type = other DNA
cggggagcgcaggggca

SEQ ID NO: 12705 - DNA, 17 bp, synthetic construct
  misc_feature 1..17: note = Oligonucleotide
  source 1..17: mol_type = other DNA
gggcggggagcgcaggg

SEQ ID NO: 12706 - DNA, 17 bp, synthetic construct
  misc_feature 1..17: note = Oligonucleotide
  source 1..17: mol_type = other DNA
cccgggcggggagcgca

SEQ ID NO: 12707 - DNA, 17 bp, synthetic construct
  misc_feature 1..17: note = Oligonucleotide
  source 1..17: mol_type = other DNA
aatcccgggcggggagc

SEQ ID NO: 12708 - DNA, 17 bp, synthetic construct
  misc_feature 1..17: note = Oligonucleotide
  source 1..17: mol_type = other DNA
gggaatcccgggcgggg

SEQ ID NO: 12709 - DNA, 17 bp, synthetic construct
  misc_feature 1..17: note = Oligonucleotide
  source 1..17: mol_type = other DNA
tgggggaatcccgggcg

SEQ ID NO: 12710 - DNA, 17 bp, synthetic construct
  misc_feature 1..17: note = Oligonucleotide
  source 1..17: mol_type = other DNA
gggtgggggaatcccgg

SEQ ID NO: 12711 - DNA, 17 bp, synthetic construct
  misc_feature 1..17: note = Oligonucleotide
  source 1..17: mol_type = other DNA
cgggggtgggggaatcc

SEQ ID NO: 12712 - DNA, 17 bp, synthetic construct
  misc_feature 1..17: note = Oligonucleotide
  source 1..17: mol_type = other DNA
cggcgggggtgggggaa

SEQ ID NO: 12713 - DNA, 17 bp, synthetic construct
  misc_feature 1..17: note = Oligonucleotide
  source 1..17: mol_type = other DNA
gcccggcgggggtgggg

SEQ ID NO: 12714 - DNA, 17 bp, synthetic construct
  misc_feature 1..17: note = Oligonucleotide
  source 1..17: mol_type = other DNA
cgcgcccggcgggggtg

SEQ ID NO: 12715 - DNA, 17 bp, synthetic construct
  misc_feature 1..17: note = Oligonucleotide
  source 1..17: mol_type = other DNA
gggcgcgcccggcgggg

SEQ ID NO: 12716 - DNA, 17 bp, synthetic construct
  misc_feature 1..17: note = Oligonucleotide
  source 1..17: mol_type = other DNA
gccgggcgcgcccggcg

SEQ ID NO: 12717 - DNA, 17 bp, synthetic construct
  misc_feature 1..17: note = Oligonucleotide
  source 1..17: mol_type = other DNA
ggcgccgggcgcgcccg

SEQ ID NO: 12718 - DNA, 17 bp, synthetic construct
  misc_feature 1..17: note = Oligonucleotide
  source 1..17: mol_type = other DNA
ccgggcgccgggcgcgc

SEQ ID NO: 12719 - DNA, 17 bp, synthetic construct
  misc_feature 1..17: note = Oligonucleotide
  source 1..17: mol_type = other DNA
gtcccgggcgccgggcg

SEQ ID NO: 12720 - DNA, 17 bp, synthetic construct
  misc_feature 1..17: note = Oligonucleotide
  source 1..17: mol_type = other DNA
ggggtcccgggcgccgg

SEQ ID NO: 12721 - DNA, 17 bp, synthetic construct
  misc_feature 1..17: note = Oligonucleotide
  source 1..17: mol_type = other DNA
ccgggggtcccgggcgc

SEQ ID NO: 12722 - DNA, 17 bp, synthetic construct
  misc_feature 1..17: note = Oligonucleotide
  source 1..17: mol_type = other DNA
gggccgggggtcccggg

SEQ ID NO: 12723 - DNA, 17 bp, synthetic construct
  misc_feature 1..17: note = Oligonucleotide
  source 1..17: mol_type = other DNA
cgtgggccgggggtccc

SEQ ID NO: 12724 - DNA, 17 bp, synthetic construct
  misc_feature 1..17: note = Oligonucleotide
  source 1..17: mol_type = other DNA
agccgtgggccgggggt

SEQ ID NO: 12725 - DNA, 17 bp, synthetic construct
  misc_feature 1..17: note = Oligonucleotide
  source 1..17: mol_type = other DNA
agtagccgtgggccggg

SEQ ID NO: 12726 - DNA, 17 bp, synthetic construct
  misc_feature 1..17: note = Oligonucleotide
  source 1..17: mol_type = other DNA
gtgagtagccgtgggcc

SEQ ID NO: 12727 - DNA, 17 bp, synthetic construct
  misc_feature 1..17: note = Oligonucleotide
  source 1..17: mol_type = other DNA
ggggtgagtagccgtgg

SEQ ID NO: 12728 - DNA, 17 bp, synthetic construct
  misc_feature 1..17: note = Oligonucleotide
  source 1..17: mol_type = other DNA
ggaggggtgagtagccg

SEQ ID NO: 12729 - DNA, 17 bp, synthetic construct
  misc_feature 1..17: note = Oligonucleotide
  source 1..17: mol_type = other DNA
gggggaggggtgagtag

SEQ ID NO: 12730 - DNA, 17 bp, synthetic construct
  misc_feature 1..17: note = Oligonucleotide
  source 1..17: mol_type = other DNA
ggcgggggaggggtgag

SEQ ID NO: 12731 - DNA, 17 bp, synthetic construct
  misc_feature 1..17: note = Oligonucleotide
  source 1..17: mol_type = other DNA
ggcggcgggggaggggt

SEQ ID NO: 12732 - DNA, 17 bp, synthetic construct
  misc_feature 1..17: note = Oligonucleotide
  source 1..17: mol_type = other DNA
ggaggcggcgggggagg

SEQ ID NO: 12733 - DNA, 17 bp, synthetic construct
  misc_feature 1..17: note = Oligonucleotide
  source 1..17: mol_type = other DNA
ggcggaggcggcggggg

SEQ ID NO: 12734 - DNA, 17 bp, synthetic construct
  misc_feature 1..17: note = Oligonucleotide
  source 1..17: mol_type = other DNA
cccggcggaggcggcgg

SEQ ID NO: 12735 - DNA, 17 bp, synthetic construct
  misc_feature 1..17: note = Oligonucleotide
  source 1..17: mol_type = other DNA
ggtcccggcggaggcgg

SEQ ID NO: 12736 - DNA, 17 bp, synthetic construct
  misc_feature 1..17: note = Oligonucleotide
  source 1..17: mol_type = other DNA
gagggtcccggcggagg

SEQ ID NO: 12737 - DNA, 17 bp, synthetic construct
  misc_feature 1..17: note = Oligonucleotide
  source 1..17: mol_type = other DNA
ggggagggtcccggcgg

SEQ ID NO: 12738 - DNA, 17 bp, synthetic construct
  misc_feature 1..17: note = Oligonucleotide
  source 1..17: mol_type = other DNA
gatggggagggtcccgg

SEQ ID NO: 12739 - DNA, 17 bp, synthetic construct
  misc_feature 1..17: note = Oligonucleotide
  source 1..17: mol_type = other DNA
ggcgatggggagggtcc

SEQ ID NO: 12740 - DNA, 17 bp, synthetic construct
  misc_feature 1..17: note = Oligonucleotide
  source 1..17: mol_type = other DNA
cctggcgatggggaggg

SEQ ID NO: 12741 - DNA, 17 bp, synthetic construct
  misc_feature 1..17: note = Oligonucleotide
  source 1..17: mol_type = other DNA
cgccctggcgatgggga

SEQ ID NO: 12742 - DNA, 17 bp, synthetic construct
  misc_feature 1..17: note = Oligonucleotide
  source 1..17: mol_type = other DNA
ccccgccctggcgatgg

SEQ ID NO: 12743 - DNA, 17 bp, synthetic construct
  misc_feature 1..17: note = Oligonucleotide
  source 1..17: mol_type = other DNA
gggccccgccctggcga

SEQ ID NO: 12744 - DNA, 17 bp, synthetic construct
  misc_feature 1..17: note = Oligonucleotide
  source 1..17: mol_type = other DNA
ccggggccccgccctgg

SEQ ID NO: 12745 - DNA, 17 bp, synthetic construct
  misc_feature 1..17: note = Oligonucleotide
  source 1..17: mol_type = other DNA
ttcccggggccccgccc

SEQ ID NO: 12746 - DNA, 17 bp, synthetic construct
  misc_feature 1..17: note = Oligonucleotide
  source 1..17: mol_type = other DNA
ggcttcccggggccccg

SEQ ID NO: 12747 - DNA, 17 bp, synthetic construct
  misc_feature 1..17: note = Oligonucleotide
  source 1..17: mol_type = other DNA
ccgggcttcccggggcc

SEQ ID NO: 12748 - DNA, 17 bp, synthetic construct
  misc_feature 1..17: note = Oligonucleotide
  source 1..17: mol_type = other DNA
gggccgggcttcccggg

SEQ ID NO: 12749 - DNA, 17 bp, synthetic construct
  misc_feature 1..17: note = Oligonucleotide
  source 1..17: mol_type = other DNA
caggggccgggcttccc

SEQ ID NO: 12750 - DNA, 17 bp, synthetic construct
  misc_feature 1..17: note = Oligonucleotide
  source 1..17: mol_type = other DNA
ccccaggggccgggctt

SEQ ID NO: 12751 - DNA, 17 bp, synthetic construct
  misc_feature 1..17: note = Oligonucleotide
  source 1..17: mol_type = other DNA
ccgccccaggggccggg

SEQ ID NO: 12752 - DNA, 17 bp, synthetic construct
  misc_feature 1..17: note = Oligonucleotide
  source 1..17: mol_type = other DNA
gccccgccccaggggcc

SEQ ID NO: 12753 - DNA, 17 bp, synthetic construct
  misc_feature 1..17: note = Oligonucleotide
  source 1..17: mol_type = other DNA
gaagccccgccccaggg

SEQ ID NO: 12754 - DNA, 17 bp, synthetic construct
  misc_feature 1..17: note = Oligonucleotide
  source 1..17: mol_type = other DNA
gccgaagccccgcccca

SEQ ID NO: 12755 - DNA, 17 bp, synthetic construct
  misc_feature 1..17: note = Oligonucleotide
  source 1..17: mol_type = other DNA
gcggccgaagccccgcc

SEQ ID NO: 12756 - DNA, 17 bp, synthetic construct
  misc_feature 1..17: note = Oligonucleotide
  source 1..17: mol_type = other DNA
accgcggccgaagcccc

SEQ ID NO: 12757 - DNA, 17 bp, synthetic construct
  misc_feature 1..17: note = Oligonucleotide
  source 1..17: mol_type = other DNA
gcctggaacaccggccg

SEQ ID NO: 12758 - DNA, 17 bp, synthetic construct
  misc_feature 1..17: note = Oligonucleotide
  source 1..17: mol_type = other DNA
ttcgcctggaacaccgg

SEQ ID NO: 12759 - DNA, 17 bp, synthetic construct
  misc_feature 1..17: note = Oligonucleotide
  source 1..17: mol_type = other DNA
aggttcgcctggaacac

SEQ ID NO: 12760 - DNA, 17 bp, synthetic construct
  misc_feature 1..17: note = Oligonucleotide
  source 1..17: mol_type = other DNA
ttcaggttcgcctggaa

SEQ ID NO: 12761 - DNA, 17 bp, synthetic construct
  misc_feature 1..17: note = Oligonucleotide
  source 1..17: mol_type = other DNA
ttcttcaggttcgcctg

SEQ ID NO: 12762 - DNA, 17 bp, synthetic construct
  misc_feature 1..17: note = Oligonucleotide
  source 1..17: mol_type = other DNA
aacttcttcaggttcgc

SEQ ID NO: 12763 - DNA, 17 bp, synthetic construct
  misc_feature 1..17: note = Oligonucleotide
  source 1..17: mol_type = other DNA
atgaacttcttcaggtt

SEQ ID NO: 12764 - DNA, 17 bp, synthetic construct
  misc_feature 1..17: note = Oligonucleotide
  source 1..17: mol_type = other DNA
tccatgaacttcttcag

SEQ ID NO: 12765 - DNA, 17 bp, synthetic construct
  misc_feature 1..17: note = Oligonucleotide
  source 1..17: mol_type = other DNA
tagtccatgaacttctt

SEQ ID NO: 12766 - DNA, 17 bp, synthetic construct
  misc_feature 1..17: note = Oligonucleotide
  source 1..17: mol_type = other DNA
acgtagtccatgaactt

SEQ ID NO: 12767 - DNA, 17 bp, synthetic construct
  misc_feature 1..17: note = Oligonucleotide
  source 1..17: mol_type = other DNA
tggacgtagtccatgaa

SEQ ID NO: 12768 - DNA, 17 bp, synthetic construct
  misc_feature 1..17: note = Oligonucleotide
  source 1..17: mol_type = other DNA
agctggacgtagtccat

SEQ ID NO: 12769 - DNA, 17 bp, synthetic construct
  misc_feature 1..17: note = Oligonucleotide
  source 1..17: mol_type = other DNA
tgcagctggacgtagtc

SEQ ID NO: 12770 - DNA, 17 bp, synthetic construct
  misc_feature 1..17: note = Oligonucleotide
  source 1..17: mol_type = other DNA
ctatgcagctggacgta

SEQ ID NO: 12771 - DNA, 17 bp, synthetic construct
  misc_feature 1..17: note = Oligonucleotide
  source 1..17: mol_type = other DNA
gtgctatgcagctggac

SEQ ID NO: 12772 - DNA, 17 bp, synthetic construct
  misc_feature 1..17: note = Oligonucleotide
  source 1..17: mol_type = other DNA
tccgtgctatgcagctg

SEQ ID NO: 12773 - DNA, 17 bp, synthetic construct
  misc_feature 1..17: note = Oligonucleotide
  source 1..17: mol_type = other DNA
ttgtccgtgctatgcag

SEQ ID NO: 12774 - DNA, 17 bp, synthetic construct
  misc_feature 1..17: note = Oligonucleotide
  source 1..17: mol_type = other DNA
accttgtccgtgctatg

SEQ ID NO: 12775 - DNA, 17 bp, synthetic construct
  misc_feature 1..17: note = Oligonucleotide
  source 1..17: mol_type = other DNA
gccaccttgtccgtgct

SEQ ID NO: 12776 - DNA, 17 bp, synthetic construct
  misc_feature 1..17: note = Oligonucleotide
  source 1..17: mol_type = other DNA
cgtgccaccttgtccgt

SEQ ID NO: 12777 - DNA, 17 bp, synthetic construct
  misc_feature 1..17: note = Oligonucleotide
  source 1..17: mol_type = other DNA
aggcgtgccaccttgtc

SEQ ID NO: 12778 - DNA, 17 bp, synthetic construct
  misc_feature 1..17: note = Oligonucleotide
  source 1..17: mol_type = other DNA
aacaggcgtgccacctt

SEQ ID NO: 12779 - DNA, 17 bp, synthetic construct
  misc_feature 1..17: note = Oligonucleotide
  source 1..17: mol_type = other DNA
tccaacaggcgtgccac

SEQ ID NO: 12780 - DNA, 17 bp, synthetic construct
  misc_feature 1..17: note = Oligonucleotide
  source 1..17: mol_type = other DNA
ttgtccaacaggcgtgc

SEQ ID NO: 12781 - DNA, 17 bp, synthetic construct
  misc_feature 1..17: note = Oligonucleotide
  source 1..17: mol_type = other DNA
cccttgtccaacaggcg

SEQ ID NO: 12782 - DNA, 17 bp, synthetic construct
  misc_feature 1..17: note = Oligonucleotide
  source 1..17: mol_type = other DNA
agccccttgtccaacag

SEQ ID NO: 12783 - DNA, 17 bp, synthetic construct
  misc_feature 1..17: note = Oligonucleotide
  source 1..17: mol_type = other DNA
tccagccccttgtccaa

SEQ ID NO: 12784 - DNA, 17 bp, synthetic construct
  misc_feature 1..17: note = Oligonucleotide
  source 1..17: mol_type = other DNA
gggtccagccccttgtc

SEQ ID NO: 12785 - DNA, 17 bp, synthetic construct
  misc_feature 1..17: note = Oligonucleotide
  source 1..17: mol_type = other DNA
ttggggtccagcccctt

SEQ ID NO: 12786 - DNA, 17 bp, synthetic construct
  misc_feature 1..17: note = Oligonucleotide
  source 1..17: mol_type = other DNA
aagttggggtccagccc

SEQ ID NO: 12787 - DNA, 17 bp, synthetic construct
  misc_feature 1..17: note = Oligonucleotide
  source 1..17: mol_type = other DNA
tggaagttggggtccag

SEQ ID NO: 12788 - DNA, 17 bp, synthetic construct
  misc_feature 1..17: note = Oligonucleotide
  source 1..17: mol_type = other DNA
tcatggaagttggggtc

SEQ ID NO: 12789 - DNA, 17 bp, synthetic construct
  misc_feature 1..17: note = Oligonucleotide
  source 1..17: mol_type = other DNA
gggtcatggaagttggg

SEQ ID NO: 12790 - DNA, 17 bp, synthetic construct
  misc_feature 1..17: note = Oligonucleotide
  source 1..17: mol_type = other DNA
tcagggtcatggaagtt

SEQ ID NO: 12791 - DNA, 17 bp, synthetic construct
  misc_feature 1..17: note = Oligonucleotide
  source 1..17: mol_type = other DNA
gagtcagggtcatggaa

SEQ ID NO: 12792 - DNA, 17 bp, synthetic construct
  misc_feature 1..17: note = Oligonucleotide
  source 1..17: mol_type = other DNA
cctgagtcagggtcatg

SEQ ID NO: 12793 - DNA, 17 bp, synthetic construct
  misc_feature 1..17: note = Oligonucleotide
  source 1..17: mol_type = other DNA
cctcctgagtcagggtc

SEQ ID NO: 12794 - DNA, 17 bp, synthetic construct
  misc_feature 1..17: note = Oligonucleotide
  source 1..17: mol_type = other DNA
tcacctcctgagtcagg

SEQ ID NO: 12795 - DNA, 17 bp, synthetic construct
  misc_feature 1..17: note = Oligonucleotide
  source 1..17: mol_type = other DNA
tcctcacctcctgagtc

SEQ ID NO: 12796 - DNA, 17 bp, synthetic construct
  misc_feature 1..17: note = Oligonucleotide
  source 1..17: mol_type = other DNA
cactcctcacctcctga

SEQ ID NO: 12797 - DNA, 17 bp, synthetic construct
  misc_feature 1..17: note = Oligonucleotide
  source 1..17: mol_type = other DNA
ctccactcctcacctcc

SEQ ID NO: 12798 - DNA, 17 bp, synthetic construct
  misc_feature 1..17: note = Oligonucleotide
  source 1..17: mol_type = other DNA
cgactccactcctcacc

SEQ ID NO: 12799 - DNA, 17 bp, synthetic construct
  misc_feature 1..17: note = Oligonucleotide
  source 1..17: mol_type = other DNA
ccccgactccactcctc

SEQ ID NO: 12800 - DNA, 17 bp, synthetic construct
  misc_feature 1..17: note = Oligonucleotide
  source 1..17: mol_type = other DNA
cctccccgactccactc

SEQ ID NO: 12801 - DNA, 17 bp, synthetic construct
  misc_feature 1..17: note = Oligonucleotide
  source 1..17: mol_type = other DNA
gcccctccccgactcca

SEQ ID NO: 12802 - DNA, 17 bp, synthetic construct
  misc_feature 1..17: note = Oligonucleotide
  source 1..17: mol_type = other DNA
catgcccctccccgact

SEQ ID NO: 12803 - DNA, 17 bp, synthetic construct
  misc_feature 1..17: note = Oligonucleotide
  source 1..17: mol_type = other DNA
ggccatgcccctccccg

SEQ ID NO: 12804 - DNA, 17 bp, synthetic construct
  misc_feature 1..17: note = Oligonucleotide
  source 1..17: mol_type = other DNA
aaaggccatgcccctcc

SEQ ID NO: 12805 - DNA, 17 bp, synthetic construct
  misc_feature 1..17: note = Oligonucleotide
  source 1..17: mol_type = other DNA
cgcaaaggccatgcccc

SEQ ID NO: 12806 - DNA, 17 bp, synthetic construct
  misc_feature 1..17: note = Oligonucleotide
  source 1..17: mol_type = other DNA
ccgcgcaaaggccatgc

SEQ ID NO: 12807 - DNA, 17 bp, synthetic construct
  misc_feature 1..17: note = Oligonucleotide
  source 1..17: mol_type = other DNA
cagccgcgcaaaggcca

SEQ ID NO: 12808 - DNA, 17 bp, synthetic construct
  misc_feature 1..17: note = Oligonucleotide
  source 1..17: mol_type = other DNA
tcccagccgcgcaaagg

SEQ ID NO: 12809 - DNA, 17 bp, synthetic construct
  misc_feature 1..17: note = Oligonucleotide
  source 1..17: mol_type = other DNA
ggctcccagccgcgcaa

SEQ ID NO: 12810 - DNA, 17 bp, synthetic construct
  misc_feature 1..17: note = Oligonucleotide
  source 1..17: mol_type = other DNA
tcaggctcccagccgcg

SEQ ID NO: 12811 - DNA, 17 bp, synthetic construct
  misc_feature 1..17: note = Oligonucleotide
  source 1..17: mol_type = other DNA
gggtcaggctcccagcc

SEQ ID NO: 12812 - DNA, 17 bp, synthetic construct
  misc_feature 1..17: note = Oligonucleotide
  source 1..17: mol_type = other DNA
taagggtcaggctccca

SEQ ID NO: 12813 - DNA, 17 bp, synthetic construct
  misc_feature 1..17: note = Oligonucleotide
  source 1..17: mol_type = other DNA
agataagggtcaggctc

SEQ ID NO: 12814 - DNA, 17 bp, synthetic construct
  misc_feature 1..17: note = Oligonucleotide
  source 1..17: mol_type = other DNA
gacagataagggtcagg

SEQ ID NO: 12815 - DNA, 17 bp, synthetic construct
  misc_feature 1..17: note = Oligonucleotide
  source 1..17: mol_type = other DNA
acagacagataagggtc

SEQ ID NO: 12816 - DNA, 17 bp, synthetic construct
  misc_feature 1..17: note = Oligonucleotide
  source 1..17: mol_type = other DNA
ttcacagacagataagg

SEQ ID NO: 12817 - DNA, 17 bp, synthetic construct
  misc_feature 1..17: note = Oligonucleotide
  source 1..17: mol_type = other DNA
gggttcacagacagata

SEQ ID NO: 12818 - DNA, 17 bp, synthetic construct
  misc_feature 1..17: note = Oligonucleotide
  source 1..17: mol_type = other DNA
tctgggttcacagacag

SEQ ID NO: 12819 - DNA, 17 bp, synthetic construct
  misc_feature 1..17: note = Oligonucleotide
  source 1..17: mol_type = other DNA
cactctgggttcacaga

SEQ ID NO: 12820 - DNA, 17 bp, synthetic construct
  misc_feature 1..17: note = Oligonucleotide
  source 1..17: mol_type = other DNA
gggcactctgggttcac

SEQ ID NO: 12821 - DNA, 17 bp, synthetic construct
  misc_feature 1..17: note = Oligonucleotide
  source 1..17: mol_type = other DNA
agggggcactctgggtt

SEQ ID NO: 12822 - DNA, 17 bp, synthetic construct
  misc_feature 1..17: note = Oligonucleotide
  source 1..17: mol_type = other DNA
ctcagggggcactctgg

SEQ ID NO: 12823 - DNA, 17 bp, synthetic construct
  misc_feature 1..17: note = Oligonucleotide
  source 1..17: mol_type = other DNA
aggctcagggggcactc

SEQ ID NO: 12824 - DNA, 17 bp, synthetic construct
  misc_feature 1..17: note = Oligonucleotide
  source 1..17: mol_type = other DNA
gcgaggctcagggggca

SEQ ID NO: 12825 - DNA, 17 bp, synthetic construct
  misc_feature 1..17: note = Oligonucleotide
  source 1..17: mol_type = other DNA
gctgcgaggctcagggg

SEQ ID NO: 12826 - DNA, 17 bp, synthetic construct
  misc_feature 1..17: note = Oligonucleotide
  source 1..17: mol_type = other DNA
tgggctgcgaggctcag

SEQ ID NO: 12827 - DNA, 17 bp, synthetic construct
  misc_feature 1..17: note = Oligonucleotide
  source 1..17: mol_type = other DNA
agctgggctgcgaggct

SEQ ID NO: 12828 - DNA, 17 bp, synthetic construct
  misc_feature 1..17: note = Oligonucleotide
  source 1..17: mol_type = other DNA
tccagctgggctgcgag

SEQ ID NO: 12829 - DNA, 17 bp, synthetic construct
  misc_feature 1..17: note = Oligonucleotide
  source 1..17: mol_type = other DNA
ttgtccagctgggctgc

SEQ ID NO: 12830 - DNA, 17 bp, synthetic construct
  misc_feature 1..17: note = Oligonucleotide
  source 1..17: mol_type = other DNA
gcgttgtccagctgggc

SEQ ID NO: 12831 - DNA, 17 bp, synthetic construct
  misc_feature 1..17: note = Oligonucleotide
  source 1..17: mol_type = other DNA
gtggcgttgtccagctg

SEQ ID NO: 12832 - DNA, 17 bp, synthetic construct
  misc_feature 1..17: note = Oligonucleotide
  source 1..17: mol_type = other DNA
tccgtggcgttgtccag

SEQ ID NO: 12833 - DNA, 17 bp, synthetic construct
  misc_feature 1..17: note = Oligonucleotide
  source 1..17: mol_type = other DNA
aggtccgtggcgttgtc

SEQ ID NO: 12834 - DNA, 17 bp, synthetic construct
  misc_feature 1..17: note = Oligonucleotide
  source 1..17: mol_type = other DNA
agcaggtccgtggcgtt

SEQ ID NO: 12835 - DNA, 17 bp, synthetic construct
  misc_feature 1..17: note = Oligonucleotide
  source 1..17: mol_type = other DNA
tttagcaggtccgtggc

SEQ ID NO: 12836 - DNA, 17 bp, synthetic construct
  misc_feature 1..17: note = Oligonucleotide
  source 1..17: mol_type = other DNA
acctttagcaggtccgt

SEQ ID NO: 12837 - DNA, 17 bp, synthetic construct
  misc_feature 1..17: note = Oligonucleotide
  source 1..17: mol_type = other DNA
agcacctttagcaggtc

SEQ ID NO: 12838 - DNA, 17 bp, synthetic construct
  misc_feature 1..17: note = Oligonucleotide
  source 1..17: mol_type = other DNA
ttcagcacctttagcag

SEQ ID NO: 12839 - DNA, 17 bp, synthetic construct
  misc_feature 1..17: note = Oligonucleotide
  source 1..17: mol_type = other DNA
ttcttcagcacctttag

SEQ ID NO: 12840 - DNA, 17 bp, synthetic construct
  misc_feature 1..17: note = Oligonucleotide
  source 1..17: mol_type = other DNA
ccattcttcagcacctt

SEQ ID NO: 12841 - DNA, 17 bp, synthetic construct
  misc_feature 1..17: note = Oligonucleotide
  source 1..17: mol_type = other DNA
ccaccattcttcagcac

SEQ ID NO: 12842 - DNA, 17 bp, synthetic construct
  misc_feature 1..17: note = Oligonucleotide
  source 1..17: mol_type = other DNA
gcaccaccattcttcag

SEQ ID NO: 12843 - DNA, 17 bp, synthetic construct
  misc_feature 1..17: note = Oligonucleotide
  source 1..17: mol_type = other DNA
tgggcaccaccattctt

SEQ ID NO: 12844 - DNA, 17 bp, synthetic construct
  misc_feature 1..17: note = Oligonucleotide
  source 1..17: mol_type = other DNA
aggtgggcaccaccatt

SEQ ID NO: 12845 - DNA, 17 bp, synthetic construct
  misc_feature 1..17: note = Oligonucleotide
  source 1..17: mol_type = other DNA
tccaggtgggcaccacc

SEQ ID NO: 12846 - DNA, 17 bp, synthetic construct
  misc_feature 1..17: note = Oligonucleotide
  source 1..17: mol_type = other DNA
aagtccaggtgggcacc

SEQ ID NO: 12847 - DNA, 17 bp, synthetic construct
  misc_feature 1..17: note = Oligonucleotide
  source 1..17: mol_type = other DNA
cggaagtccaggtgggc

SEQ ID NO: 12848 - DNA, 17 bp, synthetic construct
  misc_feature 1..17: note = Oligonucleotide
  source 1..17: mol_type = other DNA
gtgcggaagtccaggtg

SEQ ID NO: 12849 - DNA, 17 bp, synthetic construct
  misc_feature 1..17: note = Oligonucleotide
  source 1..17: mol_type = other DNA
cgagtgcggaagtccag

SEQ ID NO: 12850 - DNA, 17 bp, synthetic construct
  misc_feature 1..17: note = Oligonucleotide
  source 1..17: mol_type = other DNA
tcgcgagtgcggaagtc

SEQ ID NO: 12851 - DNA, 17 bp, synthetic construct
  misc_feature 1..17: note = Oligonucleotide
  source 1..17: mol_type = other DNA
ccatcgcgagtgcggaa

SEQ ID NO: 12852 - DNA, 17 bp, synthetic construct
  misc_feature 1..17: note = Oligonucleotide
  source 1..17: mol_type = other DNA
agcccatcgcgagtgcg

SEQ ID NO: 12853 - DNA, 17 bp, synthetic construct
  misc_feature 1..17: note = Oligonucleotide
  source 1..17: mol_type = other DNA
gtgagcccatcgcgagt

SEQ ID NO: 12854 - DNA, 17 bp, synthetic construct
  misc_feature 1..17: note = Oligonucleotide
  source 1..17: mol_type = other DNA
gcagtgagcccatcgcg

SEQ ID NO: 12855 - DNA, 17 bp, synthetic construct
  misc_feature 1..17: note = Oligonucleotide
  source 1..17: mol_type = other DNA
acggcagtgagcccatc

SEQ ID NO: 12856 - DNA, 17 bp, synthetic construct
  misc_feature 1..17: note = Oligonucleotide
  source 1..17: mol_type = other DNA
tgcacggcagtgagccc

SEQ ID NO: 12857 - DNA, 17 bp, synthetic construct
  misc_feature 1..17: note = Oligonucleotide
  source 1..17: mol_type = other DNA
cagtgcacggcagtgag

SEQ ID NO: 12858 - DNA, 17 bp, synthetic construct
  misc_feature 1..17: note = Oligonucleotide
  source 1..17: mol_type = other DNA
gcacagtgcacggcagt

SEQ ID NO: 12859 - DNA, 17 bp, synthetic construct
  misc_feature 1..17: note = Oligonucleotide
  source 1..17: mol_type = other DNA
gtggcacagtgcacggc

SEQ ID NO: 12860 - DNA, 17 bp, synthetic construct
  misc_feature 1..17: note = Oligonucleotide
  source 1..17: mol_type = other DNA
cgtgtggcacagtgcac

SEQ ID NO: 12861 - DNA, 17 bp, synthetic construct
  misc_feature 1..17: note = Oligonucleotide
  source 1..17: mol_type = other DNA
tggcgtgtggcacagtg

SEQ ID NO: 12862 - DNA, 17 bp, synthetic construct
  misc_feature 1..17: note = Oligonucleotide
  source 1..17: mol_type = other DNA
cgctggcgtgtggcaca

SEQ ID NO: 12863 - DNA, 17 bp, synthetic construct
  misc_feature 1..17: note = Oligonucleotide
  source 1..17: mol_type = other DNA
ttccgctggcgtgtggc

SEQ ID NO: 12864 - DNA, 17 bp, synthetic construct
  misc_feature 1..17: note = Oligonucleotide
  source 1..17: mol_type = other DNA
gcattccgctggcgtgt

SEQ ID NO: 12865 - DNA, 17 bp, synthetic construct
  misc_feature 1..17: note = Oligonucleotide
  source 1..17: mol_type = other DNA
gccgcattccgctggcg

SEQ ID NO: 12866 - DNA, 17 bp, synthetic construct
  misc_feature 1..17: note = Oligonucleotide
  source 1..17: mol_type = other DNA
gctgccgcattccgctg

SEQ ID NO: 12867 - DNA, 17 bp, synthetic construct
  misc_feature 1..17: note = Oligonucleotide
  source 1..17: mol_type = other DNA
agtgctgccgcattccg

SEQ ID NO: 12868 - DNA, 17 bp, synthetic construct
  misc_feature 1..17: note = Oligonucleotide
  source 1..17: mol_type = other DNA
gtcagtgctgccgcatt

SEQ ID NO: 12869 - DNA, 17 bp, synthetic construct
  misc_feature 1..17: note = Oligonucleotide
  source 1..17: mol_type = other DNA
accgtcagtgctgccgc

SEQ ID NO: 12870 - DNA, 17 bp, synthetic construct
  misc_feature 1..17: note = Oligonucleotide
  source 1..17: mol_type = other DNA
ctgaccgtcagtgctgc

SEQ ID NO: 12871 - DNA, 17 bp, synthetic construct
  misc_feature 1..17: note = Oligonucleotide
  source 1..17: mol_type = other DNA
tcactgaccgtcagtgc

SEQ ID NO: 12872 - DNA, 17 bp, synthetic construct
  misc_feature 1..17: note = Oligonucleotide
  source 1..17: mol_type = other DNA
ccctcactgaccgtcag

SEQ ID NO: 12873 - DNA, 17 bp, synthetic construct
  misc_feature 1..17: note = Oligonucleotide
  source 1..17: mol_type = other DNA
ccgccctcactgaccgt

SEQ ID NO: 12874 - DNA, 17 bp, synthetic construct
  misc_feature 1..17: note = Oligonucleotide
  source 1..17: mol_type = other DNA
gccccgccctcactgac

SEQ ID NO: 12875 - DNA, 17 bp, synthetic construct
  misc_feature 1..17: note = Oligonucleotide
  source 1..17: mol_type = other DNA
caggccccgccctcact

SEQ ID NO: 12876 - DNA, 17 bp, synthetic construct
  misc_feature 1..17: note = Oligonucleotide
  source 1..17: mol_type = other DNA
ggccaggccccgccctc

SEQ ID NO: 12877 - DNA, 17 bp, synthetic construct
  misc_feature 1..17: note = Oligonucleotide
  source 1..17: mol_type = other DNA
ccaggccaggccccgcc

SEQ ID NO: 12878 - DNA, 17 bp, synthetic construct
  misc_feature 1..17: note = Oligonucleotide
  source 1..17: mol_type = other DNA
cctccaggccaggcccc

SEQ ID NO: 12879 - DNA, 17 bp, synthetic construct
  misc_feature 1..17: note = Oligonucleotide
  source 1..17: mol_type = other DNA
gcccctccaggccaggc

SEQ ID NO: 12880 - DNA, 17 bp, synthetic construct
  misc_feature 1..17: note = Oligonucleotide
  source 1..17: mol_type = other DNA
agagcccctccaggcca

SEQ ID NO: 12881 - DNA, 17 bp, synthetic construct
  misc_feature 1..17: note = Oligonucleotide
  source 1..17: mol_type = other DNA
gcaagagcccctccagg

SEQ ID NO: 12882 - DNA, 17 bp, synthetic construct
  misc_feature 1..17: note = Oligonucleotide
  source 1..17: mol_type = other DNA
caggcaagagcccctcc

SEQ ID NO: 12883 - DNA, 17 bp, synthetic construct
  misc_feature 1..17: note = Oligonucleotide
  source 1..17: mol_type = other DNA
caccaggcaagagcccc

SEQ ID NO: 12884 - DNA, 17 bp, synthetic construct
  misc_feature 1..17: note = Oligonucleotide
  source 1..17: mol_type = other DNA
catcaccaggcaagagc

SEQ ID NO: 12885 - DNA, 17 bp, synthetic construct
  misc_feature 1..17: note = Oligonucleotide
  source 1..17: mol_type = other DNA
ccccatcaccaggcaag

SEQ ID NO: 12886 - DNA, 17 bp, synthetic construct
  misc_feature 1..17: note = Oligonucleotide
  source 1..17: mol_type = other DNA
cagccccatcaccaggc

SEQ ID NO: 12887 - DNA, 17 bp, synthetic construct
  misc_feature 1..17: note = Oligonucleotide
  source 1..17: mol_type = other DNA
ccccagccccatcacca

SEQ ID NO: 12888 - DNA, 17 bp, synthetic construct
  misc_feature 1..17: note = Oligonucleotide
  source 1..17: mol_type = other DNA
tgcccccagccccatca

SEQ ID NO: 12889 - DNA, 17 bp, synthetic construct
  misc_feature 1..17: note = Oligonucleotide
  source 1..17: mol_type = other DNA
agctgcccccagcccca

SEQ ID NO: 12890 - DNA, 17 bp, synthetic construct
  misc_feature 1..17: note = Oligonucleotide
  source 1..17: mol_type = other DNA
cccagctgcccccagcc

SEQ ID NO: 12891 - DNA, 17 bp, synthetic construct
  misc_feature 1..17: note = Oligonucleotide
  source 1..17: mol_type = other DNA
aggcccagctgccccca

SEQ ID NO: 12892 - DNA, 17 bp, synthetic construct
  misc_feature 1..17: note = Oligonucleotide
  source 1..17: mol_type = other DNA
accaggcccagctgccc

SEQ ID NO: 12893 - DNA, 17 bp, synthetic construct
  misc_feature 1..17: note = Oligonucleotide
  source 1..17: mol_type = other DNA
cacaccaggcccagctg

SEQ ID NO: 12894 - DNA, 17 bp, synthetic construct
  misc_feature 1..17: note = Oligonucleotide
  source 1..17: mol_type = other DNA
atccacaccaggcccag

SEQ ID NO: 12895 - DNA, 17 bp, synthetic construct
  misc_feature 1..17: note = Oligonucleotide
  source 1..17: mol_type = other DNA
agtatccacaccaggcc

SEQ ID NO: 12896 - DNA, 17 bp, synthetic construct
  misc_feature 1..17: note = Oligonucleotide
  source 1..17: mol_type = other DNA
ctcagtatccacaccag

SEQ ID NO: 12897 - DNA, 17 bp, synthetic construct
  misc_feature 1..17: note = Oligonucleotide
  source 1..17: mol_type = other DNA
agcctcagtatccacac

SEQ ID NO: 12898 - DNA, 17 bp, synthetic construct
  misc_feature 1..17: note = Oligonucleotide
  source 1..17: mol_type = other DNA
agcagcctcagtatcca

SEQ ID NO: 12899 - DNA, 17 bp, synthetic construct
  misc_feature 1..17: note = Oligonucleotide
  source 1..17: mol_type = other DNA
gtgagcagcctcagtat

SEQ ID NO: 12900 - DNA, 17 bp, synthetic construct
  misc_feature 1..17: note = Oligonucleotide
  source 1..17: mol_type = other DNA
agggtgagcagcctcag

SEQ ID NO: 12901 - DNA, 17 bp, synthetic construct
  misc_feature 1..17: note = Oligonucleotide
  source 1..17: mol_type = other DNA
ctgagggtgagcagcct

SEQ ID NO: 12902 - DNA, 17 bp, synthetic construct
  misc_feature 1..17: note = Oligonucleotide
  source 1..17: mol_type = other DNA
ggtctgagggtgagcag

SEQ ID NO: 12903 - DNA, 17 bp, synthetic construct
  misc_feature 1..17: note = Oligonucleotide
  source 1..17: mol_type = other DNA
cagggtctgagggtgag

SEQ ID NO: 12904 - DNA, 17 bp, synthetic construct
  misc_feature 1..17: note = Oligonucleotide
  source 1..17: mol_type = other DNA
cagcagggtctgagggt

SEQ ID NO: 12905 - DNA, 17 bp, synthetic construct
  misc_feature 1..17: note = Oligonucleotide
  source 1..17: mol_type = other DNA
gtccagcagggtctgag

SEQ ID NO: 12906 - DNA, 17 bp, synthetic construct
  misc_feature 1..17: note = Oligonucleotide
  source 1..17: mol_type = other DNA
caggtccagcagggtct

SEQ ID NO: 12907 - DNA, 17 bp, synthetic construct
  misc_feature 1..17: note = Oligonucleotide
  source 1..17: mol_type = other DNA
ccccaggtccagcaggg

SEQ ID NO: 12908 - DNA, 17 bp, synthetic construct
  misc_feature 1..17: note = Oligonucleotide
  source 1..17: mol_type = other DNA
agcccccaggtccagca

SEQ ID NO: 12909 - DNA, 17 bp, synthetic construct
  misc_feature 1..17: note = Oligonucleotide
  source 1..17: mol_type = other DNA
tgaagcccccaggtcca

SEQ ID NO: 12910 - DNA, 17 bp, synthetic construct
  misc_feature 1..17: note = Oligonucleotide
  source 1..17: mol_type = other DNA
aggtgaagcccccaggt

SEQ ID NO: 12911 - DNA, 17 bp, synthetic construct
  misc_feature 1..17: note = Oligonucleotide
  source 1..17: mol_type = other DNA
gtcaggtgaagccccca

SEQ ID NO: 12912 - DNA, 17 bp, synthetic construct
  misc_feature 1..17: note = Oligonucleotide
  source 1..17: mol_type = other DNA
gtagtcaggtgaagccc

SEQ ID NO: 12913 - DNA, 17 bp, synthetic construct
  misc_feature 1..17: note = Oligonucleotide
  source 1..17: mol_type = other DNA
cttgtagtcaggtgaag

SEQ ID NO: 12914 - DNA, 17 bp, synthetic construct
  misc_feature 1..17: note = Oligonucleotide
  source 1..17: mol_type = other DNA
gtccttgtagtcaggtg

SEQ ID NO: 12915 - DNA, 17 bp, synthetic construct
  misc_feature 1..17: note = Oligonucleotide
  source 1..17: mol_type = other DNA
gctgtccttgtagtcag

SEQ ID NO: 12916 - DNA, 17 bp, synthetic construct
  misc_feature 1..17: note = Oligonucleotide
  source 1..17: mol_type = other DNA
gcggctgtccttgtagt

SEQ ID NO: 12917 - DNA, 17 bp, synthetic construct
  misc_feature 1..17: note = Oligonucleotide
  source 1..17: mol_type = other DNA
gccgcggctgtccttgt

SEQ ID NO: 12918 - DNA, 17 bp, synthetic construct
  misc_feature 1..17: note = Oligonucleotide
  source 1..17: mol_type = other DNA
caagccgcggctgtcct

SEQ ID NO: 12919 - DNA, 17 bp, synthetic construct
  misc_feature 1..17: note = Oligonucleotide
  source 1..17: mol_type = other DNA
tgtcaagccgcggctgt

SEQ ID NO: 12920 - DNA, 17 bp, synthetic construct
  misc_feature 1..17: note = Oligonucleotide
  source 1..17: mol_type = other DNA
gggtgtcaagccgcggc

SEQ ID NO: 12921 - DNA, 17 bp, synthetic construct
  misc_feature 1..17: note = Oligonucleotide
  source 1..17: mol_type = other DNA
gaggggtgtcaagccgc

SEQ ID NO: 12922 - DNA, 17 bp, synthetic construct
  misc_feature 1..17: note = Oligonucleotide
  source 1..17: mol_type = other DNA
gtagaggggtgtcaagc

SEQ ID NO: 12923 - DNA, 17 bp, synthetic construct
  misc_feature 1..17: note = Oligonucleotide
  source 1..17: mol_type = other DNA
gtggtagaggggtgtca

SEQ ID NO: 12924 - DNA, 17 bp, synthetic construct
  misc_feature 1..17: note = Oligonucleotide
  source 1..17: mol_type = other DNA
gctgtggtagaggggtg

SEQ ID NO: 12925 - DNA, 17 bp, synthetic construct
  misc_feature 1..17: note = Oligonucleotide
  source 1..17: mol_type = other DNA
ggcgctgtggtagaggg

SEQ ID NO: 12926 - DNA, 17 bp, synthetic construct
  misc_feature 1..17: note = Oligonucleotide
  source 1..17: mol_type = other DNA
cagggcgctgtggtaga

SEQ ID NO: 12927 - DNA, 17 bp, synthetic construct
  misc_feature 1..17: note = Oligonucleotide
  source 1..17: mol_type = other DNA
ccccagggcgctgtggt

SEQ ID NO: 12928 - DNA, 17 bp, synthetic construct
  misc_feature 1..17: note = Oligonucleotide
  source 1..17: mol_type = other DNA
accccccagggcgctgt

SEQ ID NO: 12929 - DNA, 17 bp, synthetic construct
  misc_feature 1..17: note = Oligonucleotide
  source 1..17: mol_type = other DNA
cccaccccccagggcgc

SEQ ID NO: 12930 - DNA, 17 bp, synthetic construct
  misc_feature 1..17: note = Oligonucleotide
  source 1..17: mol_type = other DNA
atccccaccccccaggg

SEQ ID NO: 12931 - DNA, 17 bp, synthetic construct
  misc_feature 1..17: note = Oligonucleotide
  source 1..17: mol_type = other DNA
ggcatccccacccccca

SEQ ID NO: 12932 - DNA, 17 bp, synthetic construct
  misc_feature 1..17: note = Oligonucleotide
  source 1..17: mol_type = other DNA
gagggcatccccacccc

SEQ ID NO: 12933 - DNA, 17 bp, synthetic construct
  misc_feature 1..17: note = Oligonucleotide
  source 1..17: mol_type = other DNA
gcagagggcatccccac

SEQ ID NO: 12934 - DNA, 17 bp, synthetic construct
  misc_feature 1..17: note = Oligonucleotide
  source 1..17: mol_type = other DNA
acagcagagggcatccc

SEQ ID NO: 12935 - DNA, 17 bp, synthetic construct
  misc_feature 1..17: note = Oligonucleotide
  source 1..17: mol_type = other DNA
ctcacagcagagggcat

SEQ ID NO: 12936 - DNA, 17 bp, synthetic construct
  misc_feature 1..17: note = Oligonucleotide
  source 1..17: mol_type = other DNA
cagctcacagcagaggg

SEQ ID NO: 12937 - DNA, 17 bp, synthetic construct
  misc_feature 1..17: note = Oligonucleotide
  source 1..17: mol_type = other DNA
aagcagctcacagcaga

SEQ ID NO: 12938 - DNA, 17 bp, synthetic construct
  misc_feature 1..17: note = Oligonucleotide
  source 1..17: mol_type = other DNA
gagaagcagctcacagc

SEQ ID NO: 12939 - DNA, 17 bp, synthetic construct
  misc_feature 1..17: note = Oligonucleotide
  source 1..17: mol_type = other DNA
gtggagaagcagctcac

SEQ ID NO: 12940 - DNA, 17 bp, synthetic construct
  misc_feature 1..17: note = Oligonucleotide
  source 1..17: mol_type = other DNA
gtcgtggagaagcagct

SEQ ID NO: 12941 - DNA, 17 bp, synthetic construct
  misc_feature 1..17: note = Oligonucleotide
  source 1..17: mol_type = other DNA
gtggtcgtggagaagca

SEQ ID NO: 12942 - DNA, 17 bp, synthetic construct
  misc_feature 1..17: note = Oligonucleotide
  source 1..17: mol_type = other DNA
agcgtggtcgtggagaa

SEQ ID NO: 12943 - DNA, 17 bp, synthetic construct
  misc_feature 1..17: note = Oligonucleotide
  source 1..17: mol_type = other DNA
ctgagcgtggtcgtgga

SEQ ID NO: 12944 - DNA, 17 bp, synthetic construct
  misc_feature 1..17: note = Oligonucleotide
  source 1..17: mol_type = other DNA
cagctgagcgtggtcgt

SEQ ID NO: 12945 - DNA, 17 bp, synthetic construct
  misc_feature 1..17: note = Oligonucleotide
  source 1..17: mol_type = other DNA
ccccagctgagcgtggt

SEQ ID NO: 12946 - DNA, 17 bp, synthetic construct
  misc_feature 1..17: note = Oligonucleotide
  source 1..17: mol_type = other DNA
gatccccagctgagcgt

SEQ ID NO: 12947 - DNA, 17 bp, synthetic construct
  misc_feature 1..17: note = Oligonucleotide
  source 1..17: mol_type = other DNA
ggtgatccccagctgag

SEQ ID NO: 12948 - DNA, 17 bp, synthetic construct
  misc_feature 1..17: note = Oligonucleotide
  source 1..17: mol_type = other DNA
gtcggtgatccccagct

SEQ ID NO: 12949 - DNA, 17 bp, synthetic construct
  misc_feature 1..17: note = Oligonucleotide
  source 1..17: mol_type = other DNA
ctcgtcggtgatcccca

SEQ ID NO: 12950 - DNA, 17 bp, synthetic construct
  misc_feature 1..17: note = Oligonucleotide
  source 1..17: mol_type = other DNA
attctcgtcggtgatcc

SEQ ID NO: 12951 - DNA, 17 bp, synthetic construct
  misc_feature 1..17: note = Oligonucleotide
  source 1..17: mol_type = other DNA
gccattctcgtcggtga

SEQ ID NO: 12952 - DNA, 17 bp, synthetic construct
  misc_feature 1..17: note = Oligonucleotide
  source 1..17: mol_type = other DNA
ccagccattctcgtcgg

SEQ ID NO: 12953 - DNA, 17 bp, synthetic construct
  misc_feature 1..17: note = Oligonucleotide
  source 1..17: mol_type = other DNA
ctgccagccattctcgt

SEQ ID NO: 12954 - DNA, 17 bp, synthetic construct
  misc_feature 1..17: note = Oligonucleotide
  source 1..17: mol_type = other DNA
ctcctgccagccattct

SEQ ID NO: 12955 - DNA, 17 bp, synthetic construct
  misc_feature 1..17: note = Oligonucleotide
  source 1..17: mol_type = other DNA
gatctcctgccagccat

SEQ ID NO: 12956 - DNA, 17 bp, synthetic construct
  misc_feature 1..17: note = Oligonucleotide
  source 1..17: mol_type = other DNA
gtggatctcctgccagc

SEQ ID NO: 12957 - DNA, 17 bp, synthetic construct
  misc_feature 1..17: note = Oligonucleotide
  source 1..17: mol_type = other DNA
ctggtggatctcctgcc

SEQ ID NO: 12958 - DNA, 17 bp, synthetic construct
  misc_feature 1..17: note = Oligonucleotide
  source 1..17: mol_type = other DNA
cacctggtggatctcct

SEQ ID NO: 12959 - DNA, 17 bp, synthetic construct
  misc_feature 1..17: note = Oligonucleotide
  source 1..17: mol_type = other DNA
gcacacctggtggatct

SEQ ID NO: 12960 - DNA, 17 bp, synthetic construct
  misc_feature 1..17: note = Oligonucleotide
  source 1..17: mol_type = other DNA
cctgcacacctggtgga

SEQ ID NO: 12961 - DNA, 17 bp, synthetic construct
  misc_feature 1..17: note = Oligonucleotide
  source 1..17: mol_type = other DNA
ctccctgcacacctggt

SEQ ID NO: 12962 - DNA, 17 bp, synthetic construct
  misc_feature 1..17: note = Oligonucleotide
  source 1..17: mol_type = other DNA
cggctccctgcacacct

SEQ ID NO: 12963 - DNA, 17 bp, synthetic construct
  misc_feature 1..17: note = Oligonucleotide
  source 1..17: mol_type = other DNA
cctcggctccctgcaca

SEQ ID NO: 12964 - DNA, 17 bp, synthetic construct
  misc_feature 1..17: note = Oligonucleotide
  source 1..17: mol_type = other DNA
ccacctcggctccctgc

SEQ ID NO: 12965 - DNA, 17 bp, synthetic construct
  misc_feature 1..17: note = Oligonucleotide
  source 1..17: mol_type = other DNA
accccacctcggctccc

SEQ ID NO: 12966 - DNA, 17 bp, synthetic construct
  misc_feature 1..17: note = Oligonucleotide
  source 1..17: mol_type = other DNA
gggaccccacctcggct

SEQ ID NO: 12967 - DNA, 17 bp, synthetic construct
  misc_feature 1..17: note = Oligonucleotide
  source 1..17: mol_type = other DNA
gccgggaccccacctcg

SEQ ID NO: 12968 - DNA, 17 bp, synthetic construct
  misc_feature 1..17: note = Oligonucleotide
  source 1..17: mol_type = other DNA
gaggccgggaccccacc

SEQ ID NO: 12969 - DNA, 17 bp, synthetic construct
  misc_feature 1..17: note = Oligonucleotide
  source 1..17: mol_type = other DNA
acagaggccgggacccc

SEQ ID NO: 12970 - DNA, 17 bp, synthetic construct
  misc_feature 1..17: note = Oligonucleotide
  source 1..17: mol_type = other DNA
cacacagaggccgggac

SEQ ID NO: 12971 - DNA, 17 bp, synthetic construct
  misc_feature 1..17: note = Oligonucleotide
  source 1..17: mol_type = other DNA
cagcacacagaggccgg

SEQ ID NO: 12972 - DNA, 17 bp, synthetic construct
  misc_feature 1..17: note = Oligonucleotide
  source 1..17: mol_type = other DNA
acccagcacacagaggc

SEQ ID NO: 12973 - DNA, 17 bp, synthetic construct
  misc_feature 1..17: note = Oligonucleotide
  source 1..17: mol_type = other DNA
ccaacccagcacacaga

SEQ ID NO: 12974 - DNA, 17 bp, synthetic construct
  misc_feature 1..17: note = Oligonucleotide
  source 1..17: mol_type = other DNA
cccccaacccagcacac

SEQ ID NO: 12975 - DNA, 17 bp, synthetic construct
  misc_feature 1..17: note = Oligonucleotide
  source 1..17: mol_type = other DNA
ggacccccaacccagca

SEQ ID NO: 12976 - DNA, 17 bp, synthetic construct
  misc_feature 1..17: note = Oligonucleotide
  source 1..17: mol_type = other DNA
ccaggacccccaaccca

SEQ ID NO: 12977 - DNA, 17 bp, synthetic construct
  misc_feature 1..17: note = Oligonucleotide
  source 1..17: mol_type = other DNA
gagccaggacccccaac

SEQ ID NO: 12978 - DNA, 17 bp, synthetic construct
  misc_feature 1..17: note = Oligonucleotide
  source 1..17: mol_type = other DNA
acagagccaggaccccc

SEQ ID NO: 12979 - DNA, 17 bp, synthetic construct
  misc_feature 1..17: note = Oligonucleotide
  source 1..17: mol_type = other DNA
cagacagagccaggacc

SEQ ID NO: 12980 - DNA, 17 bp, synthetic construct
  misc_feature 1..17: note = Oligonucleotide
  source 1..17: mol_type = other DNA
ctacagacagagccagg

SEQ ID NO: 12981 - DNA, 17 bp, synthetic construct
  misc_feature 1..17: note = Oligonucleotide
  source 1..17: mol_type = other DNA
cccctacagacagagcc

SEQ ID NO: 12982 - DNA, 17 bp, synthetic construct
  misc_feature 1..17: note = Oligonucleotide
  source 1..17: mol_type = other DNA
ccacccctacagacaga

SEQ ID NO: 12983 - DNA, 17 bp, synthetic construct
  misc_feature 1..17: note = Oligonucleotide
  source 1..17: mol_type = other DNA
cccccacccctacagac

SEQ ID NO: 12984 - DNA, 17 bp, synthetic construct
  misc_feature 1..17: note = Oligonucleotide
  source 1..17: mol_type = other DNA
gggcccccacccctaca

SEQ ID NO: 12985 - DNA, 17 bp, synthetic construct
  misc_feature 1..17: note = Oligonucleotide
  source 1..17: mol_type = other DNA
ctagggcccccacccct

SEQ ID NO: 12986 - DNA, 17 bp, synthetic construct
  misc_feature 1..17: note = Oligonucleotide
  source 1..17: mol_type = other DNA
aggctagggcccccacc

SEQ ID NO: 12987 - DNA, 17 bp, synthetic construct
  misc_feature 1..17: note = Oligonucleotide
  source 1..17: mol_type = other DNA
cagaggctagggccccc

SEQ ID NO: 12988 - DNA, 17 bp, synthetic construct
  misc_feature 1..17: note = Oligonucleotide
  source 1..17: mol_type = other DNA
gggcagaggctagggcc

SEQ ID NO: 12989 - DNA, 17 bp, synthetic construct
  misc_feature 1..17: note = Oligonucleotide
  source 1..17: mol_type = other DNA
cctgggcagaggctagg

SEQ ID NO: 12990 - DNA, 17 bp, synthetic construct
  misc_feature 1..17: note = Oligonucleotide
  source 1..17: mol_type = other DNA
gtccctgggcagaggct

SEQ ID NO: 12991 - DNA, 17 bp, synthetic construct
  misc_feature 1..17: note = Oligonucleotide
  source 1..17: mol_type = other DNA
agggtccctgggcagag

SEQ ID NO: 12992 - DNA, 17 bp, synthetic construct
  misc_feature 1..17: note = Oligonucleotide
  source 1..17: mol_type = other DNA
tgtagggtccctgggca

SEQ ID NO: 12993 - DNA, 17 bp, synthetic construct
  misc_feature 1..17: note = Oligonucleotide
  source 1..17: mol_type = other DNA
tgctgtagggtccctgg

SEQ ID NO: 12994 - DNA, 17 bp, synthetic construct
  misc_feature 1..17: note = Oligonucleotide
  source 1..17: mol_type = other DNA
aggtgctgtagggtccc

SEQ ID NO: 12995 - DNA, 17 bp, synthetic construct
  misc_feature 1..17: note = Oligonucleotide
  source 1..17: mol_type = other DNA
gcaaggtgctgtagggt

SEQ ID NO: 12996 - DNA, 17 bp, synthetic construct
  misc_feature 1..17: note = Oligonucleotide
  source 1..17: mol_type = other DNA
agagcaaggtgctgtag

SEQ ID NO: 12997 - DNA, 17 bp, synthetic construct
  misc_feature 1..17: note = Oligonucleotide
  source 1..17: mol_type = other DNA
ggaagagcaaggtgctg

SEQ ID NO: 12998 - DNA, 17 bp, synthetic construct
  misc_feature 1..17: note = Oligonucleotide
  source 1..17: mol_type = other DNA
gggggaagagcaaggtg

SEQ ID NO: 12999 - DNA, 17 bp, synthetic construct
  misc_feature 1..17: note = Oligonucleotide
  source 1..17: mol_type = other DNA
cctgggggaagagcaag

SEQ ID NO: 13000 - DNA, 17 bp, synthetic construct
  misc_feature 1..17: note = Oligonucleotide
  source 1..17: mol_type = other DNA
aggcctgggggaagagc

SEQ ID NO: 13001 - DNA, 17 bp, synthetic construct
  misc_feature 1..17: note = Oligonucleotide
  source 1..17: mol_type = other DNA
ggcaggcctgggggaag

SEQ ID NO: 13002 - DNA, 17 bp, synthetic construct
  misc_feature 1..17: note = Oligonucleotide
  source 1..17: mol_type = other DNA
agcggcaggcctggggg

SEQ ID NO: 13003 - DNA, 17 bp, synthetic construct
  misc_feature 1..17: note = Oligonucleotide
  source 1..17: mol_type = other DNA
caaagcggcaggcctgg

SEQ ID NO: 13004 - DNA, 17 bp, synthetic construct
  misc_feature 1..17: note = Oligonucleotide
  source 1..17: mol_type = other DNA
gcccaaagcggcaggcc

SEQ ID NO: 13005 - DNA, 17 bp, synthetic construct
  misc_feature 1..17: note = Oligonucleotide
  source 1..17: mol_type = other DNA
cgtgcccaaagcggcag

SEQ ID NO: 13006 - DNA, 17 bp, synthetic construct
  misc_feature 1..17: note = Oligonucleotide
  source 1..17: mol_type = other DNA
gcacgtgcccaaagcgg

SEQ ID NO: 13007 - DNA, 17 bp, synthetic construct
  misc_feature 1..17: note = Oligonucleotide
  source 1..17: mol_type = other DNA
gctgcacgtgcccaaag

SEQ ID NO: 13008 - DNA, 17 bp, synthetic construct
  misc_feature 1..17: note = Oligonucleotide
  source 1..17: mol_type = other DNA
gatgctgcacgtgccca

SEQ ID NO: 13009 - DNA, 17 bp, synthetic construct
  misc_feature 1..17: note = Oligonucleotide
  source 1..17: mol_type = other DNA
ccagatgctgcacgtgc

SEQ ID NO: 13010 - DNA, 17 bp, synthetic construct
  misc_feature 1..17: note = Oligonucleotide
  source 1..17: mol_type = other DNA
gctccagatgctgcacg

SEQ ID NO: 13011 - DNA, 17 bp, synthetic construct
  misc_feature 1..17: note = Oligonucleotide
  source 1..17: mol_type = other DNA
ggtgctccagatgctgc

SEQ ID NO: 13012 - DNA, 17 bp, synthetic construct
  misc_feature 1..17: note = Oligonucleotide
  source 1..17: mol_type = other DNA
gcaggtgctccagatgc

SEQ ID NO: 13013 - DNA, 17 bp, synthetic construct
  misc_feature 1..17: note = Oligonucleotide
  source 1..17: mol_type = other DNA
acagcaggtgctccaga

SEQ ID NO: 13014 - DNA, 17 bp, synthetic construct
  misc_feature 1..17: note = Oligonucleotide
  source 1..17: mol_type = other DNA
agaacagcaggtgctcc

SEQ ID NO: 13015 - DNA, 17 bp, synthetic construct
  misc_feature 1..17: note = Oligonucleotide
  source 1..17: mol_type = other DNA
catagaacagcaggtgc

SEQ ID NO: 13016 - DNA, 17 bp, synthetic construct
  misc_feature 1..17: note = Oligonucleotide
  source 1..17: mol_type = other DNA
ccccatagaacagcagg

SEQ ID NO: 13017 - DNA, 17 bp, synthetic construct
  misc_feature 1..17: note = Oligonucleotide
  source 1..17: mol_type = other DNA
ctgccccatagaacagc

SEQ ID NO: 13018 - DNA, 17 bp, synthetic construct
  misc_feature 1..17: note = Oligonucleotide
  source 1..17: mol_type = other DNA
tgtctgccccatagaac

SEQ ID NO: 13019 - DNA, 17 bp, synthetic construct
  misc_feature 1..17: note = Oligonucleotide
  source 1..17: mol_type = other DNA
ccatgtctgccccatag

SEQ ID NO: 13020 - DNA, 17 bp, synthetic construct
  misc_feature 1..17: note = Oligonucleotide
  source 1..17: mol_type = other DNA
cccccatgtctgcccca

SEQ ID NO: 13021 - DNA, 17 bp, synthetic construct
  misc_feature 1..17: note = Oligonucleotide
  source 1..17: mol_type = other DNA
gggcccccatgtctgcc

SEQ ID NO: 13022 - DNA, 17 bp, synthetic construct
  misc_feature 1..17: note = Oligonucleotide
  source 1..17: mol_type = other DNA
tctgggcccccatgtct

SEQ ID NO: 13023 - DNA, 17 bp, synthetic construct
  misc_feature 1..17: note = Oligonucleotide
  source 1..17: mol_type = other DNA
cgttctgggcccccatg

SEQ ID NO: 13024 - DNA, 17 bp, synthetic construct
  misc_feature 1..17: note = Oligonucleotide
  source 1..17: mol_type = other DNA
aggcgttctgggccccc

SEQ ID NO: 13025 - DNA, 17 bp, synthetic construct
  misc_feature 1..17: note = Oligonucleotide
  source 1..17: mol_type = other DNA
ccgaggcgttctgggcc

SEQ ID NO: 13026 - DNA, 17 bp, synthetic construct
  misc_feature 1..17: note = Oligonucleotide
  source 1..17: mol_type = other DNA
tccccgaggcgttctgg

SEQ ID NO: 13027 - DNA, 17 bp, synthetic construct
  misc_feature 1..17: note = Oligonucleotide
  source 1..17: mol_type = other DNA
tgttccccgaggcgttc

SEQ ID NO: 13028 - DNA, 17 bp, synthetic construct
  misc_feature 1..17: note = Oligonucleotide
  source 1..17: mol_type = other DNA
ctgtgttccccgaggcg

SEQ ID NO: 13029 - DNA, 17 bp, synthetic construct
  misc_feature 1..17: note = Oligonucleotide
  source 1..17: mol_type = other DNA
gggctgtgttccccgag

SEQ ID NO: 13030 - DNA, 17 bp, synthetic construct
  misc_feature 1..17: note = Oligonucleotide
  source 1..17: mol_type = other DNA
gcagggctgtgttcccc

SEQ ID NO: 13031 - DNA, 17 bp, synthetic construct
  misc_feature 1..17: note = Oligonucleotide
  source 1..17: mol_type = other DNA
tgtgcagggctgtgttc

SEQ ID NO: 13032 - DNA, 17 bp, synthetic construct
  misc_feature 1..17: note = Oligonucleotide
  source 1..17: mol_type = other DNA
agatgtgcagggctgtg

SEQ ID NO: 13033 - DNA, 17 bp, synthetic construct
  misc_feature 1..17: note = Oligonucleotide
  source 1..17: mol_type = other DNA
cacagatgtgcagggct

SEQ ID NO: 13034 - DNA, 17 bp, synthetic construct
  misc_feature 1..17: note = Oligonucleotide
  source 1..17: mol_type = other DNA
gggcacagatgtgcagg

SEQ ID NO: 13035 - DNA, 17 bp, synthetic construct
  misc_feature 1..17: note = Oligonucleotide
  source 1..17: mol_type = other DNA
agagggcacagatgtgc

SEQ ID NO: 13036 - DNA, 17 bp, synthetic construct
  misc_feature 1..17: note = Oligonucleotide
  source 1..17: mol_type = other DNA
tgtagagggcacagatg

SEQ ID NO: 13037 - DNA, 17 bp, synthetic construct
  misc_feature 1..17: note = Oligonucleotide
  source 1..17: mol_type = other DNA
ggttgtagagggcacag

SEQ ID NO: 13038 - DNA, 17 bp, synthetic construct
  misc_feature 1..17: note = Oligonucleotide
  source 1..17: mol_type = other DNA
cctggttgtagagggca

SEQ ID NO: 13039 - DNA, 17 bp, synthetic construct
  misc_feature 1..17: note = Oligonucleotide
  source 1..17: mol_type = other DNA
gcacctggttgtagagg

SEQ ID NO: 13040 - DNA, 17 bp, synthetic construct
  misc_feature 1..17: note = Oligonucleotide
  source 1..17: mol_type = other DNA
gtcgcacctggttgtag

SEQ ID NO: 13041 - DNA, 17 bp, synthetic construct
  misc_feature 1..17: note = Oligonucleotide
  source 1..17: mol_type = other DNA
acagtcgcacctggttg

SEQ ID NO: 13042 - DNA, 17 bp, synthetic construct
  misc_feature 1..17: note = Oligonucleotide
  source 1..17: mol_type = other DNA
cacacagtcgcacctgg

SEQ ID NO: 13043 - DNA, 17 bp, synthetic construct
  misc_feature 1..17: note = Oligonucleotide
  source 1..17: mol_type = other DNA
ggacacacagtcgcacc

SEQ ID NO: 13044 - DNA, 17 bp, synthetic construct
  misc_feature 1..17: note = Oligonucleotide
  source 1..17: mol_type = other DNA
gcaggacacacagtcgc

SEQ ID NO: 13045 - DNA, 17 bp, synthetic construct
  misc_feature 1..17: note = Oligonucleotide
  source 1..17: mol_type = other DNA
tgtgcaggacacacagt

SEQ ID NO: 13046 - DNA, 17 bp, synthetic construct
  misc_feature 1..17: note = Oligonucleotide
  source 1..17: mol_type = other DNA
gcatgtgcaggacacac

SEQ ID NO: 13047 - DNA, 17 bp, synthetic construct
  misc_feature 1..17: note = Oligonucleotide
  source 1..17: mol_type = other DNA
caggcatgtgcaggaca

SEQ ID NO: 13048 - DNA, 17 bp, synthetic construct
  misc_feature 1..17: note = Oligonucleotide
  source 1..17: mol_type = other DNA
gtgcaggcatgtgcagg

SEQ ID NO: 13049 - DNA, 17 bp, synthetic construct
  misc_feature 1..17: note = Oligonucleotide
  source 1..17: mol_type = other DNA
ctggtgcaggcatgtgc

SEQ ID NO: 13050 - DNA, 17 bp, synthetic construct
  misc_feature 1..17: note = Oligonucleotide
  source 1..17: mol_type = other DNA
tcgctggtgcaggcatg

SEQ ID NO: 13051 - DNA, 17 bp, synthetic construct
  misc_feature 1..17: note = Oligonucleotide
  source 1..17: mol_type = other DNA
cactcgctggtgcaggc

SEQ ID NO: 13052 - DNA, 17 bp, synthetic construct
  misc_feature 1..17: note = Oligonucleotide
  source 1..17: mol_type = other DNA
gcacactcgctggtgca

SEQ ID NO: 13053 - DNA, 17 bp, synthetic construct
  misc_feature 1..17: note = Oligonucleotide
  source 1..17: mol_type = other DNA
tatgcacactcgctggt

SEQ ID NO: 13054 - DNA, 17 bp, synthetic construct
  misc_feature 1..17: note = Oligonucleotide
  source 1..17: mol_type = other DNA
gtatatgcacactcgct

SEQ ID NO: 13055 - DNA, 17 bp, synthetic construct
  misc_feature 1..17: note = Oligonucleotide
  source 1..17: mol_type = other DNA
caagtatatgcacactc

SEQ ID NO: 13056 - DNA, 17 bp, synthetic construct
  misc_feature 1..17: note = Oligonucleotide
  source 1..17: mol_type = other DNA
aggcaagtatatgcaca

SEQ ID NO: 13057 - DNA, 17 bp, synthetic construct
  misc_feature 1..17: note = Oligonucleotide
  source 1..17: mol_type = other DNA
aagaggcaagtatatgc

SEQ ID NO: 13058 - DNA, 17 bp, synthetic construct
  misc_feature 1..17: note = Oligonucleotide
  source 1..17: mol_type = other DNA
cagaagaggcaagtata

SEQ ID NO: 13059 - DNA, 17 bp, synthetic construct
  misc_feature 1..17: note = Oligonucleotide
  source 1..17: mol_type = other DNA
ccccagaagaggcaagt

SEQ ID NO: 13060 - DNA, 17 bp, synthetic construct
  misc_feature 1..17: note = Oligonucleotide
  source 1..17: mol_type = other DNA
cacccccagaagaggca

SEQ ID NO: 13061 - DNA, 17 bp, synthetic construct
  misc_feature 1..17: note = Oligonucleotide
  source 1..17: mol_type = other DNA
atacacccccagaagag

SEQ ID NO: 13062 - DNA, 17 bp, synthetic construct
  misc_feature 1..17: note = Oligonucleotide
  source 1..17: mol_type = other DNA
cacatacacccccagaa

SEQ ID NO: 13063 - DNA, 17 bp, synthetic construct
  misc_feature 1..17: note = Oligonucleotide
  source 1..17: mol_type = other DNA
acacacatacaccccca

SEQ ID NO: 13064 - DNA, 17 bp, synthetic construct
  misc_feature 1..17: note = Oligonucleotide
  source 1..17: mol_type = other DNA
cacacacacatacaccc

SEQ ID NO: 13065 - DNA, 17 bp, synthetic construct
  misc_feature 1..17: note = Oligonucleotide
  source 1..17: mol_type = other DNA
gcccacacacacataca

SEQ ID NO: 13066 - DNA, 17 bp, synthetic construct
  misc_feature 1..17: note = Oligonucleotide
  source 1..17: mol_type = other DNA
tgtgcccacacacacat

SEQ ID NO: 13067 - DNA, 17 bp, synthetic construct
  misc_feature 1..17: note = Oligonucleotide
  source 1..17: mol_type = other DNA
ctgtgtgcccacacaca

SEQ ID NO: 13068 - DNA, 17 bp, synthetic construct
  misc_feature 1..17: note = Oligonucleotide
  source 1..17: mol_type = other DNA
cacctgtgtgcccacac

SEQ ID NO: 13069 - DNA, 17 bp, synthetic construct
  misc_feature 1..17: note = Oligonucleotide
  source 1..17: mol_type = other DNA
ggtcacctgtgtgccca

SEQ ID NO: 13070 - DNA, 17 bp, synthetic construct
  misc_feature 1..17: note = Oligonucleotide
  source 1..17: mol_type = other DNA
cagggtcacctgtgtgc

SEQ ID NO: 13071 - DNA, 17 bp, synthetic construct
  misc_feature 1..17: note = Oligonucleotide
  source 1..17: mol_type = other DNA
gtacagggtcacctgtg

SEQ ID NO: 13072 - DNA, 17 bp, synthetic construct
  misc_feature 1..17: note = Oligonucleotide
  source 1..17: mol_type = other DNA
accgtacagggtcacct

SEQ ID NO: 13073 - DNA, 17 bp, synthetic construct
  misc_feature 1..17: note = Oligonucleotide
  source 1..17: mol_type = other DNA
atcaccgtacagggtca

SEQ ID NO: 13074 - DNA, 17 bp, synthetic construct
  misc_feature 1..17: note = Oligonucleotide
  source 1..17: mol_type = other DNA
gcaatcaccgtacaggg

SEQ ID NO: 13075 - DNA, 17 bp, synthetic construct
  misc_feature 1..17: note = Oligonucleotide
  source 1..17: mol_type = other DNA
catgcaatcaccgtaca

SEQ ID NO: 13076 - DNA, 17 bp, synthetic construct
  misc_feature 1..17: note = Oligonucleotide
  source 1..17: mol_type = other DNA
acacatgcaatcaccgt

SEQ ID NO: 13077 - DNA, 17 bp, synthetic construct
  misc_feature 1..17: note = Oligonucleotide
  source 1..17: mol_type = other DNA
tgcacacatgcaatcac

SEQ ID NO: 13078 - DNA, 17 bp, synthetic construct
  misc_feature 1..17: note = Oligonucleotide
  source 1..17: mol_type = other DNA
cggtgcacacatgcaat

SEQ ID NO: 13079 - DNA, 17 bp, synthetic construct
  misc_feature 1..17: note = Oligonucleotide
  source 1..17: mol_type = other DNA
actcggtgcacacatgc

SEQ ID NO: 13080 - DNA, 17 bp, synthetic construct
  misc_feature 1..17: note = Oligonucleotide
  source 1..17: mol_type = other DNA
cacactcggtgcacaca

SEQ ID NO: 13081 - DNA, 17 bp, synthetic construct
  misc_feature 1..17: note = Oligonucleotide
  source 1..17: mol_type = other DNA
atccacactcggtgcac

SEQ ID NO: 13082 - DNA, 17 bp, synthetic construct
  misc_feature 1..17: note = Oligonucleotide
  source 1..17: mol_type = other DNA
tatatccacactcggtg

SEQ ID NO: 13083 - DNA, 17 bp, synthetic construct
  misc_feature 1..17: note = Oligonucleotide
  source 1..17: mol_type = other DNA
aagtatatccacactcg

SEQ ID NO: 13084 - DNA, 17 bp, synthetic construct
  misc_feature 1..17: note = Oligonucleotide
  source 1..17: mol_type = other DNA
ggcaagtatatccacac

SEQ ID NO: 13085 - DNA, 17 bp, synthetic construct
  misc_feature 1..17: note = Oligonucleotide
  source 1..17: mol_type = other DNA
acaggcaagtatatcca

SEQ ID NO: 13086 - DNA, 17 bp, synthetic construct
  misc_feature 1..17: note = Oligonucleotide
  source 1..17: mol_type = other DNA
agaacaggcaagtatat

SEQ ID NO: 13087 - DNA, 17 bp, synthetic construct
  misc_feature 1..17: note = Oligonucleotide
  source 1..17: mol_type = other DNA
cccagaacaggcaagta

SEQ ID NO: 13088 - DNA, 17 bp, synthetic construct
  misc_feature 1..17: note = Oligonucleotide
  source 1..17: mol_type = other DNA
acccccagaacaggcaa

SEQ ID NO: 13089 - DNA, 17 bp, synthetic construct
  misc_feature 1..17: note = Oligonucleotide
  source 1..17: mol_type = other DNA
tacacccccagaacagg

SEQ ID NO: 13090 - DNA, 17 bp, synthetic construct
  misc_feature 1..17: note = Oligonucleotide
  source 1..17: mol_type = other DNA
acgtacacccccagaac

SEQ ID NO: 13091 - DNA, 17 bp, synthetic construct
  misc_feature 1..17: note = Oligonucleotide
  source 1..17: mol_type = other DNA
cacacgtacacccccag

SEQ ID NO: 13092 - DNA, 17 bp, synthetic construct
  misc_feature 1..17: note = Oligonucleotide
  source 1..17: mol_type = other DNA
aaacacacgtacacccc

SEQ ID NO: 13093 - DNA, 17 bp, synthetic construct
  misc_feature 1..17: note = Oligonucleotide
  source 1..17: mol_type = other DNA
cacaaacacacgtacac

SEQ ID NO: 13094 - DNA, 17 bp, synthetic construct
  misc_feature 1..17: note = Oligonucleotide
  source 1..17: mol_type = other DNA
gcacacaaacacacgta

SEQ ID NO: 13095 - DNA, 17 bp, synthetic construct
  misc_feature 1..17: note = Oligonucleotide
  source 1..17: mol_type = other DNA
tgtgcacacaaacacac

SEQ ID NO: 13096 - DNA, 17 bp, synthetic construct
  misc_feature 1..17: note = Oligonucleotide
  source 1..17: mol_type = other DNA
ctgtgtgcacacaaaca

SEQ ID NO: 13097 - DNA, 17 bp, synthetic construct
  misc_feature 1..17: note = Oligonucleotide
  source 1..17: mol_type = other DNA
cacctgtgtgcacacaa

SEQ ID NO: 13098 - DNA, 17 bp, synthetic construct
  misc_feature 1..17: note = Oligonucleotide
  source 1..17: mol_type = other DNA
ggtcacctgtgtgcaca

SEQ ID NO: 13099 - DNA, 17 bp, synthetic construct
  misc_feature 1..17: note = Oligonucleotide
  source 1..17: mol_type = other DNA
cagggtcacctgtgtgc

SEQ ID NO: 13100 - DNA, 17 bp, synthetic construct
  misc_feature 1..17: note = Oligonucleotide
  source 1..17: mol_type = other DNA
gtacagggtcacctgtg

SEQ ID NO: 13101 - DNA, 17 bp, synthetic construct
  misc_feature 1..17: note = Oligonucleotide
  source 1..17: mol_type = other DNA
actgtacagggtcacct

SEQ ID NO: 13102 - DNA, 17 bp, synthetic construct
  misc_feature 1..17: note = Oligonucleotide
  source 1..17: mol_type = other DNA
atcactgtacagggtca

SEQ ID NO: 13103 - DNA, 17 bp, synthetic construct
  misc_feature 1..17: note = Oligonucleotide
  source 1..17: mol_type = other DNA
gcaatcactgtacaggg

SEQ ID NO: 13104 - DNA, 17 bp, synthetic construct
  misc_feature 1..17: note = Oligonucleotide
  source 1..17: mol_type = other DNA
catgcaatcactgtaca

SEQ ID NO: 13105 - DNA, 17 bp, synthetic construct
  misc_feature 1..17: note = Oligonucleotide
  source 1..17: mol_type = other DNA
acgcatgcaatcactgt

SEQ ID NO: 13106 - DNA, 17 bp, synthetic construct
  misc_feature 1..17: note = Oligonucleotide
  source 1..17: mol_type = other DNA
tgcacgcatgcaatcac

SEQ ID NO: 13107 - DNA, 17 bp, synthetic construct
  misc_feature 1..17: note = Oligonucleotide
  source 1..17: mol_type = other DNA
tggtgcacgcatgcaat

SEQ ID NO: 13108 - DNA, 17 bp, synthetic construct
  misc_feature 1..17: note = Oligonucleotide
  source 1..17: mol_type = other DNA
ccctggtgcacgcatgc

SEQ ID NO: 13109 - DNA, 17 bp, synthetic construct
  misc_feature 1..17: note = Oligonucleotide
  source 1..17: mol_type = other DNA
actccctggtgcacgca

SEQ ID NO: 13110 - DNA, 17 bp, synthetic construct
  misc_feature 1..17: note = Oligonucleotide
  source 1..17: mol_type = other DNA
cacactccctggtgcac

SEQ ID NO: 13111 - DNA, 17 bp, synthetic construct
  misc_feature 1..17: note = Oligonucleotide
  source 1..17: mol_type = other DNA
atccacactccctggtg

SEQ ID NO: 13112 - DNA, 17 bp, synthetic construct
  misc_feature 1..17: note = Oligonucleotide
  source 1..17: mol_type = other DNA
tatatccacactccctg

SEQ ID NO: 13113 - DNA, 17 bp, synthetic construct
  misc_feature 1..17: note = Oligonucleotide
  source 1..17: mol_type = other DNA
aagtatatccacactcc

SEQ ID NO: 13114 - DNA, 17 bp, synthetic construct
  misc_feature 1..17: note = Oligonucleotide
  source 1..17: mol_type = other DNA
ggcaagtatatccacac

SEQ ID NO: 13115 - DNA, 17 bp, synthetic construct
  misc_feature 1..17: note = Oligonucleotide
  source 1..17: mol_type = other DNA
acaggcaagtatatcca

SEQ ID NO: 13116 - DNA, 17 bp, synthetic construct
  misc_feature 1..17: note = Oligonucleotide
  source 1..17: mol_type = other DNA
agaacaggcaagtatat

SEQ ID NO: 13117 - DNA, 17 bp, synthetic construct
  misc_feature 1..17: note = Oligonucleotide
  source 1..17: mol_type = other DNA
cccagaacaggcaagta

SEQ ID NO: 13118 - DNA, 17 bp, synthetic construct
  misc_feature 1..17: note = Oligonucleotide
  source 1..17: mol_type = other DNA
aaccccagaacaggcaa

SEQ ID NO: 13119 - DNA, 17 bp, synthetic construct
  misc_feature 1..17: note = Oligonucleotide
  source 1..17: mol_type = other DNA
tacaaccccagaacagg

SEQ ID NO: 13120 - DNA, 17 bp, synthetic construct
  misc_feature 1..17: note = Oligonucleotide
  source 1..17: mol_type = other DNA
atgtacaaccccagaac

SEQ ID NO: 13121 - DNA, 17 bp, synthetic construct
  misc_feature 1..17: note = Oligonucleotide
  source 1..17: mol_type = other DNA
cacatgtacaaccccag

SEQ ID NO: 13122 - DNA, 17 bp, synthetic construct
  misc_feature 1..17: note = Oligonucleotide
  source 1..17: mol_type = other DNA
acacacatgtacaaccc

SEQ ID NO: 13123 - DNA, 17 bp, synthetic construct
  misc_feature 1..17: note = Oligonucleotide
  source 1..17: mol_type = other DNA
tgcacacacatgtacaa

SEQ ID NO: 13124 - DNA, 17 bp, synthetic construct
  misc_feature 1..17: note = Oligonucleotide
  source 1..17: mol_type = other DNA
gtgtgcacacacatgta

SEQ ID NO: 13125 - DNA, 17 bp, synthetic construct
  misc_feature 1..17: note = Oligonucleotide
  source 1..17: mol_type = other DNA
tctgtgtgcacacacat

SEQ ID NO: 13126 - DNA, 17 bp, synthetic construct
  misc_feature 1..17: note = Oligonucleotide
  source 1..17: mol_type = other DNA
tcatctgtgtgcacaca

SEQ ID NO: 13127 - DNA, 17 bp, synthetic construct
  misc_feature 1..17: note = Oligonucleotide
  source 1..17: mol_type = other DNA
gggtcatctgtgtgcac

SEQ ID NO: 13128 - DNA, 17 bp, synthetic construct
  misc_feature 1..17: note = Oligonucleotide
  source 1..17: mol_type = other DNA
acagggtcatctgtgtg

SEQ ID NO: 13129 - DNA, 17 bp, synthetic construct
  misc_feature 1..17: note = Oligonucleotide
  source 1..17: mol_type = other DNA
tgtacagggtcatctgt

SEQ ID NO: 13130 - DNA, 17 bp, synthetic construct
  misc_feature 1..17: note = Oligonucleotide
  source 1..17: mol_type = other DNA
cactgtacagggtcatc

SEQ ID NO: 13131 - DNA, 17 bp, synthetic construct
  misc_feature 1..17: note = Oligonucleotide
  source 1..17: mol_type = other DNA
aatcactgtacagggtc

SEQ ID NO: 13132 - DNA, 17 bp, synthetic construct
  misc_feature 1..17: note = Oligonucleotide
  source 1..17: mol_type = other DNA
tacaatcactgtacagg

SEQ ID NO: 13133 - DNA, 17 bp, synthetic construct
  misc_feature 1..17: note = Oligonucleotide
  source 1..17: mol_type = other DNA
gcatacaatcactgtac

SEQ ID NO: 13134 - DNA, 17 bp, synthetic construct
  misc_feature 1..17: note = Oligonucleotide
  source 1..17: mol_type = other DNA
cacgcatacaatcactg

SEQ ID NO: 13135 - DNA, 17 bp, synthetic construct
  misc_feature 1..17: note = Oligonucleotide
  source 1..17: mol_type = other DNA
gtgcacgcatacaatca

SEQ ID NO: 13136 - DNA, 17 bp, synthetic construct
  misc_feature 1..17: note = Oligonucleotide
  source 1..17: mol_type = other DNA
ctggtgcacgcatacaa

SEQ ID NO: 13137 - DNA, 17 bp, synthetic construct
  misc_feature 1..17: note = Oligonucleotide
  source 1..17: mol_type = other DNA
tcactggtgcacgcata

SEQ ID NO: 13138 - DNA, 17 bp, synthetic construct
  misc_feature 1..17: note = Oligonucleotide
  source 1..17: mol_type = other DNA
cactcactggtgcacgc

SEQ ID NO: 13139 - DNA, 17 bp, synthetic construct
  misc_feature 1..17: note = Oligonucleotide
  source 1..17: mol_type = other DNA
ccacactcactggtgca

SEQ ID NO: 13140 - DNA, 17 bp, synthetic construct
  misc_feature 1..17: note = Oligonucleotide
  source 1..17: mol_type = other DNA
tatccacactcactggt

SEQ ID NO: 13141 - DNA, 17 bp, synthetic construct
  misc_feature 1..17: note = Oligonucleotide
  source 1..17: mol_type = other DNA
gtatatccacactcact

SEQ ID NO: 13142 - DNA, 17 bp, synthetic construct
  misc_feature 1..17: note = Oligonucleotide
  source 1..17: mol_type = other DNA
caagtatatccacactc

SEQ ID NO: 13143 - DNA, 17 bp, synthetic construct
  misc_feature 1..17: note = Oligonucleotide
  source 1..17: mol_type = other DNA
aggcaagtatatccaca

SEQ ID NO: 13144 - DNA, 17 bp, synthetic construct
  misc_feature 1..17: note = Oligonucleotide
  source 1..17: mol_type = other DNA
aacaggcaagtatatcc

SEQ ID NO: 13145 - DNA, 17 bp, synthetic construct
  misc_feature 1..17: note = Oligonucleotide
  source 1..17: mol_type = other DNA
cagaacaggcaagtata

SEQ ID NO: 13146 - DNA, 17 bp, synthetic construct
  misc_feature 1..17: note = Oligonucleotide
  source 1..17: mol_type = other DNA
ccccagaacaggcaagt

SEQ ID NO: 13147 - DNA, 17 bp, synthetic construct
  misc_feature 1..17: note = Oligonucleotide
  source 1..17: mol_type = other DNA
cacccccagaacaggca

SEQ ID NO: 13148 - DNA, 17 bp, synthetic construct
  misc_feature 1..17: note = Oligonucleotide
  source 1..17: mol_type = other DNA
gtacacccccagaacag

SEQ ID NO: 13149 - DNA, 17 bp, synthetic construct
  misc_feature 1..17: note = Oligonucleotide
  source 1..17: mol_type = other DNA
cacgtacacccccagaa

SEQ ID NO: 13150 - DNA, 17 bp, synthetic construct
  misc_feature 1..17: note = Oligonucleotide
  source 1..17: mol_type = other DNA
acacacgtacaccccca

SEQ ID NO: 13151 - DNA, 17 bp, synthetic construct
  misc_feature 1..17: note = Oligonucleotide
  source 1..17: mol_type = other DNA
caaacacacgtacaccc

SEQ ID NO: 13152 - DNA, 17 bp, synthetic construct
  misc_feature 1..17: note = Oligonucleotide
  source 1..17: mol_type = other DNA
acacaaacacacgtaca

SEQ ID NO: 13153 - DNA, 17 bp, synthetic construct
  misc_feature 1..17: note = Oligonucleotide
  source 1..17: mol_type = other DNA
tgcacacaaacacacgt

SEQ ID NO: 13154 - DNA, 17 bp, synthetic construct
  misc_feature 1..17: note = Oligonucleotide
  source 1..17: mol_type = other DNA
gtgtgcacacaaacaca

SEQ ID NO: 13155 - DNA, 17 bp, synthetic construct
  misc_feature 1..17: note = Oligonucleotide
  source 1..17: mol_type = other DNA
cctgtgtgcacacaaac

SEQ ID NO: 13156 - DNA, 17 bp, synthetic construct
  misc_feature 1..17: note = Oligonucleotide
  source 1..17: mol_type = other DNA
tcacctgtgtgcacaca

SEQ ID NO: 13157 - DNA, 17 bp, synthetic construct
  misc_feature 1..17: note = Oligonucleotide
  source 1..17: mol_type = other DNA
gggtcacctgtgtgcac

SEQ ID NO: 13158 - DNA, 17 bp, synthetic construct
  misc_feature 1..17: note = Oligonucleotide
  source 1..17: mol_type = other DNA
acagggtcacctgtgtg

SEQ ID NO: 13159 - DNA, 17 bp, synthetic construct
  misc_feature 1..17: note = Oligonucleotide
  source 1..17: mol_type = other DNA
tgtacagggtcacctgt

SEQ ID NO: 13160 - DNA, 17 bp, synthetic construct
  misc_feature 1..17: note = Oligonucleotide
  source 1..17: mol_type = other DNA
cactgtacagggtcacc

SEQ ID NO: 13161 - DNA, 17 bp, synthetic construct
  misc_feature 1..17: note = Oligonucleotide
  source 1..17: mol_type = other DNA
aatcactgtacagggtc

SEQ ID NO: 13162 - DNA, 17 bp, synthetic construct
  misc_feature 1..17: note = Oligonucleotide
  source 1..17: mol_type = other DNA
tgcaatcactgtacagg

SEQ ID NO: 13163 - DNA, 17 bp, synthetic construct
  misc_feature 1..17: note = Oligonucleotide
  source 1..17: mol_type = other DNA
acatgcaatcactgtac

SEQ ID NO: 13164 - DNA, 17 bp, synthetic construct
  misc_feature 1..17: note = Oligonucleotide
  source 1..17: mol_type = other DNA
cacacatgcaatcactg

SEQ ID NO: 13165 - DNA, 17 bp, synthetic construct
  misc_feature 1..17: note = Oligonucleotide
  source 1..17: mol_type = other DNA
gtgcacacatgcaatca

SEQ ID NO: 13166 - DNA, 17 bp, synthetic construct
  misc_feature 1..17: note = Oligonucleotide
  source 1..17: mol_type = other DNA
ctggtgcacacatgcaa

SEQ ID NO: 13167 - DNA, 17 bp, synthetic construct
  misc_feature 1..17: note = Oligonucleotide
  source 1..17: mol_type = other DNA
tccctggtgcacacatg

SEQ ID NO: 13168 - DNA, 17 bp, synthetic construct
  misc_feature 1..17: note = Oligonucleotide
  source 1..17: mol_type = other DNA
cactccctggtgcacac

SEQ ID NO: 13169 - DNA, 17 bp, synthetic construct
  misc_feature 1..17: note = Oligonucleotide
  source 1..17: mol_type = other DNA
ccacactccctggtgca

SEQ ID NO: 13170 - DNA, 17 bp, synthetic construct
  misc_feature 1..17: note = Oligonucleotide
  source 1..17: mol_type = other DNA
tatccacactccctggt

SEQ ID NO: 13171 - DNA, 17 bp, synthetic construct
  misc_feature 1..17: note = Oligonucleotide
  source 1..17: mol_type = other DNA
gtatatccacactccct

SEQ ID NO: 13172 - DNA, 17 bp, synthetic construct
  misc_feature 1..17: note = Oligonucleotide
  source 1..17: mol_type = other DNA
caagtatatccacactc

SEQ ID NO: 13173 - DNA, 17 bp, synthetic construct
  misc_feature 1..17: note = Oligonucleotide
  source 1..17: mol_type = other DNA
aggcaagtatatccaca

SEQ ID NO: 13174 - DNA, 17 bp, synthetic construct
  misc_feature 1..17: note = Oligonucleotide
  source 1..17: mol_type = other DNA
aacaggcaagtatatcc

SEQ ID NO: 13175 - DNA, 17 bp, synthetic construct
  misc_feature 1..17: note = Oligonucleotide
  source 1..17: mol_type = other DNA
cagaacaggcaagtata

SEQ ID NO: 13176 - DNA, 17 bp, synthetic construct
  misc_feature 1..17: note = Oligonucleotide
  source 1..17: mol_type = other DNA
ccccagaacaggcaagt

SEQ ID NO: 13177 - DNA, 17 bp, synthetic construct
  misc_feature 1..17: note = Oligonucleotide
  source 1..17: mol_type = other DNA
cacccccagaacaggca

SEQ ID NO: 13178 - DNA, 17 bp, synthetic construct
  misc_feature 1..17: note = Oligonucleotide
  source 1..17: mol_type = other DNA
gtacacccccagaacag

SEQ ID NO: 13179 - DNA, 17 bp, synthetic construct
  misc_feature 1..17: note = Oligonucleotide
  source 1..17: mol_type = other DNA
cgtgtacacccccagaa

SEQ ID NO: 13180 - DNA, 17 bp, synthetic construct
  misc_feature 1..17: note = Oligonucleotide
  source 1..17: mol_type = other DNA
acacgtgtacaccccca

SEQ ID NO: 13181 - DNA, 17 bp, synthetic construct
  misc_feature 1..17: note = Oligonucleotide
  source 1..17: mol_type = other DNA
aacacacgtgtacaccc

SEQ ID NO: 13182 - DNA, 17 bp, synthetic construct
  misc_feature 1..17: note = Oligonucleotide
  source 1..17: mol_type = other DNA
gcaaacacacgtgtaca

SEQ ID NO: 13183 - DNA, 17 bp, synthetic construct
  misc_feature 1..17: note = Oligonucleotide
  source 1..17: mol_type = other DNA
tgtgcaaacacacgtgt

SEQ ID NO: 13184 - DNA, 17 bp, synthetic construct
  misc_feature 1..17: note = Oligonucleotide
  source 1..17: mol_type = other DNA
ctgtgtgcaaacacacg

SEQ ID NO: 13185 - DNA, 17 bp, synthetic construct
  misc_feature 1..17: note = Oligonucleotide
  source 1..17: mol_type = other DNA
catctgtgtgcaaacac

SEQ ID NO: 13186 - DNA, 17 bp, synthetic construct
  misc_feature 1..17: note = Oligonucleotide
  source 1..17: mol_type = other DNA
ggtcatctgtgtgcaaa

SEQ ID NO: 13187 - DNA, 17 bp, synthetic construct
  misc_feature 1..17: note = Oligonucleotide
  source 1..17: mol_type = other DNA
cagggtcatctgtgtgc

SEQ ID NO: 13188 - DNA, 17 bp, synthetic construct
  misc_feature 1..17: note = Oligonucleotide
  source 1..17: mol_type = other DNA
gtacagggtcatctgtg

SEQ ID NO: 13189 - DNA, 17 bp, synthetic construct
  misc_feature 1..17: note = Oligonucleotide
  source 1..17: mol_type = other DNA
actgtacagggtcatct

SEQ ID NO: 13190 - DNA, 17 bp, synthetic construct
  misc_feature 1..17: note = Oligonucleotide
  source 1..17: mol_type = other DNA
atcactgtacagggtca

SEQ ID NO: 13191 - DNA, 17 bp, synthetic construct
  misc_feature 1..17: note = Oligonucleotide
  source 1..17: mol_type = other DNA
gcaatcactgtacaggg

SEQ ID NO: 13192 - DNA, 17 bp, synthetic construct
  misc_feature 1..17: note = Oligonucleotide
  source 1..17: mol_type = other DNA
catgcaatcactgtaca

SEQ ID NO: 13193 - DNA, 17 bp, synthetic construct
  misc_feature 1..17: note = Oligonucleotide
  source 1..17: mol_type = other DNA
acgcatgcaatcactgt

SEQ ID NO: 13194 - DNA, 17 bp, synthetic construct
  misc_feature 1..17: note = Oligonucleotide
  source 1..17: mol_type = other DNA
tgcacgcatgcaatcac

SEQ ID NO: 13195 - DNA, 17 bp, synthetic construct
  misc_feature 1..17: note = Oligonucleotide
  source 1..17: mol_type = other DNA
tggtgcacgcatgcaat

SEQ ID NO: 13196 - DNA, 17 bp, synthetic construct
  misc_feature 1..17: note = Oligonucleotide
  source 1..17: mol_type = other DNA
ccctggtgcacgcatgc

SEQ ID NO: 13197 - DNA, 17 bp, synthetic construct
  misc_feature 1..17: note = Oligonucleotide
  source 1..17: mol_type = other DNA
actccctggtgcacgca

SEQ ID NO: 13198 - DNA, 17 bp, synthetic construct
  misc_feature 1..17: note = Oligonucleotide
  source 1..17: mol_type = other DNA
cacactccctggtgcac

SEQ ID NO: 13199 - DNA, 17 bp, synthetic construct
  misc_feature 1..17: note = Oligonucleotide
  source 1..17: mol_type = other DNA
atccacactccctggtg

SEQ ID NO: 13200 - DNA, 17 bp, synthetic construct
  misc_feature 1..17: note = Oligonucleotide
  source 1..17: mol_type = other DNA
tatatccacactccctg

SEQ ID NO: 13201 - DNA, 17 bp, synthetic construct
  misc_feature 1..17: note = Oligonucleotide
  source 1..17: mol_type = other DNA
aagtatatccacactcc

SEQ ID NO: 13202 - DNA, 17 bp, synthetic construct
  misc_feature 1..17: note = Oligonucleotide
  source 1..17: mol_type = other DNA
ggcaagtatatccacac

SEQ ID NO: 13203 - DNA, 17 bp, synthetic construct
  misc_feature 1..17: note = Oligonucleotide
  source 1..17: mol_type = other DNA
acaggcaagtatatcca

SEQ ID NO: 13204 - DNA, 17 bp, synthetic construct
  misc_feature 1..17: note = Oligonucleotide
  source 1..17: mol_type = other DNA
agaacaggcaagtatat

SEQ ID NO: 13205 - DNA, 17 bp, synthetic construct
  misc_feature 1..17: note = Oligonucleotide
  source 1..17: mol_type = other DNA
cccagaacaggcaagta

SEQ ID NO: 13206 - DNA, 17 bp, synthetic construct
  misc_feature 1..17: note = Oligonucleotide
  source 1..17: mol_type = other DNA
acccccagaacaggcaa

SEQ ID NO: 13207 - DNA, 17 bp, synthetic construct
  misc_feature 1..17: note = Oligonucleotide
  source 1..17: mol_type = other DNA
tacacccccagaacagg

SEQ ID NO: 13208 - DNA, 17 bp, synthetic construct
  misc_feature 1..17: note = Oligonucleotide
  source 1..17: mol_type = other DNA
gtgtacacccccagaac

SEQ ID NO: 13209 - DNA, 17 bp, synthetic construct
  misc_feature 1..17: note = Oligonucleotide
  source 1..17: mol_type = other DNA
cacgtgtacacccccag

SEQ ID NO: 13210 - DNA, 17 bp, synthetic construct
  misc_feature 1..17: note = Oligonucleotide
  source 1..17: mol_type = other DNA
acacacgtgtacacccc

SEQ ID NO: 13211 - DNA, 17 bp, synthetic construct
  misc_feature 1..17: note = Oligonucleotide
  source 1..17: mol_type = other DNA
cacacacacgtgtacac

SEQ ID NO: 13212 - DNA, 17 bp, synthetic construct
  misc_feature 1..17: note = Oligonucleotide
  source 1..17: mol_type = other DNA
gtgcacacacacgtgta

SEQ ID NO: 13213 - DNA, 17 bp, synthetic construct
  misc_feature 1..17: note = Oligonucleotide
  source 1..17: mol_type = other DNA
tgtgtgcacacacacgt

SEQ ID NO: 13214 - DNA, 17 bp, synthetic construct
  misc_feature 1..17: note = Oligonucleotide
  source 1..17: mol_type = other DNA
atctgtgtgcacacaca

SEQ ID NO: 13215 - DNA, 17 bp, synthetic construct
  misc_feature 1..17: note = Oligonucleotide
  source 1..17: mol_type = other DNA
gtcatctgtgtgcacac

SEQ ID NO: 13216 - DNA, 17 bp, synthetic construct
  misc_feature 1..17: note = Oligonucleotide
  source 1..17: mol_type = other DNA
agggtcatctgtgtgca

SEQ ID NO: 13217 - DNA, 17 bp, synthetic construct
  misc_feature 1..17: note = Oligonucleotide
  source 1..17: mol_type = other DNA
tacagggtcatctgtgt

SEQ ID NO: 13218 - DNA, 17 bp, synthetic construct
  misc_feature 1..17: note = Oligonucleotide
  source 1..17: mol_type = other DNA
ctgtacagggtcatctg

SEQ ID NO: 13219 - DNA, 17 bp, synthetic construct
  misc_feature 1..17: note = Oligonucleotide
  source 1..17: mol_type = other DNA
tcactgtacagggtcat

SEQ ID NO: 13220 - DNA, 17 bp, synthetic construct
  misc_feature 1..17: note = Oligonucleotide
  source 1..17: mol_type = other DNA
caatcactgtacagggt

SEQ ID NO: 13221 - DNA, 17 bp, synthetic construct
  misc_feature 1..17: note = Oligonucleotide
  source 1..17: mol_type = other DNA
atgcaatcactgtacag

SEQ ID NO: 13222 - DNA, 17 bp, synthetic construct
  misc_feature 1..17: note = Oligonucleotide
  source 1..17: mol_type = other DNA
cgcatgcaatcactgta

SEQ ID NO: 13223 - DNA, 17 bp, synthetic construct
  misc_feature 1..17: note = Oligonucleotide
  source 1..17: mol_type = other DNA
gcacgcatgcaatcact

SEQ ID NO: 13224 - DNA, 17 bp, synthetic construct
  misc_feature 1..17: note = Oligonucleotide
  source 1..17: mol_type = other DNA
ggtgcacgcatgcaatc

SEQ ID NO: 13225 - DNA, 17 bp, synthetic construct
  misc_feature 1..17: note = Oligonucleotide
  source 1..17: mol_type = other DNA
cctggtgcacgcatgca

SEQ ID NO: 13226 - DNA, 17 bp, synthetic construct
  misc_feature 1..17: note = Oligonucleotide
  source 1..17: mol_type = other DNA
ctacctggtgcacgcat

SEQ ID NO: 13227 - DNA, 17 bp, synthetic construct
  misc_feature 1..17: note = Oligonucleotide
  source 1..17: mol_type = other DNA
acactacctggtgcacg

SEQ ID NO: 13228 - DNA, 17 bp, synthetic construct
  misc_feature 1..17: note = Oligonucleotide
  source 1..17: mol_type = other DNA
tccacactacctggtgc

SEQ ID NO: 13229 - DNA, 17 bp, synthetic construct
  misc_feature 1..17: note = Oligonucleotide
  source 1..17: mol_type = other DNA
atatccacactacctgg

SEQ ID NO: 13230 - DNA, 17 bp, synthetic construct
  misc_feature 1..17: note = Oligonucleotide
  source 1..17: mol_type = other DNA
agtatatccacactacc

SEQ ID NO: 13231 - DNA, 17 bp, synthetic construct
  misc_feature 1..17: note = Oligonucleotide
  source 1..17: mol_type = other DNA
gcaagtatatccacact

SEQ ID NO: 13232 - DNA, 17 bp, synthetic construct
  misc_feature 1..17: note = Oligonucleotide
  source 1..17: mol_type = other DNA
caggcaagtatatccac

SEQ ID NO: 13233 - DNA, 17 bp, synthetic construct
  misc_feature 1..17: note = Oligonucleotide
  source 1..17: mol_type = other DNA
gaacaggcaagtatatc

SEQ ID NO: 13234 - DNA, 17 bp, synthetic construct
  misc_feature 1..17: note = Oligonucleotide
  source 1..17: mol_type = other DNA
ccagaacaggcaagtat

SEQ ID NO: 13235 - DNA, 17 bp, synthetic construct
  misc_feature 1..17: note = Oligonucleotide
  source 1..17: mol_type = other DNA
cccccagaacaggcaag

SEQ ID NO: 13236 - DNA, 17 bp, synthetic construct
  misc_feature 1..17: note = Oligonucleotide
  source 1..17: mol_type = other DNA
acacccccagaacaggc

SEQ ID NO: 13237 - DNA, 17 bp, synthetic construct
  misc_feature 1..17: note = Oligonucleotide
  source 1..17: mol_type = other DNA
tgtacacccccagaaca

SEQ ID NO: 13238 - DNA, 17 bp, synthetic construct
  misc_feature 1..17: note = Oligonucleotide
  source 1..17: mol_type = other DNA
acgtgtacacccccaga

SEQ ID NO: 13239 - DNA, 17 bp, synthetic construct
  misc_feature 1..17: note = Oligonucleotide
  source 1..17: mol_type = other DNA
cacacgtgtacaccccc

SEQ ID NO: 13240 - DNA, 17 bp, synthetic construct
  misc_feature 1..17: note = Oligonucleotide
  source 1..17: mol_type = other DNA
aaacacacgtgtacacc

SEQ ID NO: 13241 - DNA, 17 bp, synthetic construct
  misc_feature 1..17: note = Oligonucleotide
  source 1..17: mol_type = other DNA
tgcaaacacacgtgtac

SEQ ID NO: 13242 - DNA, 17 bp, synthetic construct
  misc_feature 1..17: note = Oligonucleotide
  source 1..17: mol_type = other DNA
gtgtgcaaacacacgtg

SEQ ID NO: 13243 - DNA, 17 bp, synthetic construct
  misc_feature 1..17: note = Oligonucleotide
  source 1..17: mol_type = other DNA
tctgtgtgcaaacacac

SEQ ID NO: 13244 - DNA, 17 bp, synthetic construct
  misc_feature 1..17: note = Oligonucleotide
  source 1..17: mol_type = other DNA
tcatctgtgtgcaaaca

SEQ ID NO: 13245 - DNA, 17 bp, synthetic construct
  misc_feature 1..17: note = Oligonucleotide
  source 1..17: mol_type = other DNA
aggtcatctgtgtgcaa

SEQ ID NO: 13246 - DNA, 17 bp, synthetic construct
  misc_feature 1..17: note = Oligonucleotide
  source 1..17: mol_type = other DNA
acaaggtcatctgtgtg

SEQ ID NO: 13247 - DNA, 17 bp, synthetic construct
  misc_feature 1..17: note = Oligonucleotide
  source 1..17: mol_type = other DNA
tgtacaaggtcatctgt

SEQ ID NO: 13248 - DNA, 17 bp, synthetic construct
  misc_feature 1..17: note = Oligonucleotide
  source 1..17: mol_type = other DNA
cactgtacaaggtcatc

SEQ ID NO: 13249 - DNA, 17 bp, synthetic construct
  misc_feature 1..17: note = Oligonucleotide
  source 1..17: mol_type = other DNA
aatcactgtacaaggtc

SEQ ID NO: 13250 - DNA, 17 bp, synthetic construct
  misc_feature 1..17: note = Oligonucleotide
  source 1..17: mol_type = other DNA
tgcaatcactgtacaag

SEQ ID NO: 13251 - DNA, 17 bp, synthetic construct
  misc_feature 1..17: note = Oligonucleotide
  source 1..17: mol_type = other DNA
gcatgcaatcactgtac

SEQ ID NO: 13252 - DNA, 17 bp, synthetic construct
  misc_feature 1..17: note = Oligonucleotide
  source 1..17: mol_type = other DNA
cacgcatgcaatcactg

SEQ ID NO: 13253 - DNA, 17 bp, synthetic construct
  misc_feature 1..17: note = Oligonucleotide
  source 1..17: mol_type = other DNA
gtgcacgcatgcaatca

SEQ ID NO: 13254 - DNA, 17 bp, synthetic construct
  misc_feature 1..17: note = Oligonucleotide
  source 1..17: mol_type = other DNA
ctggtgcacgcatgcaa

SEQ ID NO: 13255 - DNA, 17 bp, synthetic construct
  misc_feature 1..17: note = Oligonucleotide
  source 1..17: mol_type = other DNA
tccctggtgcacgcatg

SEQ ID NO: 13256 - DNA, 17 bp, synthetic construct
  misc_feature 1..17: note = Oligonucleotide
  source 1..17: mol_type = other DNA
cactccctggtgcacgc

SEQ ID NO: 13257 - DNA, 17 bp, synthetic construct
  misc_feature 1..17: note = Oligonucleotide
  source 1..17: mol_type = other DNA
ccacactccctggtgca

SEQ ID NO: 13258 - DNA, 17 bp, synthetic construct
  misc_feature 1..17: note = Oligonucleotide
  source 1..17: mol_type = other DNA
tatccacactccctggt

SEQ ID NO: 13259 - DNA, 17 bp, synthetic construct
  misc_feature 1..17: note = Oligonucleotide
  source 1..17: mol_type = other DNA
gtatatccacactccct

SEQ ID NO: 13260 - DNA, 17 bp, synthetic construct
  misc_feature 1..17: note = Oligonucleotide
  source 1..17: mol_type = other DNA
caagtatatccacactc

SEQ ID NO: 13261 - DNA, 17 bp, synthetic construct
  misc_feature 1..17: note = Oligonucleotide
  source 1..17: mol_type = other DNA
agacaagtatatccaca

SEQ ID NO: 13262 - DNA, 17 bp, synthetic construct
  misc_feature 1..17: note = Oligonucleotide
  source 1..17: mol_type = other DNA
aacagacaagtatatcc

SEQ ID NO: 13263 - DNA, 17 bp, synthetic construct
  misc_feature 1..17: note = Oligonucleotide
  source 1..17: mol_type = other DNA
cagaacagacaagtata

SEQ ID NO: 13264 - DNA, 17 bp, synthetic construct
  misc_feature 1..17: note = Oligonucleotide
  source 1..17: mol_type = other DNA
ccccagaacagacaagt

SEQ ID NO: 13265 - DNA, 17 bp, synthetic construct
  misc_feature 1..17: note = Oligonucleotide
  source 1..17: mol_type = other DNA
cacccccagaacagaca

SEQ ID NO: 13266 - DNA, 17 bp, synthetic construct
  misc_feature 1..17: note = Oligonucleotide
  source 1..17: mol_type = other DNA
gtacacccccagaacag

SEQ ID NO: 13267 - DNA, 17 bp, synthetic construct
  misc_feature 1..17: note = Oligonucleotide
  source 1..17: mol_type = other DNA
cgtgtacacccccagaa

SEQ ID NO: 13268 - DNA, 17 bp, synthetic construct
  misc_feature 1..17: note = Oligonucleotide
  source 1..17: mol_type = other DNA
acacgtgtacaccccca

SEQ ID NO: 13269 - DNA, 17 bp, synthetic construct
  misc_feature 1..17: note = Oligonucleotide
  source 1..17: mol_type = other DNA
aacacacgtgtacaccc

SEQ ID NO: 13270 - DNA, 17 bp, synthetic construct
  misc_feature 1..17: note = Oligonucleotide
  source 1..17: mol_type = other DNA
gcaaacacacgtgtaca

SEQ ID NO: 13271 - DNA, 17 bp, synthetic construct
  misc_feature 1..17: note = Oligonucleotide
  source 1..17: mol_type = other DNA
tgtgcaaacacacgtgt

SEQ ID NO: 13272 - DNA, 17 bp, synthetic construct
  misc_feature 1..17: note = Oligonucleotide
  source 1..17: mol_type = other DNA
ctgtgtgcaaacacacg

SEQ ID NO: 13273 - DNA, 17 bp, synthetic construct
  misc_feature 1..17: note = Oligonucleotide
  source 1..17: mol_type = other DNA
catctgtgtgcaaacac

SEQ ID NO: 13274 - DNA, 17 bp, synthetic construct
  misc_feature 1..17: note = Oligonucleotide
  source 1..17: mol_type = other DNA
ggtcatctgtgtgcaaa

SEQ ID NO: 13275 - DNA, 17 bp, synthetic construct
  misc_feature 1..17: note = Oligonucleotide
  source 1..17: mol_type = other DNA
cagggtcatctgtgtgc

SEQ ID NO: 13276 - DNA, 17 bp, synthetic construct
  misc_feature 1..17: note = Oligonucleotide
  source 1..17: mol_type = other DNA
gtacagggtcatctgtg

SEQ ID NO: 13277 - DNA, 17 bp, synthetic construct
  misc_feature 1..17: note = Oligonucleotide
  source 1..17: mol_type = other DNA
actgtacagggtcatct

SEQ ID NO: 13278 - DNA, 17 bp, synthetic construct
  misc_feature 1..17: note = Oligonucleotide
  source 1..17: mol_type = other DNA
atcactgtacagggtca

SEQ ID NO: 13279 - DNA, 17 bp, synthetic construct
  misc_feature 1..17: note = Oligonucleotide
  source 1..17: mol_type = other DNA
gcaatcactgtacaggg

SEQ ID NO: 13280 - DNA, 17 bp, synthetic construct
  misc_feature 1..17: note = Oligonucleotide
  source 1..17: mol_type = other DNA
catgcaatcactgtaca

SEQ ID NO: 13281 - DNA, 17 bp, synthetic construct
  misc_feature 1..17: note = Oligonucleotide
  source 1..17: mol_type = other DNA
acgcatgcaatcactgt

SEQ ID NO: 13282 - DNA, 17 bp, synthetic construct
  misc_feature 1..17: note = Oligonucleotide
  source 1..17: mol_type = other DNA
tgcacgcatgcaatcac

SEQ ID NO: 13283 - DNA, 17 bp, synthetic construct
  misc_feature 1..17: note = Oligonucleotide
  source 1..17: mol_type = other DNA
tggtgcacgcatgcaat

SEQ ID NO: 13284 - DNA, 17 bp, synthetic construct
  misc_feature 1..17: note = Oligonucleotide
  source 1..17: mol_type = other DNA
ccctggtgcacgcatgc

SEQ ID NO: 13285 - DNA, 17 bp, synthetic construct
  misc_feature 1..17: note = Oligonucleotide
  source 1..17: mol_type = other DNA
actccctggtgcacgca

SEQ ID NO: 13286 - DNA, 17 bp, synthetic construct
  misc_feature 1..17: note = Oligonucleotide
  source 1..17: mol_type = other DNA
cacactccctggtgcac

SEQ ID NO: 13287 - DNA, 17 bp, synthetic construct
  misc_feature 1..17: note = Oligonucleotide
  source 1..17: mol_type = other DNA
atccacactccctggtg

SEQ ID NO: 13288 - DNA, 17 bp, synthetic construct
  misc_feature 1..17: note = Oligonucleotide
  source 1..17: mol_type = other DNA
tatatccacactccctg

SEQ ID NO: 13289 - DNA, 17 bp, synthetic construct
  misc_feature 1..17: note = Oligonucleotide
  source 1..17: mol_type = other DNA
aagtatatccacactcc

SEQ ID NO: 13290 - DNA, 17 bp, synthetic construct
  misc_feature 1..17: note = Oligonucleotide
  source 1..17: mol_type = other DNA
ggcaagtatatccacac

SEQ ID NO: 13291 - DNA, 17 bp, synthetic construct
  misc_feature 1..17: note = Oligonucleotide
  source 1..17: mol_type = other DNA
acaggcaagtatatcca

SEQ ID NO: 13292 - DNA, 17 bp, synthetic construct
  misc_feature 1..17: note = Oligonucleotide
  source 1..17: mol_type = other DNA
agaacaggcaagtatat

SEQ ID NO: 13293 - DNA, 17 bp, synthetic construct
  misc_feature 1..17: note = Oligonucleotide
  source 1..17: mol_type = other DNA
cccagaacaggcaagta

SEQ ID NO: 13294 - DNA, 17 bp, synthetic construct
  misc_feature 1..17: note = Oligonucleotide
  source 1..17: mol_type = other DNA
acccccagaacaggcaa

SEQ ID NO: 13295 - DNA, 17 bp, synthetic construct
  misc_feature 1..17: note = Oligonucleotide
  source 1..17: mol_type = other DNA
tacacccccagaacagg

SEQ ID NO: 13296 - DNA, 17 bp, synthetic construct
  misc_feature 1..17: note = Oligonucleotide
  source 1..17: mol_type = other DNA
gtgtacacccccagaac

SEQ ID NO: 13297 - DNA, 17 bp, synthetic construct
  misc_feature 1..17: note = Oligonucleotide
  source 1..17: mol_type = other DNA
cacgtgtacacccccag

SEQ ID NO: 13298 - DNA, 17 bp, synthetic construct
  misc_feature 1..17: note = Oligonucleotide
  source 1..17: mol_type = other DNA
acacacgtgtacacccc

SEQ ID NO: 13299 - DNA, 17 bp, synthetic construct
  misc_feature 1..17: note = Oligonucleotide
  source 1..17: mol_type = other DNA
caaacacacgtgtacac

SEQ ID NO: 13300 - DNA, 17 bp, synthetic construct
  misc_feature 1..17: note = Oligonucleotide
  source 1..17: mol_type = other DNA
gtgcaaacacacgtgta

SEQ ID NO: 13301 - DNA, 17 bp, synthetic construct
  misc_feature 1..17: note = Oligonucleotide
  source 1..17: mol_type = other DNA
tgtgtgcaaacacacgt

SEQ ID NO: 13302 - DNA, 17 bp, synthetic construct
  misc_feature 1..17: note = Oligonucleotide
  source 1..17: mol_type = other DNA
acctgtgtgcaaacaca

SEQ ID NO: 13303 - DNA, 17 bp, synthetic construct
  misc_feature 1..17: note = Oligonucleotide
  source 1..17: mol_type = other DNA
gtcacctgtgtgcaaac

SEQ ID NO: 13304 - DNA, 17 bp, synthetic construct
  misc_feature 1..17: note = Oligonucleotide
  source 1..17: mol_type = other DNA
agggtcacctgtgtgca

SEQ ID NO: 13305 - DNA, 17 bp, synthetic construct
  misc_feature 1..17: note = Oligonucleotide
  source 1..17: mol_type = other DNA
tacagggtcacctgtgt

SEQ ID NO: 13306 - DNA, 17 bp, synthetic construct
  misc_feature 1..17: note = Oligonucleotide
  source 1..17: mol_type = other DNA
ctgtacagggtcacctg

SEQ ID NO: 13307 - DNA, 17 bp, synthetic construct
  misc_feature 1..17: note = Oligonucleotide
  source 1..17: mol_type = other DNA
tcactgtacagggtcac

SEQ ID NO: 13308 - DNA, 17 bp, synthetic construct
  misc_feature 1..17: note = Oligonucleotide
  source 1..17: mol_type = other DNA
cgatcactgtacagggt

SEQ ID NO: 13309 - DNA, 17 bp, synthetic construct
  misc_feature 1..17: note = Oligonucleotide
  source 1..17: mol_type = other DNA
gtacgatcactgtacag

SEQ ID NO: 13310 - DNA, 17 bp, synthetic construct
  misc_feature 1..17: note = Oligonucleotide
  source 1..17: mol_type = other DNA
cgtgtacgatcactgta

SEQ ID NO: 13311 - DNA, 17 bp, synthetic construct
  misc_feature 1..17: note = Oligonucleotide
  source 1..17: mol_type = other DNA
acacgtgtacgatcact

SEQ ID NO: 13312 - DNA, 17 bp, synthetic construct
  misc_feature 1..17: note = Oligonucleotide
  source 1..17: mol_type = other DNA
ggtacacgtgtacgatc

SEQ ID NO: 13313 - DNA, 17 bp, synthetic construct
  misc_feature 1..17: note = Oligonucleotide
  source 1..17: mol_type = other DNA
cctggtacacgtgtacg

SEQ ID NO: 13314 - DNA, 17 bp, synthetic construct
  misc_feature 1..17: note = Oligonucleotide
  source 1..17: mol_type = other DNA
ctccctggtacacgtgt

SEQ ID NO: 13315 - DNA, 17 bp, synthetic construct
  misc_feature 1..17: note = Oligonucleotide
  source 1..17: mol_type = other DNA
acactccctggtacacg

SEQ ID NO: 13316 - DNA, 17 bp, synthetic construct
  misc_feature 1..17: note = Oligonucleotide
  source 1..17: mol_type = other DNA
tccacactccctggtac

SEQ ID NO: 13317 - DNA, 17 bp, synthetic construct
  misc_feature 1..17: note = Oligonucleotide
  source 1..17: mol_type = other DNA
atatccacactccctgg

SEQ ID NO: 13318 - DNA, 17 bp, synthetic construct
  misc_feature 1..17: note = Oligonucleotide
  source 1..17: mol_type = other DNA
agtatatccacactccc

SEQ ID NO: 13319 - DNA, 17 bp, synthetic construct
  misc_feature 1..17: note = Oligonucleotide
  source 1..17: mol_type = other DNA
gcaagtatatccacact

SEQ ID NO: 13320 - DNA, 17 bp, synthetic construct
  misc_feature 1..17: note = Oligonucleotide
  source 1..17: mol_type = other DNA
caggcaagtatatccac

SEQ ID NO: 13321 - DNA, 17 bp, synthetic construct
  misc_feature 1..17: note = Oligonucleotide
  source 1..17: mol_type = other DNA
gaacaggcaagtatatc

SEQ ID NO: 13322 - DNA, 17 bp, synthetic construct
  misc_feature 1..17: note = Oligonucleotide
  source 1..17: mol_type = other DNA
ccagaacaggcaagtat

SEQ ID NO: 13323 - DNA, 17 bp, synthetic construct
  misc_feature 1..17: note = Oligonucleotide
  source 1..17: mol_type = other DNA
accccagaacaggcaag

SEQ ID NO: 13324 - DNA, 17 bp, synthetic construct
  misc_feature 1..17: note = Oligonucleotide
  source 1..17: mol_type = other DNA
acaaccccagaacaggc

SEQ ID NO: 13325 - DNA, 17 bp, synthetic construct
  misc_feature 1..17: note = Oligonucleotide
  source 1..17: mol_type = other DNA
cgtacaaccccagaaca

SEQ ID NO: 13326 - DNA, 17 bp, synthetic construct
  misc_feature 1..17: note = Oligonucleotide
  source 1..17: mol_type = other DNA
acacgtacaaccccaga

SEQ ID NO: 13327 - DNA, 17 bp, synthetic construct
  misc_feature 1..17: note = Oligonucleotide
  source 1..17: mol_type = other DNA
cacacacgtacaacccc

SEQ ID NO: 13328 - DNA, 17 bp, synthetic construct
  misc_feature 1..17: note = Oligonucleotide
  source 1..17: mol_type = other DNA
acacacacacgtacaac

SEQ ID NO: 13329 - DNA, 17 bp, synthetic construct
  misc_feature 1..17: note = Oligonucleotide
  source 1..17: mol_type = other DNA
tgcacacacacacgtac

SEQ ID NO: 13330 - DNA, 17 bp, synthetic construct
  misc_feature 1..17: note = Oligonucleotide
  source 1..17: mol_type = other DNA
gtgtgcacacacacacg

SEQ ID NO: 13331 - DNA, 17 bp, synthetic construct
  misc_feature 1..17: note = Oligonucleotide
  source 1..17: mol_type = other DNA
tctgtgtgcacacacac

SEQ ID NO: 13332 - DNA, 17 bp, synthetic construct
  misc_feature 1..17: note = Oligonucleotide
  source 1..17: mol_type = other DNA
tcatctgtgtgcacaca

SEQ ID NO: 13333 - DNA, 17 bp, synthetic construct
  misc_feature 1..17: note = Oligonucleotide
  source 1..17: mol_type = other DNA
gagtcatctgtgtgcac

SEQ ID NO: 13334 - DNA, 17 bp, synthetic construct
  misc_feature 1..17: note = Oligonucleotide
  source 1..17: mol_type = other DNA
acagagtcatctgtgtg

SEQ ID NO: 13335 - DNA, 17 bp, synthetic construct
  misc_feature 1..17: note = Oligonucleotide
  source 1..17: mol_type = other DNA
tgtacagagtcatctgt

SEQ ID NO: 13336 - DNA, 17 bp, synthetic construct
  misc_feature 1..17: note = Oligonucleotide
  source 1..17: mol_type = other DNA
cactgtacagagtcatc

SEQ ID NO: 13337 - DNA, 17 bp, synthetic construct
  misc_feature 1..17: note = Oligonucleotide
  source 1..17: mol_type = other DNA
aatcactgtacagagtc

SEQ ID NO: 13338 - DNA, 17 bp, synthetic construct
  misc_feature 1..17: note = Oligonucleotide
  source 1..17: mol_type = other DNA
tgcaatcactgtacaga

SEQ ID NO: 13339 - DNA, 17 bp, synthetic construct
  misc_feature 1..17: note = Oligonucleotide
  source 1..17: mol_type = other DNA
gcatgcaatcactgtac

SEQ ID NO: 13340 - DNA, 17 bp, synthetic construct
  misc_feature 1..17: note = Oligonucleotide
  source 1..17: mol_type = other DNA
cacgcatgcaatcactg

SEQ ID NO: 13341 - DNA, 17 bp, synthetic construct
  misc_feature 1..17: note = Oligonucleotide
  source 1..17: mol_type = other DNA
gtgcacgcatgcaatca

SEQ ID NO: 13342 - DNA, 17 bp, synthetic construct
  misc_feature 1..17: note = Oligonucleotide
  source 1..17: mol_type = other DNA
ctggtgcacgcatgcaa

SEQ ID NO: 13343 - DNA, 17 bp, synthetic construct
  misc_feature 1..17: note = Oligonucleotide
  source 1..17: mol_type = other DNA
tacctggtgcacgcatg

SEQ ID NO: 13344 - DNA, 17 bp, synthetic construct
  misc_feature 1..17: note = Oligonucleotide
  source 1..17: mol_type = other DNA
cactacctggtgcacgc

SEQ ID NO: 13345 - DNA, 17 bp, synthetic construct
  misc_feature 1..17: note = Oligonucleotide
  source 1..17: mol_type = other DNA
ccacactacctggtgca

SEQ ID NO: 13346 - DNA, 17 bp, synthetic construct
  misc_feature 1..17: note = Oligonucleotide
  source 1..17: mol_type = other DNA
tatccacactacctggt

SEQ ID NO: 13347 - DNA, 17 bp, synthetic construct
  misc_feature 1..17: note = Oligonucleotide
  source 1..17: mol_type = other DNA
gtatatccacactacct

SEQ ID NO: 13348 - DNA, 17 bp, synthetic construct
  misc_feature 1..17: note = Oligonucleotide
  source 1..17: mol_type = other DNA
caagtatatccacacta

SEQ ID NO: 13349 - DNA, 17 bp, synthetic construct
  misc_feature 1..17: note = Oligonucleotide
  source 1..17: mol_type = other DNA
agacaagtatatccaca

SEQ ID NO: 13350 - DNA, 17 bp, synthetic construct
  misc_feature 1..17: note = Oligonucleotide
  source 1..17: mol_type = other DNA
aacagacaagtatatcc

SEQ ID NO: 13351 - DNA, 17 bp, synthetic construct
  misc_feature 1..17: note = Oligonucleotide
  source 1..17: mol_type = other DNA
cagaacagacaagtata

SEQ ID NO: 13352 - DNA, 17 bp, synthetic construct
  misc_feature 1..17: note = Oligonucleotide
  source 1..17: mol_type = other DNA
ccccagaacagacaagt

SEQ ID NO: 13353 - DNA, 17 bp, synthetic construct
  misc_feature 1..17: note = Oligonucleotide
  source 1..17: mol_type = other DNA
cacccccagaacagaca

SEQ ID NO: 13354 - DNA, 17 bp, synthetic construct
  misc_feature 1..17: note = Oligonucleotide
  source 1..17: mol_type = other DNA
gtacacccccagaacag

SEQ ID NO: 13355 - DNA, 17 bp, synthetic construct
  misc_feature 1..17: note = Oligonucleotide
  source 1..17: mol_type = other DNA
cgtgtacacccccagaa

SEQ ID NO: 13356 - DNA, 17 bp, synthetic construct
  misc_feature 1..17: note = Oligonucleotide
  source 1..17: mol_type = other DNA
acacgtgtacaccccca

SEQ ID NO: 13357 - DNA, 17 bp, synthetic construct
  misc_feature 1..17: note = Oligonucleotide
  source 1..17: mol_type = other DNA
aacacacgtgtacaccc

SEQ ID NO: 13358 - DNA, 17 bp, synthetic construct
  misc_feature 1..17: note = Oligonucleotide
  source 1..17: mol_type = other DNA
gcaaacacacgtgtaca

SEQ ID NO: 13359 - DNA, 17 bp, synthetic construct
  misc_feature 1..17: note = Oligonucleotide
  source 1..17: mol_type = other DNA
tgtgcaaacacacgtgt

SEQ ID NO: 13360 - DNA, 17 bp, synthetic construct
  misc_feature 1..17: note = Oligonucleotide
  source 1..17: mol_type = other DNA
ctgtgtgcaaacacacg

SEQ ID NO: 13361 - DNA, 17 bp, synthetic construct
  misc_feature 1..17: note = Oligonucleotide
  source 1..17: mol_type = other DNA
catctgtgtgcaaacac

SEQ ID NO: 13362 - DNA, 17 bp, synthetic construct
  misc_feature 1..17: note = Oligonucleotide
  source 1..17: mol_type = other DNA
ggtcatctgtgtgcaaa

SEQ ID NO: 13363 - DNA, 17 bp, synthetic construct
  misc_feature 1..17: note = Oligonucleotide
  source 1..17: mol_type = other DNA
caaggtcatctgtgtgc

SEQ ID NO: 13364 - DNA, 17 bp, synthetic construct
  misc_feature 1..17: note = Oligonucleotide
  source 1..17: mol_type = other DNA
gtacaaggtcatctgtg

SEQ ID NO: 13365 - DNA, 17 bp, synthetic construct
  misc_feature 1..17: note = Oligonucleotide
  source 1..17: mol_type = other DNA
actgtacaaggtcatct

SEQ ID NO: 13366 - DNA, 17 bp, synthetic construct
  misc_feature 1..17: note = Oligonucleotide
  source 1..17: mol_type = other DNA
atcactgtacaaggtca

SEQ ID NO: 13367 - DNA, 17 bp, synthetic construct
  misc_feature 1..17: note = Oligonucleotide
  source 1..17: mol_type = other DNA
gcaatcactgtacaagg

SEQ ID NO: 13368 - DNA, 17 bp, synthetic construct
  misc_feature 1..17: note = Oligonucleotide
  source 1..17: mol_type = other DNA
catgcaatcactgtaca

SEQ ID NO: 13369 - DNA, 17 bp, synthetic construct
  misc_feature 1..17: note = Oligonucleotide
  source 1..17: mol_type = other DNA
acgcatgcaatcactgt

SEQ ID NO: 13370 - DNA, 17 bp, synthetic construct
  misc_feature 1..17: note = Oligonucleotide
  source 1..17: mol_type = other DNA
tgcacgcatgcaatcac

SEQ ID NO: 13371 - DNA, 17 bp, synthetic construct
  misc_feature 1..17: note = Oligonucleotide
  source 1..17: mol_type = other DNA
tggtgcacgcatgcaat

SEQ ID NO: 13372 - DNA, 17 bp, synthetic construct
  misc_feature 1..17: note = Oligonucleotide
  source 1..17: mol_type = other DNA
ccctggtgcacgcatgc

SEQ ID NO: 13373 - DNA, 17 bp, synthetic construct
  misc_feature 1..17: note = Oligonucleotide
  source 1..17: mol_type = other DNA
actccctggtgcacgca

SEQ ID NO: 13374 - DNA, 17 bp, synthetic construct
  misc_feature 1..17: note = Oligonucleotide
  source 1..17: mol_type = other DNA
cacactccctggtgcac

SEQ ID NO: 13375 - DNA, 17 bp, synthetic construct
  misc_feature 1..17: note = Oligonucleotide
  source 1..17: mol_type = other DNA
atccacactccctggtg

SEQ ID NO: 13376 - DNA, 17 bp, synthetic construct
  misc_feature 1..17: note = Oligonucleotide
  source 1..17: mol_type = other DNA
tatatccacactccctg

SEQ ID NO: 13377 - DNA, 17 bp, synthetic construct
  misc_feature 1..17: note = Oligonucleotide
  source 1..17: mol_type = other DNA
aagtatatccacactcc

SEQ ID NO: 13378 - DNA, 17 bp, synthetic construct
  misc_feature 1..17: note = Oligonucleotide
  source 1..17: mol_type = other DNA
ggcaagtatatccacac

SEQ ID NO: 13379 - DNA, 17 bp, synthetic construct
  misc_feature 1..17: note = Oligonucleotide
  source 1..17: mol_type = other DNA
acaggcaagtatatcca

SEQ ID NO: 13380 - DNA, 17 bp, synthetic construct
  misc_feature 1..17: note = Oligonucleotide
  source 1..17: mol_type = other DNA
agaacaggcaagtatat

SEQ ID NO: 13381 - DNA, 17 bp, synthetic construct
  misc_feature 1..17: note = Oligonucleotide
  source 1..17: mol_type = other DNA
cccagaacaggcaagta

SEQ ID NO: 13382 - DNA, 17 bp, synthetic construct
  misc_feature 1..17: note = Oligonucleotide
  source 1..17: mol_type = other DNA
acccccagaacaggcaa

SEQ ID NO: 13383 - DNA, 17 bp, synthetic construct
  misc_feature 1..17: note = Oligonucleotide
  source 1..17: mol_type = other DNA
tacacccccagaacagg

SEQ ID NO: 13384 - DNA, 17 bp, synthetic construct
  misc_feature 1..17: note = Oligonucleotide
  source 1..17: mol_type = other DNA
atgtacacccccagaac

SEQ ID NO: 13385 - DNA, 17 bp, synthetic construct
  misc_feature 1..17: note = Oligonucleotide
  source 1..17: mol_type = other DNA
cacatgtacacccccag

SEQ ID NO: 13386 - DNA, 17 bp, synthetic construct
  misc_feature 1..17: note = Oligonucleotide
  source 1..17: mol_type = other DNA
acacacatgtacacccc

SEQ ID NO: 13387 - DNA, 17 bp, synthetic construct
  misc_feature 1..17: note = Oligonucleotide
  source 1..17: mol_type = other DNA
tgcacacacatgtacac

SEQ ID NO: 13388 - DNA, 17 bp, synthetic construct
  misc_feature 1..17: note = Oligonucleotide
  source 1..17: mol_type = other DNA
gtgtgcacacacatgta

SEQ ID NO: 13389 - DNA, 17 bp, synthetic construct
  misc_feature 1..17: note = Oligonucleotide
  source 1..17: mol_type = other DNA
tctgtgtgcacacacat

SEQ ID NO: 13390 - DNA, 17 bp, synthetic construct
  misc_feature 1..17: note = Oligonucleotide
  source 1..17: mol_type = other DNA
tcatctgtgtgcacaca

SEQ ID NO: 13391 - DNA, 17 bp, synthetic construct
  misc_feature 1..17: note = Oligonucleotide
  source 1..17: mol_type = other DNA
gggtcatctgtgtgcac

SEQ ID NO: 13392 - DNA, 17 bp, synthetic construct
  misc_feature 1..17: note = Oligonucleotide
  source 1..17: mol_type = other DNA
acagggtcatctgtgtg

SEQ ID NO: 13393 - DNA, 17 bp, synthetic construct
  misc_feature 1..17: note = Oligonucleotide
  source 1..17: mol_type = other DNA
tgtacagggtcatctgt

SEQ ID NO: 13394 - DNA, 17 bp, synthetic construct
  misc_feature 1..17: note = Oligonucleotide
  source 1..17: mol_type = other DNA
cactgtacagggtcatc

SEQ ID NO: 13395 - DNA, 17 bp, synthetic construct
  misc_feature 1..17: note = Oligonucleotide
  source 1..17: mol_type = other DNA
aatcactgtacagggtc

SEQ ID NO: 13396 - DNA, 17 bp, synthetic construct
  misc_feature 1..17: note = Oligonucleotide
  source 1..17: mol_type = other DNA
tgcaatcactgtacagg

SEQ ID NO: 13397 - DNA, 17 bp, synthetic construct
  misc_feature 1..17: note = Oligonucleotide
  source 1..17: mol_type = other DNA
gcatgcaatcactgtac

SEQ ID NO: 13398 - DNA, 17 bp, synthetic construct
  misc_feature 1..17: note = Oligonucleotide
  source 1..17: mol_type = other DNA
cacgcatgcaatcactg

SEQ ID NO: 13399 - DNA, 17 bp, synthetic construct
  misc_feature 1..17: note = Oligonucleotide
  source 1..17: mol_type = other DNA
gtgcacgcatgcaatca

SEQ ID NO: 13400 - DNA, 17 bp, synthetic construct
  misc_feature 1..17: note = Oligonucleotide
  source 1..17: mol_type = other DNA
ctggtgcacgcatgcaa

SEQ ID NO: 13401 - DNA, 17 bp, synthetic construct
  misc_feature 1..17: note = Oligonucleotide
  source 1..17: mol_type = other DNA
tccctggtgcacgcatg

SEQ ID NO: 13402 - DNA, 17 bp, synthetic construct
  misc_feature 1..17: note = Oligonucleotide
  source 1..17: mol_type = other DNA
cactccctggtgcacgc

SEQ ID NO: 13403 - DNA, 17 bp, synthetic construct
  misc_feature 1..17: note = Oligonucleotide
  source 1..17: mol_type = other DNA
ccacactccctggtgca

SEQ ID NO: 13404 - DNA, 17 bp, synthetic construct
  misc_feature 1..17: note = Oligonucleotide
  source 1..17: mol_type = other DNA
tatccacactccctggt

SEQ ID NO: 13405 - DNA, 17 bp, synthetic construct
  misc_feature 1..17: note = Oligonucleotide
  source 1..17: mol_type = other DNA
gtatatccacactccct

SEQ ID NO: 13406 - DNA, 17 bp, synthetic construct
  misc_feature 1..17: note = Oligonucleotide
  source 1..17: mol_type = other DNA
caagtatatccacactc

SEQ ID NO: 13407 - DNA, 17 bp, synthetic construct
  misc_feature 1..17: note = Oligonucleotide
  source 1..17: mol_type = other DNA
aggcaagtatatccaca

SEQ ID NO: 13408 - DNA, 17 bp, synthetic construct
  misc_feature 1..17: note = Oligonucleotide
  source 1..17: mol_type = other DNA
aacaggcaagtatatcc

SEQ ID NO: 13409 - DNA, 17 bp, synthetic construct
  misc_feature 1..17: note = Oligonucleotide
  source 1..17: mol_type = other DNA
cagaacaggcaagtata

SEQ ID NO: 13410 - DNA, 17 bp, synthetic construct
  misc_feature 1..17: note = Oligonucleotide
  source 1..17: mol_type = other DNA
ccccagaacaggcaagt

SEQ ID NO: 13411 - DNA, 17 bp, synthetic construct
  misc_feature 1..17: note = Oligonucleotide
  source 1..17: mol_type = other DNA
cacccccagaacaggca

SEQ ID NO: 13412 - DNA, 17 bp, synthetic construct
  misc_feature 1..17: note = Oligonucleotide
  source 1..17: mol_type = other DNA
gtacacccccagaacag

SEQ ID NO: 13413 - DNA, 17 bp, synthetic construct
  misc_feature 1..17: note = Oligonucleotide
  source 1..17: mol_type = other DNA
cgtgtacacccccagaa

SEQ ID NO: 13414 - DNA, 17 bp, synthetic construct
  misc_feature 1..17: note = Oligonucleotide
  source 1..17: mol_type = other DNA
acacgtgtacaccccca

SEQ ID NO: 13415 - DNA, 17 bp, synthetic construct
  misc_feature 1..17: note = Oligonucleotide
  source 1..17: mol_type = other DNA
aacacacgtgtacaccc

SEQ ID NO: 13416 - DNA, 17 bp, synthetic construct
  misc_feature 1..17: note = Oligonucleotide
  source 1..17: mol_type = other DNA
gcaaacacacgtgtaca

SEQ ID NO: 13417 - DNA, 17 bp, synthetic construct
  misc_feature 1..17: note = Oligonucleotide
  source 1..17: mol_type = other DNA
tgtgcaaacacacgtgt

SEQ ID NO: 13418 - DNA, 17 bp, synthetic construct
  misc_feature 1..17: note = Oligonucleotide
  source 1..17: mol_type = other DNA
ctgtgtgcaaacacacg

SEQ ID NO: 13419 - DNA, 17 bp, synthetic construct
  misc_feature 1..17: note = Oligonucleotide
  source 1..17: mol_type = other DNA
cacctgtgtgcaaacac

SEQ ID NO: 13420 - DNA, 17 bp, synthetic construct
  misc_feature 1..17: note = Oligonucleotide
  source 1..17: mol_type = other DNA
ggtcacctgtgtgcaaa

SEQ ID NO: 13421 - DNA, 17 bp, synthetic construct
  misc_feature 1..17: note = Oligonucleotide
  source 1..17: mol_type = other DNA
cagggtcacctgtgtgc

SEQ ID NO: 13422 - DNA, 17 bp, synthetic construct
  misc_feature 1..17: note = Oligonucleotide
  source 1..17: mol_type = other DNA
gtacagggtcacctgtg

SEQ ID NO: 13423 - DNA, 17 bp, synthetic construct
  misc_feature 1..17: note = Oligonucleotide
  source 1..17: mol_type = other DNA
actgtacagggtcacct

SEQ ID NO: 13424 - DNA, 17 bp, synthetic construct
  misc_feature 1..17: note = Oligonucleotide
  source 1..17: mol_type = other DNA
atcactgtacagggtca

SEQ ID NO: 13425 - DNA, 17 bp, synthetic construct
  misc_feature 1..17: note = Oligonucleotide
  source 1..17: mol_type = other DNA
acaatcactgtacaggg

SEQ ID NO: 13426 - DNA, 17 bp, synthetic construct
  misc_feature 1..17: note = Oligonucleotide
  source 1..17: mol_type = other DNA
tgtacaatcactgtaca

SEQ ID NO: 13427 - DNA, 17 bp, synthetic construct
  misc_feature 1..17: note = Oligonucleotide
  source 1..17: mol_type = other DNA
acgtgtacaatcactgt

SEQ ID NO: 13428 - DNA, 17 bp, synthetic construct
  misc_feature 1..17: note = Oligonucleotide
  source 1..17: mol_type = other DNA
tacacgtgtacaatcac

SEQ ID NO: 13429 - DNA, 17 bp, synthetic construct
  misc_feature 1..17: note = Oligonucleotide
  source 1..17: mol_type = other DNA
tggtacacgtgtacaat

SEQ ID NO: 13430 - DNA, 17 bp, synthetic construct
  misc_feature 1..17: note = Oligonucleotide
  source 1..17: mol_type = other DNA
ccctggtacacgtgtac

SEQ ID NO: 13431 - DNA, 17 bp, synthetic construct
  misc_feature 1..17: note = Oligonucleotide
  source 1..17: mol_type = other DNA
actccctggtacacgtg

SEQ ID NO: 13432 - DNA, 17 bp, synthetic construct
  misc_feature 1..17: note = Oligonucleotide
  source 1..17: mol_type = other DNA
cacactccctggtacac

SEQ ID NO: 13433 - DNA, 17 bp, synthetic construct
  misc_feature 1..17: note = Oligonucleotide
  source 1..17: mol_type = other DNA
atccacactccctggta

SEQ ID NO: 13434 - DNA, 17 bp, synthetic construct
  misc_feature 1..17: note = Oligonucleotide
  source 1..17: mol_type = other DNA
tatatccacactccctg

SEQ ID NO: 13435 - DNA, 17 bp, synthetic construct
  misc_feature 1..17: note = Oligonucleotide
  source 1..17: mol_type = other DNA
aagtatatccacactcc

SEQ ID NO: 13436 - DNA, 17 bp, synthetic construct
  misc_feature 1..17: note = Oligonucleotide
  source 1..17: mol_type = other DNA
ggcaagtatatccacac

SEQ ID NO: 13437 - DNA, 17 bp, synthetic construct
  misc_feature 1..17: note = Oligonucleotide
  source 1..17: mol_type = other DNA
acaggcaagtatatcca

SEQ ID NO: 13438 - DNA, 17 bp, synthetic construct
  misc_feature 1..17: note = Oligonucleotide
  source 1..17: mol_type = other DNA
agaacaggcaagtatat

SEQ ID NO: 13439 - DNA, 17 bp, synthetic construct
  misc_feature 1..17: note = Oligonucleotide
  source 1..17: mol_type = other DNA
cccagaacaggcaagta

SEQ ID NO: 13440 - DNA, 17 bp, synthetic construct
  misc_feature 1..17: note = Oligonucleotide
  source 1..17: mol_type = other DNA
aaccccagaacaggcaa

SEQ ID NO: 13441 - DNA, 17 bp, synthetic construct
  misc_feature 1..17: note = Oligonucleotide
  source 1..17: mol_type = other DNA
tacaaccccagaacagg

SEQ ID NO: 13442 - DNA, 17 bp, synthetic construct
  misc_feature 1..17: note = Oligonucleotide
  source 1..17: mol_type = other DNA
acgtacaaccccagaac

SEQ ID NO: 13443 - DNA, 17 bp, synthetic construct
  misc_feature 1..17: note = Oligonucleotide
  source 1..17: mol_type = other DNA
cacacgtacaaccccag

SEQ ID NO: 13444 - DNA, 17 bp, synthetic construct
  misc_feature 1..17: note = Oligonucleotide
  source 1..17: mol_type = other DNA
acacacacgtacaaccc

SEQ ID NO: 13445 - DNA, 17 bp, synthetic construct
  misc_feature 1..17: note = Oligonucleotide
  source 1..17: mol_type = other DNA
cacacacacacgtacaa

SEQ ID NO: 13446 - DNA, 17 bp, synthetic construct
  misc_feature 1..17: note = Oligonucleotide
  source 1..17: mol_type = other DNA
gtgcacacacacacgta

SEQ ID NO: 13447 - DNA, 17 bp, synthetic construct
  misc_feature 1..17: note = Oligonucleotide
  source 1..17: mol_type = other DNA
tgtgtgcacacacacac

SEQ ID NO: 13448 - DNA, 17 bp, synthetic construct
  misc_feature 1..17: note = Oligonucleotide
  source 1..17: mol_type = other DNA
atctgtgtgcacacaca

SEQ ID NO: 13449 - DNA, 17 bp, synthetic construct
  misc_feature 1..17: note = Oligonucleotide
  source 1..17: mol_type = other DNA
gtcatctgtgtgcacac

SEQ ID NO: 13450 - DNA, 17 bp, synthetic construct
  misc_feature 1..17: note = Oligonucleotide
  source 1..17: mol_type = other DNA
agagtcatctgtgtgca

SEQ ID NO: 13451 - DNA, 17 bp, synthetic construct
  misc_feature 1..17: note = Oligonucleotide
  source 1..17: mol_type = other DNA
tacagagtcatctgtgt

SEQ ID NO: 13452 - DNA, 17 bp, synthetic construct
  misc_feature 1..17: note = Oligonucleotide
  source 1..17: mol_type = other DNA
ctgtacagagtcatctg

SEQ ID NO: 13453 - DNA, 17 bp, synthetic construct
  misc_feature 1..17: note = Oligonucleotide
  source 1..17: mol_type = other DNA
tcactgtacagagtcat

SEQ ID NO: 13454 - DNA, 17 bp, synthetic construct
  misc_feature 1..17: note = Oligonucleotide
  source 1..17: mol_type = other DNA
caatcactgtacagagt

SEQ ID NO: 13455 - DNA, 17 bp, synthetic construct
  misc_feature 1..17: note = Oligonucleotide
  source 1..17: mol_type = other DNA
atgcaatcactgtacag

SEQ ID NO: 13456 - DNA, 17 bp, synthetic construct
  misc_feature 1..17: note = Oligonucleotide
  source 1..17: mol_type = other DNA
cgcatgcaatcactgta

SEQ ID NO: 13457 - DNA, 17 bp, synthetic construct
  misc_feature 1..17: note = Oligonucleotide
  source 1..17: mol_type = other DNA
gcacgcatgcaatcact

SEQ ID NO: 13458 - DNA, 17 bp, synthetic construct
  misc_feature 1..17: note = Oligonucleotide
  source 1..17: mol_type = other DNA
ggtgcacgcatgcaatc

SEQ ID NO: 13459 - DNA, 17 bp, synthetic construct
  misc_feature 1..17: note = Oligonucleotide
  source 1..17: mol_type = other DNA
cctggtgcacgcatgca

SEQ ID NO: 13460 - DNA, 17 bp, synthetic construct
  misc_feature 1..17: note = Oligonucleotide
  source 1..17: mol_type = other DNA
ctacctggtgcacgcat

SEQ ID NO: 13461 - DNA, 17 bp, synthetic construct
  misc_feature 1..17: note = Oligonucleotide
  source 1..17: mol_type = other DNA
acactacctggtgcacg

SEQ ID NO: 13462 - DNA, 17 bp, synthetic construct
  misc_feature 1..17: note = Oligonucleotide
  source 1..17: mol_type = other DNA
tccacactacctggtgc

SEQ ID NO: 13463 - DNA, 17 bp, synthetic construct
  misc_feature 1..17: note = Oligonucleotide
  source 1..17: mol_type = other DNA
atatccacactacctgg

SEQ ID NO: 13464 - DNA, 17 bp, synthetic construct
  misc_feature 1..17: note = Oligonucleotide
  source 1..17: mol_type = other DNA
agtatatccacactacc

SEQ ID NO: 13465 - DNA, 17 bp, synthetic construct
  misc_feature 1..17: note = Oligonucleotide
  source 1..17: mol_type = other DNA
acaagtatatccacact

SEQ ID NO: 13466 - DNA, 17 bp, synthetic construct
  misc_feature 1..17: note = Oligonucleotide
  source 1..17: mol_type = other DNA
cagacaagtatatccac

SEQ ID NO: 13467 - DNA, 17 bp, synthetic construct
  misc_feature 1..17: note = Oligonucleotide
  source 1..17: mol_type = other DNA
gaacagacaagtatatc

SEQ ID NO: 13468 - DNA, 17 bp, synthetic construct
  misc_feature 1..17: note = Oligonucleotide
  source 1..17: mol_type = other DNA
ccagaacagacaagtat

SEQ ID NO: 13469 - DNA, 17 bp, synthetic construct
  misc_feature 1..17: note = Oligonucleotide
  source 1..17: mol_type = other DNA
cccccagaacagacaag

SEQ ID NO: 13470 - DNA, 17 bp, synthetic construct
  misc_feature 1..17: note = Oligonucleotide
  source 1..17: mol_type = other DNA
acacccccagaacagac

SEQ ID NO: 13471 - DNA, 17 bp, synthetic construct
  misc_feature 1..17: note = Oligonucleotide
  source 1..17: mol_type = other DNA
tgtacacccccagaaca

SEQ ID NO: 13472 - DNA, 17 bp, synthetic construct
  misc_feature 1..17: note = Oligonucleotide
  source 1..17: mol_type = other DNA
acgtgtacacccccaga

SEQ ID NO: 13473 - DNA, 17 bp, synthetic construct
  misc_feature 1..17: note = Oligonucleotide
  source 1..17: mol_type = other DNA
cacacgtgtacaccccc

SEQ ID NO: 13474 - DNA, 17 bp, synthetic construct
  misc_feature 1..17: note = Oligonucleotide
  source 1..17: mol_type = other DNA
aaacacacgtgtacacc

SEQ ID NO: 13475 - DNA, 17 bp, synthetic construct
  misc_feature 1..17: note = Oligonucleotide
  source 1..17: mol_type = other DNA
tgcaaacacacgtgtac

SEQ ID NO: 13476 - DNA, 17 bp, synthetic construct
  misc_feature 1..17: note = Oligonucleotide
  source 1..17: mol_type = other DNA
gtgtgcaaacacacgtg

SEQ ID NO: 13477 - DNA, 17 bp, synthetic construct
  misc_feature 1..17: note = Oligonucleotide
  source 1..17: mol_type = other DNA
tctgtgtgcaaacacac

SEQ ID NO: 13478 - DNA, 17 bp, synthetic construct
  misc_feature 1..17: note = Oligonucleotide
  source 1..17: mol_type = other DNA
tcatctgtgtgcaaaca

SEQ ID NO: 13479 - DNA, 17 bp, synthetic construct
  misc_feature 1..17: note = Oligonucleotide
  source 1..17: mol_type = other DNA
aggtcatctgtgtgcaa

SEQ ID NO: 13480 - DNA, 17 bp, synthetic construct
  misc_feature 1..17: note = Oligonucleotide
  source 1..17: mol_type = other DNA
acaaggtcatctgtgtg

SEQ ID NO: 13481 - DNA, 17 bp, synthetic construct
  misc_feature 1..17: note = Oligonucleotide
  source 1..17: mol_type = other DNA
tgtacaaggtcatctgt

SEQ ID NO: 13482 - DNA, 17 bp, synthetic construct
  misc_feature 1..17: note = Oligonucleotide
  source 1..17: mol_type = other DNA
cactgtacaaggtcatc

SEQ ID NO: 13483 - DNA, 17 bp, synthetic construct
  misc_feature 1..17: note = Oligonucleotide
  source 1..17: mol_type = other DNA
aatcactgtacaaggtc

SEQ ID NO: 13484 - DNA, 17 bp, synthetic construct
  misc_feature 1..17: note = Oligonucleotide
  source 1..17: mol_type = other DNA
tgcaatcactgtacaag

SEQ ID NO: 13485 - DNA, 17 bp, synthetic construct
  misc_feature 1..17: note = Oligonucleotide
  source 1..17: mol_type = other DNA
gcatgcaatcactgtac

SEQ ID NO: 13486 - DNA, 17 bp, synthetic construct
  misc_feature 1..17: note = Oligonucleotide
  source 1..17: mol_type = other DNA
cacgcatgcaatcactg

SEQ ID NO: 13487 - DNA, 17 bp, synthetic construct
  misc_feature 1..17: note = Oligonucleotide
  source 1..17: mol_type = other DNA
gtgcacgcatgcaatca

SEQ ID NO: 13488 - DNA, 17 bp, synthetic construct
  misc_feature 1..17: note = Oligonucleotide
  source 1..17: mol_type = other DNA
ctggtgcacgcatgcaa

SEQ ID NO: 13489 - DNA, 17 bp, synthetic construct
  misc_feature 1..17: note = Oligonucleotide
  source 1..17: mol_type = other DNA
tccctggtgcacgcatg

SEQ ID NO: 13490 - DNA, 17 bp, synthetic construct
  misc_feature 1..17: note = Oligonucleotide
  source 1..17: mol_type = other DNA
cactccctggtgcacgc

SEQ ID NO: 13491 - DNA, 17 bp, synthetic construct
  misc_feature 1..17: note = Oligonucleotide
  source 1..17: mol_type = other DNA
ccacactccctggtgca

SEQ ID NO: 13492 - DNA, 17 bp, synthetic construct
  misc_feature 1..17: note = Oligonucleotide
  source 1..17: mol_type = other DNA
tatccacactccctggt

SEQ ID NO: 13493 - DNA, 17 bp, synthetic construct
  misc_feature 1..17: note = Oligonucleotide
  source 1..17: mol_type = other DNA
gtatatccacactccct

SEQ ID NO: 13494 - DNA, 17 bp, synthetic construct
  misc_feature 1..17: note = Oligonucleotide
  source 1..17: mol_type = other DNA
caagtatatccacactc

SEQ ID NO: 13495 - DNA, 17 bp, synthetic construct
  misc_feature 1..17: note = Oligonucleotide
  source 1..17: mol_type = other DNA
aggcaagtatatccaca

SEQ ID NO: 13496 - DNA, 17 bp, synthetic construct
  misc_feature 1..17: note = Oligonucleotide
  source 1..17: mol_type = other DNA
aacaggcaagtatatcc

SEQ ID NO: 13497 - DNA, 17 bp, synthetic construct
  misc_feature 1..17: note = Oligonucleotide
  source 1..17: mol_type = other DNA
cagaacaggcaagtata

SEQ ID NO: 13498 - DNA, 17 bp, synthetic construct
  misc_feature 1..17: note = Oligonucleotide
  source 1..17: mol_type = other DNA
ccccagaacaggcaagt

SEQ ID NO: 13499 - DNA, 17 bp, synthetic construct
  misc_feature 1..17: note = Oligonucleotide
  source 1..17: mol_type = other DNA
cacccccagaacaggca

SEQ ID NO: 13500 - DNA, 17 bp, synthetic construct
  misc_feature 1..17: note = Oligonucleotide
  source 1..17: mol_type = other DNA
gtacacccccagaacag

SEQ ID NO: 13501 - DNA, 17 bp, synthetic construct
  misc_feature 1..17: note = Oligonucleotide
  source 1..17: mol_type = other DNA
catgtacacccccagaa

SEQ ID NO: 13502 - DNA, 17 bp, synthetic construct
  misc_feature 1..17: note = Oligonucleotide
  source 1..17: mol_type = other DNA
acacatgtacaccccca

SEQ ID NO: 13503 - DNA, 17 bp, synthetic construct
  misc_feature 1..17: note = Oligonucleotide
  source 1..17: mol_type = other DNA
cacacacatgtacaccc

SEQ ID NO: 13504 - DNA, 17 bp, synthetic construct
  misc_feature 1..17: note = Oligonucleotide
  source 1..17: mol_type = other DNA
gtgcacacacatgtaca

SEQ ID NO: 13505 - DNA, 17 bp, synthetic construct
  misc_feature 1..17: note = Oligonucleotide
  source 1..17: mol_type = other DNA
tgtgtgcacacacatgt

SEQ ID NO: 13506 - DNA, 17 bp, synthetic construct
  misc_feature 1..17: note = Oligonucleotide
  source 1..17: mol_type = other DNA
atctgtgtgcacacaca

SEQ ID NO: 13507 - DNA, 17 bp, synthetic construct
  misc_feature 1..17: note = Oligonucleotide
  source 1..17: mol_type = other DNA
gtcatctgtgtgcacac

SEQ ID NO: 13508 - DNA, 17 bp, synthetic construct
  misc_feature 1..17: note = Oligonucleotide
  source 1..17: mol_type = other DNA
agggtcatctgtgtgca

SEQ ID NO: 13509 - DNA, 17 bp, synthetic construct
  misc_feature 1..17: note = Oligonucleotide
  source 1..17: mol_type = other DNA
tacagggtcatctgtgt

SEQ ID NO: 13510 - DNA, 17 bp, synthetic construct
  misc_feature 1..17: note = Oligonucleotide
  source 1..17: mol_type = other DNA
gtgtacagggtcatctg

SEQ ID NO: 13511 - DNA, 17 bp, synthetic construct
  misc_feature 1..17: note = Oligonucleotide
  source 1..17: mol_type = other DNA
tcagtgtacagggtcat

SEQ ID NO: 13512 - DNA, 17 bp, synthetic construct
  misc_feature 1..17: note = Oligonucleotide
  source 1..17: mol_type = other DNA
caatcagtgtacagggt

SEQ ID NO: 13513 - DNA, 17 bp, synthetic construct
  misc_feature 1..17: note = Oligonucleotide
  source 1..17: mol_type = other DNA
atgcaatcagtgtacag

SEQ ID NO: 13514 - DNA, 17 bp, synthetic construct
  misc_feature 1..17: note = Oligonucleotide
  source 1..17: mol_type = other DNA
cgcatgcaatcagtgta

SEQ ID NO: 13515 - DNA, 17 bp, synthetic construct
  misc_feature 1..17: note = Oligonucleotide
  source 1..17: mol_type = other DNA
gcacgcatgcaatcagt

SEQ ID NO: 13516 - DNA, 17 bp, synthetic construct
  misc_feature 1..17: note = Oligonucleotide
  source 1..17: mol_type = other DNA
ggtgcacgcatgcaatc

SEQ ID NO: 13517 - DNA, 17 bp, synthetic construct
  misc_feature 1..17: note = Oligonucleotide
  source 1..17: mol_type = other DNA
cctggtgcacgcatgca

SEQ ID NO: 13518 - DNA, 17 bp, synthetic construct
  misc_feature 1..17: note = Oligonucleotide
  source 1..17: mol_type = other DNA
ctccctggtgcacgcat

SEQ ID NO: 13519 - DNA, 17 bp, synthetic construct
  misc_feature 1..17: note = Oligonucleotide
  source 1..17: mol_type = other DNA
acactccctggtgcacg

SEQ ID NO: 13520 - DNA, 17 bp, synthetic construct
  misc_feature 1..17: note = Oligonucleotide
  source 1..17: mol_type = other DNA
tccacactccctggtgc

SEQ ID NO: 13521 - DNA, 17 bp, synthetic construct
  misc_feature 1..17: note = Oligonucleotide
  source 1..17: mol_type = other DNA
atatccacactccctgg

SEQ ID NO: 13522 - DNA, 17 bp, synthetic construct
  misc_feature 1..17: note = Oligonucleotide
  source 1..17: mol_type = other DNA
agtatatccacactccc

SEQ ID NO: 13523 - DNA, 17 bp, synthetic construct
  misc_feature 1..17: note = Oligonucleotide
  source 1..17: mol_type = other DNA
gcaagtatatccacact

SEQ ID NO: 13524 - DNA, 17 bp, synthetic construct
  misc_feature 1..17: note = Oligonucleotide
  source 1..17: mol_type = other DNA
caggcaagtatatccac

SEQ ID NO: 13525 - DNA, 17 bp, synthetic construct
  misc_feature 1..17: note = Oligonucleotide
  source 1..17: mol_type = other DNA
gaacaggcaagtatatc

SEQ ID NO: 13526 - DNA, 17 bp, synthetic construct
  misc_feature 1..17: note = Oligonucleotide
  source 1..17: mol_type = other DNA
ccagaacaggcaagtat

SEQ ID NO: 13527 - DNA, 17 bp, synthetic construct
  misc_feature 1..17: note = Oligonucleotide
  source 1..17: mol_type = other DNA
cccccagaacaggcaag

SEQ ID NO: 13528 - DNA, 17 bp, synthetic construct
  misc_feature 1..17: note = Oligonucleotide
  source 1..17: mol_type = other DNA
acacccccagaacaggc

SEQ ID NO: 13529 - DNA, 17 bp, synthetic construct
  misc_feature 1..17: note = Oligonucleotide
  source 1..17: mol_type = other DNA
tgtacacccccagaaca

SEQ ID NO: 13530 - DNA, 17 bp, synthetic construct
  misc_feature 1..17: note = Oligonucleotide
  source 1..17: mol_type = other DNA
acatgtacacccccaga

SEQ ID NO: 13531 - DNA, 17 bp, synthetic construct
  misc_feature 1..17: note = Oligonucleotide
  source 1..17: mol_type = other DNA
cacacatgtacaccccc

SEQ ID NO: 13532 - DNA, 17 bp, synthetic construct
  misc_feature 1..17: note = Oligonucleotide
  source 1..17: mol_type = other DNA
gcacacacatgtacacc

SEQ ID NO: 13533 - DNA, 17 bp, synthetic construct
  misc_feature 1..17: note = Oligonucleotide
  source 1..17: mol_type = other DNA
tgtgcacacacatgtac

SEQ ID NO: 13534 - DNA, 17 bp, synthetic construct
  misc_feature 1..17: note = Oligonucleotide
  source 1..17: mol_type = other DNA
ctgtgtgcacacacatg

SEQ ID NO: 13535 - DNA, 17 bp, synthetic construct
  misc_feature 1..17: note = Oligonucleotide
  source 1..17: mol_type = other DNA
catctgtgtgcacacac

SEQ ID NO: 13536 - DNA, 17 bp, synthetic construct
  misc_feature 1..17: note = Oligonucleotide
  source 1..17: mol_type = other DNA
ggtcatctgtgtgcaca

SEQ ID NO: 13537 - DNA, 17 bp, synthetic construct
  misc_feature 1..17: note = Oligonucleotide
  source 1..17: mol_type = other DNA
cagggtcatctgtgtgc

SEQ ID NO: 13538 - DNA, 17 bp, synthetic construct
  misc_feature 1..17: note = Oligonucleotide
  source 1..17: mol_type = other DNA
gtacagggtcatctgtg

SEQ ID NO: 13539 - DNA, 17 bp, synthetic construct
  misc_feature 1..17: note = Oligonucleotide
  source 1..17: mol_type = other DNA
actgtacagggtcatct

SEQ ID NO: 13540 - DNA, 17 bp, synthetic construct
  misc_feature 1..17: note = Oligonucleotide
  source 1..17: mol_type = other DNA
atcactgtacagggtca

SEQ ID NO: 13541 - DNA, 17 bp, synthetic construct
  misc_feature 1..17: note = Oligonucleotide
  source 1..17: mol_type = other DNA
gcaatcactgtacaggg

SEQ ID NO: 13542 - DNA, 17 bp, synthetic construct
  misc_feature 1..17: note = Oligonucleotide
  source 1..17: mol_type = other DNA
catgcaatcactgtaca

SEQ ID NO: 13543 - DNA, 17 bp, synthetic construct
  misc_feature 1..17: note = Oligonucleotide
  source 1..17: mol_type = other DNA
acgcatgcaatcactgt

SEQ ID NO: 13544 - DNA, 17 bp, synthetic construct
  misc_feature 1..17: note = Oligonucleotide
  source 1..17: mol_type = other DNA
tgcacgcatgcaatcac

SEQ ID NO: 13545 - DNA, 17 bp, synthetic construct
  misc_feature 1..17: note = Oligonucleotide
  source 1..17: mol_type = other DNA
tggtgcacgcatgcaat

SEQ ID NO: 13546 - DNA, 17 bp, synthetic construct
  misc_feature 1..17: note = Oligonucleotide
  source 1..17: mol_type = other DNA
ccctggtgcacgcatgc

SEQ ID NO: 13547 - DNA, 17 bp, synthetic construct
  misc_feature 1..17: note = Oligonucleotide
  source 1..17: mol_type = other DNA
actccctggtgcacgca

SEQ ID NO: 13548 - DNA, 17 bp, synthetic construct
  misc_feature 1..17: note = Oligonucleotide
  source 1..17: mol_type = other DNA
cacactccctggtgcac

SEQ ID NO: 13549 - DNA, 17 bp, synthetic construct
  misc_feature 1..17: note = Oligonucleotide
  source 1..17: mol_type = other DNA
atccacactccctggtg

SEQ ID NO: 13550 - DNA, 17 bp, synthetic construct
  misc_feature 1..17: note = Oligonucleotide
  source 1..17: mol_type = other DNA
tatatccacactccctg

SEQ ID NO: 13551 - DNA, 17 bp, synthetic construct
  misc_feature 1..17: note = Oligonucleotide
  source 1..17: mol_type = other DNA
aagtatatccacactcc

SEQ ID NO: 13552 - DNA, 17 bp, synthetic construct
  misc_feature 1..17: note = Oligonucleotide
  source 1..17: mol_type = other DNA
ggcaagtatatccacac

SEQ ID NO: 13553 - DNA, 17 bp, synthetic construct
  misc_feature 1..17: note = Oligonucleotide
  source 1..17: mol_type = other DNA
acaggcaagtatatcca

SEQ ID NO: 13554 - DNA, 17 bp, synthetic construct
  misc_feature 1..17: note = Oligonucleotide
  source 1..17: mol_type = other DNA
agaacaggcaagtatat

SEQ ID NO: 13555 - DNA, 17 bp, synthetic construct
  misc_feature 1..17: note = Oligonucleotide
  source 1..17: mol_type = other DNA
cccagaacaggcaagta

SEQ ID NO: 13556 - DNA, 17 bp, synthetic construct
  misc_feature 1..17: note = Oligonucleotide
  source 1..17: mol_type = other DNA
acccccagaacaggcaa

SEQ ID NO: 13557 - DNA, 17 bp, synthetic construct
  misc_feature 1..17: note = Oligonucleotide
  source 1..17: mol_type = other DNA
tacacccccagaacagg

SEQ ID NO: 13558 - DNA, 17 bp, synthetic construct
  misc_feature 1..17: note = Oligonucleotide
  source 1..17: mol_type = other DNA
atgtacacccccagaac

SEQ ID NO: 13559 - DNA, 17 bp, synthetic construct
  misc_feature 1..17: note = Oligonucleotide
  source 1..17: mol_type = other DNA
cacatgtacacccccag

SEQ ID NO: 13560 - DNA, 17 bp, synthetic construct
  misc_feature 1..17: note = Oligonucleotide
  source 1..17: mol_type = other DNA
acacacatgtacacccc

SEQ ID NO: 13561 - DNA, 17 bp, synthetic construct
  misc_feature 1..17: note = Oligonucleotide
  source 1..17: mol_type = other DNA
tgcacacacatgtacac

SEQ ID NO: 13562 - DNA, 17 bp, synthetic construct
  misc_feature 1..17: note = Oligonucleotide
  source 1..17: mol_type = other DNA
gtgtgcacacacatgta

SEQ ID NO: 13563 - DNA, 17 bp, synthetic construct
  misc_feature 1..17: note = Oligonucleotide
  source 1..17: mol_type = other DNA
tctgtgtgcacacacat

SEQ ID NO: 13564 - DNA, 17 bp, synthetic construct
  misc_feature 1..17: note = Oligonucleotide
  source 1..17: mol_type = other DNA
tcatctgtgtgcacaca

SEQ ID NO: 13565 - DNA, 17 bp, synthetic construct
  misc_feature 1..17: note = Oligonucleotide
  source 1..17: mol_type = other DNA
gggtcatctgtgtgcac

SEQ ID NO: 13566 - DNA, 17 bp, synthetic construct
  misc_feature 1..17: note = Oligonucleotide
  source 1..17: mol_type = other DNA
acagggtcatctgtgtg

SEQ ID NO: 13567 - DNA, 17 bp, synthetic construct
  misc_feature 1..17: note = Oligonucleotide
  source 1..17: mol_type = other DNA
tgtacagggtcatctgt

SEQ ID NO: 13568 - DNA, 17 bp, synthetic construct
  misc_feature 1..17: note = Oligonucleotide
  source 1..17: mol_type = other DNA
cagtgtacagggtcatc

SEQ ID NO: 13569 - DNA, 17 bp, synthetic construct
  misc_feature 1..17: note = Oligonucleotide
  source 1..17: mol_type = other DNA
aatcagtgtacagggtc

SEQ ID NO: 13570 - DNA, 17 bp, synthetic construct
  misc_feature 1..17: note = Oligonucleotide
  source 1..17: mol_type = other DNA
tgcaatcagtgtacagg

SEQ ID NO: 13571 - DNA, 17 bp, synthetic construct
  misc_feature 1..17: note = Oligonucleotide
  source 1..17: mol_type = other DNA
gcatgcaatcagtgtac

SEQ ID NO: 13572 - DNA, 17 bp, synthetic construct
  misc_feature 1..17: note = Oligonucleotide
  source 1..17: mol_type = other DNA
cacgcatgcaatcagtg

SEQ ID NO: 13573 - DNA, 17 bp, synthetic construct
  misc_feature 1..17: note = Oligonucleotide
  source 1..17: mol_type = other DNA
gtgcacgcatgcaatca

SEQ ID NO: 13574 - DNA, 17 bp, synthetic construct
  misc_feature 1..17: note = Oligonucleotide
  source 1..17: mol_type = other DNA
ctggtgcacgcatgcaa

SEQ ID NO: 13575 - DNA, 17 bp, synthetic construct
  misc_feature 1..17: note = Oligonucleotide
  source 1..17: mol_type = other DNA
tccctggtgcacgcatg

SEQ ID NO: 13576 - DNA, 17 bp, synthetic construct
  misc_feature 1..17: note = Oligonucleotide
  source 1..17: mol_type = other DNA
cactccctggtgcacgc

SEQ ID NO: 13577 - DNA, 17 bp, synthetic construct
  misc_feature 1..17: note = Oligonucleotide
  source 1..17: mol_type = other DNA
ccacactccctggtgca

SEQ ID NO: 13578 - DNA, 17 bp, synthetic construct
  misc_feature 1..17: note = Oligonucleotide
  source 1..17: mol_type = other DNA
tatccacactccctggt

SEQ ID NO: 13579 - DNA, 17 bp, synthetic construct
  misc_feature 1..17: note = Oligonucleotide
  source 1..17: mol_type = other DNA
gtatatccacactccct

SEQ ID NO: 13580 - DNA, 17 bp, synthetic construct
  misc_feature 1..17: note = Oligonucleotide
  source 1..17: mol_type = other DNA
caagtatatccacactc

SEQ ID NO: 13581 - DNA, 17 bp, synthetic construct
  misc_feature 1..17: note = Oligonucleotide
  source 1..17: mol_type = other DNA
aggcaagtatatccaca

SEQ ID NO: 13582 - DNA, 17 bp, synthetic construct
  misc_feature 1..17: note = Oligonucleotide
  source 1..17: mol_type = other DNA
aacaggcaagtatatcc

SEQ ID NO: 13583 - DNA, 17 bp, synthetic construct
  misc_feature 1..17: note = Oligonucleotide
  source 1..17: mol_type = other DNA
cagaacaggcaagtata

SEQ ID NO: 13584 - DNA, 17 bp, synthetic construct
  misc_feature 1..17: note = Oligonucleotide
  source 1..17: mol_type = other DNA
caccagaacaggcaagt

SEQ ID NO: 13585 - DNA, 17 bp, synthetic construct
  misc_feature 1..17: note = Oligonucleotide
  source 1..17: mol_type = other DNA
caacaccagaacaggca

SEQ ID NO: 13586 - DNA, 17 bp, synthetic construct
  misc_feature 1..17: note = Oligonucleotide
  source 1..17: mol_type = other DNA
gtacaacaccagaacag

SEQ ID NO: 13587 - DNA, 17 bp, synthetic construct
  misc_feature 1..17: note = Oligonucleotide
  source 1..17: mol_type = other DNA
catgtacaacaccagaa

SEQ ID NO: 13588 - DNA, 17 bp, synthetic construct
  misc_feature 1..17: note = Oligonucleotide
  source 1..17: mol_type = other DNA
acacatgtacaacacca

SEQ ID NO: 13589 - DNA, 17 bp, synthetic construct
  misc_feature 1..17: note = Oligonucleotide
  source 1..17: mol_type = other DNA
cacacacatgtacaaca

SEQ ID NO: 13590 - DNA, 17 bp, synthetic construct
  misc_feature 1..17: note = Oligonucleotide
  source 1..17: mol_type = other DNA
acacacacacatgtaca

SEQ ID NO: 13591 - DNA, 17 bp, synthetic construct
  misc_feature 1..17: note = Oligonucleotide
  source 1..17: mol_type = other DNA
tgcacacacacacatgt

SEQ ID NO: 13592 - DNA, 17 bp, synthetic construct
  misc_feature 1..17: note = Oligonucleotide
  source 1..17: mol_type = other DNA
gtgtgcacacacacaca

SEQ ID NO: 13593 - DNA, 17 bp, synthetic construct
  misc_feature 1..17: note = Oligonucleotide
  source 1..17: mol_type = other DNA
tctgtgtgcacacacac

SEQ ID NO: 13594 - DNA, 17 bp, synthetic construct
  misc_feature 1..17: note = Oligonucleotide
  source 1..17: mol_type = other DNA
tcatctgtgtgcacaca

SEQ ID NO: 13595 - DNA, 17 bp, synthetic construct
  misc_feature 1..17: note = Oligonucleotide
  source 1..17: mol_type = other DNA
gagtcatctgtgtgcac

SEQ ID NO: 13596 - DNA, 17 bp, synthetic construct
  misc_feature 1..17: note = Oligonucleotide
  source 1..17: mol_type = other DNA
gtagagtcatctgtgtg

SEQ ID NO: 13597 - DNA, 17 bp, synthetic construct
  misc_feature 1..17: note = Oligonucleotide
  source 1..17: mol_type = other DNA
actgtagagtcatctgt

SEQ ID NO: 13598 - DNA, 17 bp, synthetic construct
  misc_feature 1..17: note = Oligonucleotide
  source 1..17: mol_type = other DNA
atcactgtagagtcatc

SEQ ID NO: 13599 - DNA, 17 bp, synthetic construct
  misc_feature 1..17: note = Oligonucleotide
  source 1..17: mol_type = other DNA
acaatcactgtagagtc

SEQ ID NO: 13600 - DNA, 17 bp, synthetic construct
  misc_feature 1..17: note = Oligonucleotide
  source 1..17: mol_type = other DNA
catacaatcactgtaga

SEQ ID NO: 13601 - DNA, 17 bp, synthetic construct
  misc_feature 1..17: note = Oligonucleotide
  source 1..17: mol_type = other DNA
acgcatacaatcactgt

SEQ ID NO: 13602 - DNA, 17 bp, synthetic construct
  misc_feature 1..17: note = Oligonucleotide
  source 1..17: mol_type = other DNA
tgcacgcatacaatcac

SEQ ID NO: 13603 - DNA, 17 bp, synthetic construct
  misc_feature 1..17: note = Oligonucleotide
  source 1..17: mol_type = other DNA
tgctgcacgcatacaat

SEQ ID NO: 13604 - DNA, 17 bp, synthetic construct
  misc_feature 1..17: note = Oligonucleotide
  source 1..17: mol_type = other DNA
acctgctgcacgcatac

SEQ ID NO: 13605 - DNA, 17 bp, synthetic construct
  misc_feature 1..17: note = Oligonucleotide
  source 1..17: mol_type = other DNA
actacctgctgcacgca

SEQ ID NO: 13606 - DNA, 17 bp, synthetic construct
  misc_feature 1..17: note = Oligonucleotide
  source 1..17: mol_type = other DNA
cacactacctgctgcac

SEQ ID NO: 13607 - DNA, 17 bp, synthetic construct
  misc_feature 1..17: note = Oligonucleotide
  source 1..17: mol_type = other DNA
atccacactacctgctg

SEQ ID NO: 13608 - DNA, 17 bp, synthetic construct
  misc_feature 1..17: note = Oligonucleotide
  source 1..17: mol_type = other DNA
tatatccacactacctg

SEQ ID NO: 13609 - DNA, 17 bp, synthetic construct
  misc_feature 1..17: note = Oligonucleotide
  source 1..17: mol_type = other DNA
aagtatatccacactac

SEQ ID NO: 13610 - DNA, 17 bp, synthetic construct
  misc_feature 1..17: note = Oligonucleotide
  source 1..17: mol_type = other DNA
ggcaagtatatccacac

SEQ ID NO: 13611 - DNA, 17 bp, synthetic construct
  misc_feature 1..17: note = Oligonucleotide
  source 1..17: mol_type = other DNA
acaggcaagtatatcca

SEQ ID NO: 13612 - DNA, 17 bp, synthetic construct
  misc_feature 1..17: note = Oligonucleotide
  source 1..17: mol_type = other DNA
agaacaggcaagtatat

SEQ ID NO: 13613 - DNA, 17 bp, synthetic construct
  misc_feature 1..17: note = Oligonucleotide
  source 1..17: mol_type = other DNA
cccagaacaggcaagta

SEQ ID NO: 13614 - DNA, 17 bp, synthetic construct
  misc_feature 1..17: note = Oligonucleotide
  source 1..17: mol_type = other DNA
acccccagaacaggcaa

SEQ ID NO: 13615 - DNA, 17 bp, synthetic construct
  misc_feature 1..17: note = Oligonucleotide
  source 1..17: mol_type = other DNA
tacacccccagaacagg

SEQ ID NO: 13616 - DNA, 17 bp, synthetic construct
  misc_feature 1..17: note = Oligonucleotide
  source 1..17: mol_type = other DNA
gtgtacacccccagaac

SEQ ID NO: 13617 - DNA, 17 bp, synthetic construct
  misc_feature 1..17: note = Oligonucleotide
  source 1..17: mol_type = other DNA
cacgtgtacacccccag

SEQ ID NO: 13618 - DNA, 17 bp, synthetic construct
  misc_feature 1..17: note = Oligonucleotide
  source 1..17: mol_type = other DNA
acacacgtgtacacccc

SEQ ID NO: 13619 - DNA, 17 bp, synthetic construct
  misc_feature 1..17: note = Oligonucleotide
  source 1..17: mol_type = other DNA
caaacacacgtgtacac

SEQ ID NO: 13620 - DNA, 17 bp, synthetic construct
  misc_feature 1..17: note = Oligonucleotide
  source 1..17: mol_type = other DNA
gtgcaaacacacgtgta

SEQ ID NO: 13621 - DNA, 17 bp, synthetic construct
  misc_feature 1..17: note = Oligonucleotide
  source 1..17: mol_type = other DNA
tgtgtgcaaacacacgt

SEQ ID NO: 13622 - DNA, 17 bp, synthetic construct
  misc_feature 1..17: note = Oligonucleotide
  source 1..17: mol_type = other DNA
atctgtgtgcaaacaca

SEQ ID NO: 13623 - DNA, 17 bp, synthetic construct
  misc_feature 1..17: note = Oligonucleotide
  source 1..17: mol_type = other DNA
gtcatctgtgtgcaaac

SEQ ID NO: 13624 - DNA, 17 bp, synthetic construct
  misc_feature 1..17: note = Oligonucleotide
  source 1..17: mol_type = other DNA
agggtcatctgtgtgca

SEQ ID NO: 13625 - DNA, 17 bp, synthetic construct
  misc_feature 1..17: note = Oligonucleotide
  source 1..17: mol_type = other DNA
tacagggtcatctgtgt

SEQ ID NO: 13626 - DNA, 17 bp, synthetic construct
  misc_feature 1..17: note = Oligonucleotide
  source 1..17: mol_type = other DNA
ctgtacagggtcatctg

SEQ ID NO: 13627 - DNA, 17 bp, synthetic construct
  misc_feature 1..17: note = Oligonucleotide
  source 1..17: mol_type = other DNA
tcactgtacagggtcat

SEQ ID NO: 13628 - DNA, 17 bp, synthetic construct
  misc_feature 1..17: note = Oligonucleotide
  source 1..17: mol_type = other DNA
caatcactgtacagggt

SEQ ID NO: 13629 - DNA, 17 bp, synthetic construct
  misc_feature 1..17: note = Oligonucleotide
  source 1..17: mol_type = other DNA
atacaatcactgtacag

SEQ ID NO: 13630 - DNA, 17 bp, synthetic construct
  misc_feature 1..17: note = Oligonucleotide
  source 1..17: mol_type = other DNA
cgcatacaatcactgta

SEQ ID NO: 13631 - DNA, 17 bp, synthetic construct
  misc_feature 1..17: note = Oligonucleotide
  source 1..17: mol_type = other DNA
acacgcatacaatcact

SEQ ID NO: 13632 - DNA, 17 bp, synthetic construct
  misc_feature 1..17: note = Oligonucleotide
  source 1..17: mol_type = other DNA
ggtacacgcatacaatc

SEQ ID NO: 13633 - DNA, 17 bp, synthetic construct
  misc_feature 1..17: note = Oligonucleotide
  source 1..17: mol_type = other DNA
cctggtacacgcataca

SEQ ID NO: 13634 - DNA, 17 bp, synthetic construct
  misc_feature 1..17: note = Oligonucleotide
  source 1..17: mol_type = other DNA
ctccctggtacacgcat

SEQ ID NO: 13635 - DNA, 17 bp, synthetic construct
  misc_feature 1..17: note = Oligonucleotide
  source 1..17: mol_type = other DNA
acactccctggtacacg

SEQ ID NO: 13636 - DNA, 17 bp, synthetic construct
  misc_feature 1..17: note = Oligonucleotide
  source 1..17: mol_type = other DNA
tccacactccctggtac

SEQ ID NO: 13637 - DNA, 17 bp, synthetic construct
  misc_feature 1..17: note = Oligonucleotide
  source 1..17: mol_type = other DNA
atatccacactccctgg

SEQ ID NO: 13638 - DNA, 17 bp, synthetic construct
  misc_feature 1..17: note = Oligonucleotide
  source 1..17: mol_type = other DNA
agtatatccacactccc

SEQ ID NO: 13639 - DNA, 17 bp, synthetic construct
  misc_feature 1..17: note = Oligonucleotide
  source 1..17: mol_type = other DNA
gcaagtatatccacact

SEQ ID NO: 13640 - DNA, 17 bp, synthetic construct
  misc_feature 1..17: note = Oligonucleotide
  source 1..17: mol_type = other DNA
caggcaagtatatccac

SEQ ID NO: 13641 - DNA, 17 bp, synthetic construct
  misc_feature 1..17: note = Oligonucleotide
  source 1..17: mol_type = other DNA
gaacaggcaagtatatc

SEQ ID NO: 13642 - DNA, 17 bp, synthetic construct
  misc_feature 1..17: note = Oligonucleotide
  source 1..17: mol_type = other DNA
ccagaacaggcaagtat

SEQ ID NO: 13643 - DNA, 17 bp, synthetic construct
  misc_feature 1..17: note = Oligonucleotide
  source 1..17: mol_type = other DNA
cccccagaacaggcaag

SEQ ID NO: 13644 - DNA, 17 bp, synthetic construct
  misc_feature 1..17: note = Oligonucleotide
  source 1..17: mol_type = other DNA
acacccccagaacaggc

SEQ ID NO: 13645 - DNA, 17 bp, synthetic construct
  misc_feature 1..17: note = Oligonucleotide
  source 1..17: mol_type = other DNA
tgtacacccccagaaca

SEQ ID NO: 13646 - DNA, 17 bp, synthetic construct
  misc_feature 1..17: note = Oligonucleotide
  source 1..17: mol_type = other DNA
acatgtacacccccaga

SEQ ID NO: 13647 - DNA, 17 bp, synthetic construct
  misc_feature 1..17: note = Oligonucleotide
  source 1..17: mol_type = other DNA
cacacatgtacaccccc

SEQ ID NO: 13648 - DNA, 17 bp, synthetic construct
  misc_feature 1..17: note = Oligonucleotide
  source 1..17: mol_type = other DNA
gcacacacatgtacacc

SEQ ID NO: 13649 - DNA, 17 bp, synthetic construct
  misc_feature 1..17: note = Oligonucleotide
  source 1..17: mol_type = other DNA
tgtgcacacacatgtac

SEQ ID NO: 13650 - DNA, 17 bp, synthetic construct
  misc_feature 1..17: note = Oligonucleotide
  source 1..17: mol_type = other DNA
ctgtgtgcacacacatg

SEQ ID NO: 13651 - DNA, 17 bp, synthetic construct
  misc_feature 1..17: note = Oligonucleotide
  source 1..17: mol_type = other DNA
catctgtgtgcacacac

SEQ ID NO: 13652 - DNA, 17 bp, synthetic construct
  misc_feature 1..17: note = Oligonucleotide
  source 1..17: mol_type = other DNA
ggtcatctgtgtgcaca

SEQ ID NO: 13653 - DNA, 17 bp, synthetic construct
  misc_feature 1..17: note = Oligonucleotide
  source 1..17: mol_type = other DNA
cagggtcatctgtgtgc

SEQ ID NO: 13654 - DNA, 17 bp, synthetic construct
  misc_feature 1..17: note = Oligonucleotide
  source 1..17: mol_type = other DNA
gtacagggtcatctgtg

SEQ ID NO: 13655 - DNA, 17 bp, synthetic construct
  misc_feature 1..17: note = Oligonucleotide
  source 1..17: mol_type = other DNA
actgtacagggtcatct

SEQ ID NO: 13656 - DNA, 17 bp, synthetic construct
  misc_feature 1..17: note = Oligonucleotide
  source 1..17: mol_type = other DNA
atcactgtacagggtca

SEQ ID NO: 13657 - DNA, 17 bp, synthetic construct
  misc_feature 1..17: note = Oligonucleotide
  source 1..17: mol_type = other DNA
acaatcactgtacaggg

SEQ ID NO: 13658 - DNA, 17 bp, synthetic construct
  misc_feature 1..17: note = Oligonucleotide
  source 1..17: mol_type = other DNA
catacaatcactgtaca

SEQ ID NO: 13659 - DNA, 17 bp, synthetic construct
  misc_feature 1..17: note = Oligonucleotide
  source 1..17: mol_type = other DNA
acgcatacaatcactgt

SEQ ID NO: 13660 - DNA, 17 bp, synthetic construct
  misc_feature 1..17: note = Oligonucleotide
  source 1..17: mol_type = other DNA
tgcacgcatacaatcac

SEQ ID NO: 13661 - DNA, 17 bp, synthetic construct
  misc_feature 1..17: note = Oligonucleotide
  source 1..17: mol_type = other DNA
tggtgcacgcatacaat

SEQ ID NO: 13662 - DNA, 17 bp, synthetic construct
  misc_feature 1..17: note = Oligonucleotide
  source 1..17: mol_type = other DNA
acctggtgcacgcatac

SEQ ID NO: 13663 - DNA, 17 bp, synthetic construct
  misc_feature 1..17: note = Oligonucleotide
  source 1..17: mol_type = other DNA
actacctggtgcacgca

SEQ ID NO: 13664 - DNA, 17 bp, synthetic construct
  misc_feature 1..17: note = Oligonucleotide
  source 1..17: mol_type = other DNA
cacactacctggtgcac

SEQ ID NO: 13665 - DNA, 17 bp, synthetic construct
  misc_feature 1..17: note = Oligonucleotide
  source 1..17: mol_type = other DNA
atccacactacctggtg

SEQ ID NO: 13666 - DNA, 17 bp, synthetic construct
  misc_feature 1..17: note = Oligonucleotide
  source 1..17: mol_type = other DNA
tatatccacactacctg

SEQ ID NO: 13667 - DNA, 17 bp, synthetic construct
  misc_feature 1..17: note = Oligonucleotide
  source 1..17: mol_type = other DNA
aagtatatccacactac

SEQ ID NO: 13668 - DNA, 17 bp, synthetic construct
  misc_feature 1..17: note = Oligonucleotide
  source 1..17: mol_type = other DNA
ggcaagtatatccacac

SEQ ID NO: 13669 - DNA, 17 bp, synthetic construct
  misc_feature 1..17: note = Oligonucleotide
  source 1..17: mol_type = other DNA
acaggcaagtatatcca

SEQ ID NO: 13670 - DNA, 17 bp, synthetic construct
  misc_feature 1..17: note = Oligonucleotide
  source 1..17: mol_type = other DNA
agaacaggcaagtatat

SEQ ID NO: 13671 - DNA, 17 bp, synthetic construct
  misc_feature 1..17: note = Oligonucleotide
  source 1..17: mol_type = other DNA
cccagaacaggcaagta

SEQ ID NO: 13672 - DNA, 17 bp, synthetic construct
  misc_feature 1..17: note = Oligonucleotide
  source 1..17: mol_type = other DNA
acccccagaacaggcaa

SEQ ID NO: 13673 - DNA, 17 bp, synthetic construct
  misc_feature 1..17: note = Oligonucleotide
  source 1..17: mol_type = other DNA
tacacccccagaacagg

SEQ ID NO: 13674 - DNA, 17 bp, synthetic construct
  misc_feature 1..17: note = Oligonucleotide
  source 1..17: mol_type = other DNA
gtgtacacccccagaac

SEQ ID NO: 13675 - DNA, 17 bp, synthetic construct
  misc_feature 1..17: note = Oligonucleotide
  source 1..17: mol_type = other DNA
cacgtgtacacccccag

SEQ ID NO: 13676 - DNA, 17 bp, synthetic construct
  misc_feature 1..17: note = Oligonucleotide
  source 1..17: mol_type = other DNA
acacacgtgtacacccc

SEQ ID NO: 13677 - DNA, 17 bp, synthetic construct
  misc_feature 1..17: note = Oligonucleotide
  source 1..17: mol_type = other DNA
caaacacacgtgtacac

SEQ ID NO: 13678 - DNA, 17 bp, synthetic construct
  misc_feature 1..17: note = Oligonucleotide
  source 1..17: mol_type = other DNA
gtgcaaacacacgtgta

SEQ ID NO: 13679 - DNA, 17 bp, synthetic construct
  misc_feature 1..17: note = Oligonucleotide
  source 1..17: mol_type = other DNA
tgtgtgcaaacacacgt

SEQ ID NO: 13680 - DNA, 17 bp, synthetic construct
  misc_feature 1..17: note = Oligonucleotide
  source 1..17: mol_type = other DNA
atctgtgtgcaaacaca

SEQ ID NO: 13681 - DNA, 17 bp, synthetic construct
  misc_feature 1..17: note = Oligonucleotide
  source 1..17: mol_type = other DNA
gtcatctgtgtgcaaac

SEQ ID NO: 13682 - DNA, 17 bp, synthetic construct
  misc_feature 1..17: note = Oligonucleotide
  source 1..17: mol_type = other DNA
agggtcatctgtgtgca

SEQ ID NO: 13683 - DNA, 17 bp, synthetic construct
  misc_feature 1..17: note = Oligonucleotide
  source 1..17: mol_type = other DNA
tacagggtcatctgtgt

SEQ ID NO: 13684 - DNA, 17 bp, synthetic construct
  misc_feature 1..17: note = Oligonucleotide
  source 1..17: mol_type = other DNA
ctgtacagggtcatctg

SEQ ID NO: 13685 - DNA, 17 bp, synthetic construct
  misc_feature 1..17: note = Oligonucleotide
  source 1..17: mol_type = other DNA
tcactgtacagggtcat

SEQ ID NO: 13686 - DNA, 17 bp, synthetic construct
  misc_feature 1..17: note = Oligonucleotide
  source 1..17: mol_type = other DNA
caatcactgtacagggt

SEQ ID NO: 13687 - DNA, 17 bp, synthetic construct
  misc_feature 1..17: note = Oligonucleotide
  source 1..17: mol_type = other DNA
atgcaatcactgtacag

SEQ ID NO: 13688 - DNA, 17 bp, synthetic construct
  misc_feature 1..17: note = Oligonucleotide
  source 1..17: mol_type = other DNA
cgcatgcaatcactgta

SEQ ID NO: 13689 - DNA, 17 bp, synthetic construct
  misc_feature 1..17: note = Oligonucleotide
  source 1..17: mol_type = other DNA
gcacgcatgcaatcact

SEQ ID NO: 13690 - DNA, 17 bp, synthetic construct
  misc_feature 1..17: note = Oligonucleotide
  source 1..17: mol_type = other DNA
ggtgcacgcatgcaatc

SEQ ID NO: 13691 - DNA, 17 bp, synthetic construct
  misc_feature 1..17: note = Oligonucleotide
  source 1..17: mol_type = other DNA
cctggtgcacgcatgca

SEQ ID NO: 13692 - DNA, 17 bp, synthetic construct
  misc_feature 1..17: note = Oligonucleotide
  source 1..17: mol_type = other DNA
ctccctggtgcacgcat

SEQ ID NO: 13693 - DNA, 17 bp, synthetic construct
  misc_feature 1..17: note = Oligonucleotide
  source 1..17: mol_type = other DNA
acactccctggtgcacg

SEQ ID NO: 13694 - DNA, 17 bp, synthetic construct
  misc_feature 1..17: note = Oligonucleotide
  source 1..17: mol_type = other DNA
tccacactccctggtgc

SEQ ID NO: 13695 - DNA, 17 bp, synthetic construct
  misc_feature 1..17: note = Oligonucleotide
  source 1..17: mol_type = other DNA
atatccacactccctgg

SEQ ID NO: 13696 - DNA, 17 bp, synthetic construct
  misc_feature 1..17: note = Oligonucleotide
  source 1..17: mol_type = other DNA
agtatatccacactccc

SEQ ID NO: 13697 - DNA, 17 bp, synthetic construct
  misc_feature 1..17: note = Oligonucleotide
  source 1..17: mol_type = other DNA
gcaagtatatccacact

SEQ ID NO: 13698 - DNA, 17 bp, synthetic construct
  misc_feature 1..17: note = Oligonucleotide
  source 1..17: mol_type = other DNA
caggcaagtatatccac

SEQ ID NO: 13699 - DNA, 17 bp, synthetic construct
  misc_feature 1..17: note = Oligonucleotide
  source 1..17: mol_type = other DNA
gaacaggcaagtatatc

SEQ ID NO: 13700 - DNA, 17 bp, synthetic construct
  misc_feature 1..17: note = Oligonucleotide
  source 1..17: mol_type = other DNA
ccagaacaggcaagtat

SEQ ID NO: 13701 - DNA, 17 bp, synthetic construct
  misc_feature 1..17: note = Oligonucleotide
  source 1..17: mol_type = other DNA
accccagaacaggcaag

SEQ ID NO: 13702 - DNA, 17 bp, synthetic construct
  misc_feature 1..17: note = Oligonucleotide
  source 1..17: mol_type = other DNA
acaaccccagaacaggc

SEQ ID NO: 13703 - DNA, 17 bp, synthetic construct
  misc_feature 1..17: note = Oligonucleotide
  source 1..17: mol_type = other DNA
tgtacaaccccagaaca

SEQ ID NO: 13704 - DNA, 17 bp, synthetic construct
  misc_feature 1..17: note = Oligonucleotide
  source 1..17: mol_type = other DNA
acatgtacaaccccaga

SEQ ID NO: 13705 - DNA, 17 bp, synthetic construct
  misc_feature 1..17: note = Oligonucleotide
  source 1..17: mol_type = other DNA
gacacatgtacaacccc

SEQ ID NO: 13706 - DNA, 17 bp, synthetic construct
  misc_feature 1..17: note = Oligonucleotide
  source 1..17: mol_type = other DNA
acagacacatgtacaac

SEQ ID NO: 13707 - DNA, 17 bp, synthetic construct
  misc_feature 1..17: note = Oligonucleotide
  source 1..17: mol_type = other DNA
cacacagacacatgtac

SEQ ID NO: 13708 - DNA, 17 bp, synthetic construct
  misc_feature 1..17: note = Oligonucleotide
  source 1..17: mol_type = other DNA
gtgcacacagacacatg

SEQ ID NO: 13709 - DNA, 17 bp, synthetic construct
  misc_feature 1..17: note = Oligonucleotide
  source 1..17: mol_type = other DNA
tgtgtgcacacagacac

SEQ ID NO: 13710 - DNA, 17 bp, synthetic construct
  misc_feature 1..17: note = Oligonucleotide
  source 1..17: mol_type = other DNA
atctgtgtgcacacaga

SEQ ID NO: 13711 - DNA, 17 bp, synthetic construct
  misc_feature 1..17: note = Oligonucleotide
  source 1..17: mol_type = other DNA
gtcatctgtgtgcacac

SEQ ID NO: 13712 - DNA, 17 bp, synthetic construct
  misc_feature 1..17: note = Oligonucleotide
  source 1..17: mol_type = other DNA
agagtcatctgtgtgca

SEQ ID NO: 13713 - DNA, 17 bp, synthetic construct
  misc_feature 1..17: note = Oligonucleotide
  source 1..17: mol_type = other DNA
tacagagtcatctgtgt

SEQ ID NO: 13714 - DNA, 17 bp, synthetic construct
  misc_feature 1..17: note = Oligonucleotide
  source 1..17: mol_type = other DNA
ctgtacagagtcatctg

SEQ ID NO: 13715 - DNA, 17 bp, synthetic construct
  misc_feature 1..17: note = Oligonucleotide
  source 1..17: mol_type = other DNA
tcactgtacagagtcat

SEQ ID NO: 13716 - DNA, 17 bp, synthetic construct
  misc_feature 1..17: note = Oligonucleotide
  source 1..17: mol_type = other DNA
caatcactgtacagagt

SEQ ID NO: 13717 - DNA, 17 bp, synthetic construct
  misc_feature 1..17: note = Oligonucleotide
  source 1..17: mol_type = other DNA
atacaatcactgtacag

SEQ ID NO: 13718 - DNA, 17 bp, synthetic construct
  misc_feature 1..17: note = Oligonucleotide
  source 1..17: mol_type = other DNA
tgcatacaatcactgta

SEQ ID NO: 13719 - DNA, 17 bp, synthetic construct
  misc_feature 1..17: note = Oligonucleotide
  source 1..17: mol_type = other DNA
acatgcatacaatcact

SEQ ID NO: 13720 - DNA, 17 bp, synthetic construct
  misc_feature 1..17: note = Oligonucleotide
  source 1..17: mol_type = other DNA
ggtacatgcatacaatc

SEQ ID NO: 13721 - DNA, 17 bp, synthetic construct
  misc_feature 1..17: note = Oligonucleotide
  source 1..17: mol_type = other DNA
actggtacatgcataca

SEQ ID NO: 13722 - DNA, 17 bp, synthetic construct
  misc_feature 1..17: note = Oligonucleotide
  source 1..17: mol_type = other DNA
ctcactggtacatgcat

SEQ ID NO: 13723 - DNA, 17 bp, synthetic construct
  misc_feature 1..17: note = Oligonucleotide
  source 1..17: mol_type = other DNA
acactcactggtacatg

SEQ ID NO: 13724 - DNA, 17 bp, synthetic construct
  misc_feature 1..17: note = Oligonucleotide
  source 1..17: mol_type = other DNA
tccacactcactggtac

SEQ ID NO: 13725 - DNA, 17 bp, synthetic construct
  misc_feature 1..17: note = Oligonucleotide
  source 1..17: mol_type = other DNA
atatccacactcactgg

SEQ ID NO: 13726 - DNA, 17 bp, synthetic construct
  misc_feature 1..17: note = Oligonucleotide
  source 1..17: mol_type = other DNA
agtatatccacactcac

SEQ ID NO: 13727 - DNA, 17 bp, synthetic construct
  misc_feature 1..17: note = Oligonucleotide
  source 1..17: mol_type = other DNA
acaagtatatccacact

SEQ ID NO: 13728 - DNA, 17 bp, synthetic construct
  misc_feature 1..17: note = Oligonucleotide
  source 1..17: mol_type = other DNA
cagacaagtatatccac

SEQ ID NO: 13729 - DNA, 17 bp, synthetic construct
  misc_feature 1..17: note = Oligonucleotide
  source 1..17: mol_type = other DNA
gaacagacaagtatatc

SEQ ID NO: 13730 - DNA, 17 bp, synthetic construct
  misc_feature 1..17: note = Oligonucleotide
  source 1..17: mol_type = other DNA
ccagaacagacaagtat

SEQ ID NO: 13731 - DNA, 17 bp, synthetic construct
  misc_feature 1..17: note = Oligonucleotide
  source 1..17: mol_type = other DNA
cccccagaacagacaag

SEQ ID NO: 13732 - DNA, 17 bp, synthetic construct
  misc_feature 1..17: note = Oligonucleotide
  source 1..17: mol_type = other DNA
acacccccagaacagac

SEQ ID NO: 13733 - DNA, 17 bp, synthetic construct
  misc_feature 1..17: note = Oligonucleotide
  source 1..17: mol_type = other DNA
cgtacacccccagaaca

SEQ ID NO: 13734 - DNA, 17 bp, synthetic construct
  misc_feature 1..17: note = Oligonucleotide
  source 1..17: mol_type = other DNA
acacgtacacccccaga

SEQ ID NO: 13735 - DNA, 17 bp, synthetic construct
  misc_feature 1..17: note = Oligonucleotide
  source 1..17: mol_type = other DNA
aacacacgtacaccccc

SEQ ID NO: 13736 - DNA, 17 bp, synthetic construct
  misc_feature 1..17: note = Oligonucleotide
  source 1..17: mol_type = other DNA
acaaacacacgtacacc

SEQ ID NO: 13737 - DNA, 17 bp, synthetic construct
  misc_feature 1..17: note = Oligonucleotide
  source 1..17: mol_type = other DNA
cacacaaacacacgtac

SEQ ID NO: 13738 - DNA, 17 bp, synthetic construct
  misc_feature 1..17: note = Oligonucleotide
  source 1..17: mol_type = other DNA
gtgcacacaaacacacg

SEQ ID NO: 13739 - DNA, 17 bp, synthetic construct
  misc_feature 1..17: note = Oligonucleotide
  source 1..17: mol_type = other DNA
tgtgtgcacacaaacac

SEQ ID NO: 13740 - DNA, 17 bp, synthetic construct
  misc_feature 1..17: note = Oligonucleotide
  source 1..17: mol_type = other DNA
acctgtgtgcacacaaa

SEQ ID NO: 13741 - DNA, 17 bp, synthetic construct
  misc_feature 1..17: note = Oligonucleotide
  source 1..17: mol_type = other DNA
gtcacctgtgtgcacac

SEQ ID NO: 13742 - DNA, 17 bp, synthetic construct
  misc_feature 1..17: note = Oligonucleotide
  source 1..17: mol_type = other DNA
agggtcacctgtgtgca

SEQ ID NO: 13743 - DNA, 17 bp, synthetic construct
  misc_feature 1..17: note = Oligonucleotide
  source 1..17: mol_type = other DNA
tacagggtcacctgtgt

SEQ ID NO: 13744 - DNA, 17 bp, synthetic construct
  misc_feature 1..17: note = Oligonucleotide
  source 1..17: mol_type = other DNA
ctgtacagggtcacctg

SEQ ID NO: 13745 - DNA, 17 bp, synthetic construct
  misc_feature 1..17: note = Oligonucleotide
  source 1..17: mol_type = other DNA
tcactgtacagggtcac

SEQ ID NO: 13746 - DNA, 17 bp, synthetic construct
  misc_feature 1..17: note = Oligonucleotide
  source 1..17: mol_type = other DNA
caatcactgtacagggt

SEQ ID NO: 13747 - DNA, 17 bp, synthetic construct
  misc_feature 1..17: note = Oligonucleotide
  source 1..17: mol_type = other DNA
gtacaatcactgtacag

SEQ ID NO: 13748 - DNA, 17 bp, synthetic construct
  misc_feature 1..17: note = Oligonucleotide
  source 1..17: mol_type = other DNA
cgtgtacaatcactgta

SEQ ID NO: 13749 - DNA, 17 bp, synthetic construct
  misc_feature 1..17: note = Oligonucleotide
  source 1..17: mol_type = other DNA
acacgtgtacaatcact

SEQ ID NO: 13750 - DNA, 17 bp, synthetic construct
  misc_feature 1..17: note = Oligonucleotide
  source 1..17: mol_type = other DNA
ggtacacgtgtacaatc

SEQ ID NO: 13751 - DNA, 17 bp, synthetic construct
  misc_feature 1..17: note = Oligonucleotide
  source 1..17: mol_type = other DNA
cctggtacacgtgtaca

SEQ ID NO: 13752 - DNA, 17 bp, synthetic construct
  misc_feature 1..17: note = Oligonucleotide
  source 1..17: mol_type = other DNA
ctccctggtacacgtgt

SEQ ID NO: 13753 - DNA, 17 bp, synthetic construct
  misc_feature 1..17: note = Oligonucleotide
  source 1..17: mol_type = other DNA
acactccctggtacacg

SEQ ID NO: 13754 - DNA, 17 bp, synthetic construct
  misc_feature 1..17: note = Oligonucleotide
  source 1..17: mol_type = other DNA
tccacactccctggtac

SEQ ID NO: 13755 - DNA, 17 bp, synthetic construct
  misc_feature 1..17: note = Oligonucleotide
  source 1..17: mol_type = other DNA
atatccacactccctgg

SEQ ID NO: 13756 - DNA, 17 bp, synthetic construct
  misc_feature 1..17: note = Oligonucleotide
  source 1..17: mol_type = other DNA
agtatatccacactccc

SEQ ID NO: 13757 - DNA, 17 bp, synthetic construct
  misc_feature 1..17: note = Oligonucleotide
  source 1..17: mol_type = other DNA
gcaagtatatccacact

SEQ ID NO: 13758 - DNA, 17 bp, synthetic construct
  misc_feature 1..17: note = Oligonucleotide
  source 1..17: mol_type = other DNA
caggcaagtatatccac

SEQ ID NO: 13759 - DNA, 17 bp, synthetic construct
  misc_feature 1..17: note = Oligonucleotide
  source 1..17: mol_type = other DNA
gaacaggcaagtatatc

SEQ ID NO: 13760 - DNA, 17 bp, synthetic construct
  misc_feature 1..17: note = Oligonucleotide
  source 1..17: mol_type = other DNA
ccagaacaggcaagtat

SEQ ID NO: 13761 - DNA, 17 bp, synthetic construct
  misc_feature 1..17: note = Oligonucleotide
  source 1..17: mol_type = other DNA
cccccagaacaggcaag

SEQ ID NO: 13762 - DNA, 17 bp, synthetic construct
  misc_feature 1..17: note = Oligonucleotide
  source 1..17: mol_type = other DNA
acacccccagaacaggc

SEQ ID NO: 13763 - DNA, 17 bp, synthetic construct
  misc_feature 1..17: note = Oligonucleotide
  source 1..17: mol_type = other DNA
cgtacacccccagaaca

SEQ ID NO: 13764 - DNA, 17 bp, synthetic construct
  misc_feature 1..17: note = Oligonucleotide
  source 1..17: mol_type = other DNA
acacgtacacccccaga

SEQ ID NO: 13765 - DNA, 17 bp, synthetic construct
  misc_feature 1..17: note = Oligonucleotide
  source 1..17: mol_type = other DNA
aacacacgtacaccccc

SEQ ID NO: 13766 - DNA, 17 bp, synthetic construct
  misc_feature 1..17: note = Oligonucleotide
  source 1..17: mol_type = other DNA
acaaacacacgtacacc

SEQ ID NO: 13767 - DNA, 17 bp, synthetic construct
  misc_feature 1..17: note = Oligonucleotide
  source 1..17: mol_type = other DNA
cacacaaacacacgtac

SEQ ID NO: 13768 - DNA, 17 bp, synthetic construct
  misc_feature 1..17: note = Oligonucleotide
  source 1..17: mol_type = other DNA
gtgcacacaaacacacg

SEQ ID NO: 13769 - DNA, 17 bp, synthetic construct
  misc_feature 1..17: note = Oligonucleotide
  source 1..17: mol_type = other DNA
tgtgtgcacacaaacac

SEQ ID NO: 13770 - DNA, 17 bp, synthetic construct
  misc_feature 1..17: note = Oligonucleotide
  source 1..17: mol_type = other DNA
acctgtgtgcacacaaa

SEQ ID NO: 13771 - DNA, 17 bp, synthetic construct
  misc_feature 1..17: note = Oligonucleotide
  source 1..17: mol_type = other DNA
gtcacctgtgtgcacac

SEQ ID NO: 13772 - DNA, 17 bp, synthetic construct
  misc_feature 1..17: note = Oligonucleotide
  source 1..17: mol_type = other DNA
agggtcacctgtgtgca

SEQ ID NO: 13773 - DNA, 17 bp, synthetic construct
  misc_feature 1..17: note = Oligonucleotide
  source 1..17: mol_type = other DNA
tacagggtcacctgtgt

SEQ ID NO: 13774 - DNA, 17 bp, synthetic construct
  misc_feature 1..17: note = Oligonucleotide
  source 1..17: mol_type = other DNA
ctgtacagggtcacctg

SEQ ID NO: 13775 - DNA, 17 bp, synthetic construct
  misc_feature 1..17: note = Oligonucleotide
  source 1..17: mol_type = other DNA
tcactgtacagggtcac

SEQ ID NO: 13776 - DNA, 17 bp, synthetic construct
  misc_feature 1..17: note = Oligonucleotide
  source 1..17: mol_type = other DNA
caatcactgtacagggt

SEQ ID NO: 13777 - DNA, 17 bp, synthetic construct
  misc_feature 1..17: note = Oligonucleotide
  source 1..17: mol_type = other DNA
atgcaatcactgtacag

SEQ ID NO: 13778 - DNA, 17 bp, synthetic construct
  misc_feature 1..17: note = Oligonucleotide
  source 1..17: mol_type = other DNA
cgcatgcaatcactgta

SEQ ID NO: 13779 - DNA, 17 bp, synthetic construct
  misc_feature 1..17: note = Oligonucleotide
  source 1..17: mol_type = other DNA
gcacgcatgcaatcact

SEQ ID NO: 13780 - DNA, 17 bp, synthetic construct
  misc_feature 1..17: note = Oligonucleotide
  source 1..17: mol_type = other DNA
ggtgcacgcatgcaatc

SEQ ID NO: 13781 - DNA, 17 bp, synthetic construct
  misc_feature 1..17: note = Oligonucleotide
  source 1..17: mol_type = other DNA
cctggtgcacgcatgca

SEQ ID NO: 13782 - DNA, 17 bp, synthetic construct
  misc_feature 1..17: note = Oligonucleotide
  source 1..17: mol_type = other DNA
ctccctggtgcacgcat

SEQ ID NO: 13783 - DNA, 17 bp, synthetic construct
  misc_feature 1..17: note = Oligonucleotide
  source 1..17: mol_type = other DNA
acactccctggtgcacg

SEQ ID NO: 13784 - DNA, 17 bp, synthetic construct
  misc_feature 1..17: note = Oligonucleotide
  source 1..17: mol_type = other DNA
tccacactccctggtgc

SEQ ID NO: 13785 - DNA, 17 bp, synthetic construct
  misc_feature 1..17: note = Oligonucleotide
  source 1..17: mol_type = other DNA
atatccacactccctgg

SEQ ID NO: 13786 - DNA, 17 bp, synthetic construct
  misc_feature 1..17: note = Oligonucleotide
  source 1..17: mol_type = other DNA
agtatatccacactccc

SEQ ID NO: 13787 - DNA, 17 bp, synthetic construct
  misc_feature 1..17: note = Oligonucleotide
  source 1..17: mol_type = other DNA
gcaagtatatccacact

SEQ ID NO: 13788 - DNA, 17 bp, synthetic construct
  misc_feature 1..17: note = Oligonucleotide
  source 1..17: mol_type = other DNA
caggcaagtatatccac

SEQ ID NO: 13789 - DNA, 17 bp, synthetic construct
  misc_feature 1..17: note = Oligonucleotide
  source 1..17: mol_type = other DNA
gaacaggcaagtatatc

SEQ ID NO: 13790 - DNA, 17 bp, synthetic construct
  misc_feature 1..17: note = Oligonucleotide
  source 1..17: mol_type = other DNA
ccagaacaggcaagtat

SEQ ID NO: 13791 - DNA, 17 bp, synthetic construct
  misc_feature 1..17: note = Oligonucleotide
  source 1..17: mol_type = other DNA
cccccagaacaggcaag

SEQ ID NO: 13792 - DNA, 17 bp, synthetic construct
  misc_feature 1..17: note = Oligonucleotide
  source 1..17: mol_type = other DNA
acacccccagaacaggc

SEQ ID NO: 13793 - DNA, 17 bp, synthetic construct
  misc_feature 1..17: note = Oligonucleotide
  source 1..17: mol_type = other DNA
tgtacacccccagaaca

SEQ ID NO: 13794 - DNA, 17 bp, synthetic construct
  misc_feature 1..17: note = Oligonucleotide
  source 1..17: mol_type = other DNA
acgtgtacacccccaga

SEQ ID NO: 13795 - DNA, 17 bp, synthetic construct
  misc_feature 1..17: note = Oligonucleotide
  source 1..17: mol_type = other DNA
cacacgtgtacaccccc

SEQ ID NO: 13796 - DNA, 17 bp, synthetic construct
  misc_feature 1..17: note = Oligonucleotide
  source 1..17: mol_type = other DNA
gcacacacgtgtacacc

SEQ ID NO: 13797 - DNA, 17 bp, synthetic construct
  misc_feature 1..17: note = Oligonucleotide
  source 1..17: mol_type = other DNA
tgtgcacacacgtgtac

SEQ ID NO: 13798 - DNA, 17 bp, synthetic construct
  misc_feature 1..17: note = Oligonucleotide
  source 1..17: mol_type = other DNA
ctgtgtgcacacacgtg

SEQ ID NO: 13799 - DNA, 17 bp, synthetic construct
  misc_feature 1..17: note = Oligonucleotide
  source 1..17: mol_type = other DNA
catctgtgtgcacacac

SEQ ID NO: 13800 - DNA, 17 bp, synthetic construct
  misc_feature 1..17: note = Oligonucleotide
  source 1..17: mol_type = other DNA
ggtcatctgtgtgcaca

SEQ ID NO: 13801 - DNA, 17 bp, synthetic construct
  misc_feature 1..17: note = Oligonucleotide
  source 1..17: mol_type = other DNA
cagggtcatctgtgtgc

SEQ ID NO: 13802 - DNA, 17 bp, synthetic construct
  misc_feature 1..17: note = Oligonucleotide
  source 1..17: mol_type = other DNA
gtacagggtcatctgtg

SEQ ID NO: 13803 - DNA, 17 bp, synthetic construct
  misc_feature 1..17: note = Oligonucleotide
  source 1..17: mol_type = other DNA
actgtacagggtcatct

SEQ ID NO: 13804 - DNA, 17 bp, synthetic construct
  misc_feature 1..17: note = Oligonucleotide
  source 1..17: mol_type = other DNA
atcactgtacagggtca

SEQ ID NO: 13805 - DNA, 17 bp, synthetic construct
  misc_feature 1..17: note = Oligonucleotide
  source 1..17: mol_type = other DNA
acaatcactgtacaggg

SEQ ID NO: 13806 - DNA, 17 bp, synthetic construct
  misc_feature 1..17: note = Oligonucleotide
  source 1..17: mol_type = other DNA
tgtacaatcactgtaca

SEQ ID NO: 13807 - DNA, 17 bp, synthetic construct
  misc_feature 1..17: note = Oligonucleotide
  source 1..17: mol_type = other DNA
acgtgtacaatcactgt

SEQ ID NO: 13808 - DNA, 17 bp, synthetic construct
  misc_feature 1..17: note = Oligonucleotide
  source 1..17: mol_type = other DNA
tacacgtgtacaatcac

SEQ ID NO: 13809 - DNA, 17 bp, synthetic construct
  misc_feature 1..17: note = Oligonucleotide
  source 1..17: mol_type = other DNA
tggtacacgtgtacaat

SEQ ID NO: 13810 - DNA, 17 bp, synthetic construct
  misc_feature 1..17: note = Oligonucleotide
  source 1..17: mol_type = other DNA
ccctggtacacgtgtac

SEQ ID NO: 13811 - DNA, 17 bp, synthetic construct
  misc_feature 1..17: note = Oligonucleotide
  source 1..17: mol_type = other DNA
actccctggtacacgtg

SEQ ID NO: 13812 - DNA, 17 bp, synthetic construct
  misc_feature 1..17: note = Oligonucleotide
  source 1..17: mol_type = other DNA
cacactccctggtacac

SEQ ID NO: 13813 - DNA, 17 bp, synthetic construct
  misc_feature 1..17: note = Oligonucleotide
  source 1..17: mol_type = other DNA
atccacactccctggta

SEQ ID NO: 13814 - DNA, 17 bp, synthetic construct
  misc_feature 1..17: note = Oligonucleotide
  source 1..17: mol_type = other DNA
tatatccacactccctg

SEQ ID NO: 13815 - DNA, 17 bp, synthetic construct
  misc_feature 1..17: note = Oligonucleotide
  source 1..17: mol_type = other DNA
aagtatatccacactcc

SEQ ID NO: 13816 - DNA, 17 bp, synthetic construct
  misc_feature 1..17: note = Oligonucleotide
  source 1..17: mol_type = other DNA
ggcaagtatatccacac

SEQ ID NO: 13817 - DNA, 17 bp, synthetic construct
  misc_feature 1..17: note = Oligonucleotide
  source 1..17: mol_type = other DNA
acaggcaagtatatcca

SEQ ID NO: 13818 - DNA, 17 bp, synthetic construct
  misc_feature 1..17: note = Oligonucleotide
  source 1..17: mol_type = other DNA
agaacaggcaagtatat

SEQ ID NO: 13819 - DNA, 17 bp, synthetic construct
  misc_feature 1..17: note = Oligonucleotide
  source 1..17: mol_type = other DNA
cccagaacaggcaagta

SEQ ID NO: 13820 - DNA, 17 bp, synthetic construct
  misc_feature 1..17: note = Oligonucleotide
  source 1..17: mol_type = other DNA
acccccagaacaggcaa

SEQ ID NO: 13821 - DNA, 17 bp, synthetic construct
  misc_feature 1..17: note = Oligonucleotide
  source 1..17: mol_type = other DNA
tacacccccagaacagg

SEQ ID NO: 13822 - DNA, 17 bp, synthetic construct
  misc_feature 1..17: note = Oligonucleotide
  source 1..17: mol_type = other DNA
gtgtacacccccagaac

SEQ ID NO: 13823 - DNA, 17 bp, synthetic construct
  misc_feature 1..17: note = Oligonucleotide
  source 1..17: mol_type = other DNA
cacgtgtacacccccag

SEQ ID NO: 13824 - DNA, 17 bp, synthetic construct
  misc_feature 1..17: note = Oligonucleotide
  source 1..17: mol_type = other DNA
acacacgtgtacacccc

SEQ ID NO: 13825 - DNA, 17 bp, synthetic construct
  misc_feature 1..17: note = Oligonucleotide
  source 1..17: mol_type = other DNA
caaacacacgtgtacac

SEQ ID NO: 13826 - DNA, 17 bp, synthetic construct
  misc_feature 1..17: note = Oligonucleotide
  source 1..17: mol_type = other DNA
gtgcaaacacacgtgta

SEQ ID NO: 13827 - DNA, 17 bp, synthetic construct
  misc_feature 1..17: note = Oligonucleotide
  source 1..17: mol_type = other DNA
tgtgtgcaaacacacgt

SEQ ID NO: 13828 - DNA, 17 bp, synthetic construct
  misc_feature 1..17: note = Oligonucleotide
  source 1..17: mol_type = other DNA
atctgtgtgcaaacaca

SEQ ID NO: 13829 - DNA, 17 bp, synthetic construct
  misc_feature 1..17: note = Oligonucleotide
  source 1..17: mol_type = other DNA
gtcatctgtgtgcaaac

SEQ ID NO: 13830 - DNA, 17 bp, synthetic construct
  misc_feature 1..17: note = Oligonucleotide
  source 1..17: mol_type = other DNA
agggtcatctgtgtgca

SEQ ID NO: 13831 - DNA, 17 bp, synthetic construct
  misc_feature 1..17: note = Oligonucleotide
  source 1..17: mol_type = other DNA
tacagggtcatctgtgt

SEQ ID NO: 13832 - DNA, 17 bp, synthetic construct
  misc_feature 1..17: note = Oligonucleotide
  source 1..17: mol_type = other DNA
ctgtacagggtcatctg

SEQ ID NO: 13833 - DNA, 17 bp, synthetic construct
  misc_feature 1..17: note = Oligonucleotide
  source 1..17: mol_type = other DNA
tcactgtacagggtcat

SEQ ID NO: 13834 - DNA, 17 bp, synthetic construct
  misc_feature 1..17: note = Oligonucleotide
  source 1..17: mol_type = other DNA
caatcactgtacagggt

SEQ ID NO: 13835 - DNA, 17 bp, synthetic construct
  misc_feature 1..17: note = Oligonucleotide
  source 1..17: mol_type = other DNA
gtacaatcactgtacag

SEQ ID NO: 13836 - DNA, 17 bp, synthetic construct
  misc_feature 1..17: note = Oligonucleotide
  source 1..17: mol_type = other DNA
cgtgtacaatcactgta

SEQ ID NO: 13837 - DNA, 17 bp, synthetic construct
  misc_feature 1..17: note = Oligonucleotide
  source 1..17: mol_type = other DNA
acacgtgtacaatcact

SEQ ID NO: 13838 - DNA, 17 bp, synthetic construct
  misc_feature 1..17: note = Oligonucleotide
  source 1..17: mol_type = other DNA
ggtacacgtgtacaatc

SEQ ID NO: 13839 - DNA, 17 bp, synthetic construct
  misc_feature 1..17: note = Oligonucleotide
  source 1..17: mol_type = other DNA
cctggtacacgtgtaca

SEQ ID NO: 13840 - DNA, 17 bp, synthetic construct
  misc_feature 1..17: note = Oligonucleotide
  source 1..17: mol_type = other DNA
ctccctggtacacgtgt

SEQ ID NO: 13841 - DNA, 17 bp, synthetic construct
  misc_feature 1..17: note = Oligonucleotide
  source 1..17: mol_type = other DNA
acactccctggtacacg

SEQ ID NO: 13842 - DNA, 17 bp, synthetic construct
  misc_feature 1..17: note = Oligonucleotide
  source 1..17: mol_type = other DNA
tccacactccctggtac

SEQ ID NO: 13843 - DNA, 17 bp, synthetic construct
  misc_feature 1..17: note = Oligonucleotide
  source 1..17: mol_type = other DNA
atatccacactccctgg

SEQ ID NO: 13844 - DNA, 17 bp, synthetic construct
  misc_feature 1..17: note = Oligonucleotide
  source 1..17: mol_type = other DNA
agtatatccacactccc

SEQ ID NO: 13845 - DNA, 17 bp, synthetic construct
  misc_feature 1..17: note = Oligonucleotide
  source 1..17: mol_type = other DNA
gcaagtatatccacact

SEQ ID NO: 13846 - DNA, 17 bp, synthetic construct
  misc_feature 1..17: note = Oligonucleotide
  source 1..17: mol_type = other DNA
caggcaagtatatccac

SEQ ID NO: 13847 - DNA, 17 bp, synthetic construct
  misc_feature 1..17: note = Oligonucleotide
  source 1..17: mol_type = other DNA
gaacaggcaagtatatc

SEQ ID NO: 13848 - DNA, 17 bp, synthetic construct
  misc_feature 1..17: note = Oligonucleotide
  source 1..17: mol_type = other DNA
ccagaacaggcaagtat

SEQ ID NO: 13849 - DNA, 17 bp, synthetic construct
  misc_feature 1..17: note = Oligonucleotide
  source 1..17: mol_type = other DNA
cccccagaacaggcaag

SEQ ID NO: 13850 - DNA, 17 bp, synthetic construct
  misc_feature 1..17: note = Oligonucleotide
  source 1..17: mol_type = other DNA
acacccccagaacaggc

SEQ ID NO: 13851 - DNA, 17 bp, synthetic construct
  misc_feature 1..17: note = Oligonucleotide
  source 1..17: mol_type = other DNA
tgtacacccccagaaca

SEQ ID NO: 13852 - DNA, 17 bp, synthetic construct
  misc_feature 1..17: note = Oligonucleotide
  source 1..17: mol_type = other DNA
acgtgtacacccccaga

SEQ ID NO: 13853 - DNA, 17 bp, synthetic construct
  misc_feature 1..17: note = Oligonucleotide
  source 1..17: mol_type = other DNA
cacacgtgtacaccccc

SEQ ID NO: 13854 - DNA, 17 bp, synthetic construct
  misc_feature 1..17: note = Oligonucleotide
  source 1..17: mol_type = other DNA
gcacacacgtgtacacc

SEQ ID NO: 13855 - DNA, 17 bp, synthetic construct
  misc_feature 1..17: note = Oligonucleotide
  source 1..17: mol_type = other DNA
tgtgcacacacgtgtac

SEQ ID NO: 13856 - DNA, 17 bp, synthetic construct
  misc_feature 1..17: note = Oligonucleotide
  source 1..17: mol_type = other DNA
ctgtgtgcacacacgtg

SEQ ID NO: 13857 - DNA, 17 bp, synthetic construct
  misc_feature 1..17: note = Oligonucleotide
  source 1..17: mol_type = other DNA
catctgtgtgcacacac

SEQ ID NO: 13858 - DNA, 17 bp, synthetic construct
  misc_feature 1..17: note = Oligonucleotide
  source 1..17: mol_type = other DNA
ggtcatctgtgtgcaca

SEQ ID NO: 13859 - DNA, 17 bp, synthetic construct
  misc_feature 1..17: note = Oligonucleotide
  source 1..17: mol_type = other DNA
cagggtcatctgtgtgc

SEQ ID NO: 13860 - DNA, 17 bp, synthetic construct
  misc_feature 1..17: note = Oligonucleotide
  source 1..17: mol_type = other DNA
gtacagggtcatctgtg

SEQ ID NO: 13861 - DNA, 17 bp, synthetic construct
  misc_feature 1..17: note = Oligonucleotide
  source 1..17: mol_type = other DNA
actgtacagggtcatct

SEQ ID NO: 13862 - DNA, 17 bp, synthetic construct
  misc_feature 1..17: note = Oligonucleotide
  source 1..17: mol_type = other DNA
atcactgtacagggtca

SEQ ID NO: 13863 - DNA, 17 bp, synthetic construct
  misc_feature 1..17: note = Oligonucleotide
  source 1..17: mol_type = other DNA
acaatcactgtacaggg

SEQ ID NO: 13864 - DNA, 17 bp, synthetic construct
  misc_feature 1..17: note = Oligonucleotide
  source 1..17: mol_type = other DNA
tgtacaatcactgtaca

SEQ ID NO: 13865 - DNA, 17 bp, synthetic construct
  misc_feature 1..17: note = Oligonucleotide
  source 1..17: mol_type = other DNA
acgtgtacaatcactgt

SEQ ID NO: 13866 - DNA, 17 bp, synthetic construct
  misc_feature 1..17: note = Oligonucleotide
  source 1..17: mol_type = other DNA
tacacgtgtacaatcac

SEQ ID NO: 13867 - DNA, 17 bp, synthetic construct
  misc_feature 1..17: note = Oligonucleotide
  source 1..17: mol_type = other DNA
tggtacacgtgtacaat

SEQ ID NO: 13868 - DNA, 17 bp, synthetic construct
  misc_feature 1..17: note = Oligonucleotide
  source 1..17: mol_type = other DNA
ccctggtacacgtgtac

SEQ ID NO: 13869 - DNA, 17 bp, synthetic construct
  misc_feature 1..17: note = Oligonucleotide
  source 1..17: mol_type = other DNA
actccctggtacacgtg

SEQ ID NO: 13870 - DNA, 17 bp, synthetic construct
  misc_feature 1..17: note = Oligonucleotide
  source 1..17: mol_type = other DNA
cacactccctggtacac

SEQ ID NO: 13871 - DNA, 17 bp, synthetic construct
  misc_feature 1..17: note = Oligonucleotide
  source 1..17: mol_type = other DNA
atccacactccctggta

SEQ ID NO: 13872 - DNA, 17 bp, synthetic construct
  misc_feature 1..17: note = Oligonucleotide
  source 1..17: mol_type = other DNA
tatatccacactccctg

SEQ ID NO: 13873 - DNA, 17 bp, synthetic construct
  misc_feature 1..17: note = Oligonucleotide
  source 1..17: mol_type = other DNA
aagtatatccacactcc

SEQ ID NO: 13874 - DNA, 17 bp, synthetic construct
  misc_feature 1..17: note = Oligonucleotide
  source 1..17: mol_type = other DNA
ggcaagtatatccacac

SEQ ID NO: 13875 - DNA, 17 bp, synthetic construct
  misc_feature 1..17: note = Oligonucleotide
  source 1..17: mol_type = other DNA
acaggcaagtatatcca

SEQ ID NO: 13876 - DNA, 17 bp, synthetic construct
  misc_feature 1..17: note = Oligonucleotide
  source 1..17: mol_type = other DNA
agaacaggcaagtatat

SEQ ID NO: 13877 - DNA, 17 bp, synthetic construct
  misc_feature 1..17: note = Oligonucleotide
  source 1..17: mol_type = other DNA
cccagaacaggcaagta

SEQ ID NO: 13878 - DNA, 17 bp, synthetic construct
  misc_feature 1..17: note = Oligonucleotide
  source 1..17: mol_type = other DNA
acccccagaacaggcaa

SEQ ID NO: 13879 - DNA, 17 bp, synthetic construct
  misc_feature 1..17: note = Oligonucleotide
  source 1..17: mol_type = other DNA
tacacccccagaacagg

SEQ ID NO: 13880 - DNA, 17 bp, synthetic construct
  misc_feature 1..17: note = Oligonucleotide
  source 1..17: mol_type = other DNA
gtgtacacccccagaac

SEQ ID NO: 13881 - DNA, 17 bp, synthetic construct
  misc_feature 1..17: note = Oligonucleotide
  source 1..17: mol_type = other DNA
cacgtgtacacccccag

SEQ ID NO: 13882 - DNA, 17 bp, synthetic construct
  misc_feature 1..17: note = Oligonucleotide
  source 1..17: mol_type = other DNA
acacacgtgtacacccc

SEQ ID NO: 13883 - DNA, 17 bp, synthetic construct
  misc_feature 1..17: note = Oligonucleotide
  source 1..17: mol_type = other DNA
caaacacacgtgtacac

SEQ ID NO: 13884 - DNA, 17 bp, synthetic construct
  misc_feature 1..17: note = Oligonucleotide
  source 1..17: mol_type = other DNA
gtgcaaacacacgtgta

SEQ ID NO: 13885 - DNA, 17 bp, synthetic construct
  misc_feature 1..17: note = Oligonucleotide
  source 1..17: mol_type = other DNA
tgtgtgcaaacacacgt

SEQ ID NO: 13886 - DNA, 17 bp, synthetic construct
  misc_feature 1..17: note = Oligonucleotide
  source 1..17: mol_type = other DNA
atctgtgtgcaaacaca

SEQ ID NO: 13887 - DNA, 17 bp, synthetic construct
  misc_feature 1..17: note = Oligonucleotide
  source 1..17: mol_type = other DNA
gtcatctgtgtgcaaac

SEQ ID NO: 13888 - DNA, 17 bp, synthetic construct
  misc_feature 1..17: note = Oligonucleotide
  source 1..17: mol_type = other DNA
agggtcatctgtgtgca

SEQ ID NO: 13889 - DNA, 17 bp, synthetic construct
  misc_feature 1..17: note = Oligonucleotide
  source 1..17: mol_type = other DNA
tacagggtcatctgtgt

SEQ ID NO: 13890 - DNA, 17 bp, synthetic construct
  misc_feature 1..17: note = Oligonucleotide
  source 1..17: mol_type = other DNA
ctgtacagggtcatctg

SEQ ID NO: 13891 - DNA, 17 bp, synthetic construct
  misc_feature 1..17: note = Oligonucleotide
  source 1..17: mol_type = other DNA
tcactgtacagggtcat

SEQ ID NO: 13892 - DNA, 17 bp, synthetic construct
  misc_feature 1..17: note = Oligonucleotide
  source 1..17: mol_type = other DNA
caatcactgtacagggt

SEQ ID NO: 13893 - DNA, 17 bp, synthetic construct
  misc_feature 1..17: note = Oligonucleotide
  source 1..17: mol_type = other DNA
gtacaatcactgtacag

SEQ ID NO: 13894 - DNA, 17 bp, synthetic construct
  misc_feature 1..17: note = Oligonucleotide
  source 1..17: mol_type = other DNA
cgtgtacaatcactgta

SEQ ID NO: 13895 - DNA, 17 bp, synthetic construct
  misc_feature 1..17: note = Oligonucleotide
  source 1..17: mol_type = other DNA
acacgtgtacaatcact

SEQ ID NO: 13896 - DNA, 17 bp, synthetic construct
  misc_feature 1..17: note = Oligonucleotide
  source 1..17: mol_type = other DNA
ggtacacgtgtacaatc

SEQ ID NO: 13897 - DNA, 17 bp, synthetic construct
  misc_feature 1..17: note = Oligonucleotide
  source 1..17: mol_type = other DNA
cctggtacacgtgtaca

SEQ ID NO: 13898 - DNA, 17 bp, synthetic construct
  misc_feature 1..17: note = Oligonucleotide
  source 1..17: mol_type = other DNA
ctccctggtacacgtgt

SEQ ID NO: 13899 - DNA, 17 bp, synthetic construct
  misc_feature 1..17: note = Oligonucleotide
  source 1..17: mol_type = other DNA
acactccctggtacacg

SEQ ID NO: 13900 - DNA, 17 bp, synthetic construct
  misc_feature 1..17: note = Oligonucleotide
  source 1..17: mol_type = other DNA
tccacactccctggtac

SEQ ID NO: 13901 - DNA, 17 bp, synthetic construct
  misc_feature 1..17: note = Oligonucleotide
  source 1..17: mol_type = other DNA
atatccacactccctgg

SEQ ID NO: 13902 - DNA, 17 bp, synthetic construct
  misc_feature 1..17: note = Oligonucleotide
  source 1..17: mol_type = other DNA
agtatatccacactccc

SEQ ID NO: 13903 - DNA, 17 bp, synthetic construct
  misc_feature 1..17: note = Oligonucleotide
  source 1..17: mol_type = other DNA
gcaagtatatccacact

SEQ ID NO: 13904 - DNA, 17 bp, synthetic construct
  misc_feature 1..17: note = Oligonucleotide
  source 1..17: mol_type = other DNA
caggcaagtatatccac

SEQ ID NO: 13905 - DNA, 17 bp, synthetic construct
  misc_feature 1..17: note = Oligonucleotide
  source 1..17: mol_type = other DNA
gaacaggcaagtatatc

SEQ ID NO: 13906 - DNA, 17 bp, synthetic construct
  misc_feature 1..17: note = Oligonucleotide
  source 1..17: mol_type = other DNA
ccagaacaggcaagtat

SEQ ID NO: 13907 - DNA, 17 bp, synthetic construct
  misc_feature 1..17: note = Oligonucleotide
  source 1..17: mol_type = other DNA
cccccagaacaggcaag

SEQ ID NO: 13908 - DNA, 17 bp, synthetic construct
  misc_feature 1..17: note = Oligonucleotide
  source 1..17: mol_type = other DNA
acacccccagaacaggc

SEQ ID NO: 13909 - DNA, 17 bp, synthetic construct
  misc_feature 1..17: note = Oligonucleotide
  source 1..17: mol_type = other DNA
tgtacacccccagaaca

SEQ ID NO: 13910 - DNA, 17 bp, synthetic construct
  misc_feature 1..17: note = Oligonucleotide
  source 1..17: mol_type = other DNA
acatgtacacccccaga

SEQ ID NO: 13911 - DNA, 17 bp, synthetic construct
  misc_feature 1..17: note = Oligonucleotide
  source 1..17: mol_type = other DNA
cacacatgtacaccccc

SEQ ID NO: 13912 - DNA, 17 bp, synthetic construct
  misc_feature 1..17: note = Oligonucleotide
  source 1..17: mol_type = other DNA
gcacacacatgtacacc

SEQ ID NO: 13913 - DNA, 17 bp, synthetic construct
  misc_feature 1..17: note = Oligonucleotide
  source 1..17: mol_type = other DNA
tgtgcacacacatgtac

SEQ ID NO: 13914 - DNA, 17 bp, synthetic construct
  misc_feature 1..17: note = Oligonucleotide
  source 1..17: mol_type = other DNA
ctgtgtgcacacacatg

SEQ ID NO: 13915 - DNA, 17 bp, synthetic construct
  misc_feature 1..17: note = Oligonucleotide
  source 1..17: mol_type = other DNA
catctgtgtgcacacac

SEQ ID NO: 13916 - DNA, 17 bp, synthetic construct
  misc_feature 1..17: note = Oligonucleotide
  source 1..17: mol_type = other DNA
ggtcatctgtgtgcaca

SEQ ID NO: 13917 - DNA, 17 bp, synthetic construct
  misc_feature 1..17: note = Oligonucleotide
  source 1..17: mol_type = other DNA
cagggtcatctgtgtgc

SEQ ID NO: 13918 - DNA, 17 bp, synthetic construct
  misc_feature 1..17: note = Oligonucleotide
  source 1..17: mol_type = other DNA
gtacagggtcatctgtg

SEQ ID NO: 13919 - DNA, 17 bp, synthetic construct
  misc_feature 1..17: note = Oligonucleotide
  source 1..17: mol_type = other DNA
actgtacagggtcatct

SEQ ID NO: 13920 - DNA, 17 bp, synthetic construct
  misc_feature 1..17: note = Oligonucleotide
  source 1..17: mol_type = other DNA
atcactgtacagggtca

SEQ ID NO: 13921 - DNA, 17 bp, synthetic construct
  misc_feature 1..17: note = Oligonucleotide
  source 1..17: mol_type = other DNA
gcaatcactgtacaggg

SEQ ID NO: 13922 - DNA, 17 bp, synthetic construct
  misc_feature 1..17: note = Oligonucleotide
  source 1..17: mol_type = other DNA
catgcaatcactgtaca

SEQ ID NO: 13923 - DNA, 17 bp, synthetic construct
  misc_feature 1..17: note = Oligonucleotide
  source 1..17: mol_type = other DNA
acgcatgcaatcactgt

SEQ ID NO: 13924 - DNA, 17 bp, synthetic construct
  misc_feature 1..17: note = Oligonucleotide
  source 1..17: mol_type = other DNA
tgcacgcatgcaatcac

SEQ ID NO: 13925 - DNA, 17 bp, synthetic construct
  misc_feature 1..17: note = Oligonucleotide
  source 1..17: mol_type = other DNA
tagtgcacgcatgcaat

SEQ ID NO: 13926 - DNA, 17 bp, synthetic construct
  misc_feature 1..17: note = Oligonucleotide
  source 1..17: mol_type = other DNA
ccctagtgcacgcatgc

SEQ ID NO: 13927 - DNA, 17 bp, synthetic construct
  misc_feature 1..17: note = Oligonucleotide
  source 1..17: mol_type = other DNA
actccctagtgcacgca

SEQ ID NO: 13928 - DNA, 17 bp, synthetic construct
  misc_feature 1..17: note = Oligonucleotide
  source 1..17: mol_type = other DNA
cacactccctagtgcac

SEQ ID NO: 13929 - DNA, 17 bp, synthetic construct
  misc_feature 1..17: note = Oligonucleotide
  source 1..17: mol_type = other DNA
atccacactccctagtg

SEQ ID NO: 13930 - DNA, 17 bp, synthetic construct
  misc_feature 1..17: note = Oligonucleotide
  source 1..17: mol_type = other DNA
tatatccacactcccta

SEQ ID NO: 13931 - DNA, 17 bp, synthetic construct
  misc_feature 1..17: note = Oligonucleotide
  source 1..17: mol_type = other DNA
aagtatatccacactcc

SEQ ID NO: 13932 - DNA, 17 bp, synthetic construct
  misc_feature 1..17: note = Oligonucleotide
  source 1..17: mol_type = other DNA
ggcaagtatatccacac

SEQ ID NO: 13933 - DNA, 17 bp, synthetic construct
  misc_feature 1..17: note = Oligonucleotide
  source 1..17: mol_type = other DNA
acaggcaagtatatcca

SEQ ID NO: 13934 - DNA, 17 bp, synthetic construct
  misc_feature 1..17: note = Oligonucleotide
  source 1..17: mol_type = other DNA
agaacaggcaagtatat

SEQ ID NO: 13935 - DNA, 17 bp, synthetic construct
  misc_feature 1..17: note = Oligonucleotide
  source 1..17: mol_type = other DNA
cccagaacaggcaagta

SEQ ID NO: 13936 - DNA, 17 bp, synthetic construct
  misc_feature 1..17: note = Oligonucleotide
  source 1..17: mol_type = other DNA
acccccagaacaggcaa

SEQ ID NO: 13937 - DNA, 17 bp, synthetic construct
  misc_feature 1..17: note = Oligonucleotide
  source 1..17: mol_type = other DNA
tacacccccagaacagg

SEQ ID NO: 13938 - DNA, 17 bp, synthetic construct
  misc_feature 1..17: note = Oligonucleotide
  source 1..17: mol_type = other DNA
gtgtacacccccagaac

SEQ ID NO: 13939 - DNA, 17 bp, synthetic construct
  misc_feature 1..17: note = Oligonucleotide
  source 1..17: mol_type = other DNA
catgtgtacacccccag

SEQ ID NO: 13940 - DNA, 17 bp, synthetic construct
  misc_feature 1..17: note = Oligonucleotide
  source 1..17: mol_type = other DNA
acacatgtgtacacccc

SEQ ID NO: 13941 - DNA, 17 bp, synthetic construct
  misc_feature 1..17: note = Oligonucleotide
  source 1..17: mol_type = other DNA
caaacacatgtgtacac

SEQ ID NO: 13942 - DNA, 17 bp, synthetic construct
  misc_feature 1..17: note = Oligonucleotide
  source 1..17: mol_type = other DNA
gtgcaaacacatgtgta

SEQ ID NO: 13943 - DNA, 17 bp, synthetic construct
  misc_feature 1..17: note = Oligonucleotide
  source 1..17: mol_type = other DNA
tgtgtgcaaacacatgt

SEQ ID NO: 13944 - DNA, 17 bp, synthetic construct
  misc_feature 1..17: note = Oligonucleotide
  source 1..17: mol_type = other DNA
atctgtgtgcaaacaca

SEQ ID NO: 13945 - DNA, 17 bp, synthetic construct
  misc_feature 1..17: note = Oligonucleotide
  source 1..17: mol_type = other DNA
gtcatctgtgtgcaaac

SEQ ID NO: 13946 - DNA, 17 bp, synthetic construct
  misc_feature 1..17: note = Oligonucleotide
  source 1..17: mol_type = other DNA
agggtcatctgtgtgca

SEQ ID NO: 13947 - DNA, 17 bp, synthetic construct
  misc_feature 1..17: note = Oligonucleotide
  source 1..17: mol_type = other DNA
tacagggtcatctgtgt

SEQ ID NO: 13948 - DNA, 17 bp, synthetic construct
  misc_feature 1..17: note = Oligonucleotide
  source 1..17: mol_type = other DNA
ctgtacagggtcatctg

SEQ ID NO: 13949 - DNA, 17 bp, synthetic construct
  misc_feature 1..17: note = Oligonucleotide
  source 1..17: mol_type = other DNA
tcactgtacagggtcat

SEQ ID NO: 13950 - DNA, 17 bp, synthetic construct
  misc_feature 1..17: note = Oligonucleotide
  source 1..17: mol_type = other DNA
caatcactgtacagggt

SEQ ID NO: 13951 - DNA, 17 bp, synthetic construct
  misc_feature 1..17: note = Oligonucleotide
  source 1..17: mol_type = other DNA
gtacaatcactgtacag

SEQ ID NO: 13952 - DNA, 17 bp, synthetic construct
  misc_feature 1..17: note = Oligonucleotide
  source 1..17: mol_type = other DNA
cgtgtacaatcactgta

SEQ ID NO: 13953 - DNA, 17 bp, synthetic construct
  misc_feature 1..17: note = Oligonucleotide
  source 1..17: mol_type = other DNA
acacgtgtacaatcact

SEQ ID NO: 13954 - DNA, 17 bp, synthetic construct
  misc_feature 1..17: note = Oligonucleotide
  source 1..17: mol_type = other DNA
gatacacgtgtacaatc

SEQ ID NO: 13955 - DNA, 17 bp, synthetic construct
  misc_feature 1..17: note = Oligonucleotide
  source 1..17: mol_type = other DNA
cctgatacacgtgtaca

SEQ ID NO: 13956 - DNA, 17 bp, synthetic construct
  misc_feature 1..17: note = Oligonucleotide
  source 1..17: mol_type = other DNA
ctccctgatacacgtgt

SEQ ID NO: 13957 - DNA, 17 bp, synthetic construct
  misc_feature 1..17: note = Oligonucleotide
  source 1..17: mol_type = other DNA
acactccctgatacacg

SEQ ID NO: 13958 - DNA, 17 bp, synthetic construct
  misc_feature 1..17: note = Oligonucleotide
  source 1..17: mol_type = other DNA
tccacactccctgatac

SEQ ID NO: 13959 - DNA, 17 bp, synthetic construct
  misc_feature 1..17: note = Oligonucleotide
  source 1..17: mol_type = other DNA
atatccacactccctga

SEQ ID NO: 13960 - DNA, 17 bp, synthetic construct
  misc_feature 1..17: note = Oligonucleotide
  source 1..17: mol_type = other DNA
agtatatccacactccc

SEQ ID NO: 13961 - DNA, 17 bp, synthetic construct
  misc_feature 1..17: note = Oligonucleotide
  source 1..17: mol_type = other DNA
gcaagtatatccacact

SEQ ID NO: 13962 - DNA, 17 bp, synthetic construct
  misc_feature 1..17: note = Oligonucleotide
  source 1..17: mol_type = other DNA
caggcaagtatatccac

SEQ ID NO: 13963 - DNA, 17 bp, synthetic construct
  misc_feature 1..17: note = Oligonucleotide
  source 1..17: mol_type = other DNA
gaacaggcaagtatatc

SEQ ID NO: 13964 - DNA, 17 bp, synthetic construct
  misc_feature 1..17: note = Oligonucleotide
  source 1..17: mol_type = other DNA
ccagaacaggcaagtat

SEQ ID NO: 13965 - DNA, 17 bp, synthetic construct
  misc_feature 1..17: note = Oligonucleotide
  source 1..17: mol_type = other DNA
cccccagaacaggcaag

SEQ ID NO: 13966 - DNA, 17 bp, synthetic construct
  misc_feature 1..17: note = Oligonucleotide
  source 1..17: mol_type = other DNA
acacccccagaacaggc

SEQ ID NO: 13967 - DNA, 17 bp, synthetic construct
  misc_feature 1..17: note = Oligonucleotide
  source 1..17: mol_type = other DNA
tgtacacccccagaaca

SEQ ID NO: 13968 - DNA, 17 bp, synthetic construct
  misc_feature 1..17: note = Oligonucleotide
  source 1..17: mol_type = other DNA
acgtgtacacccccaga

SEQ ID NO: 13969 - DNA, 17 bp, synthetic construct
  misc_feature 1..17: note = Oligonucleotide
  source 1..17: mol_type = other DNA
cacacgtgtacaccccc

SEQ ID NO: 13970 - DNA, 17 bp, synthetic construct
  misc_feature 1..17: note = Oligonucleotide
  source 1..17: mol_type = other DNA
aaacacacgtgtacacc

SEQ ID NO: 13971 - DNA, 17 bp, synthetic construct
  misc_feature 1..17: note = Oligonucleotide
  source 1..17: mol_type = other DNA
tgcaaacacacgtgtac

SEQ ID NO: 13972 - DNA, 17 bp, synthetic construct
  misc_feature 1..17: note = Oligonucleotide
  source 1..17: mol_type = other DNA
gtgtgcaaacacacgtg

SEQ ID NO: 13973 - DNA, 17 bp, synthetic construct
  misc_feature 1..17: note = Oligonucleotide
  source 1..17: mol_type = other DNA
tctgtgtgcaaacacac

SEQ ID NO: 13974 - DNA, 17 bp, synthetic construct
  misc_feature 1..17: note = Oligonucleotide
  source 1..17: mol_type = other DNA
tcatctgtgtgcaaaca

SEQ ID NO: 13975 - DNA, 17 bp, synthetic construct
  misc_feature 1..17: note = Oligonucleotide
  source 1..17: mol_type = other DNA
gggtcatctgtgtgcaa

SEQ ID NO: 13976 - DNA, 17 bp, synthetic construct
  misc_feature 1..17: note = Oligonucleotide
  source 1..17: mol_type = other DNA
acagggtcatctgtgtg

SEQ ID NO: 13977 - DNA, 17 bp, synthetic construct
  misc_feature 1..17: note = Oligonucleotide
  source 1..17: mol_type = other DNA
tgtacagggtcatctgt

SEQ ID NO: 13978 - DNA, 17 bp, synthetic construct
  misc_feature 1..17: note = Oligonucleotide
  source 1..17: mol_type = other DNA
cactgtacagggtcatc

SEQ ID NO: 13979 - DNA, 17 bp, synthetic construct
  misc_feature 1..17: note = Oligonucleotide
  source 1..17: mol_type = other DNA
aatcactgtacagggtc

SEQ ID NO: 13980 - DNA, 17 bp, synthetic construct
  misc_feature 1..17: note = Oligonucleotide
  source 1..17: mol_type = other DNA
tacaatcactgtacagg

SEQ ID NO: 13981 - DNA, 17 bp, synthetic construct
  misc_feature 1..17: note = Oligonucleotide
  source 1..17: mol_type = other DNA
gtgtacaatcactgtac

SEQ ID NO: 13982 - DNA, 17 bp, synthetic construct
  misc_feature 1..17: note = Oligonucleotide
  source 1..17: mol_type = other DNA
cacgtgtacaatcactg

SEQ ID NO: 13983 - DNA, 17 bp, synthetic construct
  misc_feature 1..17: note = Oligonucleotide
  source 1..17: mol_type = other DNA
gtacacgtgtacaatca

SEQ ID NO: 13984 - DNA, 17 bp, synthetic construct
  misc_feature 1..17: note = Oligonucleotide
  source 1..17: mol_type = other DNA
ctggtacacgtgtacaa

SEQ ID NO: 13985 - DNA, 17 bp, synthetic construct
  misc_feature 1..17: note = Oligonucleotide
  source 1..17: mol_type = other DNA
tccctggtacacgtgta

SEQ ID NO: 13986 - DNA, 17 bp, synthetic construct
  misc_feature 1..17: note = Oligonucleotide
  source 1..17: mol_type = other DNA
cactccctggtacacgt

SEQ ID NO: 13987 - DNA, 17 bp, synthetic construct
  misc_feature 1..17: note = Oligonucleotide
  source 1..17: mol_type = other DNA
ccacactccctggtaca

SEQ ID NO: 13988 - DNA, 17 bp, synthetic construct
  misc_feature 1..17: note = Oligonucleotide
  source 1..17: mol_type = other DNA
tatccacactccctggt

SEQ ID NO: 13989 - DNA, 17 bp, synthetic construct
  misc_feature 1..17: note = Oligonucleotide
  source 1..17: mol_type = other DNA
gtatatccacactccct

SEQ ID NO: 13990 - DNA, 17 bp, synthetic construct
  misc_feature 1..17: note = Oligonucleotide
  source 1..17: mol_type = other DNA
caagtatatccacactc

SEQ ID NO: 13991 - DNA, 17 bp, synthetic construct
  misc_feature 1..17: note = Oligonucleotide
  source 1..17: mol_type = other DNA
aggcaagtatatccaca

SEQ ID NO: 13992 - DNA, 17 bp, synthetic construct
  misc_feature 1..17: note = Oligonucleotide
  source 1..17: mol_type = other DNA
aacaggcaagtatatcc

SEQ ID NO: 13993 - DNA, 17 bp, synthetic construct
  misc_feature 1..17: note = Oligonucleotide
  source 1..17: mol_type = other DNA
cagaacaggcaagtata

SEQ ID NO: 13994 - DNA, 17 bp, synthetic construct
  misc_feature 1..17: note = Oligonucleotide
  source 1..17: mol_type = other DNA
ccccagaacaggcaagt

SEQ ID NO: 13995 - DNA, 17 bp, synthetic construct
  misc_feature 1..17: note = Oligonucleotide
  source 1..17: mol_type = other DNA
cacccccagaacaggca

SEQ ID NO: 13996 - DNA, 17 bp, synthetic construct
  misc_feature 1..17: note = Oligonucleotide
  source 1..17: mol_type = other DNA
gtacacccccagaacag

SEQ ID NO: 13997 - DNA, 17 bp, synthetic construct
  misc_feature 1..17: note = Oligonucleotide
  source 1..17: mol_type = other DNA
catgtacacccccagaa

SEQ ID NO: 13998 - DNA, 17 bp, synthetic construct
  misc_feature 1..17: note = Oligonucleotide
  source 1..17: mol_type = other DNA
acacatgtacaccccca

SEQ ID NO: 13999 - DNA, 17 bp, synthetic construct
  misc_feature 1..17: note = Oligonucleotide
  source 1..17: mol_type = other DNA
cacacacatgtacaccc

SEQ ID NO: 14000 - DNA, 17 bp, synthetic construct
  misc_feature 1..17: note = Oligonucleotide
  source 1..17: mol_type = other DNA
gtgcacacacatgtaca

SEQ ID NO: 14001 - DNA, 17 bp, synthetic construct
  misc_feature 1..17: note = Oligonucleotide
  source 1..17: mol_type = other DNA
tgtgtgcacacacatgt

SEQ ID NO: 14002 - DNA, 17 bp, synthetic construct
  misc_feature 1..17: note = Oligonucleotide
  source 1..17: mol_type = other DNA
atctgtgtgcacacaca

SEQ ID NO: 14003 - DNA, 17 bp, synthetic construct
  misc_feature 1..17: note = Oligonucleotide
  source 1..17: mol_type = other DNA
gtcatctgtgtgcacac

SEQ ID NO: 14004 - DNA, 17 bp, synthetic construct
  misc_feature 1..17: note = Oligonucleotide
  source 1..17: mol_type = other DNA
agggtcatctgtgtgca

SEQ ID NO: 14005 - DNA, 17 bp, synthetic construct
  misc_feature 1..17: note = Oligonucleotide
  source 1..17: mol_type = other DNA
tacagggtcatctgtgt

SEQ ID NO: 14006 - DNA, 17 bp, synthetic construct
  misc_feature 1..17: note = Oligonucleotide
  source 1..17: mol_type = other DNA
ctgtacagggtcatctg

SEQ ID NO: 14007 - DNA, 17 bp, synthetic construct
  misc_feature 1..17: note = Oligonucleotide
  source 1..17: mol_type = other DNA
tcactgtacagggtcat

SEQ ID NO: 14008 - DNA, 17 bp, synthetic construct
  misc_feature 1..17: note = Oligonucleotide
  source 1..17: mol_type = other DNA
caatcactgtacagggt

SEQ ID NO: 14009 - DNA, 17 bp, synthetic construct
  misc_feature 1..17: note = Oligonucleotide
  source 1..17: mol_type = other DNA
atgcaatcactgtacag

SEQ ID NO: 14010 - DNA, 17 bp, synthetic construct
  misc_feature 1..17: note = Oligonucleotide
  source 1..17: mol_type = other DNA
cgcatgcaatcactgta

SEQ ID NO: 14011 - DNA, 17 bp, synthetic construct
  misc_feature 1..17: note = Oligonucleotide
  source 1..17: mol_type = other DNA
gcacgcatgcaatcact

SEQ ID NO: 14012 - DNA, 17 bp, synthetic construct
  misc_feature 1..17: note = Oligonucleotide
  source 1..17: mol_type = other DNA
ggtgcacgcatgcaatc

SEQ ID NO: 14013 - DNA, 17 bp, synthetic construct
  misc_feature 1..17: note = Oligonucleotide
  source 1..17: mol_type = other DNA
cctggtgcacgcatgca

SEQ ID NO: 14014 - DNA, 17 bp, synthetic construct
  misc_feature 1..17: note = Oligonucleotide
  source 1..17: mol_type = other DNA
ctccctggtgcacgcat

SEQ ID NO: 14015 - DNA, 17 bp, synthetic construct
  misc_feature 1..17: note = Oligonucleotide
  source 1..17: mol_type = other DNA
acactccctggtgcacg

SEQ ID NO: 14016 - DNA, 17 bp, synthetic construct
  misc_feature 1..17: note = Oligonucleotide
  source 1..17: mol_type = other DNA
tccacactccctggtgc

SEQ ID NO: 14017 - DNA, 17 bp, synthetic construct
  misc_feature 1..17: note = Oligonucleotide
  source 1..17: mol_type = other DNA
atatccacactccctgg

SEQ ID NO: 14018 - DNA, 17 bp, synthetic construct
  misc_feature 1..17: note = Oligonucleotide
  source 1..17: mol_type = other DNA
agtatatccacactccc

SEQ ID NO: 14019 - DNA, 17 bp, synthetic construct
  misc_feature 1..17: note = Oligonucleotide
  source 1..17: mol_type = other DNA
gcaagtatatccacact

SEQ ID NO: 14020 - DNA, 17 bp, synthetic construct
  misc_feature 1..17: note = Oligonucleotide
  source 1..17: mol_type = other DNA
caggcaagtatatccac

SEQ ID NO: 14021 - DNA, 17 bp, synthetic construct
  misc_feature 1..17: note = Oligonucleotide
  source 1..17: mol_type = other DNA
gaacaggcaagtatatc

SEQ ID NO: 14022 - DNA, 17 bp, synthetic construct
  misc_feature 1..17: note = Oligonucleotide
  source 1..17: mol_type = other DNA
ccagaacaggcaagtat

SEQ ID NO: 14023 - DNA, 17 bp, synthetic construct
  misc_feature 1..17: note = Oligonucleotide
  source 1..17: mol_type = other DNA
cccccagaacaggcaag

SEQ ID NO: 14024 - DNA, 17 bp, synthetic construct
  misc_feature 1..17: note = Oligonucleotide
  source 1..17: mol_type = other DNA
acacccccagaacaggc

SEQ ID NO: 14025 - DNA, 17 bp, synthetic construct
  misc_feature 1..17: note = Oligonucleotide
  source 1..17: mol_type = other DNA
tgtacacccccagaaca

SEQ ID NO: 14026 - DNA, 17 bp, synthetic construct
  misc_feature 1..17: note = Oligonucleotide
  source 1..17: mol_type = other DNA
acgtgtacacccccaga

SEQ ID NO: 14027 - DNA, 17 bp, synthetic construct
  misc_feature 1..17: note = Oligonucleotide
  source 1..17: mol_type = other DNA
cacacgtgtacaccccc

SEQ ID NO: 14028 - DNA, 17 bp, synthetic construct
  misc_feature 1..17: note = Oligonucleotide
  source 1..17: mol_type = other DNA
acacacacgtgtacacc

SEQ ID NO: 14029 - DNA, 17 bp, synthetic construct
  misc_feature 1..17: note = Oligonucleotide
  source 1..17: mol_type = other DNA
tgcacacacacgtgtac

SEQ ID NO: 14030 - DNA, 17 bp, synthetic construct
  misc_feature 1..17: note = Oligonucleotide
  source 1..17: mol_type = other DNA
gtgtgcacacacacgtg

SEQ ID NO: 14031 - DNA, 17 bp, synthetic construct
  misc_feature 1..17: note = Oligonucleotide
  source 1..17: mol_type = other DNA
cctgtgtgcacacacac

SEQ ID NO: 14032 - DNA, 17 bp, synthetic construct
  misc_feature 1..17: note = Oligonucleotide
  source 1..17: mol_type = other DNA
tcacctgtgtgcacaca

SEQ ID NO: 14033 - DNA, 17 bp, synthetic construct
  misc_feature 1..17: note = Oligonucleotide
  source 1..17: mol_type = other DNA
gggtcacctgtgtgcac

SEQ ID NO: 14034 - DNA, 17 bp, synthetic construct
  misc_feature 1..17: note = Oligonucleotide
  source 1..17: mol_type = other DNA
acagggtcacctgtgtg

SEQ ID NO: 14035 - DNA, 17 bp, synthetic construct
  misc_feature 1..17: note = Oligonucleotide
  source 1..17: mol_type = other DNA
tgtacagggtcacctgt

SEQ ID NO: 14036 - DNA, 17 bp, synthetic construct
  misc_feature 1..17: note = Oligonucleotide
  source 1..17: mol_type = other DNA
cactgtacagggtcacc

SEQ ID NO: 14037 - DNA, 17 bp, synthetic construct
  misc_feature 1..17: note = Oligonucleotide
  source 1..17: mol_type = other DNA
aatcactgtacagggtc

SEQ ID NO: 14038 - DNA, 17 bp, synthetic construct
  misc_feature 1..17: note = Oligonucleotide
  source 1..17: mol_type = other DNA
tgcaatcactgtacagg

SEQ ID NO: 14039 - DNA, 17 bp, synthetic construct
  misc_feature 1..17: note = Oligonucleotide
  source 1..17: mol_type = other DNA
gcatgcaatcactgtac

SEQ ID NO: 14040 - DNA, 17 bp, synthetic construct
  misc_feature 1..17: note = Oligonucleotide
  source 1..17: mol_type = other DNA
cacgcatgcaatcactg

SEQ ID NO: 14041 - DNA, 17 bp, synthetic construct
  misc_feature 1..17: note = Oligonucleotide
  source 1..17: mol_type = other DNA
gtgcacgcatgcaatca

SEQ ID NO: 14042 - DNA, 17 bp, synthetic construct
  misc_feature 1..17: note = Oligonucleotide
  source 1..17: mol_type = other DNA
ctggtgcacgcatgcaa

SEQ ID NO: 14043 - DNA, 17 bp, synthetic construct
  misc_feature 1..17: note = Oligonucleotide
  source 1..17: mol_type = other DNA
tccctggtgcacgcatg

SEQ ID NO: 14044 - DNA, 17 bp, synthetic construct
  misc_feature 1..17: note = Oligonucleotide
  source 1..17: mol_type = other DNA
cactccctggtgcacgc

SEQ ID NO: 14045 - DNA, 17 bp, synthetic construct
  misc_feature 1..17: note = Oligonucleotide
  source 1..17: mol_type = other DNA
ccacactccctggtgca

SEQ ID NO: 14046 - DNA, 17 bp, synthetic construct
  misc_feature 1..17: note = Oligonucleotide
  source 1..17: mol_type = other DNA
tatccacactccctggt

SEQ ID NO: 14047 - DNA, 17 bp, synthetic construct
  misc_feature 1..17: note = Oligonucleotide
  source 1..17: mol_type = other DNA
gtatatccacactccct

SEQ ID NO: 14048 - DNA, 17 bp, synthetic construct
  misc_feature 1..17: note = Oligonucleotide
  source 1..17: mol_type = other DNA
caagtatatccacactc

SEQ ID NO: 14049 - DNA, 17 bp, synthetic construct
  misc_feature 1..17: note = Oligonucleotide
  source 1..17: mol_type = other DNA
aggcaagtatatccaca

SEQ ID NO: 14050 - DNA, 17 bp, synthetic construct
  misc_feature 1..17: note = Oligonucleotide
  source 1..17: mol_type = other DNA
aacaggcaagtatatcc

SEQ ID NO: 14051 - DNA, 17 bp, synthetic construct
  misc_feature 1..17: note = Oligonucleotide
  source 1..17: mol_type = other DNA
cagaacaggcaagtata

SEQ ID NO: 14052 - DNA, 17 bp, synthetic construct
  misc_feature 1..17: note = Oligonucleotide
  source 1..17: mol_type = other DNA
ccccagaacaggcaagt

SEQ ID NO: 14053 - DNA, 17 bp, synthetic construct
  misc_feature 1..17: note = Oligonucleotide
  source 1..17: mol_type = other DNA
cacccccagaacaggca

SEQ ID NO: 14054 - DNA, 17 bp, synthetic construct
  misc_feature 1..17: note = Oligonucleotide
  source 1..17: mol_type = other DNA
gtacacccccagaacag

SEQ ID NO: 14055 - DNA, 17 bp, synthetic construct
  misc_feature 1..17: note = Oligonucleotide
  source 1..17: mol_type = other DNA
cgtgtacacccccagaa

SEQ ID NO: 14056 - DNA, 17 bp, synthetic construct
  misc_feature 1..17: note = Oligonucleotide
  source 1..17: mol_type = other DNA
acacgtgtacaccccca

SEQ ID NO: 14057 - DNA, 17 bp, synthetic construct
  misc_feature 1..17: note = Oligonucleotide
  source 1..17: mol_type = other DNA
cacacacgtgtacaccc

SEQ ID NO: 14058 - DNA, 17 bp, synthetic construct
  misc_feature 1..17: note = Oligonucleotide
  source 1..17: mol_type = other DNA
gcacacacacgtgtaca

SEQ ID NO: 14059 - DNA, 17 bp, synthetic construct
  misc_feature 1..17: note = Oligonucleotide
  source 1..17: mol_type = other DNA
tgtgcacacacacgtgt

SEQ ID NO: 14060 - DNA, 17 bp, synthetic construct
  misc_feature 1..17: note = Oligonucleotide
  source 1..17: mol_type = other DNA
ctgtgtgcacacacacg

SEQ ID NO: 14061 - DNA, 17 bp, synthetic construct
  misc_feature 1..17: note = Oligonucleotide
  source 1..17: mol_type = other DNA
cacctgtgtgcacacac

SEQ ID NO: 14062 - DNA, 17 bp, synthetic construct
  misc_feature 1..17: note = Oligonucleotide
  source 1..17: mol_type = other DNA
gatcacctgtgtgcaca

SEQ ID NO: 14063 - DNA, 17 bp, synthetic construct
  misc_feature 1..17: note = Oligonucleotide
  source 1..17: mol_type = other DNA
caggatcacctgtgtgc

SEQ ID NO: 14064 - DNA, 17 bp, synthetic construct
  misc_feature 1..17: note = Oligonucleotide
  source 1..17: mol_type = other DNA
gtacaggatcacctgtg

SEQ ID NO: 14065 - DNA, 17 bp, synthetic construct
  misc_feature 1..17: note = Oligonucleotide
  source 1..17: mol_type = other DNA
actgtacaggatcacct

SEQ ID NO: 14066 - DNA, 17 bp, synthetic construct
  misc_feature 1..17: note = Oligonucleotide
  source 1..17: mol_type = other DNA
atcactgtacaggatca

SEQ ID NO: 14067 - DNA, 17 bp, synthetic construct
  misc_feature 1..17: note = Oligonucleotide
  source 1..17: mol_type = other DNA
gcaatcactgtacagga

SEQ ID NO: 14068 - DNA, 17 bp, synthetic construct
  misc_feature 1..17: note = Oligonucleotide
  source 1..17: mol_type = other DNA
catgcaatcactgtaca

SEQ ID NO: 14069 - DNA, 17 bp, synthetic construct
  misc_feature 1..17: note = Oligonucleotide
  source 1..17: mol_type = other DNA
acgcatgcaatcactgt

SEQ ID NO: 14070 - DNA, 17 bp, synthetic construct
  misc_feature 1..17: note = Oligonucleotide
  source 1..17: mol_type = other DNA
tgcacgcatgcaatcac

SEQ ID NO: 14071 - DNA, 17 bp, synthetic construct
  misc_feature 1..17: note = Oligonucleotide
  source 1..17: mol_type = other DNA
tggtgcacgcatgcaat

SEQ ID NO: 14072 - DNA, 17 bp, synthetic construct
  misc_feature 1..17: note = Oligonucleotide
  source 1..17: mol_type = other DNA
ccctggtgcacgcatgc

SEQ ID NO: 14073 - DNA, 17 bp, synthetic construct
  misc_feature 1..17: note = Oligonucleotide
  source 1..17: mol_type = other DNA
actccctggtgcacgca

SEQ ID NO: 14074 - DNA, 17 bp, synthetic construct
  misc_feature 1..17: note = Oligonucleotide
  source 1..17: mol_type = other DNA
cacactccctggtgcac

SEQ ID NO: 14075 - DNA, 17 bp, synthetic construct
  misc_feature 1..17: note = Oligonucleotide
  source 1..17: mol_type = other DNA
atccacactccctggtg

SEQ ID NO: 14076 - DNA, 17 bp, synthetic construct
  misc_feature 1..17: note = Oligonucleotide
  source 1..17: mol_type = other DNA
tatatccacactccctg

SEQ ID NO: 14077 - DNA, 17 bp, synthetic construct
  misc_feature 1..17: note = Oligonucleotide
  source 1..17: mol_type = other DNA
aagtatatccacactcc

SEQ ID NO: 14078 - DNA, 17 bp, synthetic construct
  misc_feature 1..17: note = Oligonucleotide
  source 1..17: mol_type = other DNA
ggcaagtatatccacac

SEQ ID NO: 14079 - DNA, 17 bp, synthetic construct
  misc_feature 1..17: note = Oligonucleotide
  source 1..17: mol_type = other DNA
acaggcaagtatatcca

SEQ ID NO: 14080 - DNA, 17 bp, synthetic construct
  misc_feature 1..17: note = Oligonucleotide
  source 1..17: mol_type = other DNA
agaacaggcaagtatat

SEQ ID NO: 14081 - DNA, 17 bp, synthetic construct
  misc_feature 1..17: note = Oligonucleotide
  source 1..17: mol_type = other DNA
cccagaacaggcaagta

SEQ ID NO: 14082 - DNA, 17 bp, synthetic construct
  misc_feature 1..17: note = Oligonucleotide
  source 1..17: mol_type = other DNA
acccccagaacaggcaa

SEQ ID NO: 14083 - DNA, 17 bp, synthetic construct
  misc_feature 1..17: note = Oligonucleotide
  source 1..17: mol_type = other DNA
tacacccccagaacagg

SEQ ID NO: 14084 - DNA, 17 bp, synthetic construct
  misc_feature 1..17: note = Oligonucleotide
  source 1..17: mol_type = other DNA
gtgtacacccccagaac

SEQ ID NO: 14085 - DNA, 17 bp, synthetic construct
  misc_feature 1..17: note = Oligonucleotide
  source 1..17: mol_type = other DNA
catgtgtacacccccag

SEQ ID NO: 14086 - DNA, 17 bp, synthetic construct
  misc_feature 1..17: note = Oligonucleotide
  source 1..17: mol_type = other DNA
acacatgtgtacacccc

SEQ ID NO: 14087 - DNA, 17 bp, synthetic construct
  misc_feature 1..17: note = Oligonucleotide
  source 1..17: mol_type = other DNA
caaacacatgtgtacac

SEQ ID NO: 14088 - DNA, 17 bp, synthetic construct
  misc_feature 1..17: note = Oligonucleotide
  source 1..17: mol_type = other DNA
gtgcaaacacatgtgta

SEQ ID NO: 14089 - DNA, 17 bp, synthetic construct
  misc_feature 1..17: note = Oligonucleotide
  source 1..17: mol_type = other DNA
tgtgtgcaaacacatgt

SEQ ID NO: 14090 - DNA, 17 bp, synthetic construct
  misc_feature 1..17: note = Oligonucleotide
  source 1..17: mol_type = other DNA
atctgtgtgcaaacaca

SEQ ID NO: 14091 - DNA, 17 bp, synthetic construct
  misc_feature 1..17: note = Oligonucleotide
  source 1..17: mol_type = other DNA
gtcatctgtgtgcaaac

SEQ ID NO: 14092 - DNA, 17 bp, synthetic construct
  misc_feature 1..17: note = Oligonucleotide
  source 1..17: mol_type = other DNA
agggtcatctgtgtgca

SEQ ID NO: 14093 - DNA, 17 bp, synthetic construct
  misc_feature 1..17: note = Oligonucleotide
  source 1..17: mol_type = other DNA
tacagggtcatctgtgt

SEQ ID NO: 14094 - DNA, 17 bp, synthetic construct
  misc_feature 1..17: note = Oligonucleotide
  source 1..17: mol_type = other DNA
ctgtacagggtcatctg

SEQ ID NO: 14095 - DNA, 17 bp, synthetic construct
  misc_feature 1..17: note = Oligonucleotide
  source 1..17: mol_type = other DNA
tcactgtacagggtcat

SEQ ID NO: 14096 - DNA, 17 bp, synthetic construct
  misc_feature 1..17: note = Oligonucleotide
  source 1..17: mol_type = other DNA
caatcactgtacagggt

SEQ ID NO: 14097 - DNA, 17 bp, synthetic construct
  misc_feature 1..17: note = Oligonucleotide
  source 1..17: mol_type = other DNA
atgcaatcactgtacag

SEQ ID NO: 14098 - DNA, 17 bp, synthetic construct
  misc_feature 1..17: note = Oligonucleotide
  source 1..17: mol_type = other DNA
cgcatgcaatcactgta

SEQ ID NO: 14099 - DNA, 17 bp, synthetic construct
  misc_feature 1..17: note = Oligonucleotide
  source 1..17: mol_type = other DNA
gcacgcatgcaatcact

SEQ ID NO: 14100 - DNA, 17 bp, synthetic construct
  misc_feature 1..17: note = Oligonucleotide
  source 1..17: mol_type = other DNA
ggtgcacgcatgcaatc

SEQ ID NO: 14101 - DNA, 17 bp, synthetic construct
  misc_feature 1..17: note = Oligonucleotide
  source 1..17: mol_type = other DNA
cctggtgcacgcatgca

SEQ ID NO: 14102 - DNA, 17 bp, synthetic construct
  misc_feature 1..17: note = Oligonucleotide
  source 1..17: mol_type = other DNA
ctccctggtgcacgcat

SEQ ID NO: 14103 - DNA, 17 bp, synthetic construct
  misc_feature 1..17: note = Oligonucleotide
  source 1..17: mol_type = other DNA
acactccctggtgcacg

SEQ ID NO: 14104 - DNA, 17 bp, synthetic construct
  misc_feature 1..17: note = Oligonucleotide
  source 1..17: mol_type = other DNA
tccacactccctggtgc

SEQ ID NO: 14105 - DNA, 17 bp, synthetic construct
  misc_feature 1..17: note = Oligonucleotide
  source 1..17: mol_type = other DNA
atatccacactccctgg

SEQ ID NO: 14106 - DNA, 17 bp, synthetic construct
  misc_feature 1..17: note = Oligonucleotide
  source 1..17: mol_type = other DNA
agtatatccacactccc

SEQ ID NO: 14107 - DNA, 17 bp, synthetic construct
  misc_feature 1..17: note = Oligonucleotide
  source 1..17: mol_type = other DNA
gcaagtatatccacact

SEQ ID NO: 14108 - DNA, 17 bp, synthetic construct
  misc_feature 1..17: note = Oligonucleotide
  source 1..17: mol_type = other DNA
caggcaagtatatccac

SEQ ID NO: 14109 - DNA, 17 bp, synthetic construct
  misc_feature 1..17: note = Oligonucleotide
  source 1..17: mol_type = other DNA
gaacaggcaagtatatc

SEQ ID NO: 14110 - DNA, 17 bp, synthetic construct
  misc_feature 1..17: note = Oligonucleotide
  source 1..17: mol_type = other DNA
ccagaacaggcaagtat

SEQ ID NO: 14111 - DNA, 17 bp, synthetic construct
  misc_feature 1..17: note = Oligonucleotide
  source 1..17: mol_type = other DNA
cccccagaacaggcaag

SEQ ID NO: 14112 - DNA, 17 bp, synthetic construct
  misc_feature 1..17: note = Oligonucleotide
  source 1..17: mol_type = other DNA
acacccccagaacaggc

SEQ ID NO: 14113 - DNA, 17 bp, synthetic construct
  misc_feature 1..17: note = Oligonucleotide
  source 1..17: mol_type = other DNA
tgtacacccccagaaca

SEQ ID NO: 14114 - DNA, 17 bp, synthetic construct
  misc_feature 1..17: note = Oligonucleotide
  source 1..17: mol_type = other DNA
acgtgtacacccccaga

SEQ ID NO: 14115 - DNA, 17 bp, synthetic construct
  misc_feature 1..17: note = Oligonucleotide
  source 1..17: mol_type = other DNA
cacacgtgtacaccccc

SEQ ID NO: 14116 - DNA, 17 bp, synthetic construct
  misc_feature 1..17: note = Oligonucleotide
  source 1..17: mol_type = other DNA
acacacacgtgtacacc

SEQ ID NO: 14117 - DNA, 17 bp, synthetic construct
  misc_feature 1..17: note = Oligonucleotide
  source 1..17: mol_type = other DNA
tgcacacacacgtgtac

SEQ ID NO: 14118 - DNA, 17 bp, synthetic construct
  misc_feature 1..17: note = Oligonucleotide
  source 1..17: mol_type = other DNA
gtgtgcacacacacgtg

SEQ ID NO: 14119 - DNA, 17 bp, synthetic construct
  misc_feature 1..17: note = Oligonucleotide
  source 1..17: mol_type = other DNA
cctgtgtgcacacacac

SEQ ID NO: 14120 - DNA, 17 bp, synthetic construct
  misc_feature 1..17: note = Oligonucleotide
  source 1..17: mol_type = other DNA
tcacctgtgtgcacaca

SEQ ID NO: 14121 - DNA, 17 bp, synthetic construct
  misc_feature 1..17: note = Oligonucleotide
  source 1..17: mol_type = other DNA
gggtcacctgtgtgcac

SEQ ID NO: 14122 - DNA, 17 bp, synthetic construct
  misc_feature 1..17: note = Oligonucleotide
  source 1..17: mol_type = other DNA
acagggtcacctgtgtg

SEQ ID NO: 14123 - DNA, 17 bp, synthetic construct
  misc_feature 1..17: note = Oligonucleotide
  source 1..17: mol_type = other DNA
tgtacagggtcacctgt

SEQ ID NO: 14124 - DNA, 17 bp, synthetic construct
  misc_feature 1..17: note = Oligonucleotide
  source 1..17: mol_type = other DNA
cactgtacagggtcacc

SEQ ID NO: 14125 - DNA, 17 bp, synthetic construct
  misc_feature 1..17: note = Oligonucleotide
  source 1..17: mol_type = other DNA
aatcactgtacagggtc

SEQ ID NO: 14126 - DNA, 17 bp, synthetic construct
  misc_feature 1..17: note = Oligonucleotide
  source 1..17: mol_type = other DNA
tgcaatcactgtacagg

SEQ ID NO: 14127 - DNA, 17 bp, synthetic construct
  misc_feature 1..17: note = Oligonucleotide
  source 1..17: mol_type = other DNA
gcatgcaatcactgtac

SEQ ID NO: 14128 - DNA, 17 bp, synthetic construct
  misc_feature 1..17: note = Oligonucleotide
  source 1..17: mol_type = other DNA
cacgcatgcaatcactg

SEQ ID NO: 14129 - DNA, 17 bp, synthetic construct
  misc_feature 1..17: note = Oligonucleotide
  source 1..17: mol_type = other DNA
gtgcacgcatgcaatca

SEQ ID NO: 14130 - DNA, 17 bp, synthetic construct
  misc_feature 1..17: note = Oligonucleotide
  source 1..17: mol_type = other DNA
ctggtgcacgcatgcaa

SEQ ID NO: 14131 - DNA, 17 bp, synthetic construct
  misc_feature 1..17: note = Oligonucleotide
  source 1..17: mol_type = other DNA
tccctggtgcacgcatg

SEQ ID NO: 14132 - DNA, 17 bp, synthetic construct
  misc_feature 1..17: note = Oligonucleotide
  source 1..17: mol_type = other DNA
cactccctggtgcacgc

SEQ ID NO: 14133 - DNA, 17 bp, synthetic construct
  misc_feature 1..17: note = Oligonucleotide
  source 1..17: mol_type = other DNA
ccacactccctggtgca

SEQ ID NO: 14134 - DNA, 17 bp, synthetic construct
  misc_feature 1..17: note = Oligonucleotide
  source 1..17: mol_type = other DNA
tatccacactccctggt

SEQ ID NO: 14135 - DNA, 17 bp, synthetic construct
  misc_feature 1..17: note = Oligonucleotide
  source 1..17: mol_type = other DNA
gtatatccacactccct

SEQ ID NO: 14136 - DNA, 17 bp, synthetic construct
  misc_feature 1..17: note = Oligonucleotide
  source 1..17: mol_type = other DNA
caagtatatccacactc

SEQ ID NO: 14137 - DNA, 17 bp, synthetic construct
  misc_feature 1..17: note = Oligonucleotide
  source 1..17: mol_type = other DNA
aggcaagtatatccaca

SEQ ID NO: 14138 - DNA, 17 bp, synthetic construct
  misc_feature 1..17: note = Oligonucleotide
  source 1..17: mol_type = other DNA
aacaggcaagtatatcc

SEQ ID NO: 14139 - DNA, 17 bp, synthetic construct
  misc_feature 1..17: note = Oligonucleotide
  source 1..17: mol_type = other DNA
cagaacaggcaagtata

SEQ ID NO: 14140 - DNA, 17 bp, synthetic construct
  misc_feature 1..17: note = Oligonucleotide
  source 1..17: mol_type = other DNA
ccccagaacaggcaagt

SEQ ID NO: 14141 - DNA, 17 bp, synthetic construct
  misc_feature 1..17: note = Oligonucleotide
  source 1..17: mol_type = other DNA
cacccccagaacaggca

SEQ ID NO: 14142 - DNA, 17 bp, synthetic construct
  misc_feature 1..17: note = Oligonucleotide
  source 1..17: mol_type = other DNA
gtacacccccagaacag

SEQ ID NO: 14143 - DNA, 17 bp, synthetic construct
  misc_feature 1..17: note = Oligonucleotide
  source 1..17: mol_type = other DNA
cgtgtacacccccagaa

SEQ ID NO: 14144 - DNA, 17 bp, synthetic construct
  misc_feature 1..17: note = Oligonucleotide
  source 1..17: mol_type = other DNA
acacgtgtacaccccca

SEQ ID NO: 14145 - DNA, 17 bp, synthetic construct
  misc_feature 1..17: note = Oligonucleotide
  source 1..17: mol_type = other DNA
cacacacgtgtacaccc

SEQ ID NO: 14146 - DNA, 17 bp, synthetic construct
  misc_feature 1..17: note = Oligonucleotide
  source 1..17: mol_type = other DNA
gcacacacacgtgtaca

SEQ ID NO: 14147 - DNA, 17 bp, synthetic construct
  misc_feature 1..17: note = Oligonucleotide
  source 1..17: mol_type = other DNA
tgtgcacacacacgtgt

SEQ ID NO: 14148 - DNA, 17 bp, synthetic construct
  misc_feature 1..17: note = Oligonucleotide
  source 1..17: mol_type = other DNA
ctgtgtgcacacacacg

SEQ ID NO: 14149 - DNA, 17 bp, synthetic construct
  misc_feature 1..17: note = Oligonucleotide
  source 1..17: mol_type = other DNA
cacctgtgtgcacacac

SEQ ID NO: 14150 - DNA, 17 bp, synthetic construct
  misc_feature 1..17: note = Oligonucleotide
  source 1..17: mol_type = other DNA
ggtcacctgtgtgcaca

SEQ ID NO: 14151 - DNA, 17 bp, synthetic construct
  misc_feature 1..17: note = Oligonucleotide
  source 1..17: mol_type = other DNA
cagggtcacctgtgtgc

SEQ ID NO: 14152 - DNA, 17 bp, synthetic construct
  misc_feature 1..17: note = Oligonucleotide
  source 1..17: mol_type = other DNA
gtacagggtcacctgtg

SEQ ID NO: 14153 - DNA, 17 bp, synthetic construct
  misc_feature 1..17: note = Oligonucleotide
  source 1..17: mol_type = other DNA
actgtacagggtcacct

SEQ ID NO: 14154 - DNA, 17 bp, synthetic construct
  misc_feature 1..17: note = Oligonucleotide
  source 1..17: mol_type = other DNA
atcactgtacagggtca

SEQ ID NO: 14155 - DNA, 17 bp, synthetic construct
  misc_feature 1..17: note = Oligonucleotide
  source 1..17: mol_type = other DNA
gcaatcactgtacaggg

SEQ ID NO: 14156 - DNA, 17 bp, synthetic construct
  misc_feature 1..17: note = Oligonucleotide
  source 1..17: mol_type = other DNA
catgcaatcactgtaca

SEQ ID NO: 14157 - DNA, 17 bp, synthetic construct
  misc_feature 1..17: note = Oligonucleotide
  source 1..17: mol_type = other DNA
acgcatgcaatcactgt

SEQ ID NO: 14158 - DNA, 17 bp, synthetic construct
  misc_feature 1..17: note = Oligonucleotide
  source 1..17: mol_type = other DNA
tgcacgcatgcaatcac

SEQ ID NO: 14159 - DNA, 17 bp, synthetic construct
  misc_feature 1..17: note = Oligonucleotide
  source 1..17: mol_type = other DNA
tggtgcacgcatgcaat

SEQ ID NO: 14160 - DNA, 17 bp, synthetic construct
  misc_feature 1..17: note = Oligonucleotide
  source 1..17: mol_type = other DNA
ccctggtgcacgcatgc

SEQ ID NO: 14161 - DNA, 17 bp, synthetic construct
  misc_feature 1..17: note = Oligonucleotide
  source 1..17: mol_type = other DNA
actccctggtgcacgca

SEQ ID NO: 14162 - DNA, 17 bp, synthetic construct
  misc_feature 1..17: note = Oligonucleotide
  source 1..17: mol_type = other DNA
cacactccctggtgcac

SEQ ID NO: 14163 - DNA, 17 bp, synthetic construct
  misc_feature 1..17: note = Oligonucleotide
  source 1..17: mol_type = other DNA
atccacactccctggtg

SEQ ID NO: 14164 - DNA, 17 bp, synthetic construct
  misc_feature 1..17: note = Oligonucleotide
  source 1..17: mol_type = other DNA
tatatccacactccctg

SEQ ID NO: 14165 - DNA, 17 bp, synthetic construct
  misc_feature 1..17: note = Oligonucleotide
  source 1..17: mol_type = other DNA
aagtatatccacactcc

SEQ ID NO: 14166 - DNA, 17 bp, synthetic construct
  misc_feature 1..17: note = Oligonucleotide
  source 1..17: mol_type = other DNA
ggcaagtatatccacac

SEQ ID NO: 14167 - DNA, 17 bp, synthetic construct
  misc_feature 1..17: note = Oligonucleotide
  source 1..17: mol_type = other DNA
acaggcaagtatatcca

SEQ ID NO: 14168 - DNA, 17 bp, synthetic construct
  misc_feature 1..17: note = Oligonucleotide
  source 1..17: mol_type = other DNA
agaacaggcaagtatat

SEQ ID NO: 14169 - DNA, 17 bp, synthetic construct
  misc_feature 1..17: note = Oligonucleotide
  source 1..17: mol_type = other DNA
cccagaacaggcaagta

SEQ ID NO: 14170 - DNA, 17 bp, synthetic construct
  misc_feature 1..17: note = Oligonucleotide
  source 1..17: mol_type = other DNA
acccccagaacaggcaa

SEQ ID NO: 14171 - DNA, 17 bp, synthetic construct
  misc_feature 1..17: note = Oligonucleotide
  source 1..17: mol_type = other DNA
tacacccccagaacagg

SEQ ID NO: 14172 - DNA, 17 bp, synthetic construct
  misc_feature 1..17: note = Oligonucleotide
  source 1..17: mol_type = other DNA
atgtacacccccagaac

SEQ ID NO: 14173 - DNA, 17 bp, synthetic construct
  misc_feature 1..17: note = Oligonucleotide
  source 1..17: mol_type = other DNA
cacatgtacacccccag

SEQ ID NO: 14174 - DNA, 17 bp, synthetic construct
  misc_feature 1..17: note = Oligonucleotide
  source 1..17: mol_type = other DNA
acacacatgtacacccc

SEQ ID NO: 14175 - DNA, 17 bp, synthetic construct
  misc_feature 1..17: note = Oligonucleotide
  source 1..17: mol_type = other DNA
tgcacacacatgtacac

SEQ ID NO: 14176 - DNA, 17 bp, synthetic construct
  misc_feature 1..17: note = Oligonucleotide
  source 1..17: mol_type = other DNA
gtgtgcacacacatgta

SEQ ID NO: 14177 - DNA, 17 bp, synthetic construct
  misc_feature 1..17: note = Oligonucleotide
  source 1..17: mol_type = other DNA
cctgtgtgcacacacat

SEQ ID NO: 14178 - DNA, 17 bp, synthetic construct
  misc_feature 1..17: note = Oligonucleotide
  source 1..17: mol_type = other DNA
tcacctgtgtgcacaca

SEQ ID NO: 14179 - DNA, 17 bp, synthetic construct
  misc_feature 1..17: note = Oligonucleotide
  source 1..17: mol_type = other DNA
gggtcacctgtgtgcac

SEQ ID NO: 14180 - DNA, 17 bp, synthetic construct
  misc_feature 1..17: note = Oligonucleotide
  source 1..17: mol_type = other DNA
acagggtcacctgtgtg

SEQ ID NO: 14181 - DNA, 17 bp, synthetic construct
  misc_feature 1..17: note = Oligonucleotide
  source 1..17: mol_type = other DNA
tgtacagggtcacctgt

SEQ ID NO: 14182 - DNA, 17 bp, synthetic construct
  misc_feature 1..17: note = Oligonucleotide
  source 1..17: mol_type = other DNA
cactgtacagggtcacc

SEQ ID NO: 14183 - DNA, 17 bp, synthetic construct
  misc_feature 1..17: note = Oligonucleotide
  source 1..17: mol_type = other DNA
aatcactgtacagggtc

SEQ ID NO: 14184 - DNA, 17 bp, synthetic construct
  misc_feature 1..17: note = Oligonucleotide
  source 1..17: mol_type = other DNA
tgcaatcactgtacagg

SEQ ID NO: 14185 - DNA, 17 bp, synthetic construct
  misc_feature 1..17: note = Oligonucleotide
  source 1..17: mol_type = other DNA
gcatgcaatcactgtac

SEQ ID NO: 14186 - DNA, 17 bp, synthetic construct
  misc_feature 1..17: note = Oligonucleotide
  source 1..17: mol_type = other DNA
cacgcatgcaatcactg

SEQ ID NO: 14187 - DNA, 17 bp, synthetic construct
  misc_feature 1..17: note = Oligonucleotide
  source 1..17: mol_type = other DNA
gtgcacgcatgcaatca

SEQ ID NO: 14188 - DNA, 17 bp, synthetic construct
  misc_feature 1..17: note = Oligonucleotide
  source 1..17: mol_type = other DNA
ctggtgcacgcatgcaa

SEQ ID NO: 14189 - DNA, 17 bp, synthetic construct
  misc_feature 1..17: note = Oligonucleotide
  source 1..17: mol_type = other DNA
tccctggtgcacgcatg

SEQ ID NO: 14190 - DNA, 17 bp, synthetic construct
  misc_feature 1..17: note = Oligonucleotide
  source 1..17: mol_type = other DNA
cactccctggtgcacgc

SEQ ID NO: 14191 - DNA, 17 bp, synthetic construct
  misc_feature 1..17: note = Oligonucleotide
  source 1..17: mol_type = other DNA
ccacactccctggtgca

SEQ ID NO: 14192 - DNA, 17 bp, synthetic construct
  misc_feature 1..17: note = Oligonucleotide
  source 1..17: mol_type = other DNA
tttccacactccctggt

SEQ ID NO: 14193 - DNA, 17 bp, synthetic construct
  misc_feature 1..17: note = Oligonucleotide
  source 1..17: mol_type = other DNA
gtatttccacactccct

SEQ ID NO: 14194 - DNA, 17 bp, synthetic construct
  misc_feature 1..17: note = Oligonucleotide
  source 1..17: mol_type = other DNA
caagtatttccacactc

SEQ ID NO: 14195 - DNA, 17 bp, synthetic construct
  misc_feature 1..17: note = Oligonucleotide
  source 1..17: mol_type = other DNA
aggcaagtatttccaca

SEQ ID NO: 14196 - DNA, 17 bp, synthetic construct
  misc_feature 1..17: note = Oligonucleotide
  source 1..17: mol_type = other DNA
aacaggcaagtatttcc

SEQ ID NO: 14197 - DNA, 17 bp, synthetic construct
  misc_feature 1..17: note = Oligonucleotide
  source 1..17: mol_type = other DNA
cagaacaggcaagtatt

SEQ ID NO: 14198 - DNA, 17 bp, synthetic construct
  misc_feature 1..17: note = Oligonucleotide
  source 1..17: mol_type = other DNA
ccccagaacaggcaagt

SEQ ID NO: 14199 - DNA, 17 bp, synthetic construct
  misc_feature 1..17: note = Oligonucleotide
  source 1..17: mol_type = other DNA
cacccccagaacaggca

SEQ ID NO: 14200 - DNA, 17 bp, synthetic construct
  misc_feature 1..17: note = Oligonucleotide
  source 1..17: mol_type = other DNA
gtacacccccagaacag

SEQ ID NO: 14201 - DNA, 17 bp, synthetic construct
  misc_feature 1..17: note = Oligonucleotide
  source 1..17: mol_type = other DNA
cgtgtacacccccagaa

SEQ ID NO: 14202 - DNA, 17 bp, synthetic construct
  misc_feature 1..17: note = Oligonucleotide
  source 1..17: mol_type = other DNA
acacgtgtacaccccca

SEQ ID NO: 14203 - DNA, 17 bp, synthetic construct
  misc_feature 1..17: note = Oligonucleotide
  source 1..17: mol_type = other DNA
cacacacgtgtacaccc

SEQ ID NO: 14204 - DNA, 17 bp, synthetic construct
  misc_feature 1..17: note = Oligonucleotide
  source 1..17: mol_type = other DNA
gcacacacacgtgtaca

SEQ ID NO: 14205 - DNA, 17 bp, synthetic construct
  misc_feature 1..17: note = Oligonucleotide
  source 1..17: mol_type = other DNA
tgtgcacacacacgtgt

SEQ ID NO: 14206 - DNA, 17 bp, synthetic construct
  misc_feature 1..17: note = Oligonucleotide
  source 1..17: mol_type = other DNA
ctgtgtgcacacacacg

SEQ ID NO: 14207 - DNA, 17 bp, synthetic construct
  misc_feature 1..17: note = Oligonucleotide
  source 1..17: mol_type = other DNA
catctgtgtgcacacac

SEQ ID NO: 14208 - DNA, 17 bp, synthetic construct
  misc_feature 1..17: note = Oligonucleotide
  source 1..17: mol_type = other DNA
ggtcatctgtgtgcaca

SEQ ID NO: 14209 - DNA, 17 bp, synthetic construct
  misc_feature 1..17: note = Oligonucleotide
  source 1..17: mol_type = other DNA
cagggtcatctgtgtgc

SEQ ID NO: 14210 - DNA, 17 bp, synthetic construct
  misc_feature 1..17: note = Oligonucleotide
  source 1..17: mol_type = other DNA
gtacagggtcatctgtg

SEQ ID NO: 14211 - DNA, 17 bp, synthetic construct
  misc_feature 1..17: note = Oligonucleotide
  source 1..17: mol_type = other DNA
actgtacagggtcatct

SEQ ID NO: 14212 - DNA, 17 bp, synthetic construct
  misc_feature 1..17: note = Oligonucleotide
  source 1..17: mol_type = other DNA
atcactgtacagggtca

SEQ ID NO: 14213 - DNA, 17 bp, synthetic construct
  misc_feature 1..17: note = Oligonucleotide
  source 1..17: mol_type = other DNA
acaatcactgtacaggg

SEQ ID NO: 14214 - DNA, 17 bp, synthetic construct
  misc_feature 1..17: note = Oligonucleotide
  source 1..17: mol_type = other DNA
tacacaatcactgtaca

SEQ ID NO: 14215 - DNA, 17 bp, synthetic construct
  misc_feature 1..17: note = Oligonucleotide
  source 1..17: mol_type = other DNA
acatacacaatcactgt

SEQ ID NO: 14216 - DNA, 17 bp, synthetic construct
  misc_feature 1..17: note = Oligonucleotide
  source 1..17: mol_type = other DNA
tgcacatacacaatcac

SEQ ID NO: 14217 - DNA, 17 bp, synthetic construct
  misc_feature 1..17: note = Oligonucleotide
  source 1..17: mol_type = other DNA
ggatgcacatacacaat

SEQ ID NO: 14218 - DNA, 17 bp, synthetic construct
  misc_feature 1..17: note = Oligonucleotide
  source 1..17: mol_type = other DNA
cagggatgcacatacac

SEQ ID NO: 14219 - DNA, 17 bp, synthetic construct
  misc_feature 1..17: note = Oligonucleotide
  source 1..17: mol_type = other DNA
aggcagggatgcacata

SEQ ID NO: 14220 - DNA, 17 bp, synthetic construct
  misc_feature 1..17: note = Oligonucleotide
  source 1..17: mol_type = other DNA
cagaggcagggatgcac

SEQ ID NO: 14221 - DNA, 17 bp, synthetic construct
  misc_feature 1..17: note = Oligonucleotide
  source 1..17: mol_type = other DNA
gcacagaggcagggatg

SEQ ID NO: 14222 - DNA, 17 bp, synthetic construct
  misc_feature 1..17: note = Oligonucleotide
  source 1..17: mol_type = other DNA
atggcacagaggcaggg

SEQ ID NO: 14223 - DNA, 17 bp, synthetic construct
  misc_feature 1..17: note = Oligonucleotide
  source 1..17: mol_type = other DNA
accatggcacagaggca

SEQ ID NO: 14224 - DNA, 17 bp, synthetic construct
  misc_feature 1..17: note = Oligonucleotide
  source 1..17: mol_type = other DNA
tataccatggcacagag

SEQ ID NO: 14225 - DNA, 17 bp, synthetic construct
  misc_feature 1..17: note = Oligonucleotide
  source 1..17: mol_type = other DNA
atatataccatggcaca

SEQ ID NO: 14226 - DNA, 17 bp, synthetic construct
  misc_feature 1..17: note = Oligonucleotide
  source 1..17: mol_type = other DNA
catatatataccatggc

SEQ ID NO: 14227 - DNA, 17 bp, synthetic construct
  misc_feature 1..17: note = Oligonucleotide
  source 1..17: mol_type = other DNA
gcacatatatataccat

SEQ ID NO: 14228 - DNA, 17 bp, synthetic construct
  misc_feature 1..17: note = Oligonucleotide
  source 1..17: mol_type = other DNA
agagcacatatatatac

SEQ ID NO: 14229 - DNA, 17 bp, synthetic construct
  misc_feature 1..17: note = Oligonucleotide
  source 1..17: mol_type = other DNA
cacagagcacatatata

SEQ ID NO: 14230 - DNA, 17 bp, synthetic construct
  misc_feature 1..17: note = Oligonucleotide
  source 1..17: mol_type = other DNA
ggacacagagcacatat

SEQ ID NO: 14231 - DNA, 17 bp, synthetic construct
  misc_feature 1..17: note = Oligonucleotide
  source 1..17: mol_type = other DNA
gcaggacacagagcaca

SEQ ID NO: 14232 - DNA, 17 bp, synthetic construct
  misc_feature 1..17: note = Oligonucleotide
  source 1..17: mol_type = other DNA
actgcaggacacagagc

SEQ ID NO: 14233 - DNA, 17 bp, synthetic construct
  misc_feature 1..17: note = Oligonucleotide
  source 1..17: mol_type = other DNA
ctcactgcaggacacag

SEQ ID NO: 14234 - DNA, 17 bp, synthetic construct
  misc_feature 1..17: note = Oligonucleotide
  source 1..17: mol_type = other DNA
caactcactgcaggaca

SEQ ID NO: 14235 - DNA, 17 bp, synthetic construct
  misc_feature 1..17: note = Oligonucleotide
  source 1..17: mol_type = other DNA
ccacaactcactgcagg

SEQ ID NO: 14236 - DNA, 17 bp, synthetic construct
  misc_feature 1..17: note = Oligonucleotide
  source 1..17: mol_type = other DNA
cagccacaactcactgc

SEQ ID NO: 14237 - DNA, 17 bp, synthetic construct
  misc_feature 1..17: note = Oligonucleotide
  source 1..17: mol_type = other DNA
ctgcagccacaactcac

SEQ ID NO: 14238 - DNA, 17 bp, synthetic construct
  misc_feature 1..17: note = Oligonucleotide
  source 1..17: mol_type = other DNA
gtgctgcagccacaact

SEQ ID NO: 14239 - DNA, 17 bp, synthetic construct
  misc_feature 1..17: note = Oligonucleotide
  source 1..17: mol_type = other DNA
gctgtgctgcagccaca

SEQ ID NO: 14240 - DNA, 17 bp, synthetic construct
  misc_feature 1..17: note = Oligonucleotide
  source 1..17: mol_type = other DNA
gaggctgtgctgcagcc

SEQ ID NO: 14241 - DNA, 17 bp, synthetic construct
  misc_feature 1..17: note = Oligonucleotide
  source 1..17: mol_type = other DNA
tatgaggctgtgctgca

SEQ ID NO: 14242 - DNA, 17 bp, synthetic construct
  misc_feature 1..17: note = Oligonucleotide
  source 1..17: mol_type = other DNA
gcctatgaggctgtgct

SEQ ID NO: 14243 - DNA, 17 bp, synthetic construct
  misc_feature 1..17: note = Oligonucleotide
  source 1..17: mol_type = other DNA
tatgcctatgaggctgt

SEQ ID NO: 14244 - DNA, 17 bp, synthetic construct
  misc_feature 1..17: note = Oligonucleotide
  source 1..17: mol_type = other DNA
acatatgcctatgaggc

SEQ ID NO: 14245 - DNA, 17 bp, synthetic construct
  misc_feature 1..17: note = Oligonucleotide
  source 1..17: mol_type = other DNA
cacacatatgcctatga

SEQ ID NO: 14246 - DNA, 17 bp, synthetic construct
  misc_feature 1..17: note = Oligonucleotide
  source 1..17: mol_type = other DNA
gtgcacacatatgccta

SEQ ID NO: 14247 - DNA, 17 bp, synthetic construct
  misc_feature 1..17: note = Oligonucleotide
  source 1..17: mol_type = other DNA
aatgtgcacacatatgc

SEQ ID NO: 14248 - DNA, 17 bp, synthetic construct
  misc_feature 1..17: note = Oligonucleotide
  source 1..17: mol_type = other DNA
acaaatgtgcacacata

SEQ ID NO: 14249 - DNA, 17 bp, synthetic construct
  misc_feature 1..17: note = Oligonucleotide
  source 1..17: mol_type = other DNA
agaacaaatgtgcacac

SEQ ID NO: 14250 - DNA, 17 bp, synthetic construct
  misc_feature 1..17: note = Oligonucleotide
  source 1..17: mol_type = other DNA
cagagaacaaatgtgca

SEQ ID NO: 14251 - DNA, 17 bp, synthetic construct
  misc_feature 1..17: note = Oligonucleotide
  source 1..17: mol_type = other DNA
gttcagagaacaaatgt

SEQ ID NO: 14252 - DNA, 17 bp, synthetic construct
  misc_feature 1..17: note = Oligonucleotide
  source 1..17: mol_type = other DNA
tgtgttcagagaacaaa

SEQ ID NO: 14253 - DNA, 17 bp, synthetic construct
  misc_feature 1..17: note = Oligonucleotide
  source 1..17: mol_type = other DNA
ctgtgtgttcagagaac

SEQ ID NO: 14254 - DNA, 17 bp, synthetic construct
  misc_feature 1..17: note = Oligonucleotide
  source 1..17: mol_type = other DNA
cccctgtgtgttcagag

SEQ ID NO: 14255 - DNA, 17 bp, synthetic construct
  misc_feature 1..17: note = Oligonucleotide
  source 1..17: mol_type = other DNA
aagcccctgtgtgttca

SEQ ID NO: 14256 - DNA, 17 bp, synthetic construct
  misc_feature 1..17: note = Oligonucleotide
  source 1..17: mol_type = other DNA
gtgaagcccctgtgtgt

SEQ ID NO: 14257 - DNA, 17 bp, synthetic construct
  misc_feature 1..17: note = Oligonucleotide
  source 1..17: mol_type = other DNA
catgtgaagcccctgtg

SEQ ID NO: 14258 - DNA, 17 bp, synthetic construct
  misc_feature 1..17: note = Oligonucleotide
  source 1..17: mol_type = other DNA
acacatgtgaagcccct

SEQ ID NO: 14259 - DNA, 17 bp, synthetic construct
  misc_feature 1..17: note = Oligonucleotide
  source 1..17: mol_type = other DNA
tgcacacatgtgaagcc

SEQ ID NO: 14260 - DNA, 17 bp, synthetic construct
  misc_feature 1..17: note = Oligonucleotide
  source 1..17: mol_type = other DNA
acgtgcacacatgtgaa

SEQ ID NO: 14261 - DNA, 17 bp, synthetic construct
  misc_feature 1..17: note = Oligonucleotide
  source 1..17: mol_type = other DNA
cacacgtgcacacatgt

SEQ ID NO: 14262 - DNA, 17 bp, synthetic construct
  misc_feature 1..17: note = Oligonucleotide
  source 1..17: mol_type = other DNA
gaacacacgtgcacaca

SEQ ID NO: 14263 - DNA, 17 bp, synthetic construct
  misc_feature 1..17: note = Oligonucleotide
  source 1..17: mol_type = other DNA
tcagaacacacgtgcac

SEQ ID NO: 14264 - DNA, 17 bp, synthetic construct
  misc_feature 1..17: note = Oligonucleotide
  source 1..17: mol_type = other DNA
tattcagaacacacgtg

SEQ ID NO: 14265 - DNA, 17 bp, synthetic construct
  misc_feature 1..17: note = Oligonucleotide
  source 1..17: mol_type = other DNA
ggttattcagaacacac

SEQ ID NO: 14266 - DNA, 17 bp, synthetic construct
  misc_feature 1..17: note = Oligonucleotide
  source 1..17: mol_type = other DNA
cctggttattcagaaca

SEQ ID NO: 14267 - DNA, 17 bp, synthetic construct
  misc_feature 1..17: note = Oligonucleotide
  source 1..17: mol_type = other DNA
atacctggttattcaga

SEQ ID NO: 14268 - DNA, 17 bp, synthetic construct
  misc_feature 1..17: note = Oligonucleotide
  source 1..17: mol_type = other DNA
ttcatacctggttattc

SEQ ID NO: 14269 - DNA, 17 bp, synthetic construct
  misc_feature 1..17: note = Oligonucleotide
  source 1..17: mol_type = other DNA
caattcatacctggtta

SEQ ID NO: 14270 - DNA, 17 bp, synthetic construct
  misc_feature 1..17: note = Oligonucleotide
  source 1..17: mol_type = other DNA
acccaattcatacctgg

SEQ ID NO: 14271 - DNA, 17 bp, synthetic construct
  misc_feature 1..17: note = Oligonucleotide
  source 1..17: mol_type = other DNA
tgtacccaattcatacc

SEQ ID NO: 14272 - DNA, 17 bp, synthetic construct
  misc_feature 1..17: note = Oligonucleotide
  source 1..17: mol_type = other DNA
agatgtacccaattcat

SEQ ID NO: 14273 - DNA, 17 bp, synthetic construct
  misc_feature 1..17: note = Oligonucleotide
  source 1..17: mol_type = other DNA
cctagatgtacccaatt

SEQ ID NO: 14274 - DNA, 17 bp, synthetic construct
  misc_feature 1..17: note = Oligonucleotide
  source 1..17: mol_type = other DNA
gggcctagatgtaccca

SEQ ID NO: 14275 - DNA, 17 bp, synthetic construct
  misc_feature 1..17: note = Oligonucleotide
  source 1..17: mol_type = other DNA
agagggcctagatgtac

SEQ ID NO: 14276 - DNA, 17 bp, synthetic construct
  misc_feature 1..17: note = Oligonucleotide
  source 1..17: mol_type = other DNA
cccagagggcctagatg

SEQ ID NO: 14277 - DNA, 17 bp, synthetic construct
  misc_feature 1..17: note = Oligonucleotide
  source 1..17: mol_type = other DNA
tggcccagagggcctag

SEQ ID NO: 14278 - DNA, 17 bp, synthetic construct
  misc_feature 1..17: note = Oligonucleotide
  source 1..17: mol_type = other DNA
acctggcccagagggcc

SEQ ID NO: 14279 - DNA, 17 bp, synthetic construct
  misc_feature 1..17: note = Oligonucleotide
  source 1..17: mol_type = other DNA
ctcacctggcccagagg

SEQ ID NO: 14280 - DNA, 17 bp, synthetic construct
  misc_feature 1..17: note = Oligonucleotide
  source 1..17: mol_type = other DNA
ggtctcacctggcccag

SEQ ID NO: 14281 - DNA, 17 bp, synthetic construct
  misc_feature 1..17: note = Oligonucleotide
  source 1..17: mol_type = other DNA
tcaggtctcacctggcc

SEQ ID NO: 14282 - DNA, 17 bp, synthetic construct
  misc_feature 1..17: note = Oligonucleotide
  source 1..17: mol_type = other DNA
cgctcaggtctcacctg

SEQ ID NO: 14283 - DNA, 17 bp, synthetic construct
  misc_feature 1..17: note = Oligonucleotide
  source 1..17: mol_type = other DNA
acacgctcaggtctcac

SEQ ID NO: 14284 - DNA, 17 bp, synthetic construct
  misc_feature 1..17: note = Oligonucleotide
  source 1..17: mol_type = other DNA
tatacacgctcaggtct

SEQ ID NO: 14285 - DNA, 17 bp, synthetic construct
  misc_feature 1..17: note = Oligonucleotide
  source 1..17: mol_type = other DNA
aggtatacacgctcagg

SEQ ID NO: 14286 - DNA, 17 bp, synthetic construct
  misc_feature 1..17: note = Oligonucleotide
  source 1..17: mol_type = other DNA
agtaggtatacacgctc

SEQ ID NO: 14287 - DNA, 17 bp, synthetic construct
  misc_feature 1..17: note = Oligonucleotide
  source 1..17: mol_type = other DNA
gccagtaggtatacacg

SEQ ID NO: 14288 - DNA, 17 bp, synthetic construct
  misc_feature 1..17: note = Oligonucleotide
  source 1..17: mol_type = other DNA
caagccagtaggtatac

SEQ ID NO: 14289 - DNA, 17 bp, synthetic construct
  misc_feature 1..17: note = Oligonucleotide
  source 1..17: mol_type = other DNA
agacaagccagtaggta

SEQ ID NO: 14290 - DNA, 17 bp, synthetic construct
  misc_feature 1..17: note = Oligonucleotide
  source 1..17: mol_type = other DNA
cagagacaagccagtag

SEQ ID NO: 14291 - DNA, 17 bp, synthetic construct
  misc_feature 1..17: note = Oligonucleotide
  source 1..17: mol_type = other DNA
ttgcagagacaagccag

SEQ ID NO: 14292 - DNA, 17 bp, synthetic construct
  misc_feature 1..17: note = Oligonucleotide
  source 1..17: mol_type = other DNA
gagttgcagagacaagc

SEQ ID NO: 14293 - DNA, 17 bp, synthetic construct
  misc_feature 1..17: note = Oligonucleotide
  source 1..17: mol_type = other DNA
cctgagttgcagagaca

SEQ ID NO: 14294 - DNA, 17 bp, synthetic construct
  misc_feature 1..17: note = Oligonucleotide
  source 1..17: mol_type = other DNA
acacctgagttgcagag

SEQ ID NO: 14295 - DNA, 17 bp, synthetic construct
  misc_feature 1..17: note = Oligonucleotide
  source 1..17: mol_type = other DNA
tgtacacctgagttgca

SEQ ID NO: 14296 - DNA, 17 bp, synthetic construct
  misc_feature 1..17: note = Oligonucleotide
  source 1..17: mol_type = other DNA
ccatgtacacctgagtt

SEQ ID NO: 14297 - DNA, 17 bp, synthetic construct
  misc_feature 1..17: note = Oligonucleotide
  source 1..17: mol_type = other DNA
gttccatgtacacctga

SEQ ID NO: 14298 - DNA, 17 bp, synthetic construct
  misc_feature 1..17: note = Oligonucleotide
  source 1..17: mol_type = other DNA
tttgttccatgtacacc

SEQ ID NO: 14299 - DNA, 17 bp, synthetic construct
  misc_feature 1..17: note = Oligonucleotide
  source 1..17: mol_type = other DNA
ctatttgttccatgtac

SEQ ID NO: 14300 - DNA, 17 bp, synthetic construct
  misc_feature 1..17: note = Oligonucleotide
  source 1..17: mol_type = other DNA
cacctatttgttccatg

SEQ ID NO: 14301 - DNA, 17 bp, synthetic construct
  misc_feature 1..17: note = Oligonucleotide
  source 1..17: mol_type = other DNA
tcacacctatttgttcc

SEQ ID NO: 14302 - DNA, 17 bp, synthetic construct
  misc_feature 1..17: note = Oligonucleotide
  source 1..17: mol_type = other DNA
gactcacacctatttgt

SEQ ID NO: 14303 - DNA, 17 bp, synthetic construct
  misc_feature 1..17: note = Oligonucleotide
  source 1..17: mol_type = other DNA
acggactcacacctatt

SEQ ID NO: 14304 - DNA, 17 bp, synthetic construct
  misc_feature 1..17: note = Oligonucleotide
  source 1..17: mol_type = other DNA
cacacggactcacacct

SEQ ID NO: 14305 - DNA, 17 bp, synthetic construct
  misc_feature 1..17: note = Oligonucleotide
  source 1..17: mol_type = other DNA
acacacacggactcaca

SEQ ID NO: 14306 - DNA, 17 bp, synthetic construct
  misc_feature 1..17: note = Oligonucleotide
  source 1..17: mol_type = other DNA
ctcacacacacggactc

SEQ ID NO: 14307 - DNA, 17 bp, synthetic construct
  misc_feature 1..17: note = Oligonucleotide
  source 1..17: mol_type = other DNA
aggctcacacacacgga

SEQ ID NO: 14308 - DNA, 17 bp, synthetic construct
  misc_feature 1..17: note = Oligonucleotide
  source 1..17: mol_type = other DNA
cacaggctcacacacac

SEQ ID NO: 14309 - DNA, 17 bp, synthetic construct
  misc_feature 1..17: note = Oligonucleotide
  source 1..17: mol_type = other DNA
gggcacaggctcacaca

SEQ ID NO: 14310 - DNA, 17 bp, synthetic construct
  misc_feature 1..17: note = Oligonucleotide
  source 1..17: mol_type = other DNA
gcagggcacaggctcac

SEQ ID NO: 14311 - DNA, 17 bp, synthetic construct
  misc_feature 1..17: note = Oligonucleotide
  source 1..17: mol_type = other DNA
tgcgcagggcacaggct

SEQ ID NO: 14312 - DNA, 17 bp, synthetic construct
  misc_feature 1..17: note = Oligonucleotide
  source 1..17: mol_type = other DNA
gcgtgcgcagggcacag

SEQ ID NO: 14313 - DNA, 17 bp, synthetic construct
  misc_feature 1..17: note = Oligonucleotide
  source 1..17: mol_type = other DNA
atggcgtgcgcagggca

SEQ ID NO: 14314 - DNA, 17 bp, synthetic construct
  misc_feature 1..17: note = Oligonucleotide
  source 1..17: mol_type = other DNA
cacatggcgtgcgcagg

SEQ ID NO: 14315 - DNA, 17 bp, synthetic construct
  misc_feature 1..17: note = Oligonucleotide
  source 1..17: mol_type = other DNA
gcacacatggcgtgcgc

SEQ ID NO: 14316 - DNA, 17 bp, synthetic construct
  misc_feature 1..17: note = Oligonucleotide
  source 1..17: mol_type = other DNA
aatgcacacatggcgtg

SEQ ID NO: 14317 - DNA, 17 bp, synthetic construct
  misc_feature 1..17: note = Oligonucleotide
  source 1..17: mol_type = other DNA
aggaatgcacacatggc

SEQ ID NO: 14318 - DNA, 17 bp, synthetic construct
  misc_feature 1..17: note = Oligonucleotide
  source 1..17: mol_type = other DNA
cacaggaatgcacacat

SEQ ID NO: 14319 - DNA, 17 bp, synthetic construct
  misc_feature 1..17: note = Oligonucleotide
  source 1..17: mol_type = other DNA
gcacacaggaatgcaca

SEQ ID NO: 14320 - DNA, 17 bp, synthetic construct
  misc_feature 1..17: note = Oligonucleotide
  source 1..17: mol_type = other DNA
tgcgcacacaggaatgc

SEQ ID NO: 14321 - DNA, 17 bp, synthetic construct
  misc_feature 1..17: note = Oligonucleotide
  source 1..17: mol_type = other DNA
acatgcgcacacaggaa

SEQ ID NO: 14322 - DNA, 17 bp, synthetic construct
  misc_feature 1..17: note = Oligonucleotide
  source 1..17: mol_type = other DNA
agcacatgcgcacacag

SEQ ID NO: 14323 - DNA, 17 bp, synthetic construct
  misc_feature 1..17: note = Oligonucleotide
  source 1..17: mol_type = other DNA
aacagcacatgcgcaca

SEQ ID NO: 14324 - DNA, 17 bp, synthetic construct
  misc_feature 1..17: note = Oligonucleotide
  source 1..17: mol_type = other DNA
cacaacagcacatgcgc

SEQ ID NO: 14325 - DNA, 17 bp, synthetic construct
  misc_feature 1..17: note = Oligonucleotide
  source 1..17: mol_type = other DNA
gagcacaacagcacatg

SEQ ID NO: 14326 - DNA, 17 bp, synthetic construct
  misc_feature 1..17: note = Oligonucleotide
  source 1..17: mol_type = other DNA
tccgagcacaacagcac

SEQ ID NO: 14327 - DNA, 17 bp, synthetic construct
  misc_feature 1..17: note = Oligonucleotide
  source 1..17: mol_type = other DNA
ccatccgagcacaacag

SEQ ID NO: 14328 - DNA, 17 bp, synthetic construct
  misc_feature 1..17: note = Oligonucleotide
  source 1..17: mol_type = other DNA
agaccatccgagcacaa

SEQ ID NO: 14329 - DNA, 17 bp, synthetic construct
  misc_feature 1..17: note = Oligonucleotide
  source 1..17: mol_type = other DNA
gagagaccatccgagca

SEQ ID NO: 14330 - DNA, 17 bp, synthetic construct
  misc_feature 1..17: note = Oligonucleotide
  source 1..17: mol_type = other DNA
ctggagagaccatccga

SEQ ID NO: 14331 - DNA, 17 bp, synthetic construct
  misc_feature 1..17: note = Oligonucleotide
  source 1..17: mol_type = other DNA
tggctggagagaccatc

SEQ ID NO: 14332 - DNA, 17 bp, synthetic construct
  misc_feature 1..17: note = Oligonucleotide
  source 1..17: mol_type = other DNA
gggtggctggagagacc

SEQ ID NO: 14333 - DNA, 17 bp, synthetic construct
  misc_feature 1..17: note = Oligonucleotide
  source 1..17: mol_type = other DNA
gctgggtggctggagag

SEQ ID NO: 14334 - DNA, 17 bp, synthetic construct
  misc_feature 1..17: note = Oligonucleotide
  source 1..17: mol_type = other DNA
acagctgggtggctgga

SEQ ID NO: 14335 - DNA, 17 bp, synthetic construct
  misc_feature 1..17: note = Oligonucleotide
  source 1..17: mol_type = other DNA
atcacagctgggtggct

SEQ ID NO: 14336 - DNA, 17 bp, synthetic construct
  misc_feature 1..17: note = Oligonucleotide
  source 1..17: mol_type = other DNA
ggaatcacagctgggtg

SEQ ID NO: 14337 - DNA, 17 bp, synthetic construct
  misc_feature 1..17: note = Oligonucleotide
  source 1..17: mol_type = other DNA
gagggaatcacagctgg

SEQ ID NO: 14338 - DNA, 17 bp, synthetic construct
  misc_feature 1..17: note = Oligonucleotide
  source 1..17: mol_type = other DNA
gaagagggaatcacagc

SEQ ID NO: 14339 - DNA, 17 bp, synthetic construct
  misc_feature 1..17: note = Oligonucleotide
  source 1..17: mol_type = other DNA
ggggaagagggaatcac

SEQ ID NO: 14340 - DNA, 17 bp, synthetic construct
  misc_feature 1..17: note = Oligonucleotide
  source 1..17: mol_type = other DNA
tgcggggaagagggaat

SEQ ID NO: 14341 - DNA, 17 bp, synthetic construct
  misc_feature 1..17: note = Oligonucleotide
  source 1..17: mol_type = other DNA
tgttgcggggaagaggg

SEQ ID NO: 14342 - DNA, 17 bp, synthetic construct
  misc_feature 1..17: note = Oligonucleotide
  source 1..17: mol_type = other DNA
tcctgttgcggggaaga

SEQ ID NO: 14343 - DNA, 17 bp, synthetic construct
  misc_feature 1..17: note = Oligonucleotide
  source 1..17: mol_type = other DNA
ctctcctgttgcgggga

SEQ ID NO: 14344 - DNA, 17 bp, synthetic construct
  misc_feature 1..17: note = Oligonucleotide
  source 1..17: mol_type = other DNA
cagctctcctgttgcgg

SEQ ID NO: 14345 - DNA, 17 bp, synthetic construct
  misc_feature 1..17: note = Oligonucleotide
  source 1..17: mol_type = other DNA
gcacagctctcctgttg

SEQ ID NO: 14346 - DNA, 17 bp, synthetic construct
  misc_feature 1..17: note = Oligonucleotide
  source 1..17: mol_type = other DNA
cgagcacagctctcctg

SEQ ID NO: 14347 - DNA, 17 bp, synthetic construct
  misc_feature 1..17: note = Oligonucleotide
  source 1..17: mol_type = other DNA
acacgagcacagctctc

SEQ ID NO: 14348 - DNA, 17 bp, synthetic construct
  misc_feature 1..17: note = Oligonucleotide
  source 1..17: mol_type = other DNA
aggacacgagcacagct

SEQ ID NO: 14349 - DNA, 17 bp, synthetic construct
  misc_feature 1..17: note = Oligonucleotide
  source 1..17: mol_type = other DNA
agcaggacacgagcaca

SEQ ID NO: 14350 - DNA, 17 bp, synthetic construct
  misc_feature 1..17: note = Oligonucleotide
  source 1..17: mol_type = other DNA
aagagcaggacacgagc

SEQ ID NO: 14351 - DNA, 17 bp, synthetic construct
  misc_feature 1..17: note = Oligonucleotide
  source 1..17: mol_type = other DNA
cggaagagcaggacacg

SEQ ID NO: 14352 - DNA, 17 bp, synthetic construct
  misc_feature 1..17: note = Oligonucleotide
  source 1..17: mol_type = other DNA
ccacggaagagcaggac

SEQ ID NO: 14353 - DNA, 17 bp, synthetic construct
  misc_feature 1..17: note = Oligonucleotide
  source 1..17: mol_type = other DNA
gctccacggaagagcag

SEQ ID NO: 14354 - DNA, 17 bp, synthetic construct
  misc_feature 1..17: note = Oligonucleotide
  source 1..17: mol_type = other DNA
ttagctccacggaagag

SEQ ID NO: 14355 - DNA, 17 bp, synthetic construct
  misc_feature 1..17: note = Oligonucleotide
  source 1..17: mol_type = other DNA
ctgttagctccacggaa

SEQ ID NO: 14356 - DNA, 17 bp, synthetic construct
  misc_feature 1..17: note = Oligonucleotide
  source 1..17: mol_type = other DNA
tccctgttagctccacg

SEQ ID NO: 14357 - DNA, 17 bp, synthetic construct
  misc_feature 1..17: note = Oligonucleotide
  source 1..17: mol_type = other DNA
acatccctgttagctcc

SEQ ID NO: 14358 - DNA, 17 bp, synthetic construct
  misc_feature 1..17: note = Oligonucleotide
  source 1..17: mol_type = other DNA
cggacatccctgttagc

SEQ ID NO: 14359 - DNA, 17 bp, synthetic construct
  misc_feature 1..17: note = Oligonucleotide
  source 1..17: mol_type = other DNA
ttgcggacatccctgtt

SEQ ID NO: 14360 - DNA, 17 bp, synthetic construct
  misc_feature 1..17: note = Oligonucleotide
  source 1..17: mol_type = other DNA
tagttgcggacatccct

SEQ ID NO: 14361 - DNA, 17 bp, synthetic construct
  misc_feature 1..17: note = Oligonucleotide
  source 1..17: mol_type = other DNA
ttgtagttgcggacatc

SEQ ID NO: 14362 - DNA, 17 bp, synthetic construct
  misc_feature 1..17: note = Oligonucleotide
  source 1..17: mol_type = other DNA
ctgttgtagttgcggac

SEQ ID NO: 14363 - DNA, 17 bp, synthetic construct
  misc_feature 1..17: note = Oligonucleotide
  source 1..17: mol_type = other DNA
tggctgttgtagttgcg

SEQ ID NO: 14364 - DNA, 17 bp, synthetic construct
  misc_feature 1..17: note = Oligonucleotide
  source 1..17: mol_type = other DNA
gtctggctgttgtagtt

SEQ ID NO: 14365 - DNA, 17 bp, synthetic construct
  misc_feature 1..17: note = Oligonucleotide
  source 1..17: mol_type = other DNA
gctgtctggctgttgta

SEQ ID NO: 14366 - DNA, 17 bp, synthetic construct
  misc_feature 1..17: note = Oligonucleotide
  source 1..17: mol_type = other DNA
aaggctgtctggctgtt

SEQ ID NO: 14367 - DNA, 17 bp, synthetic construct
  misc_feature 1..17: note = Oligonucleotide
  source 1..17: mol_type = other DNA
tggaaggctgtctggct

SEQ ID NO: 14368 - DNA, 17 bp, synthetic construct
  misc_feature 1..17: note = Oligonucleotide
  source 1..17: mol_type = other DNA
acctggaaggctgtctg

SEQ ID NO: 14369 - DNA, 17 bp, synthetic construct
  misc_feature 1..17: note = Oligonucleotide
  source 1..17: mol_type = other DNA
tgtacctggaaggctgt

SEQ ID NO: 14370 - DNA, 17 bp, synthetic construct
  misc_feature 1..17: note = Oligonucleotide
  source 1..17: mol_type = other DNA
cggtgtacctggaaggc

SEQ ID NO: 14371 - DNA, 17 bp, synthetic construct
  misc_feature 1..17: note = Oligonucleotide
  source 1..17: mol_type = other DNA
caccggtgtacctggaa

SEQ ID NO: 14372 - DNA, 17 bp, synthetic construct
  misc_feature 1..17: note = Oligonucleotide
  source 1..17: mol_type = other DNA
aaccaccggtgtacctg

SEQ ID NO: 14373 - DNA, 17 bp, synthetic construct
  misc_feature 1..17: note = Oligonucleotide
  source 1..17: mol_type = other DNA
acctgagggaaagggga

SEQ ID NO: 14374 - DNA, 17 bp, synthetic construct
  misc_feature 1..17: note = Oligonucleotide
  source 1..17: mol_type = other DNA
gccacctgagggaaagg

SEQ ID NO: 14375 - DNA, 17 bp, synthetic construct
  misc_feature 1..17: note = Oligonucleotide
  source 1..17: mol_type = other DNA
atggccacctgagggaa

SEQ ID NO: 14376 - DNA, 17 bp, synthetic construct
  misc_feature 1..17: note = Oligonucleotide
  source 1..17: mol_type = other DNA
atgatggccacctgagg

SEQ ID NO: 14377 - DNA, 17 bp, synthetic construct
  misc_feature 1..17: note = Oligonucleotide
  source 1..17: mol_type = other DNA
gcgatgatggccacctg

SEQ ID NO: 14378 - DNA, 17 bp, synthetic construct
  misc_feature 1..17: note = Oligonucleotide
  source 1..17: mol_type = other DNA
cctgcgatgatggccac

SEQ ID NO: 14379 - DNA, 17 bp, synthetic construct
  misc_feature 1..17: note = Oligonucleotide
  source 1..17: mol_type = other DNA
ttccctgcgatgatggc

SEQ ID NO: 14380 - DNA, 17 bp, synthetic construct
  misc_feature 1..17: note = Oligonucleotide
  source 1..17: mol_type = other DNA
aagttccctgcgatgat

SEQ ID NO: 14381 - DNA, 17 bp, synthetic construct
  misc_feature 1..17: note = Oligonucleotide
  source 1..17: mol_type = other DNA
tcaaagttccctgcgat

SEQ ID NO: 14382 - DNA, 17 bp, synthetic construct
  misc_feature 1..17: note = Oligonucleotide
  source 1..17: mol_type = other DNA
agctcaaagttccctgc

SEQ ID NO: 14383 - DNA, 17 bp, synthetic construct
  misc_feature 1..17: note = Oligonucleotide
  source 1..17: mol_type = other DNA
gcaagctcaaagttccc

SEQ ID NO: 14384 - DNA, 17 bp, synthetic construct
  misc_feature 1..17: note = Oligonucleotide
  source 1..17: mol_type = other DNA
tctgcaagctcaaagtt

SEQ ID NO: 14385 - DNA, 17 bp, synthetic construct
  misc_feature 1..17: note = Oligonucleotide
  source 1..17: mol_type = other DNA
acctctgcaagctcaaa

SEQ ID NO: 14386 - DNA, 17 bp, synthetic construct
  misc_feature 1..17: note = Oligonucleotide
  source 1..17: mol_type = other DNA
ataacctctgcaagctc

SEQ ID NO: 14387 - DNA, 17 bp, synthetic construct
  misc_feature 1..17: note = Oligonucleotide
  source 1..17: mol_type = other DNA
ttgataacctctgcaag

SEQ ID NO: 14388 - DNA, 17 bp, synthetic construct
  misc_feature 1..17: note = Oligonucleotide
  source 1..17: mol_type = other DNA
gtcttgataacctctgc

SEQ ID NO: 14389 - DNA, 17 bp, synthetic construct
  misc_feature 1..17: note = Oligonucleotide
  source 1..17: mol_type = other DNA
tgggtcttgataacctc

SEQ ID NO: 14390 - DNA, 17 bp, synthetic construct
  misc_feature 1..17: note = Oligonucleotide
  source 1..17: mol_type = other DNA
ttgtgggtcttgataac

SEQ ID NO: 14391 - DNA, 17 bp, synthetic construct
  misc_feature 1..17: note = Oligonucleotide
  source 1..17: mol_type = other DNA
tctttgtgggtcttgat

SEQ ID NO: 14392 - DNA, 17 bp, synthetic construct
  misc_feature 1..17: note = Oligonucleotide
  source 1..17: mol_type = other DNA
gagtctttgtgggtctt

SEQ ID NO: 14393 - DNA, 17 bp, synthetic construct
  misc_feature 1..17: note = Oligonucleotide
  source 1..17: mol_type = other DNA
tccgagtctttgtgggt

SEQ ID NO: 14394 - DNA, 17 bp, synthetic construct
  misc_feature 1..17: note = Oligonucleotide
  source 1..17: mol_type = other DNA
acatccgagtctttgtg

SEQ ID NO: 14395 - DNA, 17 bp, synthetic construct
  misc_feature 1..17: note = Oligonucleotide
  source 1..17: mol_type = other DNA
ccaacatccgagtcttt

SEQ ID NO: 14396 - DNA, 17 bp, synthetic construct
  misc_feature 1..17: note = Oligonucleotide
  source 1..17: mol_type = other DNA
tcaccaacatccgagtc

SEQ ID NO: 14397 - DNA, 17 bp, synthetic construct
  misc_feature 1..17: note = Oligonucleotide
  source 1..17: mol_type = other DNA
aactcaccaacatccga

SEQ ID NO: 14398 - DNA, 17 bp, synthetic construct
  misc_feature 1..17: note = Oligonucleotide
  source 1..17: mol_type = other DNA
cagaactcaccaacatc

SEQ ID NO: 14399 - DNA, 17 bp, synthetic construct
  misc_feature 1..17: note = Oligonucleotide
  source 1..17: mol_type = other DNA
gggcagaactcaccaac

SEQ ID NO: 14400 - DNA, 17 bp, synthetic construct
  misc_feature 1..17: note = Oligonucleotide
  source 1..17: mol_type = other DNA
ggtgggcagaactcacc

SEQ ID NO: 14401 - DNA, 17 bp, synthetic construct
  misc_feature 1..17: note = Oligonucleotide
  source 1..17: mol_type = other DNA
ccaggtgggcagaactc

SEQ ID NO: 14402 - DNA, 17 bp, synthetic construct
  misc_feature 1..17: note = Oligonucleotide
  source 1..17: mol_type = other DNA
cgcccaggtgggcagaa

SEQ ID NO: 14403 - DNA, 17 bp, synthetic construct
  misc_feature 1..17: note = Oligonucleotide
  source 1..17: mol_type = other DNA
ggtcgcccaggtgggca

SEQ ID NO: 14404 - DNA, 17 bp, synthetic construct
  misc_feature 1..17: note = Oligonucleotide
  source 1..17: mol_type = other DNA
cagggtcgcccaggtgg

SEQ ID NO: 14405 - DNA, 17 bp, synthetic construct
  misc_feature 1..17: note = Oligonucleotide
  source 1..17: mol_type = other DNA
cagcagggtcgcccagg

SEQ ID NO: 14406 - DNA, 17 bp, synthetic construct
  misc_feature 1..17: note = Oligonucleotide
  source 1..17: mol_type = other DNA
attcagcagggtcgccc

SEQ ID NO: 14407 - DNA, 17 bp, synthetic construct
  misc_feature 1..17: note = Oligonucleotide
  source 1..17: mol_type = other DNA
tacattcagcagggtcg

SEQ ID NO: 14408 - DNA, 17 bp, synthetic construct
  misc_feature 1..17: note = Oligonucleotide
  source 1..17: mol_type = other DNA
atctacattcagcaggg

SEQ ID NO: 14409 - DNA, 17 bp, synthetic construct
  misc_feature 1..17: note = Oligonucleotide
  source 1..17: mol_type = other DNA
cgaatctacattcagca

SEQ ID NO: 14410 - DNA, 17 bp, synthetic construct
  misc_feature 1..17: note = Oligonucleotide
  source 1..17: mol_type = other DNA
acacgaatctacattca

SEQ ID NO: 14411 - DNA, 17 bp, synthetic construct
  misc_feature 1..17: note = Oligonucleotide
  source 1..17: mol_type = other DNA
accacacgaatctacat

SEQ ID NO: 14412 - DNA, 17 bp, synthetic construct
  misc_feature 1..17: note = Oligonucleotide
  source 1..17: mol_type = other DNA
aaaaccacacgaatcta

SEQ ID NO: 14413 - DNA, 17 bp, synthetic construct
  misc_feature 1..17: note = Oligonucleotide
  source 1..17: mol_type = other DNA
cagaaaaccacacgaat

SEQ ID NO: 14414 - DNA, 17 bp, synthetic construct
  misc_feature 1..17: note = Oligonucleotide
  source 1..17: mol_type = other DNA
ccccagaaaaccacacg

SEQ ID NO: 14415 - DNA, 17 bp, synthetic construct
  misc_feature 1..17: note = Oligonucleotide
  source 1..17: mol_type = other DNA
gggccccagaaaaccac

SEQ ID NO: 14416 - DNA, 17 bp, synthetic construct
  misc_feature 1..17: note = Oligonucleotide
  source 1..17: mol_type = other DNA
gctgggccccagaaaac

SEQ ID NO: 14417 - DNA, 17 bp, synthetic construct
  misc_feature 1..17: note = Oligonucleotide
  source 1..17: mol_type = other DNA
tctgctgggccccagaa

SEQ ID NO: 14418 - DNA, 17 bp, synthetic construct
  misc_feature 1..17: note = Oligonucleotide
  source 1..17: mol_type = other DNA
acatctgctgggcccca

SEQ ID NO: 14419 - DNA, 17 bp, synthetic construct
  misc_feature 1..17: note = Oligonucleotide
  source 1..17: mol_type = other DNA
cccacatctgctgggcc

SEQ ID NO: 14420 - DNA, 17 bp, synthetic construct
  misc_feature 1..17: note = Oligonucleotide
  source 1..17: mol_type = other DNA
acccccacatctgctgg

SEQ ID NO: 14421 - DNA, 17 bp, synthetic construct
  misc_feature 1..17: note = Oligonucleotide
  source 1..17: mol_type = other DNA
ctgacccccacatctgc

SEQ ID NO: 14422 - DNA, 17 bp, synthetic construct
  misc_feature 1..17: note = Oligonucleotide
  source 1..17: mol_type = other DNA
ccactgacccccacatc

SEQ ID NO: 14423 - DNA, 17 bp, synthetic construct
  misc_feature 1..17: note = Oligonucleotide
  source 1..17: mol_type = other DNA
tcaccactgacccccac

SEQ ID NO: 14424 - DNA, 17 bp, synthetic construct
  misc_feature 1..17: note = Oligonucleotide
  source 1..17: mol_type = other DNA
atgtcaccactgacccc

SEQ ID NO: 14425 - DNA, 17 bp, synthetic construct
  misc_feature 1..17: note = Oligonucleotide
  source 1..17: mol_type = other DNA
tttatgtcaccactgac

SEQ ID NO: 14426 - DNA, 17 bp, synthetic construct
  misc_feature 1..17: note = Oligonucleotide
  source 1..17: mol_type = other DNA
ccctttatgtcaccact

SEQ ID NO: 14427 - DNA, 17 bp, synthetic construct
  misc_feature 1..17: note = Oligonucleotide
  source 1..17: mol_type = other DNA
ggcccctttatgtcacc

SEQ ID NO: 14428 - DNA, 17 bp, synthetic construct
  misc_feature 1..17: note = Oligonucleotide
  source 1..17: mol_type = other DNA
tggggcccctttatgtc

SEQ ID NO: 14429 - DNA, 17 bp, synthetic construct
  misc_feature 1..17: note = Oligonucleotide
  source 1..17: mol_type = other DNA
gtgtggggcccctttat

SEQ ID NO: 14430 - DNA, 17 bp, synthetic construct
  misc_feature 1..17: note = Oligonucleotide
  source 1..17: mol_type = other DNA
ggggtgtggggcccctt

SEQ ID NO: 14431 - DNA, 17 bp, synthetic construct
  misc_feature 1..17: note = Oligonucleotide
  source 1..17: mol_type = other DNA
tgtggggtgtggggccc

SEQ ID NO: 14432 - DNA, 17 bp, synthetic construct
  misc_feature 1..17: note = Oligonucleotide
  source 1..17: mol_type = other DNA
agatgtggggtgtgggg

SEQ ID NO: 14433 - DNA, 17 bp, synthetic construct
  misc_feature 1..17: note = Oligonucleotide
  source 1..17: mol_type = other DNA
tgtagatgtggggtgtg

SEQ ID NO: 14434 - DNA, 17 bp, synthetic construct
  misc_feature 1..17: note = Oligonucleotide
  source 1..17: mol_type = other DNA
cagtgtagatgtggggt

SEQ ID NO: 14435 - DNA, 17 bp, synthetic construct
  misc_feature 1..17: note = Oligonucleotide
  source 1..17: mol_type = other DNA
acacagtgtagatgtgg

SEQ ID NO: 14436 - DNA, 17 bp, synthetic construct
  misc_feature 1..17: note = Oligonucleotide
  source 1..17: mol_type = other DNA
gccacacagtgtagatg

SEQ ID NO: 14437 - DNA, 17 bp, synthetic construct
  misc_feature 1..17: note = Oligonucleotide
  source 1..17: mol_type = other DNA
ctggccacacagtgtag

SEQ ID NO: 14438 - DNA, 17 bp, synthetic construct
  misc_feature 1..17: note = Oligonucleotide
  source 1..17: mol_type = other DNA
ccactggccacacagtg

SEQ ID NO: 14439 - DNA, 17 bp, synthetic construct
  misc_feature 1..17: note = Oligonucleotide
  source 1..17: mol_type = other DNA
agaccactggccacaca

SEQ ID NO: 14440 - DNA, 17 bp, synthetic construct
  misc_feature 1..17: note = Oligonucleotide
  source 1..17: mol_type = other DNA
cagagaccactggccac

SEQ ID NO: 14441 - DNA, 17 bp, synthetic construct
  misc_feature 1..17: note = Oligonucleotide
  source 1..17: mol_type = other DNA
actcagagaccactggc

SEQ ID NO: 14442 - DNA, 17 bp, synthetic construct
  misc_feature 1..17: note = Oligonucleotide
  source 1..17: mol_type = other DNA
gccactcagagaccact

SEQ ID NO: 14443 - DNA, 17 bp, synthetic construct
  misc_feature 1..17: note = Oligonucleotide
  source 1..17: mol_type = other DNA
gtggccactcagagacc

SEQ ID NO: 14444 - DNA, 17 bp, synthetic construct
  misc_feature 1..17: note = Oligonucleotide
  source 1..17: mol_type = other DNA
gcagtggccactcagag

SEQ ID NO: 14445 - DNA, 17 bp, synthetic construct
  misc_feature 1..17: note = Oligonucleotide
  source 1..17: mol_type = other DNA
cccgcagtggccactca

SEQ ID NO: 14446 - DNA, 17 bp, synthetic construct
  misc_feature 1..17: note = Oligonucleotide
  source 1..17: mol_type = other DNA
atgcccgcagtggccac

SEQ ID NO: 14447 - DNA, 17 bp, synthetic construct
  misc_feature 1..17: note = Oligonucleotide
  source 1..17: mol_type = other DNA
ctcatgcccgcagtggc

SEQ ID NO: 14448 - DNA, 17 bp, synthetic construct
  misc_feature 1..17: note = Oligonucleotide
  source 1..17: mol_type = other DNA
ttcctcatgcccgcagt

SEQ ID NO: 14449 - DNA, 17 bp, synthetic construct
  misc_feature 1..17: note = Oligonucleotide
  source 1..17: mol_type = other DNA
ccgttcctcatgcccgc

SEQ ID NO: 14450 - DNA, 17 bp, synthetic construct
  misc_feature 1..17: note = Oligonucleotide
  source 1..17: mol_type = other DNA
ggcccgttcctcatgcc

SEQ ID NO: 14451 - DNA, 17 bp, synthetic construct
  misc_feature 1..17: note = Oligonucleotide
  source 1..17: mol_type = other DNA
tgtggcccgttcctcat

SEQ ID NO: 14452 - DNA, 17 bp, synthetic construct
  misc_feature 1..17: note = Oligonucleotide
  source 1..17: mol_type = other DNA
ccctgtggcccgttcct

SEQ ID NO: 14453 - DNA, 17 bp, synthetic construct
  misc_feature 1..17: note = Oligonucleotide
  source 1..17: mol_type = other DNA
aggccctgtggcccgtt

SEQ ID NO: 14454 - DNA, 17 bp, synthetic construct
  misc_feature 1..17: note = Oligonucleotide
  source 1..17: mol_type = other DNA
cacaggccctgtggccc

SEQ ID NO: 14455 - DNA, 17 bp, synthetic construct
  misc_feature 1..17: note = Oligonucleotide
  source 1..17: mol_type = other DNA
caacacaggccctgtgg

SEQ ID NO: 14456 - DNA, 17 bp, synthetic construct
  misc_feature 1..17: note = Oligonucleotide
  source 1..17: mol_type = other DNA
actcaacacaggccctg

SEQ ID NO: 14457 - DNA, 17 bp, synthetic construct
  misc_feature 1..17: note = Oligonucleotide
  source 1..17: mol_type = other DNA
ttcactcaacacaggcc

SEQ ID NO: 14458 - DNA, 17 bp, synthetic construct
  misc_feature 1..17: note = Oligonucleotide
  source 1..17: mol_type = other DNA
atgttcactcaacacag

SEQ ID NO: 14459 - DNA, 17 bp, synthetic construct
  misc_feature 1..17: note = Oligonucleotide
  source 1..17: mol_type = other DNA
acaatgttcactcaaca

SEQ ID NO: 14460 - DNA, 17 bp, synthetic construct
  misc_feature 1..17: note = Oligonucleotide
  source 1..17: mol_type = other DNA
aaaacaatgttcactca

SEQ ID NO: 14461 - DNA, 17 bp, synthetic construct
  misc_feature 1..17: note = Oligonucleotide
  source 1..17: mol_type = other DNA
ccaaaaacaatgttcac

SEQ ID NO: 14462 - DNA, 17 bp, synthetic construct
  misc_feature 1..17: note = Oligonucleotide
  source 1..17: mol_type = other DNA
agaccaaaaacaatgtt

SEQ ID NO: 14463 - DNA, 17 bp, synthetic construct
  misc_feature 1..17: note = Oligonucleotide
  source 1..17: mol_type = other DNA
cccagaccaaaaacaat

SEQ ID NO: 14464 - DNA, 17 bp, synthetic construct
  misc_feature 1..17: note = Oligonucleotide
  source 1..17: mol_type = other DNA
tctcccagaccaaaaac

SEQ ID NO: 14465 - DNA, 17 bp, synthetic construct
  misc_feature 1..17: note = Oligonucleotide
  source 1..17: mol_type = other DNA
tcttctcccagaccaaa

SEQ ID NO: 14466 - DNA, 17 bp, synthetic construct
  misc_feature 1..17: note = Oligonucleotide
  source 1..17: mol_type = other DNA
tgctcttctcccagacc

SEQ ID NO: 14467 - DNA, 17 bp, synthetic construct
  misc_feature 1..17: note = Oligonucleotide
  source 1..17: mol_type = other DNA
ccatgctcttctcccag

SEQ ID NO: 14468 - DNA, 17 bp, synthetic construct
  misc_feature 1..17: note = Oligonucleotide
  source 1..17: mol_type = other DNA
tcaccatgctcttctcc

SEQ ID NO: 14469 - DNA, 17 bp, synthetic construct
  misc_feature 1..17: note = Oligonucleotide
  source 1..17: mol_type = other DNA
acctcaccatgctcttc

SEQ ID NO: 14470 - DNA, 17 bp, synthetic construct
  misc_feature 1..17: note = Oligonucleotide
  source 1..17: mol_type = other DNA
caaacctcaccatgctc

SEQ ID NO: 14471 - DNA, 17 bp, synthetic construct
  misc_feature 1..17: note = Oligonucleotide
  source 1..17: mol_type = other DNA
gcccaaacctcaccatg

SEQ ID NO: 14472 - DNA, 17 bp, synthetic construct
  misc_feature 1..17: note = Oligonucleotide
  source 1..17: mol_type = other DNA
acagcccaaacctcacc

SEQ ID NO: 14473 - DNA, 17 bp, synthetic construct
  misc_feature 1..17: note = Oligonucleotide
  source 1..17: mol_type = other DNA
cccacagcccaaacctc

SEQ ID NO: 14474 - DNA, 17 bp, synthetic construct
  misc_feature 1..17: note = Oligonucleotide
  source 1..17: mol_type = other DNA
cggcccacagcccaaac

SEQ ID NO: 14475 - DNA, 17 bp, synthetic construct
  misc_feature 1..17: note = Oligonucleotide
  source 1..17: mol_type = other DNA
ccccggcccacagccca

SEQ ID NO: 14476 - DNA, 17 bp, synthetic construct
  misc_feature 1..17: note = Oligonucleotide
  source 1..17: mol_type = other DNA
tagccccggcccacagc

SEQ ID NO: 14477 - DNA, 17 bp, synthetic construct
  misc_feature 1..17: note = Oligonucleotide
  source 1..17: mol_type = other DNA
tgctagccccggcccac

SEQ ID NO: 14478 - DNA, 17 bp, synthetic construct
  misc_feature 1..17: note = Oligonucleotide
  source 1..17: mol_type = other DNA
gaatgctagccccggcc

SEQ ID NO: 14479 - DNA, 17 bp, synthetic construct
  misc_feature 1..17: note = Oligonucleotide
  source 1..17: mol_type = other DNA
gctgaatgctagccccg

SEQ ID NO: 14480 - DNA, 17 bp, synthetic construct
  misc_feature 1..17: note = Oligonucleotide
  source 1..17: mol_type = other DNA
taagctgaatgctagcc

SEQ ID NO: 14481 - DNA, 17 bp, synthetic construct
  misc_feature 1..17: note = Oligonucleotide
  source 1..17: mol_type = other DNA
ccctaagctgaatgcta

SEQ ID NO: 14482 - DNA, 17 bp, synthetic construct
  misc_feature 1..17: note = Oligonucleotide
  source 1..17: mol_type = other DNA
gccccctaagctgaatg

SEQ ID NO: 14483 - DNA, 17 bp, synthetic construct
  misc_feature 1..17: note = Oligonucleotide
  source 1..17: mol_type = other DNA
gctgccccctaagctga

SEQ ID NO: 14484 - DNA, 17 bp, synthetic construct
  misc_feature 1..17: note = Oligonucleotide
  source 1..17: mol_type = other DNA
tatgctgccccctaagc

SEQ ID NO: 14485 - DNA, 17 bp, synthetic construct
  misc_feature 1..17: note = Oligonucleotide
  source 1..17: mol_type = other DNA
acctatgctgcccccta

SEQ ID NO: 14486 - DNA, 17 bp, synthetic construct
  misc_feature 1..17: note = Oligonucleotide
  source 1..17: mol_type = other DNA
tcaacctatgctgcccc

SEQ ID NO: 14487 - DNA, 17 bp, synthetic construct
  misc_feature 1..17: note = Oligonucleotide
  source 1..17: mol_type = other DNA
ctctcaacctatgctgc

SEQ ID NO: 14488 - DNA, 17 bp, synthetic construct
  misc_feature 1..17: note = Oligonucleotide
  source 1..17: mol_type = other DNA
ccactctcaacctatgc

SEQ ID NO: 14489 - DNA, 17 bp, synthetic construct
  misc_feature 1..17: note = Oligonucleotide
  source 1..17: mol_type = other DNA
accccactctcaaccta

SEQ ID NO: 14490 - DNA, 17 bp, synthetic construct
  misc_feature 1..17: note = Oligonucleotide
  source 1..17: mol_type = other DNA
tcaaccccactctcaac

SEQ ID NO: 14491 - DNA, 17 bp, synthetic construct
  misc_feature 1..17: note = Oligonucleotide
  source 1..17: mol_type = other DNA
acttcaaccccactctc

SEQ ID NO: 14492 - DNA, 17 bp, synthetic construct
  misc_feature 1..17: note = Oligonucleotide
  source 1..17: mol_type = other DNA
ctaacttcaaccccact

SEQ ID NO: 14493 - DNA, 17 bp, synthetic construct
  misc_feature 1..17: note = Oligonucleotide
  source 1..17: mol_type = other DNA
accctaacttcaacccc

SEQ ID NO: 14494 - DNA, 17 bp, synthetic construct
  misc_feature 1..17: note = Oligonucleotide
  source 1..17: mol_type = other DNA
ctgaccctaacttcaac

SEQ ID NO: 14495 - DNA, 17 bp, synthetic construct
  misc_feature 1..17: note = Oligonucleotide
  source 1..17: mol_type = other DNA
actctgaccctaacttc

SEQ ID NO: 14496 - DNA, 17 bp, synthetic construct
  misc_feature 1..17: note = Oligonucleotide
  source 1..17: mol_type = other DNA
gggactctgaccctaac

SEQ ID NO: 14497 - DNA, 17 bp, synthetic construct
  misc_feature 1..17: note = Oligonucleotide
  source 1..17: mol_type = other DNA
acagggactctgaccct

SEQ ID NO: 14498 - DNA, 17 bp, synthetic construct
  misc_feature 1..17: note = Oligonucleotide
  source 1..17: mol_type = other DNA
gaaacagggactctgac

SEQ ID NO: 14499 - DNA, 17 bp, synthetic construct
  misc_feature 1..17: note = Oligonucleotide
  source 1..17: mol_type = other DNA
cgggaaacagggactct

SEQ ID NO: 14500 - DNA, 17 bp, synthetic construct
  misc_feature 1..17: note = Oligonucleotide
  source 1..17: mol_type = other DNA
taacgggaaacagggac

SEQ ID NO: 14501 - DNA, 17 bp, synthetic construct
  misc_feature 1..17: note = Oligonucleotide
  source 1..17: mol_type = other DNA
atttaacgggaaacagg

SEQ ID NO: 14502 - DNA, 17 bp, synthetic construct
  misc_feature 1..17: note = Oligonucleotide
  source 1..17: mol_type = other DNA
aggatttaacgggaaac

SEQ ID NO: 14503 - DNA, 17 bp, synthetic construct
  misc_feature 1..17: note = Oligonucleotide
  source 1..17: mol_type = other DNA
cctaggatttaacggga

SEQ ID NO: 14504 - DNA, 17 bp, synthetic construct
  misc_feature 1..17: note = Oligonucleotide
  source 1..17: mol_type = other DNA
cttcctaggatttaacg

SEQ ID NO: 14505 - DNA, 17 bp, synthetic construct
  misc_feature 1..17: note = Oligonucleotide
  source 1..17: mol_type = other DNA
gctcttcctaggattta

SEQ ID NO: 14506 - DNA, 17 bp, synthetic construct
  misc_feature 1..17: note = Oligonucleotide
  source 1..17: mol_type = other DNA
ctggctcttcctaggat

SEQ ID NO: 14507 - DNA, 17 bp, synthetic construct
  misc_feature 1..17: note = Oligonucleotide
  source 1..17: mol_type = other DNA
ctgctggctcttcctag

SEQ ID NO: 14508 - DNA, 17 bp, synthetic construct
  misc_feature 1..17: note = Oligonucleotide
  source 1..17: mol_type = other DNA
ctcctgctggctcttcc

SEQ ID NO: 14509 - DNA, 17 bp, synthetic construct
  misc_feature 1..17: note = Oligonucleotide
  source 1..17: mol_type = other DNA
tgtctcctgctggctct

SEQ ID NO: 14510 - DNA, 17 bp, synthetic construct
  misc_feature 1..17: note = Oligonucleotide
  source 1..17: mol_type = other DNA
ccatgtctcctgctggc

SEQ ID NO: 14511 - DNA, 17 bp, synthetic construct
  misc_feature 1..17: note = Oligonucleotide
  source 1..17: mol_type = other DNA
cccccatgtctcctgct

SEQ ID NO: 14512 - DNA, 17 bp, synthetic construct
  misc_feature 1..17: note = Oligonucleotide
  source 1..17: mol_type = other DNA
ccacccccatgtctcct

SEQ ID NO: 14513 - DNA, 17 bp, synthetic construct
  misc_feature 1..17: note = Oligonucleotide
  source 1..17: mol_type = other DNA
ccaccacccccatgtct

SEQ ID NO: 14514 - DNA, 17 bp, synthetic construct
  misc_feature 1..17: note = Oligonucleotide
  source 1..17: mol_type = other DNA
ggtccaccacccccatg

SEQ ID NO: 14515 - DNA, 17 bp, synthetic construct
  misc_feature 1..17: note = Oligonucleotide
  source 1..17: mol_type = other DNA
tgaggtccaccaccccc

SEQ ID NO: 14516 - DNA, 17 bp, synthetic construct
  misc_feature 1..17: note = Oligonucleotide
  source 1..17: mol_type = other DNA
aagtgaggtccaccacc

SEQ ID NO: 14517 - DNA, 17 bp, synthetic construct
  misc_feature 1..17: note = Oligonucleotide
  source 1..17: mol_type = other DNA
gtgaagtgaggtccacc

SEQ ID NO: 14518 - DNA, 17 bp, synthetic construct
  misc_feature 1..17: note = Oligonucleotide
  source 1..17: mol_type = other DNA
agggtgaagtgaggtcc

SEQ ID NO: 14519 - DNA, 17 bp, synthetic construct
  misc_feature 1..17: note = Oligonucleotide
  source 1..17: mol_type = other DNA
tccagggtgaagtgagg

SEQ ID NO: 14520 - DNA, 17 bp, synthetic construct
  misc_feature 1..17: note = Oligonucleotide
  source 1..17: mol_type = other DNA
tgctccagggtgaagtg

SEQ ID NO: 14521 - DNA, 17 bp, synthetic construct
  misc_feature 1..17: note = Oligonucleotide
  source 1..17: mol_type = other DNA
gcttgctccagggtgaa

SEQ ID NO: 14522 - DNA, 17 bp, synthetic construct
  misc_feature 1..17: note = Oligonucleotide
  source 1..17: mol_type = other DNA
catgcttgctccagggt

SEQ ID NO: 14523 - DNA, 17 bp, synthetic construct
  misc_feature 1..17: note = Oligonucleotide
  source 1..17: mol_type = other DNA
actcatgcttgctccag

SEQ ID NO: 14524 - DNA, 17 bp, synthetic construct
  misc_feature 1..17: note = Oligonucleotide
  source 1..17: mol_type = other DNA
aagactcatgcttgctc

SEQ ID NO: 14525 - DNA, 17 bp, synthetic construct
  misc_feature 1..17: note = Oligonucleotide
  source 1..17: mol_type = other DNA
accaagactcatgcttg

SEQ ID NO: 14526 - DNA, 17 bp, synthetic construct
  misc_feature 1..17: note = Oligonucleotide
  source 1..17: mol_type = other DNA
accaccaagactcatgc

SEQ ID NO: 14527 - DNA, 17 bp, synthetic construct
  misc_feature 1..17: note = Oligonucleotide
  source 1..17: mol_type = other DNA
cggaccaccaagactca

SEQ ID NO: 14528 - DNA, 17 bp, synthetic construct
  misc_feature 1..17: note = Oligonucleotide
  source 1..17: mol_type = other DNA
ctacggaccaccaagac

SEQ ID NO: 14529 - DNA, 17 bp, synthetic construct
  misc_feature 1..17: note = Oligonucleotide
  source 1..17: mol_type = other DNA
ttgctacggaccaccaa

SEQ ID NO: 14530 - DNA, 17 bp, synthetic construct
  misc_feature 1..17: note = Oligonucleotide
  source 1..17: mol_type = other DNA
agcttgctacggaccac

SEQ ID NO: 14531 - DNA, 17 bp, synthetic construct
  misc_feature 1..17: note = Oligonucleotide
  source 1..17: mol_type = other DNA
gagagcttgctacggac

SEQ ID NO: 14532 - DNA, 17 bp, synthetic construct
  misc_feature 1..17: note = Oligonucleotide
  source 1..17: mol_type = other DNA
gctgagagcttgctacg

SEQ ID NO: 14533 - DNA, 17 bp, synthetic construct
  misc_feature 1..17: note = Oligonucleotide
  source 1..17: mol_type = other DNA
catgctgagagcttgct

SEQ ID NO: 14534 - DNA, 17 bp, synthetic construct
  misc_feature 1..17: note = Oligonucleotide
  source 1..17: mol_type = other DNA
ttccatgctgagagctt

SEQ ID NO: 14535 - DNA, 17 bp, synthetic construct
  misc_feature 1..17: note = Oligonucleotide
  source 1..17: mol_type = other DNA
tctttccatgctgagag

SEQ ID NO: 14536 - DNA, 17 bp, synthetic construct
  misc_feature 1..17: note = Oligonucleotide
  source 1..17: mol_type = other DNA
tgatctttccatgctga

SEQ ID NO: 14537 - DNA, 17 bp, synthetic construct
  misc_feature 1..17: note = Oligonucleotide
  source 1..17: mol_type = other DNA
acatgatctttccatgc

SEQ ID NO: 14538 - DNA, 17 bp, synthetic construct
  misc_feature 1..17: note = Oligonucleotide
  source 1..17: mol_type = other DNA
tttacatgatctttcca

SEQ ID NO: 14539 - DNA, 17 bp, synthetic construct
  misc_feature 1..17: note = Oligonucleotide
  source 1..17: mol_type = other DNA
tcgtttacatgatcttt

SEQ ID NO: 14540 - DNA, 17 bp, synthetic construct
  misc_feature 1..17: note = Oligonucleotide
  source 1..17: mol_type = other DNA
gtgtcgtttacatgatc

SEQ ID NO: 14541 - DNA, 17 bp, synthetic construct
  misc_feature 1..17: note = Oligonucleotide
  source 1..17: mol_type = other DNA
tatgtgtcgtttacatg

SEQ ID NO: 14542 - DNA, 17 bp, synthetic construct
  misc_feature 1..17: note = Oligonucleotide
  source 1..17: mol_type = other DNA
ccttatgtgtcgtttac

SEQ ID NO: 14543 - DNA, 17 bp, synthetic construct
  misc_feature 1..17: note = Oligonucleotide
  source 1..17: mol_type = other DNA
tttccttatgtgtcgtt

SEQ ID NO: 14544 - DNA, 17 bp, synthetic construct
  misc_feature 1..17: note = Oligonucleotide
  source 1..17: mol_type = other DNA
tgttttccttatgtgtc

SEQ ID NO: 14545 - DNA, 17 bp, synthetic construct
  misc_feature 1..17: note = Oligonucleotide
  source 1..17: mol_type = other DNA
tgttgttttccttatgt

SEQ ID NO: 14546 - DNA, 17 bp, synthetic construct
  misc_feature 1..17: note = Oligonucleotide
  source 1..17: mol_type = other DNA
cactgttgttttcctta

SEQ ID NO: 14547 - DNA, 17 bp, synthetic construct
  misc_feature 1..17: note = Oligonucleotide
  source 1..17: mol_type = other DNA
catcactgttgttttcc

SEQ ID NO: 14548 - DNA, 17 bp, synthetic construct
  misc_feature 1..17: note = Oligonucleotide
  source 1..17: mol_type = other DNA
tcccatcactgttgttt

SEQ ID NO: 14549 - DNA, 17 bp, synthetic construct
  misc_feature 1..17: note = Oligonucleotide
  source 1..17: mol_type = other DNA
ctttcccatcactgttg

SEQ ID NO: 14550 - DNA, 17 bp, synthetic construct
  misc_feature 1..17: note = Oligonucleotide
  source 1..17: mol_type = other DNA
ctgctttcccatcactg

SEQ ID NO: 14551 - DNA, 17 bp, synthetic construct
  misc_feature 1..17: note = Oligonucleotide
  source 1..17: mol_type = other DNA
attctgctttcccatca

SEQ ID NO: 14552 - DNA, 17 bp, synthetic construct
  misc_feature 1..17: note = Oligonucleotide
  source 1..17: mol_type = other DNA
cccattctgctttccca

SEQ ID NO: 14553 - DNA, 17 bp, synthetic construct
  misc_feature 1..17: note = Oligonucleotide
  source 1..17: mol_type = other DNA
agccccattctgctttc

SEQ ID NO: 14554 - DNA, 17 bp, synthetic construct
  misc_feature 1..17: note = Oligonucleotide
  source 1..17: mol_type = other DNA
cccagccccattctgct

SEQ ID NO: 14555 - DNA, 17 bp, synthetic construct
  misc_feature 1..17: note = Oligonucleotide
  source 1..17: mol_type = other DNA
attcccagccccattct

SEQ ID NO: 14556 - DNA, 17 bp, synthetic construct
  misc_feature 1..17: note = Oligonucleotide
  source 1..17: mol_type = other DNA
actattcccagccccat

SEQ ID NO: 14557 - DNA, 17 bp, synthetic construct
  misc_feature 1..17: note = Oligonucleotide
  source 1..17: mol_type = other DNA
ggcactattcccagccc

SEQ ID NO: 14558 - DNA, 17 bp, synthetic construct
  misc_feature 1..17: note = Oligonucleotide
  source 1..17: mol_type = other DNA
tatggcactattcccag

SEQ ID NO: 14559 - DNA, 17 bp, synthetic construct
  misc_feature 1..17: note = Oligonucleotide
  source 1..17: mol_type = other DNA
ggctatggcactattcc

SEQ ID NO: 14560 - DNA, 17 bp, synthetic construct
  misc_feature 1..17: note = Oligonucleotide
  source 1..17: mol_type = other DNA
gatggctatggcactat

SEQ ID NO: 14561 - DNA, 17 bp, synthetic construct
  misc_feature 1..17: note = Oligonucleotide
  source 1..17: mol_type = other DNA
gaggatggctatggcac

SEQ ID NO: 14562 - DNA, 17 bp, synthetic construct
  misc_feature 1..17: note = Oligonucleotide
  source 1..17: mol_type = other DNA
cctgaggatggctatgg

SEQ ID NO: 14563 - DNA, 17 bp, synthetic construct
  misc_feature 1..17: note = Oligonucleotide
  source 1..17: mol_type = other DNA
tgccctgaggatggcta

SEQ ID NO: 14564 - DNA, 17 bp, synthetic construct
  misc_feature 1..17: note = Oligonucleotide
  source 1..17: mol_type = other DNA
ccttgccctgaggatgg

SEQ ID NO: 14565 - DNA, 17 bp, synthetic construct
  misc_feature 1..17: note = Oligonucleotide
  source 1..17: mol_type = other DNA
gctccttgccctgagga

SEQ ID NO: 14566 - DNA, 17 bp, synthetic construct
  misc_feature 1..17: note = Oligonucleotide
  source 1..17: mol_type = other DNA
agagctccttgccctga

SEQ ID NO: 14567 - DNA, 17 bp, synthetic construct
  misc_feature 1..17: note = Oligonucleotide
  source 1..17: mol_type = other DNA
ctcagagctccttgccc

SEQ ID NO: 14568 - DNA, 17 bp, synthetic construct
  misc_feature 1..17: note = Oligonucleotide
  source 1..17: mol_type = other DNA
gggctcagagctccttg

SEQ ID NO: 14569 - DNA, 17 bp, synthetic construct
  misc_feature 1..17: note = Oligonucleotide
  source 1..17: mol_type = other DNA
agggggctcagagctcc

SEQ ID NO: 14570 - DNA, 17 bp, synthetic construct
  misc_feature 1..17: note = Oligonucleotide
  source 1..17: mol_type = other DNA
agcagggggctcagagc

SEQ ID NO: 14571 - DNA, 17 bp, synthetic construct
  misc_feature 1..17: note = Oligonucleotide
  source 1..17: mol_type = other DNA
ggcagcagggggctcag

SEQ ID NO: 14572 - DNA, 17 bp, synthetic construct
  misc_feature 1..17: note = Oligonucleotide
  source 1..17: mol_type = other DNA
gcaggcagcagggggct

SEQ ID NO: 14573 - DNA, 17 bp, synthetic construct
  misc_feature 1..17: note = Oligonucleotide
  source 1..17: mol_type = other DNA
ctcgcaggcagcagggg

SEQ ID NO: 14574 - DNA, 17 bp, synthetic construct
  misc_feature 1..17: note = Oligonucleotide
  source 1..17: mol_type = other DNA
ctactcgcaggcagcag

SEQ ID NO: 14575 - DNA, 17 bp, synthetic construct
  misc_feature 1..17: note = Oligonucleotide
  source 1..17: mol_type = other DNA
cctctactcgcaggcag

SEQ ID NO: 14576 - DNA, 17 bp, synthetic construct
  misc_feature 1..17: note = Oligonucleotide
  source 1..17: mol_type = other DNA
tttcctctactcgcagg

SEQ ID NO: 14577 - DNA, 17 bp, synthetic construct
  misc_feature 1..17: note = Oligonucleotide
  source 1..17: mol_type = other DNA
ggctttcctctactcgc

SEQ ID NO: 14578 - DNA, 17 bp, synthetic construct
  misc_feature 1..17: note = Oligonucleotide
  source 1..17: mol_type = other DNA
ccaggctttcctctact

SEQ ID NO: 14579 - DNA, 17 bp, synthetic construct
  misc_feature 1..17: note = Oligonucleotide
  source 1..17: mol_type = other DNA
acaccaggctttcctct

SEQ ID NO: 14580 - DNA, 17 bp, synthetic construct
  misc_feature 1..17: note = Oligonucleotide
  source 1..17: mol_type = other DNA
cacacaccaggctttcc

SEQ ID NO: 14581 - DNA, 17 bp, synthetic construct
  misc_feature 1..17: note = Oligonucleotide
  source 1..17: mol_type = other DNA
acgcacacaccaggctt

SEQ ID NO: 14582 - DNA, 17 bp, synthetic construct
  misc_feature 1..17: note = Oligonucleotide
  source 1..17: mol_type = other DNA
gtcacgcacacaccagg

SEQ ID NO: 14583 - DNA, 17 bp, synthetic construct
  misc_feature 1..17: note = Oligonucleotide
  source 1..17: mol_type = other DNA
tgagtcacgcacacacc

SEQ ID NO: 14584 - DNA, 17 bp, synthetic construct
  misc_feature 1..17: note = Oligonucleotide
  source 1..17: mol_type = other DNA
ccgtgagtcacgcacac

SEQ ID NO: 14585 - DNA, 17 bp, synthetic construct
  misc_feature 1..17: note = Oligonucleotide
  source 1..17: mol_type = other DNA
ggaccgtgagtcacgca

SEQ ID NO: 14586 - DNA, 17 bp, synthetic construct
  misc_feature 1..17: note = Oligonucleotide
  source 1..17: mol_type = other DNA
ccaggaccgtgagtcac

SEQ ID NO: 14587 - DNA, 17 bp, synthetic construct
  misc_feature 1..17: note = Oligonucleotide
  source 1..17: mol_type = other DNA
cttccaggaccgtgagt

SEQ ID NO: 14588 - DNA, 17 bp, synthetic construct
  misc_feature 1..17: note = Oligonucleotide
  source 1..17: mol_type = other DNA
ttccttccaggaccgtg

SEQ ID NO: 14589 - DNA, 17 bp, synthetic construct
  misc_feature 1..17: note = Oligonucleotide
  source 1..17: mol_type = other DNA
gttttccttccaggacc

SEQ ID NO: 14590 - DNA, 17 bp, synthetic construct
  misc_feature 1..17: note = Oligonucleotide
  source 1..17: mol_type = other DNA
ctggttttccttccagg

SEQ ID NO: 14591 - DNA, 17 bp, synthetic construct
  misc_feature 1..17: note = Oligonucleotide
  source 1..17: mol_type = other DNA
ctcctggttttccttcc

SEQ ID NO: 14592 - DNA, 17 bp, synthetic construct
  misc_feature 1..17: note = Oligonucleotide
  source 1..17: mol_type = other DNA
tgtctcctggttttcct

SEQ ID NO: 14593 - DNA, 17 bp, synthetic construct
  misc_feature 1..17: note = Oligonucleotide
  source 1..17: mol_type = other DNA
gtgtgtctcctggtttt

SEQ ID NO: 14594 - DNA, 17 bp, synthetic construct
  misc_feature 1..17: note = Oligonucleotide
  source 1..17: mol_type = other DNA
cgtgtgtgtctcctggt

SEQ ID NO: 14595 - DNA, 17 bp, synthetic construct
  misc_feature 1..17: note = Oligonucleotide
  source 1..17: mol_type = other DNA
ccacgtgtgtgtctcct

SEQ ID NO: 14596 - DNA, 17 bp, synthetic construct
  misc_feature 1..17: note = Oligonucleotide
  source 1..17: mol_type = other DNA
aggccacgtgtgtgtct

SEQ ID NO: 14597 - DNA, 17 bp, synthetic construct
  misc_feature 1..17: note = Oligonucleotide
  source 1..17: mol_type = other DNA
ctgaggccacgtgtgtg

SEQ ID NO: 14598 - DNA, 17 bp, synthetic construct
  misc_feature 1..17: note = Oligonucleotide
  source 1..17: mol_type = other DNA
tggctgaggccacgtgt

SEQ ID NO: 14599 - DNA, 17 bp, synthetic construct
  misc_feature 1..17: note = Oligonucleotide
  source 1..17: mol_type = other DNA
tcctggctgaggccacg

SEQ ID NO: 14600 - DNA, 17 bp, synthetic construct
  misc_feature 1..17: note = Oligonucleotide
  source 1..17: mol_type = other DNA
gtatcctggctgaggcc

SEQ ID NO: 14601 - DNA, 17 bp, synthetic construct
  misc_feature 1..17: note = Oligonucleotide
  source 1..17: mol_type = other DNA
cgggtatcctggctgag

SEQ ID NO: 14602 - DNA, 17 bp, synthetic construct
  misc_feature 1..17: note = Oligonucleotide
  source 1..17: mol_type = other DNA
gctcgggtatcctggct

SEQ ID NO: 14603 - DNA, 17 bp, synthetic construct
  misc_feature 1..17: note = Oligonucleotide
  source 1..17: mol_type = other DNA
gaggctcgggtatcctg

SEQ ID NO: 14604 - DNA, 17 bp, synthetic construct
  misc_feature 1..17: note = Oligonucleotide
  source 1..17: mol_type = other DNA
caagaggctcgggtatc

SEQ ID NO: 14605 - DNA, 17 bp, synthetic construct
  misc_feature 1..17: note = Oligonucleotide
  source 1..17: mol_type = other DNA
ctccaagaggctcgggt

SEQ ID NO: 14606 - DNA, 17 bp, synthetic construct
  misc_feature 1..17: note = Oligonucleotide
  source 1..17: mol_type = other DNA
gacctccaagaggctcg

SEQ ID NO: 14607 - DNA, 17 bp, synthetic construct
  misc_feature 1..17: note = Oligonucleotide
  source 1..17: mol_type = other DNA
agagacctccaagaggc

SEQ ID NO: 14608 - DNA, 17 bp, synthetic construct
  misc_feature 1..17: note = Oligonucleotide
  source 1..17: mol_type = other DNA
accagagacctccaaga

SEQ ID NO: 14609 - DNA, 17 bp, synthetic construct
  misc_feature 1..17: note = Oligonucleotide
  source 1..17: mol_type = other DNA
cccaccagagacctcca

SEQ ID NO: 14610 - DNA, 17 bp, synthetic construct
  misc_feature 1..17: note = Oligonucleotide
  source 1..17: mol_type = other DNA
acacccaccagagacct

SEQ ID NO: 14611 - DNA, 17 bp, synthetic construct
  misc_feature 1..17: note = Oligonucleotide
  source 1..17: mol_type = other DNA
cccacacccaccagaga

SEQ ID NO: 14612 - DNA, 17 bp, synthetic construct
  misc_feature 1..17: note = Oligonucleotide
  source 1..17: mol_type = other DNA
ggccccacacccaccag

SEQ ID NO: 14613 - DNA, 17 bp, synthetic construct
  misc_feature 1..17: note = Oligonucleotide
  source 1..17: mol_type = other DNA
cctggccccacacccac

SEQ ID NO: 14614 - DNA, 17 bp, synthetic construct
  misc_feature 1..17: note = Oligonucleotide
  source 1..17: mol_type = other DNA
cagcctggccccacacc

SEQ ID NO: 14615 - DNA, 17 bp, synthetic construct
  misc_feature 1..17: note = Oligonucleotide
  source 1..17: mol_type = other DNA
tcccagcctggccccac

SEQ ID NO: 14616 - DNA, 17 bp, synthetic construct
  misc_feature 1..17: note = Oligonucleotide
  source 1..17: mol_type = other DNA
cggtcccagcctggccc

SEQ ID NO: 14617 - DNA, 17 bp, synthetic construct
  misc_feature 1..17: note = Oligonucleotide
  source 1..17: mol_type = other DNA
ggacggtcccagcctgg

SEQ ID NO: 14618 - DNA, 17 bp, synthetic construct
  misc_feature 1..17: note = Oligonucleotide
  source 1..17: mol_type = other DNA
acaggacggtcccagcc

SEQ ID NO: 14619 - DNA, 17 bp, synthetic construct
  misc_feature 1..17: note = Oligonucleotide
  source 1..17: mol_type = other DNA
acaacaggacggtccca

SEQ ID NO: 14620 - DNA, 17 bp, synthetic construct
  misc_feature 1..17: note = Oligonucleotide
  source 1..17: mol_type = other DNA
gctacaacaggacggtc

SEQ ID NO: 14621 - DNA, 17 bp, synthetic construct
  misc_feature 1..17: note = Oligonucleotide
  source 1..17: mol_type = other DNA
gcagctacaacaggacg

SEQ ID NO: 14622 - DNA, 17 bp, synthetic construct
  misc_feature 1..17: note = Oligonucleotide
  source 1..17: mol_type = other DNA
ccggcagctacaacagg

SEQ ID NO: 14623 - DNA, 17 bp, synthetic construct
  misc_feature 1..17: note = Oligonucleotide
  source 1..17: mol_type = other DNA
actccggcagctacaac

SEQ ID NO: 14624 - DNA, 17 bp, synthetic construct
  misc_feature 1..17: note = Oligonucleotide
  source 1..17: mol_type = other DNA
gggactccggcagctac

SEQ ID NO: 14625 - DNA, 17 bp, synthetic construct
  misc_feature 1..17: note = Oligonucleotide
  source 1..17: mol_type = other DNA
gaggggactccggcagc

SEQ ID NO: 14626 - DNA, 17 bp, synthetic construct
  misc_feature 1..17: note = Oligonucleotide
  source 1..17: mol_type = other DNA
ccagaggggactccggc

SEQ ID NO: 14627 - DNA, 17 bp, synthetic construct
  misc_feature 1..17: note = Oligonucleotide
  source 1..17: mol_type = other DNA
ctcccagaggggactcc

SEQ ID NO: 14628 - DNA, 17 bp, synthetic construct
  misc_feature 1..17: note = Oligonucleotide
  source 1..17: mol_type = other DNA
actctcccagaggggac

SEQ ID NO: 14629 - DNA, 17 bp, synthetic construct
  misc_feature 1..17: note = Oligonucleotide
  source 1..17: mol_type = other DNA
acaactctcccagaggg

SEQ ID NO: 14630 - DNA, 17 bp, synthetic construct
  misc_feature 1..17: note = Oligonucleotide
  source 1..17: mol_type = other DNA
gctacaactctcccaga

SEQ ID NO: 14631 - DNA, 17 bp, synthetic construct
  misc_feature 1..17: note = Oligonucleotide
  source 1..17: mol_type = other DNA
gcagctacaactctccc

SEQ ID NO: 14632 - DNA, 17 bp, synthetic construct
  misc_feature 1..17: note = Oligonucleotide
  source 1..17: mol_type = other DNA
ccggcagctacaactct

SEQ ID NO: 14633 - DNA, 17 bp, synthetic construct
  misc_feature 1..17: note = Oligonucleotide
  source 1..17: mol_type = other DNA
actccggcagctacaac

SEQ ID NO: 14634 - DNA, 17 bp, synthetic construct
  misc_feature 1..17: note = Oligonucleotide
  source 1..17: mol_type = other DNA
gggactccggcagctac

SEQ ID NO: 14635 - DNA, 17 bp, synthetic construct
  misc_feature 1..17: note = Oligonucleotide
  source 1..17: mol_type = other DNA
gaggggactccggcagc

SEQ ID NO: 14636 - DNA, 17 bp, synthetic construct
  misc_feature 1..17: note = Oligonucleotide
  source 1..17: mol_type = other DNA
ccagaggggactccggc

SEQ ID NO: 14637 - DNA, 17 bp, synthetic construct
  misc_feature 1..17: note = Oligonucleotide
  source 1..17: mol_type = other DNA
ctcccagaggggactcc

SEQ ID NO: 14638 - DNA, 17 bp, synthetic construct
  misc_feature 1..17: note = Oligonucleotide
  source 1..17: mol_type = other DNA
actctcccagaggggac

SEQ ID NO: 14639 - DNA, 17 bp, synthetic construct
  misc_feature 1..17: note = Oligonucleotide
  source 1..17: mol_type = other DNA
gcaactctcccagaggg

SEQ ID NO: 14640 - DNA, 17 bp, synthetic construct
  misc_feature 1..17: note = Oligonucleotide
  source 1..17: mol_type = other DNA
gcagcaactctcccaga

SEQ ID NO: 14641 - DNA, 17 bp, synthetic construct
  misc_feature 1..17: note = Oligonucleotide
  source 1..17: mol_type = other DNA
ccagcagcaactctccc

SEQ ID NO: 14642 - DNA, 17 bp, synthetic construct
  misc_feature 1..17: note = Oligonucleotide
  source 1..17: mol_type = other DNA
tggccagcagcaactct

SEQ ID NO: 14643 - DNA, 17 bp, synthetic construct
  misc_feature 1..17: note = Oligonucleotide
  source 1..17: mol_type = other DNA
gcctggccagcagcaac

SEQ ID NO: 14644 - DNA, 17 bp, synthetic construct
  misc_feature 1..17: note = Oligonucleotide
  source 1..17: mol_type = other DNA
ccagcctggccagcagc

SEQ ID NO: 14645 - DNA, 17 bp, synthetic construct
  misc_feature 1..17: note = Oligonucleotide
  source 1..17: mol_type = other DNA
gtcccagcctggccagc

SEQ ID NO: 14646 - DNA, 17 bp, synthetic construct
  misc_feature 1..17: note = Oligonucleotide
  source 1..17: mol_type = other DNA
acggtcccagcctggcc

SEQ ID NO: 14647 - DNA, 17 bp, synthetic construct
  misc_feature 1..17: note = Oligonucleotide
  source 1..17: mol_type = other DNA
aggacggtcccagcctg

SEQ ID NO: 14648 - DNA, 17 bp, synthetic construct
  misc_feature 1..17: note = Oligonucleotide
  source 1..17: mol_type = other DNA
aacaggacggtcccagc

SEQ ID NO: 14649 - DNA, 17 bp, synthetic construct
  misc_feature 1..17: note = Oligonucleotide
  source 1..17: mol_type = other DNA
tacaacaggacggtccc

SEQ ID NO: 14650 - DNA, 17 bp, synthetic construct
  misc_feature 1..17: note = Oligonucleotide
  source 1..17: mol_type = other DNA
agctacaacaggacggt

SEQ ID NO: 14651 - DNA, 17 bp, synthetic construct
  misc_feature 1..17: note = Oligonucleotide
  source 1..17: mol_type = other DNA
ggcagctacaacaggac

SEQ ID NO: 14652 - DNA, 17 bp, synthetic construct
  misc_feature 1..17: note = Oligonucleotide
  source 1..17: mol_type = other DNA
tccggcagctacaacag

SEQ ID NO: 14653 - DNA, 17 bp, synthetic construct
  misc_feature 1..17: note = Oligonucleotide
  source 1..17: mol_type = other DNA
gactccggcagctacaa

SEQ ID NO: 14654 - DNA, 17 bp, synthetic construct
  misc_feature 1..17: note = Oligonucleotide
  source 1..17: mol_type = other DNA
ggggactccggcagcta

SEQ ID NO: 14655 - DNA, 17 bp, synthetic construct
  misc_feature 1..17: note = Oligonucleotide
  source 1..17: mol_type = other DNA
agaggggactccggcag

SEQ ID NO: 14656 - DNA, 17 bp, synthetic construct
  misc_feature 1..17: note = Oligonucleotide
  source 1..17: mol_type = other DNA
cccagaggggactccgg

SEQ ID NO: 14657 - DNA, 17 bp, synthetic construct
  misc_feature 1..17: note = Oligonucleotide
  source 1..17: mol_type = other DNA
tctcccagaggggactc

SEQ ID NO: 14658 - DNA, 17 bp, synthetic construct
  misc_feature 1..17: note = Oligonucleotide
  source 1..17: mol_type = other DNA
aactctcccagagggga

SEQ ID NO: 14659 - DNA, 17 bp, synthetic construct
  misc_feature 1..17: note = Oligonucleotide
  source 1..17: mol_type = other DNA
tacaactctcccagagg

SEQ ID NO: 14660 - DNA, 17 bp, synthetic construct
  misc_feature 1..17: note = Oligonucleotide
  source 1..17: mol_type = other DNA
agctacaactctcccag

SEQ ID NO: 14661 - DNA, 17 bp, synthetic construct
  misc_feature 1..17: note = Oligonucleotide
  source 1..17: mol_type = other DNA
ggcagctacaactctcc

SEQ ID NO: 14662 - DNA, 17 bp, synthetic construct
  misc_feature 1..17: note = Oligonucleotide
  source 1..17: mol_type = other DNA
tccggcagctacaactc

SEQ ID NO: 14663 - DNA, 17 bp, synthetic construct
  misc_feature 1..17: note = Oligonucleotide
  source 1..17: mol_type = other DNA
gactccggcagctacaa

SEQ ID NO: 14664 - DNA, 17 bp, synthetic construct
  misc_feature 1..17: note = Oligonucleotide
  source 1..17: mol_type = other DNA
ggggactccggcagcta

SEQ ID NO: 14665 - DNA, 17 bp, synthetic construct
  misc_feature 1..17: note = Oligonucleotide
  source 1..17: mol_type = other DNA
agaggggactccggcag

SEQ ID NO: 14666 - DNA, 17 bp, synthetic construct
  misc_feature 1..17: note = Oligonucleotide
  source 1..17: mol_type = other DNA
cccagaggggactccgg

SEQ ID NO: 14667 - DNA, 17 bp, synthetic construct
  misc_feature 1..17: note = Oligonucleotide
  source 1..17: mol_type = other DNA
tctcccagaggggactc

SEQ ID NO: 14668 - DNA, 17 bp, synthetic construct
  misc_feature 1..17: note = Oligonucleotide
  source 1..17: mol_type = other DNA
aactctcccagagggga

SEQ ID NO: 14669 - DNA, 17 bp, synthetic construct
  misc_feature 1..17: note = Oligonucleotide
  source 1..17: mol_type = other DNA
agcaactctcccagagg

SEQ ID NO: 14670 - DNA, 17 bp, synthetic construct
  misc_feature 1..17: note = Oligonucleotide
  source 1..17: mol_type = other DNA
agcagcaactctcccag

SEQ ID NO: 14671 - DNA, 17 bp, synthetic construct
  misc_feature 1..17: note = Oligonucleotide
  source 1..17: mol_type = other DNA
gccagcagcaactctcc

SEQ ID NO: 14672 - DNA, 17 bp, synthetic construct
  misc_feature 1..17: note = Oligonucleotide
  source 1..17: mol_type = other DNA
ctggccagcagcaactc

SEQ ID NO: 14673 - DNA, 17 bp, synthetic construct
  misc_feature 1..17: note = Oligonucleotide
  source 1..17: mol_type = other DNA
agcctggccagcagcaa

SEQ ID NO: 14674 - DNA, 17 bp, synthetic construct
  misc_feature 1..17: note = Oligonucleotide
  source 1..17: mol_type = other DNA
cccagcctggccagcag

SEQ ID NO: 14675 - DNA, 17 bp, synthetic construct
  misc_feature 1..17: note = Oligonucleotide
  source 1..17: mol_type = other DNA
cgtcccagcctggccag

SEQ ID NO: 14676 - DNA, 17 bp, synthetic construct
  misc_feature 1..17: note = Oligonucleotide
  source 1..17: mol_type = other DNA
gaccgtcccagcctggc

SEQ ID NO: 14677 - DNA, 17 bp, synthetic construct
  misc_feature 1..17: note = Oligonucleotide
  source 1..17: mol_type = other DNA
caggaccgtcccagcct

SEQ ID NO: 14678 - DNA, 17 bp, synthetic construct
  misc_feature 1..17: note = Oligonucleotide
  source 1..17: mol_type = other DNA
caacaggaccgtcccag

SEQ ID NO: 14679 - DNA, 17 bp, synthetic construct
  misc_feature 1..17: note = Oligonucleotide
  source 1..17: mol_type = other DNA
ctacaacaggaccgtcc

SEQ ID NO: 14680 - DNA, 17 bp, synthetic construct
  misc_feature 1..17: note = Oligonucleotide
  source 1..17: mol_type = other DNA
cagctacaacaggaccg

SEQ ID NO: 14681 - DNA, 17 bp, synthetic construct
  misc_feature 1..17: note = Oligonucleotide
  source 1..17: mol_type = other DNA
cggcagctacaacagga

SEQ ID NO: 14682 - DNA, 17 bp, synthetic construct
  misc_feature 1..17: note = Oligonucleotide
  source 1..17: mol_type = other DNA
ctccggcagctacaaca

SEQ ID NO: 14683 - DNA, 17 bp, synthetic construct
  misc_feature 1..17: note = Oligonucleotide
  source 1..17: mol_type = other DNA
ggactccggcagctaca

SEQ ID NO: 14684 - DNA, 17 bp, synthetic construct
  misc_feature 1..17: note = Oligonucleotide
  source 1..17: mol_type = other DNA
aggggactccggcagct

SEQ ID NO: 14685 - DNA, 17 bp, synthetic construct
  misc_feature 1..17: note = Oligonucleotide
  source 1..17: mol_type = other DNA
cagaggggactccggca

SEQ ID NO: 14686 - DNA, 17 bp, synthetic construct
  misc_feature 1..17: note = Oligonucleotide
  source 1..17: mol_type = other DNA
tcccagaggggactccg

SEQ ID NO: 14687 - DNA, 17 bp, synthetic construct
  misc_feature 1..17: note = Oligonucleotide
  source 1..17: mol_type = other DNA
ctctcccagaggggact

SEQ ID NO: 14688 - DNA, 17 bp, synthetic construct
  misc_feature 1..17: note = Oligonucleotide
  source 1..17: mol_type = other DNA
caactctcccagagggg

SEQ ID NO: 14689 - DNA, 17 bp, synthetic construct
  misc_feature 1..17: note = Oligonucleotide
  source 1..17: mol_type = other DNA
cagcaactctcccagag

SEQ ID NO: 14690 - DNA, 17 bp, synthetic construct
  misc_feature 1..17: note = Oligonucleotide
  source 1..17: mol_type = other DNA
cagcagcaactctccca

SEQ ID NO: 14691 - DNA, 17 bp, synthetic construct
  misc_feature 1..17: note = Oligonucleotide
  source 1..17: mol_type = other DNA
ggccagcagcaactctc

SEQ ID NO: 14692 - DNA, 17 bp, synthetic construct
  misc_feature 1..17: note = Oligonucleotide
  source 1..17: mol_type = other DNA
cctggccagcagcaact

SEQ ID NO: 14693 - DNA, 17 bp, synthetic construct
  misc_feature 1..17: note = Oligonucleotide
  source 1..17: mol_type = other DNA
cagcctggccagcagca

SEQ ID NO: 14694 - DNA, 17 bp, synthetic construct
  misc_feature 1..17: note = Oligonucleotide
  source 1..17: mol_type = other DNA
tcccagcctggccagca

SEQ ID NO: 14695 - DNA, 17 bp, synthetic construct
  misc_feature 1..17: note = Oligonucleotide
  source 1..17: mol_type = other DNA
cggtcccagcctggcca

SEQ ID NO: 14696 - DNA, 17 bp, synthetic construct
  misc_feature 1..17: note = Oligonucleotide
  source 1..17: mol_type = other DNA
ggacggtcccagcctgg

SEQ ID NO: 14697 - DNA, 17 bp, synthetic construct
  misc_feature 1..17: note = Oligonucleotide
  source 1..17: mol_type = other DNA
acaggacggtcccagcc

SEQ ID NO: 14698 - DNA, 17 bp, synthetic construct
  misc_feature 1..17: note = Oligonucleotide
  source 1..17: mol_type = other DNA
acaacaggacggtccca

SEQ ID NO: 14699 - DNA, 17 bp, synthetic construct
  misc_feature 1..17: note = Oligonucleotide
  source 1..17: mol_type = other DNA
gctacaacaggacggtc

SEQ ID NO: 14700 - DNA, 17 bp, synthetic construct
  misc_feature 1..17: note = Oligonucleotide
  source 1..17: mol_type = other DNA
gcagctacaacaggacg

SEQ ID NO: 14701 - DNA, 17 bp, synthetic construct
  misc_feature 1..17: note = Oligonucleotide
  source 1..17: mol_type = other DNA
ccggcagctacaacagg

SEQ ID NO: 14702 - DNA, 17 bp, synthetic construct
  misc_feature 1..17: note = Oligonucleotide
  source 1..17: mol_type = other DNA
actccggcagctacaac

SEQ ID NO: 14703 - DNA, 17 bp, synthetic construct
  misc_feature 1..17: note = Oligonucleotide
  source 1..17: mol_type = other DNA
gggactccggcagctac

SEQ ID NO: 14704 - DNA, 17 bp, synthetic construct
  misc_feature 1..17: note = Oligonucleotide
  source 1..17: mol_type = other DNA
gaggggactccggcagc

SEQ ID NO: 14705 - DNA, 17 bp, synthetic construct
  misc_feature 1..17: note = Oligonucleotide
  source 1..17: mol_type = other DNA
ccagaggggactccggc

SEQ ID NO: 14706 - DNA, 17 bp, synthetic construct
  misc_feature 1..17: note = Oligonucleotide
  source 1..17: mol_type = other DNA
ctcccagaggggactcc

SEQ ID NO: 14707 - DNA, 17 bp, synthetic construct
  misc_feature 1..17: note = Oligonucleotide
  source 1..17: mol_type = other DNA
actctcccagaggggac

SEQ ID NO: 14708 - DNA, 17 bp, synthetic construct
  misc_feature 1..17: note = Oligonucleotide
  source 1..17: mol_type = other DNA
acaactctcccagaggg

SEQ ID NO: 14709 - DNA, 17 bp, synthetic construct
  misc_feature 1..17: note = Oligonucleotide
  source 1..17: mol_type = other DNA
gctacaactctcccaga

SEQ ID NO: 14710 - DNA, 17 bp, synthetic construct
  misc_feature 1..17: note = Oligonucleotide
  source 1..17: mol_type = other DNA
gcagctacaactctccc

SEQ ID NO: 14711 - DNA, 17 bp, synthetic construct
  misc_feature 1..17: note = Oligonucleotide
  source 1..17: mol_type = other DNA
ccggcagctacaactct

SEQ ID NO: 14712 - DNA, 17 bp, synthetic construct
  misc_feature 1..17: note = Oligonucleotide
  source 1..17: mol_type = other DNA
actccggcagctacaac

SEQ ID NO: 14713 - DNA, 17 bp, synthetic construct
  misc_feature 1..17: note = Oligonucleotide
  source 1..17: mol_type = other DNA
gggactccggcagctac

SEQ ID NO: 14714 - DNA, 17 bp, synthetic construct
  misc_feature 1..17: note = Oligonucleotide
  source 1..17: mol_type = other DNA
gaggggactccggcagc

SEQ ID NO: 14715 - DNA, 17 bp, synthetic construct
  misc_feature 1..17: note = Oligonucleotide
  source 1..17: mol_type = other DNA
ccagaggggactccggc

SEQ ID NO: 14716 - DNA, 17 bp, synthetic construct
  misc_feature 1..17: note = Oligonucleotide
  source 1..17: mol_type = other DNA
ctcccagaggggactcc

SEQ ID NO: 14717 - DNA, 17 bp, synthetic construct
  misc_feature 1..17: note = Oligonucleotide
  source 1..17: mol_type = other DNA
actctcccagaggggac

SEQ ID NO: 14718 - DNA, 17 bp, synthetic construct
  misc_feature 1..17: note = Oligonucleotide
  source 1..17: mol_type = other DNA
gcaactctcccagaggg

SEQ ID NO: 14719 - DNA, 17 bp, synthetic construct
  misc_feature 1..17: note = Oligonucleotide
  source 1..17: mol_type = other DNA
gcagcaactctcccaga

SEQ ID NO: 14720 - DNA, 17 bp, synthetic construct
  misc_feature 1..17: note = Oligonucleotide
  source 1..17: mol_type = other DNA
ccagcagcaactctccc

SEQ ID NO: 14721 - DNA, 17 bp, synthetic construct
  misc_feature 1..17: note = Oligonucleotide
  source 1..17: mol_type = other DNA
tggccagcagcaactct

SEQ ID NO: 14722 - DNA, 17 bp, synthetic construct
  misc_feature 1..17: note = Oligonucleotide
  source 1..17: mol_type = other DNA
gcctggccagcagcaac

SEQ ID NO: 14723 - DNA, 17 bp, synthetic construct
  misc_feature 1..17: note = Oligonucleotide
  source 1..17: mol_type = other DNA
ccagcctggccagcagc

SEQ ID NO: 14724 - DNA, 17 bp, synthetic construct
  misc_feature 1..17: note = Oligonucleotide
  source 1..17: mol_type = other DNA
gtcccagcctggccagc

SEQ ID NO: 14725 - DNA, 17 bp, synthetic construct
  misc_feature 1..17: note = Oligonucleotide
  source 1..17: mol_type = other DNA
accgtcccagcctggcc

SEQ ID NO: 14726 - DNA, 17 bp, synthetic construct
  misc_feature 1..17: note = Oligonucleotide
  source 1..17: mol_type = other DNA
aggaccgtcccagcctg

SEQ ID NO: 14727 - DNA, 17 bp, synthetic construct
  misc_feature 1..17: note = Oligonucleotide
  source 1..17: mol_type = other DNA
aacaggaccgtcccagc

SEQ ID NO: 14728 - DNA, 17 bp, synthetic construct
  misc_feature 1..17: note = Oligonucleotide
  source 1..17: mol_type = other DNA
tacaacaggaccgtccc

SEQ ID NO: 14729 - DNA, 17 bp, synthetic construct
  misc_feature 1..17: note = Oligonucleotide
  source 1..17: mol_type = other DNA
agctacaacaggaccgt

SEQ ID NO: 14730 - DNA, 17 bp, synthetic construct
  misc_feature 1..17: note = Oligonucleotide
  source 1..17: mol_type = other DNA
ggcagctacaacaggac

SEQ ID NO: 14731 - DNA, 17 bp, synthetic construct
  misc_feature 1..17: note = Oligonucleotide
  source 1..17: mol_type = other DNA
tccggcagctacaacag

SEQ ID NO: 14732 - DNA, 17 bp, synthetic construct
  misc_feature 1..17: note = Oligonucleotide
  source 1..17: mol_type = other DNA
gactccggcagctacaa

SEQ ID NO: 14733 - DNA, 17 bp, synthetic construct
  misc_feature 1..17: note = Oligonucleotide
  source 1..17: mol_type = other DNA
ggggactccggcagcta

SEQ ID NO: 14734 - DNA, 17 bp, synthetic construct
  misc_feature 1..17: note = Oligonucleotide
  source 1..17: mol_type = other DNA
agaggggactccggcag

SEQ ID NO: 14735 - DNA, 17 bp, synthetic construct
  misc_feature 1..17: note = Oligonucleotide
  source 1..17: mol_type = other DNA
cccagaggggactccgg

SEQ ID NO: 14736 - DNA, 17 bp, synthetic construct
  misc_feature 1..17: note = Oligonucleotide
  source 1..17: mol_type = other DNA
tctcccagaggggactc

SEQ ID NO: 14737 - DNA, 17 bp, synthetic construct
  misc_feature 1..17: note = Oligonucleotide
  source 1..17: mol_type = other DNA
aactctcccagagggga

SEQ ID NO: 14738 - DNA, 17 bp, synthetic construct
  misc_feature 1..17: note = Oligonucleotide
  source 1..17: mol_type = other DNA
tacaactctcccagagg

SEQ ID NO: 14739 - DNA, 17 bp, synthetic construct
  misc_feature 1..17: note = Oligonucleotide
  source 1..17: mol_type = other DNA
agctacaactctcccag

SEQ ID NO: 14740 - DNA, 17 bp, synthetic construct
  misc_feature 1..17: note = Oligonucleotide
  source 1..17: mol_type = other DNA
gccagctacaactctcc

SEQ ID NO: 14741 - DNA, 17 bp, synthetic construct
  misc_feature 1..17: note = Oligonucleotide
  source 1..17: mol_type = other DNA
ctggccagctacaactc

SEQ ID NO: 14742 - DNA, 17 bp, synthetic construct
  misc_feature 1..17: note = Oligonucleotide
  source 1..17: mol_type = other DNA
agcctggccagctacaa

SEQ ID NO: 14743 - DNA, 17 bp, synthetic construct
  misc_feature 1..17: note = Oligonucleotide
  source 1..17: mol_type = other DNA
cccagcctggccagcta

SEQ ID NO: 14744 - DNA, 17 bp, synthetic construct
  misc_feature 1..17: note = Oligonucleotide
  source 1..17: mol_type = other DNA
ggtcccagcctggccag

SEQ ID NO: 14745 - DNA, 17 bp, synthetic construct
  misc_feature 1..17: note = Oligonucleotide
  source 1..17: mol_type = other DNA
gacggtcccagcctggc

SEQ ID NO: 14746 - DNA, 17 bp, synthetic construct
  misc_feature 1..17: note = Oligonucleotide
  source 1..17: mol_type = other DNA
caggacggtcccagcct

SEQ ID NO: 14747 - DNA, 17 bp, synthetic construct
  misc_feature 1..17: note = Oligonucleotide
  source 1..17: mol_type = other DNA
caacaggacggtcccag

SEQ ID NO: 14748 - DNA, 17 bp, synthetic construct
  misc_feature 1..17: note = Oligonucleotide
  source 1..17: mol_type = other DNA
ctacaacaggacggtcc

SEQ ID NO: 14749 - DNA, 17 bp, synthetic construct
  misc_feature 1..17: note = Oligonucleotide
  source 1..17: mol_type = other DNA
cagctacaacaggacgg

SEQ ID NO: 14750 - DNA, 17 bp, synthetic construct
  misc_feature 1..17: note = Oligonucleotide
  source 1..17: mol_type = other DNA
cggcagctacaacagga

SEQ ID NO: 14751 - DNA, 17 bp, synthetic construct
  misc_feature 1..17: note = Oligonucleotide
  source 1..17: mol_type = other DNA
ctccggcagctacaaca

SEQ ID NO: 14752 - DNA, 17 bp, synthetic construct
  misc_feature 1..17: note = Oligonucleotide
  source 1..17: mol_type = other DNA
ggactccggcagctaca

SEQ ID NO: 14753 - DNA, 17 bp, synthetic construct
  misc_feature 1..17: note = Oligonucleotide
  source 1..17: mol_type = other DNA
aggggactccggcagct

SEQ ID NO: 14754 - DNA, 17 bp, synthetic construct
  misc_feature 1..17: note = Oligonucleotide
  source 1..17: mol_type = other DNA
cagaggggactccggca

SEQ ID NO: 14755 - DNA, 17 bp, synthetic construct
  misc_feature 1..17: note = Oligonucleotide
  source 1..17: mol_type = other DNA
tcccagaggggactccg

SEQ ID NO: 14756 - DNA, 17 bp, synthetic construct
  misc_feature 1..17: note = Oligonucleotide
  source 1..17: mol_type = other DNA
ctctcccagaggggact

SEQ ID NO: 14757 - DNA, 17 bp, synthetic construct
  misc_feature 1..17: note = Oligonucleotide
  source 1..17: mol_type = other DNA
caactctcccagagggg

SEQ ID NO: 14758 - DNA, 17 bp, synthetic construct
  misc_feature 1..17: note = Oligonucleotide
  source 1..17: mol_type = other DNA
ctacaactctcccagag

SEQ ID NO: 14759 - DNA, 17 bp, synthetic construct
  misc_feature 1..17: note = Oligonucleotide
  source 1..17: mol_type = other DNA
cagctacaactctccca

SEQ ID NO: 14760 - DNA, 17 bp, synthetic construct
  misc_feature 1..17: note = Oligonucleotide
  source 1..17: mol_type = other DNA
cggcagctacaactctc

SEQ ID NO: 14761 - DNA, 17 bp, synthetic construct
  misc_feature 1..17: note = Oligonucleotide
  source 1..17: mol_type = other DNA
ctccggcagctacaact

SEQ ID NO: 14762 - DNA, 17 bp, synthetic construct
  misc_feature 1..17: note = Oligonucleotide
  source 1..17: mol_type = other DNA
ggactccggcagctaca

SEQ ID NO: 14763 - DNA, 17 bp, synthetic construct
  misc_feature 1..17: note = Oligonucleotide
  source 1..17: mol_type = other DNA
aggggactccggcagct

SEQ ID NO: 14764 - DNA, 17 bp, synthetic construct
  misc_feature 1..17: note = Oligonucleotide
  source 1..17: mol_type = other DNA
cagaggggactccggca

SEQ ID NO: 14765 - DNA, 17 bp, synthetic construct
  misc_feature 1..17: note = Oligonucleotide
  source 1..17: mol_type = other DNA
tcccagaggggactccg

SEQ ID NO: 14766 - DNA, 17 bp, synthetic construct
  misc_feature 1..17: note = Oligonucleotide
  source 1..17: mol_type = other DNA
ctctcccagaggggact

SEQ ID NO: 14767 - DNA, 17 bp, synthetic construct
  misc_feature 1..17: note = Oligonucleotide
  source 1..17: mol_type = other DNA
caactctcccagagggg

SEQ ID NO: 14768 - DNA, 17 bp, synthetic construct
  misc_feature 1..17: note = Oligonucleotide
  source 1..17: mol_type = other DNA
cagcaactctcccagag

SEQ ID NO: 14769 - DNA, 17 bp, synthetic construct
  misc_feature 1..17: note = Oligonucleotide
  source 1..17: mol_type = other DNA
cagcagcaactctccca

SEQ ID NO: 14770 - DNA, 17 bp, synthetic construct
  misc_feature 1..17: note = Oligonucleotide
  source 1..17: mol_type = other DNA
ggccagcagcaactctc

SEQ ID NO: 14771 - DNA, 17 bp, synthetic construct
  misc_feature 1..17: note = Oligonucleotide
  source 1..17: mol_type = other DNA
cctggccagcagcaact

SEQ ID NO: 14772 - DNA, 17 bp, synthetic construct
  misc_feature 1..17: note = Oligonucleotide
  source 1..17: mol_type = other DNA
cagcctggccagcagca

SEQ ID NO: 14773 - DNA, 17 bp, synthetic construct
  misc_feature 1..17: note = Oligonucleotide
  source 1..17: mol_type = other DNA
tcccagcctggccagca

SEQ ID NO: 14774 - DNA, 17 bp, synthetic construct
  misc_feature 1..17: note = Oligonucleotide
  source 1..17: mol_type = other DNA
ccatcccagcctggcca

SEQ ID NO: 14775 - DNA, 17 bp, synthetic construct
  misc_feature 1..17: note = Oligonucleotide
  source 1..17: mol_type = other DNA
ggaccatcccagcctgg

SEQ ID NO: 14776 - DNA, 17 bp, synthetic construct
  misc_feature 1..17: note = Oligonucleotide
  source 1..17: mol_type = other DNA
acaggaccatcccagcc

SEQ ID NO: 14777 - DNA, 17 bp, synthetic construct
  misc_feature 1..17: note = Oligonucleotide
  source 1..17: mol_type = other DNA
acaacaggaccatccca

SEQ ID NO: 14778 - DNA, 17 bp, synthetic construct
  misc_feature 1..17: note = Oligonucleotide
  source 1..17: mol_type = other DNA
gctacaacaggaccatc

SEQ ID NO: 14779 - DNA, 17 bp, synthetic construct
  misc_feature 1..17: note = Oligonucleotide
  source 1..17: mol_type = other DNA
gcagctacaacaggacc

SEQ ID NO: 14780 - DNA, 17 bp, synthetic construct
  misc_feature 1..17: note = Oligonucleotide
  source 1..17: mol_type = other DNA
ccggcagctacaacagg

SEQ ID NO: 14781 - DNA, 17 bp, synthetic construct
  misc_feature 1..17: note = Oligonucleotide
  source 1..17: mol_type = other DNA
actccggcagctacaac

SEQ ID NO: 14782 - DNA, 17 bp, synthetic construct
  misc_feature 1..17: note = Oligonucleotide
  source 1..17: mol_type = other DNA
gggactccggcagctac

SEQ ID NO: 14783 - DNA, 17 bp, synthetic construct
  misc_feature 1..17: note = Oligonucleotide
  source 1..17: mol_type = other DNA
gaggggactccggcagc

SEQ ID NO: 14784 - DNA, 17 bp, synthetic construct
  misc_feature 1..17: note = Oligonucleotide
  source 1..17: mol_type = other DNA
ccagaggggactccggc

SEQ ID NO: 14785 - DNA, 17 bp, synthetic construct
  misc_feature 1..17: note = Oligonucleotide
  source 1..17: mol_type = other DNA
ctcccagaggggactcc

SEQ ID NO: 14786 - DNA, 17 bp, synthetic construct
  misc_feature 1..17: note = Oligonucleotide
  source 1..17: mol_type = other DNA
actctcccagaggggac

SEQ ID NO: 14787 - DNA, 17 bp, synthetic construct
  misc_feature 1..17: note = Oligonucleotide
  source 1..17: mol_type = other DNA
gcaactctcccagaggg

SEQ ID NO: 14788 - DNA, 17 bp, synthetic construct
  misc_feature 1..17: note = Oligonucleotide
  source 1..17: mol_type = other DNA
gcagcaactctcccaga

SEQ ID NO: 14789 - DNA, 17 bp, synthetic construct
  misc_feature 1..17: note = Oligonucleotide
  source 1..17: mol_type = other DNA
ccagcagcaactctccc

SEQ ID NO: 14790 - DNA, 17 bp, synthetic construct
  misc_feature 1..17: note = Oligonucleotide
  source 1..17: mol_type = other DNA
tggccagcagcaactct

SEQ ID NO: 14791 - DNA, 17 bp, synthetic construct
  misc_feature 1..17: note = Oligonucleotide
  source 1..17: mol_type = other DNA
gcctggccagcagcaac

SEQ ID NO: 14792 - DNA, 17 bp, synthetic construct
  misc_feature 1..17: note = Oligonucleotide
  source 1..17: mol_type = other DNA
ccagcctggccagcagc

SEQ ID NO: 14793 - DNA, 17 bp, synthetic construct
  misc_feature 1..17: note = Oligonucleotide
  source 1..17: mol_type = other DNA
gtcccagcctggccagc

SEQ ID NO: 14794 - DNA, 17 bp, synthetic construct
  misc_feature 1..17: note = Oligonucleotide
  source 1..17: mol_type = other DNA
acggtcccagcctggcc

SEQ ID NO: 14795 - DNA, 17 bp, synthetic construct
  misc_feature 1..17: note = Oligonucleotide
  source 1..17: mol_type = other DNA
aggacggtcccagcctg

SEQ ID NO: 14796 - DNA, 17 bp, synthetic construct
  misc_feature 1..17: note = Oligonucleotide
  source 1..17: mol_type = other DNA
aacaggacggtcccagc

SEQ ID NO: 14797 - DNA, 17 bp, synthetic construct
  misc_feature 1..17: note = Oligonucleotide
  source 1..17: mol_type = other DNA
tacaacaggacggtccc

SEQ ID NO: 14798 - DNA, 17 bp, synthetic construct
  misc_feature 1..17: note = Oligonucleotide
  source 1..17: mol_type = other DNA
agctacaacaggacggt

SEQ ID NO: 14799 - DNA, 17 bp, synthetic construct
  misc_feature 1..17: note = Oligonucleotide
  source 1..17: mol_type = other DNA
agcagctacaacaggac

SEQ ID NO: 14800 - DNA, 17 bp, synthetic construct
  misc_feature 1..17: note = Oligonucleotide
  source 1..17: mol_type = other DNA
tccagcagctacaacag

SEQ ID NO: 14801 - DNA, 17 bp, synthetic construct
  misc_feature 1..17: note = Oligonucleotide
  source 1..17: mol_type = other DNA
gactccagcagctacaa

SEQ ID NO: 14802 - DNA, 17 bp, synthetic construct
  misc_feature 1..17: note = Oligonucleotide
  source 1..17: mol_type = other DNA
ggggactccagcagcta

SEQ ID NO: 14803 - DNA, 17 bp, synthetic construct
  misc_feature 1..17: note = Oligonucleotide
  source 1..17: mol_type = other DNA
agaggggactccagcag

SEQ ID NO: 14804 - DNA, 17 bp, synthetic construct
  misc_feature 1..17: note = Oligonucleotide
  source 1..17: mol_type = other DNA
cccagaggggactccag

SEQ ID NO: 14805 - DNA, 17 bp, synthetic construct
  misc_feature 1..17: note = Oligonucleotide
  source 1..17: mol_type = other DNA
tctcccagaggggactc

SEQ ID NO: 14806 - DNA, 17 bp, synthetic construct
  misc_feature 1..17: note = Oligonucleotide
  source 1..17: mol_type = other DNA
aactctcccagagggga

SEQ ID NO: 14807 - DNA, 17 bp, synthetic construct
  misc_feature 1..17: note = Oligonucleotide
  source 1..17: mol_type = other DNA
tacaactctcccagagg

SEQ ID NO: 14808 - DNA, 17 bp, synthetic construct
  misc_feature 1..17: note = Oligonucleotide
  source 1..17: mol_type = other DNA
agctacaactctcccag

SEQ ID NO: 14809 - DNA, 17 bp, synthetic construct
  misc_feature 1..17: note = Oligonucleotide
  source 1..17: mol_type = other DNA
ggcagctacaactctcc

SEQ ID NO: 14810 - DNA, 17 bp, synthetic construct
  misc_feature 1..17: note = Oligonucleotide
  source 1..17: mol_type = other DNA
tccggcagctacaactc

SEQ ID NO: 14811 - DNA, 17 bp, synthetic construct
  misc_feature 1..17: note = Oligonucleotide
  source 1..17: mol_type = other DNA
gactccggcagctacaa

SEQ ID NO: 14812 - DNA, 17 bp, synthetic construct
  misc_feature 1..17: note = Oligonucleotide
  source 1..17: mol_type = other DNA
ggggactccggcagcta

SEQ ID NO: 14813 - DNA, 17 bp, synthetic construct
  misc_feature 1..17: note = Oligonucleotide
  source 1..17: mol_type = other DNA
agaggggactccggcag

SEQ ID NO: 14814 - DNA, 17 bp, synthetic construct
  misc_feature 1..17: note = Oligonucleotide
  source 1..17: mol_type = other DNA
cccagaggggactccgg

SEQ ID NO: 14815 - DNA, 17 bp, synthetic construct
  misc_feature 1..17: note = Oligonucleotide
  source 1..17: mol_type = other DNA
tctcccagaggggactc

SEQ ID NO: 14816 - DNA, 17 bp, synthetic construct
  misc_feature 1..17: note = Oligonucleotide
  source 1..17: mol_type = other DNA
aactctcccagagggga

SEQ ID NO: 14817 - DNA, 17 bp, synthetic construct
  misc_feature 1..17: note = Oligonucleotide
  source 1..17: mol_type = other DNA
agcaactctcccagagg

SEQ ID NO: 14818 - DNA, 17 bp, synthetic construct
  misc_feature 1..17: note = Oligonucleotide
  source 1..17: mol_type = other DNA
agcagcaactctcccag

SEQ ID NO: 14819 - DNA, 17 bp, synthetic construct
  misc_feature 1..17: note = Oligonucleotide
  source 1..17: mol_type = other DNA
gccagcagcaactctcc

SEQ ID NO: 14820 - DNA, 17 bp, synthetic construct
  misc_feature 1..17: note = Oligonucleotide
  source 1..17: mol_type = other DNA
ctggccagcagcaactc

SEQ ID NO: 14821 - DNA, 17 bp, synthetic construct
  misc_feature 1..17: note = Oligonucleotide
  source 1..17: mol_type = other DNA
agcctggccagcagcaa

SEQ ID NO: 14822 - DNA, 17 bp, synthetic construct
  misc_feature 1..17: note = Oligonucleotide
  source 1..17: mol_type = other DNA
cccagcctggccagcag

SEQ ID NO: 14823 - DNA, 17 bp, synthetic construct
  misc_feature 1..17: note = Oligonucleotide
  source 1..17: mol_type = other DNA
ggtcccagcctggccag

SEQ ID NO: 14824 - DNA, 17 bp, synthetic construct
  misc_feature 1..17: note = Oligonucleotide
  source 1..17: mol_type = other DNA
gacggtcccagcctggc

SEQ ID NO: 14825 - DNA, 17 bp, synthetic construct
  misc_feature 1..17: note = Oligonucleotide
  source 1..17: mol_type = other DNA
caggacggtcccagcct

SEQ ID NO: 14826 - DNA, 17 bp, synthetic construct
  misc_feature 1..17: note = Oligonucleotide
  source 1..17: mol_type = other DNA
caacaggacggtcccag

SEQ ID NO: 14827 - DNA, 17 bp, synthetic construct
  misc_feature 1..17: note = Oligonucleotide
  source 1..17: mol_type = other DNA
ctacaacaggacggtcc

SEQ ID NO: 14828 - DNA, 17 bp, synthetic construct
  misc_feature 1..17: note = Oligonucleotide
  source 1..17: mol_type = other DNA
cagctacaacaggacgg

SEQ ID NO: 14829 - DNA, 17 bp, synthetic construct
  misc_feature 1..17: note = Oligonucleotide
  source 1..17: mol_type = other DNA
cggcagctacaacagga

SEQ ID NO: 14830 - DNA, 17 bp, synthetic construct
  misc_feature 1..17: note = Oligonucleotide
  source 1..17: mol_type = other DNA
ctccggcagctacaaca

SEQ ID NO: 14831 - DNA, 17 bp, synthetic construct
  misc_feature 1..17: note = Oligonucleotide
  source 1..17: mol_type = other DNA
ggactccggcagctaca

SEQ ID NO: 14832 - DNA, 17 bp, synthetic construct
  misc_feature 1..17: note = Oligonucleotide
  source 1..17: mol_type = other DNA
aggggactccggcagct

SEQ ID NO: 14833 - DNA, 17 bp, synthetic construct
  misc_feature 1..17: note = Oligonucleotide
  source 1..17: mol_type = other DNA
cagaggggactccggca

SEQ ID NO: 14834 - DNA, 17 bp, synthetic construct
  misc_feature 1..17: note = Oligonucleotide
  source 1..17: mol_type = other DNA
tcccagaggggactccg

SEQ ID NO: 14835 - DNA, 17 bp, synthetic construct
  misc_feature 1..17: note = Oligonucleotide
  source 1..17: mol_type = other DNA
ctctcccagaggggact

SEQ ID NO: 14836 - DNA, 17 bp, synthetic construct
  misc_feature 1..17: note = Oligonucleotide
  source 1..17: mol_type = other DNA
caactctcccagagggg

SEQ ID NO: 14837 - DNA, 17 bp, synthetic construct
  misc_feature 1..17: note = Oligonucleotide
  source 1..17: mol_type = other DNA
cagcaactctcccagag

SEQ ID NO: 14838 - DNA, 17 bp, synthetic construct
  misc_feature 1..17: note = Oligonucleotide
  source 1..17: mol_type = other DNA
cagcagcaactctccca

SEQ ID NO: 14839 - DNA, 17 bp, synthetic construct
  misc_feature 1..17: note = Oligonucleotide
  source 1..17: mol_type = other DNA
ggccagcagcaactctc

SEQ ID NO: 14840 - DNA, 17 bp, synthetic construct
  misc_feature 1..17: note = Oligonucleotide
  source 1..17: mol_type = other DNA
cctggccagcagcaact

SEQ ID NO: 14841 - DNA, 17 bp, synthetic construct
  misc_feature 1..17: note = Oligonucleotide
  source 1..17: mol_type = other DNA
cagcctggccagcagca

SEQ ID NO: 14842 - DNA, 17 bp, synthetic construct
  misc_feature 1..17: note = Oligonucleotide
  source 1..17: mol_type = other DNA
tcccagcctggccagca

SEQ ID NO: 14843 - DNA, 17 bp, synthetic construct
  misc_feature 1..17: note = Oligonucleotide
  source 1..17: mol_type = other DNA
ccgtcccagcctggcca

SEQ ID NO: 14844 - DNA, 17 bp, synthetic construct
  misc_feature 1..17: note = Oligonucleotide
  source 1..17: mol_type = other DNA
ggaccgtcccagcctgg

SEQ ID NO: 14845 - DNA, 17 bp, synthetic construct
  misc_feature 1..17: note = Oligonucleotide
  source 1..17: mol_type = other DNA
acaggaccgtcccagcc

SEQ ID NO: 14846 - DNA, 17 bp, synthetic construct
  misc_feature 1..17: note = Oligonucleotide
  source 1..17: mol_type = other DNA
acaacaggaccgtccca

SEQ ID NO: 14847 - DNA, 17 bp, synthetic construct
  misc_feature 1..17: note = Oligonucleotide
  source 1..17: mol_type = other DNA
gctacaacaggaccgtc

SEQ ID NO: 14848 - DNA, 17 bp, synthetic construct
  misc_feature 1..17: note = Oligonucleotide
  source 1..17: mol_type = other DNA
gcagctacaacaggacc

SEQ ID NO: 14849 - DNA, 17 bp, synthetic construct
  misc_feature 1..17: note = Oligonucleotide
  source 1..17: mol_type = other DNA
ccggcagctacaacagg

SEQ ID NO: 14850 - DNA, 17 bp, synthetic construct
  misc_feature 1..17: note = Oligonucleotide
  source 1..17: mol_type = other DNA
actccggcagctacaac

SEQ ID NO: 14851 - DNA, 17 bp, synthetic construct
  misc_feature 1..17: note = Oligonucleotide
  source 1..17: mol_type = other DNA
gggactccggcagctac

SEQ ID NO: 14852 - DNA, 17 bp, synthetic construct
  misc_feature 1..17: note = Oligonucleotide
  source 1..17: mol_type = other DNA
gaggggactccggcagc

SEQ ID NO: 14853 - DNA, 17 bp, synthetic construct
  misc_feature 1..17: note = Oligonucleotide
  source 1..17: mol_type = other DNA
ccagaggggactccggc

SEQ ID NO: 14854 - DNA, 17 bp, synthetic construct
  misc_feature 1..17: note = Oligonucleotide
  source 1..17: mol_type = other DNA
ctcccagaggggactcc

SEQ ID NO: 14855 - DNA, 17 bp, synthetic construct
  misc_feature 1..17: note = Oligonucleotide
  source 1..17: mol_type = other DNA
actctcccagaggggac

SEQ ID NO: 14856 - DNA, 17 bp, synthetic construct
  misc_feature 1..17: note = Oligonucleotide
  source 1..17: mol_type = other DNA
gcaactctcccagaggg

SEQ ID NO: 14857 - DNA, 17 bp, synthetic construct
  misc_feature 1..17: note = Oligonucleotide
  source 1..17: mol_type = other DNA
acagcaactctcccaga

SEQ ID NO: 14858 - DNA, 17 bp, synthetic construct
  misc_feature 1..17: note = Oligonucleotide
  source 1..17: mol_type = other DNA
ccaacagcaactctccc

SEQ ID NO: 14859 - DNA, 17 bp, synthetic construct
  misc_feature 1..17: note = Oligonucleotide
  source 1..17: mol_type = other DNA
tggccaacagcaactct

SEQ ID NO: 14860 - DNA, 17 bp, synthetic construct
  misc_feature 1..17: note = Oligonucleotide
  source 1..17: mol_type = other DNA
gcctggccaacagcaac

SEQ ID NO: 14861 - DNA, 17 bp, synthetic construct
  misc_feature 1..17: note = Oligonucleotide
  source 1..17: mol_type = other DNA
ccagcctggccaacagc

SEQ ID NO: 14862 - DNA, 17 bp, synthetic construct
  misc_feature 1..17: note = Oligonucleotide
  source 1..17: mol_type = other DNA
gtcccagcctggccaac

SEQ ID NO: 14863 - DNA, 17 bp, synthetic construct
  misc_feature 1..17: note = Oligonucleotide
  source 1..17: mol_type = other DNA
acggtcccagcctggcc

SEQ ID NO: 14864 - DNA, 17 bp, synthetic construct
  misc_feature 1..17: note = Oligonucleotide
  source 1..17: mol_type = other DNA
aggacggtcccagcctg

SEQ ID NO: 14865 - DNA, 17 bp, synthetic construct
  misc_feature 1..17: note = Oligonucleotide
  source 1..17: mol_type = other DNA
aacaggacggtcccagc

SEQ ID NO: 14866 - DNA, 17 bp, synthetic construct
  misc_feature 1..17: note = Oligonucleotide
  source 1..17: mol_type = other DNA
tacaacaggacggtccc

SEQ ID NO: 14867 - DNA, 17 bp, synthetic construct
  misc_feature 1..17: note = Oligonucleotide
  source 1..17: mol_type = other DNA
agctacaacaggacggt

SEQ ID NO: 14868 - DNA, 17 bp, synthetic construct
  misc_feature 1..17: note = Oligonucleotide
  source 1..17: mol_type = other DNA
ggcagctacaacaggac

SEQ ID NO: 14869 - DNA, 17 bp, synthetic construct
  misc_feature 1..17: note = Oligonucleotide
  source 1..17: mol_type = other DNA
tccggcagctacaacag

SEQ ID NO: 14870 - DNA, 17 bp, synthetic construct
  misc_feature 1..17: note = Oligonucleotide
  source 1..17: mol_type = other DNA
gactccggcagctacaa

SEQ ID NO: 14871 - DNA, 17 bp, synthetic construct
  misc_feature 1..17: note = Oligonucleotide
  source 1..17: mol_type = other DNA
ggggactccggcagcta

SEQ ID NO: 14872 - DNA, 17 bp, synthetic construct
  misc_feature 1..17: note = Oligonucleotide
  source 1..17: mol_type = other DNA
agaggggactccggcag

SEQ ID NO: 14873 - DNA, 17 bp, synthetic construct
  misc_feature 1..17: note = Oligonucleotide
  source 1..17: mol_type = other DNA
cccagaggggactccgg

SEQ ID NO: 14874 - DNA, 17 bp, synthetic construct
  misc_feature 1..17: note = Oligonucleotide
  source 1..17: mol_type = other DNA
tctcccagaggggactc

SEQ ID NO: 14875 - DNA, 17 bp, synthetic construct
  misc_feature 1..17: note = Oligonucleotide
  source 1..17: mol_type = other DNA
aactctcccagagggga

SEQ ID NO: 14876 - DNA, 17 bp, synthetic construct
  misc_feature 1..17: note = Oligonucleotide
  source 1..17: mol_type = other DNA
tacaactctcccagagg

SEQ ID NO: 14877 - DNA, 17 bp, synthetic construct
  misc_feature 1..17: note = Oligonucleotide
  source 1..17: mol_type = other DNA
agctacaactctcccag

SEQ ID NO: 14878 - DNA, 17 bp, synthetic construct
  misc_feature 1..17: note = Oligonucleotide
  source 1..17: mol_type = other DNA
ggcagctacaactctcc

SEQ ID NO: 14879 - DNA, 17 bp, synthetic construct
  misc_feature 1..17: note = Oligonucleotide
  source 1..17: mol_type = other DNA
tccggcagctacaactc

SEQ ID NO: 14880 - DNA, 17 bp, synthetic construct
  misc_feature 1..17: note = Oligonucleotide
  source 1..17: mol_type = other DNA
gactccggcagctacaa

SEQ ID NO: 14881 - DNA, 17 bp, synthetic construct
  misc_feature 1..17: note = Oligonucleotide
  source 1..17: mol_type = other DNA
ggggactccggcagcta

SEQ ID NO: 14882 - DNA, 17 bp, synthetic construct
  misc_feature 1..17: note = Oligonucleotide
  source 1..17: mol_type = other DNA
agaggggactccggcag

SEQ ID NO: 14883 - DNA, 17 bp, synthetic construct
  misc_feature 1..17: note = Oligonucleotide
  source 1..17: mol_type = other DNA
cccagaggggactccgg

SEQ ID NO: 14884 - DNA, 17 bp, synthetic construct
  misc_feature 1..17: note = Oligonucleotide
  source 1..17: mol_type = other DNA
tctcccagaggggactc

SEQ ID NO: 14885 - DNA, 17 bp, synthetic construct
  misc_feature 1..17: note = Oligonucleotide
  source 1..17: mol_type = other DNA
aactctcccagagggga

SEQ ID NO: 14886 - DNA, 17 bp, synthetic construct
  misc_feature 1..17: note = Oligonucleotide
  source 1..17: mol_type = other DNA
agcaactctcccagagg

SEQ ID NO: 14887 - DNA, 17 bp, synthetic construct
  misc_feature 1..17: note = Oligonucleotide
  source 1..17: mol_type = other DNA
agcagcaactctcccag

SEQ ID NO: 14888 - DNA, 17 bp, synthetic construct
  misc_feature 1..17: note = Oligonucleotide
  source 1..17: mol_type = other DNA
gccagcagcaactctcc

SEQ ID NO: 14889 - DNA, 17 bp, synthetic construct
  misc_feature 1..17: note = Oligonucleotide
  source 1..17: mol_type = other DNA
ctggccagcagcaactc

SEQ ID NO: 14890 - DNA, 17 bp, synthetic construct
  misc_feature 1..17: note = Oligonucleotide
  source 1..17: mol_type = other DNA
agcctggccagcagcaa

SEQ ID NO: 14891 - DNA, 17 bp, synthetic construct
  misc_feature 1..17: note = Oligonucleotide
  source 1..17: mol_type = other DNA
cccagcctggccagcag

SEQ ID NO: 14892 - DNA, 17 bp, synthetic construct
  misc_feature 1..17: note = Oligonucleotide
  source 1..17: mol_type = other DNA
ggtcccagcctggccag

SEQ ID NO: 14893 - DNA, 17 bp, synthetic construct
  misc_feature 1..17: note = Oligonucleotide
  source 1..17: mol_type = other DNA
gacggtcccagcctggc

SEQ ID NO: 14894 - DNA, 17 bp, synthetic construct
  misc_feature 1..17: note = Oligonucleotide
  source 1..17: mol_type = other DNA
caggacggtcccagcct

SEQ ID NO: 14895 - DNA, 17 bp, synthetic construct
  misc_feature 1..17: note = Oligonucleotide
  source 1..17: mol_type = other DNA
caacaggacggtcccag

SEQ ID NO: 14896 - DNA, 17 bp, synthetic construct
  misc_feature 1..17: note = Oligonucleotide
  source 1..17: mol_type = other DNA
ctacaacaggacggtcc

SEQ ID NO: 14897 - DNA, 17 bp, synthetic construct
  misc_feature 1..17: note = Oligonucleotide
  source 1..17: mol_type = other DNA
cagctacaacaggacgg

SEQ ID NO: 14898 - DNA, 17 bp, synthetic construct
  misc_feature 1..17: note = Oligonucleotide
  source 1..17: mol_type = other DNA
cggcagctacaacagga

SEQ ID NO: 14899 - DNA, 17 bp, synthetic construct
  misc_feature 1..17: note = Oligonucleotide
  source 1..17: mol_type = other DNA
ctccggcagctacaaca

SEQ ID NO: 14900 - DNA, 17 bp, synthetic construct
  misc_feature 1..17: note = Oligonucleotide
  source 1..17: mol_type = other DNA
ggactccggcagctaca

SEQ ID NO: 14901 - DNA, 17 bp, synthetic construct
  misc_feature 1..17: note = Oligonucleotide
  source 1..17: mol_type = other DNA
aggggactccggcagct

SEQ ID NO: 14902 - DNA, 17 bp, synthetic construct
  misc_feature 1..17: note = Oligonucleotide
  source 1..17: mol_type = other DNA
cagaggggactccggca

SEQ ID NO: 14903 - DNA, 17 bp, synthetic construct
  misc_feature 1..17: note = Oligonucleotide
  source 1..17: mol_type = other DNA
tcccagaggggactccg

SEQ ID NO: 14904 - DNA, 17 bp, synthetic construct
  misc_feature 1..17: note = Oligonucleotide
  source 1..17: mol_type = other DNA
ctctcccagaggggact

SEQ ID NO: 14905 - DNA, 17 bp, synthetic construct
  misc_feature 1..17: note = Oligonucleotide
  source 1..17: mol_type = other DNA
caactctcccagagggg

SEQ ID NO: 14906 - DNA, 17 bp, synthetic construct
  misc_feature 1..17: note = Oligonucleotide
  source 1..17: mol_type = other DNA
cagcaactctcccagag

SEQ ID NO: 14907 - DNA, 17 bp, synthetic construct
  misc_feature 1..17: note = Oligonucleotide
  source 1..17: mol_type = other DNA
cagcagcaactctccca

SEQ ID NO: 14908 - DNA, 17 bp, synthetic construct
  misc_feature 1..17: note = Oligonucleotide
  source 1..17: mol_type = other DNA
ggccagcagcaactctc

SEQ ID NO: 14909 - DNA, 17 bp, synthetic construct
  misc_feature 1..17: note = Oligonucleotide
  source 1..17: mol_type = other DNA
cctggccagcagcaact

SEQ ID NO: 14910 - DNA, 17 bp, synthetic construct
  misc_feature 1..17: note = Oligonucleotide
  source 1..17: mol_type = other DNA
cagcctggccagcagca

SEQ ID NO: 14911 - DNA, 17 bp, synthetic construct
  misc_feature 1..17: note = Oligonucleotide
  source 1..17: mol_type = other DNA
tcccagcctggccagca

SEQ ID NO: 14912 - DNA, 17 bp, synthetic construct
  misc_feature 1..17: note = Oligonucleotide
  source 1..17: mol_type = other DNA
tggtcccagcctggcca

SEQ ID NO: 14913 - DNA, 17 bp, synthetic construct
  misc_feature 1..17: note = Oligonucleotide
  source 1..17: mol_type = other DNA
ggatggtcccagcctgg

SEQ ID NO: 14914 - DNA, 17 bp, synthetic construct
  misc_feature 1..17: note = Oligonucleotide
  source 1..17: mol_type = other DNA
acaggatggtcccagcc

SEQ ID NO: 14915 - DNA, 17 bp, synthetic construct
  misc_feature 1..17: note = Oligonucleotide
  source 1..17: mol_type = other DNA
acaacaggatggtccca

SEQ ID NO: 14916 - DNA, 17 bp, synthetic construct
  misc_feature 1..17: note = Oligonucleotide
  source 1..17: mol_type = other DNA
gctacaacaggatggtc

SEQ ID NO: 14917 - DNA, 17 bp, synthetic construct
  misc_feature 1..17: note = Oligonucleotide
  source 1..17: mol_type = other DNA
gcagctacaacaggatg

SEQ ID NO: 14918 - DNA, 17 bp, synthetic construct
  misc_feature 1..17: note = Oligonucleotide
  source 1..17: mol_type = other DNA
ccggcagctacaacagg

SEQ ID NO: 14919 - DNA, 17 bp, synthetic construct
  misc_feature 1..17: note = Oligonucleotide
  source 1..17: mol_type = other DNA
actccggcagctacaac

SEQ ID NO: 14920 - DNA, 17 bp, synthetic construct
  misc_feature 1..17: note = Oligonucleotide
  source 1..17: mol_type = other DNA
gggactccggcagctac

SEQ ID NO: 14921 - DNA, 17 bp, synthetic construct
  misc_feature 1..17: note = Oligonucleotide
  source 1..17: mol_type = other DNA
gaggggactccggcagc

SEQ ID NO: 14922 - DNA, 17 bp, synthetic construct
  misc_feature 1..17: note = Oligonucleotide
  source 1..17: mol_type = other DNA
ccagaggggactccggc

SEQ ID NO: 14923 - DNA, 17 bp, synthetic construct
  misc_feature 1..17: note = Oligonucleotide
  source 1..17: mol_type = other DNA
ctcccagaggggactcc

SEQ ID NO: 14924 - DNA, 17 bp, synthetic construct
  misc_feature 1..17: note = Oligonucleotide
  source 1..17: mol_type = other DNA
actctcccagaggggac

SEQ ID NO: 14925 - DNA, 17 bp, synthetic construct
  misc_feature 1..17: note = Oligonucleotide
  source 1..17: mol_type = other DNA
acaactctcccagaggg

SEQ ID NO: 14926 - DNA, 17 bp, synthetic construct
  misc_feature 1..17: note = Oligonucleotide
  source 1..17: mol_type = other DNA
gctacaactctcccaga

SEQ ID NO: 14927 - DNA, 17 bp, synthetic construct
  misc_feature 1..17: note = Oligonucleotide
  source 1..17: mol_type = other DNA
ccagctacaactctccc

SEQ ID NO: 14928 - DNA, 17 bp, synthetic construct
  misc_feature 1..17: note = Oligonucleotide
  source 1..17: mol_type = other DNA
tggccagctacaactct

SEQ ID NO: 14929 - DNA, 17 bp, synthetic construct
  misc_feature 1..17: note = Oligonucleotide
  source 1..17: mol_type = other DNA
gcctggccagctacaac

SEQ ID NO: 14930 - DNA, 17 bp, synthetic construct
  misc_feature 1..17: note = Oligonucleotide
  source 1..17: mol_type = other DNA
ccagcctggccagctac

SEQ ID NO: 14931 - DNA, 17 bp, synthetic construct
  misc_feature 1..17: note = Oligonucleotide
  source 1..17: mol_type = other DNA
gtcccagcctggccagc

SEQ ID NO: 14932 - DNA, 17 bp, synthetic construct
  misc_feature 1..17: note = Oligonucleotide
  source 1..17: mol_type = other DNA
acggtcccagcctggcc

SEQ ID NO: 14933 - DNA, 17 bp, synthetic construct
  misc_feature 1..17: note = Oligonucleotide
  source 1..17: mol_type = other DNA
aggacggtcccagcctg

SEQ ID NO: 14934 - DNA, 17 bp, synthetic construct
  misc_feature 1..17: note = Oligonucleotide
  source 1..17: mol_type = other DNA
aacaggacggtcccagc

SEQ ID NO: 14935 - DNA, 17 bp, synthetic construct
  misc_feature 1..17: note = Oligonucleotide
  source 1..17: mol_type = other DNA
tacaacaggacggtccc

SEQ ID NO: 14936 - DNA, 17 bp, synthetic construct
  misc_feature 1..17: note = Oligonucleotide
  source 1..17: mol_type = other DNA
agctacaacaggacggt

SEQ ID NO: 14937 - DNA, 17 bp, synthetic construct
  misc_feature 1..17: note = Oligonucleotide
  source 1..17: mol_type = other DNA
ggcagctacaacaggac

SEQ ID NO: 14938 - DNA, 17 bp, synthetic construct
  misc_feature 1..17: note = Oligonucleotide
  source 1..17: mol_type = other DNA
tccggcagctacaacag

SEQ ID NO: 14939 - DNA, 17 bp, synthetic construct
  misc_feature 1..17: note = Oligonucleotide
  source 1..17: mol_type = other DNA
gactccggcagctacaa

SEQ ID NO: 14940 - DNA, 17 bp, synthetic construct
  misc_feature 1..17: note = Oligonucleotide
  source 1..17: mol_type = other DNA
ggggactccggcagcta

SEQ ID NO: 14941 - DNA, 17 bp, synthetic construct
  misc_feature 1..17: note = Oligonucleotide
  source 1..17: mol_type = other DNA
agaggggactccggcag

SEQ ID NO: 14942 - DNA, 17 bp, synthetic construct
  misc_feature 1..17: note = Oligonucleotide
  source 1..17: mol_type = other DNA
cccagaggggactccgg

SEQ ID NO: 14943 - DNA, 17 bp, synthetic construct
  misc_feature 1..17: note = Oligonucleotide
  source 1..17: mol_type = other DNA
tctcccagaggggactc

SEQ ID NO: 14944 - DNA, 17 bp, synthetic construct
  misc_feature 1..17: note = Oligonucleotide
  source 1..17: mol_type = other DNA
aactctcccagagggga

SEQ ID NO: 14945 - DNA, 17 bp, synthetic construct
  misc_feature 1..17: note = Oligonucleotide
  source 1..17: mol_type = other DNA
agcaactctcccagagg

SEQ ID NO: 14946 - DNA, 17 bp, synthetic construct
  misc_feature 1..17: note = Oligonucleotide
  source 1..17: mol_type = other DNA
agcagcaactctcccag

SEQ ID NO: 14947 - DNA, 17 bp, synthetic construct
  misc_feature 1..17: note = Oligonucleotide
  source 1..17: mol_type = other DNA
gccagcagcaactctcc

SEQ ID NO: 14948 - DNA, 17 bp, synthetic construct
  misc_feature 1..17: note = Oligonucleotide
  source 1..17: mol_type = other DNA
ctggccagcagcaactc

SEQ ID NO: 14949 - DNA, 17 bp, synthetic construct
  misc_feature 1..17: note = Oligonucleotide
  source 1..17: mol_type = other DNA
agcctggccagcagcaa

SEQ ID NO: 14950 - DNA, 17 bp, synthetic construct
  misc_feature 1..17: note = Oligonucleotide
  source 1..17: mol_type = other DNA
cccagcctggccagcag

SEQ ID NO: 14951 - DNA, 17 bp, synthetic construct
  misc_feature 1..17: note = Oligonucleotide
  source 1..17: mol_type = other DNA
agtcccagcctggccag

SEQ ID NO: 14952 - DNA, 17 bp, synthetic construct
  misc_feature 1..17: note = Oligonucleotide
  source 1..17: mol_type = other DNA
gacagtcccagcctggc

SEQ ID NO: 14953 - DNA, 17 bp, synthetic construct
  misc_feature 1..17: note = Oligonucleotide
  source 1..17: mol_type = other DNA
caggacagtcccagcct

SEQ ID NO: 14954 - DNA, 17 bp, synthetic construct
  misc_feature 1..17: note = Oligonucleotide
  source 1..17: mol_type = other DNA
caacaggacagtcccag

SEQ ID NO: 14955 - DNA, 17 bp, synthetic construct
  misc_feature 1..17: note = Oligonucleotide
  source 1..17: mol_type = other DNA
ctacaacaggacagtcc

SEQ ID NO: 14956 - DNA, 17 bp, synthetic construct
  misc_feature 1..17: note = Oligonucleotide
  source 1..17: mol_type = other DNA
cagctacaacaggacag

SEQ ID NO: 14957 - DNA, 17 bp, synthetic construct
  misc_feature 1..17: note = Oligonucleotide
  source 1..17: mol_type = other DNA
cggcagctacaacagga

SEQ ID NO: 14958 - DNA, 17 bp, synthetic construct
  misc_feature 1..17: note = Oligonucleotide
  source 1..17: mol_type = other DNA
ctccggcagctacaaca

SEQ ID NO: 14959 - DNA, 17 bp, synthetic construct
  misc_feature 1..17: note = Oligonucleotide
  source 1..17: mol_type = other DNA
ggactccggcagctaca

SEQ ID NO: 14960 - DNA, 17 bp, synthetic construct
  misc_feature 1..17: note = Oligonucleotide
  source 1..17: mol_type = other DNA
aggggactccggcagct

SEQ ID NO: 14961 - DNA, 17 bp, synthetic construct
  misc_feature 1..17: note = Oligonucleotide
  source 1..17: mol_type = other DNA
cagaggggactccggca

SEQ ID NO: 14962 - DNA, 17 bp, synthetic construct
  misc_feature 1..17: note = Oligonucleotide
  source 1..17: mol_type = other DNA
tcccagaggggactccg

SEQ ID NO: 14963 - DNA, 17 bp, synthetic construct
  misc_feature 1..17: note = Oligonucleotide
  source 1..17: mol_type = other DNA
ctctcccagaggggact

SEQ ID NO: 14964 - DNA, 17 bp, synthetic construct
  misc_feature 1..17: note = Oligonucleotide
  source 1..17: mol_type = other DNA
caactctcccagagggg

SEQ ID NO: 14965 - DNA, 17 bp, synthetic construct
  misc_feature 1..17: note = Oligonucleotide
  source 1..17: mol_type = other DNA
cagcaactctcccagag

SEQ ID NO: 14966 - DNA, 17 bp, synthetic construct
  misc_feature 1..17: note = Oligonucleotide
  source 1..17: mol_type = other DNA
cagcagcaactctccca

SEQ ID NO: 14967 - DNA, 17 bp, synthetic construct
  misc_feature 1..17: note = Oligonucleotide
  source 1..17: mol_type = other DNA
ggccagcagcaactctc

SEQ ID NO: 14968 - DNA, 17 bp, synthetic construct
  misc_feature 1..17: note = Oligonucleotide
  source 1..17: mol_type = other DNA
cctggccagcagcaact

SEQ ID NO: 14969 - DNA, 17 bp, synthetic construct
  misc_feature 1..17: note = Oligonucleotide
  source 1..17: mol_type = other DNA
cagcctggccagcagca

SEQ ID NO: 14970 - DNA, 17 bp, synthetic construct
  misc_feature 1..17: note = Oligonucleotide
  source 1..17: mol_type = other DNA
tcccagcctggccagca

SEQ ID NO: 14971 - DNA, 17 bp, synthetic construct
  misc_feature 1..17: note = Oligonucleotide
  source 1..17: mol_type = other DNA
cggtcccagcctggcca

SEQ ID NO: 14972 - DNA, 17 bp, synthetic construct
  misc_feature 1..17: note = Oligonucleotide
  source 1..17: mol_type = other DNA
ggacggtcccagcctgg

SEQ ID NO: 14973 - DNA, 17 bp, synthetic construct
  misc_feature 1..17: note = Oligonucleotide
  source 1..17: mol_type = other DNA
acaggacggtcccagcc

SEQ ID NO: 14974 - DNA, 17 bp, synthetic construct
  misc_feature 1..17: note = Oligonucleotide
  source 1..17: mol_type = other DNA
acaacaggacggtccca

SEQ ID NO: 14975 - DNA, 17 bp, synthetic construct
  misc_feature 1..17: note = Oligonucleotide
  source 1..17: mol_type = other DNA
gctacaacaggacggtc

SEQ ID NO: 14976 - DNA, 17 bp, synthetic construct
  misc_feature 1..17: note = Oligonucleotide
  source 1..17: mol_type = other DNA
gcagctacaacaggacg

SEQ ID NO: 14977 - DNA, 17 bp, synthetic construct
  misc_feature 1..17: note = Oligonucleotide
  source 1..17: mol_type = other DNA
ccggcagctacaacagg

SEQ ID NO: 14978 - DNA, 17 bp, synthetic construct
  misc_feature 1..17: note = Oligonucleotide
  source 1..17: mol_type = other DNA
actccggcagctacaac

SEQ ID NO: 14979 - DNA, 17 bp, synthetic construct
  misc_feature 1..17: note = Oligonucleotide
  source 1..17: mol_type = other DNA
gggactccggcagctac

SEQ ID NO: 14980 - DNA, 17 bp, synthetic construct
  misc_feature 1..17: note = Oligonucleotide
  source 1..17: mol_type = other DNA
gaggggactccggcagc

SEQ ID NO: 14981 - DNA, 17 bp, synthetic construct
  misc_feature 1..17: note = Oligonucleotide
  source 1..17: mol_type = other DNA
ccagaggggactccggc

SEQ ID NO: 14982 - DNA, 17 bp, synthetic construct
  misc_feature 1..17: note = Oligonucleotide
  source 1..17: mol_type = other DNA
ctcccagaggggactcc

SEQ ID NO: 14983 - DNA, 17 bp, synthetic construct
  misc_feature 1..17: note = Oligonucleotide
  source 1..17: mol_type = other DNA
actctcccagaggggac

SEQ ID NO: 14984 - DNA, 17 bp, synthetic construct
  misc_feature 1..17: note = Oligonucleotide
  source 1..17: mol_type = other DNA
gcaactctcccagaggg

SEQ ID NO: 14985 - DNA, 17 bp, synthetic construct
  misc_feature 1..17: note = Oligonucleotide
  source 1..17: mol_type = other DNA
gcagcaactctcccaga

SEQ ID NO: 14986 - DNA, 17 bp, synthetic construct
  misc_feature 1..17: note = Oligonucleotide
  source 1..17: mol_type = other DNA
ccagcagcaactctccc

SEQ ID NO: 14987 - DNA, 17 bp, synthetic construct
  misc_feature 1..17: note = Oligonucleotide
  source 1..17: mol_type = other DNA
tggccagcagcaactct

SEQ ID NO: 14988 - DNA, 17 bp, synthetic construct
  misc_feature 1..17: note = Oligonucleotide
  source 1..17: mol_type = other DNA
gcctggccagcagcaac

SEQ ID NO: 14989 - DNA, 17 bp, synthetic construct
  misc_feature 1..17: note = Oligonucleotide
  source 1..17: mol_type = other DNA
ccagcctggccagcagc

SEQ ID NO: 14990 - DNA, 17 bp, synthetic construct
  misc_feature 1..17: note = Oligonucleotide
  source 1..17: mol_type = other DNA
gtcccagcctggccagc

SEQ ID NO: 14991 - DNA, 17 bp, synthetic construct
  misc_feature 1..17: note = Oligonucleotide
  source 1..17: mol_type = other DNA
acagtcccagcctggcc

SEQ ID NO: 14992 - DNA, 17 bp, synthetic construct
  misc_feature 1..17: note = Oligonucleotide
  source 1..17: mol_type = other DNA
aggacagtcccagcctg

SEQ ID NO: 14993 - DNA, 17 bp, synthetic construct
  misc_feature 1..17: note = Oligonucleotide
  source 1..17: mol_type = other DNA
aacaggacagtcccagc

SEQ ID NO: 14994 - DNA, 17 bp, synthetic construct
  misc_feature 1..17: note = Oligonucleotide
  source 1..17: mol_type = other DNA
tacaacaggacagtccc

SEQ ID NO: 14995 - DNA, 17 bp, synthetic construct
  misc_feature 1..17: note = Oligonucleotide
  source 1..17: mol_type = other DNA
agctacaacaggacagt

SEQ ID NO: 14996 - DNA, 17 bp, synthetic construct
  misc_feature 1..17: note = Oligonucleotide
  source 1..17: mol_type = other DNA
ggcagctacaacaggac

SEQ ID NO: 14997 - DNA, 17 bp, synthetic construct
  misc_feature 1..17: note = Oligonucleotide
  source 1..17: mol_type = other DNA
tccggcagctacaacag

SEQ ID NO: 14998 - DNA, 17 bp, synthetic construct
  misc_feature 1..17: note = Oligonucleotide
  source 1..17: mol_type = other DNA
gactccggcagctacaa

SEQ ID NO: 14999 - DNA, 17 bp, synthetic construct
  misc_feature 1..17: note = Oligonucleotide
  source 1..17: mol_type = other DNA
ggggactccggcagcta

SEQ ID NO: 15000 - DNA, 17 bp, synthetic construct
  misc_feature 1..17: note = Oligonucleotide
  source 1..17: mol_type = other DNA
agaggggactccggcag

SEQ ID NO: 15001 - DNA, 17 bp, synthetic construct
  misc_feature 1..17: note = Oligonucleotide
  source 1..17: mol_type = other DNA
cccagaggggactccgg

SEQ ID NO: 15002 - DNA, 17 bp, synthetic construct
  misc_feature 1..17: note = Oligonucleotide
  source 1..17: mol_type = other DNA
tctcccagaggggactc

SEQ ID NO: 15003 - DNA, 17 bp, synthetic construct
  misc_feature 1..17: note = Oligonucleotide
  source 1..17: mol_type = other DNA
aactctcccagagggga

SEQ ID NO: 15004 - DNA, 17 bp, synthetic construct
  misc_feature 1..17: note = Oligonucleotide
  source 1..17: mol_type = other DNA
tacaactctcccagagg

SEQ ID NO: 15005 - DNA, 17 bp, synthetic construct
  misc_feature 1..17: note = Oligonucleotide
  source 1..17: mol_type = other DNA
agctacaactctcccag

SEQ ID NO: 15006 - DNA, 17 bp, synthetic construct
  misc_feature 1..17: note = Oligonucleotide
  source 1..17: mol_type = other DNA
ggcagctacaactctcc

SEQ ID NO: 15007 - DNA, 17 bp, synthetic construct
  misc_feature 1..17: note = Oligonucleotide
  source 1..17: mol_type = other DNA
tccggcagctacaactc

SEQ ID NO: 15008 - DNA, 17 bp, synthetic construct
  misc_feature 1..17: note = Oligonucleotide
  source 1..17: mol_type = other DNA
gactccggcagctacaa

SEQ ID NO: 15009 - DNA, 17 bp, synthetic construct
  misc_feature 1..17: note = Oligonucleotide
  source 1..17: mol_type = other DNA
ggggactccggcagcta

SEQ ID NO: 15010 - DNA, 17 bp, synthetic construct
  misc_feature 1..17: note = Oligonucleotide
  source 1..17: mol_type = other DNA
agaggggactccggcag

SEQ ID NO: 15011 - DNA, 17 bp, synthetic construct
  misc_feature 1..17: note = Oligonucleotide
  source 1..17: mol_type = other DNA
cccagaggggactccgg

SEQ ID NO: 15012 - DNA, 17 bp, synthetic construct
  misc_feature 1..17: note = Oligonucleotide
  source 1..17: mol_type = other DNA
tctcccagaggggactc

SEQ ID NO: 15013 - DNA, 17 bp, synthetic construct
  misc_feature 1..17: note = Oligonucleotide
  source 1..17: mol_type = other DNA
aactctcccagagggga

SEQ ID NO: 15014 - DNA, 17 bp, synthetic construct
  misc_feature 1..17: note = Oligonucleotide
  source 1..17: mol_type = other DNA
agcaactctcccagagg

SEQ ID NO: 15015 - DNA, 17 bp, synthetic construct
  misc_feature 1..17: note = Oligonucleotide
  source 1..17: mol_type = other DNA
agcagcaactctcccag

SEQ ID NO: 15016 - DNA, 17 bp, synthetic construct
  misc_feature 1..17: note = Oligonucleotide
  source 1..17: mol_type = other DNA
gccagcagcaactctcc

SEQ ID NO: 15017 - DNA, 17 bp, synthetic construct
  misc_feature 1..17: note = Oligonucleotide
  source 1..17: mol_type = other DNA
ctggccagcagcaactc

SEQ ID NO: 15018 - DNA, 17 bp, synthetic construct
  misc_feature 1..17: note = Oligonucleotide
  source 1..17: mol_type = other DNA
agcctggccagcagcaa

SEQ ID NO: 15019 - DNA, 17 bp, synthetic construct
  misc_feature 1..17: note = Oligonucleotide
  source 1..17: mol_type = other DNA
cccagcctggccagcag

SEQ ID NO: 15020 - DNA, 17 bp, synthetic construct
  misc_feature 1..17: note = Oligonucleotide
  source 1..17: mol_type = other DNA
cgtcccagcctggccag

SEQ ID NO: 15021 - DNA, 17 bp, synthetic construct
  misc_feature 1..17: note = Oligonucleotide
  source 1..17: mol_type = other DNA
gaccgtcccagcctggc

SEQ ID NO: 15022 - DNA, 17 bp, synthetic construct
  misc_feature 1..17: note = Oligonucleotide
  source 1..17: mol_type = other DNA
caggaccgtcccagcct

SEQ ID NO: 15023 - DNA, 17 bp, synthetic construct
  misc_feature 1..17: note = Oligonucleotide
  source 1..17: mol_type = other DNA
caacaggaccgtcccag

SEQ ID NO: 15024 - DNA, 17 bp, synthetic construct
  misc_feature 1..17: note = Oligonucleotide
  source 1..17: mol_type = other DNA
ctacaacaggaccgtcc

SEQ ID NO: 15025 - DNA, 17 bp, synthetic construct
  misc_feature 1..17: note = Oligonucleotide
  source 1..17: mol_type = other DNA
cagctacaacaggaccg

SEQ ID NO: 15026 - DNA, 17 bp, synthetic construct
  misc_feature 1..17: note = Oligonucleotide
  source 1..17: mol_type = other DNA
cggcagctacaacagga

SEQ ID NO: 15027 - DNA, 17 bp, synthetic construct
  misc_feature 1..17: note = Oligonucleotide
  source 1..17: mol_type = other DNA
ctccggcagctacaaca

SEQ ID NO: 15028 - DNA, 17 bp, synthetic construct
  misc_feature 1..17: note = Oligonucleotide
  source 1..17: mol_type = other DNA
ggactccggcagctaca

SEQ ID NO: 15029 - DNA, 17 bp, synthetic construct
  misc_feature 1..17: note = Oligonucleotide
  source 1..17: mol_type = other DNA
aggggactccggcagct

SEQ ID NO: 15030 - DNA, 17 bp, synthetic construct
  misc_feature 1..17: note = Oligonucleotide
  source 1..17: mol_type = other DNA
cagaggggactccggca

SEQ ID NO: 15031 - DNA, 17 bp, synthetic construct
  misc_feature 1..17: note = Oligonucleotide
  source 1..17: mol_type = other DNA
tcccagaggggactccg

SEQ ID NO: 15032 - DNA, 17 bp, synthetic construct
  misc_feature 1..17: note = Oligonucleotide
  source 1..17: mol_type = other DNA
ctctcccagaggggact

SEQ ID NO: 15033 - DNA, 17 bp, synthetic construct
  misc_feature 1..17: note = Oligonucleotide
  source 1..17: mol_type = other DNA
caactctcccagagggg

SEQ ID NO: 15034 - DNA, 17 bp, synthetic construct
  misc_feature 1..17: note = Oligonucleotide
  source 1..17: mol_type = other DNA
cagcaactctcccagag

SEQ ID NO: 15035 - DNA, 17 bp, synthetic construct
  misc_feature 1..17: note = Oligonucleotide
  source 1..17: mol_type = other DNA
cagcagcaactctccca

SEQ ID NO: 15036 - DNA, 17 bp, synthetic construct
  misc_feature 1..17: note = Oligonucleotide
  source 1..17: mol_type = other DNA
ggccagcagcaactctc

SEQ ID NO: 15037 - DNA, 17 bp, synthetic construct
  misc_feature 1..17: note = Oligonucleotide
  source 1..17: mol_type = other DNA
cctggccagcagcaact

SEQ ID NO: 15038 - DNA, 17 bp, synthetic construct
  misc_feature 1..17: note = Oligonucleotide
  source 1..17: mol_type = other DNA
cagcctggccagcagca

SEQ ID NO: 15039 - DNA, 17 bp, synthetic construct
  misc_feature 1..17: note = Oligonucleotide
  source 1..17: mol_type = other DNA
tcccagcctggccagca

SEQ ID NO: 15040 - DNA, 17 bp, synthetic construct
  misc_feature 1..17: note = Oligonucleotide
  source 1..17: mol_type = other DNA
ccgtcccagcctggcca

SEQ ID NO: 15041 - DNA, 17 bp, synthetic construct
  misc_feature 1..17: note = Oligonucleotide
  source 1..17: mol_type = other DNA
ggaccgtcccagcctgg

SEQ ID NO: 15042 - DNA, 17 bp, synthetic construct
  misc_feature 1..17: note = Oligonucleotide
  source 1..17: mol_type = other DNA
acaggaccgtcccagcc

SEQ ID NO: 15043 - DNA, 17 bp, synthetic construct
  misc_feature 1..17: note = Oligonucleotide
  source 1..17: mol_type = other DNA
acaacaggaccgtccca

SEQ ID NO: 15044 - DNA, 17 bp, synthetic construct
  misc_feature 1..17: note = Oligonucleotide
  source 1..17: mol_type = other DNA
gctacaacaggaccgtc

SEQ ID NO: 15045 - DNA, 17 bp, synthetic construct
  misc_feature 1..17: note = Oligonucleotide
  source 1..17: mol_type = other DNA
gcagctacaacaggacc

SEQ ID NO: 15046 - DNA, 17 bp, synthetic construct
  misc_feature 1..17: note = Oligonucleotide
  source 1..17: mol_type = other DNA
ccggcagctacaacagg

SEQ ID NO: 15047 - DNA, 17 bp, synthetic construct
  misc_feature 1..17: note = Oligonucleotide
  source 1..17: mol_type = other DNA
actccggcagctacaac

SEQ ID NO: 15048 - DNA, 17 bp, synthetic construct
  misc_feature 1..17: note = Oligonucleotide
  source 1..17: mol_type = other DNA
gggactccggcagctac

SEQ ID NO: 15049 - DNA, 17 bp, synthetic construct
  misc_feature 1..17: note = Oligonucleotide
  source 1..17: mol_type = other DNA
gaggggactccggcagc

SEQ ID NO: 15050 - DNA, 17 bp, synthetic construct
  misc_feature 1..17: note = Oligonucleotide
  source 1..17: mol_type = other DNA
ccagaggggactccggc

SEQ ID NO: 15051 - DNA, 17 bp, synthetic construct
  misc_feature 1..17: note = Oligonucleotide
  source 1..17: mol_type = other DNA
ctcccagaggggactcc

SEQ ID NO: 15052 - DNA, 17 bp, synthetic construct
  misc_feature 1..17: note = Oligonucleotide
  source 1..17: mol_type = other DNA
actctcccagaggggac

SEQ ID NO: 15053 - DNA, 17 bp, synthetic construct
  misc_feature 1..17: note = Oligonucleotide
  source 1..17: mol_type = other DNA
acaactctcccagaggg

SEQ ID NO: 15054 - DNA, 17 bp, synthetic construct
  misc_feature 1..17: note = Oligonucleotide
  source 1..17: mol_type = other DNA
gctacaactctcccaga

SEQ ID NO: 15055 - DNA, 17 bp, synthetic construct
  misc_feature 1..17: note = Oligonucleotide
  source 1..17: mol_type = other DNA
ccagctacaactctccc

SEQ ID NO: 15056 - DNA, 17 bp, synthetic construct
  misc_feature 1..17: note = Oligonucleotide
  source 1..17: mol_type = other DNA
tggccagctacaactct

SEQ ID NO: 15057 - DNA, 17 bp, synthetic construct
  misc_feature 1..17: note = Oligonucleotide
  source 1..17: mol_type = other DNA
gcctggccagctacaac

SEQ ID NO: 15058 - DNA, 17 bp, synthetic construct
  misc_feature 1..17: note = Oligonucleotide
  source 1..17: mol_type = other DNA
ccagcctggccagctac

SEQ ID NO: 15059 - DNA, 17 bp, synthetic construct
  misc_feature 1..17: note = Oligonucleotide
  source 1..17: mol_type = other DNA
gtcccagcctggccagc

SEQ ID NO: 15060 - DNA, 17 bp, synthetic construct
  misc_feature 1..17: note = Oligonucleotide
  source 1..17: mol_type = other DNA
acggtcccagcctggcc

SEQ ID NO: 15061 - DNA, 17 bp, synthetic construct
  misc_feature 1..17: note = Oligonucleotide
  source 1..17: mol_type = other DNA
aggacggtcccagcctg

SEQ ID NO: 15062 - DNA, 17 bp, synthetic construct
  misc_feature 1..17: note = Oligonucleotide
  source 1..17: mol_type = other DNA
aacaggacggtcccagc

SEQ ID NO: 15063 - DNA, 17 bp, synthetic construct
  misc_feature 1..17: note = Oligonucleotide
  source 1..17: mol_type = other DNA
tacaacaggacggtccc

SEQ ID NO: 15064 - DNA, 17 bp, synthetic construct
  misc_feature 1..17: note = Oligonucleotide
  source 1..17: mol_type = other DNA
agctacaacaggacggt

SEQ ID NO: 15065 - DNA, 17 bp, synthetic construct
  misc_feature 1..17: note = Oligonucleotide
  source 1..17: mol_type = other DNA
ggcagctacaacaggac

SEQ ID NO: 15066 - DNA, 17 bp, synthetic construct
  misc_feature 1..17: note = Oligonucleotide
  source 1..17: mol_type = other DNA
tccggcagctacaacag

SEQ ID NO: 15067 - DNA, 17 bp, synthetic construct
  misc_feature 1..17: note = Oligonucleotide
  source 1..17: mol_type = other DNA
gactccggcagctacaa

SEQ ID NO: 15068 - DNA, 17 bp, synthetic construct
  misc_feature 1..17: note = Oligonucleotide
  source 1..17: mol_type = other DNA
ggggactccggcagcta

SEQ ID NO: 15069 - DNA, 17 bp, synthetic construct
  misc_feature 1..17: note = Oligonucleotide
  source 1..17: mol_type = other DNA
agaggggactccggcag

SEQ ID NO: 15070 - DNA, 17 bp, synthetic construct
  misc_feature 1..17: note = Oligonucleotide
  source 1..17: mol_type = other DNA
cccagaggggactccgg

SEQ ID NO: 15071 - DNA, 17 bp, synthetic construct
  misc_feature 1..17: note = Oligonucleotide
  source 1..17: mol_type = other DNA
tctcccagaggggactc

SEQ ID NO: 15072 - DNA, 17 bp, synthetic construct
  misc_feature 1..17: note = Oligonucleotide
  source 1..17: mol_type = other DNA
aactctcccagagggga

SEQ ID NO: 15073 - DNA, 17 bp, synthetic construct
  misc_feature 1..17: note = Oligonucleotide
  source 1..17: mol_type = other DNA
agcaactctcccagagg

SEQ ID NO: 15074 - DNA, 17 bp, synthetic construct
  misc_feature 1..17: note = Oligonucleotide
  source 1..17: mol_type = other DNA
agcagcaactctcccag

SEQ ID NO: 15075 - DNA, 17 bp, synthetic construct
  misc_feature 1..17: note = Oligonucleotide
  source 1..17: mol_type = other DNA
gccagcagcaactctcc

SEQ ID NO: 15076 - DNA, 17 bp, synthetic construct
  misc_feature 1..17: note = Oligonucleotide
  source 1..17: mol_type = other DNA
ctggccagcagcaactc

SEQ ID NO: 15077 - DNA, 17 bp, synthetic construct
  misc_feature 1..17: note = Oligonucleotide
  source 1..17: mol_type = other DNA
agcctggccagcagcaa

SEQ ID NO: 15078 - DNA, 17 bp, synthetic construct
  misc_feature 1..17: note = Oligonucleotide
  source 1..17: mol_type = other DNA
cccagcctggccagcag

SEQ ID NO: 15079 - DNA, 17 bp, synthetic construct
  misc_feature 1..17: note = Oligonucleotide
  source 1..17: mol_type = other DNA
ggtcccagcctggccag

SEQ ID NO: 15080 - DNA, 17 bp, synthetic construct
  misc_feature 1..17: note = Oligonucleotide
  source 1..17: mol_type = other DNA
gacggtcccagcctggc

SEQ ID NO: 15081 - DNA, 17 bp, synthetic construct
  misc_feature 1..17: note = Oligonucleotide
  source 1..17: mol_type = other DNA
caggacggtcccagcct

SEQ ID NO: 15082 - DNA, 17 bp, synthetic construct
  misc_feature 1..17: note = Oligonucleotide
  source 1..17: mol_type = other DNA
caacaggacggtcccag

SEQ ID NO: 15083 - DNA, 17 bp, synthetic construct
  misc_feature 1..17: note = Oligonucleotide
  source 1..17: mol_type = other DNA
ctacaacaggacggtcc

SEQ ID NO: 15084 - DNA, 17 bp, synthetic construct
  misc_feature 1..17: note = Oligonucleotide
  source 1..17: mol_type = other DNA
cagctacaacaggacgg

SEQ ID NO: 15085 - DNA, 17 bp, synthetic construct
  misc_feature 1..17: note = Oligonucleotide
  source 1..17: mol_type = other DNA
cggcagctacaacagga

SEQ ID NO: 15086 - DNA, 17 bp, synthetic construct
  misc_feature 1..17: note = Oligonucleotide
  source 1..17: mol_type = other DNA
ctccggcagctacaaca

SEQ ID NO: 15087 - DNA, 17 bp, synthetic construct
  misc_feature 1..17: note = Oligonucleotide
  source 1..17: mol_type = other DNA
ggactccggcagctaca

SEQ ID NO: 15088 - DNA, 17 bp, synthetic construct
  misc_feature 1..17: note = Oligonucleotide
  source 1..17: mol_type = other DNA
aggggactccggcagct

SEQ ID NO: 15089 - DNA, 17 bp, synthetic construct
  misc_feature 1..17: note = Oligonucleotide
  source 1..17: mol_type = other DNA
cagaggggactccggca

SEQ ID NO: 15090 - DNA, 17 bp, synthetic construct
  misc_feature 1..17: note = Oligonucleotide
  source 1..17: mol_type = other DNA
tcccagaggggactccg

SEQ ID NO: 15091 - DNA, 17 bp, synthetic construct
  misc_feature 1..17: note = Oligonucleotide
  source 1..17: mol_type = other DNA
ctctcccagaggggact

SEQ ID NO: 15092 - DNA, 17 bp, synthetic construct
  misc_feature 1..17: note = Oligonucleotide
  source 1..17: mol_type = other DNA
caactctcccagagggg

SEQ ID NO: 15093 - DNA, 17 bp, synthetic construct
  misc_feature 1..17: note = Oligonucleotide
  source 1..17: mol_type = other DNA
ctacaactctcccagag

SEQ ID NO: 15094 - DNA, 17 bp, synthetic construct
  misc_feature 1..17: note = Oligonucleotide
  source 1..17: mol_type = other DNA
cagctacaactctccca

SEQ ID NO: 15095 - DNA, 17 bp, synthetic construct
  misc_feature 1..17: note = Oligonucleotide
  source 1..17: mol_type = other DNA
cggcagctacaactctc

SEQ ID NO: 15096 - DNA, 17 bp, synthetic construct
  misc_feature 1..17: note = Oligonucleotide
  source 1..17: mol_type = other DNA
ctccggcagctacaact

SEQ ID NO: 15097 - DNA, 17 bp, synthetic construct
  misc_feature 1..17: note = Oligonucleotide
  source 1..17: mol_type = other DNA
ggactccggcagctaca

SEQ ID NO: 15098 - DNA, 17 bp, synthetic construct
  misc_feature 1..17: note = Oligonucleotide
  source 1..17: mol_type = other DNA
aggggactccggcagct

SEQ ID NO: 15099 - DNA, 17 bp, synthetic construct
  misc_feature 1..17: note = Oligonucleotide
  source 1..17: mol_type = other DNA
cagaggggactccggca

SEQ ID NO: 15100 - DNA, 17 bp, synthetic construct
  misc_feature 1..17: note = Oligonucleotide
  source 1..17: mol_type = other DNA
tcccagaggggactccg

SEQ ID NO: 15101 - DNA, 17 bp, synthetic construct
  misc_feature 1..17: note = Oligonucleotide
  source 1..17: mol_type = other DNA
ctctcccagaggggact

SEQ ID NO: 15102 - DNA, 17 bp, synthetic construct
  misc_feature 1..17: note = Oligonucleotide
  source 1..17: mol_type = other DNA
caactctcccagagggg

SEQ ID NO: 15103 - DNA, 17 bp, synthetic construct
  misc_feature 1..17: note = Oligonucleotide
  source 1..17: mol_type = other DNA
cagcaactctcccagag

SEQ ID NO: 15104 - DNA, 17 bp, synthetic construct
  misc_feature 1..17: note = Oligonucleotide
  source 1..17: mol_type = other DNA
cagcagcaactctccca

SEQ ID NO: 15105 - DNA, 17 bp, synthetic construct
  misc_feature 1..17: note = Oligonucleotide
  source 1..17: mol_type = other DNA
ggccagcagcaactctc

SEQ ID NO: 15106 - DNA, 17 bp, synthetic construct
  misc_feature 1..17: note = Oligonucleotide
  source 1..17: mol_type = other DNA
cctggccagcagcaact

SEQ ID NO: 15107 - DNA, 17 bp, synthetic construct
  misc_feature 1..17: note = Oligonucleotide
  source 1..17: mol_type = other DNA
cagcctggccagcagca

SEQ ID NO: 15108 - DNA, 17 bp, synthetic construct
  misc_feature 1..17: note = Oligonucleotide
  source 1..17: mol_type = other DNA
tcccagcctggccagca

SEQ ID NO: 15109 - DNA, 17 bp, synthetic construct
  misc_feature 1..17: note = Oligonucleotide
  source 1..17: mol_type = other DNA
cggtcccagcctggcca

SEQ ID NO: 15110 - DNA, 17 bp, synthetic construct
  misc_feature 1..17: note = Oligonucleotide
  source 1..17: mol_type = other DNA
ggacggtcccagcctgg

SEQ ID NO: 15111 - DNA, 17 bp, synthetic construct
  misc_feature 1..17: note = Oligonucleotide
  source 1..17: mol_type = other DNA
acaggacggtcccagcc

SEQ ID NO: 15112 - DNA, 17 bp, synthetic construct
  misc_feature 1..17: note = Oligonucleotide
  source 1..17: mol_type = other DNA
acaacaggacggtccca

SEQ ID NO: 15113 - DNA, 17 bp, synthetic construct
  misc_feature 1..17: note = Oligonucleotide
  source 1..17: mol_type = other DNA
gctacaacaggacggtc

SEQ ID NO: 15114 - DNA, 17 bp, synthetic construct
  misc_feature 1..17: note = Oligonucleotide
  source 1..17: mol_type = other DNA
gcagctacaacaggacg

SEQ ID NO: 15115 - DNA, 17 bp, synthetic construct
  misc_feature 1..17: note = Oligonucleotide
  source 1..17: mol_type = other DNA
ccggcagctacaacagg

SEQ ID NO: 15116 - DNA, 17 bp, synthetic construct
  misc_feature 1..17: note = Oligonucleotide
  source 1..17: mol_type = other DNA
actccggcagctacaac

SEQ ID NO: 15117 - DNA, 17 bp, synthetic construct
  misc_feature 1..17: note = Oligonucleotide
  source 1..17: mol_type = other DNA
gggactccggcagctac

SEQ ID NO: 15118 - DNA, 17 bp, synthetic construct
  misc_feature 1..17: note = Oligonucleotide
  source 1..17: mol_type = other DNA
gaggggactccggcagc

SEQ ID NO: 15119 - DNA, 17 bp, synthetic construct
  misc_feature 1..17: note = Oligonucleotide
  source 1..17: mol_type = other DNA
ccagaggggactccggc

SEQ ID NO: 15120 - DNA, 17 bp, synthetic construct
  misc_feature 1..17: note = Oligonucleotide
  source 1..17: mol_type = other DNA
cgcccagaggggactcc

SEQ ID NO: 15121 - DNA, 17 bp, synthetic construct
  misc_feature 1..17: note = Oligonucleotide
  source 1..17: mol_type = other DNA
actcgcccagaggggac

SEQ ID NO: 15122 - DNA, 17 bp, synthetic construct
  misc_feature 1..17: note = Oligonucleotide
  source 1..17: mol_type = other DNA
gcaactcgcccagaggg

SEQ ID NO: 15123 - DNA, 17 bp, synthetic construct
  misc_feature 1..17: note = Oligonucleotide
  source 1..17: mol_type = other DNA
gcagcaactcgcccaga

SEQ ID NO: 15124 - DNA, 17 bp, synthetic construct
  misc_feature 1..17: note = Oligonucleotide
  source 1..17: mol_type = other DNA
ccagcagcaactcgccc

SEQ ID NO: 15125 - DNA, 17 bp, synthetic construct
  misc_feature 1..17: note = Oligonucleotide
  source 1..17: mol_type = other DNA
tggccagcagcaactcg

SEQ ID NO: 15126 - DNA, 17 bp, synthetic construct
  misc_feature 1..17: note = Oligonucleotide
  source 1..17: mol_type = other DNA
gcctggccagcagcaac

SEQ ID NO: 15127 - DNA, 17 bp, synthetic construct
  misc_feature 1..17: note = Oligonucleotide
  source 1..17: mol_type = other DNA
ccagcctggccagcagc

SEQ ID NO: 15128 - DNA, 17 bp, synthetic construct
  misc_feature 1..17: note = Oligonucleotide
  source 1..17: mol_type = other DNA
gtcccagcctggccagc

SEQ ID NO: 15129 - DNA, 17 bp, synthetic construct
  misc_feature 1..17: note = Oligonucleotide
  source 1..17: mol_type = other DNA
accgtcccagcctggcc

SEQ ID NO: 15130 - DNA, 17 bp, synthetic construct
  misc_feature 1..17: note = Oligonucleotide
  source 1..17: mol_type = other DNA
aggaccgtcccagcctg

SEQ ID NO: 15131 - DNA, 17 bp, synthetic construct
  misc_feature 1..17: note = Oligonucleotide
  source 1..17: mol_type = other DNA
aacaggaccgtcccagc

SEQ ID NO: 15132 - DNA, 17 bp, synthetic construct
  misc_feature 1..17: note = Oligonucleotide
  source 1..17: mol_type = other DNA
tacaacaggaccgtccc

SEQ ID NO: 15133 - DNA, 17 bp, synthetic construct
  misc_feature 1..17: note = Oligonucleotide
  source 1..17: mol_type = other DNA
agctacaacaggaccgt

SEQ ID NO: 15134 - DNA, 17 bp, synthetic construct
  misc_feature 1..17: note = Oligonucleotide
  source 1..17: mol_type = other DNA
ggcagctacaacaggac

SEQ ID NO: 15135 - DNA, 17 bp, synthetic construct
  misc_feature 1..17: note = Oligonucleotide
  source 1..17: mol_type = other DNA
tccggcagctacaacag

SEQ ID NO: 15136 - DNA, 17 bp, synthetic construct
  misc_feature 1..17: note = Oligonucleotide
  source 1..17: mol_type = other DNA
gactccggcagctacaa

SEQ ID NO: 15137 - DNA, 17 bp, synthetic construct
  misc_feature 1..17: note = Oligonucleotide
  source 1..17: mol_type = other DNA
ggggactccggcagcta

SEQ ID NO: 15138 - DNA, 17 bp, synthetic construct
  misc_feature 1..17: note = Oligonucleotide
  source 1..17: mol_type = other DNA
agaggggactccggcag

SEQ ID NO: 15139 - DNA, 17 bp, synthetic construct
  misc_feature 1..17: note = Oligonucleotide
  source 1..17: mol_type = other DNA
cccagaggggactccgg

SEQ ID NO: 15140 - DNA, 17 bp, synthetic construct
  misc_feature 1..17: note = Oligonucleotide
  source 1..17: mol_type = other DNA
tctcccagaggggactc

SEQ ID NO: 15141 - DNA, 17 bp, synthetic construct
  misc_feature 1..17: note = Oligonucleotide
  source 1..17: mol_type = other DNA
aactctcccagagggga

SEQ ID NO: 15142 - DNA, 17 bp, synthetic construct
  misc_feature 1..17: note = Oligonucleotide
  source 1..17: mol_type = other DNA
agcaactctcccagagg

SEQ ID NO: 15143 - DNA, 17 bp, synthetic construct
  misc_feature 1..17: note = Oligonucleotide
  source 1..17: mol_type = other DNA
agcagcaactctcccag

SEQ ID NO: 15144 - DNA, 17 bp, synthetic construct
  misc_feature 1..17: note = Oligonucleotide
  source 1..17: mol_type = other DNA
gccagcagcaactctcc

SEQ ID NO: 15145 - DNA, 17 bp, synthetic construct
  misc_feature 1..17: note = Oligonucleotide
  source 1..17: mol_type = other DNA
ctggccagcagcaactc

SEQ ID NO: 15146 - DNA, 17 bp, synthetic construct
  misc_feature 1..17: note = Oligonucleotide
  source 1..17: mol_type = other DNA
agcctggccagcagcaa

SEQ ID NO: 15147 - DNA, 17 bp, synthetic construct
  misc_feature 1..17: note = Oligonucleotide
  source 1..17: mol_type = other DNA
cccagcctggccagcag

SEQ ID NO: 15148 - DNA, 17 bp, synthetic construct
  misc_feature 1..17: note = Oligonucleotide
  source 1..17: mol_type = other DNA
ggtcccagcctggccag

SEQ ID NO: 15149 - DNA, 17 bp, synthetic construct
  misc_feature 1..17: note = Oligonucleotide
  source 1..17: mol_type = other DNA
gatggtcccagcctggc

SEQ ID NO: 15150 - DNA, 17 bp, synthetic construct
  misc_feature 1..17: note = Oligonucleotide
  source 1..17: mol_type = other DNA
caggatggtcccagcct

SEQ ID NO: 15151 - DNA, 17 bp, synthetic construct
  misc_feature 1..17: note = Oligonucleotide
  source 1..17: mol_type = other DNA
caacaggatggtcccag

SEQ ID NO: 15152 - DNA, 17 bp, synthetic construct
  misc_feature 1..17: note = Oligonucleotide
  source 1..17: mol_type = other DNA
ctacaacaggatggtcc

SEQ ID NO: 15153 - DNA, 17 bp, synthetic construct
  misc_feature 1..17: note = Oligonucleotide
  source 1..17: mol_type = other DNA
cagctacaacaggatgg

SEQ ID NO: 15154 - DNA, 17 bp, synthetic construct
  misc_feature 1..17: note = Oligonucleotide
  source 1..17: mol_type = other DNA
cggcagctacaacagga

SEQ ID NO: 15155 - DNA, 17 bp, synthetic construct
  misc_feature 1..17: note = Oligonucleotide
  source 1..17: mol_type = other DNA
ctccggcagctacaaca

SEQ ID NO: 15156 - DNA, 17 bp, synthetic construct
  misc_feature 1..17: note = Oligonucleotide
  source 1..17: mol_type = other DNA
ggactccggcagctaca

SEQ ID NO: 15157 - DNA, 17 bp, synthetic construct
  misc_feature 1..17: note = Oligonucleotide
  source 1..17: mol_type = other DNA
aggggactccggcagct

SEQ ID NO: 15158 - DNA, 17 bp, synthetic construct
  misc_feature 1..17: note = Oligonucleotide
  source 1..17: mol_type = other DNA
cagaggggactccggca

SEQ ID NO: 15159 - DNA, 17 bp, synthetic construct
  misc_feature 1..17: note = Oligonucleotide
  source 1..17: mol_type = other DNA
caccagaggggactccg

SEQ ID NO: 15160 - DNA, 17 bp, synthetic construct
  misc_feature 1..17: note = Oligonucleotide
  source 1..17: mol_type = other DNA
aggcaccagaggggact

SEQ ID NO: 15161 - DNA, 17 bp, synthetic construct
  misc_feature 1..17: note = Oligonucleotide
  source 1..17: mol_type = other DNA
cacaggcaccagagggg

SEQ ID NO: 15162 - DNA, 17 bp, synthetic construct
  misc_feature 1..17: note = Oligonucleotide
  source 1..17: mol_type = other DNA
aggcacaggcaccagag

SEQ ID NO: 15163 - DNA, 17 bp, synthetic construct
  misc_feature 1..17: note = Oligonucleotide
  source 1..17: mol_type = other DNA
gagaggcacaggcacca

SEQ ID NO: 15164 - DNA, 17 bp, synthetic construct
  misc_feature 1..17: note = Oligonucleotide
  source 1..17: mol_type = other DNA
agagagaggcacaggca

SEQ ID NO: 15165 - DNA, 17 bp, synthetic construct
  misc_feature 1..17: note = Oligonucleotide
  source 1..17: mol_type = other DNA
accagagagaggcacag

SEQ ID NO: 15166 - DNA, 17 bp, synthetic construct
  misc_feature 1..17: note = Oligonucleotide
  source 1..17: mol_type = other DNA
tataccagagagaggca

SEQ ID NO: 15167 - DNA, 17 bp, synthetic construct
  misc_feature 1..17: note = Oligonucleotide
  source 1..17: mol_type = other DNA
ccatataccagagagag

SEQ ID NO: 15168 - DNA, 17 bp, synthetic construct
  misc_feature 1..17: note = Oligonucleotide
  source 1..17: mol_type = other DNA
agtccatataccagaga

SEQ ID NO: 15169 - DNA, 17 bp, synthetic construct
  misc_feature 1..17: note = Oligonucleotide
  source 1..17: mol_type = other DNA
gggagtccatataccag

SEQ ID NO: 15170 - DNA, 17 bp, synthetic construct
  misc_feature 1..17: note = Oligonucleotide
  source 1..17: mol_type = other DNA
cctgggagtccatatac

SEQ ID NO: 15171 - DNA, 17 bp, synthetic construct
  misc_feature 1..17: note = Oligonucleotide
  source 1..17: mol_type = other DNA
ggtcctgggagtccata

SEQ ID NO: 15172 - DNA, 17 bp, synthetic construct
  misc_feature 1..17: note = Oligonucleotide
  source 1..17: mol_type = other DNA
gggggtcctgggagtcc

SEQ ID NO: 15173 - DNA, 17 bp, synthetic construct
  misc_feature 1..17: note = Oligonucleotide
  source 1..17: mol_type = other DNA
gaagggggtcctgggag

SEQ ID NO: 15174 - DNA, 17 bp, synthetic construct
  misc_feature 1..17: note = Oligonucleotide
  source 1..17: mol_type = other DNA
caggaagggggtcctgg

SEQ ID NO: 15175 - DNA, 17 bp, synthetic construct
  misc_feature 1..17: note = Oligonucleotide
  source 1..17: mol_type = other DNA
tggcaggaagggggtcc

SEQ ID NO: 15176 - DNA, 17 bp, synthetic construct
  misc_feature 1..17: note = Oligonucleotide
  source 1..17: mol_type = other DNA
tcatggcaggaaggggg

SEQ ID NO: 15177 - DNA, 17 bp, synthetic construct
  misc_feature 1..17: note = Oligonucleotide
  source 1..17: mol_type = other DNA
cactcatggcaggaagg

SEQ ID NO: 15178 - DNA, 17 bp, synthetic construct
  misc_feature 1..17: note = Oligonucleotide
  source 1..17: mol_type = other DNA
aaacactcatggcagga

SEQ ID NO: 15179 - DNA, 17 bp, synthetic construct
  misc_feature 1..17: note = Oligonucleotide
  source 1..17: mol_type = other DNA
agtaaacactcatggca

SEQ ID NO: 15180 - DNA, 17 bp, synthetic construct
  misc_feature 1..17: note = Oligonucleotide
  source 1..17: mol_type = other DNA
acgagtaaacactcatg

SEQ ID NO: 15181 - DNA, 17 bp, synthetic construct
  misc_feature 1..17: note = Oligonucleotide
  source 1..17: mol_type = other DNA
cccacgagtaaacactc

SEQ ID NO: 15182 - DNA, 17 bp, synthetic construct
  misc_feature 1..17: note = Oligonucleotide
  source 1..17: mol_type = other DNA
acacccacgagtaaaca

SEQ ID NO: 15183 - DNA, 17 bp, synthetic construct
  misc_feature 1..17: note = Oligonucleotide
  source 1..17: mol_type = other DNA
gggacacccacgagtaa

SEQ ID NO: 15184 - DNA, 17 bp, synthetic construct
  misc_feature 1..17: note = Oligonucleotide
  source 1..17: mol_type = other DNA
atggggacacccacgag

SEQ ID NO: 15185 - DNA, 17 bp, synthetic construct
  misc_feature 1..17: note = Oligonucleotide
  source 1..17: mol_type = other DNA
aaaatggggacacccac

SEQ ID NO: 15186 - DNA, 17 bp, synthetic construct
  misc_feature 1..17: note = Oligonucleotide
  source 1..17: mol_type = other DNA
caaaaaatggggacacc

SEQ ID NO: 15187 - DNA, 17 bp, synthetic construct
  misc_feature 1..17: note = Oligonucleotide
  source 1..17: mol_type = other DNA
aaacaaaaaatggggac

SEQ ID NO: 15188 - DNA, 17 bp, synthetic construct
  misc_feature 1..17: note = Oligonucleotide
  source 1..17: mol_type = other DNA
caaaaacaaaaaatggg

SEQ ID NO: 15189 - DNA, 17 bp, synthetic construct
  misc_feature 1..17: note = Oligonucleotide
  source 1..17: mol_type = other DNA
aaacaaaaacaaaaaat

SEQ ID NO: 15190 - DNA, 17 bp, synthetic construct
  misc_feature 1..17: note = Oligonucleotide
  source 1..17: mol_type = other DNA
ttaaaacaaaaacaaaa

SEQ ID NO: 15191 - DNA, 17 bp, synthetic construct
  misc_feature 1..17: note = Oligonucleotide
  source 1..17: mol_type = other DNA
aaattaaaacaaaaaca

SEQ ID NO: 15192 - DNA, 17 bp, synthetic construct
  misc_feature 1..17: note = Oligonucleotide
  source 1..17: mol_type = other DNA
ttcaaattaaaacaaaa

SEQ ID NO: 15193 - DNA, 17 bp, synthetic construct
  misc_feature 1..17: note = Oligonucleotide
  source 1..17: mol_type = other DNA
cacttcaaattaaaaca

SEQ ID NO: 15194 - DNA, 17 bp, synthetic construct
  misc_feature 1..17: note = Oligonucleotide
  source 1..17: mol_type = other DNA
tgtcacttcaaattaaa

SEQ ID NO: 15195 - DNA, 17 bp, synthetic construct
  misc_feature 1..17: note = Oligonucleotide
  source 1..17: mol_type = other DNA
cgctgtcacttcaaatt

SEQ ID NO: 15196 - DNA, 17 bp, synthetic construct
  misc_feature 1..17: note = Oligonucleotide
  source 1..17: mol_type = other DNA
gcccgctgtcacttcaa

SEQ ID NO: 15197 - DNA, 17 bp, synthetic construct
  misc_feature 1..17: note = Oligonucleotide
  source 1..17: mol_type = other DNA
gctgcccgctgtcactt

SEQ ID NO: 15198 - DNA, 17 bp, synthetic construct
  misc_feature 1..17: note = Oligonucleotide
  source 1..17: mol_type = other DNA
tttgctgcccgctgtca

SEQ ID NO: 15199 - DNA, 17 bp, synthetic construct
  misc_feature 1..17: note = Oligonucleotide
  source 1..17: mol_type = other DNA
acgtttgctgcccgctg

SEQ ID NO: 15200 - DNA, 17 bp, synthetic construct
  misc_feature 1..17: note = Oligonucleotide
  source 1..17: mol_type = other DNA
cagacgtttgctgcccg

SEQ ID NO: 15201 - DNA, 17 bp, synthetic construct
  misc_feature 1..17: note = Oligonucleotide
  source 1..17: mol_type = other DNA
ctccagacgtttgctgc

SEQ ID NO: 15202 - DNA, 17 bp, synthetic construct
  misc_feature 1..17: note = Oligonucleotide
  source 1..17: mol_type = other DNA
ctgctccagacgtttgc

SEQ ID NO: 15203 - DNA, 17 bp, synthetic construct
  misc_feature 1..17: note = Oligonucleotide
  source 1..17: mol_type = other DNA
catctgctccagacgtt

SEQ ID NO: 15204 - DNA, 17 bp, synthetic construct
  misc_feature 1..17: note = Oligonucleotide
  source 1..17: mol_type = other DNA
taacatctgctccagac

SEQ ID NO: 15205 - DNA, 17 bp, synthetic construct
  misc_feature 1..17: note = Oligonucleotide
  source 1..17: mol_type = other DNA
ccctaacatctgctcca

SEQ ID NO: 15206 - DNA, 17 bp, synthetic construct
  misc_feature 1..17: note = Oligonucleotide
  source 1..17: mol_type = other DNA
caaccctaacatctgct

SEQ ID NO: 15207 - DNA, 17 bp, synthetic construct
  misc_feature 1..17: note = Oligonucleotide
  source 1..17: mol_type = other DNA
gtccaaccctaacatct

SEQ ID NO: 15208 - DNA, 17 bp, synthetic construct
  misc_feature 1..17: note = Oligonucleotide
  source 1..17: mol_type = other DNA
agagtccaaccctaaca

SEQ ID NO: 15209 - DNA, 17 bp, synthetic construct
  misc_feature 1..17: note = Oligonucleotide
  source 1..17: mol_type = other DNA
gtgagagtccaacccta

SEQ ID NO: 15210 - DNA, 17 bp, synthetic construct
  misc_feature 1..17: note = Oligonucleotide
  source 1..17: mol_type = other DNA
caagtgagagtccaacc

SEQ ID NO: 15211 - DNA, 17 bp, synthetic construct
  misc_feature 1..17: note = Oligonucleotide
  source 1..17: mol_type = other DNA
aaccaagtgagagtcca

SEQ ID NO: 15212 - DNA, 17 bp, synthetic construct
  misc_feature 1..17: note = Oligonucleotide
  source 1..17: mol_type = other DNA
tagaaccaagtgagagt

SEQ ID NO: 15213 - DNA, 17 bp, synthetic construct
  misc_feature 1..17: note = Oligonucleotide
  source 1..17: mol_type = other DNA
cattagaaccaagtgag

SEQ ID NO: 15214 - DNA, 17 bp, synthetic construct
  misc_feature 1..17: note = Oligonucleotide
  source 1..17: mol_type = other DNA
tcacattagaaccaagt

SEQ ID NO: 15215 - DNA, 17 bp, synthetic construct
  misc_feature 1..17: note = Oligonucleotide
  source 1..17: mol_type = other DNA
acctcacattagaacca

SEQ ID NO: 15216 - DNA, 17 bp, synthetic construct
  misc_feature 1..17: note = Oligonucleotide
  source 1..17: mol_type = other DNA
atgacctcacattagaa

SEQ ID NO: 15217 - DNA, 17 bp, synthetic construct
  misc_feature 1..17: note = Oligonucleotide
  source 1..17: mol_type = other DNA
accatgacctcacatta

SEQ ID NO: 15218 - DNA, 17 bp, synthetic construct
  misc_feature 1..17: note = Oligonucleotide
  source 1..17: mol_type = other DNA
ctgaccatgacctcaca

SEQ ID NO: 15219 - DNA, 17 bp, synthetic construct
  misc_feature 1..17: note = Oligonucleotide
  source 1..17: mol_type = other DNA
gccctgaccatgacctc

SEQ ID NO: 15220 - DNA, 17 bp, synthetic construct
  misc_feature 1..17: note = Oligonucleotide
  source 1..17: mol_type = other DNA
ccagccctgaccatgac

SEQ ID NO: 15221 - DNA, 17 bp, synthetic construct
  misc_feature 1..17: note = Oligonucleotide
  source 1..17: mol_type = other DNA
actccagccctgaccat

SEQ ID NO: 15222 - DNA, 17 bp, synthetic construct
  misc_feature 1..17: note = Oligonucleotide
  source 1..17: mol_type = other DNA
tcaactccagccctgac

SEQ ID NO: 15223 - DNA, 17 bp, synthetic construct
  misc_feature 1..17: note = Oligonucleotide
  source 1..17: mol_type = other DNA
aattcaactccagccct

SEQ ID NO: 15224 - DNA, 17 bp, synthetic construct
  misc_feature 1..17: note = Oligonucleotide
  source 1..17: mol_type = other DNA
caaaattcaactccagc

SEQ ID NO: 15225 - DNA, 17 bp, synthetic construct
  misc_feature 1..17: note = Oligonucleotide
  source 1..17: mol_type = other DNA
gtccaaaattcaactcc

SEQ ID NO: 15226 - DNA, 17 bp, synthetic construct
  misc_feature 1..17: note = Oligonucleotide
  source 1..17: mol_type = other DNA
ccagtccaaaattcaac

SEQ ID NO: 15227 - DNA, 17 bp, synthetic construct
  misc_feature 1..17: note = Oligonucleotide
  source 1..17: mol_type = other DNA
accccagtccaaaattc

SEQ ID NO: 15228 - DNA, 17 bp, synthetic construct
  misc_feature 1..17: note = Oligonucleotide
  source 1..17: mol_type = other DNA
ttaaccccagtccaaaa

SEQ ID NO: 15229 - DNA, 17 bp, synthetic construct
  misc_feature 1..17: note = Oligonucleotide
  source 1..17: mol_type = other DNA
atcttaaccccagtcca

SEQ ID NO: 15230 - DNA, 17 bp, synthetic construct
  misc_feature 1..17: note = Oligonucleotide
  source 1..17: mol_type = other DNA
ttaatcttaaccccagt

SEQ ID NO: 15231 - DNA, 17 bp, synthetic construct
  misc_feature 1..17: note = Oligonucleotide
  source 1..17: mol_type = other DNA
accttaatcttaacccc

SEQ ID NO: 15232 - DNA, 17 bp, synthetic construct
  misc_feature 1..17: note = Oligonucleotide
  source 1..17: mol_type = other DNA
ccgaccttaatcttaac

SEQ ID NO: 15233 - DNA, 17 bp, synthetic construct
  misc_feature 1..17: note = Oligonucleotide
  source 1..17: mol_type = other DNA
aaaccgaccttaatctt

SEQ ID NO: 15234 - DNA, 17 bp, synthetic construct
  misc_feature 1..17: note = Oligonucleotide
  source 1..17: mol_type = other DNA
atgaaaccgaccttaat

SEQ ID NO: 15235 - DNA, 17 bp, synthetic construct
  misc_feature 1..17: note = Oligonucleotide
  source 1..17: mol_type = other DNA
aacatgaaaccgacctt

SEQ ID NO: 15236 - DNA, 17 bp, synthetic construct
  misc_feature 1..17: note = Oligonucleotide
  source 1..17: mol_type = other DNA
ttaaacatgaaaccgac

SEQ ID NO: 15237 - DNA, 17 bp, synthetic construct
  misc_feature 1..17: note = Oligonucleotide
  source 1..17: mol_type = other DNA
cccttaaacatgaaacc

SEQ ID NO: 15238 - DNA, 17 bp, synthetic construct
  misc_feature 1..17: note = Oligonucleotide
  source 1..17: mol_type = other DNA
gggcccttaaacatgaa

SEQ ID NO: 15239 - DNA, 17 bp, synthetic construct
  misc_feature 1..17: note = Oligonucleotide
  source 1..17: mol_type = other DNA
gaagggcccttaaacat

SEQ ID NO: 15240 - DNA, 17 bp, synthetic construct
  misc_feature 1..17: note = Oligonucleotide
  source 1..17: mol_type = other DNA
gaagaagggcccttaaa

SEQ ID NO: 15241 - DNA, 17 bp, synthetic construct
  misc_feature 1..17: note = Oligonucleotide
  source 1..17: mol_type = other DNA
acagaagaagggccctt

SEQ ID NO: 15242 - DNA, 17 bp, synthetic construct
  misc_feature 1..17: note = Oligonucleotide
  source 1..17: mol_type = other DNA
tctacagaagaagggcc

SEQ ID NO: 15243 - DNA, 17 bp, synthetic construct
  misc_feature 1..17: note = Oligonucleotide
  source 1..17: mol_type = other DNA
aactctacagaagaagg

SEQ ID NO: 15244 - DNA, 17 bp, synthetic construct
  misc_feature 1..17: note = Oligonucleotide
  source 1..17: mol_type = other DNA
gggaactctacagaaga

SEQ ID NO: 15245 - DNA, 17 bp, synthetic construct
  misc_feature 1..17: note = Oligonucleotide
  source 1..17: mol_type = other DNA
agggggaactctacaga

SEQ ID NO: 15246 - DNA, 17 bp, synthetic construct
  misc_feature 1..17: note = Oligonucleotide
  source 1..17: mol_type = other DNA
ttcagggggaactctac

SEQ ID NO: 15247 - DNA, 17 bp, synthetic construct
  misc_feature 1..17: note = Oligonucleotide
  source 1..17: mol_type = other DNA
atgttcagggggaactc

SEQ ID NO: 15248 - DNA, 17 bp, synthetic construct
  misc_feature 1..17: note = Oligonucleotide
  source 1..17: mol_type = other DNA
gggatgttcagggggaa

SEQ ID NO: 15249 - DNA, 17 bp, synthetic construct
  misc_feature 1..17: note = Oligonucleotide
  source 1..17: mol_type = other DNA
agggggatgttcagggg

SEQ ID NO: 15250 - DNA, 17 bp, synthetic construct
  misc_feature 1..17: note = Oligonucleotide
  source 1..17: mol_type = other DNA
tacagggggatgttcag

SEQ ID NO: 15251 - DNA, 17 bp, synthetic construct
  misc_feature 1..17: note = Oligonucleotide
  source 1..17: mol_type = other DNA
ccttacagggggatgtt

SEQ ID NO: 15252 - DNA, 17 bp, synthetic construct
  misc_feature 1..17: note = Oligonucleotide
  source 1..17: mol_type = other DNA
aagccttacagggggat

SEQ ID NO: 15253 - DNA, 17 bp, synthetic construct
  misc_feature 1..17: note = Oligonucleotide
  source 1..17: mol_type = other DNA
accaagccttacagggg

SEQ ID NO: 15254 - DNA, 17 bp, synthetic construct
  misc_feature 1..17: note = Oligonucleotide
  source 1..17: mol_type = other DNA
ataaccaagccttacag

SEQ ID NO: 15255 - DNA, 17 bp, synthetic construct
  misc_feature 1..17: note = Oligonucleotide
  source 1..17: mol_type = other DNA
ctcataaccaagcctta

SEQ ID NO: 15256 - DNA, 17 bp, synthetic construct
  misc_feature 1..17: note = Oligonucleotide
  source 1..17: mol_type = other DNA
gggctcataaccaagcc

SEQ ID NO: 15257 - DNA, 17 bp, synthetic construct
  misc_feature 1..17: note = Oligonucleotide
  source 1..17: mol_type = other DNA
gaggggctcataaccaa

SEQ ID NO: 15258 - DNA, 17 bp, synthetic construct
  misc_feature 1..17: note = Oligonucleotide
  source 1..17: mol_type = other DNA
gtggaggggctcataac

SEQ ID NO: 15259 - DNA, 17 bp, synthetic construct
  misc_feature 1..17: note = Oligonucleotide
  source 1..17: mol_type = other DNA
ggggtggaggggctcat

SEQ ID NO: 15260 - DNA, 17 bp, synthetic construct
  misc_feature 1..17: note = Oligonucleotide
  source 1..17: mol_type = other DNA
cctggggtggaggggct

SEQ ID NO: 15261 - DNA, 17 bp, synthetic construct
  misc_feature 1..17: note = Oligonucleotide
  source 1..17: mol_type = other DNA
cagcctggggtggaggg

SEQ ID NO: 15262 - DNA, 17 bp, synthetic construct
  misc_feature 1..17: note = Oligonucleotide
  source 1..17: mol_type = other DNA
acacagcctggggtgga

SEQ ID NO: 15263 - DNA, 17 bp, synthetic construct
  misc_feature 1..17: note = Oligonucleotide
  source 1..17: mol_type = other DNA
ctgacacagcctggggt

SEQ ID NO: 15264 - DNA, 17 bp, synthetic construct
  misc_feature 1..17: note = Oligonucleotide
  source 1..17: mol_type = other DNA
caactgacacagcctgg

SEQ ID NO: 15265 - DNA, 17 bp, synthetic construct
  misc_feature 1..17: note = Oligonucleotide
  source 1..17: mol_type = other DNA
gttcaactgacacagcc

SEQ ID NO: 15266 - DNA, 17 bp, synthetic construct
  misc_feature 1..17: note = Oligonucleotide
  source 1..17: mol_type = other DNA
atggttcaactgacaca

SEQ ID NO: 15267 - DNA, 17 bp, synthetic construct
  misc_feature 1..17: note = Oligonucleotide
  source 1..17: mol_type = other DNA
cagatggttcaactgac

SEQ ID NO: 15268 - DNA, 17 bp, synthetic construct
  misc_feature 1..17: note = Oligonucleotide
  source 1..17: mol_type = other DNA
cctcagatggttcaact

SEQ ID NO: 15269 - DNA, 17 bp, synthetic construct
  misc_feature 1..17: note = Oligonucleotide
  source 1..17: mol_type = other DNA
cagcctcagatggttca

SEQ ID NO: 15270 - DNA, 17 bp, synthetic construct
  misc_feature 1..17: note = Oligonucleotide
  source 1..17: mol_type = other DNA
ccacagcctcagatggt

SEQ ID NO: 15271 - DNA, 17 bp, synthetic construct
  misc_feature 1..17: note = Oligonucleotide
  source 1..17: mol_type = other DNA
ctgccacagcctcagat

SEQ ID NO: 15272 - DNA, 17 bp, synthetic construct
  misc_feature 1..17: note = Oligonucleotide
  source 1..17: mol_type = other DNA
ggtctgccacagcctca

SEQ ID NO: 15273 - DNA, 17 bp, synthetic construct
  misc_feature 1..17: note = Oligonucleotide
  source 1..17: mol_type = other DNA
gagggtctgccacagcc

SEQ ID NO: 15274 - DNA, 17 bp, synthetic construct
  misc_feature 1..17: note = Oligonucleotide
  source 1..17: mol_type = other DNA
accgagggtctgccaca

SEQ ID NO: 15275 - DNA, 17 bp, synthetic construct
  misc_feature 1..17: note = Oligonucleotide
  source 1..17: mol_type = other DNA
ttcaccgagggtctgcc

SEQ ID NO: 15276 - DNA, 17 bp, synthetic construct
  misc_feature 1..17: note = Oligonucleotide
  source 1..17: mol_type = other DNA
gcattcaccgagggtct

SEQ ID NO: 15277 - DNA, 17 bp, synthetic construct
  misc_feature 1..17: note = Oligonucleotide
  source 1..17: mol_type = other DNA
gtggcattcaccgaggg

SEQ ID NO: 15278 - DNA, 17 bp, synthetic construct
  misc_feature 1..17: note = Oligonucleotide
  source 1..17: mol_type = other DNA
gctgtggcattcaccga

SEQ ID NO: 15279 - DNA, 17 bp, synthetic construct
  misc_feature 1..17: note = Oligonucleotide
  source 1..17: mol_type = other DNA
gcagctgtggcattcac

SEQ ID NO: 15280 - DNA, 17 bp, synthetic construct
  misc_feature 1..17: note = Oligonucleotide
  source 1..17: mol_type = other DNA
agagcagctgtggcatt

SEQ ID NO: 15281 - DNA, 17 bp, synthetic construct
  misc_feature 1..17: note = Oligonucleotide
  source 1..17: mol_type = other DNA
ttgagagcagctgtggc

SEQ ID NO: 15282 - DNA, 17 bp, synthetic construct
  misc_feature 1..17: note = Oligonucleotide
  source 1..17: mol_type = other DNA
gccttgagagcagctgt

SEQ ID NO: 15283 - DNA, 17 bp, synthetic construct
  misc_feature 1..17: note = Oligonucleotide
  source 1..17: mol_type = other DNA
gtggccttgagagcagc

SEQ ID NO: 15284 - DNA, 17 bp, synthetic construct
  misc_feature 1..17: note = Oligonucleotide
  source 1..17: mol_type = other DNA
gcagtggccttgagagc

SEQ ID NO: 15285 - DNA, 17 bp, synthetic construct
  misc_feature 1..17: note = Oligonucleotide
  source 1..17: mol_type = other DNA
cctgcagtggccttgag

SEQ ID NO: 15286 - DNA, 17 bp, synthetic construct
  misc_feature 1..17: note = Oligonucleotide
  source 1..17: mol_type = other DNA
ttccctgcagtggcctt

SEQ ID NO: 15287 - DNA, 17 bp, synthetic construct
  misc_feature 1..17: note = Oligonucleotide
  source 1..17: mol_type = other DNA
cacttccctgcagtggc

SEQ ID NO: 15288 - DNA, 17 bp, synthetic construct
  misc_feature 1..17: note = Oligonucleotide
  source 1..17: mol_type = other DNA
acacacttccctgcagt

SEQ ID NO: 15289 - DNA, 17 bp, synthetic construct
  misc_feature 1..17: note = Oligonucleotide
  source 1..17: mol_type = other DNA
aacacacacttccctgc

SEQ ID NO: 15290 - DNA, 17 bp, synthetic construct
  misc_feature 1..17: note = Oligonucleotide
  source 1..17: mol_type = other DNA
ctcaacacacacttccc

SEQ ID NO: 15291 - DNA, 17 bp, synthetic construct
  misc_feature 1..17: note = Oligonucleotide
  source 1..17: mol_type = other DNA
ttcctcaacacacactt

SEQ ID NO: 15292 - DNA, 17 bp, synthetic construct
  misc_feature 1..17: note = Oligonucleotide
  source 1..17: mol_type = other DNA
tacttcctcaacacaca

SEQ ID NO: 15293 - DNA, 17 bp, synthetic construct
  misc_feature 1..17: note = Oligonucleotide
  source 1..17: mol_type = other DNA
agttacttcctcaacac

SEQ ID NO: 15294 - DNA, 17 bp, synthetic construct
  misc_feature 1..17: note = Oligonucleotide
  source 1..17: mol_type = other DNA
cccagttacttcctcaa

SEQ ID NO: 15295 - DNA, 17 bp, synthetic construct
  misc_feature 1..17: note = Oligonucleotide
  source 1..17: mol_type = other DNA
tggcccagttacttcct

SEQ ID NO: 15296 - DNA, 17 bp, synthetic construct
  misc_feature 1..17: note = Oligonucleotide
  source 1..17: mol_type = other DNA
cactggcccagttactt

SEQ ID NO: 15297 - DNA, 17 bp, synthetic construct
  misc_feature 1..17: note = Oligonucleotide
  source 1..17: mol_type = other DNA
tcccactggcccagtta

SEQ ID NO: 15298 - DNA, 17 bp, synthetic construct
  misc_feature 1..17: note = Oligonucleotide
  source 1..17: mol_type = other DNA
ccatcccactggcccag

SEQ ID NO: 15299 - DNA, 17 bp, synthetic construct
  misc_feature 1..17: note = Oligonucleotide
  source 1..17: mol_type = other DNA
tacccatcccactggcc

SEQ ID NO: 15300 - DNA, 17 bp, synthetic construct
  misc_feature 1..17: note = Oligonucleotide
  source 1..17: mol_type = other DNA
tcctacccatcccactg

SEQ ID NO: 15301 - DNA, 17 bp, synthetic construct
  misc_feature 1..17: note = Oligonucleotide
  source 1..17: mol_type = other DNA
cgatcctacccatccca

SEQ ID NO: 15302 - DNA, 17 bp, synthetic construct
  misc_feature 1..17: note = Oligonucleotide
  source 1..17: mol_type = other DNA
ctccgatcctacccatc

SEQ ID NO: 15303 - DNA, 17 bp, synthetic construct
  misc_feature 1..17: note = Oligonucleotide
  source 1..17: mol_type = other DNA
ggactccgatcctaccc

SEQ ID NO: 15304 - DNA, 17 bp, synthetic construct
  misc_feature 1..17: note = Oligonucleotide
  source 1..17: mol_type = other DNA
cctggactccgatccta

SEQ ID NO: 15305 - DNA, 17 bp, synthetic construct
  misc_feature 1..17: note = Oligonucleotide
  source 1..17: mol_type = other DNA
gaccctggactccgatc

SEQ ID NO: 15306 - DNA, 17 bp, synthetic construct
  misc_feature 1..17: note = Oligonucleotide
  source 1..17: mol_type = other DNA
cctgaccctggactccg

SEQ ID NO: 15307 - DNA, 17 bp, synthetic construct
  misc_feature 1..17: note = Oligonucleotide
  source 1..17: mol_type = other DNA
tgacctgaccctggact

SEQ ID NO: 15308 - DNA, 17 bp, synthetic construct
  misc_feature 1..17: note = Oligonucleotide
  source 1..17: mol_type = other DNA
ccctgacctgaccctgg

SEQ ID NO: 15309 - DNA, 17 bp, synthetic construct
  misc_feature 1..17: note = Oligonucleotide
  source 1..17: mol_type = other DNA
ctcccctgacctgaccc

SEQ ID NO: 15310 - DNA, 17 bp, synthetic construct
  misc_feature 1..17: note = Oligonucleotide
  source 1..17: mol_type = other DNA
gttctcccctgacctga

SEQ ID NO: 15311 - DNA, 17 bp, synthetic construct
  misc_feature 1..17: note = Oligonucleotide
  source 1..17: mol_type = other DNA
acagttctcccctgacc

SEQ ID NO: 15312 - DNA, 17 bp, synthetic construct
  misc_feature 1..17: note = Oligonucleotide
  source 1..17: mol_type = other DNA
accacagttctcccctg

SEQ ID NO: 15313 - DNA, 17 bp, synthetic construct
  misc_feature 1..17: note = Oligonucleotide
  source 1..17: mol_type = other DNA
cttaccacagttctccc

SEQ ID NO: 15314 - DNA, 17 bp, synthetic construct
  misc_feature 1..17: note = Oligonucleotide
  source 1..17: mol_type = other DNA
aaccttaccacagttct

SEQ ID NO: 15315 - DNA, 17 bp, synthetic construct
  misc_feature 1..17: note = Oligonucleotide
  source 1..17: mol_type = other DNA
ccaaaccttaccacagt

SEQ ID NO: 15316 - DNA, 17 bp, synthetic construct
  misc_feature 1..17: note = Oligonucleotide
  source 1..17: mol_type = other DNA
aacccaaaccttaccac

SEQ ID NO: 15317 - DNA, 17 bp, synthetic construct
  misc_feature 1..17: note = Oligonucleotide
  source 1..17: mol_type = other DNA
gcaaacccaaaccttac

SEQ ID NO: 15318 - DNA, 17 bp, synthetic construct
  misc_feature 1..17: note = Oligonucleotide
  source 1..17: mol_type = other DNA
tatgcaaacccaaacct

SEQ ID NO: 15319 - DNA, 17 bp, synthetic construct
  misc_feature 1..17: note = Oligonucleotide
  source 1..17: mol_type = other DNA
ccttatgcaaacccaaa

SEQ ID NO: 15320 - DNA, 17 bp, synthetic construct
  misc_feature 1..17: note = Oligonucleotide
  source 1..17: mol_type = other DNA
gccccttatgcaaaccc

SEQ ID NO: 15321 - DNA, 17 bp, synthetic construct
  misc_feature 1..17: note = Oligonucleotide
  source 1..17: mol_type = other DNA
gctgccccttatgcaaa

SEQ ID NO: 15322 - DNA, 17 bp, synthetic construct
  misc_feature 1..17: note = Oligonucleotide
  source 1..17: mol_type = other DNA
tctgctgccccttatgc

SEQ ID NO: 15323 - DNA, 17 bp, synthetic construct
  misc_feature 1..17: note = Oligonucleotide
  source 1..17: mol_type = other DNA
ctatctgctgcccctta

SEQ ID NO: 15324 - DNA, 17 bp, synthetic construct
  misc_feature 1..17: note = Oligonucleotide
  source 1..17: mol_type = other DNA
taactatctgctgcccc

SEQ ID NO: 15325 - DNA, 17 bp, synthetic construct
  misc_feature 1..17: note = Oligonucleotide
  source 1..17: mol_type = other DNA
aagtaactatctgctgc

SEQ ID NO: 15326 - DNA, 17 bp, synthetic construct
  misc_feature 1..17: note = Oligonucleotide
  source 1..17: mol_type = other DNA
cagaagtaactatctgc

SEQ ID NO: 15327 - DNA, 17 bp, synthetic construct
  misc_feature 1..17: note = Oligonucleotide
  source 1..17: mol_type = other DNA
aaccagaagtaactatc

SEQ ID NO: 15328 - DNA, 17 bp, synthetic construct
  misc_feature 1..17: note = Oligonucleotide
  source 1..17: mol_type = other DNA
ccaaaccagaagtaact

SEQ ID NO: 15329 - DNA, 17 bp, synthetic construct
  misc_feature 1..17: note = Oligonucleotide
  source 1..17: mol_type = other DNA
agcccaaaccagaagta

SEQ ID NO: 15330 - DNA, 17 bp, synthetic construct
  misc_feature 1..17: note = Oligonucleotide
  source 1..17: mol_type = other DNA
accagcccaaaccagaa

SEQ ID NO: 15331 - DNA, 17 bp, synthetic construct
  misc_feature 1..17: note = Oligonucleotide
  source 1..17: mol_type = other DNA
aacaccagcccaaacca

SEQ ID NO: 15332 - DNA, 17 bp, synthetic construct
  misc_feature 1..17: note = Oligonucleotide
  source 1..17: mol_type = other DNA
caaaacaccagcccaaa

SEQ ID NO: 15333 - DNA, 17 bp, synthetic construct
  misc_feature 1..17: note = Oligonucleotide
  source 1..17: mol_type = other DNA
ctccaaaacaccagccc

SEQ ID NO: 15334 - DNA, 17 bp, synthetic construct
  misc_feature 1..17: note = Oligonucleotide
  source 1..17: mol_type = other DNA
cacctccaaaacaccag

SEQ ID NO: 15335 - DNA, 17 bp, synthetic construct
  misc_feature 1..17: note = Oligonucleotide
  source 1..17: mol_type = other DNA
ggccacctccaaaacac

SEQ ID NO: 15336 - DNA, 17 bp, synthetic construct
  misc_feature 1..17: note = Oligonucleotide
  source 1..17: mol_type = other DNA
aagggccacctccaaaa

SEQ ID NO: 15337 - DNA, 17 bp, synthetic construct
  misc_feature 1..17: note = Oligonucleotide
  source 1..17: mol_type = other DNA
actaagggccacctcca

SEQ ID NO: 15338 - DNA, 17 bp, synthetic construct
  misc_feature 1..17: note = Oligonucleotide
  source 1..17: mol_type = other DNA
aacactaagggccacct

SEQ ID NO: 15339 - DNA, 17 bp, synthetic construct
  misc_feature 1..17: note = Oligonucleotide
  source 1..17: mol_type = other DNA
tccaacactaagggcca

SEQ ID NO: 15340 - DNA, 17 bp, synthetic construct
  misc_feature 1..17: note = Oligonucleotide
  source 1..17: mol_type = other DNA
ccttccaacactaaggg

SEQ ID NO: 15341 - DNA, 17 bp, synthetic construct
  misc_feature 1..17: note = Oligonucleotide
  source 1..17: mol_type = other DNA
gggccttccaacactaa

SEQ ID NO: 15342 - DNA, 17 bp, synthetic construct
  misc_feature 1..17: note = Oligonucleotide
  source 1..17: mol_type = other DNA
ccagggccttccaacac

SEQ ID NO: 15343 - DNA, 17 bp, synthetic construct
  misc_feature 1..17: note = Oligonucleotide
  source 1..17: mol_type = other DNA
aaaccagggccttccaa

SEQ ID NO: 15344 - DNA, 17 bp, synthetic construct
  misc_feature 1..17: note = Oligonucleotide
  source 1..17: mol_type = other DNA
cacaaaccagggccttc

SEQ ID NO: 15345 - DNA, 17 bp, synthetic construct
  misc_feature 1..17: note = Oligonucleotide
  source 1..17: mol_type = other DNA
atgcacaaaccagggcc

SEQ ID NO: 15346 - DNA, 17 bp, synthetic construct
  misc_feature 1..17: note = Oligonucleotide
  source 1..17: mol_type = other DNA
cacatgcacaaaccagg

SEQ ID NO: 15347 - DNA, 17 bp, synthetic construct
  misc_feature 1..17: note = Oligonucleotide
  source 1..17: mol_type = other DNA
ccacacatgcacaaacc

SEQ ID NO: 15348 - DNA, 17 bp, synthetic construct
  misc_feature 1..17: note = Oligonucleotide
  source 1..17: mol_type = other DNA
gccccacacatgcacaa

SEQ ID NO: 15349 - DNA, 17 bp, synthetic construct
  misc_feature 1..17: note = Oligonucleotide
  source 1..17: mol_type = other DNA
gaggccccacacatgca

SEQ ID NO: 15350 - DNA, 17 bp, synthetic construct
  misc_feature 1..17: note = Oligonucleotide
  source 1..17: mol_type = other DNA
gaagaggccccacacat

SEQ ID NO: 15351 - DNA, 17 bp, synthetic construct
  misc_feature 1..17: note = Oligonucleotide
  source 1..17: mol_type = other DNA
gaggaagaggccccaca

SEQ ID NO: 15352 - DNA, 17 bp, synthetic construct
  misc_feature 1..17: note = Oligonucleotide
  source 1..17: mol_type = other DNA
aaagaggaagaggcccc

SEQ ID NO: 15353 - DNA, 17 bp, synthetic construct
  misc_feature 1..17: note = Oligonucleotide
  source 1..17: mol_type = other DNA
aaaaaagaggaagaggc

SEQ ID NO: 15354 - DNA, 17 bp, synthetic construct
  misc_feature 1..17: note = Oligonucleotide
  source 1..17: mol_type = other DNA
aaaaaaaaagaggaaga

SEQ ID NO: 15355 - DNA, 17 bp, synthetic construct
  misc_feature 1..17: note = Oligonucleotide
  source 1..17: mol_type = other DNA
aaaaaaaaaaaagagga

SEQ ID NO: 15356 - DNA, 17 bp, synthetic construct
  misc_feature 1..17: note = Oligonucleotide
  source 1..17: mol_type = other DNA
aaaaaaaaaaaaaaaga

SEQ ID NO: 15357 - DNA, 17 bp, synthetic construct
  misc_feature 1..17: note = Oligonucleotide
  source 1..17: mol_type = other DNA
caaaaaaaaaaaaaaaa

SEQ ID NO: 15358 - DNA, 17 bp, synthetic construct
  misc_feature 1..17: note = Oligonucleotide
  source 1..17: mol_type = other DNA
tctcaaaaaaaaaaaaa

SEQ ID NO: 15359 - DNA, 17 bp, synthetic construct
  misc_feature 1..17: note = Oligonucleotide
  source 1..17: mol_type = other DNA
ccatctcaaaaaaaaaa

SEQ ID NO: 15360 - DNA, 17 bp, synthetic construct
  misc_feature 1..17: note = Oligonucleotide
  source 1..17: mol_type = other DNA
actccatctcaaaaaaa

SEQ ID NO: 15361 - DNA, 17 bp, synthetic construct
  misc_feature 1..17: note = Oligonucleotide
  source 1..17: mol_type = other DNA
cagactccatctcaaaa

SEQ ID NO: 15362 - DNA, 17 bp, synthetic construct
  misc_feature 1..17: note = Oligonucleotide
  source 1..17: mol_type = other DNA
aggcagactccatctca

SEQ ID NO: 15363 - DNA, 17 bp, synthetic construct
  misc_feature 1..17: note = Oligonucleotide
  source 1..17: mol_type = other DNA
cataggcagactccatc

SEQ ID NO: 15364 - DNA, 17 bp, synthetic construct
  misc_feature 1..17: note = Oligonucleotide
  source 1..17: mol_type = other DNA
ctacataggcagactcc

SEQ ID NO: 15365 - DNA, 17 bp, synthetic construct
  misc_feature 1..17: note = Oligonucleotide
  source 1..17: mol_type = other DNA
gggctacataggcagac

SEQ ID NO: 15366 - DNA, 17 bp, synthetic construct
  misc_feature 1..17: note = Oligonucleotide
  source 1..17: mol_type = other DNA
cctgggctacataggca

SEQ ID NO: 15367 - DNA, 17 bp, synthetic construct
  misc_feature 1..17: note = Oligonucleotide
  source 1..17: mol_type = other DNA
ctgcctgggctacatag

SEQ ID NO: 15368 - DNA, 17 bp, synthetic construct
  misc_feature 1..17: note = Oligonucleotide
  source 1..17: mol_type = other DNA
ctcctgcctgggctaca

SEQ ID NO: 15369 - DNA, 17 bp, synthetic construct
  misc_feature 1..17: note = Oligonucleotide
  source 1..17: mol_type = other DNA
gcactcctgcctgggct

SEQ ID NO: 15370 - DNA, 17 bp, synthetic construct
  misc_feature 1..17: note = Oligonucleotide
  source 1..17: mol_type = other DNA
actgcactcctgcctgg

SEQ ID NO: 15371 - DNA, 17 bp, synthetic construct
  misc_feature 1..17: note = Oligonucleotide
  source 1..17: mol_type = other DNA
gccactgcactcctgcc

SEQ ID NO: 15372 - DNA, 17 bp, synthetic construct
  misc_feature 1..17: note = Oligonucleotide
  source 1..17: mol_type = other DNA
cgcgccactgcactcct

SEQ ID NO: 15373 - DNA, 17 bp, synthetic construct
  misc_feature 1..17: note = Oligonucleotide
  source 1..17: mol_type = other DNA
gatcgcgccactgcact

SEQ ID NO: 15374 - DNA, 17 bp, synthetic construct
  misc_feature 1..17: note = Oligonucleotide
  source 1..17: mol_type = other DNA
caagatcgcgccactgc

SEQ ID NO: 15375 - DNA, 17 bp, synthetic construct
  misc_feature 1..17: note = Oligonucleotide
  source 1..17: mol_type = other DNA
agccaagatcgcgccac

SEQ ID NO: 15376 - DNA, 17 bp, synthetic construct
  misc_feature 1..17: note = Oligonucleotide
  source 1..17: mol_type = other DNA
gtgagccaagatcgcgc

SEQ ID NO: 15377 - DNA, 17 bp, synthetic construct
  misc_feature 1..17: note = Oligonucleotide
  source 1..17: mol_type = other DNA
gcagtgagccaagatcg

SEQ ID NO: 15378 - DNA, 17 bp, synthetic construct
  misc_feature 1..17: note = Oligonucleotide
  source 1..17: mol_type = other DNA
cttgcagtgagccaaga

SEQ ID NO: 15379 - DNA, 17 bp, synthetic construct
  misc_feature 1..17: note = Oligonucleotide
  source 1..17: mol_type = other DNA
gagcttgcagtgagcca

SEQ ID NO: 15380 - DNA, 17 bp, synthetic construct
  misc_feature 1..17: note = Oligonucleotide
  source 1..17: mol_type = other DNA
gcggagcttgcagtgag

SEQ ID NO: 15381 - DNA, 17 bp, synthetic construct
  misc_feature 1..17: note = Oligonucleotide
  source 1..17: mol_type = other DNA
gaggcggagcttgcagt

SEQ ID NO: 15382 - DNA, 17 bp, synthetic construct
  misc_feature 1..17: note = Oligonucleotide
  source 1..17: mol_type = other DNA
caggaggcggagcttgc

SEQ ID NO: 15383 - DNA, 17 bp, synthetic construct
  misc_feature 1..17: note = Oligonucleotide
  source 1..17: mol_type = other DNA
acccaggaggcggagct

SEQ ID NO: 15384 - DNA, 17 bp, synthetic construct
  misc_feature 1..17: note = Oligonucleotide
  source 1..17: mol_type = other DNA
agaacccaggaggcgga

SEQ ID NO: 15385 - DNA, 17 bp, synthetic construct
  misc_feature 1..17: note = Oligonucleotide
  source 1..17: mol_type = other DNA
gtgagaacccaggaggc

SEQ ID NO: 15386 - DNA, 17 bp, synthetic construct
  misc_feature 1..17: note = Oligonucleotide
  source 1..17: mol_type = other DNA
atggtgagaacccagga

SEQ ID NO: 15387 - DNA, 17 bp, synthetic construct
  misc_feature 1..17: note = Oligonucleotide
  source 1..17: mol_type = other DNA
agaatggtgagaaccca

SEQ ID NO: 15388 - DNA, 17 bp, synthetic construct
  misc_feature 1..17: note = Oligonucleotide
  source 1..17: mol_type = other DNA
aggagaatggtgagaac

SEQ ID NO: 15389 - DNA, 17 bp, synthetic construct
  misc_feature 1..17: note = Oligonucleotide
  source 1..17: mol_type = other DNA
ggcaggagaatggtgag

SEQ ID NO: 15390 - DNA, 17 bp, synthetic construct
  misc_feature 1..17: note = Oligonucleotide
  source 1..17: mol_type = other DNA
tgaggcaggagaatggt

SEQ ID NO: 15391 - DNA, 17 bp, synthetic construct
  misc_feature 1..17: note = Oligonucleotide
  source 1..17: mol_type = other DNA
ggctgaggcaggagaat

SEQ ID NO: 15392 - DNA, 17 bp, synthetic construct
  misc_feature 1..17: note = Oligonucleotide
  source 1..17: mol_type = other DNA
ggaggctgaggcaggag

SEQ ID NO: 15393 - DNA, 17 bp, synthetic construct
  misc_feature 1..17: note = Oligonucleotide
  source 1..17: mol_type = other DNA
tcgggaggctgaggcag

SEQ ID NO: 15394 - DNA, 17 bp, synthetic construct
  misc_feature 1..17: note = Oligonucleotide
  source 1..17: mol_type = other DNA
tactcgggaggctgagg

SEQ ID NO: 15395 - DNA, 17 bp, synthetic construct
  misc_feature 1..17: note = Oligonucleotide
  source 1..17: mol_type = other DNA
agctactcgggaggctg

SEQ ID NO: 15396 - DNA, 17 bp, synthetic construct
  misc_feature 1..17: note = Oligonucleotide
  source 1..17: mol_type = other DNA
cccagctactcgggagg

SEQ ID NO: 15397 - DNA, 17 bp, synthetic construct
  misc_feature 1..17: note = Oligonucleotide
  source 1..17: mol_type = other DNA
aatcccagctactcggg

SEQ ID NO: 15398 - DNA, 17 bp, synthetic construct
  misc_feature 1..17: note = Oligonucleotide
  source 1..17: mol_type = other DNA
tgtaatcccagctactc

SEQ ID NO: 15399 - DNA, 17 bp, synthetic construct
  misc_feature 1..17: note = Oligonucleotide
  source 1..17: mol_type = other DNA
acctgtaatcccagcta

SEQ ID NO: 15400 - DNA, 17 bp, synthetic construct
  misc_feature 1..17: note = Oligonucleotide
  source 1..17: mol_type = other DNA
ggcacctgtaatcccag

SEQ ID NO: 15401 - DNA, 17 bp, synthetic construct
  misc_feature 1..17: note = Oligonucleotide
  source 1..17: mol_type = other DNA
gtgggcacctgtaatcc

SEQ ID NO: 15402 - DNA, 17 bp, synthetic construct
  misc_feature 1..17: note = Oligonucleotide
  source 1..17: mol_type = other DNA
atggtgggcacctgtaa

SEQ ID NO: 15403 - DNA, 17 bp, synthetic construct
  misc_feature 1..17: note = Oligonucleotide
  source 1..17: mol_type = other DNA
atgatggtgggcacctg

SEQ ID NO: 15404 - DNA, 17 bp, synthetic construct
  misc_feature 1..17: note = Oligonucleotide
  source 1..17: mol_type = other DNA
ggcatgatggtgggcac

SEQ ID NO: 15405 - DNA, 17 bp, synthetic construct
  misc_feature 1..17: note = Oligonucleotide
  source 1..17: mol_type = other DNA
ccaggcatgatggtggg

SEQ ID NO: 15406 - DNA, 17 bp, synthetic construct
  misc_feature 1..17: note = Oligonucleotide
  source 1..17: mol_type = other DNA
tagccaggcatgatggt

SEQ ID NO: 15407 - DNA, 17 bp, synthetic construct
  misc_feature 1..17: note = Oligonucleotide
  source 1..17: mol_type = other DNA
aattagccaggcatgat

SEQ ID NO: 15408 - DNA, 17 bp, synthetic construct
  misc_feature 1..17: note = Oligonucleotide
  source 1..17: mol_type = other DNA
gaaaattagccaggcat

SEQ ID NO: 15409 - DNA, 17 bp, synthetic construct
  misc_feature 1..17: note = Oligonucleotide
  source 1..17: mol_type = other DNA
acagaaaattagccagg

SEQ ID NO: 15410 - DNA, 17 bp, synthetic construct
  misc_feature 1..17: note = Oligonucleotide
  source 1..17: mol_type = other DNA
aatacagaaaattagcc

SEQ ID NO: 15411 - DNA, 17 bp, synthetic construct
  misc_feature 1..17: note = Oligonucleotide
  source 1..17: mol_type = other DNA
aaaaatacagaaaatta

SEQ ID NO: 15412 - DNA, 17 bp, synthetic construct
  misc_feature 1..17: note = Oligonucleotide
  source 1..17: mol_type = other DNA
actaaaaatacagaaaa

SEQ ID NO: 15413 - DNA, 17 bp, synthetic construct
  misc_feature 1..17: note = Oligonucleotide
  source 1..17: mol_type = other DNA
tctactaaaaatacaga

SEQ ID NO: 15414 - DNA, 17 bp, synthetic construct
  misc_feature 1..17: note = Oligonucleotide
  source 1..17: mol_type = other DNA
gtctctactaaaaatac

SEQ ID NO: 15415 - DNA, 17 bp, synthetic construct
  misc_feature 1..17: note = Oligonucleotide
  source 1..17: mol_type = other DNA
cccgtctctactaaaaa

SEQ ID NO: 15416 - DNA, 17 bp, synthetic construct
  misc_feature 1..17: note = Oligonucleotide
  source 1..17: mol_type = other DNA
aaccccgtctctactaa

SEQ ID NO: 15417 - DNA, 17 bp, synthetic construct
  misc_feature 1..17: note = Oligonucleotide
  source 1..17: mol_type = other DNA
tgaaaccccgtctctac

SEQ ID NO: 15418 - DNA, 17 bp, synthetic construct
  misc_feature 1..17: note = Oligonucleotide
  source 1..17: mol_type = other DNA
cggtgaaaccccgtctc

SEQ ID NO: 15419 - DNA, 17 bp, synthetic construct
  misc_feature 1..17: note = Oligonucleotide
  source 1..17: mol_type = other DNA
acacggtgaaaccccgt

SEQ ID NO: 15420 - DNA, 17 bp, synthetic construct
  misc_feature 1..17: note = Oligonucleotide
  source 1..17: mol_type = other DNA
ctaacacggtgaaaccc

SEQ ID NO: 15421 - DNA, 17 bp, synthetic construct
  misc_feature 1..17: note = Oligonucleotide
  source 1..17: mol_type = other DNA
tggctaacacggtgaaa

SEQ ID NO: 15422 - DNA, 17 bp, synthetic construct
  misc_feature 1..17: note = Oligonucleotide
  source 1..17: mol_type = other DNA
tcctggctaacacggtg

SEQ ID NO: 15423 - DNA, 17 bp, synthetic construct
  misc_feature 1..17: note = Oligonucleotide
  source 1..17: mol_type = other DNA
ccatcctggctaacacg

SEQ ID NO: 15424 - DNA, 17 bp, synthetic construct
  misc_feature 1..17: note = Oligonucleotide
  source 1..17: mol_type = other DNA
agaccatcctggctaac

SEQ ID NO: 15425 - DNA, 17 bp, synthetic construct
  misc_feature 1..17: note = Oligonucleotide
  source 1..17: mol_type = other DNA
tcaagaccatcctggct

SEQ ID NO: 15426 - DNA, 17 bp, synthetic construct
  misc_feature 1..17: note = Oligonucleotide
  source 1..17: mol_type = other DNA
agatcaagaccatcctg

SEQ ID NO: 15427 - DNA, 17 bp, synthetic construct
  misc_feature 1..17: note = Oligonucleotide
  source 1..17: mol_type = other DNA
aggagatcaagaccatc

SEQ ID NO: 15428 - DNA, 17 bp, synthetic construct
  misc_feature 1..17: note = Oligonucleotide
  source 1..17: mol_type = other DNA
gtcaggagatcaagacc

SEQ ID NO: 15429 - DNA, 17 bp, synthetic construct
  misc_feature 1..17: note = Oligonucleotide
  source 1..17: mol_type = other DNA
gaggtcaggagatcaag

SEQ ID NO: 15430 - DNA, 17 bp, synthetic construct
  misc_feature 1..17: note = Oligonucleotide
  source 1..17: mol_type = other DNA
cacgaggtcaggagatc

SEQ ID NO: 15431 - DNA, 17 bp, synthetic construct
  misc_feature 1..17: note = Oligonucleotide
  source 1..17: mol_type = other DNA
gatcacgaggtcaggag

SEQ ID NO: 15432 - DNA, 17 bp, synthetic construct
  misc_feature 1..17: note = Oligonucleotide
  source 1..17: mol_type = other DNA
gtggatcacgaggtcag

SEQ ID NO: 15433 - DNA, 17 bp, synthetic construct
  misc_feature 1..17: note = Oligonucleotide
  source 1..17: mol_type = other DNA
cgggtggatcacgaggt

SEQ ID NO: 15434 - DNA, 17 bp, synthetic construct
  misc_feature 1..17: note = Oligonucleotide
  source 1..17: mol_type = other DNA
aggcgggtggatcacga

SEQ ID NO: 15435 - DNA, 17 bp, synthetic construct
  misc_feature 1..17: note = Oligonucleotide
  source 1..17: mol_type = other DNA
ccgaggcgggtggatca

SEQ ID NO: 15436 - DNA, 17 bp, synthetic construct
  misc_feature 1..17: note = Oligonucleotide
  source 1..17: mol_type = other DNA
aagccgaggcgggtgga

SEQ ID NO: 15437 - DNA, 17 bp, synthetic construct
  misc_feature 1..17: note = Oligonucleotide
  source 1..17: mol_type = other DNA
gggaagccgaggcgggt

SEQ ID NO: 15438 - DNA, 17 bp, synthetic construct
  misc_feature 1..17: note = Oligonucleotide
  source 1..17: mol_type = other DNA
tttgggaagccgaggcg

SEQ ID NO: 15439 - DNA, 17 bp, synthetic construct
  misc_feature 1..17: note = Oligonucleotide
  source 1..17: mol_type = other DNA
cactttgggaagccgag

SEQ ID NO: 15440 - DNA, 17 bp, synthetic construct
  misc_feature 1..17: note = Oligonucleotide
  source 1..17: mol_type = other DNA
cagcactttgggaagcc

SEQ ID NO: 15441 - DNA, 17 bp, synthetic construct
  misc_feature 1..17: note = Oligonucleotide
  source 1..17: mol_type = other DNA
tcccagcactttgggaa

SEQ ID NO: 15442 - DNA, 17 bp, synthetic construct
  misc_feature 1..17: note = Oligonucleotide
  source 1..17: mol_type = other DNA
taatcccagcactttgg

SEQ ID NO: 15443 - DNA, 17 bp, synthetic construct
  misc_feature 1..17: note = Oligonucleotide
  source 1..17: mol_type = other DNA
ctgtaatcccagcactt

SEQ ID NO: 15444 - DNA, 17 bp, synthetic construct
  misc_feature 1..17: note = Oligonucleotide
  source 1..17: mol_type = other DNA
tgcctgtaatcccagca

SEQ ID NO: 15445 - DNA, 17 bp, synthetic construct
  misc_feature 1..17: note = Oligonucleotide
  source 1..17: mol_type = other DNA
tcatgcctgtaatccca

SEQ ID NO: 15446 - DNA, 17 bp, synthetic construct
  misc_feature 1..17: note = Oligonucleotide
  source 1..17: mol_type = other DNA
ggctcatgcctgtaatc

SEQ ID NO: 15447 - DNA, 17 bp, synthetic construct
  misc_feature 1..17: note = Oligonucleotide
  source 1..17: mol_type = other DNA
agtggctcatgcctgta

SEQ ID NO: 15448 - DNA, 17 bp, synthetic construct
  misc_feature 1..17: note = Oligonucleotide
  source 1..17: mol_type = other DNA
cacagtggctcatgcct

SEQ ID NO: 15449 - DNA, 17 bp, synthetic construct
  misc_feature 1..17: note = Oligonucleotide
  source 1..17: mol_type = other DNA
gggcacagtggctcatg

SEQ ID NO: 15450 - DNA, 17 bp, synthetic construct
  misc_feature 1..17: note = Oligonucleotide
  source 1..17: mol_type = other DNA
gccgggcacagtggctc

SEQ ID NO: 15451 - DNA, 17 bp, synthetic construct
  misc_feature 1..17: note = Oligonucleotide
  source 1..17: mol_type = other DNA
ctggccgggcacagtgg

SEQ ID NO: 15452 - DNA, 17 bp, synthetic construct
  misc_feature 1..17: note = Oligonucleotide
  source 1..17: mol_type = other DNA
gccctggccgggcacag

SEQ ID NO: 15453 - DNA, 17 bp, synthetic construct
  misc_feature 1..17: note = Oligonucleotide
  source 1..17: mol_type = other DNA
gaggccctggccgggca

SEQ ID NO: 15454 - DNA, 17 bp, synthetic construct
  misc_feature 1..17: note = Oligonucleotide
  source 1..17: mol_type = other DNA
gaggaggccctggccgg

SEQ ID NO: 15455 - DNA, 17 bp, synthetic construct
  misc_feature 1..17: note = Oligonucleotide
  source 1..17: mol_type = other DNA
gaagaggaggccctggc

SEQ ID NO: 15456 - DNA, 17 bp, synthetic construct
  misc_feature 1..17: note = Oligonucleotide
  source 1..17: mol_type = other DNA
gcagaagaggaggccct

SEQ ID NO: 15457 - DNA, 17 bp, synthetic construct
  misc_feature 1..17: note = Oligonucleotide
  source 1..17: mol_type = other DNA
taggcagaagaggaggc

SEQ ID NO: 15458 - DNA, 17 bp, synthetic construct
  misc_feature 1..17: note = Oligonucleotide
  source 1..17: mol_type = other DNA
ttataggcagaagagga

SEQ ID NO: 15459 - DNA, 17 bp, synthetic construct
  misc_feature 1..17: note = Oligonucleotide
  source 1..17: mol_type = other DNA
caattataggcagaaga

SEQ ID NO: 15460 - DNA, 17 bp, synthetic construct
  misc_feature 1..17: note = Oligonucleotide
  source 1..17: mol_type = other DNA
agacaattataggcaga

SEQ ID NO: 15461 - DNA, 17 bp, synthetic construct
  misc_feature 1..17: note = Oligonucleotide
  source 1..17: mol_type = other DNA
gttagacaattataggc

SEQ ID NO: 15462 - DNA, 17 bp, synthetic construct
  misc_feature 1..17: note = Oligonucleotide
  source 1..17: mol_type = other DNA
acggttagacaattata

SEQ ID NO: 15463 - DNA, 17 bp, synthetic construct
  misc_feature 1..17: note = Oligonucleotide
  source 1..17: mol_type = other DNA
cccacggttagacaatt

SEQ ID NO: 15464 - DNA, 17 bp, synthetic construct
  misc_feature 1..17: note = Oligonucleotide
  source 1..17: mol_type = other DNA
tttcccacggttagaca

SEQ ID NO: 15465 - DNA, 17 bp, synthetic construct
  misc_feature 1..17: note = Oligonucleotide
  source 1..17: mol_type = other DNA
agctttcccacggttag

SEQ ID NO: 15466 - DNA, 17 bp, synthetic construct
  misc_feature 1..17: note = Oligonucleotide
  source 1..17: mol_type = other DNA
gacagctttcccacggt

SEQ ID NO: 15467 - DNA, 17 bp, synthetic construct
  misc_feature 1..17: note = Oligonucleotide
  source 1..17: mol_type = other DNA
ccagacagctttcccac

SEQ ID NO: 15468 - DNA, 17 bp, synthetic construct
  misc_feature 1..17: note = Oligonucleotide
  source 1..17: mol_type = other DNA
gtcccagacagctttcc

SEQ ID NO: 15469 - DNA, 17 bp, synthetic construct
  misc_feature 1..17: note = Oligonucleotide
  source 1..17: mol_type = other DNA
gaggtcccagacagctt

SEQ ID NO: 15470 - DNA, 17 bp, synthetic construct
  misc_feature 1..17: note = Oligonucleotide
  source 1..17: mol_type = other DNA
gcagaggtcccagacag

SEQ ID NO: 15471 - DNA, 17 bp, synthetic construct
  misc_feature 1..17: note = Oligonucleotide
  source 1..17: mol_type = other DNA
ggcgcagaggtcccaga

SEQ ID NO: 15472 - DNA, 17 bp, synthetic construct
  misc_feature 1..17: note = Oligonucleotide
  source 1..17: mol_type = other DNA
tgaggcgcagaggtccc

SEQ ID NO: 15473 - DNA, 17 bp, synthetic construct
  misc_feature 1..17: note = Oligonucleotide
  source 1..17: mol_type = other DNA
aactgaggcgcagaggt

SEQ ID NO: 15474 - DNA, 17 bp, synthetic construct
  misc_feature 1..17: note = Oligonucleotide
  source 1..17: mol_type = other DNA
agaaactgaggcgcaga

SEQ ID NO: 15475 - DNA, 17 bp, synthetic construct
  misc_feature 1..17: note = Oligonucleotide
  source 1..17: mol_type = other DNA
aagagaaactgaggcgc

SEQ ID NO: 15476 - DNA, 17 bp, synthetic construct
  misc_feature 1..17: note = Oligonucleotide
  source 1..17: mol_type = other DNA
cttaagagaaactgagg

SEQ ID NO: 15477 - DNA, 17 bp, synthetic construct
  misc_feature 1..17: note = Oligonucleotide
  source 1..17: mol_type = other DNA
tcacttaagagaaactg

SEQ ID NO: 15478 - DNA, 17 bp, synthetic construct
  misc_feature 1..17: note = Oligonucleotide
  source 1..17: mol_type = other DNA
gtttcacttaagagaaa

SEQ ID NO: 15479 - DNA, 17 bp, synthetic construct
  misc_feature 1..17: note = Oligonucleotide
  source 1..17: mol_type = other DNA
catgtttcacttaagag

SEQ ID NO: 15480 - DNA, 17 bp, synthetic construct
  misc_feature 1..17: note = Oligonucleotide
  source 1..17: mol_type = other DNA
gaccatgtttcacttaa

SEQ ID NO: 15481 - DNA, 17 bp, synthetic construct
  misc_feature 1..17: note = Oligonucleotide
  source 1..17: mol_type = other DNA
agagaccatgtttcact

SEQ ID NO: 15482 - DNA, 17 bp, synthetic construct
  misc_feature 1..17: note = Oligonucleotide
  source 1..17: mol_type = other DNA
ataagagaccatgtttc

SEQ ID NO: 15483 - DNA, 17 bp, synthetic construct
  misc_feature 1..17: note = Oligonucleotide
  source 1..17: mol_type = other DNA
accataagagaccatgt

SEQ ID NO: 15484 - DNA, 17 bp, synthetic construct
  misc_feature 1..17: note = Oligonucleotide
  source 1..17: mol_type = other DNA
atgaccataagagacca

SEQ ID NO: 15485 - DNA, 17 bp, synthetic construct
  misc_feature 1..17: note = Oligonucleotide
  source 1..17: mol_type = other DNA
caaatgaccataagaga

SEQ ID NO: 15486 - DNA, 17 bp, synthetic construct
  misc_feature 1..17: note = Oligonucleotide
  source 1..17: mol_type = other DNA
atgcaaatgaccataag

SEQ ID NO: 15487 - DNA, 17 bp, synthetic construct
  misc_feature 1..17: note = Oligonucleotide
  source 1..17: mol_type = other DNA
gggatgcaaatgaccat

SEQ ID NO: 15488 - DNA, 17 bp, synthetic construct
  misc_feature 1..17: note = Oligonucleotide
  source 1..17: mol_type = other DNA
aaggggatgcaaatgac

SEQ ID NO: 15489 - DNA, 17 bp, synthetic construct
  misc_feature 1..17: note = Oligonucleotide
  source 1..17: mol_type = other DNA
gggaaggggatgcaaat

SEQ ID NO: 15490 - DNA, 17 bp, synthetic construct
  misc_feature 1..17: note = Oligonucleotide
  source 1..17: mol_type = other DNA
agggggaaggggatgca

SEQ ID NO: 15491 - DNA, 17 bp, synthetic construct
  misc_feature 1..17: note = Oligonucleotide
  source 1..17: mol_type = other DNA
cacagggggaaggggat

SEQ ID NO: 15492 - DNA, 17 bp, synthetic construct
  misc_feature 1..17: note = Oligonucleotide
  source 1..17: mol_type = other DNA
caccacagggggaaggg

SEQ ID NO: 15493 - DNA, 17 bp, synthetic construct
  misc_feature 1..17: note = Oligonucleotide
  source 1..17: mol_type = other DNA
ggacaccacagggggaa

SEQ ID NO: 15494 - DNA, 17 bp, synthetic construct
  misc_feature 1..17: note = Oligonucleotide
  source 1..17: mol_type = other DNA
acaggacaccacagggg

SEQ ID NO: 15495 - DNA, 17 bp, synthetic construct
  misc_feature 1..17: note = Oligonucleotide
  source 1..17: mol_type = other DNA
gccacaggacaccacag

SEQ ID NO: 15496 - DNA, 17 bp, synthetic construct
  misc_feature 1..17: note = Oligonucleotide
  source 1..17: mol_type = other DNA
aacgccacaggacacca

SEQ ID NO: 15497 - DNA, 17 bp, synthetic construct
  misc_feature 1..17: note = Oligonucleotide
  source 1..17: mol_type = other DNA
tcaaacgccacaggaca

SEQ ID NO: 15498 - DNA, 17 bp, synthetic construct
  misc_feature 1..17: note = Oligonucleotide
  source 1..17: mol_type = other DNA
ggatcaaacgccacagg

SEQ ID NO: 15499 - DNA, 17 bp, synthetic construct
  misc_feature 1..17: note = Oligonucleotide
  source 1..17: mol_type = other DNA
ccaggatcaaacgccac

SEQ ID NO: 15500 - DNA, 17 bp, synthetic construct
  misc_feature 1..17: note = Oligonucleotide
  source 1..17: mol_type = other DNA
cacccaggatcaaacgc

SEQ ID NO: 15501 - DNA, 17 bp, synthetic construct
  misc_feature 1..17: note = Oligonucleotide
  source 1..17: mol_type = other DNA
ccccacccaggatcaaa

SEQ ID NO: 15502 - DNA, 17 bp, synthetic construct
  misc_feature 1..17: note = Oligonucleotide
  source 1..17: mol_type = other DNA
cagccccacccaggatc

SEQ ID NO: 15503 - DNA, 17 bp, synthetic construct
  misc_feature 1..17: note = Oligonucleotide
  source 1..17: mol_type = other DNA
gtccagccccacccagg

SEQ ID NO: 15504 - DNA, 17 bp, synthetic construct
  misc_feature 1..17: note = Oligonucleotide
  source 1..17: mol_type = other DNA
agagtccagccccaccc

SEQ ID NO: 15505 - DNA, 17 bp, synthetic construct
  misc_feature 1..17: note = Oligonucleotide
  source 1..17: mol_type = other DNA
gcaagagtccagcccca

SEQ ID NO: 15506 - DNA, 17 bp, synthetic construct
  misc_feature 1..17: note = Oligonucleotide
  source 1..17: mol_type = other DNA
ccggcaagagtccagcc

SEQ ID NO: 15507 - DNA, 17 bp, synthetic construct
  misc_feature 1..17: note = Oligonucleotide
  source 1..17: mol_type = other DNA
ccaccggcaagagtcca

SEQ ID NO: 15508 - DNA, 17 bp, synthetic construct
  misc_feature 1..17: note = Oligonucleotide
  source 1..17: mol_type = other DNA
aggccaccggcaagagt

SEQ ID NO: 15509 - DNA, 17 bp, synthetic construct
  misc_feature 1..17: note = Oligonucleotide
  source 1..17: mol_type = other DNA
ccaaggccaccggcaag

SEQ ID NO: 15510 - DNA, 17 bp, synthetic construct
  misc_feature 1..17: note = Oligonucleotide
  source 1..17: mol_type = other DNA
agaccaaggccaccggc

SEQ ID NO: 15511 - DNA, 17 bp, synthetic construct
  misc_feature 1..17: note = Oligonucleotide
  source 1..17: mol_type = other DNA
actagaccaaggccacc

SEQ ID NO: 15512 - DNA, 17 bp, synthetic construct
  misc_feature 1..17: note = Oligonucleotide
  source 1..17: mol_type = other DNA
gcaactagaccaaggcc

SEQ ID NO: 15513 - DNA, 17 bp, synthetic construct
  misc_feature 1..17: note = Oligonucleotide
  source 1..17: mol_type = other DNA
caagcaactagaccaag

SEQ ID NO: 15514 - DNA, 17 bp, synthetic construct
  misc_feature 1..17: note = Oligonucleotide
  source 1..17: mol_type = other DNA
ctccaagcaactagacc

SEQ ID NO: 15515 - DNA, 17 bp, synthetic construct
  misc_feature 1..17: note = Oligonucleotide
  source 1..17: mol_type = other DNA
tccctccaagcaactag

SEQ ID NO: 15516 - DNA, 17 bp, synthetic construct
  misc_feature 1..17: note = Oligonucleotide
  source 1..17: mol_type = other DNA
ccctccctccaagcaac

SEQ ID NO: 15517 - DNA, 17 bp, synthetic construct
  misc_feature 1..17: note = Oligonucleotide
  source 1..17: mol_type = other DNA
ccgccctccctccaagc

SEQ ID NO: 15518 - DNA, 17 bp, synthetic construct
  misc_feature 1..17: note = Oligonucleotide
  source 1..17: mol_type = other DNA
ttcccgccctccctcca

SEQ ID NO: 15519 - DNA, 17 bp, synthetic construct
  misc_feature 1..17: note = Oligonucleotide
  source 1..17: mol_type = other DNA
gccttcccgccctccct

SEQ ID NO: 15520 - DNA, 17 bp, synthetic construct
  misc_feature 1..17: note = Oligonucleotide
  source 1..17: mol_type = other DNA
ggggccttcccgccctc

SEQ ID NO: 15521 - DNA, 17 bp, synthetic construct
  misc_feature 1..17: note = Oligonucleotide
  source 1..17: mol_type = other DNA
gatggggccttcccgcc

SEQ ID NO: 15522 - DNA, 17 bp, synthetic construct
  misc_feature 1..17: note = Oligonucleotide
  source 1..17: mol_type = other DNA
gcagatggggccttccc

SEQ ID NO: 15523 - DNA, 17 bp, synthetic construct
  misc_feature 1..17: note = Oligonucleotide
  source 1..17: mol_type = other DNA
ggggcagatggggcctt

SEQ ID NO: 15524 - DNA, 17 bp, synthetic construct
  misc_feature 1..17: note = Oligonucleotide
  source 1..17: mol_type = other DNA
tgaggggcagatggggc

SEQ ID NO: 15525 - DNA, 17 bp, synthetic construct
  misc_feature 1..17: note = Oligonucleotide
  source 1..17: mol_type = other DNA
agatgaggggcagatgg

SEQ ID NO: 15526 - DNA, 17 bp, synthetic construct
  misc_feature 1..17: note = Oligonucleotide
  source 1..17: mol_type = other DNA
cacagatgaggggcaga

SEQ ID NO: 15527 - DNA, 17 bp, synthetic construct
  misc_feature 1..17: note = Oligonucleotide
  source 1..17: mol_type = other DNA
acgcacagatgaggggc

SEQ ID NO: 15528 - DNA, 17 bp, synthetic construct
  misc_feature 1..17: note = Oligonucleotide
  source 1..17: mol_type = other DNA
acaacgcacagatgagg

SEQ ID NO: 15529 - DNA, 17 bp, synthetic construct
  misc_feature 1..17: note = Oligonucleotide
  source 1..17: mol_type = other DNA
tccacaacgcacagatg

SEQ ID NO: 15530 - DNA, 17 bp, synthetic construct
  misc_feature 1..17: note = Oligonucleotide
  source 1..17: mol_type = other DNA
ctgtccacaacgcacag

SEQ ID NO: 15531 - DNA, 17 bp, synthetic construct
  misc_feature 1..17: note = Oligonucleotide
  source 1..17: mol_type = other DNA
tatctgtccacaacgca

SEQ ID NO: 15532 - DNA, 17 bp, synthetic construct
  misc_feature 1..17: note = Oligonucleotide
  source 1..17: mol_type = other DNA
gggtatctgtccacaac

SEQ ID NO: 15533 - DNA, 17 bp, synthetic construct
  misc_feature 1..17: note = Oligonucleotide
  source 1..17: mol_type = other DNA
ctggggtatctgtccac

SEQ ID NO: 15534 - DNA, 17 bp, synthetic construct
  misc_feature 1..17: note = Oligonucleotide
  source 1..17: mol_type = other DNA
gccctggggtatctgtc

SEQ ID NO: 15535 - DNA, 17 bp, synthetic construct
  misc_feature 1..17: note = Oligonucleotide
  source 1..17: mol_type = other DNA
agagccctggggtatct

SEQ ID NO: 15536 - DNA, 17 bp, synthetic construct
  misc_feature 1..17: note = Oligonucleotide
  source 1..17: mol_type = other DNA
ccaagagccctggggta

SEQ ID NO: 15537 - DNA, 17 bp, synthetic construct
  misc_feature 1..17: note = Oligonucleotide
  source 1..17: mol_type = other DNA
actccaagagccctggg

SEQ ID NO: 15538 - DNA, 17 bp, synthetic construct
  misc_feature 1..17: note = Oligonucleotide
  source 1..17: mol_type = other DNA
gtgactccaagagccct

SEQ ID NO: 15539 - DNA, 17 bp, synthetic construct
  misc_feature 1..17: note = Oligonucleotide
  source 1..17: mol_type = other DNA
atggtgactccaagagc

SEQ ID NO: 15540 - DNA, 17 bp, synthetic construct
  misc_feature 1..17: note = Oligonucleotide
  source 1..17: mol_type = other DNA
accatggtgactccaag

SEQ ID NO: 15541 - DNA, 17 bp, synthetic construct
  misc_feature 1..17: note = Oligonucleotide
  source 1..17: mol_type = other DNA
gcaaccatggtgactcc

SEQ ID NO: 15542 - DNA, 17 bp, synthetic construct
  misc_feature 1..17: note = Oligonucleotide
  source 1..17: mol_type = other DNA
gtcgcaaccatggtgac

SEQ ID NO: 15543 - DNA, 17 bp, synthetic construct
  misc_feature 1..17: note = Oligonucleotide
  source 1..17: mol_type = other DNA
taagtcgcaaccatggt

SEQ ID NO: 15544 - DNA, 17 bp, synthetic construct
  misc_feature 1..17: note = Oligonucleotide
  source 1..17: mol_type = other DNA
cagtaagtcgcaaccat

SEQ ID NO: 15545 - DNA, 17 bp, synthetic construct
  misc_feature 1..17: note = Oligonucleotide
  source 1..17: mol_type = other DNA
agccagtaagtcgcaac

SEQ ID NO: 15546 - DNA, 17 bp, synthetic construct
  misc_feature 1..17: note = Oligonucleotide
  source 1..17: mol_type = other DNA
gatagccagtaagtcgc

SEQ ID NO: 15547 - DNA, 17 bp, synthetic construct
  misc_feature 1..17: note = Oligonucleotide
  source 1..17: mol_type = other DNA
ttggatagccagtaagt

SEQ ID NO: 15548 - DNA, 17 bp, synthetic construct
  misc_feature 1..17: note = Oligonucleotide
  source 1..17: mol_type = other DNA
aggttggatagccagta

SEQ ID NO: 15549 - DNA, 17 bp, synthetic construct
  misc_feature 1..17: note = Oligonucleotide
  source 1..17: mol_type = other DNA
cctaggttggatagcca

SEQ ID NO: 15550 - DNA, 17 bp, synthetic construct
  misc_feature 1..17: note = Oligonucleotide
  source 1..17: mol_type = other DNA
acacctaggttggatag

SEQ ID NO: 15551 - DNA, 17 bp, synthetic construct
  misc_feature 1..17: note = Oligonucleotide
  source 1..17: mol_type = other DNA
agcacacctaggttgga

SEQ ID NO: 15552 - DNA, 17 bp, synthetic construct
  misc_feature 1..17: note = Oligonucleotide
  source 1..17: mol_type = other DNA
gcaagcacacctaggtt

SEQ ID NO: 15553 - DNA, 17 bp, synthetic construct
  misc_feature 1..17: note = Oligonucleotide
  source 1..17: mol_type = other DNA
caagcaagcacacctag

SEQ ID NO: 15554 - DNA, 17 bp, synthetic construct
  misc_feature 1..17: note = Oligonucleotide
  source 1..17: mol_type = other DNA
aaccaagcaagcacacc

SEQ ID NO: 15555 - DNA, 17 bp, synthetic construct
  misc_feature 1..17: note = Oligonucleotide
  source 1..17: mol_type = other DNA
tccaaccaagcaagcac

SEQ ID NO: 15556 - DNA, 17 bp, synthetic construct
  misc_feature 1..17: note = Oligonucleotide
  source 1..17: mol_type = other DNA
aactccaaccaagcaag

SEQ ID NO: 15557 - DNA, 17 bp, synthetic construct
  misc_feature 1..17: note = Oligonucleotide
  source 1..17: mol_type = other DNA
tctaactccaaccaagc

SEQ ID NO: 15558 - DNA, 17 bp, synthetic construct
  misc_feature 1..17: note = Oligonucleotide
  source 1..17: mol_type = other DNA
gtgtctaactccaacca

SEQ ID NO: 15559 - DNA, 17 bp, synthetic construct
  misc_feature 1..17: note = Oligonucleotide
  source 1..17: mol_type = other DNA
cgtgtgtctaactccaa

SEQ ID NO: 15560 - DNA, 17 bp, synthetic construct
  misc_feature 1..17: note = Oligonucleotide
  source 1..17: mol_type = other DNA
ggacgtgtgtctaactc

SEQ ID NO: 15561 - DNA, 17 bp, synthetic construct
  misc_feature 1..17: note = Oligonucleotide
  source 1..17: mol_type = other DNA
gagggacgtgtgtctaa

SEQ ID NO: 15562 - DNA, 17 bp, synthetic construct
  misc_feature 1..17: note = Oligonucleotide
  source 1..17: mol_type = other DNA
actgagggacgtgtgtc

SEQ ID NO: 15563 - DNA, 17 bp, synthetic construct
  misc_feature 1..17: note = Oligonucleotide
  source 1..17: mol_type = other DNA
accactgagggacgtgt

SEQ ID NO: 15564 - DNA, 17 bp, synthetic construct
  misc_feature 1..17: note = Oligonucleotide
  source 1..17: mol_type = other DNA
cttaccactgagggacg

SEQ ID NO: 15565 - DNA, 17 bp, synthetic construct
  misc_feature 1..17: note = Oligonucleotide
  source 1..17: mol_type = other DNA
ctccttaccactgaggg

SEQ ID NO: 15566 - DNA, 17 bp, synthetic construct
  misc_feature 1..17: note = Oligonucleotide
  source 1..17: mol_type = other DNA
ctgctccttaccactga

SEQ ID NO: 15567 - DNA, 17 bp, synthetic construct
  misc_feature 1..17: note = Oligonucleotide
  source 1..17: mol_type = other DNA
tgcctgctccttaccac

SEQ ID NO: 15568 - DNA, 17 bp, synthetic construct
  misc_feature 1..17: note = Oligonucleotide
  source 1..17: mol_type = other DNA
aggtgcctgctccttac

SEQ ID NO: 15569 - DNA, 17 bp, synthetic construct
  misc_feature 1..17: note = Oligonucleotide
  source 1..17: mol_type = other DNA
cacaggtgcctgctcct

SEQ ID NO: 15570 - DNA, 17 bp, synthetic construct
  misc_feature 1..17: note = Oligonucleotide
  source 1..17: mol_type = other DNA
tgacacaggtgcctgct

SEQ ID NO: 15571 - DNA, 17 bp, synthetic construct
  misc_feature 1..17: note = Oligonucleotide
  source 1..17: mol_type = other DNA
aactgacacaggtgcct

SEQ ID NO: 15572 - DNA, 17 bp, synthetic construct
  misc_feature 1..17: note = Oligonucleotide
  source 1..17: mol_type = other DNA
atgaactgacacaggtg

SEQ ID NO: 15573 - DNA, 17 bp, synthetic construct
  misc_feature 1..17: note = Oligonucleotide
  source 1..17: mol_type = other DNA
aggatgaactgacacag

SEQ ID NO: 15574 - DNA, 17 bp, synthetic construct
  misc_feature 1..17: note = Oligonucleotide
  source 1..17: mol_type = other DNA
atcaggatgaactgaca

SEQ ID NO: 15575 - DNA, 17 bp, synthetic construct
  misc_feature 1..17: note = Oligonucleotide
  source 1..17: mol_type = other DNA
cacatcaggatgaactg

SEQ ID NO: 15576 - DNA, 17 bp, synthetic construct
  misc_feature 1..17: note = Oligonucleotide
  source 1..17: mol_type = other DNA
gaccacatcaggatgaa

SEQ ID NO: 15577 - DNA, 17 bp, synthetic construct
  misc_feature 1..17: note = Oligonucleotide
  source 1..17: mol_type = other DNA
gacgaccacatcaggat

SEQ ID NO: 15578 - DNA, 17 bp, synthetic construct
  misc_feature 1..17: note = Oligonucleotide
  source 1..17: mol_type = other DNA
gccgacgaccacatcag

SEQ ID NO: 15579 - DNA, 17 bp, synthetic construct
  misc_feature 1..17: note = Oligonucleotide
  source 1..17: mol_type = other DNA
ggagccgacgaccacat

SEQ ID NO: 15580 - DNA, 17 bp, synthetic construct
  misc_feature 1..17: note = Oligonucleotide
  source 1..17: mol_type = other DNA
catggagccgacgacca

SEQ ID NO: 15581 - DNA, 17 bp, synthetic construct
  misc_feature 1..17: note = Oligonucleotide
  source 1..17: mol_type = other DNA
gcccatggagccgacga

SEQ ID NO: 15582 - DNA, 17 bp, synthetic construct
  misc_feature 1..17: note = Oligonucleotide
  source 1..17: mol_type = other DNA
ttggcccatggagccga

SEQ ID NO: 15583 - DNA, 17 bp, synthetic construct
  misc_feature 1..17: note = Oligonucleotide
  source 1..17: mol_type = other DNA
ttgttggcccatggagc

SEQ ID NO: 15584 - DNA, 17 bp, synthetic construct
  misc_feature 1..17: note = Oligonucleotide
  source 1..17: mol_type = other DNA
gtgttgttggcccatgg

SEQ ID NO: 15585 - DNA, 17 bp, synthetic construct
  misc_feature 1..17: note = Oligonucleotide
  source 1..17: mol_type = other DNA
agggtgttgttggccca

SEQ ID NO: 15586 - DNA, 17 bp, synthetic construct
  misc_feature 1..17: note = Oligonucleotide
  source 1..17: mol_type = other DNA
gtaagggtgttgttggc

SEQ ID NO: 15587 - DNA, 17 bp, synthetic construct
  misc_feature 1..17: note = Oligonucleotide
  source 1..17: mol_type = other DNA
caggtaagggtgttgtt

SEQ ID NO: 15588 - DNA, 17 bp, synthetic construct
  misc_feature 1..17: note = Oligonucleotide
  source 1..17: mol_type = other DNA
gatcaggtaagggtgtt

SEQ ID NO: 15589 - DNA, 17 bp, synthetic construct
  misc_feature 1..17: note = Oligonucleotide
  source 1..17: mol_type = other DNA
cctgatcaggtaagggt

SEQ ID NO: 15590 - DNA, 17 bp, synthetic construct
  misc_feature 1..17: note = Oligonucleotide
  source 1..17: mol_type = other DNA
gcacctgatcaggtaag

SEQ ID NO: 15591 - DNA, 17 bp, synthetic construct
  misc_feature 1..17: note = Oligonucleotide
  source 1..17: mol_type = other DNA
gtggcacctgatcaggt

SEQ ID NO: 15592 - DNA, 17 bp, synthetic construct
  misc_feature 1..17: note = Oligonucleotide
  source 1..17: mol_type = other DNA
tgtgtggcacctgatca

SEQ ID NO: 15593 - DNA, 17 bp, synthetic construct
  misc_feature 1..17: note = Oligonucleotide
  source 1..17: mol_type = other DNA
ctgtgtgtggcacctga

SEQ ID NO: 15594 - DNA, 17 bp, synthetic construct
  misc_feature 1..17: note = Oligonucleotide
  source 1..17: mol_type = other DNA
tgtctgtgtgtggcacc

SEQ ID NO: 15595 - DNA, 17 bp, synthetic construct
  misc_feature 1..17: note = Oligonucleotide
  source 1..17: mol_type = other DNA
tagtgtctgtgtgtggc

SEQ ID NO: 15596 - DNA, 17 bp, synthetic construct
  misc_feature 1..17: note = Oligonucleotide
  source 1..17: mol_type = other DNA
ccctagtgtctgtgtgt

SEQ ID NO: 15597 - DNA, 17 bp, synthetic construct
  misc_feature 1..17: note = Oligonucleotide
  source 1..17: mol_type = other DNA
tcaccctagtgtctgtg

SEQ ID NO: 15598 - DNA, 17 bp, synthetic construct
  misc_feature 1..17: note = Oligonucleotide
  source 1..17: mol_type = other DNA
gtgtcaccctagtgtct

SEQ ID NO: 15599 - DNA, 17 bp, synthetic construct
  misc_feature 1..17: note = Oligonucleotide
  source 1..17: mol_type = other DNA
gcggtgtcaccctagtg

SEQ ID NO: 15600 - DNA, 17 bp, synthetic construct
  misc_feature 1..17: note = Oligonucleotide
  source 1..17: mol_type = other DNA
ctggcggtgtcacccta

SEQ ID NO: 15601 - DNA, 17 bp, synthetic construct
  misc_feature 1..17: note = Oligonucleotide
  source 1..17: mol_type = other DNA
aatctggcggtgtcacc

SEQ ID NO: 15602 - DNA, 17 bp, synthetic construct
  misc_feature 1..17: note = Oligonucleotide
  source 1..17: mol_type = other DNA
ggaaatctggcggtgtc

SEQ ID NO: 15603 - DNA, 17 bp, synthetic construct
  misc_feature 1..17: note = Oligonucleotide
  source 1..17: mol_type = other DNA
cagggaaatctggcggt

SEQ ID NO: 15604 - DNA, 17 bp, synthetic construct
  misc_feature 1..17: note = Oligonucleotide
  source 1..17: mol_type = other DNA
actcagggaaatctggc

SEQ ID NO: 15605 - DNA, 17 bp, synthetic construct
  misc_feature 1..17: note = Oligonucleotide
  source 1..17: mol_type = other DNA
tgtactcagggaaatct

SEQ ID NO: 15606 - DNA, 17 bp, synthetic construct
  misc_feature 1..17: note = Oligonucleotide
  source 1..17: mol_type = other DNA
gcctgtactcagggaaa

SEQ ID NO: 15607 - DNA, 17 bp, synthetic construct
  misc_feature 1..17: note = Oligonucleotide
  source 1..17: mol_type = other DNA
gctgcctgtactcaggg

SEQ ID NO: 15608 - DNA, 17 bp, synthetic construct
  misc_feature 1..17: note = Oligonucleotide
  source 1..17: mol_type = other DNA
tatgctgcctgtactca

SEQ ID NO: 15609 - DNA, 17 bp, synthetic construct
  misc_feature 1..17: note = Oligonucleotide
  source 1..17: mol_type = other DNA
aaatatgctgcctgtac

SEQ ID NO: 15610 - DNA, 17 bp, synthetic construct
  misc_feature 1..17: note = Oligonucleotide
  source 1..17: mol_type = other DNA
gacaaatatgctgcctg

SEQ ID NO: 15611 - DNA, 17 bp, synthetic construct
  misc_feature 1..17: note = Oligonucleotide
  source 1..17: mol_type = other DNA
cctgacaaatatgctgc

SEQ ID NO: 15612 - DNA, 17 bp, synthetic construct
  misc_feature 1..17: note = Oligonucleotide
  source 1..17: mol_type = other DNA
aatcctgacaaatatgc

SEQ ID NO: 15613 - DNA, 17 bp, synthetic construct
  misc_feature 1..17: note = Oligonucleotide
  source 1..17: mol_type = other DNA
ttaaatcctgacaaata

SEQ ID NO: 15614 - DNA, 17 bp, synthetic construct
  misc_feature 1..17: note = Oligonucleotide
  source 1..17: mol_type = other DNA
gtattaaatcctgacaa

SEQ ID NO: 15615 - DNA, 17 bp, synthetic construct
  misc_feature 1..17: note = Oligonucleotide
  source 1..17: mol_type = other DNA
cttgtattaaatcctga

SEQ ID NO: 15616 - DNA, 17 bp, synthetic construct
  misc_feature 1..17: note = Oligonucleotide
  source 1..17: mol_type = other DNA
gggcttgtattaaatcc

SEQ ID NO: 15617 - DNA, 17 bp, synthetic construct
  misc_feature 1..17: note = Oligonucleotide
  source 1..17: mol_type = other DNA
aaggggcttgtattaaa

SEQ ID NO: 15618 - DNA, 17 bp, synthetic construct
  misc_feature 1..17: note = Oligonucleotide
  source 1..17: mol_type = other DNA
gataaggggcttgtatt

SEQ ID NO: 15619 - DNA, 17 bp, synthetic construct
  misc_feature 1..17: note = Oligonucleotide
  source 1..17: mol_type = other DNA
tgagataaggggcttgt

SEQ ID NO: 15620 - DNA, 17 bp, synthetic construct
  misc_feature 1..17: note = Oligonucleotide
  source 1..17: mol_type = other DNA
aattgagataaggggct

SEQ ID NO: 15621 - DNA, 17 bp, synthetic construct
  misc_feature 1..17: note = Oligonucleotide
  source 1..17: mol_type = other DNA
gcaaattgagataaggg

SEQ ID NO: 15622 - DNA, 17 bp, synthetic construct
  misc_feature 1..17: note = Oligonucleotide
  source 1..17: mol_type = other DNA
agggcaaattgagataa

SEQ ID NO: 15623 - DNA, 17 bp, synthetic construct
  misc_feature 1..17: note = Oligonucleotide
  source 1..17: mol_type = other DNA
gagagggcaaattgaga

SEQ ID NO: 15624 - DNA, 17 bp, synthetic construct
  misc_feature 1..17: note = Oligonucleotide
  source 1..17: mol_type = other DNA
gttgagagggcaaattg

SEQ ID NO: 15625 - DNA, 17 bp, synthetic construct
  misc_feature 1..17: note = Oligonucleotide
  source 1..17: mol_type = other DNA
gttgttgagagggcaaa

SEQ ID NO: 15626 - DNA, 17 bp, synthetic construct
  misc_feature 1..17: note = Oligonucleotide
  source 1..17: mol_type = other DNA
ggggttgttgagagggc

SEQ ID NO: 15627 - DNA, 17 bp, synthetic construct
  misc_feature 1..17: note = Oligonucleotide
  source 1..17: mol_type = other DNA
tggggggttgttgagag

SEQ ID NO: 15628 - DNA, 17 bp, synthetic construct
  misc_feature 1..17: note = Oligonucleotide
  source 1..17: mol_type = other DNA
ccttggggggttgttga

SEQ ID NO: 15629 - DNA, 17 bp, synthetic construct
  misc_feature 1..17: note = Oligonucleotide
  source 1..17: mol_type = other DNA
actccttggggggttgt

SEQ ID NO: 15630 - DNA, 17 bp, synthetic construct
  misc_feature 1..17: note = Oligonucleotide
  source 1..17: mol_type = other DNA
atcactccttggggggt

SEQ ID NO: 15631 - DNA, 17 bp, synthetic construct
  misc_feature 1..17: note = Oligonucleotide
  source 1..17: mol_type = other DNA
ctaatcactccttgggg

SEQ ID NO: 15632 - DNA, 17 bp, synthetic construct
  misc_feature 1..17: note = Oligonucleotide
  source 1..17: mol_type = other DNA
agtctaatcactccttg

SEQ ID NO: 15633 - DNA, 17 bp, synthetic construct
  misc_feature 1..17: note = Oligonucleotide
  source 1..17: mol_type = other DNA
aacagtctaatcactcc

SEQ ID NO: 15634 - DNA, 17 bp, synthetic construct
  misc_feature 1..17: note = Oligonucleotide
  source 1..17: mol_type = other DNA
taaaacagtctaatcac

SEQ ID NO: 15635 - DNA, 17 bp, synthetic construct
  misc_feature 1..17: note = Oligonucleotide
  source 1..17: mol_type = other DNA
ccgtaaaacagtctaat

SEQ ID NO: 15636 - DNA, 17 bp, synthetic construct
  misc_feature 1..17: note = Oligonucleotide
  source 1..17: mol_type = other DNA
tctccgtaaaacagtct

SEQ ID NO: 15637 - DNA, 17 bp, synthetic construct
  misc_feature 1..17: note = Oligonucleotide
  source 1..17: mol_type = other DNA
ccttctccgtaaaacag

SEQ ID NO: 15638 - DNA, 17 bp, synthetic construct
  misc_feature 1..17: note = Oligonucleotide
  source 1..17: mol_type = other DNA
tttccttctccgtaaaa

SEQ ID NO: 15639 - DNA, 17 bp, synthetic construct
  misc_feature 1..17: note = Oligonucleotide
  source 1..17: mol_type = other DNA
cagtttccttctccgta

SEQ ID NO: 15640 - DNA, 17 bp, synthetic construct
  misc_feature 1..17: note = Oligonucleotide
  source 1..17: mol_type = other DNA
cctcagtttccttctcc

SEQ ID NO: 15641 - DNA, 17 bp, synthetic construct
  misc_feature 1..17: note = Oligonucleotide
  source 1..17: mol_type = other DNA
gtgcctcagtttccttc

SEQ ID NO: 15642 - DNA, 17 bp, synthetic construct
  misc_feature 1..17: note = Oligonucleotide
  source 1..17: mol_type = other DNA
tctgtgcctcagtttcc

SEQ ID NO: 15643 - DNA, 17 bp, synthetic construct
  misc_feature 1..17: note = Oligonucleotide
  source 1..17: mol_type = other DNA
ccctctgtgcctcagtt

SEQ ID NO: 15644 - DNA, 17 bp, synthetic construct
  misc_feature 1..17: note = Oligonucleotide
  source 1..17: mol_type = other DNA
accccctctgtgcctca

SEQ ID NO: 15645 - DNA, 17 bp, synthetic construct
  misc_feature 1..17: note = Oligonucleotide
  source 1..17: mol_type = other DNA
ttaaccccctctgtgcc

SEQ ID NO: 15646 - DNA, 17 bp, synthetic construct
  misc_feature 1..17: note = Oligonucleotide
  source 1..17: mol_type = other DNA
gaattaaccccctctgt

SEQ ID NO: 15647 - DNA, 17 bp, synthetic construct
  misc_feature 1..17: note = Oligonucleotide
  source 1..17: mol_type = other DNA
tctgaattaaccccctc

SEQ ID NO: 15648 - DNA, 17 bp, synthetic construct
  misc_feature 1..17: note = Oligonucleotide
  source 1..17: mol_type = other DNA
aggtctgaattaacccc

SEQ ID NO: 15649 - DNA, 17 bp, synthetic construct
  misc_feature 1..17: note = Oligonucleotide
  source 1..17: mol_type = other DNA
atcaggtctgaattaac

SEQ ID NO: 15650 - DNA, 17 bp, synthetic construct
  misc_feature 1..17: note = Oligonucleotide
  source 1..17: mol_type = other DNA
tcaatcaggtctgaatt

SEQ ID NO: 15651 - DNA, 17 bp, synthetic construct
  misc_feature 1..17: note = Oligonucleotide
  source 1..17: mol_type = other DNA
gaatcaatcaggtctga

SEQ ID NO: 15652 - DNA, 17 bp, synthetic construct
  misc_feature 1..17: note = Oligonucleotide
  source 1..17: mol_type = other DNA
cctgaatcaatcaggtc

SEQ ID NO: 15653 - DNA, 17 bp, synthetic construct
  misc_feature 1..17: note = Oligonucleotide
  source 1..17: mol_type = other DNA
gaccctgaatcaatcag

SEQ ID NO: 15654 - DNA, 17 bp, synthetic construct
  misc_feature 1..17: note = Oligonucleotide
  source 1..17: mol_type = other DNA
gcagaccctgaatcaat

SEQ ID NO: 15655 - DNA, 17 bp, synthetic construct
  misc_feature 1..17: note = Oligonucleotide
  source 1..17: mol_type = other DNA
aaggcagaccctgaatc

SEQ ID NO: 15656 - DNA, 17 bp, synthetic construct
  misc_feature 1..17: note = Oligonucleotide
  source 1..17: mol_type = other DNA
acaaaggcagaccctga

SEQ ID NO: 15657 - DNA, 17 bp, synthetic construct
  misc_feature 1..17: note = Oligonucleotide
  source 1..17: mol_type = other DNA
gtgacaaaggcagaccc

SEQ ID NO: 15658 - DNA, 17 bp, synthetic construct
  misc_feature 1..17: note = Oligonucleotide
  source 1..17: mol_type = other DNA
ggagtgacaaaggcaga

SEQ ID NO: 15659 - DNA, 17 bp, synthetic construct
  misc_feature 1..17: note = Oligonucleotide
  source 1..17: mol_type = other DNA
atgggagtgacaaaggc

SEQ ID NO: 15660 - DNA, 17 bp, synthetic construct
  misc_feature 1..17: note = Oligonucleotide
  source 1..17: mol_type = other DNA
ggcatgggagtgacaaa

SEQ ID NO: 15661 - DNA, 17 bp, synthetic construct
  misc_feature 1..17: note = Oligonucleotide
  source 1..17: mol_type = other DNA
gagggcatgggagtgac

SEQ ID NO: 15662 - DNA, 17 bp, synthetic construct
  misc_feature 1..17: note = Oligonucleotide
  source 1..17: mol_type = other DNA
acggagggcatgggagt

SEQ ID NO: 15663 - DNA, 17 bp, synthetic construct
  misc_feature 1..17: note = Oligonucleotide
  source 1..17: mol_type = other DNA
tgtacggagggcatggg

SEQ ID NO: 15664 - DNA, 17 bp, synthetic construct
  misc_feature 1..17: note = Oligonucleotide
  source 1..17: mol_type = other DNA
atgtgtacggagggcat

SEQ ID NO: 15665 - DNA, 17 bp, synthetic construct
  misc_feature 1..17: note = Oligonucleotide
  source 1..17: mol_type = other DNA
caaatgtgtacggaggg

SEQ ID NO: 15666 - DNA, 17 bp, synthetic construct
  misc_feature 1..17: note = Oligonucleotide
  source 1..17: mol_type = other DNA
gagcaaatgtgtacgga

SEQ ID NO: 15667 - DNA, 17 bp, synthetic construct
  misc_feature 1..17: note = Oligonucleotide
  source 1..17: mol_type = other DNA
ttggagcaaatgtgtac

SEQ ID NO: 15668 - DNA, 17 bp, synthetic construct
  misc_feature 1..17: note = Oligonucleotide
  source 1..17: mol_type = other DNA
tccttggagcaaatgtg

SEQ ID NO: 15669 - DNA, 17 bp, synthetic construct
  misc_feature 1..17: note = Oligonucleotide
  source 1..17: mol_type = other DNA
ctgtccttggagcaaat

SEQ ID NO: 15670 - DNA, 17 bp, synthetic construct
  misc_feature 1..17: note = Oligonucleotide
  source 1..17: mol_type = other DNA
gtcctgtccttggagca

SEQ ID NO: 15671 - DNA, 17 bp, synthetic construct
  misc_feature 1..17: note = Oligonucleotide
  source 1..17: mol_type = other DNA
actgtcctgtccttgga

SEQ ID NO: 15672 - DNA, 17 bp, synthetic construct
  misc_feature 1..17: note = Oligonucleotide
  source 1..17: mol_type = other DNA
atgactgtcctgtcctt

SEQ ID NO: 15673 - DNA, 17 bp, synthetic construct
  misc_feature 1..17: note = Oligonucleotide
  source 1..17: mol_type = other DNA
gtcatgactgtcctgtc

SEQ ID NO: 15674 - DNA, 17 bp, synthetic construct
  misc_feature 1..17: note = Oligonucleotide
  source 1..17: mol_type = other DNA
caagtcatgactgtcct

SEQ ID NO: 15675 - DNA, 17 bp, synthetic construct
  misc_feature 1..17: note = Oligonucleotide
  source 1..17: mol_type = other DNA
tagcaagtcatgactgt

SEQ ID NO: 15676 - DNA, 17 bp, synthetic construct
  misc_feature 1..17: note = Oligonucleotide
  source 1..17: mol_type = other DNA
atgtagcaagtcatgac

SEQ ID NO: 15677 - DNA, 17 bp, synthetic construct
  misc_feature 1..17: note = Oligonucleotide
  source 1..17: mol_type = other DNA
aggatgtagcaagtcat

SEQ ID NO: 15678 - DNA, 17 bp, synthetic construct
  misc_feature 1..17: note = Oligonucleotide
  source 1..17: mol_type = other DNA
cataggatgtagcaagt

SEQ ID NO: 15679 - DNA, 17 bp, synthetic construct
  misc_feature 1..17: note = Oligonucleotide
  source 1..17: mol_type = other DNA
gggcataggatgtagca

SEQ ID NO: 15680 - DNA, 17 bp, synthetic construct
  misc_feature 1..17: note = Oligonucleotide
  source 1..17: mol_type = other DNA
agtgggcataggatgta

SEQ ID NO: 15681 - DNA, 17 bp, synthetic construct
  misc_feature 1..17: note = Oligonucleotide
  source 1..17: mol_type = other DNA
cccagtgggcataggat

SEQ ID NO: 15682 - DNA, 17 bp, synthetic construct
  misc_feature 1..17: note = Oligonucleotide
  source 1..17: mol_type = other DNA
gaccccagtgggcatag

SEQ ID NO: 15683 - DNA, 17 bp, synthetic construct
  misc_feature 1..17: note = Oligonucleotide
  source 1..17: mol_type = other DNA
tgggaccccagtgggca

SEQ ID NO: 15684 - DNA, 17 bp, synthetic construct
  misc_feature 1..17: note = Oligonucleotide
  source 1..17: mol_type = other DNA
ctctgggaccccagtgg

SEQ ID NO: 15685 - DNA, 17 bp, synthetic construct
  misc_feature 1..17: note = Oligonucleotide
  source 1..17: mol_type = other DNA
ccactctgggaccccag

SEQ ID NO: 15686 - DNA, 17 bp, synthetic construct
  misc_feature 1..17: note = Oligonucleotide
  source 1..17: mol_type = other DNA
gccccactctgggaccc

SEQ ID NO: 15687 - DNA, 17 bp, synthetic construct
  misc_feature 1..17: note = Oligonucleotide
  source 1..17: mol_type = other DNA
caggccccactctggga

SEQ ID NO: 15688 - DNA, 17 bp, synthetic construct
  misc_feature 1..17: note = Oligonucleotide
  source 1..17: mol_type = other DNA
gtacaggccccactctg

SEQ ID NO: 15689 - DNA, 17 bp, synthetic construct
  misc_feature 1..17: note = Oligonucleotide
  source 1..17: mol_type = other DNA
tgtgtacaggccccact

SEQ ID NO: 15690 - DNA, 17 bp, synthetic construct
  misc_feature 1..17: note = Oligonucleotide
  source 1..17: mol_type = other DNA
ttctgtgtacaggcccc

SEQ ID NO: 15691 - DNA, 17 bp, synthetic construct
  misc_feature 1..17: note = Oligonucleotide
  source 1..17: mol_type = other DNA
ctcttctgtgtacaggc

SEQ ID NO: 15692 - DNA, 17 bp, synthetic construct
  misc_feature 1..17: note = Oligonucleotide
  source 1..17: mol_type = other DNA
ttcctcttctgtgtaca

SEQ ID NO: 15693 - DNA, 17 bp, synthetic construct
  misc_feature 1..17: note = Oligonucleotide
  source 1..17: mol_type = other DNA
cagttcctcttctgtgt

SEQ ID NO: 15694 - DNA, 17 bp, synthetic construct
  misc_feature 1..17: note = Oligonucleotide
  source 1..17: mol_type = other DNA
ttccagttcctcttctg

SEQ ID NO: 15695 - DNA, 17 bp, synthetic construct
  misc_feature 1..17: note = Oligonucleotide
  source 1..17: mol_type = other DNA
tccttccagttcctctt

SEQ ID NO: 15696 - DNA, 17 bp, synthetic construct
  misc_feature 1..17: note = Oligonucleotide
  source 1..17: mol_type = other DNA
acctccttccagttcct

SEQ ID NO: 15697 - DNA, 17 bp, synthetic construct
  misc_feature 1..17: note = Oligonucleotide
  source 1..17: mol_type = other DNA
ggcacctccttccagtt

SEQ ID NO: 15698 - DNA, 17 bp, synthetic construct
  misc_feature 1..17: note = Oligonucleotide
  source 1..17: mol_type = other DNA
ggcggcacctccttcca

SEQ ID NO: 15699 - DNA, 17 bp, synthetic construct
  misc_feature 1..17: note = Oligonucleotide
  source 1..17: mol_type = other DNA
gaaggcggcacctcctt

SEQ ID NO: 15700 - DNA, 17 bp, synthetic construct
  misc_feature 1..17: note = Oligonucleotide
  source 1..17: mol_type = other DNA
agagaaggcggcacctc

SEQ ID NO: 15701 - DNA, 17 bp, synthetic construct
  misc_feature 1..17: note = Oligonucleotide
  source 1..17: mol_type = other DNA
accagagaaggcggcac

SEQ ID NO: 15702 - DNA, 17 bp, synthetic construct
  misc_feature 1..17: note = Oligonucleotide
  source 1..17: mol_type = other DNA
cccaccagagaaggcgg

SEQ ID NO: 15703 - DNA, 17 bp, synthetic construct
  misc_feature 1..17: note = Oligonucleotide
  source 1..17: mol_type = other DNA
ctgcccaccagagaagg

SEQ ID NO: 15704 - DNA, 17 bp, synthetic construct
  misc_feature 1..17: note = Oligonucleotide
  source 1..17: mol_type = other DNA
cacctgcccaccagaga

SEQ ID NO: 15705 - DNA, 17 bp, synthetic construct
  misc_feature 1..17: note = Oligonucleotide
  source 1..17: mol_type = other DNA
tggcacctgcccaccag

SEQ ID NO: 15706 - DNA, 17 bp, synthetic construct
  misc_feature 1..17: note = Oligonucleotide
  source 1..17: mol_type = other DNA
gggtggcacctgcccac

SEQ ID NO: 15707 - DNA, 17 bp, synthetic construct
  misc_feature 1..17: note = Oligonucleotide
  source 1..17: mol_type = other DNA
accgggtggcacctgcc

SEQ ID NO: 15708 - DNA, 17 bp, synthetic construct
  misc_feature 1..17: note = Oligonucleotide
  source 1..17: mol_type = other DNA
cccaccgggtggcacct

SEQ ID NO: 15709 - DNA, 17 bp, synthetic construct
  misc_feature 1..17: note = Oligonucleotide
  source 1..17: mol_type = other DNA
gatcccaccgggtggca

SEQ ID NO: 15710 - DNA, 17 bp, synthetic construct
  misc_feature 1..17: note = Oligonucleotide
  source 1..17: mol_type = other DNA
ccagatcccaccgggtg

SEQ ID NO: 15711 - DNA, 17 bp, synthetic construct
  misc_feature 1..17: note = Oligonucleotide
  source 1..17: mol_type = other DNA
ctaccagatcccaccgg

SEQ ID NO: 15712 - DNA, 17 bp, synthetic construct
  misc_feature 1..17: note = Oligonucleotide
  source 1..17: mol_type = other DNA
agtctaccagatcccac

SEQ ID NO: 15713 - DNA, 17 bp, synthetic construct
  misc_feature 1..17: note = Oligonucleotide
  source 1..17: mol_type = other DNA
cccagtctaccagatcc

SEQ ID NO: 15714 - DNA, 17 bp, synthetic construct
  misc_feature 1..17: note = Oligonucleotide
  source 1..17: mol_type = other DNA
ggtcccagtctaccaga

SEQ ID NO: 15715 - DNA, 17 bp, synthetic construct
  misc_feature 1..17: note = Oligonucleotide
  source 1..17: mol_type = other DNA
acaggtcccagtctacc

SEQ ID NO: 15716 - DNA, 17 bp, synthetic construct
  misc_feature 1..17: note = Oligonucleotide
  source 1..17: mol_type = other DNA
tacacaggtcccagtct

SEQ ID NO: 15717 - DNA, 17 bp, synthetic construct
  misc_feature 1..17: note = Oligonucleotide
  source 1..17: mol_type = other DNA
ggttacacaggtcccag

SEQ ID NO: 15718 - DNA, 17 bp, synthetic construct
  misc_feature 1..17: note = Oligonucleotide
  source 1..17: mol_type = other DNA
aagggttacacaggtcc

SEQ ID NO: 15719 - DNA, 17 bp, synthetic construct
  misc_feature 1..17: note = Oligonucleotide
  source 1..17: mol_type = other DNA
ctgaagggttacacagg

SEQ ID NO: 15720 - DNA, 17 bp, synthetic construct
  misc_feature 1..17: note = Oligonucleotide
  source 1..17: mol_type = other DNA
tgcctgaagggttacac

SEQ ID NO: 15721 - DNA, 17 bp, synthetic construct
  misc_feature 1..17: note = Oligonucleotide
  source 1..17: mol_type = other DNA
tgttgcctgaagggtta

SEQ ID NO: 15722 - DNA, 17 bp, synthetic construct
  misc_feature 1..17: note = Oligonucleotide
  source 1..17: mol_type = other DNA
tcctgttgcctgaaggg

SEQ ID NO: 15723 - DNA, 17 bp, synthetic construct
  misc_feature 1..17: note = Oligonucleotide
  source 1..17: mol_type = other DNA
ctatcctgttgcctgaa

SEQ ID NO: 15724 - DNA, 17 bp, synthetic construct
  misc_feature 1..17: note = Oligonucleotide
  source 1..17: mol_type = other DNA
aagctatcctgttgcct

SEQ ID NO: 15725 - DNA, 17 bp, synthetic construct
  misc_feature 1..17: note = Oligonucleotide
  source 1..17: mol_type = other DNA
agcaagctatcctgttg

SEQ ID NO: 15726 - DNA, 17 bp, synthetic construct
  misc_feature 1..17: note = Oligonucleotide
  source 1..17: mol_type = other DNA
ggcagcaagctatcctg

SEQ ID NO: 15727 - DNA, 17 bp, synthetic construct
  misc_feature 1..17: note = Oligonucleotide
  source 1..17: mol_type = other DNA
agaggcagcaagctatc

SEQ ID NO: 15728 - DNA, 17 bp, synthetic construct
  misc_feature 1..17: note = Oligonucleotide
  source 1..17: mol_type = other DNA
tcgagaggcagcaagct

SEQ ID NO: 15729 - DNA, 17 bp, synthetic construct
  misc_feature 1..17: note = Oligonucleotide
  source 1..17: mol_type = other DNA
ctgtcgagaggcagcaa

SEQ ID NO: 15730 - DNA, 17 bp, synthetic construct
  misc_feature 1..17: note = Oligonucleotide
  source 1..17: mol_type = other DNA
aggctgtcgagaggcag

SEQ ID NO: 15731 - DNA, 17 bp, synthetic construct
  misc_feature 1..17: note = Oligonucleotide
  source 1..17: mol_type = other DNA
gcaaggctgtcgagagg

SEQ ID NO: 15732 - DNA, 17 bp, synthetic construct
  misc_feature 1..17: note = Oligonucleotide
  source 1..17: mol_type = other DNA
caagcaaggctgtcgag

SEQ ID NO: 15733 - DNA, 17 bp, synthetic construct
  misc_feature 1..17: note = Oligonucleotide
  source 1..17: mol_type = other DNA
gggcaagcaaggctgtc

SEQ ID NO: 15734 - DNA, 17 bp, synthetic construct
  misc_feature 1..17: note = Oligonucleotide
  source 1..17: mol_type = other DNA
agggggcaagcaaggct

SEQ ID NO: 15735 - DNA, 17 bp, synthetic construct
  misc_feature 1..17: note = Oligonucleotide
  source 1..17: mol_type = other DNA
tagagggggcaagcaag

SEQ ID NO: 15736 - DNA, 17 bp, synthetic construct
  misc_feature 1..17: note = Oligonucleotide
  source 1..17: mol_type = other DNA
gtctagagggggcaagc

SEQ ID NO: 15737 - DNA, 17 bp, synthetic construct
  misc_feature 1..17: note = Oligonucleotide
  source 1..17: mol_type = other DNA
tcagtctagagggggca

SEQ ID NO: 15738 - DNA, 17 bp, synthetic construct
  misc_feature 1..17: note = Oligonucleotide
  source 1..17: mol_type = other DNA
ctgtcagtctagagggg

SEQ ID NO: 15739 - DNA, 17 bp, synthetic construct
  misc_feature 1..17: note = Oligonucleotide
  source 1..17: mol_type = other DNA
ggcctgtcagtctagag

SEQ ID NO: 15740 - DNA, 17 bp, synthetic construct
  misc_feature 1..17: note = Oligonucleotide
  source 1..17: mol_type = other DNA
caaggcctgtcagtcta

SEQ ID NO: 15741 - DNA, 17 bp, synthetic construct
  misc_feature 1..17: note = Oligonucleotide
  source 1..17: mol_type = other DNA
acccaaggcctgtcagt

SEQ ID NO: 15742 - DNA, 17 bp, synthetic construct
  misc_feature 1..17: note = Oligonucleotide
  source 1..17: mol_type = other DNA
cccacccaaggcctgtc

SEQ ID NO: 15743 - DNA, 17 bp, synthetic construct
  misc_feature 1..17: note = Oligonucleotide
  source 1..17: mol_type = other DNA
gaccccacccaaggcct

SEQ ID NO: 15744 - DNA, 17 bp, synthetic construct
  misc_feature 1..17: note = Oligonucleotide
  source 1..17: mol_type = other DNA
agggaccccacccaagg

SEQ ID NO: 15745 - DNA, 17 bp, synthetic construct
  misc_feature 1..17: note = Oligonucleotide
  source 1..17: mol_type = other DNA
gccagggaccccaccca

SEQ ID NO: 15746 - DNA, 17 bp, synthetic construct
  misc_feature 1..17: note = Oligonucleotide
  source 1..17: mol_type = other DNA
caggccagggaccccac

SEQ ID NO: 15747 - DNA, 17 bp, synthetic construct
  misc_feature 1..17: note = Oligonucleotide
  source 1..17: mol_type = other DNA
gcccaggccagggaccc

SEQ ID NO: 15748 - DNA, 17 bp, synthetic construct
  misc_feature 1..17: note = Oligonucleotide
  source 1..17: mol_type = other DNA
cacgcccaggccaggga

SEQ ID NO: 15749 - DNA, 17 bp, synthetic construct
  misc_feature 1..17: note = Oligonucleotide
  source 1..17: mol_type = other DNA
ttccacgcccaggccag

SEQ ID NO: 15750 - DNA, 17 bp, synthetic construct
  misc_feature 1..17: note = Oligonucleotide
  source 1..17: mol_type = other DNA
ccattccacgcccaggc

SEQ ID NO: 15751 - DNA, 17 bp, synthetic construct
  misc_feature 1..17: note = Oligonucleotide
  source 1..17: mol_type = other DNA
tgcccattccacgccca

SEQ ID NO: 15752 - DNA, 17 bp, synthetic construct
  misc_feature 1..17: note = Oligonucleotide
  source 1..17: mol_type = other DNA
ggatgcccattccacgc

SEQ ID NO: 15753 - DNA, 17 bp, synthetic construct
  misc_feature 1..17: note = Oligonucleotide
  source 1..17: mol_type = other DNA
gtgggatgcccattcca

SEQ ID NO: 15754 - DNA, 17 bp, synthetic construct
  misc_feature 1..17: note = Oligonucleotide
  source 1..17: mol_type = other DNA
actgtgggatgcccatt

SEQ ID NO: 15755 - DNA, 17 bp, synthetic construct
  misc_feature 1..17: note = Oligonucleotide
  source 1..17: mol_type = other DNA
agcactgtgggatgccc

SEQ ID NO: 15756 - DNA, 17 bp, synthetic construct
  misc_feature 1..17: note = Oligonucleotide
  source 1..17: mol_type = other DNA
aaaagcactgtgggatg

SEQ ID NO: 15757 - DNA, 17 bp, synthetic construct
  misc_feature 1..17: note = Oligonucleotide
  source 1..17: mol_type = other DNA
atcaaaagcactgtggg

SEQ ID NO: 15758 - DNA, 17 bp, synthetic construct
  misc_feature 1..17: note = Oligonucleotide
  source 1..17: mol_type = other DNA
ctcatcaaaagcactgt

SEQ ID NO: 15759 - DNA, 17 bp, synthetic construct
  misc_feature 1..17: note = Oligonucleotide
  source 1..17: mol_type = other DNA
gtactcatcaaaagcac

SEQ ID NO: 15760 - DNA, 17 bp, synthetic construct
  misc_feature 1..17: note = Oligonucleotide
  source 1..17: mol_type = other DNA
aaggtactcatcaaaag

SEQ ID NO: 15761 - DNA, 17 bp, synthetic construct
  misc_feature 1..17: note = Oligonucleotide
  source 1..17: mol_type = other DNA
cccaaggtactcatcaa

SEQ ID NO: 15762 - DNA, 17 bp, synthetic construct
  misc_feature 1..17: note = Oligonucleotide
  source 1..17: mol_type = other DNA
ttccccaaggtactcat

SEQ ID NO: 15763 - DNA, 17 bp, synthetic construct
  misc_feature 1..17: note = Oligonucleotide
  source 1..17: mol_type = other DNA
catttccccaaggtact

SEQ ID NO: 15764 - DNA, 17 bp, synthetic construct
  misc_feature 1..17: note = Oligonucleotide
  source 1..17: mol_type = other DNA
aagcatttccccaaggt

SEQ ID NO: 15765 - DNA, 17 bp, synthetic construct
  misc_feature 1..17: note = Oligonucleotide
  source 1..17: mol_type = other DNA
gagaagcatttccccaa

SEQ ID NO: 15766 - DNA, 17 bp, synthetic construct
  misc_feature 1..17: note = Oligonucleotide
  source 1..17: mol_type = other DNA
ctggagaagcatttccc

SEQ ID NO: 15767 - DNA, 17 bp, synthetic construct
  misc_feature 1..17: note = Oligonucleotide
  source 1..17: mol_type = other DNA
accctggagaagcattt

SEQ ID NO: 15768 - DNA, 17 bp, synthetic construct
  misc_feature 1..17: note = Oligonucleotide
  source 1..17: mol_type = other DNA
agcaccctggagaagca

SEQ ID NO: 15769 - DNA, 17 bp, synthetic construct
  misc_feature 1..17: note = Oligonucleotide
  source 1..17: mol_type = other DNA
gacagcaccctggagaa

SEQ ID NO: 15770 - DNA, 17 bp, synthetic construct
  misc_feature 1..17: note = Oligonucleotide
  source 1..17: mol_type = other DNA
catgacagcaccctgga

SEQ ID NO: 15771 - DNA, 17 bp, synthetic construct
  misc_feature 1..17: note = Oligonucleotide
  source 1..17: mol_type = other DNA
gggcatgacagcaccct

SEQ ID NO: 15772 - DNA, 17 bp, synthetic construct
  misc_feature 1..17: note = Oligonucleotide
  source 1..17: mol_type = other DNA
catgggcatgacagcac

SEQ ID NO: 15773 - DNA, 17 bp, synthetic construct
  misc_feature 1..17: note = Oligonucleotide
  source 1..17: mol_type = other DNA
tctcatgggcatgacag

SEQ ID NO: 15774 - DNA, 17 bp, synthetic construct
  misc_feature 1..17: note = Oligonucleotide
  source 1..17: mol_type = other DNA
tgttctcatgggcatga

SEQ ID NO: 15775 - DNA, 17 bp, synthetic construct
  misc_feature 1..17: note = Oligonucleotide
  source 1..17: mol_type = other DNA
gtgtgttctcatgggca

SEQ ID NO: 15776 - DNA, 17 bp, synthetic construct
  misc_feature 1..17: note = Oligonucleotide
  source 1..17: mol_type = other DNA
caggtgtgttctcatgg

SEQ ID NO: 15777 - DNA, 17 bp, synthetic construct
  misc_feature 1..17: note = Oligonucleotide
  source 1..17: mol_type = other DNA
gcacaggtgtgttctca

SEQ ID NO: 15778 - DNA, 17 bp, synthetic construct
  misc_feature 1..17: note = Oligonucleotide
  source 1..17: mol_type = other DNA
caggcacaggtgtgttc

SEQ ID NO: 15779 - DNA, 17 bp, synthetic construct
  misc_feature 1..17: note = Oligonucleotide
  source 1..17: mol_type = other DNA
tcccaggcacaggtgtg

SEQ ID NO: 15780 - DNA, 17 bp, synthetic construct
  misc_feature 1..17: note = Oligonucleotide
  source 1..17: mol_type = other DNA
cactcccaggcacaggt

SEQ ID NO: 15781 - DNA, 17 bp, synthetic construct
  misc_feature 1..17: note = Oligonucleotide
  source 1..17: mol_type = other DNA
acacactcccaggcaca

SEQ ID NO: 15782 - DNA, 17 bp, synthetic construct
  misc_feature 1..17: note = Oligonucleotide
  source 1..17: mol_type = other DNA
ggcacacactcccaggc

SEQ ID NO: 15783 - DNA, 17 bp, synthetic construct
  misc_feature 1..17: note = Oligonucleotide
  source 1..17: mol_type = other DNA
tcaggcacacactccca

SEQ ID NO: 15784 - DNA, 17 bp, synthetic construct
  misc_feature 1..17: note = Oligonucleotide
  source 1..17: mol_type = other DNA
ctctcaggcacacactc

SEQ ID NO: 15785 - DNA, 17 bp, synthetic construct
  misc_feature 1..17: note = Oligonucleotide
  source 1..17: mol_type = other DNA
cctctctcaggcacaca

SEQ ID NO: 15786 - DNA, 17 bp, synthetic construct
  misc_feature 1..17: note = Oligonucleotide
  source 1..17: mol_type = other DNA
taccctctctcaggcac

SEQ ID NO: 15787 - DNA, 17 bp, synthetic construct
  misc_feature 1..17: note = Oligonucleotide
  source 1..17: mol_type = other DNA
tcttaccctctctcagg

SEQ ID NO: 15788 - DNA, 17 bp, synthetic construct
  misc_feature 1..17: note = Oligonucleotide
  source 1..17: mol_type = other DNA
gtctcttaccctctctc

SEQ ID NO: 15789 - DNA, 17 bp, synthetic construct
  misc_feature 1..17: note = Oligonucleotide
  source 1..17: mol_type = other DNA
attgtctcttaccctct

SEQ ID NO: 15790 - DNA, 17 bp, synthetic construct
  misc_feature 1..17: note = Oligonucleotide
  source 1..17: mol_type = other DNA
cacattgtctcttaccc

SEQ ID NO: 15791 - DNA, 17 bp, synthetic construct
  misc_feature 1..17: note = Oligonucleotide
  source 1..17: mol_type = other DNA
gtccacattgtctctta

SEQ ID NO: 15792 - DNA, 17 bp, synthetic construct
  misc_feature 1..17: note = Oligonucleotide
  source 1..17: mol_type = other DNA
tgggtccacattgtctc

SEQ ID NO: 15793 - DNA, 17 bp, synthetic construct
  misc_feature 1..17: note = Oligonucleotide
  source 1..17: mol_type = other DNA
ctttgggtccacattgt

SEQ ID NO: 15794 - DNA, 17 bp, synthetic construct
  misc_feature 1..17: note = Oligonucleotide
  source 1..17: mol_type = other DNA
actctttgggtccacat

SEQ ID NO: 15795 - DNA, 17 bp, synthetic construct
  misc_feature 1..17: note = Oligonucleotide
  source 1..17: mol_type = other DNA
gtcactctttgggtcca

SEQ ID NO: 15796 - DNA, 17 bp, synthetic construct
  misc_feature 1..17: note = Oligonucleotide
  source 1..17: mol_type = other DNA
cgggtcactctttgggt

SEQ ID NO: 15797 - DNA, 17 bp, synthetic construct
  misc_feature 1..17: note = Oligonucleotide
  source 1..17: mol_type = other DNA
cgtcgggtcactctttg

SEQ ID NO: 15798 - DNA, 17 bp, synthetic construct
  misc_feature 1..17: note = Oligonucleotide
  source 1..17: mol_type = other DNA
tcacgtcgggtcactct

SEQ ID NO: 15799 - DNA, 17 bp, synthetic construct
  misc_feature 1..17: note = Oligonucleotide
  source 1..17: mol_type = other DNA
ctgtcacgtcgggtcac

SEQ ID NO: 15800 - DNA, 17 bp, synthetic construct
  misc_feature 1..17: note = Oligonucleotide
  source 1..17: mol_type = other DNA
cctctgtcacgtcgggt

SEQ ID NO: 15801 - DNA, 17 bp, synthetic construct
  misc_feature 1..17: note = Oligonucleotide
  source 1..17: mol_type = other DNA
ttgcctctgtcacgtcg

SEQ ID NO: 15802 - DNA, 17 bp, synthetic construct
  misc_feature 1..17: note = Oligonucleotide
  source 1..17: mol_type = other DNA
tccttgcctctgtcacg

SEQ ID NO: 15803 - DNA, 17 bp, synthetic construct
  misc_feature 1..17: note = Oligonucleotide
  source 1..17: mol_type = other DNA
gcttccttgcctctgtc

SEQ ID NO: 15804 - DNA, 17 bp, synthetic construct
  misc_feature 1..17: note = Oligonucleotide
  source 1..17: mol_type = other DNA
tctgcttccttgcctct

SEQ ID NO: 15805 - DNA, 17 bp, synthetic construct
  misc_feature 1..17: note = Oligonucleotide
  source 1..17: mol_type = other DNA
acctctgcttccttgcc

SEQ ID NO: 15806 - DNA, 17 bp, synthetic construct
  misc_feature 1..17: note = Oligonucleotide
  source 1..17: mol_type = other DNA
gtcacctctgcttcctt

SEQ ID NO: 15807 - DNA, 17 bp, synthetic construct
  misc_feature 1..17: note = Oligonucleotide
  source 1..17: mol_type = other DNA
gtggtcacctctgcttc

SEQ ID NO: 15808 - DNA, 17 bp, synthetic construct
  misc_feature 1..17: note = Oligonucleotide
  source 1..17: mol_type = other DNA
gaagtggtcacctctgc

SEQ ID NO: 15809 - DNA, 17 bp, synthetic construct
  misc_feature 1..17: note = Oligonucleotide
  source 1..17: mol_type = other DNA
ctagaagtggtcacctc

SEQ ID NO: 15810 - DNA, 17 bp, synthetic construct
  misc_feature 1..17: note = Oligonucleotide
  source 1..17: mol_type = other DNA
ggcctagaagtggtcac

SEQ ID NO: 15811 - DNA, 17 bp, synthetic construct
  misc_feature 1..17: note = Oligonucleotide
  source 1..17: mol_type = other DNA
tctggcctagaagtggt

SEQ ID NO: 15812 - DNA, 17 bp, synthetic construct
  misc_feature 1..17: note = Oligonucleotide
  source 1..17: mol_type = other DNA
cattctggcctagaagt

SEQ ID NO: 15813 - DNA, 17 bp, synthetic construct
  misc_feature 1..17: note = Oligonucleotide
  source 1..17: mol_type = other DNA
aatcattctggcctaga

SEQ ID NO: 15814 - DNA, 17 bp, synthetic construct
  misc_feature 1..17: note = Oligonucleotide
  source 1..17: mol_type = other DNA
ctgaatcattctggcct

SEQ ID NO: 15815 - DNA, 17 bp, synthetic construct
  misc_feature 1..17: note = Oligonucleotide
  source 1..17: mol_type = other DNA
ctactgaatcattctgg

SEQ ID NO: 15816 - DNA, 17 bp, synthetic construct
  misc_feature 1..17: note = Oligonucleotide
  source 1..17: mol_type = other DNA
acgctactgaatcattc

SEQ ID NO: 15817 - DNA, 17 bp, synthetic construct
  misc_feature 1..17: note = Oligonucleotide
  source 1..17: mol_type = other DNA
agaacgctactgaatca

SEQ ID NO: 15818 - DNA, 17 bp, synthetic construct
  misc_feature 1..17: note = Oligonucleotide
  source 1..17: mol_type = other DNA
tacagaacgctactgaa

SEQ ID NO: 15819 - DNA, 17 bp, synthetic construct
  misc_feature 1..17: note = Oligonucleotide
  source 1..17: mol_type = other DNA
atatacagaacgctact

SEQ ID NO: 15820 - DNA, 17 bp, synthetic construct
  misc_feature 1..17: note = Oligonucleotide
  source 1..17: mol_type = other DNA
tgaatatacagaacgct

SEQ ID NO: 15821 - DNA, 17 bp, synthetic construct
  misc_feature 1..17: note = Oligonucleotide
  source 1..17: mol_type = other DNA
ccgtgaatatacagaac

SEQ ID NO: 15822 - DNA, 17 bp, synthetic construct
  misc_feature 1..17: note = Oligonucleotide
  source 1..17: mol_type = other DNA
acaccgtgaatatacag

SEQ ID NO: 15823 - DNA, 17 bp, synthetic construct
  misc_feature 1..17: note = Oligonucleotide
  source 1..17: mol_type = other DNA
acaacaccgtgaatata

SEQ ID NO: 15824 - DNA, 17 bp, synthetic construct
  misc_feature 1..17: note = Oligonucleotide
  source 1..17: mol_type = other DNA
tgcacaacaccgtgaat

SEQ ID NO: 15825 - DNA, 17 bp, synthetic construct
  misc_feature 1..17: note = Oligonucleotide
  source 1..17: mol_type = other DNA
ggctgcacaacaccgtg

SEQ ID NO: 15826 - DNA, 17 bp, synthetic construct
  misc_feature 1..17: note = Oligonucleotide
  source 1..17: mol_type = other DNA
atcggctgcacaacacc

SEQ ID NO: 15827 - DNA, 17 bp, synthetic construct
  misc_feature 1..17: note = Oligonucleotide
  source 1..17: mol_type = other DNA
agaatcggctgcacaac

SEQ ID NO: 15828 - DNA, 17 bp, synthetic construct
  misc_feature 1..17: note = Oligonucleotide
  source 1..17: mol_type = other DNA
aatagaatcggctgcac

SEQ ID NO: 15829 - DNA, 17 bp, synthetic construct
  misc_feature 1..17: note = Oligonucleotide
  source 1..17: mol_type = other DNA
ttcaatagaatcggctg

SEQ ID NO: 15830 - DNA, 17 bp, synthetic construct
  misc_feature 1..17: note = Oligonucleotide
  source 1..17: mol_type = other DNA
gaattcaatagaatcgg

SEQ ID NO: 15831 - DNA, 17 bp, synthetic construct
  misc_feature 1..17: note = Oligonucleotide
  source 1..17: mol_type = other DNA
tttgaattcaatagaat

SEQ ID NO: 15832 - DNA, 17 bp, synthetic construct
  misc_feature 1..17: note = Oligonucleotide
  source 1..17: mol_type = other DNA
tgttttgaattcaatag

SEQ ID NO: 15833 - DNA, 17 bp, synthetic construct
  misc_feature 1..17: note = Oligonucleotide
  source 1..17: mol_type = other DNA
aaatgttttgaattcaa

SEQ ID NO: 15834 - DNA, 17 bp, synthetic construct
  misc_feature 1..17: note = Oligonucleotide
  source 1..17: mol_type = other DNA
tgaaaatgttttgaatt

SEQ ID NO: 15835 - DNA, 17 bp, synthetic construct
  misc_feature 1..17: note = Oligonucleotide
  source 1..17: mol_type = other DNA
tgatgaaaatgttttga

SEQ ID NO: 15836 - DNA, 17 bp, synthetic construct
  misc_feature 1..17: note = Oligonucleotide
  source 1..17: mol_type = other DNA
tggtgatgaaaatgttt

SEQ ID NO: 15837 - DNA, 17 bp, synthetic construct
  misc_feature 1..17: note = Oligonucleotide
  source 1..17: mol_type = other DNA
ttgtggtgatgaaaatg

SEQ ID NO: 15838 - DNA, 17 bp, synthetic construct
  misc_feature 1..17: note = Oligonucleotide
  source 1..17: mol_type = other DNA
cttttgtggtgatgaaa

SEQ ID NO: 15839 - DNA, 17 bp, synthetic construct
  misc_feature 1..17: note = Oligonucleotide
  source 1..17: mol_type = other DNA
cttcttttgtggtgatg

SEQ ID NO: 15840 - DNA, 17 bp, synthetic construct
  misc_feature 1..17: note = Oligonucleotide
  source 1..17: mol_type = other DNA
ggtcttcttttgtggtg

SEQ ID NO: 15841 - DNA, 17 bp, synthetic construct
  misc_feature 1..17: note = Oligonucleotide
  source 1..17: mol_type = other DNA
cagggtcttcttttgtg

SEQ ID NO: 15842 - DNA, 17 bp, synthetic construct
  misc_feature 1..17: note = Oligonucleotide
  source 1..17: mol_type = other DNA
gtccagggtcttctttt

SEQ ID NO: 15843 - DNA, 17 bp, synthetic construct
  misc_feature 1..17: note = Oligonucleotide
  source 1..17: mol_type = other DNA
tgtgtccagggtcttct

SEQ ID NO: 15844 - DNA, 17 bp, synthetic construct
  misc_feature 1..17: note = Oligonucleotide
  source 1..17: mol_type = other DNA
taatgtgtccagggtct

SEQ ID NO: 15845 - DNA, 17 bp, synthetic construct
  misc_feature 1..17: note = Oligonucleotide
  source 1..17: mol_type = other DNA
gcttaatgtgtccaggg

SEQ ID NO: 15846 - DNA, 17 bp, synthetic construct
  misc_feature 1..17: note = Oligonucleotide
  source 1..17: mol_type = other DNA
attgcttaatgtgtcca

SEQ ID NO: 15847 - DNA, 17 bp, synthetic construct
  misc_feature 1..17: note = Oligonucleotide
  source 1..17: mol_type = other DNA
attattgcttaatgtgt

SEQ ID NO: 15848 - DNA, 17 bp, synthetic construct
  misc_feature 1..17: note = Oligonucleotide
  source 1..17: mol_type = other DNA
agaattattgcttaatg

SEQ ID NO: 15849 - DNA, 17 bp, synthetic construct
  misc_feature 1..17: note = Oligonucleotide
  source 1..17: mol_type = other DNA
tgcagaattattgctta

SEQ ID NO: 15850 - DNA, 17 bp, synthetic construct
  misc_feature 1..17: note = Oligonucleotide
  source 1..17: mol_type = other DNA
tgatgcagaattattgc

SEQ ID NO: 15851 - DNA, 17 bp, synthetic construct
  misc_feature 1..17: note = Oligonucleotide
  source 1..17: mol_type = other DNA
aattgatgcagaattat

SEQ ID NO: 15852 - DNA, 17 bp, synthetic construct
  misc_feature 1..17: note = Oligonucleotide
  source 1..17: mol_type = other DNA
ggtaattgatgcagaat

SEQ ID NO: 15853 - DNA, 17 bp, synthetic construct
  misc_feature 1..17: note = Oligonucleotide
  source 1..17: mol_type = other DNA
gagggtaattgatgcag

SEQ ID NO: 15854 - DNA, 17 bp, synthetic construct
  misc_feature 1..17: note = Oligonucleotide
  source 1..17: mol_type = other DNA
ggagagggtaattgatg

SEQ ID NO: 15855 - DNA, 17 bp, synthetic construct
  misc_feature 1..17: note = Oligonucleotide
  source 1..17: mol_type = other DNA
gagggagagggtaattg

SEQ ID NO: 15856 - DNA, 17 bp, synthetic construct
  misc_feature 1..17: note = Oligonucleotide
  source 1..17: mol_type = other DNA
ttggagggagagggtaa

SEQ ID NO: 15857 - DNA, 17 bp, synthetic construct
  misc_feature 1..17: note = Oligonucleotide
  source 1..17: mol_type = other DNA
gagttggagggagaggg

SEQ ID NO: 15858 - DNA, 17 bp, synthetic construct
  misc_feature 1..17: note = Oligonucleotide
  source 1..17: mol_type = other DNA
acagagttggagggaga

SEQ ID NO: 15859 - DNA, 17 bp, synthetic construct
  misc_feature 1..17: note = Oligonucleotide
  source 1..17: mol_type = other DNA
ctgacagagttggaggg

SEQ ID NO: 15860 - DNA, 17 bp, synthetic construct
  misc_feature 1..17: note = Oligonucleotide
  source 1..17: mol_type = other DNA
tggctgacagagttgga

SEQ ID NO: 15861 - DNA, 17 bp, synthetic construct
  misc_feature 1..17: note = Oligonucleotide
  source 1..17: mol_type = other DNA
taatggctgacagagtt

SEQ ID NO: 15862 - DNA, 17 bp, synthetic construct
  misc_feature 1..17: note = Oligonucleotide
  source 1..17: mol_type = other DNA
tgttaatggctgacaga

SEQ ID NO: 15863 - DNA, 17 bp, synthetic construct
  misc_feature 1..17: note = Oligonucleotide
  source 1..17: mol_type = other DNA
gtgtgttaatggctgac

SEQ ID NO: 15864 - DNA, 17 bp, synthetic construct
  misc_feature 1..17: note = Oligonucleotide
  source 1..17: mol_type = other DNA
aaagtgtgttaatggct

SEQ ID NO: 15865 - DNA, 17 bp, synthetic construct
  misc_feature 1..17: note = Oligonucleotide
  source 1..17: mol_type = other DNA
acgaaagtgtgttaatg

SEQ ID NO: 15866 - DNA, 17 bp, synthetic construct
  misc_feature 1..17: note = Oligonucleotide
  source 1..17: mol_type = other DNA
gagacgaaagtgtgtta

SEQ ID NO: 15867 - DNA, 17 bp, synthetic construct
  misc_feature 1..17: note = Oligonucleotide
  source 1..17: mol_type = other DNA
acagagacgaaagtgtg

SEQ ID NO: 15868 - DNA, 17 bp, synthetic construct
  misc_feature 1..17: note = Oligonucleotide
  source 1..17: mol_type = other DNA
tccacagagacgaaagt

SEQ ID NO: 15869 - DNA, 17 bp, synthetic construct
  misc_feature 1..17: note = Oligonucleotide
  source 1..17: mol_type = other DNA
tagtccacagagacgaa

SEQ ID NO: 15870 - DNA, 17 bp, synthetic construct
  misc_feature 1..17: note = Oligonucleotide
  source 1..17: mol_type = other DNA
ctatagtccacagagac

SEQ ID NO: 15871 - DNA, 17 bp, synthetic construct
  misc_feature 1..17: note = Oligonucleotide
  source 1..17: mol_type = other DNA
aatctatagtccacaga

SEQ ID NO: 15872 - DNA, 17 bp, synthetic construct
  misc_feature 1..17: note = Oligonucleotide
  source 1..17: mol_type = other DNA
gtaaatctatagtccac

SEQ ID NO: 15873 - DNA, 17 bp, synthetic construct
  misc_feature 1..17: note = Oligonucleotide
  source 1..17: mol_type = other DNA
taggtaaatctatagtc

SEQ ID NO: 15874 - DNA, 17 bp, synthetic construct
  misc_feature 1..17: note = Oligonucleotide
  source 1..17: mol_type = other DNA
gaataggtaaatctata

SEQ ID NO: 15875 - DNA, 17 bp, synthetic construct
  misc_feature 1..17: note = Oligonucleotide
  source 1..17: mol_type = other DNA
caagaataggtaaatct

SEQ ID NO: 15876 - DNA, 17 bp, synthetic construct
  misc_feature 1..17: note = Oligonucleotide
  source 1..17: mol_type = other DNA
tatcaagaataggtaaa

SEQ ID NO: 15877 - DNA, 17 bp, synthetic construct
  misc_feature 1..17: note = Oligonucleotide
  source 1..17: mol_type = other DNA
aaatatcaagaataggt

SEQ ID NO: 15878 - DNA, 17 bp, synthetic construct
  misc_feature 1..17: note = Oligonucleotide
  source 1..17: mol_type = other DNA
atgaaatatcaagaata

SEQ ID NO: 15879 - DNA, 17 bp, synthetic construct
  misc_feature 1..17: note = Oligonucleotide
  source 1..17: mol_type = other DNA
gacatgaaatatcaaga

SEQ ID NO: 15880 - DNA, 17 bp, synthetic construct
  misc_feature 1..17: note = Oligonucleotide
  source 1..17: mol_type = other DNA
attgacatgaaatatca

SEQ ID NO: 15881 - DNA, 17 bp, synthetic construct
  misc_feature 1..17: note = Oligonucleotide
  source 1..17: mol_type = other DNA
tccattgacatgaaata

SEQ ID NO: 15882 - DNA, 17 bp, synthetic construct
  misc_feature 1..17: note = Oligonucleotide
  source 1..17: mol_type = other DNA
gattccattgacatgaa

SEQ ID NO: 15883 - DNA, 17 bp, synthetic construct
  misc_feature 1..17: note = Oligonucleotide
  source 1..17: mol_type = other DNA
tatgattccattgacat

SEQ ID NO: 15884 - DNA, 17 bp, synthetic construct
  misc_feature 1..17: note = Oligonucleotide
  source 1..17: mol_type = other DNA
ttatatgattccattga

SEQ ID NO: 15885 - DNA, 17 bp, synthetic construct
  misc_feature 1..17: note = Oligonucleotide
  source 1..17: mol_type = other DNA
ttattatatgattccat

SEQ ID NO: 15886 - DNA, 17 bp, synthetic construct
  misc_feature 1..17: note = Oligonucleotide
  source 1..17: mol_type = other DNA
cacttattatatgattc

SEQ ID NO: 15887 - DNA, 17 bp, synthetic construct
  misc_feature 1..17: note = Oligonucleotide
  source 1..17: mol_type = other DNA
tgtcacttattatatga

SEQ ID NO: 15888 - DNA, 17 bp, synthetic construct
  misc_feature 1..17: note = Oligonucleotide
  source 1..17: mol_type = other DNA
aagtgtcacttattata

SEQ ID NO: 15889 - DNA, 17 bp, synthetic construct
  misc_feature 1..17: note = Oligonucleotide
  source 1..17: mol_type = other DNA
actaagtgtcacttatt

SEQ ID NO: 15890 - DNA, 17 bp, synthetic construct
  misc_feature 1..17: note = Oligonucleotide
  source 1..17: mol_type = other DNA
gacactaagtgtcactt

SEQ ID NO: 15891 - DNA, 17 bp, synthetic construct
  misc_feature 1..17: note = Oligonucleotide
  source 1..17: mol_type = other DNA
ccagacactaagtgtca

SEQ ID NO: 15892 - DNA, 17 bp, synthetic construct
  misc_feature 1..17: note = Oligonucleotide
  source 1..17: mol_type = other DNA
cagccagacactaagtg

SEQ ID NO: 15893 - DNA, 17 bp, synthetic construct
  misc_feature 1..17: note = Oligonucleotide
  source 1..17: mol_type = other DNA
aagcagccagacactaa

SEQ ID NO: 15894 - DNA, 17 bp, synthetic construct
  misc_feature 1..17: note = Oligonucleotide
  source 1..17: mol_type = other DNA
taaaagcagccagacac

SEQ ID NO: 15895 - DNA, 17 bp, synthetic construct
  misc_feature 1..17: note = Oligonucleotide
  source 1..17: mol_type = other DNA
gagtaaaagcagccaga

SEQ ID NO: 15896 - DNA, 17 bp, synthetic construct
  misc_feature 1..17: note = Oligonucleotide
  source 1..17: mol_type = other DNA
gttgagtaaaagcagcc

SEQ ID NO: 15897 - DNA, 17 bp, synthetic construct
  misc_feature 1..17: note = Oligonucleotide
  source 1..17: mol_type = other DNA
catgttgagtaaaagca

SEQ ID NO: 15898 - DNA, 17 bp, synthetic construct
  misc_feature 1..17: note = Oligonucleotide
  source 1..17: mol_type = other DNA
aaacatgttgagtaaaa

SEQ ID NO: 15899 - DNA, 17 bp, synthetic construct
  misc_feature 1..17: note = Oligonucleotide
  source 1..17: mol_type = other DNA
caaaaacatgttgagta

SEQ ID NO: 15900 - DNA, 17 bp, synthetic construct
  misc_feature 1..17: note = Oligonucleotide
  source 1..17: mol_type = other DNA
gctcaaaaacatgttga

SEQ ID NO: 15901 - DNA, 17 bp, synthetic construct
  misc_feature 1..17: note = Oligonucleotide
  source 1..17: mol_type = other DNA
gaagctcaaaaacatgt

SEQ ID NO: 15902 - DNA, 17 bp, synthetic construct
  misc_feature 1..17: note = Oligonucleotide
  source 1..17: mol_type = other DNA
ggtgaagctcaaaaaca

SEQ ID NO: 15903 - DNA, 17 bp, synthetic construct
  misc_feature 1..17: note = Oligonucleotide
  source 1..17: mol_type = other DNA
caaggtgaagctcaaaa

SEQ ID NO: 15904 - DNA, 17 bp, synthetic construct
  misc_feature 1..17: note = Oligonucleotide
  source 1..17: mol_type = other DNA
ctacaaggtgaagctca

SEQ ID NO: 15905 - DNA, 17 bp, synthetic construct
  misc_feature 1..17: note = Oligonucleotide
  source 1..17: mol_type = other DNA
atcctacaaggtgaagc

SEQ ID NO: 15906 - DNA, 17 bp, synthetic construct
  misc_feature 1..17: note = Oligonucleotide
  source 1..17: mol_type = other DNA
tatatcctacaaggtga

SEQ ID NO: 15907 - DNA, 17 bp, synthetic construct
  misc_feature 1..17: note = Oligonucleotide
  source 1..17: mol_type = other DNA
tgatatatcctacaagg

SEQ ID NO: 15908 - DNA, 17 bp, synthetic construct
  misc_feature 1..17: note = Oligonucleotide
  source 1..17: mol_type = other DNA
cagtgatatatcctaca

SEQ ID NO: 15909 - DNA, 17 bp, synthetic construct
  misc_feature 1..17: note = Oligonucleotide
  source 1..17: mol_type = other DNA
aagcagtgatatatcct

SEQ ID NO: 15910 - DNA, 17 bp, synthetic construct
  misc_feature 1..17: note = Oligonucleotide
  source 1..17: mol_type = other DNA
atgaagcagtgatatat

SEQ ID NO: 15911 - DNA, 17 bp, synthetic construct
  misc_feature 1..17: note = Oligonucleotide
  source 1..17: mol_type = other DNA
ggaatgaagcagtgata

SEQ ID NO: 15912 - DNA, 17 bp, synthetic construct
  misc_feature 1..17: note = Oligonucleotide
  source 1..17: mol_type = other DNA
gaaggaatgaagcagtg

SEQ ID NO: 15913 - DNA, 17 bp, synthetic construct
  misc_feature 1..17: note = Oligonucleotide
  source 1..17: mol_type = other DNA
taagaaggaatgaagca

SEQ ID NO: 15914 - DNA, 17 bp, synthetic construct
  misc_feature 1..17: note = Oligonucleotide
  source 1..17: mol_type = other DNA
ccataagaaggaatgaa

SEQ ID NO: 15915 - DNA, 17 bp, synthetic construct
  misc_feature 1..17: note = Oligonucleotide
  source 1..17: mol_type = other DNA
cagccataagaaggaat

SEQ ID NO: 15916 - DNA, 17 bp, synthetic construct
  misc_feature 1..17: note = Oligonucleotide
  source 1..17: mol_type = other DNA
attcagccataagaagg

SEQ ID NO: 15917 - DNA, 17 bp, synthetic construct
  misc_feature 1..17: note = Oligonucleotide
  source 1..17: mol_type = other DNA
attattcagccataaga

SEQ ID NO: 15918 - DNA, 17 bp, synthetic construct
  misc_feature 1..17: note = Oligonucleotide
  source 1..17: mol_type = other DNA
aatattattcagccata

SEQ ID NO: 15919 - DNA, 17 bp, synthetic construct
  misc_feature 1..17: note = Oligonucleotide
  source 1..17: mol_type = other DNA
tgaaatattattcagcc

SEQ ID NO: 15920 - DNA, 17 bp, synthetic construct
  misc_feature 1..17: note = Oligonucleotide
  source 1..17: mol_type = other DNA
cagtgaaatattattca

SEQ ID NO: 15921 - DNA, 17 bp, synthetic construct
  misc_feature 1..17: note = Oligonucleotide
  source 1..17: mol_type = other DNA
caacagtgaaatattat

SEQ ID NO: 15922 - DNA, 17 bp, synthetic construct
  misc_feature 1..17: note = Oligonucleotide
  source 1..17: mol_type = other DNA
taccaacagtgaaatat

SEQ ID NO: 15923 - DNA, 17 bp, synthetic construct
  misc_feature 1..17: note = Oligonucleotide
  source 1..17: mol_type = other DNA
ttataccaacagtgaaa

SEQ ID NO: 15924 - DNA, 17 bp, synthetic construct
  misc_feature 1..17: note = Oligonucleotide
  source 1..17: mol_type = other DNA
catttataccaacagtg

SEQ ID NO: 15925 - DNA, 17 bp, synthetic construct
  misc_feature 1..17: note = Oligonucleotide
  source 1..17: mol_type = other DNA
tgtcatttataccaaca

SEQ ID NO: 15926 - DNA, 17 bp, synthetic construct
  misc_feature 1..17: note = Oligonucleotide
  source 1..17: mol_type = other DNA
aaatgtcatttatacca

SEQ ID NO: 15927 - DNA, 17 bp, synthetic construct
  misc_feature 1..17: note = Oligonucleotide
  source 1..17: mol_type = other DNA
acaaaatgtcatttata

SEQ ID NO: 15928 - DNA, 17 bp, synthetic construct
  misc_feature 1..17: note = Oligonucleotide
  source 1..17: mol_type = other DNA
taaacaaaatgtcattt

SEQ ID NO: 15929 - DNA, 17 bp, synthetic construct
  misc_feature 1..17: note = Oligonucleotide
  source 1..17: mol_type = other DNA
gcataaacaaaatgtca

SEQ ID NO: 15930 - DNA, 17 bp, synthetic construct
  misc_feature 1..17: note = Oligonucleotide
  source 1..17: mol_type = other DNA
aatgcataaacaaaatg

SEQ ID NO: 15931 - DNA, 17 bp, synthetic construct
  misc_feature 1..17: note = Oligonucleotide
  source 1..17: mol_type = other DNA
atgaatgcataaacaaa

SEQ ID NO: 15932 - DNA, 17 bp, synthetic construct
  misc_feature 1..17: note = Oligonucleotide
  source 1..17: mol_type = other DNA
cagatgaatgcataaac

SEQ ID NO: 15933 - DNA, 17 bp, synthetic construct
  misc_feature 1..17: note = Oligonucleotide
  source 1..17: mol_type = other DNA
tgacagatgaatgcata

SEQ ID NO: 15934 - DNA, 17 bp, synthetic construct
  misc_feature 1..17: note = Oligonucleotide
  source 1..17: mol_type = other DNA
cattgacagatgaatgc

SEQ ID NO: 15935 - DNA, 17 bp, synthetic construct
  misc_feature 1..17: note = Oligonucleotide
  source 1..17: mol_type = other DNA
atccattgacagatgaa

SEQ ID NO: 15936 - DNA, 17 bp, synthetic construct
  misc_feature 1..17: note = Oligonucleotide
  source 1..17: mol_type = other DNA
catatccattgacagat

SEQ ID NO: 15937 - DNA, 17 bp, synthetic construct
  misc_feature 1..17: note = Oligonucleotide
  source 1..17: mol_type = other DNA
ccacatatccattgaca

SEQ ID NO: 15938 - DNA, 17 bp, synthetic construct
  misc_feature 1..17: note = Oligonucleotide
  source 1..17: mol_type = other DNA
aacccacatatccattg

SEQ ID NO: 15939 - DNA, 17 bp, synthetic construct
  misc_feature 1..17: note = Oligonucleotide
  source 1..17: mol_type = other DNA
agaaacccacatatcca

SEQ ID NO: 15940 - DNA, 17 bp, synthetic construct
  misc_feature 1..17: note = Oligonucleotide
  source 1..17: mol_type = other DNA
ggtagaaacccacatat

SEQ ID NO: 15941 - DNA, 17 bp, synthetic construct
  misc_feature 1..17: note = Oligonucleotide
  source 1..17: mol_type = other DNA
aaaggtagaaacccaca

SEQ ID NO: 15942 - DNA, 17 bp, synthetic construct
  misc_feature 1..17: note = Oligonucleotide
  source 1..17: mol_type = other DNA
tcaaaaggtagaaaccc

SEQ ID NO: 15943 - DNA, 17 bp, synthetic construct
  misc_feature 1..17: note = Oligonucleotide
  source 1..17: mol_type = other DNA
cagtcaaaaggtagaaa

SEQ ID NO: 15944 - DNA, 17 bp, synthetic construct
  misc_feature 1..17: note = Oligonucleotide
  source 1..17: mol_type = other DNA
aaacagtcaaaaggtag

SEQ ID NO: 15945 - DNA, 17 bp, synthetic construct
  misc_feature 1..17: note = Oligonucleotide
  source 1..17: mol_type = other DNA
tcaaaacagtcaaaagg

SEQ ID NO: 15946 - DNA, 17 bp, synthetic construct
  misc_feature 1..17: note = Oligonucleotide
  source 1..17: mol_type = other DNA
tattcaaaacagtcaaa

SEQ ID NO: 15947 - DNA, 17 bp, synthetic construct
  misc_feature 1..17: note = Oligonucleotide
  source 1..17: mol_type = other DNA
caatattcaaaacagtc

SEQ ID NO: 15948 - DNA, 17 bp, synthetic construct
  misc_feature 1..17: note = Oligonucleotide
  source 1..17: mol_type = other DNA
cagcaatattcaaaaca

SEQ ID NO: 15949 - DNA, 17 bp, synthetic construct
  misc_feature 1..17: note = Oligonucleotide
  source 1..17: mol_type = other DNA
cagcagcaatattcaaa

SEQ ID NO: 15950 - DNA, 17 bp, synthetic construct
  misc_feature 1..17: note = Oligonucleotide
  source 1..17: mol_type = other DNA
tgacagcagcaatattc

SEQ ID NO: 15951 - DNA, 17 bp, synthetic construct
  misc_feature 1..17: note = Oligonucleotide
  source 1..17: mol_type = other DNA
tgttgacagcagcaata

SEQ ID NO: 15952 - DNA, 17 bp, synthetic construct
  misc_feature 1..17: note = Oligonucleotide
  source 1..17: mol_type = other DNA
acatgttgacagcagca

SEQ ID NO: 15953 - DNA, 17 bp, synthetic construct
  misc_feature 1..17: note = Oligonucleotide
  source 1..17: mol_type = other DNA
cacacatgttgacagca

SEQ ID NO: 15954 - DNA, 17 bp, synthetic construct
  misc_feature 1..17: note = Oligonucleotide
  source 1..17: mol_type = other DNA
gtacacacatgttgaca

SEQ ID NO: 15955 - DNA, 17 bp, synthetic construct
  misc_feature 1..17: note = Oligonucleotide
  source 1..17: mol_type = other DNA
catgtacacacatgttg

SEQ ID NO: 15956 - DNA, 17 bp, synthetic construct
  misc_feature 1..17: note = Oligonucleotide
  source 1..17: mol_type = other DNA
gtacatgtacacacatg

SEQ ID NO: 15957 - DNA, 17 bp, synthetic construct
  misc_feature 1..17: note = Oligonucleotide
  source 1..17: mol_type = other DNA
caagtacatgtacacac

SEQ ID NO: 15958 - DNA, 17 bp, synthetic construct
  misc_feature 1..17: note = Oligonucleotide
  source 1..17: mol_type = other DNA
aaacaagtacatgtaca

SEQ ID NO: 15959 - DNA, 17 bp, synthetic construct
  misc_feature 1..17: note = Oligonucleotide
  source 1..17: mol_type = other DNA
ttcaaacaagtacatgt

SEQ ID NO: 15960 - DNA, 17 bp, synthetic construct
  misc_feature 1..17: note = Oligonucleotide
  source 1..17: mol_type = other DNA
atattcaaacaagtaca

SEQ ID NO: 15961 - DNA, 17 bp, synthetic construct
  misc_feature 1..17: note = Oligonucleotide
  source 1..17: mol_type = other DNA
tagatattcaaacaagt

SEQ ID NO: 15962 - DNA, 17 bp, synthetic construct
  misc_feature 1..17: note = Oligonucleotide
  source 1..17: mol_type = other DNA
aaatagatattcaaaca

SEQ ID NO: 15963 - DNA, 17 bp, synthetic construct
  misc_feature 1..17: note = Oligonucleotide
  source 1..17: mol_type = other DNA
tgaaaatagatattcaa

SEQ ID NO: 15964 - DNA, 17 bp, synthetic construct
  misc_feature 1..17: note = Oligonucleotide
  source 1..17: mol_type = other DNA
gattgaaaatagatatt

SEQ ID NO: 15965 - DNA, 17 bp, synthetic construct
  misc_feature 1..17: note = Oligonucleotide
  source 1..17: mol_type = other DNA
agagattgaaaatagat

SEQ ID NO: 15966 - DNA, 17 bp, synthetic construct
  misc_feature 1..17: note = Oligonucleotide
  source 1..17: mol_type = other DNA
ctaagagattgaaaata

SEQ ID NO: 15967 - DNA, 17 bp, synthetic construct
  misc_feature 1..17: note = Oligonucleotide
  source 1..17: mol_type = other DNA
tacctaagagattgaaa

SEQ ID NO: 15968 - DNA, 17 bp, synthetic construct
  misc_feature 1..17: note = Oligonucleotide
  source 1..17: mol_type = other DNA
atatacctaagagattg

SEQ ID NO: 15969 - DNA, 17 bp, synthetic construct
  misc_feature 1..17: note = Oligonucleotide
  source 1..17: mol_type = other DNA
ggtatatacctaagaga

SEQ ID NO: 15970 - DNA, 17 bp, synthetic construct
  misc_feature 1..17: note = Oligonucleotide
  source 1..17: mol_type = other DNA
ttaggtatatacctaag

SEQ ID NO: 15971 - DNA, 17 bp, synthetic construct
  misc_feature 1..17: note = Oligonucleotide
  source 1..17: mol_type = other DNA
ttcttaggtatatacct

SEQ ID NO: 15972 - DNA, 17 bp, synthetic construct
  misc_feature 1..17: note = Oligonucleotide
  source 1..17: mol_type = other DNA
ccattcttaggtatata

SEQ ID NO: 15973 - DNA, 17 bp, synthetic construct
  misc_feature 1..17: note = Oligonucleotide
  source 1..17: mol_type = other DNA
attccattcttaggtat

SEQ ID NO: 15974 - DNA, 17 bp, synthetic construct
  misc_feature 1..17: note = Oligonucleotide
  source 1..17: mol_type = other DNA
aaaattccattcttagg

SEQ ID NO: 15975 - DNA, 17 bp, synthetic construct
  misc_feature 1..17: note = Oligonucleotide
  source 1..17: mol_type = other DNA
tccaaaattccattctt

SEQ ID NO: 15976 - DNA, 17 bp, synthetic construct
  misc_feature 1..17: note = Oligonucleotide
  source 1..17: mol_type = other DNA
gattccaaaattccatt

SEQ ID NO: 15977 - DNA, 17 bp, synthetic construct
  misc_feature 1..17: note = Oligonucleotide
  source 1..17: mol_type = other DNA
tatgattccaaaattcc

SEQ ID NO: 15978 - DNA, 17 bp, synthetic construct
  misc_feature 1..17: note = Oligonucleotide
  source 1..17: mol_type = other DNA
tcatatgattccaaaat

SEQ ID NO: 15979 - DNA, 17 bp, synthetic construct
  misc_feature 1..17: note = Oligonucleotide
  source 1..17: mol_type = other DNA
ttatcatatgattccaa

SEQ ID NO: 15980 - DNA, 17 bp, synthetic construct
  misc_feature 1..17: note = Oligonucleotide
  source 1..17: mol_type = other DNA
gaattatcatatgattc

SEQ ID NO: 15981 - DNA, 17 bp, synthetic construct
  misc_feature 1..17: note = Oligonucleotide
  source 1..17: mol_type = other DNA
atagaattatcatatga

SEQ ID NO: 15982 - DNA, 17 bp, synthetic construct
  misc_feature 1..17: note = Oligonucleotide
  source 1..17: mol_type = other DNA
aacatagaattatcata

SEQ ID NO: 15983 - DNA, 17 bp, synthetic construct
  misc_feature 1..17: note = Oligonucleotide
  source 1..17: mol_type = other DNA
ttaaacatagaattatc

SEQ ID NO: 15984 - DNA, 17 bp, synthetic construct
  misc_feature 1..17: note = Oligonucleotide
  source 1..17: mol_type = other DNA
aagttaaacatagaatt

SEQ ID NO: 15985 - DNA, 17 bp, synthetic construct
  misc_feature 1..17: note = Oligonucleotide
  source 1..17: mol_type = other DNA
aagaagttaaacataga

SEQ ID NO: 15986 - DNA, 17 bp, synthetic construct
  misc_feature 1..17: note = Oligonucleotide
  source 1..17: mol_type = other DNA
ctcaagaagttaaacat

SEQ ID NO: 15987 - DNA, 17 bp, synthetic construct
  misc_feature 1..17: note = Oligonucleotide
  source 1..17: mol_type = other DNA
ttcctcaagaagttaaa

SEQ ID NO: 15988 - DNA, 17 bp, synthetic construct
  misc_feature 1..17: note = Oligonucleotide
  source 1..17: mol_type = other DNA
cagttcctcaagaagtt

SEQ ID NO: 15989 - DNA, 17 bp, synthetic construct
  misc_feature 1..17: note = Oligonucleotide
  source 1..17: mol_type = other DNA
tggcagttcctcaagaa

SEQ ID NO: 15990 - DNA, 17 bp, synthetic construct
  misc_feature 1..17: note = Oligonucleotide
  source 1..17: mol_type = other DNA
gtttggcagttcctcaa

SEQ ID NO: 15991 - DNA, 17 bp, synthetic construct
  misc_feature 1..17: note = Oligonucleotide
  source 1..17: mol_type = other DNA
acagtttggcagttcct

SEQ ID NO: 15992 - DNA, 17 bp, synthetic construct
  misc_feature 1..17: note = Oligonucleotide
  source 1..17: mol_type = other DNA
aaaacagtttggcagtt

SEQ ID NO: 15993 - DNA, 17 bp, synthetic construct
  misc_feature 1..17: note = Oligonucleotide
  source 1..17: mol_type = other DNA
tggaaaacagtttggca

SEQ ID NO: 15994 - DNA, 17 bp, synthetic construct
  misc_feature 1..17: note = Oligonucleotide
  source 1..17: mol_type = other DNA
tggtggaaaacagtttg

SEQ ID NO: 15995 - DNA, 17 bp, synthetic construct
  misc_feature 1..17: note = Oligonucleotide
  source 1..17: mol_type = other DNA
aaatggtggaaaacagt

SEQ ID NO: 15996 - DNA, 17 bp, synthetic construct
  misc_feature 1..17: note = Oligonucleotide
  source 1..17: mol_type = other DNA
gcaaaatggtggaaaac

SEQ ID NO: 15997 - DNA, 17 bp, synthetic construct
  misc_feature 1..17: note = Oligonucleotide
  source 1..17: mol_type = other DNA
aatgcaaaatggtggaa

SEQ ID NO: 15998 - DNA, 17 bp, synthetic construct
  misc_feature 1..17: note = Oligonucleotide
  source 1..17: mol_type = other DNA
gggaatgcaaaatggtg

SEQ ID NO: 15999 - DNA, 17 bp, synthetic construct
  misc_feature 1..17: note = Oligonucleotide
  source 1..17: mol_type = other DNA
ggtgggaatgcaaaatg

SEQ ID NO: 16000 - DNA, 17 bp, synthetic construct
  misc_feature 1..17: note = Oligonucleotide
  source 1..17: mol_type = other DNA
actggtgggaatgcaaa

SEQ ID NO: 16001 - DNA, 17 bp, synthetic construct
  misc_feature 1..17: note = Oligonucleotide
  source 1..17: mol_type = other DNA
atcactggtgggaatgc

SEQ ID NO: 16002 - DNA, 17 bp, synthetic construct
  misc_feature 1..17: note = Oligonucleotide
  source 1..17: mol_type = other DNA
tacatcactggtgggaa

SEQ ID NO: 16003 - DNA, 17 bp, synthetic construct
  misc_feature 1..17: note = Oligonucleotide
  source 1..17: mol_type = other DNA
tcatacatcactggtgg

SEQ ID NO: 16004 - DNA, 17 bp, synthetic construct
  misc_feature 1..17: note = Oligonucleotide
  source 1..17: mol_type = other DNA
gcctcatacatcactgg

SEQ ID NO: 16005 - DNA, 17 bp, synthetic construct
  misc_feature 1..17: note = Oligonucleotide
  source 1..17: mol_type = other DNA
gaagcctcatacatcac

SEQ ID NO: 16006 - DNA, 17 bp, synthetic construct
  misc_feature 1..17: note = Oligonucleotide
  source 1..17: mol_type = other DNA
ccggaagcctcatacat

SEQ ID NO: 16007 - DNA, 17 bp, synthetic construct
  misc_feature 1..17: note = Oligonucleotide
  source 1..17: mol_type = other DNA
aaaccggaagcctcata

SEQ ID NO: 16008 - DNA, 17 bp, synthetic construct
  misc_feature 1..17: note = Oligonucleotide
  source 1..17: mol_type = other DNA
aaaaaaccggaagcctc

SEQ ID NO: 16009 - DNA, 17 bp, synthetic construct
  misc_feature 1..17: note = Oligonucleotide
  source 1..17: mol_type = other DNA
gtgaaaaaaccggaagc

SEQ ID NO: 16010 - DNA, 17 bp, synthetic construct
  misc_feature 1..17: note = Oligonucleotide
  source 1..17: mol_type = other DNA
gatgtgaaaaaaccgga

SEQ ID NO: 16011 - DNA, 17 bp, synthetic construct
  misc_feature 1..17: note = Oligonucleotide
  source 1..17: mol_type = other DNA
gaagatgtgaaaaaacc

SEQ ID NO: 16012 - DNA, 17 bp, synthetic construct
  misc_feature 1..17: note = Oligonucleotide
  source 1..17: mol_type = other DNA
ggtgaagatgtgaaaaa

SEQ ID NO: 16013 - DNA, 17 bp, synthetic construct
  misc_feature 1..17: note = Oligonucleotide
  source 1..17: mol_type = other DNA
gttggtgaagatgtgaa

SEQ ID NO: 16014 - DNA, 17 bp, synthetic construct
  misc_feature 1..17: note = Oligonucleotide
  source 1..17: mol_type = other DNA
actgttggtgaagatgt

SEQ ID NO: 16015 - DNA, 17 bp, synthetic construct
  misc_feature 1..17: note = Oligonucleotide
  source 1..17: mol_type = other DNA
acaactgttggtgaaga

SEQ ID NO: 16016 - DNA, 17 bp, synthetic construct
  misc_feature 1..17: note = Oligonucleotide
  source 1..17: mol_type = other DNA
gtaacaactgttggtga

SEQ ID NO: 16017 - DNA, 17 bp, synthetic construct
  misc_feature 1..17: note = Oligonucleotide
  source 1..17: mol_type = other DNA
atagtaacaactgttgg

SEQ ID NO: 16018 - DNA, 17 bp, synthetic construct
  misc_feature 1..17: note = Oligonucleotide
  source 1..17: mol_type = other DNA
aagatagtaacaactgt

SEQ ID NO: 16019 - DNA, 17 bp, synthetic construct
  misc_feature 1..17: note = Oligonucleotide
  source 1..17: mol_type = other DNA
aaaaagatagtaacaac

SEQ ID NO: 16020 - DNA, 17 bp, synthetic construct
  misc_feature 1..17: note = Oligonucleotide
  source 1..17: mol_type = other DNA
aaaaaaaagatagtaac

SEQ ID NO: 16021 - DNA, 17 bp, synthetic construct
  misc_feature 1..17: note = Oligonucleotide
  source 1..17: mol_type = other DNA
caaaaaaaaaagatagt

SEQ ID NO: 16022 - DNA, 17 bp, synthetic construct
  misc_feature 1..17: note = Oligonucleotide
  source 1..17: mol_type = other DNA
ggtcaaaaaaaaaagat

SEQ ID NO: 16023 - DNA, 17 bp, synthetic construct
  misc_feature 1..17: note = Oligonucleotide
  source 1..17: mol_type = other DNA
tacggtcaaaaaaaaaa

SEQ ID NO: 16024 - DNA, 17 bp, synthetic construct
  misc_feature 1..17: note = Oligonucleotide
  source 1..17: mol_type = other DNA
ggctacggtcaaaaaaa

SEQ ID NO: 16025 - DNA, 17 bp, synthetic construct
  misc_feature 1..17: note = Oligonucleotide
  source 1..17: mol_type = other DNA
gatggctacggtcaaaa

SEQ ID NO: 16026 - DNA, 17 bp, synthetic construct
  misc_feature 1..17: note = Oligonucleotide
  source 1..17: mol_type = other DNA
taggatggctacggtca

SEQ ID NO: 16027 - DNA, 17 bp, synthetic construct
  misc_feature 1..17: note = Oligonucleotide
  source 1..17: mol_type = other DNA
tactaggatggctacgg

SEQ ID NO: 16028 - DNA, 17 bp, synthetic construct
  misc_feature 1..17: note = Oligonucleotide
  source 1..17: mol_type = other DNA
acttactaggatggcta

SEQ ID NO: 16029 - DNA, 17 bp, synthetic construct
  misc_feature 1..17: note = Oligonucleotide
  source 1..17: mol_type = other DNA
cacacttactaggatgg

SEQ ID NO: 16030 - DNA, 17 bp, synthetic construct
  misc_feature 1..17: note = Oligonucleotide
  source 1..17: mol_type = other DNA
tttcacacttactagga

SEQ ID NO: 16031 - DNA, 17 bp, synthetic construct
  misc_feature 1..17: note = Oligonucleotide
  source 1..17: mol_type = other DNA
ccatttcacacttacta

SEQ ID NO: 16032 - DNA, 17 bp, synthetic construct
  misc_feature 1..17: note = Oligonucleotide
  source 1..17: mol_type = other DNA
ataccatttcacactta

SEQ ID NO: 16033 - DNA, 17 bp, synthetic construct
  misc_feature 1..17: note = Oligonucleotide
  source 1..17: mol_type = other DNA
gaaataccatttcacac

SEQ ID NO: 16034 - DNA, 17 bp, synthetic construct
  misc_feature 1..17: note = Oligonucleotide
  source 1..17: mol_type = other DNA
aatgaaataccatttca

SEQ ID NO: 16035 - DNA, 17 bp, synthetic construct
  misc_feature 1..17: note = Oligonucleotide
  source 1..17: mol_type = other DNA
cacaatgaaataccatt

SEQ ID NO: 16036 - DNA, 17 bp, synthetic construct
  misc_feature 1..17: note = Oligonucleotide
  source 1..17: mol_type = other DNA
aatcacaatgaaatacc

SEQ ID NO: 16037 - DNA, 17 bp, synthetic construct
  misc_feature 1..17: note = Oligonucleotide
  source 1..17: mol_type = other DNA
caaaatcacaatgaaat

SEQ ID NO: 16038 - DNA, 17 bp, synthetic construct
  misc_feature 1..17: note = Oligonucleotide
  source 1..17: mol_type = other DNA
agtcaaaatcacaatga

SEQ ID NO: 16039 - DNA, 17 bp, synthetic construct
  misc_feature 1..17: note = Oligonucleotide
  source 1..17: mol_type = other DNA
acaagtcaaaatcacaa

SEQ ID NO: 16040 - DNA, 17 bp, synthetic construct
  misc_feature 1..17: note = Oligonucleotide
  source 1..17: mol_type = other DNA
aatacaagtcaaaatca

SEQ ID NO: 16041 - DNA, 17 bp, synthetic construct
  misc_feature 1..17: note = Oligonucleotide
  source 1..17: mol_type = other DNA
ggaaatacaagtcaaaa

SEQ ID NO: 16042 - DNA, 17 bp, synthetic construct
  misc_feature 1..17: note = Oligonucleotide
  source 1..17: mol_type = other DNA
tagggaaatacaagtca

SEQ ID NO: 16043 - DNA, 17 bp, synthetic construct
  misc_feature 1..17: note = Oligonucleotide
  source 1..17: mol_type = other DNA
cactagggaaatacaag

SEQ ID NO: 16044 - DNA, 17 bp, synthetic construct
  misc_feature 1..17: note = Oligonucleotide
  source 1..17: mol_type = other DNA
agtcactagggaaatac

SEQ ID NO: 16045 - DNA, 17 bp, synthetic construct
  misc_feature 1..17: note = Oligonucleotide
  source 1..17: mol_type = other DNA
attagtcactagggaaa

SEQ ID NO: 16046 - DNA, 17 bp, synthetic construct
  misc_feature 1..17: note = Oligonucleotide
  source 1..17: mol_type = other DNA
atcattagtcactaggg

SEQ ID NO: 16047 - DNA, 17 bp, synthetic construct
  misc_feature 1..17: note = Oligonucleotide
  source 1..17: mol_type = other DNA
aacatcattagtcacta

SEQ ID NO: 16048 - DNA, 17 bp, synthetic construct
  misc_feature 1..17: note = Oligonucleotide
  source 1..17: mol_type = other DNA
caaaacatcattagtca

SEQ ID NO: 16049 - DNA, 17 bp, synthetic construct
  misc_feature 1..17: note = Oligonucleotide
  source 1..17: mol_type = other DNA
atgcaaaacatcattag

SEQ ID NO: 16050 - DNA, 17 bp, synthetic construct
  misc_feature 1..17: note = Oligonucleotide
  source 1..17: mol_type = other DNA
aagatgcaaaacatcat

SEQ ID NO: 16051 - DNA, 17 bp, synthetic construct
  misc_feature 1..17: note = Oligonucleotide
  source 1..17: mol_type = other DNA
gaaaagatgcaaaacat

SEQ ID NO: 16052 - DNA, 17 bp, synthetic construct
  misc_feature 1..17: note = Oligonucleotide
  source 1..17: mol_type = other DNA
catgaaaagatgcaaaa

SEQ ID NO: 16053 - DNA, 17 bp, synthetic construct
  misc_feature 1..17: note = Oligonucleotide
  source 1..17: mol_type = other DNA
gcacatgaaaagatgca

SEQ ID NO: 16054 - DNA, 17 bp, synthetic construct
  misc_feature 1..17: note = Oligonucleotide
  source 1..17: mol_type = other DNA
taagcacatgaaaagat

SEQ ID NO: 16055 - DNA, 17 bp, synthetic construct
  misc_feature 1..17: note = Oligonucleotide
  source 1..17: mol_type = other DNA
caataagcacatgaaaa

SEQ ID NO: 16056 - DNA, 17 bp, synthetic construct
  misc_feature 1..17: note = Oligonucleotide
  source 1..17: mol_type = other DNA
gcccaataagcacatga

SEQ ID NO: 16057 - DNA, 17 bp, synthetic construct
  misc_feature 1..17: note = Oligonucleotide
  source 1..17: mol_type = other DNA
aatgcccaataagcaca

SEQ ID NO: 16058 - DNA, 17 bp, synthetic construct
  misc_feature 1..17: note = Oligonucleotide
  source 1..17: mol_type = other DNA
acaaatgcccaataagc

SEQ ID NO: 16059 - DNA, 17 bp, synthetic construct
  misc_feature 1..17: note = Oligonucleotide
  source 1..17: mol_type = other DNA
tatacaaatgcccaata

SEQ ID NO: 16060 - DNA, 17 bp, synthetic construct
  misc_feature 1..17: note = Oligonucleotide
  source 1..17: mol_type = other DNA
agatatacaaatgccca

SEQ ID NO: 16061 - DNA, 17 bp, synthetic construct
  misc_feature 1..17: note = Oligonucleotide
  source 1..17: mol_type = other DNA
agaagatatacaaatgc

SEQ ID NO: 16062 - DNA, 17 bp, synthetic construct
  misc_feature 1..17: note = Oligonucleotide
  source 1..17: mol_type = other DNA
caaagaagatatacaaa

SEQ ID NO: 16063 - DNA, 17 bp, synthetic construct
  misc_feature 1..17: note = Oligonucleotide
  source 1..17: mol_type = other DNA
ctccaaagaagatatac

SEQ ID NO: 16064 - DNA, 17 bp, synthetic construct
  misc_feature 1..17: note = Oligonucleotide
  source 1..17: mol_type = other DNA
tttctccaaagaagata

SEQ ID NO: 16065 - DNA, 17 bp, synthetic construct
  misc_feature 1..17: note = Oligonucleotide
  source 1..17: mol_type = other DNA
acttttctccaaagaag

SEQ ID NO: 16066 - DNA, 17 bp, synthetic construct
  misc_feature 1..17: note = Oligonucleotide
  source 1..17: mol_type = other DNA
ttgacttttctccaaag

SEQ ID NO: 16067 - DNA, 17 bp, synthetic construct
  misc_feature 1..17: note = Oligonucleotide
  source 1..17: mol_type = other DNA
gacttgacttttctcca

SEQ ID NO: 16068 - DNA, 17 bp, synthetic construct
  misc_feature 1..17: note = Oligonucleotide
  source 1..17: mol_type = other DNA
aaggacttgacttttct

SEQ ID NO: 16069 - DNA, 17 bp, synthetic construct
  misc_feature 1..17: note = Oligonucleotide
  source 1..17: mol_type = other DNA
acaaaggacttgacttt

SEQ ID NO: 16070 - DNA, 17 bp, synthetic construct
  misc_feature 1..17: note = Oligonucleotide
  source 1..17: mol_type = other DNA
tggacaaaggacttgac

SEQ ID NO: 16071 - DNA, 17 bp, synthetic construct
  misc_feature 1..17: note = Oligonucleotide
  source 1..17: mol_type = other DNA
aaatggacaaaggactt

SEQ ID NO: 16072 - DNA, 17 bp, synthetic construct
  misc_feature 1..17: note = Oligonucleotide
  source 1..17: mol_type = other DNA
taaaaatggacaaagga

SEQ ID NO: 16073 - DNA, 17 bp, synthetic construct
  misc_feature 1..17: note = Oligonucleotide
  source 1..17: mol_type = other DNA
atttaaaaatggacaaa

SEQ ID NO: 16074 - DNA, 17 bp, synthetic construct
  misc_feature 1..17: note = Oligonucleotide
  source 1..17: mol_type = other DNA
ccaatttaaaaatggac

SEQ ID NO: 16075 - DNA, 17 bp, synthetic construct
  misc_feature 1..17: note = Oligonucleotide
  source 1..17: mol_type = other DNA
gacccaatttaaaaatg

SEQ ID NO: 16076 - DNA, 17 bp, synthetic construct
  misc_feature 1..17: note = Oligonucleotide
  source 1..17: mol_type = other DNA
aatgacccaatttaaaa

SEQ ID NO: 16077 - DNA, 17 bp, synthetic construct
  misc_feature 1..17: note = Oligonucleotide
  source 1..17: mol_type = other DNA
ataaatgacccaattta

SEQ ID NO: 16078 - DNA, 17 bp, synthetic construct
  misc_feature 1..17: note = Oligonucleotide
  source 1..17: mol_type = other DNA
aaaataaatgacccaat

SEQ ID NO: 16079 - DNA, 17 bp, synthetic construct
  misc_feature 1..17: note = Oligonucleotide
  source 1..17: mol_type = other DNA
acaaaaataaatgaccc

SEQ ID NO: 16080 - DNA, 17 bp, synthetic construct
  misc_feature 1..17: note = Oligonucleotide
  source 1..17: mol_type = other DNA
acaacaaaaataaatga

SEQ ID NO: 16081 - DNA, 17 bp, synthetic construct
  misc_feature 1..17: note = Oligonucleotide
  source 1..17: mol_type = other DNA
tcaacaacaaaaataaa

SEQ ID NO: 16082 - DNA, 17 bp, synthetic construct
  misc_feature 1..17: note = Oligonucleotide
  source 1..17: mol_type = other DNA
aactcaacaacaaaaat

SEQ ID NO: 16083 - DNA, 17 bp, synthetic construct
  misc_feature 1..17: note = Oligonucleotide
  source 1..17: mol_type = other DNA
tacaactcaacaacaaa

SEQ ID NO: 16084 - DNA, 17 bp, synthetic construct
  misc_feature 1..17: note = Oligonucleotide
  source 1..17: mol_type = other DNA
ccttacaactcaacaac

SEQ ID NO: 16085 - DNA, 17 bp, synthetic construct
  misc_feature 1..17: note = Oligonucleotide
  source 1..17: mol_type = other DNA
aacccttacaactcaac

SEQ ID NO: 16086 - DNA, 17 bp, synthetic construct
  misc_feature 1..17: note = Oligonucleotide
  source 1..17: mol_type = other DNA
aagaacccttacaactc

SEQ ID NO: 16087 - DNA, 17 bp, synthetic construct
  misc_feature 1..17: note = Oligonucleotide
  source 1..17: mol_type = other DNA
ataaagaacccttacaa

SEQ ID NO: 16088 - DNA, 17 bp, synthetic construct
  misc_feature 1..17: note = Oligonucleotide
  source 1..17: mol_type = other DNA
tatataaagaaccctta

SEQ ID NO: 16089 - DNA, 17 bp, synthetic construct
  misc_feature 1..17: note = Oligonucleotide
  source 1..17: mol_type = other DNA
gaatatataaagaaccc

SEQ ID NO: 16090 - DNA, 17 bp, synthetic construct
  misc_feature 1..17: note = Oligonucleotide
  source 1..17: mol_type = other DNA
tcagaatatataaagaa

SEQ ID NO: 16091 - DNA, 17 bp, synthetic construct
  misc_feature 1..17: note = Oligonucleotide
  source 1..17: mol_type = other DNA
tattcagaatatataaa

SEQ ID NO: 16092 - DNA, 17 bp, synthetic construct
  misc_feature 1..17: note = Oligonucleotide
  source 1..17: mol_type = other DNA
tagtattcagaatatat

SEQ ID NO: 16093 - DNA, 17 bp, synthetic construct
  misc_feature 1..17: note = Oligonucleotide
  source 1..17: mol_type = other DNA
gtttagtattcagaata

SEQ ID NO: 16094 - DNA, 17 bp, synthetic construct
  misc_feature 1..17: note = Oligonucleotide
  source 1..17: mol_type = other DNA
caagtttagtattcaga

SEQ ID NO: 16095 - DNA, 17 bp, synthetic construct
  misc_feature 1..17: note = Oligonucleotide
  source 1..17: mol_type = other DNA
acacaagtttagtattc

SEQ ID NO: 16096 - DNA, 17 bp, synthetic construct
  misc_feature 1..17: note = Oligonucleotide
  source 1..17: mol_type = other DNA
tccacacaagtttagta

SEQ ID NO: 16097 - DNA, 17 bp, synthetic construct
  misc_feature 1..17: note = Oligonucleotide
  source 1..17: mol_type = other DNA
tattccacacaagttta

SEQ ID NO: 16098 - DNA, 17 bp, synthetic construct
  misc_feature 1..17: note = Oligonucleotide
  source 1..17: mol_type = other DNA
acatattccacacaagt

SEQ ID NO: 16099 - DNA, 17 bp, synthetic construct
  misc_feature 1..17: note = Oligonucleotide
  source 1..17: mol_type = other DNA
atcacatattccacaca

SEQ ID NO: 16100 - DNA, 17 bp, synthetic construct
  misc_feature 1..17: note = Oligonucleotide
  source 1..17: mol_type = other DNA
caaatcacatattccac

SEQ ID NO: 16101 - DNA, 17 bp, synthetic construct
  misc_feature 1..17: note = Oligonucleotide
  source 1..17: mol_type = other DNA
ttacaaatcacatattc

SEQ ID NO: 16102 - DNA, 17 bp, synthetic construct
  misc_feature 1..17: note = Oligonucleotide
  source 1..17: mol_type = other DNA
tatttacaaatcacata

SEQ ID NO: 16103 - DNA, 17 bp, synthetic construct
  misc_feature 1..17: note = Oligonucleotide
  source 1..17: mol_type = other DNA
aaatatttacaaatcac

SEQ ID NO: 16104 - DNA, 17 bp, synthetic construct
  misc_feature 1..17: note = Oligonucleotide
  source 1..17: mol_type = other DNA
agaaaatatttacaaat

SEQ ID NO: 16105 - DNA, 17 bp, synthetic construct
  misc_feature 1..17: note = Oligonucleotide
  source 1..17: mol_type = other DNA
cagagaaaatatttaca

SEQ ID NO: 16106 - DNA, 17 bp, synthetic construct
  misc_feature 1..17: note = Oligonucleotide
  source 1..17: mol_type = other DNA
ctacagagaaaatattt

SEQ ID NO: 16107 - DNA, 17 bp, synthetic construct
  misc_feature 1..17: note = Oligonucleotide
  source 1..17: mol_type = other DNA
attctacagagaaaata

SEQ ID NO: 16108 - DNA, 17 bp, synthetic construct
  misc_feature 1..17: note = Oligonucleotide
  source 1..17: mol_type = other DNA
cctattctacagagaaa

SEQ ID NO: 16109 - DNA, 17 bp, synthetic construct
  misc_feature 1..17: note = Oligonucleotide
  source 1..17: mol_type = other DNA
tctcctattctacagag

SEQ ID NO: 16110 - DNA, 17 bp, synthetic construct
  misc_feature 1..17: note = Oligonucleotide
  source 1..17: mol_type = other DNA
ggatctcctattctaca

SEQ ID NO: 16111 - DNA, 17 bp, synthetic construct
  misc_feature 1..17: note = Oligonucleotide
  source 1..17: mol_type = other DNA
caaggatctcctattct

SEQ ID NO: 16112 - DNA, 17 bp, synthetic construct
  misc_feature 1..17: note = Oligonucleotide
  source 1..17: mol_type = other DNA
tgacaaggatctcctat

SEQ ID NO: 16113 - DNA, 17 bp, synthetic construct
  misc_feature 1..17: note = Oligonucleotide
  source 1..17: mol_type = other DNA
aagtgacaaggatctcc

SEQ ID NO: 16114 - DNA, 17 bp, synthetic construct
  misc_feature 1..17: note = Oligonucleotide
  source 1..17: mol_type = other DNA
aaaaagtgacaaggatc

SEQ ID NO: 16115 - DNA, 17 bp, synthetic construct
  misc_feature 1..17: note = Oligonucleotide
  source 1..17: mol_type = other DNA
tcaaaaaagtgacaagg

SEQ ID NO: 16116 - DNA, 17 bp, synthetic construct
  misc_feature 1..17: note = Oligonucleotide
  source 1..17: mol_type = other DNA
ttatcaaaaaagtgaca

SEQ ID NO: 16117 - DNA, 17 bp, synthetic construct
  misc_feature 1..17: note = Oligonucleotide
  source 1..17: mol_type = other DNA
acattatcaaaaaagtg

SEQ ID NO: 16118 - DNA, 17 bp, synthetic construct
  misc_feature 1..17: note = Oligonucleotide
  source 1..17: mol_type = other DNA
aggacattatcaaaaaa

SEQ ID NO: 16119 - DNA, 17 bp, synthetic construct
  misc_feature 1..17: note = Oligonucleotide
  source 1..17: mol_type = other DNA
caaaggacattatcaaa

SEQ ID NO: 16120 - DNA, 17 bp, synthetic construct
  misc_feature 1..17: note = Oligonucleotide
  source 1..17: mol_type = other DNA
catcaaaggacattatc

SEQ ID NO: 16121 - DNA, 17 bp, synthetic construct
  misc_feature 1..17: note = Oligonucleotide
  source 1..17: mol_type = other DNA
gtacatcaaaggacatt

SEQ ID NO: 16122 - DNA, 17 bp, synthetic construct
  misc_feature 1..17: note = Oligonucleotide
  source 1..17: mol_type = other DNA
cttgtacatcaaaggac

SEQ ID NO: 16123 - DNA, 17 bp, synthetic construct
  misc_feature 1..17: note = Oligonucleotide
  source 1..17: mol_type = other DNA
attcttgtacatcaaag

SEQ ID NO: 16124 - DNA, 17 bp, synthetic construct
  misc_feature 1..17: note = Oligonucleotide
  source 1..17: mol_type = other DNA
aaaattcttgtacatca

SEQ ID NO: 16125 - DNA, 17 bp, synthetic construct
  misc_feature 1..17: note = Oligonucleotide
  source 1..17: mol_type = other DNA
ttaaaaattcttgtaca

SEQ ID NO: 16126 - DNA, 17 bp, synthetic construct
  misc_feature 1..17: note = Oligonucleotide
  source 1..17: mol_type = other DNA
aaattaaaaattcttgt

SEQ ID NO: 16127 - DNA, 17 bp, synthetic construct
  misc_feature 1..17: note = Oligonucleotide
  source 1..17: mol_type = other DNA
tcaaaattaaaaattct

SEQ ID NO: 16128 - DNA, 17 bp, synthetic construct
  misc_feature 1..17: note = Oligonucleotide
  source 1..17: mol_type = other DNA
ttatcaaaattaaaaat

SEQ ID NO: 16129 - DNA, 17 bp, synthetic construct
  misc_feature 1..17: note = Oligonucleotide
  source 1..17: mol_type = other DNA
actttatcaaaattaaa

SEQ ID NO: 16130 - DNA, 17 bp, synthetic construct
  misc_feature 1..17: note = Oligonucleotide
  source 1..17: mol_type = other DNA
tgaactttatcaaaatt

SEQ ID NO: 16131 - DNA, 17 bp, synthetic construct
  misc_feature 1..17: note = Oligonucleotide
  source 1..17: mol_type = other DNA
ccttgaactttatcaaa

SEQ ID NO: 16132 - DNA, 17 bp, synthetic construct
  misc_feature 1..17: note = Oligonucleotide
  source 1..17: mol_type = other DNA
ataccttgaactttatc

SEQ ID NO: 16133 - DNA, 17 bp, synthetic construct
  misc_feature 1..17: note = Oligonucleotide
  source 1..17: mol_type = other DNA
tagataccttgaacttt

SEQ ID NO: 16134 - DNA, 17 bp, synthetic construct
  misc_feature 1..17: note = Oligonucleotide
  source 1..17: mol_type = other DNA
aaatagataccttgaac

SEQ ID NO: 16135 - DNA, 17 bp, synthetic construct
  misc_feature 1..17: note = Oligonucleotide
  source 1..17: mol_type = other DNA
aaaaaatagataccttg

SEQ ID NO: 16136 - DNA, 17 bp, synthetic construct
  misc_feature 1..17: note = Oligonucleotide
  source 1..17: mol_type = other DNA
agaaaaaaatagatacc

SEQ ID NO: 16137 - DNA, 17 bp, synthetic construct
  misc_feature 1..17: note = Oligonucleotide
  source 1..17: mol_type = other DNA
aaaagaaaaaaatagat

SEQ ID NO: 16138 - DNA, 17 bp, synthetic construct
  misc_feature 1..17: note = Oligonucleotide
  source 1..17: mol_type = other DNA
aacaaaagaaaaaaata

SEQ ID NO: 16139 - DNA, 17 bp, synthetic construct
  misc_feature 1..17: note = Oligonucleotide
  source 1..17: mol_type = other DNA
aacaacaaaagaaaaaa

SEQ ID NO: 16140 - DNA, 17 bp, synthetic construct
  misc_feature 1..17: note = Oligonucleotide
  source 1..17: mol_type = other DNA
atgaacaacaaaagaaa

SEQ ID NO: 16141 - DNA, 17 bp, synthetic construct
  misc_feature 1..17: note = Oligonucleotide
  source 1..17: mol_type = other DNA
agcatgaacaacaaaag

SEQ ID NO: 16142 - DNA, 17 bp, synthetic construct
  misc_feature 1..17: note = Oligonucleotide
  source 1..17: mol_type = other DNA
aaaagcatgaacaacaa

SEQ ID NO: 16143 - DNA, 17 bp, synthetic construct
  misc_feature 1..17: note = Oligonucleotide
  source 1..17: mol_type = other DNA
accaaaagcatgaacaa

SEQ ID NO: 16144 - DNA, 17 bp, synthetic construct
  misc_feature 1..17: note = Oligonucleotide
  source 1..17: mol_type = other DNA
gacaccaaaagcatgaa

SEQ ID NO: 16145 - DNA, 17 bp, synthetic construct
  misc_feature 1..17: note = Oligonucleotide
  source 1..17: mol_type = other DNA
tatgacaccaaaagcat

SEQ ID NO: 16146 - DNA, 17 bp, synthetic construct
  misc_feature 1..17: note = Oligonucleotide
  source 1..17: mol_type = other DNA
acctatgacaccaaaag

SEQ ID NO: 16147 - DNA, 17 bp, synthetic construct
  misc_feature 1..17: note = Oligonucleotide
  source 1..17: mol_type = other DNA
gtgacctatgacaccaa

SEQ ID NO: 16148 - DNA, 17 bp, synthetic construct
  misc_feature 1..17: note = Oligonucleotide
  source 1..17: mol_type = other DNA
ctcgtgacctatgacac

SEQ ID NO: 16149 - DNA, 17 bp, synthetic construct
  misc_feature 1..17: note = Oligonucleotide
  source 1..17: mol_type = other DNA
accctcgtgacctatga

SEQ ID NO: 16150 - DNA, 17 bp, synthetic construct
  misc_feature 1..17: note = Oligonucleotide
  source 1..17: mol_type = other DNA
taaaccctcgtgaccta

SEQ ID NO: 16151 - DNA, 17 bp, synthetic construct
  misc_feature 1..17: note = Oligonucleotide
  source 1..17: mol_type = other DNA
ggataaaccctcgtgac

SEQ ID NO: 16152 - DNA, 17 bp, synthetic construct
  misc_feature 1..17: note = Oligonucleotide
  source 1..17: mol_type = other DNA
agaggataaaccctcgt

SEQ ID NO: 16153 - DNA, 17 bp, synthetic construct
  misc_feature 1..17: note = Oligonucleotide
  source 1..17: mol_type = other DNA
cctagaggataaaccct

SEQ ID NO: 16154 - DNA, 17 bp, synthetic construct
  misc_feature 1..17: note = Oligonucleotide
  source 1..17: mol_type = other DNA
aaacctagaggataaac

SEQ ID NO: 16155 - DNA, 17 bp, synthetic construct
  misc_feature 1..17: note = Oligonucleotide
  source 1..17: mol_type = other DNA
agaaaacctagaggata

SEQ ID NO: 16156 - DNA, 17 bp, synthetic construct
  misc_feature 1..17: note = Oligonucleotide
  source 1..17: mol_type = other DNA
agaagaaaacctagagg

SEQ ID NO: 16157 - DNA, 17 bp, synthetic construct
  misc_feature 1..17: note = Oligonucleotide
  source 1..17: mol_type = other DNA
cttagaagaaaacctag

SEQ ID NO: 16158 - DNA, 17 bp, synthetic construct
  misc_feature 1..17: note = Oligonucleotide
  source 1..17: mol_type = other DNA
attcttagaagaaaacc

SEQ ID NO: 16159 - DNA, 17 bp, synthetic construct
  misc_feature 1..17: note = Oligonucleotide
  source 1..17: mol_type = other DNA
aaaattcttagaagaaa

SEQ ID NO: 16160 - DNA, 17 bp, synthetic construct
  misc_feature 1..17: note = Oligonucleotide
  source 1..17: mol_type = other DNA
cgtaaaattcttagaag

SEQ ID NO: 16161 - DNA, 17 bp, synthetic construct
  misc_feature 1..17: note = Oligonucleotide
  source 1..17: mol_type = other DNA
aaccgtaaaattcttag

SEQ ID NO: 16162 - DNA, 17 bp, synthetic construct
  misc_feature 1..17: note = Oligonucleotide
  source 1..17: mol_type = other DNA
gaaaaccgtaaaattct

SEQ ID NO: 16163 - DNA, 17 bp, synthetic construct
  misc_feature 1..17: note = Oligonucleotide
  source 1..17: mol_type = other DNA
agtgaaaaccgtaaaat

SEQ ID NO: 16164 - DNA, 17 bp, synthetic construct
  misc_feature 1..17: note = Oligonucleotide
  source 1..17: mol_type = other DNA
aagagtgaaaaccgtaa

SEQ ID NO: 16165 - DNA, 17 bp, synthetic construct
  misc_feature 1..17: note = Oligonucleotide
  source 1..17: mol_type = other DNA
cctaagagtgaaaaccg

SEQ ID NO: 16166 - DNA, 17 bp, synthetic construct
  misc_feature 1..17: note = Oligonucleotide
  source 1..17: mol_type = other DNA
tgacctaagagtgaaaa

SEQ ID NO: 16167 - DNA, 17 bp, synthetic construct
  misc_feature 1..17: note = Oligonucleotide
  source 1..17: mol_type = other DNA
cagtgacctaagagtga

SEQ ID NO: 16168 - DNA, 17 bp, synthetic construct
  misc_feature 1..17: note = Oligonucleotide
  source 1..17: mol_type = other DNA
gatcagtgacctaagag

SEQ ID NO: 16169 - DNA, 17 bp, synthetic construct
  misc_feature 1..17: note = Oligonucleotide
  source 1..17: mol_type = other DNA
atggatcagtgacctaa

SEQ ID NO: 16170 - DNA, 17 bp, synthetic construct
  misc_feature 1..17: note = Oligonucleotide
  source 1..17: mol_type = other DNA
aaaatggatcagtgacc

SEQ ID NO: 16171 - DNA, 17 bp, synthetic construct
  misc_feature 1..17: note = Oligonucleotide
  source 1..17: mol_type = other DNA
cttaaaatggatcagtg

SEQ ID NO: 16172 - DNA, 17 bp, synthetic construct
  misc_feature 1..17: note = Oligonucleotide
  source 1..17: mol_type = other DNA
aaacttaaaatggatca

SEQ ID NO: 16173 - DNA, 17 bp, synthetic construct
  misc_feature 1..17: note = Oligonucleotide
  source 1..17: mol_type = other DNA
ttaaaacttaaaatgga

SEQ ID NO: 16174 - DNA, 17 bp, synthetic construct
  misc_feature 1..17: note = Oligonucleotide
  source 1..17: mol_type = other DNA
aagttaaaacttaaaat

SEQ ID NO: 16175 - DNA, 17 bp, synthetic construct
  misc_feature 1..17: note = Oligonucleotide
  source 1..17: mol_type = other DNA
cagaagttaaaacttaa

SEQ ID NO: 16176 - DNA, 17 bp, synthetic construct
  misc_feature 1..17: note = Oligonucleotide
  source 1..17: mol_type = other DNA
aaacagaagttaaaact

SEQ ID NO: 16177 - DNA, 17 bp, synthetic construct
  misc_feature 1..17: note = Oligonucleotide
  source 1..17: mol_type = other DNA
cataaacagaagttaaa

SEQ ID NO: 16178 - DNA, 17 bp, synthetic construct
  misc_feature 1..17: note = Oligonucleotide
  source 1..17: mol_type = other DNA
caccataaacagaagtt

SEQ ID NO: 16179 - DNA, 17 bp, synthetic construct
  misc_feature 1..17: note = Oligonucleotide
  source 1..17: mol_type = other DNA
tcacaccataaacagaa

SEQ ID NO: 16180 - DNA, 17 bp, synthetic construct
  misc_feature 1..17: note = Oligonucleotide
  source 1..17: mol_type = other DNA
acctcacaccataaaca

SEQ ID NO: 16181 - DNA, 17 bp, synthetic construct
  misc_feature 1..17: note = Oligonucleotide
  source 1..17: mol_type = other DNA
cctacctcacaccataa

SEQ ID NO: 16182 - DNA, 17 bp, synthetic construct
  misc_feature 1..17: note = Oligonucleotide
  source 1..17: mol_type = other DNA
ctccctacctcacacca

SEQ ID NO: 16183 - DNA, 17 bp, synthetic construct
  misc_feature 1..17: note = Oligonucleotide
  source 1..17: mol_type = other DNA
tggctccctacctcaca

SEQ ID NO: 16184 - DNA, 17 bp, synthetic construct
  misc_feature 1..17: note = Oligonucleotide
  source 1..17: mol_type = other DNA
agatggctccctacctc

SEQ ID NO: 16185 - DNA, 17 bp, synthetic construct
  misc_feature 1..17: note = Oligonucleotide
  source 1..17: mol_type = other DNA
tgaagatggctccctac

SEQ ID NO: 16186 - DNA, 17 bp, synthetic construct
  misc_feature 1..17: note = Oligonucleotide
  source 1..17: mol_type = other DNA
taatgaagatggctccc

SEQ ID NO: 16187 - DNA, 17 bp, synthetic construct
  misc_feature 1..17: note = Oligonucleotide
  source 1..17: mol_type = other DNA
aaataatgaagatggct

SEQ ID NO: 16188 - DNA, 17 bp, synthetic construct
  misc_feature 1..17: note = Oligonucleotide
  source 1..17: mol_type = other DNA
gcaaaataatgaagatg

SEQ ID NO: 16189 - DNA, 17 bp, synthetic construct
  misc_feature 1..17: note = Oligonucleotide
  source 1..17: mol_type = other DNA
tatgcaaaataatgaag

SEQ ID NO: 16190 - DNA, 17 bp, synthetic construct
  misc_feature 1..17: note = Oligonucleotide
  source 1..17: mol_type = other DNA
tcatatgcaaaataatg

SEQ ID NO: 16191 - DNA, 17 bp, synthetic construct
  misc_feature 1..17: note = Oligonucleotide
  source 1..17: mol_type = other DNA
tattcatatgcaaaata

SEQ ID NO: 16192 - DNA, 17 bp, synthetic construct
  misc_feature 1..17: note = Oligonucleotide
  source 1..17: mol_type = other DNA
ggatattcatatgcaaa

SEQ ID NO: 16193 - DNA, 17 bp, synthetic construct
  misc_feature 1..17: note = Oligonucleotide
  source 1..17: mol_type = other DNA
attggatattcatatgc

SEQ ID NO: 16194 - DNA, 17 bp, synthetic construct
  misc_feature 1..17: note = Oligonucleotide
  source 1..17: mol_type = other DNA
acaattggatattcata

SEQ ID NO: 16195 - DNA, 17 bp, synthetic construct
  misc_feature 1..17: note = Oligonucleotide
  source 1..17: mol_type = other DNA
tggacaattggatattc

SEQ ID NO: 16196 - DNA, 17 bp, synthetic construct
  misc_feature 1..17: note = Oligonucleotide
  source 1..17: mol_type = other DNA
tgctggacaattggata

SEQ ID NO: 16197 - DNA, 17 bp, synthetic construct
  misc_feature 1..17: note = Oligonucleotide
  source 1..17: mol_type = other DNA
tggtgctggacaattgg

SEQ ID NO: 16198 - DNA, 17 bp, synthetic construct
  misc_feature 1..17: note = Oligonucleotide
  source 1..17: mol_type = other DNA
aaatggtgctggacaat

SEQ ID NO: 16199 - DNA, 17 bp, synthetic construct
  misc_feature 1..17: note = Oligonucleotide
  source 1..17: mol_type = other DNA
aacaaatggtgctggac

SEQ ID NO: 16200 - DNA, 17 bp, synthetic construct
  misc_feature 1..17: note = Oligonucleotide
  source 1..17: mol_type = other DNA
ttcaacaaatggtgctg

SEQ ID NO: 16201 - DNA, 17 bp, synthetic construct
  misc_feature 1..17: note = Oligonucleotide
  source 1..17: mol_type = other DNA
ctcttcaacaaatggtg

SEQ ID NO: 16202 - DNA, 17 bp, synthetic construct
  misc_feature 1..17: note = Oligonucleotide
  source 1..17: mol_type = other DNA
agtctcttcaacaaatg

SEQ ID NO: 16203 - DNA, 17 bp, synthetic construct
  misc_feature 1..17: note = Oligonucleotide
  source 1..17: mol_type = other DNA
aatagtctcttcaacaa

SEQ ID NO: 16204 - DNA, 17 bp, synthetic construct
  misc_feature 1..17: note = Oligonucleotide
  source 1..17: mol_type = other DNA
aagaatagtctcttcaa

SEQ ID NO: 16205 - DNA, 17 bp, synthetic construct
  misc_feature 1..17: note = Oligonucleotide
  source 1..17: mol_type = other DNA
gaaaagaatagtctctt

SEQ ID NO: 16206 - DNA, 17 bp, synthetic construct
  misc_feature 1..17: note = Oligonucleotide
  source 1..17: mol_type = other DNA
tgggaaaagaatagtct

SEQ ID NO: 16207 - DNA, 17 bp, synthetic construct
  misc_feature 1..17: note = Oligonucleotide
  source 1..17: mol_type = other DNA
caatgggaaaagaatag

SEQ ID NO: 16208 - DNA, 17 bp, synthetic construct
  misc_feature 1..17: note = Oligonucleotide
  source 1..17: mol_type = other DNA
attcaatgggaaaagaa

SEQ ID NO: 16209 - DNA, 17 bp, synthetic construct
  misc_feature 1..17: note = Oligonucleotide
  source 1..17: mol_type = other DNA
accattcaatgggaaaa

SEQ ID NO: 16210 - DNA, 17 bp, synthetic construct
  misc_feature 1..17: note = Oligonucleotide
  source 1..17: mol_type = other DNA
aagaccattcaatggga

SEQ ID NO: 16211 - DNA, 17 bp, synthetic construct
  misc_feature 1..17: note = Oligonucleotide
  source 1..17: mol_type = other DNA
gccaagaccattcaatg

SEQ ID NO: 16212 - DNA, 17 bp, synthetic construct
  misc_feature 1..17: note = Oligonucleotide
  source 1..17: mol_type = other DNA
ggtgccaagaccattca

SEQ ID NO: 16213 - DNA, 17 bp, synthetic construct
  misc_feature 1..17: note = Oligonucleotide
  source 1..17: mol_type = other DNA
aagggtgccaagaccat

SEQ ID NO: 16214 - DNA, 17 bp, synthetic construct
  misc_feature 1..17: note = Oligonucleotide
  source 1..17: mol_type = other DNA
aacaagggtgccaagac

SEQ ID NO: 16215 - DNA, 17 bp, synthetic construct
  misc_feature 1..17: note = Oligonucleotide
  source 1..17: mol_type = other DNA
ttcaacaagggtgccaa

SEQ ID NO: 16216 - DNA, 17 bp, synthetic construct
  misc_feature 1..17: note = Oligonucleotide
  source 1..17: mol_type = other DNA
attttcaacaagggtgc

SEQ ID NO: 16217 - DNA, 17 bp, synthetic construct
  misc_feature 1..17: note = Oligonucleotide
  source 1..17: mol_type = other DNA
ttcattttcaacaaggg

SEQ ID NO: 16218 - DNA, 17 bp, synthetic construct
  misc_feature 1..17: note = Oligonucleotide
  source 1..17: mol_type = other DNA
caattcattttcaacaa

SEQ ID NO: 16219 - DNA, 17 bp, synthetic construct
  misc_feature 1..17: note = Oligonucleotide
  source 1..17: mol_type = other DNA
gatcaattcattttcaa

SEQ ID NO: 16220 - DNA, 17 bp, synthetic construct
  misc_feature 1..17: note = Oligonucleotide
  source 1..17: mol_type = other DNA
taggatcaattcatttt

SEQ ID NO: 16221 - DNA, 17 bp, synthetic construct
  misc_feature 1..17: note = Oligonucleotide
  source 1..17: mol_type = other DNA
atctaggatcaattcat

SEQ ID NO: 16222 - DNA, 17 bp, synthetic construct
  misc_feature 1..17: note = Oligonucleotide
  source 1..17: mol_type = other DNA
catatctaggatcaatt

SEQ ID NO: 16223 - DNA, 17 bp, synthetic construct
  misc_feature 1..17: note = Oligonucleotide
  source 1..17: mol_type = other DNA
ccacatatctaggatca

SEQ ID NO: 16224 - DNA, 17 bp, synthetic construct
  misc_feature 1..17: note = Oligonucleotide
  source 1..17: mol_type = other DNA
aacccacatatctagga

SEQ ID NO: 16225 - DNA, 17 bp, synthetic construct
  misc_feature 1..17: note = Oligonucleotide
  source 1..17: mol_type = other DNA
ataaacccacatatcta

SEQ ID NO: 16226 - DNA, 17 bp, synthetic construct
  misc_feature 1..17: note = Oligonucleotide
  source 1..17: mol_type = other DNA
caaataaacccacatat

SEQ ID NO: 16227 - DNA, 17 bp, synthetic construct
  misc_feature 1..17: note = Oligonucleotide
  source 1..17: mol_type = other DNA
gtccaaataaacccaca

SEQ ID NO: 16228 - DNA, 17 bp, synthetic construct
  misc_feature 1..17: note = Oligonucleotide
  source 1..17: mol_type = other DNA
agagtccaaataaaccc

SEQ ID NO: 16229 - DNA, 17 bp, synthetic construct
  misc_feature 1..17: note = Oligonucleotide
  source 1..17: mol_type = other DNA
ttgagagtccaaataaa

SEQ ID NO: 16230 - DNA, 17 bp, synthetic construct
  misc_feature 1..17: note = Oligonucleotide
  source 1..17: mol_type = other DNA
gaattgagagtccaaat

SEQ ID NO: 16231 - DNA, 17 bp, synthetic construct
  misc_feature 1..17: note = Oligonucleotide
  source 1..17: mol_type = other DNA
atagaattgagagtcca

SEQ ID NO: 16232 - DNA, 17 bp, synthetic construct
  misc_feature 1..17: note = Oligonucleotide
  source 1..17: mol_type = other DNA
gggatagaattgagagt

SEQ ID NO: 16233 - DNA, 17 bp, synthetic construct
  misc_feature 1..17: note = Oligonucleotide
  source 1..17: mol_type = other DNA
actgggatagaattgag

SEQ ID NO: 16234 - DNA, 17 bp, synthetic construct
  misc_feature 1..17: note = Oligonucleotide
  source 1..17: mol_type = other DNA
accactgggatagaatt

SEQ ID NO: 16235 - DNA, 17 bp, synthetic construct
  misc_feature 1..17: note = Oligonucleotide
  source 1..17: mol_type = other DNA
tagaccactgggataga

SEQ ID NO: 16236 - DNA, 17 bp, synthetic construct
  misc_feature 1..17: note = Oligonucleotide
  source 1..17: mol_type = other DNA
atgtagaccactgggat

SEQ ID NO: 16237 - DNA, 17 bp, synthetic construct
  misc_feature 1..17: note = Oligonucleotide
  source 1..17: mol_type = other DNA
tacatgtagaccactgg

SEQ ID NO: 16238 - DNA, 17 bp, synthetic construct
  misc_feature 1..17: note = Oligonucleotide
  source 1..17: mol_type = other DNA
atatacatgtagaccac

SEQ ID NO: 16239 - DNA, 17 bp, synthetic construct
  misc_feature 1..17: note = Oligonucleotide
  source 1..17: mol_type = other DNA
agaatatacatgtagac

SEQ ID NO: 16240 - DNA, 17 bp, synthetic construct
  misc_feature 1..17: note = Oligonucleotide
  source 1..17: mol_type = other DNA
ataagaatatacatgta

SEQ ID NO: 16241 - DNA, 17 bp, synthetic construct
  misc_feature 1..17: note = Oligonucleotide
  source 1..17: mol_type = other DNA
ggcataagaatatacat

SEQ ID NO: 16242 - DNA, 17 bp, synthetic construct
  misc_feature 1..17: note = Oligonucleotide
  source 1..17: mol_type = other DNA
cctggcataagaatata

SEQ ID NO: 16243 - DNA, 17 bp, synthetic construct
  misc_feature 1..17: note = Oligonucleotide
  source 1..17: mol_type = other DNA
ggtcctggcataagaat

SEQ ID NO: 16244 - DNA, 17 bp, synthetic construct
  misc_feature 1..17: note = Oligonucleotide
  source 1..17: mol_type = other DNA
tgtggtcctggcataag

SEQ ID NO: 16245 - DNA, 17 bp, synthetic construct
  misc_feature 1..17: note = Oligonucleotide
  source 1..17: mol_type = other DNA
ccatgtggtcctggcat

SEQ ID NO: 16246 - DNA, 17 bp, synthetic construct
  misc_feature 1..17: note = Oligonucleotide
  source 1..17: mol_type = other DNA
aaaccatgtggtcctgg

SEQ ID NO: 16247 - DNA, 17 bp, synthetic construct
  misc_feature 1..17: note = Oligonucleotide
  source 1..17: mol_type = other DNA
atcaaaccatgtggtcc

SEQ ID NO: 16248 - DNA, 17 bp, synthetic construct
  misc_feature 1..17: note = Oligonucleotide
  source 1..17: mol_type = other DNA
gtaatcaaaccatgtgg

SEQ ID NO: 16249 - DNA, 17 bp, synthetic construct
  misc_feature 1..17: note = Oligonucleotide
  source 1..17: mol_type = other DNA
gcagtaatcaaaccatg

SEQ ID NO: 16250 - DNA, 17 bp, synthetic construct
  misc_feature 1..17: note = Oligonucleotide
  source 1..17: mol_type = other DNA
gctgcagtaatcaaacc

SEQ ID NO: 16251 - DNA, 17 bp, synthetic construct
  misc_feature 1..17: note = Oligonucleotide
  source 1..17: mol_type = other DNA
aaagctgcagtaatcaa

SEQ ID NO: 16252 - DNA, 17 bp, synthetic construct
  misc_feature 1..17: note = Oligonucleotide
  source 1..17: mol_type = other DNA
tacaaagctgcagtaat

SEQ ID NO: 16253 - DNA, 17 bp, synthetic construct
  misc_feature 1..17: note = Oligonucleotide
  source 1..17: mol_type = other DNA
tactacaaagctgcagt

SEQ ID NO: 16254 - DNA, 17 bp, synthetic construct
  misc_feature 1..17: note = Oligonucleotide
  source 1..17: mol_type = other DNA
agttactacaaagctgc

SEQ ID NO: 16255 - DNA, 17 bp, synthetic construct
  misc_feature 1..17: note = Oligonucleotide
  source 1..17: mol_type = other DNA
aaaagttactacaaagc

SEQ ID NO: 16256 - DNA, 17 bp, synthetic construct
  misc_feature 1..17: note = Oligonucleotide
  source 1..17: mol_type = other DNA
ataaaaagttactacaa

SEQ ID NO: 16257 - DNA, 17 bp, synthetic construct
  misc_feature 1..17: note = Oligonucleotide
  source 1..17: mol_type = other DNA
aaaataaaaagttacta

SEQ ID NO: 16258 - DNA, 17 bp, synthetic construct
  misc_feature 1..17: note = Oligonucleotide
  source 1..17: mol_type = other DNA
ataaaaataaaaagtta

SEQ ID NO: 16259 - DNA, 17 bp, synthetic construct
  misc_feature 1..17: note = Oligonucleotide
  source 1..17: mol_type = other DNA
aaaataaaaataaaaag

SEQ ID NO: 16260 - DNA, 17 bp, synthetic construct
  misc_feature 1..17: note = Oligonucleotide
  source 1..17: mol_type = other DNA
aaaaaaataaaaataaa

SEQ ID NO: 16261 - DNA, 17 bp, synthetic construct
  misc_feature 1..17: note = Oligonucleotide
  source 1..17: mol_type = other DNA
tccaaaaaaataaaaat

SEQ ID NO: 16262 - DNA, 17 bp, synthetic construct
  misc_feature 1..17: note = Oligonucleotide
  source 1..17: mol_type = other DNA
atctccaaaaaaataaa

SEQ ID NO: 16263 - DNA, 17 bp, synthetic construct
  misc_feature 1..17: note = Oligonucleotide
  source 1..17: mol_type = other DNA
tccatctccaaaaaaat

SEQ ID NO: 16264 - DNA, 17 bp, synthetic construct
  misc_feature 1..17: note = Oligonucleotide
  source 1..17: mol_type = other DNA
aactccatctccaaaaa

SEQ ID NO: 16265 - DNA, 17 bp, synthetic construct
  misc_feature 1..17: note = Oligonucleotide
  source 1..17: mol_type = other DNA
caaaactccatctccaa

SEQ ID NO: 16266 - DNA, 17 bp, synthetic construct
  misc_feature 1..17: note = Oligonucleotide
  source 1..17: mol_type = other DNA
gagcaaaactccatctc

SEQ ID NO: 16267 - DNA, 17 bp, synthetic construct
  misc_feature 1..17: note = Oligonucleotide
  source 1..17: mol_type = other DNA
caagagcaaaactccat

SEQ ID NO: 16268 - DNA, 17 bp, synthetic construct
  misc_feature 1..17: note = Oligonucleotide
  source 1..17: mol_type = other DNA
tgacaagagcaaaactc

SEQ ID NO: 16269 - DNA, 17 bp, synthetic construct
  misc_feature 1..17: note = Oligonucleotide
  source 1..17: mol_type = other DNA
gggtgacaagagcaaaa

SEQ ID NO: 16270 - DNA, 17 bp, synthetic construct
  misc_feature 1..17: note = Oligonucleotide
  source 1..17: mol_type = other DNA
cctgggtgacaagagca

SEQ ID NO: 16271 - DNA, 17 bp, synthetic construct
  misc_feature 1..17: note = Oligonucleotide
  source 1..17: mol_type = other DNA
cagcctgggtgacaaga

SEQ ID NO: 16272 - DNA, 17 bp, synthetic construct
  misc_feature 1..17: note = Oligonucleotide
  source 1..17: mol_type = other DNA
ctccagcctgggtgaca

SEQ ID NO: 16273 - DNA, 17 bp, synthetic construct
  misc_feature 1..17: note = Oligonucleotide
  source 1..17: mol_type = other DNA
gcactccagcctgggtg

SEQ ID NO: 16274 - DNA, 17 bp, synthetic construct
  misc_feature 1..17: note = Oligonucleotide
  source 1..17: mol_type = other DNA
attgcactccagcctgg

SEQ ID NO: 16275 - DNA, 17 bp, synthetic construct
  misc_feature 1..17: note = Oligonucleotide
  source 1..17: mol_type = other DNA
gccattgcactccagcc

SEQ ID NO: 16276 - DNA, 17 bp, synthetic construct
  misc_feature 1..17: note = Oligonucleotide
  source 1..17: mol_type = other DNA
tgcgccattgcactcca

SEQ ID NO: 16277 - DNA, 17 bp, synthetic construct
  misc_feature 1..17: note = Oligonucleotide
  source 1..17: mol_type = other DNA
gactgcgccattgcact

SEQ ID NO: 16278 - DNA, 17 bp, synthetic construct
  misc_feature 1..17: note = Oligonucleotide
  source 1..17: mol_type = other DNA
tgagactgcgccattgc

SEQ ID NO: 16279 - DNA, 17 bp, synthetic construct
  misc_feature 1..17: note = Oligonucleotide
  source 1..17: mol_type = other DNA
agctgagactgcgccat

SEQ ID NO: 16280 - DNA, 17 bp, synthetic construct
  misc_feature 1..17: note = Oligonucleotide
  source 1..17: mol_type = other DNA
gtgagctgagactgcgc

SEQ ID NO: 16281 - DNA, 17 bp, synthetic construct
  misc_feature 1..17: note = Oligonucleotide
  source 1..17: mol_type = other DNA
gcagtgagctgagactg

SEQ ID NO: 16282 - DNA, 17 bp, synthetic construct
  misc_feature 1..17: note = Oligonucleotide
  source 1..17: mol_type = other DNA
gttgcagtgagctgaga

SEQ ID NO: 16283 - DNA, 17 bp, synthetic construct
  misc_feature 1..17: note = Oligonucleotide
  source 1..17: mol_type = other DNA
gaggttgcagtgagctg

SEQ ID NO: 16284 - DNA, 17 bp, synthetic construct
  misc_feature 1..17: note = Oligonucleotide
  source 1..17: mol_type = other DNA
gcggaggttgcagtgag

SEQ ID NO: 16285 - DNA, 17 bp, synthetic construct
  misc_feature 1..17: note = Oligonucleotide
  source 1..17: mol_type = other DNA
gaggcggaggttgcagt

SEQ ID NO: 16286 - DNA, 17 bp, synthetic construct
  misc_feature 1..17: note = Oligonucleotide
  source 1..17: mol_type = other DNA
tgggaggcggaggttgc

SEQ ID NO: 16287 - DNA, 17 bp, synthetic construct
  misc_feature 1..17: note = Oligonucleotide
  source 1..17: mol_type = other DNA
acctgggaggcggaggt

SEQ ID NO: 16288 - DNA, 17 bp, synthetic construct
  misc_feature 1..17: note = Oligonucleotide
  source 1..17: mol_type = other DNA
tgaacctgggaggcgga

SEQ ID NO: 16289 - DNA, 17 bp, synthetic construct
  misc_feature 1..17: note = Oligonucleotide
  source 1..17: mol_type = other DNA
gcttgaacctgggaggc

SEQ ID NO: 16290 - DNA, 17 bp, synthetic construct
  misc_feature 1..17: note = Oligonucleotide
  source 1..17: mol_type = other DNA
attgcttgaacctggga

SEQ ID NO: 16291 - DNA, 17 bp, synthetic construct
  misc_feature 1..17: note = Oligonucleotide
  source 1..17: mol_type = other DNA
agaattgcttgaacctg

SEQ ID NO: 16292 - DNA, 17 bp, synthetic construct
  misc_feature 1..17: note = Oligonucleotide
  source 1..17: mol_type = other DNA
aggagaattgcttgaac

SEQ ID NO: 16293 - DNA, 17 bp, synthetic construct
  misc_feature 1..17: note = Oligonucleotide
  source 1..17: mol_type = other DNA
ggcaggagaattgcttg

SEQ ID NO: 16294 - DNA, 17 bp, synthetic construct
  misc_feature 1..17: note = Oligonucleotide
  source 1..17: mol_type = other DNA
tgaggcaggagaattgc

SEQ ID NO: 16295 - DNA, 17 bp, synthetic construct
  misc_feature 1..17: note = Oligonucleotide
  source 1..17: mol_type = other DNA
ggctgaggcaggagaat

SEQ ID NO: 16296 - DNA, 17 bp, synthetic construct
  misc_feature 1..17: note = Oligonucleotide
  source 1..17: mol_type = other DNA
ggaggctgaggcaggag

SEQ ID NO: 16297 - DNA, 17 bp, synthetic construct
  misc_feature 1..17: note = Oligonucleotide
  source 1..17: mol_type = other DNA
tttggaggctgaggcag

SEQ ID NO: 16298 - DNA, 17 bp, synthetic construct
  misc_feature 1..17: note = Oligonucleotide
  source 1..17: mol_type = other DNA
tactttggaggctgagg

SEQ ID NO: 16299 - DNA, 17 bp, synthetic construct
  misc_feature 1..17: note = Oligonucleotide
  source 1..17: mol_type = other DNA
agctactttggaggctg

SEQ ID NO: 16300 - DNA, 17 bp, synthetic construct
  misc_feature 1..17: note = Oligonucleotide
  source 1..17: mol_type = other DNA
cccagctactttggagg

SEQ ID NO: 16301 - DNA, 17 bp, synthetic construct
  misc_feature 1..17: note = Oligonucleotide
  source 1..17: mol_type = other DNA
aatcccagctactttgg

SEQ ID NO: 16302 - DNA, 17 bp, synthetic construct
  misc_feature 1..17: note = Oligonucleotide
  source 1..17: mol_type = other DNA
tgtaatcccagctactt

SEQ ID NO: 16303 - DNA, 17 bp, synthetic construct
  misc_feature 1..17: note = Oligonucleotide
  source 1..17: mol_type = other DNA
acctgtaatcccagcta

SEQ ID NO: 16304 - DNA, 17 bp, synthetic construct
  misc_feature 1..17: note = Oligonucleotide
  source 1..17: mol_type = other DNA
cacacctgtaatcccag

SEQ ID NO: 16305 - DNA, 17 bp, synthetic construct
  misc_feature 1..17: note = Oligonucleotide
  source 1..17: mol_type = other DNA
gcacacacctgtaatcc

SEQ ID NO: 16306 - DNA, 17 bp, synthetic construct
  misc_feature 1..17: note = Oligonucleotide
  source 1..17: mol_type = other DNA
gtggcacacacctgtaa

SEQ ID NO: 16307 - DNA, 17 bp, synthetic construct
  misc_feature 1..17: note = Oligonucleotide
  source 1..17: mol_type = other DNA
atggtggcacacacctg

SEQ ID NO: 16308 - DNA, 17 bp, synthetic construct
  misc_feature 1..17: note = Oligonucleotide
  source 1..17: mol_type = other DNA
ggcatggtggcacacac

SEQ ID NO: 16309 - DNA, 17 bp, synthetic construct
  misc_feature 1..17: note = Oligonucleotide
  source 1..17: mol_type = other DNA
ctgggcatggtggcaca

SEQ ID NO: 16310 - DNA, 17 bp, synthetic construct
  misc_feature 1..17: note = Oligonucleotide
  source 1..17: mol_type = other DNA
tagctgggcatggtggc

SEQ ID NO: 16311 - DNA, 17 bp, synthetic construct
  misc_feature 1..17: note = Oligonucleotide
  source 1..17: mol_type = other DNA
acttagctgggcatggt

SEQ ID NO: 16312 - DNA, 17 bp, synthetic construct
  misc_feature 1..17: note = Oligonucleotide
  source 1..17: mol_type = other DNA
aaaacttagctgggcat

SEQ ID NO: 16313 - DNA, 17 bp, synthetic construct
  misc_feature 1..17: note = Oligonucleotide
  source 1..17: mol_type = other DNA
tacaaaacttagctggg

SEQ ID NO: 16314 - DNA, 17 bp, synthetic construct
  misc_feature 1..17: note = Oligonucleotide
  source 1..17: mol_type = other DNA
taatacaaaacttagct

SEQ ID NO: 16315 - DNA, 17 bp, synthetic construct
  misc_feature 1..17: note = Oligonucleotide
  source 1..17: mol_type = other DNA
taataatacaaaactta

SEQ ID NO: 16316 - DNA, 17 bp, synthetic construct
  misc_feature 1..17: note = Oligonucleotide
  source 1..17: mol_type = other DNA
tactaataatacaaaac

SEQ ID NO: 16317 - DNA, 17 bp, synthetic construct
  misc_feature 1..17: note = Oligonucleotide
  source 1..17: mol_type = other DNA
ctctactaataatacaa

SEQ ID NO: 16318 - DNA, 17 bp, synthetic construct
  misc_feature 1..17: note = Oligonucleotide
  source 1..17: mol_type = other DNA
catctctactaataata

SEQ ID NO: 16319 - DNA, 17 bp, synthetic construct
  misc_feature 1..17: note = Oligonucleotide
  source 1..17: mol_type = other DNA
ccccatctctactaata

SEQ ID NO: 16320 - DNA, 17 bp, synthetic construct
  misc_feature 1..17: note = Oligonucleotide
  source 1..17: mol_type = other DNA
aaaccccatctctacta

SEQ ID NO: 16321 - DNA, 17 bp, synthetic construct
  misc_feature 1..17: note = Oligonucleotide
  source 1..17: mol_type = other DNA
gtaaaaccccatctcta

SEQ ID NO: 16322 - DNA, 17 bp, synthetic construct
  misc_feature 1..17: note = Oligonucleotide
  source 1..17: mol_type = other DNA
atggtaaaaccccatct

SEQ ID NO: 16323 - DNA, 17 bp, synthetic construct
  misc_feature 1..17: note = Oligonucleotide
  source 1..17: mol_type = other DNA
aacatggtaaaacccca

SEQ ID NO: 16324 - DNA, 17 bp, synthetic construct
  misc_feature 1..17: note = Oligonucleotide
  source 1..17: mol_type = other DNA
cccaacatggtaaaacc

SEQ ID NO: 16325 - DNA, 17 bp, synthetic construct
  misc_feature 1..17: note = Oligonucleotide
  source 1..17: mol_type = other DNA
ctgcccaacatggtaaa

SEQ ID NO: 16326 - DNA, 17 bp, synthetic construct
  misc_feature 1..17: note = Oligonucleotide
  source 1..17: mol_type = other DNA
agcctgcccaacatggt

SEQ ID NO: 16327 - DNA, 17 bp, synthetic construct
  misc_feature 1..17: note = Oligonucleotide
  source 1..17: mol_type = other DNA
accagcctgcccaacat

SEQ ID NO: 16328 - DNA, 17 bp, synthetic construct
  misc_feature 1..17: note = Oligonucleotide
  source 1..17: mol_type = other DNA
gagaccagcctgcccaa

SEQ ID NO: 16329 - DNA, 17 bp, synthetic construct
  misc_feature 1..17: note = Oligonucleotide
  source 1..17: mol_type = other DNA
ttcgagaccagcctgcc

SEQ ID NO: 16330 - DNA, 17 bp, synthetic construct
  misc_feature 1..17: note = Oligonucleotide
  source 1..17: mol_type = other DNA
gagttcgagaccagcct

SEQ ID NO: 16331 - DNA, 17 bp, synthetic construct
  misc_feature 1..17: note = Oligonucleotide
  source 1..17: mol_type = other DNA
caagagttcgagaccag

SEQ ID NO: 16332 - DNA, 17 bp, synthetic construct
  misc_feature 1..17: note = Oligonucleotide
  source 1..17: mol_type = other DNA
ggtcaagagttcgagac

SEQ ID NO: 16333 - DNA, 17 bp, synthetic construct
  misc_feature 1..17: note = Oligonucleotide
  source 1..17: mol_type = other DNA
tgaggtcaagagttcga

SEQ ID NO: 16334 - DNA, 17 bp, synthetic construct
  misc_feature 1..17: note = Oligonucleotide
  source 1..17: mol_type = other DNA
acctgaggtcaagagtt

SEQ ID NO: 16335 - DNA, 17 bp, synthetic construct
  misc_feature 1..17: note = Oligonucleotide
  source 1..17: mol_type = other DNA
atcacctgaggtcaaga

SEQ ID NO: 16336 - DNA, 17 bp, synthetic construct
  misc_feature 1..17: note = Oligonucleotide
  source 1..17: mol_type = other DNA
tggatcacctgaggtca

SEQ ID NO: 16337 - DNA, 17 bp, synthetic construct
  misc_feature 1..17: note = Oligonucleotide
  source 1..17: mol_type = other DNA
gggtggatcacctgagg

SEQ ID NO: 16338 - DNA, 17 bp, synthetic construct
  misc_feature 1..17: note = Oligonucleotide
  source 1..17: mol_type = other DNA
ggcgggtggatcacctg

SEQ ID NO: 16339 - DNA, 17 bp, synthetic construct
  misc_feature 1..17: note = Oligonucleotide
  source 1..17: mol_type = other DNA
agaggcgggtggatcac

SEQ ID NO: 16340 - DNA, 17 bp, synthetic construct
  misc_feature 1..17: note = Oligonucleotide
  source 1..17: mol_type = other DNA
gacagaggcgggtggat

SEQ ID NO: 16341 - DNA, 17 bp, synthetic construct
  misc_feature 1..17: note = Oligonucleotide
  source 1..17: mol_type = other DNA
ggagacagaggcgggtg

SEQ ID NO: 16342 - DNA, 17 bp, synthetic construct
  misc_feature 1..17: note = Oligonucleotide
  source 1..17: mol_type = other DNA
ttgggagacagaggcgg

SEQ ID NO: 16343 - DNA, 17 bp, synthetic construct
  misc_feature 1..17: note = Oligonucleotide
  source 1..17: mol_type = other DNA
actttgggagacagagg

SEQ ID NO: 16344 - DNA, 17 bp, synthetic construct
  misc_feature 1..17: note = Oligonucleotide
  source 1..17: mol_type = other DNA
aacactttgggagacag

SEQ ID NO: 16345 - DNA, 17 bp, synthetic construct
  misc_feature 1..17: note = Oligonucleotide
  source 1..17: mol_type = other DNA
cccaacactttgggaga

SEQ ID NO: 16346 - DNA, 17 bp, synthetic construct
  misc_feature 1..17: note = Oligonucleotide
  source 1..17: mol_type = other DNA
aatcccaacactttggg

SEQ ID NO: 16347 - DNA, 17 bp, synthetic construct
  misc_feature 1..17: note = Oligonucleotide
  source 1..17: mol_type = other DNA
tgtaatcccaacacttt

SEQ ID NO: 16348 - DNA, 17 bp, synthetic construct
  misc_feature 1..17: note = Oligonucleotide
  source 1..17: mol_type = other DNA
gcctgtaatcccaacac

SEQ ID NO: 16349 - DNA, 17 bp, synthetic construct
  misc_feature 1..17: note = Oligonucleotide
  source 1..17: mol_type = other DNA
catgcctgtaatcccaa

SEQ ID NO: 16350 - DNA, 17 bp, synthetic construct
  misc_feature 1..17: note = Oligonucleotide
  source 1..17: mol_type = other DNA
gctcatgcctgtaatcc

SEQ ID NO: 16351 - DNA, 17 bp, synthetic construct
  misc_feature 1..17: note = Oligonucleotide
  source 1..17: mol_type = other DNA
gtggctcatgcctgtaa

SEQ ID NO: 16352 - DNA, 17 bp, synthetic construct
  misc_feature 1..17: note = Oligonucleotide
  source 1..17: mol_type = other DNA
gcagtggctcatgcctg

SEQ ID NO: 16353 - DNA, 17 bp, synthetic construct
  misc_feature 1..17: note = Oligonucleotide
  source 1..17: mol_type = other DNA
ggtgcagtggctcatgc

SEQ ID NO: 16354 - DNA, 17 bp, synthetic construct
  misc_feature 1..17: note = Oligonucleotide
  source 1..17: mol_type = other DNA
ccgggtgcagtggctca

SEQ ID NO: 16355 - DNA, 17 bp, synthetic construct
  misc_feature 1..17: note = Oligonucleotide
  source 1..17: mol_type = other DNA
actccgggtgcagtggc

SEQ ID NO: 16356 - DNA, 17 bp, synthetic construct
  misc_feature 1..17: note = Oligonucleotide
  source 1..17: mol_type = other DNA
tacactccgggtgcagt

SEQ ID NO: 16357 - DNA, 17 bp, synthetic construct
  misc_feature 1..17: note = Oligonucleotide
  source 1..17: mol_type = other DNA
tactacactccgggtgc

SEQ ID NO: 16358 - DNA, 17 bp, synthetic construct
  misc_feature 1..17: note = Oligonucleotide
  source 1..17: mol_type = other DNA
agttactacactccggg

SEQ ID NO: 16359 - DNA, 17 bp, synthetic construct
  misc_feature 1..17: note = Oligonucleotide
  source 1..17: mol_type = other DNA
aaaagttactacactcc

SEQ ID NO: 16360 - DNA, 17 bp, synthetic construct
  misc_feature 1..17: note = Oligonucleotide
  source 1..17: mol_type = other DNA
ttcaaaagttactacac

SEQ ID NO: 16361 - DNA, 17 bp, synthetic construct
  misc_feature 1..17: note = Oligonucleotide
  source 1..17: mol_type = other DNA
gatttcaaaagttacta

SEQ ID NO: 16362 - DNA, 17 bp, synthetic construct
  misc_feature 1..17: note = Oligonucleotide
  source 1..17: mol_type = other DNA
cctgatttcaaaagtta

SEQ ID NO: 16363 - DNA, 17 bp, synthetic construct
  misc_feature 1..17: note = Oligonucleotide
  source 1..17: mol_type = other DNA
cctcctgatttcaaaag

SEQ ID NO: 16364 - DNA, 17 bp, synthetic construct
  misc_feature 1..17: note = Oligonucleotide
  source 1..17: mol_type = other DNA
aaacctcctgatttcaa

SEQ ID NO: 16365 - DNA, 17 bp, synthetic construct
  misc_feature 1..17: note = Oligonucleotide
  source 1..17: mol_type = other DNA
ctcaaacctcctgattt

SEQ ID NO: 16366 - DNA, 17 bp, synthetic construct
  misc_feature 1..17: note = Oligonucleotide
  source 1..17: mol_type = other DNA
gcactcaaacctcctga

SEQ ID NO: 16367 - DNA, 17 bp, synthetic construct
  misc_feature 1..17: note = Oligonucleotide
  source 1..17: mol_type = other DNA
gaagcactcaaacctcc

SEQ ID NO: 16368 - DNA, 17 bp, synthetic construct
  misc_feature 1..17: note = Oligonucleotide
  source 1..17: mol_type = other DNA
gttgaagcactcaaacc

SEQ ID NO: 16369 - DNA, 17 bp, synthetic construct
  misc_feature 1..17: note = Oligonucleotide
  source 1..17: mol_type = other DNA
caagttgaagcactcaa

SEQ ID NO: 16370 - DNA, 17 bp, synthetic construct
  misc_feature 1..17: note = Oligonucleotide
  source 1..17: mol_type = other DNA
gaacaagttgaagcact

SEQ ID NO: 16371 - DNA, 17 bp, synthetic construct
  misc_feature 1..17: note = Oligonucleotide
  source 1..17: mol_type = other DNA
taagaacaagttgaagc

SEQ ID NO: 16372 - DNA, 17 bp, synthetic construct
  misc_feature 1..17: note = Oligonucleotide
  source 1..17: mol_type = other DNA
aaataagaacaagttga

SEQ ID NO: 16373 - DNA, 17 bp, synthetic construct
  misc_feature 1..17: note = Oligonucleotide
  source 1..17: mol_type = other DNA
aacaaataagaacaagt

SEQ ID NO: 16374 - DNA, 17 bp, synthetic construct
  misc_feature 1..17: note = Oligonucleotide
  source 1..17: mol_type = other DNA
gataacaaataagaaca

SEQ ID NO: 16375 - DNA, 17 bp, synthetic construct
  misc_feature 1..17: note = Oligonucleotide
  source 1..17: mol_type = other DNA
aacgataacaaataaga

SEQ ID NO: 16376 - DNA, 17 bp, synthetic construct
  misc_feature 1..17: note = Oligonucleotide
  source 1..17: mol_type = other DNA
caaaacgataacaaata

SEQ ID NO: 16377 - DNA, 17 bp, synthetic construct
  misc_feature 1..17: note = Oligonucleotide
  source 1..17: mol_type = other DNA
agccaaaacgataacaa

SEQ ID NO: 16378 - DNA, 17 bp, synthetic construct
  misc_feature 1..17: note = Oligonucleotide
  source 1..17: mol_type = other DNA
attagccaaaacgataa

SEQ ID NO: 16379 - DNA, 17 bp, synthetic construct
  misc_feature 1..17: note = Oligonucleotide
  source 1..17: mol_type = other DNA
ctgattagccaaaacga

SEQ ID NO: 16380 - DNA, 17 bp, synthetic construct
  misc_feature 1..17: note = Oligonucleotide
  source 1..17: mol_type = other DNA
gccctgattagccaaaa

SEQ ID NO: 16381 - DNA, 17 bp, synthetic construct
  misc_feature 1..17: note = Oligonucleotide
  source 1..17: mol_type = other DNA
ggggccctgattagcca

SEQ ID NO: 16382 - DNA, 17 bp, synthetic construct
  misc_feature 1..17: note = Oligonucleotide
  source 1..17: mol_type = other DNA
ccaggggccctgattag

SEQ ID NO: 16383 - DNA, 17 bp, synthetic construct
  misc_feature 1..17: note = Oligonucleotide
  source 1..17: mol_type = other DNA
ttgccaggggccctgat

SEQ ID NO: 16384 - DNA, 17 bp, synthetic construct
  misc_feature 1..17: note = Oligonucleotide
  source 1..17: mol_type = other DNA
gaattgccaggggccct

SEQ ID NO: 16385 - DNA, 17 bp, synthetic construct
  misc_feature 1..17: note = Oligonucleotide
  source 1..17: mol_type = other DNA
atggaattgccaggggc

SEQ ID NO: 16386 - DNA, 17 bp, synthetic construct
  misc_feature 1..17: note = Oligonucleotide
  source 1..17: mol_type = other DNA
tatatggaattgccagg

SEQ ID NO: 16387 - DNA, 17 bp, synthetic construct
  misc_feature 1..17: note = Oligonucleotide
  source 1..17: mol_type = other DNA
gtctatatggaattgcc

SEQ ID NO: 16388 - DNA, 17 bp, synthetic construct
  misc_feature 1..17: note = Oligonucleotide
  source 1..17: mol_type = other DNA
caagtctatatggaatt

SEQ ID NO: 16389 - DNA, 17 bp, synthetic construct
  misc_feature 1..17: note = Oligonucleotide
  source 1..17: mol_type = other DNA
gttcaagtctatatgga

SEQ ID NO: 16390 - DNA, 17 bp, synthetic construct
  misc_feature 1..17: note = Oligonucleotide
  source 1..17: mol_type = other DNA
aatgttcaagtctatat

SEQ ID NO: 16391 - DNA, 17 bp, synthetic construct
  misc_feature 1..17: note = Oligonucleotide
  source 1..17: mol_type = other DNA
agcaatgttcaagtcta

SEQ ID NO: 16392 - DNA, 17 bp, synthetic construct
  misc_feature 1..17: note = Oligonucleotide
  source 1..17: mol_type = other DNA
aaaagcaatgttcaagt

SEQ ID NO: 16393 - DNA, 17 bp, synthetic construct
  misc_feature 1..17: note = Oligonucleotide
  source 1..17: mol_type = other DNA
tagaaaagcaatgttca

SEQ ID NO: 16394 - DNA, 17 bp, synthetic construct
  misc_feature 1..17: note = Oligonucleotide
  source 1..17: mol_type = other DNA
aaatagaaaagcaatgt

SEQ ID NO: 16395 - DNA, 17 bp, synthetic construct
  misc_feature 1..17: note = Oligonucleotide
  source 1..17: mol_type = other DNA
cacaaatagaaaagcaa

SEQ ID NO: 16396 - DNA, 17 bp, synthetic construct
  misc_feature 1..17: note = Oligonucleotide
  source 1..17: mol_type = other DNA
ttgcacaaatagaaaag

SEQ ID NO: 16397 - DNA, 17 bp, synthetic construct
  misc_feature 1..17: note = Oligonucleotide
  source 1..17: mol_type = other DNA
tttttgcacaaatagaa

SEQ ID NO: 16398 - DNA, 17 bp, synthetic construct
  misc_feature 1..17: note = Oligonucleotide
  source 1..17: mol_type = other DNA
ccctttttgcacaaata

SEQ ID NO: 16399 - DNA, 17 bp, synthetic construct
  misc_feature 1..17: note = Oligonucleotide
  source 1..17: mol_type = other DNA
tgtccctttttgcacaa

SEQ ID NO: 16400 - DNA, 17 bp, synthetic construct
  misc_feature 1..17: note = Oligonucleotide
  source 1..17: mol_type = other DNA
caatgtccctttttgca

SEQ ID NO: 16401 - DNA, 17 bp, synthetic construct
  misc_feature 1..17: note = Oligonucleotide
  source 1..17: mol_type = other DNA
ttccaatgtcccttttt

SEQ ID NO: 16402 - DNA, 17 bp, synthetic construct
  misc_feature 1..17: note = Oligonucleotide
  source 1..17: mol_type = other DNA
aaattccaatgtccctt

SEQ ID NO: 16403 - DNA, 17 bp, synthetic construct
  misc_feature 1..17: note = Oligonucleotide
  source 1..17: mol_type = other DNA
gcaaaattccaatgtcc

SEQ ID NO: 16404 - DNA, 17 bp, synthetic construct
  misc_feature 1..17: note = Oligonucleotide
  source 1..17: mol_type = other DNA
aatgcaaaattccaatg

SEQ ID NO: 16405 - DNA, 17 bp, synthetic construct
  misc_feature 1..17: note = Oligonucleotide
  source 1..17: mol_type = other DNA
ttcaatgcaaaattcca

SEQ ID NO: 16406 - DNA, 17 bp, synthetic construct
  misc_feature 1..17: note = Oligonucleotide
  source 1..17: mol_type = other DNA
agattcaatgcaaaatt

SEQ ID NO: 16407 - DNA, 17 bp, synthetic construct
  misc_feature 1..17: note = Oligonucleotide
  source 1..17: mol_type = other DNA
gacagattcaatgcaaa

SEQ ID NO: 16408 - DNA, 17 bp, synthetic construct
  misc_feature 1..17: note = Oligonucleotide
  source 1..17: mol_type = other DNA
gatgacagattcaatgc

SEQ ID NO: 16409 - DNA, 17 bp, synthetic construct
  misc_feature 1..17: note = Oligonucleotide
  source 1..17: mol_type = other DNA
agtgatgacagattcaa

SEQ ID NO: 16410 - DNA, 17 bp, synthetic construct
  misc_feature 1..17: note = Oligonucleotide
  source 1..17: mol_type = other DNA
cagagtgatgacagatt

SEQ ID NO: 16411 - DNA, 17 bp, synthetic construct
  misc_feature 1..17: note = Oligonucleotide
  source 1..17: mol_type = other DNA
acccagagtgatgacag

SEQ ID NO: 16412 - DNA, 17 bp, synthetic construct
  misc_feature 1..17: note = Oligonucleotide
  source 1..17: mol_type = other DNA
gtcacccagagtgatga

SEQ ID NO: 16413 - DNA, 17 bp, synthetic construct
  misc_feature 1..17: note = Oligonucleotide
  source 1..17: mol_type = other DNA
aatgtcacccagagtga

SEQ ID NO: 16414 - DNA, 17 bp, synthetic construct
  misc_feature 1..17: note = Oligonucleotide
  source 1..17: mol_type = other DNA
gttaatgtcacccagag

SEQ ID NO: 16415 - DNA, 17 bp, synthetic construct
  misc_feature 1..17: note = Oligonucleotide
  source 1..17: mol_type = other DNA
aatgttaatgtcaccca

SEQ ID NO: 16416 - DNA, 17 bp, synthetic construct
  misc_feature 1..17: note = Oligonucleotide
  source 1..17: mol_type = other DNA
taaaatgttaatgtcac

SEQ ID NO: 16417 - DNA, 17 bp, synthetic construct
  misc_feature 1..17: note = Oligonucleotide
  source 1..17: mol_type = other DNA
tgttaaaatgttaatgt

SEQ ID NO: 16418 - DNA, 17 bp, synthetic construct
  misc_feature 1..17: note = Oligonucleotide
  source 1..17: mol_type = other DNA
tggtgttaaaatgttaa

SEQ ID NO: 16419 - DNA, 17 bp, synthetic construct
  misc_feature 1..17: note = Oligonucleotide
  source 1..17: mol_type = other DNA
caatggtgttaaaatgt

SEQ ID NO: 16420 - DNA, 17 bp, synthetic construct
  misc_feature 1..17: note = Oligonucleotide
  source 1..17: mol_type = other DNA
agacaatggtgttaaaa

SEQ ID NO: 16421 - DNA, 17 bp, synthetic construct
  misc_feature 1..17: note = Oligonucleotide
  source 1..17: mol_type = other DNA
ggaagacaatggtgtta

SEQ ID NO: 16422 - DNA, 17 bp, synthetic construct
  misc_feature 1..17: note = Oligonucleotide
  source 1..17: mol_type = other DNA
attggaagacaatggtg

SEQ ID NO: 16423 - DNA, 17 bp, synthetic construct
  misc_feature 1..17: note = Oligonucleotide
  source 1..17: mol_type = other DNA
ttaattggaagacaatg

SEQ ID NO: 16424 - DNA, 17 bp, synthetic construct
  misc_feature 1..17: note = Oligonucleotide
  source 1..17: mol_type = other DNA
tcattaattggaagaca

SEQ ID NO: 16425 - DNA, 17 bp, synthetic construct
  misc_feature 1..17: note = Oligonucleotide
  source 1..17: mol_type = other DNA
tgttcattaattggaag

SEQ ID NO: 16426 - DNA, 17 bp, synthetic construct
  misc_feature 1..17: note = Oligonucleotide
  source 1..17: mol_type = other DNA
ccatgttcattaattgg

SEQ ID NO: 16427 - DNA, 17 bp, synthetic construct
  misc_feature 1..17: note = Oligonucleotide
  source 1..17: mol_type = other DNA
atcccatgttcattaat

SEQ ID NO: 16428 - DNA, 17 bp, synthetic construct
  misc_feature 1..17: note = Oligonucleotide
  source 1..17: mol_type = other DNA
gacatcccatgttcatt

SEQ ID NO: 16429 - DNA, 17 bp, synthetic construct
  misc_feature 1..17: note = Oligonucleotide
  source 1..17: mol_type = other DNA
aaggacatcccatgttc

SEQ ID NO: 16430 - DNA, 17 bp, synthetic construct
  misc_feature 1..17: note = Oligonucleotide
  source 1..17: mol_type = other DNA
taaaaggacatcccatg

SEQ ID NO: 16431 - DNA, 17 bp, synthetic construct
  misc_feature 1..17: note = Oligonucleotide
  source 1..17: mol_type = other DNA
aaataaaaggacatccc

SEQ ID NO: 16432 - DNA, 17 bp, synthetic construct
  misc_feature 1..17: note = Oligonucleotide
  source 1..17: mol_type = other DNA
aataaataaaaggacat

SEQ ID NO: 16433 - DNA, 17 bp, synthetic construct
  misc_feature 1..17: note = Oligonucleotide
  source 1..17: mol_type = other DNA
ctaaataaataaaagga

SEQ ID NO: 16434 - DNA, 17 bp, synthetic construct
  misc_feature 1..17: note = Oligonucleotide
  source 1..17: mol_type = other DNA
gacctaaataaataaaa

SEQ ID NO: 16435 - DNA, 17 bp, synthetic construct
  misc_feature 1..17: note = Oligonucleotide
  source 1..17: mol_type = other DNA
gatgacctaaataaata

SEQ ID NO: 16436 - DNA, 17 bp, synthetic construct
  misc_feature 1..17: note = Oligonucleotide
  source 1..17: mol_type = other DNA
agagatgacctaaataa

SEQ ID NO: 16437 - DNA, 17 bp, synthetic construct
  misc_feature 1..17: note = Oligonucleotide
  source 1..17: mol_type = other DNA
cttagagatgacctaaa

SEQ ID NO: 16438 - DNA, 17 bp, synthetic construct
  misc_feature 1..17: note = Oligonucleotide
  source 1..17: mol_type = other DNA
ctgcttagagatgacct

SEQ ID NO: 16439 - DNA, 17 bp, synthetic construct
  misc_feature 1..17: note = Oligonucleotide
  source 1..17: mol_type = other DNA
acactgcttagagatga

SEQ ID NO: 16440 - DNA, 17 bp, synthetic construct
  misc_feature 1..17: note = Oligonucleotide
  source 1..17: mol_type = other DNA
aaaacactgcttagaga

SEQ ID NO: 16441 - DNA, 17 bp, synthetic construct
  misc_feature 1..17: note = Oligonucleotide
  source 1..17: mol_type = other DNA
gacaaaacactgcttag

SEQ ID NO: 16442 - DNA, 17 bp, synthetic construct
  misc_feature 1..17: note = Oligonucleotide
  source 1..17: mol_type = other DNA
aatgacaaaacactgct

SEQ ID NO: 16443 - DNA, 17 bp, synthetic construct
  misc_feature 1..17: note = Oligonucleotide
  source 1..17: mol_type = other DNA
gaaaatgacaaaacact

SEQ ID NO: 16444 - DNA, 17 bp, synthetic construct
  misc_feature 1..17: note = Oligonucleotide
  source 1..17: mol_type = other DNA
actgaaaatgacaaaac

SEQ ID NO: 16445 - DNA, 17 bp, synthetic construct
  misc_feature 1..17: note = Oligonucleotide
  source 1..17: mol_type = other DNA
tatactgaaaatgacaa

SEQ ID NO: 16446 - DNA, 17 bp, synthetic construct
  misc_feature 1..17: note = Oligonucleotide
  source 1..17: mol_type = other DNA
ctatatactgaaaatga

SEQ ID NO: 16447 - DNA, 17 bp, synthetic construct
  misc_feature 1..17: note = Oligonucleotide
  source 1..17: mol_type = other DNA
aatctatatactgaaaa

SEQ ID NO: 16448 - DNA, 17 bp, synthetic construct
  misc_feature 1..17: note = Oligonucleotide
  source 1..17: mol_type = other DNA
aaaaatctatatactga

SEQ ID NO: 16449 - DNA, 17 bp, synthetic construct
  misc_feature 1..17: note = Oligonucleotide
  source 1..17: mol_type = other DNA
taaaaaaatctatatac

SEQ ID NO: 16450 - DNA, 17 bp, synthetic construct
  misc_feature 1..17: note = Oligonucleotide
  source 1..17: mol_type = other DNA
aagtaaaaaaatctata

SEQ ID NO: 16451 - DNA, 17 bp, synthetic construct
  misc_feature 1..17: note = Oligonucleotide
  source 1..17: mol_type = other DNA
aggaagtaaaaaaatct

SEQ ID NO: 16452 - DNA, 17 bp, synthetic construct
  misc_feature 1..17: note = Oligonucleotide
  source 1..17: mol_type = other DNA
ctaaggaagtaaaaaaa

SEQ ID NO: 16453 - DNA, 17 bp, synthetic construct
  misc_feature 1..17: note = Oligonucleotide
  source 1..17: mol_type = other DNA
taactaaggaagtaaaa

SEQ ID NO: 16454 - DNA, 17 bp, synthetic construct
  misc_feature 1..17: note = Oligonucleotide
  source 1..17: mol_type = other DNA
atttaactaaggaagta

SEQ ID NO: 16455 - DNA, 17 bp, synthetic construct
  misc_feature 1..17: note = Oligonucleotide
  source 1..17: mol_type = other DNA
taaatttaactaaggaa

SEQ ID NO: 16456 - DNA, 17 bp, synthetic construct
  misc_feature 1..17: note = Oligonucleotide
  source 1..17: mol_type = other DNA
gaataaatttaactaag

SEQ ID NO: 16457 - DNA, 17 bp, synthetic construct
  misc_feature 1..17: note = Oligonucleotide
  source 1..17: mol_type = other DNA
caagaataaatttaact

SEQ ID NO: 16458 - DNA, 17 bp, synthetic construct
  misc_feature 1..17: note = Oligonucleotide
  source 1..17: mol_type = other DNA
aatcaagaataaattta

SEQ ID NO: 16459 - DNA, 17 bp, synthetic construct
  misc_feature 1..17: note = Oligonucleotide
  source 1..17: mol_type = other DNA
aataatcaagaataaat

SEQ ID NO: 16460 - DNA, 17 bp, synthetic construct
  misc_feature 1..17: note = Oligonucleotide
  source 1..17: mol_type = other DNA
gaaaataatcaagaata

SEQ ID NO: 16461 - DNA, 17 bp, synthetic construct
  misc_feature 1..17: note = Oligonucleotide
  source 1..17: mol_type = other DNA
gaagaaaataatcaaga

SEQ ID NO: 16462 - DNA, 17 bp, synthetic construct
  misc_feature 1..17: note = Oligonucleotide
  source 1..17: mol_type = other DNA
gaagaagaaaataatca

SEQ ID NO: 16463 - DNA, 17 bp, synthetic construct
  misc_feature 1..17: note = Oligonucleotide
  source 1..17: mol_type = other DNA
ccagaagaagaaaataa

SEQ ID NO: 16464 - DNA, 17 bp, synthetic construct
  misc_feature 1..17: note = Oligonucleotide
  source 1..17: mol_type = other DNA
catccagaagaagaaaa

SEQ ID NO: 16465 - DNA, 17 bp, synthetic construct
  misc_feature 1..17: note = Oligonucleotide
  source 1..17: mol_type = other DNA
tagcatccagaagaaga

SEQ ID NO: 16466 - DNA, 17 bp, synthetic construct
  misc_feature 1..17: note = Oligonucleotide
  source 1..17: mol_type = other DNA
taatagcatccagaaga

SEQ ID NO: 16467 - DNA, 17 bp, synthetic construct
  misc_feature 1..17: note = Oligonucleotide
  source 1..17: mol_type = other DNA
ttataatagcatccaga

SEQ ID NO: 16468 - DNA, 17 bp, synthetic construct
  misc_feature 1..17: note = Oligonucleotide
  source 1..17: mol_type = other DNA
catttataatagcatcc

SEQ ID NO: 16469 - DNA, 17 bp, synthetic construct
  misc_feature 1..17: note = Oligonucleotide
  source 1..17: mol_type = other DNA
ttccatttataatagca

SEQ ID NO: 16470 - DNA, 17 bp, synthetic construct
  misc_feature 1..17: note = Oligonucleotide
  source 1..17: mol_type = other DNA
taattccatttataata

SEQ ID NO: 16471 - DNA, 17 bp, synthetic construct
  misc_feature 1..17: note = Oligonucleotide
  source 1..17: mol_type = other DNA
aaataattccatttata

SEQ ID NO: 16472 - DNA, 17 bp, synthetic construct
  misc_feature 1..17: note = Oligonucleotide
  source 1..17: mol_type = other DNA
agaaaataattccattt

SEQ ID NO: 16473 - DNA, 17 bp, synthetic construct
  misc_feature 1..17: note = Oligonucleotide
  source 1..17: mol_type = other DNA
ttaagaaaataattcca

SEQ ID NO: 16474 - DNA, 17 bp, synthetic construct
  misc_feature 1..17: note = Oligonucleotide
  source 1..17: mol_type = other DNA
aaattaagaaaataatt

SEQ ID NO: 16475 - DNA, 17 bp, synthetic construct
  misc_feature 1..17: note = Oligonucleotide
  source 1..17: mol_type = other DNA
aggaaattaagaaaata

SEQ ID NO: 16476 - DNA, 17 bp, synthetic construct
  misc_feature 1..17: note = Oligonucleotide
  source 1..17: mol_type = other DNA
aaaaggaaattaagaaa

SEQ ID NO: 16477 - DNA, 17 bp, synthetic construct
  misc_feature 1..17: note = Oligonucleotide
  source 1..17: mol_type = other DNA
ccaaaaaggaaattaag

SEQ ID NO: 16478 - DNA, 17 bp, synthetic construct
  misc_feature 1..17: note = Oligonucleotide
  source 1..17: mol_type = other DNA
aatccaaaaaggaaatt

SEQ ID NO: 16479 - DNA, 17 bp, synthetic construct
  misc_feature 1..17: note = Oligonucleotide
  source 1..17: mol_type = other DNA
aacaatccaaaaaggaa

SEQ ID NO: 16480 - DNA, 17 bp, synthetic construct
  misc_feature 1..17: note = Oligonucleotide
  source 1..17: mol_type = other DNA
atgaacaatccaaaaag

SEQ ID NO: 16481 - DNA, 17 bp, synthetic construct
  misc_feature 1..17: note = Oligonucleotide
  source 1..17: mol_type = other DNA
gcaatgaacaatccaaa

SEQ ID NO: 16482 - DNA, 17 bp, synthetic construct
  misc_feature 1..17: note = Oligonucleotide
  source 1..17: mol_type = other DNA
ccagcaatgaacaatcc

SEQ ID NO: 16483 - DNA, 17 bp, synthetic construct
  misc_feature 1..17: note = Oligonucleotide
  source 1..17: mol_type = other DNA
acaccagcaatgaacaa

SEQ ID NO: 16484 - DNA, 17 bp, synthetic construct
  misc_feature 1..17: note = Oligonucleotide
  source 1..17: mol_type = other DNA
tacacaccagcaatgaa

SEQ ID NO: 16485 - DNA, 17 bp, synthetic construct
  misc_feature 1..17: note = Oligonucleotide
  source 1..17: mol_type = other DNA
ttttacacaccagcaat

SEQ ID NO: 16486 - DNA, 17 bp, synthetic construct
  misc_feature 1..17: note = Oligonucleotide
  source 1..17: mol_type = other DNA
tgtttttacacaccagc

SEQ ID NO: 16487 - DNA, 17 bp, synthetic construct
  misc_feature 1..17: note = Oligonucleotide
  source 1..17: mol_type = other DNA
acttgtttttacacacc

SEQ ID NO: 16488 - DNA, 17 bp, synthetic construct
  misc_feature 1..17: note = Oligonucleotide
  source 1..17: mol_type = other DNA
atcacttgtttttacac

SEQ ID NO: 16489 - DNA, 17 bp, synthetic construct
  misc_feature 1..17: note = Oligonucleotide
  source 1..17: mol_type = other DNA
aaaatcacttgttttta

SEQ ID NO: 16490 - DNA, 17 bp, synthetic construct
  misc_feature 1..17: note = Oligonucleotide
  source 1..17: mol_type = other DNA
acaaaaatcacttgttt

SEQ ID NO: 16491 - DNA, 17 bp, synthetic construct
  misc_feature 1..17: note = Oligonucleotide
  source 1..17: mol_type = other DNA
cacacaaaaatcacttg

SEQ ID NO: 16492 - DNA, 17 bp, synthetic construct
  misc_feature 1..17: note = Oligonucleotide
  source 1..17: mol_type = other DNA
cagcacacaaaaatcac

SEQ ID NO: 16493 - DNA, 17 bp, synthetic construct
  misc_feature 1..17: note = Oligonucleotide
  source 1..17: mol_type = other DNA
gatcagcacacaaaaat

SEQ ID NO: 16494 - DNA, 17 bp, synthetic construct
  misc_feature 1..17: note = Oligonucleotide
  source 1..17: mol_type = other DNA
caagatcagcacacaaa

SEQ ID NO: 16495 - DNA, 17 bp, synthetic construct
  misc_feature 1..17: note = Oligonucleotide
  source 1..17: mol_type = other DNA
gcacaagatcagcacac

SEQ ID NO: 16496 - DNA, 17 bp, synthetic construct
  misc_feature 1..17: note = Oligonucleotide
  source 1..17: mol_type = other DNA
agggcacaagatcagca

SEQ ID NO: 16497 - DNA, 17 bp, synthetic construct
  misc_feature 1..17: note = Oligonucleotide
  source 1..17: mol_type = other DNA
tgtagggcacaagatca

SEQ ID NO: 16498 - DNA, 17 bp, synthetic construct
  misc_feature 1..17: note = Oligonucleotide
  source 1..17: mol_type = other DNA
agttgtagggcacaaga

SEQ ID NO: 16499 - DNA, 17 bp, synthetic construct
  misc_feature 1..17: note = Oligonucleotide
  source 1..17: mol_type = other DNA
caaagttgtagggcaca

SEQ ID NO: 16500 - DNA, 17 bp, synthetic construct
  misc_feature 1..17: note = Oligonucleotide
  source 1..17: mol_type = other DNA
cagcaaagttgtagggc

SEQ ID NO: 16501 - DNA, 17 bp, synthetic construct
  misc_feature 1..17: note = Oligonucleotide
  source 1..17: mol_type = other DNA
attcagcaaagttgtag

SEQ ID NO: 16502 - DNA, 17 bp, synthetic construct
  misc_feature 1..17: note = Oligonucleotide
  source 1..17: mol_type = other DNA
caaattcagcaaagttg

SEQ ID NO: 16503 - DNA, 17 bp, synthetic construct
  misc_feature 1..17: note = Oligonucleotide
  source 1..17: mol_type = other DNA
aaacaaattcagcaaag

SEQ ID NO: 16504 - DNA, 17 bp, synthetic construct
  misc_feature 1..17: note = Oligonucleotide
  source 1..17: mol_type = other DNA
aataaacaaattcagca

SEQ ID NO: 16505 - DNA, 17 bp, synthetic construct
  misc_feature 1..17: note = Oligonucleotide
  source 1..17: mol_type = other DNA
gctaataaacaaattca

SEQ ID NO: 16506 - DNA, 17 bp, synthetic construct
  misc_feature 1..17: note = Oligonucleotide
  source 1..17: mol_type = other DNA
agagctaataaacaaat

SEQ ID NO: 16507 - DNA, 17 bp, synthetic construct
  misc_feature 1..17: note = Oligonucleotide
  source 1..17: mol_type = other DNA
actagagctaataaaca

SEQ ID NO: 16508 - DNA, 17 bp, synthetic construct
  misc_feature 1..17: note = Oligonucleotide
  source 1..17: mol_type = other DNA
gctactagagctaataa

SEQ ID NO: 16509 - DNA, 17 bp, synthetic construct
  misc_feature 1..17: note = Oligonucleotide
  source 1..17: mol_type = other DNA
agagctactagagctaa

SEQ ID NO: 16510 - DNA, 17 bp, synthetic construct
  misc_feature 1..17: note = Oligonucleotide
  source 1..17: mol_type = other DNA
aaaagagctactagagc

SEQ ID NO: 16511 - DNA, 17 bp, synthetic construct
  misc_feature 1..17: note = Oligonucleotide
  source 1..17: mol_type = other DNA
accaaaagagctactag

SEQ ID NO: 16512 - DNA, 17 bp, synthetic construct
  misc_feature 1..17: note = Oligonucleotide
  source 1..17: mol_type = other DNA
tacaccaaaagagctac

SEQ ID NO: 16513 - DNA, 17 bp, synthetic construct
  misc_feature 1..17: note = Oligonucleotide
  source 1..17: mol_type = other DNA
gaatacaccaaaagagc

SEQ ID NO: 16514 - DNA, 17 bp, synthetic construct
  misc_feature 1..17: note = Oligonucleotide
  source 1..17: mol_type = other DNA
aaagaatacaccaaaag

SEQ ID NO: 16515 - DNA, 17 bp, synthetic construct
  misc_feature 1..17: note = Oligonucleotide
  source 1..17: mol_type = other DNA
cccaaagaatacaccaa

SEQ ID NO: 16516 - DNA, 17 bp, synthetic construct
  misc_feature 1..17: note = Oligonucleotide
  source 1..17: mol_type = other DNA
aatcccaaagaatacac

SEQ ID NO: 16517 - DNA, 17 bp, synthetic construct
  misc_feature 1..17: note = Oligonucleotide
  source 1..17: mol_type = other DNA
gaaaatcccaaagaata

SEQ ID NO: 16518 - DNA, 17 bp, synthetic construct
  misc_feature 1..17: note = Oligonucleotide
  source 1..17: mol_type = other DNA
gtagaaaatcccaaaga

SEQ ID NO: 16519 - DNA, 17 bp, synthetic construct
  misc_feature 1..17: note = Oligonucleotide
  source 1..17: mol_type = other DNA
tatgtagaaaatcccaa

SEQ ID NO: 16520 - DNA, 17 bp, synthetic construct
  misc_feature 1..17: note = Oligonucleotide
  source 1..17: mol_type = other DNA
ctatatgtagaaaatcc

SEQ ID NO: 16521 - DNA, 17 bp, synthetic construct
  misc_feature 1..17: note = Oligonucleotide
  source 1..17: mol_type = other DNA
atcctatatgtagaaaa

SEQ ID NO: 16522 - DNA, 17 bp, synthetic construct
  misc_feature 1..17: note = Oligonucleotide
  source 1..17: mol_type = other DNA
atgatcctatatgtaga

SEQ ID NO: 16523 - DNA, 17 bp, synthetic construct
  misc_feature 1..17: note = Oligonucleotide
  source 1..17: mol_type = other DNA
ggcatgatcctatatgt

SEQ ID NO: 16524 - DNA, 17 bp, synthetic construct
  misc_feature 1..17: note = Oligonucleotide
  source 1..17: mol_type = other DNA
gatggcatgatcctata

SEQ ID NO: 16525 - DNA, 17 bp, synthetic construct
  misc_feature 1..17: note = Oligonucleotide
  source 1..17: mol_type = other DNA
gcagatggcatgatcct

SEQ ID NO: 16526 - DNA, 17 bp, synthetic construct
  misc_feature 1..17: note = Oligonucleotide
  source 1..17: mol_type = other DNA
tttgcagatggcatgat

SEQ ID NO: 16527 - DNA, 17 bp, synthetic construct
  misc_feature 1..17: note = Oligonucleotide
  source 1..17: mol_type = other DNA
ctatttgcagatggcat

SEQ ID NO: 16528 - DNA, 17 bp, synthetic construct
  misc_feature 1..17: note = Oligonucleotide
  source 1..17: mol_type = other DNA
tctctatttgcagatgg

SEQ ID NO: 16529 - DNA, 17 bp, synthetic construct
  misc_feature 1..17: note = Oligonucleotide
  source 1..17: mol_type = other DNA
ctatctctatttgcaga

SEQ ID NO: 16530 - DNA, 17 bp, synthetic construct
  misc_feature 1..17: note = Oligonucleotide
  source 1..17: mol_type = other DNA
aaactatctctatttgc

SEQ ID NO: 16531 - DNA, 17 bp, synthetic construct
  misc_feature 1..17: note = Oligonucleotide
  source 1..17: mol_type = other DNA
gtaaaactatctctatt

SEQ ID NO: 16532 - DNA, 17 bp, synthetic construct
  misc_feature 1..17: note = Oligonucleotide
  source 1..17: mol_type = other DNA
gaagtaaaactatctct

SEQ ID NO: 16533 - DNA, 17 bp, synthetic construct
  misc_feature 1..17: note = Oligonucleotide
  source 1..17: mol_type = other DNA
gaagaagtaaaactatc

SEQ ID NO: 16534 - DNA, 17 bp, synthetic construct
  misc_feature 1..17: note = Oligonucleotide
  source 1..17: mol_type = other DNA
aaggaagaagtaaaact

SEQ ID NO: 16535 - DNA, 17 bp, synthetic construct
  misc_feature 1..17: note = Oligonucleotide
  source 1..17: mol_type = other DNA
gggaaggaagaagtaaa

SEQ ID NO: 16536 - DNA, 17 bp, synthetic construct
  misc_feature 1..17: note = Oligonucleotide
  source 1..17: mol_type = other DNA
attgggaaggaagaagt

SEQ ID NO: 16537 - DNA, 17 bp, synthetic construct
  misc_feature 1..17: note = Oligonucleotide
  source 1..17: mol_type = other DNA
caaattgggaaggaaga

SEQ ID NO: 16538 - DNA, 17 bp, synthetic construct
  misc_feature 1..17: note = Oligonucleotide
  source 1..17: mol_type = other DNA
acccaaattgggaagga

SEQ ID NO: 16539 - DNA, 17 bp, synthetic construct
  misc_feature 1..17: note = Oligonucleotide
  source 1..17: mol_type = other DNA
ggcacccaaattgggaa

SEQ ID NO: 16540 - DNA, 17 bp, synthetic construct
  misc_feature 1..17: note = Oligonucleotide
  source 1..17: mol_type = other DNA
aaaggcacccaaattgg

SEQ ID NO: 16541 - DNA, 17 bp, synthetic construct
  misc_feature 1..17: note = Oligonucleotide
  source 1..17: mol_type = other DNA
aaaaaaggcacccaaat

SEQ ID NO: 16542 - DNA, 17 bp, synthetic construct
  misc_feature 1..17: note = Oligonucleotide
  source 1..17: mol_type = other DNA
taaaaaaaaggcaccca

SEQ ID NO: 16543 - DNA, 17 bp, synthetic construct
  misc_feature 1..17: note = Oligonucleotide
  source 1..17: mol_type = other DNA
aattaaaaaaaaggcac

SEQ ID NO: 16544 - DNA, 17 bp, synthetic construct
  misc_feature 1..17: note = Oligonucleotide
  source 1..17: mol_type = other DNA
aaaaattaaaaaaaagg

SEQ ID NO: 16545 - DNA, 17 bp, synthetic construct
  misc_feature 1..17: note = Oligonucleotide
  source 1..17: mol_type = other DNA
aataaaaattaaaaaaa

SEQ ID NO: 16546 - DNA, 17 bp, synthetic construct
  misc_feature 1..17: note = Oligonucleotide
  source 1..17: mol_type = other DNA
aaaaataaaaattaaaa

SEQ ID NO: 16547 - DNA, 17 bp, synthetic construct
  misc_feature 1..17: note = Oligonucleotide
  source 1..17: mol_type = other DNA
ggcaaaaataaaaatta

SEQ ID NO: 16548 - DNA, 17 bp, synthetic construct
  misc_feature 1..17: note = Oligonucleotide
  source 1..17: mol_type = other DNA
acaggcaaaaataaaaa

SEQ ID NO: 16549 - DNA, 17 bp, synthetic construct
  misc_feature 1..17: note = Oligonucleotide
  source 1..17: mol_type = other DNA
tagacaggcaaaaataa

SEQ ID NO: 16550 - DNA, 17 bp, synthetic construct
  misc_feature 1..17: note = Oligonucleotide
  source 1..17: mol_type = other DNA
ttctagacaggcaaaaa

SEQ ID NO: 16551 - DNA, 17 bp, synthetic construct
  misc_feature 1..17: note = Oligonucleotide
  source 1..17: mol_type = other DNA
aagttctagacaggcaa

SEQ ID NO: 16552 - DNA, 17 bp, synthetic construct
  misc_feature 1..17: note = Oligonucleotide
  source 1..17: mol_type = other DNA
tgaaagttctagacagg

SEQ ID NO: 16553 - DNA, 17 bp, synthetic construct
  misc_feature 1..17: note = Oligonucleotide
  source 1..17: mol_type = other DNA
tactgaaagttctagac

SEQ ID NO: 16554 - DNA, 17 bp, synthetic construct
  misc_feature 1..17: note = Oligonucleotide
  source 1..17: mol_type = other DNA
ccgtactgaaagttcta

SEQ ID NO: 16555 - DNA, 17 bp, synthetic construct
  misc_feature 1..17: note = Oligonucleotide
  source 1..17: mol_type = other DNA
acaccgtactgaaagtt

SEQ ID NO: 16556 - DNA, 17 bp, synthetic construct
  misc_feature 1..17: note = Oligonucleotide
  source 1..17: mol_type = other DNA
tcaacaccgtactgaaa

SEQ ID NO: 16557 - DNA, 17 bp, synthetic construct
  misc_feature 1..17: note = Oligonucleotide
  source 1..17: mol_type = other DNA
tattcaacaccgtactg

SEQ ID NO: 16558 - DNA, 17 bp, synthetic construct
  misc_feature 1..17: note = Oligonucleotide
  source 1..17: mol_type = other DNA
tggtattcaacaccgta

SEQ ID NO: 16559 - DNA, 17 bp, synthetic construct
  misc_feature 1..17: note = Oligonucleotide
  source 1..17: mol_type = other DNA
tactggtattcaacacc

SEQ ID NO: 16560 - DNA, 17 bp, synthetic construct
  misc_feature 1..17: note = Oligonucleotide
  source 1..17: mol_type = other DNA
tactactggtattcaac

SEQ ID NO: 16561 - DNA, 17 bp, synthetic construct
  misc_feature 1..17: note = Oligonucleotide
  source 1..17: mol_type = other DNA
ttttactactggtattc

SEQ ID NO: 16562 - DNA, 17 bp, synthetic construct
  misc_feature 1..17: note = Oligonucleotide
  source 1..17: mol_type = other DNA
tgcttttactactggta

SEQ ID NO: 16563 - DNA, 17 bp, synthetic construct
  misc_feature 1..17: note = Oligonucleotide
  source 1..17: mol_type = other DNA
gcctgcttttactactg

SEQ ID NO: 16564 - DNA, 17 bp, synthetic construct
  misc_feature 1..17: note = Oligonucleotide
  source 1..17: mol_type = other DNA
gatgcctgcttttacta

SEQ ID NO: 16565 - DNA, 17 bp, synthetic construct
  misc_feature 1..17: note = Oligonucleotide
  source 1..17: mol_type = other DNA
aaagatgcctgctttta

SEQ ID NO: 16566 - DNA, 17 bp, synthetic construct
  misc_feature 1..17: note = Oligonucleotide
  source 1..17: mol_type = other DNA
ggcaaagatgcctgctt

SEQ ID NO: 16567 - DNA, 17 bp, synthetic construct
  misc_feature 1..17: note = Oligonucleotide
  source 1..17: mol_type = other DNA
caaggcaaagatgcctg

SEQ ID NO: 16568 - DNA, 17 bp, synthetic construct
  misc_feature 1..17: note = Oligonucleotide
  source 1..17: mol_type = other DNA
gaacaaggcaaagatgc

SEQ ID NO: 16569 - DNA, 17 bp, synthetic construct
  misc_feature 1..17: note = Oligonucleotide
  source 1..17: mol_type = other DNA
caggaacaaggcaaaga

SEQ ID NO: 16570 - DNA, 17 bp, synthetic construct
  misc_feature 1..17: note = Oligonucleotide
  source 1..17: mol_type = other DNA
gatcaggaacaaggcaa

SEQ ID NO: 16571 - DNA, 17 bp, synthetic construct
  misc_feature 1..17: note = Oligonucleotide
  source 1..17: mol_type = other DNA
taagatcaggaacaagg

SEQ ID NO: 16572 - DNA, 17 bp, synthetic construct
  misc_feature 1..17: note = Oligonucleotide
  source 1..17: mol_type = other DNA
ccctaagatcaggaaca

SEQ ID NO: 16573 - DNA, 17 bp, synthetic construct
  misc_feature 1..17: note = Oligonucleotide
  source 1..17: mol_type = other DNA
tccccctaagatcagga

SEQ ID NO: 16574 - DNA, 17 bp, synthetic construct
  misc_feature 1..17: note = Oligonucleotide
  source 1..17: mol_type = other DNA
ctttccccctaagatca

SEQ ID NO: 16575 - DNA, 17 bp, synthetic construct
  misc_feature 1..17: note = Oligonucleotide
  source 1..17: mol_type = other DNA
atgctttccccctaaga

SEQ ID NO: 16576 - DNA, 17 bp, synthetic construct
  misc_feature 1..17: note = Oligonucleotide
  source 1..17: mol_type = other DNA
tgaatgctttcccccta

SEQ ID NO: 16577 - DNA, 17 bp, synthetic construct
  misc_feature 1..17: note = Oligonucleotide
  source 1..17: mol_type = other DNA
gattgaatgctttcccc

SEQ ID NO: 16578 - DNA, 17 bp, synthetic construct
  misc_feature 1..17: note = Oligonucleotide
  source 1..17: mol_type = other DNA
aaagattgaatgctttc

SEQ ID NO: 16579 - DNA, 17 bp, synthetic construct
  misc_feature 1..17: note = Oligonucleotide
  source 1..17: mol_type = other DNA
gtgaaagattgaatgct

SEQ ID NO: 16580 - DNA, 17 bp, synthetic construct
  misc_feature 1..17: note = Oligonucleotide
  source 1..17: mol_type = other DNA
atggtgaaagattgaat

SEQ ID NO: 16581 - DNA, 17 bp, synthetic construct
  misc_feature 1..17: note = Oligonucleotide
  source 1..17: mol_type = other DNA
acaatggtgaaagattg

SEQ ID NO: 16582 - DNA, 17 bp, synthetic construct
  misc_feature 1..17: note = Oligonucleotide
  source 1..17: mol_type = other DNA
tacacaatggtgaaaga

SEQ ID NO: 16583 - DNA, 17 bp, synthetic construct
  misc_feature 1..17: note = Oligonucleotide
  source 1..17: mol_type = other DNA
ccatacacaatggtgaa

SEQ ID NO: 16584 - DNA, 17 bp, synthetic construct
  misc_feature 1..17: note = Oligonucleotide
  source 1..17: mol_type = other DNA
gcaccatacacaatggt

SEQ ID NO: 16585 - DNA, 17 bp, synthetic construct
  misc_feature 1..17: note = Oligonucleotide
  source 1..17: mol_type = other DNA
atagcaccatacacaat

SEQ ID NO: 16586 - DNA, 17 bp, synthetic construct
  misc_feature 1..17: note = Oligonucleotide
  source 1..17: mol_type = other DNA
tagatagcaccatacac

SEQ ID NO: 16587 - DNA, 17 bp, synthetic construct
  misc_feature 1..17: note = Oligonucleotide
  source 1..17: mol_type = other DNA
acatagatagcaccata

SEQ ID NO: 16588 - DNA, 17 bp, synthetic construct
  misc_feature 1..17: note = Oligonucleotide
  source 1..17: mol_type = other DNA
cacacatagatagcacc

SEQ ID NO: 16589 - DNA, 17 bp, synthetic construct
  misc_feature 1..17: note = Oligonucleotide
  source 1..17: mol_type = other DNA
aaacacacatagatagc

SEQ ID NO: 16590 - DNA, 17 bp, synthetic construct
  misc_feature 1..17: note = Oligonucleotide
  source 1..17: mol_type = other DNA
aaaaaacacacatagat

SEQ ID NO: 16591 - DNA, 17 bp, synthetic construct
  misc_feature 1..17: note = Oligonucleotide
  source 1..17: mol_type = other DNA
caaaaaaaacacacata

SEQ ID NO: 16592 - DNA, 17 bp, synthetic construct
  misc_feature 1..17: note = Oligonucleotide
  source 1..17: mol_type = other DNA
aaacaaaaaaaacacac

SEQ ID NO: 16593 - DNA, 17 bp, synthetic construct
  misc_feature 1..17: note = Oligonucleotide
  source 1..17: mol_type = other DNA
aacaaacaaaaaaaaca

SEQ ID NO: 16594 - DNA, 17 bp, synthetic construct
  misc_feature 1..17: note = Oligonucleotide
  source 1..17: mol_type = other DNA
acaaacaaacaaaaaaa

SEQ ID NO: 16595 - DNA, 17 bp, synthetic construct
  misc_feature 1..17: note = Oligonucleotide
  source 1..17: mol_type = other DNA
aaaacaaacaaacaaaa

SEQ ID NO: 16596 - DNA, 17 bp, synthetic construct
  misc_feature 1..17: note = Oligonucleotide
  source 1..17: mol_type = other DNA
caaaaaacaaacaaaca

SEQ ID NO: 16597 - DNA, 17 bp, synthetic construct
  misc_feature 1..17: note = Oligonucleotide
  source 1..17: mol_type = other DNA
aaacaaaaaacaaacaa

SEQ ID NO: 16598 - DNA, 17 bp, synthetic construct
  misc_feature 1..17: note = Oligonucleotide
  source 1..17: mol_type = other DNA
aaaaaacaaaaaacaaa

SEQ ID NO: 16599 - DNA, 17 bp, synthetic construct
  misc_feature 1..17: note = Oligonucleotide
  source 1..17: mol_type = other DNA
tttaaaaaacaaaaaac

SEQ ID NO: 16600 - DNA, 17 bp, synthetic construct
  misc_feature 1..17: note = Oligonucleotide
  source 1..17: mol_type = other DNA
atatttaaaaaacaaaa

SEQ ID NO: 16601 - DNA, 17 bp, synthetic construct
  misc_feature 1..17: note = Oligonucleotide
  source 1..17: mol_type = other DNA
tccatatttaaaaaaca

SEQ ID NO: 16602 - DNA, 17 bp, synthetic construct
  misc_feature 1..17: note = Oligonucleotide
  source 1..17: mol_type = other DNA
cattccatatttaaaaa

SEQ ID NO: 16603 - DNA, 17 bp, synthetic construct
  misc_feature 1..17: note = Oligonucleotide
  source 1..17: mol_type = other DNA
aagcattccatatttaa

SEQ ID NO: 16604 - DNA, 17 bp, synthetic construct
  misc_feature 1..17: note = Oligonucleotide
  source 1..17: mol_type = other DNA
atgaagcattccatatt

SEQ ID NO: 16605 - DNA, 17 bp, synthetic construct
  misc_feature 1..17: note = Oligonucleotide
  source 1..17: mol_type = other DNA
ttaatgaagcattccat

SEQ ID NO: 16606 - DNA, 17 bp, synthetic construct
  misc_feature 1..17: note = Oligonucleotide
  source 1..17: mol_type = other DNA
aaattaatgaagcattc

SEQ ID NO: 16607 - DNA, 17 bp, synthetic construct
  misc_feature 1..17: note = Oligonucleotide
  source 1..17: mol_type = other DNA
tgcaaattaatgaagca

SEQ ID NO: 16608 - DNA, 17 bp, synthetic construct
  misc_feature 1..17: note = Oligonucleotide
  source 1..17: mol_type = other DNA
acatgcaaattaatgaa

SEQ ID NO: 16609 - DNA, 17 bp, synthetic construct
  misc_feature 1..17: note = Oligonucleotide
  source 1..17: mol_type = other DNA
atgacatgcaaattaat

SEQ ID NO: 16610 - DNA, 17 bp, synthetic construct
  misc_feature 1..17: note = Oligonucleotide
  source 1..17: mol_type = other DNA
aggatgacatgcaaatt

SEQ ID NO: 16611 - DNA, 17 bp, synthetic construct
  misc_feature 1..17: note = Oligonucleotide
  source 1..17: mol_type = other DNA
acaaggatgacatgcaa

SEQ ID NO: 16612 - DNA, 17 bp, synthetic construct
  misc_feature 1..17: note = Oligonucleotide
  source 1..17: mol_type = other DNA
tgcacaaggatgacatg

SEQ ID NO: 16613 - DNA, 17 bp, synthetic construct
  misc_feature 1..17: note = Oligonucleotide
  source 1..17: mol_type = other DNA
ccctgcacaaggatgac

SEQ ID NO: 16614 - DNA, 17 bp, synthetic construct
  misc_feature 1..17: note = Oligonucleotide
  source 1..17: mol_type = other DNA
gtcccctgcacaaggat

SEQ ID NO: 16615 - DNA, 17 bp, synthetic construct
  misc_feature 1..17: note = Oligonucleotide
  source 1..17: mol_type = other DNA
catgtcccctgcacaag

SEQ ID NO: 16616 - DNA, 17 bp, synthetic construct
  misc_feature 1..17: note = Oligonucleotide
  source 1..17: mol_type = other DNA
tagcatgtcccctgcac

SEQ ID NO: 16617 - DNA, 17 bp, synthetic construct
  misc_feature 1..17: note = Oligonucleotide
  source 1..17: mol_type = other DNA
gattagcatgtcccctg

SEQ ID NO: 16618 - DNA, 17 bp, synthetic construct
  misc_feature 1..17: note = Oligonucleotide
  source 1..17: mol_type = other DNA
agagattagcatgtccc

SEQ ID NO: 16619 - DNA, 17 bp, synthetic construct
  misc_feature 1..17: note = Oligonucleotide
  source 1..17: mol_type = other DNA
ttcagagattagcatgt

SEQ ID NO: 16620 - DNA, 17 bp, synthetic construct
  misc_feature 1..17: note = Oligonucleotide
  source 1..17: mol_type = other DNA
tgattcagagattagca

SEQ ID NO: 16621 - DNA, 17 bp, synthetic construct
  misc_feature 1..17: note = Oligonucleotide
  source 1..17: mol_type = other DNA
gaatgattcagagatta

SEQ ID NO: 16622 - DNA, 17 bp, synthetic construct
  misc_feature 1..17: note = Oligonucleotide
  source 1..17: mol_type = other DNA
ttagaatgattcagaga

SEQ ID NO: 16623 - DNA, 17 bp, synthetic construct
  misc_feature 1..17: note = Oligonucleotide
  source 1..17: mol_type = other DNA
aaattagaatgattcag

SEQ ID NO: 16624 - DNA, 17 bp, synthetic construct
  misc_feature 1..17: note = Oligonucleotide
  source 1..17: mol_type = other DNA
ctaaaattagaatgatt

SEQ ID NO: 16625 - DNA, 17 bp, synthetic construct
  misc_feature 1..17: note = Oligonucleotide
  source 1..17: mol_type = other DNA
atactaaaattagaatg

SEQ ID NO: 16626 - DNA, 17 bp, synthetic construct
  misc_feature 1..17: note = Oligonucleotide
  source 1..17: mol_type = other DNA
catatactaaaattaga

SEQ ID NO: 16627 - DNA, 17 bp, synthetic construct
  misc_feature 1..17: note = Oligonucleotide
  source 1..17: mol_type = other DNA
gcacatatactaaaatt

SEQ ID NO: 16628 - DNA, 17 bp, synthetic construct
  misc_feature 1..17: note = Oligonucleotide
  source 1..17: mol_type = other DNA
gcagcacatatactaaa

SEQ ID NO: 16629 - DNA, 17 bp, synthetic construct
  misc_feature 1..17: note = Oligonucleotide
  source 1..17: mol_type = other DNA
tctgcagcacatatact

SEQ ID NO: 16630 - DNA, 17 bp, synthetic construct
  misc_feature 1..17: note = Oligonucleotide
  source 1..17: mol_type = other DNA
gcttctgcagcacatat

SEQ ID NO: 16631 - DNA, 17 bp, synthetic construct
  misc_feature 1..17: note = Oligonucleotide
  source 1..17: mol_type = other DNA
cttgcttctgcagcaca

SEQ ID NO: 16632 - DNA, 17 bp, synthetic construct
  misc_feature 1..17: note = Oligonucleotide
  source 1..17: mol_type = other DNA
gtgcttgcttctgcagc

SEQ ID NO: 16633 - DNA, 17 bp, synthetic construct
  misc_feature 1..17: note = Oligonucleotide
  source 1..17: mol_type = other DNA
gaagtgcttgcttctgc

SEQ ID NO: 16634 - DNA, 17 bp, synthetic construct
  misc_feature 1..17: note = Oligonucleotide
  source 1..17: mol_type = other DNA
tccgaagtgcttgcttc

SEQ ID NO: 16635 - DNA, 17 bp, synthetic construct
  misc_feature 1..17: note = Oligonucleotide
  source 1..17: mol_type = other DNA
aaatccgaagtgcttgc

SEQ ID NO: 16636 - DNA, 17 bp, synthetic construct
  misc_feature 1..17: note = Oligonucleotide
  source 1..17: mol_type = other DNA
taaaaatccgaagtgct

SEQ ID NO: 16637 - DNA, 17 bp, synthetic construct
  misc_feature 1..17: note = Oligonucleotide
  source 1..17: mol_type = other DNA
tattaaaaatccgaagt

SEQ ID NO: 16638 - DNA, 17 bp, synthetic construct
  misc_feature 1..17: note = Oligonucleotide
  source 1..17: mol_type = other DNA
atttattaaaaatccga

SEQ ID NO: 16639 - DNA, 17 bp, synthetic construct
  misc_feature 1..17: note = Oligonucleotide
  source 1..17: mol_type = other DNA
gaaatttattaaaaatc

SEQ ID NO: 16640 - DNA, 17 bp, synthetic construct
  misc_feature 1..17: note = Oligonucleotide
  source 1..17: mol_type = other DNA
aaggaaatttattaaaa

SEQ ID NO: 16641 - DNA, 17 bp, synthetic construct
  misc_feature 1..17: note = Oligonucleotide
  source 1..17: mol_type = other DNA
ataaaggaaatttatta

SEQ ID NO: 16642 - DNA, 17 bp, synthetic construct
  misc_feature 1..17: note = Oligonucleotide
  source 1..17: mol_type = other DNA
ataataaaggaaattta

SEQ ID NO: 16643 - DNA, 17 bp, synthetic construct
  misc_feature 1..17: note = Oligonucleotide
  source 1..17: mol_type = other DNA
aacataataaaggaaat

SEQ ID NO: 16644 - DNA, 17 bp, synthetic construct
  misc_feature 1..17: note = Oligonucleotide
  source 1..17: mol_type = other DNA
ctcaacataataaagga

SEQ ID NO: 16645 - DNA, 17 bp, synthetic construct
  misc_feature 1..17: note = Oligonucleotide
  source 1..17: mol_type = other DNA
ttcctcaacataataaa

SEQ ID NO: 16646 - DNA, 17 bp, synthetic construct
  misc_feature 1..17: note = Oligonucleotide
  source 1..17: mol_type = other DNA
aacttcctcaacataat

SEQ ID NO: 16647 - DNA, 17 bp, synthetic construct
  misc_feature 1..17: note = Oligonucleotide
  source 1..17: mol_type = other DNA
agtaacttcctcaacat

SEQ ID NO: 16648 - DNA, 17 bp, synthetic construct
  misc_feature 1..17: note = Oligonucleotide
  source 1..17: mol_type = other DNA
gctagtaacttcctcaa

SEQ ID NO: 16649 - DNA, 17 bp, synthetic construct
  misc_feature 1..17: note = Oligonucleotide
  source 1..17: mol_type = other DNA
gaagctagtaacttcct

SEQ ID NO: 16650 - DNA, 17 bp, synthetic construct
  misc_feature 1..17: note = Oligonucleotide
  source 1..17: mol_type = other DNA
atagaagctagtaactt

SEQ ID NO: 16651 - DNA, 17 bp, synthetic construct
  misc_feature 1..17: note = Oligonucleotide
  source 1..17: mol_type = other DNA
gtaatagaagctagtaa

SEQ ID NO: 16652 - DNA, 17 bp, synthetic construct
  misc_feature 1..17: note = Oligonucleotide
  source 1..17: mol_type = other DNA
ctagtaatagaagctag

SEQ ID NO: 16653 - DNA, 17 bp, synthetic construct
  misc_feature 1..17: note = Oligonucleotide
  source 1..17: mol_type = other DNA
aaactagtaatagaagc

SEQ ID NO: 16654 - DNA, 17 bp, synthetic construct
  misc_feature 1..17: note = Oligonucleotide
  source 1..17: mol_type = other DNA
aggaaactagtaataga

SEQ ID NO: 16655 - DNA, 17 bp, synthetic construct
  misc_feature 1..17: note = Oligonucleotide
  source 1..17: mol_type = other DNA
ctcaggaaactagtaat

SEQ ID NO: 16656 - DNA, 17 bp, synthetic construct
  misc_feature 1..17: note = Oligonucleotide
  source 1..17: mol_type = other DNA
acactcaggaaactagt

SEQ ID NO: 16657 - DNA, 17 bp, synthetic construct
  misc_feature 1..17: note = Oligonucleotide
  source 1..17: mol_type = other DNA
aaaacactcaggaaact

SEQ ID NO: 16658 - DNA, 17 bp, synthetic construct
  misc_feature 1..17: note = Oligonucleotide
  source 1..17: mol_type = other DNA
ataaaaacactcaggaa

SEQ ID NO: 16659 - DNA, 17 bp, synthetic construct
  misc_feature 1..17: note = Oligonucleotide
  source 1..17: mol_type = other DNA
attataaaaacactcag

SEQ ID NO: 16660 - DNA, 17 bp, synthetic construct
  misc_feature 1..17: note = Oligonucleotide
  source 1..17: mol_type = other DNA
ttcattataaaaacact

SEQ ID NO: 16661 - DNA, 17 bp, synthetic construct
  misc_feature 1..17: note = Oligonucleotide
  source 1..17: mol_type = other DNA
tctttcattataaaaac

SEQ ID NO: 16662 - DNA, 17 bp, synthetic construct
  misc_feature 1..17: note = Oligonucleotide
  source 1..17: mol_type = other DNA
cactctttcattataaa

SEQ ID NO: 16663 - DNA, 17 bp, synthetic construct
  misc_feature 1..17: note = Oligonucleotide
  source 1..17: mol_type = other DNA
caacactctttcattat

SEQ ID NO: 16664 - DNA, 17 bp, synthetic construct
  misc_feature 1..17: note = Oligonucleotide
  source 1..17: mol_type = other DNA
atccaacactctttcat

SEQ ID NO: 16665 - DNA, 17 bp, synthetic construct
  misc_feature 1..17: note = Oligonucleotide
  source 1..17: mol_type = other DNA
ataatccaacactcttt

SEQ ID NO: 16666 - DNA, 17 bp, synthetic construct
  misc_feature 1..17: note = Oligonucleotide
  source 1..17: mol_type = other DNA
gccataatccaacactc

SEQ ID NO: 16667 - DNA, 17 bp, synthetic construct
  misc_feature 1..17: note = Oligonucleotide
  source 1..17: mol_type = other DNA
tctgccataatccaaca

SEQ ID NO: 16668 - DNA, 17 bp, synthetic construct
  misc_feature 1..17: note = Oligonucleotide
  source 1..17: mol_type = other DNA
gcatctgccataatcca

SEQ ID NO: 16669 - DNA, 17 bp, synthetic construct
  misc_feature 1..17: note = Oligonucleotide
  source 1..17: mol_type = other DNA
aaagcatctgccataat

SEQ ID NO: 16670 - DNA, 17 bp, synthetic construct
  misc_feature 1..17: note = Oligonucleotide
  source 1..17: mol_type = other DNA
taaaaagcatctgccat

SEQ ID NO: 16671 - DNA, 17 bp, synthetic construct
  misc_feature 1..17: note = Oligonucleotide
  source 1..17: mol_type = other DNA
gcataaaaagcatctgc

SEQ ID NO: 16672 - DNA, 17 bp, synthetic construct
  misc_feature 1..17: note = Oligonucleotide
  source 1..17: mol_type = other DNA
gatgcataaaaagcatc

SEQ ID NO: 16673 - DNA, 17 bp, synthetic construct
  misc_feature 1..17: note = Oligonucleotide
  source 1..17: mol_type = other DNA
attgatgcataaaaagc

SEQ ID NO: 16674 - DNA, 17 bp, synthetic construct
  misc_feature 1..17: note = Oligonucleotide
  source 1..17: mol_type = other DNA
tcaattgatgcataaaa

SEQ ID NO: 16675 - DNA, 17 bp, synthetic construct
  misc_feature 1..17: note = Oligonucleotide
  source 1..17: mol_type = other DNA
atttcaattgatgcata

SEQ ID NO: 16676 - DNA, 17 bp, synthetic construct
  misc_feature 1..17: note = Oligonucleotide
  source 1..17: mol_type = other DNA
atcatttcaattgatgc

SEQ ID NO: 16677 - DNA, 17 bp, synthetic construct
  misc_feature 1..17: note = Oligonucleotide
  source 1..17: mol_type = other DNA
atgatcatttcaattga

SEQ ID NO: 16678 - DNA, 17 bp, synthetic construct
  misc_feature 1..17: note = Oligonucleotide
  source 1..17: mol_type = other DNA
aaaatgatcatttcaat

SEQ ID NO: 16679 - DNA, 17 bp, synthetic construct
  misc_feature 1..17: note = Oligonucleotide
  source 1..17: mol_type = other DNA
ggaaaaatgatcatttc

SEQ ID NO: 16680 - DNA, 17 bp, synthetic construct
  misc_feature 1..17: note = Oligonucleotide
  source 1..17: mol_type = other DNA
gggggaaaaatgatcat

SEQ ID NO: 16681 - DNA, 17 bp, synthetic construct
  misc_feature 1..17: note = Oligonucleotide
  source 1..17: mol_type = other DNA
aaagggggaaaaatgat

SEQ ID NO: 16682 - DNA, 17 bp, synthetic construct
  misc_feature 1..17: note = Oligonucleotide
  source 1..17: mol_type = other DNA
aacaaagggggaaaaat

SEQ ID NO: 16683 - DNA, 17 bp, synthetic construct
  misc_feature 1..17: note = Oligonucleotide
  source 1..17: mol_type = other DNA
tagaacaaagggggaaa

SEQ ID NO: 16684 - DNA, 17 bp, synthetic construct
  misc_feature 1..17: note = Oligonucleotide
  source 1..17: mol_type = other DNA
taatagaacaaaggggg

SEQ ID NO: 16685 - DNA, 17 bp, synthetic construct
  misc_feature 1..17: note = Oligonucleotide
  source 1..17: mol_type = other DNA
cattaatagaacaaagg

SEQ ID NO: 16686 - DNA, 17 bp, synthetic construct
  misc_feature 1..17: note = Oligonucleotide
  source 1..17: mol_type = other DNA
tcacattaatagaacaa

SEQ ID NO: 16687 - DNA, 17 bp, synthetic construct
  misc_feature 1..17: note = Oligonucleotide
  source 1..17: mol_type = other DNA
acatcacattaatagaa

SEQ ID NO: 16688 - DNA, 17 bp, synthetic construct
  misc_feature 1..17: note = Oligonucleotide
  source 1..17: mol_type = other DNA
aatacatcacattaata

SEQ ID NO: 16689 - DNA, 17 bp, synthetic construct
  misc_feature 1..17: note = Oligonucleotide
  source 1..17: mol_type = other DNA
tataatacatcacatta

SEQ ID NO: 16690 - DNA, 17 bp, synthetic construct
  misc_feature 1..17: note = Oligonucleotide
  source 1..17: mol_type = other DNA
caatataatacatcaca

SEQ ID NO: 16691 - DNA, 17 bp, synthetic construct
  misc_feature 1..17: note = Oligonucleotide
  source 1..17: mol_type = other DNA
aatcaatataatacatc

SEQ ID NO: 16692 - DNA, 17 bp, synthetic construct
  misc_feature 1..17: note = Oligonucleotide
  source 1..17: mol_type = other DNA
tgtaatcaatataatac

SEQ ID NO: 16693 - DNA, 17 bp, synthetic construct
  misc_feature 1..17: note = Oligonucleotide
  source 1..17: mol_type = other DNA
taatgtaatcaatataa

SEQ ID NO: 16694 - DNA, 17 bp, synthetic construct
  misc_feature 1..17: note = Oligonucleotide
  source 1..17: mol_type = other DNA
gactaatgtaatcaata

SEQ ID NO: 16695 - DNA, 17 bp, synthetic construct
  misc_feature 1..17: note = Oligonucleotide
  source 1..17: mol_type = other DNA
acagactaatgtaatca

SEQ ID NO: 16696 - DNA, 17 bp, synthetic construct
  misc_feature 1..17: note = Oligonucleotide
  source 1..17: mol_type = other DNA
tctacagactaatgtaa

SEQ ID NO: 16697 - DNA, 17 bp, synthetic construct
  misc_feature 1..17: note = Oligonucleotide
  source 1..17: mol_type = other DNA
aaatctacagactaatg

SEQ ID NO: 16698 - DNA, 17 bp, synthetic construct
  misc_feature 1..17: note = Oligonucleotide
  source 1..17: mol_type = other DNA
aagaaatctacagacta

SEQ ID NO: 16699 - DNA, 17 bp, synthetic construct
  misc_feature 1..17: note = Oligonucleotide
  source 1..17: mol_type = other DNA
gaaaagaaatctacaga

SEQ ID NO: 16700 - DNA, 17 bp, synthetic construct
  misc_feature 1..17: note = Oligonucleotide
  source 1..17: mol_type = other DNA
caggaaaagaaatctac

SEQ ID NO: 16701 - DNA, 17 bp, synthetic construct
  misc_feature 1..17: note = Oligonucleotide
  source 1..17: mol_type = other DNA
ttgcaggaaaagaaatc

SEQ ID NO: 16702 - DNA, 17 bp, synthetic construct
  misc_feature 1..17: note = Oligonucleotide
  source 1..17: mol_type = other DNA
gcattgcaggaaaagaa

SEQ ID NO: 16703 - DNA, 17 bp, synthetic construct
  misc_feature 1..17: note = Oligonucleotide
  source 1..17: mol_type = other DNA
agggcattgcaggaaaa

SEQ ID NO: 16704 - DNA, 17 bp, synthetic construct
  misc_feature 1..17: note = Oligonucleotide
  source 1..17: mol_type = other DNA
ataagggcattgcagga

SEQ ID NO: 16705 - DNA, 17 bp, synthetic construct
  misc_feature 1..17: note = Oligonucleotide
  source 1..17: mol_type = other DNA
cagataagggcattgca

SEQ ID NO: 16706 - DNA, 17 bp, synthetic construct
  misc_feature 1..17: note = Oligonucleotide
  source 1..17: mol_type = other DNA
agccagataagggcatt

SEQ ID NO: 16707 - DNA, 17 bp, synthetic construct
  misc_feature 1..17: note = Oligonucleotide
  source 1..17: mol_type = other DNA
caaagccagataagggc

SEQ ID NO: 16708 - DNA, 17 bp, synthetic construct
  misc_feature 1..17: note = Oligonucleotide
  source 1..17: mol_type = other DNA
taccaaagccagataag

SEQ ID NO: 16709 - DNA, 17 bp, synthetic construct
  misc_feature 1..17: note = Oligonucleotide
  source 1..17: mol_type = other DNA
tgctaccaaagccagat

SEQ ID NO: 16710 - DNA, 17 bp, synthetic construct
  misc_feature 1..17: note = Oligonucleotide
  source 1..17: mol_type = other DNA
ccctgctaccaaagcca

SEQ ID NO: 16711 - DNA, 17 bp, synthetic construct
  misc_feature 1..17: note = Oligonucleotide
  source 1..17: mol_type = other DNA
ttaccctgctaccaaag

SEQ ID NO: 16712 - DNA, 17 bp, synthetic construct
  misc_feature 1..17: note = Oligonucleotide
  source 1..17: mol_type = other DNA
gtattaccctgctacca

SEQ ID NO: 16713 - DNA, 17 bp, synthetic construct
  misc_feature 1..17: note = Oligonucleotide
  source 1..17: mol_type = other DNA
ccagtattaccctgcta

SEQ ID NO: 16714 - DNA, 17 bp, synthetic construct
  misc_feature 1..17: note = Oligonucleotide
  source 1..17: mol_type = other DNA
aggccagtattaccctg

SEQ ID NO: 16715 - DNA, 17 bp, synthetic construct
  misc_feature 1..17: note = Oligonucleotide
  source 1..17: mol_type = other DNA
acgaggccagtattacc

SEQ ID NO: 16716 - DNA, 17 bp, synthetic construct
  misc_feature 1..17: note = Oligonucleotide
  source 1..17: mol_type = other DNA
ttcacgaggccagtatt

SEQ ID NO: 16717 - DNA, 17 bp, synthetic construct
  misc_feature 1..17: note = Oligonucleotide
  source 1..17: mol_type = other DNA
catttcacgaggccagt

SEQ ID NO: 16718 - DNA, 17 bp, synthetic construct
  misc_feature 1..17: note = Oligonucleotide
  source 1..17: mol_type = other DNA
cctcatttcacgaggcc

SEQ ID NO: 16719 - DNA, 17 bp, synthetic construct
  misc_feature 1..17: note = Oligonucleotide
  source 1..17: mol_type = other DNA
ctccctcatttcacgag

SEQ ID NO: 16720 - DNA, 17 bp, synthetic construct
  misc_feature 1..17: note = Oligonucleotide
  source 1..17: mol_type = other DNA
acactccctcatttcac

SEQ ID NO: 16721 - DNA, 17 bp, synthetic construct
  misc_feature 1..17: note = Oligonucleotide
  source 1..17: mol_type = other DNA
ggaacactccctcattt

SEQ ID NO: 16722 - DNA, 17 bp, synthetic construct
  misc_feature 1..17: note = Oligonucleotide
  source 1..17: mol_type = other DNA
gagggaacactccctca

SEQ ID NO: 16723 - DNA, 17 bp, synthetic construct
  misc_feature 1..17: note = Oligonucleotide
  source 1..17: mol_type = other DNA
gaggagggaacactccc

SEQ ID NO: 16724 - DNA, 17 bp, synthetic construct
  misc_feature 1..17: note = Oligonucleotide
  source 1..17: mol_type = other DNA
gaagaggagggaacact

SEQ ID NO: 16725 - DNA, 17 bp, synthetic construct
  misc_feature 1..17: note = Oligonucleotide
  source 1..17: mol_type = other DNA
acagaagaggagggaac

SEQ ID NO: 16726 - DNA, 17 bp, synthetic construct
  misc_feature 1..17: note = Oligonucleotide
  source 1..17: mol_type = other DNA
aaaacagaagaggaggg

SEQ ID NO: 16727 - DNA, 17 bp, synthetic construct
  misc_feature 1..17: note = Oligonucleotide
  source 1..17: mol_type = other DNA
caaaaaacagaagagga

SEQ ID NO: 16728 - DNA, 17 bp, synthetic construct
  misc_feature 1..17: note = Oligonucleotide
  source 1..17: mol_type = other DNA
ttccaaaaaacagaaga

SEQ ID NO: 16729 - DNA, 17 bp, synthetic construct
  misc_feature 1..17: note = Oligonucleotide
  source 1..17: mol_type = other DNA
ctcttccaaaaaacaga

SEQ ID NO: 16730 - DNA, 17 bp, synthetic construct
  misc_feature 1..17: note = Oligonucleotide
  source 1..17: mol_type = other DNA
aaactcttccaaaaaac

SEQ ID NO: 16731 - DNA, 17 bp, synthetic construct
  misc_feature 1..17: note = Oligonucleotide
  source 1..17: mol_type = other DNA
ctcaaactcttccaaaa

SEQ ID NO: 16732 - DNA, 17 bp, synthetic construct
  misc_feature 1..17: note = Oligonucleotide
  source 1..17: mol_type = other DNA
attctcaaactcttcca

SEQ ID NO: 16733 - DNA, 17 bp, synthetic construct
  misc_feature 1..17: note = Oligonucleotide
  source 1..17: mol_type = other DNA
caaattctcaaactctt

SEQ ID NO: 16734 - DNA, 17 bp, synthetic construct
  misc_feature 1..17: note = Oligonucleotide
  source 1..17: mol_type = other DNA
acacaaattctcaaact

SEQ ID NO: 16735 - DNA, 17 bp, synthetic construct
  misc_feature 1..17: note = Oligonucleotide
  source 1..17: mol_type = other DNA
ttgacacaaattctcaa

SEQ ID NO: 16736 - DNA, 17 bp, synthetic construct
  misc_feature 1..17: note = Oligonucleotide
  source 1..17: mol_type = other DNA
gaattgacacaaattct

SEQ ID NO: 16737 - DNA, 17 bp, synthetic construct
  misc_feature 1..17: note = Oligonucleotide
  source 1..17: mol_type = other DNA
aaagaattgacacaaat

SEQ ID NO: 16738 - DNA, 17 bp, synthetic construct
  misc_feature 1..17: note = Oligonucleotide
  source 1..17: mol_type = other DNA
tttaaagaattgacaca

SEQ ID NO: 16739 - DNA, 17 bp, synthetic construct
  misc_feature 1..17: note = Oligonucleotide
  source 1..17: mol_type = other DNA
aaatttaaagaattgac

SEQ ID NO: 16740 - DNA, 17 bp, synthetic construct
  misc_feature 1..17: note = Oligonucleotide
  source 1..17: mol_type = other DNA
tagaaatttaaagaatt

SEQ ID NO: 16741 - DNA, 17 bp, synthetic construct
  misc_feature 1..17: note = Oligonucleotide
  source 1..17: mol_type = other DNA
tactagaaatttaaaga

SEQ ID NO: 16742 - DNA, 17 bp, synthetic construct
  misc_feature 1..17: note = Oligonucleotide
  source 1..17: mol_type = other DNA
ctctactagaaatttaa

SEQ ID NO: 16743 - DNA, 17 bp, synthetic construct
  misc_feature 1..17: note = Oligonucleotide
  source 1..17: mol_type = other DNA
gcactctactagaaatt

SEQ ID NO: 16744 - DNA, 17 bp, synthetic construct
  misc_feature 1..17: note = Oligonucleotide
  source 1..17: mol_type = other DNA
ggtgcactctactagaa

SEQ ID NO: 16745 - DNA, 17 bp, synthetic construct
  misc_feature 1..17: note = Oligonucleotide
  source 1..17: mol_type = other DNA
actggtgcactctacta

SEQ ID NO: 16746 - DNA, 17 bp, synthetic construct
  misc_feature 1..17: note = Oligonucleotide
  source 1..17: mol_type = other DNA
atcactggtgcactcta

SEQ ID NO: 16747 - DNA, 17 bp, synthetic construct
  misc_feature 1..17: note = Oligonucleotide
  source 1..17: mol_type = other DNA
ggcatcactggtgcact

SEQ ID NO: 16748 - DNA, 17 bp, synthetic construct
  misc_feature 1..17: note = Oligonucleotide
  source 1..17: mol_type = other DNA
gatggcatcactggtgc

SEQ ID NO: 16749 - DNA, 17 bp, synthetic construct
  misc_feature 1..17: note = Oligonucleotide
  source 1..17: mol_type = other DNA
ccagatggcatcactgg

SEQ ID NO: 16750 - DNA, 17 bp, synthetic construct
  misc_feature 1..17: note = Oligonucleotide
  source 1..17: mol_type = other DNA
ccaccagatggcatcac

SEQ ID NO: 16751 - DNA, 17 bp, synthetic construct
  misc_feature 1..17: note = Oligonucleotide
  source 1..17: mol_type = other DNA
ccaccaccagatggcat

SEQ ID NO: 16752 - DNA, 17 bp, synthetic construct
  misc_feature 1..17: note = Oligonucleotide
  source 1..17: mol_type = other DNA
agtccaccaccagatgg

SEQ ID NO: 16753 - DNA, 17 bp, synthetic construct
  misc_feature 1..17: note = Oligonucleotide
  source 1..17: mol_type = other DNA
aaaagtccaccaccaga

SEQ ID NO: 16754 - DNA, 17 bp, synthetic construct
  misc_feature 1..17: note = Oligonucleotide
  source 1..17: mol_type = other DNA
aagaaaagtccaccacc

SEQ ID NO: 16755 - DNA, 17 bp, synthetic construct
  misc_feature 1..17: note = Oligonucleotide
  source 1..17: mol_type = other DNA
acgaagaaaagtccacc

SEQ ID NO: 16756 - DNA, 17 bp, synthetic construct
  misc_feature 1..17: note = Oligonucleotide
  source 1..17: mol_type = other DNA
ccaacgaagaaaagtcc

SEQ ID NO: 16757 - DNA, 17 bp, synthetic construct
  misc_feature 1..17: note = Oligonucleotide
  source 1..17: mol_type = other DNA
ctcccaacgaagaaaag

SEQ ID NO: 16758 - DNA, 17 bp, synthetic construct
  misc_feature 1..17: note = Oligonucleotide
  source 1..17: mol_type = other DNA
agcctcccaacgaagaa

SEQ ID NO: 16759 - DNA, 17 bp, synthetic construct
  misc_feature 1..17: note = Oligonucleotide
  source 1..17: mol_type = other DNA
acaagcctcccaacgaa

SEQ ID NO: 16760 - DNA, 17 bp, synthetic construct
  misc_feature 1..17: note = Oligonucleotide
  source 1..17: mol_type = other DNA
accacaagcctcccaac

SEQ ID NO: 16761 - DNA, 17 bp, synthetic construct
  misc_feature 1..17: note = Oligonucleotide
  source 1..17: mol_type = other DNA
ttaaccacaagcctccc

SEQ ID NO: 16762 - DNA, 17 bp, synthetic construct
  misc_feature 1..17: note = Oligonucleotide
  source 1..17: mol_type = other DNA
tccttaaccacaagcct

SEQ ID NO: 16763 - DNA, 17 bp, synthetic construct
  misc_feature 1..17: note = Oligonucleotide
  source 1..17: mol_type = other DNA
gaatccttaaccacaag

SEQ ID NO: 16764 - DNA, 17 bp, synthetic construct
  misc_feature 1..17: note = Oligonucleotide
  source 1..17: mol_type = other DNA
attgaatccttaaccac

SEQ ID NO: 16765 - DNA, 17 bp, synthetic construct
  misc_feature 1..17: note = Oligonucleotide
  source 1..17: mol_type = other DNA
gagattgaatccttaac

SEQ ID NO: 16766 - DNA, 17 bp, synthetic construct
  misc_feature 1..17: note = Oligonucleotide
  source 1..17: mol_type = other DNA
aaagagattgaatcctt

SEQ ID NO: 16767 - DNA, 17 bp, synthetic construct
  misc_feature 1..17: note = Oligonucleotide
  source 1..17: mol_type = other DNA
agcaaagagattgaatc

SEQ ID NO: 16768 - DNA, 17 bp, synthetic construct
  misc_feature 1..17: note = Oligonucleotide
  source 1..17: mol_type = other DNA
acaagcaaagagattga

SEQ ID NO: 16769 - DNA, 17 bp, synthetic construct
  misc_feature 1..17: note = Oligonucleotide
  source 1..17: mol_type = other DNA
ataacaagcaaagagat

SEQ ID NO: 16770 - DNA, 17 bp, synthetic construct
  misc_feature 1..17: note = Oligonucleotide
  source 1..17: mol_type = other DNA
cctataacaagcaaaga

SEQ ID NO: 16771 - DNA, 17 bp, synthetic construct
  misc_feature 1..17: note = Oligonucleotide
  source 1..17: mol_type = other DNA
agacctataacaagcaa

SEQ ID NO: 16772 - DNA, 17 bp, synthetic construct
  misc_feature 1..17: note = Oligonucleotide
  source 1..17: mol_type = other DNA
aacagacctataacaag

SEQ ID NO: 16773 - DNA, 17 bp, synthetic construct
  misc_feature 1..17: note = Oligonucleotide
  source 1..17: mol_type = other DNA
ttaaacagacctataac

SEQ ID NO: 16774 - DNA, 17 bp, synthetic construct
  misc_feature 1..17: note = Oligonucleotide
  source 1..17: mol_type = other DNA
aatttaaacagacctat

SEQ ID NO: 16775 - DNA, 17 bp, synthetic construct
  misc_feature 1..17: note = Oligonucleotide
  source 1..17: mol_type = other DNA
gaaaatttaaacagacc

SEQ ID NO: 16776 - DNA, 17 bp, synthetic construct
  misc_feature 1..17: note = Oligonucleotide
  source 1..17: mol_type = other DNA
acagaaaatttaaacag

SEQ ID NO: 16777 - DNA, 17 bp, synthetic construct
  misc_feature 1..17: note = Oligonucleotide
  source 1..17: mol_type = other DNA
gaaacagaaaatttaaa

SEQ ID NO: 16778 - DNA, 17 bp, synthetic construct
  misc_feature 1..17: note = Oligonucleotide
  source 1..17: mol_type = other DNA
gaagaaacagaaaattt

SEQ ID NO: 16779 - DNA, 17 bp, synthetic construct
  misc_feature 1..17: note = Oligonucleotide
  source 1..17: mol_type = other DNA
caagaagaaacagaaaa

SEQ ID NO: 16780 - DNA, 17 bp, synthetic construct
  misc_feature 1..17: note = Oligonucleotide
  source 1..17: mol_type = other DNA
actcaagaagaaacaga

SEQ ID NO: 16781 - DNA, 17 bp, synthetic construct
  misc_feature 1..17: note = Oligonucleotide
  source 1..17: mol_type = other DNA
ctgactcaagaagaaac

SEQ ID NO: 16782 - DNA, 17 bp, synthetic construct
  misc_feature 1..17: note = Oligonucleotide
  source 1..17: mol_type = other DNA
aaactgactcaagaaga

SEQ ID NO: 16783 - DNA, 17 bp, synthetic construct
  misc_feature 1..17: note = Oligonucleotide
  source 1..17: mol_type = other DNA
ccaaaactgactcaaga

SEQ ID NO: 16784 - DNA, 17 bp, synthetic construct
  misc_feature 1..17: note = Oligonucleotide
  source 1..17: mol_type = other DNA
ttaccaaaactgactca

SEQ ID NO: 16785 - DNA, 17 bp, synthetic construct
  misc_feature 1..17: note = Oligonucleotide
  source 1..17: mol_type = other DNA
aaattaccaaaactgac

SEQ ID NO: 16786 - DNA, 17 bp, synthetic construct
  misc_feature 1..17: note = Oligonucleotide
  source 1..17: mol_type = other DNA
cacaaattaccaaaact

SEQ ID NO: 16787 - DNA, 17 bp, synthetic construct
  misc_feature 1..17: note = Oligonucleotide
  source 1..17: mol_type = other DNA
aaacacaaattaccaaa

SEQ ID NO: 16788 - DNA, 17 bp, synthetic construct
  misc_feature 1..17: note = Oligonucleotide
  source 1..17: mol_type = other DNA
gaaaaacacaaattacc

SEQ ID NO: 16789 - DNA, 17 bp, synthetic construct
  misc_feature 1..17: note = Oligonucleotide
  source 1..17: mol_type = other DNA
ctagaaaaacacaaatt

SEQ ID NO: 16790 - DNA, 17 bp, synthetic construct
  misc_feature 1..17: note = Oligonucleotide
  source 1..17: mol_type = other DNA
tttctagaaaaacacaa

SEQ ID NO: 16791 - DNA, 17 bp, synthetic construct
  misc_feature 1..17: note = Oligonucleotide
  source 1..17: mol_type = other DNA
aaatttctagaaaaaca

SEQ ID NO: 16792 - DNA, 17 bp, synthetic construct
  misc_feature 1..17: note = Oligonucleotide
  source 1..17: mol_type = other DNA
gacaaatttctagaaaa

SEQ ID NO: 16793 - DNA, 17 bp, synthetic construct
  misc_feature 1..17: note = Oligonucleotide
  source 1..17: mol_type = other DNA
gtagacaaatttctaga

SEQ ID NO: 16794 - DNA, 17 bp, synthetic construct
  misc_feature 1..17: note = Oligonucleotide
  source 1..17: mol_type = other DNA
gaggtagacaaatttct

SEQ ID NO: 16795 - DNA, 17 bp, synthetic construct
  misc_feature 1..17: note = Oligonucleotide
  source 1..17: mol_type = other DNA
gatgaggtagacaaatt

SEQ ID NO: 16796 - DNA, 17 bp, synthetic construct
  misc_feature 1..17: note = Oligonucleotide
  source 1..17: mol_type = other DNA
ctagatgaggtagacaa

SEQ ID NO: 16797 - DNA, 17 bp, synthetic construct
  misc_feature 1..17: note = Oligonucleotide
  source 1..17: mol_type = other DNA
aagctagatgaggtaga

SEQ ID NO: 16798 - DNA, 17 bp, synthetic construct
  misc_feature 1..17: note = Oligonucleotide
  source 1..17: mol_type = other DNA
gaaaagctagatgaggt

SEQ ID NO: 16799 - DNA, 17 bp, synthetic construct
  misc_feature 1..17: note = Oligonucleotide
  source 1..17: mol_type = other DNA
atagaaaagctagatga

SEQ ID NO: 16800 - DNA, 17 bp, synthetic construct
  misc_feature 1..17: note = Oligonucleotide
  source 1..17: mol_type = other DNA
caaatagaaaagctaga

SEQ ID NO: 16801 - DNA, 17 bp, synthetic construct
  misc_feature 1..17: note = Oligonucleotide
  source 1..17: mol_type = other DNA
caacaaatagaaaagct

SEQ ID NO: 16802 - DNA, 17 bp, synthetic construct
  misc_feature 1..17: note = Oligonucleotide
  source 1..17: mol_type = other DNA
tgccaacaaatagaaaa

SEQ ID NO: 16803 - DNA, 17 bp, synthetic construct
  misc_feature 1..17: note = Oligonucleotide
  source 1..17: mol_type = other DNA
acatgccaacaaataga

SEQ ID NO: 16804 - DNA, 17 bp, synthetic construct
  misc_feature 1..17: note = Oligonucleotide
  source 1..17: mol_type = other DNA
attacatgccaacaaat

SEQ ID NO: 16805 - DNA, 17 bp, synthetic construct
  misc_feature 1..17: note = Oligonucleotide
  source 1..17: mol_type = other DNA
acaattacatgccaaca

SEQ ID NO: 16806 - DNA, 17 bp, synthetic construct
  misc_feature 1..17: note = Oligonucleotide
  source 1..17: mol_type = other DNA
tgaacaattacatgcca

SEQ ID NO: 16807 - DNA, 17 bp, synthetic construct
  misc_feature 1..17: note = Oligonucleotide
  source 1..17: mol_type = other DNA
ctatgaacaattacatg

SEQ ID NO: 16808 - DNA, 17 bp, synthetic construct
  misc_feature 1..17: note = Oligonucleotide
  source 1..17: mol_type = other DNA
acactatgaacaattac

SEQ ID NO: 16809 - DNA, 17 bp, synthetic construct
  misc_feature 1..17: note = Oligonucleotide
  source 1..17: mol_type = other DNA
ataacactatgaacaat

SEQ ID NO: 16810 - DNA, 17 bp, synthetic construct
  misc_feature 1..17: note = Oligonucleotide
  source 1..17: mol_type = other DNA
aatataacactatgaac

SEQ ID NO: 16811 - DNA, 17 bp, synthetic construct
  misc_feature 1..17: note = Oligonucleotide
  source 1..17: mol_type = other DNA
aggaatataacactatg

SEQ ID NO: 16812 - DNA, 17 bp, synthetic construct
  misc_feature 1..17: note = Oligonucleotide
  source 1..17: mol_type = other DNA
aaaaggaatataacact

SEQ ID NO: 16813 - DNA, 17 bp, synthetic construct
  misc_feature 1..17: note = Oligonucleotide
  source 1..17: mol_type = other DNA
ttaaaaaggaatataac

SEQ ID NO: 16814 - DNA, 17 bp, synthetic construct
  misc_feature 1..17: note = Oligonucleotide
  source 1..17: mol_type = other DNA
aagttaaaaaggaatat

SEQ ID NO: 16815 - DNA, 17 bp, synthetic construct
  misc_feature 1..17: note = Oligonucleotide
  source 1..17: mol_type = other DNA
cagaagttaaaaaggaa

SEQ ID NO: 16816 - DNA, 17 bp, synthetic construct
  misc_feature 1..17: note = Oligonucleotide
  source 1..17: mol_type = other DNA
ttacagaagttaaaaag

SEQ ID NO: 16817 - DNA, 17 bp, synthetic construct
  misc_feature 1..17: note = Oligonucleotide
  source 1..17: mol_type = other DNA
gtgttacagaagttaaa

SEQ ID NO: 16818 - DNA, 17 bp, synthetic construct
  misc_feature 1..17: note = Oligonucleotide
  source 1..17: mol_type = other DNA
tcagtgttacagaagtt

SEQ ID NO: 16819 - DNA, 17 bp, synthetic construct
  misc_feature 1..17: note = Oligonucleotide
  source 1..17: mol_type = other DNA
ctatcagtgttacagaa

SEQ ID NO: 16820 - DNA, 17 bp, synthetic construct
  misc_feature 1..17: note = Oligonucleotide
  source 1..17: mol_type = other DNA
ttactatcagtgttaca

SEQ ID NO: 16821 - DNA, 17 bp, synthetic construct
  misc_feature 1..17: note = Oligonucleotide
  source 1..17: mol_type = other DNA
gacttactatcagtgtt

SEQ ID NO: 16822 - DNA, 17 bp, synthetic construct
  misc_feature 1..17: note = Oligonucleotide
  source 1..17: mol_type = other DNA
ggggacttactatcagt

SEQ ID NO: 16823 - DNA, 17 bp, synthetic construct
  misc_feature 1..17: note = Oligonucleotide
  source 1..17: mol_type = other DNA
tttggggacttactatc

SEQ ID NO: 16824 - DNA, 17 bp, synthetic construct
  misc_feature 1..17: note = Oligonucleotide
  source 1..17: mol_type = other DNA
aaatttggggacttact

SEQ ID NO: 16825 - DNA, 17 bp, synthetic construct
  misc_feature 1..17: note = Oligonucleotide
  source 1..17: mol_type = other DNA
atgaaatttggggactt

SEQ ID NO: 16826 - DNA, 17 bp, synthetic construct
  misc_feature 1..17: note = Oligonucleotide
  source 1..17: mol_type = other DNA
caaatgaaatttgggga

SEQ ID NO: 16827 - DNA, 17 bp, synthetic construct
  misc_feature 1..17: note = Oligonucleotide
  source 1..17: mol_type = other DNA
tcacaaatgaaatttgg

SEQ ID NO: 16828 - DNA, 17 bp, synthetic construct
  misc_feature 1..17: note = Oligonucleotide
  source 1..17: mol_type = other DNA
aaatcacaaatgaaatt

SEQ ID NO: 16829 - DNA, 17 bp, synthetic construct
  misc_feature 1..17: note = Oligonucleotide
  source 1..17: mol_type = other DNA
ctaaaatcacaaatgaa

SEQ ID NO: 16830 - DNA, 17 bp, synthetic construct
  misc_feature 1..17: note = Oligonucleotide
  source 1..17: mol_type = other DNA
taactaaaatcacaaat

SEQ ID NO: 16831 - DNA, 17 bp, synthetic construct
  misc_feature 1..17: note = Oligonucleotide
  source 1..17: mol_type = other DNA
aaataactaaaatcaca

SEQ ID NO: 16832 - DNA, 17 bp, synthetic construct
  misc_feature 1..17: note = Oligonucleotide
  source 1..17: mol_type = other DNA
cagaaataactaaaatc

SEQ ID NO: 16833 - DNA, 17 bp, synthetic construct
  misc_feature 1..17: note = Oligonucleotide
  source 1..17: mol_type = other DNA
ggacagaaataactaaa

SEQ ID NO: 16834 - DNA, 17 bp, synthetic construct
  misc_feature 1..17: note = Oligonucleotide
  source 1..17: mol_type = other DNA
gatggacagaaataact

SEQ ID NO: 16835 - DNA, 17 bp, synthetic construct
  misc_feature 1..17: note = Oligonucleotide
  source 1..17: mol_type = other DNA
gaagatggacagaaata

SEQ ID NO: 16836 - DNA, 17 bp, synthetic construct
  misc_feature 1..17: note = Oligonucleotide
  source 1..17: mol_type = other DNA
agagaagatggacagaa

SEQ ID NO: 16837 - DNA, 17 bp, synthetic construct
  misc_feature 1..17: note = Oligonucleotide
  source 1..17: mol_type = other DNA
aggagagaagatggaca

SEQ ID NO: 16838 - DNA, 17 bp, synthetic construct
  misc_feature 1..17: note = Oligonucleotide
  source 1..17: mol_type = other DNA
gtaaggagagaagatgg

SEQ ID NO: 16839 - DNA, 17 bp, synthetic construct
  misc_feature 1..17: note = Oligonucleotide
  source 1..17: mol_type = other DNA
ctagtaaggagagaaga

SEQ ID NO: 16840 - DNA, 17 bp, synthetic construct
  misc_feature 1..17: note = Oligonucleotide
  source 1..17: mol_type = other DNA
tgactagtaaggagaga

SEQ ID NO: 16841 - DNA, 17 bp, synthetic construct
  misc_feature 1..17: note = Oligonucleotide
  source 1..17: mol_type = other DNA
gattgactagtaaggag

SEQ ID NO: 16842 - DNA, 17 bp, synthetic construct
  misc_feature 1..17: note = Oligonucleotide
  source 1..17: mol_type = other DNA
ctagattgactagtaag

SEQ ID NO: 16843 - DNA, 17 bp, synthetic construct
  misc_feature 1..17: note = Oligonucleotide
  source 1..17: mol_type = other DNA
tggctagattgactagt

SEQ ID NO: 16844 - DNA, 17 bp, synthetic construct
  misc_feature 1..17: note = Oligonucleotide
  source 1..17: mol_type = other DNA
ctttggctagattgact

SEQ ID NO: 16845 - DNA, 17 bp, synthetic construct
  misc_feature 1..17: note = Oligonucleotide
  source 1..17: mol_type = other DNA
aacctttggctagattg

SEQ ID NO: 16846 - DNA, 17 bp, synthetic construct
  misc_feature 1..17: note = Oligonucleotide
  source 1..17: mol_type = other DNA
acaaacctttggctaga

SEQ ID NO: 16847 - DNA, 17 bp, synthetic construct
  misc_feature 1..17: note = Oligonucleotide
  source 1..17: mol_type = other DNA
ttgacaaacctttggct

SEQ ID NO: 16848 - DNA, 17 bp, synthetic construct
  misc_feature 1..17: note = Oligonucleotide
  source 1..17: mol_type = other DNA
taattgacaaacctttg

SEQ ID NO: 16849 - DNA, 17 bp, synthetic construct
  misc_feature 1..17: note = Oligonucleotide
  source 1..17: mol_type = other DNA
acataattgacaaacct

SEQ ID NO: 16850 - DNA, 17 bp, synthetic construct
  misc_feature 1..17: note = Oligonucleotide
  source 1..17: mol_type = other DNA
tcaacataattgacaaa

SEQ ID NO: 16851 - DNA, 17 bp, synthetic construct
  misc_feature 1..17: note = Oligonucleotide
  source 1..17: mol_type = other DNA
atatcaacataattgac

SEQ ID NO: 16852 - DNA, 17 bp, synthetic construct
  misc_feature 1..17: note = Oligonucleotide
  source 1..17: mol_type = other DNA
acaatatcaacataatt

SEQ ID NO: 16853 - DNA, 17 bp, synthetic construct
  misc_feature 1..17: note = Oligonucleotide
  source 1..17: mol_type = other DNA
ttgacaatatcaacata

SEQ ID NO: 16854 - DNA, 17 bp, synthetic construct
  misc_feature 1..17: note = Oligonucleotide
  source 1..17: mol_type = other DNA
tctttgacaatatcaac

SEQ ID NO: 16855 - DNA, 17 bp, synthetic construct
  misc_feature 1..17: note = Oligonucleotide
  source 1..17: mol_type = other DNA
gtttctttgacaatatc

SEQ ID NO: 16856 - DNA, 17 bp, synthetic construct
  misc_feature 1..17: note = Oligonucleotide
  source 1..17: mol_type = other DNA
gttgtttctttgacaat

SEQ ID NO: 16857 - DNA, 17 bp, synthetic construct
  misc_feature 1..17: note = Oligonucleotide
  source 1..17: mol_type = other DNA
aaggttgtttctttgac

SEQ ID NO: 16858 - DNA, 17 bp, synthetic construct
  misc_feature 1..17: note = Oligonucleotide
  source 1..17: mol_type = other DNA
taaaaggttgtttcttt

SEQ ID NO: 16859 - DNA, 17 bp, synthetic construct
  misc_feature 1..17: note = Oligonucleotide
  source 1..17: mol_type = other DNA
aaataaaaggttgtttc

SEQ ID NO: 16860 - DNA, 17 bp, synthetic construct
  misc_feature 1..17: note = Oligonucleotide
  source 1..17: mol_type = other DNA
aggaaataaaaggttgt

SEQ ID NO: 16861 - DNA, 17 bp, synthetic construct
  misc_feature 1..17: note = Oligonucleotide
  source 1..17: mol_type = other DNA
tcaaggaaataaaaggt

SEQ ID NO: 16862 - DNA, 17 bp, synthetic construct
  misc_feature 1..17: note = Oligonucleotide
  source 1..17: mol_type = other DNA
gaatcaaggaaataaaa

SEQ ID NO: 16863 - DNA, 17 bp, synthetic construct
  misc_feature 1..17: note = Oligonucleotide
  source 1..17: mol_type = other DNA
ggagaatcaaggaaata

SEQ ID NO: 16864 - DNA, 17 bp, synthetic construct
  misc_feature 1..17: note = Oligonucleotide
  source 1..17: mol_type = other DNA
agcggagaatcaaggaa

SEQ ID NO: 16865 - DNA, 17 bp, synthetic construct
  misc_feature 1..17: note = Oligonucleotide
  source 1..17: mol_type = other DNA
aacagcggagaatcaag

SEQ ID NO: 16866 - DNA, 17 bp, synthetic construct
  misc_feature 1..17: note = Oligonucleotide
  source 1..17: mol_type = other DNA
aaaaacagcggagaatc

SEQ ID NO: 16867 - DNA, 17 bp, synthetic construct
  misc_feature 1..17: note = Oligonucleotide
  source 1..17: mol_type = other DNA
gagaaaaacagcggaga

SEQ ID NO: 16868 - DNA, 17 bp, synthetic construct
  misc_feature 1..17: note = Oligonucleotide
  source 1..17: mol_type = other DNA
aaagagaaaaacagcgg

SEQ ID NO: 16869 - DNA, 17 bp, synthetic construct
  misc_feature 1..17: note = Oligonucleotide
  source 1..17: mol_type = other DNA
acaaaagagaaaaacag

SEQ ID NO: 16870 - DNA, 17 bp, synthetic construct
  misc_feature 1..17: note = Oligonucleotide
  source 1..17: mol_type = other DNA
taaacaaaagagaaaaa

SEQ ID NO: 16871 - DNA, 17 bp, synthetic construct
  misc_feature 1..17: note = Oligonucleotide
  source 1..17: mol_type = other DNA
agataaacaaaagagaa

SEQ ID NO: 16872 - DNA, 17 bp, synthetic construct
  misc_feature 1..17: note = Oligonucleotide
  source 1..17: mol_type = other DNA
cagagataaacaaaaga

SEQ ID NO: 16873 - DNA, 17 bp, synthetic construct
  misc_feature 1..17: note = Oligonucleotide
  source 1..17: mol_type = other DNA
gagcagagataaacaaa

SEQ ID NO: 16874 - DNA, 17 bp, synthetic construct
  misc_feature 1..17: note = Oligonucleotide
  source 1..17: mol_type = other DNA
ttagagcagagataaac

SEQ ID NO: 16875 - DNA, 17 bp, synthetic construct
  misc_feature 1..17: note = Oligonucleotide
  source 1..17: mol_type = other DNA
agattagagcagagata

SEQ ID NO: 16876 - DNA, 17 bp, synthetic construct
  misc_feature 1..17: note = Oligonucleotide
  source 1..17: mol_type = other DNA
gtaagattagagcagag

SEQ ID NO: 16877 - DNA, 17 bp, synthetic construct
  misc_feature 1..17: note = Oligonucleotide
  source 1..17: mol_type = other DNA
acagtaagattagagca

SEQ ID NO: 16878 - DNA, 17 bp, synthetic construct
  misc_feature 1..17: note = Oligonucleotide
  source 1..17: mol_type = other DNA
gaaacagtaagattaga

SEQ ID NO: 16879 - DNA, 17 bp, synthetic construct
  misc_feature 1..17: note = Oligonucleotide
  source 1..17: mol_type = other DNA
aaggaaacagtaagatt

SEQ ID NO: 16880 - DNA, 17 bp, synthetic construct
  misc_feature 1..17: note = Oligonucleotide
  source 1..17: mol_type = other DNA
aggaaggaaacagtaag

SEQ ID NO: 16881 - DNA, 17 bp, synthetic construct
  misc_feature 1..17: note = Oligonucleotide
  source 1..17: mol_type = other DNA
agaaggaaggaaacagt

SEQ ID NO: 16882 - DNA, 17 bp, synthetic construct
  misc_feature 1..17: note = Oligonucleotide
  source 1..17: mol_type = other DNA
agcagaaggaaggaaac

SEQ ID NO: 16883 - DNA, 17 bp, synthetic construct
  misc_feature 1..17: note = Oligonucleotide
  source 1..17: mol_type = other DNA
gctagcagaaggaagga

SEQ ID NO: 16884 - DNA, 17 bp, synthetic construct
  misc_feature 1..17: note = Oligonucleotide
  source 1..17: mol_type = other DNA
aaagctagcagaaggaa

SEQ ID NO: 16885 - DNA, 17 bp, synthetic construct
  misc_feature 1..17: note = Oligonucleotide
  source 1..17: mol_type = other DNA
agaaaagctagcagaag

SEQ ID NO: 16886 - DNA, 17 bp, synthetic construct
  misc_feature 1..17: note = Oligonucleotide
  source 1..17: mol_type = other DNA
gaaagaaaagctagcag

SEQ ID NO: 16887 - DNA, 17 bp, synthetic construct
  misc_feature 1..17: note = Oligonucleotide
  source 1..17: mol_type = other DNA
aaagaaagaaaagctag

SEQ ID NO: 16888 - DNA, 17 bp, synthetic construct
  misc_feature 1..17: note = Oligonucleotide
  source 1..17: mol_type = other DNA
gcaaaagaaagaaaagc

SEQ ID NO: 16889 - DNA, 17 bp, synthetic construct
  misc_feature 1..17: note = Oligonucleotide
  source 1..17: mol_type = other DNA
ctagcaaaagaaagaaa

SEQ ID NO: 16890 - DNA, 17 bp, synthetic construct
  misc_feature 1..17: note = Oligonucleotide
  source 1..17: mol_type = other DNA
aaactagcaaaagaaag

SEQ ID NO: 16891 - DNA, 17 bp, synthetic construct
  misc_feature 1..17: note = Oligonucleotide
  source 1..17: mol_type = other DNA
accaaactagcaaaaga

SEQ ID NO: 16892 - DNA, 17 bp, synthetic construct
  misc_feature 1..17: note = Oligonucleotide
  source 1..17: mol_type = other DNA
caaaccaaactagcaaa

SEQ ID NO: 16893 - DNA, 17 bp, synthetic construct
  misc_feature 1..17: note = Oligonucleotide
  source 1..17: mol_type = other DNA
gagcaaaccaaactagc

SEQ ID NO: 16894 - DNA, 17 bp, synthetic construct
  misc_feature 1..17: note = Oligonucleotide
  source 1..17: mol_type = other DNA
gaagagcaaaccaaact

SEQ ID NO: 16895 - DNA, 17 bp, synthetic construct
  misc_feature 1..17: note = Oligonucleotide
  source 1..17: mol_type = other DNA
aaagaagagcaaaccaa

SEQ ID NO: 16896 - DNA, 17 bp, synthetic construct
  misc_feature 1..17: note = Oligonucleotide
  source 1..17: mol_type = other DNA
gagaaagaagagcaaac

SEQ ID NO: 16897 - DNA, 17 bp, synthetic construct
  misc_feature 1..17: note = Oligonucleotide
  source 1..17: mol_type = other DNA
caagagaaagaagagca

SEQ ID NO: 16898 - DNA, 17 bp, synthetic construct
  misc_feature 1..17: note = Oligonucleotide
  source 1..17: mol_type = other DNA
aaacaagagaaagaaga

SEQ ID NO: 16899 - DNA, 17 bp, synthetic construct
  misc_feature 1..17: note = Oligonucleotide
  source 1..17: mol_type = other DNA
aaaaaacaagagaaaga

SEQ ID NO: 16900 - DNA, 17 bp, synthetic construct
  misc_feature 1..17: note = Oligonucleotide
  source 1..17: mol_type = other DNA
acaaaaaaacaagagaa

SEQ ID NO: 16901 - DNA, 17 bp, synthetic construct
  misc_feature 1..17: note = Oligonucleotide
  source 1..17: mol_type = other DNA
caaacaaaaaaacaaga

SEQ ID NO: 16902 - DNA, 17 bp, synthetic construct
  misc_feature 1..17: note = Oligonucleotide
  source 1..17: mol_type = other DNA
aaacaaacaaaaaaaca

SEQ ID NO: 16903 - DNA, 17 bp, synthetic construct
  misc_feature 1..17: note = Oligonucleotide
  source 1..17: mol_type = other DNA
aagaaacaaacaaaaaa

SEQ ID NO: 16904 - DNA, 17 bp, synthetic construct
  misc_feature 1..17: note = Oligonucleotide
  source 1..17: mol_type = other DNA
aaaaagaaacaaacaaa

SEQ ID NO: 16905 - DNA, 17 bp, synthetic construct
  misc_feature 1..17: note = Oligonucleotide
  source 1..17: mol_type = other DNA
accaaaaagaaacaaac

SEQ ID NO: 16906 - DNA, 17 bp, synthetic construct
  misc_feature 1..17: note = Oligonucleotide
  source 1..17: mol_type = other DNA
aagaccaaaaagaaaca

SEQ ID NO: 16907 - DNA, 17 bp, synthetic construct
  misc_feature 1..17: note = Oligonucleotide
  source 1..17: mol_type = other DNA
agaaagaccaaaaagaa

SEQ ID NO: 16908 - DNA, 17 bp, synthetic construct
  misc_feature 1..17: note = Oligonucleotide
  source 1..17: mol_type = other DNA
tagagaaagaccaaaaa

SEQ ID NO: 16909 - DNA, 17 bp, synthetic construct
  misc_feature 1..17: note = Oligonucleotide
  source 1..17: mol_type = other DNA
gactagagaaagaccaa

SEQ ID NO: 16910 - DNA, 17 bp, synthetic construct
  misc_feature 1..17: note = Oligonucleotide
  source 1..17: mol_type = other DNA
acagactagagaaagac

SEQ ID NO: 16911 - DNA, 17 bp, synthetic construct
  misc_feature 1..17: note = Oligonucleotide
  source 1..17: mol_type = other DNA
cggacagactagagaaa

SEQ ID NO: 16912 - DNA, 17 bp, synthetic construct
  misc_feature 1..17: note = Oligonucleotide
  source 1..17: mol_type = other DNA
ggacggacagactagag

SEQ ID NO: 16913 - DNA, 17 bp, synthetic construct
  misc_feature 1..17: note = Oligonucleotide
  source 1..17: mol_type = other DNA
gagggacggacagacta

SEQ ID NO: 16914 - DNA, 17 bp, synthetic construct
  misc_feature 1..17: note = Oligonucleotide
  source 1..17: mol_type = other DNA
acggagggacggacaga

SEQ ID NO: 16915 - DNA, 17 bp, synthetic construct
  misc_feature 1..17: note = Oligonucleotide
  source 1..17: mol_type = other DNA
gggacggagggacggac

SEQ ID NO: 16916 - DNA, 17 bp, synthetic construct
  misc_feature 1..17: note = Oligonucleotide
  source 1..17: mol_type = other DNA
ggagggacggagggacg

SEQ ID NO: 16917 - DNA, 17 bp, synthetic construct
  misc_feature 1..17: note = Oligonucleotide
  source 1..17: mol_type = other DNA
gagggagggacggaggg

SEQ ID NO: 16918 - DNA, 17 bp, synthetic construct
  misc_feature 1..17: note = Oligonucleotide
  source 1..17: mol_type = other DNA
agagagggagggacgga

SEQ ID NO: 16919 - DNA, 17 bp, synthetic construct
  misc_feature 1..17: note = Oligonucleotide
  source 1..17: mol_type = other DNA
gcaagagagggagggac

SEQ ID NO: 16920 - DNA, 17 bp, synthetic construct
  misc_feature 1..17: note = Oligonucleotide
  source 1..17: mol_type = other DNA
gaagcaagagagggagg

SEQ ID NO: 16921 - DNA, 17 bp, synthetic construct
  misc_feature 1..17: note = Oligonucleotide
  source 1..17: mol_type = other DNA
aaggaagcaagagaggg

SEQ ID NO: 16922 - DNA, 17 bp, synthetic construct
  misc_feature 1..17: note = Oligonucleotide
  source 1..17: mol_type = other DNA
aggaaggaagcaagaga

SEQ ID NO: 16923 - DNA, 17 bp, synthetic construct
  misc_feature 1..17: note = Oligonucleotide
  source 1..17: mol_type = other DNA
aagaggaaggaagcaag

SEQ ID NO: 16924 - DNA, 17 bp, synthetic construct
  misc_feature 1..17: note = Oligonucleotide
  source 1..17: mol_type = other DNA
ataaagaggaaggaagc

SEQ ID NO: 16925 - DNA, 17 bp, synthetic construct
  misc_feature 1..17: note = Oligonucleotide
  source 1..17: mol_type = other DNA
aaaataaagaggaagga

SEQ ID NO: 16926 - DNA, 17 bp, synthetic construct
  misc_feature 1..17: note = Oligonucleotide
  source 1..17: mol_type = other DNA
aacaaaataaagaggaa

SEQ ID NO: 16927 - DNA, 17 bp, synthetic construct
  misc_feature 1..17: note = Oligonucleotide
  source 1..17: mol_type = other DNA
gcaaacaaaataaagag

SEQ ID NO: 16928 - DNA, 17 bp, synthetic construct
  misc_feature 1..17: note = Oligonucleotide
  source 1..17: mol_type = other DNA
agagcaaacaaaataaa

SEQ ID NO: 16929 - DNA, 17 bp, synthetic construct
  misc_feature 1..17: note = Oligonucleotide
  source 1..17: mol_type = other DNA
agaagagcaaacaaaat

SEQ ID NO: 16930 - DNA, 17 bp, synthetic construct
  misc_feature 1..17: note = Oligonucleotide
  source 1..17: mol_type = other DNA
gaaagaagagcaaacaa

SEQ ID NO: 16931 - DNA, 17 bp, synthetic construct
  misc_feature 1..17: note = Oligonucleotide
  source 1..17: mol_type = other DNA
agagaaagaagagcaaa

SEQ ID NO: 16932 - DNA, 17 bp, synthetic construct
  misc_feature 1..17: note = Oligonucleotide
  source 1..17: mol_type = other DNA
actagagaaagaagagc

SEQ ID NO: 16933 - DNA, 17 bp, synthetic construct
  misc_feature 1..17: note = Oligonucleotide
  source 1..17: mol_type = other DNA
gaaactagagaaagaag

SEQ ID NO: 16934 - DNA, 17 bp, synthetic construct
  misc_feature 1..17: note = Oligonucleotide
  source 1..17: mol_type = other DNA
gaagaaactagagaaag

SEQ ID NO: 16935 - DNA, 17 bp, synthetic construct
  misc_feature 1..17: note = Oligonucleotide
  source 1..17: mol_type = other DNA
aaagaagaaactagaga

SEQ ID NO: 16936 - DNA, 17 bp, synthetic construct
  misc_feature 1..17: note = Oligonucleotide
  source 1..17: mol_type = other DNA
agaaaagaagaaactag

SEQ ID NO: 16937 - DNA, 17 bp, synthetic construct
  misc_feature 1..17: note = Oligonucleotide
  source 1..17: mol_type = other DNA
agaagaaaagaagaaac

SEQ ID NO: 16938 - DNA, 17 bp, synthetic construct
  misc_feature 1..17: note = Oligonucleotide
  source 1..17: mol_type = other DNA
gagagaagaaaagaaga

SEQ ID NO: 16939 - DNA, 17 bp, synthetic construct
  misc_feature 1..17: note = Oligonucleotide
  source 1..17: mol_type = other DNA
agagagagaagaaaaga

SEQ ID NO: 16940 - DNA, 17 bp, synthetic construct
  misc_feature 1..17: note = Oligonucleotide
  source 1..17: mol_type = other DNA
aaaagagagagaagaaa

SEQ ID NO: 16941 - DNA, 17 bp, synthetic construct
  misc_feature 1..17: note = Oligonucleotide
  source 1..17: mol_type = other DNA
aaaaaaagagagagaag

SEQ ID NO: 16942 - DNA, 17 bp, synthetic construct
  misc_feature 1..17: note = Oligonucleotide
  source 1..17: mol_type = other DNA
aaaaaaaaaagagagag

SEQ ID NO: 16943 - DNA, 17 bp, synthetic construct
  misc_feature 1..17: note = Oligonucleotide
  source 1..17: mol_type = other DNA
ccaaaaaaaaaaagaga

SEQ ID NO: 16944 - DNA, 17 bp, synthetic construct
  misc_feature 1..17: note = Oligonucleotide
  source 1..17: mol_type = other DNA
tctccaaaaaaaaaaag

SEQ ID NO: 16945 - DNA, 17 bp, synthetic construct
  misc_feature 1..17: note = Oligonucleotide
  source 1..17: mol_type = other DNA
ccatctccaaaaaaaaa

SEQ ID NO: 16946 - DNA, 17 bp, synthetic construct
  misc_feature 1..17: note = Oligonucleotide
  source 1..17: mol_type = other DNA
actccatctccaaaaaa

SEQ ID NO: 16947 - DNA, 17 bp, synthetic construct
  misc_feature 1..17: note = Oligonucleotide
  source 1..17: mol_type = other DNA
gaaactccatctccaaa

SEQ ID NO: 16948 - DNA, 17 bp, synthetic construct
  misc_feature 1..17: note = Oligonucleotide
  source 1..17: mol_type = other DNA
agcgaaactccatctcc

SEQ ID NO: 16949 - DNA, 17 bp, synthetic construct
  misc_feature 1..17: note = Oligonucleotide
  source 1..17: mol_type = other DNA
aagagcgaaactccatc

SEQ ID NO: 16950 - DNA, 17 bp, synthetic construct
  misc_feature 1..17: note = Oligonucleotide
  source 1..17: mol_type = other DNA
aacaagagcgaaactcc

SEQ ID NO: 16951 - DNA, 17 bp, synthetic construct
  misc_feature 1..17: note = Oligonucleotide
  source 1..17: mol_type = other DNA
ggcaacaagagcgaaac

SEQ ID NO: 16952 - DNA, 17 bp, synthetic construct
  misc_feature 1..17: note = Oligonucleotide
  source 1..17: mol_type = other DNA
ctgggcaacaagagcga

SEQ ID NO: 16953 - DNA, 17 bp, synthetic construct
  misc_feature 1..17: note = Oligonucleotide
  source 1..17: mol_type = other DNA
agcctgggcaacaagag

SEQ ID NO: 16954 - DNA, 17 bp, synthetic construct
  misc_feature 1..17: note = Oligonucleotide
  source 1..17: mol_type = other DNA
tacagcctgggcaacaa

SEQ ID NO: 16955 - DNA, 17 bp, synthetic construct
  misc_feature 1..17: note = Oligonucleotide
  source 1..17: mol_type = other DNA
cactacagcctgggcaa

SEQ ID NO: 16956 - DNA, 17 bp, synthetic construct
  misc_feature 1..17: note = Oligonucleotide
  source 1..17: mol_type = other DNA
ttgcactacagcctggg

SEQ ID NO: 16957 - DNA, 17 bp, synthetic construct
  misc_feature 1..17: note = Oligonucleotide
  source 1..17: mol_type = other DNA
ccattgcactacagcct

SEQ ID NO: 16958 - DNA, 17 bp, synthetic construct
  misc_feature 1..17: note = Oligonucleotide
  source 1..17: mol_type = other DNA
acaccattgcactacag

SEQ ID NO: 16959 - DNA, 17 bp, synthetic construct
  misc_feature 1..17: note = Oligonucleotide
  source 1..17: mol_type = other DNA
atcacaccattgcacta

SEQ ID NO: 16960 - DNA, 17 bp, synthetic construct
  misc_feature 1..17: note = Oligonucleotide
  source 1..17: mol_type = other DNA
gagatcacaccattgca

SEQ ID NO: 16961 - DNA, 17 bp, synthetic construct
  misc_feature 1..17: note = Oligonucleotide
  source 1..17: mol_type = other DNA
gctgagatcacaccatt

SEQ ID NO: 16962 - DNA, 17 bp, synthetic construct
  misc_feature 1..17: note = Oligonucleotide
  source 1..17: mol_type = other DNA
tgagctgagatcacacc

SEQ ID NO: 16963 - DNA, 17 bp, synthetic construct
  misc_feature 1..17: note = Oligonucleotide
  source 1..17: mol_type = other DNA
tggtgagctgagatcac

SEQ ID NO: 16964 - DNA, 17 bp, synthetic construct
  misc_feature 1..17: note = Oligonucleotide
  source 1..17: mol_type = other DNA
ttgtggtgagctgagat

SEQ ID NO: 16965 - DNA, 17 bp, synthetic construct
  misc_feature 1..17: note = Oligonucleotide
  source 1..17: mol_type = other DNA
aggttgtggtgagctga

SEQ ID NO: 16966 - DNA, 17 bp, synthetic construct
  misc_feature 1..17: note = Oligonucleotide
  source 1..17: mol_type = other DNA
cggaggttgtggtgagc

SEQ ID NO: 16967 - DNA, 17 bp, synthetic construct
  misc_feature 1..17: note = Oligonucleotide
  source 1..17: mol_type = other DNA
tggcggaggttgtggtg

SEQ ID NO: 16968 - DNA, 17 bp, synthetic construct
  misc_feature 1..17: note = Oligonucleotide
  source 1..17: mol_type = other DNA
agttggcggaggttgtg

SEQ ID NO: 16969 - DNA, 17 bp, synthetic construct
  misc_feature 1..17: note = Oligonucleotide
  source 1..17: mol_type = other DNA
cccagttggcggaggtt

SEQ ID NO: 16970 - DNA, 17 bp, synthetic construct
  misc_feature 1..17: note = Oligonucleotide
  source 1..17: mol_type = other DNA
gaacccagttggcggag

SEQ ID NO: 16971 - DNA, 17 bp, synthetic construct
  misc_feature 1..17: note = Oligonucleotide
  source 1..17: mol_type = other DNA
cttgaacccagttggcg

SEQ ID NO: 16972 - DNA, 17 bp, synthetic construct
  misc_feature 1..17: note = Oligonucleotide
  source 1..17: mol_type = other DNA
tcgcttgaacccagttg

SEQ ID NO: 16973 - DNA, 17 bp, synthetic construct
  misc_feature 1..17: note = Oligonucleotide
  source 1..17: mol_type = other DNA
gaatcgcttgaacccag

SEQ ID NO: 16974 - DNA, 17 bp, synthetic construct
  misc_feature 1..17: note = Oligonucleotide
  source 1..17: mol_type = other DNA
ggagaatcgcttgaacc

SEQ ID NO: 16975 - DNA, 17 bp, synthetic construct
  misc_feature 1..17: note = Oligonucleotide
  source 1..17: mol_type = other DNA
gcaggagaatcgcttga

SEQ ID NO: 16976 - DNA, 17 bp, synthetic construct
  misc_feature 1..17: note = Oligonucleotide
  source 1..17: mol_type = other DNA
gaggcaggagaatcgct

SEQ ID NO: 16977 - DNA, 17 bp, synthetic construct
  misc_feature 1..17: note = Oligonucleotide
  source 1..17: mol_type = other DNA
gctgaggcaggagaatc

SEQ ID NO: 16978 - DNA, 17 bp, synthetic construct
  misc_feature 1..17: note = Oligonucleotide
  source 1..17: mol_type = other DNA
gaggctgaggcaggaga

SEQ ID NO: 16979 - DNA, 17 bp, synthetic construct
  misc_feature 1..17: note = Oligonucleotide
  source 1..17: mol_type = other DNA
cgggaggctgaggcagg

SEQ ID NO: 16980 - DNA, 17 bp, synthetic construct
  misc_feature 1..17: note = Oligonucleotide
  source 1..17: mol_type = other DNA
actcgggaggctgaggc

SEQ ID NO: 16981 - DNA, 17 bp, synthetic construct
  misc_feature 1..17: note = Oligonucleotide
  source 1..17: mol_type = other DNA
gctactcgggaggctga

SEQ ID NO: 16982 - DNA, 17 bp, synthetic construct
  misc_feature 1..17: note = Oligonucleotide
  source 1..17: mol_type = other DNA
ccagctactcgggaggc

SEQ ID NO: 16983 - DNA, 17 bp, synthetic construct
  misc_feature 1..17: note = Oligonucleotide
  source 1..17: mol_type = other DNA
atcccagctactcggga

SEQ ID NO: 16984 - DNA, 17 bp, synthetic construct
  misc_feature 1..17: note = Oligonucleotide
  source 1..17: mol_type = other DNA
gtaatcccagctactcg

SEQ ID NO: 16985 - DNA, 17 bp, synthetic construct
  misc_feature 1..17: note = Oligonucleotide
  source 1..17: mol_type = other DNA
cctgtaatcccagctac

SEQ ID NO: 16986 - DNA, 17 bp, synthetic construct
  misc_feature 1..17: note = Oligonucleotide
  source 1..17: mol_type = other DNA
gtccctgtaatcccagc

SEQ ID NO: 16987 - DNA, 17 bp, synthetic construct
  misc_feature 1..17: note = Oligonucleotide
  source 1..17: mol_type = other DNA
tgggtccctgtaatccc

SEQ ID NO: 16988 - DNA, 17 bp, synthetic construct
  misc_feature 1..17: note = Oligonucleotide
  source 1..17: mol_type = other DNA
tggtgggtccctgtaat

SEQ ID NO: 16989 - DNA, 17 bp, synthetic construct
  misc_feature 1..17: note = Oligonucleotide
  source 1..17: mol_type = other DNA
tggtggtgggtccctgt

SEQ ID NO: 16990 - DNA, 17 bp, synthetic construct
  misc_feature 1..17: note = Oligonucleotide
  source 1..17: mol_type = other DNA
gcatggtggtgggtccc

SEQ ID NO: 16991 - DNA, 17 bp, synthetic construct
  misc_feature 1..17: note = Oligonucleotide
  source 1..17: mol_type = other DNA
caggcatggtggtgggt

SEQ ID NO: 16992 - DNA, 17 bp, synthetic construct
  misc_feature 1..17: note = Oligonucleotide
  source 1..17: mol_type = other DNA
agccaggcatggtggtg

SEQ ID NO: 16993 - DNA, 17 bp, synthetic construct
  misc_feature 1..17: note = Oligonucleotide
  source 1..17: mol_type = other DNA
attagccaggcatggtg

SEQ ID NO: 16994 - DNA, 17 bp, synthetic construct
  misc_feature 1..17: note = Oligonucleotide
  source 1..17: mol_type = other DNA
aaaattagccaggcatg

SEQ ID NO: 16995 - DNA, 17 bp, synthetic construct
  misc_feature 1..17: note = Oligonucleotide
  source 1..17: mol_type = other DNA
tacaaaattagccaggc

SEQ ID NO: 16996 - DNA, 17 bp, synthetic construct
  misc_feature 1..17: note = Oligonucleotide
  source 1..17: mol_type = other DNA
aaatacaaaattagcca

SEQ ID NO: 16997 - DNA, 17 bp, synthetic construct
  misc_feature 1..17: note = Oligonucleotide
  source 1..17: mol_type = other DNA
aaaaaatacaaaattag

SEQ ID NO: 16998 - DNA, 17 bp, synthetic construct
  misc_feature 1..17: note = Oligonucleotide
  source 1..17: mol_type = other DNA
tctaaaaaatacaaaat

SEQ ID NO: 16999 - DNA, 17 bp, synthetic construct
  misc_feature 1..17: note = Oligonucleotide
  source 1..17: mol_type = other DNA
gcctctaaaaaatacaa

SEQ ID NO: 17000 - DNA, 17 bp, synthetic construct
  misc_feature 1..17: note = Oligonucleotide
  source 1..17: mol_type = other DNA
tctgcctctaaaaaata

SEQ ID NO: 17001 - DNA, 17 bp, synthetic construct
  misc_feature 1..17: note = Oligonucleotide
  source 1..17: mol_type = other DNA
aactctgcctctaaaaa

SEQ ID NO: 17002 - DNA, 17 bp, synthetic construct
  misc_feature 1..17: note = Oligonucleotide
  source 1..17: mol_type = other DNA
agaaactctgcctctaa

SEQ ID NO: 17003 - DNA, 17 bp, synthetic construct
  misc_feature 1..17: note = Oligonucleotide
  source 1..17: mol_type = other DNA
tgaagaaactctgcctc

SEQ ID NO: 17004 - DNA, 17 bp, synthetic construct
  misc_feature 1..17: note = Oligonucleotide
  source 1..17: mol_type = other DNA
acatgaagaaactctgc

SEQ ID NO: 17005 - DNA, 17 bp, synthetic construct
  misc_feature 1..17: note = Oligonucleotide
  source 1..17: mol_type = other DNA
ccaacatgaagaaactc

SEQ ID NO: 17006 - DNA, 17 bp, synthetic construct
  misc_feature 1..17: note = Oligonucleotide
  source 1..17: mol_type = other DNA
tgaccaacatgaagaaa

SEQ ID NO: 17007 - DNA, 17 bp, synthetic construct
  misc_feature 1..17: note = Oligonucleotide
  source 1..17: mol_type = other DNA
gcctgaccaacatgaag

SEQ ID NO: 17008 - DNA, 17 bp, synthetic construct
  misc_feature 1..17: note = Oligonucleotide
  source 1..17: mol_type = other DNA
ccagcctgaccaacatg

SEQ ID NO: 17009 - DNA, 17 bp, synthetic construct
  misc_feature 1..17: note = Oligonucleotide
  source 1..17: mol_type = other DNA
agaccagcctgaccaac

SEQ ID NO: 17010 - DNA, 17 bp, synthetic construct
  misc_feature 1..17: note = Oligonucleotide
  source 1..17: mol_type = other DNA
tcgagaccagcctgacc

SEQ ID NO: 17011 - DNA, 17 bp, synthetic construct
  misc_feature 1..17: note = Oligonucleotide
  source 1..17: mol_type = other DNA
agttcgagaccagcctg

SEQ ID NO: 17012 - DNA, 17 bp, synthetic construct
  misc_feature 1..17: note = Oligonucleotide
  source 1..17: mol_type = other DNA
gggagttcgagaccagc

SEQ ID NO: 17013 - DNA, 17 bp, synthetic construct
  misc_feature 1..17: note = Oligonucleotide
  source 1..17: mol_type = other DNA
gttgggagttcgagacc

SEQ ID NO: 17014 - DNA, 17 bp, synthetic construct
  misc_feature 1..17: note = Oligonucleotide
  source 1..17: mol_type = other DNA
gaggttgggagttcgag

SEQ ID NO: 17015 - DNA, 17 bp, synthetic construct
  misc_feature 1..17: note = Oligonucleotide
  source 1..17: mol_type = other DNA
cctgaggttgggagttc

SEQ ID NO: 17016 - DNA, 17 bp, synthetic construct
  misc_feature 1..17: note = Oligonucleotide
  source 1..17: mol_type = other DNA
tcacctgaggttgggag

SEQ ID NO: 17017 - DNA, 17 bp, synthetic construct
  misc_feature 1..17: note = Oligonucleotide
  source 1..17: mol_type = other DNA
agatcacctgaggttgg

SEQ ID NO: 17018 - DNA, 17 bp, synthetic construct
  misc_feature 1..17: note = Oligonucleotide
  source 1..17: mol_type = other DNA
ggcagatcacctgaggt

SEQ ID NO: 17019 - DNA, 17 bp, synthetic construct
  misc_feature 1..17: note = Oligonucleotide
  source 1..17: mol_type = other DNA
gcaggcagatcacctga

SEQ ID NO: 17020 - DNA, 17 bp, synthetic construct
  misc_feature 1..17: note = Oligonucleotide
  source 1..17: mol_type = other DNA
gaggcaggcagatcacc

SEQ ID NO: 17021 - DNA, 17 bp, synthetic construct
  misc_feature 1..17: note = Oligonucleotide
  source 1..17: mol_type = other DNA
gccgaggcaggcagatc

SEQ ID NO: 17022 - DNA, 17 bp, synthetic construct
  misc_feature 1..17: note = Oligonucleotide
  source 1..17: mol_type = other DNA
gaggccgaggcaggcag

SEQ ID NO: 17023 - DNA, 17 bp, synthetic construct
  misc_feature 1..17: note = Oligonucleotide
  source 1..17: mol_type = other DNA
tgggaggccgaggcagg

SEQ ID NO: 17024 - DNA, 17 bp, synthetic construct
  misc_feature 1..17: note = Oligonucleotide
  source 1..17: mol_type = other DNA
acttgggaggccgaggc

SEQ ID NO: 17025 - DNA, 17 bp, synthetic construct
  misc_feature 1..17: note = Oligonucleotide
  source 1..17: mol_type = other DNA
agcacttgggaggccga

SEQ ID NO: 17026 - DNA, 17 bp, synthetic construct
  misc_feature 1..17: note = Oligonucleotide
  source 1..17: mol_type = other DNA
cccagcacttgggaggc

SEQ ID NO: 17027 - DNA, 17 bp, synthetic construct
  misc_feature 1..17: note = Oligonucleotide
  source 1..17: mol_type = other DNA
aatcccagcacttggga

SEQ ID NO: 17028 - DNA, 17 bp, synthetic construct
  misc_feature 1..17: note = Oligonucleotide
  source 1..17: mol_type = other DNA
tgtaatcccagcacttg

SEQ ID NO: 17029 - DNA, 17 bp, synthetic construct
  misc_feature 1..17: note = Oligonucleotide
  source 1..17: mol_type = other DNA
gcctgtaatcccagcac

SEQ ID NO: 17030 - DNA, 17 bp, synthetic construct
  misc_feature 1..17: note = Oligonucleotide
  source 1..17: mol_type = other DNA
catgcctgtaatcccag

SEQ ID NO: 17031 - DNA, 17 bp, synthetic construct
  misc_feature 1..17: note = Oligonucleotide
  source 1..17: mol_type = other DNA
gctcatgcctgtaatcc

SEQ ID NO: 17032 - DNA, 17 bp, synthetic construct
  misc_feature 1..17: note = Oligonucleotide
  source 1..17: mol_type = other DNA
gtggctcatgcctgtaa

SEQ ID NO: 17033 - DNA, 17 bp, synthetic construct
  misc_feature 1..17: note = Oligonucleotide
  source 1..17: mol_type = other DNA
acagtggctcatgcctg

SEQ ID NO: 17034 - DNA, 17 bp, synthetic construct
  misc_feature 1..17: note = Oligonucleotide
  source 1..17: mol_type = other DNA
ggcacagtggctcatgc

SEQ ID NO: 17035 - DNA, 17 bp, synthetic construct
  misc_feature 1..17: note = Oligonucleotide
  source 1..17: mol_type = other DNA
ccgggcacagtggctca

SEQ ID NO: 17036 - DNA, 17 bp, synthetic construct
  misc_feature 1..17: note = Oligonucleotide
  source 1..17: mol_type = other DNA
aggccgggcacagtggc

SEQ ID NO: 17037 - DNA, 17 bp, synthetic construct
  misc_feature 1..17: note = Oligonucleotide
  source 1..17: mol_type = other DNA
aagaggccgggcacagt

SEQ ID NO: 17038 - DNA, 17 bp, synthetic construct
  misc_feature 1..17: note = Oligonucleotide
  source 1..17: mol_type = other DNA
gaaaagaggccgggcac

SEQ ID NO: 17039 - DNA, 17 bp, synthetic construct
  misc_feature 1..17: note = Oligonucleotide
  source 1..17: mol_type = other DNA
aaagaaaagaggccggg

SEQ ID NO: 17040 - DNA, 17 bp, synthetic construct
  misc_feature 1..17: note = Oligonucleotide
  source 1..17: mol_type = other DNA
agaaaagaaaagaggcc

SEQ ID NO: 17041 - DNA, 17 bp, synthetic construct
  misc_feature 1..17: note = Oligonucleotide
  source 1..17: mol_type = other DNA
aaaagaaaagaaaagag

SEQ ID NO: 17042 - DNA, 17 bp, synthetic construct
  misc_feature 1..17: note = Oligonucleotide
  source 1..17: mol_type = other DNA
aataaaagaaaagaaaa

SEQ ID NO: 17043 - DNA, 17 bp, synthetic construct
  misc_feature 1..17: note = Oligonucleotide
  source 1..17: mol_type = other DNA
accaataaaagaaaaga

SEQ ID NO: 17044 - DNA, 17 bp, synthetic construct
  misc_feature 1..17: note = Oligonucleotide
  source 1..17: mol_type = other DNA
tgaaccaataaaagaaa

SEQ ID NO: 17045 - DNA, 17 bp, synthetic construct
  misc_feature 1..17: note = Oligonucleotide
  source 1..17: mol_type = other DNA
gaatgaaccaataaaag

SEQ ID NO: 17046 - DNA, 17 bp, synthetic construct
  misc_feature 1..17: note = Oligonucleotide
  source 1..17: mol_type = other DNA
tatgaatgaaccaataa

SEQ ID NO: 17047 - DNA, 17 bp, synthetic construct
  misc_feature 1..17: note = Oligonucleotide
  source 1..17: mol_type = other DNA
ctgtatgaatgaaccaa

SEQ ID NO: 17048 - DNA, 17 bp, synthetic construct
  misc_feature 1..17: note = Oligonucleotide
  source 1..17: mol_type = other DNA
tgtctgtatgaatgaac

SEQ ID NO: 17049 - DNA, 17 bp, synthetic construct
  misc_feature 1..17: note = Oligonucleotide
  source 1..17: mol_type = other DNA
ccttgtctgtatgaatg

SEQ ID NO: 17050 - DNA, 17 bp, synthetic construct
  misc_feature 1..17: note = Oligonucleotide
  source 1..17: mol_type = other DNA
agaccttgtctgtatga

SEQ ID NO: 17051 - DNA, 17 bp, synthetic construct
  misc_feature 1..17: note = Oligonucleotide
  source 1..17: mol_type = other DNA
gtgagaccttgtctgta

SEQ ID NO: 17052 - DNA, 17 bp, synthetic construct
  misc_feature 1..17: note = Oligonucleotide
  source 1..17: mol_type = other DNA
atagtgagaccttgtct

SEQ ID NO: 17053 - DNA, 17 bp, synthetic construct
  misc_feature 1..17: note = Oligonucleotide
  source 1..17: mol_type = other DNA
aacatagtgagaccttg

SEQ ID NO: 17054 - DNA, 17 bp, synthetic construct
  misc_feature 1..17: note = Oligonucleotide
  source 1..17: mol_type = other DNA
agcaacatagtgagacc

SEQ ID NO: 17055 - DNA, 17 bp, synthetic construct
  misc_feature 1..17: note = Oligonucleotide
  source 1..17: mol_type = other DNA
cctagcaacatagtgag

SEQ ID NO: 17056 - DNA, 17 bp, synthetic construct
  misc_feature 1..17: note = Oligonucleotide
  source 1..17: mol_type = other DNA
cagcctagcaacatagt

SEQ ID NO: 17057 - DNA, 17 bp, synthetic construct
  misc_feature 1..17: note = Oligonucleotide
  source 1..17: mol_type = other DNA
gaccagcctagcaacat

SEQ ID NO: 17058 - DNA, 17 bp, synthetic construct
  misc_feature 1..17: note = Oligonucleotide
  source 1..17: mol_type = other DNA
caagaccagcctagcaa

SEQ ID NO: 17059 - DNA, 17 bp, synthetic construct
  misc_feature 1..17: note = Oligonucleotide
  source 1..17: mol_type = other DNA
gctcaagaccagcctag

SEQ ID NO: 17060 - DNA, 17 bp, synthetic construct
  misc_feature 1..17: note = Oligonucleotide
  source 1..17: mol_type = other DNA
ggagctcaagaccagcc

SEQ ID NO: 17061 - DNA, 17 bp, synthetic construct
  misc_feature 1..17: note = Oligonucleotide
  source 1..17: mol_type = other DNA
ccaggagctcaagacca

SEQ ID NO: 17062 - DNA, 17 bp, synthetic construct
  misc_feature 1..17: note = Oligonucleotide
  source 1..17: mol_type = other DNA
agcccaggagctcaaga

SEQ ID NO: 17063 - DNA, 17 bp, synthetic construct
  misc_feature 1..17: note = Oligonucleotide
  source 1..17: mol_type = other DNA
ttcagcccaggagctca

SEQ ID NO: 17064 - DNA, 17 bp, synthetic construct
  misc_feature 1..17: note = Oligonucleotide
  source 1..17: mol_type = other DNA
cacttcagcccaggagc

SEQ ID NO: 17065 - DNA, 17 bp, synthetic construct
  misc_feature 1..17: note = Oligonucleotide
  source 1..17: mol_type = other DNA
catcacttcagcccagg

SEQ ID NO: 17066 - DNA, 17 bp, synthetic construct
  misc_feature 1..17: note = Oligonucleotide
  source 1..17: mol_type = other DNA
gagcatcacttcagccc

SEQ ID NO: 17067 - DNA, 17 bp, synthetic construct
  misc_feature 1..17: note = Oligonucleotide
  source 1..17: mol_type = other DNA
cgggagcatcacttcag

SEQ ID NO: 17068 - DNA, 17 bp, synthetic construct
  misc_feature 1..17: note = Oligonucleotide
  source 1..17: mol_type = other DNA
aagcgggagcatcactt

SEQ ID NO: 17069 - DNA, 17 bp, synthetic construct
  misc_feature 1..17: note = Oligonucleotide
  source 1..17: mol_type = other DNA
ccaaagcgggagcatca

SEQ ID NO: 17070 - DNA, 17 bp, synthetic construct
  misc_feature 1..17: note = Oligonucleotide
  source 1..17: mol_type = other DNA
aggccaaagcgggagca

SEQ ID NO: 17071 - DNA, 17 bp, synthetic construct
  misc_feature 1..17: note = Oligonucleotide
  source 1..17: mol_type = other DNA
gggaggccaaagcggga

SEQ ID NO: 17072 - DNA, 17 bp, synthetic construct
  misc_feature 1..17: note = Oligonucleotide
  source 1..17: mol_type = other DNA
tttgggaggccaaagcg

SEQ ID NO: 17073 - DNA, 17 bp, synthetic construct
  misc_feature 1..17: note = Oligonucleotide
  source 1..17: mol_type = other DNA
cactttgggaggccaaa

SEQ ID NO: 17074 - DNA, 17 bp, synthetic construct
  misc_feature 1..17: note = Oligonucleotide
  source 1..17: mol_type = other DNA
cagcactttgggaggcc

SEQ ID NO: 17075 - DNA, 17 bp, synthetic construct
  misc_feature 1..17: note = Oligonucleotide
  source 1..17: mol_type = other DNA
tcccagcactttgggag

SEQ ID NO: 17076 - DNA, 17 bp, synthetic construct
  misc_feature 1..17: note = Oligonucleotide
  source 1..17: mol_type = other DNA
taatcccagcactttgg

SEQ ID NO: 17077 - DNA, 17 bp, synthetic construct
  misc_feature 1..17: note = Oligonucleotide
  source 1..17: mol_type = other DNA
ctgtaatcccagcactt

SEQ ID NO: 17078 - DNA, 17 bp, synthetic construct
  misc_feature 1..17: note = Oligonucleotide
  source 1..17: mol_type = other DNA
tgcctgtaatcccagca

SEQ ID NO: 17079 - DNA, 17 bp, synthetic construct
  misc_feature 1..17: note = Oligonucleotide
  source 1..17: mol_type = other DNA
tcatgcctgtaatccca

SEQ ID NO: 17080 - DNA, 17 bp, synthetic construct
  misc_feature 1..17: note = Oligonucleotide
  source 1..17: mol_type = other DNA
ggctcatgcctgtaatc

SEQ ID NO: 17081 - DNA, 17 bp, synthetic construct
  misc_feature 1..17: note = Oligonucleotide
  source 1..17: mol_type = other DNA
agtggctcatgcctgta

SEQ ID NO: 17082 - DNA, 17 bp, synthetic construct
  misc_feature 1..17: note = Oligonucleotide
  source 1..17: mol_type = other DNA
ctcagtggctcatgcct

SEQ ID NO: 17083 - DNA, 17 bp, synthetic construct
  misc_feature 1..17: note = Oligonucleotide
  source 1..17: mol_type = other DNA
aggctcagtggctcatg

SEQ ID NO: 17084 - DNA, 17 bp, synthetic construct
  misc_feature 1..17: note = Oligonucleotide
  source 1..17: mol_type = other DNA
gcgaggctcagtggctc

SEQ ID NO: 17085 - DNA, 17 bp, synthetic construct
  misc_feature 1..17: note = Oligonucleotide
  source 1..17: mol_type = other DNA
aaggcgaggctcagtgg

SEQ ID NO: 17086 - DNA, 17 bp, synthetic construct
  misc_feature 1..17: note = Oligonucleotide
  source 1..17: mol_type = other DNA
gagaaggcgaggctcag

SEQ ID NO: 17087 - DNA, 17 bp, synthetic construct
  misc_feature 1..17: note = Oligonucleotide
  source 1..17: mol_type = other DNA
aacgagaaggcgaggct

SEQ ID NO: 17088 - DNA, 17 bp, synthetic construct
  misc_feature 1..17: note = Oligonucleotide
  source 1..17: mol_type = other DNA
agaaacgagaaggcgag

SEQ ID NO: 17089 - DNA, 17 bp, synthetic construct
  misc_feature 1..17: note = Oligonucleotide
  source 1..17: mol_type = other DNA
aaaagaaacgagaaggc

SEQ ID NO: 17090 - DNA, 17 bp, synthetic construct
  misc_feature 1..17: note = Oligonucleotide
  source 1..17: mol_type = other DNA
caaaaaagaaacgagaa

SEQ ID NO: 17091 - DNA, 17 bp, synthetic construct
  misc_feature 1..17: note = Oligonucleotide
  source 1..17: mol_type = other DNA
aaacaaaaaagaaacga

SEQ ID NO: 17092 - DNA, 17 bp, synthetic construct
  misc_feature 1..17: note = Oligonucleotide
  source 1..17: mol_type = other DNA
aagaaacaaaaaagaaa

SEQ ID NO: 17093 - DNA, 17 bp, synthetic construct
  misc_feature 1..17: note = Oligonucleotide
  source 1..17: mol_type = other DNA
aaaaagaaacaaaaaag

SEQ ID NO: 17094 - DNA, 17 bp, synthetic construct
  misc_feature 1..17: note = Oligonucleotide
  source 1..17: mol_type = other DNA
aaaaaaaagaaacaaaa

SEQ ID NO: 17095 - DNA, 17 bp, synthetic construct
  misc_feature 1..17: note = Oligonucleotide
  source 1..17: mol_type = other DNA
acgaaaaaaaagaaaca

SEQ ID NO: 17096 - DNA, 17 bp, synthetic construct
  misc_feature 1..17: note = Oligonucleotide
  source 1..17: mol_type = other DNA
ctcacgaaaaaaaagaa

SEQ ID NO: 17097 - DNA, 17 bp, synthetic construct
  misc_feature 1..17: note = Oligonucleotide
  source 1..17: mol_type = other DNA
catctcacgaaaaaaaa

SEQ ID NO: 17098 - DNA, 17 bp, synthetic construct
  misc_feature 1..17: note = Oligonucleotide
  source 1..17: mol_type = other DNA
ctccatctcacgaaaaa

SEQ ID NO: 17099 - DNA, 17 bp, synthetic construct
  misc_feature 1..17: note = Oligonucleotide
  source 1..17: mol_type = other DNA
aaactccatctcacgaa

SEQ ID NO: 17100 - DNA, 17 bp, synthetic construct
  misc_feature 1..17: note = Oligonucleotide
  source 1..17: mol_type = other DNA
gtgaaactccatctcac

SEQ ID NO: 17101 - DNA, 17 bp, synthetic construct
  misc_feature 1..17: note = Oligonucleotide
  source 1..17: mol_type = other DNA
agagtgaaactccatct

SEQ ID NO: 17102 - DNA, 17 bp, synthetic construct
  misc_feature 1..17: note = Oligonucleotide
  source 1..17: mol_type = other DNA
ccaagagtgaaactcca

SEQ ID NO: 17103 - DNA, 17 bp, synthetic construct
  misc_feature 1..17: note = Oligonucleotide
  source 1..17: mol_type = other DNA
gcaccaagagtgaaact

SEQ ID NO: 17104 - DNA, 17 bp, synthetic construct
  misc_feature 1..17: note = Oligonucleotide
  source 1..17: mol_type = other DNA
tgggcaccaagagtgaa

SEQ ID NO: 17105 - DNA, 17 bp, synthetic construct
  misc_feature 1..17: note = Oligonucleotide
  source 1..17: mol_type = other DNA
gcctgggcaccaagagt

SEQ ID NO: 17106 - DNA, 17 bp, synthetic construct
  misc_feature 1..17: note = Oligonucleotide
  source 1..17: mol_type = other DNA
accgcctgggcaccaag

SEQ ID NO: 17107 - DNA, 17 bp, synthetic construct
  misc_feature 1..17: note = Oligonucleotide
  source 1..17: mol_type = other DNA
actaccgcctgggcacc

SEQ ID NO: 17108 - DNA, 17 bp, synthetic construct
  misc_feature 1..17: note = Oligonucleotide
  source 1..17: mol_type = other DNA
tgcactaccgcctgggc

SEQ ID NO: 17109 - DNA, 17 bp, synthetic construct
  misc_feature 1..17: note = Oligonucleotide
  source 1..17: mol_type = other DNA
cattgcactaccgcctg

SEQ ID NO: 17110 - DNA, 17 bp, synthetic construct
  misc_feature 1..17: note = Oligonucleotide
  source 1..17: mol_type = other DNA
cgccattgcactaccgc

SEQ ID NO: 17111 - DNA, 17 bp, synthetic construct
  misc_feature 1..17: note = Oligonucleotide
  source 1..17: mol_type = other DNA
ttgcgccattgcactac

SEQ ID NO: 17112 - DNA, 17 bp, synthetic construct
  misc_feature 1..17: note = Oligonucleotide
  source 1..17: mol_type = other DNA
agattgcgccattgcac

SEQ ID NO: 17113 - DNA, 17 bp, synthetic construct
  misc_feature 1..17: note = Oligonucleotide
  source 1..17: mol_type = other DNA
ccaagattgcgccattg

SEQ ID NO: 17114 - DNA, 17 bp, synthetic construct
  misc_feature 1..17: note = Oligonucleotide
  source 1..17: mol_type = other DNA
gagccaagattgcgcca

SEQ ID NO: 17115 - DNA, 17 bp, synthetic construct
  misc_feature 1..17: note = Oligonucleotide
  source 1..17: mol_type = other DNA
ggtgagccaagattgcg

SEQ ID NO: 17116 - DNA, 17 bp, synthetic construct
  misc_feature 1..17: note = Oligonucleotide
  source 1..17: mol_type = other DNA
ggtggtgagccaagatt

SEQ ID NO: 17117 - DNA, 17 bp, synthetic construct
  misc_feature 1..17: note = Oligonucleotide
  source 1..17: mol_type = other DNA
ggtggtggtgagccaag

SEQ ID NO: 17118 - DNA, 17 bp, synthetic construct
  misc_feature 1..17: note = Oligonucleotide
  source 1..17: mol_type = other DNA
ggaggtggtggtgagcc

SEQ ID NO: 17119 - DNA, 17 bp, synthetic construct
  misc_feature 1..17: note = Oligonucleotide
  source 1..17: mol_type = other DNA
ggcggaggtggtggtga

SEQ ID NO: 17120 - DNA, 17 bp, synthetic construct
  misc_feature 1..17: note = Oligonucleotide
  source 1..17: mol_type = other DNA
ggaggcggaggtggtgg

SEQ ID NO: 17121 - DNA, 17 bp, synthetic construct
  misc_feature 1..17: note = Oligonucleotide
  source 1..17: mol_type = other DNA
ccaggaggcggaggtgg

SEQ ID NO: 17122 - DNA, 17 bp, synthetic construct
  misc_feature 1..17: note = Oligonucleotide
  source 1..17: mol_type = other DNA
aacccaggaggcggagg

SEQ ID NO: 17123 - DNA, 17 bp, synthetic construct
  misc_feature 1..17: note = Oligonucleotide
  source 1..17: mol_type = other DNA
ttgaacccaggaggcgg

SEQ ID NO: 17124 - DNA, 17 bp, synthetic construct
  misc_feature 1..17: note = Oligonucleotide
  source 1..17: mol_type = other DNA
tgcttgaacccaggagg

SEQ ID NO: 17125 - DNA, 17 bp, synthetic construct
  misc_feature 1..17: note = Oligonucleotide
  source 1..17: mol_type = other DNA
aattgcttgaacccagg

SEQ ID NO: 17126 - DNA, 17 bp, synthetic construct
  misc_feature 1..17: note = Oligonucleotide
  source 1..17: mol_type = other DNA
gagaattgcttgaaccc

SEQ ID NO: 17127 - DNA, 17 bp, synthetic construct
  misc_feature 1..17: note = Oligonucleotide
  source 1..17: mol_type = other DNA
catgagaattgcttgaa

SEQ ID NO: 17128 - DNA, 17 bp, synthetic construct
  misc_feature 1..17: note = Oligonucleotide
  source 1..17: mol_type = other DNA
aggcatgagaattgctt

SEQ ID NO: 17129 - DNA, 17 bp, synthetic construct
  misc_feature 1..17: note = Oligonucleotide
  source 1..17: mol_type = other DNA
ctgaggcatgagaattg

SEQ ID NO: 17130 - DNA, 17 bp, synthetic construct
  misc_feature 1..17: note = Oligonucleotide
  source 1..17: mol_type = other DNA
aggctgaggcatgagaa

SEQ ID NO: 17131 - DNA, 17 bp, synthetic construct
  misc_feature 1..17: note = Oligonucleotide
  source 1..17: mol_type = other DNA
aggaggctgaggcatga

SEQ ID NO: 17132 - DNA, 17 bp, synthetic construct
  misc_feature 1..17: note = Oligonucleotide
  source 1..17: mol_type = other DNA
ctcaggaggctgaggca

SEQ ID NO: 17133 - DNA, 17 bp, synthetic construct
  misc_feature 1..17: note = Oligonucleotide
  source 1..17: mol_type = other DNA
ctactcaggaggctgag

SEQ ID NO: 17134 - DNA, 17 bp, synthetic construct
  misc_feature 1..17: note = Oligonucleotide
  source 1..17: mol_type = other DNA
cagctactcaggaggct

SEQ ID NO: 17135 - DNA, 17 bp, synthetic construct
  misc_feature 1..17: note = Oligonucleotide
  source 1..17: mol_type = other DNA
tcccagctactcaggag

SEQ ID NO: 17136 - DNA, 17 bp, synthetic construct
  misc_feature 1..17: note = Oligonucleotide
  source 1..17: mol_type = other DNA
taatcccagctactcag

SEQ ID NO: 17137 - DNA, 17 bp, synthetic construct
  misc_feature 1..17: note = Oligonucleotide
  source 1..17: mol_type = other DNA
ctgtaatcccagctact

SEQ ID NO: 17138 - DNA, 17 bp, synthetic construct
  misc_feature 1..17: note = Oligonucleotide
  source 1..17: mol_type = other DNA
tgcctgtaatcccagct

SEQ ID NO: 17139 - DNA, 17 bp, synthetic construct
  misc_feature 1..17: note = Oligonucleotide
  source 1..17: mol_type = other DNA
gcatgcctgtaatccca

SEQ ID NO: 17140 - DNA, 17 bp, synthetic construct
  misc_feature 1..17: note = Oligonucleotide
  source 1..17: mol_type = other DNA
agtgcatgcctgtaatc

SEQ ID NO: 17141 - DNA, 17 bp, synthetic construct
  misc_feature 1..17: note = Oligonucleotide
  source 1..17: mol_type = other DNA
ggcagtgcatgcctgta

SEQ ID NO: 17142 - DNA, 17 bp, synthetic construct
  misc_feature 1..17: note = Oligonucleotide
  source 1..17: mol_type = other DNA
tgtggcagtgcatgcct

SEQ ID NO: 17143 - DNA, 17 bp, synthetic construct
  misc_feature 1..17: note = Oligonucleotide
  source 1..17: mol_type = other DNA
gggtgtggcagtgcatg

SEQ ID NO: 17144 - DNA, 17 bp, synthetic construct
  misc_feature 1..17: note = Oligonucleotide
  source 1..17: mol_type = other DNA
gccgggtgtggcagtgc

SEQ ID NO: 17145 - DNA, 17 bp, synthetic construct
  misc_feature 1..17: note = Oligonucleotide
  source 1..17: mol_type = other DNA
ttggccgggtgtggcag

SEQ ID NO: 17146 - DNA, 17 bp, synthetic construct
  misc_feature 1..17: note = Oligonucleotide
  source 1..17: mol_type = other DNA
aaattggccgggtgtgg

SEQ ID NO: 17147 - DNA, 17 bp, synthetic construct
  misc_feature 1..17: note = Oligonucleotide
  source 1..17: mol_type = other DNA
caaaaattggccgggtg

SEQ ID NO: 17148 - DNA, 17 bp, synthetic construct
  misc_feature 1..17: note = Oligonucleotide
  source 1..17: mol_type = other DNA
atacaaaaattggccgg

SEQ ID NO: 17149 - DNA, 17 bp, synthetic construct
  misc_feature 1..17: note = Oligonucleotide
  source 1..17: mol_type = other DNA
ataatacaaaaattggc

SEQ ID NO: 17150 - DNA, 17 bp, synthetic construct
  misc_feature 1..17: note = Oligonucleotide
  source 1..17: mol_type = other DNA
ctaataatacaaaaatt

SEQ ID NO: 17151 - DNA, 17 bp, synthetic construct
  misc_feature 1..17: note = Oligonucleotide
  source 1..17: mol_type = other DNA
ctactaataatacaaaa

SEQ ID NO: 17152 - DNA, 17 bp, synthetic construct
  misc_feature 1..17: note = Oligonucleotide
  source 1..17: mol_type = other DNA
tctctactaataataca

SEQ ID NO: 17153 - DNA, 17 bp, synthetic construct
  misc_feature 1..17: note = Oligonucleotide
  source 1..17: mol_type = other DNA
ccgtctctactaataat

SEQ ID NO: 17154 - DNA, 17 bp, synthetic construct
  misc_feature 1..17: note = Oligonucleotide
  source 1..17: mol_type = other DNA
accccgtctctactaat

SEQ ID NO: 17155 - DNA, 17 bp, synthetic construct
  misc_feature 1..17: note = Oligonucleotide
  source 1..17: mol_type = other DNA
gaaaccccgtctctact

SEQ ID NO: 17156 - DNA, 17 bp, synthetic construct
  misc_feature 1..17: note = Oligonucleotide
  source 1..17: mol_type = other DNA
ggagaaaccccgtctct

SEQ ID NO: 17157 - DNA, 17 bp, synthetic construct
  misc_feature 1..17: note = Oligonucleotide
  source 1..17: mol_type = other DNA
catggagaaaccccgtc

SEQ ID NO: 17158 - DNA, 17 bp, synthetic construct
  misc_feature 1..17: note = Oligonucleotide
  source 1..17: mol_type = other DNA
caacatggagaaacccc

SEQ ID NO: 17159 - DNA, 17 bp, synthetic construct
  misc_feature 1..17: note = Oligonucleotide
  source 1..17: mol_type = other DNA
gaccaacatggagaaac

SEQ ID NO: 17160 - DNA, 17 bp, synthetic construct
  misc_feature 1..17: note = Oligonucleotide
  source 1..17: mol_type = other DNA
cctgaccaacatggaga

SEQ ID NO: 17161 - DNA, 17 bp, synthetic construct
  misc_feature 1..17: note = Oligonucleotide
  source 1..17: mol_type = other DNA
cagcctgaccaacatgg

SEQ ID NO: 17162 - DNA, 17 bp, synthetic construct
  misc_feature 1..17: note = Oligonucleotide
  source 1..17: mol_type = other DNA
aaccagcctgaccaaca

SEQ ID NO: 17163 - DNA, 17 bp, synthetic construct
  misc_feature 1..17: note = Oligonucleotide
  source 1..17: mol_type = other DNA
cgaaaccagcctgacca

SEQ ID NO: 17164 - DNA, 17 bp, synthetic construct
  misc_feature 1..17: note = Oligonucleotide
  source 1..17: mol_type = other DNA
gttcgaaaccagcctga

SEQ ID NO: 17165 - DNA, 17 bp, synthetic construct
  misc_feature 1..17: note = Oligonucleotide
  source 1..17: mol_type = other DNA
ggagttcgaaaccagcc

SEQ ID NO: 17166 - DNA, 17 bp, synthetic construct
  misc_feature 1..17: note = Oligonucleotide
  source 1..17: mol_type = other DNA
tcgggagttcgaaacca

SEQ ID NO: 17167 - DNA, 17 bp, synthetic construct
  misc_feature 1..17: note = Oligonucleotide
  source 1..17: mol_type = other DNA
aggtcgggagttcgaaa

SEQ ID NO: 17168 - DNA, 17 bp, synthetic construct
  misc_feature 1..17: note = Oligonucleotide
  source 1..17: mol_type = other DNA
ttgaggtcgggagttcg

SEQ ID NO: 17169 - DNA, 17 bp, synthetic construct
  misc_feature 1..17: note = Oligonucleotide
  source 1..17: mol_type = other DNA
cacttgaggtcgggagt

SEQ ID NO: 17170 - DNA, 17 bp, synthetic construct
  misc_feature 1..17: note = Oligonucleotide
  source 1..17: mol_type = other DNA
gatcacttgaggtcggg

SEQ ID NO: 17171 - DNA, 17 bp, synthetic construct
  misc_feature 1..17: note = Oligonucleotide
  source 1..17: mol_type = other DNA
gtagatcacttgaggtc

SEQ ID NO: 17172 - DNA, 17 bp, synthetic construct
  misc_feature 1..17: note = Oligonucleotide
  source 1..17: mol_type = other DNA
caggtagatcacttgag

SEQ ID NO: 17173 - DNA, 17 bp, synthetic construct
  misc_feature 1..17: note = Oligonucleotide
  source 1..17: mol_type = other DNA
aggcaggtagatcactt

SEQ ID NO: 17174 - DNA, 17 bp, synthetic construct
  misc_feature 1..17: note = Oligonucleotide
  source 1..17: mol_type = other DNA
ccaaggcaggtagatca

SEQ ID NO: 17175 - DNA, 17 bp, synthetic construct
  misc_feature 1..17: note = Oligonucleotide
  source 1..17: mol_type = other DNA
aggccaaggcaggtaga

SEQ ID NO: 17176 - DNA, 17 bp, synthetic construct
  misc_feature 1..17: note = Oligonucleotide
  source 1..17: mol_type = other DNA
gggaggccaaggcaggt

SEQ ID NO: 17177 - DNA, 17 bp, synthetic construct
  misc_feature 1..17: note = Oligonucleotide
  source 1..17: mol_type = other DNA
tttgggaggccaaggca

SEQ ID NO: 17178 - DNA, 17 bp, synthetic construct
  misc_feature 1..17: note = Oligonucleotide
  source 1..17: mol_type = other DNA
cactttgggaggccaag

SEQ ID NO: 17179 - DNA, 17 bp, synthetic construct
  misc_feature 1..17: note = Oligonucleotide
  source 1..17: mol_type = other DNA
tagcactttgggaggcc

SEQ ID NO: 17180 - DNA, 17 bp, synthetic construct
  misc_feature 1..17: note = Oligonucleotide
  source 1..17: mol_type = other DNA
tcctagcactttgggag

SEQ ID NO: 17181 - DNA, 17 bp, synthetic construct
  misc_feature 1..17: note = Oligonucleotide
  source 1..17: mol_type = other DNA
taatcctagcactttgg

SEQ ID NO: 17182 - DNA, 17 bp, synthetic construct
  misc_feature 1..17: note = Oligonucleotide
  source 1..17: mol_type = other DNA
ctgtaatcctagcactt

SEQ ID NO: 17183 - DNA, 17 bp, synthetic construct
  misc_feature 1..17: note = Oligonucleotide
  source 1..17: mol_type = other DNA
cgcctgtaatcctagca

SEQ ID NO: 17184 - DNA, 17 bp, synthetic construct
  misc_feature 1..17: note = Oligonucleotide
  source 1..17: mol_type = other DNA
tcacgcctgtaatccta

SEQ ID NO: 17185 - DNA, 17 bp, synthetic construct
  misc_feature 1..17: note = Oligonucleotide
  source 1..17: mol_type = other DNA
ggctcacgcctgtaatc

SEQ ID NO: 17186 - DNA, 17 bp, synthetic construct
  misc_feature 1..17: note = Oligonucleotide
  source 1..17: mol_type = other DNA
agtggctcacgcctgta

SEQ ID NO: 17187 - DNA, 17 bp, synthetic construct
  misc_feature 1..17: note = Oligonucleotide
  source 1..17: mol_type = other DNA
ttcagtggctcacgcct

SEQ ID NO: 17188 - DNA, 17 bp, synthetic construct
  misc_feature 1..17: note = Oligonucleotide
  source 1..17: mol_type = other DNA
gggttcagtggctcacg

SEQ ID NO: 17189 - DNA, 17 bp, synthetic construct
  misc_feature 1..17: note = Oligonucleotide
  source 1..17: mol_type = other DNA
gccgggttcagtggctc

SEQ ID NO: 17190 - DNA, 17 bp, synthetic construct
  misc_feature 1..17: note = Oligonucleotide
  source 1..17: mol_type = other DNA
aaggccgggttcagtgg

SEQ ID NO: 17191 - DNA, 17 bp, synthetic construct
  misc_feature 1..17: note = Oligonucleotide
  source 1..17: mol_type = other DNA
gagaaggccgggttcag

SEQ ID NO: 17192 - DNA, 17 bp, synthetic construct
  misc_feature 1..17: note = Oligonucleotide
  source 1..17: mol_type = other DNA
caagagaaggccgggtt

SEQ ID NO: 17193 - DNA, 17 bp, synthetic construct
  misc_feature 1..17: note = Oligonucleotide
  source 1..17: mol_type = other DNA
aaacaagagaaggccgg

SEQ ID NO: 17194 - DNA, 17 bp, synthetic construct
  misc_feature 1..17: note = Oligonucleotide
  source 1..17: mol_type = other DNA
aagaaacaagagaaggc

SEQ ID NO: 17195 - DNA, 17 bp, synthetic construct
  misc_feature 1..17: note = Oligonucleotide
  source 1..17: mol_type = other DNA
cttaagaaacaagagaa

SEQ ID NO: 17196 - DNA, 17 bp, synthetic construct
  misc_feature 1..17: note = Oligonucleotide
  source 1..17: mol_type = other DNA
catcttaagaaacaaga

SEQ ID NO: 17197 - DNA, 17 bp, synthetic construct
  misc_feature 1..17: note = Oligonucleotide
  source 1..17: mol_type = other DNA
atacatcttaagaaaca

SEQ ID NO: 17198 - DNA, 17 bp, synthetic construct
  misc_feature 1..17: note = Oligonucleotide
  source 1..17: mol_type = other DNA
attatacatcttaagaa

SEQ ID NO: 17199 - DNA, 17 bp, synthetic construct
  misc_feature 1..17: note = Oligonucleotide
  source 1..17: mol_type = other DNA
ctaattatacatcttaa

SEQ ID NO: 17200 - DNA, 17 bp, synthetic construct
  misc_feature 1..17: note = Oligonucleotide
  source 1..17: mol_type = other DNA
aacctaattatacatct

SEQ ID NO: 17201 - DNA, 17 bp, synthetic construct
  misc_feature 1..17: note = Oligonucleotide
  source 1..17: mol_type = other DNA
aataacctaattataca

SEQ ID NO: 17202 - DNA, 17 bp, synthetic construct
  misc_feature 1..17: note = Oligonucleotide
  source 1..17: mol_type = other DNA
atcaataacctaattat

SEQ ID NO: 17203 - DNA, 17 bp, synthetic construct
  misc_feature 1..17: note = Oligonucleotide
  source 1..17: mol_type = other DNA
caaatcaataacctaat

SEQ ID NO: 17204 - DNA, 17 bp, synthetic construct
  misc_feature 1..17: note = Oligonucleotide
  source 1..17: mol_type = other DNA
tctcaaatcaataacct

SEQ ID NO: 17205 - DNA, 17 bp, synthetic construct
  misc_feature 1..17: note = Oligonucleotide
  source 1..17: mol_type = other DNA
caatctcaaatcaataa

SEQ ID NO: 17206 - DNA, 17 bp, synthetic construct
  misc_feature 1..17: note = Oligonucleotide
  source 1..17: mol_type = other DNA
aaacaatctcaaatcaa

SEQ ID NO: 17207 - DNA, 17 bp, synthetic construct
  misc_feature 1..17: note = Oligonucleotide
  source 1..17: mol_type = other DNA
ggaaaacaatctcaaat

SEQ ID NO: 17208 - DNA, 17 bp, synthetic construct
  misc_feature 1..17: note = Oligonucleotide
  source 1..17: mol_type = other DNA
aaaggaaaacaatctca

SEQ ID NO: 17209 - DNA, 17 bp, synthetic construct
  misc_feature 1..17: note = Oligonucleotide
  source 1..17: mol_type = other DNA
taaaaaggaaaacaatc

SEQ ID NO: 17210 - DNA, 17 bp, synthetic construct
  misc_feature 1..17: note = Oligonucleotide
  source 1..17: mol_type = other DNA
ttttaaaaaggaaaaca

SEQ ID NO: 17211 - DNA, 17 bp, synthetic construct
  misc_feature 1..17: note = Oligonucleotide
  source 1..17: mol_type = other DNA
tacttttaaaaaggaaa

SEQ ID NO: 17212 - DNA, 17 bp, synthetic construct
  misc_feature 1..17: note = Oligonucleotide
  source 1..17: mol_type = other DNA
acttacttttaaaaagg

SEQ ID NO: 17213 - DNA, 17 bp, synthetic construct
  misc_feature 1..17: note = Oligonucleotide
  source 1..17: mol_type = other DNA
aacacttacttttaaaa

SEQ ID NO: 17214 - DNA, 17 bp, synthetic construct
  misc_feature 1..17: note = Oligonucleotide
  source 1..17: mol_type = other DNA
gtaaacacttactttta

SEQ ID NO: 17215 - DNA, 17 bp, synthetic construct
  misc_feature 1..17: note = Oligonucleotide
  source 1..17: mol_type = other DNA
gctgtaaacacttactt

SEQ ID NO: 17216 - DNA, 17 bp, synthetic construct
  misc_feature 1..17: note = Oligonucleotide
  source 1..17: mol_type = other DNA
aacgctgtaaacactta

SEQ ID NO: 17217 - DNA, 17 bp, synthetic construct
  misc_feature 1..17: note = Oligonucleotide
  source 1..17: mol_type = other DNA
aacaacgctgtaaacac

SEQ ID NO: 17218 - DNA, 17 bp, synthetic construct
  misc_feature 1..17: note = Oligonucleotide
  source 1..17: mol_type = other DNA
ggaaacaacgctgtaaa

SEQ ID NO: 17219 - DNA, 17 bp, synthetic construct
  misc_feature 1..17: note = Oligonucleotide
  source 1..17: mol_type = other DNA
aagggaaacaacgctgt

SEQ ID NO: 17220 - DNA, 17 bp, synthetic construct
  misc_feature 1..17: note = Oligonucleotide
  source 1..17: mol_type = other DNA
ttaaagggaaacaacgc

SEQ ID NO: 17221 - DNA, 17 bp, synthetic construct
  misc_feature 1..17: note = Oligonucleotide
  source 1..17: mol_type = other DNA
tacttaaagggaaacaa

SEQ ID NO: 17222 - DNA, 17 bp, synthetic construct
  misc_feature 1..17: note = Oligonucleotide
  source 1..17: mol_type = other DNA
cagtacttaaagggaaa

SEQ ID NO: 17223 - DNA, 17 bp, synthetic construct
  misc_feature 1..17: note = Oligonucleotide
  source 1..17: mol_type = other DNA
aagcagtacttaaaggg

SEQ ID NO: 17224 - DNA, 17 bp, synthetic construct
  misc_feature 1..17: note = Oligonucleotide
  source 1..17: mol_type = other DNA
caaaagcagtacttaaa

SEQ ID NO: 17225 - DNA, 17 bp, synthetic construct
  misc_feature 1..17: note = Oligonucleotide
  source 1..17: mol_type = other DNA
gagcaaaagcagtactt

SEQ ID NO: 17226 - DNA, 17 bp, synthetic construct
  misc_feature 1..17: note = Oligonucleotide
  source 1..17: mol_type = other DNA
atggagcaaaagcagta

SEQ ID NO: 17227 - DNA, 17 bp, synthetic construct
  misc_feature 1..17: note = Oligonucleotide
  source 1..17: mol_type = other DNA
catatggagcaaaagca

SEQ ID NO: 17228 - DNA, 17 bp, synthetic construct
  misc_feature 1..17: note = Oligonucleotide
  source 1..17: mol_type = other DNA
caacatatggagcaaaa

SEQ ID NO: 17229 - DNA, 17 bp, synthetic construct
  misc_feature 1..17: note = Oligonucleotide
  source 1..17: mol_type = other DNA
atacaacatatggagca

SEQ ID NO: 17230 - DNA, 17 bp, synthetic construct
  misc_feature 1..17: note = Oligonucleotide
  source 1..17: mol_type = other DNA
aaaatacaacatatgga

SEQ ID NO: 17231 - DNA, 17 bp, synthetic construct
  misc_feature 1..17: note = Oligonucleotide
  source 1..17: mol_type = other DNA
acaaaaatacaacatat

SEQ ID NO: 17232 - DNA, 17 bp, synthetic construct
  misc_feature 1..17: note = Oligonucleotide
  source 1..17: mol_type = other DNA
agaacaaaaatacaaca

SEQ ID NO: 17233 - DNA, 17 bp, synthetic construct
  misc_feature 1..17: note = Oligonucleotide
  source 1..17: mol_type = other DNA
acaagaacaaaaataca

SEQ ID NO: 17234 - DNA, 17 bp, synthetic construct
  misc_feature 1..17: note = Oligonucleotide
  source 1..17: mol_type = other DNA
caaacaagaacaaaaat

SEQ ID NO: 17235 - DNA, 17 bp, synthetic construct
  misc_feature 1..17: note = Oligonucleotide
  source 1..17: mol_type = other DNA
agacaaacaagaacaaa

SEQ ID NO: 17236 - DNA, 17 bp, synthetic construct
  misc_feature 1..17: note = Oligonucleotide
  source 1..17: mol_type = other DNA
ttaagacaaacaagaac

SEQ ID NO: 17237 - DNA, 17 bp, synthetic construct
  misc_feature 1..17: note = Oligonucleotide
  source 1..17: mol_type = other DNA
actttaagacaaacaag

SEQ ID NO: 17238 - DNA, 17 bp, synthetic construct
  misc_feature 1..17: note = Oligonucleotide
  source 1..17: mol_type = other DNA
aacactttaagacaaac

SEQ ID NO: 17239 - DNA, 17 bp, synthetic construct
  misc_feature 1..17: note = Oligonucleotide
  source 1..17: mol_type = other DNA
gaaaacactttaagaca

SEQ ID NO: 17240 - DNA, 17 bp, synthetic construct
  misc_feature 1..17: note = Oligonucleotide
  source 1..17: mol_type = other DNA
ttagaaaacactttaag

SEQ ID NO: 17241 - DNA, 17 bp, synthetic construct
  misc_feature 1..17: note = Oligonucleotide
  source 1..17: mol_type = other DNA
aaattagaaaacacttt

SEQ ID NO: 17242 - DNA, 17 bp, synthetic construct
  misc_feature 1..17: note = Oligonucleotide
  source 1..17: mol_type = other DNA
ggaaaattagaaaacac

SEQ ID NO: 17243 - DNA, 17 bp, synthetic construct
  misc_feature 1..17: note = Oligonucleotide
  source 1..17: mol_type = other DNA
taaggaaaattagaaaa

SEQ ID NO: 17244 - DNA, 17 bp, synthetic construct
  misc_feature 1..17: note = Oligonucleotide
  source 1..17: mol_type = other DNA
tcataaggaaaattaga

SEQ ID NO: 17245 - DNA, 17 bp, synthetic construct
  misc_feature 1..17: note = Oligonucleotide
  source 1..17: mol_type = other DNA
caatcataaggaaaatt

SEQ ID NO: 17246 - DNA, 17 bp, synthetic construct
  misc_feature 1..17: note = Oligonucleotide
  source 1..17: mol_type = other DNA
aatcaatcataaggaaa

SEQ ID NO: 17247 - DNA, 17 bp, synthetic construct
  misc_feature 1..17: note = Oligonucleotide
  source 1..17: mol_type = other DNA
agaaatcaatcataagg

SEQ ID NO: 17248 - DNA, 17 bp, synthetic construct
  misc_feature 1..17: note = Oligonucleotide
  source 1..17: mol_type = other DNA
aaaagaaatcaatcata

SEQ ID NO: 17249 - DNA, 17 bp, synthetic construct
  misc_feature 1..17: note = Oligonucleotide
  source 1..17: mol_type = other DNA
gaaaaaagaaatcaatc

SEQ ID NO: 17250 - DNA, 17 bp, synthetic construct
  misc_feature 1..17: note = Oligonucleotide
  source 1..17: mol_type = other DNA
agagaaaaaagaaatca

SEQ ID NO: 17251 - DNA, 17 bp, synthetic construct
  misc_feature 1..17: note = Oligonucleotide
  source 1..17: mol_type = other DNA
gaaagagaaaaaagaaa

SEQ ID NO: 17252 - DNA, 17 bp, synthetic construct
  misc_feature 1..17: note = Oligonucleotide
  source 1..17: mol_type = other DNA
aaagaaagagaaaaaag

SEQ ID NO: 17253 - DNA, 17 bp, synthetic construct
  misc_feature 1..17: note = Oligonucleotide
  source 1..17: mol_type = other DNA
aagaaagaaagagaaaa

SEQ ID NO: 17254 - DNA, 17 bp, synthetic construct
  misc_feature 1..17: note = Oligonucleotide
  source 1..17: mol_type = other DNA
aaaaagaaagaaagaga

SEQ ID NO: 17255 - DNA, 17 bp, synthetic construct
  misc_feature 1..17: note = Oligonucleotide
  source 1..17: mol_type = other DNA
aaaaaaaagaaagaaag

SEQ ID NO: 17256 - DNA, 17 bp, synthetic construct
  misc_feature 1..17: note = Oligonucleotide
  source 1..17: mol_type = other DNA
aaaaaaaaaaagaaaga

SEQ ID NO: 17257 - DNA, 17 bp, synthetic construct
  misc_feature 1..17: note = Oligonucleotide
  source 1..17: mol_type = other DNA
ttaaaaaaaaaaaagaa

SEQ ID NO: 17258 - DNA, 17 bp, synthetic construct
  misc_feature 1..17: note = Oligonucleotide
  source 1..17: mol_type = other DNA
ctcttaaaaaaaaaaaa

SEQ ID NO: 17259 - DNA, 17 bp, synthetic construct
  misc_feature 1..17: note = Oligonucleotide
  source 1..17: mol_type = other DNA
catctcttaaaaaaaaa

SEQ ID NO: 17260 - DNA, 17 bp, synthetic construct
  misc_feature 1..17: note = Oligonucleotide
  source 1..17: mol_type = other DNA
tcccatctcttaaaaaa

SEQ ID NO: 17261 - DNA, 17 bp, synthetic construct
  misc_feature 1..17: note = Oligonucleotide
  source 1..17: mol_type = other DNA
agatcccatctcttaaa

SEQ ID NO: 17262 - DNA, 17 bp, synthetic construct
  misc_feature 1..17: note = Oligonucleotide
  source 1..17: mol_type = other DNA
gtgagatcccatctctt

SEQ ID NO: 17263 - DNA, 17 bp, synthetic construct
  misc_feature 1..17: note = Oligonucleotide
  source 1..17: mol_type = other DNA
agagtgagatcccatct

SEQ ID NO: 17264 - DNA, 17 bp, synthetic construct
  misc_feature 1..17: note = Oligonucleotide
  source 1..17: mol_type = other DNA
catagagtgagatccca

SEQ ID NO: 17265 - DNA, 17 bp, synthetic construct
  misc_feature 1..17: note = Oligonucleotide
  source 1..17: mol_type = other DNA
ggccatagagtgagatc

SEQ ID NO: 17266 - DNA, 17 bp, synthetic construct
  misc_feature 1..17: note = Oligonucleotide
  source 1..17: mol_type = other DNA
ctgggccatagagtgag

SEQ ID NO: 17267 - DNA, 17 bp, synthetic construct
  misc_feature 1..17: note = Oligonucleotide
  source 1..17: mol_type = other DNA
agcctgggccatagagt

SEQ ID NO: 17268 - DNA, 17 bp, synthetic construct
  misc_feature 1..17: note = Oligonucleotide
  source 1..17: mol_type = other DNA
tccagcctgggccatag

SEQ ID NO: 17269 - DNA, 17 bp, synthetic construct
  misc_feature 1..17: note = Oligonucleotide
  source 1..17: mol_type = other DNA
cactccagcctgggcca

SEQ ID NO: 17270 - DNA, 17 bp, synthetic construct
  misc_feature 1..17: note = Oligonucleotide
  source 1..17: mol_type = other DNA
gggcactccagcctggg

SEQ ID NO: 17271 - DNA, 17 bp, synthetic construct
  misc_feature 1..17: note = Oligonucleotide
  source 1..17: mol_type = other DNA
ccagggcactccagcct

SEQ ID NO: 17272 - DNA, 17 bp, synthetic construct
  misc_feature 1..17: note = Oligonucleotide
  source 1..17: mol_type = other DNA
aagccagggcactccag

SEQ ID NO: 17273 - DNA, 17 bp, synthetic construct
  misc_feature 1..17: note = Oligonucleotide
  source 1..17: mol_type = other DNA
atcaagccagggcactc

SEQ ID NO: 17274 - DNA, 17 bp, synthetic construct
  misc_feature 1..17: note = Oligonucleotide
  source 1..17: mol_type = other DNA
aaaatcaagccagggca

SEQ ID NO: 17275 - DNA, 17 bp, synthetic construct
  misc_feature 1..17: note = Oligonucleotide
  source 1..17: mol_type = other DNA
gccaaaatcaagccagg

SEQ ID NO: 17276 - DNA, 17 bp, synthetic construct
  misc_feature 1..17: note = Oligonucleotide
  source 1..17: mol_type = other DNA
tgagccaaaatcaagcc

SEQ ID NO: 17277 - DNA, 17 bp, synthetic construct
  misc_feature 1..17: note = Oligonucleotide
  source 1..17: mol_type = other DNA
cagtgagccaaaatcaa

SEQ ID NO: 17278 - DNA, 17 bp, synthetic construct
  misc_feature 1..17: note = Oligonucleotide
  source 1..17: mol_type = other DNA
ctgcagtgagccaaaat

SEQ ID NO: 17279 - DNA, 17 bp, synthetic construct
  misc_feature 1..17: note = Oligonucleotide
  source 1..17: mol_type = other DNA
aggctgcagtgagccaa

SEQ ID NO: 17280 - DNA, 17 bp, synthetic construct
  misc_feature 1..17: note = Oligonucleotide
  source 1..17: mol_type = other DNA
ttgaggctgcagtgagc

SEQ ID NO: 17281 - DNA, 17 bp, synthetic construct
  misc_feature 1..17: note = Oligonucleotide
  source 1..17: mol_type = other DNA
aggttgaggctgcagtg

SEQ ID NO: 17282 - DNA, 17 bp, synthetic construct
  misc_feature 1..17: note = Oligonucleotide
  source 1..17: mol_type = other DNA
aggaggttgaggctgca

SEQ ID NO: 17283 - DNA, 17 bp, synthetic construct
  misc_feature 1..17: note = Oligonucleotide
  source 1..17: mol_type = other DNA
actaggaggttgaggct

SEQ ID NO: 17284 - DNA, 17 bp, synthetic construct
  misc_feature 1..17: note = Oligonucleotide
  source 1..17: mol_type = other DNA
gagactaggaggttgag

SEQ ID NO: 17285 - DNA, 17 bp, synthetic construct
  misc_feature 1..17: note = Oligonucleotide
  source 1..17: mol_type = other DNA
cttgagactaggaggtt

SEQ ID NO: 17286 - DNA, 17 bp, synthetic construct
  misc_feature 1..17: note = Oligonucleotide
  source 1..17: mol_type = other DNA
tggcttgagactaggag

SEQ ID NO: 17287 - DNA, 17 bp, synthetic construct
  misc_feature 1..17: note = Oligonucleotide
  source 1..17: mol_type = other DNA
ggatggcttgagactag

SEQ ID NO: 17288 - DNA, 17 bp, synthetic construct
  misc_feature 1..17: note = Oligonucleotide
  source 1..17: mol_type = other DNA
ggaggatggcttgagac

SEQ ID NO: 17289 - DNA, 17 bp, synthetic construct
  misc_feature 1..17: note = Oligonucleotide
  source 1..17: mol_type = other DNA
gtgggaggatggcttga

SEQ ID NO: 17290 - DNA, 17 bp, synthetic construct
  misc_feature 1..17: note = Oligonucleotide
  source 1..17: mol_type = other DNA
gaggtgggaggatggct

SEQ ID NO: 17291 - DNA, 17 bp, synthetic construct
  misc_feature 1..17: note = Oligonucleotide
  source 1..17: mol_type = other DNA
gctgaggtgggaggatg

SEQ ID NO: 17292 - DNA, 17 bp, synthetic construct
  misc_feature 1..17: note = Oligonucleotide
  source 1..17: mol_type = other DNA
gaagctgaggtgggagg

SEQ ID NO: 17293 - DNA, 17 bp, synthetic construct
  misc_feature 1..17: note = Oligonucleotide
  source 1..17: mol_type = other DNA
caggaagctgaggtggg

SEQ ID NO: 17294 - DNA, 17 bp, synthetic construct
  misc_feature 1..17: note = Oligonucleotide
  source 1..17: mol_type = other DNA
actcaggaagctgaggt

SEQ ID NO: 17295 - DNA, 17 bp, synthetic construct
  misc_feature 1..17: note = Oligonucleotide
  source 1..17: mol_type = other DNA
gctactcaggaagctga

SEQ ID NO: 17296 - DNA, 17 bp, synthetic construct
  misc_feature 1..17: note = Oligonucleotide
  source 1..17: mol_type = other DNA
acagctactcaggaagc

SEQ ID NO: 17297 - DNA, 17 bp, synthetic construct
  misc_feature 1..17: note = Oligonucleotide
  source 1..17: mol_type = other DNA
gttacagctactcagga

SEQ ID NO: 17298 - DNA, 17 bp, synthetic construct
  misc_feature 1..17: note = Oligonucleotide
  source 1..17: mol_type = other DNA
gtagttacagctactca

SEQ ID NO: 17299 - DNA, 17 bp, synthetic construct
  misc_feature 1..17: note = Oligonucleotide
  source 1..17: mol_type = other DNA
cctgtagttacagctac

SEQ ID NO: 17300 - DNA, 17 bp, synthetic construct
  misc_feature 1..17: note = Oligonucleotide
  source 1..17: mol_type = other DNA
caccctgtagttacagc

SEQ ID NO: 17301 - DNA, 17 bp, synthetic construct
  misc_feature 1..17: note = Oligonucleotide
  source 1..17: mol_type = other DNA
ctgcaccctgtagttac

SEQ ID NO: 17302 - DNA, 17 bp, synthetic construct
  misc_feature 1..17: note = Oligonucleotide
  source 1..17: mol_type = other DNA
gtgctgcaccctgtagt

SEQ ID NO: 17303 - DNA, 17 bp, synthetic construct
  misc_feature 1..17: note = Oligonucleotide
  source 1..17: mol_type = other DNA
gtggtgctgcaccctgt

SEQ ID NO: 17304 - DNA, 17 bp, synthetic construct
  misc_feature 1..17: note = Oligonucleotide
  source 1..17: mol_type = other DNA
ggtgtggtgctgcaccc

SEQ ID NO: 17305 - DNA, 17 bp, synthetic construct
  misc_feature 1..17: note = Oligonucleotide
  source 1..17: mol_type = other DNA
ccaggtgtggtgctgca

SEQ ID NO: 17306 - DNA, 17 bp, synthetic construct
  misc_feature 1..17: note = Oligonucleotide
  source 1..17: mol_type = other DNA
aagccaggtgtggtgct

SEQ ID NO: 17307 - DNA, 17 bp, synthetic construct
  misc_feature 1..17: note = Oligonucleotide
  source 1..17: mol_type = other DNA
aaaaagccaggtgtggt

SEQ ID NO: 17308 - DNA, 17 bp, synthetic construct
  misc_feature 1..17: note = Oligonucleotide
  source 1..17: mol_type = other DNA
tagaaaaagccaggtgt

SEQ ID NO: 17309 - DNA, 17 bp, synthetic construct
  misc_feature 1..17: note = Oligonucleotide
  source 1..17: mol_type = other DNA
aaatagaaaaagccagg

SEQ ID NO: 17310 - DNA, 17 bp, synthetic construct
  misc_feature 1..17: note = Oligonucleotide
  source 1..17: mol_type = other DNA
aaaaaatagaaaaagcc

SEQ ID NO: 17311 - DNA, 17 bp, synthetic construct
  misc_feature 1..17: note = Oligonucleotide
  source 1..17: mol_type = other DNA
tataaaaaatagaaaaa

SEQ ID NO: 17312 - DNA, 17 bp, synthetic construct
  misc_feature 1..17: note = Oligonucleotide
  source 1..17: mol_type = other DNA
ctctataaaaaatagaa

SEQ ID NO: 17313 - DNA, 17 bp, synthetic construct
  misc_feature 1..17: note = Oligonucleotide
  source 1..17: mol_type = other DNA
catctctataaaaaata

SEQ ID NO: 17314 - DNA, 17 bp, synthetic construct
  misc_feature 1..17: note = Oligonucleotide
  source 1..17: mol_type = other DNA
ccccatctctataaaaa

SEQ ID NO: 17315 - DNA, 17 bp, synthetic construct
  misc_feature 1..17: note = Oligonucleotide
  source 1..17: mol_type = other DNA
cacccccatctctataa

SEQ ID NO: 17316 - DNA, 17 bp, synthetic construct
  misc_feature 1..17: note = Oligonucleotide
  source 1..17: mol_type = other DNA
tgacacccccatctcta

SEQ ID NO: 17317 - DNA, 17 bp, synthetic construct
  misc_feature 1..17: note = Oligonucleotide
  source 1..17: mol_type = other DNA
tagtgacacccccatct

SEQ ID NO: 17318 - DNA, 17 bp, synthetic construct
  misc_feature 1..17: note = Oligonucleotide
  source 1..17: mol_type = other DNA
acatagtgacaccccca

SEQ ID NO: 17319 - DNA, 17 bp, synthetic construct
  misc_feature 1..17: note = Oligonucleotide
  source 1..17: mol_type = other DNA
acaacatagtgacaccc

SEQ ID NO: 17320 - DNA, 17 bp, synthetic construct
  misc_feature 1..17: note = Oligonucleotide
  source 1..17: mol_type = other DNA
tggacaacatagtgaca

SEQ ID NO: 17321 - DNA, 17 bp, synthetic construct
  misc_feature 1..17: note = Oligonucleotide
  source 1..17: mol_type = other DNA
gcctggacaacatagtg

SEQ ID NO: 17322 - DNA, 17 bp, synthetic construct
  misc_feature 1..17: note = Oligonucleotide
  source 1..17: mol_type = other DNA
ccagcctggacaacata

SEQ ID NO: 17323 - DNA, 17 bp, synthetic construct
  misc_feature 1..17: note = Oligonucleotide
  source 1..17: mol_type = other DNA
agaccagcctggacaac

SEQ ID NO: 17324 - DNA, 17 bp, synthetic construct
  misc_feature 1..17: note = Oligonucleotide
  source 1..17: mol_type = other DNA
ttgagaccagcctggac

SEQ ID NO: 17325 - DNA, 17 bp, synthetic construct
  misc_feature 1..17: note = Oligonucleotide
  source 1..17: mol_type = other DNA
agtttgagaccagcctg

SEQ ID NO: 17326 - DNA, 17 bp, synthetic construct
  misc_feature 1..17: note = Oligonucleotide
  source 1..17: mol_type = other DNA
aggagtttgagaccagc

SEQ ID NO: 17327 - DNA, 17 bp, synthetic construct
  misc_feature 1..17: note = Oligonucleotide
  source 1..17: mol_type = other DNA
gtcaggagtttgagacc

SEQ ID NO: 17328 - DNA, 17 bp, synthetic construct
  misc_feature 1..17: note = Oligonucleotide
  source 1..17: mol_type = other DNA
gaagtcaggagtttgag

SEQ ID NO: 17329 - DNA, 17 bp, synthetic construct
  misc_feature 1..17: note = Oligonucleotide
  source 1..17: mol_type = other DNA
cttgaagtcaggagttt

SEQ ID NO: 17330 - DNA, 17 bp, synthetic construct
  misc_feature 1..17: note = Oligonucleotide
  source 1..17: mol_type = other DNA
tcacttgaagtcaggag

SEQ ID NO: 17331 - DNA, 17 bp, synthetic construct
  misc_feature 1..17: note = Oligonucleotide
  source 1..17: mol_type = other DNA
ggatcacttgaagtcag

SEQ ID NO: 17332 - DNA, 17 bp, synthetic construct
  misc_feature 1..17: note = Oligonucleotide
  source 1..17: mol_type = other DNA
ggaggatcacttgaagt

SEQ ID NO: 17333 - DNA, 17 bp, synthetic construct
  misc_feature 1..17: note = Oligonucleotide
  source 1..17: mol_type = other DNA
gcaggaggatcacttga

SEQ ID NO: 17334 - DNA, 17 bp, synthetic construct
  misc_feature 1..17: note = Oligonucleotide
  source 1..17: mol_type = other DNA
aaggcaggaggatcact

SEQ ID NO: 17335 - DNA, 17 bp, synthetic construct
  misc_feature 1..17: note = Oligonucleotide
  source 1..17: mol_type = other DNA
gtcaaggcaggaggatc

SEQ ID NO: 17336 - DNA, 17 bp, synthetic construct
  misc_feature 1..17: note = Oligonucleotide
  source 1..17: mol_type = other DNA
gaggtcaaggcaggagg

SEQ ID NO: 17337 - DNA, 17 bp, synthetic construct
  misc_feature 1..17: note = Oligonucleotide
  source 1..17: mol_type = other DNA
tgggaggtcaaggcagg

SEQ ID NO: 17338 - DNA, 17 bp, synthetic construct
  misc_feature 1..17: note = Oligonucleotide
  source 1..17: mol_type = other DNA
ctttgggaggtcaaggc

SEQ ID NO: 17339 - DNA, 17 bp, synthetic construct
  misc_feature 1..17: note = Oligonucleotide
  source 1..17: mol_type = other DNA
gcactttgggaggtcaa

SEQ ID NO: 17340 - DNA, 17 bp, synthetic construct
  misc_feature 1..17: note = Oligonucleotide
  source 1..17: mol_type = other DNA
ccagcactttgggaggt

SEQ ID NO: 17341 - DNA, 17 bp, synthetic construct
  misc_feature 1..17: note = Oligonucleotide
  source 1..17: mol_type = other DNA
atcccagcactttggga

SEQ ID NO: 17342 - DNA, 17 bp, synthetic construct
  misc_feature 1..17: note = Oligonucleotide
  source 1..17: mol_type = other DNA
ataatcccagcactttg

SEQ ID NO: 17343 - DNA, 17 bp, synthetic construct
  misc_feature 1..17: note = Oligonucleotide
  source 1..17: mol_type = other DNA
cctataatcccagcact

SEQ ID NO: 17344 - DNA, 17 bp, synthetic construct
  misc_feature 1..17: note = Oligonucleotide
  source 1..17: mol_type = other DNA
aagcctataatcccagc

SEQ ID NO: 17345 - DNA, 17 bp, synthetic construct
  misc_feature 1..17: note = Oligonucleotide
  source 1..17: mol_type = other DNA
ctcaagcctataatccc

SEQ ID NO: 17346 - DNA, 17 bp, synthetic construct
  misc_feature 1..17: note = Oligonucleotide
  source 1..17: mol_type = other DNA
tggctcaagcctataat

SEQ ID NO: 17347 - DNA, 17 bp, synthetic construct
  misc_feature 1..17: note = Oligonucleotide
  source 1..17: mol_type = other DNA
tggtggctcaagcctat

SEQ ID NO: 17348 - DNA, 17 bp, synthetic construct
  misc_feature 1..17: note = Oligonucleotide
  source 1..17: mol_type = other DNA
aaatggtggctcaagcc

SEQ ID NO: 17349 - DNA, 17 bp, synthetic construct
  misc_feature 1..17: note = Oligonucleotide
  source 1..17: mol_type = other DNA
aagaaatggtggctcaa

SEQ ID NO: 17350 - DNA, 17 bp, synthetic construct
  misc_feature 1..17: note = Oligonucleotide
  source 1..17: mol_type = other DNA
aaaaagaaatggtggct

SEQ ID NO: 17351 - DNA, 17 bp, synthetic construct
  misc_feature 1..17: note = Oligonucleotide
  source 1..17: mol_type = other DNA
tcaaaaaagaaatggtg

SEQ ID NO: 17352 - DNA, 17 bp, synthetic construct
  misc_feature 1..17: note = Oligonucleotide
  source 1..17: mol_type = other DNA
ggctcaaaaaagaaatg

SEQ ID NO: 17353 - DNA, 17 bp, synthetic construct
  misc_feature 1..17: note = Oligonucleotide
  source 1..17: mol_type = other DNA
ccaggctcaaaaaagaa

SEQ ID NO: 17354 - DNA, 17 bp, synthetic construct
  misc_feature 1..17: note = Oligonucleotide
  source 1..17: mol_type = other DNA
aaaccaggctcaaaaaa

SEQ ID NO: 17355 - DNA, 17 bp, synthetic construct
  misc_feature 1..17: note = Oligonucleotide
  source 1..17: mol_type = other DNA
aagaaaccaggctcaaa

SEQ ID NO: 17356 - DNA, 17 bp, synthetic construct
  misc_feature 1..17: note = Oligonucleotide
  source 1..17: mol_type = other DNA
aaaaagaaaccaggctc

SEQ ID NO: 17357 - DNA, 17 bp, synthetic construct
  misc_feature 1..17: note = Oligonucleotide
  source 1..17: mol_type = other DNA
tcaaaaaagaaaccagg

SEQ ID NO: 17358 - DNA, 17 bp, synthetic construct
  misc_feature 1..17: note = Oligonucleotide
  source 1..17: mol_type = other DNA
gtgtcaaaaaagaaacc

SEQ ID NO: 17359 - DNA, 17 bp, synthetic construct
  misc_feature 1..17: note = Oligonucleotide
  source 1..17: mol_type = other DNA
aatgtgtcaaaaaagaa

SEQ ID NO: 17360 - DNA, 17 bp, synthetic construct
  misc_feature 1..17: note = Oligonucleotide
  source 1..17: mol_type = other DNA
accaatgtgtcaaaaaa

SEQ ID NO: 17361 - DNA, 17 bp, synthetic construct
  misc_feature 1..17: note = Oligonucleotide
  source 1..17: mol_type = other DNA
gcaaccaatgtgtcaaa

SEQ ID NO: 17362 - DNA, 17 bp, synthetic construct
  misc_feature 1..17: note = Oligonucleotide
  source 1..17: mol_type = other DNA
taagcaaccaatgtgtc

SEQ ID NO: 17363 - DNA, 17 bp, synthetic construct
  misc_feature 1..17: note = Oligonucleotide
  source 1..17: mol_type = other DNA
tcctaagcaaccaatgt

SEQ ID NO: 17364 - DNA, 17 bp, synthetic construct
  misc_feature 1..17: note = Oligonucleotide
  source 1..17: mol_type = other DNA
tactcctaagcaaccaa

SEQ ID NO: 17365 - DNA, 17 bp, synthetic construct
  misc_feature 1..17: note = Oligonucleotide
  source 1..17: mol_type = other DNA
ccatactcctaagcaac

SEQ ID NO: 17366 - DNA, 17 bp, synthetic construct
  misc_feature 1..17: note = Oligonucleotide
  source 1..17: mol_type = other DNA
acaccatactcctaagc

SEQ ID NO: 17367 - DNA, 17 bp, synthetic construct
  misc_feature 1..17: note = Oligonucleotide
  source 1..17: mol_type = other DNA
taaacaccatactccta

SEQ ID NO: 17368 - DNA, 17 bp, synthetic construct
  misc_feature 1..17: note = Oligonucleotide
  source 1..17: mol_type = other DNA
aattaaacaccatactc

SEQ ID NO: 17369 - DNA, 17 bp, synthetic construct
  misc_feature 1..17: note = Oligonucleotide
  source 1..17: mol_type = other DNA
ggaaattaaacaccata

SEQ ID NO: 17370 - DNA, 17 bp, synthetic construct
  misc_feature 1..17: note = Oligonucleotide
  source 1..17: mol_type = other DNA
tgtggaaattaaacacc

SEQ ID NO: 17371 - DNA, 17 bp, synthetic construct
  misc_feature 1..17: note = Oligonucleotide
  source 1..17: mol_type = other DNA
atatgtggaaattaaac

SEQ ID NO: 17372 - DNA, 17 bp, synthetic construct
  misc_feature 1..17: note = Oligonucleotide
  source 1..17: mol_type = other DNA
caaatatgtggaaatta

SEQ ID NO: 17373 - DNA, 17 bp, synthetic construct
  misc_feature 1..17: note = Oligonucleotide
  source 1..17: mol_type = other DNA
tcacaaatatgtggaaa

SEQ ID NO: 17374 - DNA, 17 bp, synthetic construct
  misc_feature 1..17: note = Oligonucleotide
  source 1..17: mol_type = other DNA
aattcacaaatatgtgg

SEQ ID NO: 17375 - DNA, 17 bp, synthetic construct
  misc_feature 1..17: note = Oligonucleotide
  source 1..17: mol_type = other DNA
gaaaattcacaaatatg

SEQ ID NO: 17376 - DNA, 17 bp, synthetic construct
  misc_feature 1..17: note = Oligonucleotide
  source 1..17: mol_type = other DNA
ctggaaaattcacaaat

SEQ ID NO: 17377 - DNA, 17 bp, synthetic construct
  misc_feature 1..17: note = Oligonucleotide
  source 1..17: mol_type = other DNA
aaactggaaaattcaca

SEQ ID NO: 17378 - DNA, 17 bp, synthetic construct
  misc_feature 1..17: note = Oligonucleotide
  source 1..17: mol_type = other DNA
agaaaactggaaaattc

SEQ ID NO: 17379 - DNA, 17 bp, synthetic construct
  misc_feature 1..17: note = Oligonucleotide
  source 1..17: mol_type = other DNA
gaaagaaaactggaaaa

SEQ ID NO: 17380 - DNA, 17 bp, synthetic construct
  misc_feature 1..17: note = Oligonucleotide
  source 1..17: mol_type = other DNA
agtgaaagaaaactgga

SEQ ID NO: 17381 - DNA, 17 bp, synthetic construct
  misc_feature 1..17: note = Oligonucleotide
  source 1..17: mol_type = other DNA
agaagtgaaagaaaact

SEQ ID NO: 17382 - DNA, 17 bp, synthetic construct
  misc_feature 1..17: note = Oligonucleotide
  source 1..17: mol_type = other DNA
tcgagaagtgaaagaaa

SEQ ID NO: 17383 - DNA, 17 bp, synthetic construct
  misc_feature 1..17: note = Oligonucleotide
  source 1..17: mol_type = other DNA
aaatcgagaagtgaaag

SEQ ID NO: 17384 - DNA, 17 bp, synthetic construct
  misc_feature 1..17: note = Oligonucleotide
  source 1..17: mol_type = other DNA
tagaaatcgagaagtga

SEQ ID NO: 17385 - DNA, 17 bp, synthetic construct
  misc_feature 1..17: note = Oligonucleotide
  source 1..17: mol_type = other DNA
agctagaaatcgagaag

SEQ ID NO: 17386 - DNA, 17 bp, synthetic construct
  misc_feature 1..17: note = Oligonucleotide
  source 1..17: mol_type = other DNA
caaagctagaaatcgag

SEQ ID NO: 17387 - DNA, 17 bp, synthetic construct
  misc_feature 1..17: note = Oligonucleotide
  source 1..17: mol_type = other DNA
aaacaaagctagaaatc

SEQ ID NO: 17388 - DNA, 17 bp, synthetic construct
  misc_feature 1..17: note = Oligonucleotide
  source 1..17: mol_type = other DNA
acgaaacaaagctagaa

SEQ ID NO: 17389 - DNA, 17 bp, synthetic construct
  misc_feature 1..17: note = Oligonucleotide
  source 1..17: mol_type = other DNA
acaacgaaacaaagcta

SEQ ID NO: 17390 - DNA, 17 bp, synthetic construct
  misc_feature 1..17: note = Oligonucleotide
  source 1..17: mol_type = other DNA
accacaacgaaacaaag

SEQ ID NO: 17391 - DNA, 17 bp, synthetic construct
  misc_feature 1..17: note = Oligonucleotide
  source 1..17: mol_type = other DNA
tcaaccacaacgaaaca

SEQ ID NO: 17392 - DNA, 17 bp, synthetic construct
  misc_feature 1..17: note = Oligonucleotide
  source 1..17: mol_type = other DNA
ttttcaaccacaacgaa

SEQ ID NO: 17393 - DNA, 17 bp, synthetic construct
  misc_feature 1..17: note = Oligonucleotide
  source 1..17: mol_type = other DNA
tctttttcaaccacaac

SEQ ID NO: 17394 - DNA, 17 bp, synthetic construct
  misc_feature 1..17: note = Oligonucleotide
  source 1..17: mol_type = other DNA
gtatctttttcaaccac

SEQ ID NO: 17395 - DNA, 17 bp, synthetic construct
  misc_feature 1..17: note = Oligonucleotide
  source 1..17: mol_type = other DNA
aaagtatctttttcaac

SEQ ID NO: 17396 - DNA, 17 bp, synthetic construct
  misc_feature 1..17: note = Oligonucleotide
  source 1..17: mol_type = other DNA
tacaaagtatctttttc

SEQ ID NO: 17397 - DNA, 17 bp, synthetic construct
  misc_feature 1..17: note = Oligonucleotide
  source 1..17: mol_type = other DNA
tcatacaaagtatcttt

SEQ ID NO: 17398 - DNA, 17 bp, synthetic construct
  misc_feature 1..17: note = Oligonucleotide
  source 1..17: mol_type = other DNA
aaatcatacaaagtatc

SEQ ID NO: 17399 - DNA, 17 bp, synthetic construct
  misc_feature 1..17: note = Oligonucleotide
  source 1..17: mol_type = other DNA
ctgaaatcatacaaagt

SEQ ID NO: 17400 - DNA, 17 bp, synthetic construct
  misc_feature 1..17: note = Oligonucleotide
  source 1..17: mol_type = other DNA
agactgaaatcatacaa

SEQ ID NO: 17401 - DNA, 17 bp, synthetic construct
  misc_feature 1..17: note = Oligonucleotide
  source 1..17: mol_type = other DNA
aaaagactgaaatcata

SEQ ID NO: 17402 - DNA, 17 bp, synthetic construct
  misc_feature 1..17: note = Oligonucleotide
  source 1..17: mol_type = other DNA
tttaaaagactgaaatc

SEQ ID NO: 17403 - DNA, 17 bp, synthetic construct
  misc_feature 1..17: note = Oligonucleotide
  source 1..17: mol_type = other DNA
agttttaaaagactgaa

SEQ ID NO: 17404 - DNA, 17 bp, synthetic construct
  misc_feature 1..17: note = Oligonucleotide
  source 1..17: mol_type = other DNA
taaagttttaaaagact

SEQ ID NO: 17405 - DNA, 17 bp, synthetic construct
  misc_feature 1..17: note = Oligonucleotide
  source 1..17: mol_type = other DNA
tgataaagttttaaaag

SEQ ID NO: 17406 - DNA, 17 bp, synthetic construct
  misc_feature 1..17: note = Oligonucleotide
  source 1..17: mol_type = other DNA
tcttgataaagttttaa

SEQ ID NO: 17407 - DNA, 17 bp, synthetic construct
  misc_feature 1..17: note = Oligonucleotide
  source 1..17: mol_type = other DNA
aagtcttgataaagttt

SEQ ID NO: 17408 - DNA, 17 bp, synthetic construct
  misc_feature 1..17: note = Oligonucleotide
  source 1..17: mol_type = other DNA
aacaagtcttgataaag

SEQ ID NO: 17409 - DNA, 17 bp, synthetic construct
  misc_feature 1..17: note = Oligonucleotide
  source 1..17: mol_type = other DNA
caaaacaagtcttgata

SEQ ID NO: 17410 - DNA, 17 bp, synthetic construct
  misc_feature 1..17: note = Oligonucleotide
  source 1..17: mol_type = other DNA
ccgcaaaacaagtcttg

SEQ ID NO: 17411 - DNA, 17 bp, synthetic construct
  misc_feature 1..17: note = Oligonucleotide
  source 1..17: mol_type = other DNA
tggccgcaaaacaagtc

SEQ ID NO: 17412 - DNA, 17 bp, synthetic construct
  misc_feature 1..17: note = Oligonucleotide
  source 1..17: mol_type = other DNA
gtttggccgcaaaacaa

SEQ ID NO: 17413 - DNA, 17 bp, synthetic construct
  misc_feature 1..17: note = Oligonucleotide
  source 1..17: mol_type = other DNA
tatgtttggccgcaaaa

SEQ ID NO: 17414 - DNA, 17 bp, synthetic construct
  misc_feature 1..17: note = Oligonucleotide
  source 1..17: mol_type = other DNA
ctgtatgtttggccgca

SEQ ID NO: 17415 - DNA, 17 bp, synthetic construct
  misc_feature 1..17: note = Oligonucleotide
  source 1..17: mol_type = other DNA
agactgtatgtttggcc

SEQ ID NO: 17416 - DNA, 17 bp, synthetic construct
  misc_feature 1..17: note = Oligonucleotide
  source 1..17: mol_type = other DNA
gacagactgtatgtttg

SEQ ID NO: 17417 - DNA, 17 bp, synthetic construct
  misc_feature 1..17: note = Oligonucleotide
  source 1..17: mol_type = other DNA
ccagacagactgtatgt

SEQ ID NO: 17418 - DNA, 17 bp, synthetic construct
  misc_feature 1..17: note = Oligonucleotide
  source 1..17: mol_type = other DNA
ctcccagacagactgta

SEQ ID NO: 17419 - DNA, 17 bp, synthetic construct
  misc_feature 1..17: note = Oligonucleotide
  source 1..17: mol_type = other DNA
attctcccagacagact

SEQ ID NO: 17420 - DNA, 17 bp, synthetic construct
  misc_feature 1..17: note = Oligonucleotide
  source 1..17: mol_type = other DNA
aacattctcccagacag

SEQ ID NO: 17421 - DNA, 17 bp, synthetic construct
  misc_feature 1..17: note = Oligonucleotide
  source 1..17: mol_type = other DNA
tggaacattctcccaga

SEQ ID NO: 17422 - DNA, 17 bp, synthetic construct
  misc_feature 1..17: note = Oligonucleotide
  source 1..17: mol_type = other DNA
acatggaacattctccc

SEQ ID NO: 17423 - DNA, 17 bp, synthetic construct
  misc_feature 1..17: note = Oligonucleotide
  source 1..17: mol_type = other DNA
tacacatggaacattct

SEQ ID NO: 17424 - DNA, 17 bp, synthetic construct
  misc_feature 1..17: note = Oligonucleotide
  source 1..17: mol_type = other DNA
gagtacacatggaacat

SEQ ID NO: 17425 - DNA, 17 bp, synthetic construct
  misc_feature 1..17: note = Oligonucleotide
  source 1..17: mol_type = other DNA
ctcgagtacacatggaa

SEQ ID NO: 17426 - DNA, 17 bp, synthetic construct
  misc_feature 1..17: note = Oligonucleotide
  source 1..17: mol_type = other DNA
cttctcgagtacacatg

SEQ ID NO: 17427 - DNA, 17 bp, synthetic construct
  misc_feature 1..17: note = Oligonucleotide
  source 1..17: mol_type = other DNA
attcttctcgagtacac

SEQ ID NO: 17428 - DNA, 17 bp, synthetic construct
  misc_feature 1..17: note = Oligonucleotide
  source 1..17: mol_type = other DNA
agaattcttctcgagta

SEQ ID NO: 17429 - DNA, 17 bp, synthetic construct
  misc_feature 1..17: note = Oligonucleotide
  source 1..17: mol_type = other DNA
tcaagaattcttctcga

SEQ ID NO: 17430 - DNA, 17 bp, synthetic construct
  misc_feature 1..17: note = Oligonucleotide
  source 1..17: mol_type = other DNA
tattcaagaattcttct

SEQ ID NO: 17431 - DNA, 17 bp, synthetic construct
  misc_feature 1..17: note = Oligonucleotide
  source 1..17: mol_type = other DNA
atatattcaagaattct

SEQ ID NO: 17432 - DNA, 17 bp, synthetic construct
  misc_feature 1..17: note = Oligonucleotide
  source 1..17: mol_type = other DNA
agaatatattcaagaat

SEQ ID NO: 17433 - DNA, 17 bp, synthetic construct
  misc_feature 1..17: note = Oligonucleotide
  source 1..17: mol_type = other DNA
agcagaatatattcaag

SEQ ID NO: 17434 - DNA, 17 bp, synthetic construct
  misc_feature 1..17: note = Oligonucleotide
  source 1..17: mol_type = other DNA
aagagcagaatatattc

SEQ ID NO: 17435 - DNA, 17 bp, synthetic construct
  misc_feature 1..17: note = Oligonucleotide
  source 1..17: mol_type = other DNA
aacaagagcagaatata

SEQ ID NO: 17436 - DNA, 17 bp, synthetic construct
  misc_feature 1..17: note = Oligonucleotide
  source 1..17: mol_type = other DNA
cccaacaagagcagaat

SEQ ID NO: 17437 - DNA, 17 bp, synthetic construct
  misc_feature 1..17: note = Oligonucleotide
  source 1..17: mol_type = other DNA
ccacccaacaagagcag

SEQ ID NO: 17438 - DNA, 17 bp, synthetic construct
  misc_feature 1..17: note = Oligonucleotide
  source 1..17: mol_type = other DNA
atgccacccaacaagag

SEQ ID NO: 17439 - DNA, 17 bp, synthetic construct
  misc_feature 1..17: note = Oligonucleotide
  source 1..17: mol_type = other DNA
aacatgccacccaacaa

SEQ ID NO: 17440 - DNA, 17 bp, synthetic construct
  misc_feature 1..17: note = Oligonucleotide
  source 1..17: mol_type = other DNA
cagaacatgccacccaa

SEQ ID NO: 17441 - DNA, 17 bp, synthetic construct
  misc_feature 1..17: note = Oligonucleotide
  source 1..17: mol_type = other DNA
gtacagaacatgccacc

SEQ ID NO: 17442 - DNA, 17 bp, synthetic construct
  misc_feature 1..17: note = Oligonucleotide
  source 1..17: mol_type = other DNA
tacgtacagaacatgcc

SEQ ID NO: 17443 - DNA, 17 bp, synthetic construct
  misc_feature 1..17: note = Oligonucleotide
  source 1..17: mol_type = other DNA
cgatacgtacagaacat

SEQ ID NO: 17444 - DNA, 17 bp, synthetic construct
  misc_feature 1..17: note = Oligonucleotide
  source 1..17: mol_type = other DNA
caacgatacgtacagaa

SEQ ID NO: 17445 - DNA, 17 bp, synthetic construct
  misc_feature 1..17: note = Oligonucleotide
  source 1..17: mol_type = other DNA
actcaacgatacgtaca

SEQ ID NO: 17446 - DNA, 17 bp, synthetic construct
  misc_feature 1..17: note = Oligonucleotide
  source 1..17: mol_type = other DNA
tagactcaacgatacgt

SEQ ID NO: 17447 - DNA, 17 bp, synthetic construct
  misc_feature 1..17: note = Oligonucleotide
  source 1..17: mol_type = other DNA
aattagactcaacgata

SEQ ID NO: 17448 - DNA, 17 bp, synthetic construct
  misc_feature 1..17: note = Oligonucleotide
  source 1..17: mol_type = other DNA
accaattagactcaacg

SEQ ID NO: 17449 - DNA, 17 bp, synthetic construct
  misc_feature 1..17: note = Oligonucleotide
  source 1..17: mol_type = other DNA
taaaccaattagactca

SEQ ID NO: 17450 - DNA, 17 bp, synthetic construct
  misc_feature 1..17: note = Oligonucleotide
  source 1..17: mol_type = other DNA
acttaaaccaattagac

SEQ ID NO: 17451 - DNA, 17 bp, synthetic construct
  misc_feature 1..17: note = Oligonucleotide
  source 1..17: mol_type = other DNA
aagacttaaaccaatta

SEQ ID NO: 17452 - DNA, 17 bp, synthetic construct
  misc_feature 1..17: note = Oligonucleotide
  source 1..17: mol_type = other DNA
tagaagacttaaaccaa

SEQ ID NO: 17453 - DNA, 17 bp, synthetic construct
  misc_feature 1..17: note = Oligonucleotide
  source 1..17: mol_type = other DNA
acatagaagacttaaac

SEQ ID NO: 17454 - DNA, 17 bp, synthetic construct
  misc_feature 1..17: note = Oligonucleotide
  source 1..17: mol_type = other DNA
aggacatagaagactta

SEQ ID NO: 17455 - DNA, 17 bp, synthetic construct
  misc_feature 1..17: note = Oligonucleotide
  source 1..17: mol_type = other DNA
ataaggacatagaagac

SEQ ID NO: 17456 - DNA, 17 bp, synthetic construct
  misc_feature 1..17: note = Oligonucleotide
  source 1..17: mol_type = other DNA
tcaataaggacatagaa

SEQ ID NO: 17457 - DNA, 17 bp, synthetic construct
  misc_feature 1..17: note = Oligonucleotide
  source 1..17: mol_type = other DNA
agatcaataaggacata

SEQ ID NO: 17458 - DNA, 17 bp, synthetic construct
  misc_feature 1..17: note = Oligonucleotide
  source 1..17: mol_type = other DNA
gagagatcaataaggac

SEQ ID NO: 17459 - DNA, 17 bp, synthetic construct
  misc_feature 1..17: note = Oligonucleotide
  source 1..17: mol_type = other DNA
ctggagagatcaataag

SEQ ID NO: 17460 - DNA, 17 bp, synthetic construct
  misc_feature 1..17: note = Oligonucleotide
  source 1..17: mol_type = other DNA
catctggagagatcaat

SEQ ID NO: 17461 - DNA, 17 bp, synthetic construct
  misc_feature 1..17: note = Oligonucleotide
  source 1..17: mol_type = other DNA
gaacatctggagagatc

SEQ ID NO: 17462 - DNA, 17 bp, synthetic construct
  misc_feature 1..17: note = Oligonucleotide
  source 1..17: mol_type = other DNA
gtagaacatctggagag

SEQ ID NO: 17463 - DNA, 17 bp, synthetic construct
  misc_feature 1..17: note = Oligonucleotide
  source 1..17: mol_type = other DNA
tgggtagaacatctgga

SEQ ID NO: 17464 - DNA, 17 bp, synthetic construct
  misc_feature 1..17: note = Oligonucleotide
  source 1..17: mol_type = other DNA
taatgggtagaacatct

SEQ ID NO: 17465 - DNA, 17 bp, synthetic construct
  misc_feature 1..17: note = Oligonucleotide
  source 1..17: mol_type = other DNA
caataatgggtagaaca

SEQ ID NO: 17466 - DNA, 17 bp, synthetic construct
  misc_feature 1..17: note = Oligonucleotide
  source 1..17: mol_type = other DNA
tttcaataatgggtaga

SEQ ID NO: 17467 - DNA, 17 bp, synthetic construct
  misc_feature 1..17: note = Oligonucleotide
  source 1..17: mol_type = other DNA
tactttcaataatgggt

SEQ ID NO: 17468 - DNA, 17 bp, synthetic construct
  misc_feature 1..17: note = Oligonucleotide
  source 1..17: mol_type = other DNA
ccttactttcaataatg

SEQ ID NO: 17469 - DNA, 17 bp, synthetic construct
  misc_feature 1..17: note = Oligonucleotide
  source 1..17: mol_type = other DNA
ataccttactttcaata

SEQ ID NO: 17470 - DNA, 17 bp, synthetic construct
  misc_feature 1..17: note = Oligonucleotide
  source 1..17: mol_type = other DNA
ttaataccttactttca

SEQ ID NO: 17471 - DNA, 17 bp, synthetic construct
  misc_feature 1..17: note = Oligonucleotide
  source 1..17: mol_type = other DNA
actttaataccttactt

SEQ ID NO: 17472 - DNA, 17 bp, synthetic construct
  misc_feature 1..17: note = Oligonucleotide
  source 1..17: mol_type = other DNA
gaaactttaatacctta

SEQ ID NO: 17473 - DNA, 17 bp, synthetic construct
  misc_feature 1..17: note = Oligonucleotide
  source 1..17: mol_type = other DNA
taagaaactttaatacc

SEQ ID NO: 17474 - DNA, 17 bp, synthetic construct
  misc_feature 1..17: note = Oligonucleotide
  source 1..17: mol_type = other DNA
tagtaagaaactttaat

SEQ ID NO: 17475 - DNA, 17 bp, synthetic construct
  misc_feature 1..17: note = Oligonucleotide
  source 1..17: mol_type = other DNA
taatagtaagaaacttt

SEQ ID NO: 17476 - DNA, 17 bp, synthetic construct
  misc_feature 1..17: note = Oligonucleotide
  source 1..17: mol_type = other DNA
caataatagtaagaaac

SEQ ID NO: 17477 - DNA, 17 bp, synthetic construct
  misc_feature 1..17: note = Oligonucleotide
  source 1..17: mol_type = other DNA
ccacaataatagtaaga

SEQ ID NO: 17478 - DNA, 17 bp, synthetic construct
  misc_feature 1..17: note = Oligonucleotide
  source 1..17: mol_type = other DNA
gttccacaataatagta

SEQ ID NO: 17479 - DNA, 17 bp, synthetic construct
  misc_feature 1..17: note = Oligonucleotide
  source 1..17: mol_type = other DNA
acagttccacaataata

SEQ ID NO: 17480 - DNA, 17 bp, synthetic construct
  misc_feature 1..17: note = Oligonucleotide
  source 1..17: mol_type = other DNA
tagacagttccacaata

SEQ ID NO: 17481 - DNA, 17 bp, synthetic construct
  misc_feature 1..17: note = Oligonucleotide
  source 1..17: mol_type = other DNA
aaatagacagttccaca

SEQ ID NO: 17482 - DNA, 17 bp, synthetic construct
  misc_feature 1..17: note = Oligonucleotide
  source 1..17: mol_type = other DNA
gagaaatagacagttcc

SEQ ID NO: 17483 - DNA, 17 bp, synthetic construct
  misc_feature 1..17: note = Oligonucleotide
  source 1..17: mol_type = other DNA
agagagaaatagacagt

SEQ ID NO: 17484 - DNA, 17 bp, synthetic construct
  misc_feature 1..17: note = Oligonucleotide
  source 1..17: mol_type = other DNA
ttaagagagaaatagac

SEQ ID NO: 17485 - DNA, 17 bp, synthetic construct
  misc_feature 1..17: note = Oligonucleotide
  source 1..17: mol_type = other DNA
aatttaagagagaaata

SEQ ID NO: 17486 - DNA, 17 bp, synthetic construct
  misc_feature 1..17: note = Oligonucleotide
  source 1..17: mol_type = other DNA
cacaatttaagagagaa

SEQ ID NO: 17487 - DNA, 17 bp, synthetic construct
  misc_feature 1..17: note = Oligonucleotide
  source 1..17: mol_type = other DNA
caacacaatttaagaga

SEQ ID NO: 17488 - DNA, 17 bp, synthetic construct
  misc_feature 1..17: note = Oligonucleotide
  source 1..17: mol_type = other DNA
aaacaacacaatttaag

SEQ ID NO: 17489 - DNA, 17 bp, synthetic construct
  misc_feature 1..17: note = Oligonucleotide
  source 1..17: mol_type = other DNA
tacaaacaacacaattt

SEQ ID NO: 17490 - DNA, 17 bp, synthetic construct
  misc_feature 1..17: note = Oligonucleotide
  source 1..17: mol_type = other DNA
tgatacaaacaacacaa

SEQ ID NO: 17491 - DNA, 17 bp, synthetic construct
  misc_feature 1..17: note = Oligonucleotide
  source 1..17: mol_type = other DNA
atatgatacaaacaaca

SEQ ID NO: 17492 - DNA, 17 bp, synthetic construct
  misc_feature 1..17: note = Oligonucleotide
  source 1..17: mol_type = other DNA
aaaatatgatacaaaca

SEQ ID NO: 17493 - DNA, 17 bp, synthetic construct
  misc_feature 1..17: note = Oligonucleotide
  source 1..17: mol_type = other DNA
atcaaaatatgatacaa

SEQ ID NO: 17494 - DNA, 17 bp, synthetic construct
  misc_feature 1..17: note = Oligonucleotide
  source 1..17: mol_type = other DNA
aacatcaaaatatgata

SEQ ID NO: 17495 - DNA, 17 bp, synthetic construct
  misc_feature 1..17: note = Oligonucleotide
  source 1..17: mol_type = other DNA
cagaacatcaaaatatg

SEQ ID NO: 17496 - DNA, 17 bp, synthetic construct
  misc_feature 1..17: note = Oligonucleotide
  source 1..17: mol_type = other DNA
caacagaacatcaaaat

SEQ ID NO: 17497 - DNA, 17 bp, synthetic construct
  misc_feature 1..17: note = Oligonucleotide
  source 1..17: mol_type = other DNA
gaacaacagaacatcaa

SEQ ID NO: 17498 - DNA, 17 bp, synthetic construct
  misc_feature 1..17: note = Oligonucleotide
  source 1..17: mol_type = other DNA
accgaacaacagaacat

SEQ ID NO: 17499 - DNA, 17 bp, synthetic construct
  misc_feature 1..17: note = Oligonucleotide
  source 1..17: mol_type = other DNA
cacaccgaacaacagaa

SEQ ID NO: 17500 - DNA, 17 bp, synthetic construct
  misc_feature 1..17: note = Oligonucleotide
  source 1..17: mol_type = other DNA
atacacaccgaacaaca

SEQ ID NO: 17501 - DNA, 17 bp, synthetic construct
  misc_feature 1..17: note = Oligonucleotide
  source 1..17: mol_type = other DNA
catatacacaccgaaca

SEQ ID NO: 17502 - DNA, 17 bp, synthetic construct
  misc_feature 1..17: note = Oligonucleotide
  source 1..17: mol_type = other DNA
taacatatacacaccga

SEQ ID NO: 17503 - DNA, 17 bp, synthetic construct
  misc_feature 1..17: note = Oligonucleotide
  source 1..17: mol_type = other DNA
tactaacatatacacac

SEQ ID NO: 17504 - DNA, 17 bp, synthetic construct
  misc_feature 1..17: note = Oligonucleotide
  source 1..17: mol_type = other DNA
aattactaacatataca

SEQ ID NO: 17505 - DNA, 17 bp, synthetic construct
  misc_feature 1..17: note = Oligonucleotide
  source 1..17: mol_type = other DNA
aacaattactaacatat

SEQ ID NO: 17506 - DNA, 17 bp, synthetic construct
  misc_feature 1..17: note = Oligonucleotide
  source 1..17: mol_type = other DNA
attaacaattactaaca

SEQ ID NO: 17507 - DNA, 17 bp, synthetic construct
  misc_feature 1..17: note = Oligonucleotide
  source 1..17: mol_type = other DNA
ttgattaacaattacta

SEQ ID NO: 17508 - DNA, 17 bp, synthetic construct
  misc_feature 1..17: note = Oligonucleotide
  source 1..17: mol_type = other DNA
atgttgattaacaatta

SEQ ID NO: 17509 - DNA, 17 bp, synthetic construct
  misc_feature 1..17: note = Oligonucleotide
  source 1..17: mol_type = other DNA
tatatgttgattaacaa

SEQ ID NO: 17510 - DNA, 17 bp, synthetic construct
  misc_feature 1..17: note = Oligonucleotide
  source 1..17: mol_type = other DNA
cattatatgttgattaa

SEQ ID NO: 17511 - DNA, 17 bp, synthetic construct
  misc_feature 1..17: note = Oligonucleotide
  source 1..17: mol_type = other DNA
ggacattatatgttgat

SEQ ID NO: 17512 - DNA, 17 bp, synthetic construct
  misc_feature 1..17: note = Oligonucleotide
  source 1..17: mol_type = other DNA
gaaggacattatatgtt

SEQ ID NO: 17513 - DNA, 17 bp, synthetic construct
  misc_feature 1..17: note = Oligonucleotide
  source 1..17: mol_type = other DNA
agagaaggacattatat

SEQ ID NO: 17514 - DNA, 17 bp, synthetic construct
  misc_feature 1..17: note = Oligonucleotide
  source 1..17: mol_type = other DNA
gacagagaaggacatta

SEQ ID NO: 17515 - DNA, 17 bp, synthetic construct
  misc_feature 1..17: note = Oligonucleotide
  source 1..17: mol_type = other DNA
agagacagagaaggaca

SEQ ID NO: 17516 - DNA, 17 bp, synthetic construct
  misc_feature 1..17: note = Oligonucleotide
  source 1..17: mol_type = other DNA
acaagagacagagaagg

SEQ ID NO: 17517 - DNA, 17 bp, synthetic construct
  misc_feature 1..17: note = Oligonucleotide
  source 1..17: mol_type = other DNA
gtaacaagagacagaga

SEQ ID NO: 17518 - DNA, 17 bp, synthetic construct
  misc_feature 1..17: note = Oligonucleotide
  source 1..17: mol_type = other DNA
actgtaacaagagacag

SEQ ID NO: 17519 - DNA, 17 bp, synthetic construct
  misc_feature 1..17: note = Oligonucleotide
  source 1..17: mol_type = other DNA
aaaactgtaacaagaga

SEQ ID NO: 17520 - DNA, 17 bp, synthetic construct
  misc_feature 1..17: note = Oligonucleotide
  source 1..17: mol_type = other DNA
ataaaaactgtaacaag

SEQ ID NO: 17521 - DNA, 17 bp, synthetic construct
  misc_feature 1..17: note = Oligonucleotide
  source 1..17: mol_type = other DNA
aagataaaaactgtaac

SEQ ID NO: 17522 - DNA, 17 bp, synthetic construct
  misc_feature 1..17: note = Oligonucleotide
  source 1..17: mol_type = other DNA
tttaagataaaaactgt

SEQ ID NO: 17523 - DNA, 17 bp, synthetic construct
  misc_feature 1..17: note = Oligonucleotide
  source 1..17: mol_type = other DNA
aactttaagataaaaac

SEQ ID NO: 17524 - DNA, 17 bp, synthetic construct
  misc_feature 1..17: note = Oligonucleotide
  source 1..17: mol_type = other DNA
ataaactttaagataaa

SEQ ID NO: 17525 - DNA, 17 bp, synthetic construct
  misc_feature 1..17: note = Oligonucleotide
  source 1..17: mol_type = other DNA
aaaataaactttaagat

SEQ ID NO: 17526 - DNA, 17 bp, synthetic construct
  misc_feature 1..17: note = Oligonucleotide
  source 1..17: mol_type = other DNA
tacaaaataaactttaa

SEQ ID NO: 17527 - DNA, 17 bp, synthetic construct
  misc_feature 1..17: note = Oligonucleotide
  source 1..17: mol_type = other DNA
tcatacaaaataaactt

SEQ ID NO: 17528 - DNA, 17 bp, synthetic construct
  misc_feature 1..17: note = Oligonucleotide
  source 1..17: mol_type = other DNA
acatcatacaaaataaa

SEQ ID NO: 17529 - DNA, 17 bp, synthetic construct
  misc_feature 1..17: note = Oligonucleotide
  source 1..17: mol_type = other DNA
ttaacatcatacaaaat

SEQ ID NO: 17530 - DNA, 17 bp, synthetic construct
  misc_feature 1..17: note = Oligonucleotide
  source 1..17: mol_type = other DNA
atattaacatcatacaa

SEQ ID NO: 17531 - DNA, 17 bp, synthetic construct
  misc_feature 1..17: note = Oligonucleotide
  source 1..17: mol_type = other DNA
gttatattaacatcata

SEQ ID NO: 17532 - DNA, 17 bp, synthetic construct
  misc_feature 1..17: note = Oligonucleotide
  source 1..17: mol_type = other DNA
gtggttatattaacatc

SEQ ID NO: 17533 - DNA, 17 bp, synthetic construct
  misc_feature 1..17: note = Oligonucleotide
  source 1..17: mol_type = other DNA
tgggtggttatattaac

SEQ ID NO: 17534 - DNA, 17 bp, synthetic construct
  misc_feature 1..17: note = Oligonucleotide
  source 1..17: mol_type = other DNA
agctgggtggttatatt

SEQ ID NO: 17535 - DNA, 17 bp, synthetic construct
  misc_feature 1..17: note = Oligonucleotide
  source 1..17: mol_type = other DNA
gagagctgggtggttat

SEQ ID NO: 17536 - DNA, 17 bp, synthetic construct
  misc_feature 1..17: note = Oligonucleotide
  source 1..17: mol_type = other DNA
aaagagagctgggtggt

SEQ ID NO: 17537 - DNA, 17 bp, synthetic construct
  misc_feature 1..17: note = Oligonucleotide
  source 1..17: mol_type = other DNA
ccaaaagagagctgggt

SEQ ID NO: 17538 - DNA, 17 bp, synthetic construct
  misc_feature 1..17: note = Oligonucleotide
  source 1..17: mol_type = other DNA
taaccaaaagagagctg

SEQ ID NO: 17539 - DNA, 17 bp, synthetic construct
  misc_feature 1..17: note = Oligonucleotide
  source 1..17: mol_type = other DNA
tagtaaccaaaagagag

SEQ ID NO: 17540 - DNA, 17 bp, synthetic construct
  misc_feature 1..17: note = Oligonucleotide
  source 1..17: mol_type = other DNA
aaatagtaaccaaaaga

SEQ ID NO: 17541 - DNA, 17 bp, synthetic construct
  misc_feature 1..17: note = Oligonucleotide
  source 1..17: mol_type = other DNA
tgtaaatagtaaccaaa

SEQ ID NO: 17542 - DNA, 17 bp, synthetic construct
  misc_feature 1..17: note = Oligonucleotide
  source 1..17: mol_type = other DNA
taatgtaaatagtaacc

SEQ ID NO: 17543 - DNA, 17 bp, synthetic construct
  misc_feature 1..17: note = Oligonucleotide
  source 1..17: mol_type = other DNA
atctaatgtaaatagta

SEQ ID NO: 17544 - DNA, 17 bp, synthetic construct
  misc_feature 1..17: note = Oligonucleotide
  source 1..17: mol_type = other DNA
gcaatctaatgtaaata

SEQ ID NO: 17545 - DNA, 17 bp, synthetic construct
  misc_feature 1..17: note = Oligonucleotide
  source 1..17: mol_type = other DNA
aaagcaatctaatgtaa

SEQ ID NO: 17546 - DNA, 17 bp, synthetic construct
  misc_feature 1..17: note = Oligonucleotide
  source 1..17: mol_type = other DNA
aaaaaagcaatctaatg

SEQ ID NO: 17547 - DNA, 17 bp, synthetic construct
  misc_feature 1..17: note = Oligonucleotide
  source 1..17: mol_type = other DNA
ataaaaaaagcaatcta

SEQ ID NO: 17548 - DNA, 17 bp, synthetic construct
  misc_feature 1..17: note = Oligonucleotide
  source 1..17: mol_type = other DNA
aggataaaaaaagcaat

SEQ ID NO: 17549 - DNA, 17 bp, synthetic construct
  misc_feature 1..17: note = Oligonucleotide
  source 1..17: mol_type = other DNA
gaaaggataaaaaaagc

SEQ ID NO: 17550 - DNA, 17 bp, synthetic construct
  misc_feature 1..17: note = Oligonucleotide
  source 1..17: mol_type = other DNA
agtgaaaggataaaaaa

SEQ ID NO: 17551 - DNA, 17 bp, synthetic construct
  misc_feature 1..17: note = Oligonucleotide
  source 1..17: mol_type = other DNA
caaagtgaaaggataaa

SEQ ID NO: 17552 - DNA, 17 bp, synthetic construct
  misc_feature 1..17: note = Oligonucleotide
  source 1..17: mol_type = other DNA
gttcaaagtgaaaggat

SEQ ID NO: 17553 - DNA, 17 bp, synthetic construct
  misc_feature 1..17: note = Oligonucleotide
  source 1..17: mol_type = other DNA
taggttcaaagtgaaag

SEQ ID NO: 17554 - DNA, 17 bp, synthetic construct
  misc_feature 1..17: note = Oligonucleotide
  source 1..17: mol_type = other DNA
aaataggttcaaagtga

SEQ ID NO: 17555 - DNA, 17 bp, synthetic construct
  misc_feature 1..17: note = Oligonucleotide
  source 1..17: mol_type = other DNA
cacaaataggttcaaag

SEQ ID NO: 17556 - DNA, 17 bp, synthetic construct
  misc_feature 1..17: note = Oligonucleotide
  source 1..17: mol_type = other DNA
agacacaaataggttca

SEQ ID NO: 17557 - DNA, 17 bp, synthetic construct
  misc_feature 1..17: note = Oligonucleotide
  source 1..17: mol_type = other DNA
caaagacacaaataggt

SEQ ID NO: 17558 - DNA, 17 bp, synthetic construct
  misc_feature 1..17: note = Oligonucleotide
  source 1..17: mol_type = other DNA
atccaaagacacaaata

SEQ ID NO: 17559 - DNA, 17 bp, synthetic construct
  misc_feature 1..17: note = Oligonucleotide
  source 1..17: mol_type = other DNA
taaatccaaagacacaa

SEQ ID NO: 17560 - DNA, 17 bp, synthetic construct
  misc_feature 1..17: note = Oligonucleotide
  source 1..17: mol_type = other DNA
ctttaaatccaaagaca

SEQ ID NO: 17561 - DNA, 17 bp, synthetic construct
  misc_feature 1..17: note = Oligonucleotide
  source 1..17: mol_type = other DNA
tcactttaaatccaaag

SEQ ID NO: 17562 - DNA, 17 bp, synthetic construct
  misc_feature 1..17: note = Oligonucleotide
  source 1..17: mol_type = other DNA
taatcactttaaatcca

SEQ ID NO: 17563 - DNA, 17 bp, synthetic construct
  misc_feature 1..17: note = Oligonucleotide
  source 1..17: mol_type = other DNA
aaataatcactttaaat

SEQ ID NO: 17564 - DNA, 17 bp, synthetic construct
  misc_feature 1..17: note = Oligonucleotide
  source 1..17: mol_type = other DNA
acaaaataatcacttta

SEQ ID NO: 17565 - DNA, 17 bp, synthetic construct
  misc_feature 1..17: note = Oligonucleotide
  source 1..17: mol_type = other DNA
cttacaaaataatcact

SEQ ID NO: 17566 - DNA, 17 bp, synthetic construct
  misc_feature 1..17: note = Oligonucleotide
  source 1..17: mol_type = other DNA
ctacttacaaaataatc

SEQ ID NO: 17567 - DNA, 17 bp, synthetic construct
  misc_feature 1..17: note = Oligonucleotide
  source 1..17: mol_type = other DNA
atgctacttacaaaata

SEQ ID NO: 17568 - DNA, 17 bp, synthetic construct
  misc_feature 1..17: note = Oligonucleotide
  source 1..17: mol_type = other DNA
tatatgctacttacaaa

SEQ ID NO: 17569 - DNA, 17 bp, synthetic construct
  misc_feature 1..17: note = Oligonucleotide
  source 1..17: mol_type = other DNA
aactatatgctacttac

SEQ ID NO: 17570 - DNA, 17 bp, synthetic construct
  misc_feature 1..17: note = Oligonucleotide
  source 1..17: mol_type = other DNA
tccaactatatgctact

SEQ ID NO: 17571 - DNA, 17 bp, synthetic construct
  misc_feature 1..17: note = Oligonucleotide
  source 1..17: mol_type = other DNA
ttatccaactatatgct

SEQ ID NO: 17572 - DNA, 17 bp, synthetic construct
  misc_feature 1..17: note = Oligonucleotide
  source 1..17: mol_type = other DNA
gtattatccaactatat

SEQ ID NO: 17573 - DNA, 17 bp, synthetic construct
  misc_feature 1..17: note = Oligonucleotide
  source 1..17: mol_type = other DNA
aaagtattatccaacta

SEQ ID NO: 17574 - DNA, 17 bp, synthetic construct
  misc_feature 1..17: note = Oligonucleotide
  source 1..17: mol_type = other DNA
taaaaagtattatccaa

SEQ ID NO: 17575 - DNA, 17 bp, synthetic construct
  misc_feature 1..17: note = Oligonucleotide
  source 1..17: mol_type = other DNA
gattaaaaagtattatc

SEQ ID NO: 17576 - DNA, 17 bp, synthetic construct
  misc_feature 1..17: note = Oligonucleotide
  source 1..17: mol_type = other DNA
agtgattaaaaagtatt

SEQ ID NO: 17577 - DNA, 17 bp, synthetic construct
  misc_feature 1..17: note = Oligonucleotide
  source 1..17: mol_type = other DNA
gatagtgattaaaaagt

SEQ ID NO: 17578 - DNA, 17 bp, synthetic construct
  misc_feature 1..17: note = Oligonucleotide
  source 1..17: mol_type = other DNA
gcagatagtgattaaaa

SEQ ID NO: 17579 - DNA, 17 bp, synthetic construct
  misc_feature 1..17: note = Oligonucleotide
  source 1..17: mol_type = other DNA
aaagcagatagtgatta

SEQ ID NO: 17580 - DNA, 17 bp, synthetic construct
  misc_feature 1..17: note = Oligonucleotide
  source 1..17: mol_type = other DNA
taaaaagcagatagtga

SEQ ID NO: 17581 - DNA, 17 bp, synthetic construct
  misc_feature 1..17: note = Oligonucleotide
  source 1..17: mol_type = other DNA
acttaaaaagcagatag

SEQ ID NO: 17582 - DNA, 17 bp, synthetic construct
  misc_feature 1..17: note = Oligonucleotide
  source 1..17: mol_type = other DNA
tttacttaaaaagcaga

SEQ ID NO: 17583 - DNA, 17 bp, synthetic construct
  misc_feature 1..17: note = Oligonucleotide
  source 1..17: mol_type = other DNA
aattttacttaaaaagc

SEQ ID NO: 17584 - DNA, 17 bp, synthetic construct
  misc_feature 1..17: note = Oligonucleotide
  source 1..17: mol_type = other DNA
tagaattttacttaaaa

SEQ ID NO: 17585 - DNA, 17 bp, synthetic construct
  misc_feature 1..17: note = Oligonucleotide
  source 1..17: mol_type = other DNA
caatagaattttactta

SEQ ID NO: 17586 - DNA, 17 bp, synthetic construct
  misc_feature 1..17: note = Oligonucleotide
  source 1..17: mol_type = other DNA
ttccaatagaattttac

SEQ ID NO: 17587 - DNA, 17 bp, synthetic construct
  misc_feature 1..17: note = Oligonucleotide
  source 1..17: mol_type = other DNA
gtgttccaatagaattt

SEQ ID NO: 17588 - DNA, 17 bp, synthetic construct
  misc_feature 1..17: note = Oligonucleotide
  source 1..17: mol_type = other DNA
tttgtgttccaatagaa

SEQ ID NO: 17589 - DNA, 17 bp, synthetic construct
  misc_feature 1..17: note = Oligonucleotide
  source 1..17: mol_type = other DNA
gtgtttgtgttccaata

SEQ ID NO: 17590 - DNA, 17 bp, synthetic construct
  misc_feature 1..17: note = Oligonucleotide
  source 1..17: mol_type = other DNA
ggtgtgtttgtgttcca

SEQ ID NO: 17591 - DNA, 17 bp, synthetic construct
  misc_feature 1..17: note = Oligonucleotide
  source 1..17: mol_type = other DNA
ataggtgtgtttgtgtt

SEQ ID NO: 17592 - DNA, 17 bp, synthetic construct
  misc_feature 1..17: note = Oligonucleotide
  source 1..17: mol_type = other DNA
cagataggtgtgtttgt

SEQ ID NO: 17593 - DNA, 17 bp, synthetic construct
  misc_feature 1..17: note = Oligonucleotide
  source 1..17: mol_type = other DNA
aagcagataggtgtgtt

SEQ ID NO: 17594 - DNA, 17 bp, synthetic construct
  misc_feature 1..17: note = Oligonucleotide
  source 1..17: mol_type = other DNA
tacaagcagataggtgt

SEQ ID NO: 17595 - DNA, 17 bp, synthetic construct
  misc_feature 1..17: note = Oligonucleotide
  source 1..17: mol_type = other DNA
acatacaagcagatagg

SEQ ID NO: 17596 - DNA, 17 bp, synthetic construct
  misc_feature 1..17: note = Oligonucleotide
  source 1..17: mol_type = other DNA
acaacatacaagcagat

SEQ ID NO: 17597 - DNA, 17 bp, synthetic construct
  misc_feature 1..17: note = Oligonucleotide
  source 1..17: mol_type = other DNA
caaacaacatacaagca

SEQ ID NO: 17598 - DNA, 17 bp, synthetic construct
  misc_feature 1..17: note = Oligonucleotide
  source 1..17: mol_type = other DNA
ccacaaacaacatacaa

SEQ ID NO: 17599 - DNA, 17 bp, synthetic construct
  misc_feature 1..17: note = Oligonucleotide
  source 1..17: mol_type = other DNA
ccaccacaaacaacata

SEQ ID NO: 17600 - DNA, 17 bp, synthetic construct
  misc_feature 1..17: note = Oligonucleotide
  source 1..17: mol_type = other DNA
aaaccaccacaaacaac

SEQ ID NO: 17601 - DNA, 17 bp, synthetic construct
  misc_feature 1..17: note = Oligonucleotide
  source 1..17: mol_type = other DNA
tgaaaaccaccacaaac

SEQ ID NO: 17602 - DNA, 17 bp, synthetic construct
  misc_feature 1..17: note = Oligonucleotide
  source 1..17: mol_type = other DNA
gcatgaaaaccaccaca

SEQ ID NO: 17603 - DNA, 17 bp, synthetic construct
  misc_feature 1..17: note = Oligonucleotide
  source 1..17: mol_type = other DNA
gcagcatgaaaaccacc

SEQ ID NO: 17604 - DNA, 17 bp, synthetic construct
  misc_feature 1..17: note = Oligonucleotide
  source 1..17: mol_type = other DNA
accgcagcatgaaaacc

SEQ ID NO: 17605 - DNA, 17 bp, synthetic construct
  misc_feature 1..17: note = Oligonucleotide
  source 1..17: mol_type = other DNA
gccaccgcagcatgaaa

SEQ ID NO: 17606 - DNA, 17 bp, synthetic construct
  misc_feature 1..17: note = Oligonucleotide
  source 1..17: mol_type = other DNA
tctgccaccgcagcatg

SEQ ID NO: 17607 - DNA, 17 bp, synthetic construct
  misc_feature 1..17: note = Oligonucleotide
  source 1..17: mol_type = other DNA
aactctgccaccgcagc

SEQ ID NO: 17608 - DNA, 17 bp, synthetic construct
  misc_feature 1..17: note = Oligonucleotide
  source 1..17: mol_type = other DNA
ctcaactctgccaccgc

SEQ ID NO: 17609 - DNA, 17 bp, synthetic construct
  misc_feature 1..17: note = Oligonucleotide
  source 1..17: mol_type = other DNA
tgactcaactctgccac

SEQ ID NO: 17610 - DNA, 17 bp, synthetic construct
  misc_feature 1..17: note = Oligonucleotide
  source 1..17: mol_type = other DNA
caatgactcaactctgc

SEQ ID NO: 17611 - DNA, 17 bp, synthetic construct
  misc_feature 1..17: note = Oligonucleotide
  source 1..17: mol_type = other DNA
ttgcaatgactcaactc

SEQ ID NO: 17612 - DNA, 17 bp, synthetic construct
  misc_feature 1..17: note = Oligonucleotide
  source 1..17: mol_type = other DNA
gtgttgcaatgactcaa

SEQ ID NO: 17613 - DNA, 17 bp, synthetic construct
  misc_feature 1..17: note = Oligonucleotide
  source 1..17: mol_type = other DNA
tctgtgttgcaatgact

SEQ ID NO: 17614 - DNA, 17 bp, synthetic construct
  misc_feature 1..17: note = Oligonucleotide
  source 1..17: mol_type = other DNA
tagtctgtgttgcaatg

SEQ ID NO: 17615 - DNA, 17 bp, synthetic construct
  misc_feature 1..17: note = Oligonucleotide
  source 1..17: mol_type = other DNA
atatagtctgtgttgca

SEQ ID NO: 17616 - DNA, 17 bp, synthetic construct
  misc_feature 1..17: note = Oligonucleotide
  source 1..17: mol_type = other DNA
gctatatagtctgtgtt

SEQ ID NO: 17617 - DNA, 17 bp, synthetic construct
  misc_feature 1..17: note = Oligonucleotide
  source 1..17: mol_type = other DNA
caagctatatagtctgt

SEQ ID NO: 17618 - DNA, 17 bp, synthetic construct
  misc_feature 1..17: note = Oligonucleotide
  source 1..17: mol_type = other DNA
ttgcaagctatatagtc

SEQ ID NO: 17619 - DNA, 17 bp, synthetic construct
  misc_feature 1..17: note = Oligonucleotide
  source 1..17: mol_type = other DNA
gctttgcaagctatata

SEQ ID NO: 17620 - DNA, 17 bp, synthetic construct
  misc_feature 1..17: note = Oligonucleotide
  source 1..17: mol_type = other DNA
aaggctttgcaagctat

SEQ ID NO: 17621 - DNA, 17 bp, synthetic construct
  misc_feature 1..17: note = Oligonucleotide
  source 1..17: mol_type = other DNA
cttaaggctttgcaagc

SEQ ID NO: 17622 - DNA, 17 bp, synthetic construct
  misc_feature 1..17: note = Oligonucleotide
  source 1..17: mol_type = other DNA
ctacttaaggctttgca

SEQ ID NO: 17623 - DNA, 17 bp, synthetic construct
  misc_feature 1..17: note = Oligonucleotide
  source 1..17: mol_type = other DNA
taactacttaaggcttt

SEQ ID NO: 17624 - DNA, 17 bp, synthetic construct
  misc_feature 1..17: note = Oligonucleotide
  source 1..17: mol_type = other DNA
cagtaactacttaaggc

SEQ ID NO: 17625 - DNA, 17 bp, synthetic construct
  misc_feature 1..17: note = Oligonucleotide
  source 1..17: mol_type = other DNA
ggacagtaactacttaa

SEQ ID NO: 17626 - DNA, 17 bp, synthetic construct
  misc_feature 1..17: note = Oligonucleotide
  source 1..17: mol_type = other DNA
attggacagtaactact

SEQ ID NO: 17627 - DNA, 17 bp, synthetic construct
  misc_feature 1..17: note = Oligonucleotide
  source 1..17: mol_type = other DNA
agaattggacagtaact

SEQ ID NO: 17628 - DNA, 17 bp, synthetic construct
  misc_feature 1..17: note = Oligonucleotide
  source 1..17: mol_type = other DNA
gaaagaattggacagta

SEQ ID NO: 17629 - DNA, 17 bp, synthetic construct
  misc_feature 1..17: note = Oligonucleotide
  source 1..17: mol_type = other DNA
ctggaaagaattggaca

SEQ ID NO: 17630 - DNA, 17 bp, synthetic construct
  misc_feature 1..17: note = Oligonucleotide
  source 1..17: mol_type = other DNA
tttctggaaagaattgg

SEQ ID NO: 17631 - DNA, 17 bp, synthetic construct
  misc_feature 1..17: note = Oligonucleotide
  source 1..17: mol_type = other DNA
ccttttctggaaagaat

SEQ ID NO: 17632 - DNA, 17 bp, synthetic construct
  misc_feature 1..17: note = Oligonucleotide
  source 1..17: mol_type = other DNA
aaaccttttctggaaag

SEQ ID NO: 17633 - DNA, 17 bp, synthetic construct
  misc_feature 1..17: note = Oligonucleotide
  source 1..17: mol_type = other DNA
agcaaaccttttctgga

SEQ ID NO: 17634 - DNA, 17 bp, synthetic construct
  misc_feature 1..17: note = Oligonucleotide
  source 1..17: mol_type = other DNA
atcagcaaaccttttct

SEQ ID NO: 17635 - DNA, 17 bp, synthetic construct
  misc_feature 1..17: note = Oligonucleotide
  source 1..17: mol_type = other DNA
gggatcagcaaaccttt

SEQ ID NO: 17636 - DNA, 17 bp, synthetic construct
  misc_feature 1..17: note = Oligonucleotide
  source 1..17: mol_type = other DNA
ccagggatcagcaaacc

SEQ ID NO: 17637 - DNA, 17 bp, synthetic construct
  misc_feature 1..17: note = Oligonucleotide
  source 1..17: mol_type = other DNA
agaccagggatcagcaa

SEQ ID NO: 17638 - DNA, 17 bp, synthetic construct
  misc_feature 1..17: note = Oligonucleotide
  source 1..17: mol_type = other DNA
tctagaccagggatcag

SEQ ID NO: 17639 - DNA, 17 bp, synthetic construct
  misc_feature 1..17: note = Oligonucleotide
  source 1..17: mol_type = other DNA
cattctagaccagggat

SEQ ID NO: 17640 - DNA, 17 bp, synthetic construct
  misc_feature 1..17: note = Oligonucleotide
  source 1..17: mol_type = other DNA
agacattctagaccagg

SEQ ID NO: 17641 - DNA, 17 bp, synthetic construct
  misc_feature 1..17: note = Oligonucleotide
  source 1..17: mol_type = other DNA
aaaagacattctagacc

SEQ ID NO: 17642 - DNA, 17 bp, synthetic construct
  misc_feature 1..17: note = Oligonucleotide
  source 1..17: mol_type = other DNA
tataaaagacattctag

SEQ ID NO: 17643 - DNA, 17 bp, synthetic construct
  misc_feature 1..17: note = Oligonucleotide
  source 1..17: mol_type = other DNA
aactataaaagacattc

SEQ ID NO: 17644 - DNA, 17 bp, synthetic construct
  misc_feature 1..17: note = Oligonucleotide
  source 1..17: mol_type = other DNA
ggaaactataaaagaca

SEQ ID NO: 17645 - DNA, 17 bp, synthetic construct
  misc_feature 1..17: note = Oligonucleotide
  source 1..17: mol_type = other DNA
cagggaaactataaaag

SEQ ID NO: 17646 - DNA, 17 bp, synthetic construct
  misc_feature 1..17: note = Oligonucleotide
  source 1..17: mol_type = other DNA
aaccagggaaactataa

SEQ ID NO: 17647 - DNA, 17 bp, synthetic construct
  misc_feature 1..17: note = Oligonucleotide
  source 1..17: mol_type = other DNA
tataaccagggaaacta

SEQ ID NO: 17648 - DNA, 17 bp, synthetic construct
  misc_feature 1..17: note = Oligonucleotide
  source 1..17: mol_type = other DNA
aactataaccagggaaa

SEQ ID NO: 17649 - DNA, 17 bp, synthetic construct
  misc_feature 1..17: note = Oligonucleotide
  source 1..17: mol_type = other DNA
gttaactataaccaggg

SEQ ID NO: 17650 - DNA, 17 bp, synthetic construct
  misc_feature 1..17: note = Oligonucleotide
  source 1..17: mol_type = other DNA
gcagttaactataacca

SEQ ID NO: 17651 - DNA, 17 bp, synthetic construct
  misc_feature 1..17: note = Oligonucleotide
  source 1..17: mol_type = other DNA
tttgcagttaactataa

SEQ ID NO: 17652 - DNA, 17 bp, synthetic construct
  misc_feature 1..17: note = Oligonucleotide
  source 1..17: mol_type = other DNA
ccatttgcagttaacta

SEQ ID NO: 17653 - DNA, 17 bp, synthetic construct
  misc_feature 1..17: note = Oligonucleotide
  source 1..17: mol_type = other DNA
ggaccatttgcagttaa

SEQ ID NO: 17654 - DNA, 17 bp, synthetic construct
  misc_feature 1..17: note = Oligonucleotide
  source 1..17: mol_type = other DNA
acaggaccatttgcagt

SEQ ID NO: 17655 - DNA, 17 bp, synthetic construct
  misc_feature 1..17: note = Oligonucleotide
  source 1..17: mol_type = other DNA
tgaacaggaccatttgc

SEQ ID NO: 17656 - DNA, 17 bp, synthetic construct
  misc_feature 1..17: note = Oligonucleotide
  source 1..17: mol_type = other DNA
tgctgaacaggaccatt

SEQ ID NO: 17657 - DNA, 17 bp, synthetic construct
  misc_feature 1..17: note = Oligonucleotide
  source 1..17: mol_type = other DNA
tactgctgaacaggacc

SEQ ID NO: 17658 - DNA, 17 bp, synthetic construct
  misc_feature 1..17: note = Oligonucleotide
  source 1..17: mol_type = other DNA
gactactgctgaacagg

SEQ ID NO: 17659 - DNA, 17 bp, synthetic construct
  misc_feature 1..17: note = Oligonucleotide
  source 1..17: mol_type = other DNA
ccagactactgctgaac

SEQ ID NO: 17660 - DNA, 17 bp, synthetic construct
  misc_feature 1..17: note = Oligonucleotide
  source 1..17: mol_type = other DNA
tcaccagactactgctg

SEQ ID NO: 17661 - DNA, 17 bp, synthetic construct
  misc_feature 1..17: note = Oligonucleotide
  source 1..17: mol_type = other DNA
atctcaccagactactg

SEQ ID NO: 17662 - DNA, 17 bp, synthetic construct
  misc_feature 1..17: note = Oligonucleotide
  source 1..17: mol_type = other DNA
cgaatctcaccagacta

SEQ ID NO: 17663 - DNA, 17 bp, synthetic construct
  misc_feature 1..17: note = Oligonucleotide
  source 1..17: mol_type = other DNA
tgacgaatctcaccaga

SEQ ID NO: 17664 - DNA, 17 bp, synthetic construct
  misc_feature 1..17: note = Oligonucleotide
  source 1..17: mol_type = other DNA
atgtgacgaatctcacc

SEQ ID NO: 17665 - DNA, 17 bp, synthetic construct
  misc_feature 1..17: note = Oligonucleotide
  source 1..17: mol_type = other DNA
tacatgtgacgaatctc

SEQ ID NO: 17666 - DNA, 17 bp, synthetic construct
  misc_feature 1..17: note = Oligonucleotide
  source 1..17: mol_type = other DNA
ggctacatgtgacgaat

SEQ ID NO: 17667 - DNA, 17 bp, synthetic construct
  misc_feature 1..17: note = Oligonucleotide
  source 1..17: mol_type = other DNA
acaggctacatgtgacg

SEQ ID NO: 17668 - DNA, 17 bp, synthetic construct
  misc_feature 1..17: note = Oligonucleotide
  source 1..17: mol_type = other DNA
aaaacaggctacatgtg

SEQ ID NO: 17669 - DNA, 17 bp, synthetic construct
  misc_feature 1..17: note = Oligonucleotide
  source 1..17: mol_type = other DNA
gacaaaacaggctacat

SEQ ID NO: 17670 - DNA, 17 bp, synthetic construct
  misc_feature 1..17: note = Oligonucleotide
  source 1..17: mol_type = other DNA
agagacaaaacaggcta

SEQ ID NO: 17671 - DNA, 17 bp, synthetic construct
  misc_feature 1..17: note = Oligonucleotide
  source 1..17: mol_type = other DNA
aggagagacaaaacagg

SEQ ID NO: 17672 - DNA, 17 bp, synthetic construct
  misc_feature 1..17: note = Oligonucleotide
  source 1..17: mol_type = other DNA
ttcaggagagacaaaac

SEQ ID NO: 17673 - DNA, 17 bp, synthetic construct
  misc_feature 1..17: note = Oligonucleotide
  source 1..17: mol_type = other DNA
agcttcaggagagacaa

SEQ ID NO: 17674 - DNA, 17 bp, synthetic construct
  misc_feature 1..17: note = Oligonucleotide
  source 1..17: mol_type = other DNA
acaagcttcaggagaga

SEQ ID NO: 17675 - DNA, 17 bp, synthetic construct
  misc_feature 1..17: note = Oligonucleotide
  source 1..17: mol_type = other DNA
ttcacaagcttcaggag

SEQ ID NO: 17676 - DNA, 17 bp, synthetic construct
  misc_feature 1..17: note = Oligonucleotide
  source 1..17: mol_type = other DNA
catttcacaagcttcag

SEQ ID NO: 17677 - DNA, 17 bp, synthetic construct
  misc_feature 1..17: note = Oligonucleotide
  source 1..17: mol_type = other DNA
ctgcatttcacaagctt

SEQ ID NO: 17678 - DNA, 17 bp, synthetic construct
  misc_feature 1..17: note = Oligonucleotide
  source 1..17: mol_type = other DNA
gaactgcatttcacaag

SEQ ID NO: 17679 - DNA, 17 bp, synthetic construct
  misc_feature 1..17: note = Oligonucleotide
  source 1..17: mol_type = other DNA
taagaactgcatttcac

SEQ ID NO: 17680 - DNA, 17 bp, synthetic construct
  misc_feature 1..17: note = Oligonucleotide
  source 1..17: mol_type = other DNA
ctctaagaactgcattt

SEQ ID NO: 17681 - DNA, 17 bp, synthetic construct
  misc_feature 1..17: note = Oligonucleotide
  source 1..17: mol_type = other DNA
atgctctaagaactgca

SEQ ID NO: 17682 - DNA, 17 bp, synthetic construct
  misc_feature 1..17: note = Oligonucleotide
  source 1..17: mol_type = other DNA
gatatgctctaagaact

SEQ ID NO: 17683 - DNA, 17 bp, synthetic construct
  misc_feature 1..17: note = Oligonucleotide
  source 1..17: mol_type = other DNA
tcagatatgctctaaga

SEQ ID NO: 17684 - DNA, 17 bp, synthetic construct
  misc_feature 1..17: note = Oligonucleotide
  source 1..17: mol_type = other DNA
tgctcagatatgctcta

SEQ ID NO: 17685 - DNA, 17 bp, synthetic construct
  misc_feature 1..17: note = Oligonucleotide
  source 1..17: mol_type = other DNA
gggtgctcagatatgct

SEQ ID NO: 17686 - DNA, 17 bp, synthetic construct
  misc_feature 1..17: note = Oligonucleotide
  source 1..17: mol_type = other DNA
tgagggtgctcagatat

SEQ ID NO: 17687 - DNA, 17 bp, synthetic construct
  misc_feature 1..17: note = Oligonucleotide
  source 1..17: mol_type = other DNA
ccttgagggtgctcaga

SEQ ID NO: 17688 - DNA, 17 bp, synthetic construct
  misc_feature 1..17: note = Oligonucleotide
  source 1..17: mol_type = other DNA
gggccttgagggtgctc

SEQ ID NO: 17689 - DNA, 17 bp, synthetic construct
  misc_feature 1..17: note = Oligonucleotide
  source 1..17: mol_type = other DNA
aaggggccttgagggtg

SEQ ID NO: 17690 - DNA, 17 bp, synthetic construct
  misc_feature 1..17: note = Oligonucleotide
  source 1..17: mol_type = other DNA
cgaaaggggccttgagg

SEQ ID NO: 17691 - DNA, 17 bp, synthetic construct
  misc_feature 1..17: note = Oligonucleotide
  source 1..17: mol_type = other DNA
agccgaaaggggccttg

SEQ ID NO: 17692 - DNA, 17 bp, synthetic construct
  misc_feature 1..17: note = Oligonucleotide
  source 1..17: mol_type = other DNA
ctcagccgaaaggggcc

SEQ ID NO: 17693 - DNA, 17 bp, synthetic construct
  misc_feature 1..17: note = Oligonucleotide
  source 1..17: mol_type = other DNA
cctctcagccgaaaggg

SEQ ID NO: 17694 - DNA, 17 bp, synthetic construct
  misc_feature 1..17: note = Oligonucleotide
  source 1..17: mol_type = other DNA
tctcctctcagccgaaa

SEQ ID NO: 17695 - DNA, 17 bp, synthetic construct
  misc_feature 1..17: note = Oligonucleotide
  source 1..17: mol_type = other DNA
gcttctcctctcagccg

SEQ ID NO: 17696 - DNA, 17 bp, synthetic construct
  misc_feature 1..17: note = Oligonucleotide
  source 1..17: mol_type = other DNA
cctgcttctcctctcag

SEQ ID NO: 17697 - DNA, 17 bp, synthetic construct
  misc_feature 1..17: note = Oligonucleotide
  source 1..17: mol_type = other DNA
aagcctgcttctcctct

SEQ ID NO: 17698 - DNA, 17 bp, synthetic construct
  misc_feature 1..17: note = Oligonucleotide
  source 1..17: mol_type = other DNA
tagaagcctgcttctcc

SEQ ID NO: 17699 - DNA, 17 bp, synthetic construct
  misc_feature 1..17: note = Oligonucleotide
  source 1..17: mol_type = other DNA
aggtagaagcctgcttc

SEQ ID NO: 17700 - DNA, 17 bp, synthetic construct
  misc_feature 1..17: note = Oligonucleotide
  source 1..17: mol_type = other DNA
cagaggtagaagcctgc

SEQ ID NO: 17701 - DNA, 17 bp, synthetic construct
  misc_feature 1..17: note = Oligonucleotide
  source 1..17: mol_type = other DNA
cttcagaggtagaagcc

SEQ ID NO: 17702 - DNA, 17 bp, synthetic construct
  misc_feature 1..17: note = Oligonucleotide
  source 1..17: mol_type = other DNA
tagcttcagaggtagaa

SEQ ID NO: 17703 - DNA, 17 bp, synthetic construct
  misc_feature 1..17: note = Oligonucleotide
  source 1..17: mol_type = other DNA
ccctagcttcagaggta

SEQ ID NO: 17704 - DNA, 17 bp, synthetic construct
  misc_feature 1..17: note = Oligonucleotide
  source 1..17: mol_type = other DNA
tcaccctagcttcagag

SEQ ID NO: 17705 - DNA, 17 bp, synthetic construct
  misc_feature 1..17: note = Oligonucleotide
  source 1..17: mol_type = other DNA
ctctcaccctagcttca

SEQ ID NO: 17706 - DNA, 17 bp, synthetic construct
  misc_feature 1..17: note = Oligonucleotide
  source 1..17: mol_type = other DNA
tgcctctcaccctagct

SEQ ID NO: 17707 - DNA, 17 bp, synthetic construct
  misc_feature 1..17: note = Oligonucleotide
  source 1..17: mol_type = other DNA
aactgcctctcacccta

SEQ ID NO: 17708 - DNA, 17 bp, synthetic construct
  misc_feature 1..17: note = Oligonucleotide
  source 1..17: mol_type = other DNA
tcaaactgcctctcacc

SEQ ID NO: 17709 - DNA, 17 bp, synthetic construct
  misc_feature 1..17: note = Oligonucleotide
  source 1..17: mol_type = other DNA
cagtcaaactgcctctc

SEQ ID NO: 17710 - DNA, 17 bp, synthetic construct
  misc_feature 1..17: note = Oligonucleotide
  source 1..17: mol_type = other DNA
tcccagtcaaactgcct

SEQ ID NO: 17711 - DNA, 17 bp, synthetic construct
  misc_feature 1..17: note = Oligonucleotide
  source 1..17: mol_type = other DNA
acatcccagtcaaactg

SEQ ID NO: 17712 - DNA, 17 bp, synthetic construct
  misc_feature 1..17: note = Oligonucleotide
  source 1..17: mol_type = other DNA
gccacatcccagtcaaa

SEQ ID NO: 17713 - DNA, 17 bp, synthetic construct
  misc_feature 1..17: note = Oligonucleotide
  source 1..17: mol_type = other DNA
ggggccacatcccagtc

SEQ ID NO: 17714 - DNA, 17 bp, synthetic construct
  misc_feature 1..17: note = Oligonucleotide
  source 1..17: mol_type = other DNA
taaggggccacatccca

SEQ ID NO: 17715 - DNA, 17 bp, synthetic construct
  misc_feature 1..17: note = Oligonucleotide
  source 1..17: mol_type = other DNA
cattaaggggccacatc

SEQ ID NO: 17716 - DNA, 17 bp, synthetic construct
  misc_feature 1..17: note = Oligonucleotide
  source 1..17: mol_type = other DNA
taccattaaggggccac

SEQ ID NO: 17717 - DNA, 17 bp, synthetic construct
  misc_feature 1..17: note = Oligonucleotide
  source 1..17: mol_type = other DNA
agctaccattaaggggc

SEQ ID NO: 17718 - DNA, 17 bp, synthetic construct
  misc_feature 1..17: note = Oligonucleotide
  source 1..17: mol_type = other DNA
tgaagctaccattaagg

SEQ ID NO: 17719 - DNA, 17 bp, synthetic construct
  misc_feature 1..17: note = Oligonucleotide
  source 1..17: mol_type = other DNA
aaatgaagctaccatta

SEQ ID NO: 17720 - DNA, 17 bp, synthetic construct
  misc_feature 1..17: note = Oligonucleotide
  source 1..17: mol_type = other DNA
tacaaatgaagctacca

SEQ ID NO: 17721 - DNA, 17 bp, synthetic construct
  misc_feature 1..17: note = Oligonucleotide
  source 1..17: mol_type = other DNA
ccctacaaatgaagcta

SEQ ID NO: 17722 - DNA, 17 bp, synthetic construct
  misc_feature 1..17: note = Oligonucleotide
  source 1..17: mol_type = other DNA
ccaccctacaaatgaag

SEQ ID NO: 17723 - DNA, 17 bp, synthetic construct
  misc_feature 1..17: note = Oligonucleotide
  source 1..17: mol_type = other DNA
tggccaccctacaaatg

SEQ ID NO: 17724 - DNA, 17 bp, synthetic construct
  misc_feature 1..17: note = Oligonucleotide
  source 1..17: mol_type = other DNA
agttggccaccctacaa

SEQ ID NO: 17725 - DNA, 17 bp, synthetic construct
  misc_feature 1..17: note = Oligonucleotide
  source 1..17: mol_type = other DNA
aagagttggccacccta

SEQ ID NO: 17726 - DNA, 17 bp, synthetic construct
  misc_feature 1..17: note = Oligonucleotide
  source 1..17: mol_type = other DNA
caaaagagttggccacc

SEQ ID NO: 17727 - DNA, 17 bp, synthetic construct
  misc_feature 1..17: note = Oligonucleotide
  source 1..17: mol_type = other DNA
aaccaaaagagttggcc

SEQ ID NO: 17728 - DNA, 17 bp, synthetic construct
  misc_feature 1..17: note = Oligonucleotide
  source 1..17: mol_type = other DNA
gcaaaccaaaagagttg

SEQ ID NO: 17729 - DNA, 17 bp, synthetic construct
  misc_feature 1..17: note = Oligonucleotide
  source 1..17: mol_type = other DNA
caggcaaaccaaaagag

SEQ ID NO: 17730 - DNA, 17 bp, synthetic construct
  misc_feature 1..17: note = Oligonucleotide
  source 1..17: mol_type = other DNA
ttccaggcaaaccaaaa

SEQ ID NO: 17731 - DNA, 17 bp, synthetic construct
  misc_feature 1..17: note = Oligonucleotide
  source 1..17: mol_type = other DNA
tggttccaggcaaacca

SEQ ID NO: 17732 - DNA, 17 bp, synthetic construct
  misc_feature 1..17: note = Oligonucleotide
  source 1..17: mol_type = other DNA
ccttggttccaggcaaa

SEQ ID NO: 17733 - DNA, 17 bp, synthetic construct
  misc_feature 1..17: note = Oligonucleotide
  source 1..17: mol_type = other DNA
ctgccttggttccaggc

SEQ ID NO: 17734 - DNA, 17 bp, synthetic construct
  misc_feature 1..17: note = Oligonucleotide
  source 1..17: mol_type = other DNA
gaactgccttggttcca

SEQ ID NO: 17735 - DNA, 17 bp, synthetic construct
  misc_feature 1..17: note = Oligonucleotide
  source 1..17: mol_type = other DNA
caggaactgccttggtt

SEQ ID NO: 17736 - DNA, 17 bp, synthetic construct
  misc_feature 1..17: note = Oligonucleotide
  source 1..17: mol_type = other DNA
ttccaggaactgccttg

SEQ ID NO: 17737 - DNA, 17 bp, synthetic construct
  misc_feature 1..17: note = Oligonucleotide
  source 1..17: mol_type = other DNA
atgttccaggaactgcc

SEQ ID NO: 17738 - DNA, 17 bp, synthetic construct
  misc_feature 1..17: note = Oligonucleotide
  source 1..17: mol_type = other DNA
cctatgttccaggaact

SEQ ID NO: 17739 - DNA, 17 bp, synthetic construct
  misc_feature 1..17: note = Oligonucleotide
  source 1..17: mol_type = other DNA
aatcctatgttccagga

SEQ ID NO: 17740 - DNA, 17 bp, synthetic construct
  misc_feature 1..17: note = Oligonucleotide
  source 1..17: mol_type = other DNA
ctaaatcctatgttcca

SEQ ID NO: 17741 - DNA, 17 bp, synthetic construct
  misc_feature 1..17: note = Oligonucleotide
  source 1..17: mol_type = other DNA
aaactaaatcctatgtt

SEQ ID NO: 17742 - DNA, 17 bp, synthetic construct
  misc_feature 1..17: note = Oligonucleotide
  source 1..17: mol_type = other DNA
ttaaaactaaatcctat

SEQ ID NO: 17743 - DNA, 17 bp, synthetic construct
  misc_feature 1..17: note = Oligonucleotide
  source 1..17: mol_type = other DNA
atgttaaaactaaatcc

SEQ ID NO: 17744 - DNA, 17 bp, synthetic construct
  misc_feature 1..17: note = Oligonucleotide
  source 1..17: mol_type = other DNA
cagatgttaaaactaaa

SEQ ID NO: 17745 - DNA, 17 bp, synthetic construct
  misc_feature 1..17: note = Oligonucleotide
  source 1..17: mol_type = other DNA
ttccagatgttaaaact

SEQ ID NO: 17746 - DNA, 17 bp, synthetic construct
  misc_feature 1..17: note = Oligonucleotide
  source 1..17: mol_type = other DNA
gctttccagatgttaaa

SEQ ID NO: 17747 - DNA, 17 bp, synthetic construct
  misc_feature 1..17: note = Oligonucleotide
  source 1..17: mol_type = other DNA
caggctttccagatgtt

SEQ ID NO: 17748 - DNA, 17 bp, synthetic construct
  misc_feature 1..17: note = Oligonucleotide
  source 1..17: mol_type = other DNA
gcccaggctttccagat

SEQ ID NO: 17749 - DNA, 17 bp, synthetic construct
  misc_feature 1..17: note = Oligonucleotide
  source 1..17: mol_type = other DNA
tttgcccaggctttcca

SEQ ID NO: 17750 - DNA, 17 bp, synthetic construct
  misc_feature 1..17: note = Oligonucleotide
  source 1..17: mol_type = other DNA
cagtttgcccaggcttt

SEQ ID NO: 17751 - DNA, 17 bp, synthetic construct
  misc_feature 1..17: note = Oligonucleotide
  source 1..17: mol_type = other DNA
gtccagtttgcccaggc

SEQ ID NO: 17752 - DNA, 17 bp, synthetic construct
  misc_feature 1..17: note = Oligonucleotide
  source 1..17: mol_type = other DNA
cttgtccagtttgccca

SEQ ID NO: 17753 - DNA, 17 bp, synthetic construct
  misc_feature 1..17: note = Oligonucleotide
  source 1..17: mol_type = other DNA
caacttgtccagtttgc

SEQ ID NO: 17754 - DNA, 17 bp, synthetic construct
  misc_feature 1..17: note = Oligonucleotide
  source 1..17: mol_type = other DNA
gaccaacttgtccagtt

SEQ ID NO: 17755 - DNA, 17 bp, synthetic construct
  misc_feature 1..17: note = Oligonucleotide
  source 1..17: mol_type = other DNA
ggtgaccaacttgtcca

SEQ ID NO: 17756 - DNA, 17 bp, synthetic construct
  misc_feature 1..17: note = Oligonucleotide
  source 1..17: mol_type = other DNA
ctgggtgaccaacttgt

SEQ ID NO: 17757 - DNA, 17 bp, synthetic construct
  misc_feature 1..17: note = Oligonucleotide
  source 1..17: mol_type = other DNA
cagctgggtgaccaact

SEQ ID NO: 17758 - DNA, 17 bp, synthetic construct
  misc_feature 1..17: note = Oligonucleotide
  source 1..17: mol_type = other DNA
agccagctgggtgacca

SEQ ID NO: 17759 - DNA, 17 bp, synthetic construct
  misc_feature 1..17: note = Oligonucleotide
  source 1..17: mol_type = other DNA
aacagccagctgggtga

SEQ ID NO: 17760 - DNA, 17 bp, synthetic construct
  misc_feature 1..17: note = Oligonucleotide
  source 1..17: mol_type = other DNA
ctgaacagccagctggg

SEQ ID NO: 17761 - DNA, 17 bp, synthetic construct
  misc_feature 1..17: note = Oligonucleotide
  source 1..17: mol_type = other DNA
actctgaacagccagct

SEQ ID NO: 17762 - DNA, 17 bp, synthetic construct
  misc_feature 1..17: note = Oligonucleotide
  source 1..17: mol_type = other DNA
aagactctgaacagcca

SEQ ID NO: 17763 - DNA, 17 bp, synthetic construct
  misc_feature 1..17: note = Oligonucleotide
  source 1..17: mol_type = other DNA
ggtaagactctgaacag

SEQ ID NO: 17764 - DNA, 17 bp, synthetic construct
  misc_feature 1..17: note = Oligonucleotide
  source 1..17: mol_type = other DNA
ataggtaagactctgaa

SEQ ID NO: 17765 - DNA, 17 bp, synthetic construct
  misc_feature 1..17: note = Oligonucleotide
  source 1..17: mol_type = other DNA
ggcataggtaagactct

SEQ ID NO: 17766 - DNA, 17 bp, synthetic construct
  misc_feature 1..17: note = Oligonucleotide
  source 1..17: mol_type = other DNA
gggggcataggtaagac

SEQ ID NO: 17767 - DNA, 17 bp, synthetic construct
  misc_feature 1..17: note = Oligonucleotide
  source 1..17: mol_type = other DNA
taagggggcataggtaa

SEQ ID NO: 17768 - DNA, 17 bp, synthetic construct
  misc_feature 1..17: note = Oligonucleotide
  source 1..17: mol_type = other DNA
gggtaagggggcatagg

SEQ ID NO: 17769 - DNA, 17 bp, synthetic construct
  misc_feature 1..17: note = Oligonucleotide
  source 1..17: mol_type = other DNA
ctggggtaagggggcat

SEQ ID NO: 17770 - DNA, 17 bp, synthetic construct
  misc_feature 1..17: note = Oligonucleotide
  source 1..17: mol_type = other DNA
gtactggggtaaggggg

SEQ ID NO: 17771 - DNA, 17 bp, synthetic construct
  misc_feature 1..17: note = Oligonucleotide
  source 1..17: mol_type = other DNA
atggtactggggtaagg

SEQ ID NO: 17772 - DNA, 17 bp, synthetic construct
  misc_feature 1..17: note = Oligonucleotide
  source 1..17: mol_type = other DNA
tgaatggtactggggta

SEQ ID NO: 17773 - DNA, 17 bp, synthetic construct
  misc_feature 1..17: note = Oligonucleotide
  source 1..17: mol_type = other DNA
ccctgaatggtactggg

SEQ ID NO: 17774 - DNA, 17 bp, synthetic construct
  misc_feature 1..17: note = Oligonucleotide
  source 1..17: mol_type = other DNA
tttccctgaatggtact

SEQ ID NO: 17775 - DNA, 17 bp, synthetic construct
  misc_feature 1..17: note = Oligonucleotide
  source 1..17: mol_type = other DNA
gggtttccctgaatggt

SEQ ID NO: 17776 - DNA, 17 bp, synthetic construct
  misc_feature 1..17: note = Oligonucleotide
  source 1..17: mol_type = other DNA
tgggggtttccctgaat

SEQ ID NO: 17777 - DNA, 17 bp, synthetic construct
  misc_feature 1..17: note = Oligonucleotide
  source 1..17: mol_type = other DNA
agctgggggtttccctg

SEQ ID NO: 17778 - DNA, 17 bp, synthetic construct
  misc_feature 1..17: note = Oligonucleotide
  source 1..17: mol_type = other DNA
catagctgggggtttcc

SEQ ID NO: 17779 - DNA, 17 bp, synthetic construct
  misc_feature 1..17: note = Oligonucleotide
  source 1..17: mol_type = other DNA
tcgcatagctgggggtt

SEQ ID NO: 17780 - DNA, 17 bp, synthetic construct
  misc_feature 1..17: note = Oligonucleotide
  source 1..17: mol_type = other DNA
gcttcgcatagctgggg

SEQ ID NO: 17781 - DNA, 17 bp, synthetic construct
  misc_feature 1..17: note = Oligonucleotide
  source 1..17: mol_type = other DNA
gccgcttcgcatagctg

SEQ ID NO: 17782 - DNA, 17 bp, synthetic construct
  misc_feature 1..17: note = Oligonucleotide
  source 1..17: mol_type = other DNA
gccgccgcttcgcatag

SEQ ID NO: 17783 - DNA, 17 bp, synthetic construct
  misc_feature 1..17: note = Oligonucleotide
  source 1..17: mol_type = other DNA
gtcgccgccgcttcgca

SEQ ID NO: 17784 - DNA, 17 bp, synthetic construct
  misc_feature 1..17: note = Oligonucleotide
  source 1..17: mol_type = other DNA
ccagtcgccgccgcttc

SEQ ID NO: 17785 - DNA, 17 bp, synthetic construct
  misc_feature 1..17: note = Oligonucleotide
  source 1..17: mol_type = other DNA
cagccagtcgccgccgc

SEQ ID NO: 17786 - DNA, 17 bp, synthetic construct
  misc_feature 1..17: note = Oligonucleotide
  source 1..17: mol_type = other DNA
ggccagccagtcgccgc

SEQ ID NO: 17787 - DNA, 17 bp, synthetic construct
  misc_feature 1..17: note = Oligonucleotide
  source 1..17: mol_type = other DNA
tggggccagccagtcgc

SEQ ID NO: 17788 - DNA, 17 bp, synthetic construct
  misc_feature 1..17: note = Oligonucleotide
  source 1..17: mol_type = other DNA
cactggggccagccagt

SEQ ID NO: 17789 - DNA, 17 bp, synthetic construct
  misc_feature 1..17: note = Oligonucleotide
  source 1..17: mol_type = other DNA
agccactggggccagcc

SEQ ID NO: 17790 - DNA, 17 bp, synthetic construct
  misc_feature 1..17: note = Oligonucleotide
  source 1..17: mol_type = other DNA
ccaagccactggggcca

SEQ ID NO: 17791 - DNA, 17 bp, synthetic construct
  misc_feature 1..17: note = Oligonucleotide
  source 1..17: mol_type = other DNA
atgccaagccactgggg

SEQ ID NO: 17792 - DNA, 17 bp, synthetic construct
  misc_feature 1..17: note = Oligonucleotide
  source 1..17: mol_type = other DNA
gggatgccaagccactg

SEQ ID NO: 17793 - DNA, 17 bp, synthetic construct
  misc_feature 1..17: note = Oligonucleotide
  source 1..17: mol_type = other DNA
gaggggatgccaagcca

SEQ ID NO: 17794 - DNA, 17 bp, synthetic construct
  misc_feature 1..17: note = Oligonucleotide
  source 1..17: mol_type = other DNA
gccgaggggatgccaag

SEQ ID NO: 17795 - DNA, 17 bp, synthetic construct
  misc_feature 1..17: note = Oligonucleotide
  source 1..17: mol_type = other DNA
gaggccgaggggatgcc

SEQ ID NO: 17796 - DNA, 17 bp, synthetic construct
  misc_feature 1..17: note = Oligonucleotide
  source 1..17: mol_type = other DNA
gcagaggccgaggggat

SEQ ID NO: 17797 - DNA, 17 bp, synthetic construct
  misc_feature 1..17: note = Oligonucleotide
  source 1..17: mol_type = other DNA
gctgcagaggccgaggg

SEQ ID NO: 17798 - DNA, 17 bp, synthetic construct
  misc_feature 1..17: note = Oligonucleotide
  source 1..17: mol_type = other DNA
agcgctgcagaggccga

SEQ ID NO: 17799 - DNA, 17 bp, synthetic construct
  misc_feature 1..17: note = Oligonucleotide
  source 1..17: mol_type = other DNA
ctgagcgctgcagaggc

SEQ ID NO: 17800 - DNA, 17 bp, synthetic construct
  misc_feature 1..17: note = Oligonucleotide
  source 1..17: mol_type = other DNA
tggctgagcgctgcaga

SEQ ID NO: 17801 - DNA, 17 bp, synthetic construct
  misc_feature 1..17: note = Oligonucleotide
  source 1..17: mol_type = other DNA
cgctggctgagcgctgc

SEQ ID NO: 17802 - DNA, 17 bp, synthetic construct
  misc_feature 1..17: note = Oligonucleotide
  source 1..17: mol_type = other DNA
tatcgctggctgagcgc

SEQ ID NO: 17803 - DNA, 17 bp, synthetic construct
  misc_feature 1..17: note = Oligonucleotide
  source 1..17: mol_type = other DNA
tgatatcgctggctgag

SEQ ID NO: 17804 - DNA, 17 bp, synthetic construct
  misc_feature 1..17: note = Oligonucleotide
  source 1..17: mol_type = other DNA
ggttgatatcgctggct

SEQ ID NO: 17805 - DNA, 17 bp, synthetic construct
  misc_feature 1..17: note = Oligonucleotide
  source 1..17: mol_type = other DNA
tcaggttgatatcgctg

SEQ ID NO: 17806 - DNA, 17 bp, synthetic construct
  misc_feature 1..17: note = Oligonucleotide
  source 1..17: mol_type = other DNA
ccttcaggttgatatcg

SEQ ID NO: 17807 - DNA, 17 bp, synthetic construct
  misc_feature 1..17: note = Oligonucleotide
  source 1..17: mol_type = other DNA
cccccttcaggttgata

SEQ ID NO: 17808 - DNA, 17 bp, synthetic construct
  misc_feature 1..17: note = Oligonucleotide
  source 1..17: mol_type = other DNA
cctcccccttcaggttg

SEQ ID NO: 17809 - DNA, 17 bp, synthetic construct
  misc_feature 1..17: note = Oligonucleotide
  source 1..17: mol_type = other DNA
gtgcctcccccttcagg

SEQ ID NO: 17810 - DNA, 17 bp, synthetic construct
  misc_feature 1..17: note = Oligonucleotide
  source 1..17: mol_type = other DNA
gctgtgcctcccccttc

SEQ ID NO: 17811 - DNA, 17 bp, synthetic construct
  misc_feature 1..17: note = Oligonucleotide
  source 1..17: mol_type = other DNA
ctggctgtgcctccccc

SEQ ID NO: 17812 - DNA, 17 bp, synthetic construct
  misc_feature 1..17: note = Oligonucleotide
  source 1..17: mol_type = other DNA
ctgctggctgtgcctcc

SEQ ID NO: 17813 - DNA, 17 bp, synthetic construct
  misc_feature 1..17: note = Oligonucleotide
  source 1..17: mol_type = other DNA
aagctgctggctgtgcc

SEQ ID NO: 17814 - DNA, 17 bp, synthetic construct
  misc_feature 1..17: note = Oligonucleotide
  source 1..17: mol_type = other DNA
gagaagctgctggctgt

SEQ ID NO: 17815 - DNA, 17 bp, synthetic construct
  misc_feature 1..17: note = Oligonucleotide
  source 1..17: mol_type = other DNA
caggagaagctgctggc

SEQ ID NO: 17816 - DNA, 17 bp, synthetic construct
  misc_feature 1..17: note = Oligonucleotide
  source 1..17: mol_type = other DNA
gtccaggagaagctgct

SEQ ID NO: 17817 - DNA, 17 bp, synthetic construct
  misc_feature 1..17: note = Oligonucleotide
  source 1..17: mol_type = other DNA
agggtccaggagaagct

SEQ ID NO: 17818 - DNA, 17 bp, synthetic construct
  misc_feature 1..17: note = Oligonucleotide
  source 1..17: mol_type = other DNA
gcgagggtccaggagaa

SEQ ID NO: 17819 - DNA, 17 bp, synthetic construct
  misc_feature 1..17: note = Oligonucleotide
  source 1..17: mol_type = other DNA
tcagcgagggtccagga

SEQ ID NO: 17820 - DNA, 17 bp, synthetic construct
  misc_feature 1..17: note = Oligonucleotide
  source 1..17: mol_type = other DNA
ttctcagcgagggtcca

SEQ ID NO: 17821 - DNA, 17 bp, synthetic construct
  misc_feature 1..17: note = Oligonucleotide
  source 1..17: mol_type = other DNA
ggcttctcagcgagggt

SEQ ID NO: 17822 - DNA, 17 bp, synthetic construct
  misc_feature 1..17: note = Oligonucleotide
  source 1..17: mol_type = other DNA
ggaggcttctcagcgag

SEQ ID NO: 17823 - DNA, 17 bp, synthetic construct
  misc_feature 1..17: note = Oligonucleotide
  source 1..17: mol_type = other DNA
gggggaggcttctcagc

SEQ ID NO: 17824 - DNA, 17 bp, synthetic construct
  misc_feature 1..17: note = Oligonucleotide
  source 1..17: mol_type = other DNA
ggtgggggaggcttctc

SEQ ID NO: 17825 - DNA, 17 bp, synthetic construct
  misc_feature 1..17: note = Oligonucleotide
  source 1..17: mol_type = other DNA
gctggtgggggaggctt

SEQ ID NO: 17826 - DNA, 17 bp, synthetic construct
  misc_feature 1..17: note = Oligonucleotide
  source 1..17: mol_type = other DNA
gcagctggtgggggagg

SEQ ID NO: 17827 - DNA, 17 bp, synthetic construct
  misc_feature 1..17: note = Oligonucleotide
  source 1..17: mol_type = other DNA
gcagcagctggtggggg

SEQ ID NO: 17828 - DNA, 17 bp, synthetic construct
  misc_feature 1..17: note = Oligonucleotide
  source 1..17: mol_type = other DNA
ggagcagcagctggtgg

SEQ ID NO: 17829 - DNA, 17 bp, synthetic construct
  misc_feature 1..17: note = Oligonucleotide
  source 1..17: mol_type = other DNA
gctggagcagcagctgg

SEQ ID NO: 17830 - DNA, 17 bp, synthetic construct
  misc_feature 1..17: note = Oligonucleotide
  source 1..17: mol_type = other DNA
gccgctggagcagcagc

SEQ ID NO: 17831 - DNA, 17 bp, synthetic construct
  misc_feature 1..17: note = Oligonucleotide
  source 1..17: mol_type = other DNA
gcagccgctggagcagc

SEQ ID NO: 17832 - DNA, 17 bp, synthetic construct
  misc_feature 1..17: note = Oligonucleotide
  source 1..17: mol_type = other DNA
cttgcagccgctggagc

SEQ ID NO: 17833 - DNA, 17 bp, synthetic construct
  misc_feature 1..17: note = Oligonucleotide
  source 1..17: mol_type = other DNA
cctcttgcagccgctgg

SEQ ID NO: 17834 - DNA, 17 bp, synthetic construct
  misc_feature 1..17: note = Oligonucleotide
  source 1..17: mol_type = other DNA
tctcctcttgcagccgc

SEQ ID NO: 17835 - DNA, 17 bp, synthetic construct
  misc_feature 1..17: note = Oligonucleotide
  source 1..17: mol_type = other DNA
ctttctcctcttgcagc

SEQ ID NO: 17836 - DNA, 17 bp, synthetic construct
  misc_feature 1..17: note = Oligonucleotide
  source 1..17: mol_type = other DNA
gatctttctcctcttgc

SEQ ID NO: 17837 - DNA, 17 bp, synthetic construct
  misc_feature 1..17: note = Oligonucleotide
  source 1..17: mol_type = other DNA
cacgatctttctcctct

SEQ ID NO: 17838 - DNA, 17 bp, synthetic construct
  misc_feature 1..17: note = Oligonucleotide
  source 1..17: mol_type = other DNA
ggtcacgatctttctcc

SEQ ID NO: 17839 - DNA, 17 bp, synthetic construct
  misc_feature 1..17: note = Oligonucleotide
  source 1..17: mol_type = other DNA
cccggtcacgatctttc

SEQ ID NO: 17840 - DNA, 17 bp, synthetic construct
  misc_feature 1..17: note = Oligonucleotide
  source 1..17: mol_type = other DNA
catcccggtcacgatct

SEQ ID NO: 17841 - DNA, 17 bp, synthetic construct
  misc_feature 1..17: note = Oligonucleotide
  source 1..17: mol_type = other DNA
cggcatcccggtcacga

SEQ ID NO: 17842 - DNA, 17 bp, synthetic construct
  misc_feature 1..17: note = Oligonucleotide
  source 1..17: mol_type = other DNA
ggtcggcatcccggtca

SEQ ID NO: 17843 - DNA, 17 bp, synthetic construct
  misc_feature 1..17: note = Oligonucleotide
  source 1..17: mol_type = other DNA
cctggtcggcatcccgg

SEQ ID NO: 17844 - DNA, 17 bp, synthetic construct
  misc_feature 1..17: note = Oligonucleotide
  source 1..17: mol_type = other DNA
tctcctggtcggcatcc

SEQ ID NO: 17845 - DNA, 17 bp, synthetic construct
  misc_feature 1..17: note = Oligonucleotide
  source 1..17: mol_type = other DNA
tgctctcctggtcggca

SEQ ID NO: 17846 - DNA, 17 bp, synthetic construct
  misc_feature 1..17: note = Oligonucleotide
  source 1..17: mol_type = other DNA
tgttgctctcctggtcg

SEQ ID NO: 17847 - DNA, 17 bp, synthetic construct
  misc_feature 1..17: note = Oligonucleotide
  source 1..17: mol_type = other DNA
tgatgttgctctcctgg

SEQ ID NO: 17848 - DNA, 17 bp, synthetic construct
  misc_feature 1..17: note = Oligonucleotide
  source 1..17: mol_type = other DNA
cactgatgttgctctcc

SEQ ID NO: 17849 - DNA, 17 bp, synthetic construct
  misc_feature 1..17: note = Oligonucleotide
  source 1..17: mol_type = other DNA
ggccactgatgttgctc

SEQ ID NO: 17850 - DNA, 17 bp, synthetic construct
  misc_feature 1..17: note = Oligonucleotide
  source 1..17: mol_type = other DNA
aagggccactgatgttg

SEQ ID NO: 17851 - DNA, 17 bp, synthetic construct
  misc_feature 1..17: note = Oligonucleotide
  source 1..17: mol_type = other DNA
ctaaagggccactgatg

SEQ ID NO: 17852 - DNA, 17 bp, synthetic construct
  misc_feature 1..17: note = Oligonucleotide
  source 1..17: mol_type = other DNA
ctgctaaagggccactg

SEQ ID NO: 17853 - DNA, 17 bp, synthetic construct
  misc_feature 1..17: note = Oligonucleotide
  source 1..17: mol_type = other DNA
tgcctgctaaagggcca

SEQ ID NO: 17854 - DNA, 17 bp, synthetic construct
  misc_feature 1..17: note = Oligonucleotide
  source 1..17: mol_type = other DNA
ccctgcctgctaaaggg

SEQ ID NO: 17855 - DNA, 17 bp, synthetic construct
  misc_feature 1..17: note = Oligonucleotide
  source 1..17: mol_type = other DNA
cggccctgcctgctaaa

SEQ ID NO: 17856 - DNA, 17 bp, synthetic construct
  misc_feature 1..17: note = Oligonucleotide
  source 1..17: mol_type = other DNA
ggccggccctgcctgct

SEQ ID NO: 17857 - DNA, 17 bp, synthetic construct
  misc_feature 1..17: note = Oligonucleotide
  source 1..17: mol_type = other DNA
tttggccggccctgcct

SEQ ID NO: 17858 - DNA, 17 bp, synthetic construct
  misc_feature 1..17: note = Oligonucleotide
  source 1..17: mol_type = other DNA
tgctttggccggccctg

SEQ ID NO: 17859 - DNA, 17 bp, synthetic construct
  misc_feature 1..17: note = Oligonucleotide
  source 1..17: mol_type = other DNA
tcttgctttggccggcc

SEQ ID NO: 17860 - DNA, 17 bp, synthetic construct
  misc_feature 1..17: note = Oligonucleotide
  source 1..17: mol_type = other DNA
tgatcttgctttggccg

SEQ ID NO: 17861 - DNA, 17 bp, synthetic construct
  misc_feature 1..17: note = Oligonucleotide
  source 1..17: mol_type = other DNA
acctgatcttgctttgg

SEQ ID NO: 17862 - DNA, 17 bp, synthetic construct
  misc_feature 1..17: note = Oligonucleotide
  source 1..17: mol_type = other DNA
cctacctgatcttgctt

SEQ ID NO: 17863 - DNA, 17 bp, synthetic construct
  misc_feature 1..17: note = Oligonucleotide
  source 1..17: mol_type = other DNA
cctcctacctgatcttg

SEQ ID NO: 17864 - DNA, 17 bp, synthetic construct
  misc_feature 1..17: note = Oligonucleotide
  source 1..17: mol_type = other DNA
ccccctcctacctgatc

SEQ ID NO: 17865 - DNA, 17 bp, synthetic construct
  misc_feature 1..17: note = Oligonucleotide
  source 1..17: mol_type = other DNA
cagccccctcctacctg

SEQ ID NO: 17866 - DNA, 17 bp, synthetic construct
  misc_feature 1..17: note = Oligonucleotide
  source 1..17: mol_type = other DNA
tgccagccccctcctac

SEQ ID NO: 17867 - DNA, 17 bp, synthetic construct
  misc_feature 1..17: note = Oligonucleotide
  source 1..17: mol_type = other DNA
gcctgccagccccctcc

SEQ ID NO: 17868 - DNA, 17 bp, synthetic construct
  misc_feature 1..17: note = Oligonucleotide
  source 1..17: mol_type = other DNA
agggcctgccagccccc

SEQ ID NO: 17869 - DNA, 17 bp, synthetic construct
  misc_feature 1..17: note = Oligonucleotide
  source 1..17: mol_type = other DNA
tccagggcctgccagcc

SEQ ID NO: 17870 - DNA, 17 bp, synthetic construct
  misc_feature 1..17: note = Oligonucleotide
  source 1..17: mol_type = other DNA
ccctccagggcctgcca

SEQ ID NO: 17871 - DNA, 17 bp, synthetic construct
  misc_feature 1..17: note = Oligonucleotide
  source 1..17: mol_type = other DNA
aacccctccagggcctg

SEQ ID NO: 17872 - DNA, 17 bp, synthetic construct
  misc_feature 1..17: note = Oligonucleotide
  source 1..17: mol_type = other DNA
cccaacccctccagggc

SEQ ID NO: 17873 - DNA, 17 bp, synthetic construct
  misc_feature 1..17: note = Oligonucleotide
  source 1..17: mol_type = other DNA
cctcccaacccctccag

SEQ ID NO: 17874 - DNA, 17 bp, synthetic construct
  misc_feature 1..17: note = Oligonucleotide
  source 1..17: mol_type = other DNA
caccctcccaacccctc

SEQ ID NO: 17875 - DNA, 17 bp, synthetic construct
  misc_feature 1..17: note = Oligonucleotide
  source 1..17: mol_type = other DNA
ccccaccctcccaaccc

SEQ ID NO: 17876 - DNA, 17 bp, synthetic construct
  misc_feature 1..17: note = Oligonucleotide
  source 1..17: mol_type = other DNA
gcaccccaccctcccaa

SEQ ID NO: 17877 - DNA, 17 bp, synthetic construct
  misc_feature 1..17: note = Oligonucleotide
  source 1..17: mol_type = other DNA
ccggcaccccaccctcc

SEQ ID NO: 17878 - DNA, 17 bp, synthetic construct
  misc_feature 1..17: note = Oligonucleotide
  source 1..17: mol_type = other DNA
gtcccggcaccccaccc

SEQ ID NO: 17879 - DNA, 17 bp, synthetic construct
  misc_feature 1..17: note = Oligonucleotide
  source 1..17: mol_type = other DNA
caggtcccggcacccca

SEQ ID NO: 17880 - DNA, 17 bp, synthetic construct
  misc_feature 1..17: note = Oligonucleotide
  source 1..17: mol_type = other DNA
gctcaggtcccggcacc

SEQ ID NO: 17881 - DNA, 17 bp, synthetic construct
  misc_feature 1..17: note = Oligonucleotide
  source 1..17: mol_type = other DNA
ctggctcaggtcccggc

SEQ ID NO: 17882 - DNA, 17 bp, synthetic construct
  misc_feature 1..17: note = Oligonucleotide
  source 1..17: mol_type = other DNA
ctcctggctcaggtccc

SEQ ID NO: 17883 - DNA, 17 bp, synthetic construct
  misc_feature 1..17: note = Oligonucleotide
  source 1..17: mol_type = other DNA
ctcctcctggctcaggt

SEQ ID NO: 17884 - DNA, 17 bp, synthetic construct
  misc_feature 1..17: note = Oligonucleotide
  source 1..17: mol_type = other DNA
tggctcctcctggctca

SEQ ID NO: 17885 - DNA, 17 bp, synthetic construct
  misc_feature 1..17: note = Oligonucleotide
  source 1..17: mol_type = other DNA
tgctggctcctcctggc

SEQ ID NO: 17886 - DNA, 17 bp, synthetic construct
  misc_feature 1..17: note = Oligonucleotide
  source 1..17: mol_type = other DNA
cggtgctggctcctcct

SEQ ID NO: 17887 - DNA, 17 bp, synthetic construct
  misc_feature 1..17: note = Oligonucleotide
  source 1..17: mol_type = other DNA
tcccggtgctggctcct

SEQ ID NO: 17888 - DNA, 17 bp, synthetic construct
  misc_feature 1..17: note = Oligonucleotide
  source 1..17: mol_type = other DNA
gcctcccggtgctggct

SEQ ID NO: 17889 - DNA, 17 bp, synthetic construct
  misc_feature 1..17: note = Oligonucleotide
  source 1..17: mol_type = other DNA
tctgcctcccggtgctg

SEQ ID NO: 17890 - DNA, 17 bp, synthetic construct
  misc_feature 1..17: note = Oligonucleotide
  source 1..17: mol_type = other DNA
ctctctgcctcccggtg

SEQ ID NO: 17891 - DNA, 17 bp, synthetic construct
  misc_feature 1..17: note = Oligonucleotide
  source 1..17: mol_type = other DNA
cctctctctgcctcccg

SEQ ID NO: 17892 - DNA, 17 bp, synthetic construct
  misc_feature 1..17: note = Oligonucleotide
  source 1..17: mol_type = other DNA
aggcctctctctgcctc

SEQ ID NO: 17893 - DNA, 17 bp, synthetic construct
  misc_feature 1..17: note = Oligonucleotide
  source 1..17: mol_type = other DNA
accaggcctctctctgc

SEQ ID NO: 17894 - DNA, 17 bp, synthetic construct
  misc_feature 1..17: note = Oligonucleotide
  source 1..17: mol_type = other DNA
accaccaggcctctctc

SEQ ID NO: 17895 - DNA, 17 bp, synthetic construct
  misc_feature 1..17: note = Oligonucleotide
  source 1..17: mol_type = other DNA
ggcaccaccaggcctct

SEQ ID NO: 17896 - DNA, 17 bp, synthetic construct
  misc_feature 1..17: note = Oligonucleotide
  source 1..17: mol_type = other DNA
ctaggcaccaccaggcc

SEQ ID NO: 17897 - DNA, 17 bp, synthetic construct
  misc_feature 1..17: note = Oligonucleotide
  source 1..17: mol_type = other DNA
gtgctaggcaccaccag

SEQ ID NO: 17898 - DNA, 17 bp, synthetic construct
  misc_feature 1..17: note = Oligonucleotide
  source 1..17: mol_type = other DNA
caggtgctaggcaccac

SEQ ID NO: 17899 - DNA, 17 bp, synthetic construct
  misc_feature 1..17: note = Oligonucleotide
  source 1..17: mol_type = other DNA
acacaggtgctaggcac

SEQ ID NO: 17900 - DNA, 17 bp, synthetic construct
  misc_feature 1..17: note = Oligonucleotide
  source 1..17: mol_type = other DNA
actacacaggtgctagg

SEQ ID NO: 17901 - DNA, 17 bp, synthetic construct
  misc_feature 1..17: note = Oligonucleotide
  source 1..17: mol_type = other DNA
atcactacacaggtgct

SEQ ID NO: 17902 - DNA, 17 bp, synthetic construct
  misc_feature 1..17: note = Oligonucleotide
  source 1..17: mol_type = other DNA
cccatcactacacaggt

SEQ ID NO: 17903 - DNA, 17 bp, synthetic construct
  misc_feature 1..17: note = Oligonucleotide
  source 1..17: mol_type = other DNA
tagcccatcactacaca

SEQ ID NO: 17904 - DNA, 17 bp, synthetic construct
  misc_feature 1..17: note = Oligonucleotide
  source 1..17: mol_type = other DNA
ccctagcccatcactac

SEQ ID NO: 17905 - DNA, 17 bp, synthetic construct
  misc_feature 1..17: note = Oligonucleotide
  source 1..17: mol_type = other DNA
aagccctagcccatcac

SEQ ID NO: 17906 - DNA, 17 bp, synthetic construct
  misc_feature 1..17: note = Oligonucleotide
  source 1..17: mol_type = other DNA
aggaagccctagcccat

SEQ ID NO: 17907 - DNA, 17 bp, synthetic construct
  misc_feature 1..17: note = Oligonucleotide
  source 1..17: mol_type = other DNA
accaggaagccctagcc

SEQ ID NO: 17908 - DNA, 17 bp, synthetic construct
  misc_feature 1..17: note = Oligonucleotide
  source 1..17: mol_type = other DNA
ccaaccaggaagcccta

SEQ ID NO: 17909 - DNA, 17 bp, synthetic construct
  misc_feature 1..17: note = Oligonucleotide
  source 1..17: mol_type = other DNA
tccccaaccaggaagcc

SEQ ID NO: 17910 - DNA, 17 bp, synthetic construct
  misc_feature 1..17: note = Oligonucleotide
  source 1..17: mol_type = other DNA
ccttccccaaccaggaa

SEQ ID NO: 17911 - DNA, 17 bp, synthetic construct
  misc_feature 1..17: note = Oligonucleotide
  source 1..17: mol_type = other DNA
ttcccttccccaaccag

SEQ ID NO: 17912 - DNA, 17 bp, synthetic construct
  misc_feature 1..17: note = Oligonucleotide
  source 1..17: mol_type = other DNA
ttcttcccttccccaac

SEQ ID NO: 17913 - DNA, 17 bp, synthetic construct
  misc_feature 1..17: note = Oligonucleotide
  source 1..17: mol_type = other DNA
gccttcttcccttcccc

SEQ ID NO: 17914 - DNA, 17 bp, synthetic construct
  misc_feature 1..17: note = Oligonucleotide
  source 1..17: mol_type = other DNA
gatgccttcttcccttc

SEQ ID NO: 17915 - DNA, 17 bp, synthetic construct
  misc_feature 1..17: note = Oligonucleotide
  source 1..17: mol_type = other DNA
agagatgccttcttccc

SEQ ID NO: 17916 - DNA, 17 bp, synthetic construct
  misc_feature 1..17: note = Oligonucleotide
  source 1..17: mol_type = other DNA
tccagagatgccttctt

SEQ ID NO: 17917 - DNA, 17 bp, synthetic construct
  misc_feature 1..17: note = Oligonucleotide
  source 1..17: mol_type = other DNA
acctccagagatgcctt

SEQ ID NO: 17918 - DNA, 17 bp, synthetic construct
  misc_feature 1..17: note = Oligonucleotide
  source 1..17: mol_type = other DNA
cccacctccagagatgc

SEQ ID NO: 17919 - DNA, 17 bp, synthetic construct
  misc_feature 1..17: note = Oligonucleotide
  source 1..17: mol_type = other DNA
gtccccacctccagaga

SEQ ID NO: 17920 - DNA, 17 bp, synthetic construct
  misc_feature 1..17: note = Oligonucleotide
  source 1..17: mol_type = other DNA
cctgtccccacctccag

SEQ ID NO: 17921 - DNA, 17 bp, synthetic construct
  misc_feature 1..17: note = Oligonucleotide
  source 1..17: mol_type = other DNA
gtgcctgtccccacctc

SEQ ID NO: 17922 - DNA, 17 bp, synthetic construct
  misc_feature 1..17: note = Oligonucleotide
  source 1..17: mol_type = other DNA
catgtgcctgtccccac

SEQ ID NO: 17923 - DNA, 17 bp, synthetic construct
  misc_feature 1..17: note = Oligonucleotide
  source 1..17: mol_type = other DNA
gtgcatgtgcctgtccc

SEQ ID NO: 17924 - DNA, 17 bp, synthetic construct
  misc_feature 1..17: note = Oligonucleotide
  source 1..17: mol_type = other DNA
agcgtgcatgtgcctgt

SEQ ID NO: 17925 - DNA, 17 bp, synthetic construct
  misc_feature 1..17: note = Oligonucleotide
  source 1..17: mol_type = other DNA
atcagcgtgcatgtgcc

SEQ ID NO: 17926 - DNA, 17 bp, synthetic construct
  misc_feature 1..17: note = Oligonucleotide
  source 1..17: mol_type = other DNA
gaaatcagcgtgcatgt

SEQ ID NO: 17927 - DNA, 17 bp, synthetic construct
  misc_feature 1..17: note = Oligonucleotide
  source 1..17: mol_type = other DNA
ccggaaatcagcgtgca

SEQ ID NO: 17928 - DNA, 17 bp, synthetic construct
  misc_feature 1..17: note = Oligonucleotide
  source 1..17: mol_type = other DNA
caaccggaaatcagcgt

SEQ ID NO: 17929 - DNA, 17 bp, synthetic construct
  misc_feature 1..17: note = Oligonucleotide
  source 1..17: mol_type = other DNA
ctccaaccggaaatcag

SEQ ID NO: 17930 - DNA, 17 bp, synthetic construct
  misc_feature 1..17: note = Oligonucleotide
  source 1..17: mol_type = other DNA
cagctccaaccggaaat

SEQ ID NO: 17931 - DNA, 17 bp, synthetic construct
  misc_feature 1..17: note = Oligonucleotide
  source 1..17: mol_type = other DNA
gcccagctccaaccgga

SEQ ID NO: 17932 - DNA, 17 bp, synthetic construct
  misc_feature 1..17: note = Oligonucleotide
  source 1..17: mol_type = other DNA
caagcccagctccaacc

SEQ ID NO: 17933 - DNA, 17 bp, synthetic construct
  misc_feature 1..17: note = Oligonucleotide
  source 1..17: mol_type = other DNA
tggcaagcccagctcca

SEQ ID NO: 17934 - DNA, 17 bp, synthetic construct
  misc_feature 1..17: note = Oligonucleotide
  source 1..17: mol_type = other DNA
tcatggcaagcccagct

SEQ ID NO: 17935 - DNA, 17 bp, synthetic construct
  misc_feature 1..17: note = Oligonucleotide
  source 1..17: mol_type = other DNA
tcctcatggcaagccca

SEQ ID NO: 17936 - DNA, 17 bp, synthetic construct
  misc_feature 1..17: note = Oligonucleotide
  source 1..17: mol_type = other DNA
ctgtcctcatggcaagc

SEQ ID NO: 17937 - DNA, 17 bp, synthetic construct
  misc_feature 1..17: note = Oligonucleotide
  source 1..17: mol_type = other DNA
ccactgtcctcatggca

SEQ ID NO: 17938 - DNA, 17 bp, synthetic construct
  misc_feature 1..17: note = Oligonucleotide
  source 1..17: mol_type = other DNA
tgcccactgtcctcatg

SEQ ID NO: 17939 - DNA, 17 bp, synthetic construct
  misc_feature 1..17: note = Oligonucleotide
  source 1..17: mol_type = other DNA
aactgcccactgtcctc

SEQ ID NO: 17940 - DNA, 17 bp, synthetic construct
  misc_feature 1..17: note = Oligonucleotide
  source 1..17: mol_type = other DNA
ctcaactgcccactgtc

SEQ ID NO: 17941 - DNA, 17 bp, synthetic construct
  misc_feature 1..17: note = Oligonucleotide
  source 1..17: mol_type = other DNA
tccctcaactgcccact

SEQ ID NO: 17942 - DNA, 17 bp, synthetic construct
  misc_feature 1..17: note = Oligonucleotide
  source 1..17: mol_type = other DNA
cgctccctcaactgccc

SEQ ID NO: 17943 - DNA, 17 bp, synthetic construct
  misc_feature 1..17: note = Oligonucleotide
  source 1..17: mol_type = other DNA
acacgctccctcaactg

SEQ ID NO: 17944 - DNA, 17 bp, synthetic construct
  misc_feature 1..17: note = Oligonucleotide
  source 1..17: mol_type = other DNA
ctaacacgctccctcaa

SEQ ID NO: 17945 - DNA, 17 bp, synthetic construct
  misc_feature 1..17: note = Oligonucleotide
  source 1..17: mol_type = other DNA
cacctaacacgctccct

SEQ ID NO: 17946 - DNA, 17 bp, synthetic construct
  misc_feature 1..17: note = Oligonucleotide
  source 1..17: mol_type = other DNA
ctccacctaacacgctc

SEQ ID NO: 17947 - DNA, 17 bp, synthetic construct
  misc_feature 1..17: note = Oligonucleotide
  source 1..17: mol_type = other DNA
cctctccacctaacacg

SEQ ID NO: 17948 - DNA, 17 bp, synthetic construct
  misc_feature 1..17: note = Oligonucleotide
  source 1..17: mol_type = other DNA
taccctctccacctaac

SEQ ID NO: 17949 - DNA, 17 bp, synthetic construct
  misc_feature 1..17: note = Oligonucleotide
  source 1..17: mol_type = other DNA
gcataccctctccacct

SEQ ID NO: 17950 - DNA, 17 bp, synthetic construct
  misc_feature 1..17: note = Oligonucleotide
  source 1..17: mol_type = other DNA
ggagcataccctctcca

SEQ ID NO: 17951 - DNA, 17 bp, synthetic construct
  misc_feature 1..17: note = Oligonucleotide
  source 1..17: mol_type = other DNA
gtaggagcataccctct

SEQ ID NO: 17952 - DNA, 17 bp, synthetic construct
  misc_feature 1..17: note = Oligonucleotide
  source 1..17: mol_type = other DNA
caggtaggagcataccc

SEQ ID NO: 17953 - DNA, 17 bp, synthetic construct
  misc_feature 1..17: note = Oligonucleotide
  source 1..17: mol_type = other DNA
tcacaggtaggagcata

SEQ ID NO: 17954 - DNA, 17 bp, synthetic construct
  misc_feature 1..17: note = Oligonucleotide
  source 1..17: mol_type = other DNA
aaatcacaggtaggagc

SEQ ID NO: 17955 - DNA, 17 bp, synthetic construct
  misc_feature 1..17: note = Oligonucleotide
  source 1..17: mol_type = other DNA
tctaaatcacaggtagg

SEQ ID NO: 17956 - DNA, 17 bp, synthetic construct
  misc_feature 1..17: note = Oligonucleotide
  source 1..17: mol_type = other DNA
ttttctaaatcacaggt

SEQ ID NO: 17957 - DNA, 17 bp, synthetic construct
  misc_feature 1..17: note = Oligonucleotide
  source 1..17: mol_type = other DNA
gtgttttctaaatcaca

SEQ ID NO: 17958 - DNA, 17 bp, synthetic construct
  misc_feature 1..17: note = Oligonucleotide
  source 1..17: mol_type = other DNA
agtgtgttttctaaatc

SEQ ID NO: 17959 - DNA, 17 bp, synthetic construct
  misc_feature 1..17: note = Oligonucleotide
  source 1..17: mol_type = other DNA
tgcagtgtgttttctaa

SEQ ID NO: 17960 - DNA, 17 bp, synthetic construct
  misc_feature 1..17: note = Oligonucleotide
  source 1..17: mol_type = other DNA
caatgcagtgtgttttc

SEQ ID NO: 17961 - DNA, 17 bp, synthetic construct
  misc_feature 1..17: note = Oligonucleotide
  source 1..17: mol_type = other DNA
tgacaatgcagtgtgtt

SEQ ID NO: 17962 - DNA, 17 bp, synthetic construct
  misc_feature 1..17: note = Oligonucleotide
  source 1..17: mol_type = other DNA
gcctgacaatgcagtgt

SEQ ID NO: 17963 - DNA, 17 bp, synthetic construct
  misc_feature 1..17: note = Oligonucleotide
  source 1..17: mol_type = other DNA
catgcctgacaatgcag

SEQ ID NO: 17964 - DNA, 17 bp, synthetic construct
  misc_feature 1..17: note = Oligonucleotide
  source 1..17: mol_type = other DNA
agccatgcctgacaatg

SEQ ID NO: 17965 - DNA, 17 bp, synthetic construct
  misc_feature 1..17: note = Oligonucleotide
  source 1..17: mol_type = other DNA
cccagccatgcctgaca

SEQ ID NO: 17966 - DNA, 17 bp, synthetic construct
  misc_feature 1..17: note = Oligonucleotide
  source 1..17: mol_type = other DNA
cttcccagccatgcctg

SEQ ID NO: 17967 - DNA, 17 bp, synthetic construct
  misc_feature 1..17: note = Oligonucleotide
  source 1..17: mol_type = other DNA
actcttcccagccatgc

SEQ ID NO: 17968 - DNA, 17 bp, synthetic construct
  misc_feature 1..17: note = Oligonucleotide
  source 1..17: mol_type = other DNA
ctgactcttcccagcca

SEQ ID NO: 17969 - DNA, 17 bp, synthetic construct
  misc_feature 1..17: note = Oligonucleotide
  source 1..17: mol_type = other DNA
gccctgactcttcccag

SEQ ID NO: 17970 - DNA, 17 bp, synthetic construct
  misc_feature 1..17: note = Oligonucleotide
  source 1..17: mol_type = other DNA
ccagccctgactcttcc

SEQ ID NO: 17971 - DNA, 17 bp, synthetic construct
  misc_feature 1..17: note = Oligonucleotide
  source 1..17: mol_type = other DNA
ccaccagccctgactct

SEQ ID NO: 17972 - DNA, 17 bp, synthetic construct
  misc_feature 1..17: note = Oligonucleotide
  source 1..17: mol_type = other DNA
aggccaccagccctgac

SEQ ID NO: 17973 - DNA, 17 bp, synthetic construct
  misc_feature 1..17: note = Oligonucleotide
  source 1..17: mol_type = other DNA
cacaggccaccagccct

SEQ ID NO: 17974 - DNA, 17 bp, synthetic construct
  misc_feature 1..17: note = Oligonucleotide
  source 1..17: mol_type = other DNA
taccacaggccaccagc

SEQ ID NO: 17975 - DNA, 17 bp, synthetic construct
  misc_feature 1..17: note = Oligonucleotide
  source 1..17: mol_type = other DNA
ccttaccacaggccacc

SEQ ID NO: 17976 - DNA, 17 bp, synthetic construct
  misc_feature 1..17: note = Oligonucleotide
  source 1..17: mol_type = other DNA
cccccttaccacaggcc

SEQ ID NO: 17977 - DNA, 17 bp, synthetic construct
  misc_feature 1..17: note = Oligonucleotide
  source 1..17: mol_type = other DNA
tgtcccccttaccacag

SEQ ID NO: 17978 - DNA, 17 bp, synthetic construct
  misc_feature 1..17: note = Oligonucleotide
  source 1..17: mol_type = other DNA
ccctgtcccccttacca

SEQ ID NO: 17979 - DNA, 17 bp, synthetic construct
  misc_feature 1..17: note = Oligonucleotide
  source 1..17: mol_type = other DNA
catccctgtccccctta

SEQ ID NO: 17980 - DNA, 17 bp, synthetic construct
  misc_feature 1..17: note = Oligonucleotide
  source 1..17: mol_type = other DNA
ctccatccctgtccccc

SEQ ID NO: 17981 - DNA, 17 bp, synthetic construct
  misc_feature 1..17: note = Oligonucleotide
  source 1..17: mol_type = other DNA
caactccatccctgtcc

SEQ ID NO: 17982 - DNA, 17 bp, synthetic construct
  misc_feature 1..17: note = Oligonucleotide
  source 1..17: mol_type = other DNA
tggcaactccatccctg

SEQ ID NO: 17983 - DNA, 17 bp, synthetic construct
  misc_feature 1..17: note = Oligonucleotide
  source 1..17: mol_type = other DNA
gagtggcaactccatcc

SEQ ID NO: 17984 - DNA, 17 bp, synthetic construct
  misc_feature 1..17: note = Oligonucleotide
  source 1..17: mol_type = other DNA
ctggagtggcaactcca

SEQ ID NO: 17985 - DNA, 17 bp, synthetic construct
  misc_feature 1..17: note = Oligonucleotide
  source 1..17: mol_type = other DNA
ctactggagtggcaact

SEQ ID NO: 17986 - DNA, 17 bp, synthetic construct
  misc_feature 1..17: note = Oligonucleotide
  source 1..17: mol_type = other DNA
gccctactggagtggca

SEQ ID NO: 17987 - DNA, 17 bp, synthetic construct
  misc_feature 1..17: note = Oligonucleotide
  source 1..17: mol_type = other DNA
tgggccctactggagtg

SEQ ID NO: 17988 - DNA, 17 bp, synthetic construct
  misc_feature 1..17: note = Oligonucleotide
  source 1..17: mol_type = other DNA
ttttgggccctactgga

SEQ ID NO: 17989 - DNA, 17 bp, synthetic construct
  misc_feature 1..17: note = Oligonucleotide
  source 1..17: mol_type = other DNA
aggttttgggccctact

SEQ ID NO: 17990 - DNA, 17 bp, synthetic construct
  misc_feature 1..17: note = Oligonucleotide
  source 1..17: mol_type = other DNA
tgtaggttttgggccct

SEQ ID NO: 17991 - DNA, 17 bp, synthetic construct
  misc_feature 1..17: note = Oligonucleotide
  source 1..17: mol_type = other DNA
acctgtaggttttgggc

SEQ ID NO: 17992 - DNA, 17 bp, synthetic construct
  misc_feature 1..17: note = Oligonucleotide
  source 1..17: mol_type = other DNA
cttacctgtaggttttg

SEQ ID NO: 17993 - DNA, 17 bp, synthetic construct
  misc_feature 1..17: note = Oligonucleotide
  source 1..17: mol_type = other DNA
gggcttacctgtaggtt

SEQ ID NO: 17994 - DNA, 17 bp, synthetic construct
  misc_feature 1..17: note = Oligonucleotide
  source 1..17: mol_type = other DNA
ctggggcttacctgtag

SEQ ID NO: 17995 - DNA, 17 bp, synthetic construct
  misc_feature 1..17: note = Oligonucleotide
  source 1..17: mol_type = other DNA
gggctggggcttacctg

SEQ ID NO: 17996 - DNA, 17 bp, synthetic construct
  misc_feature 1..17: note = Oligonucleotide
  source 1..17: mol_type = other DNA
acagggctggggcttac

SEQ ID NO: 17997 - DNA, 17 bp, synthetic construct
  misc_feature 1..17: note = Oligonucleotide
  source 1..17: mol_type = other DNA
gggacagggctggggct

SEQ ID NO: 17998 - DNA, 17 bp, synthetic construct
  misc_feature 1..17: note = Oligonucleotide
  source 1..17: mol_type = other DNA
ctggggacagggctggg

SEQ ID NO: 17999 - DNA, 17 bp, synthetic construct
  misc_feature 1..17: note = Oligonucleotide
  source 1..17: mol_type = other DNA
accctggggacagggct

SEQ ID NO: 18000 - DNA, 17 bp, synthetic construct
  misc_feature 1..17: note = Oligonucleotide
  source 1..17: mol_type = other DNA
tataccctggggacagg

SEQ ID NO: 18001 - DNA, 17 bp, synthetic construct
  misc_feature 1..17: note = Oligonucleotide
  source 1..17: mol_type = other DNA
gagtataccctggggac

SEQ ID NO: 18002 - DNA, 17 bp, synthetic construct
  misc_feature 1..17: note = Oligonucleotide
  source 1..17: mol_type = other DNA
catgagtataccctggg

SEQ ID NO: 18003 - DNA, 17 bp, synthetic construct
  misc_feature 1..17: note = Oligonucleotide
  source 1..17: mol_type = other DNA
aaccatgagtataccct

SEQ ID NO: 18004 - DNA, 17 bp, synthetic construct
  misc_feature 1..17: note = Oligonucleotide
  source 1..17: mol_type = other DNA
ggaaaccatgagtatac

SEQ ID NO: 18005 - DNA, 17 bp, synthetic construct
  misc_feature 1..17: note = Oligonucleotide
  source 1..17: mol_type = other DNA
gggggaaaccatgagta

SEQ ID NO: 18006 - DNA, 17 bp, synthetic construct
  misc_feature 1..17: note = Oligonucleotide
  source 1..17: mol_type = other DNA
gctgggggaaaccatga

SEQ ID NO: 18007 - DNA, 17 bp, synthetic construct
  misc_feature 1..17: note = Oligonucleotide
  source 1..17: mol_type = other DNA
agggctgggggaaacca

SEQ ID NO: 18008 - DNA, 17 bp, synthetic construct
  misc_feature 1..17: note = Oligonucleotide
  source 1..17: mol_type = other DNA
gccagggctgggggaaa

SEQ ID NO: 18009 - DNA, 17 bp, synthetic construct
  misc_feature 1..17: note = Oligonucleotide
  source 1..17: mol_type = other DNA
tgtgccagggctggggg

SEQ ID NO: 18010 - DNA, 17 bp, synthetic construct
  misc_feature 1..17: note = Oligonucleotide
  source 1..17: mol_type = other DNA
aggtgtgccagggctgg

SEQ ID NO: 18011 - DNA, 17 bp, synthetic construct
  misc_feature 1..17: note = Oligonucleotide
  source 1..17: mol_type = other DNA
tgtaggtgtgccagggc

SEQ ID NO: 18012 - DNA, 17 bp, synthetic construct
  misc_feature 1..17: note = Oligonucleotide
  source 1..17: mol_type = other DNA
tcctgtaggtgtgccag

SEQ ID NO: 18013 - DNA, 17 bp, synthetic construct
  misc_feature 1..17: note = Oligonucleotide
  source 1..17: mol_type = other DNA
gagtcctgtaggtgtgc

SEQ ID NO: 18014 - DNA, 17 bp, synthetic construct
  misc_feature 1..17: note = Oligonucleotide
  source 1..17: mol_type = other DNA
acagagtcctgtaggtg

SEQ ID NO: 18015 - DNA, 17 bp, synthetic construct
  misc_feature 1..17: note = Oligonucleotide
  source 1..17: mol_type = other DNA
gccacagagtcctgtag

SEQ ID NO: 18016 - DNA, 17 bp, synthetic construct
  misc_feature 1..17: note = Oligonucleotide
  source 1..17: mol_type = other DNA
gaagccacagagtcctg

SEQ ID NO: 18017 - DNA, 17 bp, synthetic construct
  misc_feature 1..17: note = Oligonucleotide
  source 1..17: mol_type = other DNA
atagaagccacagagtc

SEQ ID NO: 18018 - DNA, 17 bp, synthetic construct
  misc_feature 1..17: note = Oligonucleotide
  source 1..17: mol_type = other DNA
agaatagaagccacaga

SEQ ID NO: 18019 - DNA, 17 bp, synthetic construct
  misc_feature 1..17: note = Oligonucleotide
  source 1..17: mol_type = other DNA
taaagaatagaagccac

SEQ ID NO: 18020 - DNA, 17 bp, synthetic construct
  misc_feature 1..17: note = Oligonucleotide
  source 1..17: mol_type = other DNA
gggtaaagaatagaagc

SEQ ID NO: 18021 - DNA, 17 bp, synthetic construct
  misc_feature 1..17: note = Oligonucleotide
  source 1..17: mol_type = other DNA
tgagggtaaagaataga

SEQ ID NO: 18022 - DNA, 17 bp, synthetic construct
  misc_feature 1..17: note = Oligonucleotide
  source 1..17: mol_type = other DNA
gggtgagggtaaagaat

SEQ ID NO: 18023 - DNA, 17 bp, synthetic construct
  misc_feature 1..17: note = Oligonucleotide
  source 1..17: mol_type = other DNA
tcagggtgagggtaaag

SEQ ID NO: 18024 - DNA, 17 bp, synthetic construct
  misc_feature 1..17: note = Oligonucleotide
  source 1..17: mol_type = other DNA
gcctcagggtgagggta

SEQ ID NO: 18025 - DNA, 17 bp, synthetic construct
  misc_feature 1..17: note = Oligonucleotide
  source 1..17: mol_type = other DNA
caggcctcagggtgagg

SEQ ID NO: 18026 - DNA, 17 bp, synthetic construct
  misc_feature 1..17: note = Oligonucleotide
  source 1..17: mol_type = other DNA
acccaggcctcagggtg

SEQ ID NO: 18027 - DNA, 17 bp, synthetic construct
  misc_feature 1..17: note = Oligonucleotide
  source 1..17: mol_type = other DNA
gggacccaggcctcagg

SEQ ID NO: 18028 - DNA, 17 bp, synthetic construct
  misc_feature 1..17: note = Oligonucleotide
  source 1..17: mol_type = other DNA
tcagggacccaggcctc

SEQ ID NO: 18029 - DNA, 17 bp, synthetic construct
  misc_feature 1..17: note = Oligonucleotide
  source 1..17: mol_type = other DNA
gcctcagggacccaggc

SEQ ID NO: 18030 - DNA, 17 bp, synthetic construct
  misc_feature 1..17: note = Oligonucleotide
  source 1..17: mol_type = other DNA
cctgcctcagggaccca

SEQ ID NO: 18031 - DNA, 17 bp, synthetic construct
  misc_feature 1..17: note = Oligonucleotide
  source 1..17: mol_type = other DNA
atccctgcctcagggac

SEQ ID NO: 18032 - DNA, 17 bp, synthetic construct
  misc_feature 1..17: note = Oligonucleotide
  source 1..17: mol_type = other DNA
ggcatccctgcctcagg

SEQ ID NO: 18033 - DNA, 17 bp, synthetic construct
  misc_feature 1..17: note = Oligonucleotide
  source 1..17: mol_type = other DNA
ccaggcatccctgcctc

SEQ ID NO: 18034 - DNA, 17 bp, synthetic construct
  misc_feature 1..17: note = Oligonucleotide
  source 1..17: mol_type = other DNA
ggtccaggcatccctgc

SEQ ID NO: 18035 - DNA, 17 bp, synthetic construct
  misc_feature 1..17: note = Oligonucleotide
  source 1..17: mol_type = other DNA
tccggtccaggcatccc

SEQ ID NO: 18036 - DNA, 17 bp, synthetic construct
  misc_feature 1..17: note = Oligonucleotide
  source 1..17: mol_type = other DNA
ggctccggtccaggcat

SEQ ID NO: 18037 - DNA, 17 bp, synthetic construct
  misc_feature 1..17: note = Oligonucleotide
  source 1..17: mol_type = other DNA
gtgggctccggtccagg

SEQ ID NO: 18038 - DNA, 17 bp, synthetic construct
  misc_feature 1..17: note = Oligonucleotide
  source 1..17: mol_type = other DNA
ccagtgggctccggtcc

SEQ ID NO: 18039 - DNA, 17 bp, synthetic construct
  misc_feature 1..17: note = Oligonucleotide
  source 1..17: mol_type = other DNA
aggccagtgggctccgg

SEQ ID NO: 18040 - DNA, 17 bp, synthetic construct
  misc_feature 1..17: note = Oligonucleotide
  source 1..17: mol_type = other DNA
gagaggccagtgggctc

SEQ ID NO: 18041 - DNA, 17 bp, synthetic construct
  misc_feature 1..17: note = Oligonucleotide
  source 1..17: mol_type = other DNA
ccagagaggccagtggg

SEQ ID NO: 18042 - DNA, 17 bp, synthetic construct
  misc_feature 1..17: note = Oligonucleotide
  source 1..17: mol_type = other DNA
agcccagagaggccagt

SEQ ID NO: 18043 - DNA, 17 bp, synthetic construct
  misc_feature 1..17: note = Oligonucleotide
  source 1..17: mol_type = other DNA
cacagcccagagaggcc

SEQ ID NO: 18044 - DNA, 17 bp, synthetic construct
  misc_feature 1..17: note = Oligonucleotide
  source 1..17: mol_type = other DNA
atgcacagcccagagag

SEQ ID NO: 18045 - DNA, 17 bp, synthetic construct
  misc_feature 1..17: note = Oligonucleotide
  source 1..17: mol_type = other DNA
ccaatgcacagcccaga

SEQ ID NO: 18046 - DNA, 17 bp, synthetic construct
  misc_feature 1..17: note = Oligonucleotide
  source 1..17: mol_type = other DNA
cacccaatgcacagccc

SEQ ID NO: 18047 - DNA, 17 bp, synthetic construct
  misc_feature 1..17: note = Oligonucleotide
  source 1..17: mol_type = other DNA
cagcacccaatgcacag

SEQ ID NO: 18048 - DNA, 17 bp, synthetic construct
  misc_feature 1..17: note = Oligonucleotide
  source 1..17: mol_type = other DNA
cctcagcacccaatgca

SEQ ID NO: 18049 - DNA, 17 bp, synthetic construct
  misc_feature 1..17: note = Oligonucleotide
  source 1..17: mol_type = other DNA
ccacctcagcacccaat

SEQ ID NO: 18050 - DNA, 17 bp, synthetic construct
  misc_feature 1..17: note = Oligonucleotide
  source 1..17: mol_type = other DNA
cgcccacctcagcaccc

SEQ ID NO: 18051 - DNA, 17 bp, synthetic construct
  misc_feature 1..17: note = Oligonucleotide
  source 1..17: mol_type = other DNA
gtgcgcccacctcagca

SEQ ID NO: 18052 - DNA, 17 bp, synthetic construct
  misc_feature 1..17: note = Oligonucleotide
  source 1..17: mol_type = other DNA
ccagtgcgcccacctca

SEQ ID NO: 18053 - DNA, 17 bp, synthetic construct
  misc_feature 1..17: note = Oligonucleotide
  source 1..17: mol_type = other DNA
gagccagtgcgcccacc

SEQ ID NO: 18054 - DNA, 17 bp, synthetic construct
  misc_feature 1..17: note = Oligonucleotide
  source 1..17: mol_type = other DNA
tgagagccagtgcgccc

SEQ ID NO: 18055 - DNA, 17 bp, synthetic construct
  misc_feature 1..17: note = Oligonucleotide
  source 1..17: mol_type = other DNA
ggctgagagccagtgcg

SEQ ID NO: 18056 - DNA, 17 bp, synthetic construct
  misc_feature 1..17: note = Oligonucleotide
  source 1..17: mol_type = other DNA
agtggctgagagccagt

SEQ ID NO: 18057 - DNA, 17 bp, synthetic construct
  misc_feature 1..17: note = Oligonucleotide
  source 1..17: mol_type = other DNA
caaagtggctgagagcc

SEQ ID NO: 18058 - DNA, 17 bp, synthetic construct
  misc_feature 1..17: note = Oligonucleotide
  source 1..17: mol_type = other DNA
gcacaaagtggctgaga

SEQ ID NO: 18059 - DNA, 17 bp, synthetic construct
  misc_feature 1..17: note = Oligonucleotide
  source 1..17: mol_type = other DNA
caggcacaaagtggctg

SEQ ID NO: 18060 - DNA, 17 bp, synthetic construct
  misc_feature 1..17: note = Oligonucleotide
  source 1..17: mol_type = other DNA
gcccaggcacaaagtgg

SEQ ID NO: 18061 - DNA, 17 bp, synthetic construct
  misc_feature 1..17: note = Oligonucleotide
  source 1..17: mol_type = other DNA
gaagcccaggcacaaag

SEQ ID NO: 18062 - DNA, 17 bp, synthetic construct
  misc_feature 1..17: note = Oligonucleotide
  source 1..17: mol_type = other DNA
tgagaagcccaggcaca

SEQ ID NO: 18063 - DNA, 17 bp, synthetic construct
  misc_feature 1..17: note = Oligonucleotide
  source 1..17: mol_type = other DNA
tgatgagaagcccaggc

SEQ ID NO: 18064 - DNA, 17 bp, synthetic construct
  misc_feature 1..17: note = Oligonucleotide
  source 1..17: mol_type = other DNA
tactgatgagaagccca

SEQ ID NO: 18065 - DNA, 17 bp, synthetic construct
  misc_feature 1..17: note = Oligonucleotide
  source 1..17: mol_type = other DNA
acttactgatgagaagc

SEQ ID NO: 18066 - DNA, 17 bp, synthetic construct
  misc_feature 1..17: note = Oligonucleotide
  source 1..17: mol_type = other DNA
cccacttactgatgaga

SEQ ID NO: 18067 - DNA, 17 bp, synthetic construct
  misc_feature 1..17: note = Oligonucleotide
  source 1..17: mol_type = other DNA
attcccacttactgatg

SEQ ID NO: 18068 - DNA, 17 bp, synthetic construct
  misc_feature 1..17: note = Oligonucleotide
  source 1..17: mol_type = other DNA
actattcccacttactg

SEQ ID NO: 18069 - DNA, 17 bp, synthetic construct
  misc_feature 1..17: note = Oligonucleotide
  source 1..17: mol_type = other DNA
aggactattcccactta

SEQ ID NO: 18070 - DNA, 17 bp, synthetic construct
  misc_feature 1..17: note = Oligonucleotide
  source 1..17: mol_type = other DNA
ggtaggactattcccac

SEQ ID NO: 18071 - DNA, 17 bp, synthetic construct
  misc_feature 1..17: note = Oligonucleotide
  source 1..17: mol_type = other DNA
ttaggtaggactattcc

SEQ ID NO: 18072 - DNA, 17 bp, synthetic construct
  misc_feature 1..17: note = Oligonucleotide
  source 1..17: mol_type = other DNA
gacttaggtaggactat

SEQ ID NO: 18073 - DNA, 17 bp, synthetic construct
  misc_feature 1..17: note = Oligonucleotide
  source 1..17: mol_type = other DNA
aatgacttaggtaggac

SEQ ID NO: 18074 - DNA, 17 bp, synthetic construct
  misc_feature 1..17: note = Oligonucleotide
  source 1..17: mol_type = other DNA
gacaatgacttaggtag

SEQ ID NO: 18075 - DNA, 17 bp, synthetic construct
  misc_feature 1..17: note = Oligonucleotide
  source 1..17: mol_type = other DNA
aaagacaatgacttagg

SEQ ID NO: 18076 - DNA, 17 bp, synthetic construct
  misc_feature 1..17: note = Oligonucleotide
  source 1..17: mol_type = other DNA
cccaaagacaatgactt

SEQ ID NO: 18077 - DNA, 17 bp, synthetic construct
  misc_feature 1..17: note = Oligonucleotide
  source 1..17: mol_type = other DNA
cttcccaaagacaatga

SEQ ID NO: 18078 - DNA, 17 bp, synthetic construct
  misc_feature 1..17: note = Oligonucleotide
  source 1..17: mol_type = other DNA
aggcttcccaaagacaa

SEQ ID NO: 18079 - DNA, 17 bp, synthetic construct
  misc_feature 1..17: note = Oligonucleotide
  source 1..17: mol_type = other DNA
ggaaggcttcccaaaga

SEQ ID NO: 18080 - DNA, 17 bp, synthetic construct
  misc_feature 1..17: note = Oligonucleotide
  source 1..17: mol_type = other DNA
tctggaaggcttcccaa

SEQ ID NO: 18081 - DNA, 17 bp, synthetic construct
  misc_feature 1..17: note = Oligonucleotide
  source 1..17: mol_type = other DNA
cattctggaaggcttcc

SEQ ID NO: 18082 - DNA, 17 bp, synthetic construct
  misc_feature 1..17: note = Oligonucleotide
  source 1..17: mol_type = other DNA
gggcattctggaaggct

SEQ ID NO: 18083 - DNA, 17 bp, synthetic construct
  misc_feature 1..17: note = Oligonucleotide
  source 1..17: mol_type = other DNA
ccagggcattctggaag

SEQ ID NO: 18084 - DNA, 17 bp, synthetic construct
  misc_feature 1..17: note = Oligonucleotide
  source 1..17: mol_type = other DNA
tgcccagggcattctgg

SEQ ID NO: 18085 - DNA, 17 bp, synthetic construct
  misc_feature 1..17: note = Oligonucleotide
  source 1..17: mol_type = other DNA
acctgcccagggcattc

SEQ ID NO: 18086 - DNA, 17 bp, synthetic construct
  misc_feature 1..17: note = Oligonucleotide
  source 1..17: mol_type = other DNA
ctcacctgcccagggca

SEQ ID NO: 18087 - DNA, 17 bp, synthetic construct
  misc_feature 1..17: note = Oligonucleotide
  source 1..17: mol_type = other DNA
tccctcacctgcccagg

SEQ ID NO: 18088 - DNA, 17 bp, synthetic construct
  misc_feature 1..17: note = Oligonucleotide
  source 1..17: mol_type = other DNA
tgatccctcacctgccc

SEQ ID NO: 18089 - DNA, 17 bp, synthetic construct
  misc_feature 1..17: note = Oligonucleotide
  source 1..17: mol_type = other DNA
aggtgatccctcacctg

SEQ ID NO: 18090 - DNA, 17 bp, synthetic construct
  misc_feature 1..17: note = Oligonucleotide
  source 1..17: mol_type = other DNA
gccaggtgatccctcac

SEQ ID NO: 18091 - DNA, 17 bp, synthetic construct
  misc_feature 1..17: note = Oligonucleotide
  source 1..17: mol_type = other DNA
tctgccaggtgatccct

SEQ ID NO: 18092 - DNA, 17 bp, synthetic construct
  misc_feature 1..17: note = Oligonucleotide
  source 1..17: mol_type = other DNA
gactctgccaggtgatc

SEQ ID NO: 18093 - DNA, 17 bp, synthetic construct
  misc_feature 1..17: note = Oligonucleotide
  source 1..17: mol_type = other DNA
ccagactctgccaggtg

SEQ ID NO: 18094 - DNA, 17 bp, synthetic construct
  misc_feature 1..17: note = Oligonucleotide
  source 1..17: mol_type = other DNA
ttgccagactctgccag

SEQ ID NO: 18095 - DNA, 17 bp, synthetic construct
  misc_feature 1..17: note = Oligonucleotide
  source 1..17: mol_type = other DNA
cagttgccagactctgc

SEQ ID NO: 18096 - DNA, 17 bp, synthetic construct
  misc_feature 1..17: note = Oligonucleotide
  source 1..17: mol_type = other DNA
cggcagttgccagactc

SEQ ID NO: 18097 - DNA, 17 bp, synthetic construct
  misc_feature 1..17: note = Oligonucleotide
  source 1..17: mol_type = other DNA
taccggcagttgccaga

SEQ ID NO: 18098 - DNA, 17 bp, synthetic construct
  misc_feature 1..17: note = Oligonucleotide
  source 1..17: mol_type = other DNA
ttttaccggcagttgcc

SEQ ID NO: 18099 - DNA, 17 bp, synthetic construct
  misc_feature 1..17: note = Oligonucleotide
  source 1..17: mol_type = other DNA
tgcttttaccggcagtt

SEQ ID NO: 18100 - DNA, 17 bp, synthetic construct
  misc_feature 1..17: note = Oligonucleotide
  source 1..17: mol_type = other DNA
aggtgcttttaccggca

SEQ ID NO: 18101 - DNA, 17 bp, synthetic construct
  misc_feature 1..17: note = Oligonucleotide
  source 1..17: mol_type = other DNA
ggcaggtgcttttaccg

SEQ ID NO: 18102 - DNA, 17 bp, synthetic construct
  misc_feature 1..17: note = Oligonucleotide
  source 1..17: mol_type = other DNA
gagggcaggtgctttta

SEQ ID NO: 18103 - DNA, 17 bp, synthetic construct
  misc_feature 1..17: note = Oligonucleotide
  source 1..17: mol_type = other DNA
agggagggcaggtgctt

SEQ ID NO: 18104 - DNA, 17 bp, synthetic construct
  misc_feature 1..17: note = Oligonucleotide
  source 1..17: mol_type = other DNA
cacagggagggcaggtg

SEQ ID NO: 18105 - DNA, 17 bp, synthetic construct
  misc_feature 1..17: note = Oligonucleotide
  source 1..17: mol_type = other DNA
aggcacagggagggcag

SEQ ID NO: 18106 - DNA, 17 bp, synthetic construct
  misc_feature 1..17: note = Oligonucleotide
  source 1..17: mol_type = other DNA
tcaaggcacagggaggg

SEQ ID NO: 18107 - DNA, 17 bp, synthetic construct
  misc_feature 1..17: note = Oligonucleotide
  source 1..17: mol_type = other DNA
ccttcaaggcacaggga

SEQ ID NO: 18108 - DNA, 17 bp, synthetic construct
  misc_feature 1..17: note = Oligonucleotide
  source 1..17: mol_type = other DNA
ctgccttcaaggcacag

SEQ ID NO: 18109 - DNA, 17 bp, synthetic construct
  misc_feature 1..17: note = Oligonucleotide
  source 1..17: mol_type = other DNA
tgcctgccttcaaggca

SEQ ID NO: 18110 - DNA, 17 bp, synthetic construct
  misc_feature 1..17: note = Oligonucleotide
  source 1..17: mol_type = other DNA
cggtgcctgccttcaag

SEQ ID NO: 18111 - DNA, 17 bp, synthetic construct
  misc_feature 1..17: note = Oligonucleotide
  source 1..17: mol_type = other DNA
agacggtgcctgccttc

SEQ ID NO: 18112 - DNA, 17 bp, synthetic construct
  misc_feature 1..17: note = Oligonucleotide
  source 1..17: mol_type = other DNA
caaagacggtgcctgcc

SEQ ID NO: 18113 - DNA, 17 bp, synthetic construct
  misc_feature 1..17: note = Oligonucleotide
  source 1..17: mol_type = other DNA
cgacaaagacggtgcct

SEQ ID NO: 18114 - DNA, 17 bp, synthetic construct
  misc_feature 1..17: note = Oligonucleotide
  source 1..17: mol_type = other DNA
aaacgacaaagacggtg

SEQ ID NO: 18115 - DNA, 17 bp, synthetic construct
  misc_feature 1..17: note = Oligonucleotide
  source 1..17: mol_type = other DNA
aggaaacgacaaagacg

SEQ ID NO: 18116 - DNA, 17 bp, synthetic construct
  misc_feature 1..17: note = Oligonucleotide
  source 1..17: mol_type = other DNA
actaggaaacgacaaag

SEQ ID NO: 18117 - DNA, 17 bp, synthetic construct
  misc_feature 1..17: note = Oligonucleotide
  source 1..17: mol_type = other DNA
gaaactaggaaacgaca

SEQ ID NO: 18118 - DNA, 17 bp, synthetic construct
  misc_feature 1..17: note = Oligonucleotide
  source 1..17: mol_type = other DNA
gatgaaactaggaaacg

SEQ ID NO: 18119 - DNA, 17 bp, synthetic construct
  misc_feature 1..17: note = Oligonucleotide
  source 1..17: mol_type = other DNA
tctgatgaaactaggaa

SEQ ID NO: 18120 - DNA, 17 bp, synthetic construct
  misc_feature 1..17: note = Oligonucleotide
  source 1..17: mol_type = other DNA
ggctctgatgaaactag

SEQ ID NO: 18121 - DNA, 17 bp, synthetic construct
  misc_feature 1..17: note = Oligonucleotide
  source 1..17: mol_type = other DNA
cctggctctgatgaaac

SEQ ID NO: 18122 - DNA, 17 bp, synthetic construct
  misc_feature 1..17: note = Oligonucleotide
  source 1..17: mol_type = other DNA
gtgcctggctctgatga

SEQ ID NO: 18123 - DNA, 17 bp, synthetic construct
  misc_feature 1..17: note = Oligonucleotide
  source 1..17: mol_type = other DNA
tcagtgcctggctctga

SEQ ID NO: 18124 - DNA, 17 bp, synthetic construct
  misc_feature 1..17: note = Oligonucleotide
  source 1..17: mol_type = other DNA
tcctcagtgcctggctc

SEQ ID NO: 18125 - DNA, 17 bp, synthetic construct
  misc_feature 1..17: note = Oligonucleotide
  source 1..17: mol_type = other DNA
ccctcctcagtgcctgg

SEQ ID NO: 18126 - DNA, 17 bp, synthetic construct
  misc_feature 1..17: note = Oligonucleotide
  source 1..17: mol_type = other DNA
acaccctcctcagtgcc

SEQ ID NO: 18127 - DNA, 17 bp, synthetic construct
  misc_feature 1..17: note = Oligonucleotide
  source 1..17: mol_type = other DNA
caaacaccctcctcagt

SEQ ID NO: 18128 - DNA, 17 bp, synthetic construct
  misc_feature 1..17: note = Oligonucleotide
  source 1..17: mol_type = other DNA
tgccaaacaccctcctc

SEQ ID NO: 18129 - DNA, 17 bp, synthetic construct
  misc_feature 1..17: note = Oligonucleotide
  source 1..17: mol_type = other DNA
gtctgccaaacaccctc

SEQ ID NO: 18130 - DNA, 17 bp, synthetic construct
  misc_feature 1..17: note = Oligonucleotide
  source 1..17: mol_type = other DNA
aatgtctgccaaacacc

SEQ ID NO: 18131 - DNA, 17 bp, synthetic construct
  misc_feature 1..17: note = Oligonucleotide
  source 1..17: mol_type = other DNA
aacaatgtctgccaaac

SEQ ID NO: 18132 - DNA, 17 bp, synthetic construct
  misc_feature 1..17: note = Oligonucleotide
  source 1..17: mol_type = other DNA
ctcaacaatgtctgcca

SEQ ID NO: 18133 - DNA, 17 bp, synthetic construct
  misc_feature 1..17: note = Oligonucleotide
  source 1..17: mol_type = other DNA
ccactcaacaatgtctg

SEQ ID NO: 18134 - DNA, 17 bp, synthetic construct
  misc_feature 1..17: note = Oligonucleotide
  source 1..17: mol_type = other DNA
cttccactcaacaatgt

SEQ ID NO: 18135 - DNA, 17 bp, synthetic construct
  misc_feature 1..17: note = Oligonucleotide
  source 1..17: mol_type = other DNA
actcttccactcaacaa

SEQ ID NO: 18136 - DNA, 17 bp, synthetic construct
  misc_feature 1..17: note = Oligonucleotide
  source 1..17: mol_type = other DNA
gtaactcttccactcaa

SEQ ID NO: 18137 - DNA, 17 bp, synthetic construct
  misc_feature 1..17: note = Oligonucleotide
  source 1..17: mol_type = other DNA
tatgtaactcttccact

SEQ ID NO: 18138 - DNA, 17 bp, synthetic construct
  misc_feature 1..17: note = Oligonucleotide
  source 1..17: mol_type = other DNA
gtttatgtaactcttcc

SEQ ID NO: 18139 - DNA, 17 bp, synthetic construct
  misc_feature 1..17: note = Oligonucleotide
  source 1..17: mol_type = other DNA
actgtttatgtaactct

SEQ ID NO: 18140 - DNA, 17 bp, synthetic construct
  misc_feature 1..17: note = Oligonucleotide
  source 1..17: mol_type = other DNA
catactgtttatgtaac

SEQ ID NO: 18141 - DNA, 17 bp, synthetic construct
  misc_feature 1..17: note = Oligonucleotide
  source 1..17: mol_type = other DNA
caacatactgtttatgt

SEQ ID NO: 18142 - DNA, 17 bp, synthetic construct
  misc_feature 1..17: note = Oligonucleotide
  source 1..17: mol_type = other DNA
caacaacatactgttta

SEQ ID NO: 18143 - DNA, 17 bp, synthetic construct
  misc_feature 1..17: note = Oligonucleotide
  source 1..17: mol_type = other DNA
tgacaacaacatactgt

SEQ ID NO: 18144 - DNA, 17 bp, synthetic construct
  misc_feature 1..17: note = Oligonucleotide
  source 1..17: mol_type = other DNA
tcctgacaacaacatac

SEQ ID NO: 18145 - DNA, 17 bp, synthetic construct
  misc_feature 1..17: note = Oligonucleotide
  source 1..17: mol_type = other DNA
ccatcctgacaacaaca

SEQ ID NO: 18146 - DNA, 17 bp, synthetic construct
  misc_feature 1..17: note = Oligonucleotide
  source 1..17: mol_type = other DNA
cggccatcctgacaaca

SEQ ID NO: 18147 - DNA, 17 bp, synthetic construct
  misc_feature 1..17: note = Oligonucleotide
  source 1..17: mol_type = other DNA
cggcggccatcctgaca

SEQ ID NO: 18148 - DNA, 17 bp, synthetic construct
  misc_feature 1..17: note = Oligonucleotide
  source 1..17: mol_type = other DNA
ggccggcggccatcctg

SEQ ID NO: 18149 - DNA, 17 bp, synthetic construct
  misc_feature 1..17: note = Oligonucleotide
  source 1..17: mol_type = other DNA
aaaggccggcggccatc

SEQ ID NO: 18150 - DNA, 17 bp, synthetic construct
  misc_feature 1..17: note = Oligonucleotide
  source 1..17: mol_type = other DNA
tgtaaaggccggcggcc

SEQ ID NO: 18151 - DNA, 17 bp, synthetic construct
  misc_feature 1..17: note = Oligonucleotide
  source 1..17: mol_type = other DNA
aactgtaaaggccggcg

SEQ ID NO: 18152 - DNA, 17 bp, synthetic construct
  misc_feature 1..17: note = Oligonucleotide
  source 1..17: mol_type = other DNA
cagaactgtaaaggccg

SEQ ID NO: 18153 - DNA, 17 bp, synthetic construct
  misc_feature 1..17: note = Oligonucleotide
  source 1..17: mol_type = other DNA
tgacagaactgtaaagg

SEQ ID NO: 18154 - DNA, 17 bp, synthetic construct
  misc_feature 1..17: note = Oligonucleotide
  source 1..17: mol_type = other DNA
gactgacagaactgtaa

SEQ ID NO: 18155 - DNA, 17 bp, synthetic construct
  misc_feature 1..17: note = Oligonucleotide
  source 1..17: mol_type = other DNA
ctggactgacagaactg

SEQ ID NO: 18156 - DNA, 17 bp, synthetic construct
  misc_feature 1..17: note = Oligonucleotide
  source 1..17: mol_type = other DNA
ggcctggactgacagaa

SEQ ID NO: 18157 - DNA, 17 bp, synthetic construct
  misc_feature 1..17: note = Oligonucleotide
  source 1..17: mol_type = other DNA
gcgggcctggactgaca

SEQ ID NO: 18158 - DNA, 17 bp, synthetic construct
  misc_feature 1..17: note = Oligonucleotide
  source 1..17: mol_type = other DNA
acagcgggcctggactg

SEQ ID NO: 18159 - DNA, 17 bp, synthetic construct
  misc_feature 1..17: note = Oligonucleotide
  source 1..17: mol_type = other DNA
ccaacagcgggcctgga

SEQ ID NO: 18160 - DNA, 17 bp, synthetic construct
  misc_feature 1..17: note = Oligonucleotide
  source 1..17: mol_type = other DNA
agcccaacagcgggcct

SEQ ID NO: 18161 - DNA, 17 bp, synthetic construct
  misc_feature 1..17: note = Oligonucleotide
  source 1..17: mol_type = other DNA
ttcagcccaacagcggg

SEQ ID NO: 18162 - DNA, 17 bp, synthetic construct
  misc_feature 1..17: note = Oligonucleotide
  source 1..17: mol_type = other DNA
ccattcagcccaacagc

SEQ ID NO: 18163 - DNA, 17 bp, synthetic construct
  misc_feature 1..17: note = Oligonucleotide
  source 1..17: mol_type = other DNA
atgccattcagcccaac

SEQ ID NO: 18164 - DNA, 17 bp, synthetic construct
  misc_feature 1..17: note = Oligonucleotide
  source 1..17: mol_type = other DNA
cacatgccattcagccc

SEQ ID NO: 18165 - DNA, 17 bp, synthetic construct
  misc_feature 1..17: note = Oligonucleotide
  source 1..17: mol_type = other DNA
atacacatgccattcag

SEQ ID NO: 18166 - DNA, 17 bp, synthetic construct
  misc_feature 1..17: note = Oligonucleotide
  source 1..17: mol_type = other DNA
agtatacacatgccatt

SEQ ID NO: 18167 - DNA, 17 bp, synthetic construct
  misc_feature 1..17: note = Oligonucleotide
  source 1..17: mol_type = other DNA
gctagtatacacatgcc

SEQ ID NO: 18168 - DNA, 17 bp, synthetic construct
  misc_feature 1..17: note = Oligonucleotide
  source 1..17: mol_type = other DNA
ggagctagtatacacat

SEQ ID NO: 18169 - DNA, 17 bp, synthetic construct
  misc_feature 1..17: note = Oligonucleotide
  source 1..17: mol_type = other DNA
aaaggagctagtataca

SEQ ID NO: 18170 - DNA, 17 bp, synthetic construct
  misc_feature 1..17: note = Oligonucleotide
  source 1..17: mol_type = other DNA
gttaaaggagctagtat

SEQ ID NO: 18171 - DNA, 17 bp, synthetic construct
  misc_feature 1..17: note = Oligonucleotide
  source 1..17: mol_type = other DNA
aaggttaaaggagctag

SEQ ID NO: 18172 - DNA, 17 bp, synthetic construct
  misc_feature 1..17: note = Oligonucleotide
  source 1..17: mol_type = other DNA
gtcaaggttaaaggagc

SEQ ID NO: 18173 - DNA, 17 bp, synthetic construct
  misc_feature 1..17: note = Oligonucleotide
  source 1..17: mol_type = other DNA
ttcgtcaaggttaaagg

SEQ ID NO: 18174 - DNA, 17 bp, synthetic construct
  misc_feature 1..17: note = Oligonucleotide
  source 1..17: mol_type = other DNA
acgttcgtcaaggttaa

SEQ ID NO: 18175 - DNA, 17 bp, synthetic construct
  misc_feature 1..17: note = Oligonucleotide
  source 1..17: mol_type = other DNA
tgtacgttcgtcaaggt

SEQ ID NO: 18176 - DNA, 17 bp, synthetic construct
  misc_feature 1..17: note = Oligonucleotide
  source 1..17: mol_type = other DNA
acatgtacgttcgtcaa

SEQ ID NO: 18177 - DNA, 17 bp, synthetic construct
  misc_feature 1..17: note = Oligonucleotide
  source 1..17: mol_type = other DNA
tgaacatgtacgttcgt

SEQ ID NO: 18178 - DNA, 17 bp, synthetic construct
  misc_feature 1..17: note = Oligonucleotide
  source 1..17: mol_type = other DNA
gcatgaacatgtacgtt

SEQ ID NO: 18179 - DNA, 17 bp, synthetic construct
  misc_feature 1..17: note = Oligonucleotide
  source 1..17: mol_type = other DNA
agagcatgaacatgtac

SEQ ID NO: 18180 - DNA, 17 bp, synthetic construct
  misc_feature 1..17: note = Oligonucleotide
  source 1..17: mol_type = other DNA
aatagagcatgaacatg

SEQ ID NO: 18181 - DNA, 17 bp, synthetic construct
  misc_feature 1..17: note = Oligonucleotide
  source 1..17: mol_type = other DNA
attaatagagcatgaac

SEQ ID NO: 18182 - DNA, 17 bp, synthetic construct
  misc_feature 1..17: note = Oligonucleotide
  source 1..17: mol_type = other DNA
ggtattaatagagcatg

SEQ ID NO: 18183 - DNA, 17 bp, synthetic construct
  misc_feature 1..17: note = Oligonucleotide
  source 1..17: mol_type = other DNA
catggtattaatagagc

SEQ ID NO: 18184 - DNA, 17 bp, synthetic construct
  misc_feature 1..17: note = Oligonucleotide
  source 1..17: mol_type = other DNA
taacatggtattaatag

SEQ ID NO: 18185 - DNA, 17 bp, synthetic construct
  misc_feature 1..17: note = Oligonucleotide
  source 1..17: mol_type = other DNA
ctgtaacatggtattaa

SEQ ID NO: 18186 - DNA, 17 bp, synthetic construct
  misc_feature 1..17: note = Oligonucleotide
  source 1..17: mol_type = other DNA
catctgtaacatggtat

SEQ ID NO: 18187 - DNA, 17 bp, synthetic construct
  misc_feature 1..17: note = Oligonucleotide
  source 1..17: mol_type = other DNA
gctcatctgtaacatgg

SEQ ID NO: 18188 - DNA, 17 bp, synthetic construct
  misc_feature 1..17: note = Oligonucleotide
  source 1..17: mol_type = other DNA
gacgctcatctgtaaca

SEQ ID NO: 18189 - DNA, 17 bp, synthetic construct
  misc_feature 1..17: note = Oligonucleotide
  source 1..17: mol_type = other DNA
caggacgctcatctgta

SEQ ID NO: 18190 - DNA, 17 bp, synthetic construct
  misc_feature 1..17: note = Oligonucleotide
  source 1..17: mol_type = other DNA
taccaggacgctcatct

SEQ ID NO: 18191 - DNA, 17 bp, synthetic construct
  misc_feature 1..17: note = Oligonucleotide
  source 1..17: mol_type = other DNA
gcgtaccaggacgctca

SEQ ID NO: 18192 - DNA, 17 bp, synthetic construct
  misc_feature 1..17: note = Oligonucleotide
  source 1..17: mol_type = other DNA
cctgcgtaccaggacgc

SEQ ID NO: 18193 - DNA, 17 bp, synthetic construct
  misc_feature 1..17: note = Oligonucleotide
  source 1..17: mol_type = other DNA
ccacctgcgtaccagga

SEQ ID NO: 18194 - DNA, 17 bp, synthetic construct
  misc_feature 1..17: note = Oligonucleotide
  source 1..17: mol_type = other DNA
gccccacctgcgtacca

SEQ ID NO: 18195 - DNA, 17 bp, synthetic construct
  misc_feature 1..17: note = Oligonucleotide
  source 1..17: mol_type = other DNA
caggccccacctgcgta

SEQ ID NO: 18196 - DNA, 17 bp, synthetic construct
  misc_feature 1..17: note = Oligonucleotide
  source 1..17: mol_type = other DNA
tcacaggccccacctgc

SEQ ID NO: 18197 - DNA, 17 bp, synthetic construct
  misc_feature 1..17: note = Oligonucleotide
  source 1..17: mol_type = other DNA
ccgtcacaggccccacc

SEQ ID NO: 18198 - DNA, 17 bp, synthetic construct
  misc_feature 1..17: note = Oligonucleotide
  source 1..17: mol_type = other DNA
gacccgtcacaggcccc

SEQ ID NO: 18199 - DNA, 17 bp, synthetic construct
  misc_feature 1..17: note = Oligonucleotide
  source 1..17: mol_type = other DNA
ctggacccgtcacaggc

SEQ ID NO: 18200 - DNA, 17 bp, synthetic construct
  misc_feature 1..17: note = Oligonucleotide
  source 1..17: mol_type = other DNA
actctggacccgtcaca

SEQ ID NO: 18201 - DNA, 17 bp, synthetic construct
  misc_feature 1..17: note = Oligonucleotide
  source 1..17: mol_type = other DNA
gtgactctggacccgtc

SEQ ID NO: 18202 - DNA, 17 bp, synthetic construct
  misc_feature 1..17: note = Oligonucleotide
  source 1..17: mol_type = other DNA
tctgtgactctggaccc

SEQ ID NO: 18203 - DNA, 17 bp, synthetic construct
  misc_feature 1..17: note = Oligonucleotide
  source 1..17: mol_type = other DNA
agctctgtgactctgga

SEQ ID NO: 18204 - DNA, 17 bp, synthetic construct
  misc_feature 1..17: note = Oligonucleotide
  source 1..17: mol_type = other DNA
cgtagctctgtgactct

SEQ ID NO: 18205 - DNA, 17 bp, synthetic construct
  misc_feature 1..17: note = Oligonucleotide
  source 1..17: mol_type = other DNA
atccgtagctctgtgac

SEQ ID NO: 18206 - DNA, 17 bp, synthetic construct
  misc_feature 1..17: note = Oligonucleotide
  source 1..17: mol_type = other DNA
ctgatccgtagctctgt

SEQ ID NO: 18207 - DNA, 17 bp, synthetic construct
  misc_feature 1..17: note = Oligonucleotide
  source 1..17: mol_type = other DNA
aagctgatccgtagctc

SEQ ID NO: 18208 - DNA, 17 bp, synthetic construct
  misc_feature 1..17: note = Oligonucleotide
  source 1..17: mol_type = other DNA
gtgaagctgatccgtag

SEQ ID NO: 18209 - DNA, 17 bp, synthetic construct
  misc_feature 1..17: note = Oligonucleotide
  source 1..17: mol_type = other DNA
ccagtgaagctgatccg

SEQ ID NO: 18210 - DNA, 17 bp, synthetic construct
  misc_feature 1..17: note = Oligonucleotide
  source 1..17: mol_type = other DNA
ggcccagtgaagctgat

SEQ ID NO: 18211 - DNA, 17 bp, synthetic construct
  misc_feature 1..17: note = Oligonucleotide
  source 1..17: mol_type = other DNA
tggggcccagtgaagct

SEQ ID NO: 18212 - DNA, 17 bp, synthetic construct
  misc_feature 1..17: note = Oligonucleotide
  source 1..17: mol_type = other DNA
acctggggcccagtgaa

SEQ ID NO: 18213 - DNA, 17 bp, synthetic construct
  misc_feature 1..17: note = Oligonucleotide
  source 1..17: mol_type = other DNA
tctacctggggcccagt

SEQ ID NO: 18214 - DNA, 17 bp, synthetic construct
  misc_feature 1..17: note = Oligonucleotide
  source 1..17: mol_type = other DNA
gggtctacctggggccc

SEQ ID NO: 18215 - DNA, 17 bp, synthetic construct
  misc_feature 1..17: note = Oligonucleotide
  source 1..17: mol_type = other DNA
attgggtctacctgggg

SEQ ID NO: 18216 - DNA, 17 bp, synthetic construct
  misc_feature 1..17: note = Oligonucleotide
  source 1..17: mol_type = other DNA
gggattgggtctacctg

SEQ ID NO: 18217 - DNA, 17 bp, synthetic construct
  misc_feature 1..17: note = Oligonucleotide
  source 1..17: mol_type = other DNA
ttggggattgggtctac

SEQ ID NO: 18218 - DNA, 17 bp, synthetic construct
  misc_feature 1..17: note = Oligonucleotide
  source 1..17: mol_type = other DNA
aagttggggattgggtc

SEQ ID NO: 18219 - DNA, 17 bp, synthetic construct
  misc_feature 1..17: note = Oligonucleotide
  source 1..17: mol_type = other DNA
agaaagttggggattgg

SEQ ID NO: 18220 - DNA, 17 bp, synthetic construct
  misc_feature 1..17: note = Oligonucleotide
  source 1..17: mol_type = other DNA
cttagaaagttggggat

SEQ ID NO: 18221 - DNA, 17 bp, synthetic construct
  misc_feature 1..17: note = Oligonucleotide
  source 1..17: mol_type = other DNA
aggcttagaaagttggg

SEQ ID NO: 18222 - DNA, 17 bp, synthetic construct
  misc_feature 1..17: note = Oligonucleotide
  source 1..17: mol_type = other DNA
ctcaggcttagaaagtt

SEQ ID NO: 18223 - DNA, 17 bp, synthetic construct
  misc_feature 1..17: note = Oligonucleotide
  source 1..17: mol_type = other DNA
acactcaggcttagaaa

SEQ ID NO: 18224 - DNA, 17 bp, synthetic construct
  misc_feature 1..17: note = Oligonucleotide
  source 1..17: mol_type = other DNA
tgaacactcaggcttag

SEQ ID NO: 18225 - DNA, 17 bp, synthetic construct
  misc_feature 1..17: note = Oligonucleotide
  source 1..17: mol_type = other DNA
tgctgaacactcaggct

SEQ ID NO: 18226 - DNA, 17 bp, synthetic construct
  misc_feature 1..17: note = Oligonucleotide
  source 1..17: mol_type = other DNA
ctctgctgaacactcag

SEQ ID NO: 18227 - DNA, 17 bp, synthetic construct
  misc_feature 1..17: note = Oligonucleotide
  source 1..17: mol_type = other DNA
gccctctgctgaacact

SEQ ID NO: 18228 - DNA, 17 bp, synthetic construct
  misc_feature 1..17: note = Oligonucleotide
  source 1..17: mol_type = other DNA
tgagccctctgctgaac

SEQ ID NO: 18229 - DNA, 17 bp, synthetic construct
  misc_feature 1..17: note = Oligonucleotide
  source 1..17: mol_type = other DNA
ccctgagccctctgctg

SEQ ID NO: 18230 - DNA, 17 bp, synthetic construct
  misc_feature 1..17: note = Oligonucleotide
  source 1..17: mol_type = other DNA
gcaccctgagccctctg

SEQ ID NO: 18231 - DNA, 17 bp, synthetic construct
  misc_feature 1..17: note = Oligonucleotide
  source 1..17: mol_type = other DNA
gctgcaccctgagccct

SEQ ID NO: 18232 - DNA, 17 bp, synthetic construct
  misc_feature 1..17: note = Oligonucleotide
  source 1..17: mol_type = other DNA
cctgctgcaccctgagc

SEQ ID NO: 18233 - DNA, 17 bp, synthetic construct
  misc_feature 1..17: note = Oligonucleotide
  source 1..17: mol_type = other DNA
ggccctgctgcaccctg

SEQ ID NO: 18234 - DNA, 17 bp, synthetic construct
  misc_feature 1..17: note = Oligonucleotide
  source 1..17: mol_type = other DNA
ataggccctgctgcacc

SEQ ID NO: 18235 - DNA, 17 bp, synthetic construct
  misc_feature 1..17: note = Oligonucleotide
  source 1..17: mol_type = other DNA
tccataggccctgctgc

SEQ ID NO: 18236 - DNA, 17 bp, synthetic construct
  misc_feature 1..17: note = Oligonucleotide
  source 1..17: mol_type = other DNA
ccttccataggccctgc

SEQ ID NO: 18237 - DNA, 17 bp, synthetic construct
  misc_feature 1..17: note = Oligonucleotide
  source 1..17: mol_type = other DNA
gcgccttccataggccc

SEQ ID NO: 18238 - DNA, 17 bp, synthetic construct
  misc_feature 1..17: note = Oligonucleotide
  source 1..17: mol_type = other DNA
ggggcgccttccatagg

SEQ ID NO: 18239 - DNA, 17 bp, synthetic construct
  misc_feature 1..17: note = Oligonucleotide
  source 1..17: mol_type = other DNA
gaaggggcgccttccat

SEQ ID NO: 18240 - DNA, 17 bp, synthetic construct
  misc_feature 1..17: note = Oligonucleotide
  source 1..17: mol_type = other DNA
caggaaggggcgccttc

SEQ ID NO: 18241 - DNA, 17 bp, synthetic construct
  misc_feature 1..17: note = Oligonucleotide
  source 1..17: mol_type = other DNA
gcacaggaaggggcgcc

SEQ ID NO: 18242 - DNA, 17 bp, synthetic construct
  misc_feature 1..17: note = Oligonucleotide
  source 1..17: mol_type = other DNA
gcagcacaggaaggggc

SEQ ID NO: 18243 - DNA, 17 bp, synthetic construct
  misc_feature 1..17: note = Oligonucleotide
  source 1..17: mol_type = other DNA
gcggcagcacaggaagg

SEQ ID NO: 18244 - DNA, 17 bp, synthetic construct
  misc_feature 1..17: note = Oligonucleotide
  source 1..17: mol_type = other DNA
ggggcggcagcacagga

SEQ ID NO: 18245 - DNA, 17 bp, synthetic construct
  misc_feature 1..17: note = Oligonucleotide
  source 1..17: mol_type = other DNA
gcaggggcggcagcaca

SEQ ID NO: 18246 - DNA, 17 bp, synthetic construct
  misc_feature 1..17: note = Oligonucleotide
  source 1..17: mol_type = other DNA
agagcaggggcggcagc

SEQ ID NO: 18247 - DNA, 17 bp, synthetic construct
  misc_feature 1..17: note = Oligonucleotide
  source 1..17: mol_type = other DNA
tgcagagcaggggcggc

SEQ ID NO: 18248 - DNA, 17 bp, synthetic construct
  misc_feature 1..17: note = Oligonucleotide
  source 1..17: mol_type = other DNA
ggctgcagagcaggggc

SEQ ID NO: 18249 - DNA, 17 bp, synthetic construct
  misc_feature 1..17: note = Oligonucleotide
  source 1..17: mol_type = other DNA
ccaggctgcagagcagg

SEQ ID NO: 18250 - DNA, 17 bp, synthetic construct
  misc_feature 1..17: note = Oligonucleotide
  source 1..17: mol_type = other DNA
agaccaggctgcagagc

SEQ ID NO: 18251 - DNA, 17 bp, synthetic construct
  misc_feature 1..17: note = Oligonucleotide
  source 1..17: mol_type = other DNA
ctgagaccaggctgcag

SEQ ID NO: 18252 - DNA, 17 bp, synthetic construct
  misc_feature 1..17: note = Oligonucleotide
  source 1..17: mol_type = other DNA
tcgctgagaccaggctg

SEQ ID NO: 18253 - DNA, 17 bp, synthetic construct
  misc_feature 1..17: note = Oligonucleotide
  source 1..17: mol_type = other DNA
acatcgctgagaccagg

SEQ ID NO: 18254 - DNA, 17 bp, synthetic construct
  misc_feature 1..17: note = Oligonucleotide
  source 1..17: mol_type = other DNA
gagacatcgctgagacc

SEQ ID NO: 18255 - DNA, 17 bp, synthetic construct
  misc_feature 1..17: note = Oligonucleotide
  source 1..17: mol_type = other DNA
acggagacatcgctgag

SEQ ID NO: 18256 - DNA, 17 bp, synthetic construct
  misc_feature 1..17: note = Oligonucleotide
  source 1..17: mol_type = other DNA
gacacggagacatcgct

SEQ ID NO: 18257 - DNA, 17 bp, synthetic construct
  misc_feature 1..17: note = Oligonucleotide
  source 1..17: mol_type = other DNA
acagacacggagacatc

SEQ ID NO: 18258 - DNA, 17 bp, synthetic construct
  misc_feature 1..17: note = Oligonucleotide
  source 1..17: mol_type = other DNA
aagacagacacggagac

SEQ ID NO: 18259 - DNA, 17 bp, synthetic construct
  misc_feature 1..17: note = Oligonucleotide
  source 1..17: mol_type = other DNA
gcaaagacagacacgga

SEQ ID NO: 18260 - DNA, 17 bp, synthetic construct
  misc_feature 1..17: note = Oligonucleotide
  source 1..17: mol_type = other DNA
caggcaaagacagacac

SEQ ID NO: 18261 - DNA, 17 bp, synthetic construct
  misc_feature 1..17: note = Oligonucleotide
  source 1..17: mol_type = other DNA
gcccaggcaaagacaga

SEQ ID NO: 18262 - DNA, 17 bp, synthetic construct
  misc_feature 1..17: note = Oligonucleotide
  source 1..17: mol_type = other DNA
caagcccaggcaaagac

SEQ ID NO: 18263 - DNA, 17 bp, synthetic construct
  misc_feature 1..17: note = Oligonucleotide
  source 1..17: mol_type = other DNA
caacaagcccaggcaaa

SEQ ID NO: 18264 - DNA, 17 bp, synthetic construct
  misc_feature 1..17: note = Oligonucleotide
  source 1..17: mol_type = other DNA
gtccaacaagcccaggc

SEQ ID NO: 18265 - DNA, 17 bp, synthetic construct
  misc_feature 1..17: note = Oligonucleotide
  source 1..17: mol_type = other DNA
cgagtccaacaagccca

SEQ ID NO: 18266 - DNA, 17 bp, synthetic construct
  misc_feature 1..17: note = Oligonucleotide
  source 1..17: mol_type = other DNA
ttgcgagtccaacaagc

SEQ ID NO: 18267 - DNA, 17 bp, synthetic construct
  misc_feature 1..17: note = Oligonucleotide
  source 1..17: mol_type = other DNA
gccttgcgagtccaaca

SEQ ID NO: 18268 - DNA, 17 bp, synthetic construct
  misc_feature 1..17: note = Oligonucleotide
  source 1..17: mol_type = other DNA
ccagccttgcgagtcca

SEQ ID NO: 18269 - DNA, 17 bp, synthetic construct
  misc_feature 1..17: note = Oligonucleotide
  source 1..17: mol_type = other DNA
cagccagccttgcgagt

SEQ ID NO: 18270 - DNA, 17 bp, synthetic construct
  misc_feature 1..17: note = Oligonucleotide
  source 1..17: mol_type = other DNA
gtacagccagccttgcg

SEQ ID NO: 18271 - DNA, 17 bp, synthetic construct
  misc_feature 1..17: note = Oligonucleotide
  source 1..17: mol_type = other DNA
gcagtacagccagcctt

SEQ ID NO: 18272 - DNA, 17 bp, synthetic construct
  misc_feature 1..17: note = Oligonucleotide
  source 1..17: mol_type = other DNA
ggggcagtacagccagc

SEQ ID NO: 18273 - DNA, 17 bp, synthetic construct
  misc_feature 1..17: note = Oligonucleotide
  source 1..17: mol_type = other DNA
tttggggcagtacagcc

SEQ ID NO: 18274 - DNA, 17 bp, synthetic construct
  misc_feature 1..17: note = Oligonucleotide
  source 1..17: mol_type = other DNA
agatttggggcagtaca

SEQ ID NO: 18275 - DNA, 17 bp, synthetic construct
  misc_feature 1..17: note = Oligonucleotide
  source 1..17: mol_type = other DNA
ttgagatttggggcagt

SEQ ID NO: 18276 - DNA, 17 bp, synthetic construct
  misc_feature 1..17: note = Oligonucleotide
  source 1..17: mol_type = other DNA
gaattgagatttggggc

SEQ ID NO: 18277 - DNA, 17 bp, synthetic construct
  misc_feature 1..17: note = Oligonucleotide
  source 1..17: mol_type = other DNA
ggagaattgagatttgg

SEQ ID NO: 18278 - DNA, 17 bp, synthetic construct
  misc_feature 1..17: note = Oligonucleotide
  source 1..17: mol_type = other DNA
aggggagaattgagatt

SEQ ID NO: 18279 - DNA, 17 bp, synthetic construct
  misc_feature 1..17: note = Oligonucleotide
  source 1..17: mol_type = other DNA
ttcaggggagaattgag

SEQ ID NO: 18280 - DNA, 17 bp, synthetic construct
  misc_feature 1..17: note = Oligonucleotide
  source 1..17: mol_type = other DNA
agcttcaggggagaatt

SEQ ID NO: 18281 - DNA, 17 bp, synthetic construct
  misc_feature 1..17: note = Oligonucleotide
  source 1..17: mol_type = other DNA
gaaagcttcaggggaga

SEQ ID NO: 18282 - DNA, 17 bp, synthetic construct
  misc_feature 1..17: note = Oligonucleotide
  source 1..17: mol_type = other DNA
taagaaagcttcagggg

SEQ ID NO: 18283 - DNA, 17 bp, synthetic construct
  misc_feature 1..17: note = Oligonucleotide
  source 1..17: mol_type = other DNA
ctataagaaagcttcag

SEQ ID NO: 18284 - DNA, 17 bp, synthetic construct
  misc_feature 1..17: note = Oligonucleotide
  source 1..17: mol_type = other DNA
ggtctataagaaagctt

SEQ ID NO: 18285 - DNA, 17 bp, synthetic construct
  misc_feature 1..17: note = Oligonucleotide
  source 1..17: mol_type = other DNA
gcgggtctataagaaag

SEQ ID NO: 18286 - DNA, 17 bp, synthetic construct
  misc_feature 1..17: note = Oligonucleotide
  source 1..17: mol_type = other DNA
tccgcgggtctataaga

SEQ ID NO: 18287 - DNA, 17 bp, synthetic construct
  misc_feature 1..17: note = Oligonucleotide
  source 1..17: mol_type = other DNA
aaatccgcgggtctata

SEQ ID NO: 18288 - DNA, 17 bp, synthetic construct
  misc_feature 1..17: note = Oligonucleotide
  source 1..17: mol_type = other DNA
agaaaatccgcgggtct

SEQ ID NO: 18289 - DNA, 17 bp, synthetic construct
  misc_feature 1..17: note = Oligonucleotide
  source 1..17: mol_type = other DNA
cttagaaaatccgcggg

SEQ ID NO: 18290 - DNA, 17 bp, synthetic construct
  misc_feature 1..17: note = Oligonucleotide
  source 1..17: mol_type = other DNA
gcccttagaaaatccgc

SEQ ID NO: 18291 - DNA, 17 bp, synthetic construct
  misc_feature 1..17: note = Oligonucleotide
  source 1..17: mol_type = other DNA
ccagcccttagaaaatc

SEQ ID NO: 18292 - DNA, 17 bp, synthetic construct
  misc_feature 1..17: note = Oligonucleotide
  source 1..17: mol_type = other DNA
cgcccagcccttagaaa

SEQ ID NO: 18293 - DNA, 17 bp, synthetic construct
  misc_feature 1..17: note = Oligonucleotide
  source 1..17: mol_type = other DNA
ggccgcccagcccttag

SEQ ID NO: 18294 - DNA, 17 bp, synthetic construct
  misc_feature 1..17: note = Oligonucleotide
  source 1..17: mol_type = other DNA
ctgggccgcccagccct

SEQ ID NO: 18295 - DNA, 17 bp, synthetic construct
  misc_feature 1..17: note = Oligonucleotide
  source 1..17: mol_type = other DNA
ccactgggccgcccagc

SEQ ID NO: 18296 - DNA, 17 bp, synthetic construct
  misc_feature 1..17: note = Oligonucleotide
  source 1..17: mol_type = other DNA
cagccactgggccgccc

SEQ ID NO: 18297 - DNA, 17 bp, synthetic construct
  misc_feature 1..17: note = Oligonucleotide
  source 1..17: mol_type = other DNA
tttcagccactgggccg

SEQ ID NO: 18298 - DNA, 17 bp, synthetic construct
  misc_feature 1..17: note = Oligonucleotide
  source 1..17: mol_type = other DNA
ttctttcagccactggg

SEQ ID NO: 18299 - DNA, 17 bp, synthetic construct
  misc_feature 1..17: note = Oligonucleotide
  source 1..17: mol_type = other DNA
gtgttctttcagccact

SEQ ID NO: 18300 - DNA, 17 bp, synthetic construct
  misc_feature 1..17: note = Oligonucleotide
  source 1..17: mol_type = other DNA
aatgtgttctttcagcc

SEQ ID NO: 18301 - DNA, 17 bp, synthetic construct
  misc_feature 1..17: note = Oligonucleotide
  source 1..17: mol_type = other DNA
cagaatgtgttctttca

SEQ ID NO: 18302 - DNA, 17 bp, synthetic construct
  misc_feature 1..17: note = Oligonucleotide
  source 1..17: mol_type = other DNA
atgcagaatgtgttctt

SEQ ID NO: 18303 - DNA, 17 bp, synthetic construct
  misc_feature 1..17: note = Oligonucleotide
  source 1..17: mol_type = other DNA
ggaatgcagaatgtgtt

SEQ ID NO: 18304 - DNA, 17 bp, synthetic construct
  misc_feature 1..17: note = Oligonucleotide
  source 1..17: mol_type = other DNA
tccggaatgcagaatgt

SEQ ID NO: 18305 - DNA, 17 bp, synthetic construct
  misc_feature 1..17: note = Oligonucleotide
  source 1..17: mol_type = other DNA
acatccggaatgcagaa

SEQ ID NO: 18306 - DNA, 17 bp, synthetic construct
  misc_feature 1..17: note = Oligonucleotide
  source 1..17: mol_type = other DNA
gaaacatccggaatgca

SEQ ID NO: 18307 - DNA, 17 bp, synthetic construct
  misc_feature 1..17: note = Oligonucleotide
  source 1..17: mol_type = other DNA
atggaaacatccggaat

SEQ ID NO: 18308 - DNA, 17 bp, synthetic construct
  misc_feature 1..17: note = Oligonucleotide
  source 1..17: mol_type = other DNA
gggatggaaacatccgg

SEQ ID NO: 18309 - DNA, 17 bp, synthetic construct
  misc_feature 1..17: note = Oligonucleotide
  source 1..17: mol_type = other DNA
tgcgggatggaaacatc

SEQ ID NO: 18310 - DNA, 17 bp, synthetic construct
  misc_feature 1..17: note = Oligonucleotide
  source 1..17: mol_type = other DNA
ttctgcgggatggaaac

SEQ ID NO: 18311 - DNA, 17 bp, synthetic construct
  misc_feature 1..17: note = Oligonucleotide
  source 1..17: mol_type = other DNA
cctttctgcgggatgga

SEQ ID NO: 18312 - DNA, 17 bp, synthetic construct
  misc_feature 1..17: note = Oligonucleotide
  source 1..17: mol_type = other DNA
cagcctttctgcgggat

SEQ ID NO: 18313 - DNA, 17 bp, synthetic construct
  misc_feature 1..17: note = Oligonucleotide
  source 1..17: mol_type = other DNA
gagcagcctttctgcgg

SEQ ID NO: 18314 - DNA, 17 bp, synthetic construct
  misc_feature 1..17: note = Oligonucleotide
  source 1..17: mol_type = other DNA
caggagcagcctttctg

SEQ ID NO: 18315 - DNA, 17 bp, synthetic construct
  misc_feature 1..17: note = Oligonucleotide
  source 1..17: mol_type = other DNA
actcaggagcagccttt

SEQ ID NO: 18316 - DNA, 17 bp, synthetic construct
  misc_feature 1..17: note = Oligonucleotide
  source 1..17: mol_type = other DNA
ccaactcaggagcagcc

SEQ ID NO: 18317 - DNA, 17 bp, synthetic construct
  misc_feature 1..17: note = Oligonucleotide
  source 1..17: mol_type = other DNA
cctccaactcaggagca

SEQ ID NO: 18318 - DNA, 17 bp, synthetic construct
  misc_feature 1..17: note = Oligonucleotide
  source 1..17: mol_type = other DNA
gtgcctccaactcagga

SEQ ID NO: 18319 - DNA, 17 bp, synthetic construct
  misc_feature 1..17: note = Oligonucleotide
  source 1..17: mol_type = other DNA
cgcgtgcctccaactca

SEQ ID NO: 18320 - DNA, 17 bp, synthetic construct
  misc_feature 1..17: note = Oligonucleotide
  source 1..17: mol_type = other DNA
caacgcgtgcctccaac

SEQ ID NO: 18321 - DNA, 17 bp, synthetic construct
  misc_feature 1..17: note = Oligonucleotide
  source 1..17: mol_type = other DNA
tggcaacgcgtgcctcc

SEQ ID NO: 18322 - DNA, 17 bp, synthetic construct
  misc_feature 1..17: note = Oligonucleotide
  source 1..17: mol_type = other DNA
ctgtggcaacgcgtgcc

SEQ ID NO: 18323 - DNA, 17 bp, synthetic construct
  misc_feature 1..17: note = Oligonucleotide
  source 1..17: mol_type = other DNA
agcctgtggcaacgcgt

SEQ ID NO: 18324 - DNA, 17 bp, synthetic construct
  misc_feature 1..17: note = Oligonucleotide
  source 1..17: mol_type = other DNA
aggagcctgtggcaacg

SEQ ID NO: 18325 - DNA, 17 bp, synthetic construct
  misc_feature 1..17: note = Oligonucleotide
  source 1..17: mol_type = other DNA
gggaggagcctgtggca

SEQ ID NO: 18326 - DNA, 17 bp, synthetic construct
  misc_feature 1..17: note = Oligonucleotide
  source 1..17: mol_type = other DNA
gcagggaggagcctgtg

SEQ ID NO: 18327 - DNA, 17 bp, synthetic construct
  misc_feature 1..17: note = Oligonucleotide
  source 1..17: mol_type = other DNA
aatgcagggaggagcct

SEQ ID NO: 18328 - DNA, 17 bp, synthetic construct
  misc_feature 1..17: note = Oligonucleotide
  source 1..17: mol_type = other DNA
atgaatgcagggaggag

SEQ ID NO: 18329 - DNA, 17 bp, synthetic construct
  misc_feature 1..17: note = Oligonucleotide
  source 1..17: mol_type = other DNA
aaaatgaatgcagggag

SEQ ID NO: 18330 - DNA, 17 bp, synthetic construct
  misc_feature 1..17: note = Oligonucleotide
  source 1..17: mol_type = other DNA
caaaaaatgaatgcagg

SEQ ID NO: 18331 - DNA, 17 bp, synthetic construct
  misc_feature 1..17: note = Oligonucleotide
  source 1..17: mol_type = other DNA
gtacaaaaaatgaatgc

SEQ ID NO: 18332 - DNA, 17 bp, synthetic construct
  misc_feature 1..17: note = Oligonucleotide
  source 1..17: mol_type = other DNA
cacgtacaaaaaatgaa

SEQ ID NO: 18333 - DNA, 17 bp, synthetic construct
  misc_feature 1..17: note = Oligonucleotide
  source 1..17: mol_type = other DNA
gaacacgtacaaaaaat

SEQ ID NO: 18334 - DNA, 17 bp, synthetic construct
  misc_feature 1..17: note = Oligonucleotide
  source 1..17: mol_type = other DNA
aatgaacacgtacaaaa

SEQ ID NO: 18335 - DNA, 17 bp, synthetic construct
  misc_feature 1..17: note = Oligonucleotide
  source 1..17: mol_type = other DNA
atgaatgaacacgtaca

SEQ ID NO: 18336 - DNA, 17 bp, synthetic construct
  misc_feature 1..17: note = Oligonucleotide
  source 1..17: mol_type = other DNA
aggatgaatgaacacgt

SEQ ID NO: 18337 - DNA, 17 bp, synthetic construct
  misc_feature 1..17: note = Oligonucleotide
  source 1..17: mol_type = other DNA
gaaaggatgaatgaaca

SEQ ID NO: 18338 - DNA, 17 bp, synthetic construct
  misc_feature 1..17: note = Oligonucleotide
  source 1..17: mol_type = other DNA
gctgaaaggatgaatga

SEQ ID NO: 18339 - DNA, 17 bp, synthetic construct
  misc_feature 1..17: note = Oligonucleotide
  source 1..17: mol_type = other DNA
tctgctgaaaggatgaa

SEQ ID NO: 18340 - DNA, 17 bp, synthetic construct
  misc_feature 1..17: note = Oligonucleotide
  source 1..17: mol_type = other DNA
gtgtctgctgaaaggat

SEQ ID NO: 18341 - DNA, 17 bp, synthetic construct
  misc_feature 1..17: note = Oligonucleotide
  source 1..17: mol_type = other DNA
tttgtgtctgctgaaag

SEQ ID NO: 18342 - DNA, 17 bp, synthetic construct
  misc_feature 1..17: note = Oligonucleotide
  source 1..17: mol_type = other DNA
agttttgtgtctgctga

SEQ ID NO: 18343 - DNA, 17 bp, synthetic construct
  misc_feature 1..17: note = Oligonucleotide
  source 1..17: mol_type = other DNA
cttagttttgtgtctgc

SEQ ID NO: 18344 - DNA, 17 bp, synthetic construct
  misc_feature 1..17: note = Oligonucleotide
  source 1..17: mol_type = other DNA
ggtcttagttttgtgtc

SEQ ID NO: 18345 - DNA, 17 bp, synthetic construct
  misc_feature 1..17: note = Oligonucleotide
  source 1..17: mol_type = other DNA
gcaggtcttagttttgt

SEQ ID NO: 18346 - DNA, 17 bp, synthetic construct
  misc_feature 1..17: note = Oligonucleotide
  source 1..17: mol_type = other DNA
acagcaggtcttagttt

SEQ ID NO: 18347 - DNA, 17 bp, synthetic construct
  misc_feature 1..17: note = Oligonucleotide
  source 1..17: mol_type = other DNA
cacacagcaggtcttag

SEQ ID NO: 18348 - DNA, 17 bp, synthetic construct
  misc_feature 1..17: note = Oligonucleotide
  source 1..17: mol_type = other DNA
cctcacacagcaggtct

SEQ ID NO: 18349 - DNA, 17 bp, synthetic construct
  misc_feature 1..17: note = Oligonucleotide
  source 1..17: mol_type = other DNA
gcccctcacacagcagg

SEQ ID NO: 18350 - DNA, 17 bp, synthetic construct
  misc_feature 1..17: note = Oligonucleotide
  source 1..17: mol_type = other DNA
ggagcccctcacacagc

SEQ ID NO: 18351 - DNA, 17 bp, synthetic construct
  misc_feature 1..17: note = Oligonucleotide
  source 1..17: mol_type = other DNA
gctggagcccctcacac

SEQ ID NO: 18352 - DNA, 17 bp, synthetic construct
  misc_feature 1..17: note = Oligonucleotide
  source 1..17: mol_type = other DNA
tgagctggagcccctca

SEQ ID NO: 18353 - DNA, 17 bp, synthetic construct
  misc_feature 1..17: note = Oligonucleotide
  source 1..17: mol_type = other DNA
aggtgagctggagcccc

SEQ ID NO: 18354 - DNA, 17 bp, synthetic construct
  misc_feature 1..17: note = Oligonucleotide
  source 1..17: mol_type = other DNA
agcaggtgagctggagc

SEQ ID NO: 18355 - DNA, 17 bp, synthetic construct
  misc_feature 1..17: note = Oligonucleotide
  source 1..17: mol_type = other DNA
cagagcaggtgagctgg

SEQ ID NO: 18356 - DNA, 17 bp, synthetic construct
  misc_feature 1..17: note = Oligonucleotide
  source 1..17: mol_type = other DNA
ccacagagcaggtgagc

SEQ ID NO: 18357 - DNA, 17 bp, synthetic construct
  misc_feature 1..17: note = Oligonucleotide
  source 1..17: mol_type = other DNA
tccccacagagcaggtg

SEQ ID NO: 18358 - DNA, 17 bp, synthetic construct
  misc_feature 1..17: note = Oligonucleotide
  source 1..17: mol_type = other DNA
ccatccccacagagcag

SEQ ID NO: 18359 - DNA, 17 bp, synthetic construct
  misc_feature 1..17: note = Oligonucleotide
  source 1..17: mol_type = other DNA
ctgccatccccacagag

SEQ ID NO: 18360 - DNA, 17 bp, synthetic construct
  misc_feature 1..17: note = Oligonucleotide
  source 1..17: mol_type = other DNA
attctgccatccccaca

SEQ ID NO: 18361 - DNA, 17 bp, synthetic construct
  misc_feature 1..17: note = Oligonucleotide
  source 1..17: mol_type = other DNA
agaattctgccatcccc

SEQ ID NO: 18362 - DNA, 17 bp, synthetic construct
  misc_feature 1..17: note = Oligonucleotide
  source 1..17: mol_type = other DNA
aacagaattctgccatc

SEQ ID NO: 18363 - DNA, 17 bp, synthetic construct
  misc_feature 1..17: note = Oligonucleotide
  source 1..17: mol_type = other DNA
aaaaacagaattctgcc

SEQ ID NO: 18364 - DNA, 17 bp, synthetic construct
  misc_feature 1..17: note = Oligonucleotide
  source 1..17: mol_type = other DNA
ggaaaaaacagaattct

SEQ ID NO: 18365 - DNA, 17 bp, synthetic construct
  misc_feature 1..17: note = Oligonucleotide
  source 1..17: mol_type = other DNA
gaaggaaaaaacagaat

SEQ ID NO: 18366 - DNA, 17 bp, synthetic construct
  misc_feature 1..17: note = Oligonucleotide
  source 1..17: mol_type = other DNA
gaggaaggaaaaaacag

SEQ ID NO: 18367 - DNA, 17 bp, synthetic construct
  misc_feature 1..17: note = Oligonucleotide
  source 1..17: mol_type = other DNA
tgcgaggaaggaaaaaa

SEQ ID NO: 18368 - DNA, 17 bp, synthetic construct
  misc_feature 1..17: note = Oligonucleotide
  source 1..17: mol_type = other DNA
gtttgcgaggaaggaaa

SEQ ID NO: 18369 - DNA, 17 bp, synthetic construct
  misc_feature 1..17: note = Oligonucleotide
  source 1..17: mol_type = other DNA
aatgtttgcgaggaagg

SEQ ID NO: 18370 - DNA, 17 bp, synthetic construct
  misc_feature 1..17: note = Oligonucleotide
  source 1..17: mol_type = other DNA
ataaatgtttgcgagga

SEQ ID NO: 18371 - DNA, 17 bp, synthetic construct
  misc_feature 1..17: note = Oligonucleotide
  source 1..17: mol_type = other DNA
ccaataaatgtttgcga

SEQ ID NO: 18372 - DNA, 17 bp, synthetic construct
  misc_feature 1..17: note = Oligonucleotide
  source 1..17: mol_type = other DNA
cacccaataaatgtttg

SEQ ID NO: 18373 - DNA, 17 bp, synthetic construct
  misc_feature 1..17: note = Oligonucleotide
  source 1..17: mol_type = other DNA
aggcacccaataaatgt

SEQ ID NO: 18374 - DNA, 17 bp, synthetic construct
  misc_feature 1..17: note = Oligonucleotide
  source 1..17: mol_type = other DNA
accaggcacccaataaa

SEQ ID NO: 18375 - DNA, 17 bp, synthetic construct
  misc_feature 1..17: note = Oligonucleotide
  source 1..17: mol_type = other DNA
cgcaccaggcacccaat

SEQ ID NO: 18376 - DNA, 17 bp, synthetic construct
  misc_feature 1..17: note = Oligonucleotide
  source 1..17: mol_type = other DNA
tgacgcaccaggcaccc

SEQ ID NO: 18377 - DNA, 17 bp, synthetic construct
  misc_feature 1..17: note = Oligonucleotide
  source 1..17: mol_type = other DNA
ctctgacgcaccaggca

SEQ ID NO: 18378 - DNA, 17 bp, synthetic construct
  misc_feature 1..17: note = Oligonucleotide
  source 1..17: mol_type = other DNA
cacctctgacgcaccag

SEQ ID NO: 18379 - DNA, 17 bp, synthetic construct
  misc_feature 1..17: note = Oligonucleotide
  source 1..17: mol_type = other DNA
caccacctctgacgcac

SEQ ID NO: 18380 - DNA, 17 bp, synthetic construct
  misc_feature 1..17: note = Oligonucleotide
  source 1..17: mol_type = other DNA
acccaccacctctgacg

SEQ ID NO: 18381 - DNA, 17 bp, synthetic construct
  misc_feature 1..17: note = Oligonucleotide
  source 1..17: mol_type = other DNA
gagacccaccacctctg

SEQ ID NO: 18382 - DNA, 17 bp, synthetic construct
  misc_feature 1..17: note = Oligonucleotide
  source 1..17: mol_type = other DNA
cctgagacccaccacct

SEQ ID NO: 18383 - DNA, 17 bp, synthetic construct
  misc_feature 1..17: note = Oligonucleotide
  source 1..17: mol_type = other DNA
cttcctgagacccacca

SEQ ID NO: 18384 - DNA, 17 bp, synthetic construct
  misc_feature 1..17: note = Oligonucleotide
  source 1..17: mol_type = other DNA
caacttcctgagaccca

SEQ ID NO: 18385 - DNA, 17 bp, synthetic construct
  misc_feature 1..17: note = Oligonucleotide
  source 1..17: mol_type = other DNA
tgtcaacttcctgagac

SEQ ID NO: 18386 - DNA, 17 bp, synthetic construct
  misc_feature 1..17: note = Oligonucleotide
  source 1..17: mol_type = other DNA
ggctgtcaacttcctga

SEQ ID NO: 18387 - DNA, 17 bp, synthetic construct
  misc_feature 1..17: note = Oligonucleotide
  source 1..17: mol_type = other DNA
ctcggctgtcaacttcc

SEQ ID NO: 18388 - DNA, 17 bp, synthetic construct
  misc_feature 1..17: note = Oligonucleotide
  source 1..17: mol_type = other DNA
gccctcggctgtcaact

SEQ ID NO: 18389 - DNA, 17 bp, synthetic construct
  misc_feature 1..17: note = Oligonucleotide
  source 1..17: mol_type = other DNA
cgggccctcggctgtca

SEQ ID NO: 18390 - DNA, 17 bp, synthetic construct
  misc_feature 1..17: note = Oligonucleotide
  source 1..17: mol_type = other DNA
gcccgggccctcggctg

SEQ ID NO: 18391 - DNA, 17 bp, synthetic construct
  misc_feature 1..17: note = Oligonucleotide
  source 1..17: mol_type = other DNA
ttagcccgggccctcgg

SEQ ID NO: 18392 - DNA, 17 bp, synthetic construct
  misc_feature 1..17: note = Oligonucleotide
  source 1..17: mol_type = other DNA
tgcttagcccgggccct

SEQ ID NO: 18393 - DNA, 17 bp, synthetic construct
  misc_feature 1..17: note = Oligonucleotide
  source 1..17: mol_type = other DNA
tgctgcttagcccgggc

SEQ ID NO: 18394 - DNA, 17 bp, synthetic construct
  misc_feature 1..17: note = Oligonucleotide
  source 1..17: mol_type = other DNA
aactgctgcttagcccg

SEQ ID NO: 18395 - DNA, 17 bp, synthetic construct
  misc_feature 1..17: note = Oligonucleotide
  source 1..17: mol_type = other DNA
cctaactgctgcttagc

SEQ ID NO: 18396 - DNA, 17 bp, synthetic construct
  misc_feature 1..17: note = Oligonucleotide
  source 1..17: mol_type = other DNA
ccacctaactgctgctt

SEQ ID NO: 18397 - DNA, 17 bp, synthetic construct
  misc_feature 1..17: note = Oligonucleotide
  source 1..17: mol_type = other DNA
tgcccacctaactgctg

SEQ ID NO: 18398 - DNA, 17 bp, synthetic construct
  misc_feature 1..17: note = Oligonucleotide
  source 1..17: mol_type = other DNA
cactgcccacctaactg

SEQ ID NO: 18399 - DNA, 17 bp, synthetic construct
  misc_feature 1..17: note = Oligonucleotide
  source 1..17: mol_type = other DNA
gatcactgcccacctaa

SEQ ID NO: 18400 - DNA, 17 bp, synthetic construct
  misc_feature 1..17: note = Oligonucleotide
  source 1..17: mol_type = other DNA
ggggatcactgcccacc

SEQ ID NO: 18401 - DNA, 17 bp, synthetic construct
  misc_feature 1..17: note = Oligonucleotide
  source 1..17: mol_type = other DNA
taaggggatcactgccc

SEQ ID NO: 18402 - DNA, 17 bp, synthetic construct
  misc_feature 1..17: note = Oligonucleotide
  source 1..17: mol_type = other DNA
ccataaggggatcactg

SEQ ID NO: 18403 - DNA, 17 bp, synthetic construct
  misc_feature 1..17: note = Oligonucleotide
  source 1..17: mol_type = other DNA
gccccataaggggatca

SEQ ID NO: 18404 - DNA, 17 bp, synthetic construct
  misc_feature 1..17: note = Oligonucleotide
  source 1..17: mol_type = other DNA
gcagccccataagggga

SEQ ID NO: 18405 - DNA, 17 bp, synthetic construct
  misc_feature 1..17: note = Oligonucleotide
  source 1..17: mol_type = other DNA
agggcagccccataagg

SEQ ID NO: 18406 - DNA, 17 bp, synthetic construct
  misc_feature 1..17: note = Oligonucleotide
  source 1..17: mol_type = other DNA
accagggcagccccata

SEQ ID NO: 18407 - DNA, 17 bp, synthetic construct
  misc_feature 1..17: note = Oligonucleotide
  source 1..17: mol_type = other DNA
ctcaccagggcagcccc

SEQ ID NO: 18408 - DNA, 17 bp, synthetic construct
  misc_feature 1..17: note = Oligonucleotide
  source 1..17: mol_type = other DNA
ccactcaccagggcagc

SEQ ID NO: 18409 - DNA, 17 bp, synthetic construct
  misc_feature 1..17: note = Oligonucleotide
  source 1..17: mol_type = other DNA
tgtccactcaccagggc

SEQ ID NO: 18410 - DNA, 17 bp, synthetic construct
  misc_feature 1..17: note = Oligonucleotide
  source 1..17: mol_type = other DNA
ccttgtccactcaccag

SEQ ID NO: 18411 - DNA, 17 bp, synthetic construct
  misc_feature 1..17: note = Oligonucleotide
  source 1..17: mol_type = other DNA
gacccttgtccactcac

SEQ ID NO: 18412 - DNA, 17 bp, synthetic construct
  misc_feature 1..17: note = Oligonucleotide
  source 1..17: mol_type = other DNA
gcagacccttgtccact

SEQ ID NO: 18413 - DNA, 17 bp, synthetic construct
  misc_feature 1..17: note = Oligonucleotide
  source 1..17: mol_type = other DNA
gctgcagacccttgtcc

SEQ ID NO: 18414 - DNA, 17 bp, synthetic construct
  misc_feature 1..17: note = Oligonucleotide
  source 1..17: mol_type = other DNA
agagctgcagacccttg

SEQ ID NO: 18415 - DNA, 17 bp, synthetic construct
  misc_feature 1..17: note = Oligonucleotide
  source 1..17: mol_type = other DNA
ccgagagctgcagaccc

SEQ ID NO: 18416 - DNA, 17 bp, synthetic construct
  misc_feature 1..17: note = Oligonucleotide
  source 1..17: mol_type = other DNA
ctcccgagagctgcaga

SEQ ID NO: 18417 - DNA, 17 bp, synthetic construct
  misc_feature 1..17: note = Oligonucleotide
  source 1..17: mol_type = other DNA
cccctcccgagagctgc

SEQ ID NO: 18418 - DNA, 17 bp, synthetic construct
  misc_feature 1..17: note = Oligonucleotide
  source 1..17: mol_type = other DNA
cagcccctcccgagagc

SEQ ID NO: 18419 - DNA, 17 bp, synthetic construct
  misc_feature 1..17: note = Oligonucleotide
  source 1..17: mol_type = other DNA
cctcagcccctcccgag

SEQ ID NO: 18420 - DNA, 17 bp, synthetic construct
  misc_feature 1..17: note = Oligonucleotide
  source 1..17: mol_type = other DNA
cttcctcagcccctccc

SEQ ID NO: 18421 - DNA, 17 bp, synthetic construct
  misc_feature 1..17: note = Oligonucleotide
  source 1..17: mol_type = other DNA
gaacttcctcagcccct

SEQ ID NO: 18422 - DNA, 17 bp, synthetic construct
  misc_feature 1..17: note = Oligonucleotide
  source 1..17: mol_type = other DNA
accgaacttcctcagcc

SEQ ID NO: 18423 - DNA, 17 bp, synthetic construct
  misc_feature 1..17: note = Oligonucleotide
  source 1..17: mol_type = other DNA
ggcaccgaacttcctca

SEQ ID NO: 18424 - DNA, 17 bp, synthetic construct
  misc_feature 1..17: note = Oligonucleotide
  source 1..17: mol_type = other DNA
cggggcaccgaacttcc

SEQ ID NO: 18425 - DNA, 17 bp, synthetic construct
  misc_feature 1..17: note = Oligonucleotide
  source 1..17: mol_type = other DNA
cctcggggcaccgaact

SEQ ID NO: 18426 - DNA, 17 bp, synthetic construct
  misc_feature 1..17: note = Oligonucleotide
  source 1..17: mol_type = other DNA
tctcctcggggcaccga

SEQ ID NO: 18427 - DNA, 17 bp, synthetic construct
  misc_feature 1..17: note = Oligonucleotide
  source 1..17: mol_type = other DNA
ttctctcctcggggcac

SEQ ID NO: 18428 - DNA, 17 bp, synthetic construct
  misc_feature 1..17: note = Oligonucleotide
  source 1..17: mol_type = other DNA
gacttctctcctcgggg

SEQ ID NO: 18429 - DNA, 17 bp, synthetic construct
  misc_feature 1..17: note = Oligonucleotide
  source 1..17: mol_type = other DNA
ggtgacttctctcctcg

SEQ ID NO: 18430 - DNA, 17 bp, synthetic construct
  misc_feature 1..17: note = Oligonucleotide
  source 1..17: mol_type = other DNA
gggggtgacttctctcc

SEQ ID NO: 18431 - DNA, 17 bp, synthetic construct
  misc_feature 1..17: note = Oligonucleotide
  source 1..17: mol_type = other DNA
ccagggggtgacttctc

SEQ ID NO: 18432 - DNA, 17 bp, synthetic construct
  misc_feature 1..17: note = Oligonucleotide
  source 1..17: mol_type = other DNA
cccccagggggtgactt

SEQ ID NO: 18433 - DNA, 17 bp, synthetic construct
  misc_feature 1..17: note = Oligonucleotide
  source 1..17: mol_type = other DNA
cctcccccagggggtga

SEQ ID NO: 18434 - DNA, 17 bp, synthetic construct
  misc_feature 1..17: note = Oligonucleotide
  source 1..17: mol_type = other DNA
tcgcctcccccaggggg

SEQ ID NO: 18435 - DNA, 17 bp, synthetic construct
  misc_feature 1..17: note = Oligonucleotide
  source 1..17: mol_type = other DNA
gcctcgcctcccccagg

SEQ ID NO: 18436 - DNA, 17 bp, synthetic construct
  misc_feature 1..17: note = Oligonucleotide
  source 1..17: mol_type = other DNA
ccagcctcgcctccccc

SEQ ID NO: 18437 - DNA, 17 bp, synthetic construct
  misc_feature 1..17: note = Oligonucleotide
  source 1..17: mol_type = other DNA
ggcccagcctcgcctcc

SEQ ID NO: 18438 - DNA, 17 bp, synthetic construct
  misc_feature 1..17: note = Oligonucleotide
  source 1..17: mol_type = other DNA
cagggcccagcctcgcc

SEQ ID NO: 18439 - DNA, 17 bp, synthetic construct
  misc_feature 1..17: note = Oligonucleotide
  source 1..17: mol_type = other DNA
gtgcagggcccagcctc

SEQ ID NO: 18440 - DNA, 17 bp, synthetic construct
  misc_feature 1..17: note = Oligonucleotide
  source 1..17: mol_type = other DNA
gcggtgcagggcccagc

SEQ ID NO: 18441 - DNA, 17 bp, synthetic construct
  misc_feature 1..17: note = Oligonucleotide
  source 1..17: mol_type = other DNA
cgcgcggtgcagggccc

SEQ ID NO: 18442 - DNA, 17 bp, synthetic construct
  misc_feature 1..17: note = Oligonucleotide
  source 1..17: mol_type = other DNA
acccgcgcggtgcaggg

SEQ ID NO: 18443 - DNA, 17 bp, synthetic construct
  misc_feature 1..17: note = Oligonucleotide
  source 1..17: mol_type = other DNA
gcgacccgcgcggtgca

SEQ ID NO: 18444 - DNA, 17 bp, synthetic construct
  misc_feature 1..17: note = Oligonucleotide
  source 1..17: mol_type = other DNA
gcagcgacccgcgcggt

SEQ ID NO: 18445 - DNA, 17 bp, synthetic construct
  misc_feature 1..17: note = Oligonucleotide
  source 1..17: mol_type = other DNA
ggcgcagcgacccgcgc

SEQ ID NO: 18446 - DNA, 17 bp, synthetic construct
  misc_feature 1..17: note = Oligonucleotide
  source 1..17: mol_type = other DNA
gagggcgcagcgacccg

SEQ ID NO: 18447 - DNA, 17 bp, synthetic construct
  misc_feature 1..17: note = Oligonucleotide
  source 1..17: mol_type = other DNA
acagagggcgcagcgac

SEQ ID NO: 18448 - DNA, 17 bp, synthetic construct
  misc_feature 1..17: note = Oligonucleotide
  source 1..17: mol_type = other DNA
ccgacagagggcgcagc

SEQ ID NO: 18449 - DNA, 17 bp, synthetic construct
  misc_feature 1..17: note = Oligonucleotide
  source 1..17: mol_type = other DNA
caaccgacagagggcgc

SEQ ID NO: 18450 - DNA, 17 bp, synthetic construct
  misc_feature 1..17: note = Oligonucleotide
  source 1..17: mol_type = other DNA
gctcaaccgacagaggg

SEQ ID NO: 18451 - DNA, 17 bp, synthetic construct
  misc_feature 1..17: note = Oligonucleotide
  source 1..17: mol_type = other DNA
ccggctcaaccgacaga

SEQ ID NO: 18452 - DNA, 17 bp, synthetic construct
  misc_feature 1..17: note = Oligonucleotide
  source 1..17: mol_type = other DNA
ggtccggctcaaccgac

SEQ ID NO: 18453 - DNA, 17 bp, synthetic construct
  misc_feature 1..17: note = Oligonucleotide
  source 1..17: mol_type = other DNA
cccggtccggctcaacc

SEQ ID NO: 18454 - DNA, 17 bp, synthetic construct
  misc_feature 1..17: note = Oligonucleotide
  source 1..17: mol_type = other DNA
ggtcccggtccggctca

SEQ ID NO: 18455 - DNA, 17 bp, synthetic construct
  misc_feature 1..17: note = Oligonucleotide
  source 1..17: mol_type = other DNA
tcgggtcccggtccggc

SEQ ID NO: 18456 - DNA, 17 bp, synthetic construct
  misc_feature 1..17: note = Oligonucleotide
  source 1..17: mol_type = other DNA
gggtcgggtcccggtcc

SEQ ID NO: 18457 - DNA, 17 bp, synthetic construct
  misc_feature 1..17: note = Oligonucleotide
  source 1..17: mol_type = other DNA
tgggggtcgggtcccgg

SEQ ID NO: 18458 - DNA, 17 bp, synthetic construct
  misc_feature 1..17: note = Oligonucleotide
  source 1..17: mol_type = other DNA
tgatgggggtcgggtcc

SEQ ID NO: 18459 - DNA, 17 bp, synthetic construct
  misc_feature 1..17: note = Oligonucleotide
  source 1..17: mol_type = other DNA
ggctgatgggggtcggg

SEQ ID NO: 18460 - DNA, 17 bp, synthetic construct
  misc_feature 1..17: note = Oligonucleotide
  source 1..17: mol_type = other DNA
gggggctgatgggggtc

SEQ ID NO: 18461 - DNA, 17 bp, synthetic construct
  misc_feature 1..17: note = Oligonucleotide
  source 1..17: mol_type = other DNA
ctggggggctgatgggg

SEQ ID NO: 18462 - DNA, 17 bp, synthetic construct
  misc_feature 1..17: note = Oligonucleotide
  source 1..17: mol_type = other DNA
atactggggggctgatg

SEQ ID NO: 18463 - DNA, 17 bp, synthetic construct
  misc_feature 1..17: note = Oligonucleotide
  source 1..17: mol_type = other DNA
gtgatactggggggctg

SEQ ID NO: 18464 - DNA, 17 bp, synthetic construct
  misc_feature 1..17: note = Oligonucleotide
  source 1..17: mol_type = other DNA
cgtgtgatactgggggg

SEQ ID NO: 18465 - DNA, 17 bp, synthetic construct
  misc_feature 1..17: note = Oligonucleotide
  source 1..17: mol_type = other DNA
ccccgtgtgatactggg

SEQ ID NO: 18466 - DNA, 17 bp, synthetic construct
  misc_feature 1..17: note = Oligonucleotide
  source 1..17: mol_type = other DNA
gtgccccgtgtgatact

SEQ ID NO: 18467 - DNA, 17 bp, synthetic construct
  misc_feature 1..17: note = Oligonucleotide
  source 1..17: mol_type = other DNA
gccgtgccccgtgtgat

SEQ ID NO: 18468 - DNA, 17 bp, synthetic construct
  misc_feature 1..17: note = Oligonucleotide
  source 1..17: mol_type = other DNA
cccgccgtgccccgtgt

SEQ ID NO: 18469 - DNA, 17 bp, synthetic construct
  misc_feature 1..17: note = Oligonucleotide
  source 1..17: mol_type = other DNA
tcccccgccgtgccccg

SEQ ID NO: 18470 - DNA, 17 bp, synthetic construct
  misc_feature 1..17: note = Oligonucleotide
  source 1..17: mol_type = other DNA
aactcccccgccgtgcc

SEQ ID NO: 18471 - DNA, 17 bp, synthetic construct
  misc_feature 1..17: note = Oligonucleotide
  source 1..17: mol_type = other DNA
ccaaactcccccgccgt

SEQ ID NO: 18472 - DNA, 17 bp, synthetic construct
  misc_feature 1..17: note = Oligonucleotide
  source 1..17: mol_type = other DNA
agcccaaactcccccgc

SEQ ID NO: 18473 - DNA, 17 bp, synthetic construct
  misc_feature 1..17: note = Oligonucleotide
  source 1..17: mol_type = other DNA
ctcagcccaaactcccc

SEQ ID NO: 18474 - DNA, 17 bp, synthetic construct
  misc_feature 1..17: note = Oligonucleotide
  source 1..17: mol_type = other DNA
gctctcagcccaaactc

SEQ ID NO: 18475 - DNA, 17 bp, synthetic construct
  misc_feature 1..17: note = Oligonucleotide
  source 1..17: mol_type = other DNA
cgggctctcagcccaaa

SEQ ID NO: 18476 - DNA, 17 bp, synthetic construct
  misc_feature 1..17: note = Oligonucleotide
  source 1..17: mol_type = other DNA
tgacgggctctcagccc

SEQ ID NO: 18477 - DNA, 17 bp, synthetic construct
  misc_feature 1..17: note = Oligonucleotide
  source 1..17: mol_type = other DNA
aagtgacgggctctcag

SEQ ID NO: 18478 - DNA, 17 bp, synthetic construct
  misc_feature 1..17: note = Oligonucleotide
  source 1..17: mol_type = other DNA
gttaagtgacgggctct

SEQ ID NO: 18479 - DNA, 17 bp, synthetic construct
  misc_feature 1..17: note = Oligonucleotide
  source 1..17: mol_type = other DNA
gctgttaagtgacgggc

SEQ ID NO: 18480 - DNA, 17 bp, synthetic construct
  misc_feature 1..17: note = Oligonucleotide
  source 1..17: mol_type = other DNA
ccagctgttaagtgacg

SEQ ID NO: 18481 - DNA, 17 bp, synthetic construct
  misc_feature 1..17: note = Oligonucleotide
  source 1..17: mol_type = other DNA
gggccagctgttaagtg

SEQ ID NO: 18482 - DNA, 17 bp, synthetic construct
  misc_feature 1..17: note = Oligonucleotide
  source 1..17: mol_type = other DNA
cctgggccagctgttaa

SEQ ID NO: 18483 - DNA, 17 bp, synthetic construct
  misc_feature 1..17: note = Oligonucleotide
  source 1..17: mol_type = other DNA
acccctgggccagctgt

SEQ ID NO: 18484 - DNA, 17 bp, synthetic construct
  misc_feature 1..17: note = Oligonucleotide
  source 1..17: mol_type = other DNA
ctgacccctgggccagc

SEQ ID NO: 18485 - DNA, 17 bp, synthetic construct
  misc_feature 1..17: note = Oligonucleotide
  source 1..17: mol_type = other DNA
atcctgacccctgggcc

SEQ ID NO: 18486 - DNA, 17 bp, synthetic construct
  misc_feature 1..17: note = Oligonucleotide
  source 1..17: mol_type = other DNA
aacatcctgacccctgg

SEQ ID NO: 18487 - DNA, 17 bp, synthetic construct
  misc_feature 1..17: note = Oligonucleotide
  source 1..17: mol_type = other DNA
tctaacatcctgacccc

SEQ ID NO: 18488 - DNA, 17 bp, synthetic construct
  misc_feature 1..17: note = Oligonucleotide
  source 1..17: mol_type = other DNA
tactctaacatcctgac

SEQ ID NO: 18489 - DNA, 17 bp, synthetic construct
  misc_feature 1..17: note = Oligonucleotide
  source 1..17: mol_type = other DNA
aactactctaacatcct

SEQ ID NO: 18490 - DNA, 17 bp, synthetic construct
  misc_feature 1..17: note = Oligonucleotide
  source 1..17: mol_type = other DNA
ctgaactactctaacat

SEQ ID NO: 18491 - DNA, 17 bp, synthetic construct
  misc_feature 1..17: note = Oligonucleotide
  source 1..17: mol_type = other DNA
cacctgaactactctaa

SEQ ID NO: 18492 - DNA, 17 bp, synthetic construct
  misc_feature 1..17: note = Oligonucleotide
  source 1..17: mol_type = other DNA
caacacctgaactactc

SEQ ID NO: 18493 - DNA, 17 bp, synthetic construct
  misc_feature 1..17: note = Oligonucleotide
  source 1..17: mol_type = other DNA
tgccaacacctgaacta

SEQ ID NO: 18494 - DNA, 17 bp, synthetic construct
  misc_feature 1..17: note = Oligonucleotide
  source 1..17: mol_type = other DNA
agttgccaacacctgaa

SEQ ID NO: 18495 - DNA, 17 bp, synthetic construct
  misc_feature 1..17: note = Oligonucleotide
  source 1..17: mol_type = other DNA
cgcagttgccaacacct

SEQ ID NO: 18496 - DNA, 17 bp, synthetic construct
  misc_feature 1..17: note = Oligonucleotide
  source 1..17: mol_type = other DNA
tcacgcagttgccaaca

SEQ ID NO: 18497 - DNA, 17 bp, synthetic construct
  misc_feature 1..17: note = Oligonucleotide
  source 1..17: mol_type = other DNA
ccgtcacgcagttgcca

SEQ ID NO: 18498 - DNA, 17 bp, synthetic construct
  misc_feature 1..17: note = Oligonucleotide
  source 1..17: mol_type = other DNA
tgtccgtcacgcagttg

SEQ ID NO: 18499 - DNA, 17 bp, synthetic construct
  misc_feature 1..17: note = Oligonucleotide
  source 1..17: mol_type = other DNA
ggctgtccgtcacgcag

SEQ ID NO: 18500 - DNA, 17 bp, synthetic construct
  misc_feature 1..17: note = Oligonucleotide
  source 1..17: mol_type = other DNA
gtgggctgtccgtcacg

SEQ ID NO: 18501 - DNA, 17 bp, synthetic construct
  misc_feature 1..17: note = Oligonucleotide
  source 1..17: mol_type = other DNA
cctgtgggctgtccgtc

SEQ ID NO: 18502 - DNA, 17 bp, synthetic construct
  misc_feature 1..17: note = Oligonucleotide
  source 1..17: mol_type = other DNA
cctcctgtgggctgtcc

SEQ ID NO: 18503 - DNA, 17 bp, synthetic construct
  misc_feature 1..17: note = Oligonucleotide
  source 1..17: mol_type = other DNA
tcccctcctgtgggctg

SEQ ID NO: 18504 - DNA, 17 bp, synthetic construct
  misc_feature 1..17: note = Oligonucleotide
  source 1..17: mol_type = other DNA
ccttcccctcctgtggg

SEQ ID NO: 18505 - DNA, 17 bp, synthetic construct
  misc_feature 1..17: note = Oligonucleotide
  source 1..17: mol_type = other DNA
tctccttcccctcctgt

SEQ ID NO: 18506 - DNA, 17 bp, synthetic construct
  misc_feature 1..17: note = Oligonucleotide
  source 1..17: mol_type = other DNA
acctctccttcccctcc

SEQ ID NO: 18507 - DNA, 17 bp, synthetic construct
  misc_feature 1..17: note = Oligonucleotide
  source 1..17: mol_type = other DNA
ggcacctctccttcccc

SEQ ID NO: 18508 - DNA, 17 bp, synthetic construct
  misc_feature 1..17: note = Oligonucleotide
  source 1..17: mol_type = other DNA
cggggcacctctccttc

SEQ ID NO: 18509 - DNA, 17 bp, synthetic construct
  misc_feature 1..17: note = Oligonucleotide
  source 1..17: mol_type = other DNA
acacggggcacctctcc

SEQ ID NO: 18510 - DNA, 17 bp, synthetic construct
  misc_feature 1..17: note = Oligonucleotide
  source 1..17: mol_type = other DNA
gtcacacggggcacctc

SEQ ID NO: 18511 - DNA, 17 bp, synthetic construct
  misc_feature 1..17: note = Oligonucleotide
  source 1..17: mol_type = other DNA
ctagtcacacggggcac

SEQ ID NO: 18512 - DNA, 17 bp, synthetic construct
  misc_feature 1..17: note = Oligonucleotide
  source 1..17: mol_type = other DNA
gctctagtcacacgggg

SEQ ID NO: 18513 - DNA, 17 bp, synthetic construct
  misc_feature 1..17: note = Oligonucleotide
  source 1..17: mol_type = other DNA
tacgctctagtcacacg

SEQ ID NO: 18514 - DNA, 17 bp, synthetic construct
  misc_feature 1..17: note = Oligonucleotide
  source 1..17: mol_type = other DNA
tgctacgctctagtcac

SEQ ID NO: 18515 - DNA, 17 bp, synthetic construct
  misc_feature 1..17: note = Oligonucleotide
  source 1..17: mol_type = other DNA
gtttgctacgctctagt

SEQ ID NO: 18516 - DNA, 17 bp, synthetic construct
  misc_feature 1..17: note = Oligonucleotide
  source 1..17: mol_type = other DNA
gcagtttgctacgctct

SEQ ID NO: 18517 - DNA, 17 bp, synthetic construct
  misc_feature 1..17: note = Oligonucleotide
  source 1..17: mol_type = other DNA
ttggcagtttgctacgc

SEQ ID NO: 18518 - DNA, 17 bp, synthetic construct
  misc_feature 1..17: note = Oligonucleotide
  source 1..17: mol_type = other DNA
ggcttggcagtttgcta

SEQ ID NO: 18519 - DNA, 17 bp, synthetic construct
  misc_feature 1..17: note = Oligonucleotide
  source 1..17: mol_type = other DNA
tcgggcttggcagtttg

SEQ ID NO: 18520 - DNA, 17 bp, synthetic construct
  misc_feature 1..17: note = Oligonucleotide
  source 1..17: mol_type = other DNA
ccctcgggcttggcagt

SEQ ID NO: 18521 - DNA, 17 bp, synthetic construct
  misc_feature 1..17: note = Oligonucleotide
  source 1..17: mol_type = other DNA
gctccctcgggcttggc

SEQ ID NO: 18522 - DNA, 17 bp, synthetic construct
  misc_feature 1..17: note = Oligonucleotide
  source 1..17: mol_type = other DNA
caggctccctcgggctt

SEQ ID NO: 18523 - DNA, 17 bp, synthetic construct
  misc_feature 1..17: note = Oligonucleotide
  source 1..17: mol_type = other DNA
agccaggctccctcggg

SEQ ID NO: 18524 - DNA, 17 bp, synthetic construct
  misc_feature 1..17: note = Oligonucleotide
  source 1..17: mol_type = other DNA
aagagccaggctccctc

SEQ ID NO: 18525 - DNA, 17 bp, synthetic construct
  misc_feature 1..17: note = Oligonucleotide
  source 1..17: mol_type = other DNA
tccaagagccaggctcc

SEQ ID NO: 18526 - DNA, 17 bp, synthetic construct
  misc_feature 1..17: note = Oligonucleotide
  source 1..17: mol_type = other DNA
ttttccaagagccaggc

SEQ ID NO: 18527 - DNA, 17 bp, synthetic construct
  misc_feature 1..17: note = Oligonucleotide
  source 1..17: mol_type = other DNA
cgcttttccaagagcca

SEQ ID NO: 18528 - DNA, 17 bp, synthetic construct
  misc_feature 1..17: note = Oligonucleotide
  source 1..17: mol_type = other DNA
acccgcttttccaagag

SEQ ID NO: 18529 - DNA, 17 bp, synthetic construct
  misc_feature 1..17: note = Oligonucleotide
  source 1..17: mol_type = other DNA
gccacccgcttttccaa

SEQ ID NO: 18530 - DNA, 17 bp, synthetic construct
  misc_feature 1..17: note = Oligonucleotide
  source 1..17: mol_type = other DNA
agagccacccgcttttc

SEQ ID NO: 18531 - DNA, 17 bp, synthetic construct
  misc_feature 1..17: note = Oligonucleotide
  source 1..17: mol_type = other DNA
gccagagccacccgctt

SEQ ID NO: 18532 - DNA, 17 bp, synthetic construct
  misc_feature 1..17: note = Oligonucleotide
  source 1..17: mol_type = other DNA
caggccagagccacccg

SEQ ID NO: 18533 - DNA, 17 bp, synthetic construct
  misc_feature 1..17: note = Oligonucleotide
  source 1..17: mol_type = other DNA
aggcaggccagagccac

SEQ ID NO: 18534 - DNA, 17 bp, synthetic construct
  misc_feature 1..17: note = Oligonucleotide
  source 1..17: mol_type = other DNA
cccaggcaggccagagc

SEQ ID NO: 18535 - DNA, 17 bp, synthetic construct
  misc_feature 1..17: note = Oligonucleotide
  source 1..17: mol_type = other DNA
gtacccaggcaggccag

SEQ ID NO: 18536 - DNA, 17 bp, synthetic construct
  misc_feature 1..17: note = Oligonucleotide
  source 1..17: mol_type = other DNA
ctagtacccaggcaggc

SEQ ID NO: 18537 - DNA, 17 bp, synthetic construct
  misc_feature 1..17: note = Oligonucleotide
  source 1..17: mol_type = other DNA
tccctagtacccaggca

SEQ ID NO: 18538 - DNA, 17 bp, synthetic construct
  misc_feature 1..17: note = Oligonucleotide
  source 1..17: mol_type = other DNA
ggctccctagtacccag

SEQ ID NO: 18539 - DNA, 17 bp, synthetic construct
  misc_feature 1..17: note = Oligonucleotide
  source 1..17: mol_type = other DNA
agtggctccctagtacc

SEQ ID NO: 18540 - DNA, 17 bp, synthetic construct
  misc_feature 1..17: note = Oligonucleotide
  source 1..17: mol_type = other DNA
tgcagtggctccctagt

SEQ ID NO: 18541 - DNA, 17 bp, synthetic construct
  misc_feature 1..17: note = Oligonucleotide
  source 1..17: mol_type = other DNA
gcctgcagtggctccct

SEQ ID NO: 18542 - DNA, 17 bp, synthetic construct
  misc_feature 1..17: note = Oligonucleotide
  source 1..17: mol_type = other DNA
gaagcctgcagtggctc

SEQ ID NO: 18543 - DNA, 17 bp, synthetic construct
  misc_feature 1..17: note = Oligonucleotide
  source 1..17: mol_type = other DNA
tcagaagcctgcagtgg

SEQ ID NO: 18544 - DNA, 17 bp, synthetic construct
  misc_feature 1..17: note = Oligonucleotide
  source 1..17: mol_type = other DNA
tgctcagaagcctgcag

SEQ ID NO: 18545 - DNA, 17 bp, synthetic construct
  misc_feature 1..17: note = Oligonucleotide
  source 1..17: mol_type = other DNA
ctctgctcagaagcctg

SEQ ID NO: 18546 - DNA, 17 bp, synthetic construct
  misc_feature 1..17: note = Oligonucleotide
  source 1..17: mol_type = other DNA
gggctctgctcagaagc

SEQ ID NO: 18547 - DNA, 17 bp, synthetic construct
  misc_feature 1..17: note = Oligonucleotide
  source 1..17: mol_type = other DNA
ctggggctctgctcaga

SEQ ID NO: 18548 - DNA, 17 bp, synthetic construct
  misc_feature 1..17: note = Oligonucleotide
  source 1..17: mol_type = other DNA
ccactggggctctgctc

SEQ ID NO: 18549 - DNA, 17 bp, synthetic construct
  misc_feature 1..17: note = Oligonucleotide
  source 1..17: mol_type = other DNA
cctccactggggctctg

SEQ ID NO: 18550 - DNA, 17 bp, synthetic construct
  misc_feature 1..17: note = Oligonucleotide
  source 1..17: mol_type = other DNA
actcctccactggggct

SEQ ID NO: 18551 - DNA, 17 bp, synthetic construct
  misc_feature 1..17: note = Oligonucleotide
  source 1..17: mol_type = other DNA
ctcactcctccactggg

SEQ ID NO: 18552 - DNA, 17 bp, synthetic construct
  misc_feature 1..17: note = Oligonucleotide
  source 1..17: mol_type = other DNA
gctctcactcctccact

SEQ ID NO: 18553 - DNA, 17 bp, synthetic construct
  misc_feature 1..17: note = Oligonucleotide
  source 1..17: mol_type = other DNA
tgagctctcactcctcc

SEQ ID NO: 18554 - DNA, 17 bp, synthetic construct
  misc_feature 1..17: note = Oligonucleotide
  source 1..17: mol_type = other DNA
gcctgagctctcactcc

SEQ ID NO: 18555 - DNA, 17 bp, synthetic construct
  misc_feature 1..17: note = Oligonucleotide
  source 1..17: mol_type = other DNA
agagcctgagctctcac

SEQ ID NO: 18556 - DNA, 17 bp, synthetic construct
  misc_feature 1..17: note = Oligonucleotide
  source 1..17: mol_type = other DNA
ggtagagcctgagctct

SEQ ID NO: 18557 - DNA, 17 bp, synthetic construct
  misc_feature 1..17: note = Oligonucleotide
  source 1..17: mol_type = other DNA
tggggtagagcctgagc

SEQ ID NO: 18558 - DNA, 17 bp, synthetic construct
  misc_feature 1..17: note = Oligonucleotide
  source 1..17: mol_type = other DNA
gactggggtagagcctg

SEQ ID NO: 18559 - DNA, 17 bp, synthetic construct
  misc_feature 1..17: note = Oligonucleotide
  source 1..17: mol_type = other DNA
ccagactggggtagagc

SEQ ID NO: 18560 - DNA, 17 bp, synthetic construct
  misc_feature 1..17: note = Oligonucleotide
  source 1..17: mol_type = other DNA
ctcccagactggggtag

SEQ ID NO: 18561 - DNA, 17 bp, synthetic construct
  misc_feature 1..17: note = Oligonucleotide
  source 1..17: mol_type = other DNA
ccactcccagactgggg

SEQ ID NO: 18562 - DNA, 17 bp, synthetic construct
  misc_feature 1..17: note = Oligonucleotide
  source 1..17: mol_type = other DNA
agaccactcccagactg

SEQ ID NO: 18563 - DNA, 17 bp, synthetic construct
  misc_feature 1..17: note = Oligonucleotide
  source 1..17: mol_type = other DNA
cccagaccactcccaga

SEQ ID NO: 18564 - DNA, 17 bp, synthetic construct
  misc_feature 1..17: note = Oligonucleotide
  source 1..17: mol_type = other DNA
ttccccagaccactccc

SEQ ID NO: 18565 - DNA, 17 bp, synthetic construct
  misc_feature 1..17: note = Oligonucleotide
  source 1..17: mol_type = other DNA
accttccccagaccact

SEQ ID NO: 18566 - DNA, 17 bp, synthetic construct
  misc_feature 1..17: note = Oligonucleotide
  source 1..17: mol_type = other DNA
cccaccttccccagacc

SEQ ID NO: 18567 - DNA, 17 bp, synthetic construct
  misc_feature 1..17: note = Oligonucleotide
  source 1..17: mol_type = other DNA
atgcccaccttccccag

SEQ ID NO: 18568 - DNA, 17 bp, synthetic construct
  misc_feature 1..17: note = Oligonucleotide
  source 1..17: mol_type = other DNA
gtgatgcccaccttccc

SEQ ID NO: 18569 - DNA, 17 bp, synthetic construct
  misc_feature 1..17: note = Oligonucleotide
  source 1..17: mol_type = other DNA
tgcgtgatgcccacctt

SEQ ID NO: 18570 - DNA, 17 bp, synthetic construct
  misc_feature 1..17: note = Oligonucleotide
  source 1..17: mol_type = other DNA
cactgcgtgatgcccac

SEQ ID NO: 18571 - DNA, 17 bp, synthetic construct
  misc_feature 1..17: note = Oligonucleotide
  source 1..17: mol_type = other DNA
gcccactgcgtgatgcc

SEQ ID NO: 18572 - DNA, 17 bp, synthetic construct
  misc_feature 1..17: note = Oligonucleotide
  source 1..17: mol_type = other DNA
cacgcccactgcgtgat

SEQ ID NO: 18573 - DNA, 17 bp, synthetic construct
  misc_feature 1..17: note = Oligonucleotide
  source 1..17: mol_type = other DNA
gcccacgcccactgcgt

SEQ ID NO: 18574 - DNA, 17 bp, synthetic construct
  misc_feature 1..17: note = Oligonucleotide
  source 1..17: mol_type = other DNA
cctgcccacgcccactg

SEQ ID NO: 18575 - DNA, 17 bp, synthetic construct
  misc_feature 1..17: note = Oligonucleotide
  source 1..17: mol_type = other DNA
gcccctgcccacgccca

SEQ ID NO: 18576 - DNA, 17 bp, synthetic construct
  misc_feature 1..17: note = Oligonucleotide
  source 1..17: mol_type = other DNA
ccggcccctgcccacgc

SEQ ID NO: 18577 - DNA, 17 bp, synthetic construct
  misc_feature 1..17: note = Oligonucleotide
  source 1..17: mol_type = other DNA
acaccggcccctgccca

SEQ ID NO: 18578 - DNA, 17 bp, synthetic construct
  misc_feature 1..17: note = Oligonucleotide
  source 1..17: mol_type = other DNA
tggacaccggcccctgc

SEQ ID NO: 18579 - DNA, 17 bp, synthetic construct
  misc_feature 1..17: note = Oligonucleotide
  source 1..17: mol_type = other DNA
tcctggacaccggcccc

SEQ ID NO: 18580 - DNA, 17 bp, synthetic construct
  misc_feature 1..17: note = Oligonucleotide
  source 1..17: mol_type = other DNA
tcgtcctggacaccggc

SEQ ID NO: 18581 - DNA, 17 bp, synthetic construct
  misc_feature 1..17: note = Oligonucleotide
  source 1..17: mol_type = other DNA
ccctcgtcctggacacc

SEQ ID NO: 18582 - DNA, 17 bp, synthetic construct
  misc_feature 1..17: note = Oligonucleotide
  source 1..17: mol_type = other DNA
gtcccctcgtcctggac

SEQ ID NO: 18583 - DNA, 17 bp, synthetic construct
  misc_feature 1..17: note = Oligonucleotide
  source 1..17: mol_type = other DNA
tgggtcccctcgtcctg

SEQ ID NO: 18584 - DNA, 17 bp, synthetic construct
  misc_feature 1..17: note = Oligonucleotide
  source 1..17: mol_type = other DNA
gcctgggtcccctcgtc

SEQ ID NO: 18585 - DNA, 17 bp, synthetic construct
  misc_feature 1..17: note = Oligonucleotide
  source 1..17: mol_type = other DNA
taggcctgggtcccctc

SEQ ID NO: 18586 - DNA, 17 bp, synthetic construct
  misc_feature 1..17: note = Oligonucleotide
  source 1..17: mol_type = other DNA
ctctaggcctgggtccc

SEQ ID NO: 18587 - DNA, 17 bp, synthetic construct
  misc_feature 1..17: note = Oligonucleotide
  source 1..17: mol_type = other DNA
cccctctaggcctgggt

SEQ ID NO: 18588 - DNA, 17 bp, synthetic construct
  misc_feature 1..17: note = Oligonucleotide
  source 1..17: mol_type = other DNA
gtccccctctaggcctg

SEQ ID NO: 18589 - DNA, 17 bp, synthetic construct
  misc_feature 1..17: note = Oligonucleotide
  source 1..17: mol_type = other DNA
ccagtccccctctaggc

SEQ ID NO: 18590 - DNA, 17 bp, synthetic construct
  misc_feature 1..17: note = Oligonucleotide
  source 1..17: mol_type = other DNA
tgcccagtccccctcta

SEQ ID NO: 18591 - DNA, 17 bp, synthetic construct
  misc_feature 1..17: note = Oligonucleotide
  source 1..17: mol_type = other DNA
gggtgcccagtccccct

SEQ ID NO: 18592 - DNA, 17 bp, synthetic construct
  misc_feature 1..17: note = Oligonucleotide
  source 1..17: mol_type = other DNA
gctgggtgcccagtccc

SEQ ID NO: 18593 - DNA, 17 bp, synthetic construct
  misc_feature 1..17: note = Oligonucleotide
  source 1..17: mol_type = other DNA
atcgctgggtgcccagt

SEQ ID NO: 18594 - DNA, 17 bp, synthetic construct
  misc_feature 1..17: note = Oligonucleotide
  source 1..17: mol_type = other DNA
cggatcgctgggtgccc

SEQ ID NO: 18595 - DNA, 17 bp, synthetic construct
  misc_feature 1..17: note = Oligonucleotide
  source 1..17: mol_type = other DNA
gcccggatcgctgggtg

SEQ ID NO: 18596 - DNA, 17 bp, synthetic construct
  misc_feature 1..17: note = Oligonucleotide
  source 1..17: mol_type = other DNA
agggcccggatcgctgg

SEQ ID NO: 18597 - DNA, 17 bp, synthetic construct
  misc_feature 1..17: note = Oligonucleotide
  source 1..17: mol_type = other DNA
tccagggcccggatcgc

SEQ ID NO: 18598 - DNA, 17 bp, synthetic construct
  misc_feature 1..17: note = Oligonucleotide
  source 1..17: mol_type = other DNA
aggtccagggcccggat

SEQ ID NO: 18599 - DNA, 17 bp, synthetic construct
  misc_feature 1..17: note = Oligonucleotide
  source 1..17: mol_type = other DNA
tccaggtccagggcccg

SEQ ID NO: 18600 - DNA, 17 bp, synthetic construct
  misc_feature 1..17: note = Oligonucleotide
  source 1..17: mol_type = other DNA
ccctccaggtccagggc

SEQ ID NO: 18601 - DNA, 17 bp, synthetic construct
  misc_feature 1..17: note = Oligonucleotide
  source 1..17: mol_type = other DNA
cacccctccaggtccag

SEQ ID NO: 18602 - DNA, 17 bp, synthetic construct
  misc_feature 1..17: note = Oligonucleotide
  source 1..17: mol_type = other DNA
ccccacccctccaggtc

SEQ ID NO: 18603 - DNA, 17 bp, synthetic construct
  misc_feature 1..17: note = Oligonucleotide
  source 1..17: mol_type = other DNA
cccccccacccctccag

SEQ ID NO: 18604 - DNA, 17 bp, synthetic construct
  misc_feature 1..17: note = Oligonucleotide
  source 1..17: mol_type = other DNA
cgccccccccacccctc

SEQ ID NO: 18605 - DNA, 17 bp, synthetic construct
  misc_feature 1..17: note = Oligonucleotide
  source 1..17: mol_type = other DNA
gggcgccccccccaccc

SEQ ID NO: 18606 - DNA, 17 bp, synthetic construct
  misc_feature 1..17: note = Oligonucleotide
  source 1..17: mol_type = other DNA
gaggggcgcccccccca

SEQ ID NO: 18607 - DNA, 17 bp, synthetic construct
  misc_feature 1..17: note = Oligonucleotide
  source 1..17: mol_type = other DNA
agggaggggcgcccccc

SEQ ID NO: 18608 - DNA, 17 bp, synthetic construct
  misc_feature 1..17: note = Oligonucleotide
  source 1..17: mol_type = other DNA
gggagggaggggcgccc

SEQ ID NO: 18609 - DNA, 17 bp, synthetic construct
  misc_feature 1..17: note = Oligonucleotide
  source 1..17: mol_type = other DNA
aacgggagggaggggcg

SEQ ID NO: 18610 - DNA, 17 bp, synthetic construct
  misc_feature 1..17: note = Oligonucleotide
  source 1..17: mol_type = other DNA
gtgaacgggagggaggg

SEQ ID NO: 18611 - DNA, 17 bp, synthetic construct
  misc_feature 1..17: note = Oligonucleotide
  source 1..17: mol_type = other DNA
ccggtgaacgggaggga

SEQ ID NO: 18612 - DNA, 17 bp, synthetic construct
  misc_feature 1..17: note = Oligonucleotide
  source 1..17: mol_type = other DNA
gagccggtgaacgggag

SEQ ID NO: 18613 - DNA, 17 bp, synthetic construct
  misc_feature 1..17: note = Oligonucleotide
  source 1..17: mol_type = other DNA
ctggagccggtgaacgg

SEQ ID NO: 18614 - DNA, 17 bp, synthetic construct
  misc_feature 1..17: note = Oligonucleotide
  source 1..17: mol_type = other DNA
cgcctggagccggtgaa

SEQ ID NO: 18615 - DNA, 17 bp, synthetic construct
  misc_feature 1..17: note = Oligonucleotide
  source 1..17: mol_type = other DNA
agccgcctggagccggt

SEQ ID NO: 18616 - DNA, 17 bp, synthetic construct
  misc_feature 1..17: note = Oligonucleotide
  source 1..17: mol_type = other DNA
caaagccgcctggagcc

SEQ ID NO: 18617 - DNA, 17 bp, synthetic construct
  misc_feature 1..17: note = Oligonucleotide
  source 1..17: mol_type = other DNA
cagcaaagccgcctgga

SEQ ID NO: 18618 - DNA, 17 bp, synthetic construct
  misc_feature 1..17: note = Oligonucleotide
  source 1..17: mol_type = other DNA
caccagcaaagccgcct

SEQ ID NO: 18619 - DNA, 17 bp, synthetic construct
  misc_feature 1..17: note = Oligonucleotide
  source 1..17: mol_type = other DNA
gggcaccagcaaagccg

SEQ ID NO: 18620 - DNA, 17 bp, synthetic construct
  misc_feature 1..17: note = Oligonucleotide
  source 1..17: mol_type = other DNA
ttcgggcaccagcaaag

SEQ ID NO: 18621 - DNA, 17 bp, synthetic construct
  misc_feature 1..17: note = Oligonucleotide
  source 1..17: mol_type = other DNA
ggcttcgggcaccagca

SEQ ID NO: 18622 - DNA, 17 bp, synthetic construct
  misc_feature 1..17: note = Oligonucleotide
  source 1..17: mol_type = other DNA
gggggcttcgggcacca

SEQ ID NO: 18623 - DNA, 17 bp, synthetic construct
  misc_feature 1..17: note = Oligonucleotide
  source 1..17: mol_type = other DNA
ggcgggggcttcgggca

SEQ ID NO: 18624 - DNA, 17 bp, synthetic construct
  misc_feature 1..17: note = Oligonucleotide
  source 1..17: mol_type = other DNA
tggggcgggggcttcgg

SEQ ID NO: 18625 - DNA, 17 bp, synthetic construct
  misc_feature 1..17: note = Oligonucleotide
  source 1..17: mol_type = other DNA
ggatggggcgggggctt

SEQ ID NO: 18626 - DNA, 17 bp, synthetic construct
  misc_feature 1..17: note = Oligonucleotide
  source 1..17: mol_type = other DNA
gggggatggggcggggg

SEQ ID NO: 18627 - DNA, 17 bp, synthetic construct
  misc_feature 1..17: note = Oligonucleotide
  source 1..17: mol_type = other DNA
agcgggggatggggcgg

SEQ ID NO: 18628 - DNA, 17 bp, synthetic construct
  misc_feature 1..17: note = Oligonucleotide
  source 1..17: mol_type = other DNA
gggagcgggggatgggg

SEQ ID NO: 18629 - DNA, 17 bp, synthetic construct
  misc_feature 1..17: note = Oligonucleotide
  source 1..17: mol_type = other DNA
agtgggagcgggggatg

SEQ ID NO: 18630 - DNA, 17 bp, synthetic construct
  misc_feature 1..17: note = Oligonucleotide
  source 1..17: mol_type = other DNA
cctagtgggagcggggg

SEQ ID NO: 18631 - DNA, 17 bp, synthetic construct
  misc_feature 1..17: note = Oligonucleotide
  source 1..17: mol_type = other DNA
cagcctagtgggagcgg

SEQ ID NO: 18632 - DNA, 17 bp, synthetic construct
  misc_feature 1..17: note = Oligonucleotide
  source 1..17: mol_type = other DNA
gggcagcctagtgggag

SEQ ID NO: 18633 - DNA, 17 bp, synthetic construct
  misc_feature 1..17: note = Oligonucleotide
  source 1..17: mol_type = other DNA
tcagggcagcctagtgg

SEQ ID NO: 18634 - DNA, 17 bp, synthetic construct
  misc_feature 1..17: note = Oligonucleotide
  source 1..17: mol_type = other DNA
tggtcagggcagcctag

SEQ ID NO: 18635 - DNA, 17 bp, synthetic construct
  misc_feature 1..17: note = Oligonucleotide
  source 1..17: mol_type = other DNA
cggtggtcagggcagcc

SEQ ID NO: 18636 - DNA, 17 bp, synthetic construct
  misc_feature 1..17: note = Oligonucleotide
  source 1..17: mol_type = other DNA
ggacggtggtcagggca

SEQ ID NO: 18637 - DNA, 17 bp, synthetic construct
  misc_feature 1..17: note = Oligonucleotide
  source 1..17: mol_type = other DNA
gcgggacggtggtcagg

SEQ ID NO: 18638 - DNA, 17 bp, synthetic construct
  misc_feature 1..17: note = Oligonucleotide
  source 1..17: mol_type = other DNA
gacgcgggacggtggtc

SEQ ID NO: 18639 - DNA, 17 bp, synthetic construct
  misc_feature 1..17: note = Oligonucleotide
  source 1..17: mol_type = other DNA
gcggacgcgggacggtg

SEQ ID NO: 18640 - DNA, 17 bp, synthetic construct
  misc_feature 1..17: note = Oligonucleotide
  source 1..17: mol_type = other DNA
gacgcggacgcgggacg

SEQ ID NO: 18641 - DNA, 17 bp, synthetic construct
  misc_feature 1..17: note = Oligonucleotide
  source 1..17: mol_type = other DNA
tcggacgcggacgcggg

SEQ ID NO: 18642 - DNA, 17 bp, synthetic construct
  misc_feature 1..17: note = Oligonucleotide
  source 1..17: mol_type = other DNA
agttcggacgcggacgc

SEQ ID NO: 18643 - DNA, 17 bp, synthetic construct
  misc_feature 1..17: note = Oligonucleotide
  source 1..17: mol_type = other DNA
gggagttcggacgcgga

SEQ ID NO: 18644 - DNA, 17 bp, synthetic construct
  misc_feature 1..17: note = Oligonucleotide
  source 1..17: mol_type = other DNA
agggggagttcggacgc

SEQ ID NO: 18645 - DNA, 17 bp, synthetic construct
  misc_feature 1..17: note = Oligonucleotide
  source 1..17: mol_type = other DNA
gggagggggagttcgga

SEQ ID NO: 18646 - DNA, 17 bp, synthetic construct
  misc_feature 1..17: note = Oligonucleotide
  source 1..17: mol_type = other DNA
cccgggagggggagttc

SEQ ID NO: 18647 - DNA, 17 bp, synthetic construct
  misc_feature 1..17: note = Oligonucleotide
  source 1..17: mol_type = other DNA
acccccgggagggggag

SEQ ID NO: 18648 - DNA, 17 bp, synthetic construct
  misc_feature 1..17: note = Oligonucleotide
  source 1..17: mol_type = other DNA
ccgacccccgggagggg

SEQ ID NO: 18649 - DNA, 17 bp, synthetic construct
  misc_feature 1..17: note = Oligonucleotide
  source 1..17: mol_type = other DNA
ccgccgacccccgggag

SEQ ID NO: 18650 - DNA, 17 bp, synthetic construct
  misc_feature 1..17: note = Oligonucleotide
  source 1..17: mol_type = other DNA
tcgccgccgacccccgg

SEQ ID NO: 18651 - DNA, 17 bp, synthetic construct
  misc_feature 1..17: note = Oligonucleotide
  source 1..17: mol_type = other DNA
ccctcgccgccgacccc

SEQ ID NO: 18652 - DNA, 17 bp, synthetic construct
  misc_feature 1..17: note = Oligonucleotide
  source 1..17: mol_type = other DNA
ctcccctcgccgccgac

SEQ ID NO: 18653 - DNA, 17 bp, synthetic construct
  misc_feature 1..17: note = Oligonucleotide
  source 1..17: mol_type = other DNA
gccctcccctcgccgcc

SEQ ID NO: 18654 - DNA, 17 bp, synthetic construct
  misc_feature 1..17: note = Oligonucleotide
  source 1..17: mol_type = other DNA
cccgccctcccctcgcc

SEQ ID NO: 18655 - DNA, 17 bp, synthetic construct
  misc_feature 1..17: note = Oligonucleotide
  source 1..17: mol_type = other DNA
cctcccgccctcccctc

SEQ ID NO: 18656 - DNA, 17 bp, synthetic construct
  misc_feature 1..17: note = Oligonucleotide
  source 1..17: mol_type = other DNA
ctccctcccgccctccc

SEQ ID NO: 18657 - DNA, 17 bp, synthetic construct
  misc_feature 1..17: note = Oligonucleotide
  source 1..17: mol_type = other DNA
gccctccctcccgccct

SEQ ID NO: 18658 - DNA, 17 bp, synthetic construct
  misc_feature 1..17: note = Oligonucleotide
  source 1..17: mol_type = other DNA
cgcgccctccctcccgc

SEQ ID NO: 18659 - DNA, 17 bp, synthetic construct
  misc_feature 1..17: note = Oligonucleotide
  source 1..17: mol_type = other DNA
cctcgcgccctccctcc

SEQ ID NO: 18660 - DNA, 17 bp, synthetic construct
  misc_feature 1..17: note = Oligonucleotide
  source 1..17: mol_type = other DNA
ggccctcgcgccctccc

SEQ ID NO: 18661 - DNA, 17 bp, synthetic construct
  misc_feature 1..17: note = Oligonucleotide
  source 1..17: mol_type = other DNA
ggcggccctcgcgccct

SEQ ID NO: 18662 - DNA, 17 bp, synthetic construct
  misc_feature 1..17: note = Oligonucleotide
  source 1..17: mol_type = other DNA
ggtggcggccctcgcgc

SEQ ID NO: 18663 - DNA, 17 bp, synthetic construct
  misc_feature 1..17: note = Oligonucleotide
  source 1..17: mol_type = other DNA
ggtggtggcggccctcg

SEQ ID NO: 18664 - DNA, 17 bp, synthetic construct
  misc_feature 1..17: note = Oligonucleotide
  source 1..17: mol_type = other DNA
ggcggtggtggcggccc

SEQ ID NO: 18665 - DNA, 17 bp, synthetic construct
  misc_feature 1..17: note = Oligonucleotide
  source 1..17: mol_type = other DNA
gcgggcggtggtggcgg

SEQ ID NO: 18666 - DNA, 17 bp, synthetic construct
  misc_feature 1..17: note = Oligonucleotide
  source 1..17: mol_type = other DNA
tctgcgggcggtggtgg

SEQ ID NO: 18667 - DNA, 17 bp, synthetic construct
  misc_feature 1..17: note = Oligonucleotide
  source 1..17: mol_type = other DNA
ccctctgcgggcggtgg

SEQ ID NO: 18668 - DNA, 17 bp, synthetic construct
  misc_feature 1..17: note = Oligonucleotide
  source 1..17: mol_type = other DNA
cctccctctgcgggcgg

SEQ ID NO: 18669 - DNA, 17 bp, synthetic construct
  misc_feature 1..17: note = Oligonucleotide
  source 1..17: mol_type = other DNA
gctcctccctctgcggg

SEQ ID NO: 18670 - DNA, 17 bp, synthetic construct
  misc_feature 1..17: note = Oligonucleotide
  source 1..17: mol_type = other DNA
cgggctcctccctctgc

SEQ ID NO: 18671 - DNA, 17 bp, synthetic construct
  misc_feature 1..17: note = Oligonucleotide
  source 1..17: mol_type = other DNA
ggccgggctcctccctc

SEQ ID NO: 18672 - DNA, 17 bp, synthetic construct
  misc_feature 1..17: note = Oligonucleotide
  source 1..17: mol_type = other DNA
cacggccgggctcctcc

SEQ ID NO: 18673 - DNA, 17 bp, synthetic construct
  misc_feature 1..17: note = Oligonucleotide
  source 1..17: mol_type = other DNA
ctccacggccgggctcc

SEQ ID NO: 18674 - DNA, 17 bp, synthetic construct
  misc_feature 1..17: note = Oligonucleotide
  source 1..17: mol_type = other DNA
ctcctccacggccgggc

SEQ ID NO: 18675 - DNA, 17 bp, synthetic construct
  misc_feature 1..17: note = Oligonucleotide
  source 1..17: mol_type = other DNA
cgcctcctccacggccg

SEQ ID NO: 18676 - DNA, 17 bp, synthetic construct
  misc_feature 1..17: note = Oligonucleotide
  source 1..17: mol_type = other DNA
ccccgcctcctccacgg

SEQ ID NO: 18677 - DNA, 17 bp, synthetic construct
  misc_feature 1..17: note = Oligonucleotide
  source 1..17: mol_type = other DNA
gcgccccgcctcctcca

SEQ ID NO: 18678 - DNA, 17 bp, synthetic construct
  misc_feature 1..17: note = Oligonucleotide
  source 1..17: mol_type = other DNA
cccgcgccccgcctcct

SEQ ID NO: 18679 - DNA, 17 bp, synthetic construct
  misc_feature 1..17: note = Oligonucleotide
  source 1..17: mol_type = other DNA
cgccccgcgccccgcct

SEQ ID NO: 18680 - DNA, 17 bp, synthetic construct
  misc_feature 1..17: note = Oligonucleotide
  source 1..17: mol_type = other DNA
ggccgccccgcgccccg

SEQ ID NO: 18681 - DNA, 17 bp, synthetic construct
  misc_feature 1..17: note = Oligonucleotide
  source 1..17: mol_type = other DNA
cgcggccgccccgcgcc

SEQ ID NO: 18682 - DNA, 17 bp, synthetic construct
  misc_feature 1..17: note = Oligonucleotide
  source 1..17: mol_type = other DNA
tgccgcggccgccccgc

SEQ ID NO: 18683 - DNA, 17 bp, synthetic construct
  misc_feature 1..17: note = Oligonucleotide
  source 1..17: mol_type = other DNA
ccatgccgcggccgccc

SEQ ID NO: 18684 - DNA, 17 bp, synthetic construct
  misc_feature 1..17: note = Oligonucleotide
  source 1..17: mol_type = other DNA
gctccatgccgcggccg

SEQ ID NO: 18685 - DNA, 17 bp, synthetic construct
  misc_feature 1..17: note = Oligonucleotide
  source 1..17: mol_type = other DNA
ctcgctccatgccgcgg

SEQ ID NO: 18686 - DNA, 17 bp, synthetic construct
  misc_feature 1..17: note = Oligonucleotide
  source 1..17: mol_type = other DNA
aggctcgctccatgccg

SEQ ID NO: 18687 - DNA, 17 bp, synthetic construct
  misc_feature 1..17: note = Oligonucleotide
  source 1..17: mol_type = other DNA
gccaggctcgctccatg

SEQ ID NO: 18688 - DNA, 17 bp, synthetic construct
  misc_feature 1..17: note = Oligonucleotide
  source 1..17: mol_type = other DNA
cgcgccaggctcgctcc

SEQ ID NO: 18689 - DNA, 17 bp, synthetic construct
  misc_feature 1..17: note = Oligonucleotide
  source 1..17: mol_type = other DNA
gggcgcgccaggctcgc

SEQ ID NO: 18690 - DNA, 17 bp, synthetic construct
  misc_feature 1..17: note = Oligonucleotide
  source 1..17: mol_type = other DNA
cctgggcgcgccaggct

SEQ ID NO: 18691 - DNA, 17 bp, synthetic construct
  misc_feature 1..17: note = Oligonucleotide
  source 1..17: mol_type = other DNA
gctcctgggcgcgccag

SEQ ID NO: 18692 - DNA, 17 bp, synthetic construct
  misc_feature 1..17: note = Oligonucleotide
  source 1..17: mol_type = other DNA
acagctcctgggcgcgc

SEQ ID NO: 18693 - DNA, 17 bp, synthetic construct
  misc_feature 1..17: note = Oligonucleotide
  source 1..17: mol_type = other DNA
aatacagctcctgggcg

SEQ ID NO: 18694 - DNA, 17 bp, synthetic construct
  misc_feature 1..17: note = Oligonucleotide
  source 1..17: mol_type = other DNA
tcgaatacagctcctgg

SEQ ID NO: 18695 - DNA, 17 bp, synthetic construct
  misc_feature 1..17: note = Oligonucleotide
  source 1..17: mol_type = other DNA
aattcgaatacagctcc

SEQ ID NO: 18696 - DNA, 17 bp, synthetic construct
  misc_feature 1..17: note = Oligonucleotide
  source 1..17: mol_type = other DNA
tcgaattcgaatacagc

SEQ ID NO: 18697 - DNA, 17 bp, synthetic construct
  misc_feature 1..17: note = Oligonucleotide
  source 1..17: mol_type = other DNA
agctcgaattcgaatac

SEQ ID NO: 18698 - DNA, 17 bp, synthetic construct
  misc_feature 1..17: note = Oligonucleotide
  source 1..17: mol_type = other DNA
ccgagctcgaattcgaa

SEQ ID NO: 18699 - DNA, 17 bp, synthetic construct
  misc_feature 1..17: note = Oligonucleotide
  source 1..17: mol_type = other DNA
gaaccgagctcgaattc

SEQ ID NO: 18700 - DNA, 17 bp, synthetic construct
  misc_feature 1..17: note = Oligonucleotide
  source 1..17: mol_type = other DNA
ggggaaccgagctcgaa

SEQ ID NO: 18701 - DNA, 17 bp, synthetic construct
  misc_feature 1..17: note = Oligonucleotide
  source 1..17: mol_type = other DNA
cgcggggaaccgagctc

SEQ ID NO: 18702 - DNA, 17 bp, synthetic construct
  misc_feature 1..17: note = Oligonucleotide
  source 1..17: mol_type = other DNA
gggcgcggggaaccgag

SEQ ID NO: 18703 - DNA, 17 bp, synthetic construct
  misc_feature 1..17: note = Oligonucleotide
  source 1..17: mol_type = other DNA
agggggcgcggggaacc

SEQ ID NO: 18704 - DNA, 17 bp, synthetic construct
  misc_feature 1..17: note = Oligonucleotide
  source 1..17: mol_type = other DNA
cgcagggggcgcgggga

SEQ ID NO: 18705 - DNA, 17 bp, synthetic construct
  misc_feature 1..17: note = Oligonucleotide
  source 1..17: mol_type = other DNA
gggcgcagggggcgcgg

SEQ ID NO: 18706 - DNA, 17 bp, synthetic construct
  misc_feature 1..17: note = Oligonucleotide
  source 1..17: mol_type = other DNA
ggggggcgcagggggcg

SEQ ID NO: 18707 - DNA, 17 bp, synthetic construct
  misc_feature 1..17: note = Oligonucleotide
  source 1..17: mol_type = other DNA
tgcggggggcgcagggg

SEQ ID NO: 18708 - DNA, 17 bp, synthetic construct
  misc_feature 1..17: note = Oligonucleotide
  source 1..17: mol_type = other DNA
cggtgcggggggcgcag

SEQ ID NO: 18709 - DNA, 17 bp, synthetic construct
  misc_feature 1..17: note = Oligonucleotide
  source 1..17: mol_type = other DNA
cggcggtgcggggggcg

SEQ ID NO: 18710 - DNA, 17 bp, synthetic construct
  misc_feature 1..17: note = Oligonucleotide
  source 1..17: mol_type = other DNA
gggcggcggtgcggggg

SEQ ID NO: 18711 - DNA, 17 bp, synthetic construct
  misc_feature 1..17: note = Oligonucleotide
  source 1..17: mol_type = other DNA
ccggggcggcggtgcgg

SEQ ID NO: 18712 - DNA, 17 bp, synthetic construct
  misc_feature 1..17: note = Oligonucleotide
  source 1..17: mol_type = other DNA
gccccggggcggcggtg

SEQ ID NO: 18713 - DNA, 17 bp, synthetic construct
  misc_feature 1..17: note = Oligonucleotide
  source 1..17: mol_type = other DNA
cgggccccggggcggcg

SEQ ID NO: 18714 - DNA, 17 bp, synthetic construct
  misc_feature 1..17: note = Oligonucleotide
  source 1..17: mol_type = other DNA
cttcgggccccggggcg

SEQ ID NO: 18715 - DNA, 17 bp, synthetic construct
  misc_feature 1..17: note = Oligonucleotide
  source 1..17: mol_type = other DNA
ccgcttcgggccccggg

SEQ ID NO: 18716 - DNA, 17 bp, synthetic construct
  misc_feature 1..17: note = Oligonucleotide
  source 1..17: mol_type = other DNA
tttccgcttcgggcccc

SEQ ID NO: 18717 - DNA, 17 bp, synthetic construct
  misc_feature 1..17: note = Oligonucleotide
  source 1..17: mol_type = other DNA
aagtttccgcttcgggc

SEQ ID NO: 18718 - DNA, 17 bp, synthetic construct
  misc_feature 1..17: note = Oligonucleotide
  source 1..17: mol_type = other DNA
gtaaagtttccgcttcg

SEQ ID NO: 18719 - DNA, 17 bp, synthetic construct
  misc_feature 1..17: note = Oligonucleotide
  source 1..17: mol_type = other DNA
gctgtaaagtttccgct

SEQ ID NO: 18720 - DNA, 17 bp, synthetic construct
  misc_feature 1..17: note = Oligonucleotide
  source 1..17: mol_type = other DNA
ggcgctgtaaagtttcc

SEQ ID NO: 18721 - DNA, 17 bp, synthetic construct
  misc_feature 1..17: note = Oligonucleotide
  source 1..17: mol_type = other DNA
gacggcgctgtaaagtt

SEQ ID NO: 18722 - DNA, 17 bp, synthetic construct
  misc_feature 1..17: note = Oligonucleotide
  source 1..17: mol_type = other DNA
ggggacggcgctgtaaa

SEQ ID NO: 18723 - DNA, 17 bp, synthetic construct
  misc_feature 1..17: note = Oligonucleotide
  source 1..17: mol_type = other DNA
gccggggacggcgctgt

SEQ ID NO: 18724 - DNA, 17 bp, synthetic construct
  misc_feature 1..17: note = Oligonucleotide
  source 1..17: mol_type = other DNA
gcggccggggacggcgc

SEQ ID NO: 18725 - DNA, 17 bp, synthetic construct
  misc_feature 1..17: note = Oligonucleotide
  source 1..17: mol_type = other DNA
cttgcggccggggacgg

SEQ ID NO: 18726 - DNA, 17 bp, synthetic construct
  misc_feature 1..17: note = Oligonucleotide
  source 1..17: mol_type = other DNA
gaacttgcggccgggga

SEQ ID NO: 18727 - DNA, 17 bp, synthetic construct
  misc_feature 1..17: note = Oligonucleotide
  source 1..17: mol_type = other DNA
gatgaacttgcggccgg

SEQ ID NO: 18728 - DNA, 17 bp, synthetic construct
  misc_feature 1..17: note = Oligonucleotide
  source 1..17: mol_type = other DNA
ggcgatgaacttgcggc

SEQ ID NO: 18729 - DNA, 17 bp, synthetic construct
  misc_feature 1..17: note = Oligonucleotide
  source 1..17: mol_type = other DNA
cacggcgatgaacttgc

SEQ ID NO: 18730 - DNA, 17 bp, synthetic construct
  misc_feature 1..17: note = Oligonucleotide
  source 1..17: mol_type = other DNA
cttcacggcgatgaact

SEQ ID NO: 18731 - DNA, 17 bp, synthetic construct
  misc_feature 1..17: note = Oligonucleotide
  source 1..17: mol_type = other DNA
cgccttcacggcgatga

SEQ ID NO: 18732 - DNA, 17 bp, synthetic construct
  misc_feature 1..17: note = Oligonucleotide
  source 1..17: mol_type = other DNA
gtgcgccttcacggcga

SEQ ID NO: 18733 - DNA, 17 bp, synthetic construct
  misc_feature 1..17: note = Oligonucleotide
  source 1..17: mol_type = other DNA
gctgtgcgccttcacgg

SEQ ID NO: 18734 - DNA, 17 bp, synthetic construct
  misc_feature 1..17: note = Oligonucleotide
  source 1..17: mol_type = other DNA
cgggctgtgcgccttca

SEQ ID NO: 18735 - DNA, 17 bp, synthetic construct
  misc_feature 1..17: note = Oligonucleotide
  source 1..17: mol_type = other DNA
ctgcgggctgtgcgcct

SEQ ID NO: 18736 - DNA, 17 bp, synthetic construct
  misc_feature 1..17: note = Oligonucleotide
  source 1..17: mol_type = other DNA
accctgcgggctgtgcg

SEQ ID NO: 18737 - DNA, 17 bp, synthetic construct
  misc_feature 1..17: note = Oligonucleotide
  source 1..17: mol_type = other DNA
ttcaccctgcgggctgt

SEQ ID NO: 18738 - DNA, 17 bp, synthetic construct
  misc_feature 1..17: note = Oligonucleotide
  source 1..17: mol_type = other DNA
gccttcaccctgcgggc

SEQ ID NO: 18739 - DNA, 17 bp, synthetic construct
  misc_feature 1..17: note = Oligonucleotide
  source 1..17: mol_type = other DNA
ctcgccttcaccctgcg

SEQ ID NO: 18740 - DNA, 17 bp, synthetic construct
  misc_feature 1..17: note = Oligonucleotide
  source 1..17: mol_type = other DNA
gatctcgccttcaccct

SEQ ID NO: 18741 - DNA, 17 bp, synthetic construct
  misc_feature 1..17: note = Oligonucleotide
  source 1..17: mol_type = other DNA
cgggatctcgccttcac

SEQ ID NO: 18742 - DNA, 17 bp, synthetic construct
  misc_feature 1..17: note = Oligonucleotide
  source 1..17: mol_type = other DNA
cagcgggatctcgcctt

SEQ ID NO: 18743 - DNA, 17 bp, synthetic construct
  misc_feature 1..17: note = Oligonucleotide
  source 1..17: mol_type = other DNA
gtgcagcgggatctcgc

SEQ ID NO: 18744 - DNA, 17 bp, synthetic construct
  misc_feature 1..17: note = Oligonucleotide
  source 1..17: mol_type = other DNA
gcggtgcagcgggatct

SEQ ID NO: 18745 - DNA, 17 bp, synthetic construct
  misc_feature 1..17: note = Oligonucleotide
  source 1..17: mol_type = other DNA
gccgcggtgcagcggga

SEQ ID NO: 18746 - DNA, 17 bp, synthetic construct
  misc_feature 1..17: note = Oligonucleotide
  source 1..17: mol_type = other DNA
ctcgccgcggtgcagcg

SEQ ID NO: 18747 - DNA, 17 bp, synthetic construct
  misc_feature 1..17: note = Oligonucleotide
  source 1..17: mol_type = other DNA
ggcctcgccgcggtgca

SEQ ID NO: 18748 - DNA, 17 bp, synthetic construct
  misc_feature 1..17: note = Oligonucleotide
  source 1..17: mol_type = other DNA
cacggcctcgccgcggt

SEQ ID NO: 18749 - DNA, 17 bp, synthetic construct
  misc_feature 1..17: note = Oligonucleotide
  source 1..17: mol_type = other DNA
cttcacggcctcgccgc

SEQ ID NO: 18750 - DNA, 17 bp, synthetic construct
  misc_feature 1..17: note = Oligonucleotide
  source 1..17: mol_type = other DNA
acccttcacggcctcgc

SEQ ID NO: 18751 - DNA, 17 bp, synthetic construct
  misc_feature 1..17: note = Oligonucleotide
  source 1..17: mol_type = other DNA
ctcacccttcacggcct

SEQ ID NO: 18752 - DNA, 17 bp, synthetic construct
  misc_feature 1..17: note = Oligonucleotide
  source 1..17: mol_type = other DNA
cccctcacccttcacgg

SEQ ID NO: 18753 - DNA, 17 bp, synthetic construct
  misc_feature 1..17: note = Oligonucleotide
  source 1..17: mol_type = other DNA
gcgcccctcacccttca

SEQ ID NO: 18754 - DNA, 17 bp, synthetic construct
  misc_feature 1..17: note = Oligonucleotide
  source 1..17: mol_type = other DNA
cccgcgcccctcaccct

SEQ ID NO: 18755 - DNA, 17 bp, synthetic construct
  misc_feature 1..17: note = Oligonucleotide
  source 1..17: mol_type = other DNA
ccccccgcgcccctcac

SEQ ID NO: 18756 - DNA, 17 bp, synthetic construct
  misc_feature 1..17: note = Oligonucleotide
  source 1..17: mol_type = other DNA
cgcccccccgcgcccct

SEQ ID NO: 18757 - DNA, 17 bp, synthetic construct
  misc_feature 1..17: note = Oligonucleotide
  source 1..17: mol_type = other DNA
ccgcgcccccccgcgcc

SEQ ID NO: 18758 - DNA, 17 bp, synthetic construct
  misc_feature 1..17: note = Oligonucleotide
  source 1..17: mol_type = other DNA
cccccgcgcccccccgc

SEQ ID NO: 18759 - DNA, 17 bp, synthetic construct
  misc_feature 1..17: note = Oligonucleotide
  source 1..17: mol_type = other DNA
gcccccccgcgcccccc

SEQ ID NO: 18760 - DNA, 17 bp, synthetic construct
  misc_feature 1..17: note = Oligonucleotide
  source 1..17: mol_type = other DNA
cccgcccccccgcgccc

SEQ ID NO: 18761 - DNA, 17 bp, synthetic construct
  misc_feature 1..17: note = Oligonucleotide
  source 1..17: mol_type = other DNA
gggcccgcccccccgcg

SEQ ID NO: 18762 - DNA, 17 bp, synthetic construct
  misc_feature 1..17: note = Oligonucleotide
  source 1..17: mol_type = other DNA
gccgggcccgccccccc

SEQ ID NO: 18763 - DNA, 17 bp, synthetic construct
  misc_feature 1..17: note = Oligonucleotide
  source 1..17: mol_type = other DNA
cgcgccgggcccgcccc

SEQ ID NO: 18764 - DNA, 17 bp, synthetic construct
  misc_feature 1..17: note = Oligonucleotide
  source 1..17: mol_type = other DNA
ccccgcgccgggcccgc

SEQ ID NO: 18765 - DNA, 17 bp, synthetic construct
  misc_feature 1..17: note = Oligonucleotide
  source 1..17: mol_type = other DNA
cctccccgcgccgggcc

SEQ ID NO: 18766 - DNA, 17 bp, synthetic construct
  misc_feature 1..17: note = Oligonucleotide
  source 1..17: mol_type = other DNA
ccccctccccgcgccgg

SEQ ID NO: 18767 - DNA, 17 bp, synthetic construct
  misc_feature 1..17: note = Oligonucleotide
  source 1..17: mol_type = other DNA
ccgccccctccccgcgc

SEQ ID NO: 18768 - DNA, 17 bp, synthetic construct
  misc_feature 1..17: note = Oligonucleotide
  source 1..17: mol_type = other DNA
gcgccgccccctccccg

SEQ ID NO: 18769 - DNA, 17 bp, synthetic construct
  misc_feature 1..17: note = Oligonucleotide
  source 1..17: mol_type = other DNA
gcggcgccgccccctcc

SEQ ID NO: 18770 - DNA, 17 bp, synthetic construct
  misc_feature 1..17: note = Oligonucleotide
  source 1..17: mol_type = other DNA
cgcgcggcgccgccccc

SEQ ID NO: 18771 - DNA, 17 bp, synthetic construct
  misc_feature 1..17: note = Oligonucleotide
  source 1..17: mol_type = other DNA
ccgcgcgcggcgccgcc

SEQ ID NO: 18772 - DNA, 17 bp, synthetic construct
  misc_feature 1..17: note = Oligonucleotide
  source 1..17: mol_type = other DNA
gcaccgcgcgcggcgcc

SEQ ID NO: 18773 - DNA, 17 bp, synthetic construct
  misc_feature 1..17: note = Oligonucleotide
  source 1..17: mol_type = other DNA
ccagcaccgcgcgcggc

SEQ ID NO: 18774 - DNA, 17 bp, synthetic construct
  misc_feature 1..17: note = Oligonucleotide
  source 1..17: mol_type = other DNA
cggccagcaccgcgcgc

SEQ ID NO: 18775 - DNA, 17 bp, synthetic construct
  misc_feature 1..17: note = Oligonucleotide
  source 1..17: mol_type = other DNA
gcccggccagcaccgcg

SEQ ID NO: 18776 - DNA, 17 bp, synthetic construct
  misc_feature 1..17: note = Oligonucleotide
  source 1..17: mol_type = other DNA
ccggcccggccagcacc

SEQ ID NO: 18777 - DNA, 17 bp, synthetic construct
  misc_feature 1..17: note = Oligonucleotide
  source 1..17: mol_type = other DNA
gccccggcccggccagc

SEQ ID NO: 18778 - DNA, 17 bp, synthetic construct
  misc_feature 1..17: note = Oligonucleotide
  source 1..17: mol_type = other DNA
actgccccggcccggcc

SEQ ID NO: 18779 - DNA, 17 bp, synthetic construct
  misc_feature 1..17: note = Oligonucleotide
  source 1..17: mol_type = other DNA
gccactgccccggcccg

SEQ ID NO: 18780 - DNA, 17 bp, synthetic construct
  misc_feature 1..17: note = Oligonucleotide
  source 1..17: mol_type = other DNA
agagccactgccccggc

SEQ ID NO: 18781 - DNA, 17 bp, synthetic construct
  misc_feature 1..17: note = Oligonucleotide
  source 1..17: mol_type = other DNA
cccagagccactgcccc

SEQ ID NO: 18782 - DNA, 17 bp, synthetic construct
  misc_feature 1..17: note = Oligonucleotide
  source 1..17: mol_type = other DNA
gaccccagagccactgc

SEQ ID NO: 18783 - DNA, 17 bp, synthetic construct
  misc_feature 1..17: note = Oligonucleotide
  source 1..17: mol_type = other DNA
ggagaccccagagccac

SEQ ID NO: 18784 - DNA, 17 bp, synthetic construct
  misc_feature 1..17: note = Oligonucleotide
  source 1..17: mol_type = other DNA
agaggagaccccagagc

SEQ ID NO: 18785 - DNA, 17 bp, synthetic construct
  misc_feature 1..17: note = Oligonucleotide
  source 1..17: mol_type = other DNA
ggcagaggagaccccag

SEQ ID NO: 18786 - DNA, 17 bp, synthetic construct
  misc_feature 1..17: note = Oligonucleotide
  source 1..17: mol_type = other DNA
cccggcagaggagaccc

SEQ ID NO: 18787 - DNA, 17 bp, synthetic construct
  misc_feature 1..17: note = Oligonucleotide
  source 1..17: mol_type = other DNA
cgccccggcagaggaga

SEQ ID NO: 18788 - DNA, 17 bp, synthetic construct
  misc_feature 1..17: note = Oligonucleotide
  source 1..17: mol_type = other DNA
ggccgccccggcagagg

SEQ ID NO: 18789 - DNA, 17 bp, synthetic construct
  misc_feature 1..17: note = Oligonucleotide
  source 1..17: mol_type = other DNA
cagggccgccccggcag

SEQ ID NO: 18790 - DNA, 17 bp, synthetic construct
  misc_feature 1..17: note = Oligonucleotide
  source 1..17: mol_type = other DNA
gcccagggccgccccgg

SEQ ID NO: 18791 - DNA, 17 bp, synthetic construct
  misc_feature 1..17: note = Oligonucleotide
  source 1..17: mol_type = other DNA
agggcccagggccgccc

SEQ ID NO: 18792 - DNA, 17 bp, synthetic construct
  misc_feature 1..17: note = Oligonucleotide
  source 1..17: mol_type = other DNA
acaagggcccagggccg

SEQ ID NO: 18793 - DNA, 17 bp, synthetic construct
  misc_feature 1..17: note = Oligonucleotide
  source 1..17: mol_type = other DNA
cccacaagggcccaggg

SEQ ID NO: 18794 - DNA, 17 bp, synthetic construct
  misc_feature 1..17: note = Oligonucleotide
  source 1..17: mol_type = other DNA
gatcccacaagggccca

SEQ ID NO: 18795 - DNA, 17 bp, synthetic construct
  misc_feature 1..17: note = Oligonucleotide
  source 1..17: mol_type = other DNA
agggatcccacaagggc

SEQ ID NO: 18796 - DNA, 17 bp, synthetic construct
  misc_feature 1..17: note = Oligonucleotide
  source 1..17: mol_type = other DNA
accagggatcccacaag

SEQ ID NO: 18797 - DNA, 17 bp, synthetic construct
  misc_feature 1..17: note = Oligonucleotide
  source 1..17: mol_type = other DNA
gacaccagggatcccac

SEQ ID NO: 18798 - DNA, 17 bp, synthetic construct
  misc_feature 1..17: note = Oligonucleotide
  source 1..17: mol_type = other DNA
cgtgacaccagggatcc

SEQ ID NO: 18799 - DNA, 17 bp, synthetic construct
  misc_feature 1..17: note = Oligonucleotide
  source 1..17: mol_type = other DNA
caccgtgacaccaggga

SEQ ID NO: 18800 - DNA, 17 bp, synthetic construct
  misc_feature 1..17: note = Oligonucleotide
  source 1..17: mol_type = other DNA
cttcaccgtgacaccag

SEQ ID NO: 18801 - DNA, 17 bp, synthetic construct
  misc_feature 1..17: note = Oligonucleotide
  source 1..17: mol_type = other DNA
gcccttcaccgtgacac

SEQ ID NO: 18802 - DNA, 17 bp, synthetic construct
  misc_feature 1..17: note = Oligonucleotide
  source 1..17: mol_type = other DNA
agagcccttcaccgtga

SEQ ID NO: 18803 - DNA, 17 bp, synthetic construct
  misc_feature 1..17: note = Oligonucleotide
  source 1..17: mol_type = other DNA
ggcagagcccttcaccg

SEQ ID NO: 18804 - DNA, 17 bp, synthetic construct
  misc_feature 1..17: note = Oligonucleotide
  source 1..17: mol_type = other DNA
ccaggcagagcccttca

SEQ ID NO: 18805 - DNA, 17 bp, synthetic construct
  misc_feature 1..17: note = Oligonucleotide
  source 1..17: mol_type = other DNA
tccccaggcagagccct

SEQ ID NO: 18806 - DNA, 17 bp, synthetic construct
  misc_feature 1..17: note = Oligonucleotide
  source 1..17: mol_type = other DNA
ccttccccaggcagagc

SEQ ID NO: 18807 - DNA, 17 bp, synthetic construct
  misc_feature 1..17: note = Oligonucleotide
  source 1..17: mol_type = other DNA
gaaccttccccaggcag

SEQ ID NO: 18808 - DNA, 17 bp, synthetic construct
  misc_feature 1..17: note = Oligonucleotide
  source 1..17: mol_type = other DNA
caggaaccttccccagg

SEQ ID NO: 18809 - DNA, 17 bp, synthetic construct
  misc_feature 1..17: note = Oligonucleotide
  source 1..17: mol_type = other DNA
cggcaggaaccttcccc

SEQ ID NO: 18810 - DNA, 17 bp, synthetic construct
  misc_feature 1..17: note = Oligonucleotide
  source 1..17: mol_type = other DNA
gcacggcaggaaccttc

SEQ ID NO: 18811 - DNA, 17 bp, synthetic construct
  misc_feature 1..17: note = Oligonucleotide
  source 1..17: mol_type = other DNA
cccgcacggcaggaacc

SEQ ID NO: 18812 - DNA, 17 bp, synthetic construct
  misc_feature 1..17: note = Oligonucleotide
  source 1..17: mol_type = other DNA
ggacccgcacggcagga

SEQ ID NO: 18813 - DNA, 17 bp, synthetic construct
  misc_feature 1..17: note = Oligonucleotide
  source 1..17: mol_type = other DNA
gagggacccgcacggca

SEQ ID NO: 18814 - DNA, 17 bp, synthetic construct
  misc_feature 1..17: note = Oligonucleotide
  source 1..17: mol_type = other DNA
ccggagggacccgcacg

SEQ ID NO: 18815 - DNA, 17 bp, synthetic construct
  misc_feature 1..17: note = Oligonucleotide
  source 1..17: mol_type = other DNA
gcaccggagggacccgc

SEQ ID NO: 18816 - DNA, 17 bp, synthetic construct
  misc_feature 1..17: note = Oligonucleotide
  source 1..17: mol_type = other DNA
agagcaccggagggacc

SEQ ID NO: 18817 - DNA, 17 bp, synthetic construct
  misc_feature 1..17: note = Oligonucleotide
  source 1..17: mol_type = other DNA
gacagagcaccggaggg

SEQ ID NO: 18818 - DNA, 17 bp, synthetic construct
  misc_feature 1..17: note = Oligonucleotide
  source 1..17: mol_type = other DNA
aacgacagagcaccgga

SEQ ID NO: 18819 - DNA, 17 bp, synthetic construct
  misc_feature 1..17: note = Oligonucleotide
  source 1..17: mol_type = other DNA
cggaacgacagagcacc

SEQ ID NO: 18820 - DNA, 17 bp, synthetic construct
  misc_feature 1..17: note = Oligonucleotide
  source 1..17: mol_type = other DNA
gcccggaacgacagagc

SEQ ID NO: 18821 - DNA, 17 bp, synthetic construct
  misc_feature 1..17: note = Oligonucleotide
  source 1..17: mol_type = other DNA
ggagcccggaacgacag

SEQ ID NO: 18822 - DNA, 17 bp, synthetic construct
  misc_feature 1..17: note = Oligonucleotide
  source 1..17: mol_type = other DNA
cagggagcccggaacga

SEQ ID NO: 18823 - DNA, 17 bp, synthetic construct
  misc_feature 1..17: note = Oligonucleotide
  source 1..17: mol_type = other DNA
acacagggagcccggaa

SEQ ID NO: 18824 - DNA, 17 bp, synthetic construct
  misc_feature 1..17: note = Oligonucleotide
  source 1..17: mol_type = other DNA
gtgacacagggagcccg

SEQ ID NO: 18825 - DNA, 17 bp, synthetic construct
  misc_feature 1..17: note = Oligonucleotide
  source 1..17: mol_type = other DNA
gtggtgacacagggagc

SEQ ID NO: 18826 - DNA, 17 bp, synthetic construct
  misc_feature 1..17: note = Oligonucleotide
  source 1..17: mol_type = other DNA
tccgtggtgacacaggg

SEQ ID NO: 18827 - DNA, 17 bp, synthetic construct
  misc_feature 1..17: note = Oligonucleotide
  source 1..17: mol_type = other DNA
gcctccgtggtgacaca

SEQ ID NO: 18828 - DNA, 17 bp, synthetic construct
  misc_feature 1..17: note = Oligonucleotide
  source 1..17: mol_type = other DNA
ggagcctccgtggtgac

SEQ ID NO: 18829 - DNA, 17 bp, synthetic construct
  misc_feature 1..17: note = Oligonucleotide
  source 1..17: mol_type = other DNA
agaggagcctccgtggt

SEQ ID NO: 18830 - DNA, 17 bp, synthetic construct
  misc_feature 1..17: note = Oligonucleotide
  source 1..17: mol_type = other DNA
gagagaggagcctccgt

SEQ ID NO: 18831 - DNA, 17 bp, synthetic construct
  misc_feature 1..17: note = Oligonucleotide
  source 1..17: mol_type = other DNA
ggcgagagaggagcctc

SEQ ID NO: 18832 - DNA, 17 bp, synthetic construct
  misc_feature 1..17: note = Oligonucleotide
  source 1..17: mol_type = other DNA
cgtggcgagagaggagc

SEQ ID NO: 18833 - DNA, 17 bp, synthetic construct
  misc_feature 1..17: note = Oligonucleotide
  source 1..17: mol_type = other DNA
gcccgtggcgagagagg

SEQ ID NO: 18834 - DNA, 17 bp, synthetic construct
  misc_feature 1..17: note = Oligonucleotide
  source 1..17: mol_type = other DNA
aacgcccgtggcgagag

SEQ ID NO: 18835 - DNA, 17 bp, synthetic construct
  misc_feature 1..17: note = Oligonucleotide
  source 1..17: mol_type = other DNA
agaaacgcccgtggcga

SEQ ID NO: 18836 - DNA, 17 bp, synthetic construct
  misc_feature 1..17: note = Oligonucleotide
  source 1..17: mol_type = other DNA
cacagaaacgcccgtgg

SEQ ID NO: 18837 - DNA, 17 bp, synthetic construct
  misc_feature 1..17: note = Oligonucleotide
  source 1..17: mol_type = other DNA
ggacacagaaacgcccg

SEQ ID NO: 18838 - DNA, 17 bp, synthetic construct
  misc_feature 1..17: note = Oligonucleotide
  source 1..17: mol_type = other DNA
cggggacacagaaacgc

SEQ ID NO: 18839 - DNA, 17 bp, synthetic construct
  misc_feature 1..17: note = Oligonucleotide
  source 1..17: mol_type = other DNA
ccccggggacacagaaa

SEQ ID NO: 18840 - DNA, 17 bp, synthetic construct
  misc_feature 1..17: note = Oligonucleotide
  source 1..17: mol_type = other DNA
gacccccggggacacag

SEQ ID NO: 18841 - DNA, 17 bp, synthetic construct
  misc_feature 1..17: note = Oligonucleotide
  source 1..17: mol_type = other DNA
agagacccccggggaca

SEQ ID NO: 18842 - DNA, 17 bp, synthetic construct
  misc_feature 1..17: note = Oligonucleotide
  source 1..17: mol_type = other DNA
ggcagagacccccgggg

SEQ ID NO: 18843 - DNA, 17 bp, synthetic construct
  misc_feature 1..17: note = Oligonucleotide
  source 1..17: mol_type = other DNA
tcaggcagagacccccg

SEQ ID NO: 18844 - DNA, 17 bp, synthetic construct
  misc_feature 1..17: note = Oligonucleotide
  source 1..17: mol_type = other DNA
ccttcaggcagagaccc

SEQ ID NO: 18845 - DNA, 17 bp, synthetic construct
  misc_feature 1..17: note = Oligonucleotide
  source 1..17: mol_type = other DNA
ggtccttcaggcagaga

SEQ ID NO: 18846 - DNA, 17 bp, synthetic construct
  misc_feature 1..17: note = Oligonucleotide
  source 1..17: mol_type = other DNA
cagggtccttcaggcag

SEQ ID NO: 18847 - DNA, 17 bp, synthetic construct
  misc_feature 1..17: note = Oligonucleotide
  source 1..17: mol_type = other DNA
ggacagggtccttcagg

SEQ ID NO: 18848 - DNA, 17 bp, synthetic construct
  misc_feature 1..17: note = Oligonucleotide
  source 1..17: mol_type = other DNA
atgggacagggtccttc

SEQ ID NO: 18849 - DNA, 17 bp, synthetic construct
  misc_feature 1..17: note = Oligonucleotide
  source 1..17: mol_type = other DNA
gtaatgggacagggtcc

SEQ ID NO: 18850 - DNA, 17 bp, synthetic construct
  misc_feature 1..17: note = Oligonucleotide
  source 1..17: mol_type = other DNA
tctgtaatgggacaggg

SEQ ID NO: 18851 - DNA, 17 bp, synthetic construct
  misc_feature 1..17: note = Oligonucleotide
  source 1..17: mol_type = other DNA
agctctgtaatgggaca

SEQ ID NO: 18852 - DNA, 17 bp, synthetic construct
  misc_feature 1..17: note = Oligonucleotide
  source 1..17: mol_type = other DNA
ggaagctctgtaatggg

SEQ ID NO: 18853 - DNA, 17 bp, synthetic construct
  misc_feature 1..17: note = Oligonucleotide
  source 1..17: mol_type = other DNA
caaggaagctctgtaat

SEQ ID NO: 18854 - DNA, 17 bp, synthetic construct
  misc_feature 1..17: note = Oligonucleotide
  source 1..17: mol_type = other DNA
atgcaaggaagctctgt

SEQ ID NO: 18855 - DNA, 17 bp, synthetic construct
  misc_feature 1..17: note = Oligonucleotide
  source 1..17: mol_type = other DNA
gcaatgcaaggaagctc

SEQ ID NO: 18856 - DNA, 17 bp, synthetic construct
  misc_feature 1..17: note = Oligonucleotide
  source 1..17: mol_type = other DNA
cccgcaatgcaaggaag

SEQ ID NO: 18857 - DNA, 17 bp, synthetic construct
  misc_feature 1..17: note = Oligonucleotide
  source 1..17: mol_type = other DNA
aaccccgcaatgcaagg

SEQ ID NO: 18858 - DNA, 17 bp, synthetic construct
  misc_feature 1..17: note = Oligonucleotide
  source 1..17: mol_type = other DNA
gggaaccccgcaatgca

SEQ ID NO: 18859 - DNA, 17 bp, synthetic construct
  misc_feature 1..17: note = Oligonucleotide
  source 1..17: mol_type = other DNA
cacgggaaccccgcaat

SEQ ID NO: 18860 - DNA, 17 bp, synthetic construct
  misc_feature 1..17: note = Oligonucleotide
  source 1..17: mol_type = other DNA
tgccacgggaaccccgc

SEQ ID NO: 18861 - DNA, 17 bp, synthetic construct
  misc_feature 1..17: note = Oligonucleotide
  source 1..17: mol_type = other DNA
aagtgccacgggaaccc

SEQ ID NO: 18862 - DNA, 17 bp, synthetic construct
  misc_feature 1..17: note = Oligonucleotide
  source 1..17: mol_type = other DNA
cagaagtgccacgggaa

SEQ ID NO: 18863 - DNA, 17 bp, synthetic construct
  misc_feature 1..17: note = Oligonucleotide
  source 1..17: mol_type = other DNA
ctgcagaagtgccacgg

SEQ ID NO: 18864 - DNA, 17 bp, synthetic construct
  misc_feature 1..17: note = Oligonucleotide
  source 1..17: mol_type = other DNA
aagctgcagaagtgcca

SEQ ID NO: 18865 - DNA, 17 bp, synthetic construct
  misc_feature 1..17: note = Oligonucleotide
  source 1..17: mol_type = other DNA
gagaagctgcagaagtg

SEQ ID NO: 18866 - DNA, 17 bp, synthetic construct
  misc_feature 1..17: note = Oligonucleotide
  source 1..17: mol_type = other DNA
atggagaagctgcagaa

SEQ ID NO: 18867 - DNA, 17 bp, synthetic construct
  misc_feature 1..17: note = Oligonucleotide
  source 1..17: mol_type = other DNA
ccaatggagaagctgca

SEQ ID NO: 18868 - DNA, 17 bp, synthetic construct
  misc_feature 1..17: note = Oligonucleotide
  source 1..17: mol_type = other DNA
cctccaatggagaagct

SEQ ID NO: 18869 - DNA, 17 bp, synthetic construct
  misc_feature 1..17: note = Oligonucleotide
  source 1..17: mol_type = other DNA
gggcctccaatggagaa

SEQ ID NO: 18870 - DNA, 17 bp, synthetic construct
  misc_feature 1..17: note = Oligonucleotide
  source 1..17: mol_type = other DNA
caggggcctccaatgga

SEQ ID NO: 18871 - DNA, 17 bp, synthetic construct
  misc_feature 1..17: note = Oligonucleotide
  source 1..17: mol_type = other DNA
tcgcaggggcctccaat

SEQ ID NO: 18872 - DNA, 17 bp, synthetic construct
  misc_feature 1..17: note = Oligonucleotide
  source 1..17: mol_type = other DNA
acatcgcaggggcctcc

SEQ ID NO: 18873 - DNA, 17 bp, synthetic construct
  misc_feature 1..17: note = Oligonucleotide
  source 1..17: mol_type = other DNA
cccacatcgcaggggcc

SEQ ID NO: 18874 - DNA, 17 bp, synthetic construct
  misc_feature 1..17: note = Oligonucleotide
  source 1..17: mol_type = other DNA
tcccccacatcgcaggg

SEQ ID NO: 18875 - DNA, 17 bp, synthetic construct
  misc_feature 1..17: note = Oligonucleotide
  source 1..17: mol_type = other DNA
gggtcccccacatcgca

SEQ ID NO: 18876 - DNA, 17 bp, synthetic construct
  misc_feature 1..17: note = Oligonucleotide
  source 1..17: mol_type = other DNA
caagggtcccccacatc

SEQ ID NO: 18877 - DNA, 17 bp, synthetic construct
  misc_feature 1..17: note = Oligonucleotide
  source 1..17: mol_type = other DNA
cggcaagggtcccccac

SEQ ID NO: 18878 - DNA, 17 bp, synthetic construct
  misc_feature 1..17: note = Oligonucleotide
  source 1..17: mol_type = other DNA
cgacggcaagggtcccc

SEQ ID NO: 18879 - DNA, 17 bp, synthetic construct
  misc_feature 1..17: note = Oligonucleotide
  source 1..17: mol_type = other DNA
ccacgacggcaagggtc

SEQ ID NO: 18880 - DNA, 17 bp, synthetic construct
  misc_feature 1..17: note = Oligonucleotide
  source 1..17: mol_type = other DNA
accccacgacggcaagg

SEQ ID NO: 18881 - DNA, 17 bp, synthetic construct
  misc_feature 1..17: note = Oligonucleotide
  source 1..17: mol_type = other DNA
gacaccccacgacggca

SEQ ID NO: 18882 - DNA, 17 bp, synthetic construct
  misc_feature 1..17: note = Oligonucleotide
  source 1..17: mol_type = other DNA
acagacaccccacgacg

SEQ ID NO: 18883 - DNA, 17 bp, synthetic construct
  misc_feature 1..17: note = Oligonucleotide
  source 1..17: mol_type = other DNA
gtcacagacaccccacg

SEQ ID NO: 18884 - DNA, 17 bp, synthetic construct
  misc_feature 1..17: note = Oligonucleotide
  source 1..17: mol_type = other DNA
acggtcacagacacccc

SEQ ID NO: 18885 - DNA, 17 bp, synthetic construct
  misc_feature 1..17: note = Oligonucleotide
  source 1..17: mol_type = other DNA
atgacggtcacagacac

SEQ ID NO: 18886 - DNA, 17 bp, synthetic construct
  misc_feature 1..17: note = Oligonucleotide
  source 1..17: mol_type = other DNA
cacatgacggtcacaga

SEQ ID NO: 18887 - DNA, 17 bp, synthetic construct
  misc_feature 1..17: note = Oligonucleotide
  source 1..17: mol_type = other DNA
acccacatgacggtcac

SEQ ID NO: 18888 - DNA, 17 bp, synthetic construct
  misc_feature 1..17: note = Oligonucleotide
  source 1..17: mol_type = other DNA
aacacccacatgacggt

SEQ ID NO: 18889 - DNA, 17 bp, synthetic construct
  misc_feature 1..17: note = Oligonucleotide
  source 1..17: mol_type = other DNA
acaaacacccacatgac

SEQ ID NO: 18890 - DNA, 17 bp, synthetic construct
  misc_feature 1..17: note = Oligonucleotide
  source 1..17: mol_type = other DNA
aacacaaacacccacat

SEQ ID NO: 18891 - DNA, 17 bp, synthetic construct
  misc_feature 1..17: note = Oligonucleotide
  source 1..17: mol_type = other DNA
cataacacaaacaccca

SEQ ID NO: 18892 - DNA, 17 bp, synthetic construct
  misc_feature 1..17: note = Oligonucleotide
  source 1..17: mol_type = other DNA
ctgcataacacaaacac

SEQ ID NO: 18893 - DNA, 17 bp, synthetic construct
  misc_feature 1..17: note = Oligonucleotide
  source 1..17: mol_type = other DNA
agcctgcataacacaaa

SEQ ID NO: 18894 - DNA, 17 bp, synthetic construct
  misc_feature 1..17: note = Oligonucleotide
  source 1..17: mol_type = other DNA
agaagcctgcataacac

SEQ ID NO: 18895 - DNA, 17 bp, synthetic construct
  misc_feature 1..17: note = Oligonucleotide
  source 1..17: mol_type = other DNA
gacagaagcctgcataa

SEQ ID NO: 18896 - DNA, 17 bp, synthetic construct
  misc_feature 1..17: note = Oligonucleotide
  source 1..17: mol_type = other DNA
ggtgacagaagcctgca

SEQ ID NO: 18897 - DNA, 17 bp, synthetic construct
  misc_feature 1..17: note = Oligonucleotide
  source 1..17: mol_type = other DNA
cccggtgacagaagcct

SEQ ID NO: 18898 - DNA, 17 bp, synthetic construct
  misc_feature 1..17: note = Oligonucleotide
  source 1..17: mol_type = other DNA
agccccggtgacagaag

SEQ ID NO: 18899 - DNA, 17 bp, synthetic construct
  misc_feature 1..17: note = Oligonucleotide
  source 1..17: mol_type = other DNA
ggaagccccggtgacag

SEQ ID NO: 18900 - DNA, 17 bp, synthetic construct
  misc_feature 1..17: note = Oligonucleotide
  source 1..17: mol_type = other DNA
acaggaagccccggtga

SEQ ID NO: 18901 - DNA, 17 bp, synthetic construct
  misc_feature 1..17: note = Oligonucleotide
  source 1..17: mol_type = other DNA
aacacaggaagccccgg

SEQ ID NO: 18902 - DNA, 17 bp, synthetic construct
  misc_feature 1..17: note = Oligonucleotide
  source 1..17: mol_type = other DNA
cagaacacaggaagccc

SEQ ID NO: 18903 - DNA, 17 bp, synthetic construct
  misc_feature 1..17: note = Oligonucleotide
  source 1..17: mol_type = other DNA
ccccagaacacaggaag

SEQ ID NO: 18904 - DNA, 17 bp, synthetic construct
  misc_feature 1..17: note = Oligonucleotide
  source 1..17: mol_type = other DNA
tccccccagaacacagg

SEQ ID NO: 18905 - DNA, 17 bp, synthetic construct
  misc_feature 1..17: note = Oligonucleotide
  source 1..17: mol_type = other DNA
cgatccccccagaacac

SEQ ID NO: 18906 - DNA, 17 bp, synthetic construct
  misc_feature 1..17: note = Oligonucleotide
  source 1..17: mol_type = other DNA
acgcgatccccccagaa

SEQ ID NO: 18907 - DNA, 17 bp, synthetic construct
  misc_feature 1..17: note = Oligonucleotide
  source 1..17: mol_type = other DNA
ggcacgcgatcccccca

SEQ ID NO: 18908 - DNA, 17 bp, synthetic construct
  misc_feature 1..17: note = Oligonucleotide
  source 1..17: mol_type = other DNA
catggcacgcgatcccc

SEQ ID NO: 18909 - DNA, 17 bp, synthetic construct
  misc_feature 1..17: note = Oligonucleotide
  source 1..17: mol_type = other DNA
tgtcatggcacgcgatc

SEQ ID NO: 18910 - DNA, 17 bp, synthetic construct
  misc_feature 1..17: note = Oligonucleotide
  source 1..17: mol_type = other DNA
gtttgtcatggcacgcg

SEQ ID NO: 18911 - DNA, 17 bp, synthetic construct
  misc_feature 1..17: note = Oligonucleotide
  source 1..17: mol_type = other DNA
ggggtttgtcatggcac

SEQ ID NO: 18912 - DNA, 17 bp, synthetic construct
  misc_feature 1..17: note = Oligonucleotide
  source 1..17: mol_type = other DNA
agaggggtttgtcatgg

SEQ ID NO: 18913 - DNA, 17 bp, synthetic construct
  misc_feature 1..17: note = Oligonucleotide
  source 1..17: mol_type = other DNA
atgagaggggtttgtca

SEQ ID NO: 18914 - DNA, 17 bp, synthetic construct
  misc_feature 1..17: note = Oligonucleotide
  source 1..17: mol_type = other DNA
agaatgagaggggtttg

SEQ ID NO: 18915 - DNA, 17 bp, synthetic construct
  misc_feature 1..17: note = Oligonucleotide
  source 1..17: mol_type = other DNA
cccagaatgagaggggt

SEQ ID NO: 18916 - DNA, 17 bp, synthetic construct
  misc_feature 1..17: note = Oligonucleotide
  source 1..17: mol_type = other DNA
acccccagaatgagagg

SEQ ID NO: 18917 - DNA, 17 bp, synthetic construct
  misc_feature 1..17: note = Oligonucleotide
  source 1..17: mol_type = other DNA
gagacccccagaatgag

SEQ ID NO: 18918 - DNA, 17 bp, synthetic construct
  misc_feature 1..17: note = Oligonucleotide
  source 1..17: mol_type = other DNA
cccgagacccccagaat

SEQ ID NO: 18919 - DNA, 17 bp, synthetic construct
  misc_feature 1..17: note = Oligonucleotide
  source 1..17: mol_type = other DNA
ggccccgagacccccag

SEQ ID NO: 18920 - DNA, 17 bp, synthetic construct
  misc_feature 1..17: note = Oligonucleotide
  source 1..17: mol_type = other DNA
gatggccccgagacccc

SEQ ID NO: 18921 - DNA, 17 bp, synthetic construct
  misc_feature 1..17: note = Oligonucleotide
  source 1..17: mol_type = other DNA
agtgatggccccgagac

SEQ ID NO: 18922 - DNA, 17 bp, synthetic construct
  misc_feature 1..17: note = Oligonucleotide
  source 1..17: mol_type = other DNA
cccagtgatggccccga

SEQ ID NO: 18923 - DNA, 17 bp, synthetic construct
  misc_feature 1..17: note = Oligonucleotide
  source 1..17: mol_type = other DNA
gagcccagtgatggccc

SEQ ID NO: 18924 - DNA, 17 bp, synthetic construct
  misc_feature 1..17: note = Oligonucleotide
  source 1..17: mol_type = other DNA
taggagcccagtgatgg

SEQ ID NO: 18925 - DNA, 17 bp, synthetic construct
  misc_feature 1..17: note = Oligonucleotide
  source 1..17: mol_type = other DNA
ggctaggagcccagtga

SEQ ID NO: 18926 - DNA, 17 bp, synthetic construct
  misc_feature 1..17: note = Oligonucleotide
  source 1..17: mol_type = other DNA
tgaggctaggagcccag

SEQ ID NO: 18927 - DNA, 17 bp, synthetic construct
  misc_feature 1..17: note = Oligonucleotide
  source 1..17: mol_type = other DNA
ccctgaggctaggagcc

SEQ ID NO: 18928 - DNA, 17 bp, synthetic construct
  misc_feature 1..17: note = Oligonucleotide
  source 1..17: mol_type = other DNA
cggccctgaggctagga

SEQ ID NO: 18929 - DNA, 17 bp, synthetic construct
  misc_feature 1..17: note = Oligonucleotide
  source 1..17: mol_type = other DNA
agccggccctgaggcta

SEQ ID NO: 18930 - DNA, 17 bp, synthetic construct
  misc_feature 1..17: note = Oligonucleotide
  source 1..17: mol_type = other DNA
ctcagccggccctgagg

SEQ ID NO: 18931 - DNA, 17 bp, synthetic construct
  misc_feature 1..17: note = Oligonucleotide
  source 1..17: mol_type = other DNA
cacctcagccggccctg

SEQ ID NO: 18932 - DNA, 17 bp, synthetic construct
  misc_feature 1..17: note = Oligonucleotide
  source 1..17: mol_type = other DNA
ttccacctcagccggcc

SEQ ID NO: 18933 - DNA, 17 bp, synthetic construct
  misc_feature 1..17: note = Oligonucleotide
  source 1..17: mol_type = other DNA
tgtttccacctcagccg

SEQ ID NO: 18934 - DNA, 17 bp, synthetic construct
  misc_feature 1..17: note = Oligonucleotide
  source 1..17: mol_type = other DNA
ggctgtttccacctcag

SEQ ID NO: 18935 - DNA, 17 bp, synthetic construct
  misc_feature 1..17: note = Oligonucleotide
  source 1..17: mol_type = other DNA
ctgggctgtttccacct

SEQ ID NO: 18936 - DNA, 17 bp, synthetic construct
  misc_feature 1..17: note = Oligonucleotide
  source 1..17: mol_type = other DNA
cagctgggctgtttcca

SEQ ID NO: 18937 - DNA, 17 bp, synthetic construct
  misc_feature 1..17: note = Oligonucleotide
  source 1..17: mol_type = other DNA
caccagctgggctgttt

SEQ ID NO: 18938 - DNA, 17 bp, synthetic construct
  misc_feature 1..17: note = Oligonucleotide
  source 1..17: mol_type = other DNA
atgcaccagctgggctg

SEQ ID NO: 18939 - DNA, 17 bp, synthetic construct
  misc_feature 1..17: note = Oligonucleotide
  source 1..17: mol_type = other DNA
gtgatgcaccagctggg

SEQ ID NO: 18940 - DNA, 17 bp, synthetic construct
  misc_feature 1..17: note = Oligonucleotide
  source 1..17: mol_type = other DNA
cacgtgatgcaccagct

SEQ ID NO: 18941 - DNA, 17 bp, synthetic construct
  misc_feature 1..17: note = Oligonucleotide
  source 1..17: mol_type = other DNA
ggccacgtgatgcacca

SEQ ID NO: 18942 - DNA, 17 bp, synthetic construct
  misc_feature 1..17: note = Oligonucleotide
  source 1..17: mol_type = other DNA
tgaggccacgtgatgca

SEQ ID NO: 18943 - DNA, 17 bp, synthetic construct
  misc_feature 1..17: note = Oligonucleotide
  source 1..17: mol_type = other DNA
gggtgaggccacgtgat

SEQ ID NO: 18944 - DNA, 17 bp, synthetic construct
  misc_feature 1..17: note = Oligonucleotide
  source 1..17: mol_type = other DNA
agtgggtgaggccacgt

SEQ ID NO: 18945 - DNA, 17 bp, synthetic construct
  misc_feature 1..17: note = Oligonucleotide
  source 1..17: mol_type = other DNA
gccagtgggtgaggcca

SEQ ID NO: 18946 - DNA, 17 bp, synthetic construct
  misc_feature 1..17: note = Oligonucleotide
  source 1..17: mol_type = other DNA
gtggccagtgggtgagg

SEQ ID NO: 18947 - DNA, 17 bp, synthetic construct
  misc_feature 1..17: note = Oligonucleotide
  source 1..17: mol_type = other DNA
gctgtggccagtgggtg

SEQ ID NO: 18948 - DNA, 17 bp, synthetic construct
  misc_feature 1..17: note = Oligonucleotide
  source 1..17: mol_type = other DNA
cgtgctgtggccagtgg

SEQ ID NO: 18949 - DNA, 17 bp, synthetic construct
  misc_feature 1..17: note = Oligonucleotide
  source 1..17: mol_type = other DNA
catcgtgctgtggccag

SEQ ID NO: 18950 - DNA, 17 bp, synthetic construct
  misc_feature 1..17: note = Oligonucleotide
  source 1..17: mol_type = other DNA
ggtcatcgtgctgtggc

SEQ ID NO: 18951 - DNA, 17 bp, synthetic construct
  misc_feature 1..17: note = Oligonucleotide
  source 1..17: mol_type = other DNA
cggggtcatcgtgctgt

SEQ ID NO: 18952 - DNA, 17 bp, synthetic construct
  misc_feature 1..17: note = Oligonucleotide
  source 1..17: mol_type = other DNA
gctcggggtcatcgtgc

SEQ ID NO: 18953 - DNA, 17 bp, synthetic construct
  misc_feature 1..17: note = Oligonucleotide
  source 1..17: mol_type = other DNA
agagctcggggtcatcg

SEQ ID NO: 18954 - DNA, 17 bp, synthetic construct
  misc_feature 1..17: note = Oligonucleotide
  source 1..17: mol_type = other DNA
ccgagagctcggggtca

SEQ ID NO: 18955 - DNA, 17 bp, synthetic construct
  misc_feature 1..17: note = Oligonucleotide
  source 1..17: mol_type = other DNA
ctgccgagagctcgggg

SEQ ID NO: 18956 - DNA, 17 bp, synthetic construct
  misc_feature 1..17: note = Oligonucleotide
  source 1..17: mol_type = other DNA
tcactgccgagagctcg

SEQ ID NO: 18957 - DNA, 17 bp, synthetic construct
  misc_feature 1..17: note = Oligonucleotide
  source 1..17: mol_type = other DNA
gggtcactgccgagagc

SEQ ID NO: 18958 - DNA, 17 bp, synthetic construct
  misc_feature 1..17: note = Oligonucleotide
  source 1..17: mol_type = other DNA
caggggtcactgccgag

SEQ ID NO: 18959 - DNA, 17 bp, synthetic construct
  misc_feature 1..17: note = Oligonucleotide
  source 1..17: mol_type = other DNA
acccaggggtcactgcc

SEQ ID NO: 18960 - DNA, 17 bp, synthetic construct
  misc_feature 1..17: note = Oligonucleotide
  source 1..17: mol_type = other DNA
cccacccaggggtcact

SEQ ID NO: 18961 - DNA, 17 bp, synthetic construct
  misc_feature 1..17: note = Oligonucleotide
  source 1..17: mol_type = other DNA
tcacccacccaggggtc

SEQ ID NO: 18962 - DNA, 17 bp, synthetic construct
  misc_feature 1..17: note = Oligonucleotide
  source 1..17: mol_type = other DNA
ctgtcacccacccaggg

SEQ ID NO: 18963 - DNA, 17 bp, synthetic construct
  misc_feature 1..17: note = Oligonucleotide
  source 1..17: mol_type = other DNA
gctctgtcacccaccca

SEQ ID NO: 18964 - DNA, 17 bp, synthetic construct
  misc_feature 1..17: note = Oligonucleotide
  source 1..17: mol_type = other DNA
ctggctctgtcacccac

SEQ ID NO: 18965 - DNA, 17 bp, synthetic construct
  misc_feature 1..17: note = Oligonucleotide
  source 1..17: mol_type = other DNA
atcctggctctgtcacc

SEQ ID NO: 18966 - DNA, 17 bp, synthetic construct
  misc_feature 1..17: note = Oligonucleotide
  source 1..17: mol_type = other DNA
cccatcctggctctgtc

SEQ ID NO: 18967 - DNA, 17 bp, synthetic construct
  misc_feature 1..17: note = Oligonucleotide
  source 1..17: mol_type = other DNA
acccccatcctggctct

SEQ ID NO: 18968 - DNA, 17 bp, synthetic construct
  misc_feature 1..17: note = Oligonucleotide
  source 1..17: mol_type = other DNA
ccgacccccatcctggc

SEQ ID NO: 18969 - DNA, 17 bp, synthetic construct
  misc_feature 1..17: note = Oligonucleotide
  source 1..17: mol_type = other DNA
caaccgacccccatcct

SEQ ID NO: 18970 - DNA, 17 bp, synthetic construct
  misc_feature 1..17: note = Oligonucleotide
  source 1..17: mol_type = other DNA
cttcaaccgacccccat

SEQ ID NO: 18971 - DNA, 17 bp, synthetic construct
  misc_feature 1..17: note = Oligonucleotide
  source 1..17: mol_type = other DNA
ccccttcaaccgacccc

SEQ ID NO: 18972 - DNA, 17 bp, synthetic construct
  misc_feature 1..17: note = Oligonucleotide
  source 1..17: mol_type = other DNA
cagccccttcaaccgac

SEQ ID NO: 18973 - DNA, 17 bp, synthetic construct
  misc_feature 1..17: note = Oligonucleotide
  source 1..17: mol_type = other DNA
ccccagccccttcaacc

SEQ ID NO: 18974 - DNA, 17 bp, synthetic construct
  misc_feature 1..17: note = Oligonucleotide
  source 1..17: mol_type = other DNA
ctcccccagccccttca

SEQ ID NO: 18975 - DNA, 17 bp, synthetic construct
  misc_feature 1..17: note = Oligonucleotide
  source 1..17: mol_type = other DNA
atgctcccccagcccct

SEQ ID NO: 18976 - DNA, 17 bp, synthetic construct
  misc_feature 1..17: note = Oligonucleotide
  source 1..17: mol_type = other DNA
accatgctcccccagcc

SEQ ID NO: 18977 - DNA, 17 bp, synthetic construct
  misc_feature 1..17: note = Oligonucleotide
  source 1..17: mol_type = other DNA
ctgaccatgctccccca

SEQ ID NO: 18978 - DNA, 17 bp, synthetic construct
  misc_feature 1..17: note = Oligonucleotide
  source 1..17: mol_type = other DNA
cagctgaccatgctccc

SEQ ID NO: 18979 - DNA, 17 bp, synthetic construct
  misc_feature 1..17: note = Oligonucleotide
  source 1..17: mol_type = other DNA
ccccagctgaccatgct

SEQ ID NO: 18980 - DNA, 17 bp, synthetic construct
  misc_feature 1..17: note = Oligonucleotide
  source 1..17: mol_type = other DNA
cacccccagctgaccat

SEQ ID NO: 18981 - DNA, 17 bp, synthetic construct
  misc_feature 1..17: note = Oligonucleotide
  source 1..17: mol_type = other DNA
ccccacccccagctgac

SEQ ID NO: 18982 - DNA, 17 bp, synthetic construct
  misc_feature 1..17: note = Oligonucleotide
  source 1..17: mol_type = other DNA
tgcccccacccccagct

SEQ ID NO: 18983 - DNA, 17 bp, synthetic construct
  misc_feature 1..17: note = Oligonucleotide
  source 1..17: mol_type = other DNA
tgctgcccccaccccca

SEQ ID NO: 18984 - DNA, 17 bp, synthetic construct
  misc_feature 1..17: note = Oligonucleotide
  source 1..17: mol_type = other DNA
tgctgctgcccccaccc

SEQ ID NO: 18985 - DNA, 17 bp, synthetic construct
  misc_feature 1..17: note = Oligonucleotide
  source 1..17: mol_type = other DNA
tcctgctgctgccccca

SEQ ID NO: 18986 - DNA, 17 bp, synthetic construct
  misc_feature 1..17: note = Oligonucleotide
  source 1..17: mol_type = other DNA
cactcctgctgctgccc

SEQ ID NO: 18987 - DNA, 17 bp, synthetic construct
  misc_feature 1..17: note = Oligonucleotide
  source 1..17: mol_type = other DNA
ccacactcctgctgctg

SEQ ID NO: 18988 - DNA, 17 bp, synthetic construct
  misc_feature 1..17: note = Oligonucleotide
  source 1..17: mol_type = other DNA
gggccacactcctgctg

SEQ ID NO: 18989 - DNA, 17 bp, synthetic construct
  misc_feature 1..17: note = Oligonucleotide
  source 1..17: mol_type = other DNA
caggggccacactcctg

SEQ ID NO: 18990 - DNA, 17 bp, synthetic construct
  misc_feature 1..17: note = Oligonucleotide
  source 1..17: mol_type = other DNA
gggcaggggccacactc

SEQ ID NO: 18991 - DNA, 17 bp, synthetic construct
  misc_feature 1..17: note = Oligonucleotide
  source 1..17: mol_type = other DNA
caggggcaggggccaca

SEQ ID NO: 18992 - DNA, 17 bp, synthetic construct
  misc_feature 1..17: note = Oligonucleotide
  source 1..17: mol_type = other DNA
aggcaggggcaggggcc

SEQ ID NO: 18993 - DNA, 17 bp, synthetic construct
  misc_feature 1..17: note = Oligonucleotide
  source 1..17: mol_type = other DNA
cgcaggcaggggcaggg

SEQ ID NO: 18994 - DNA, 17 bp, synthetic construct
  misc_feature 1..17: note = Oligonucleotide
  source 1..17: mol_type = other DNA
gggcgcaggcaggggca

SEQ ID NO: 18995 - DNA, 17 bp, synthetic construct
  misc_feature 1..17: note = Oligonucleotide
  source 1..17: mol_type = other DNA
gaggggcgcaggcaggg

SEQ ID NO: 18996 - DNA, 17 bp, synthetic construct
  misc_feature 1..17: note = Oligonucleotide
  source 1..17: mol_type = other DNA
ggggaggggcgcaggca

SEQ ID NO: 18997 - DNA, 17 bp, synthetic construct
  misc_feature 1..17: note = Oligonucleotide
  source 1..17: mol_type = other DNA
ctcggggaggggcgcag

SEQ ID NO: 18998 - DNA, 17 bp, synthetic construct
  misc_feature 1..17: note = Oligonucleotide
  source 1..17: mol_type = other DNA
acactcggggaggggcg

SEQ ID NO: 18999 - DNA, 17 bp, synthetic construct
  misc_feature 1..17: note = Oligonucleotide
  source 1..17: mol_type = other DNA
gacacactcggggaggg

SEQ ID NO: 19000 - DNA, 17 bp, synthetic construct
  misc_feature 1..17: note = Oligonucleotide
  source 1..17: mol_type = other DNA
atggacacactcgggga

SEQ ID NO: 19001 - DNA, 17 bp, synthetic construct
  misc_feature 1..17: note = Oligonucleotide
  source 1..17: mol_type = other DNA
cagatggacacactcgg

SEQ ID NO: 19002 - DNA, 17 bp, synthetic construct
  misc_feature 1..17: note = Oligonucleotide
  source 1..17: mol_type = other DNA
acacagatggacacact

SEQ ID NO: 19003 - DNA, 17 bp, synthetic construct
  misc_feature 1..17: note = Oligonucleotide
  source 1..17: mol_type = other DNA
gacacacagatggacac

SEQ ID NO: 19004 - DNA, 17 bp, synthetic construct
  misc_feature 1..17: note = Oligonucleotide
  source 1..17: mol_type = other DNA
agagacacacagatgga

SEQ ID NO: 19005 - DNA, 17 bp, synthetic construct
  misc_feature 1..17: note = Oligonucleotide
  source 1..17: mol_type = other DNA
cagagagacacacagat

SEQ ID NO: 19006 - DNA, 17 bp, synthetic construct
  misc_feature 1..17: note = Oligonucleotide
  source 1..17: mol_type = other DNA
ggacagagagacacaca

SEQ ID NO: 19007 - DNA, 17 bp, synthetic construct
  misc_feature 1..17: note = Oligonucleotide
  source 1..17: mol_type = other DNA
gggggacagagagacac

SEQ ID NO: 19008 - DNA, 17 bp, synthetic construct
  misc_feature 1..17: note = Oligonucleotide
  source 1..17: mol_type = other DNA
tgtgggggacagagaga

SEQ ID NO: 19009 - DNA, 17 bp, synthetic construct
  misc_feature 1..17: note = Oligonucleotide
  source 1..17: mol_type = other DNA
gcatgtgggggacagag

SEQ ID NO: 19010 - DNA, 17 bp, synthetic construct
  misc_feature 1..17: note = Oligonucleotide
  source 1..17: mol_type = other DNA
tgggcatgtgggggaca

SEQ ID NO: 19011 - DNA, 17 bp, synthetic construct
  misc_feature 1..17: note = Oligonucleotide
  source 1..17: mol_type = other DNA
gggtgggcatgtggggg

SEQ ID NO: 19012 - DNA, 17 bp, synthetic construct
  misc_feature 1..17: note = Oligonucleotide
  source 1..17: mol_type = other DNA
acagggtgggcatgtgg

SEQ ID NO: 19013 - DNA, 17 bp, synthetic construct
  misc_feature 1..17: note = Oligonucleotide
  source 1..17: mol_type = other DNA
ggcacagggtgggcatg

SEQ ID NO: 19014 - DNA, 17 bp, synthetic construct
  misc_feature 1..17: note = Oligonucleotide
  source 1..17: mol_type = other DNA
ctcggcacagggtgggc

SEQ ID NO: 19015 - DNA, 17 bp, synthetic construct
  misc_feature 1..17: note = Oligonucleotide
  source 1..17: mol_type = other DNA
gggctcggcacagggtg

SEQ ID NO: 19016 - DNA, 17 bp, synthetic construct
  misc_feature 1..17: note = Oligonucleotide
  source 1..17: mol_type = other DNA
gatgggctcggcacagg

SEQ ID NO: 19017 - DNA, 17 bp, synthetic construct
  misc_feature 1..17: note = Oligonucleotide
  source 1..17: mol_type = other DNA
acagatgggctcggcac

SEQ ID NO: 19018 - DNA, 17 bp, synthetic construct
  misc_feature 1..17: note = Oligonucleotide
  source 1..17: mol_type = other DNA
ggaacagatgggctcgg

SEQ ID NO: 19019 - DNA, 17 bp, synthetic construct
  misc_feature 1..17: note = Oligonucleotide
  source 1..17: mol_type = other DNA
aaaggaacagatgggct

SEQ ID NO: 19020 - DNA, 17 bp, synthetic construct
  misc_feature 1..17: note = Oligonucleotide
  source 1..17: mol_type = other DNA
gagaaaggaacagatgg

SEQ ID NO: 19021 - DNA, 17 bp, synthetic construct
  misc_feature 1..17: note = Oligonucleotide
  source 1..17: mol_type = other DNA
agagagaaaggaacaga

SEQ ID NO: 19022 - DNA, 17 bp, synthetic construct
  misc_feature 1..17: note = Oligonucleotide
  source 1..17: mol_type = other DNA
agaagagagaaaggaac

SEQ ID NO: 19023 - DNA, 17 bp, synthetic construct
  misc_feature 1..17: note = Oligonucleotide
  source 1..17: mol_type = other DNA
cgcagaagagagaaagg

SEQ ID NO: 19024 - DNA, 17 bp, synthetic construct
  misc_feature 1..17: note = Oligonucleotide
  source 1..17: mol_type = other DNA
ccacgcagaagagagaa

SEQ ID NO: 19025 - DNA, 17 bp, synthetic construct
  misc_feature 1..17: note = Oligonucleotide
  source 1..17: mol_type = other DNA
gatccacgcagaagaga

SEQ ID NO: 19026 - DNA, 17 bp, synthetic construct
  misc_feature 1..17: note = Oligonucleotide
  source 1..17: mol_type = other DNA
tgggatccacgcagaag

SEQ ID NO: 19027 - DNA, 17 bp, synthetic construct
  misc_feature 1..17: note = Oligonucleotide
  source 1..17: mol_type = other DNA
ttttgggatccacgcag

SEQ ID NO: 19028 - DNA, 17 bp, synthetic construct
  misc_feature 1..17: note = Oligonucleotide
  source 1..17: mol_type = other DNA
agattttgggatccacg

SEQ ID NO: 19029 - DNA, 17 bp, synthetic construct
  misc_feature 1..17: note = Oligonucleotide
  source 1..17: mol_type = other DNA
ggaagattttgggatcc

SEQ ID NO: 19030 - DNA, 17 bp, synthetic construct
  misc_feature 1..17: note = Oligonucleotide
  source 1..17: mol_type = other DNA
ctgggaagattttggga

SEQ ID NO: 19031 - DNA, 17 bp, synthetic construct
  misc_feature 1..17: note = Oligonucleotide
  source 1..17: mol_type = other DNA
tccctgggaagattttg

SEQ ID NO: 19032 - DNA, 17 bp, synthetic construct
  misc_feature 1..17: note = Oligonucleotide
  source 1..17: mol_type = other DNA
ttttccctgggaagatt

SEQ ID NO: 19033 - DNA, 17 bp, synthetic construct
  misc_feature 1..17: note = Oligonucleotide
  source 1..17: mol_type = other DNA
gctttttccctgggaag

SEQ ID NO: 19034 - DNA, 17 bp, synthetic construct
  misc_feature 1..17: note = Oligonucleotide
  source 1..17: mol_type = other DNA
ccagctttttccctggg

SEQ ID NO: 19035 - DNA, 17 bp, synthetic construct
  misc_feature 1..17: note = Oligonucleotide
  source 1..17: mol_type = other DNA
ctcccagctttttccct

SEQ ID NO: 19036 - DNA, 17 bp, synthetic construct
  misc_feature 1..17: note = Oligonucleotide
  source 1..17: mol_type = other DNA
tttctcccagctttttc

SEQ ID NO: 19037 - DNA, 17 bp, synthetic construct
  misc_feature 1..17: note = Oligonucleotide
  source 1..17: mol_type = other DNA
cactttctcccagcttt

SEQ ID NO: 19038 - DNA, 17 bp, synthetic construct
  misc_feature 1..17: note = Oligonucleotide
  source 1..17: mol_type = other DNA
tcccactttctcccagc

SEQ ID NO: 19039 - DNA, 17 bp, synthetic construct
  misc_feature 1..17: note = Oligonucleotide
  source 1..17: mol_type = other DNA
ccttcccactttctccc

SEQ ID NO: 19040 - DNA, 17 bp, synthetic construct
  misc_feature 1..17: note = Oligonucleotide
  source 1..17: mol_type = other DNA
ttcccttcccactttct

SEQ ID NO: 19041 - DNA, 17 bp, synthetic construct
  misc_feature 1..17: note = Oligonucleotide
  source 1..17: mol_type = other DNA
tccttcccttcccactt

SEQ ID NO: 19042 - DNA, 17 bp, synthetic construct
  misc_feature 1..17: note = Oligonucleotide
  source 1..17: mol_type = other DNA
ccctccttcccttccca

SEQ ID NO: 19043 - DNA, 17 bp, synthetic construct
  misc_feature 1..17: note = Oligonucleotide
  source 1..17: mol_type = other DNA
tttccctccttcccttc

SEQ ID NO: 19044 - DNA, 17 bp, synthetic construct
  misc_feature 1..17: note = Oligonucleotide
  source 1..17: mol_type = other DNA
ccctttccctccttccc

SEQ ID NO: 19045 - DNA, 17 bp, synthetic construct
  misc_feature 1..17: note = Oligonucleotide
  source 1..17: mol_type = other DNA
ctgccctttccctcctt

SEQ ID NO: 19046 - DNA, 17 bp, synthetic construct
  misc_feature 1..17: note = Oligonucleotide
  source 1..17: mol_type = other DNA
cccctgccctttccctc

SEQ ID NO: 19047 - DNA, 17 bp, synthetic construct
  misc_feature 1..17: note = Oligonucleotide
  source 1..17: mol_type = other DNA
caccccctgccctttcc

SEQ ID NO: 19048 - DNA, 17 bp, synthetic construct
  misc_feature 1..17: note = Oligonucleotide
  source 1..17: mol_type = other DNA
acccaccccctgccctt

SEQ ID NO: 19049 - DNA, 17 bp, synthetic construct
  misc_feature 1..17: note = Oligonucleotide
  source 1..17: mol_type = other DNA
cccacccaccccctgcc

SEQ ID NO: 19050 - DNA, 17 bp, synthetic construct
  misc_feature 1..17: note = Oligonucleotide
  source 1..17: mol_type = other DNA
ctgcccacccaccccct

SEQ ID NO: 19051 - DNA, 17 bp, synthetic construct
  misc_feature 1..17: note = Oligonucleotide
  source 1..17: mol_type = other DNA
gttctgcccacccaccc

SEQ ID NO: 19052 - DNA, 17 bp, synthetic construct
  misc_feature 1..17: note = Oligonucleotide
  source 1..17: mol_type = other DNA
caggttctgcccaccca

SEQ ID NO: 19053 - DNA, 17 bp, synthetic construct
  misc_feature 1..17: note = Oligonucleotide
  source 1..17: mol_type = other DNA
gagcaggttctgcccac

SEQ ID NO: 19054 - DNA, 17 bp, synthetic construct
  misc_feature 1..17: note = Oligonucleotide
  source 1..17: mol_type = other DNA
caggagcaggttctgcc

SEQ ID NO: 19055 - DNA, 17 bp, synthetic construct
  misc_feature 1..17: note = Oligonucleotide
  source 1..17: mol_type = other DNA
cctcaggagcaggttct

SEQ ID NO: 19056 - DNA, 17 bp, synthetic construct
  misc_feature 1..17: note = Oligonucleotide
  source 1..17: mol_type = other DNA
ccacctcaggagcaggt

SEQ ID NO: 19057 - DNA, 17 bp, synthetic construct
  misc_feature 1..17: note = Oligonucleotide
  source 1..17: mol_type = other DNA
accccacctcaggagca

SEQ ID NO: 19058 - DNA, 17 bp, synthetic construct
  misc_feature 1..17: note = Oligonucleotide
  source 1..17: mol_type = other DNA
cctaccccacctcagga

SEQ ID NO: 19059 - DNA, 17 bp, synthetic construct
  misc_feature 1..17: note = Oligonucleotide
  source 1..17: mol_type = other DNA
gcgcctaccccacctca

SEQ ID NO: 19060 - DNA, 17 bp, synthetic construct
  misc_feature 1..17: note = Oligonucleotide
  source 1..17: mol_type = other DNA
tgggcgcctaccccacc

SEQ ID NO: 19061 - DNA, 17 bp, synthetic construct
  misc_feature 1..17: note = Oligonucleotide
  source 1..17: mol_type = other DNA
agctgggcgcctacccc

SEQ ID NO: 19062 - DNA, 17 bp, synthetic construct
  misc_feature 1..17: note = Oligonucleotide
  source 1..17: mol_type = other DNA
cagagctgggcgcctac

SEQ ID NO: 19063 - DNA, 17 bp, synthetic construct
  misc_feature 1..17: note = Oligonucleotide
  source 1..17: mol_type = other DNA
gagcagagctgggcgcc

SEQ ID NO: 19064 - DNA, 17 bp, synthetic construct
  misc_feature 1..17: note = Oligonucleotide
  source 1..17: mol_type = other DNA
ggggagcagagctgggc

SEQ ID NO: 19065 - DNA, 17 bp, synthetic construct
  misc_feature 1..17: note = Oligonucleotide
  source 1..17: mol_type = other DNA
agtggggagcagagctg

SEQ ID NO: 19066 - DNA, 17 bp, synthetic construct
  misc_feature 1..17: note = Oligonucleotide
  source 1..17: mol_type = other DNA
gtcagtggggagcagag

SEQ ID NO: 19067 - DNA, 17 bp, synthetic construct
  misc_feature 1..17: note = Oligonucleotide
  source 1..17: mol_type = other DNA
gccgtcagtggggagca

SEQ ID NO: 19068 - DNA, 17 bp, synthetic construct
  misc_feature 1..17: note = Oligonucleotide
  source 1..17: mol_type = other DNA
caggccgtcagtgggga

SEQ ID NO: 19069 - DNA, 17 bp, synthetic construct
  misc_feature 1..17: note = Oligonucleotide
  source 1..17: mol_type = other DNA
agacaggccgtcagtgg

SEQ ID NO: 19070 - DNA, 17 bp, synthetic construct
  misc_feature 1..17: note = Oligonucleotide
  source 1..17: mol_type = other DNA
gccagacaggccgtcag

SEQ ID NO: 19071 - DNA, 17 bp, synthetic construct
  misc_feature 1..17: note = Oligonucleotide
  source 1..17: mol_type = other DNA
gaagccagacaggccgt

SEQ ID NO: 19072 - DNA, 17 bp, synthetic construct
  misc_feature 1..17: note = Oligonucleotide
  source 1..17: mol_type = other DNA
gaagaagccagacaggc

SEQ ID NO: 19073 - DNA, 17 bp, synthetic construct
  misc_feature 1..17: note = Oligonucleotide
  source 1..17: mol_type = other DNA
gaggaagaagccagaca

SEQ ID NO: 19074 - DNA, 17 bp, synthetic construct
  misc_feature 1..17: note = Oligonucleotide
  source 1..17: mol_type = other DNA
ctggaggaagaagccag

SEQ ID NO: 19075 - DNA, 17 bp, synthetic construct
  misc_feature 1..17: note = Oligonucleotide
  source 1..17: mol_type = other DNA
gcactggaggaagaagc

SEQ ID NO: 19076 - DNA, 17 bp, synthetic construct
  misc_feature 1..17: note = Oligonucleotide
  source 1..17: mol_type = other DNA
tgagcactggaggaaga

SEQ ID NO: 19077 - DNA, 17 bp, synthetic construct
  misc_feature 1..17: note = Oligonucleotide
  source 1..17: mol_type = other DNA
tgctgagcactggagga

SEQ ID NO: 19078 - DNA, 17 bp, synthetic construct
  misc_feature 1..17: note = Oligonucleotide
  source 1..17: mol_type = other DNA
caatgctgagcactgga

SEQ ID NO: 19079 - DNA, 17 bp, synthetic construct
  misc_feature 1..17: note = Oligonucleotide
  source 1..17: mol_type = other DNA
ccccaatgctgagcact

SEQ ID NO: 19080 - DNA, 17 bp, synthetic construct
  misc_feature 1..17: note = Oligonucleotide
  source 1..17: mol_type = other DNA
cctccccaatgctgagc

SEQ ID NO: 19081 - DNA, 17 bp, synthetic construct
  misc_feature 1..17: note = Oligonucleotide
  source 1..17: mol_type = other DNA
cgccctccccaatgctg

SEQ ID NO: 19082 - DNA, 17 bp, synthetic construct
  misc_feature 1..17: note = Oligonucleotide
  source 1..17: mol_type = other DNA
aaccgccctccccaatg

SEQ ID NO: 19083 - DNA, 17 bp, synthetic construct
  misc_feature 1..17: note = Oligonucleotide
  source 1..17: mol_type = other DNA
agaaaccgccctcccca

SEQ ID NO: 19084 - DNA, 17 bp, synthetic construct
  misc_feature 1..17: note = Oligonucleotide
  source 1..17: mol_type = other DNA
cccagaaaccgccctcc

SEQ ID NO: 19085 - DNA, 17 bp, synthetic construct
  misc_feature 1..17: note = Oligonucleotide
  source 1..17: mol_type = other DNA
cctcccagaaaccgccc

SEQ ID NO: 19086 - DNA, 17 bp, synthetic construct
  misc_feature 1..17: note = Oligonucleotide
  source 1..17: mol_type = other DNA
ttccctcccagaaaccg

SEQ ID NO: 19087 - DNA, 17 bp, synthetic construct
  misc_feature 1..17: note = Oligonucleotide
  source 1..17: mol_type = other DNA
cggttccctcccagaaa

SEQ ID NO: 19088 - DNA, 17 bp, synthetic construct
  misc_feature 1..17: note = Oligonucleotide
  source 1..17: mol_type = other DNA
tcacggttccctcccag

SEQ ID NO: 19089 - DNA, 17 bp, synthetic construct
  misc_feature 1..17: note = Oligonucleotide
  source 1..17: mol_type = other DNA
ctttcacggttccctcc

SEQ ID NO: 19090 - DNA, 17 bp, synthetic construct
  misc_feature 1..17: note = Oligonucleotide
  source 1..17: mol_type = other DNA
ggcctttcacggttccc

SEQ ID NO: 19091 - DNA, 17 bp, synthetic construct
  misc_feature 1..17: note = Oligonucleotide
  source 1..17: mol_type = other DNA
tgcggcctttcacggtt

SEQ ID NO: 19092 - DNA, 17 bp, synthetic construct
  misc_feature 1..17: note = Oligonucleotide
  source 1..17: mol_type = other DNA
ccgtgcggcctttcacg

SEQ ID NO: 19093 - DNA, 17 bp, synthetic construct
  misc_feature 1..17: note = Oligonucleotide
  source 1..17: mol_type = other DNA
agcccgtgcggcctttc

SEQ ID NO: 19094 - DNA, 17 bp, synthetic construct
  misc_feature 1..17: note = Oligonucleotide
  source 1..17: mol_type = other DNA
accagcccgtgcggcct

SEQ ID NO: 19095 - DNA, 17 bp, synthetic construct
  misc_feature 1..17: note = Oligonucleotide
  source 1..17: mol_type = other DNA
ggaaccagcccgtgcgg

SEQ ID NO: 19096 - DNA, 17 bp, synthetic construct
  misc_feature 1..17: note = Oligonucleotide
  source 1..17: mol_type = other DNA
ccgggaaccagcccgtg

SEQ ID NO: 19097 - DNA, 17 bp, synthetic construct
  misc_feature 1..17: note = Oligonucleotide
  source 1..17: mol_type = other DNA
cggccgggaaccagccc

SEQ ID NO: 19098 - DNA, 17 bp, synthetic construct
  misc_feature 1..17: note = Oligonucleotide
  source 1..17: mol_type = other DNA
agtcggccgggaaccag

SEQ ID NO: 19099 - DNA, 17 bp, synthetic construct
  misc_feature 1..17: note = Oligonucleotide
  source 1..17: mol_type = other DNA
cgcagtcggccgggaac

SEQ ID NO: 19100 - DNA, 17 bp, synthetic construct
  misc_feature 1..17: note = Oligonucleotide
  source 1..17: mol_type = other DNA
ccacgcagtcggccggg

SEQ ID NO: 19101 - DNA, 17 bp, synthetic construct
  misc_feature 1..17: note = Oligonucleotide
  source 1..17: mol_type = other DNA
cctccacgcagtcggcc

SEQ ID NO: 19102 - DNA, 17 bp, synthetic construct
  misc_feature 1..17: note = Oligonucleotide
  source 1..17: mol_type = other DNA
cttcctccacgcagtcg

SEQ ID NO: 19103 - DNA, 17 bp, synthetic construct
  misc_feature 1..17: note = Oligonucleotide
  source 1..17: mol_type = other DNA
gcacttcctccacgcag

SEQ ID NO: 19104 - DNA, 17 bp, synthetic construct
  misc_feature 1..17: note = Oligonucleotide
  source 1..17: mol_type = other DNA
tctgcacttcctccacg

SEQ ID NO: 19105 - DNA, 17 bp, synthetic construct
  misc_feature 1..17: note = Oligonucleotide
  source 1..17: mol_type = other DNA
tcatctgcacttcctcc

SEQ ID NO: 19106 - DNA, 17 bp, synthetic construct
  misc_feature 1..17: note = Oligonucleotide
  source 1..17: mol_type = other DNA
gcctcatctgcacttcc

SEQ ID NO: 19107 - DNA, 17 bp, synthetic construct
  misc_feature 1..17: note = Oligonucleotide
  source 1..17: mol_type = other DNA
gctgcctcatctgcact

SEQ ID NO: 19108 - DNA, 17 bp, synthetic construct
  misc_feature 1..17: note = Oligonucleotide
  source 1..17: mol_type = other DNA
catgctgcctcatctgc

SEQ ID NO: 19109 - DNA, 17 bp, synthetic construct
  misc_feature 1..17: note = Oligonucleotide
  source 1..17: mol_type = other DNA
tgtcatgctgcctcatc

SEQ ID NO: 19110 - DNA, 17 bp, synthetic construct
  misc_feature 1..17: note = Oligonucleotide
  source 1..17: mol_type = other DNA
gtgtgtcatgctgcctc

SEQ ID NO: 19111 - DNA, 17 bp, synthetic construct
  misc_feature 1..17: note = Oligonucleotide
  source 1..17: mol_type = other DNA
gccgtgtgtcatgctgc

SEQ ID NO: 19112 - DNA, 17 bp, synthetic construct
  misc_feature 1..17: note = Oligonucleotide
  source 1..17: mol_type = other DNA
caggccgtgtgtcatgc

SEQ ID NO: 19113 - DNA, 17 bp, synthetic construct
  misc_feature 1..17: note = Oligonucleotide
  source 1..17: mol_type = other DNA
caccaggccgtgtgtca

SEQ ID NO: 19114 - DNA, 17 bp, synthetic construct
  misc_feature 1..17: note = Oligonucleotide
  source 1..17: mol_type = other DNA
actcaccaggccgtgtg

SEQ ID NO: 19115 - DNA, 17 bp, synthetic construct
  misc_feature 1..17: note = Oligonucleotide
  source 1..17: mol_type = other DNA
gtcactcaccaggccgt

SEQ ID NO: 19116 - DNA, 17 bp, synthetic construct
  misc_feature 1..17: note = Oligonucleotide
  source 1..17: mol_type = other DNA
ggggtcactcaccaggc

SEQ ID NO: 19117 - DNA, 17 bp, synthetic construct
  misc_feature 1..17: note = Oligonucleotide
  source 1..17: mol_type = other DNA
cgtggggtcactcacca

SEQ ID NO: 19118 - DNA, 17 bp, synthetic construct
  misc_feature 1..17: note = Oligonucleotide
  source 1..17: mol_type = other DNA
agccgtggggtcactca

SEQ ID NO: 19119 - DNA, 17 bp, synthetic construct
  misc_feature 1..17: note = Oligonucleotide
  source 1..17: mol_type = other DNA
gggagccgtggggtcac

SEQ ID NO: 19120 - DNA, 17 bp, synthetic construct
  misc_feature 1..17: note = Oligonucleotide
  source 1..17: mol_type = other DNA
ccggggagccgtggggt

SEQ ID NO: 19121 - DNA, 17 bp, synthetic construct
  misc_feature 1..17: note = Oligonucleotide
  source 1..17: mol_type = other DNA
tgcccggggagccgtgg

SEQ ID NO: 19122 - DNA, 17 bp, synthetic construct
  misc_feature 1..17: note = Oligonucleotide
  source 1..17: mol_type = other DNA
agctgcccggggagccg

SEQ ID NO: 19123 - DNA, 17 bp, synthetic construct
  misc_feature 1..17: note = Oligonucleotide
  source 1..17: mol_type = other DNA
gggagctgcccggggag

SEQ ID NO: 19124 - DNA, 17 bp, synthetic construct
  misc_feature 1..17: note = Oligonucleotide
  source 1..17: mol_type = other DNA
cttgggagctgcccggg

SEQ ID NO: 19125 - DNA, 17 bp, synthetic construct
  misc_feature 1..17: note = Oligonucleotide
  source 1..17: mol_type = other DNA
ccccttgggagctgccc

SEQ ID NO: 19126 - DNA, 17 bp, synthetic construct
  misc_feature 1..17: note = Oligonucleotide
  source 1..17: mol_type = other DNA
ggtccccttgggagctg

SEQ ID NO: 19127 - DNA, 17 bp, synthetic construct
  misc_feature 1..17: note = Oligonucleotide
  source 1..17: mol_type = other DNA
ggtggtccccttgggag

SEQ ID NO: 19128 - DNA, 17 bp, synthetic construct
  misc_feature 1..17: note = Oligonucleotide
  source 1..17: mol_type = other DNA
aggggtggtccccttgg

SEQ ID NO: 19129 - DNA, 17 bp, synthetic construct
  misc_feature 1..17: note = Oligonucleotide
  source 1..17: mol_type = other DNA
ggaaggggtggtcccct

SEQ ID NO: 19130 - DNA, 17 bp, synthetic construct
  misc_feature 1..17: note = Oligonucleotide
  source 1..17: mol_type = other DNA
actggaaggggtggtcc

SEQ ID NO: 19131 - DNA, 17 bp, synthetic construct
  misc_feature 1..17: note = Oligonucleotide
  source 1..17: mol_type = other DNA
gaaactggaaggggtgg

SEQ ID NO: 19132 - DNA, 17 bp, synthetic construct
  misc_feature 1..17: note = Oligonucleotide
  source 1..17: mol_type = other DNA
agggaaactggaagggg

SEQ ID NO: 19133 - DNA, 17 bp, synthetic construct
  misc_feature 1..17: note = Oligonucleotide
  source 1..17: mol_type = other DNA
caaagggaaactggaag

SEQ ID NO: 19134 - DNA, 17 bp, synthetic construct
  misc_feature 1..17: note = Oligonucleotide
  source 1..17: mol_type = other DNA
gaacaaagggaaactgg

SEQ ID NO: 19135 - DNA, 17 bp, synthetic construct
  misc_feature 1..17: note = Oligonucleotide
  source 1..17: mol_type = other DNA
agagaacaaagggaaac

SEQ ID NO: 19136 - DNA, 17 bp, synthetic construct
  misc_feature 1..17: note = Oligonucleotide
  source 1..17: mol_type = other DNA
aagagagaacaaaggga

SEQ ID NO: 19137 - DNA, 17 bp, synthetic construct
  misc_feature 1..17: note = Oligonucleotide
  source 1..17: mol_type = other DNA
accaagagagaacaaag

SEQ ID NO: 19138 - DNA, 17 bp, synthetic construct
  misc_feature 1..17: note = Oligonucleotide
  source 1..17: mol_type = other DNA
agcaccaagagagaaca

SEQ ID NO: 19139 - DNA, 17 bp, synthetic construct
  misc_feature 1..17: note = Oligonucleotide
  source 1..17: mol_type = other DNA
tttagcaccaagagaga

SEQ ID NO: 19140 - DNA, 17 bp, synthetic construct
  misc_feature 1..17: note = Oligonucleotide
  source 1..17: mol_type = other DNA
ggatttagcaccaagag

SEQ ID NO: 19141 - DNA, 17 bp, synthetic construct
  misc_feature 1..17: note = Oligonucleotide
  source 1..17: mol_type = other DNA
tgtggatttagcaccaa

SEQ ID NO: 19142 - DNA, 17 bp, synthetic construct
  misc_feature 1..17: note = Oligonucleotide
  source 1..17: mol_type = other DNA
ccatgtggatttagcac

SEQ ID NO: 19143 - DNA, 17 bp, synthetic construct
  misc_feature 1..17: note = Oligonucleotide
  source 1..17: mol_type = other DNA
tatccatgtggatttag

SEQ ID NO: 19144 - DNA, 17 bp, synthetic construct
  misc_feature 1..17: note = Oligonucleotide
  source 1..17: mol_type = other DNA
gaatatccatgtggatt

SEQ ID NO: 19145 - DNA, 17 bp, synthetic construct
  misc_feature 1..17: note = Oligonucleotide
  source 1..17: mol_type = other DNA
tatgaatatccatgtgg

SEQ ID NO: 19146 - DNA, 17 bp, synthetic construct
  misc_feature 1..17: note = Oligonucleotide
  source 1..17: mol_type = other DNA
ctctatgaatatccatg

SEQ ID NO: 19147 - DNA, 17 bp, synthetic construct
  misc_feature 1..17: note = Oligonucleotide
  source 1..17: mol_type = other DNA
tttctctatgaatatcc

SEQ ID NO: 19148 - DNA, 17 bp, synthetic construct
  misc_feature 1..17: note = Oligonucleotide
  source 1..17: mol_type = other DNA
tcttttctctatgaata

SEQ ID NO: 19149 - DNA, 17 bp, synthetic construct
  misc_feature 1..17: note = Oligonucleotide
  source 1..17: mol_type = other DNA
tagtcttttctctatga

SEQ ID NO: 19150 - DNA, 17 bp, synthetic construct
  misc_feature 1..17: note = Oligonucleotide
  source 1..17: mol_type = other DNA
ctctagtcttttctcta

SEQ ID NO: 19151 - DNA, 17 bp, synthetic construct
  misc_feature 1..17: note = Oligonucleotide
  source 1..17: mol_type = other DNA
tacctctagtcttttct

SEQ ID NO: 19152 - DNA, 17 bp, synthetic construct
  misc_feature 1..17: note = Oligonucleotide
  source 1..17: mol_type = other DNA
gtttacctctagtcttt

SEQ ID NO: 19153 - DNA, 17 bp, synthetic construct
  misc_feature 1..17: note = Oligonucleotide
  source 1..17: mol_type = other DNA
tgagtttacctctagtc

SEQ ID NO: 19154 - DNA, 17 bp, synthetic construct
  misc_feature 1..17: note = Oligonucleotide
  source 1..17: mol_type = other DNA
gtttgagtttacctcta

SEQ ID NO: 19155 - DNA, 17 bp, synthetic construct
  misc_feature 1..17: note = Oligonucleotide
  source 1..17: mol_type = other DNA
tttgtttgagtttacct

SEQ ID NO: 19156 - DNA, 17 bp, synthetic construct
  misc_feature 1..17: note = Oligonucleotide
  source 1..17: mol_type = other DNA
gtgtttgtttgagttta

SEQ ID NO: 19157 - DNA, 17 bp, synthetic construct
  misc_feature 1..17: note = Oligonucleotide
  source 1..17: mol_type = other DNA
tgagtgtttgtttgagt

SEQ ID NO: 19158 - DNA, 17 bp, synthetic construct
  misc_feature 1..17: note = Oligonucleotide
  source 1..17: mol_type = other DNA
ctttgagtgtttgtttg

SEQ ID NO: 19159 - DNA, 17 bp, synthetic construct
  misc_feature 1..17: note = Oligonucleotide
  source 1..17: mol_type = other DNA
ctactttgagtgtttgt

SEQ ID NO: 19160 - DNA, 17 bp, synthetic construct
  misc_feature 1..17: note = Oligonucleotide
  source 1..17: mol_type = other DNA
catctactttgagtgtt

SEQ ID NO: 19161 - DNA, 17 bp, synthetic construct
  misc_feature 1..17: note = Oligonucleotide
  source 1..17: mol_type = other DNA
ttgcatctactttgagt

SEQ ID NO: 19162 - DNA, 17 bp, synthetic construct
  misc_feature 1..17: note = Oligonucleotide
  source 1..17: mol_type = other DNA
agtttgcatctactttg

SEQ ID NO: 19163 - DNA, 17 bp, synthetic construct
  misc_feature 1..17: note = Oligonucleotide
  source 1..17: mol_type = other DNA
acaagtttgcatctact

SEQ ID NO: 19164 - DNA, 17 bp, synthetic construct
  misc_feature 1..17: note = Oligonucleotide
  source 1..17: mol_type = other DNA
tacacaagtttgcatct

SEQ ID NO: 19165 - DNA, 17 bp, synthetic construct
  misc_feature 1..17: note = Oligonucleotide
  source 1..17: mol_type = other DNA
atgtacacaagtttgca

SEQ ID NO: 19166 - DNA, 17 bp, synthetic construct
  misc_feature 1..17: note = Oligonucleotide
  source 1..17: mol_type = other DNA
gtcatgtacacaagttt

SEQ ID NO: 19167 - DNA, 17 bp, synthetic construct
  misc_feature 1..17: note = Oligonucleotide
  source 1..17: mol_type = other DNA
tgtgtcatgtacacaag

SEQ ID NO: 19168 - DNA, 17 bp, synthetic construct
  misc_feature 1..17: note = Oligonucleotide
  source 1..17: mol_type = other DNA
gtctgtgtcatgtacac

SEQ ID NO: 19169 - DNA, 17 bp, synthetic construct
  misc_feature 1..17: note = Oligonucleotide
  source 1..17: mol_type = other DNA
cgtgtctgtgtcatgta

SEQ ID NO: 19170 - DNA, 17 bp, synthetic construct
  misc_feature 1..17: note = Oligonucleotide
  source 1..17: mol_type = other DNA
acacgtgtctgtgtcat

SEQ ID NO: 19171 - DNA, 17 bp, synthetic construct
  misc_feature 1..17: note = Oligonucleotide
  source 1..17: mol_type = other DNA
tgcacacgtgtctgtgt

SEQ ID NO: 19172 - DNA, 17 bp, synthetic construct
  misc_feature 1..17: note = Oligonucleotide
  source 1..17: mol_type = other DNA
gtgtgcacacgtgtctg

SEQ ID NO: 19173 - DNA, 17 bp, synthetic construct
  misc_feature 1..17: note = Oligonucleotide
  source 1..17: mol_type = other DNA
agtgtgtgcacacgtgt

SEQ ID NO: 19174 - DNA, 17 bp, synthetic construct
  misc_feature 1..17: note = Oligonucleotide
  source 1..17: mol_type = other DNA
cagagtgtgtgcacacg

SEQ ID NO: 19175 - DNA, 17 bp, synthetic construct
  misc_feature 1..17: note = Oligonucleotide
  source 1..17: mol_type = other DNA
atgcagagtgtgtgcac

SEQ ID NO: 19176 - DNA, 17 bp, synthetic construct
  misc_feature 1..17: note = Oligonucleotide
  source 1..17: mol_type = other DNA
tatatgcagagtgtgtg

SEQ ID NO: 19177 - DNA, 17 bp, synthetic construct
  misc_feature 1..17: note = Oligonucleotide
  source 1..17: mol_type = other DNA
aagtatatgcagagtgt

SEQ ID NO: 19178 - DNA, 17 bp, synthetic construct
  misc_feature 1..17: note = Oligonucleotide
  source 1..17: mol_type = other DNA
cccaagtatatgcagag

SEQ ID NO: 19179 - DNA, 17 bp, synthetic construct
  misc_feature 1..17: note = Oligonucleotide
  source 1..17: mol_type = other DNA
gttcccaagtatatgca

SEQ ID NO: 19180 - DNA, 17 bp, synthetic construct
  misc_feature 1..17: note = Oligonucleotide
  source 1..17: mol_type = other DNA
catgttcccaagtatat

SEQ ID NO: 19181 - DNA, 17 bp, synthetic construct
  misc_feature 1..17: note = Oligonucleotide
  source 1..17: mol_type = other DNA
acgcatgttcccaagta

SEQ ID NO: 19182 - DNA, 17 bp, synthetic construct
  misc_feature 1..17: note = Oligonucleotide
  source 1..17: mol_type = other DNA
tacacgcatgttcccaa

SEQ ID NO: 19183 - DNA, 17 bp, synthetic construct
  misc_feature 1..17: note = Oligonucleotide
  source 1..17: mol_type = other DNA
acatacacgcatgttcc

SEQ ID NO: 19184 - DNA, 17 bp, synthetic construct
  misc_feature 1..17: note = Oligonucleotide
  source 1..17: mol_type = other DNA
gttacatacacgcatgt

SEQ ID NO: 19185 - DNA, 17 bp, synthetic construct
  misc_feature 1..17: note = Oligonucleotide
  source 1..17: mol_type = other DNA
caggttacatacacgca

SEQ ID NO: 19186 - DNA, 17 bp, synthetic construct
  misc_feature 1..17: note = Oligonucleotide
  source 1..17: mol_type = other DNA
cgtcaggttacatacac

SEQ ID NO: 19187 - DNA, 17 bp, synthetic construct
  misc_feature 1..17: note = Oligonucleotide
  source 1..17: mol_type = other DNA
aagcgtcaggttacata

SEQ ID NO: 19188 - DNA, 17 bp, synthetic construct
  misc_feature 1..17: note = Oligonucleotide
  source 1..17: mol_type = other DNA
gtgaagcgtcaggttac

SEQ ID NO: 19189 - DNA, 17 bp, synthetic construct
  misc_feature 1..17: note = Oligonucleotide
  source 1..17: mol_type = other DNA
cacgtgaagcgtcaggt

SEQ ID NO: 19190 - DNA, 17 bp, synthetic construct
  misc_feature 1..17: note = Oligonucleotide
  source 1..17: mol_type = other DNA
ctgcacgtgaagcgtca

SEQ ID NO: 19191 - DNA, 17 bp, synthetic construct
  misc_feature 1..17: note = Oligonucleotide
  source 1..17: mol_type = other DNA
ccactgcacgtgaagcg

SEQ ID NO: 19192 - DNA, 17 bp, synthetic construct
  misc_feature 1..17: note = Oligonucleotide
  source 1..17: mol_type = other DNA
tctccactgcacgtgaa

SEQ ID NO: 19193 - DNA, 17 bp, synthetic construct
  misc_feature 1..17: note = Oligonucleotide
  source 1..17: mol_type = other DNA
gtgtctccactgcacgt

SEQ ID NO: 19194 - DNA, 17 bp, synthetic construct
  misc_feature 1..17: note = Oligonucleotide
  source 1..17: mol_type = other DNA
tatgtgtctccactgca

SEQ ID NO: 19195 - DNA, 17 bp, synthetic construct
  misc_feature 1..17: note = Oligonucleotide
  source 1..17: mol_type = other DNA
tcctatgtgtctccact

SEQ ID NO: 19196 - DNA, 17 bp, synthetic construct
  misc_feature 1..17: note = Oligonucleotide
  source 1..17: mol_type = other DNA
acgtcctatgtgtctcc

SEQ ID NO: 19197 - DNA, 17 bp, synthetic construct
  misc_feature 1..17: note = Oligonucleotide
  source 1..17: mol_type = other DNA
cacacgtcctatgtgtc

SEQ ID NO: 19198 - DNA, 17 bp, synthetic construct
  misc_feature 1..17: note = Oligonucleotide
  source 1..17: mol_type = other DNA
tcacacacgtcctatgt

SEQ ID NO: 19199 - DNA, 17 bp, synthetic construct
  misc_feature 1..17: note = Oligonucleotide
  source 1..17: mol_type = other DNA
ccgtcacacacgtccta

SEQ ID NO: 19200 - DNA, 17 bp, synthetic construct
  misc_feature 1..17: note = Oligonucleotide
  source 1..17: mol_type = other DNA
gccccgtcacacacgtc

SEQ ID NO: 19201 - DNA, 17 bp, synthetic construct
  misc_feature 1..17: note = Oligonucleotide
  source 1..17: mol_type = other DNA
gaggccccgtcacacac

SEQ ID NO: 19202 - DNA, 17 bp, synthetic construct
  misc_feature 1..17: note = Oligonucleotide
  source 1..17: mol_type = other DNA
acagaggccccgtcaca

SEQ ID NO: 19203 - DNA, 17 bp, synthetic construct
  misc_feature 1..17: note = Oligonucleotide
  source 1..17: mol_type = other DNA
cagacagaggccccgtc

SEQ ID NO: 19204 - DNA, 17 bp, synthetic construct
  misc_feature 1..17: note = Oligonucleotide
  source 1..17: mol_type = other DNA
acacagacagaggcccc

SEQ ID NO: 19205 - DNA, 17 bp, synthetic construct
  misc_feature 1..17: note = Oligonucleotide
  source 1..17: mol_type = other DNA
atcacacagacagaggc

SEQ ID NO: 19206 - DNA, 17 bp, synthetic construct
  misc_feature 1..17: note = Oligonucleotide
  source 1..17: mol_type = other DNA
gggatcacacagacaga

SEQ ID NO: 19207 - DNA, 17 bp, synthetic construct
  misc_feature 1..17: note = Oligonucleotide
  source 1..17: mol_type = other DNA
tgtgggatcacacagac

SEQ ID NO: 19208 - DNA, 17 bp, synthetic construct
  misc_feature 1..17: note = Oligonucleotide
  source 1..17: mol_type = other DNA
caatgtgggatcacaca

SEQ ID NO: 19209 - DNA, 17 bp, synthetic construct
  misc_feature 1..17: note = Oligonucleotide
  source 1..17: mol_type = other DNA
agtcaatgtgggatcac

SEQ ID NO: 19210 - DNA, 17 bp, synthetic construct
  misc_feature 1..17: note = Oligonucleotide
  source 1..17: mol_type = other DNA
gggagtcaatgtgggat

SEQ ID NO: 19211 - DNA, 17 bp, synthetic construct
  misc_feature 1..17: note = Oligonucleotide
  source 1..17: mol_type = other DNA
actgggagtcaatgtgg

SEQ ID NO: 19212 - DNA, 17 bp, synthetic construct
  misc_feature 1..17: note = Oligonucleotide
  source 1..17: mol_type = other DNA
gtcactgggagtcaatg

SEQ ID NO: 19213 - DNA, 17 bp, synthetic construct
  misc_feature 1..17: note = Oligonucleotide
  source 1..17: mol_type = other DNA
caagtcactgggagtca

SEQ ID NO: 19214 - DNA, 17 bp, synthetic construct
  misc_feature 1..17: note = Oligonucleotide
  source 1..17: mol_type = other DNA
gtgcaagtcactgggag

SEQ ID NO: 19215 - DNA, 17 bp, synthetic construct
  misc_feature 1..17: note = Oligonucleotide
  source 1..17: mol_type = other DNA
ggggtgcaagtcactgg

SEQ ID NO: 19216 - DNA, 17 bp, synthetic construct
  misc_feature 1..17: note = Oligonucleotide
  source 1..17: mol_type = other DNA
ggtggggtgcaagtcac

SEQ ID NO: 19217 - DNA, 17 bp, synthetic construct
  misc_feature 1..17: note = Oligonucleotide
  source 1..17: mol_type = other DNA
gctggtggggtgcaagt

SEQ ID NO: 19218 - DNA, 17 bp, synthetic construct
  misc_feature 1..17: note = Oligonucleotide
  source 1..17: mol_type = other DNA
tgtgctggtggggtgca

SEQ ID NO: 19219 - DNA, 17 bp, synthetic construct
  misc_feature 1..17: note = Oligonucleotide
  source 1..17: mol_type = other DNA
gactgtgctggtggggt

SEQ ID NO: 19220 - DNA, 17 bp, synthetic construct
  misc_feature 1..17: note = Oligonucleotide
  source 1..17: mol_type = other DNA
aaggactgtgctggtgg

SEQ ID NO: 19221 - DNA, 17 bp, synthetic construct
  misc_feature 1..17: note = Oligonucleotide
  source 1..17: mol_type = other DNA
ctgaaggactgtgctgg

SEQ ID NO: 19222 - DNA, 17 bp, synthetic construct
  misc_feature 1..17: note = Oligonucleotide
  source 1..17: mol_type = other DNA
tttctgaaggactgtgc

SEQ ID NO: 19223 - DNA, 17 bp, synthetic construct
  misc_feature 1..17: note = Oligonucleotide
  source 1..17: mol_type = other DNA
gtgtttctgaaggactg

SEQ ID NO: 19224 - DNA, 17 bp, synthetic construct
  misc_feature 1..17: note = Oligonucleotide
  source 1..17: mol_type = other DNA
ctggtgtttctgaagga

SEQ ID NO: 19225 - DNA, 17 bp, synthetic construct
  misc_feature 1..17: note = Oligonucleotide
  source 1..17: mol_type = other DNA
cacctggtgtttctgaa

SEQ ID NO: 19226 - DNA, 17 bp, synthetic construct
  misc_feature 1..17: note = Oligonucleotide
  source 1..17: mol_type = other DNA
acacacctggtgtttct

SEQ ID NO: 19227 - DNA, 17 bp, synthetic construct
  misc_feature 1..17: note = Oligonucleotide
  source 1..17: mol_type = other DNA
tccacacacctggtgtt

SEQ ID NO: 19228 - DNA, 17 bp, synthetic construct
  misc_feature 1..17: note = Oligonucleotide
  source 1..17: mol_type = other DNA
cgttccacacacctggt

SEQ ID NO: 19229 - DNA, 17 bp, synthetic construct
  misc_feature 1..17: note = Oligonucleotide
  source 1..17: mol_type = other DNA
atgcgttccacacacct

SEQ ID NO: 19230 - DNA, 17 bp, synthetic construct
  misc_feature 1..17: note = Oligonucleotide
  source 1..17: mol_type = other DNA
atcatgcgttccacaca

SEQ ID NO: 19231 - DNA, 17 bp, synthetic construct
  misc_feature 1..17: note = Oligonucleotide
  source 1..17: mol_type = other DNA
ggaatcatgcgttccac

SEQ ID NO: 19232 - DNA, 17 bp, synthetic construct
  misc_feature 1..17: note = Oligonucleotide
  source 1..17: mol_type = other DNA
gcaggaatcatgcgttc

SEQ ID NO: 19233 - DNA, 17 bp, synthetic construct
  misc_feature 1..17: note = Oligonucleotide
  source 1..17: mol_type = other DNA
tacgcaggaatcatgcg

SEQ ID NO: 19234 - DNA, 17 bp, synthetic construct
  misc_feature 1..17: note = Oligonucleotide
  source 1..17: mol_type = other DNA
agctacgcaggaatcat

SEQ ID NO: 19235 - DNA, 17 bp, synthetic construct
  misc_feature 1..17: note = Oligonucleotide
  source 1..17: mol_type = other DNA
gccagctacgcaggaat

SEQ ID NO: 19236 - DNA, 17 bp, synthetic construct
  misc_feature 1..17: note = Oligonucleotide
  source 1..17: mol_type = other DNA
tctgccagctacgcagg

SEQ ID NO: 19237 - DNA, 17 bp, synthetic construct
  misc_feature 1..17: note = Oligonucleotide
  source 1..17: mol_type = other DNA
atgtctgccagctacgc

SEQ ID NO: 19238 - DNA, 17 bp, synthetic construct
  misc_feature 1..17: note = Oligonucleotide
  source 1..17: mol_type = other DNA
tacatgtctgccagcta

SEQ ID NO: 19239 - DNA, 17 bp, synthetic construct
  misc_feature 1..17: note = Oligonucleotide
  source 1..17: mol_type = other DNA
ccttacatgtctgccag

SEQ ID NO: 19240 - DNA, 17 bp, synthetic construct
  misc_feature 1..17: note = Oligonucleotide
  source 1..17: mol_type = other DNA
cctccttacatgtctgc

SEQ ID NO: 19241 - DNA, 17 bp, synthetic construct
  misc_feature 1..17: note = Oligonucleotide
  source 1..17: mol_type = other DNA
tgacctccttacatgtc

SEQ ID NO: 19242 - DNA, 17 bp, synthetic construct
  misc_feature 1..17: note = Oligonucleotide
  source 1..17: mol_type = other DNA
cactgacctccttacat

SEQ ID NO: 19243 - DNA, 17 bp, synthetic construct
  misc_feature 1..17: note = Oligonucleotide
  source 1..17: mol_type = other DNA
tcacactgacctcctta

SEQ ID NO: 19244 - DNA, 17 bp, synthetic construct
  misc_feature 1..17: note = Oligonucleotide
  source 1..17: mol_type = other DNA
ttctcacactgacctcc

SEQ ID NO: 19245 - DNA, 17 bp, synthetic construct
  misc_feature 1..17: note = Oligonucleotide
  source 1..17: mol_type = other DNA
cttttctcacactgacc

SEQ ID NO: 19246 - DNA, 17 bp, synthetic construct
  misc_feature 1..17: note = Oligonucleotide
  source 1..17: mol_type = other DNA
cctcttttctcacactg

SEQ ID NO: 19247 - DNA, 17 bp, synthetic construct
  misc_feature 1..17: note = Oligonucleotide
  source 1..17: mol_type = other DNA
acgcctcttttctcaca

SEQ ID NO: 19248 - DNA, 17 bp, synthetic construct
  misc_feature 1..17: note = Oligonucleotide
  source 1..17: mol_type = other DNA
aaaacgcctcttttctc

SEQ ID NO: 19249 - DNA, 17 bp, synthetic construct
  misc_feature 1..17: note = Oligonucleotide
  source 1..17: mol_type = other DNA
ggaaaaacgcctctttt

SEQ ID NO: 19250 - DNA, 17 bp, synthetic construct
  misc_feature 1..17: note = Oligonucleotide
  source 1..17: mol_type = other DNA
tttggaaaaacgcctct

SEQ ID NO: 19251 - DNA, 17 bp, synthetic construct
  misc_feature 1..17: note = Oligonucleotide
  source 1..17: mol_type = other DNA
cactttggaaaaacgcc

SEQ ID NO: 19252 - DNA, 17 bp, synthetic construct
  misc_feature 1..17: note = Oligonucleotide
  source 1..17: mol_type = other DNA
gtccactttggaaaaac

SEQ ID NO: 19253 - DNA, 17 bp, synthetic construct
  misc_feature 1..17: note = Oligonucleotide
  source 1..17: mol_type = other DNA
tctgtccactttggaaa

SEQ ID NO: 19254 - DNA, 17 bp, synthetic construct
  misc_feature 1..17: note = Oligonucleotide
  source 1..17: mol_type = other DNA
caatctgtccactttgg

SEQ ID NO: 19255 - DNA, 17 bp, synthetic construct
  misc_feature 1..17: note = Oligonucleotide
  source 1..17: mol_type = other DNA
ggacaatctgtccactt

SEQ ID NO: 19256 - DNA, 17 bp, synthetic construct
  misc_feature 1..17: note = Oligonucleotide
  source 1..17: mol_type = other DNA
cttggacaatctgtcca

SEQ ID NO: 19257 - DNA, 17 bp, synthetic construct
  misc_feature 1..17: note = Oligonucleotide
  source 1..17: mol_type = other DNA
ccacttggacaatctgt

SEQ ID NO: 19258 - DNA, 17 bp, synthetic construct
  misc_feature 1..17: note = Oligonucleotide
  source 1..17: mol_type = other DNA
tgcccacttggacaatc

SEQ ID NO: 19259 - DNA, 17 bp, synthetic construct
  misc_feature 1..17: note = Oligonucleotide
  source 1..17: mol_type = other DNA
ctctgcccacttggaca

SEQ ID NO: 19260 - DNA, 17 bp, synthetic construct
  misc_feature 1..17: note = Oligonucleotide
  source 1..17: mol_type = other DNA
ctgctctgcccacttgg

SEQ ID NO: 19261 - DNA, 17 bp, synthetic construct
  misc_feature 1..17: note = Oligonucleotide
  source 1..17: mol_type = other DNA
tgcctgctctgcccact

SEQ ID NO: 19262 - DNA, 17 bp, synthetic construct
  misc_feature 1..17: note = Oligonucleotide
  source 1..17: mol_type = other DNA
gcctgcctgctctgccc

SEQ ID NO: 19263 - DNA, 17 bp, synthetic construct
  misc_feature 1..17: note = Oligonucleotide
  source 1..17: mol_type = other DNA
cgggcctgcctgctctg

SEQ ID NO: 19264 - DNA, 17 bp, synthetic construct
  misc_feature 1..17: note = Oligonucleotide
  source 1..17: mol_type = other DNA
ctccgggcctgcctgct

SEQ ID NO: 19265 - DNA, 17 bp, synthetic construct
  misc_feature 1..17: note = Oligonucleotide
  source 1..17: mol_type = other DNA
ctgctccgggcctgcct

SEQ ID NO: 19266 - DNA, 17 bp, synthetic construct
  misc_feature 1..17: note = Oligonucleotide
  source 1..17: mol_type = other DNA
tggctgctccgggcctg

SEQ ID NO: 19267 - DNA, 17 bp, synthetic construct
  misc_feature 1..17: note = Oligonucleotide
  source 1..17: mol_type = other DNA
tcttggctgctccgggc

SEQ ID NO: 19268 - DNA, 17 bp, synthetic construct
  misc_feature 1..17: note = Oligonucleotide
  source 1..17: mol_type = other DNA
tcctcttggctgctccg

SEQ ID NO: 19269 - DNA, 17 bp, synthetic construct
  misc_feature 1..17: note = Oligonucleotide
  source 1..17: mol_type = other DNA
atttcctcttggctgct

SEQ ID NO: 19270 - DNA, 17 bp, synthetic construct
  misc_feature 1..17: note = Oligonucleotide
  source 1..17: mol_type = other DNA
ctcatttcctcttggct

SEQ ID NO: 19271 - DNA, 17 bp, synthetic construct
  misc_feature 1..17: note = Oligonucleotide
  source 1..17: mol_type = other DNA
ggcctcatttcctcttg

SEQ ID NO: 19272 - DNA, 17 bp, synthetic construct
  misc_feature 1..17: note = Oligonucleotide
  source 1..17: mol_type = other DNA
actggcctcatttcctc

SEQ ID NO: 19273 - DNA, 17 bp, synthetic construct
  misc_feature 1..17: note = Oligonucleotide
  source 1..17: mol_type = other DNA
ccaactggcctcatttc

SEQ ID NO: 19274 - DNA, 17 bp, synthetic construct
  misc_feature 1..17: note = Oligonucleotide
  source 1..17: mol_type = other DNA
ggcccaactggcctcat

SEQ ID NO: 19275 - DNA, 17 bp, synthetic construct
  misc_feature 1..17: note = Oligonucleotide
  source 1..17: mol_type = other DNA
ccaggcccaactggcct

SEQ ID NO: 19276 - DNA, 17 bp, synthetic construct
  misc_feature 1..17: note = Oligonucleotide
  source 1..17: mol_type = other DNA
cctccaggcccaactgg

SEQ ID NO: 19277 - DNA, 17 bp, synthetic construct
  misc_feature 1..17: note = Oligonucleotide
  source 1..17: mol_type = other DNA
gcacctccaggcccaac

SEQ ID NO: 19278 - DNA, 17 bp, synthetic construct
  misc_feature 1..17: note = Oligonucleotide
  source 1..17: mol_type = other DNA
agggcacctccaggccc

SEQ ID NO: 19279 - DNA, 17 bp, synthetic construct
  misc_feature 1..17: note = Oligonucleotide
  source 1..17: mol_type = other DNA
accagggcacctccagg

SEQ ID NO: 19280 - DNA, 17 bp, synthetic construct
  misc_feature 1..17: note = Oligonucleotide
  source 1..17: mol_type = other DNA
ctcaccagggcacctcc

SEQ ID NO: 19281 - DNA, 17 bp, synthetic construct
  misc_feature 1..17: note = Oligonucleotide
  source 1..17: mol_type = other DNA
gcactcaccagggcacc

SEQ ID NO: 19282 - DNA, 17 bp, synthetic construct
  misc_feature 1..17: note = Oligonucleotide
  source 1..17: mol_type = other DNA
agggcactcaccagggc

SEQ ID NO: 19283 - DNA, 17 bp, synthetic construct
  misc_feature 1..17: note = Oligonucleotide
  source 1..17: mol_type = other DNA
cccagggcactcaccag

SEQ ID NO: 19284 - DNA, 17 bp, synthetic construct
  misc_feature 1..17: note = Oligonucleotide
  source 1..17: mol_type = other DNA
tgccccagggcactcac

SEQ ID NO: 19285 - DNA, 17 bp, synthetic construct
  misc_feature 1..17: note = Oligonucleotide
  source 1..17: mol_type = other DNA
ccctgccccagggcact

SEQ ID NO: 19286 - DNA, 17 bp, synthetic construct
  misc_feature 1..17: note = Oligonucleotide
  source 1..17: mol_type = other DNA
catccctgccccagggc

SEQ ID NO: 19287 - DNA, 17 bp, synthetic construct
  misc_feature 1..17: note = Oligonucleotide
  source 1..17: mol_type = other DNA
gaccatccctgccccag

SEQ ID NO: 19288 - DNA, 17 bp, synthetic construct
  misc_feature 1..17: note = Oligonucleotide
  source 1..17: mol_type = other DNA
tcagaccatccctgccc

SEQ ID NO: 19289 - DNA, 17 bp, synthetic construct
  misc_feature 1..17: note = Oligonucleotide
  source 1..17: mol_type = other DNA
ccctcagaccatccctg

SEQ ID NO: 19290 - DNA, 17 bp, synthetic construct
  misc_feature 1..17: note = Oligonucleotide
  source 1..17: mol_type = other DNA
ctgccctcagaccatcc

SEQ ID NO: 19291 - DNA, 17 bp, synthetic construct
  misc_feature 1..17: note = Oligonucleotide
  source 1..17: mol_type = other DNA
ctgctgccctcagacca

SEQ ID NO: 19292 - DNA, 17 bp, synthetic construct
  misc_feature 1..17: note = Oligonucleotide
  source 1..17: mol_type = other DNA
cacctgctgccctcaga

SEQ ID NO: 19293 - DNA, 17 bp, synthetic construct
  misc_feature 1..17: note = Oligonucleotide
  source 1..17: mol_type = other DNA
cctcacctgctgccctc

SEQ ID NO: 19294 - DNA, 17 bp, synthetic construct
  misc_feature 1..17: note = Oligonucleotide
  source 1..17: mol_type = other DNA
cagcctcacctgctgcc

SEQ ID NO: 19295 - DNA, 17 bp, synthetic construct
  misc_feature 1..17: note = Oligonucleotide
  source 1..17: mol_type = other DNA
gcccagcctcacctgct

SEQ ID NO: 19296 - DNA, 17 bp, synthetic construct
  misc_feature 1..17: note = Oligonucleotide
  source 1..17: mol_type = other DNA
ccagcccagcctcacct

SEQ ID NO: 19297 - DNA, 17 bp, synthetic construct
  misc_feature 1..17: note = Oligonucleotide
  source 1..17: mol_type = other DNA
ggaccagcccagcctca

SEQ ID NO: 19298 - DNA, 17 bp, synthetic construct
  misc_feature 1..17: note = Oligonucleotide
  source 1..17: mol_type = other DNA
tgaggaccagcccagcc

SEQ ID NO: 19299 - DNA, 17 bp, synthetic construct
  misc_feature 1..17: note = Oligonucleotide
  source 1..17: mol_type = other DNA
ggctgaggaccagccca

SEQ ID NO: 19300 - DNA, 17 bp, synthetic construct
  misc_feature 1..17: note = Oligonucleotide
  source 1..17: mol_type = other DNA
gcaggctgaggaccagc

SEQ ID NO: 19301 - DNA, 17 bp, synthetic construct
  misc_feature 1..17: note = Oligonucleotide
  source 1..17: mol_type = other DNA
cctgcaggctgaggacc

SEQ ID NO: 19302 - DNA, 17 bp, synthetic construct
  misc_feature 1..17: note = Oligonucleotide
  source 1..17: mol_type = other DNA
ctccctgcaggctgagg

SEQ ID NO: 19303 - DNA, 17 bp, synthetic construct
  misc_feature 1..17: note = Oligonucleotide
  source 1..17: mol_type = other DNA
atcctccctgcaggctg

SEQ ID NO: 19304 - DNA, 17 bp, synthetic construct
  misc_feature 1..17: note = Oligonucleotide
  source 1..17: mol_type = other DNA
cacatcctccctgcagg

SEQ ID NO: 19305 - DNA, 17 bp, synthetic construct
  misc_feature 1..17: note = Oligonucleotide
  source 1..17: mol_type = other DNA
cttcacatcctccctgc

SEQ ID NO: 19306 - DNA, 17 bp, synthetic construct
  misc_feature 1..17: note = Oligonucleotide
  source 1..17: mol_type = other DNA
caccttcacatcctccc

SEQ ID NO: 19307 - DNA, 17 bp, synthetic construct
  misc_feature 1..17: note = Oligonucleotide
  source 1..17: mol_type = other DNA
cttcaccttcacatcct

SEQ ID NO: 19308 - DNA, 17 bp, synthetic construct
  misc_feature 1..17: note = Oligonucleotide
  source 1..17: mol_type = other DNA
agccttcaccttcacat

SEQ ID NO: 19309 - DNA, 17 bp, synthetic construct
  misc_feature 1..17: note = Oligonucleotide
  source 1..17: mol_type = other DNA
tgcagccttcaccttca

SEQ ID NO: 19310 - DNA, 17 bp, synthetic construct
  misc_feature 1..17: note = Oligonucleotide
  source 1..17: mol_type = other DNA
agctgcagccttcacct

SEQ ID NO: 19311 - DNA, 17 bp, synthetic construct
  misc_feature 1..17: note = Oligonucleotide
  source 1..17: mol_type = other DNA
aggagctgcagccttca

SEQ ID NO: 19312 - DNA, 17 bp, synthetic construct
  misc_feature 1..17: note = Oligonucleotide
  source 1..17: mol_type = other DNA
cccaggagctgcagcct

SEQ ID NO: 19313 - DNA, 17 bp, synthetic construct
  misc_feature 1..17: note = Oligonucleotide
  source 1..17: mol_type = other DNA
caacccaggagctgcag

SEQ ID NO: 19314 - DNA, 17 bp, synthetic construct
  misc_feature 1..17: note = Oligonucleotide
  source 1..17: mol_type = other DNA
caccaacccaggagctg

SEQ ID NO: 19315 - DNA, 17 bp, synthetic construct
  misc_feature 1..17: note = Oligonucleotide
  source 1..17: mol_type = other DNA
actcaccaacccaggag

SEQ ID NO: 19316 - DNA, 17 bp, synthetic construct
  misc_feature 1..17: note = Oligonucleotide
  source 1..17: mol_type = other DNA
gccactcaccaacccag

SEQ ID NO: 19317 - DNA, 17 bp, synthetic construct
  misc_feature 1..17: note = Oligonucleotide
  source 1..17: mol_type = other DNA
gcagccactcaccaacc

SEQ ID NO: 19318 - DNA, 17 bp, synthetic construct
  misc_feature 1..17: note = Oligonucleotide
  source 1..17: mol_type = other DNA
acagcagccactcacca

SEQ ID NO: 19319 - DNA, 17 bp, synthetic construct
  misc_feature 1..17: note = Oligonucleotide
  source 1..17: mol_type = other DNA
tggacagcagccactca

SEQ ID NO: 19320 - DNA, 17 bp, synthetic construct
  misc_feature 1..17: note = Oligonucleotide
  source 1..17: mol_type = other DNA
ggctggacagcagccac

SEQ ID NO: 19321 - DNA, 17 bp, synthetic construct
  misc_feature 1..17: note = Oligonucleotide
  source 1..17: mol_type = other DNA
cagggctggacagcagc

SEQ ID NO: 19322 - DNA, 17 bp, synthetic construct
  misc_feature 1..17: note = Oligonucleotide
  source 1..17: mol_type = other DNA
cagcagggctggacagc

SEQ ID NO: 19323 - DNA, 17 bp, synthetic construct
  misc_feature 1..17: note = Oligonucleotide
  source 1..17: mol_type = other DNA
ggtcagcagggctggac

SEQ ID NO: 19324 - DNA, 17 bp, synthetic construct
  misc_feature 1..17: note = Oligonucleotide
  source 1..17: mol_type = other DNA
gatggtcagcagggctg

SEQ ID NO: 19325 - DNA, 17 bp, synthetic construct
  misc_feature 1..17: note = Oligonucleotide
  source 1..17: mol_type = other DNA
ccagatggtcagcaggg

SEQ ID NO: 19326 - DNA, 17 bp, synthetic construct
  misc_feature 1..17: note = Oligonucleotide
  source 1..17: mol_type = other DNA
ggaccagatggtcagca

SEQ ID NO: 19327 - DNA, 17 bp, synthetic construct
  misc_feature 1..17: note = Oligonucleotide
  source 1..17: mol_type = other DNA
aaaggaccagatggtca

SEQ ID NO: 19328 - DNA, 17 bp, synthetic construct
  misc_feature 1..17: note = Oligonucleotide
  source 1..17: mol_type = other DNA
cccaaaggaccagatgg

SEQ ID NO: 19329 - DNA, 17 bp, synthetic construct
  misc_feature 1..17: note = Oligonucleotide
  source 1..17: mol_type = other DNA
gcccccaaaggaccaga

SEQ ID NO: 19330 - DNA, 17 bp, synthetic construct
  misc_feature 1..17: note = Oligonucleotide
  source 1..17: mol_type = other DNA
ggggcccccaaaggacc

SEQ ID NO: 19331 - DNA, 17 bp, synthetic construct
  misc_feature 1..17: note = Oligonucleotide
  source 1..17: mol_type = other DNA
ccgggggcccccaaagg

SEQ ID NO: 19332 - DNA, 17 bp, synthetic construct
  misc_feature 1..17: note = Oligonucleotide
  source 1..17: mol_type = other DNA
agcccgggggcccccaa

SEQ ID NO: 19333 - DNA, 17 bp, synthetic construct
  misc_feature 1..17: note = Oligonucleotide
  source 1..17: mol_type = other DNA
tccagcccgggggcccc

SEQ ID NO: 19334 - DNA, 17 bp, synthetic construct
  misc_feature 1..17: note = Oligonucleotide
  source 1..17: mol_type = other DNA
agctccagcccgggggc

SEQ ID NO: 19335 - DNA, 17 bp, synthetic construct
  misc_feature 1..17: note = Oligonucleotide
  source 1..17: mol_type = other DNA
cccagctccagcccggg

SEQ ID NO: 19336 - DNA, 17 bp, synthetic construct
  misc_feature 1..17: note = Oligonucleotide
  source 1..17: mol_type = other DNA
gcacccagctccagccc

SEQ ID NO: 19337 - DNA, 17 bp, synthetic construct
  misc_feature 1..17: note = Oligonucleotide
  source 1..17: mol_type = other DNA
cacgcacccagctccag

SEQ ID NO: 19338 - DNA, 17 bp, synthetic construct
  misc_feature 1..17: note = Oligonucleotide
  source 1..17: mol_type = other DNA
agacacgcacccagctc

SEQ ID NO: 19339 - DNA, 17 bp, synthetic construct
  misc_feature 1..17: note = Oligonucleotide
  source 1..17: mol_type = other DNA
ccaagacacgcacccag

SEQ ID NO: 19340 - DNA, 17 bp, synthetic construct
  misc_feature 1..17: note = Oligonucleotide
  source 1..17: mol_type = other DNA
cccccaagacacgcacc

SEQ ID NO: 19341 - DNA, 17 bp, synthetic construct
  misc_feature 1..17: note = Oligonucleotide
  source 1..17: mol_type = other DNA
gcacccccaagacacgc

SEQ ID NO: 19342 - DNA, 17 bp, synthetic construct
  misc_feature 1..17: note = Oligonucleotide
  source 1..17: mol_type = other DNA
agggcacccccaagaca

SEQ ID NO: 19343 - DNA, 17 bp, synthetic construct
  misc_feature 1..17: note = Oligonucleotide
  source 1..17: mol_type = other DNA
gcaagggcacccccaag

SEQ ID NO: 19344 - DNA, 17 bp, synthetic construct
  misc_feature 1..17: note = Oligonucleotide
  source 1..17: mol_type = other DNA
cttgcaagggcaccccc

SEQ ID NO: 19345 - DNA, 17 bp, synthetic construct
  misc_feature 1..17: note = Oligonucleotide
  source 1..17: mol_type = other DNA
ttccttgcaagggcacc

SEQ ID NO: 19346 - DNA, 17 bp, synthetic construct
  misc_feature 1..17: note = Oligonucleotide
  source 1..17: mol_type = other DNA
gggttccttgcaagggc

SEQ ID NO: 19347 - DNA, 17 bp, synthetic construct
  misc_feature 1..17: note = Oligonucleotide
  source 1..17: mol_type = other DNA
tgagggttccttgcaag

SEQ ID NO: 19348 - DNA, 17 bp, synthetic construct
  misc_feature 1..17: note = Oligonucleotide
  source 1..17: mol_type = other DNA
ccctgagggttccttgc

SEQ ID NO: 19349 - DNA, 17 bp, synthetic construct
  misc_feature 1..17: note = Oligonucleotide
  source 1..17: mol_type = other DNA
gacccctgagggttcct

SEQ ID NO: 19350 - DNA, 17 bp, synthetic construct
  misc_feature 1..17: note = Oligonucleotide
  source 1..17: mol_type = other DNA
cgggacccctgagggtt

SEQ ID NO: 19351 - DNA, 17 bp, synthetic construct
  misc_feature 1..17: note = Oligonucleotide
  source 1..17: mol_type = other DNA
tcccgggacccctgagg

SEQ ID NO: 19352 - DNA, 17 bp, synthetic construct
  misc_feature 1..17: note = Oligonucleotide
  source 1..17: mol_type = other DNA
gcctcccgggacccctg

SEQ ID NO: 19353 - DNA, 17 bp, synthetic construct
  misc_feature 1..17: note = Oligonucleotide
  source 1..17: mol_type = other DNA
ggggcctcccgggaccc

SEQ ID NO: 19354 - DNA, 17 bp, synthetic construct
  misc_feature 1..17: note = Oligonucleotide
  source 1..17: mol_type = other DNA
ctgggggcctcccggga

SEQ ID NO: 19355 - DNA, 17 bp, synthetic construct
  misc_feature 1..17: note = Oligonucleotide
  source 1..17: mol_type = other DNA
gatctgggggcctcccg

SEQ ID NO: 19356 - DNA, 17 bp, synthetic construct
  misc_feature 1..17: note = Oligonucleotide
  source 1..17: mol_type = other DNA
atggatctgggggcctc

SEQ ID NO: 19357 - DNA, 17 bp, synthetic construct
  misc_feature 1..17: note = Oligonucleotide
  source 1..17: mol_type = other DNA
tgcatggatctgggggc

SEQ ID NO: 19358 - DNA, 17 bp, synthetic construct
  misc_feature 1..17: note = Oligonucleotide
  source 1..17: mol_type = other DNA
acatgcatggatctggg

SEQ ID NO: 19359 - DNA, 17 bp, synthetic construct
  misc_feature 1..17: note = Oligonucleotide
  source 1..17: mol_type = other DNA
agcacatgcatggatct

SEQ ID NO: 19360 - DNA, 17 bp, synthetic construct
  misc_feature 1..17: note = Oligonucleotide
  source 1..17: mol_type = other DNA
agaagcacatgcatgga

SEQ ID NO: 19361 - DNA, 17 bp, synthetic construct
  misc_feature 1..17: note = Oligonucleotide
  source 1..17: mol_type = other DNA
gacagaagcacatgcat

SEQ ID NO: 19362 - DNA, 17 bp, synthetic construct
  misc_feature 1..17: note = Oligonucleotide
  source 1..17: mol_type = other DNA
caggacagaagcacatg

SEQ ID NO: 19363 - DNA, 17 bp, synthetic construct
  misc_feature 1..17: note = Oligonucleotide
  source 1..17: mol_type = other DNA
ctccaggacagaagcac

SEQ ID NO: 19364 - DNA, 17 bp, synthetic construct
  misc_feature 1..17: note = Oligonucleotide
  source 1..17: mol_type = other DNA
gctctccaggacagaag

SEQ ID NO: 19365 - DNA, 17 bp, synthetic construct
  misc_feature 1..17: note = Oligonucleotide
  source 1..17: mol_type = other DNA
ccagctctccaggacag

SEQ ID NO: 19366 - DNA, 17 bp, synthetic construct
  misc_feature 1..17: note = Oligonucleotide
  source 1..17: mol_type = other DNA
ccaccagctctccagga

SEQ ID NO: 19367 - DNA, 17 bp, synthetic construct
  misc_feature 1..17: note = Oligonucleotide
  source 1..17: mol_type = other DNA
ggcccaccagctctcca

SEQ ID NO: 19368 - DNA, 17 bp, synthetic construct
  misc_feature 1..17: note = Oligonucleotide
  source 1..17: mol_type = other DNA
cttggcccaccagctct

SEQ ID NO: 19369 - DNA, 17 bp, synthetic construct
  misc_feature 1..17: note = Oligonucleotide
  source 1..17: mol_type = other DNA
ttgcttggcccaccagc

SEQ ID NO: 19370 - DNA, 17 bp, synthetic construct
  misc_feature 1..17: note = Oligonucleotide
  source 1..17: mol_type = other DNA
ggtttgcttggcccacc

SEQ ID NO: 19371 - DNA, 17 bp, synthetic construct
  misc_feature 1..17: note = Oligonucleotide
  source 1..17: mol_type = other DNA
agaggtttgcttggccc

SEQ ID NO: 19372 - DNA, 17 bp, synthetic construct
  misc_feature 1..17: note = Oligonucleotide
  source 1..17: mol_type = other DNA
aggagaggtttgcttgg

SEQ ID NO: 19373 - DNA, 17 bp, synthetic construct
  misc_feature 1..17: note = Oligonucleotide
  source 1..17: mol_type = other DNA
ctcaggagaggtttgct

SEQ ID NO: 19374 - DNA, 17 bp, synthetic construct
  misc_feature 1..17: note = Oligonucleotide
  source 1..17: mol_type = other DNA
tcactcaggagaggttt

SEQ ID NO: 19375 - DNA, 17 bp, synthetic construct
  misc_feature 1..17: note = Oligonucleotide
  source 1..17: mol_type = other DNA
ccatcactcaggagagg

SEQ ID NO: 19376 - DNA, 17 bp, synthetic construct
  misc_feature 1..17: note = Oligonucleotide
  source 1..17: mol_type = other DNA
tgaccatcactcaggag

SEQ ID NO: 19377 - DNA, 17 bp, synthetic construct
  misc_feature 1..17: note = Oligonucleotide
  source 1..17: mol_type = other DNA
cagtgaccatcactcag

SEQ ID NO: 19378 - DNA, 17 bp, synthetic construct
  misc_feature 1..17: note = Oligonucleotide
  source 1..17: mol_type = other DNA
ccccagtgaccatcact

SEQ ID NO: 19379 - DNA, 17 bp, synthetic construct
  misc_feature 1..17: note = Oligonucleotide
  source 1..17: mol_type = other DNA
ggcccccagtgaccatc

SEQ ID NO: 19380 - DNA, 17 bp, synthetic construct
  misc_feature 1..17: note = Oligonucleotide
  source 1..17: mol_type = other DNA
gatggcccccagtgacc

SEQ ID NO: 19381 - DNA, 17 bp, synthetic construct
  misc_feature 1..17: note = Oligonucleotide
  source 1..17: mol_type = other DNA
accgatggcccccagtg

SEQ ID NO: 19382 - DNA, 17 bp, synthetic construct
  misc_feature 1..17: note = Oligonucleotide
  source 1..17: mol_type = other DNA
accaccgatggccccca

SEQ ID NO: 19383 - DNA, 17 bp, synthetic construct
  misc_feature 1..17: note = Oligonucleotide
  source 1..17: mol_type = other DNA
cacaccaccgatggccc

SEQ ID NO: 19384 - DNA, 17 bp, synthetic construct
  misc_feature 1..17: note = Oligonucleotide
  source 1..17: mol_type = other DNA
agacacaccaccgatgg

SEQ ID NO: 19385 - DNA, 17 bp, synthetic construct
  misc_feature 1..17: note = Oligonucleotide
  source 1..17: mol_type = other DNA
tccagacacaccaccga

SEQ ID NO: 19386 - DNA, 17 bp, synthetic construct
  misc_feature 1..17: note = Oligonucleotide
  source 1..17: mol_type = other DNA
tgatccagacacaccac

SEQ ID NO: 19387 - DNA, 17 bp, synthetic construct
  misc_feature 1..17: note = Oligonucleotide
  source 1..17: mol_type = other DNA
ccttgatccagacacac

SEQ ID NO: 19388 - DNA, 17 bp, synthetic construct
  misc_feature 1..17: note = Oligonucleotide
  source 1..17: mol_type = other DNA
cacccttgatccagaca

SEQ ID NO: 19389 - DNA, 17 bp, synthetic construct
  misc_feature 1..17: note = Oligonucleotide
  source 1..17: mol_type = other DNA
atgcacccttgatccag

SEQ ID NO: 19390 - DNA, 17 bp, synthetic construct
  misc_feature 1..17: note = Oligonucleotide
  source 1..17: mol_type = other DNA
tgcatgcacccttgatc

SEQ ID NO: 19391 - DNA, 17 bp, synthetic construct
  misc_feature 1..17: note = Oligonucleotide
  source 1..17: mol_type = other DNA
gggtgcatgcacccttg

SEQ ID NO: 19392 - DNA, 17 bp, synthetic construct
  misc_feature 1..17: note = Oligonucleotide
  source 1..17: mol_type = other DNA
ggagggtgcatgcaccc

SEQ ID NO: 19393 - DNA, 17 bp, synthetic construct
  misc_feature 1..17: note = Oligonucleotide
  source 1..17: mol_type = other DNA
gagggagggtgcatgca

SEQ ID NO: 19394 - DNA, 17 bp, synthetic construct
  misc_feature 1..17: note = Oligonucleotide
  source 1..17: mol_type = other DNA
gcagagggagggtgcat

SEQ ID NO: 19395 - DNA, 17 bp, synthetic construct
  misc_feature 1..17: note = Oligonucleotide
  source 1..17: mol_type = other DNA
catgcagagggagggtg

SEQ ID NO: 19396 - DNA, 17 bp, synthetic construct
  misc_feature 1..17: note = Oligonucleotide
  source 1..17: mol_type = other DNA
tcacatgcagagggagg

SEQ ID NO: 19397 - DNA, 17 bp, synthetic construct
  misc_feature 1..17: note = Oligonucleotide
  source 1..17: mol_type = other DNA
ccttcacatgcagaggg

SEQ ID NO: 19398 - DNA, 17 bp, synthetic construct
  misc_feature 1..17: note = Oligonucleotide
  source 1..17: mol_type = other DNA
agcccttcacatgcaga

SEQ ID NO: 19399 - DNA, 17 bp, synthetic construct
  misc_feature 1..17: note = Oligonucleotide
  source 1..17: mol_type = other DNA
ctgagcccttcacatgc

SEQ ID NO: 19400 - DNA, 17 bp, synthetic construct
  misc_feature 1..17: note = Oligonucleotide
  source 1..17: mol_type = other DNA
ggcctgagcccttcaca

SEQ ID NO: 19401 - DNA, 17 bp, synthetic construct
  misc_feature 1..17: note = Oligonucleotide
  source 1..17: mol_type = other DNA
ccaggcctgagcccttc

SEQ ID NO: 19402 - DNA, 17 bp, synthetic construct
  misc_feature 1..17: note = Oligonucleotide
  source 1..17: mol_type = other DNA
accccaggcctgagccc

SEQ ID NO: 19403 - DNA, 17 bp, synthetic construct
  misc_feature 1..17: note = Oligonucleotide
  source 1..17: mol_type = other DNA
gtaaccccaggcctgag

SEQ ID NO: 19404 - DNA, 17 bp, synthetic construct
  misc_feature 1..17: note = Oligonucleotide
  source 1..17: mol_type = other DNA
acagtaaccccaggcct

SEQ ID NO: 19405 - DNA, 17 bp, synthetic construct
  misc_feature 1..17: note = Oligonucleotide
  source 1..17: mol_type = other DNA
gacacagtaaccccagg

SEQ ID NO: 19406 - DNA, 17 bp, synthetic construct
  misc_feature 1..17: note = Oligonucleotide
  source 1..17: mol_type = other DNA
ggggacacagtaacccc

SEQ ID NO: 19407 - DNA, 17 bp, synthetic construct
  misc_feature 1..17: note = Oligonucleotide
  source 1..17: mol_type = other DNA
gatggggacacagtaac

SEQ ID NO: 19408 - DNA, 17 bp, synthetic construct
  misc_feature 1..17: note = Oligonucleotide
  source 1..17: mol_type = other DNA
agagatggggacacagt

SEQ ID NO: 19409 - DNA, 17 bp, synthetic construct
  misc_feature 1..17: note = Oligonucleotide
  source 1..17: mol_type = other DNA
cacagagatggggacac

SEQ ID NO: 19410 - DNA, 17 bp, synthetic construct
  misc_feature 1..17: note = Oligonucleotide
  source 1..17: mol_type = other DNA
ggacacagagatgggga

SEQ ID NO: 19411 - DNA, 17 bp, synthetic construct
  misc_feature 1..17: note = Oligonucleotide
  source 1..17: mol_type = other DNA
tggggacacagagatgg

SEQ ID NO: 19412 - DNA, 17 bp, synthetic construct
  misc_feature 1..17: note = Oligonucleotide
  source 1..17: mol_type = other DNA
aggtggggacacagaga

SEQ ID NO: 19413 - DNA, 17 bp, synthetic construct
  misc_feature 1..17: note = Oligonucleotide
  source 1..17: mol_type = other DNA
cagaggtggggacacag

SEQ ID NO: 19414 - DNA, 17 bp, synthetic construct
  misc_feature 1..17: note = Oligonucleotide
  source 1..17: mol_type = other DNA
tctcagaggtggggaca

SEQ ID NO: 19415 - DNA, 17 bp, synthetic construct
  misc_feature 1..17: note = Oligonucleotide
  source 1..17: mol_type = other DNA
aactctcagaggtgggg

SEQ ID NO: 19416 - DNA, 17 bp, synthetic construct
  misc_feature 1..17: note = Oligonucleotide
  source 1..17: mol_type = other DNA
ggaaactctcagaggtg

SEQ ID NO: 19417 - DNA, 17 bp, synthetic construct
  misc_feature 1..17: note = Oligonucleotide
  source 1..17: mol_type = other DNA
ctgggaaactctcagag

SEQ ID NO: 19418 - DNA, 17 bp, synthetic construct
  misc_feature 1..17: note = Oligonucleotide
  source 1..17: mol_type = other DNA
tcgctgggaaactctca

SEQ ID NO: 19419 - DNA, 17 bp, synthetic construct
  misc_feature 1..17: note = Oligonucleotide
  source 1..17: mol_type = other DNA
gagtcgctgggaaactc

SEQ ID NO: 19420 - DNA, 17 bp, synthetic construct
  misc_feature 1..17: note = Oligonucleotide
  source 1..17: mol_type = other DNA
gtggagtcgctgggaaa

SEQ ID NO: 19421 - DNA, 17 bp, synthetic construct
  misc_feature 1..17: note = Oligonucleotide
  source 1..17: mol_type = other DNA
ggggtggagtcgctggg

SEQ ID NO: 19422 - DNA, 17 bp, synthetic construct
  misc_feature 1..17: note = Oligonucleotide
  source 1..17: mol_type = other DNA
acaggggtggagtcgct

SEQ ID NO: 19423 - DNA, 17 bp, synthetic construct
  misc_feature 1..17: note = Oligonucleotide
  source 1..17: mol_type = other DNA
cgtacaggggtggagtc

SEQ ID NO: 19424 - DNA, 17 bp, synthetic construct
  misc_feature 1..17: note = Oligonucleotide
  source 1..17: mol_type = other DNA
ggccgtacaggggtgga

SEQ ID NO: 19425 - DNA, 17 bp, synthetic construct
  misc_feature 1..17: note = Oligonucleotide
  source 1..17: mol_type = other DNA
ccaggccgtacaggggt

SEQ ID NO: 19426 - DNA, 17 bp, synthetic construct
  misc_feature 1..17: note = Oligonucleotide
  source 1..17: mol_type = other DNA
ggtccaggccgtacagg

SEQ ID NO: 19427 - DNA, 17 bp, synthetic construct
  misc_feature 1..17: note = Oligonucleotide
  source 1..17: mol_type = other DNA
aggggtccaggccgtac

SEQ ID NO: 19428 - DNA, 17 bp, synthetic construct
  misc_feature 1..17: note = Oligonucleotide
  source 1..17: mol_type = other DNA
ggcaggggtccaggccg

SEQ ID NO: 19429 - DNA, 17 bp, synthetic construct
  misc_feature 1..17: note = Oligonucleotide
  source 1..17: mol_type = other DNA
cagggcaggggtccagg

SEQ ID NO: 19430 - DNA, 17 bp, synthetic construct
  misc_feature 1..17: note = Oligonucleotide
  source 1..17: mol_type = other DNA
gcacagggcaggggtcc

SEQ ID NO: 19431 - DNA, 17 bp, synthetic construct
  misc_feature 1..17: note = Oligonucleotide
  source 1..17: mol_type = other DNA
tcagcacagggcagggg

SEQ ID NO: 19432 - DNA, 17 bp, synthetic construct
  misc_feature 1..17: note = Oligonucleotide
  source 1..17: mol_type = other DNA
agctcagcacagggcag

SEQ ID NO: 19433 - DNA, 17 bp, synthetic construct
  misc_feature 1..17: note = Oligonucleotide
  source 1..17: mol_type = other DNA
ctgagctcagcacaggg

SEQ ID NO: 19434 - DNA, 17 bp, synthetic construct
  misc_feature 1..17: note = Oligonucleotide
  source 1..17: mol_type = other DNA
ctgctgagctcagcaca

SEQ ID NO: 19435 - DNA, 17 bp, synthetic construct
  misc_feature 1..17: note = Oligonucleotide
  source 1..17: mol_type = other DNA
cctctgctgagctcagc

SEQ ID NO: 19436 - DNA, 17 bp, synthetic construct
  misc_feature 1..17: note = Oligonucleotide
  source 1..17: mol_type = other DNA
gggcctctgctgagctc

SEQ ID NO: 19437 - DNA, 17 bp, synthetic construct
  misc_feature 1..17: note = Oligonucleotide
  source 1..17: mol_type = other DNA
cctgggcctctgctgag

SEQ ID NO: 19438 - DNA, 17 bp, synthetic construct
  misc_feature 1..17: note = Oligonucleotide
  source 1..17: mol_type = other DNA
ctccctgggcctctgct

SEQ ID NO: 19439 - DNA, 17 bp, synthetic construct
  misc_feature 1..17: note = Oligonucleotide
  source 1..17: mol_type = other DNA
tgcctccctgggcctct

SEQ ID NO: 19440 - DNA, 17 bp, synthetic construct
  misc_feature 1..17: note = Oligonucleotide
  source 1..17: mol_type = other DNA
tcctgcctccctgggcc

SEQ ID NO: 19441 - DNA, 17 bp, synthetic construct
  misc_feature 1..17: note = Oligonucleotide
  source 1..17: mol_type = other DNA
agctcctgcctccctgg

SEQ ID NO: 19442 - DNA, 17 bp, synthetic construct
  misc_feature 1..17: note = Oligonucleotide
  source 1..17: mol_type = other DNA
cgaagctcctgcctccc

SEQ ID NO: 19443 - DNA, 17 bp, synthetic construct
  misc_feature 1..17: note = Oligonucleotide
  source 1..17: mol_type = other DNA
tggcgaagctcctgcct

SEQ ID NO: 19444 - DNA, 17 bp, synthetic construct
  misc_feature 1..17: note = Oligonucleotide
  source 1..17: mol_type = other DNA
cagtggcgaagctcctg

SEQ ID NO: 19445 - DNA, 17 bp, synthetic construct
  misc_feature 1..17: note = Oligonucleotide
  source 1..17: mol_type = other DNA
ggtcagtggcgaagctc

SEQ ID NO: 19446 - DNA, 17 bp, synthetic construct
  misc_feature 1..17: note = Oligonucleotide
  source 1..17: mol_type = other DNA
aaaggtcagtggcgaag

SEQ ID NO: 19447 - DNA, 17 bp, synthetic construct
  misc_feature 1..17: note = Oligonucleotide
  source 1..17: mol_type = other DNA
ggaaaaggtcagtggcg

SEQ ID NO: 19448 - DNA, 17 bp, synthetic construct
  misc_feature 1..17: note = Oligonucleotide
  source 1..17: mol_type = other DNA
ccaggaaaaggtcagtg

SEQ ID NO: 19449 - DNA, 17 bp, synthetic construct
  misc_feature 1..17: note = Oligonucleotide
  source 1..17: mol_type = other DNA
ggcccaggaaaaggtca

SEQ ID NO: 19450 - DNA, 17 bp, synthetic construct
  misc_feature 1..17: note = Oligonucleotide
  source 1..17: mol_type = other DNA
accggcccaggaaaagg

SEQ ID NO: 19451 - DNA, 17 bp, synthetic construct
  misc_feature 1..17: note = Oligonucleotide
  source 1..17: mol_type = other DNA
ggcaccggcccaggaaa

SEQ ID NO: 19452 - DNA, 17 bp, synthetic construct
  misc_feature 1..17: note = Oligonucleotide
  source 1..17: mol_type = other DNA
aagggcaccggcccagg

SEQ ID NO: 19453 - DNA, 17 bp, synthetic construct
  misc_feature 1..17: note = Oligonucleotide
  source 1..17: mol_type = other DNA
ggaaagggcaccggccc

SEQ ID NO: 19454 - DNA, 17 bp, synthetic construct
  misc_feature 1..17: note = Oligonucleotide
  source 1..17: mol_type = other DNA
ggaggaaagggcaccgg

SEQ ID NO: 19455 - DNA, 17 bp, synthetic construct
  misc_feature 1..17: note = Oligonucleotide
  source 1..17: mol_type = other DNA
gaaggaggaaagggcac

SEQ ID NO: 19456 - DNA, 17 bp, synthetic construct
  misc_feature 1..17: note = Oligonucleotide
  source 1..17: mol_type = other DNA
aaggaaggaggaaaggg

SEQ ID NO: 19457 - DNA, 17 bp, synthetic construct
  misc_feature 1..17: note = Oligonucleotide
  source 1..17: mol_type = other DNA
gccaaggaaggaggaaa

SEQ ID NO: 19458 - DNA, 17 bp, synthetic construct
  misc_feature 1..17: note = Oligonucleotide
  source 1..17: mol_type = other DNA
aaggccaaggaaggagg

SEQ ID NO: 19459 - DNA, 17 bp, synthetic construct
  misc_feature 1..17: note = Oligonucleotide
  source 1..17: mol_type = other DNA
aacaaggccaaggaagg

SEQ ID NO: 19460 - DNA, 17 bp, synthetic construct
  misc_feature 1..17: note = Oligonucleotide
  source 1..17: mol_type = other DNA
cagaacaaggccaagga

SEQ ID NO: 19461 - DNA, 17 bp, synthetic construct
  misc_feature 1..17: note = Oligonucleotide
  source 1..17: mol_type = other DNA
aggcagaacaaggccaa

SEQ ID NO: 19462 - DNA, 17 bp, synthetic construct
  misc_feature 1..17: note = Oligonucleotide
  source 1..17: mol_type = other DNA
gcaaggcagaacaaggc

SEQ ID NO: 19463 - DNA, 17 bp, synthetic construct
  misc_feature 1..17: note = Oligonucleotide
  source 1..17: mol_type = other DNA
agagcaaggcagaacaa

SEQ ID NO: 19464 - DNA, 17 bp, synthetic construct
  misc_feature 1..17: note = Oligonucleotide
  source 1..17: mol_type = other DNA
gtcagagcaaggcagaa

SEQ ID NO: 19465 - DNA, 17 bp, synthetic construct
  misc_feature 1..17: note = Oligonucleotide
  source 1..17: mol_type = other DNA
ccagtcagagcaaggca

SEQ ID NO: 19466 - DNA, 17 bp, synthetic construct
  misc_feature 1..17: note = Oligonucleotide
  source 1..17: mol_type = other DNA
ccaccagtcagagcaag

SEQ ID NO: 19467 - DNA, 17 bp, synthetic construct
  misc_feature 1..17: note = Oligonucleotide
  source 1..17: mol_type = other DNA
aagccaccagtcagagc

SEQ ID NO: 19468 - DNA, 17 bp, synthetic construct
  misc_feature 1..17: note = Oligonucleotide
  source 1..17: mol_type = other DNA
tctaagccaccagtcag

SEQ ID NO: 19469 - DNA, 17 bp, synthetic construct
  misc_feature 1..17: note = Oligonucleotide
  source 1..17: mol_type = other DNA
cactctaagccaccagt

SEQ ID NO: 19470 - DNA, 17 bp, synthetic construct
  misc_feature 1..17: note = Oligonucleotide
  source 1..17: mol_type = other DNA
ccacactctaagccacc

SEQ ID NO: 19471 - DNA, 17 bp, synthetic construct
  misc_feature 1..17: note = Oligonucleotide
  source 1..17: mol_type = other DNA
cttccacactctaagcc

SEQ ID NO: 19472 - DNA, 17 bp, synthetic construct
  misc_feature 1..17: note = Oligonucleotide
  source 1..17: mol_type = other DNA
tcccttccacactctaa

SEQ ID NO: 19473 - DNA, 17 bp, synthetic construct
  misc_feature 1..17: note = Oligonucleotide
  source 1..17: mol_type = other DNA
aagtcccttccacactc

SEQ ID NO: 19474 - DNA, 17 bp, synthetic construct
  misc_feature 1..17: note = Oligonucleotide
  source 1..17: mol_type = other DNA
gccaagtcccttccaca

SEQ ID NO: 19475 - DNA, 17 bp, synthetic construct
  misc_feature 1..17: note = Oligonucleotide
  source 1..17: mol_type = other DNA
ggggccaagtcccttcc

SEQ ID NO: 19476 - DNA, 17 bp, synthetic construct
  misc_feature 1..17: note = Oligonucleotide
  source 1..17: mol_type = other DNA
cagggggccaagtccct

SEQ ID NO: 19477 - DNA, 17 bp, synthetic construct
  misc_feature 1..17: note = Oligonucleotide
  source 1..17: mol_type = other DNA
gaacagggggccaagtc

SEQ ID NO: 19478 - DNA, 17 bp, synthetic construct
  misc_feature 1..17: note = Oligonucleotide
  source 1..17: mol_type = other DNA
tgagaacagggggccaa

SEQ ID NO: 19479 - DNA, 17 bp, synthetic construct
  misc_feature 1..17: note = Oligonucleotide
  source 1..17: mol_type = other DNA
ggctgagaacagggggc

SEQ ID NO: 19480 - DNA, 17 bp, synthetic construct
  misc_feature 1..17: note = Oligonucleotide
  source 1..17: mol_type = other DNA
gcgggctgagaacaggg

SEQ ID NO: 19481 - DNA, 17 bp, synthetic construct
  misc_feature 1..17: note = Oligonucleotide
  source 1..17: mol_type = other DNA
tccgcgggctgagaaca

SEQ ID NO: 19482 - DNA, 17 bp, synthetic construct
  misc_feature 1..17: note = Oligonucleotide
  source 1..17: mol_type = other DNA
ccctccgcgggctgaga

SEQ ID NO: 19483 - DNA, 17 bp, synthetic construct
  misc_feature 1..17: note = Oligonucleotide
  source 1..17: mol_type = other DNA
ccaccctccgcgggctg

SEQ ID NO: 19484 - DNA, 17 bp, synthetic construct
  misc_feature 1..17: note = Oligonucleotide
  source 1..17: mol_type = other DNA
tatccaccctccgcggg

SEQ ID NO: 19485 - DNA, 17 bp, synthetic construct
  misc_feature 1..17: note = Oligonucleotide
  source 1..17: mol_type = other DNA
ccctatccaccctccgc

SEQ ID NO: 19486 - DNA, 17 bp, synthetic construct
  misc_feature 1..17: note = Oligonucleotide
  source 1..17: mol_type = other DNA
ctgccctatccaccctc

SEQ ID NO: 19487 - DNA, 17 bp, synthetic construct
  misc_feature 1..17: note = Oligonucleotide
  source 1..17: mol_type = other DNA
accctgccctatccacc

SEQ ID NO: 19488 - DNA, 17 bp, synthetic construct
  misc_feature 1..17: note = Oligonucleotide
  source 1..17: mol_type = other DNA
tggaccctgccctatcc

SEQ ID NO: 19489 - DNA, 17 bp, synthetic construct
  misc_feature 1..17: note = Oligonucleotide
  source 1..17: mol_type = other DNA
atctggaccctgcccta

SEQ ID NO: 19490 - DNA, 17 bp, synthetic construct
  misc_feature 1..17: note = Oligonucleotide
  source 1..17: mol_type = other DNA
cccatctggaccctgcc

SEQ ID NO: 19491 - DNA, 17 bp, synthetic construct
  misc_feature 1..17: note = Oligonucleotide
  source 1..17: mol_type = other DNA
tttcccatctggaccct

SEQ ID NO: 19492 - DNA, 17 bp, synthetic construct
  misc_feature 1..17: note = Oligonucleotide
  source 1..17: mol_type = other DNA
ccatttcccatctggac

SEQ ID NO: 19493 - DNA, 17 bp, synthetic construct
  misc_feature 1..17: note = Oligonucleotide
  source 1..17: mol_type = other DNA
aaaccatttcccatctg

SEQ ID NO: 19494 - DNA, 17 bp, synthetic construct
  misc_feature 1..17: note = Oligonucleotide
  source 1..17: mol_type = other DNA
ctgaaaccatttcccat

SEQ ID NO: 19495 - DNA, 17 bp, synthetic construct
  misc_feature 1..17: note = Oligonucleotide
  source 1..17: mol_type = other DNA
tctctgaaaccatttcc

SEQ ID NO: 19496 - DNA, 17 bp, synthetic construct
  misc_feature 1..17: note = Oligonucleotide
  source 1..17: mol_type = other DNA
aaatctctgaaaccatt

SEQ ID NO: 19497 - DNA, 17 bp, synthetic construct
  misc_feature 1..17: note = Oligonucleotide
  source 1..17: mol_type = other DNA
cccaaatctctgaaacc

SEQ ID NO: 19498 - DNA, 17 bp, synthetic construct
  misc_feature 1..17: note = Oligonucleotide
  source 1..17: mol_type = other DNA
gggcccaaatctctgaa

SEQ ID NO: 19499 - DNA, 17 bp, synthetic construct
  misc_feature 1..17: note = Oligonucleotide
  source 1..17: mol_type = other DNA
ccagggcccaaatctct

SEQ ID NO: 19500 - DNA, 17 bp, synthetic construct
  misc_feature 1..17: note = Oligonucleotide
  source 1..17: mol_type = other DNA
gaaccagggcccaaatc

SEQ ID NO: 19501 - DNA, 17 bp, synthetic construct
  misc_feature 1..17: note = Oligonucleotide
  source 1..17: mol_type = other DNA
tctgaaccagggcccaa

SEQ ID NO: 19502 - DNA, 17 bp, synthetic construct
  misc_feature 1..17: note = Oligonucleotide
  source 1..17: mol_type = other DNA
ctgtctgaaccagggcc

SEQ ID NO: 19503 - DNA, 17 bp, synthetic construct
  misc_feature 1..17: note = Oligonucleotide
  source 1..17: mol_type = other DNA
atactgtctgaaccagg

SEQ ID NO: 19504 - DNA, 17 bp, synthetic construct
  misc_feature 1..17: note = Oligonucleotide
  source 1..17: mol_type = other DNA
cccatactgtctgaacc

SEQ ID NO: 19505 - DNA, 17 bp, synthetic construct
  misc_feature 1..17: note = Oligonucleotide
  source 1..17: mol_type = other DNA
tctcccatactgtctga

SEQ ID NO: 19506 - DNA, 17 bp, synthetic construct
  misc_feature 1..17: note = Oligonucleotide
  source 1..17: mol_type = other DNA
ccctctcccatactgtc

SEQ ID NO: 19507 - DNA, 17 bp, synthetic construct
  misc_feature 1..17: note = Oligonucleotide
  source 1..17: mol_type = other DNA
ctcccctctcccatact

SEQ ID NO: 19508 - DNA, 17 bp, synthetic construct
  misc_feature 1..17: note = Oligonucleotide
  source 1..17: mol_type = other DNA
cccctcccctctcccat

SEQ ID NO: 19509 - DNA, 17 bp, synthetic construct
  misc_feature 1..17: note = Oligonucleotide
  source 1..17: mol_type = other DNA
cttcccctcccctctcc

SEQ ID NO: 19510 - DNA, 17 bp, synthetic construct
  misc_feature 1..17: note = Oligonucleotide
  source 1..17: mol_type = other DNA
ctccttcccctcccctc

SEQ ID NO: 19511 - DNA, 17 bp, synthetic construct
  misc_feature 1..17: note = Oligonucleotide
  source 1..17: mol_type = other DNA
cctctccttcccctccc

SEQ ID NO: 19512 - DNA, 17 bp, synthetic construct
  misc_feature 1..17: note = Oligonucleotide
  source 1..17: mol_type = other DNA
ctacctctccttcccct

SEQ ID NO: 19513 - DNA, 17 bp, synthetic construct
  misc_feature 1..17: note = Oligonucleotide
  source 1..17: mol_type = other DNA
cccctacctctccttcc

SEQ ID NO: 19514 - DNA, 17 bp, synthetic construct
  misc_feature 1..17: note = Oligonucleotide
  source 1..17: mol_type = other DNA
atccccctacctctcct

SEQ ID NO: 19515 - DNA, 17 bp, synthetic construct
  misc_feature 1..17: note = Oligonucleotide
  source 1..17: mol_type = other DNA
tggatccccctacctct

SEQ ID NO: 19516 - DNA, 17 bp, synthetic construct
  misc_feature 1..17: note = Oligonucleotide
  source 1..17: mol_type = other DNA
gtgtggatccccctacc

SEQ ID NO: 19517 - DNA, 17 bp, synthetic construct
  misc_feature 1..17: note = Oligonucleotide
  source 1..17: mol_type = other DNA
caggtgtggatccccct

SEQ ID NO: 19518 - DNA, 17 bp, synthetic construct
  misc_feature 1..17: note = Oligonucleotide
  source 1..17: mol_type = other DNA
ccacaggtgtggatccc

SEQ ID NO: 19519 - DNA, 17 bp, synthetic construct
  misc_feature 1..17: note = Oligonucleotide
  source 1..17: mol_type = other DNA
ccgccacaggtgtggat

SEQ ID NO: 19520 - DNA, 17 bp, synthetic construct
  misc_feature 1..17: note = Oligonucleotide
  source 1..17: mol_type = other DNA
ctcccgccacaggtgtg

SEQ ID NO: 19521 - DNA, 17 bp, synthetic construct
  misc_feature 1..17: note = Oligonucleotide
  source 1..17: mol_type = other DNA
ccgctcccgccacaggt

SEQ ID NO: 19522 - DNA, 17 bp, synthetic construct
  misc_feature 1..17: note = Oligonucleotide
  source 1..17: mol_type = other DNA
gacccgctcccgccaca

SEQ ID NO: 19523 - DNA, 17 bp, synthetic construct
  misc_feature 1..17: note = Oligonucleotide
  source 1..17: mol_type = other DNA
caagacccgctcccgcc

SEQ ID NO: 19524 - DNA, 17 bp, synthetic construct
  misc_feature 1..17: note = Oligonucleotide
  source 1..17: mol_type = other DNA
gctcaagacccgctccc

SEQ ID NO: 19525 - DNA, 17 bp, synthetic construct
  misc_feature 1..17: note = Oligonucleotide
  source 1..17: mol_type = other DNA
ggagctcaagacccgct

SEQ ID NO: 19526 - DNA, 17 bp, synthetic construct
  misc_feature 1..17: note = Oligonucleotide
  source 1..17: mol_type = other DNA
gggggagctcaagaccc

SEQ ID NO: 19527 - DNA, 17 bp, synthetic construct
  misc_feature 1..17: note = Oligonucleotide
  source 1..17: mol_type = other DNA
cgtgggggagctcaaga

SEQ ID NO: 19528 - DNA, 17 bp, synthetic construct
  misc_feature 1..17: note = Oligonucleotide
  source 1..17: mol_type = other DNA
ccacgtgggggagctca

SEQ ID NO: 19529 - DNA, 17 bp, synthetic construct
  misc_feature 1..17: note = Oligonucleotide
  source 1..17: mol_type = other DNA
ccaccacgtgggggagc

SEQ ID NO: 19530 - DNA, 17 bp, synthetic construct
  misc_feature 1..17: note = Oligonucleotide
  source 1..17: mol_type = other DNA
tcaccaccacgtggggg

SEQ ID NO: 19531 - DNA, 17 bp, synthetic construct
  misc_feature 1..17: note = Oligonucleotide
  source 1..17: mol_type = other DNA
tcctcaccaccacgtgg

SEQ ID NO: 19532 - DNA, 17 bp, synthetic construct
  misc_feature 1..17: note = Oligonucleotide
  source 1..17: mol_type = other DNA
ccttcctcaccaccacg

SEQ ID NO: 19533 - DNA, 17 bp, synthetic construct
  misc_feature 1..17: note = Oligonucleotide
  source 1..17: mol_type = other DNA
gaaccttcctcaccacc

SEQ ID NO: 19534 - DNA, 17 bp, synthetic construct
  misc_feature 1..17: note = Oligonucleotide
  source 1..17: mol_type = other DNA
ccagaaccttcctcacc

SEQ ID NO: 19535 - DNA, 17 bp, synthetic construct
  misc_feature 1..17: note = Oligonucleotide
  source 1..17: mol_type = other DNA
aaaccagaaccttcctc

SEQ ID NO: 19536 - DNA, 17 bp, synthetic construct
  misc_feature 1..17: note = Oligonucleotide
  source 1..17: mol_type = other DNA
ctcaaaccagaaccttc

SEQ ID NO: 19537 - DNA, 17 bp, synthetic construct
  misc_feature 1..17: note = Oligonucleotide
  source 1..17: mol_type = other DNA
gtcctcaaaccagaacc

SEQ ID NO: 19538 - DNA, 17 bp, synthetic construct
  misc_feature 1..17: note = Oligonucleotide
  source 1..17: mol_type = other DNA
acagtcctcaaaccaga

SEQ ID NO: 19539 - DNA, 17 bp, synthetic construct
  misc_feature 1..17: note = Oligonucleotide
  source 1..17: mol_type = other DNA
cacacagtcctcaaacc

SEQ ID NO: 19540 - DNA, 17 bp, synthetic construct
  misc_feature 1..17: note = Oligonucleotide
  source 1..17: mol_type = other DNA
ctccacacagtcctcaa

SEQ ID NO: 19541 - DNA, 17 bp, synthetic construct
  misc_feature 1..17: note = Oligonucleotide
  source 1..17: mol_type = other DNA
tcactccacacagtcct

SEQ ID NO: 19542 - DNA, 17 bp, synthetic construct
  misc_feature 1..17: note = Oligonucleotide
  source 1..17: mol_type = other DNA
ccctcactccacacagt

SEQ ID NO: 19543 - DNA, 17 bp, synthetic construct
  misc_feature 1..17: note = Oligonucleotide
  source 1..17: mol_type = other DNA
tgcccctcactccacac

SEQ ID NO: 19544 - DNA, 17 bp, synthetic construct
  misc_feature 1..17: note = Oligonucleotide
  source 1..17: mol_type = other DNA
aaatgcccctcactcca

SEQ ID NO: 19545 - DNA, 17 bp, synthetic construct
  misc_feature 1..17: note = Oligonucleotide
  source 1..17: mol_type = other DNA
tccaaatgcccctcact

SEQ ID NO: 19546 - DNA, 17 bp, synthetic construct
  misc_feature 1..17: note = Oligonucleotide
  source 1..17: mol_type = other DNA
aggtccaaatgcccctc

SEQ ID NO: 19547 - DNA, 17 bp, synthetic construct
  misc_feature 1..17: note = Oligonucleotide
  source 1..17: mol_type = other DNA
cgtaggtccaaatgccc

SEQ ID NO: 19548 - DNA, 17 bp, synthetic construct
  misc_feature 1..17: note = Oligonucleotide
  source 1..17: mol_type = other DNA
agacgtaggtccaaatg

SEQ ID NO: 19549 - DNA, 17 bp, synthetic construct
  misc_feature 1..17: note = Oligonucleotide
  source 1..17: mol_type = other DNA
ttcagacgtaggtccaa

SEQ ID NO: 19550 - DNA, 17 bp, synthetic construct
  misc_feature 1..17: note = Oligonucleotide
  source 1..17: mol_type = other DNA
agcttcagacgtaggtc

SEQ ID NO: 19551 - DNA, 17 bp, synthetic construct
  misc_feature 1..17: note = Oligonucleotide
  source 1..17: mol_type = other DNA
gtcagcttcagacgtag

SEQ ID NO: 19552 - DNA, 17 bp, synthetic construct
  misc_feature 1..17: note = Oligonucleotide
  source 1..17: mol_type = other DNA
cccgtcagcttcagacg

SEQ ID NO: 19553 - DNA, 17 bp, synthetic construct
  misc_feature 1..17: note = Oligonucleotide
  source 1..17: mol_type = other DNA
ctccccgtcagcttcag

SEQ ID NO: 19554 - DNA, 17 bp, synthetic construct
  misc_feature 1..17: note = Oligonucleotide
  source 1..17: mol_type = other DNA
tccctccccgtcagctt

SEQ ID NO: 19555 - DNA, 17 bp, synthetic construct
  misc_feature 1..17: note = Oligonucleotide
  source 1..17: mol_type = other DNA
ccctccctccccgtcag

SEQ ID NO: 19556 - DNA, 17 bp, synthetic construct
  misc_feature 1..17: note = Oligonucleotide
  source 1..17: mol_type = other DNA
cccccctccctccccgt

SEQ ID NO: 19557 - DNA, 17 bp, synthetic construct
  misc_feature 1..17: note = Oligonucleotide
  source 1..17: mol_type = other DNA
aaacccccctccctccc

SEQ ID NO: 19558 - DNA, 17 bp, synthetic construct
  misc_feature 1..17: note = Oligonucleotide
  source 1..17: mol_type = other DNA
cctaaacccccctccct

SEQ ID NO: 19559 - DNA, 17 bp, synthetic construct
  misc_feature 1..17: note = Oligonucleotide
  source 1..17: mol_type = other DNA
cagcctaaacccccctc

SEQ ID NO: 19560 - DNA, 17 bp, synthetic construct
  misc_feature 1..17: note = Oligonucleotide
  source 1..17: mol_type = other DNA
ctccagcctaaaccccc

SEQ ID NO: 19561 - DNA, 17 bp, synthetic construct
  misc_feature 1..17: note = Oligonucleotide
  source 1..17: mol_type = other DNA
tgactccagcctaaacc

SEQ ID NO: 19562 - DNA, 17 bp, synthetic construct
  misc_feature 1..17: note = Oligonucleotide
  source 1..17: mol_type = other DNA
ttctgactccagcctaa

SEQ ID NO: 19563 - DNA, 17 bp, synthetic construct
  misc_feature 1..17: note = Oligonucleotide
  source 1..17: mol_type = other DNA
caattctgactccagcc

SEQ ID NO: 19564 - DNA, 17 bp, synthetic construct
  misc_feature 1..17: note = Oligonucleotide
  source 1..17: mol_type = other DNA
ctccaattctgactcca

SEQ ID NO: 19565 - DNA, 17 bp, synthetic construct
  misc_feature 1..17: note = Oligonucleotide
  source 1..17: mol_type = other DNA
gctctccaattctgact

SEQ ID NO: 19566 - DNA, 17 bp, synthetic construct
  misc_feature 1..17: note = Oligonucleotide
  source 1..17: mol_type = other DNA
gctgctctccaattctg

SEQ ID NO: 19567 - DNA, 17 bp, synthetic construct
  misc_feature 1..17: note = Oligonucleotide
  source 1..17: mol_type = other DNA
tttgctgctctccaatt

SEQ ID NO: 19568 - DNA, 17 bp, synthetic construct
  misc_feature 1..17: note = Oligonucleotide
  source 1..17: mol_type = other DNA
acatttgctgctctcca

SEQ ID NO: 19569 - DNA, 17 bp, synthetic construct
  misc_feature 1..17: note = Oligonucleotide
  source 1..17: mol_type = other DNA
aaaacatttgctgctct

SEQ ID NO: 19570 - DNA, 17 bp, synthetic construct
  misc_feature 1..17: note = Oligonucleotide
  source 1..17: mol_type = other DNA
taaaaaacatttgctgc

SEQ ID NO: 19571 - DNA, 17 bp, synthetic construct
  misc_feature 1..17: note = Oligonucleotide
  source 1..17: mol_type = other DNA
acctaaaaaacatttgc

SEQ ID NO: 19572 - DNA, 17 bp, synthetic construct
  misc_feature 1..17: note = Oligonucleotide
  source 1..17: mol_type = other DNA
aacacctaaaaaacatt

SEQ ID NO: 19573 - DNA, 17 bp, synthetic construct
  misc_feature 1..17: note = Oligonucleotide
  source 1..17: mol_type = other DNA
acaaacacctaaaaaac

SEQ ID NO: 19574 - DNA, 17 bp, synthetic construct
  misc_feature 1..17: note = Oligonucleotide
  source 1..17: mol_type = other DNA
atgacaaacacctaaaa

SEQ ID NO: 19575 - DNA, 17 bp, synthetic construct
  misc_feature 1..17: note = Oligonucleotide
  source 1..17: mol_type = other DNA
cacatgacaaacaccta

SEQ ID NO: 19576 - DNA, 17 bp, synthetic construct
  misc_feature 1..17: note = Oligonucleotide
  source 1..17: mol_type = other DNA
cagcacatgacaaacac

SEQ ID NO: 19577 - DNA, 17 bp, synthetic construct
  misc_feature 1..17: note = Oligonucleotide
  source 1..17: mol_type = other DNA
gcccagcacatgacaaa

SEQ ID NO: 19578 - DNA, 17 bp, synthetic construct
  misc_feature 1..17: note = Oligonucleotide
  source 1..17: mol_type = other DNA
agggcccagcacatgac

SEQ ID NO: 19579 - DNA, 17 bp, synthetic construct
  misc_feature 1..17: note = Oligonucleotide
  source 1..17: mol_type = other DNA
cacagggcccagcacat

SEQ ID NO: 19580 - DNA, 17 bp, synthetic construct
  misc_feature 1..17: note = Oligonucleotide
  source 1..17: mol_type = other DNA
cagcacagggcccagca

SEQ ID NO: 19581 - DNA, 17 bp, synthetic construct
  misc_feature 1..17: note = Oligonucleotide
  source 1..17: mol_type = other DNA
tcccagcacagggccca

SEQ ID NO: 19582 - DNA, 17 bp, synthetic construct
  misc_feature 1..17: note = Oligonucleotide
  source 1..17: mol_type = other DNA
ggctcccagcacagggc

SEQ ID NO: 19583 - DNA, 17 bp, synthetic construct
  misc_feature 1..17: note = Oligonucleotide
  source 1..17: mol_type = other DNA
cccggctcccagcacag

SEQ ID NO: 19584 - DNA, 17 bp, synthetic construct
  misc_feature 1..17: note = Oligonucleotide
  source 1..17: mol_type = other DNA
gatcccggctcccagca

SEQ ID NO: 19585 - DNA, 17 bp, synthetic construct
  misc_feature 1..17: note = Oligonucleotide
  source 1..17: mol_type = other DNA
cgtgatcccggctccca

SEQ ID NO: 19586 - DNA, 17 bp, synthetic construct
  misc_feature 1..17: note = Oligonucleotide
  source 1..17: mol_type = other DNA
ctccgtgatcccggctc

SEQ ID NO: 19587 - DNA, 17 bp, synthetic construct
  misc_feature 1..17: note = Oligonucleotide
  source 1..17: mol_type = other DNA
agcctccgtgatcccgg

SEQ ID NO: 19588 - DNA, 17 bp, synthetic construct
  misc_feature 1..17: note = Oligonucleotide
  source 1..17: mol_type = other DNA
ctgagcctccgtgatcc

SEQ ID NO: 19589 - DNA, 17 bp, synthetic construct
  misc_feature 1..17: note = Oligonucleotide
  source 1..17: mol_type = other DNA
cagctgagcctccgtga

SEQ ID NO: 19590 - DNA, 17 bp, synthetic construct
  misc_feature 1..17: note = Oligonucleotide
  source 1..17: mol_type = other DNA
ttccagctgagcctccg

SEQ ID NO: 19591 - DNA, 17 bp, synthetic construct
  misc_feature 1..17: note = Oligonucleotide
  source 1..17: mol_type = other DNA
ggcttccagctgagcct

SEQ ID NO: 19592 - DNA, 17 bp, synthetic construct
  misc_feature 1..17: note = Oligonucleotide
  source 1..17: mol_type = other DNA
caaggcttccagctgag

SEQ ID NO: 19593 - DNA, 17 bp, synthetic construct
  misc_feature 1..17: note = Oligonucleotide
  source 1..17: mol_type = other DNA
ccacaaggcttccagct

SEQ ID NO: 19594 - DNA, 17 bp, synthetic construct
  misc_feature 1..17: note = Oligonucleotide
  source 1..17: mol_type = other DNA
ctcccacaaggcttcca

SEQ ID NO: 19595 - DNA, 17 bp, synthetic construct
  misc_feature 1..17: note = Oligonucleotide
  source 1..17: mol_type = other DNA
ctgctcccacaaggctt

SEQ ID NO: 19596 - DNA, 17 bp, synthetic construct
  misc_feature 1..17: note = Oligonucleotide
  source 1..17: mol_type = other DNA
ccactgctcccacaagg

SEQ ID NO: 19597 - DNA, 17 bp, synthetic construct
  misc_feature 1..17: note = Oligonucleotide
  source 1..17: mol_type = other DNA
cagccactgctcccaca

SEQ ID NO: 19598 - DNA, 17 bp, synthetic construct
  misc_feature 1..17: note = Oligonucleotide
  source 1..17: mol_type = other DNA
tcacagccactgctccc

SEQ ID NO: 19599 - DNA, 17 bp, synthetic construct
  misc_feature 1..17: note = Oligonucleotide
  source 1..17: mol_type = other DNA
ccgtcacagccactgct

SEQ ID NO: 19600 - DNA, 17 bp, synthetic construct
  misc_feature 1..17: note = Oligonucleotide
  source 1..17: mol_type = other DNA
cccccgtcacagccact

SEQ ID NO: 19601 - DNA, 17 bp, synthetic construct
  misc_feature 1..17: note = Oligonucleotide
  source 1..17: mol_type = other DNA
cggcccccgtcacagcc

SEQ ID NO: 19602 - DNA, 17 bp, synthetic construct
  misc_feature 1..17: note = Oligonucleotide
  source 1..17: mol_type = other DNA
acacggcccccgtcaca

SEQ ID NO: 19603 - DNA, 17 bp, synthetic construct
  misc_feature 1..17: note = Oligonucleotide
  source 1..17: mol_type = other DNA
ctcacacggcccccgtc

SEQ ID NO: 19604 - DNA, 17 bp, synthetic construct
  misc_feature 1..17: note = Oligonucleotide
  source 1..17: mol_type = other DNA
acgctcacacggccccc

SEQ ID NO: 19605 - DNA, 17 bp, synthetic construct
  misc_feature 1..17: note = Oligonucleotide
  source 1..17: mol_type = other DNA
cccacgctcacacggcc

SEQ ID NO: 19606 - DNA, 17 bp, synthetic construct
  misc_feature 1..17: note = Oligonucleotide
  source 1..17: mol_type = other DNA
gctcccacgctcacacg

SEQ ID NO: 19607 - DNA, 17 bp, synthetic construct
  misc_feature 1..17: note = Oligonucleotide
  source 1..17: mol_type = other DNA
ggagctcccacgctcac

SEQ ID NO: 19608 - DNA, 17 bp, synthetic construct
  misc_feature 1..17: note = Oligonucleotide
  source 1..17: mol_type = other DNA
cagggagctcccacgct

SEQ ID NO: 19609 - DNA, 17 bp, synthetic construct
  misc_feature 1..17: note = Oligonucleotide
  source 1..17: mol_type = other DNA
gcccagggagctcccac

SEQ ID NO: 19610 - DNA, 17 bp, synthetic construct
  misc_feature 1..17: note = Oligonucleotide
  source 1..17: mol_type = other DNA
ccagcccagggagctcc

SEQ ID NO: 19611 - DNA, 17 bp, synthetic construct
  misc_feature 1..17: note = Oligonucleotide
  source 1..17: mol_type = other DNA
aggccagcccagggagc

SEQ ID NO: 19612 - DNA, 17 bp, synthetic construct
  misc_feature 1..17: note = Oligonucleotide
  source 1..17: mol_type = other DNA
ttcaggccagcccaggg

SEQ ID NO: 19613 - DNA, 17 bp, synthetic construct
  misc_feature 1..17: note = Oligonucleotide
  source 1..17: mol_type = other DNA
tccttcaggccagccca

SEQ ID NO: 19614 - DNA, 17 bp, synthetic construct
  misc_feature 1..17: note = Oligonucleotide
  source 1..17: mol_type = other DNA
gactccttcaggccagc

SEQ ID NO: 19615 - DNA, 17 bp, synthetic construct
  misc_feature 1..17: note = Oligonucleotide
  source 1..17: mol_type = other DNA
tctgactccttcaggcc

SEQ ID NO: 19616 - DNA, 17 bp, synthetic construct
  misc_feature 1..17: note = Oligonucleotide
  source 1..17: mol_type = other DNA
ctctctgactccttcag

SEQ ID NO: 19617 - DNA, 17 bp, synthetic construct
  misc_feature 1..17: note = Oligonucleotide
  source 1..17: mol_type = other DNA
gccctctctgactcctt

SEQ ID NO: 19618 - DNA, 17 bp, synthetic construct
  misc_feature 1..17: note = Oligonucleotide
  source 1..17: mol_type = other DNA
gaggccctctctgactc

SEQ ID NO: 19619 - DNA, 17 bp, synthetic construct
  misc_feature 1..17: note = Oligonucleotide
  source 1..17: mol_type = other DNA
tttgaggccctctctga

SEQ ID NO: 19620 - DNA, 17 bp, synthetic construct
  misc_feature 1..17: note = Oligonucleotide
  source 1..17: mol_type = other DNA
tgttttgaggccctctc

SEQ ID NO: 19621 - DNA, 17 bp, synthetic construct
  misc_feature 1..17: note = Oligonucleotide
  source 1..17: mol_type = other DNA
ctctgttttgaggccct

SEQ ID NO: 19622 - DNA, 17 bp, synthetic construct
  misc_feature 1..17: note = Oligonucleotide
  source 1..17: mol_type = other DNA
tgcctctgttttgaggc

SEQ ID NO: 19623 - DNA, 17 bp, synthetic construct
  misc_feature 1..17: note = Oligonucleotide
  source 1..17: mol_type = other DNA
caatgcctctgttttga

SEQ ID NO: 19624 - DNA, 17 bp, synthetic construct
  misc_feature 1..17: note = Oligonucleotide
  source 1..17: mol_type = other DNA
agacaatgcctctgttt

SEQ ID NO: 19625 - DNA, 17 bp, synthetic construct
  misc_feature 1..17: note = Oligonucleotide
  source 1..17: mol_type = other DNA
ctcagacaatgcctctg

SEQ ID NO: 19626 - DNA, 17 bp, synthetic construct
  misc_feature 1..17: note = Oligonucleotide
  source 1..17: mol_type = other DNA
cagctcagacaatgcct

SEQ ID NO: 19627 - DNA, 17 bp, synthetic construct
  misc_feature 1..17: note = Oligonucleotide
  source 1..17: mol_type = other DNA
actcagctcagacaatg

SEQ ID NO: 19628 - DNA, 17 bp, synthetic construct
  misc_feature 1..17: note = Oligonucleotide
  source 1..17: mol_type = other DNA
aggactcagctcagaca

SEQ ID NO: 19629 - DNA, 17 bp, synthetic construct
  misc_feature 1..17: note = Oligonucleotide
  source 1..17: mol_type = other DNA
tagaggactcagctcag

SEQ ID NO: 19630 - DNA, 17 bp, synthetic construct
  misc_feature 1..17: note = Oligonucleotide
  source 1..17: mol_type = other DNA
acctagaggactcagct

SEQ ID NO: 19631 - DNA, 17 bp, synthetic construct
  misc_feature 1..17: note = Oligonucleotide
  source 1..17: mol_type = other DNA
accacctagaggactca

SEQ ID NO: 19632 - DNA, 17 bp, synthetic construct
  misc_feature 1..17: note = Oligonucleotide
  source 1..17: mol_type = other DNA
ctgaccacctagaggac

SEQ ID NO: 19633 - DNA, 17 bp, synthetic construct
  misc_feature 1..17: note = Oligonucleotide
  source 1..17: mol_type = other DNA
ccgctgaccacctagag

SEQ ID NO: 19634 - DNA, 17 bp, synthetic construct
  misc_feature 1..17: note = Oligonucleotide
  source 1..17: mol_type = other DNA
cagccgctgaccaccta

SEQ ID NO: 19635 - DNA, 17 bp, synthetic construct
  misc_feature 1..17: note = Oligonucleotide
  source 1..17: mol_type = other DNA
ccccagccgctgaccac

SEQ ID NO: 19636 - DNA, 17 bp, synthetic construct
  misc_feature 1..17: note = Oligonucleotide
  source 1..17: mol_type = other DNA
cagccccagccgctgac

SEQ ID NO: 19637 - DNA, 17 bp, synthetic construct
  misc_feature 1..17: note = Oligonucleotide
  source 1..17: mol_type = other DNA
cctcagccccagccgct

SEQ ID NO: 19638 - DNA, 17 bp, synthetic construct
  misc_feature 1..17: note = Oligonucleotide
  source 1..17: mol_type = other DNA
tcccctcagccccagcc

SEQ ID NO: 19639 - DNA, 17 bp, synthetic construct
  misc_feature 1..17: note = Oligonucleotide
  source 1..17: mol_type = other DNA
ctgtcccctcagcccca

SEQ ID NO: 19640 - DNA, 17 bp, synthetic construct
  misc_feature 1..17: note = Oligonucleotide
  source 1..17: mol_type = other DNA
cggctgtcccctcagcc

SEQ ID NO: 19641 - DNA, 17 bp, synthetic construct
  misc_feature 1..17: note = Oligonucleotide
  source 1..17: mol_type = other DNA
acacggctgtcccctca

SEQ ID NO: 19642 - DNA, 17 bp, synthetic construct
  misc_feature 1..17: note = Oligonucleotide
  source 1..17: mol_type = other DNA
cacacacggctgtcccc

SEQ ID NO: 19643 - DNA, 17 bp, synthetic construct
  misc_feature 1..17: note = Oligonucleotide
  source 1..17: mol_type = other DNA
ctgcacacacggctgtc

SEQ ID NO: 19644 - DNA, 17 bp, synthetic construct
  misc_feature 1..17: note = Oligonucleotide
  source 1..17: mol_type = other DNA
accctgcacacacggct

SEQ ID NO: 19645 - DNA, 17 bp, synthetic construct
  misc_feature 1..17: note = Oligonucleotide
  source 1..17: mol_type = other DNA
cggaccctgcacacacg

SEQ ID NO: 19646 - DNA, 17 bp, synthetic construct
  misc_feature 1..17: note = Oligonucleotide
  source 1..17: mol_type = other DNA
acacggaccctgcacac

SEQ ID NO: 19647 - DNA, 17 bp, synthetic construct
  misc_feature 1..17: note = Oligonucleotide
  source 1..17: mol_type = other DNA
gccacacggaccctgca

SEQ ID NO: 19648 - DNA, 17 bp, synthetic construct
  misc_feature 1..17: note = Oligonucleotide
  source 1..17: mol_type = other DNA
agcgccacacggaccct

SEQ ID NO: 19649 - DNA, 17 bp, synthetic construct
  misc_feature 1..17: note = Oligonucleotide
  source 1..17: mol_type = other DNA
tagagcgccacacggac

SEQ ID NO: 19650 - DNA, 17 bp, synthetic construct
  misc_feature 1..17: note = Oligonucleotide
  source 1..17: mol_type = other DNA
ctgtagagcgccacacg

SEQ ID NO: 19651 - DNA, 17 bp, synthetic construct
  misc_feature 1..17: note = Oligonucleotide
  source 1..17: mol_type = other DNA
cagctgtagagcgccac

SEQ ID NO: 19652 - DNA, 17 bp, synthetic construct
  misc_feature 1..17: note = Oligonucleotide
  source 1..17: mol_type = other DNA
acacagctgtagagcgc

SEQ ID NO: 19653 - DNA, 17 bp, synthetic construct
  misc_feature 1..17: note = Oligonucleotide
  source 1..17: mol_type = other DNA
gacacacagctgtagag

SEQ ID NO: 19654 - DNA, 17 bp, synthetic construct
  misc_feature 1..17: note = Oligonucleotide
  source 1..17: mol_type = other DNA
gctgacacacagctgta

SEQ ID NO: 19655 - DNA, 17 bp, synthetic construct
  misc_feature 1..17: note = Oligonucleotide
  source 1..17: mol_type = other DNA
cgtgctgacacacagct

SEQ ID NO: 19656 - DNA, 17 bp, synthetic construct
  misc_feature 1..17: note = Oligonucleotide
  source 1..17: mol_type = other DNA
ggccgtgctgacacaca

SEQ ID NO: 19657 - DNA, 17 bp, synthetic construct
  misc_feature 1..17: note = Oligonucleotide
  source 1..17: mol_type = other DNA
gcaggccgtgctgacac

SEQ ID NO: 19658 - DNA, 17 bp, synthetic construct
  misc_feature 1..17: note = Oligonucleotide
  source 1..17: mol_type = other DNA
agagcaggccgtgctga

SEQ ID NO: 19659 - DNA, 17 bp, synthetic construct
  misc_feature 1..17: note = Oligonucleotide
  source 1..17: mol_type = other DNA
ctcagagcaggccgtgc

SEQ ID NO: 19660 - DNA, 17 bp, synthetic construct
  misc_feature 1..17: note = Oligonucleotide
  source 1..17: mol_type = other DNA
gcactcagagcaggccg

SEQ ID NO: 19661 - DNA, 17 bp, synthetic construct
  misc_feature 1..17: note = Oligonucleotide
  source 1..17: mol_type = other DNA
caggcactcagagcagg

SEQ ID NO: 19662 - DNA, 17 bp, synthetic construct
  misc_feature 1..17: note = Oligonucleotide
  source 1..17: mol_type = other DNA
tgccaggcactcagagc

SEQ ID NO: 19663 - DNA, 17 bp, synthetic construct
  misc_feature 1..17: note = Oligonucleotide
  source 1..17: mol_type = other DNA
ctgtgccaggcactcag

SEQ ID NO: 19664 - DNA, 17 bp, synthetic construct
  misc_feature 1..17: note = Oligonucleotide
  source 1..17: mol_type = other DNA
aaactgtgccaggcact

SEQ ID NO: 19665 - DNA, 17 bp, synthetic construct
  misc_feature 1..17: note = Oligonucleotide
  source 1..17: mol_type = other DNA
ctaaaactgtgccaggc

SEQ ID NO: 19666 - DNA, 17 bp, synthetic construct
  misc_feature 1..17: note = Oligonucleotide
  source 1..17: mol_type = other DNA
gtgctaaaactgtgcca

SEQ ID NO: 19667 - DNA, 17 bp, synthetic construct
  misc_feature 1..17: note = Oligonucleotide
  source 1..17: mol_type = other DNA
gaagtgctaaaactgtg

SEQ ID NO: 19668 - DNA, 17 bp, synthetic construct
  misc_feature 1..17: note = Oligonucleotide
  source 1..17: mol_type = other DNA
gtagaagtgctaaaact

SEQ ID NO: 19669 - DNA, 17 bp, synthetic construct
  misc_feature 1..17: note = Oligonucleotide
  source 1..17: mol_type = other DNA
cgtgtagaagtgctaaa

SEQ ID NO: 19670 - DNA, 17 bp, synthetic construct
  misc_feature 1..17: note = Oligonucleotide
  source 1..17: mol_type = other DNA
atacgtgtagaagtgct

SEQ ID NO: 19671 - DNA, 17 bp, synthetic construct
  misc_feature 1..17: note = Oligonucleotide
  source 1..17: mol_type = other DNA
cttatacgtgtagaagt

SEQ ID NO: 19672 - DNA, 17 bp, synthetic construct
  misc_feature 1..17: note = Oligonucleotide
  source 1..17: mol_type = other DNA
cgacttatacgtgtaga

SEQ ID NO: 19673 - DNA, 17 bp, synthetic construct
  misc_feature 1..17: note = Oligonucleotide
  source 1..17: mol_type = other DNA
caacgacttatacgtgt

SEQ ID NO: 19674 - DNA, 17 bp, synthetic construct
  misc_feature 1..17: note = Oligonucleotide
  source 1..17: mol_type = other DNA
agtcaacgacttatacg

SEQ ID NO: 19675 - DNA, 17 bp, synthetic construct
  misc_feature 1..17: note = Oligonucleotide
  source 1..17: mol_type = other DNA
atgagtcaacgacttat

SEQ ID NO: 19676 - DNA, 17 bp, synthetic construct
  misc_feature 1..17: note = Oligonucleotide
  source 1..17: mol_type = other DNA
gggatgagtcaacgact

SEQ ID NO: 19677 - DNA, 17 bp, synthetic construct
  misc_feature 1..17: note = Oligonucleotide
  source 1..17: mol_type = other DNA
gctgggatgagtcaacg

SEQ ID NO: 19678 - DNA, 17 bp, synthetic construct
  misc_feature 1..17: note = Oligonucleotide
  source 1..17: mol_type = other DNA
actgctgggatgagtca

SEQ ID NO: 19679 - DNA, 17 bp, synthetic construct
  misc_feature 1..17: note = Oligonucleotide
  source 1..17: mol_type = other DNA
gggactgctgggatgag

SEQ ID NO: 19680 - DNA, 17 bp, synthetic construct
  misc_feature 1..17: note = Oligonucleotide
  source 1..17: mol_type = other DNA
cttgggactgctgggat

SEQ ID NO: 19681 - DNA, 17 bp, synthetic construct
  misc_feature 1..17: note = Oligonucleotide
  source 1..17: mol_type = other DNA
cctcttgggactgctgg

SEQ ID NO: 19682 - DNA, 17 bp, synthetic construct
  misc_feature 1..17: note = Oligonucleotide
  source 1..17: mol_type = other DNA
ccacctcttgggactgc

SEQ ID NO: 19683 - DNA, 17 bp, synthetic construct
  misc_feature 1..17: note = Oligonucleotide
  source 1..17: mol_type = other DNA
gccccacctcttgggac

SEQ ID NO: 19684 - DNA, 17 bp, synthetic construct
  misc_feature 1..17: note = Oligonucleotide
  source 1..17: mol_type = other DNA
gtggccccacctcttgg

SEQ ID NO: 19685 - DNA, 17 bp, synthetic construct
  misc_feature 1..17: note = Oligonucleotide
  source 1..17: mol_type = other DNA
caagtggccccacctct

SEQ ID NO: 19686 - DNA, 17 bp, synthetic construct
  misc_feature 1..17: note = Oligonucleotide
  source 1..17: mol_type = other DNA
caacaagtggccccacc

SEQ ID NO: 19687 - DNA, 17 bp, synthetic construct
  misc_feature 1..17: note = Oligonucleotide
  source 1..17: mol_type = other DNA
taacaacaagtggcccc

SEQ ID NO: 19688 - DNA, 17 bp, synthetic construct
  misc_feature 1..17: note = Oligonucleotide
  source 1..17: mol_type = other DNA
gaataacaacaagtggc

SEQ ID NO: 19689 - DNA, 17 bp, synthetic construct
  misc_feature 1..17: note = Oligonucleotide
  source 1..17: mol_type = other DNA
atggaataacaacaagt

SEQ ID NO: 19690 - DNA, 17 bp, synthetic construct
  misc_feature 1..17: note = Oligonucleotide
  source 1..17: mol_type = other DNA
gaaatggaataacaaca

SEQ ID NO: 19691 - DNA, 17 bp, synthetic construct
  misc_feature 1..17: note = Oligonucleotide
  source 1..17: mol_type = other DNA
ctagaaatggaataaca

SEQ ID NO: 19692 - DNA, 17 bp, synthetic construct
  misc_feature 1..17: note = Oligonucleotide
  source 1..17: mol_type = other DNA
cccctagaaatggaata

SEQ ID NO: 19693 - DNA, 17 bp, synthetic construct
  misc_feature 1..17: note = Oligonucleotide
  source 1..17: mol_type = other DNA
gaccccctagaaatgga

SEQ ID NO: 19694 - DNA, 17 bp, synthetic construct
  misc_feature 1..17: note = Oligonucleotide
  source 1..17: mol_type = other DNA
tgtgaccccctagaaat

SEQ ID NO: 19695 - DNA, 17 bp, synthetic construct
  misc_feature 1..17: note = Oligonucleotide
  source 1..17: mol_type = other DNA
ccatgtgaccccctaga

SEQ ID NO: 19696 - DNA, 17 bp, synthetic construct
  misc_feature 1..17: note = Oligonucleotide
  source 1..17: mol_type = other DNA
gggccatgtgaccccct

SEQ ID NO: 19697 - DNA, 17 bp, synthetic construct
  misc_feature 1..17: note = Oligonucleotide
  source 1..17: mol_type = other DNA
tcagggccatgtgaccc

SEQ ID NO: 19698 - DNA, 17 bp, synthetic construct
  misc_feature 1..17: note = Oligonucleotide
  source 1..17: mol_type = other DNA
ccctcagggccatgtga

SEQ ID NO: 19699 - DNA, 17 bp, synthetic construct
  misc_feature 1..17: note = Oligonucleotide
  source 1..17: mol_type = other DNA
tgcccctcagggccatg

SEQ ID NO: 19700 - DNA, 17 bp, synthetic construct
  misc_feature 1..17: note = Oligonucleotide
  source 1..17: mol_type = other DNA
ctttgcccctcagggcc

SEQ ID NO: 19701 - DNA, 17 bp, synthetic construct
  misc_feature 1..17: note = Oligonucleotide
  source 1..17: mol_type = other DNA
agactttgcccctcagg

SEQ ID NO: 19702 - DNA, 17 bp, synthetic construct
  misc_feature 1..17: note = Oligonucleotide
  source 1..17: mol_type = other DNA
acaagactttgcccctc

SEQ ID NO: 19703 - DNA, 17 bp, synthetic construct
  misc_feature 1..17: note = Oligonucleotide
  source 1..17: mol_type = other DNA
caaacaagactttgccc

SEQ ID NO: 19704 - DNA, 17 bp, synthetic construct
  misc_feature 1..17: note = Oligonucleotide
  source 1..17: mol_type = other DNA
ttgcaaacaagactttg

SEQ ID NO: 19705 - DNA, 17 bp, synthetic construct
  misc_feature 1..17: note = Oligonucleotide
  source 1..17: mol_type = other DNA
gtgttgcaaacaagact

SEQ ID NO: 19706 - DNA, 17 bp, synthetic construct
  misc_feature 1..17: note = Oligonucleotide
  source 1..17: mol_type = other DNA
cctgtgttgcaaacaag

SEQ ID NO: 19707 - DNA, 17 bp, synthetic construct
  misc_feature 1..17: note = Oligonucleotide
  source 1..17: mol_type = other DNA
ctgcctgtgttgcaaac

SEQ ID NO: 19708 - DNA, 17 bp, synthetic construct
  misc_feature 1..17: note = Oligonucleotide
  source 1..17: mol_type = other DNA
ttgctgcctgtgttgca

SEQ ID NO: 19709 - DNA, 17 bp, synthetic construct
  misc_feature 1..17: note = Oligonucleotide
  source 1..17: mol_type = other DNA
aacttgctgcctgtgtt

SEQ ID NO: 19710 - DNA, 17 bp, synthetic construct
  misc_feature 1..17: note = Oligonucleotide
  source 1..17: mol_type = other DNA
tagaacttgctgcctgt

SEQ ID NO: 19711 - DNA, 17 bp, synthetic construct
  misc_feature 1..17: note = Oligonucleotide
  source 1..17: mol_type = other DNA
acatagaacttgctgcc

SEQ ID NO: 19712 - DNA, 17 bp, synthetic construct
  misc_feature 1..17: note = Oligonucleotide
  source 1..17: mol_type = other DNA
ctcacatagaacttgct

SEQ ID NO: 19713 - DNA, 17 bp, synthetic construct
  misc_feature 1..17: note = Oligonucleotide
  source 1..17: mol_type = other DNA
tcactcacatagaactt

SEQ ID NO: 19714 - DNA, 17 bp, synthetic construct
  misc_feature 1..17: note = Oligonucleotide
  source 1..17: mol_type = other DNA
gtttcactcacatagaa

SEQ ID NO: 19715 - DNA, 17 bp, synthetic construct
  misc_feature 1..17: note = Oligonucleotide
  source 1..17: mol_type = other DNA
ggcgtttcactcacata

SEQ ID NO: 19716 - DNA, 17 bp, synthetic construct
  misc_feature 1..17: note = Oligonucleotide
  source 1..17: mol_type = other DNA
gcaggcgtttcactcac

SEQ ID NO: 19717 - DNA, 17 bp, synthetic construct
  misc_feature 1..17: note = Oligonucleotide
  source 1..17: mol_type = other DNA
catgcaggcgtttcact

SEQ ID NO: 19718 - DNA, 17 bp, synthetic construct
  misc_feature 1..17: note = Oligonucleotide
  source 1..17: mol_type = other DNA
ccccatgcaggcgtttc

SEQ ID NO: 19719 - DNA, 17 bp, synthetic construct
  misc_feature 1..17: note = Oligonucleotide
  source 1..17: mol_type = other DNA
tcaccccatgcaggcgt

SEQ ID NO: 19720 - DNA, 17 bp, synthetic construct
  misc_feature 1..17: note = Oligonucleotide
  source 1..17: mol_type = other DNA
ccctcaccccatgcagg

SEQ ID NO: 19721 - DNA, 17 bp, synthetic construct
  misc_feature 1..17: note = Oligonucleotide
  source 1..17: mol_type = other DNA
cgcccctcaccccatgc

SEQ ID NO: 19722 - DNA, 17 bp, synthetic construct
  misc_feature 1..17: note = Oligonucleotide
  source 1..17: mol_type = other DNA
cctcgcccctcacccca

SEQ ID NO: 19723 - DNA, 17 bp, synthetic construct
  misc_feature 1..17: note = Oligonucleotide
  source 1..17: mol_type = other DNA
cagcctcgcccctcacc

SEQ ID NO: 19724 - DNA, 17 bp, synthetic construct
  misc_feature 1..17: note = Oligonucleotide
  source 1..17: mol_type = other DNA
caccagcctcgcccctc

SEQ ID NO: 19725 - DNA, 17 bp, synthetic construct
  misc_feature 1..17: note = Oligonucleotide
  source 1..17: mol_type = other DNA
ccacaccagcctcgccc

SEQ ID NO: 19726 - DNA, 17 bp, synthetic construct
  misc_feature 1..17: note = Oligonucleotide
  source 1..17: mol_type = other DNA
tccccacaccagcctcg

SEQ ID NO: 19727 - DNA, 17 bp, synthetic construct
  misc_feature 1..17: note = Oligonucleotide
  source 1..17: mol_type = other DNA
tggtccccacaccagcc

SEQ ID NO: 19728 - DNA, 17 bp, synthetic construct
  misc_feature 1..17: note = Oligonucleotide
  source 1..17: mol_type = other DNA
ccgtggtccccacacca

SEQ ID NO: 19729 - DNA, 17 bp, synthetic construct
  misc_feature 1..17: note = Oligonucleotide
  source 1..17: mol_type = other DNA
accccgtggtccccaca

SEQ ID NO: 19730 - DNA, 17 bp, synthetic construct
  misc_feature 1..17: note = Oligonucleotide
  source 1..17: mol_type = other DNA
accaccccgtggtcccc

SEQ ID NO: 19731 - DNA, 17 bp, synthetic construct
  misc_feature 1..17: note = Oligonucleotide
  source 1..17: mol_type = other DNA
ctgaccaccccgtggtc

SEQ ID NO: 19732 - DNA, 17 bp, synthetic construct
  misc_feature 1..17: note = Oligonucleotide
  source 1..17: mol_type = other DNA
cacctgaccaccccgtg

SEQ ID NO: 19733 - DNA, 17 bp, synthetic construct
  misc_feature 1..17: note = Oligonucleotide
  source 1..17: mol_type = other DNA
tgccacctgaccacccc

SEQ ID NO: 19734 - DNA, 17 bp, synthetic construct
  misc_feature 1..17: note = Oligonucleotide
  source 1..17: mol_type = other DNA
ccatgccacctgaccac

SEQ ID NO: 19735 - DNA, 17 bp, synthetic construct
  misc_feature 1..17: note = Oligonucleotide
  source 1..17: mol_type = other DNA
actccatgccacctgac

SEQ ID NO: 19736 - DNA, 17 bp, synthetic construct
  misc_feature 1..17: note = Oligonucleotide
  source 1..17: mol_type = other DNA
ttgactccatgccacct

SEQ ID NO: 19737 - DNA, 17 bp, synthetic construct
  misc_feature 1..17: note = Oligonucleotide
  source 1..17: mol_type = other DNA
cacttgactccatgcca

SEQ ID NO: 19738 - DNA, 17 bp, synthetic construct
  misc_feature 1..17: note = Oligonucleotide
  source 1..17: mol_type = other DNA
tgtcacttgactccatg

SEQ ID NO: 19739 - DNA, 17 bp, synthetic construct
  misc_feature 1..17: note = Oligonucleotide
  source 1..17: mol_type = other DNA
cactgtcacttgactcc

SEQ ID NO: 19740 - DNA, 17 bp, synthetic construct
  misc_feature 1..17: note = Oligonucleotide
  source 1..17: mol_type = other DNA
ccacactgtcacttgac

SEQ ID NO: 19741 - DNA, 17 bp, synthetic construct
  misc_feature 1..17: note = Oligonucleotide
  source 1..17: mol_type = other DNA
atgccacactgtcactt

SEQ ID NO: 19742 - DNA, 17 bp, synthetic construct
  misc_feature 1..17: note = Oligonucleotide
  source 1..17: mol_type = other DNA
atgatgccacactgtca

SEQ ID NO: 19743 - DNA, 17 bp, synthetic construct
  misc_feature 1..17: note = Oligonucleotide
  source 1..17: mol_type = other DNA
gccatgatgccacactg

SEQ ID NO: 19744 - DNA, 17 bp, synthetic construct
  misc_feature 1..17: note = Oligonucleotide
  source 1..17: mol_type = other DNA
tccgccatgatgccaca

SEQ ID NO: 19745 - DNA, 17 bp, synthetic construct
  misc_feature 1..17: note = Oligonucleotide
  source 1..17: mol_type = other DNA
ccctccgccatgatgcc

SEQ ID NO: 19746 - DNA, 17 bp, synthetic construct
  misc_feature 1..17: note = Oligonucleotide
  source 1..17: mol_type = other DNA
gttccctccgccatgat

SEQ ID NO: 19747 - DNA, 17 bp, synthetic construct
  misc_feature 1..17: note = Oligonucleotide
  source 1..17: mol_type = other DNA
tgggttccctccgccat

SEQ ID NO: 19748 - DNA, 17 bp, synthetic construct
  misc_feature 1..17: note = Oligonucleotide
  source 1..17: mol_type = other DNA
ggctgggttccctccgc

SEQ ID NO: 19749 - DNA, 17 bp, synthetic construct
  misc_feature 1..17: note = Oligonucleotide
  source 1..17: mol_type = other DNA
tgcggctgggttccctc

SEQ ID NO: 19750 - DNA, 17 bp, synthetic construct
  misc_feature 1..17: note = Oligonucleotide
  source 1..17: mol_type = other DNA
cactgcggctgggttcc

SEQ ID NO: 19751 - DNA, 17 bp, synthetic construct
  misc_feature 1..17: note = Oligonucleotide
  source 1..17: mol_type = other DNA
agacactgcggctgggt

SEQ ID NO: 19752 - DNA, 17 bp, synthetic construct
  misc_feature 1..17: note = Oligonucleotide
  source 1..17: mol_type = other DNA
atcagacactgcggctg

SEQ ID NO: 19753 - DNA, 17 bp, synthetic construct
  misc_feature 1..17: note = Oligonucleotide
  source 1..17: mol_type = other DNA
acaatcagacactgcgg

SEQ ID NO: 19754 - DNA, 17 bp, synthetic construct
  misc_feature 1..17: note = Oligonucleotide
  source 1..17: mol_type = other DNA
tgcacaatcagacactg

SEQ ID NO: 19755 - DNA, 17 bp, synthetic construct
  misc_feature 1..17: note = Oligonucleotide
  source 1..17: mol_type = other DNA
acctgcacaatcagaca

SEQ ID NO: 19756 - DNA, 17 bp, synthetic construct
  misc_feature 1..17: note = Oligonucleotide
  source 1..17: mol_type = other DNA
acaacctgcacaatcag

SEQ ID NO: 19757 - DNA, 17 bp, synthetic construct
  misc_feature 1..17: note = Oligonucleotide
  source 1..17: mol_type = other DNA
tacacaacctgcacaat

SEQ ID NO: 19758 - DNA, 17 bp, synthetic construct
  misc_feature 1..17: note = Oligonucleotide
  source 1..17: mol_type = other DNA
tcctacacaacctgcac

SEQ ID NO: 19759 - DNA, 17 bp, synthetic construct
  misc_feature 1..17: note = Oligonucleotide
  source 1..17: mol_type = other DNA
tgatcctacacaacctg

SEQ ID NO: 19760 - DNA, 17 bp, synthetic construct
  misc_feature 1..17: note = Oligonucleotide
  source 1..17: mol_type = other DNA
ctttgatcctacacaac

SEQ ID NO: 19761 - DNA, 17 bp, synthetic construct
  misc_feature 1..17: note = Oligonucleotide
  source 1..17: mol_type = other DNA
gggctttgatcctacac

SEQ ID NO: 19762 - DNA, 17 bp, synthetic construct
  misc_feature 1..17: note = Oligonucleotide
  source 1..17: mol_type = other DNA
cccgggctttgatccta

SEQ ID NO: 19763 - DNA, 17 bp, synthetic construct
  misc_feature 1..17: note = Oligonucleotide
  source 1..17: mol_type = other DNA
cagcccgggctttgatc

SEQ ID NO: 19764 - DNA, 17 bp, synthetic construct
  misc_feature 1..17: note = Oligonucleotide
  source 1..17: mol_type = other DNA
gcccagcccgggctttg

SEQ ID NO: 19765 - DNA, 17 bp, synthetic construct
  misc_feature 1..17: note = Oligonucleotide
  source 1..17: mol_type = other DNA
tctgcccagcccgggct

SEQ ID NO: 19766 - DNA, 17 bp, synthetic construct
  misc_feature 1..17: note = Oligonucleotide
  source 1..17: mol_type = other DNA
tgctctgcccagcccgg

SEQ ID NO: 19767 - DNA, 17 bp, synthetic construct
  misc_feature 1..17: note = Oligonucleotide
  source 1..17: mol_type = other DNA
ctctgctctgcccagcc

SEQ ID NO: 19768 - DNA, 17 bp, synthetic construct
  misc_feature 1..17: note = Oligonucleotide
  source 1..17: mol_type = other DNA
ttgctctgctctgccca

SEQ ID NO: 19769 - DNA, 17 bp, synthetic construct
  misc_feature 1..17: note = Oligonucleotide
  source 1..17: mol_type = other DNA
ccattgctctgctctgc

SEQ ID NO: 19770 - DNA, 17 bp, synthetic construct
  misc_feature 1..17: note = Oligonucleotide
  source 1..17: mol_type = other DNA
tctccattgctctgctc

SEQ ID NO: 19771 - DNA, 17 bp, synthetic construct
  misc_feature 1..17: note = Oligonucleotide
  source 1..17: mol_type = other DNA
tcctctccattgctctg

SEQ ID NO: 19772 - DNA, 17 bp, synthetic construct
  misc_feature 1..17: note = Oligonucleotide
  source 1..17: mol_type = other DNA
ccctcctctccattgct

SEQ ID NO: 19773 - DNA, 17 bp, synthetic construct
  misc_feature 1..17: note = Oligonucleotide
  source 1..17: mol_type = other DNA
gaaccctcctctccatt

SEQ ID NO: 19774 - DNA, 17 bp, synthetic construct
  misc_feature 1..17: note = Oligonucleotide
  source 1..17: mol_type = other DNA
cctgaaccctcctctcc

SEQ ID NO: 19775 - DNA, 17 bp, synthetic construct
  misc_feature 1..17: note = Oligonucleotide
  source 1..17: mol_type = other DNA
agacctgaaccctcctc

SEQ ID NO: 19776 - DNA, 17 bp, synthetic construct
  misc_feature 1..17: note = Oligonucleotide
  source 1..17: mol_type = other DNA
cccagacctgaaccctc

SEQ ID NO: 19777 - DNA, 17 bp, synthetic construct
  misc_feature 1..17: note = Oligonucleotide
  source 1..17: mol_type = other DNA
gagcccagacctgaacc

SEQ ID NO: 19778 - DNA, 17 bp, synthetic construct
  misc_feature 1..17: note = Oligonucleotide
  source 1..17: mol_type = other DNA
ctggagcccagacctga

SEQ ID NO: 19779 - DNA, 17 bp, synthetic construct
  misc_feature 1..17: note = Oligonucleotide
  source 1..17: mol_type = other DNA
tggctggagcccagacc

SEQ ID NO: 19780 - DNA, 17 bp, synthetic construct
  misc_feature 1..17: note = Oligonucleotide
  source 1..17: mol_type = other DNA
tgctggctggagcccag

SEQ ID NO: 19781 - DNA, 17 bp, synthetic construct
  misc_feature 1..17: note = Oligonucleotide
  source 1..17: mol_type = other DNA
ggctgctggctggagcc

SEQ ID NO: 19782 - DNA, 17 bp, synthetic construct
  misc_feature 1..17: note = Oligonucleotide
  source 1..17: mol_type = other DNA
catggctgctggctgga

SEQ ID NO: 19783 - DNA, 17 bp, synthetic construct
  misc_feature 1..17: note = Oligonucleotide
  source 1..17: mol_type = other DNA
caccatggctgctggct

SEQ ID NO: 19784 - DNA, 17 bp, synthetic construct
  misc_feature 1..17: note = Oligonucleotide
  source 1..17: mol_type = other DNA
acacaccatggctgctg

SEQ ID NO: 19785 - DNA, 17 bp, synthetic construct
  misc_feature 1..17: note = Oligonucleotide
  source 1..17: mol_type = other DNA
cacacacaccatggctg

SEQ ID NO: 19786 - DNA, 17 bp, synthetic construct
  misc_feature 1..17: note = Oligonucleotide
  source 1..17: mol_type = other DNA
ggtcacacacaccatgg

SEQ ID NO: 19787 - DNA, 17 bp, synthetic construct
  misc_feature 1..17: note = Oligonucleotide
  source 1..17: mol_type = other DNA
ccaggtcacacacacca

SEQ ID NO: 19788 - DNA, 17 bp, synthetic construct
  misc_feature 1..17: note = Oligonucleotide
  source 1..17: mol_type = other DNA
tccccaggtcacacaca

SEQ ID NO: 19789 - DNA, 17 bp, synthetic construct
  misc_feature 1..17: note = Oligonucleotide
  source 1..17: mol_type = other DNA
cactccccaggtcacac

SEQ ID NO: 19790 - DNA, 17 bp, synthetic construct
  misc_feature 1..17: note = Oligonucleotide
  source 1..17: mol_type = other DNA
actcactccccaggtca

SEQ ID NO: 19791 - DNA, 17 bp, synthetic construct
  misc_feature 1..17: note = Oligonucleotide
  source 1..17: mol_type = other DNA
gacactcactccccagg

SEQ ID NO: 19792 - DNA, 17 bp, synthetic construct
  misc_feature 1..17: note = Oligonucleotide
  source 1..17: mol_type = other DNA
tctgacactcactcccc

SEQ ID NO: 19793 - DNA, 17 bp, synthetic construct
  misc_feature 1..17: note = Oligonucleotide
  source 1..17: mol_type = other DNA
acctctgacactcactc

SEQ ID NO: 19794 - DNA, 17 bp, synthetic construct
  misc_feature 1..17: note = Oligonucleotide
  source 1..17: mol_type = other DNA
gggacctctgacactca

SEQ ID NO: 19795 - DNA, 17 bp, synthetic construct
  misc_feature 1..17: note = Oligonucleotide
  source 1..17: mol_type = other DNA
cccgggacctctgacac

SEQ ID NO: 19796 - DNA, 17 bp, synthetic construct
  misc_feature 1..17: note = Oligonucleotide
  source 1..17: mol_type = other DNA
taccccgggacctctga

SEQ ID NO: 19797 - DNA, 17 bp, synthetic construct
  misc_feature 1..17: note = Oligonucleotide
  source 1..17: mol_type = other DNA
gtctaccccgggacctc

SEQ ID NO: 19798 - DNA, 17 bp, synthetic construct
  misc_feature 1..17: note = Oligonucleotide
  source 1..17: mol_type = other DNA
cccgtctaccccgggac

SEQ ID NO: 19799 - DNA, 17 bp, synthetic construct
  misc_feature 1..17: note = Oligonucleotide
  source 1..17: mol_type = other DNA
actcccgtctaccccgg

SEQ ID NO: 19800 - DNA, 17 bp, synthetic construct
  misc_feature 1..17: note = Oligonucleotide
  source 1..17: mol_type = other DNA
aatactcccgtctaccc

SEQ ID NO: 19801 - DNA, 17 bp, synthetic construct
  misc_feature 1..17: note = Oligonucleotide
  source 1..17: mol_type = other DNA
tgaaatactcccgtcta

SEQ ID NO: 19802 - DNA, 17 bp, synthetic construct
  misc_feature 1..17: note = Oligonucleotide
  source 1..17: mol_type = other DNA
tcatgaaatactcccgt

SEQ ID NO: 19803 - DNA, 17 bp, synthetic construct
  misc_feature 1..17: note = Oligonucleotide
  source 1..17: mol_type = other DNA
cactcatgaaatactcc

SEQ ID NO: 19804 - DNA, 17 bp, synthetic construct
  misc_feature 1..17: note = Oligonucleotide
  source 1..17: mol_type = other DNA
gcccactcatgaaatac

SEQ ID NO: 19805 - DNA, 17 bp, synthetic construct
  misc_feature 1..17: note = Oligonucleotide
  source 1..17: mol_type = other DNA
gctgcccactcatgaaa

SEQ ID NO: 19806 - DNA, 17 bp, synthetic construct
  misc_feature 1..17: note = Oligonucleotide
  source 1..17: mol_type = other DNA
cccgctgcccactcatg

SEQ ID NO: 19807 - DNA, 17 bp, synthetic construct
  misc_feature 1..17: note = Oligonucleotide
  source 1..17: mol_type = other DNA
tctcccgctgcccactc

SEQ ID NO: 19808 - DNA, 17 bp, synthetic construct
  misc_feature 1..17: note = Oligonucleotide
  source 1..17: mol_type = other DNA
ccctctcccgctgccca

SEQ ID NO: 19809 - DNA, 17 bp, synthetic construct
  misc_feature 1..17: note = Oligonucleotide
  source 1..17: mol_type = other DNA
ggtccctctcccgctgc

SEQ ID NO: 19810 - DNA, 17 bp, synthetic construct
  misc_feature 1..17: note = Oligonucleotide
  source 1..17: mol_type = other DNA
gcaggtccctctcccgc

SEQ ID NO: 19811 - DNA, 17 bp, synthetic construct
  misc_feature 1..17: note = Oligonucleotide
  source 1..17: mol_type = other DNA
tccgcaggtccctctcc

SEQ ID NO: 19812 - DNA, 17 bp, synthetic construct
  misc_feature 1..17: note = Oligonucleotide
  source 1..17: mol_type = other DNA
gcctccgcaggtccctc

SEQ ID NO: 19813 - DNA, 17 bp, synthetic construct
  misc_feature 1..17: note = Oligonucleotide
  source 1..17: mol_type = other DNA
gcagcctccgcaggtcc

SEQ ID NO: 19814 - DNA, 17 bp, synthetic construct
  misc_feature 1..17: note = Oligonucleotide
  source 1..17: mol_type = other DNA
caggcagcctccgcagg

SEQ ID NO: 19815 - DNA, 17 bp, synthetic construct
  misc_feature 1..17: note = Oligonucleotide
  source 1..17: mol_type = other DNA
tcgcaggcagcctccgc

SEQ ID NO: 19816 - DNA, 17 bp, synthetic construct
  misc_feature 1..17: note = Oligonucleotide
  source 1..17: mol_type = other DNA
ccttcgcaggcagcctc

SEQ ID NO: 19817 - DNA, 17 bp, synthetic construct
  misc_feature 1..17: note = Oligonucleotide
  source 1..17: mol_type = other DNA
tgcccttcgcaggcagc

SEQ ID NO: 19818 - DNA, 17 bp, synthetic construct
  misc_feature 1..17: note = Oligonucleotide
  source 1..17: mol_type = other DNA
ccctgcccttcgcaggc

SEQ ID NO: 19819 - DNA, 17 bp, synthetic construct
  misc_feature 1..17: note = Oligonucleotide
  source 1..17: mol_type = other DNA
actccctgcccttcgca

SEQ ID NO: 19820 - DNA, 17 bp, synthetic construct
  misc_feature 1..17: note = Oligonucleotide
  source 1..17: mol_type = other DNA
cccactccctgcccttc

SEQ ID NO: 19821 - DNA, 17 bp, synthetic construct
  misc_feature 1..17: note = Oligonucleotide
  source 1..17: mol_type = other DNA
gctcccactccctgccc

SEQ ID NO: 19822 - DNA, 17 bp, synthetic construct
  misc_feature 1..17: note = Oligonucleotide
  source 1..17: mol_type = other DNA
actgctcccactccctg

SEQ ID NO: 19823 - DNA, 17 bp, synthetic construct
  misc_feature 1..17: note = Oligonucleotide
  source 1..17: mol_type = other DNA
gtcactgctcccactcc

SEQ ID NO: 19824 - DNA, 17 bp, synthetic construct
  misc_feature 1..17: note = Oligonucleotide
  source 1..17: mol_type = other DNA
actgtcactgctcccac

SEQ ID NO: 19825 - DNA, 17 bp, synthetic construct
  misc_feature 1..17: note = Oligonucleotide
  source 1..17: mol_type = other DNA
ggcactgtcactgctcc

SEQ ID NO: 19826 - DNA, 17 bp, synthetic construct
  misc_feature 1..17: note = Oligonucleotide
  source 1..17: mol_type = other DNA
gagggcactgtcactgc

SEQ ID NO: 19827 - DNA, 17 bp, synthetic construct
  misc_feature 1..17: note = Oligonucleotide
  source 1..17: mol_type = other DNA
tcagagggcactgtcac

SEQ ID NO: 19828 - DNA, 17 bp, synthetic construct
  misc_feature 1..17: note = Oligonucleotide
  source 1..17: mol_type = other DNA
aggtcagagggcactgt

SEQ ID NO: 19829 - DNA, 17 bp, synthetic construct
  misc_feature 1..17: note = Oligonucleotide
  source 1..17: mol_type = other DNA
ccaaggtcagagggcac

SEQ ID NO: 19830 - DNA, 17 bp, synthetic construct
  misc_feature 1..17: note = Oligonucleotide
  source 1..17: mol_type = other DNA
cagccaaggtcagaggg

SEQ ID NO: 19831 - DNA, 17 bp, synthetic construct
  misc_feature 1..17: note = Oligonucleotide
  source 1..17: mol_type = other DNA
ctgcagccaaggtcaga

SEQ ID NO: 19832 - DNA, 17 bp, synthetic construct
  misc_feature 1..17: note = Oligonucleotide
  source 1..17: mol_type = other DNA
ggcctgcagccaaggtc

SEQ ID NO: 19833 - DNA, 17 bp, synthetic construct
  misc_feature 1..17: note = Oligonucleotide
  source 1..17: mol_type = other DNA
cagggcctgcagccaag

SEQ ID NO: 19834 - DNA, 17 bp, synthetic construct
  misc_feature 1..17: note = Oligonucleotide
  source 1..17: mol_type = other DNA
cagcagggcctgcagcc

SEQ ID NO: 19835 - DNA, 17 bp, synthetic construct
  misc_feature 1..17: note = Oligonucleotide
  source 1..17: mol_type = other DNA
ggccagcagggcctgca

SEQ ID NO: 19836 - DNA, 17 bp, synthetic construct
  misc_feature 1..17: note = Oligonucleotide
  source 1..17: mol_type = other DNA
tgtggccagcagggcct

SEQ ID NO: 19837 - DNA, 17 bp, synthetic construct
  misc_feature 1..17: note = Oligonucleotide
  source 1..17: mol_type = other DNA
cagtgtggccagcaggg

SEQ ID NO: 19838 - DNA, 17 bp, synthetic construct
  misc_feature 1..17: note = Oligonucleotide
  source 1..17: mol_type = other DNA
gcgcagtgtggccagca

SEQ ID NO: 19839 - DNA, 17 bp, synthetic construct
  misc_feature 1..17: note = Oligonucleotide
  source 1..17: mol_type = other DNA
tctgcgcagtgtggcca

SEQ ID NO: 19840 - DNA, 17 bp, synthetic construct
  misc_feature 1..17: note = Oligonucleotide
  source 1..17: mol_type = other DNA
ggctctgcgcagtgtgg

SEQ ID NO: 19841 - DNA, 17 bp, synthetic construct
  misc_feature 1..17: note = Oligonucleotide
  source 1..17: mol_type = other DNA
agaggctctgcgcagtg

SEQ ID NO: 19842 - DNA, 17 bp, synthetic construct
  misc_feature 1..17: note = Oligonucleotide
  source 1..17: mol_type = other DNA
agcagaggctctgcgca

SEQ ID NO: 19843 - DNA, 17 bp, synthetic construct
  misc_feature 1..17: note = Oligonucleotide
  source 1..17: mol_type = other DNA
cagagcagaggctctgc

SEQ ID NO: 19844 - DNA, 17 bp, synthetic construct
  misc_feature 1..17: note = Oligonucleotide
  source 1..17: mol_type = other DNA
tcccagagcagaggctc

SEQ ID NO: 19845 - DNA, 17 bp, synthetic construct
  misc_feature 1..17: note = Oligonucleotide
  source 1..17: mol_type = other DNA
ggatcccagagcagagg

SEQ ID NO: 19846 - DNA, 17 bp, synthetic construct
  misc_feature 1..17: note = Oligonucleotide
  source 1..17: mol_type = other DNA
ccgggatcccagagcag

SEQ ID NO: 19847 - DNA, 17 bp, synthetic construct
  misc_feature 1..17: note = Oligonucleotide
  source 1..17: mol_type = other DNA
gccccgggatcccagag

SEQ ID NO: 19848 - DNA, 17 bp, synthetic construct
  misc_feature 1..17: note = Oligonucleotide
  source 1..17: mol_type = other DNA
tcggccccgggatccca

SEQ ID NO: 19849 - DNA, 17 bp, synthetic construct
  misc_feature 1..17: note = Oligonucleotide
  source 1..17: mol_type = other DNA
aactcggccccgggatc

SEQ ID NO: 19850 - DNA, 17 bp, synthetic construct
  misc_feature 1..17: note = Oligonucleotide
  source 1..17: mol_type = other DNA
cagaactcggccccggg

SEQ ID NO: 19851 - DNA, 17 bp, synthetic construct
  misc_feature 1..17: note = Oligonucleotide
  source 1..17: mol_type = other DNA
tggcagaactcggcccc

SEQ ID NO: 19852 - DNA, 17 bp, synthetic construct
  misc_feature 1..17: note = Oligonucleotide
  source 1..17: mol_type = other DNA
ctctggcagaactcggc

SEQ ID NO: 19853 - DNA, 17 bp, synthetic construct
  misc_feature 1..17: note = Oligonucleotide
  source 1..17: mol_type = other DNA
ggcctctggcagaactc

SEQ ID NO: 19854 - DNA, 17 bp, synthetic construct
  misc_feature 1..17: note = Oligonucleotide
  source 1..17: mol_type = other DNA
tctggcctctggcagaa

SEQ ID NO: 19855 - DNA, 17 bp, synthetic construct
  misc_feature 1..17: note = Oligonucleotide
  source 1..17: mol_type = other DNA
cactctggcctctggca

SEQ ID NO: 19856 - DNA, 17 bp, synthetic construct
  misc_feature 1..17: note = Oligonucleotide
  source 1..17: mol_type = other DNA
ctgcactctggcctctg

SEQ ID NO: 19857 - DNA, 17 bp, synthetic construct
  misc_feature 1..17: note = Oligonucleotide
  source 1..17: mol_type = other DNA
gggctgcactctggcct

SEQ ID NO: 19858 - DNA, 17 bp, synthetic construct
  misc_feature 1..17: note = Oligonucleotide
  source 1..17: mol_type = other DNA
cctgggctgcactctgg

SEQ ID NO: 19859 - DNA, 17 bp, synthetic construct
  misc_feature 1..17: note = Oligonucleotide
  source 1..17: mol_type = other DNA
gttcctgggctgcactc

SEQ ID NO: 19860 - DNA, 17 bp, synthetic construct
  misc_feature 1..17: note = Oligonucleotide
  source 1..17: mol_type = other DNA
cctgttcctgggctgca

SEQ ID NO: 19861 - DNA, 17 bp, synthetic construct
  misc_feature 1..17: note = Oligonucleotide
  source 1..17: mol_type = other DNA
gttcctgttcctgggct

SEQ ID NO: 19862 - DNA, 17 bp, synthetic construct
  misc_feature 1..17: note = Oligonucleotide
  source 1..17: mol_type = other DNA
caggttcctgttcctgg

SEQ ID NO: 19863 - DNA, 17 bp, synthetic construct
  misc_feature 1..17: note = Oligonucleotide
  source 1..17: mol_type = other DNA
aagcaggttcctgttcc

SEQ ID NO: 19864 - DNA, 17 bp, synthetic construct
  misc_feature 1..17: note = Oligonucleotide
  source 1..17: mol_type = other DNA
tggaagcaggttcctgt

SEQ ID NO: 19865 - DNA, 17 bp, synthetic construct
  misc_feature 1..17: note = Oligonucleotide
  source 1..17: mol_type = other DNA
tgttggaagcaggttcc

SEQ ID NO: 19866 - DNA, 17 bp, synthetic construct
  misc_feature 1..17: note = Oligonucleotide
  source 1..17: mol_type = other DNA
gcctgttggaagcaggt

SEQ ID NO: 19867 - DNA, 17 bp, synthetic construct
  misc_feature 1..17: note = Oligonucleotide
  source 1..17: mol_type = other DNA
tgggcctgttggaagca

SEQ ID NO: 19868 - DNA, 17 bp, synthetic construct
  misc_feature 1..17: note = Oligonucleotide
  source 1..17: mol_type = other DNA
atctgggcctgttggaa

SEQ ID NO: 19869 - DNA, 17 bp, synthetic construct
  misc_feature 1..17: note = Oligonucleotide
  source 1..17: mol_type = other DNA
cagatctgggcctgttg

SEQ ID NO: 19870 - DNA, 17 bp, synthetic construct
  misc_feature 1..17: note = Oligonucleotide
  source 1..17: mol_type = other DNA
gagcagatctgggcctg

SEQ ID NO: 19871 - DNA, 17 bp, synthetic construct
  misc_feature 1..17: note = Oligonucleotide
  source 1..17: mol_type = other DNA
ggggagcagatctgggc

SEQ ID NO: 19872 - DNA, 17 bp, synthetic construct
  misc_feature 1..17: note = Oligonucleotide
  source 1..17: mol_type = other DNA
tggggggagcagatctg

SEQ ID NO: 19873 - DNA, 17 bp, synthetic construct
  misc_feature 1..17: note = Oligonucleotide
  source 1..17: mol_type = other DNA
gggtggggggagcagat

SEQ ID NO: 19874 - DNA, 17 bp, synthetic construct
  misc_feature 1..17: note = Oligonucleotide
  source 1..17: mol_type = other DNA
ggggggtggggggagca

SEQ ID NO: 19875 - DNA, 17 bp, synthetic construct
  misc_feature 1..17: note = Oligonucleotide
  source 1..17: mol_type = other DNA
tttggggggtgggggga

SEQ ID NO: 19876 - DNA, 17 bp, synthetic construct
  misc_feature 1..17: note = Oligonucleotide
  source 1..17: mol_type = other DNA
ttttttggggggtgggg

SEQ ID NO: 19877 - DNA, 17 bp, synthetic construct
  misc_feature 1..17: note = Oligonucleotide
  source 1..17: mol_type = other DNA
gatttttttggggggtg

SEQ ID NO: 19878 - DNA, 17 bp, synthetic construct
  misc_feature 1..17: note = Oligonucleotide
  source 1..17: mol_type = other DNA
atggatttttttggggg

SEQ ID NO: 19879 - DNA, 17 bp, synthetic construct
  misc_feature 1..17: note = Oligonucleotide
  source 1..17: mol_type = other DNA
gaaatggatttttttgg

SEQ ID NO: 19880 - DNA, 17 bp, synthetic construct
  misc_feature 1..17: note = Oligonucleotide
  source 1..17: mol_type = other DNA
ccggaaatggatttttt

SEQ ID NO: 19881 - DNA, 17 bp, synthetic construct
  misc_feature 1..17: note = Oligonucleotide
  source 1..17: mol_type = other DNA
gtcccggaaatggattt

SEQ ID NO: 19882 - DNA, 17 bp, synthetic construct
  misc_feature 1..17: note = Oligonucleotide
  source 1..17: mol_type = other DNA
ccagtcccggaaatgga

SEQ ID NO: 19883 - DNA, 17 bp, synthetic construct
  misc_feature 1..17: note = Oligonucleotide
  source 1..17: mol_type = other DNA
actccagtcccggaaat

SEQ ID NO: 19884 - DNA, 17 bp, synthetic construct
  misc_feature 1..17: note = Oligonucleotide
  source 1..17: mol_type = other DNA
cccactccagtcccgga

SEQ ID NO: 19885 - DNA, 17 bp, synthetic construct
  misc_feature 1..17: note = Oligonucleotide
  source 1..17: mol_type = other DNA
gtccccactccagtccc

SEQ ID NO: 19886 - DNA, 17 bp, synthetic construct
  misc_feature 1..17: note = Oligonucleotide
  source 1..17: mol_type = other DNA
tctgtccccactccagt

SEQ ID NO: 19887 - DNA, 17 bp, synthetic construct
  misc_feature 1..17: note = Oligonucleotide
  source 1..17: mol_type = other DNA
ttttctgtccccactcc

SEQ ID NO: 19888 - DNA, 17 bp, synthetic construct
  misc_feature 1..17: note = Oligonucleotide
  source 1..17: mol_type = other DNA
tccttttctgtccccac

SEQ ID NO: 19889 - DNA, 17 bp, synthetic construct
  misc_feature 1..17: note = Oligonucleotide
  source 1..17: mol_type = other DNA
aagtccttttctgtccc

SEQ ID NO: 19890 - DNA, 17 bp, synthetic construct
  misc_feature 1..17: note = Oligonucleotide
  source 1..17: mol_type = other DNA
tttaagtccttttctgt

SEQ ID NO: 19891 - DNA, 17 bp, synthetic construct
  misc_feature 1..17: note = Oligonucleotide
  source 1..17: mol_type = other DNA
acctttaagtccttttc

SEQ ID NO: 19892 - DNA, 17 bp, synthetic construct
  misc_feature 1..17: note = Oligonucleotide
  source 1..17: mol_type = other DNA
ctaacctttaagtcctt

SEQ ID NO: 19893 - DNA, 17 bp, synthetic construct
  misc_feature 1..17: note = Oligonucleotide
  source 1..17: mol_type = other DNA
tccctaacctttaagtc

SEQ ID NO: 19894 - DNA, 17 bp, synthetic construct
  misc_feature 1..17: note = Oligonucleotide
  source 1..17: mol_type = other DNA
ccctccctaacctttaa

SEQ ID NO: 19895 - DNA, 17 bp, synthetic construct
  misc_feature 1..17: note = Oligonucleotide
  source 1..17: mol_type = other DNA
gtcccctccctaacctt

SEQ ID NO: 19896 - DNA, 17 bp, synthetic construct
  misc_feature 1..17: note = Oligonucleotide
  source 1..17: mol_type = other DNA
tatgtcccctccctaac

SEQ ID NO: 19897 - DNA, 17 bp, synthetic construct
  misc_feature 1..17: note = Oligonucleotide
  source 1..17: mol_type = other DNA
gactatgtcccctccct

SEQ ID NO: 19898 - DNA, 17 bp, synthetic construct
  misc_feature 1..17: note = Oligonucleotide
  source 1..17: mol_type = other DNA
agggactatgtcccctc

SEQ ID NO: 19899 - DNA, 17 bp, synthetic construct
  misc_feature 1..17: note = Oligonucleotide
  source 1..17: mol_type = other DNA
cacagggactatgtccc

SEQ ID NO: 19900 - DNA, 17 bp, synthetic construct
  misc_feature 1..17: note = Oligonucleotide
  source 1..17: mol_type = other DNA
acgcacagggactatgt

SEQ ID NO: 19901 - DNA, 17 bp, synthetic construct
  misc_feature 1..17: note = Oligonucleotide
  source 1..17: mol_type = other DNA
tgcacgcacagggacta

SEQ ID NO: 19902 - DNA, 17 bp, synthetic construct
  misc_feature 1..17: note = Oligonucleotide
  source 1..17: mol_type = other DNA
ccctgcacgcacaggga

SEQ ID NO: 19903 - DNA, 17 bp, synthetic construct
  misc_feature 1..17: note = Oligonucleotide
  source 1..17: mol_type = other DNA
agcccctgcacgcacag

SEQ ID NO: 19904 - DNA, 17 bp, synthetic construct
  misc_feature 1..17: note = Oligonucleotide
  source 1..17: mol_type = other DNA
accagcccctgcacgca

SEQ ID NO: 19905 - DNA, 17 bp, synthetic construct
  misc_feature 1..17: note = Oligonucleotide
  source 1..17: mol_type = other DNA
ggcaccagcccctgcac

SEQ ID NO: 19906 - DNA, 17 bp, synthetic construct
  misc_feature 1..17: note = Oligonucleotide
  source 1..17: mol_type = other DNA
ctgggcaccagcccctg

SEQ ID NO: 19907 - DNA, 17 bp, synthetic construct
  misc_feature 1..17: note = Oligonucleotide
  source 1..17: mol_type = other DNA
gctctgggcaccagccc

SEQ ID NO: 19908 - DNA, 17 bp, synthetic construct
  misc_feature 1..17: note = Oligonucleotide
  source 1..17: mol_type = other DNA
ccggctctgggcaccag

SEQ ID NO: 19909 - DNA, 17 bp, synthetic construct
  misc_feature 1..17: note = Oligonucleotide
  source 1..17: mol_type = other DNA
gcaccggctctgggcac

SEQ ID NO: 19910 - DNA, 17 bp, synthetic construct
  misc_feature 1..17: note = Oligonucleotide
  source 1..17: mol_type = other DNA
caggcaccggctctggg

SEQ ID NO: 19911 - DNA, 17 bp, synthetic construct
  misc_feature 1..17: note = Oligonucleotide
  source 1..17: mol_type = other DNA
cagcaggcaccggctct

SEQ ID NO: 19912 - DNA, 17 bp, synthetic construct
  misc_feature 1..17: note = Oligonucleotide
  source 1..17: mol_type = other DNA
ccacagcaggcaccggc

SEQ ID NO: 19913 - DNA, 17 bp, synthetic construct
  misc_feature 1..17: note = Oligonucleotide
  source 1..17: mol_type = other DNA
atcccacagcaggcacc

SEQ ID NO: 19914 - DNA, 17 bp, synthetic construct
  misc_feature 1..17: note = Oligonucleotide
  source 1..17: mol_type = other DNA
ccgatcccacagcaggc

SEQ ID NO: 19915 - DNA, 17 bp, synthetic construct
  misc_feature 1..17: note = Oligonucleotide
  source 1..17: mol_type = other DNA
ctcccgatcccacagca

SEQ ID NO: 19916 - DNA, 17 bp, synthetic construct
  misc_feature 1..17: note = Oligonucleotide
  source 1..17: mol_type = other DNA
cgcctcccgatcccaca

SEQ ID NO: 19917 - DNA, 17 bp, synthetic construct
  misc_feature 1..17: note = Oligonucleotide
  source 1..17: mol_type = other DNA
actcgcctcccgatccc

SEQ ID NO: 19918 - DNA, 17 bp, synthetic construct
  misc_feature 1..17: note = Oligonucleotide
  source 1..17: mol_type = other DNA
aggactcgcctcccgat

SEQ ID NO: 19919 - DNA, 17 bp, synthetic construct
  misc_feature 1..17: note = Oligonucleotide
  source 1..17: mol_type = other DNA
accaggactcgcctccc

SEQ ID NO: 19920 - DNA, 17 bp, synthetic construct
  misc_feature 1..17: note = Oligonucleotide
  source 1..17: mol_type = other DNA
gtgaccaggactcgcct

SEQ ID NO: 19921 - DNA, 17 bp, synthetic construct
  misc_feature 1..17: note = Oligonucleotide
  source 1..17: mol_type = other DNA
taagtgaccaggactcg

SEQ ID NO: 19922 - DNA, 17 bp, synthetic construct
  misc_feature 1..17: note = Oligonucleotide
  source 1..17: mol_type = other DNA
gggtaagtgaccaggac

SEQ ID NO: 19923 - DNA, 17 bp, synthetic construct
  misc_feature 1..17: note = Oligonucleotide
  source 1..17: mol_type = other DNA
gctgggtaagtgaccag

SEQ ID NO: 19924 - DNA, 17 bp, synthetic construct
  misc_feature 1..17: note = Oligonucleotide
  source 1..17: mol_type = other DNA
tctgctgggtaagtgac

SEQ ID NO: 19925 - DNA, 17 bp, synthetic construct
  misc_feature 1..17: note = Oligonucleotide
  source 1..17: mol_type = other DNA
ctctctgctgggtaagt

SEQ ID NO: 19926 - DNA, 17 bp, synthetic construct
  misc_feature 1..17: note = Oligonucleotide
  source 1..17: mol_type = other DNA
ctgctctctgctgggta

SEQ ID NO: 19927 - DNA, 17 bp, synthetic construct
  misc_feature 1..17: note = Oligonucleotide
  source 1..17: mol_type = other DNA
agactgctctctgctgg

SEQ ID NO: 19928 - DNA, 17 bp, synthetic construct
  misc_feature 1..17: note = Oligonucleotide
  source 1..17: mol_type = other DNA
gggagactgctctctgc

SEQ ID NO: 19929 - DNA, 17 bp, synthetic construct
  misc_feature 1..17: note = Oligonucleotide
  source 1..17: mol_type = other DNA
cgtgggagactgctctc

SEQ ID NO: 19930 - DNA, 17 bp, synthetic construct
  misc_feature 1..17: note = Oligonucleotide
  source 1..17: mol_type = other DNA
tgccgtgggagactgct

SEQ ID NO: 19931 - DNA, 17 bp, synthetic construct
  misc_feature 1..17: note = Oligonucleotide
  source 1..17: mol_type = other DNA
aggtgccgtgggagact

SEQ ID NO: 19932 - DNA, 17 bp, synthetic construct
  misc_feature 1..17: note = Oligonucleotide
  source 1..17: mol_type = other DNA
aggaggtgccgtgggag

SEQ ID NO: 19933 - DNA, 17 bp, synthetic construct
  misc_feature 1..17: note = Oligonucleotide
  source 1..17: mol_type = other DNA
gccaggaggtgccgtgg

SEQ ID NO: 19934 - DNA, 17 bp, synthetic construct
  misc_feature 1..17: note = Oligonucleotide
  source 1..17: mol_type = other DNA
cctgccaggaggtgccg

SEQ ID NO: 19935 - DNA, 17 bp, synthetic construct
  misc_feature 1..17: note = Oligonucleotide
  source 1..17: mol_type = other DNA
ctgcctgccaggaggtg

SEQ ID NO: 19936 - DNA, 17 bp, synthetic construct
  misc_feature 1..17: note = Oligonucleotide
  source 1..17: mol_type = other DNA
cctctgcctgccaggag

SEQ ID NO: 19937 - DNA, 17 bp, synthetic construct
  misc_feature 1..17: note = Oligonucleotide
  source 1..17: mol_type = other DNA
caccctctgcctgccag

SEQ ID NO: 19938 - DNA, 17 bp, synthetic construct
  misc_feature 1..17: note = Oligonucleotide
  source 1..17: mol_type = other DNA
ctccaccctctgcctgc

SEQ ID NO: 19939 - DNA, 17 bp, synthetic construct
  misc_feature 1..17: note = Oligonucleotide
  source 1..17: mol_type = other DNA
cagctccaccctctgcc

SEQ ID NO: 19940 - DNA, 17 bp, synthetic construct
  misc_feature 1..17: note = Oligonucleotide
  source 1..17: mol_type = other DNA
tcacagctccaccctct

SEQ ID NO: 19941 - DNA, 17 bp, synthetic construct
  misc_feature 1..17: note = Oligonucleotide
  source 1..17: mol_type = other DNA
ccctcacagctccaccc

SEQ ID NO: 19942 - DNA, 17 bp, synthetic construct
  misc_feature 1..17: note = Oligonucleotide
  source 1..17: mol_type = other DNA
cctccctcacagctcca

SEQ ID NO: 19943 - DNA, 17 bp, synthetic construct
  misc_feature 1..17: note = Oligonucleotide
  source 1..17: mol_type = other DNA
ttccctccctcacagct

SEQ ID NO: 19944 - DNA, 17 bp, synthetic construct
  misc_feature 1..17: note = Oligonucleotide
  source 1..17: mol_type = other DNA
ccattccctccctcaca

SEQ ID NO: 19945 - DNA, 17 bp, synthetic construct
  misc_feature 1..17: note = Oligonucleotide
  source 1..17: mol_type = other DNA
tctccattccctccctc

SEQ ID NO: 19946 - DNA, 17 bp, synthetic construct
  misc_feature 1..17: note = Oligonucleotide
  source 1..17: mol_type = other DNA
gcttctccattccctcc

SEQ ID NO: 19947 - DNA, 17 bp, synthetic construct
  misc_feature 1..17: note = Oligonucleotide
  source 1..17: mol_type = other DNA
ctcgcttctccattccc

SEQ ID NO: 19948 - DNA, 17 bp, synthetic construct
  misc_feature 1..17: note = Oligonucleotide
  source 1..17: mol_type = other DNA
gacctcgcttctccatt

SEQ ID NO: 19949 - DNA, 17 bp, synthetic construct
  misc_feature 1..17: note = Oligonucleotide
  source 1..17: mol_type = other DNA
cctgacctcgcttctcc

SEQ ID NO: 19950 - DNA, 17 bp, synthetic construct
  misc_feature 1..17: note = Oligonucleotide
  source 1..17: mol_type = other DNA
acacctgacctcgcttc

SEQ ID NO: 19951 - DNA, 17 bp, synthetic construct
  misc_feature 1..17: note = Oligonucleotide
  source 1..17: mol_type = other DNA
aacacacctgacctcgc

SEQ ID NO: 19952 - DNA, 17 bp, synthetic construct
  misc_feature 1..17: note = Oligonucleotide
  source 1..17: mol_type = other DNA
cagaacacacctgacct

SEQ ID NO: 19953 - DNA, 17 bp, synthetic construct
  misc_feature 1..17: note = Oligonucleotide
  source 1..17: mol_type = other DNA
ctccagaacacacctga

SEQ ID NO: 19954 - DNA, 17 bp, synthetic construct
  misc_feature 1..17: note = Oligonucleotide
  source 1..17: mol_type = other DNA
ggcctccagaacacacc

SEQ ID NO: 19955 - DNA, 17 bp, synthetic construct
  misc_feature 1..17: note = Oligonucleotide
  source 1..17: mol_type = other DNA
ctgggcctccagaacac

SEQ ID NO: 19956 - DNA, 17 bp, synthetic construct
  misc_feature 1..17: note = Oligonucleotide
  source 1..17: mol_type = other DNA
ctgctgggcctccagaa

SEQ ID NO: 19957 - DNA, 17 bp, synthetic construct
  misc_feature 1..17: note = Oligonucleotide
  source 1..17: mol_type = other DNA
ctcctgctgggcctcca

SEQ ID NO: 19958 - DNA, 17 bp, synthetic construct
  misc_feature 1..17: note = Oligonucleotide
  source 1..17: mol_type = other DNA
ctgctcctgctgggcct

SEQ ID NO: 19959 - DNA, 17 bp, synthetic construct
  misc_feature 1..17: note = Oligonucleotide
  source 1..17: mol_type = other DNA
ggcctgctcctgctggg

SEQ ID NO: 19960 - DNA, 17 bp, synthetic construct
  misc_feature 1..17: note = Oligonucleotide
  source 1..17: mol_type = other DNA
cagggcctgctcctgct

SEQ ID NO: 19961 - DNA, 17 bp, synthetic construct
  misc_feature 1..17: note = Oligonucleotide
  source 1..17: mol_type = other DNA
gcacagggcctgctcct

SEQ ID NO: 19962 - DNA, 17 bp, synthetic construct
  misc_feature 1..17: note = Oligonucleotide
  source 1..17: mol_type = other DNA
aaggcacagggcctgct

SEQ ID NO: 19963 - DNA, 17 bp, synthetic construct
  misc_feature 1..17: note = Oligonucleotide
  source 1..17: mol_type = other DNA
gggaaggcacagggcct

SEQ ID NO: 19964 - DNA, 17 bp, synthetic construct
  misc_feature 1..17: note = Oligonucleotide
  source 1..17: mol_type = other DNA
ggagggaaggcacaggg

SEQ ID NO: 19965 - DNA, 17 bp, synthetic construct
  misc_feature 1..17: note = Oligonucleotide
  source 1..17: mol_type = other DNA
aggggagggaaggcaca

SEQ ID NO: 19966 - DNA, 17 bp, synthetic construct
  misc_feature 1..17: note = Oligonucleotide
  source 1..17: mol_type = other DNA
gggaggggagggaaggc

SEQ ID NO: 19967 - DNA, 17 bp, synthetic construct
  misc_feature 1..17: note = Oligonucleotide
  source 1..17: mol_type = other DNA
ggagggaggggagggaa

SEQ ID NO: 19968 - DNA, 17 bp, synthetic construct
  misc_feature 1..17: note = Oligonucleotide
  source 1..17: mol_type = other DNA
gaaggagggaggggagg

SEQ ID NO: 19969 - DNA, 17 bp, synthetic construct
  misc_feature 1..17: note = Oligonucleotide
  source 1..17: mol_type = other DNA
agggaaggagggagggg

SEQ ID NO: 19970 - DNA, 17 bp, synthetic construct
  misc_feature 1..17: note = Oligonucleotide
  source 1..17: mol_type = other DNA
gaaagggaaggagggag

SEQ ID NO: 19971 - DNA, 17 bp, synthetic construct
  misc_feature 1..17: note = Oligonucleotide
  source 1..17: mol_type = other DNA
aaagaaagggaaggagg

SEQ ID NO: 19972 - DNA, 17 bp, synthetic construct
  misc_feature 1..17: note = Oligonucleotide
  source 1..17: mol_type = other DNA
tgcaaagaaagggaagg

SEQ ID NO: 19973 - DNA, 17 bp, synthetic construct
  misc_feature 1..17: note = Oligonucleotide
  source 1..17: mol_type = other DNA
tactgcaaagaaaggga

SEQ ID NO: 19974 - DNA, 17 bp, synthetic construct
  misc_feature 1..17: note = Oligonucleotide
  source 1..17: mol_type = other DNA
ccttactgcaaagaaag

SEQ ID NO: 19975 - DNA, 17 bp, synthetic construct
  misc_feature 1..17: note = Oligonucleotide
  source 1..17: mol_type = other DNA
tgaccttactgcaaaga

SEQ ID NO: 19976 - DNA, 17 bp, synthetic construct
  misc_feature 1..17: note = Oligonucleotide
  source 1..17: mol_type = other DNA
tgctgaccttactgcaa

SEQ ID NO: 19977 - DNA, 17 bp, synthetic construct
  misc_feature 1..17: note = Oligonucleotide
  source 1..17: mol_type = other DNA
aagtgctgaccttactg

SEQ ID NO: 19978 - DNA, 17 bp, synthetic construct
  misc_feature 1..17: note = Oligonucleotide
  source 1..17: mol_type = other DNA
cccaagtgctgacctta

SEQ ID NO: 19979 - DNA, 17 bp, synthetic construct
  misc_feature 1..17: note = Oligonucleotide
  source 1..17: mol_type = other DNA
ccacccaagtgctgacc

SEQ ID NO: 19980 - DNA, 17 bp, synthetic construct
  misc_feature 1..17: note = Oligonucleotide
  source 1..17: mol_type = other DNA
tacccacccaagtgctg

SEQ ID NO: 19981 - DNA, 17 bp, synthetic construct
  misc_feature 1..17: note = Oligonucleotide
  source 1..17: mol_type = other DNA
tactacccacccaagtg

SEQ ID NO: 19982 - DNA, 17 bp, synthetic construct
  misc_feature 1..17: note = Oligonucleotide
  source 1..17: mol_type = other DNA
tcctactacccacccaa

SEQ ID NO: 19983 - DNA, 17 bp, synthetic construct
  misc_feature 1..17: note = Oligonucleotide
  source 1..17: mol_type = other DNA
atctcctactacccacc

SEQ ID NO: 19984 - DNA, 17 bp, synthetic construct
  misc_feature 1..17: note = Oligonucleotide
  source 1..17: mol_type = other DNA
gccatctcctactaccc

SEQ ID NO: 19985 - DNA, 17 bp, synthetic construct
  misc_feature 1..17: note = Oligonucleotide
  source 1..17: mol_type = other DNA
acagccatctcctacta

SEQ ID NO: 19986 - DNA, 17 bp, synthetic construct
  misc_feature 1..17: note = Oligonucleotide
  source 1..17: mol_type = other DNA
aacacagccatctccta

SEQ ID NO: 19987 - DNA, 17 bp, synthetic construct
  misc_feature 1..17: note = Oligonucleotide
  source 1..17: mol_type = other DNA
cccaacacagccatctc

SEQ ID NO: 19988 - DNA, 17 bp, synthetic construct
  misc_feature 1..17: note = Oligonucleotide
  source 1..17: mol_type = other DNA
atgcccaacacagccat

SEQ ID NO: 19989 - DNA, 17 bp, synthetic construct
  misc_feature 1..17: note = Oligonucleotide
  source 1..17: mol_type = other DNA
aaaatgcccaacacagc

SEQ ID NO: 19990 - DNA, 17 bp, synthetic construct
  misc_feature 1..17: note = Oligonucleotide
  source 1..17: mol_type = other DNA
gagaaaatgcccaacac

SEQ ID NO: 19991 - DNA, 17 bp, synthetic construct
  misc_feature 1..17: note = Oligonucleotide
  source 1..17: mol_type = other DNA
gaagagaaaatgcccaa

SEQ ID NO: 19992 - DNA, 17 bp, synthetic construct
  misc_feature 1..17: note = Oligonucleotide
  source 1..17: mol_type = other DNA
gctgaagagaaaatgcc

SEQ ID NO: 19993 - DNA, 17 bp, synthetic construct
  misc_feature 1..17: note = Oligonucleotide
  source 1..17: mol_type = other DNA
ccagctgaagagaaaat

SEQ ID NO: 19994 - DNA, 17 bp, synthetic construct
  misc_feature 1..17: note = Oligonucleotide
  source 1..17: mol_type = other DNA
aagccagctgaagagaa

SEQ ID NO: 19995 - DNA, 17 bp, synthetic construct
  misc_feature 1..17: note = Oligonucleotide
  source 1..17: mol_type = other DNA
taaaagccagctgaaga

SEQ ID NO: 19996 - DNA, 17 bp, synthetic construct
  misc_feature 1..17: note = Oligonucleotide
  source 1..17: mol_type = other DNA
acataaaagccagctga

SEQ ID NO: 19997 - DNA, 17 bp, synthetic construct
  misc_feature 1..17: note = Oligonucleotide
  source 1..17: mol_type = other DNA
gacacataaaagccagc

SEQ ID NO: 19998 - DNA, 17 bp, synthetic construct
  misc_feature 1..17: note = Oligonucleotide
  source 1..17: mol_type = other DNA
taagacacataaaagcc

SEQ ID NO: 19999 - DNA, 17 bp, synthetic construct
  misc_feature 1..17: note = Oligonucleotide
  source 1..17: mol_type = other DNA
taataagacacataaaa

SEQ ID NO: 20000 - DNA, 17 bp, synthetic construct
  misc_feature 1..17: note = Oligonucleotide
  source 1..17: mol_type = other DNA
tgttaataagacacata

SEQ ID NO: 20001 - DNA, 17 bp, synthetic construct
  misc_feature 1..17: note = Oligonucleotide
  source 1..17: mol_type = other DNA
ttttgttaataagacac

SEQ ID NO: 20002 - DNA, 17 bp, synthetic construct
  misc_feature 1..17: note = Oligonucleotide
  source 1..17: mol_type = other DNA
cagttttgttaataaga

SEQ ID NO: 20003 - DNA, 17 bp, synthetic construct
  misc_feature 1..17: note = Oligonucleotide
  source 1..17: mol_type = other DNA
ttccagttttgttaata

SEQ ID NO: 20004 - DNA, 17 bp, synthetic construct
  misc_feature 1..17: note = Oligonucleotide
  source 1..17: mol_type = other DNA
tttttccagttttgtta

SEQ ID NO: 20005 - DNA, 17 bp, synthetic construct
  misc_feature 1..17: note = Oligonucleotide
  source 1..17: mol_type = other DNA
tcatttttccagttttg

SEQ ID NO: 20006 - DNA, 17 bp, synthetic construct
  misc_feature 1..17: note = Oligonucleotide
  source 1..17: mol_type = other DNA
aactcatttttccagtt

SEQ ID NO: 20007 - DNA, 17 bp, synthetic construct
  misc_feature 1..17: note = Oligonucleotide
  source 1..17: mol_type = other DNA
acaaactcatttttcca

SEQ ID NO: 20008 - DNA, 17 bp, synthetic construct
  misc_feature 1..17: note = Oligonucleotide
  source 1..17: mol_type = other DNA
aacacaaactcattttt

SEQ ID NO: 20009 - DNA, 17 bp, synthetic construct
  misc_feature 1..17: note = Oligonucleotide
  source 1..17: mol_type = other DNA
cataacacaaactcatt

SEQ ID NO: 20010 - DNA, 17 bp, synthetic construct
  misc_feature 1..17: note = Oligonucleotide
  source 1..17: mol_type = other DNA
ttacataacacaaactc

SEQ ID NO: 20011 - DNA, 17 bp, synthetic construct
  misc_feature 1..17: note = Oligonucleotide
  source 1..17: mol_type = other DNA
ggattacataacacaaa

SEQ ID NO: 20012 - DNA, 17 bp, synthetic construct
  misc_feature 1..17: note = Oligonucleotide
  source 1..17: mol_type = other DNA
tatggattacataacac

SEQ ID NO: 20013 - DNA, 17 bp, synthetic construct
  misc_feature 1..17: note = Oligonucleotide
  source 1..17: mol_type = other DNA
ttgtatggattacataa

SEQ ID NO: 20014 - DNA, 17 bp, synthetic construct
  misc_feature 1..17: note = Oligonucleotide
  source 1..17: mol_type = other DNA
aaattgtatggattaca

SEQ ID NO: 20015 - DNA, 17 bp, synthetic construct
  misc_feature 1..17: note = Oligonucleotide
  source 1..17: mol_type = other DNA
aacaaattgtatggatt

SEQ ID NO: 20016 - DNA, 17 bp, synthetic construct
  misc_feature 1..17: note = Oligonucleotide
  source 1..17: mol_type = other DNA
ccaaacaaattgtatgg

SEQ ID NO: 20017 - DNA, 17 bp, synthetic construct
  misc_feature 1..17: note = Oligonucleotide
  source 1..17: mol_type = other DNA
caaccaaacaaattgta

SEQ ID NO: 20018 - DNA, 17 bp, synthetic construct
  misc_feature 1..17: note = Oligonucleotide
  source 1..17: mol_type = other DNA
tgtcaaccaaacaaatt

SEQ ID NO: 20019 - DNA, 17 bp, synthetic construct
  misc_feature 1..17: note = Oligonucleotide
  source 1..17: mol_type = other DNA
tgttgtcaaccaaacaa

SEQ ID NO: 20020 - DNA, 17 bp, synthetic construct
  misc_feature 1..17: note = Oligonucleotide
  source 1..17: mol_type = other DNA
agatgttgtcaaccaaa

SEQ ID NO: 20021 - DNA, 17 bp, synthetic construct
  misc_feature 1..17: note = Oligonucleotide
  source 1..17: mol_type = other DNA
ttcagatgttgtcaacc

SEQ ID NO: 20022 - DNA, 17 bp, synthetic construct
  misc_feature 1..17: note = Oligonucleotide
  source 1..17: mol_type = other DNA
gttttcagatgttgtca

SEQ ID NO: 20023 - DNA, 17 bp, synthetic construct
  misc_feature 1..17: note = Oligonucleotide
  source 1..17: mol_type = other DNA
cctgttttcagatgttg

SEQ ID NO: 20024 - DNA, 17 bp, synthetic construct
  misc_feature 1..17: note = Oligonucleotide
  source 1..17: mol_type = other DNA
cctcctgttttcagatg

SEQ ID NO: 20025 - DNA, 17 bp, synthetic construct
  misc_feature 1..17: note = Oligonucleotide
  source 1..17: mol_type = other DNA
cagcctcctgttttcag

SEQ ID NO: 20026 - DNA, 17 bp, synthetic construct
  misc_feature 1..17: note = Oligonucleotide
  source 1..17: mol_type = other DNA
gaccagcctcctgtttt

SEQ ID NO: 20027 - DNA, 17 bp, synthetic construct
  misc_feature 1..17: note = Oligonucleotide
  source 1..17: mol_type = other DNA
cttgaccagcctcctgt

SEQ ID NO: 20028 - DNA, 17 bp, synthetic construct
  misc_feature 1..17: note = Oligonucleotide
  source 1..17: mol_type = other DNA
gcacttgaccagcctcc

SEQ ID NO: 20029 - DNA, 17 bp, synthetic construct
  misc_feature 1..17: note = Oligonucleotide
  source 1..17: mol_type = other DNA
cttgcacttgaccagcc

SEQ ID NO: 20030 - DNA, 17 bp, synthetic construct
  misc_feature 1..17: note = Oligonucleotide
  source 1..17: mol_type = other DNA
acacttgcacttgacca

SEQ ID NO: 20031 - DNA, 17 bp, synthetic construct
  misc_feature 1..17: note = Oligonucleotide
  source 1..17: mol_type = other DNA
gccacacttgcacttga

SEQ ID NO: 20032 - DNA, 17 bp, synthetic construct
  misc_feature 1..17: note = Oligonucleotide
  source 1..17: mol_type = other DNA
cccgccacacttgcact

SEQ ID NO: 20033 - DNA, 17 bp, synthetic construct
  misc_feature 1..17: note = Oligonucleotide
  source 1..17: mol_type = other DNA
gaacccgccacacttgc

SEQ ID NO: 20034 - DNA, 17 bp, synthetic construct
  misc_feature 1..17: note = Oligonucleotide
  source 1..17: mol_type = other DNA
gaagaacccgccacact

SEQ ID NO: 20035 - DNA, 17 bp, synthetic construct
  misc_feature 1..17: note = Oligonucleotide
  source 1..17: mol_type = other DNA
gctgaagaacccgccac

SEQ ID NO: 20036 - DNA, 17 bp, synthetic construct
  misc_feature 1..17: note = Oligonucleotide
  source 1..17: mol_type = other DNA
cctgctgaagaacccgc

SEQ ID NO: 20037 - DNA, 17 bp, synthetic construct
  misc_feature 1..17: note = Oligonucleotide
  source 1..17: mol_type = other DNA
ctgcctgctgaagaacc

SEQ ID NO: 20038 - DNA, 17 bp, synthetic construct
  misc_feature 1..17: note = Oligonucleotide
  source 1..17: mol_type = other DNA
gtgctgcctgctgaaga

SEQ ID NO: 20039 - DNA, 17 bp, synthetic construct
  misc_feature 1..17: note = Oligonucleotide
  source 1..17: mol_type = other DNA
atggtgctgcctgctga

SEQ ID NO: 20040 - DNA, 17 bp, synthetic construct
  misc_feature 1..17: note = Oligonucleotide
  source 1..17: mol_type = other DNA
gtcatggtgctgcctgc

SEQ ID NO: 20041 - DNA, 17 bp, synthetic construct
  misc_feature 1..17: note = Oligonucleotide
  source 1..17: mol_type = other DNA
agtgtcatggtgctgcc

SEQ ID NO: 20042 - DNA, 17 bp, synthetic construct
  misc_feature 1..17: note = Oligonucleotide
  source 1..17: mol_type = other DNA
ggaagtgtcatggtgct

SEQ ID NO: 20043 - DNA, 17 bp, synthetic construct
  misc_feature 1..17: note = Oligonucleotide
  source 1..17: mol_type = other DNA
cacggaagtgtcatggt

SEQ ID NO: 20044 - DNA, 17 bp, synthetic construct
  misc_feature 1..17: note = Oligonucleotide
  source 1..17: mol_type = other DNA
aggcacggaagtgtcat

SEQ ID NO: 20045 - DNA, 17 bp, synthetic construct
  misc_feature 1..17: note = Oligonucleotide
  source 1..17: mol_type = other DNA
cagaggcacggaagtgt

SEQ ID NO: 20046 - DNA, 17 bp, synthetic construct
  misc_feature 1..17: note = Oligonucleotide
  source 1..17: mol_type = other DNA
cgacagaggcacggaag

SEQ ID NO: 20047 - DNA, 17 bp, synthetic construct
  misc_feature 1..17: note = Oligonucleotide
  source 1..17: mol_type = other DNA
cgtcgacagaggcacgg

SEQ ID NO: 20048 - DNA, 17 bp, synthetic construct
  misc_feature 1..17: note = Oligonucleotide
  source 1..17: mol_type = other DNA
ccacgtcgacagaggca

SEQ ID NO: 20049 - DNA, 17 bp, synthetic construct
  misc_feature 1..17: note = Oligonucleotide
  source 1..17: mol_type = other DNA
tctccacgtcgacagag

SEQ ID NO: 20050 - DNA, 17 bp, synthetic construct
  misc_feature 1..17: note = Oligonucleotide
  source 1..17: mol_type = other DNA
ccttctccacgtcgaca

SEQ ID NO: 20051 - DNA, 17 bp, synthetic construct
  misc_feature 1..17: note = Oligonucleotide
  source 1..17: mol_type = other DNA
cacccttctccacgtcg

SEQ ID NO: 20052 - DNA, 17 bp, synthetic construct
  misc_feature 1..17: note = Oligonucleotide
  source 1..17: mol_type = other DNA
tcacacccttctccacg

SEQ ID NO: 20053 - DNA, 17 bp, synthetic construct
  misc_feature 1..17: note = Oligonucleotide
  source 1..17: mol_type = other DNA
ccatcacacccttctcc

SEQ ID NO: 20054 - DNA, 17 bp, synthetic construct
  misc_feature 1..17: note = Oligonucleotide
  source 1..17: mol_type = other DNA
cctccatcacacccttc

SEQ ID NO: 20055 - DNA, 17 bp, synthetic construct
  misc_feature 1..17: note = Oligonucleotide
  source 1..17: mol_type = other DNA
tttcctccatcacaccc

SEQ ID NO: 20056 - DNA, 17 bp, synthetic construct
  misc_feature 1..17: note = Oligonucleotide
  source 1..17: mol_type = other DNA
tcctttcctccatcaca

SEQ ID NO: 20057 - DNA, 17 bp, synthetic construct
  misc_feature 1..17: note = Oligonucleotide
  source 1..17: mol_type = other DNA
ccctcctttcctccatc

SEQ ID NO: 20058 - DNA, 17 bp, synthetic construct
  misc_feature 1..17: note = Oligonucleotide
  source 1..17: mol_type = other DNA
gacccctcctttcctcc

SEQ ID NO: 20059 - DNA, 17 bp, synthetic construct
  misc_feature 1..17: note = Oligonucleotide
  source 1..17: mol_type = other DNA
tcagacccctcctttcc

SEQ ID NO: 20060 - DNA, 17 bp, synthetic construct
  misc_feature 1..17: note = Oligonucleotide
  source 1..17: mol_type = other DNA
gcatcagacccctcctt

SEQ ID NO: 20061 - DNA, 17 bp, synthetic construct
  misc_feature 1..17: note = Oligonucleotide
  source 1..17: mol_type = other DNA
ggggcatcagacccctc

SEQ ID NO: 20062 - DNA, 17 bp, synthetic construct
  misc_feature 1..17: note = Oligonucleotide
  source 1..17: mol_type = other DNA
ggtggggcatcagaccc

SEQ ID NO: 20063 - DNA, 17 bp, synthetic construct
  misc_feature 1..17: note = Oligonucleotide
  source 1..17: mol_type = other DNA
tcaggtggggcatcaga

SEQ ID NO: 20064 - DNA, 17 bp, synthetic construct
  misc_feature 1..17: note = Oligonucleotide
  source 1..17: mol_type = other DNA
cactcaggtggggcatc

SEQ ID NO: 20065 - DNA, 17 bp, synthetic construct
  misc_feature 1..17: note = Oligonucleotide
  source 1..17: mol_type = other DNA
caccactcaggtggggc

SEQ ID NO: 20066 - DNA, 17 bp, synthetic construct
  misc_feature 1..17: note = Oligonucleotide
  source 1..17: mol_type = other DNA
catcaccactcaggtgg

SEQ ID NO: 20067 - DNA, 17 bp, synthetic construct
  misc_feature 1..17: note = Oligonucleotide
  source 1..17: mol_type = other DNA
cctcatcaccactcagg

SEQ ID NO: 20068 - DNA, 17 bp, synthetic construct
  misc_feature 1..17: note = Oligonucleotide
  source 1..17: mol_type = other DNA
aagcctcatcaccactc

SEQ ID NO: 20069 - DNA, 17 bp, synthetic construct
  misc_feature 1..17: note = Oligonucleotide
  source 1..17: mol_type = other DNA
gccaagcctcatcacca

SEQ ID NO: 20070 - DNA, 17 bp, synthetic construct
  misc_feature 1..17: note = Oligonucleotide
  source 1..17: mol_type = other DNA
caggccaagcctcatca

SEQ ID NO: 20071 - DNA, 17 bp, synthetic construct
  misc_feature 1..17: note = Oligonucleotide
  source 1..17: mol_type = other DNA
gctcaggccaagcctca

SEQ ID NO: 20072 - DNA, 17 bp, synthetic construct
  misc_feature 1..17: note = Oligonucleotide
  source 1..17: mol_type = other DNA
ccagctcaggccaagcc

SEQ ID NO: 20073 - DNA, 17 bp, synthetic construct
  misc_feature 1..17: note = Oligonucleotide
  source 1..17: mol_type = other DNA
aggccagctcaggccaa

SEQ ID NO: 20074 - DNA, 17 bp, synthetic construct
  misc_feature 1..17: note = Oligonucleotide
  source 1..17: mol_type = other DNA
ctaaggccagctcaggc

SEQ ID NO: 20075 - DNA, 17 bp, synthetic construct
  misc_feature 1..17: note = Oligonucleotide
  source 1..17: mol_type = other DNA
aacctaaggccagctca

SEQ ID NO: 20076 - DNA, 17 bp, synthetic construct
  misc_feature 1..17: note = Oligonucleotide
  source 1..17: mol_type = other DNA
ctgaacctaaggccagc

SEQ ID NO: 20077 - DNA, 17 bp, synthetic construct
  misc_feature 1..17: note = Oligonucleotide
  source 1..17: mol_type = other DNA
ccgctgaacctaaggcc

SEQ ID NO: 20078 - DNA, 17 bp, synthetic construct
  misc_feature 1..17: note = Oligonucleotide
  source 1..17: mol_type = other DNA
atcccgctgaacctaag

SEQ ID NO: 20079 - DNA, 17 bp, synthetic construct
  misc_feature 1..17: note = Oligonucleotide
  source 1..17: mol_type = other DNA
ctcatcccgctgaacct

SEQ ID NO: 20080 - DNA, 17 bp, synthetic construct
  misc_feature 1..17: note = Oligonucleotide
  source 1..17: mol_type = other DNA
cccctcatcccgctgaa

SEQ ID NO: 20081 - DNA, 17 bp, synthetic construct
  misc_feature 1..17: note = Oligonucleotide
  source 1..17: mol_type = other DNA
gcacccctcatcccgct

SEQ ID NO: 20082 - DNA, 17 bp, synthetic construct
  misc_feature 1..17: note = Oligonucleotide
  source 1..17: mol_type = other DNA
cctgcacccctcatccc

SEQ ID NO: 20083 - DNA, 17 bp, synthetic construct
  misc_feature 1..17: note = Oligonucleotide
  source 1..17: mol_type = other DNA
acacctgcacccctcat

SEQ ID NO: 20084 - DNA, 17 bp, synthetic construct
  misc_feature 1..17: note = Oligonucleotide
  source 1..17: mol_type = other DNA
accacacctgcacccct

SEQ ID NO: 20085 - DNA, 17 bp, synthetic construct
  misc_feature 1..17: note = Oligonucleotide
  source 1..17: mol_type = other DNA
ccaaccacacctgcacc

SEQ ID NO: 20086 - DNA, 17 bp, synthetic construct
  misc_feature 1..17: note = Oligonucleotide
  source 1..17: mol_type = other DNA
tccccaaccacacctgc

SEQ ID NO: 20087 - DNA, 17 bp, synthetic construct
  misc_feature 1..17: note = Oligonucleotide
  source 1..17: mol_type = other DNA
cattccccaaccacacc

SEQ ID NO: 20088 - DNA, 17 bp, synthetic construct
  misc_feature 1..17: note = Oligonucleotide
  source 1..17: mol_type = other DNA
tggcattccccaaccac

SEQ ID NO: 20089 - DNA, 17 bp, synthetic construct
  misc_feature 1..17: note = Oligonucleotide
  source 1..17: mol_type = other DNA
tcctggcattccccaac

SEQ ID NO: 20090 - DNA, 17 bp, synthetic construct
  misc_feature 1..17: note = Oligonucleotide
  source 1..17: mol_type = other DNA
ttatcctggcattcccc

SEQ ID NO: 20091 - DNA, 17 bp, synthetic construct
  misc_feature 1..17: note = Oligonucleotide
  source 1..17: mol_type = other DNA
atcttatcctggcattc

SEQ ID NO: 20092 - DNA, 17 bp, synthetic construct
  misc_feature 1..17: note = Oligonucleotide
  source 1..17: mol_type = other DNA
tatatcttatcctggca

SEQ ID NO: 20093 - DNA, 17 bp, synthetic construct
  misc_feature 1..17: note = Oligonucleotide
  source 1..17: mol_type = other DNA
acctatatcttatcctg

SEQ ID NO: 20094 - DNA, 17 bp, synthetic construct
  misc_feature 1..17: note = Oligonucleotide
  source 1..17: mol_type = other DNA
atgacctatatcttatc

SEQ ID NO: 20095 - DNA, 17 bp, synthetic construct
  misc_feature 1..17: note = Oligonucleotide
  source 1..17: mol_type = other DNA
ctgatgacctatatctt

SEQ ID NO: 20096 - DNA, 17 bp, synthetic construct
  misc_feature 1..17: note = Oligonucleotide
  source 1..17: mol_type = other DNA
gttctgatgacctatat

SEQ ID NO: 20097 - DNA, 17 bp, synthetic construct
  misc_feature 1..17: note = Oligonucleotide
  source 1..17: mol_type = other DNA
ttggttctgatgaccta

SEQ ID NO: 20098 - DNA, 17 bp, synthetic construct
  misc_feature 1..17: note = Oligonucleotide
  source 1..17: mol_type = other DNA
cccttggttctgatgac

SEQ ID NO: 20099 - DNA, 17 bp, synthetic construct
  misc_feature 1..17: note = Oligonucleotide
  source 1..17: mol_type = other DNA
atccccttggttctgat

SEQ ID NO: 20100 - DNA, 17 bp, synthetic construct
  misc_feature 1..17: note = Oligonucleotide
  source 1..17: mol_type = other DNA
aggatccccttggttct

SEQ ID NO: 20101 - DNA, 17 bp, synthetic construct
  misc_feature 1..17: note = Oligonucleotide
  source 1..17: mol_type = other DNA
tggaggatccccttggt

SEQ ID NO: 20102 - DNA, 17 bp, synthetic construct
  misc_feature 1..17: note = Oligonucleotide
  source 1..17: mol_type = other DNA
acttggaggatcccctt

SEQ ID NO: 20103 - DNA, 17 bp, synthetic construct
  misc_feature 1..17: note = Oligonucleotide
  source 1..17: mol_type = other DNA
ccaacttggaggatccc

SEQ ID NO: 20104 - DNA, 17 bp, synthetic construct
  misc_feature 1..17: note = Oligonucleotide
  source 1..17: mol_type = other DNA
aatccaacttggaggat

SEQ ID NO: 20105 - DNA, 17 bp, synthetic construct
  misc_feature 1..17: note = Oligonucleotide
  source 1..17: mol_type = other DNA
agaaatccaacttggag

SEQ ID NO: 20106 - DNA, 17 bp, synthetic construct
  misc_feature 1..17: note = Oligonucleotide
  source 1..17: mol_type = other DNA
tagagaaatccaacttg

SEQ ID NO: 20107 - DNA, 17 bp, synthetic construct
  misc_feature 1..17: note = Oligonucleotide
  source 1..17: mol_type = other DNA
gaatagagaaatccaac

SEQ ID NO: 20108 - DNA, 17 bp, synthetic construct
  misc_feature 1..17: note = Oligonucleotide
  source 1..17: mol_type = other DNA
atagaatagagaaatcc

SEQ ID NO: 20109 - DNA, 17 bp, synthetic construct
  misc_feature 1..17: note = Oligonucleotide
  source 1..17: mol_type = other DNA
catatagaatagagaaa

SEQ ID NO: 20110 - DNA, 17 bp, synthetic construct
  misc_feature 1..17: note = Oligonucleotide
  source 1..17: mol_type = other DNA
gcccatatagaatagag

SEQ ID NO: 20111 - DNA, 17 bp, synthetic construct
  misc_feature 1..17: note = Oligonucleotide
  source 1..17: mol_type = other DNA
cccgcccatatagaata

SEQ ID NO: 20112 - DNA, 17 bp, synthetic construct
  misc_feature 1..17: note = Oligonucleotide
  source 1..17: mol_type = other DNA
aagcccgcccatataga

SEQ ID NO: 20113 - DNA, 17 bp, synthetic construct
  misc_feature 1..17: note = Oligonucleotide
  source 1..17: mol_type = other DNA
tctaagcccgcccatat

SEQ ID NO: 20114 - DNA, 17 bp, synthetic construct
  misc_feature 1..17: note = Oligonucleotide
  source 1..17: mol_type = other DNA
ccctctaagcccgccca

SEQ ID NO: 20115 - DNA, 17 bp, synthetic construct
  misc_feature 1..17: note = Oligonucleotide
  source 1..17: mol_type = other DNA
gccccctctaagcccgc

SEQ ID NO: 20116 - DNA, 17 bp, synthetic construct
  misc_feature 1..17: note = Oligonucleotide
  source 1..17: mol_type = other DNA
acagccccctctaagcc

SEQ ID NO: 20117 - DNA, 17 bp, synthetic construct
  misc_feature 1..17: note = Oligonucleotide
  source 1..17: mol_type = other DNA
tcaacagccccctctaa

SEQ ID NO: 20118 - DNA, 17 bp, synthetic construct
  misc_feature 1..17: note = Oligonucleotide
  source 1..17: mol_type = other DNA
aagtcaacagccccctc

SEQ ID NO: 20119 - DNA, 17 bp, synthetic construct
  misc_feature 1..17: note = Oligonucleotide
  source 1..17: mol_type = other DNA
agtaagtcaacagcccc

SEQ ID NO: 20120 - DNA, 17 bp, synthetic construct
  misc_feature 1..17: note = Oligonucleotide
  source 1..17: mol_type = other DNA
ctcagtaagtcaacagc

SEQ ID NO: 20121 - DNA, 17 bp, synthetic construct
  misc_feature 1..17: note = Oligonucleotide
  source 1..17: mol_type = other DNA
actctcagtaagtcaac

SEQ ID NO: 20122 - DNA, 17 bp, synthetic construct
  misc_feature 1..17: note = Oligonucleotide
  source 1..17: mol_type = other DNA
gtgactctcagtaagtc

SEQ ID NO: 20123 - DNA, 17 bp, synthetic construct
  misc_feature 1..17: note = Oligonucleotide
  source 1..17: mol_type = other DNA
tgtgtgactctcagtaa

SEQ ID NO: 20124 - DNA, 17 bp, synthetic construct
  misc_feature 1..17: note = Oligonucleotide
  source 1..17: mol_type = other DNA
cgttgtgtgactctcag

SEQ ID NO: 20125 - DNA, 17 bp, synthetic construct
  misc_feature 1..17: note = Oligonucleotide
  source 1..17: mol_type = other DNA
ctacgttgtgtgactct

SEQ ID NO: 20126 - DNA, 17 bp, synthetic construct
  misc_feature 1..17: note = Oligonucleotide
  source 1..17: mol_type = other DNA
ctactacgttgtgtgac

SEQ ID NO: 20127 - DNA, 17 bp, synthetic construct
  misc_feature 1..17: note = Oligonucleotide
  source 1..17: mol_type = other DNA
cagctactacgttgtgt

SEQ ID NO: 20128 - DNA, 17 bp, synthetic construct
  misc_feature 1..17: note = Oligonucleotide
  source 1..17: mol_type = other DNA
tcccagctactacgttg

SEQ ID NO: 20129 - DNA, 17 bp, synthetic construct
  misc_feature 1..17: note = Oligonucleotide
  source 1..17: mol_type = other DNA
aggtcccagctactacg

SEQ ID NO: 20130 - DNA, 17 bp, synthetic construct
  misc_feature 1..17: note = Oligonucleotide
  source 1..17: mol_type = other DNA
tccaggtcccagctact

SEQ ID NO: 20131 - DNA, 17 bp, synthetic construct
  misc_feature 1..17: note = Oligonucleotide
  source 1..17: mol_type = other DNA
gattccaggtcccagct

SEQ ID NO: 20132 - DNA, 17 bp, synthetic construct
  misc_feature 1..17: note = Oligonucleotide
  source 1..17: mol_type = other DNA
ctggattccaggtccca

SEQ ID NO: 20133 - DNA, 17 bp, synthetic construct
  misc_feature 1..17: note = Oligonucleotide
  source 1..17: mol_type = other DNA
gggctggattccaggtc

SEQ ID NO: 20134 - DNA, 17 bp, synthetic construct
  misc_feature 1..17: note = Oligonucleotide
  source 1..17: mol_type = other DNA
atcgggctggattccag

SEQ ID NO: 20135 - DNA, 17 bp, synthetic construct
  misc_feature 1..17: note = Oligonucleotide
  source 1..17: mol_type = other DNA
agtatcgggctggattc

SEQ ID NO: 20136 - DNA, 17 bp, synthetic construct
  misc_feature 1..17: note = Oligonucleotide
  source 1..17: mol_type = other DNA
aaaagtatcgggctgga

SEQ ID NO: 20137 - DNA, 17 bp, synthetic construct
  misc_feature 1..17: note = Oligonucleotide
  source 1..17: mol_type = other DNA
caaaaaagtatcgggct

SEQ ID NO: 20138 - DNA, 17 bp, synthetic construct
  misc_feature 1..17: note = Oligonucleotide
  source 1..17: mol_type = other DNA
tatcaaaaaagtatcgg

SEQ ID NO: 20139 - DNA, 17 bp, synthetic construct
  misc_feature 1..17: note = Oligonucleotide
  source 1..17: mol_type = other DNA
agatatcaaaaaagtat

SEQ ID NO: 20140 - DNA, 17 bp, synthetic construct
  misc_feature 1..17: note = Oligonucleotide
  source 1..17: mol_type = other DNA
cacagatatcaaaaaag

SEQ ID NO: 20141 - DNA, 17 bp, synthetic construct
  misc_feature 1..17: note = Oligonucleotide
  source 1..17: mol_type = other DNA
aggcacagatatcaaaa

SEQ ID NO: 20142 - DNA, 17 bp, synthetic construct
  misc_feature 1..17: note = Oligonucleotide
  source 1..17: mol_type = other DNA
agaaggcacagatatca

SEQ ID NO: 20143 - DNA, 17 bp, synthetic construct
  misc_feature 1..17: note = Oligonucleotide
  source 1..17: mol_type = other DNA
atcagaaggcacagata

SEQ ID NO: 20144 - DNA, 17 bp, synthetic construct
  misc_feature 1..17: note = Oligonucleotide
  source 1..17: mol_type = other DNA
tctatcagaaggcacag

SEQ ID NO: 20145 - DNA, 17 bp, synthetic construct
  misc_feature 1..17: note = Oligonucleotide
  source 1..17: mol_type = other DNA
atttctatcagaaggca

SEQ ID NO: 20146 - DNA, 17 bp, synthetic construct
  misc_feature 1..17: note = Oligonucleotide
  source 1..17: mol_type = other DNA
cctatttctatcagaag

SEQ ID NO: 20147 - DNA, 17 bp, synthetic construct
  misc_feature 1..17: note = Oligonucleotide
  source 1..17: mol_type = other DNA
gtgcctatttctatcag

SEQ ID NO: 20148 - DNA, 17 bp, synthetic construct
  misc_feature 1..17: note = Oligonucleotide
  source 1..17: mol_type = other DNA
agagtgcctatttctat

SEQ ID NO: 20149 - DNA, 17 bp, synthetic construct
  misc_feature 1..17: note = Oligonucleotide
  source 1..17: mol_type = other DNA
gaaagagtgcctatttc

SEQ ID NO: 20150 - DNA, 17 bp, synthetic construct
  misc_feature 1..17: note = Oligonucleotide
  source 1..17: mol_type = other DNA
gaggaaagagtgcctat

SEQ ID NO: 20151 - DNA, 17 bp, synthetic construct
  misc_feature 1..17: note = Oligonucleotide
  source 1..17: mol_type = other DNA
aaagaggaaagagtgcc

SEQ ID NO: 20152 - DNA, 17 bp, synthetic construct
  misc_feature 1..17: note = Oligonucleotide
  source 1..17: mol_type = other DNA
cggaaagaggaaagagt

SEQ ID NO: 20153 - DNA, 17 bp, synthetic construct
  misc_feature 1..17: note = Oligonucleotide
  source 1..17: mol_type = other DNA
ggacggaaagaggaaag

SEQ ID NO: 20154 - DNA, 17 bp, synthetic construct
  misc_feature 1..17: note = Oligonucleotide
  source 1..17: mol_type = other DNA
gccggacggaaagagga

SEQ ID NO: 20155 - DNA, 17 bp, synthetic construct
  misc_feature 1..17: note = Oligonucleotide
  source 1..17: mol_type = other DNA
gtggccggacggaaaga

SEQ ID NO: 20156 - DNA, 17 bp, synthetic construct
  misc_feature 1..17: note = Oligonucleotide
  source 1..17: mol_type = other DNA
gcagtggccggacggaa

SEQ ID NO: 20157 - DNA, 17 bp, synthetic construct
  misc_feature 1..17: note = Oligonucleotide
  source 1..17: mol_type = other DNA
ggagcagtggccggacg

SEQ ID NO: 20158 - DNA, 17 bp, synthetic construct
  misc_feature 1..17: note = Oligonucleotide
  source 1..17: mol_type = other DNA
ggtggagcagtggccgg

SEQ ID NO: 20159 - DNA, 17 bp, synthetic construct
  misc_feature 1..17: note = Oligonucleotide
  source 1..17: mol_type = other DNA
ataggtggagcagtggc

SEQ ID NO: 20160 - DNA, 17 bp, synthetic construct
  misc_feature 1..17: note = Oligonucleotide
  source 1..17: mol_type = other DNA
aacataggtggagcagt

SEQ ID NO: 20161 - DNA, 17 bp, synthetic construct
  misc_feature 1..17: note = Oligonucleotide
  source 1..17: mol_type = other DNA
gtaaacataggtggagc

SEQ ID NO: 20162 - DNA, 17 bp, synthetic construct
  misc_feature 1..17: note = Oligonucleotide
  source 1..17: mol_type = other DNA
gctgtaaacataggtgg

SEQ ID NO: 20163 - DNA, 17 bp, synthetic construct
  misc_feature 1..17: note = Oligonucleotide
  source 1..17: mol_type = other DNA
atggctgtaaacatagg

SEQ ID NO: 20164 - DNA, 17 bp, synthetic construct
  misc_feature 1..17: note = Oligonucleotide
  source 1..17: mol_type = other DNA
tagatggctgtaaacat

SEQ ID NO: 20165 - DNA, 17 bp, synthetic construct
  misc_feature 1..17: note = Oligonucleotide
  source 1..17: mol_type = other DNA
ggatagatggctgtaaa

SEQ ID NO: 20166 - DNA, 17 bp, synthetic construct
  misc_feature 1..17: note = Oligonucleotide
  source 1..17: mol_type = other DNA
aaaggatagatggctgt

SEQ ID NO: 20167 - DNA, 17 bp, synthetic construct
  misc_feature 1..17: note = Oligonucleotide
  source 1..17: mol_type = other DNA
gtcaaaggatagatggc

SEQ ID NO: 20168 - DNA, 17 bp, synthetic construct
  misc_feature 1..17: note = Oligonucleotide
  source 1..17: mol_type = other DNA
tgagtcaaaggatagat

SEQ ID NO: 20169 - DNA, 17 bp, synthetic construct
  misc_feature 1..17: note = Oligonucleotide
  source 1..17: mol_type = other DNA
gggtgagtcaaaggata

SEQ ID NO: 20170 - DNA, 17 bp, synthetic construct
  misc_feature 1..17: note = Oligonucleotide
  source 1..17: mol_type = other DNA
ggtgggtgagtcaaagg

SEQ ID NO: 20171 - DNA, 17 bp, synthetic construct
  misc_feature 1..17: note = Oligonucleotide
  source 1..17: mol_type = other DNA
atgggtgggtgagtcaa

SEQ ID NO: 20172 - DNA, 17 bp, synthetic construct
  misc_feature 1..17: note = Oligonucleotide
  source 1..17: mol_type = other DNA
gggatgggtgggtgagt

SEQ ID NO: 20173 - DNA, 17 bp, synthetic construct
  misc_feature 1..17: note = Oligonucleotide
  source 1..17: mol_type = other DNA
ggtgggatgggtgggtg

SEQ ID NO: 20174 - DNA, 17 bp, synthetic construct
  misc_feature 1..17: note = Oligonucleotide
  source 1..17: mol_type = other DNA
gatggtgggatgggtgg

SEQ ID NO: 20175 - DNA, 17 bp, synthetic construct
  misc_feature 1..17: note = Oligonucleotide
  source 1..17: mol_type = other DNA
gatgatggtgggatggg

SEQ ID NO: 20176 - DNA, 17 bp, synthetic construct
  misc_feature 1..17: note = Oligonucleotide
  source 1..17: mol_type = other DNA
gaagatgatggtgggat

SEQ ID NO: 20177 - DNA, 17 bp, synthetic construct
  misc_feature 1..17: note = Oligonucleotide
  source 1..17: mol_type = other DNA
taagaagatgatggtgg

SEQ ID NO: 20178 - DNA, 17 bp, synthetic construct
  misc_feature 1..17: note = Oligonucleotide
  source 1..17: mol_type = other DNA
ggttaagaagatgatgg

SEQ ID NO: 20179 - DNA, 17 bp, synthetic construct
  misc_feature 1..17: note = Oligonucleotide
  source 1..17: mol_type = other DNA
aacggttaagaagatga

SEQ ID NO: 20180 - DNA, 17 bp, synthetic construct
  misc_feature 1..17: note = Oligonucleotide
  source 1..17: mol_type = other DNA
gtcaacggttaagaaga

SEQ ID NO: 20181 - DNA, 17 bp, synthetic construct
  misc_feature 1..17: note = Oligonucleotide
  source 1..17: mol_type = other DNA
tgagtcaacggttaaga

SEQ ID NO: 20182 - DNA, 17 bp, synthetic construct
  misc_feature 1..17: note = Oligonucleotide
  source 1..17: mol_type = other DNA
tggtgagtcaacggtta

SEQ ID NO: 20183 - DNA, 17 bp, synthetic construct
  misc_feature 1..17: note = Oligonucleotide
  source 1..17: mol_type = other DNA
ggctggtgagtcaacgg

SEQ ID NO: 20184 - DNA, 17 bp, synthetic construct
  misc_feature 1..17: note = Oligonucleotide
  source 1..17: mol_type = other DNA
gttggctggtgagtcaa

SEQ ID NO: 20185 - DNA, 17 bp, synthetic construct
  misc_feature 1..17: note = Oligonucleotide
  source 1..17: mol_type = other DNA
tgggttggctggtgagt

SEQ ID NO: 20186 - DNA, 17 bp, synthetic construct
  misc_feature 1..17: note = Oligonucleotide
  source 1..17: mol_type = other DNA
gattgggttggctggtg

SEQ ID NO: 20187 - DNA, 17 bp, synthetic construct
  misc_feature 1..17: note = Oligonucleotide
  source 1..17: mol_type = other DNA
gtggattgggttggctg

SEQ ID NO: 20188 - DNA, 17 bp, synthetic construct
  misc_feature 1..17: note = Oligonucleotide
  source 1..17: mol_type = other DNA
gtggtggattgggttgg

SEQ ID NO: 20189 - DNA, 17 bp, synthetic construct
  misc_feature 1..17: note = Oligonucleotide
  source 1..17: mol_type = other DNA
ggggtggtggattgggt

SEQ ID NO: 20190 - DNA, 17 bp, synthetic construct
  misc_feature 1..17: note = Oligonucleotide
  source 1..17: mol_type = other DNA
ggaggggtggtggattg

SEQ ID NO: 20191 - DNA, 17 bp, synthetic construct
  misc_feature 1..17: note = Oligonucleotide
  source 1..17: mol_type = other DNA
aagggaggggtggtgga

SEQ ID NO: 20192 - DNA, 17 bp, synthetic construct
  misc_feature 1..17: note = Oligonucleotide
  source 1..17: mol_type = other DNA
aggaagggaggggtggt

SEQ ID NO: 20193 - DNA, 17 bp, synthetic construct
  misc_feature 1..17: note = Oligonucleotide
  source 1..17: mol_type = other DNA
tggaggaagggaggggt

SEQ ID NO: 20194 - DNA, 17 bp, synthetic construct
  misc_feature 1..17: note = Oligonucleotide
  source 1..17: mol_type = other DNA
ggatggaggaagggagg

SEQ ID NO: 20195 - DNA, 17 bp, synthetic construct
  misc_feature 1..17: note = Oligonucleotide
  source 1..17: mol_type = other DNA
gatggatggaggaaggg

SEQ ID NO: 20196 - DNA, 17 bp, synthetic construct
  misc_feature 1..17: note = Oligonucleotide
  source 1..17: mol_type = other DNA
gtggatggatggaggaa

SEQ ID NO: 20197 - DNA, 17 bp, synthetic construct
  misc_feature 1..17: note = Oligonucleotide
  source 1..17: mol_type = other DNA
gaggtggatggatggag

SEQ ID NO: 20198 - DNA, 17 bp, synthetic construct
  misc_feature 1..17: note = Oligonucleotide
  source 1..17: mol_type = other DNA
ggagaggtggatggatg

SEQ ID NO: 20199 - DNA, 17 bp, synthetic construct
  misc_feature 1..17: note = Oligonucleotide
  source 1..17: mol_type = other DNA
ggtggagaggtggatgg

SEQ ID NO: 20200 - DNA, 17 bp, synthetic construct
  misc_feature 1..17: note = Oligonucleotide
  source 1..17: mol_type = other DNA
gtaggtggagaggtgga

SEQ ID NO: 20201 - DNA, 17 bp, synthetic construct
  misc_feature 1..17: note = Oligonucleotide
  source 1..17: mol_type = other DNA
caggtaggtggagaggt

SEQ ID NO: 20202 - DNA, 17 bp, synthetic construct
  misc_feature 1..17: note = Oligonucleotide
  source 1..17: mol_type = other DNA
agacaggtaggtggaga

SEQ ID NO: 20203 - DNA, 17 bp, synthetic construct
  misc_feature 1..17: note = Oligonucleotide
  source 1..17: mol_type = other DNA
tgtagacaggtaggtgg

SEQ ID NO: 20204 - DNA, 17 bp, synthetic construct
  misc_feature 1..17: note = Oligonucleotide
  source 1..17: mol_type = other DNA
gtgtgtagacaggtagg

SEQ ID NO: 20205 - DNA, 17 bp, synthetic construct
  misc_feature 1..17: note = Oligonucleotide
  source 1..17: mol_type = other DNA
tgggtgtgtagacaggt

SEQ ID NO: 20206 - DNA, 17 bp, synthetic construct
  misc_feature 1..17: note = Oligonucleotide
  source 1..17: mol_type = other DNA
gactgggtgtgtagaca

SEQ ID NO: 20207 - DNA, 17 bp, synthetic construct
  misc_feature 1..17: note = Oligonucleotide
  source 1..17: mol_type = other DNA
atggactgggtgtgtag

SEQ ID NO: 20208 - DNA, 17 bp, synthetic construct
  misc_feature 1..17: note = Oligonucleotide
  source 1..17: mol_type = other DNA
tggatggactgggtgtg

SEQ ID NO: 20209 - DNA, 17 bp, synthetic construct
  misc_feature 1..17: note = Oligonucleotide
  source 1..17: mol_type = other DNA
ggatggatggactgggt

SEQ ID NO: 20210 - DNA, 17 bp, synthetic construct
  misc_feature 1..17: note = Oligonucleotide
  source 1..17: mol_type = other DNA
gatggatggatggactg

SEQ ID NO: 20211 - DNA, 17 bp, synthetic construct
  misc_feature 1..17: note = Oligonucleotide
  source 1..17: mol_type = other DNA
gtagatggatggatgga

SEQ ID NO: 20212 - DNA, 17 bp, synthetic construct
  misc_feature 1..17: note = Oligonucleotide
  source 1..17: mol_type = other DNA
tgggtagatggatggat

SEQ ID NO: 20213 - DNA, 17 bp, synthetic construct
  misc_feature 1..17: note = Oligonucleotide
  source 1..17: mol_type = other DNA
acatgggtagatggatg

SEQ ID NO: 20214 - DNA, 17 bp, synthetic construct
  misc_feature 1..17: note = Oligonucleotide
  source 1..17: mol_type = other DNA
gatacatgggtagatgg

SEQ ID NO: 20215 - DNA, 17 bp, synthetic construct
  misc_feature 1..17: note = Oligonucleotide
  source 1..17: mol_type = other DNA
acagatacatgggtaga

SEQ ID NO: 20216 - DNA, 17 bp, synthetic construct
  misc_feature 1..17: note = Oligonucleotide
  source 1..17: mol_type = other DNA
cagacagatacatgggt

SEQ ID NO: 20217 - DNA, 17 bp, synthetic construct
  misc_feature 1..17: note = Oligonucleotide
  source 1..17: mol_type = other DNA
gagcagacagatacatg

SEQ ID NO: 20218 - DNA, 17 bp, synthetic construct
  misc_feature 1..17: note = Oligonucleotide
  source 1..17: mol_type = other DNA
aaagagcagacagatac

SEQ ID NO: 20219 - DNA, 17 bp, synthetic construct
  misc_feature 1..17: note = Oligonucleotide
  source 1..17: mol_type = other DNA
gtcaaagagcagacaga

SEQ ID NO: 20220 - DNA, 17 bp, synthetic construct
  misc_feature 1..17: note = Oligonucleotide
  source 1..17: mol_type = other DNA
taggtcaaagagcagac

SEQ ID NO: 20221 - DNA, 17 bp, synthetic construct
  misc_feature 1..17: note = Oligonucleotide
  source 1..17: mol_type = other DNA
agataggtcaaagagca

SEQ ID NO: 20222 - DNA, 17 bp, synthetic construct
  misc_feature 1..17: note = Oligonucleotide
  source 1..17: mol_type = other DNA
ggtagataggtcaaaga

SEQ ID NO: 20223 - DNA, 17 bp, synthetic construct
  misc_feature 1..17: note = Oligonucleotide
  source 1..17: mol_type = other DNA
atgggtagataggtcaa

SEQ ID NO: 20224 - DNA, 17 bp, synthetic construct
  misc_feature 1..17: note = Oligonucleotide
  source 1..17: mol_type = other DNA
gccatgggtagataggt

SEQ ID NO: 20225 - DNA, 17 bp, synthetic construct
  misc_feature 1..17: note = Oligonucleotide
  source 1..17: mol_type = other DNA
agggccatgggtagata

SEQ ID NO: 20226 - DNA, 17 bp, synthetic construct
  misc_feature 1..17: note = Oligonucleotide
  source 1..17: mol_type = other DNA
gagagggccatgggtag

SEQ ID NO: 20227 - DNA, 17 bp, synthetic construct
  misc_feature 1..17: note = Oligonucleotide
  source 1..17: mol_type = other DNA
aaggagagggccatggg

SEQ ID NO: 20228 - DNA, 17 bp, synthetic construct
  misc_feature 1..17: note = Oligonucleotide
  source 1..17: mol_type = other DNA
gggaaggagagggccat

SEQ ID NO: 20229 - DNA, 17 bp, synthetic construct
  misc_feature 1..17: note = Oligonucleotide
  source 1..17: mol_type = other DNA
ggagggaaggagagggc

SEQ ID NO: 20230 - DNA, 17 bp, synthetic construct
  misc_feature 1..17: note = Oligonucleotide
  source 1..17: mol_type = other DNA
gagggagggaaggagag

SEQ ID NO: 20231 - DNA, 17 bp, synthetic construct
  misc_feature 1..17: note = Oligonucleotide
  source 1..17: mol_type = other DNA
atggagggagggaagga

SEQ ID NO: 20232 - DNA, 17 bp, synthetic construct
  misc_feature 1..17: note = Oligonucleotide
  source 1..17: mol_type = other DNA
tggatggagggagggaa

SEQ ID NO: 20233 - DNA, 17 bp, synthetic construct
  misc_feature 1..17: note = Oligonucleotide
  source 1..17: mol_type = other DNA
cagtggatggagggagg

SEQ ID NO: 20234 - DNA, 17 bp, synthetic construct
  misc_feature 1..17: note = Oligonucleotide
  source 1..17: mol_type = other DNA
gaccagtggatggaggg

SEQ ID NO: 20235 - DNA, 17 bp, synthetic construct
  misc_feature 1..17: note = Oligonucleotide
  source 1..17: mol_type = other DNA
ctggaccagtggatgga

SEQ ID NO: 20236 - DNA, 17 bp, synthetic construct
  misc_feature 1..17: note = Oligonucleotide
  source 1..17: mol_type = other DNA
gcactggaccagtggat

SEQ ID NO: 20237 - DNA, 17 bp, synthetic construct
  misc_feature 1..17: note = Oligonucleotide
  source 1..17: mol_type = other DNA
aaggcactggaccagtg

SEQ ID NO: 20238 - DNA, 17 bp, synthetic construct
  misc_feature 1..17: note = Oligonucleotide
  source 1..17: mol_type = other DNA
tgaaaggcactggacca

SEQ ID NO: 20239 - DNA, 17 bp, synthetic construct
  misc_feature 1..17: note = Oligonucleotide
  source 1..17: mol_type = other DNA
gattgaaaggcactgga

SEQ ID NO: 20240 - DNA, 17 bp, synthetic construct
  misc_feature 1..17: note = Oligonucleotide
  source 1..17: mol_type = other DNA
gtggattgaaaggcact

SEQ ID NO: 20241 - DNA, 17 bp, synthetic construct
  misc_feature 1..17: note = Oligonucleotide
  source 1..17: mol_type = other DNA
agggtggattgaaaggc

SEQ ID NO: 20242 - DNA, 17 bp, synthetic construct
  misc_feature 1..17: note = Oligonucleotide
  source 1..17: mol_type = other DNA
agaagggtggattgaaa

SEQ ID NO: 20243 - DNA, 17 bp, synthetic construct
  misc_feature 1..17: note = Oligonucleotide
  source 1..17: mol_type = other DNA
gacagaagggtggattg

SEQ ID NO: 20244 - DNA, 17 bp, synthetic construct
  misc_feature 1..17: note = Oligonucleotide
  source 1..17: mol_type = other DNA
acggacagaagggtgga

SEQ ID NO: 20245 - DNA, 17 bp, synthetic construct
  misc_feature 1..17: note = Oligonucleotide
  source 1..17: mol_type = other DNA
tagacggacagaagggt

SEQ ID NO: 20246 - DNA, 17 bp, synthetic construct
  misc_feature 1..17: note = Oligonucleotide
  source 1..17: mol_type = other DNA
agatagacggacagaag

SEQ ID NO: 20247 - DNA, 17 bp, synthetic construct
  misc_feature 1..17: note = Oligonucleotide
  source 1..17: mol_type = other DNA
ctgagatagacggacag

SEQ ID NO: 20248 - DNA, 17 bp, synthetic construct
  misc_feature 1..17: note = Oligonucleotide
  source 1..17: mol_type = other DNA
catctgagatagacgga

SEQ ID NO: 20249 - DNA, 17 bp, synthetic construct
  misc_feature 1..17: note = Oligonucleotide
  source 1..17: mol_type = other DNA
gtgcatctgagatagac

SEQ ID NO: 20250 - DNA, 17 bp, synthetic construct
  misc_feature 1..17: note = Oligonucleotide
  source 1..17: mol_type = other DNA
caggtgcatctgagata

SEQ ID NO: 20251 - DNA, 17 bp, synthetic construct
  misc_feature 1..17: note = Oligonucleotide
  source 1..17: mol_type = other DNA
ggacaggtgcatctgag

SEQ ID NO: 20252 - DNA, 17 bp, synthetic construct
  misc_feature 1..17: note = Oligonucleotide
  source 1..17: mol_type = other DNA
ggtggacaggtgcatct

SEQ ID NO: 20253 - DNA, 17 bp, synthetic construct
  misc_feature 1..17: note = Oligonucleotide
  source 1..17: mol_type = other DNA
aatggtggacaggtgca

SEQ ID NO: 20254 - DNA, 17 bp, synthetic construct
  misc_feature 1..17: note = Oligonucleotide
  source 1..17: mol_type = other DNA
gtaaatggtggacaggt

SEQ ID NO: 20255 - DNA, 17 bp, synthetic construct
  misc_feature 1..17: note = Oligonucleotide
  source 1..17: mol_type = other DNA
agagtaaatggtggaca

SEQ ID NO: 20256 - DNA, 17 bp, synthetic construct
  misc_feature 1..17: note = Oligonucleotide
  source 1..17: mol_type = other DNA
aggagagtaaatggtgg

SEQ ID NO: 20257 - DNA, 17 bp, synthetic construct
  misc_feature 1..17: note = Oligonucleotide
  source 1..17: mol_type = other DNA
actaggagagtaaatgg

SEQ ID NO: 20258 - DNA, 17 bp, synthetic construct
  misc_feature 1..17: note = Oligonucleotide
  source 1..17: mol_type = other DNA
ctgactaggagagtaaa

SEQ ID NO: 20259 - DNA, 17 bp, synthetic construct
  misc_feature 1..17: note = Oligonucleotide
  source 1..17: mol_type = other DNA
atgctgactaggagagt

SEQ ID NO: 20260 - DNA, 17 bp, synthetic construct
  misc_feature 1..17: note = Oligonucleotide
  source 1..17: mol_type = other DNA
gggatgctgactaggag

SEQ ID NO: 20261 - DNA, 17 bp, synthetic construct
  misc_feature 1..17: note = Oligonucleotide
  source 1..17: mol_type = other DNA
gaagggatgctgactag

SEQ ID NO: 20262 - DNA, 17 bp, synthetic construct
  misc_feature 1..17: note = Oligonucleotide
  source 1..17: mol_type = other DNA
acagaagggatgctgac

SEQ ID NO: 20263 - DNA, 17 bp, synthetic construct
  misc_feature 1..17: note = Oligonucleotide
  source 1..17: mol_type = other DNA
cggacagaagggatgct

SEQ ID NO: 20264 - DNA, 17 bp, synthetic construct
  misc_feature 1..17: note = Oligonucleotide
  source 1..17: mol_type = other DNA
agacggacagaagggat

SEQ ID NO: 20265 - DNA, 17 bp, synthetic construct
  misc_feature 1..17: note = Oligonucleotide
  source 1..17: mol_type = other DNA
gatagacggacagaagg

SEQ ID NO: 20266 - DNA, 17 bp, synthetic construct
  misc_feature 1..17: note = Oligonucleotide
  source 1..17: mol_type = other DNA
tgagatagacggacaga

SEQ ID NO: 20267 - DNA, 17 bp, synthetic construct
  misc_feature 1..17: note = Oligonucleotide
  source 1..17: mol_type = other DNA
atctgagatagacggac

SEQ ID NO: 20268 - DNA, 17 bp, synthetic construct
  misc_feature 1..17: note = Oligonucleotide
  source 1..17: mol_type = other DNA
tgcatctgagatagacg

SEQ ID NO: 20269 - DNA, 17 bp, synthetic construct
  misc_feature 1..17: note = Oligonucleotide
  source 1..17: mol_type = other DNA
aggtgcatctgagatag

SEQ ID NO: 20270 - DNA, 17 bp, synthetic construct
  misc_feature 1..17: note = Oligonucleotide
  source 1..17: mol_type = other DNA
gacaggtgcatctgaga

SEQ ID NO: 20271 - DNA, 17 bp, synthetic construct
  misc_feature 1..17: note = Oligonucleotide
  source 1..17: mol_type = other DNA
gtggacaggtgcatctg

SEQ ID NO: 20272 - DNA, 17 bp, synthetic construct
  misc_feature 1..17: note = Oligonucleotide
  source 1..17: mol_type = other DNA
atggtggacaggtgcat

SEQ ID NO: 20273 - DNA, 17 bp, synthetic construct
  misc_feature 1..17: note = Oligonucleotide
  source 1..17: mol_type = other DNA
taaatggtggacaggtg

SEQ ID NO: 20274 - DNA, 17 bp, synthetic construct
  misc_feature 1..17: note = Oligonucleotide
  source 1..17: mol_type = other DNA
gagtaaatggtggacag

SEQ ID NO: 20275 - DNA, 17 bp, synthetic construct
  misc_feature 1..17: note = Oligonucleotide
  source 1..17: mol_type = other DNA
ggagagtaaatggtgga

SEQ ID NO: 20276 - DNA, 17 bp, synthetic construct
  misc_feature 1..17: note = Oligonucleotide
  source 1..17: mol_type = other DNA
ctaggagagtaaatggt

SEQ ID NO: 20277 - DNA, 17 bp, synthetic construct
  misc_feature 1..17: note = Oligonucleotide
  source 1..17: mol_type = other DNA
tgactaggagagtaaat

SEQ ID NO: 20278 - DNA, 17 bp, synthetic construct
  misc_feature 1..17: note = Oligonucleotide
  source 1..17: mol_type = other DNA
tgctgactaggagagta

SEQ ID NO: 20279 - DNA, 17 bp, synthetic construct
  misc_feature 1..17: note = Oligonucleotide
  source 1..17: mol_type = other DNA
gcatgctgactaggaga

SEQ ID NO: 20280 - DNA, 17 bp, synthetic construct
  misc_feature 1..17: note = Oligonucleotide
  source 1..17: mol_type = other DNA
tctgcatgctgactagg

SEQ ID NO: 20281 - DNA, 17 bp, synthetic construct
  misc_feature 1..17: note = Oligonucleotide
  source 1..17: mol_type = other DNA
cattctgcatgctgact

SEQ ID NO: 20282 - DNA, 17 bp, synthetic construct
  misc_feature 1..17: note = Oligonucleotide
  source 1..17: mol_type = other DNA
aggcattctgcatgctg

SEQ ID NO: 20283 - DNA, 17 bp, synthetic construct
  misc_feature 1..17: note = Oligonucleotide
  source 1..17: mol_type = other DNA
cacaggcattctgcatg

SEQ ID NO: 20284 - DNA, 17 bp, synthetic construct
  misc_feature 1..17: note = Oligonucleotide
  source 1..17: mol_type = other DNA
cgtcacaggcattctgc

SEQ ID NO: 20285 - DNA, 17 bp, synthetic construct
  misc_feature 1..17: note = Oligonucleotide
  source 1..17: mol_type = other DNA
gcacgtcacaggcattc

SEQ ID NO: 20286 - DNA, 17 bp, synthetic construct
  misc_feature 1..17: note = Oligonucleotide
  source 1..17: mol_type = other DNA
ctggcacgtcacaggca

SEQ ID NO: 20287 - DNA, 17 bp, synthetic construct
  misc_feature 1..17: note = Oligonucleotide
  source 1..17: mol_type = other DNA
cacctggcacgtcacag

SEQ ID NO: 20288 - DNA, 17 bp, synthetic construct
  misc_feature 1..17: note = Oligonucleotide
  source 1..17: mol_type = other DNA
cagcacctggcacgtca

SEQ ID NO: 20289 - DNA, 17 bp, synthetic construct
  misc_feature 1..17: note = Oligonucleotide
  source 1..17: mol_type = other DNA
gcacagcacctggcacg

SEQ ID NO: 20290 - DNA, 17 bp, synthetic construct
  misc_feature 1..17: note = Oligonucleotide
  source 1..17: mol_type = other DNA
ccagcacagcacctggc

SEQ ID NO: 20291 - DNA, 17 bp, synthetic construct
  misc_feature 1..17: note = Oligonucleotide
  source 1..17: mol_type = other DNA
cacccagcacagcacct

SEQ ID NO: 20292 - DNA, 17 bp, synthetic construct
  misc_feature 1..17: note = Oligonucleotide
  source 1..17: mol_type = other DNA
tagcacccagcacagca

SEQ ID NO: 20293 - DNA, 17 bp, synthetic construct
  misc_feature 1..17: note = Oligonucleotide
  source 1..17: mol_type = other DNA
tcctagcacccagcaca

SEQ ID NO: 20294 - DNA, 17 bp, synthetic construct
  misc_feature 1..17: note = Oligonucleotide
  source 1..17: mol_type = other DNA
tgatcctagcacccagc

SEQ ID NO: 20295 - DNA, 17 bp, synthetic construct
  misc_feature 1..17: note = Oligonucleotide
  source 1..17: mol_type = other DNA
ctgtgatcctagcaccc

SEQ ID NO: 20296 - DNA, 17 bp, synthetic construct
  misc_feature 1..17: note = Oligonucleotide
  source 1..17: mol_type = other DNA
tctctgtgatcctagca

SEQ ID NO: 20297 - DNA, 17 bp, synthetic construct
  misc_feature 1..17: note = Oligonucleotide
  source 1..17: mol_type = other DNA
ttatctctgtgatccta

SEQ ID NO: 20298 - DNA, 17 bp, synthetic construct
  misc_feature 1..17: note = Oligonucleotide
  source 1..17: mol_type = other DNA
tctttatctctgtgatc

SEQ ID NO: 20299 - DNA, 17 bp, synthetic construct
  misc_feature 1..17: note = Oligonucleotide
  source 1..17: mol_type = other DNA
tgttctttatctctgtg

SEQ ID NO: 20300 - DNA, 17 bp, synthetic construct
  misc_feature 1..17: note = Oligonucleotide
  source 1..17: mol_type = other DNA
acatgttctttatctct

SEQ ID NO: 20301 - DNA, 17 bp, synthetic construct
  misc_feature 1..17: note = Oligonucleotide
  source 1..17: mol_type = other DNA
gccacatgttctttatc

SEQ ID NO: 20302 - DNA, 17 bp, synthetic construct
  misc_feature 1..17: note = Oligonucleotide
  source 1..17: mol_type = other DNA
agggccacatgttcttt

SEQ ID NO: 20303 - DNA, 17 bp, synthetic construct
  misc_feature 1..17: note = Oligonucleotide
  source 1..17: mol_type = other DNA
gtaagggccacatgttc

SEQ ID NO: 20304 - DNA, 17 bp, synthetic construct
  misc_feature 1..17: note = Oligonucleotide
  source 1..17: mol_type = other DNA
agggtaagggccacatg

SEQ ID NO: 20305 - DNA, 17 bp, synthetic construct
  misc_feature 1..17: note = Oligonucleotide
  source 1..17: mol_type = other DNA
ttgagggtaagggccac

SEQ ID NO: 20306 - DNA, 17 bp, synthetic construct
  misc_feature 1..17: note = Oligonucleotide
  source 1..17: mol_type = other DNA
tccttgagggtaagggc

SEQ ID NO: 20307 - DNA, 17 bp, synthetic construct
  misc_feature 1..17: note = Oligonucleotide
  source 1..17: mol_type = other DNA
agctccttgagggtaag

SEQ ID NO: 20308 - DNA, 17 bp, synthetic construct
  misc_feature 1..17: note = Oligonucleotide
  source 1..17: mol_type = other DNA
gtgagctccttgagggt

SEQ ID NO: 20309 - DNA, 17 bp, synthetic construct
  misc_feature 1..17: note = Oligonucleotide
  source 1..17: mol_type = other DNA
attgtgagctccttgag

SEQ ID NO: 20310 - DNA, 17 bp, synthetic construct
  misc_feature 1..17: note = Oligonucleotide
  source 1..17: mol_type = other DNA
ctaattgtgagctcctt

SEQ ID NO: 20311 - DNA, 17 bp, synthetic construct
  misc_feature 1..17: note = Oligonucleotide
  source 1..17: mol_type = other DNA
ccactaattgtgagctc

SEQ ID NO: 20312 - DNA, 17 bp, synthetic construct
  misc_feature 1..17: note = Oligonucleotide
  source 1..17: mol_type = other DNA
cccccactaattgtgag

SEQ ID NO: 20313 - DNA, 17 bp, synthetic construct
  misc_feature 1..17: note = Oligonucleotide
  source 1..17: mol_type = other DNA
tttcccccactaattgt

SEQ ID NO: 20314 - DNA, 17 bp, synthetic construct
  misc_feature 1..17: note = Oligonucleotide
  source 1..17: mol_type = other DNA
ctgtttcccccactaat

SEQ ID NO: 20315 - DNA, 17 bp, synthetic construct
  misc_feature 1..17: note = Oligonucleotide
  source 1..17: mol_type = other DNA
gacctgtttcccccact

SEQ ID NO: 20316 - DNA, 17 bp, synthetic construct
  misc_feature 1..17: note = Oligonucleotide
  source 1..17: mol_type = other DNA
gatgacctgtttccccc

SEQ ID NO: 20317 - DNA, 17 bp, synthetic construct
  misc_feature 1..17: note = Oligonucleotide
  source 1..17: mol_type = other DNA
ttcgatgacctgtttcc

SEQ ID NO: 20318 - DNA, 17 bp, synthetic construct
  misc_feature 1..17: note = Oligonucleotide
  source 1..17: mol_type = other DNA
gctttcgatgacctgtt

SEQ ID NO: 20319 - DNA, 17 bp, synthetic construct
  misc_feature 1..17: note = Oligonucleotide
  source 1..17: mol_type = other DNA
gcagctttcgatgacct

SEQ ID NO: 20320 - DNA, 17 bp, synthetic construct
  misc_feature 1..17: note = Oligonucleotide
  source 1..17: mol_type = other DNA
cctgcagctttcgatga

SEQ ID NO: 20321 - DNA, 17 bp, synthetic construct
  misc_feature 1..17: note = Oligonucleotide
  source 1..17: mol_type = other DNA
taacctgcagctttcga

SEQ ID NO: 20322 - DNA, 17 bp, synthetic construct
  misc_feature 1..17: note = Oligonucleotide
  source 1..17: mol_type = other DNA
agataacctgcagcttt

SEQ ID NO: 20323 - DNA, 17 bp, synthetic construct
  misc_feature 1..17: note = Oligonucleotide
  source 1..17: mol_type = other DNA
gaaagataacctgcagc

SEQ ID NO: 20324 - DNA, 17 bp, synthetic construct
  misc_feature 1..17: note = Oligonucleotide
  source 1..17: mol_type = other DNA
tcagaaagataacctgc

SEQ ID NO: 20325 - DNA, 17 bp, synthetic construct
  misc_feature 1..17: note = Oligonucleotide
  source 1..17: mol_type = other DNA
agatcagaaagataacc

SEQ ID NO: 20326 - DNA, 17 bp, synthetic construct
  misc_feature 1..17: note = Oligonucleotide
  source 1..17: mol_type = other DNA
atgagatcagaaagata

SEQ ID NO: 20327 - DNA, 17 bp, synthetic construct
  misc_feature 1..17: note = Oligonucleotide
  source 1..17: mol_type = other DNA
gaaatgagatcagaaag

SEQ ID NO: 20328 - DNA, 17 bp, synthetic construct
  misc_feature 1..17: note = Oligonucleotide
  source 1..17: mol_type = other DNA
caggaaatgagatcaga

SEQ ID NO: 20329 - DNA, 17 bp, synthetic construct
  misc_feature 1..17: note = Oligonucleotide
  source 1..17: mol_type = other DNA
tggcaggaaatgagatc

SEQ ID NO: 20330 - DNA, 17 bp, synthetic construct
  misc_feature 1..17: note = Oligonucleotide
  source 1..17: mol_type = other DNA
gagtggcaggaaatgag

SEQ ID NO: 20331 - DNA, 17 bp, synthetic construct
  misc_feature 1..17: note = Oligonucleotide
  source 1..17: mol_type = other DNA
agagagtggcaggaaat

SEQ ID NO: 20332 - DNA, 17 bp, synthetic construct
  misc_feature 1..17: note = Oligonucleotide
  source 1..17: mol_type = other DNA
tagagagagtggcagga

SEQ ID NO: 20333 - DNA, 17 bp, synthetic construct
  misc_feature 1..17: note = Oligonucleotide
  source 1..17: mol_type = other DNA
agctagagagagtggca

SEQ ID NO: 20334 - DNA, 17 bp, synthetic construct
  misc_feature 1..17: note = Oligonucleotide
  source 1..17: mol_type = other DNA
gggagctagagagagtg

SEQ ID NO: 20335 - DNA, 17 bp, synthetic construct
  misc_feature 1..17: note = Oligonucleotide
  source 1..17: mol_type = other DNA
agagggagctagagaga

SEQ ID NO: 20336 - DNA, 17 bp, synthetic construct
  misc_feature 1..17: note = Oligonucleotide
  source 1..17: mol_type = other DNA
agcagagggagctagag

SEQ ID NO: 20337 - DNA, 17 bp, synthetic construct
  misc_feature 1..17: note = Oligonucleotide
  source 1..17: mol_type = other DNA
tggagcagagggagcta

SEQ ID NO: 20338 - DNA, 17 bp, synthetic construct
  misc_feature 1..17: note = Oligonucleotide
  source 1..17: mol_type = other DNA
agctggagcagagggag

SEQ ID NO: 20339 - DNA, 17 bp, synthetic construct
  misc_feature 1..17: note = Oligonucleotide
  source 1..17: mol_type = other DNA
tgcagctggagcagagg

SEQ ID NO: 20340 - DNA, 17 bp, synthetic construct
  misc_feature 1..17: note = Oligonucleotide
  source 1..17: mol_type = other DNA
ctgtgcagctggagcag

SEQ ID NO: 20341 - DNA, 17 bp, synthetic construct
  misc_feature 1..17: note = Oligonucleotide
  source 1..17: mol_type = other DNA
agcctgtgcagctggag

SEQ ID NO: 20342 - DNA, 17 bp, synthetic construct
  misc_feature 1..17: note = Oligonucleotide
  source 1..17: mol_type = other DNA
cagagcctgtgcagctg

SEQ ID NO: 20343 - DNA, 17 bp, synthetic construct
  misc_feature 1..17: note = Oligonucleotide
  source 1..17: mol_type = other DNA
gttcagagcctgtgcag

SEQ ID NO: 20344 - DNA, 17 bp, synthetic construct
  misc_feature 1..17: note = Oligonucleotide
  source 1..17: mol_type = other DNA
agagttcagagcctgtg

SEQ ID NO: 20345 - DNA, 17 bp, synthetic construct
  misc_feature 1..17: note = Oligonucleotide
  source 1..17: mol_type = other DNA
gagagagttcagagcct

SEQ ID NO: 20346 - DNA, 17 bp, synthetic construct
  misc_feature 1..17: note = Oligonucleotide
  source 1..17: mol_type = other DNA
tttgagagagttcagag

SEQ ID NO: 20347 - DNA, 17 bp, synthetic construct
  misc_feature 1..17: note = Oligonucleotide
  source 1..17: mol_type = other DNA
gcatttgagagagttca

SEQ ID NO: 20348 - DNA, 17 bp, synthetic construct
  misc_feature 1..17: note = Oligonucleotide
  source 1..17: mol_type = other DNA
gcagcatttgagagagt

SEQ ID NO: 20349 - DNA, 17 bp, synthetic construct
  misc_feature 1..17: note = Oligonucleotide
  source 1..17: mol_type = other DNA
cctgcagcatttgagag

SEQ ID NO: 20350 - DNA, 17 bp, synthetic construct
  misc_feature 1..17: note = Oligonucleotide
  source 1..17: mol_type = other DNA
cagcctgcagcatttga

SEQ ID NO: 20351 - DNA, 17 bp, synthetic construct
  misc_feature 1..17: note = Oligonucleotide
  source 1..17: mol_type = other DNA
catcagcctgcagcatt

SEQ ID NO: 20352 - DNA, 17 bp, synthetic construct
  misc_feature 1..17: note = Oligonucleotide
  source 1..17: mol_type = other DNA
aggcatcagcctgcagc

SEQ ID NO: 20353 - DNA, 17 bp, synthetic construct
  misc_feature 1..17: note = Oligonucleotide
  source 1..17: mol_type = other DNA
ggcaggcatcagcctgc

SEQ ID NO: 20354 - DNA, 17 bp, synthetic construct
  misc_feature 1..17: note = Oligonucleotide
  source 1..17: mol_type = other DNA
cacggcaggcatcagcc

SEQ ID NO: 20355 - DNA, 17 bp, synthetic construct
  misc_feature 1..17: note = Oligonucleotide
  source 1..17: mol_type = other DNA
gcccacggcaggcatca

SEQ ID NO: 20356 - DNA, 17 bp, synthetic construct
  misc_feature 1..17: note = Oligonucleotide
  source 1..17: mol_type = other DNA
gaagcccacggcaggca

SEQ ID NO: 20357 - DNA, 17 bp, synthetic construct
  misc_feature 1..17: note = Oligonucleotide
  source 1..17: mol_type = other DNA
ggggaagcccacggcag

SEQ ID NO: 20358 - DNA, 17 bp, synthetic construct
  misc_feature 1..17: note = Oligonucleotide
  source 1..17: mol_type = other DNA
tcaggggaagcccacgg

SEQ ID NO: 20359 - DNA, 17 bp, synthetic construct
  misc_feature 1..17: note = Oligonucleotide
  source 1..17: mol_type = other DNA
tggtcaggggaagccca

SEQ ID NO: 20360 - DNA, 17 bp, synthetic construct
  misc_feature 1..17: note = Oligonucleotide
  source 1..17: mol_type = other DNA
gggtggtcaggggaagc

SEQ ID NO: 20361 - DNA, 17 bp, synthetic construct
  misc_feature 1..17: note = Oligonucleotide
  source 1..17: mol_type = other DNA
cgggggtggtcagggga

SEQ ID NO: 20362 - DNA, 17 bp, synthetic construct
  misc_feature 1..17: note = Oligonucleotide
  source 1..17: mol_type = other DNA
gagcgggggtggtcagg

SEQ ID NO: 20363 - DNA, 17 bp, synthetic construct
  misc_feature 1..17: note = Oligonucleotide
  source 1..17: mol_type = other DNA
caggagcgggggtggtc

SEQ ID NO: 20364 - DNA, 17 bp, synthetic construct
  misc_feature 1..17: note = Oligonucleotide
  source 1..17: mol_type = other DNA
tcccaggagcgggggtg

SEQ ID NO: 20365 - DNA, 17 bp, synthetic construct
  misc_feature 1..17: note = Oligonucleotide
  source 1..17: mol_type = other DNA
gcttcccaggagcgggg

SEQ ID NO: 20366 - DNA, 17 bp, synthetic construct
  misc_feature 1..17: note = Oligonucleotide
  source 1..17: mol_type = other DNA
agggcttcccaggagcg

SEQ ID NO: 20367 - DNA, 17 bp, synthetic construct
  misc_feature 1..17: note = Oligonucleotide
  source 1..17: mol_type = other DNA
caaagggcttcccagga

SEQ ID NO: 20368 - DNA, 17 bp, synthetic construct
  misc_feature 1..17: note = Oligonucleotide
  source 1..17: mol_type = other DNA
gggcaaagggcttccca

SEQ ID NO: 20369 - DNA, 17 bp, synthetic construct
  misc_feature 1..17: note = Oligonucleotide
  source 1..17: mol_type = other DNA
tgtgggcaaagggcttc

SEQ ID NO: 20370 - DNA, 17 bp, synthetic construct
  misc_feature 1..17: note = Oligonucleotide
  source 1..17: mol_type = other DNA
atatgtgggcaaagggc

SEQ ID NO: 20371 - DNA, 17 bp, synthetic construct
  misc_feature 1..17: note = Oligonucleotide
  source 1..17: mol_type = other DNA
tggatatgtgggcaaag

SEQ ID NO: 20372 - DNA, 17 bp, synthetic construct
  misc_feature 1..17: note = Oligonucleotide
  source 1..17: mol_type = other DNA
ctgtggatatgtgggca

SEQ ID NO: 20373 - DNA, 17 bp, synthetic construct
  misc_feature 1..17: note = Oligonucleotide
  source 1..17: mol_type = other DNA
agcctgtggatatgtgg

SEQ ID NO: 20374 - DNA, 17 bp, synthetic construct
  misc_feature 1..17: note = Oligonucleotide
  source 1..17: mol_type = other DNA
agcagcctgtggatatg

SEQ ID NO: 20375 - DNA, 17 bp, synthetic construct
  misc_feature 1..17: note = Oligonucleotide
  source 1..17: mol_type = other DNA
gggagcagcctgtggat

SEQ ID NO: 20376 - DNA, 17 bp, synthetic construct
  misc_feature 1..17: note = Oligonucleotide
  source 1..17: mol_type = other DNA
atggggagcagcctgtg

SEQ ID NO: 20377 - DNA, 17 bp, synthetic construct
  misc_feature 1..17: note = Oligonucleotide
  source 1..17: mol_type = other DNA
aggatggggagcagcct

SEQ ID NO: 20378 - DNA, 17 bp, synthetic construct
  misc_feature 1..17: note = Oligonucleotide
  source 1..17: mol_type = other DNA
ctgaggatggggagcag

SEQ ID NO: 20379 - DNA, 17 bp, synthetic construct
  misc_feature 1..17: note = Oligonucleotide
  source 1..17: mol_type = other DNA
aggctgaggatggggag

SEQ ID NO: 20380 - DNA, 17 bp, synthetic construct
  misc_feature 1..17: note = Oligonucleotide
  source 1..17: mol_type = other DNA
cagaggctgaggatggg

SEQ ID NO: 20381 - DNA, 17 bp, synthetic construct
  misc_feature 1..17: note = Oligonucleotide
  source 1..17: mol_type = other DNA
gagcagaggctgaggat

SEQ ID NO: 20382 - DNA, 17 bp, synthetic construct
  misc_feature 1..17: note = Oligonucleotide
  source 1..17: mol_type = other DNA
gctgagcagaggctgag

SEQ ID NO: 20383 - DNA, 17 bp, synthetic construct
  misc_feature 1..17: note = Oligonucleotide
  source 1..17: mol_type = other DNA
agggctgagcagaggct

SEQ ID NO: 20384 - DNA, 17 bp, synthetic construct
  misc_feature 1..17: note = Oligonucleotide
  source 1..17: mol_type = other DNA
gggagggctgagcagag

SEQ ID NO: 20385 - DNA, 17 bp, synthetic construct
  misc_feature 1..17: note = Oligonucleotide
  source 1..17: mol_type = other DNA
cacgggagggctgagca

SEQ ID NO: 20386 - DNA, 17 bp, synthetic construct
  misc_feature 1..17: note = Oligonucleotide
  source 1..17: mol_type = other DNA
ccccacgggagggctga

SEQ ID NO: 20387 - DNA, 17 bp, synthetic construct
  misc_feature 1..17: note = Oligonucleotide
  source 1..17: mol_type = other DNA
cacccccacgggagggc

SEQ ID NO: 20388 - DNA, 17 bp, synthetic construct
  misc_feature 1..17: note = Oligonucleotide
  source 1..17: mol_type = other DNA
cctcacccccacgggag

SEQ ID NO: 20389 - DNA, 17 bp, synthetic construct
  misc_feature 1..17: note = Oligonucleotide
  source 1..17: mol_type = other DNA
aggcctcacccccacgg

SEQ ID NO: 20390 - DNA, 17 bp, synthetic construct
  misc_feature 1..17: note = Oligonucleotide
  source 1..17: mol_type = other DNA
caaaggcctcaccccca

SEQ ID NO: 20391 - DNA, 17 bp, synthetic construct
  misc_feature 1..17: note = Oligonucleotide
  source 1..17: mol_type = other DNA
acgcaaaggcctcaccc

SEQ ID NO: 20392 - DNA, 17 bp, synthetic construct
  misc_feature 1..17: note = Oligonucleotide
  source 1..17: mol_type = other DNA
ggcacgcaaaggcctca

SEQ ID NO: 20393 - DNA, 17 bp, synthetic construct
  misc_feature 1..17: note = Oligonucleotide
  source 1..17: mol_type = other DNA
aaaggcacgcaaaggcc

SEQ ID NO: 20394 - DNA, 17 bp, synthetic construct
  misc_feature 1..17: note = Oligonucleotide
  source 1..17: mol_type = other DNA
gagaaaggcacgcaaag

SEQ ID NO: 20395 - DNA, 17 bp, synthetic construct
  misc_feature 1..17: note = Oligonucleotide
  source 1..17: mol_type = other DNA
gcagagaaaggcacgca

SEQ ID NO: 20396 - DNA, 17 bp, synthetic construct
  misc_feature 1..17: note = Oligonucleotide
  source 1..17: mol_type = other DNA
agggcagagaaaggcac

SEQ ID NO: 20397 - DNA, 17 bp, synthetic construct
  misc_feature 1..17: note = Oligonucleotide
  source 1..17: mol_type = other DNA
gggagggcagagaaagg

SEQ ID NO: 20398 - DNA, 17 bp, synthetic construct
  misc_feature 1..17: note = Oligonucleotide
  source 1..17: mol_type = other DNA
tcagggagggcagagaa

SEQ ID NO: 20399 - DNA, 17 bp, synthetic construct
  misc_feature 1..17: note = Oligonucleotide
  source 1..17: mol_type = other DNA
agatcagggagggcaga

SEQ ID NO: 20400 - DNA, 17 bp, synthetic construct
  misc_feature 1..17: note = Oligonucleotide
  source 1..17: mol_type = other DNA
agcagatcagggagggc

SEQ ID NO: 20401 - DNA, 17 bp, synthetic construct
  misc_feature 1..17: note = Oligonucleotide
  source 1..17: mol_type = other DNA
gcgagcagatcagggag

SEQ ID NO: 20402 - DNA, 17 bp, synthetic construct
  misc_feature 1..17: note = Oligonucleotide
  source 1..17: mol_type = other DNA
ccagcgagcagatcagg

SEQ ID NO: 20403 - DNA, 17 bp, synthetic construct
  misc_feature 1..17: note = Oligonucleotide
  source 1..17: mol_type = other DNA
agaccagcgagcagatc

SEQ ID NO: 20404 - DNA, 17 bp, synthetic construct
  misc_feature 1..17: note = Oligonucleotide
  source 1..17: mol_type = other DNA
aggagaccagcgagcag

SEQ ID NO: 20405 - DNA, 17 bp, synthetic construct
  misc_feature 1..17: note = Oligonucleotide
  source 1..17: mol_type = other DNA
ctcaggagaccagcgag

SEQ ID NO: 20406 - DNA, 17 bp, synthetic construct
  misc_feature 1..17: note = Oligonucleotide
  source 1..17: mol_type = other DNA
gtgctcaggagaccagc

SEQ ID NO: 20407 - DNA, 17 bp, synthetic construct
  misc_feature 1..17: note = Oligonucleotide
  source 1..17: mol_type = other DNA
caagtgctcaggagacc

SEQ ID NO: 20408 - DNA, 17 bp, synthetic construct
  misc_feature 1..17: note = Oligonucleotide
  source 1..17: mol_type = other DNA
tggcaagtgctcaggag

SEQ ID NO: 20409 - DNA, 17 bp, synthetic construct
  misc_feature 1..17: note = Oligonucleotide
  source 1..17: mol_type = other DNA
tgctggcaagtgctcag

SEQ ID NO: 20410 - DNA, 17 bp, synthetic construct
  misc_feature 1..17: note = Oligonucleotide
  source 1..17: mol_type = other DNA
gaatgctggcaagtgct

SEQ ID NO: 20411 - DNA, 17 bp, synthetic construct
  misc_feature 1..17: note = Oligonucleotide
  source 1..17: mol_type = other DNA
tgcgaatgctggcaagt

SEQ ID NO: 20412 - DNA, 17 bp, synthetic construct
  misc_feature 1..17: note = Oligonucleotide
  source 1..17: mol_type = other DNA
gcatgcgaatgctggca

SEQ ID NO: 20413 - DNA, 17 bp, synthetic construct
  misc_feature 1..17: note = Oligonucleotide
  source 1..17: mol_type = other DNA
atagcatgcgaatgctg

SEQ ID NO: 20414 - DNA, 17 bp, synthetic construct
  misc_feature 1..17: note = Oligonucleotide
  source 1..17: mol_type = other DNA
gacatagcatgcgaatg

SEQ ID NO: 20415 - DNA, 17 bp, synthetic construct
  misc_feature 1..17: note = Oligonucleotide
  source 1..17: mol_type = other DNA
aaagacatagcatgcga

SEQ ID NO: 20416 - DNA, 17 bp, synthetic construct
  misc_feature 1..17: note = Oligonucleotide
  source 1..17: mol_type = other DNA
gataaagacatagcatg

SEQ ID NO: 20417 - DNA, 17 bp, synthetic construct
  misc_feature 1..17: note = Oligonucleotide
  source 1..17: mol_type = other DNA
gaggataaagacatagc

SEQ ID NO: 20418 - DNA, 17 bp, synthetic construct
  misc_feature 1..17: note = Oligonucleotide
  source 1..17: mol_type = other DNA
acagaggataaagacat

SEQ ID NO: 20419 - DNA, 17 bp, synthetic construct
  misc_feature 1..17: note = Oligonucleotide
  source 1..17: mol_type = other DNA
taaacagaggataaaga

SEQ ID NO: 20420 - DNA, 17 bp, synthetic construct
  misc_feature 1..17: note = Oligonucleotide
  source 1..17: mol_type = other DNA
ggataaacagaggataa

SEQ ID NO: 20421 - DNA, 17 bp, synthetic construct
  misc_feature 1..17: note = Oligonucleotide
  source 1..17: mol_type = other DNA
acaggataaacagagga

SEQ ID NO: 20422 - DNA, 17 bp, synthetic construct
  misc_feature 1..17: note = Oligonucleotide
  source 1..17: mol_type = other DNA
gagacaggataaacaga

SEQ ID NO: 20423 - DNA, 17 bp, synthetic construct
  misc_feature 1..17: note = Oligonucleotide
  source 1..17: mol_type = other DNA
tgggagacaggataaac

SEQ ID NO: 20424 - DNA, 17 bp, synthetic construct
  misc_feature 1..17: note = Oligonucleotide
  source 1..17: mol_type = other DNA
ttctgggagacaggata

SEQ ID NO: 20425 - DNA, 17 bp, synthetic construct
  misc_feature 1..17: note = Oligonucleotide
  source 1..17: mol_type = other DNA
ctgttctgggagacagg

SEQ ID NO: 20426 - DNA, 17 bp, synthetic construct
  misc_feature 1..17: note = Oligonucleotide
  source 1..17: mol_type = other DNA
aatctgttctgggagac

SEQ ID NO: 20427 - DNA, 17 bp, synthetic construct
  misc_feature 1..17: note = Oligonucleotide
  source 1..17: mol_type = other DNA
tataatctgttctggga

SEQ ID NO: 20428 - DNA, 17 bp, synthetic construct
  misc_feature 1..17: note = Oligonucleotide
  source 1..17: mol_type = other DNA
gtttataatctgttctg

SEQ ID NO: 20429 - DNA, 17 bp, synthetic construct
  misc_feature 1..17: note = Oligonucleotide
  source 1..17: mol_type = other DNA
ggggtttataatctgtt

SEQ ID NO: 20430 - DNA, 17 bp, synthetic construct
  misc_feature 1..17: note = Oligonucleotide
  source 1..17: mol_type = other DNA
cgtggggtttataatct

SEQ ID NO: 20431 - DNA, 17 bp, synthetic construct
  misc_feature 1..17: note = Oligonucleotide
  source 1..17: mol_type = other DNA
actcgtggggtttataa

SEQ ID NO: 20432 - DNA, 17 bp, synthetic construct
  misc_feature 1..17: note = Oligonucleotide
  source 1..17: mol_type = other DNA
tgcactcgtggggttta

SEQ ID NO: 20433 - DNA, 17 bp, synthetic construct
  misc_feature 1..17: note = Oligonucleotide
  source 1..17: mol_type = other DNA
ctctgcactcgtggggt

SEQ ID NO: 20434 - DNA, 17 bp, synthetic construct
  misc_feature 1..17: note = Oligonucleotide
  source 1..17: mol_type = other DNA
agtctctgcactcgtgg

SEQ ID NO: 20435 - DNA, 17 bp, synthetic construct
  misc_feature 1..17: note = Oligonucleotide
  source 1..17: mol_type = other DNA
caaagtctctgcactcg

SEQ ID NO: 20436 - DNA, 17 bp, synthetic construct
  misc_feature 1..17: note = Oligonucleotide
  source 1..17: mol_type = other DNA
gaacaaagtctctgcac

SEQ ID NO: 20437 - DNA, 17 bp, synthetic construct
  misc_feature 1..17: note = Oligonucleotide
  source 1..17: mol_type = other DNA
agagaacaaagtctctg

SEQ ID NO: 20438 - DNA, 17 bp, synthetic construct
  misc_feature 1..17: note = Oligonucleotide
  source 1..17: mol_type = other DNA
agaagagaacaaagtct

SEQ ID NO: 20439 - DNA, 17 bp, synthetic construct
  misc_feature 1..17: note = Oligonucleotide
  source 1..17: mol_type = other DNA
cagagaagagaacaaag

SEQ ID NO: 20440 - DNA, 17 bp, synthetic construct
  misc_feature 1..17: note = Oligonucleotide
  source 1..17: mol_type = other DNA
cagcagagaagagaaca

SEQ ID NO: 20441 - DNA, 17 bp, synthetic construct
  misc_feature 1..17: note = Oligonucleotide
  source 1..17: mol_type = other DNA
atacagcagagaagaga

SEQ ID NO: 20442 - DNA, 17 bp, synthetic construct
  misc_feature 1..17: note = Oligonucleotide
  source 1..17: mol_type = other DNA
caaatacagcagagaag

SEQ ID NO: 20443 - DNA, 17 bp, synthetic construct
  misc_feature 1..17: note = Oligonucleotide
  source 1..17: mol_type = other DNA
ctgcaaatacagcagag

SEQ ID NO: 20444 - DNA, 17 bp, synthetic construct
  misc_feature 1..17: note = Oligonucleotide
  source 1..17: mol_type = other DNA
gctctgcaaatacagca

SEQ ID NO: 20445 - DNA, 17 bp, synthetic construct
  misc_feature 1..17: note = Oligonucleotide
  source 1..17: mol_type = other DNA
ccagctctgcaaataca

SEQ ID NO: 20446 - DNA, 17 bp, synthetic construct
  misc_feature 1..17: note = Oligonucleotide
  source 1..17: mol_type = other DNA
gtaccagctctgcaaat

SEQ ID NO: 20447 - DNA, 17 bp, synthetic construct
  misc_feature 1..17: note = Oligonucleotide
  source 1..17: mol_type = other DNA
tgtgtaccagctctgca

SEQ ID NO: 20448 - DNA, 17 bp, synthetic construct
  misc_feature 1..17: note = Oligonucleotide
  source 1..17: mol_type = other DNA
tactgtgtaccagctct

SEQ ID NO: 20449 - DNA, 17 bp, synthetic construct
  misc_feature 1..17: note = Oligonucleotide
  source 1..17: mol_type = other DNA
tcctactgtgtaccagc

SEQ ID NO: 20450 - DNA, 17 bp, synthetic construct
  misc_feature 1..17: note = Oligonucleotide
  source 1..17: mol_type = other DNA
agctcctactgtgtacc

SEQ ID NO: 20451 - DNA, 17 bp, synthetic construct
  misc_feature 1..17: note = Oligonucleotide
  source 1..17: mol_type = other DNA
ttgagctcctactgtgt

SEQ ID NO: 20452 - DNA, 17 bp, synthetic construct
  misc_feature 1..17: note = Oligonucleotide
  source 1..17: mol_type = other DNA
ttattgagctcctactg

SEQ ID NO: 20453 - DNA, 17 bp, synthetic construct
  misc_feature 1..17: note = Oligonucleotide
  source 1..17: mol_type = other DNA
tatttattgagctccta

SEQ ID NO: 20454 - DNA, 17 bp, synthetic construct
  misc_feature 1..17: note = Oligonucleotide
  source 1..17: mol_type = other DNA
aagtatttattgagctc

SEQ ID NO: 20455 - DNA, 17 bp, synthetic construct
  misc_feature 1..17: note = Oligonucleotide
  source 1..17: mol_type = other DNA
agcaagtatttattgag

SEQ ID NO: 20456 - DNA, 17 bp, synthetic construct
  misc_feature 1..17: note = Oligonucleotide
  source 1..17: mol_type = other DNA
ttcagcaagtatttatt

SEQ ID NO: 20457 - DNA, 17 bp, synthetic construct
  misc_feature 1..17: note = Oligonucleotide
  source 1..17: mol_type = other DNA
tccttcagcaagtattt

SEQ ID NO: 20458 - DNA, 17 bp, synthetic construct
  misc_feature 1..17: note = Oligonucleotide
  source 1..17: mol_type = other DNA
ttttccttcagcaagta

SEQ ID NO: 20459 - DNA, 17 bp, synthetic construct
  misc_feature 1..17: note = Oligonucleotide
  source 1..17: mol_type = other DNA
atgttttccttcagcaa

SEQ ID NO: 20460 - DNA, 17 bp, synthetic construct
  misc_feature 1..17: note = Oligonucleotide
  source 1..17: mol_type = other DNA
tccatgttttccttcag

SEQ ID NO: 20461 - DNA, 17 bp, synthetic construct
  misc_feature 1..17: note = Oligonucleotide
  source 1..17: mol_type = other DNA
agatccatgttttcctt

SEQ ID NO: 20462 - DNA, 17 bp, synthetic construct
  misc_feature 1..17: note = Oligonucleotide
  source 1..17: mol_type = other DNA
tcaagatccatgttttc

SEQ ID NO: 20463 - DNA, 17 bp, synthetic construct
  misc_feature 1..17: note = Oligonucleotide
  source 1..17: mol_type = other DNA
ttctcaagatccatgtt

SEQ ID NO: 20464 - DNA, 17 bp, synthetic construct
  misc_feature 1..17: note = Oligonucleotide
  source 1..17: mol_type = other DNA
catttctcaagatccat

SEQ ID NO: 20465 - DNA, 17 bp, synthetic construct
  misc_feature 1..17: note = Oligonucleotide
  source 1..17: mol_type = other DNA
tagcatttctcaagatc

SEQ ID NO: 20466 - DNA, 17 bp, synthetic construct
  misc_feature 1..17: note = Oligonucleotide
  source 1..17: mol_type = other DNA
tggtagcatttctcaag

SEQ ID NO: 20467 - DNA, 17 bp, synthetic construct
  misc_feature 1..17: note = Oligonucleotide
  source 1..17: mol_type = other DNA
tcttggtagcatttctc

SEQ ID NO: 20468 - DNA, 17 bp, synthetic construct
  misc_feature 1..17: note = Oligonucleotide
  source 1..17: mol_type = other DNA
ctctcttggtagcattt

SEQ ID NO: 20469 - DNA, 17 bp, synthetic construct
  misc_feature 1..17: note = Oligonucleotide
  source 1..17: mol_type = other DNA
ttcctctcttggtagca

SEQ ID NO: 20470 - DNA, 17 bp, synthetic construct
  misc_feature 1..17: note = Oligonucleotide
  source 1..17: mol_type = other DNA
catttcctctcttggta

SEQ ID NO: 20471 - DNA, 17 bp, synthetic construct
  misc_feature 1..17: note = Oligonucleotide
  source 1..17: mol_type = other DNA
cctcatttcctctcttg

SEQ ID NO: 20472 - DNA, 17 bp, synthetic construct
  misc_feature 1..17: note = Oligonucleotide
  source 1..17: mol_type = other DNA
cttcctcatttcctctc

SEQ ID NO: 20473 - DNA, 17 bp, synthetic construct
  misc_feature 1..17: note = Oligonucleotide
  source 1..17: mol_type = other DNA
caccttcctcatttcct

SEQ ID NO: 20474 - DNA, 17 bp, synthetic construct
  misc_feature 1..17: note = Oligonucleotide
  source 1..17: mol_type = other DNA
cagcaccttcctcattt

SEQ ID NO: 20475 - DNA, 17 bp, synthetic construct
  misc_feature 1..17: note = Oligonucleotide
  source 1..17: mol_type = other DNA
cctcagcaccttcctca

SEQ ID NO: 20476 - DNA, 17 bp, synthetic construct
  misc_feature 1..17: note = Oligonucleotide
  source 1..17: mol_type = other DNA
atccctcagcaccttcc

SEQ ID NO: 20477 - DNA, 17 bp, synthetic construct
  misc_feature 1..17: note = Oligonucleotide
  source 1..17: mol_type = other DNA
ttcatccctcagcacct

SEQ ID NO: 20478 - DNA, 17 bp, synthetic construct
  misc_feature 1..17: note = Oligonucleotide
  source 1..17: mol_type = other DNA
gctttcatccctcagca

SEQ ID NO: 20479 - DNA, 17 bp, synthetic construct
  misc_feature 1..17: note = Oligonucleotide
  source 1..17: mol_type = other DNA
ctcgctttcatccctca

SEQ ID NO: 20480 - DNA, 17 bp, synthetic construct
  misc_feature 1..17: note = Oligonucleotide
  source 1..17: mol_type = other DNA
tgcctcgctttcatccc

SEQ ID NO: 20481 - DNA, 17 bp, synthetic construct
  misc_feature 1..17: note = Oligonucleotide
  source 1..17: mol_type = other DNA
cactgcctcgctttcat

SEQ ID NO: 20482 - DNA, 17 bp, synthetic construct
  misc_feature 1..17: note = Oligonucleotide
  source 1..17: mol_type = other DNA
caccactgcctcgcttt

SEQ ID NO: 20483 - DNA, 17 bp, synthetic construct
  misc_feature 1..17: note = Oligonucleotide
  source 1..17: mol_type = other DNA
caccaccactgcctcgc

SEQ ID NO: 20484 - DNA, 17 bp, synthetic construct
  misc_feature 1..17: note = Oligonucleotide
  source 1..17: mol_type = other DNA
cagcaccaccactgcct

SEQ ID NO: 20485 - DNA, 17 bp, synthetic construct
  misc_feature 1..17: note = Oligonucleotide
  source 1..17: mol_type = other DNA
aggcagcaccaccactg

SEQ ID NO: 20486 - DNA, 17 bp, synthetic construct
  misc_feature 1..17: note = Oligonucleotide
  source 1..17: mol_type = other DNA
cacaggcagcaccacca

SEQ ID NO: 20487 - DNA, 17 bp, synthetic construct
  misc_feature 1..17: note = Oligonucleotide
  source 1..17: mol_type = other DNA
ccccacaggcagcacca

SEQ ID NO: 20488 - DNA, 17 bp, synthetic construct
  misc_feature 1..17: note = Oligonucleotide
  source 1..17: mol_type = other DNA
aggccccacaggcagca

SEQ ID NO: 20489 - DNA, 17 bp, synthetic construct
  misc_feature 1..17: note = Oligonucleotide
  source 1..17: mol_type = other DNA
caaaggccccacaggca

SEQ ID NO: 20490 - DNA, 17 bp, synthetic construct
  misc_feature 1..17: note = Oligonucleotide
  source 1..17: mol_type = other DNA
ccgcaaaggccccacag

SEQ ID NO: 20491 - DNA, 17 bp, synthetic construct
  misc_feature 1..17: note = Oligonucleotide
  source 1..17: mol_type = other DNA
ggaccgcaaaggcccca

SEQ ID NO: 20492 - DNA, 17 bp, synthetic construct
  misc_feature 1..17: note = Oligonucleotide
  source 1..17: mol_type = other DNA
ccaggaccgcaaaggcc

SEQ ID NO: 20493 - DNA, 17 bp, synthetic construct
  misc_feature 1..17: note = Oligonucleotide
  source 1..17: mol_type = other DNA
tctccaggaccgcaaag

SEQ ID NO: 20494 - DNA, 17 bp, synthetic construct
  misc_feature 1..17: note = Oligonucleotide
  source 1..17: mol_type = other DNA
cactctccaggaccgca

SEQ ID NO: 20495 - DNA, 17 bp, synthetic construct
  misc_feature 1..17: note = Oligonucleotide
  source 1..17: mol_type = other DNA
ctccactctccaggacc

SEQ ID NO: 20496 - DNA, 17 bp, synthetic construct
  misc_feature 1..17: note = Oligonucleotide
  source 1..17: mol_type = other DNA
cagctccactctccagg

SEQ ID NO: 20497 - DNA, 17 bp, synthetic construct
  misc_feature 1..17: note = Oligonucleotide
  source 1..17: mol_type = other DNA
ccgcagctccactctcc

SEQ ID NO: 20498 - DNA, 17 bp, synthetic construct
  misc_feature 1..17: note = Oligonucleotide
  source 1..17: mol_type = other DNA
gccccgcagctccactc

SEQ ID NO: 20499 - DNA, 17 bp, synthetic construct
  misc_feature 1..17: note = Oligonucleotide
  source 1..17: mol_type = other DNA
ccagccccgcagctcca

SEQ ID NO: 20500 - DNA, 17 bp, synthetic construct
  misc_feature 1..17: note = Oligonucleotide
  source 1..17: mol_type = other DNA
ttcccagccccgcagct

SEQ ID NO: 20501 - DNA, 17 bp, synthetic construct
  misc_feature 1..17: note = Oligonucleotide
  source 1..17: mol_type = other DNA
gccttcccagccccgca

SEQ ID NO: 20502 - DNA, 17 bp, synthetic construct
  misc_feature 1..17: note = Oligonucleotide
  source 1..17: mol_type = other DNA
ccagccttcccagcccc

SEQ ID NO: 20503 - DNA, 17 bp, synthetic construct
  misc_feature 1..17: note = Oligonucleotide
  source 1..17: mol_type = other DNA
ccaccagccttcccagc

SEQ ID NO: 20504 - DNA, 17 bp, synthetic construct
  misc_feature 1..17: note = Oligonucleotide
  source 1..17: mol_type = other DNA
cacccaccagccttccc

SEQ ID NO: 20505 - DNA, 17 bp, synthetic construct
  misc_feature 1..17: note = Oligonucleotide
  source 1..17: mol_type = other DNA
ccccacccaccagcctt

SEQ ID NO: 20506 - DNA, 17 bp, synthetic construct
  misc_feature 1..17: note = Oligonucleotide
  source 1..17: mol_type = other DNA
gagccccacccaccagc

SEQ ID NO: 20507 - DNA, 17 bp, synthetic construct
  misc_feature 1..17: note = Oligonucleotide
  source 1..17: mol_type = other DNA
tgcgagccccacccacc

SEQ ID NO: 20508 - DNA, 17 bp, synthetic construct
  misc_feature 1..17: note = Oligonucleotide
  source 1..17: mol_type = other DNA
gcctgcgagccccaccc

SEQ ID NO: 20509 - DNA, 17 bp, synthetic construct
  misc_feature 1..17: note = Oligonucleotide
  source 1..17: mol_type = other DNA
gctgcctgcgagcccca

SEQ ID NO: 20510 - DNA, 17 bp, synthetic construct
  misc_feature 1..17: note = Oligonucleotide
  source 1..17: mol_type = other DNA
ccagctgcctgcgagcc

SEQ ID NO: 20511 - DNA, 17 bp, synthetic construct
  misc_feature 1..17: note = Oligonucleotide
  source 1..17: mol_type = other DNA
cctccagctgcctgcga

SEQ ID NO: 20512 - DNA, 17 bp, synthetic construct
  misc_feature 1..17: note = Oligonucleotide
  source 1..17: mol_type = other DNA
gctcctccagctgcctg

SEQ ID NO: 20513 - DNA, 17 bp, synthetic construct
  misc_feature 1..17: note = Oligonucleotide
  source 1..17: mol_type = other DNA
cgagctcctccagctgc

SEQ ID NO: 20514 - DNA, 17 bp, synthetic construct
  misc_feature 1..17: note = Oligonucleotide
  source 1..17: mol_type = other DNA
ccacgagctcctccagc

SEQ ID NO: 20515 - DNA, 17 bp, synthetic construct
  misc_feature 1..17: note = Oligonucleotide
  source 1..17: mol_type = other DNA
ctcccacgagctcctcc

SEQ ID NO: 20516 - DNA, 17 bp, synthetic construct
  misc_feature 1..17: note = Oligonucleotide
  source 1..17: mol_type = other DNA
ctgctcccacgagctcc

SEQ ID NO: 20517 - DNA, 17 bp, synthetic construct
  misc_feature 1..17: note = Oligonucleotide
  source 1..17: mol_type = other DNA
tctctgctcccacgagc

SEQ ID NO: 20518 - DNA, 17 bp, synthetic construct
  misc_feature 1..17: note = Oligonucleotide
  source 1..17: mol_type = other DNA
acctctctgctcccacg

SEQ ID NO: 20519 - DNA, 17 bp, synthetic construct
  misc_feature 1..17: note = Oligonucleotide
  source 1..17: mol_type = other DNA
atgacctctctgctccc

SEQ ID NO: 20520 - DNA, 17 bp, synthetic construct
  misc_feature 1..17: note = Oligonucleotide
  source 1..17: mol_type = other DNA
gccatgacctctctgct

SEQ ID NO: 20521 - DNA, 17 bp, synthetic construct
  misc_feature 1..17: note = Oligonucleotide
  source 1..17: mol_type = other DNA
ccagccatgacctctct

SEQ ID NO: 20522 - DNA, 17 bp, synthetic construct
  misc_feature 1..17: note = Oligonucleotide
  source 1..17: mol_type = other DNA
cctccagccatgacctc

SEQ ID NO: 20523 - DNA, 17 bp, synthetic construct
  misc_feature 1..17: note = Oligonucleotide
  source 1..17: mol_type = other DNA
acacctccagccatgac

SEQ ID NO: 20524 - DNA, 17 bp, synthetic construct
  misc_feature 1..17: note = Oligonucleotide
  source 1..17: mol_type = other DNA
gccacacctccagccat

SEQ ID NO: 20525 - DNA, 17 bp, synthetic construct
  misc_feature 1..17: note = Oligonucleotide
  source 1..17: mol_type = other DNA
cgagccacacctccagc

SEQ ID NO: 20526 - DNA, 17 bp, synthetic construct
  misc_feature 1..17: note = Oligonucleotide
  source 1..17: mol_type = other DNA
gttcgagccacacctcc

SEQ ID NO: 20527 - DNA, 17 bp, synthetic construct
  misc_feature 1..17: note = Oligonucleotide
  source 1..17: mol_type = other DNA
aaggttcgagccacacc

SEQ ID NO: 20528 - DNA, 17 bp, synthetic construct
  misc_feature 1..17: note = Oligonucleotide
  source 1..17: mol_type = other DNA
ctgaaggttcgagccac

SEQ ID NO: 20529 - DNA, 17 bp, synthetic construct
  misc_feature 1..17: note = Oligonucleotide
  source 1..17: mol_type = other DNA
gacctgaaggttcgagc

SEQ ID NO: 20530 - DNA, 17 bp, synthetic construct
  misc_feature 1..17: note = Oligonucleotide
  source 1..17: mol_type = other DNA
actgacctgaaggttcg

SEQ ID NO: 20531 - DNA, 17 bp, synthetic construct
  misc_feature 1..17: note = Oligonucleotide
  source 1..17: mol_type = other DNA
ctcactgacctgaaggt

SEQ ID NO: 20532 - DNA, 17 bp, synthetic construct
  misc_feature 1..17: note = Oligonucleotide
  source 1..17: mol_type = other DNA
accctcactgacctgaa

SEQ ID NO: 20533 - DNA, 17 bp, synthetic construct
  misc_feature 1..17: note = Oligonucleotide
  source 1..17: mol_type = other DNA
tccaccctcactgacct

SEQ ID NO: 20534 - DNA, 17 bp, synthetic construct
  misc_feature 1..17: note = Oligonucleotide
  source 1..17: mol_type = other DNA
cactccaccctcactga

SEQ ID NO: 20535 - DNA, 17 bp, synthetic construct
  misc_feature 1..17: note = Oligonucleotide
  source 1..17: mol_type = other DNA
caccactccaccctcac

SEQ ID NO: 20536 - DNA, 17 bp, synthetic construct
  misc_feature 1..17: note = Oligonucleotide
  source 1..17: mol_type = other DNA
gcccaccactccaccct

SEQ ID NO: 20537 - DNA, 17 bp, synthetic construct
  misc_feature 1..17: note = Oligonucleotide
  source 1..17: mol_type = other DNA
tctgcccaccactccac

SEQ ID NO: 20538 - DNA, 17 bp, synthetic construct
  misc_feature 1..17: note = Oligonucleotide
  source 1..17: mol_type = other DNA
ctgtctgcccaccactc

SEQ ID NO: 20539 - DNA, 17 bp, synthetic construct
  misc_feature 1..17: note = Oligonucleotide
  source 1..17: mol_type = other DNA
cagctgtctgcccacca

SEQ ID NO: 20540 - DNA, 17 bp, synthetic construct
  misc_feature 1..17: note = Oligonucleotide
  source 1..17: mol_type = other DNA
agccagctgtctgccca

SEQ ID NO: 20541 - DNA, 17 bp, synthetic construct
  misc_feature 1..17: note = Oligonucleotide
  source 1..17: mol_type = other DNA
gctagccagctgtctgc

SEQ ID NO: 20542 - DNA, 17 bp, synthetic construct
  misc_feature 1..17: note = Oligonucleotide
  source 1..17: mol_type = other DNA
caagctagccagctgtc

SEQ ID NO: 20543 - DNA, 17 bp, synthetic construct
  misc_feature 1..17: note = Oligonucleotide
  source 1..17: mol_type = other DNA
caccaagctagccagct

SEQ ID NO: 20544 - DNA, 17 bp, synthetic construct
  misc_feature 1..17: note = Oligonucleotide
  source 1..17: mol_type = other DNA
cagcaccaagctagcca

SEQ ID NO: 20545 - DNA, 17 bp, synthetic construct
  misc_feature 1..17: note = Oligonucleotide
  source 1..17: mol_type = other DNA
ggccagcaccaagctag

SEQ ID NO: 20546 - DNA, 17 bp, synthetic construct
  misc_feature 1..17: note = Oligonucleotide
  source 1..17: mol_type = other DNA
catggccagcaccaagc

SEQ ID NO: 20547 - DNA, 17 bp, synthetic construct
  misc_feature 1..17: note = Oligonucleotide
  source 1..17: mol_type = other DNA
ccacatggccagcacca

SEQ ID NO: 20548 - DNA, 17 bp, synthetic construct
  misc_feature 1..17: note = Oligonucleotide
  source 1..17: mol_type = other DNA
gtcccacatggccagca

SEQ ID NO: 20549 - DNA, 17 bp, synthetic construct
  misc_feature 1..17: note = Oligonucleotide
  source 1..17: mol_type = other DNA
caagtcccacatggcca

SEQ ID NO: 20550 - DNA, 17 bp, synthetic construct
  misc_feature 1..17: note = Oligonucleotide
  source 1..17: mol_type = other DNA
tctcaagtcccacatgg

SEQ ID NO: 20551 - DNA, 17 bp, synthetic construct
  misc_feature 1..17: note = Oligonucleotide
  source 1..17: mol_type = other DNA
tgatctcaagtcccaca

SEQ ID NO: 20552 - DNA, 17 bp, synthetic construct
  misc_feature 1..17: note = Oligonucleotide
  source 1..17: mol_type = other DNA
tcttgatctcaagtccc

SEQ ID NO: 20553 - DNA, 17 bp, synthetic construct
  misc_feature 1..17: note = Oligonucleotide
  source 1..17: mol_type = other DNA
tcctcttgatctcaagt

SEQ ID NO: 20554 - DNA, 17 bp, synthetic construct
  misc_feature 1..17: note = Oligonucleotide
  source 1..17: mol_type = other DNA
ctgtcctcttgatctca

SEQ ID NO: 20555 - DNA, 17 bp, synthetic construct
  misc_feature 1..17: note = Oligonucleotide
  source 1..17: mol_type = other DNA
caactgtcctcttgatc

SEQ ID NO: 20556 - DNA, 17 bp, synthetic construct
  misc_feature 1..17: note = Oligonucleotide
  source 1..17: mol_type = other DNA
ccccaactgtcctcttg

SEQ ID NO: 20557 - DNA, 17 bp, synthetic construct
  misc_feature 1..17: note = Oligonucleotide
  source 1..17: mol_type = other DNA
ggtccccaactgtcctc

SEQ ID NO: 20558 - DNA, 17 bp, synthetic construct
  misc_feature 1..17: note = Oligonucleotide
  source 1..17: mol_type = other DNA
cttggtccccaactgtc

SEQ ID NO: 20559 - DNA, 17 bp, synthetic construct
  misc_feature 1..17: note = Oligonucleotide
  source 1..17: mol_type = other DNA
gagcttggtccccaact

SEQ ID NO: 20560 - DNA, 17 bp, synthetic construct
  misc_feature 1..17: note = Oligonucleotide
  source 1..17: mol_type = other DNA
acagagcttggtcccca

SEQ ID NO: 20561 - DNA, 17 bp, synthetic construct
  misc_feature 1..17: note = Oligonucleotide
  source 1..17: mol_type = other DNA
cccacagagcttggtcc

SEQ ID NO: 20562 - DNA, 17 bp, synthetic construct
  misc_feature 1..17: note = Oligonucleotide
  source 1..17: mol_type = other DNA
catcccacagagcttgg

SEQ ID NO: 20563 - DNA, 17 bp, synthetic construct
  misc_feature 1..17: note = Oligonucleotide
  source 1..17: mol_type = other DNA
atgcatcccacagagct

SEQ ID NO: 20564 - DNA, 17 bp, synthetic construct
  misc_feature 1..17: note = Oligonucleotide
  source 1..17: mol_type = other DNA
tcgatgcatcccacaga

SEQ ID NO: 20565 - DNA, 17 bp, synthetic construct
  misc_feature 1..17: note = Oligonucleotide
  source 1..17: mol_type = other DNA
acctcgatgcatcccac

SEQ ID NO: 20566 - DNA, 17 bp, synthetic construct
  misc_feature 1..17: note = Oligonucleotide
  source 1..17: mol_type = other DNA
ctgacctcgatgcatcc

SEQ ID NO: 20567 - DNA, 17 bp, synthetic construct
  misc_feature 1..17: note = Oligonucleotide
  source 1..17: mol_type = other DNA
gccctgacctcgatgca

SEQ ID NO: 20568 - DNA, 17 bp, synthetic construct
  misc_feature 1..17: note = Oligonucleotide
  source 1..17: mol_type = other DNA
cctgccctgacctcgat

SEQ ID NO: 20569 - DNA, 17 bp, synthetic construct
  misc_feature 1..17: note = Oligonucleotide
  source 1..17: mol_type = other DNA
tcccctgccctgacctc

SEQ ID NO: 20570 - DNA, 17 bp, synthetic construct
  misc_feature 1..17: note = Oligonucleotide
  source 1..17: mol_type = other DNA
gggtcccctgccctgac

SEQ ID NO: 20571 - DNA, 17 bp, synthetic construct
  misc_feature 1..17: note = Oligonucleotide
  source 1..17: mol_type = other DNA
gctgggtcccctgccct

SEQ ID NO: 20572 - DNA, 17 bp, synthetic construct
  misc_feature 1..17: note = Oligonucleotide
  source 1..17: mol_type = other DNA
tgggctgggtcccctgc

SEQ ID NO: 20573 - DNA, 17 bp, synthetic construct
  misc_feature 1..17: note = Oligonucleotide
  source 1..17: mol_type = other DNA
gtgtgggctgggtcccc

SEQ ID NO: 20574 - DNA, 17 bp, synthetic construct
  misc_feature 1..17: note = Oligonucleotide
  source 1..17: mol_type = other DNA
ggtgtgtgggctgggtc

SEQ ID NO: 20575 - DNA, 17 bp, synthetic construct
  misc_feature 1..17: note = Oligonucleotide
  source 1..17: mol_type = other DNA
ctaggtgtgtgggctgg

SEQ ID NO: 20576 - DNA, 17 bp, synthetic construct
  misc_feature 1..17: note = Oligonucleotide
  source 1..17: mol_type = other DNA
gatctaggtgtgtgggc

SEQ ID NO: 20577 - DNA, 17 bp, synthetic construct
  misc_feature 1..17: note = Oligonucleotide
  source 1..17: mol_type = other DNA
ggggatctaggtgtgtg

SEQ ID NO: 20578 - DNA, 17 bp, synthetic construct
  misc_feature 1..17: note = Oligonucleotide
  source 1..17: mol_type = other DNA
gcaggggatctaggtgt

SEQ ID NO: 20579 - DNA, 17 bp, synthetic construct
  misc_feature 1..17: note = Oligonucleotide
  source 1..17: mol_type = other DNA
ggggcaggggatctagg

SEQ ID NO: 20580 - DNA, 17 bp, synthetic construct
  misc_feature 1..17: note = Oligonucleotide
  source 1..17: mol_type = other DNA
agtggggcaggggatct

SEQ ID NO: 20581 - DNA, 17 bp, synthetic construct
  misc_feature 1..17: note = Oligonucleotide
  source 1..17: mol_type = other DNA
gtgagtggggcagggga

SEQ ID NO: 20582 - DNA, 17 bp, synthetic construct
  misc_feature 1..17: note = Oligonucleotide
  source 1..17: mol_type = other DNA
actgtgagtggggcagg

SEQ ID NO: 20583 - DNA, 17 bp, synthetic construct
  misc_feature 1..17: note = Oligonucleotide
  source 1..17: mol_type = other DNA
ctaactgtgagtggggc

SEQ ID NO: 20584 - DNA, 17 bp, synthetic construct
  misc_feature 1..17: note = Oligonucleotide
  source 1..17: mol_type = other DNA
agactaactgtgagtgg

SEQ ID NO: 20585 - DNA, 17 bp, synthetic construct
  misc_feature 1..17: note = Oligonucleotide
  source 1..17: mol_type = other DNA
ttcagactaactgtgag

SEQ ID NO: 20586 - DNA, 17 bp, synthetic construct
  misc_feature 1..17: note = Oligonucleotide
  source 1..17: mol_type = other DNA
tgcttcagactaactgt

SEQ ID NO: 20587 - DNA, 17 bp, synthetic construct
  misc_feature 1..17: note = Oligonucleotide
  source 1..17: mol_type = other DNA
ccttgcttcagactaac

SEQ ID NO: 20588 - DNA, 17 bp, synthetic construct
  misc_feature 1..17: note = Oligonucleotide
  source 1..17: mol_type = other DNA
gtcccttgcttcagact

SEQ ID NO: 20589 - DNA, 17 bp, synthetic construct
  misc_feature 1..17: note = Oligonucleotide
  source 1..17: mol_type = other DNA
ggggtcccttgcttcag

SEQ ID NO: 20590 - DNA, 17 bp, synthetic construct
  misc_feature 1..17: note = Oligonucleotide
  source 1..17: mol_type = other DNA
catggggtcccttgctt

SEQ ID NO: 20591 - DNA, 17 bp, synthetic construct
  misc_feature 1..17: note = Oligonucleotide
  source 1..17: mol_type = other DNA
cctcatggggtcccttg

SEQ ID NO: 20592 - DNA, 17 bp, synthetic construct
  misc_feature 1..17: note = Oligonucleotide
  source 1..17: mol_type = other DNA
caacctcatggggtccc

SEQ ID NO: 20593 - DNA, 17 bp, synthetic construct
  misc_feature 1..17: note = Oligonucleotide
  source 1..17: mol_type = other DNA
gctcaacctcatggggt

SEQ ID NO: 20594 - DNA, 17 bp, synthetic construct
  misc_feature 1..17: note = Oligonucleotide
  source 1..17: mol_type = other DNA
gatgctcaacctcatgg

SEQ ID NO: 20595 - DNA, 17 bp, synthetic construct
  misc_feature 1..17: note = Oligonucleotide
  source 1..17: mol_type = other DNA
cttgatgctcaacctca

SEQ ID NO: 20596 - DNA, 17 bp, synthetic construct
  misc_feature 1..17: note = Oligonucleotide
  source 1..17: mol_type = other DNA
ctccttgatgctcaacc

SEQ ID NO: 20597 - DNA, 17 bp, synthetic construct
  misc_feature 1..17: note = Oligonucleotide
  source 1..17: mol_type = other DNA
tagctccttgatgctca

SEQ ID NO: 20598 - DNA, 17 bp, synthetic construct
  misc_feature 1..17: note = Oligonucleotide
  source 1..17: mol_type = other DNA
caatagctccttgatgc

SEQ ID NO: 20599 - DNA, 17 bp, synthetic construct
  misc_feature 1..17: note = Oligonucleotide
  source 1..17: mol_type = other DNA
tcacaatagctccttga

SEQ ID NO: 20600 - DNA, 17 bp, synthetic construct
  misc_feature 1..17: note = Oligonucleotide
  source 1..17: mol_type = other DNA
tcttcacaatagctcct

SEQ ID NO: 20601 - DNA, 17 bp, synthetic construct
  misc_feature 1..17: note = Oligonucleotide
  source 1..17: mol_type = other DNA
acttcttcacaatagct

SEQ ID NO: 20602 - DNA, 17 bp, synthetic construct
  misc_feature 1..17: note = Oligonucleotide
  source 1..17: mol_type = other DNA
ccaacttcttcacaata

SEQ ID NO: 20603 - DNA, 17 bp, synthetic construct
  misc_feature 1..17: note = Oligonucleotide
  source 1..17: mol_type = other DNA
tcaccaacttcttcaca

SEQ ID NO: 20604 - DNA, 17 bp, synthetic construct
  misc_feature 1..17: note = Oligonucleotide
  source 1..17: mol_type = other DNA
tcttcaccaacttcttc

SEQ ID NO: 20605 - DNA, 17 bp, synthetic construct
  misc_feature 1..17: note = Oligonucleotide
  source 1..17: mol_type = other DNA
ctgtcttcaccaacttc

SEQ ID NO: 20606 - DNA, 17 bp, synthetic construct
  misc_feature 1..17: note = Oligonucleotide
  source 1..17: mol_type = other DNA
gttctgtcttcaccaac

SEQ ID NO: 20607 - DNA, 17 bp, synthetic construct
  misc_feature 1..17: note = Oligonucleotide
  source 1..17: mol_type = other DNA
agcgttctgtcttcacc

SEQ ID NO: 20608 - DNA, 17 bp, synthetic construct
  misc_feature 1..17: note = Oligonucleotide
  source 1..17: mol_type = other DNA
agcagcgttctgtcttc

SEQ ID NO: 20609 - DNA, 17 bp, synthetic construct
  misc_feature 1..17: note = Oligonucleotide
  source 1..17: mol_type = other DNA
ggaagcagcgttctgtc

SEQ ID NO: 20610 - DNA, 17 bp, synthetic construct
  misc_feature 1..17: note = Oligonucleotide
  source 1..17: mol_type = other DNA
catggaagcagcgttct

SEQ ID NO: 20611 - DNA, 17 bp, synthetic construct
  misc_feature 1..17: note = Oligonucleotide
  source 1..17: mol_type = other DNA
tggcatggaagcagcgt

SEQ ID NO: 20612 - DNA, 17 bp, synthetic construct
  misc_feature 1..17: note = Oligonucleotide
  source 1..17: mol_type = other DNA
cgctggcatggaagcag

SEQ ID NO: 20613 - DNA, 17 bp, synthetic construct
  misc_feature 1..17: note = Oligonucleotide
  source 1..17: mol_type = other DNA
aggcgctggcatggaag

SEQ ID NO: 20614 - DNA, 17 bp, synthetic construct
  misc_feature 1..17: note = Oligonucleotide
  source 1..17: mol_type = other DNA
tataggcgctggcatgg

SEQ ID NO: 20615 - DNA, 17 bp, synthetic construct
  misc_feature 1..17: note = Oligonucleotide
  source 1..17: mol_type = other DNA
gcctataggcgctggca

SEQ ID NO: 20616 - DNA, 17 bp, synthetic construct
  misc_feature 1..17: note = Oligonucleotide
  source 1..17: mol_type = other DNA
tgtgcctataggcgctg

SEQ ID NO: 20617 - DNA, 17 bp, synthetic construct
  misc_feature 1..17: note = Oligonucleotide
  source 1..17: mol_type = other DNA
ctatgtgcctataggcg

SEQ ID NO: 20618 - DNA, 17 bp, synthetic construct
  misc_feature 1..17: note = Oligonucleotide
  source 1..17: mol_type = other DNA
gtgctatgtgcctatag

SEQ ID NO: 20619 - DNA, 17 bp, synthetic construct
  misc_feature 1..17: note = Oligonucleotide
  source 1..17: mol_type = other DNA
gccgtgctatgtgccta

SEQ ID NO: 20620 - DNA, 17 bp, synthetic construct
  misc_feature 1..17: note = Oligonucleotide
  source 1..17: mol_type = other DNA
aatgccgtgctatgtgc

SEQ ID NO: 20621 - DNA, 17 bp, synthetic construct
  misc_feature 1..17: note = Oligonucleotide
  source 1..17: mol_type = other DNA
acaaatgccgtgctatg

SEQ ID NO: 20622 - DNA, 17 bp, synthetic construct
  misc_feature 1..17: note = Oligonucleotide
  source 1..17: mol_type = other DNA
tgtacaaatgccgtgct

SEQ ID NO: 20623 - DNA, 17 bp, synthetic construct
  misc_feature 1..17: note = Oligonucleotide
  source 1..17: mol_type = other DNA
tcatgtacaaatgccgt

SEQ ID NO: 20624 - DNA, 17 bp, synthetic construct
  misc_feature 1..17: note = Oligonucleotide
  source 1..17: mol_type = other DNA
cactcatgtacaaatgc

SEQ ID NO: 20625 - DNA, 17 bp, synthetic construct
  misc_feature 1..17: note = Oligonucleotide
  source 1..17: mol_type = other DNA
ccacactcatgtacaaa

SEQ ID NO: 20626 - DNA, 17 bp, synthetic construct
  misc_feature 1..17: note = Oligonucleotide
  source 1..17: mol_type = other DNA
tacccacactcatgtac

SEQ ID NO: 20627 - DNA, 17 bp, synthetic construct
  misc_feature 1..17: note = Oligonucleotide
  source 1..17: mol_type = other DNA
cattacccacactcatg

SEQ ID NO: 20628 - DNA, 17 bp, synthetic construct
  misc_feature 1..17: note = Oligonucleotide
  source 1..17: mol_type = other DNA
ctgcattacccacactc

SEQ ID NO: 20629 - DNA, 17 bp, synthetic construct
  misc_feature 1..17: note = Oligonucleotide
  source 1..17: mol_type = other DNA
aatctgcattacccaca

SEQ ID NO: 20630 - DNA, 17 bp, synthetic construct
  misc_feature 1..17: note = Oligonucleotide
  source 1..17: mol_type = other DNA
ctgaatctgcattaccc

SEQ ID NO: 20631 - DNA, 17 bp, synthetic construct
  misc_feature 1..17: note = Oligonucleotide
  source 1..17: mol_type = other DNA
catctgaatctgcatta

SEQ ID NO: 20632 - DNA, 17 bp, synthetic construct
  misc_feature 1..17: note = Oligonucleotide
  source 1..17: mol_type = other DNA
gcacatctgaatctgca

SEQ ID NO: 20633 - DNA, 17 bp, synthetic construct
  misc_feature 1..17: note = Oligonucleotide
  source 1..17: mol_type = other DNA
tgtgcacatctgaatct

SEQ ID NO: 20634 - DNA, 17 bp, synthetic construct
  misc_feature 1..17: note = Oligonucleotide
  source 1..17: mol_type = other DNA
gtgtgtgcacatctgaa

SEQ ID NO: 20635 - DNA, 17 bp, synthetic construct
  misc_feature 1..17: note = Oligonucleotide
  source 1..17: mol_type = other DNA
tgtgtgtgtgcacatct

SEQ ID NO: 20636 - DNA, 17 bp, synthetic construct
  misc_feature 1..17: note = Oligonucleotide
  source 1..17: mol_type = other DNA
gcatgtgtgtgtgcaca

SEQ ID NO: 20637 - DNA, 17 bp, synthetic construct
  misc_feature 1..17: note = Oligonucleotide
  source 1..17: mol_type = other DNA
catgcatgtgtgtgtgc

SEQ ID NO: 20638 - DNA, 17 bp, synthetic construct
  misc_feature 1..17: note = Oligonucleotide
  source 1..17: mol_type = other DNA
gttcatgcatgtgtgtg

SEQ ID NO: 20639 - DNA, 17 bp, synthetic construct
  misc_feature 1..17: note = Oligonucleotide
  source 1..17: mol_type = other DNA
tgtgttcatgcatgtgt

SEQ ID NO: 20640 - DNA, 17 bp, synthetic construct
  misc_feature 1..17: note = Oligonucleotide
  source 1..17: mol_type = other DNA
aggtgtgttcatgcatg

SEQ ID NO: 20641 - DNA, 17 bp, synthetic construct
  misc_feature 1..17: note = Oligonucleotide
  source 1..17: mol_type = other DNA
gtgaggtgtgttcatgc

SEQ ID NO: 20642 - DNA, 17 bp, synthetic construct
  misc_feature 1..17: note = Oligonucleotide
  source 1..17: mol_type = other DNA
cgtgtgaggtgtgttca

SEQ ID NO: 20643 - DNA, 17 bp, synthetic construct
  misc_feature 1..17: note = Oligonucleotide
  source 1..17: mol_type = other DNA
gtgcgtgtgaggtgtgt

SEQ ID NO: 20644 - DNA, 17 bp, synthetic construct
  misc_feature 1..17: note = Oligonucleotide
  source 1..17: mol_type = other DNA
catgtgcgtgtgaggtg

SEQ ID NO: 20645 - DNA, 17 bp, synthetic construct
  misc_feature 1..17: note = Oligonucleotide
  source 1..17: mol_type = other DNA
cgtcatgtgcgtgtgag

SEQ ID NO: 20646 - DNA, 17 bp, synthetic construct
  misc_feature 1..17: note = Oligonucleotide
  source 1..17: mol_type = other DNA
tgccgtcatgtgcgtgt

SEQ ID NO: 20647 - DNA, 17 bp, synthetic construct
  misc_feature 1..17: note = Oligonucleotide
  source 1..17: mol_type = other DNA
acctgccgtcatgtgcg

SEQ ID NO: 20648 - DNA, 17 bp, synthetic construct
  misc_feature 1..17: note = Oligonucleotide
  source 1..17: mol_type = other DNA
gtgacctgccgtcatgt

SEQ ID NO: 20649 - DNA, 17 bp, synthetic construct
  misc_feature 1..17: note = Oligonucleotide
  source 1..17: mol_type = other DNA
tgtgtgacctgccgtca

SEQ ID NO: 20650 - DNA, 17 bp, synthetic construct
  misc_feature 1..17: note = Oligonucleotide
  source 1..17: mol_type = other DNA
gtctgtgtgacctgccg

SEQ ID NO: 20651 - DNA, 17 bp, synthetic construct
  misc_feature 1..17: note = Oligonucleotide
  source 1..17: mol_type = other DNA
tgtgtctgtgtgacctg

SEQ ID NO: 20652 - DNA, 17 bp, synthetic construct
  misc_feature 1..17: note = Oligonucleotide
  source 1..17: mol_type = other DNA
tcatgtgtctgtgtgac

SEQ ID NO: 20653 - DNA, 17 bp, synthetic construct
  misc_feature 1..17: note = Oligonucleotide
  source 1..17: mol_type = other DNA
tgctcatgtgtctgtgt

SEQ ID NO: 20654 - DNA, 17 bp, synthetic construct
  misc_feature 1..17: note = Oligonucleotide
  source 1..17: mol_type = other DNA
ccgtgctcatgtgtctg

SEQ ID NO: 20655 - DNA, 17 bp, synthetic construct
  misc_feature 1..17: note = Oligonucleotide
  source 1..17: mol_type = other DNA
gtgccgtgctcatgtgt

SEQ ID NO: 20656 - DNA, 17 bp, synthetic construct
  misc_feature 1..17: note = Oligonucleotide
  source 1..17: mol_type = other DNA
caagtgccgtgctcatg

SEQ ID NO: 20657 - DNA, 17 bp, synthetic construct
  misc_feature 1..17: note = Oligonucleotide
  source 1..17: mol_type = other DNA
gtgcaagtgccgtgctc

SEQ ID NO: 20658 - DNA, 17 bp, synthetic construct
  misc_feature 1..17: note = Oligonucleotide
  source 1..17: mol_type = other DNA
tgtgtgcaagtgccgtg

SEQ ID NO: 20659 - DNA, 17 bp, synthetic construct
  misc_feature 1..17: note = Oligonucleotide
  source 1..17: mol_type = other DNA
cactgtgtgcaagtgcc

SEQ ID NO: 20660 - DNA, 17 bp, synthetic construct
  misc_feature 1..17: note = Oligonucleotide
  source 1..17: mol_type = other DNA
gcccactgtgtgcaagt

SEQ ID NO: 20661 - DNA, 17 bp, synthetic construct
  misc_feature 1..17: note = Oligonucleotide
  source 1..17: mol_type = other DNA
tgagcccactgtgtgca

SEQ ID NO: 20662 - DNA, 17 bp, synthetic construct
  misc_feature 1..17: note = Oligonucleotide
  source 1..17: mol_type = other DNA
atatgagcccactgtgt

SEQ ID NO: 20663 - DNA, 17 bp, synthetic construct
  misc_feature 1..17: note = Oligonucleotide
  source 1..17: mol_type = other DNA
tctatatgagcccactg

SEQ ID NO: 20664 - DNA, 17 bp, synthetic construct
  misc_feature 1..17: note = Oligonucleotide
  source 1..17: mol_type = other DNA
gtctctatatgagccca

SEQ ID NO: 20665 - DNA, 17 bp, synthetic construct
  misc_feature 1..17: note = Oligonucleotide
  source 1..17: mol_type = other DNA
cgtgtctctatatgagc

SEQ ID NO: 20666 - DNA, 17 bp, synthetic construct
  misc_feature 1..17: note = Oligonucleotide
  source 1..17: mol_type = other DNA
gcacgtgtctctatatg

SEQ ID NO: 20667 - DNA, 17 bp, synthetic construct
  misc_feature 1..17: note = Oligonucleotide
  source 1..17: mol_type = other DNA
catgcacgtgtctctat

SEQ ID NO: 20668 - DNA, 17 bp, synthetic construct
  misc_feature 1..17: note = Oligonucleotide
  source 1..17: mol_type = other DNA
gctcatgcacgtgtctc

SEQ ID NO: 20669 - DNA, 17 bp, synthetic construct
  misc_feature 1..17: note = Oligonucleotide
  source 1..17: mol_type = other DNA
tgtgctcatgcacgtgt

SEQ ID NO: 20670 - DNA, 17 bp, synthetic construct
  misc_feature 1..17: note = Oligonucleotide
  source 1..17: mol_type = other DNA
tgctgtgctcatgcacg

SEQ ID NO: 20671 - DNA, 17 bp, synthetic construct
  misc_feature 1..17: note = Oligonucleotide
  source 1..17: mol_type = other DNA
agatgctgtgctcatgc

SEQ ID NO: 20672 - DNA, 17 bp, synthetic construct
  misc_feature 1..17: note = Oligonucleotide
  source 1..17: mol_type = other DNA
tgtagatgctgtgctca

SEQ ID NO: 20673 - DNA, 17 bp, synthetic construct
  misc_feature 1..17: note = Oligonucleotide
  source 1..17: mol_type = other DNA
atgtgtagatgctgtgc

SEQ ID NO: 20674 - DNA, 17 bp, synthetic construct
  misc_feature 1..17: note = Oligonucleotide
  source 1..17: mol_type = other DNA
gtcatgtgtagatgctg

SEQ ID NO: 20675 - DNA, 17 bp, synthetic construct
  misc_feature 1..17: note = Oligonucleotide
  source 1..17: mol_type = other DNA
gtggtcatgtgtagatg

SEQ ID NO: 20676 - DNA, 17 bp, synthetic construct
  misc_feature 1..17: note = Oligonucleotide
  source 1..17: mol_type = other DNA
tccgtggtcatgtgtag

SEQ ID NO: 20677 - DNA, 17 bp, synthetic construct
  misc_feature 1..17: note = Oligonucleotide
  source 1..17: mol_type = other DNA
agatccgtggtcatgtg

SEQ ID NO: 20678 - DNA, 17 bp, synthetic construct
  misc_feature 1..17: note = Oligonucleotide
  source 1..17: mol_type = other DNA
gagagatccgtggtcat

SEQ ID NO: 20679 - DNA, 17 bp, synthetic construct
  misc_feature 1..17: note = Oligonucleotide
  source 1..17: mol_type = other DNA
tgtgagagatccgtggt

SEQ ID NO: 20680 - DNA, 17 bp, synthetic construct
  misc_feature 1..17: note = Oligonucleotide
  source 1..17: mol_type = other DNA
gtgtgtgagagatccgt

SEQ ID NO: 20681 - DNA, 17 bp, synthetic construct
  misc_feature 1..17: note = Oligonucleotide
  source 1..17: mol_type = other DNA
tgtgtgtgtgagagatc

SEQ ID NO: 20682 - DNA, 17 bp, synthetic construct
  misc_feature 1..17: note = Oligonucleotide
  source 1..17: mol_type = other DNA
acgtgtgtgtgtgagag

SEQ ID NO: 20683 - DNA, 17 bp, synthetic construct
  misc_feature 1..17: note = Oligonucleotide
  source 1..17: mol_type = other DNA
catacgtgtgtgtgtga

SEQ ID NO: 20684 - DNA, 17 bp, synthetic construct
  misc_feature 1..17: note = Oligonucleotide
  source 1..17: mol_type = other DNA
gcacatacgtgtgtgtg

SEQ ID NO: 20685 - DNA, 17 bp, synthetic construct
  misc_feature 1..17: note = Oligonucleotide
  source 1..17: mol_type = other DNA
tgtgcacatacgtgtgt

SEQ ID NO: 20686 - DNA, 17 bp, synthetic construct
  misc_feature 1..17: note = Oligonucleotide
  source 1..17: mol_type = other DNA
gggtgtgcacatacgtg

SEQ ID NO: 20687 - DNA, 17 bp, synthetic construct
  misc_feature 1..17: note = Oligonucleotide
  source 1..17: mol_type = other DNA
ggggggtgtgcacatac

SEQ ID NO: 20688 - DNA, 17 bp, synthetic construct
  misc_feature 1..17: note = Oligonucleotide
  source 1..17: mol_type = other DNA
agaggggggtgtgcaca

SEQ ID NO: 20689 - DNA, 17 bp, synthetic construct
  misc_feature 1..17: note = Oligonucleotide
  source 1..17: mol_type = other DNA
caaagaggggggtgtgc

SEQ ID NO: 20690 - DNA, 17 bp, synthetic construct
  misc_feature 1..17: note = Oligonucleotide
  source 1..17: mol_type = other DNA
gagcaaagaggggggtg

SEQ ID NO: 20691 - DNA, 17 bp, synthetic construct
  misc_feature 1..17: note = Oligonucleotide
  source 1..17: mol_type = other DNA
tgcgagcaaagaggggg

SEQ ID NO: 20692 - DNA, 17 bp, synthetic construct
  misc_feature 1..17: note = Oligonucleotide
  source 1..17: mol_type = other DNA
ggctgcgagcaaagagg

SEQ ID NO: 20693 - DNA, 17 bp, synthetic construct
  misc_feature 1..17: note = Oligonucleotide
  source 1..17: mol_type = other DNA
caaggctgcgagcaaag

SEQ ID NO: 20694 - DNA, 17 bp, synthetic construct
  misc_feature 1..17: note = Oligonucleotide
  source 1..17: mol_type = other DNA
ccccaaggctgcgagca

SEQ ID NO: 20695 - DNA, 17 bp, synthetic construct
  misc_feature 1..17: note = Oligonucleotide
  source 1..17: mol_type = other DNA
gagccccaaggctgcga

SEQ ID NO: 20696 - DNA, 17 bp, synthetic construct
  misc_feature 1..17: note = Oligonucleotide
  source 1..17: mol_type = other DNA
agtgagccccaaggctg

SEQ ID NO: 20697 - DNA, 17 bp, synthetic construct
  misc_feature 1..17: note = Oligonucleotide
  source 1..17: mol_type = other DNA
gtaagtgagccccaagg

SEQ ID NO: 20698 - DNA, 17 bp, synthetic construct
  misc_feature 1..17: note = Oligonucleotide
  source 1..17: mol_type = other DNA
agcgtaagtgagcccca

SEQ ID NO: 20699 - DNA, 17 bp, synthetic construct
  misc_feature 1..17: note = Oligonucleotide
  source 1..17: mol_type = other DNA
cagagcgtaagtgagcc

SEQ ID NO: 20700 - DNA, 17 bp, synthetic construct
  misc_feature 1..17: note = Oligonucleotide
  source 1..17: mol_type = other DNA
ccacagagcgtaagtga

SEQ ID NO: 20701 - DNA, 17 bp, synthetic construct
  misc_feature 1..17: note = Oligonucleotide
  source 1..17: mol_type = other DNA
cgtccacagagcgtaag

SEQ ID NO: 20702 - DNA, 17 bp, synthetic construct
  misc_feature 1..17: note = Oligonucleotide
  source 1..17: mol_type = other DNA
agccgtccacagagcgt

SEQ ID NO: 20703 - DNA, 17 bp, synthetic construct
  misc_feature 1..17: note = Oligonucleotide
  source 1..17: mol_type = other DNA
cagagccgtccacagag

SEQ ID NO: 20704 - DNA, 17 bp, synthetic construct
  misc_feature 1..17: note = Oligonucleotide
  source 1..17: mol_type = other DNA
ggccagagccgtccaca

SEQ ID NO: 20705 - DNA, 17 bp, synthetic construct
  misc_feature 1..17: note = Oligonucleotide
  source 1..17: mol_type = other DNA
caaggccagagccgtcc

SEQ ID NO: 20706 - DNA, 17 bp, synthetic construct
  misc_feature 1..17: note = Oligonucleotide
  source 1..17: mol_type = other DNA
aaacaaggccagagccg

SEQ ID NO: 20707 - DNA, 17 bp, synthetic construct
  misc_feature 1..17: note = Oligonucleotide
  source 1..17: mol_type = other DNA
tccaaacaaggccagag

SEQ ID NO: 20708 - DNA, 17 bp, synthetic construct
  misc_feature 1..17: note = Oligonucleotide
  source 1..17: mol_type = other DNA
gagtccaaacaaggcca

SEQ ID NO: 20709 - DNA, 17 bp, synthetic construct
  misc_feature 1..17: note = Oligonucleotide
  source 1..17: mol_type = other DNA
caggagtccaaacaagg

SEQ ID NO: 20710 - DNA, 17 bp, synthetic construct
  misc_feature 1..17: note = Oligonucleotide
  source 1..17: mol_type = other DNA
aaccaggagtccaaaca

SEQ ID NO: 20711 - DNA, 17 bp, synthetic construct
  misc_feature 1..17: note = Oligonucleotide
  source 1..17: mol_type = other DNA
ctgaaccaggagtccaa

SEQ ID NO: 20712 - DNA, 17 bp, synthetic construct
  misc_feature 1..17: note = Oligonucleotide
  source 1..17: mol_type = other DNA
ctgctgaaccaggagtc

SEQ ID NO: 20713 - DNA, 17 bp, synthetic construct
  misc_feature 1..17: note = Oligonucleotide
  source 1..17: mol_type = other DNA
tagctgctgaaccagga

SEQ ID NO: 20714 - DNA, 17 bp, synthetic construct
  misc_feature 1..17: note = Oligonucleotide
  source 1..17: mol_type = other DNA
aagtagctgctgaacca

SEQ ID NO: 20715 - DNA, 17 bp, synthetic construct
  misc_feature 1..17: note = Oligonucleotide
  source 1..17: mol_type = other DNA
cctaagtagctgctgaa

SEQ ID NO: 20716 - DNA, 17 bp, synthetic construct
  misc_feature 1..17: note = Oligonucleotide
  source 1..17: mol_type = other DNA
tttcctaagtagctgct

SEQ ID NO: 20717 - DNA, 17 bp, synthetic construct
  misc_feature 1..17: note = Oligonucleotide
  source 1..17: mol_type = other DNA
ctctttcctaagtagct

SEQ ID NO: 20718 - DNA, 17 bp, synthetic construct
  misc_feature 1..17: note = Oligonucleotide
  source 1..17: mol_type = other DNA
catctctttcctaagta

SEQ ID NO: 20719 - DNA, 17 bp, synthetic construct
  misc_feature 1..17: note = Oligonucleotide
  source 1..17: mol_type = other DNA
gctcatctctttcctaa

SEQ ID NO: 20720 - DNA, 17 bp, synthetic construct
  misc_feature 1..17: note = Oligonucleotide
  source 1..17: mol_type = other DNA
gcagctcatctctttcc

SEQ ID NO: 20721 - DNA, 17 bp, synthetic construct
  misc_feature 1..17: note = Oligonucleotide
  source 1..17: mol_type = other DNA
gcagcagctcatctctt

SEQ ID NO: 20722 - DNA, 17 bp, synthetic construct
  misc_feature 1..17: note = Oligonucleotide
  source 1..17: mol_type = other DNA
ggggcagcagctcatct

SEQ ID NO: 20723 - DNA, 17 bp, synthetic construct
  misc_feature 1..17: note = Oligonucleotide
  source 1..17: mol_type = other DNA
gagggggcagcagctca

SEQ ID NO: 20724 - DNA, 17 bp, synthetic construct
  misc_feature 1..17: note = Oligonucleotide
  source 1..17: mol_type = other DNA
caagagggggcagcagc

SEQ ID NO: 20725 - DNA, 17 bp, synthetic construct
  misc_feature 1..17: note = Oligonucleotide
  source 1..17: mol_type = other DNA
gcccaagagggggcagc

SEQ ID NO: 20726 - DNA, 17 bp, synthetic construct
  misc_feature 1..17: note = Oligonucleotide
  source 1..17: mol_type = other DNA
agggcccaagagggggc

SEQ ID NO: 20727 - DNA, 17 bp, synthetic construct
  misc_feature 1..17: note = Oligonucleotide
  source 1..17: mol_type = other DNA
gtcagggcccaagaggg

SEQ ID NO: 20728 - DNA, 17 bp, synthetic construct
  misc_feature 1..17: note = Oligonucleotide
  source 1..17: mol_type = other DNA
tgggtcagggcccaaga

SEQ ID NO: 20729 - DNA, 17 bp, synthetic construct
  misc_feature 1..17: note = Oligonucleotide
  source 1..17: mol_type = other DNA
ccgtgggtcagggccca

SEQ ID NO: 20730 - DNA, 17 bp, synthetic construct
  misc_feature 1..17: note = Oligonucleotide
  source 1..17: mol_type = other DNA
cctccgtgggtcagggc

SEQ ID NO: 20731 - DNA, 17 bp, synthetic construct
  misc_feature 1..17: note = Oligonucleotide
  source 1..17: mol_type = other DNA
tgacctccgtgggtcag

SEQ ID NO: 20732 - DNA, 17 bp, synthetic construct
  misc_feature 1..17: note = Oligonucleotide
  source 1..17: mol_type = other DNA
ttctgacctccgtgggt

SEQ ID NO: 20733 - DNA, 17 bp, synthetic construct
  misc_feature 1..17: note = Oligonucleotide
  source 1..17: mol_type = other DNA
gaattctgacctccgtg

SEQ ID NO: 20734 - DNA, 17 bp, synthetic construct
  misc_feature 1..17: note = Oligonucleotide
  source 1..17: mol_type = other DNA
agggaattctgacctcc

SEQ ID NO: 20735 - DNA, 17 bp, synthetic construct
  misc_feature 1..17: note = Oligonucleotide
  source 1..17: mol_type = other DNA
tgtagggaattctgacc

SEQ ID NO: 20736 - DNA, 17 bp, synthetic construct
  misc_feature 1..17: note = Oligonucleotide
  source 1..17: mol_type = other DNA
tgatgtagggaattctg

SEQ ID NO: 20737 - DNA, 17 bp, synthetic construct
  misc_feature 1..17: note = Oligonucleotide
  source 1..17: mol_type = other DNA
ggatgatgtagggaatt

SEQ ID NO: 20738 - DNA, 17 bp, synthetic construct
  misc_feature 1..17: note = Oligonucleotide
  source 1..17: mol_type = other DNA
aggggatgatgtaggga

SEQ ID NO: 20739 - DNA, 17 bp, synthetic construct
  misc_feature 1..17: note = Oligonucleotide
  source 1..17: mol_type = other DNA
ctgaggggatgatgtag

SEQ ID NO: 20740 - DNA, 17 bp, synthetic construct
  misc_feature 1..17: note = Oligonucleotide
  source 1..17: mol_type = other DNA
aggctgaggggatgatg

SEQ ID NO: 20741 - DNA, 17 bp, synthetic construct
  misc_feature 1..17: note = Oligonucleotide
  source 1..17: mol_type = other DNA
agaaggctgaggggatg

SEQ ID NO: 20742 - DNA, 17 bp, synthetic construct
  misc_feature 1..17: note = Oligonucleotide
  source 1..17: mol_type = other DNA
gtaagaaggctgagggg

SEQ ID NO: 20743 - DNA, 17 bp, synthetic construct
  misc_feature 1..17: note = Oligonucleotide
  source 1..17: mol_type = other DNA
gaggtaagaaggctgag

SEQ ID NO: 20744 - DNA, 17 bp, synthetic construct
  misc_feature 1..17: note = Oligonucleotide
  source 1..17: mol_type = other DNA
ccagaggtaagaaggct

SEQ ID NO: 20745 - DNA, 17 bp, synthetic construct
  misc_feature 1..17: note = Oligonucleotide
  source 1..17: mol_type = other DNA
ggtccagaggtaagaag

SEQ ID NO: 20746 - DNA, 17 bp, synthetic construct
  misc_feature 1..17: note = Oligonucleotide
  source 1..17: mol_type = other DNA
ctgggtccagaggtaag

SEQ ID NO: 20747 - DNA, 17 bp, synthetic construct
  misc_feature 1..17: note = Oligonucleotide
  source 1..17: mol_type = other DNA
gtcctgggtccagaggt

SEQ ID NO: 20748 - DNA, 17 bp, synthetic construct
  misc_feature 1..17: note = Oligonucleotide
  source 1..17: mol_type = other DNA
ggagtcctgggtccaga

SEQ ID NO: 20749 - DNA, 17 bp, synthetic construct
  misc_feature 1..17: note = Oligonucleotide
  source 1..17: mol_type = other DNA
cctggagtcctgggtcc

SEQ ID NO: 20750 - DNA, 17 bp, synthetic construct
  misc_feature 1..17: note = Oligonucleotide
  source 1..17: mol_type = other DNA
aatcctggagtcctggg

SEQ ID NO: 20751 - DNA, 17 bp, synthetic construct
  misc_feature 1..17: note = Oligonucleotide
  source 1..17: mol_type = other DNA
ccaaatcctggagtcct

SEQ ID NO: 20752 - DNA, 17 bp, synthetic construct
  misc_feature 1..17: note = Oligonucleotide
  source 1..17: mol_type = other DNA
gccccaaatcctggagt

SEQ ID NO: 20753 - DNA, 17 bp, synthetic construct
  misc_feature 1..17: note = Oligonucleotide
  source 1..17: mol_type = other DNA
ggggccccaaatcctgg

SEQ ID NO: 20754 - DNA, 17 bp, synthetic construct
  misc_feature 1..17: note = Oligonucleotide
  source 1..17: mol_type = other DNA
tagggggccccaaatcc

SEQ ID NO: 20755 - DNA, 17 bp, synthetic construct
  misc_feature 1..17: note = Oligonucleotide
  source 1..17: mol_type = other DNA
aagtagggggccccaaa

SEQ ID NO: 20756 - DNA, 17 bp, synthetic construct
  misc_feature 1..17: note = Oligonucleotide
  source 1..17: mol_type = other DNA
tggaagtagggggcccc

SEQ ID NO: 20757 - DNA, 17 bp, synthetic construct
  misc_feature 1..17: note = Oligonucleotide
  source 1..17: mol_type = other DNA
agatggaagtagggggc

SEQ ID NO: 20758 - DNA, 17 bp, synthetic construct
  misc_feature 1..17: note = Oligonucleotide
  source 1..17: mol_type = other DNA
tccagatggaagtaggg

SEQ ID NO: 20759 - DNA, 17 bp, synthetic construct
  misc_feature 1..17: note = Oligonucleotide
  source 1..17: mol_type = other DNA
gtgtccagatggaagta

SEQ ID NO: 20760 - DNA, 17 bp, synthetic construct
  misc_feature 1..17: note = Oligonucleotide
  source 1..17: mol_type = other DNA
gttgtgtccagatggaa

SEQ ID NO: 20761 - DNA, 17 bp, synthetic construct
  misc_feature 1..17: note = Oligonucleotide
  source 1..17: mol_type = other DNA
ctggttgtgtccagatg

SEQ ID NO: 20762 - DNA, 17 bp, synthetic construct
  misc_feature 1..17: note = Oligonucleotide
  source 1..17: mol_type = other DNA
ggcctggttgtgtccag

SEQ ID NO: 20763 - DNA, 17 bp, synthetic construct
  misc_feature 1..17: note = Oligonucleotide
  source 1..17: mol_type = other DNA
cttggcctggttgtgtc

SEQ ID NO: 20764 - DNA, 17 bp, synthetic construct
  misc_feature 1..17: note = Oligonucleotide
  source 1..17: mol_type = other DNA
ccccttggcctggttgt

SEQ ID NO: 20765 - DNA, 17 bp, synthetic construct
  misc_feature 1..17: note = Oligonucleotide
  source 1..17: mol_type = other DNA
cacccccttggcctggt

SEQ ID NO: 20766 - DNA, 17 bp, synthetic construct
  misc_feature 1..17: note = Oligonucleotide
  source 1..17: mol_type = other DNA
acacacccccttggcct

SEQ ID NO: 20767 - DNA, 17 bp, synthetic construct
  misc_feature 1..17: note = Oligonucleotide
  source 1..17: mol_type = other DNA
cacacacacccccttgg

SEQ ID NO: 20768 - DNA, 17 bp, synthetic construct
  misc_feature 1..17: note = Oligonucleotide
  source 1..17: mol_type = other DNA
gcccacacacaccccct

SEQ ID NO: 20769 - DNA, 17 bp, synthetic construct
  misc_feature 1..17: note = Oligonucleotide
  source 1..17: mol_type = other DNA
tctgcccacacacaccc

SEQ ID NO: 20770 - DNA, 17 bp, synthetic construct
  misc_feature 1..17: note = Oligonucleotide
  source 1..17: mol_type = other DNA
gtctctgcccacacaca

SEQ ID NO: 20771 - DNA, 17 bp, synthetic construct
  misc_feature 1..17: note = Oligonucleotide
  source 1..17: mol_type = other DNA
ccagtctctgcccacac

SEQ ID NO: 20772 - DNA, 17 bp, synthetic construct
  misc_feature 1..17: note = Oligonucleotide
  source 1..17: mol_type = other DNA
tcaccagtctctgccca

SEQ ID NO: 20773 - DNA, 17 bp, synthetic construct
  misc_feature 1..17: note = Oligonucleotide
  source 1..17: mol_type = other DNA
tggtcaccagtctctgc

SEQ ID NO: 20774 - DNA, 17 bp, synthetic construct
  misc_feature 1..17: note = Oligonucleotide
  source 1..17: mol_type = other DNA
tgctggtcaccagtctc

SEQ ID NO: 20775 - DNA, 17 bp, synthetic construct
  misc_feature 1..17: note = Oligonucleotide
  source 1..17: mol_type = other DNA
ccatgctggtcaccagt

SEQ ID NO: 20776 - DNA, 17 bp, synthetic construct
  misc_feature 1..17: note = Oligonucleotide
  source 1..17: mol_type = other DNA
cacccatgctggtcacc

SEQ ID NO: 20777 - DNA, 17 bp, synthetic construct
  misc_feature 1..17: note = Oligonucleotide
  source 1..17: mol_type = other DNA
cctcacccatgctggtc

SEQ ID NO: 20778 - DNA, 17 bp, synthetic construct
  misc_feature 1..17: note = Oligonucleotide
  source 1..17: mol_type = other DNA
tgccctcacccatgctg

SEQ ID NO: 20779 - DNA, 17 bp, synthetic construct
  misc_feature 1..17: note = Oligonucleotide
  source 1..17: mol_type = other DNA
aactgccctcacccatg

SEQ ID NO: 20780 - DNA, 17 bp, synthetic construct
  misc_feature 1..17: note = Oligonucleotide
  source 1..17: mol_type = other DNA
ctcaactgccctcaccc

SEQ ID NO: 20781 - DNA, 17 bp, synthetic construct
  misc_feature 1..17: note = Oligonucleotide
  source 1..17: mol_type = other DNA
tgcctcaactgccctca

SEQ ID NO: 20782 - DNA, 17 bp, synthetic construct
  misc_feature 1..17: note = Oligonucleotide
  source 1..17: mol_type = other DNA
gcctgcctcaactgccc

SEQ ID NO: 20783 - DNA, 17 bp, synthetic construct
  misc_feature 1..17: note = Oligonucleotide
  source 1..17: mol_type = other DNA
ctggcctgcctcaactg

SEQ ID NO: 20784 - DNA, 17 bp, synthetic construct
  misc_feature 1..17: note = Oligonucleotide
  source 1..17: mol_type = other DNA
cagctggcctgcctcaa

SEQ ID NO: 20785 - DNA, 17 bp, synthetic construct
  misc_feature 1..17: note = Oligonucleotide
  source 1..17: mol_type = other DNA
ctccagctggcctgcct

SEQ ID NO: 20786 - DNA, 17 bp, synthetic construct
  misc_feature 1..17: note = Oligonucleotide
  source 1..17: mol_type = other DNA
ggcctccagctggcctg

SEQ ID NO: 20787 - DNA, 17 bp, synthetic construct
  misc_feature 1..17: note = Oligonucleotide
  source 1..17: mol_type = other DNA
cgtggcctccagctggc

SEQ ID NO: 20788 - DNA, 17 bp, synthetic construct
  misc_feature 1..17: note = Oligonucleotide
  source 1..17: mol_type = other DNA
agtcgtggcctccagct

SEQ ID NO: 20789 - DNA, 17 bp, synthetic construct
  misc_feature 1..17: note = Oligonucleotide
  source 1..17: mol_type = other DNA
gacagtcgtggcctcca

SEQ ID NO: 20790 - DNA, 17 bp, synthetic construct
  misc_feature 1..17: note = Oligonucleotide
  source 1..17: mol_type = other DNA
atggacagtcgtggcct

SEQ ID NO: 20791 - DNA, 17 bp, synthetic construct
  misc_feature 1..17: note = Oligonucleotide
  source 1..17: mol_type = other DNA
ctgatggacagtcgtgg

SEQ ID NO: 20792 - DNA, 17 bp, synthetic construct
  misc_feature 1..17: note = Oligonucleotide
  source 1..17: mol_type = other DNA
gagctgatggacagtcg

SEQ ID NO: 20793 - DNA, 17 bp, synthetic construct
  misc_feature 1..17: note = Oligonucleotide
  source 1..17: mol_type = other DNA
cgggagctgatggacag

SEQ ID NO: 20794 - DNA, 17 bp, synthetic construct
  misc_feature 1..17: note = Oligonucleotide
  source 1..17: mol_type = other DNA
tatcgggagctgatgga

SEQ ID NO: 20795 - DNA, 17 bp, synthetic construct
  misc_feature 1..17: note = Oligonucleotide
  source 1..17: mol_type = other DNA
gagtatcgggagctgat

SEQ ID NO: 20796 - DNA, 17 bp, synthetic construct
  misc_feature 1..17: note = Oligonucleotide
  source 1..17: mol_type = other DNA
agggagtatcgggagct

SEQ ID NO: 20797 - DNA, 17 bp, synthetic construct
  misc_feature 1..17: note = Oligonucleotide
  source 1..17: mol_type = other DNA
tgaagggagtatcggga

SEQ ID NO: 20798 - DNA, 17 bp, synthetic construct
  misc_feature 1..17: note = Oligonucleotide
  source 1..17: mol_type = other DNA
ttctgaagggagtatcg

SEQ ID NO: 20799 - DNA, 17 bp, synthetic construct
  misc_feature 1..17: note = Oligonucleotide
  source 1..17: mol_type = other DNA
cgtttctgaagggagta

SEQ ID NO: 20800 - DNA, 17 bp, synthetic construct
  misc_feature 1..17: note = Oligonucleotide
  source 1..17: mol_type = other DNA
ccgcgtttctgaaggga

SEQ ID NO: 20801 - DNA, 17 bp, synthetic construct
  misc_feature 1..17: note = Oligonucleotide
  source 1..17: mol_type = other DNA
ctcccgcgtttctgaag

SEQ ID NO: 20802 - DNA, 17 bp, synthetic construct
  misc_feature 1..17: note = Oligonucleotide
  source 1..17: mol_type = other DNA
gtcctcccgcgtttctg

SEQ ID NO: 20803 - DNA, 17 bp, synthetic construct
  misc_feature 1..17: note = Oligonucleotide
  source 1..17: mol_type = other DNA
ccggtcctcccgcgttt

SEQ ID NO: 20804 - DNA, 17 bp, synthetic construct
  misc_feature 1..17: note = Oligonucleotide
  source 1..17: mol_type = other DNA
cgtccggtcctcccgcg

SEQ ID NO: 20805 - DNA, 17 bp, synthetic construct
  misc_feature 1..17: note = Oligonucleotide
  source 1..17: mol_type = other DNA
cttcgtccggtcctccc

SEQ ID NO: 20806 - DNA, 17 bp, synthetic construct
  misc_feature 1..17: note = Oligonucleotide
  source 1..17: mol_type = other DNA
ccgcttcgtccggtcct

SEQ ID NO: 20807 - DNA, 17 bp, synthetic construct
  misc_feature 1..17: note = Oligonucleotide
  source 1..17: mol_type = other DNA
gagccgcttcgtccggt

SEQ ID NO: 20808 - DNA, 17 bp, synthetic construct
  misc_feature 1..17: note = Oligonucleotide
  source 1..17: mol_type = other DNA
aaagagccgcttcgtcc

SEQ ID NO: 20809 - DNA, 17 bp, synthetic construct
  misc_feature 1..17: note = Oligonucleotide
  source 1..17: mol_type = other DNA
ccgaaagagccgcttcg

SEQ ID NO: 20810 - DNA, 17 bp, synthetic construct
  misc_feature 1..17: note = Oligonucleotide
  source 1..17: mol_type = other DNA
gtgccgaaagagccgct

SEQ ID NO: 20811 - DNA, 17 bp, synthetic construct
  misc_feature 1..17: note = Oligonucleotide
  source 1..17: mol_type = other DNA
gtagtgccgaaagagcc

SEQ ID NO: 20812 - DNA, 17 bp, synthetic construct
  misc_feature 1..17: note = Oligonucleotide
  source 1..17: mol_type = other DNA
tgtgtagtgccgaaaga

SEQ ID NO: 20813 - DNA, 17 bp, synthetic construct
  misc_feature 1..17: note = Oligonucleotide
  source 1..17: mol_type = other DNA
cactgtgtagtgccgaa

SEQ ID NO: 20814 - DNA, 17 bp, synthetic construct
  misc_feature 1..17: note = Oligonucleotide
  source 1..17: mol_type = other DNA
gcccactgtgtagtgcc

SEQ ID NO: 20815 - DNA, 17 bp, synthetic construct
  misc_feature 1..17: note = Oligonucleotide
  source 1..17: mol_type = other DNA
ggagcccactgtgtagt

SEQ ID NO: 20816 - DNA, 17 bp, synthetic construct
  misc_feature 1..17: note = Oligonucleotide
  source 1..17: mol_type = other DNA
gtaggagcccactgtgt

SEQ ID NO: 20817 - DNA, 17 bp, synthetic construct
  misc_feature 1..17: note = Oligonucleotide
  source 1..17: mol_type = other DNA
gtcgtaggagcccactg

SEQ ID NO: 20818 - DNA, 17 bp, synthetic construct
  misc_feature 1..17: note = Oligonucleotide
  source 1..17: mol_type = other DNA
gctgtcgtaggagccca

SEQ ID NO: 20819 - DNA, 17 bp, synthetic construct
  misc_feature 1..17: note = Oligonucleotide
  source 1..17: mol_type = other DNA
gaggctgtcgtaggagc

SEQ ID NO: 20820 - DNA, 17 bp, synthetic construct
  misc_feature 1..17: note = Oligonucleotide
  source 1..17: mol_type = other DNA
ggtgaggctgtcgtagg

SEQ ID NO: 20821 - DNA, 17 bp, synthetic construct
  misc_feature 1..17: note = Oligonucleotide
  source 1..17: mol_type = other DNA
tgaggtgaggctgtcgt

SEQ ID NO: 20822 - DNA, 17 bp, synthetic construct
  misc_feature 1..17: note = Oligonucleotide
  source 1..17: mol_type = other DNA
gtgtgaggtgaggctgt

SEQ ID NO: 20823 - DNA, 17 bp, synthetic construct
  misc_feature 1..17: note = Oligonucleotide
  source 1..17: mol_type = other DNA
cctgtgtgaggtgaggc

SEQ ID NO: 20824 - DNA, 17 bp, synthetic construct
  misc_feature 1..17: note = Oligonucleotide
  source 1..17: mol_type = other DNA
gtacctgtgtgaggtga

SEQ ID NO: 20825 - DNA, 17 bp, synthetic construct
  misc_feature 1..17: note = Oligonucleotide
  source 1..17: mol_type = other DNA
cacgtacctgtgtgagg

SEQ ID NO: 20826 - DNA, 17 bp, synthetic construct
  misc_feature 1..17: note = Oligonucleotide
  source 1..17: mol_type = other DNA
ctgcacgtacctgtgtg

SEQ ID NO: 20827 - DNA, 17 bp, synthetic construct
  misc_feature 1..17: note = Oligonucleotide
  source 1..17: mol_type = other DNA
tccctgcacgtacctgt

SEQ ID NO: 20828 - DNA, 17 bp, synthetic construct
  misc_feature 1..17: note = Oligonucleotide
  source 1..17: mol_type = other DNA
gggtccctgcacgtacc

SEQ ID NO: 20829 - DNA, 17 bp, synthetic construct
  misc_feature 1..17: note = Oligonucleotide
  source 1..17: mol_type = other DNA
ccagggtccctgcacgt

SEQ ID NO: 20830 - DNA, 17 bp, synthetic construct
  misc_feature 1..17: note = Oligonucleotide
  source 1..17: mol_type = other DNA
cagccagggtccctgca

SEQ ID NO: 20831 - DNA, 17 bp, synthetic construct
  misc_feature 1..17: note = Oligonucleotide
  source 1..17: mol_type = other DNA
cgccagccagggtccct

SEQ ID NO: 20832 - DNA, 17 bp, synthetic construct
  misc_feature 1..17: note = Oligonucleotide
  source 1..17: mol_type = other DNA
tcccgccagccagggtc

SEQ ID NO: 20833 - DNA, 17 bp, synthetic construct
  misc_feature 1..17: note = Oligonucleotide
  source 1..17: mol_type = other DNA
tgctcccgccagccagg

SEQ ID NO: 20834 - DNA, 17 bp, synthetic construct
  misc_feature 1..17: note = Oligonucleotide
  source 1..17: mol_type = other DNA
gcatgctcccgccagcc

SEQ ID NO: 20835 - DNA, 17 bp, synthetic construct
  misc_feature 1..17: note = Oligonucleotide
  source 1..17: mol_type = other DNA
catgcatgctcccgcca

SEQ ID NO: 20836 - DNA, 17 bp, synthetic construct
  misc_feature 1..17: note = Oligonucleotide
  source 1..17: mol_type = other DNA
ccacatgcatgctcccg

SEQ ID NO: 20837 - DNA, 17 bp, synthetic construct
  misc_feature 1..17: note = Oligonucleotide
  source 1..17: mol_type = other DNA
gtcccacatgcatgctc

SEQ ID NO: 20838 - DNA, 17 bp, synthetic construct
  misc_feature 1..17: note = Oligonucleotide
  source 1..17: mol_type = other DNA
cacgtcccacatgcatg

SEQ ID NO: 20839 - DNA, 17 bp, synthetic construct
  misc_feature 1..17: note = Oligonucleotide
  source 1..17: mol_type = other DNA
ccccacgtcccacatgc

SEQ ID NO: 20840 - DNA, 17 bp, synthetic construct
  misc_feature 1..17: note = Oligonucleotide
  source 1..17: mol_type = other DNA
ctgccccacgtcccaca

SEQ ID NO: 20841 - DNA, 17 bp, synthetic construct
  misc_feature 1..17: note = Oligonucleotide
  source 1..17: mol_type = other DNA
gtcctgccccacgtccc

SEQ ID NO: 20842 - DNA, 17 bp, synthetic construct
  misc_feature 1..17: note = Oligonucleotide
  source 1..17: mol_type = other DNA
caggtcctgccccacgt

SEQ ID NO: 20843 - DNA, 17 bp, synthetic construct
  misc_feature 1..17: note = Oligonucleotide
  source 1..17: mol_type = other DNA
ctgcaggtcctgcccca

SEQ ID NO: 20844 - DNA, 17 bp, synthetic construct
  misc_feature 1..17: note = Oligonucleotide
  source 1..17: mol_type = other DNA
acactgcaggtcctgcc

SEQ ID NO: 20845 - DNA, 17 bp, synthetic construct
  misc_feature 1..17: note = Oligonucleotide
  source 1..17: mol_type = other DNA
tctacactgcaggtcct

SEQ ID NO: 20846 - DNA, 17 bp, synthetic construct
  misc_feature 1..17: note = Oligonucleotide
  source 1..17: mol_type = other DNA
ccctctacactgcaggt

SEQ ID NO: 20847 - DNA, 17 bp, synthetic construct
  misc_feature 1..17: note = Oligonucleotide
  source 1..17: mol_type = other DNA
cctccctctacactgca

SEQ ID NO: 20848 - DNA, 17 bp, synthetic construct
  misc_feature 1..17: note = Oligonucleotide
  source 1..17: mol_type = other DNA
tggcctccctctacact

SEQ ID NO: 20849 - DNA, 17 bp, synthetic construct
  misc_feature 1..17: note = Oligonucleotide
  source 1..17: mol_type = other DNA
acctggcctccctctac

SEQ ID NO: 20850 - DNA, 17 bp, synthetic construct
  misc_feature 1..17: note = Oligonucleotide
  source 1..17: mol_type = other DNA
catacctggcctccctc

SEQ ID NO: 20851 - DNA, 17 bp, synthetic construct
  misc_feature 1..17: note = Oligonucleotide
  source 1..17: mol_type = other DNA
cttcatacctggcctcc

SEQ ID NO: 20852 - DNA, 17 bp, synthetic construct
  misc_feature 1..17: note = Oligonucleotide
  source 1..17: mol_type = other DNA
cctcttcatacctggcc

SEQ ID NO: 20853 - DNA, 17 bp, synthetic construct
  misc_feature 1..17: note = Oligonucleotide
  source 1..17: mol_type = other DNA
tgacctcttcatacctg

SEQ ID NO: 20854 - DNA, 17 bp, synthetic construct
  misc_feature 1..17: note = Oligonucleotide
  source 1..17: mol_type = other DNA
ctctgacctcttcatac

SEQ ID NO: 20855 - DNA, 17 bp, synthetic construct
  misc_feature 1..17: note = Oligonucleotide
  source 1..17: mol_type = other DNA
ctcctctgacctcttca

SEQ ID NO: 20856 - DNA, 17 bp, synthetic construct
  misc_feature 1..17: note = Oligonucleotide
  source 1..17: mol_type = other DNA
gccctcctctgacctct

SEQ ID NO: 20857 - DNA, 17 bp, synthetic construct
  misc_feature 1..17: note = Oligonucleotide
  source 1..17: mol_type = other DNA
cttgccctcctctgacc

SEQ ID NO: 20858 - DNA, 17 bp, synthetic construct
  misc_feature 1..17: note = Oligonucleotide
  source 1..17: mol_type = other DNA
tcccttgccctcctctg

SEQ ID NO: 20859 - DNA, 17 bp, synthetic construct
  misc_feature 1..17: note = Oligonucleotide
  source 1..17: mol_type = other DNA
cattcccttgccctcct

SEQ ID NO: 20860 - DNA, 17 bp, synthetic construct
  misc_feature 1..17: note = Oligonucleotide
  source 1..17: mol_type = other DNA
gcacattcccttgccct

SEQ ID NO: 20861 - DNA, 17 bp, synthetic construct
  misc_feature 1..17: note = Oligonucleotide
  source 1..17: mol_type = other DNA
caggcacattcccttgc

SEQ ID NO: 20862 - DNA, 17 bp, synthetic construct
  misc_feature 1..17: note = Oligonucleotide
  source 1..17: mol_type = other DNA
ggccaggcacattccct

SEQ ID NO: 20863 - DNA, 17 bp, synthetic construct
  misc_feature 1..17: note = Oligonucleotide
  source 1..17: mol_type = other DNA
gtcggccaggcacattc

SEQ ID NO: 20864 - DNA, 17 bp, synthetic construct
  misc_feature 1..17: note = Oligonucleotide
  source 1..17: mol_type = other DNA
gaggtcggccaggcaca

SEQ ID NO: 20865 - DNA, 17 bp, synthetic construct
  misc_feature 1..17: note = Oligonucleotide
  source 1..17: mol_type = other DNA
agagaggtcggccaggc

SEQ ID NO: 20866 - DNA, 17 bp, synthetic construct
  misc_feature 1..17: note = Oligonucleotide
  source 1..17: mol_type = other DNA
agaagagaggtcggcca

SEQ ID NO: 20867 - DNA, 17 bp, synthetic construct
  misc_feature 1..17: note = Oligonucleotide
  source 1..17: mol_type = other DNA
agcagaagagaggtcgg

SEQ ID NO: 20868 - DNA, 17 bp, synthetic construct
  misc_feature 1..17: note = Oligonucleotide
  source 1..17: mol_type = other DNA
ggcagcagaagagaggt

SEQ ID NO: 20869 - DNA, 17 bp, synthetic construct
  misc_feature 1..17: note = Oligonucleotide
  source 1..17: mol_type = other DNA
ccgggcagcagaagaga

SEQ ID NO: 20870 - DNA, 17 bp, synthetic construct
  misc_feature 1..17: note = Oligonucleotide
  source 1..17: mol_type = other DNA
aggccgggcagcagaag

SEQ ID NO: 20871 - DNA, 17 bp, synthetic construct
  misc_feature 1..17: note = Oligonucleotide
  source 1..17: mol_type = other DNA
gacaggccgggcagcag

SEQ ID NO: 20872 - DNA, 17 bp, synthetic construct
  misc_feature 1..17: note = Oligonucleotide
  source 1..17: mol_type = other DNA
actgacaggccgggcag

SEQ ID NO: 20873 - DNA, 17 bp, synthetic construct
  misc_feature 1..17: note = Oligonucleotide
  source 1..17: mol_type = other DNA
gggactgacaggccggg

SEQ ID NO: 20874 - DNA, 17 bp, synthetic construct
  misc_feature 1..17: note = Oligonucleotide
  source 1..17: mol_type = other DNA
cccgggactgacaggcc

SEQ ID NO: 20875 - DNA, 17 bp, synthetic construct
  misc_feature 1..17: note = Oligonucleotide
  source 1..17: mol_type = other DNA
caccccgggactgacag

SEQ ID NO: 20876 - DNA, 17 bp, synthetic construct
  misc_feature 1..17: note = Oligonucleotide
  source 1..17: mol_type = other DNA
agtcaccccgggactga

SEQ ID NO: 20877 - DNA, 17 bp, synthetic construct
  misc_feature 1..17: note = Oligonucleotide
  source 1..17: mol_type = other DNA
tgcagtcaccccgggac

SEQ ID NO: 20878 - DNA, 17 bp, synthetic construct
  misc_feature 1..17: note = Oligonucleotide
  source 1..17: mol_type = other DNA
ccctgcagtcaccccgg

SEQ ID NO: 20879 - DNA, 17 bp, synthetic construct
  misc_feature 1..17: note = Oligonucleotide
  source 1..17: mol_type = other DNA
ccaccctgcagtcaccc

SEQ ID NO: 20880 - DNA, 17 bp, synthetic construct
  misc_feature 1..17: note = Oligonucleotide
  source 1..17: mol_type = other DNA
agtccaccctgcagtca

SEQ ID NO: 20881 - DNA, 17 bp, synthetic construct
  misc_feature 1..17: note = Oligonucleotide
  source 1..17: mol_type = other DNA
cacagtccaccctgcag

SEQ ID NO: 20882 - DNA, 17 bp, synthetic construct
  misc_feature 1..17: note = Oligonucleotide
  source 1..17: mol_type = other DNA
ggccacagtccaccctg

SEQ ID NO: 20883 - DNA, 17 bp, synthetic construct
  misc_feature 1..17: note = Oligonucleotide
  source 1..17: mol_type = other DNA
gccggccacagtccacc

SEQ ID NO: 20884 - DNA, 17 bp, synthetic construct
  misc_feature 1..17: note = Oligonucleotide
  source 1..17: mol_type = other DNA
ttggccggccacagtcc

SEQ ID NO: 20885 - DNA, 17 bp, synthetic construct
  misc_feature 1..17: note = Oligonucleotide
  source 1..17: mol_type = other DNA
aggttggccggccacag

SEQ ID NO: 20886 - DNA, 17 bp, synthetic construct
  misc_feature 1..17: note = Oligonucleotide
  source 1..17: mol_type = other DNA
tcgaggttggccggcca

SEQ ID NO: 20887 - DNA, 17 bp, synthetic construct
  misc_feature 1..17: note = Oligonucleotide
  source 1..17: mol_type = other DNA
gcctcgaggttggccgg

SEQ ID NO: 20888 - DNA, 17 bp, synthetic construct
  misc_feature 1..17: note = Oligonucleotide
  source 1..17: mol_type = other DNA
cctgcctcgaggttggc

SEQ ID NO: 20889 - DNA, 17 bp, synthetic construct
  misc_feature 1..17: note = Oligonucleotide
  source 1..17: mol_type = other DNA
agccctgcctcgaggtt

SEQ ID NO: 20890 - DNA, 17 bp, synthetic construct
  misc_feature 1..17: note = Oligonucleotide
  source 1..17: mol_type = other DNA
gtaagccctgcctcgag

SEQ ID NO: 20891 - DNA, 17 bp, synthetic construct
  misc_feature 1..17: note = Oligonucleotide
  source 1..17: mol_type = other DNA
gaggtaagccctgcctc

SEQ ID NO: 20892 - DNA, 17 bp, synthetic construct
  misc_feature 1..17: note = Oligonucleotide
  source 1..17: mol_type = other DNA
agtgaggtaagccctgc

SEQ ID NO: 20893 - DNA, 17 bp, synthetic construct
  misc_feature 1..17: note = Oligonucleotide
  source 1..17: mol_type = other DNA
aggagtgaggtaagccc

SEQ ID NO: 20894 - DNA, 17 bp, synthetic construct
  misc_feature 1..17: note = Oligonucleotide
  source 1..17: mol_type = other DNA
gggaggagtgaggtaag

SEQ ID NO: 20895 - DNA, 17 bp, synthetic construct
  misc_feature 1..17: note = Oligonucleotide
  source 1..17: mol_type = other DNA
gcagggaggagtgaggt

SEQ ID NO: 20896 - DNA, 17 bp, synthetic construct
  misc_feature 1..17: note = Oligonucleotide
  source 1..17: mol_type = other DNA
aaagcagggaggagtga

SEQ ID NO: 20897 - DNA, 17 bp, synthetic construct
  misc_feature 1..17: note = Oligonucleotide
  source 1..17: mol_type = other DNA
aggaaagcagggaggag

SEQ ID NO: 20898 - DNA, 17 bp, synthetic construct
  misc_feature 1..17: note = Oligonucleotide
  source 1..17: mol_type = other DNA
tgaaggaaagcagggag

SEQ ID NO: 20899 - DNA, 17 bp, synthetic construct
  misc_feature 1..17: note = Oligonucleotide
  source 1..17: mol_type = other DNA
tgatgaaggaaagcagg

SEQ ID NO: 20900 - DNA, 17 bp, synthetic construct
  misc_feature 1..17: note = Oligonucleotide
  source 1..17: mol_type = other DNA
cgctgatgaaggaaagc

SEQ ID NO: 20901 - DNA, 17 bp, synthetic construct
  misc_feature 1..17: note = Oligonucleotide
  source 1..17: mol_type = other DNA
aatcgctgatgaaggaa

SEQ ID NO: 20902 - DNA, 17 bp, synthetic construct
  misc_feature 1..17: note = Oligonucleotide
  source 1..17: mol_type = other DNA
cataatcgctgatgaag

SEQ ID NO: 20903 - DNA, 17 bp, synthetic construct
  misc_feature 1..17: note = Oligonucleotide
  source 1..17: mol_type = other DNA
tgacataatcgctgatg

SEQ ID NO: 20904 - DNA, 17 bp, synthetic construct
  misc_feature 1..17: note = Oligonucleotide
  source 1..17: mol_type = other DNA
caatgacataatcgctg

SEQ ID NO: 20905 - DNA, 17 bp, synthetic construct
  misc_feature 1..17: note = Oligonucleotide
  source 1..17: mol_type = other DNA
catcaatgacataatcg

SEQ ID NO: 20906 - DNA, 17 bp, synthetic construct
  misc_feature 1..17: note = Oligonucleotide
  source 1..17: mol_type = other DNA
tgtcatcaatgacataa

SEQ ID NO: 20907 - DNA, 17 bp, synthetic construct
  misc_feature 1..17: note = Oligonucleotide
  source 1..17: mol_type = other DNA
ctttgtcatcaatgaca

SEQ ID NO: 20908 - DNA, 17 bp, synthetic construct
  misc_feature 1..17: note = Oligonucleotide
  source 1..17: mol_type = other DNA
ccactttgtcatcaatg

SEQ ID NO: 20909 - DNA, 17 bp, synthetic construct
  misc_feature 1..17: note = Oligonucleotide
  source 1..17: mol_type = other DNA
cagccactttgtcatca

SEQ ID NO: 20910 - DNA, 17 bp, synthetic construct
  misc_feature 1..17: note = Oligonucleotide
  source 1..17: mol_type = other DNA
ggacagccactttgtca

SEQ ID NO: 20911 - DNA, 17 bp, synthetic construct
  misc_feature 1..17: note = Oligonucleotide
  source 1..17: mol_type = other DNA
gcaggacagccactttg

SEQ ID NO: 20912 - DNA, 17 bp, synthetic construct
  misc_feature 1..17: note = Oligonucleotide
  source 1..17: mol_type = other DNA
tctgcaggacagccact

SEQ ID NO: 20913 - DNA, 17 bp, synthetic construct
  misc_feature 1..17: note = Oligonucleotide
  source 1..17: mol_type = other DNA
gtttctgcaggacagcc

SEQ ID NO: 20914 - DNA, 17 bp, synthetic construct
  misc_feature 1..17: note = Oligonucleotide
  source 1..17: mol_type = other DNA
cccgtttctgcaggaca

SEQ ID NO: 20915 - DNA, 17 bp, synthetic construct
  misc_feature 1..17: note = Oligonucleotide
  source 1..17: mol_type = other DNA
ggtcccgtttctgcagg

SEQ ID NO: 20916 - DNA, 17 bp, synthetic construct
  misc_feature 1..17: note = Oligonucleotide
  source 1..17: mol_type = other DNA
cgtggtcccgtttctgc

SEQ ID NO: 20917 - DNA, 17 bp, synthetic construct
  misc_feature 1..17: note = Oligonucleotide
  source 1..17: mol_type = other DNA
cctcgtggtcccgtttc

SEQ ID NO: 20918 - DNA, 17 bp, synthetic construct
  misc_feature 1..17: note = Oligonucleotide
  source 1..17: mol_type = other DNA
agccctcgtggtcccgt

SEQ ID NO: 20919 - DNA, 17 bp, synthetic construct
  misc_feature 1..17: note = Oligonucleotide
  source 1..17: mol_type = other DNA
caaagccctcgtggtcc

SEQ ID NO: 20920 - DNA, 17 bp, synthetic construct
  misc_feature 1..17: note = Oligonucleotide
  source 1..17: mol_type = other DNA
aaccaaagccctcgtgg

SEQ ID NO: 20921 - DNA, 17 bp, synthetic construct
  misc_feature 1..17: note = Oligonucleotide
  source 1..17: mol_type = other DNA
caaaaccaaagccctcg

SEQ ID NO: 20922 - DNA, 17 bp, synthetic construct
  misc_feature 1..17: note = Oligonucleotide
  source 1..17: mol_type = other DNA
gcacaaaaccaaagccc

SEQ ID NO: 20923 - DNA, 17 bp, synthetic construct
  misc_feature 1..17: note = Oligonucleotide
  source 1..17: mol_type = other DNA
ggagcacaaaaccaaag

SEQ ID NO: 20924 - DNA, 17 bp, synthetic construct
  misc_feature 1..17: note = Oligonucleotide
  source 1..17: mol_type = other DNA
cccggagcacaaaacca

SEQ ID NO: 20925 - DNA, 17 bp, synthetic construct
  misc_feature 1..17: note = Oligonucleotide
  source 1..17: mol_type = other DNA
ctccccggagcacaaaa

SEQ ID NO: 20926 - DNA, 17 bp, synthetic construct
  misc_feature 1..17: note = Oligonucleotide
  source 1..17: mol_type = other DNA
tggctccccggagcaca

SEQ ID NO: 20927 - DNA, 17 bp, synthetic construct
  misc_feature 1..17: note = Oligonucleotide
  source 1..17: mol_type = other DNA
ctttggctccccggagc

SEQ ID NO: 20928 - DNA, 17 bp, synthetic construct
  misc_feature 1..17: note = Oligonucleotide
  source 1..17: mol_type = other DNA
tacctttggctccccgg

SEQ ID NO: 20929 - DNA, 17 bp, synthetic construct
  misc_feature 1..17: note = Oligonucleotide
  source 1..17: mol_type = other DNA
cattacctttggctccc

SEQ ID NO: 20930 - DNA, 17 bp, synthetic construct
  misc_feature 1..17: note = Oligonucleotide
  source 1..17: mol_type = other DNA
ccccattacctttggct

SEQ ID NO: 20931 - DNA, 17 bp, synthetic construct
  misc_feature 1..17: note = Oligonucleotide
  source 1..17: mol_type = other DNA
actccccattacctttg

SEQ ID NO: 20932 - DNA, 17 bp, synthetic construct
  misc_feature 1..17: note = Oligonucleotide
  source 1..17: mol_type = other DNA
cccactccccattacct

SEQ ID NO: 20933 - DNA, 17 bp, synthetic construct
  misc_feature 1..17: note = Oligonucleotide
  source 1..17: mol_type = other DNA
gcacccactccccatta

SEQ ID NO: 20934 - DNA, 17 bp, synthetic construct
  misc_feature 1..17: note = Oligonucleotide
  source 1..17: mol_type = other DNA
cgggcacccactcccca

SEQ ID NO: 20935 - DNA, 17 bp, synthetic construct
  misc_feature 1..17: note = Oligonucleotide
  source 1..17: mol_type = other DNA
ccccgggcacccactcc

SEQ ID NO: 20936 - DNA, 17 bp, synthetic construct
  misc_feature 1..17: note = Oligonucleotide
  source 1..17: mol_type = other DNA
gacccccgggcacccac

SEQ ID NO: 20937 - DNA, 17 bp, synthetic construct
  misc_feature 1..17: note = Oligonucleotide
  source 1..17: mol_type = other DNA
cctgacccccgggcacc

SEQ ID NO: 20938 - DNA, 17 bp, synthetic construct
  misc_feature 1..17: note = Oligonucleotide
  source 1..17: mol_type = other DNA
ctgcctgacccccgggc

SEQ ID NO: 20939 - DNA, 17 bp, synthetic construct
  misc_feature 1..17: note = Oligonucleotide
  source 1..17: mol_type = other DNA
tgcctgcctgacccccg

SEQ ID NO: 20940 - DNA, 17 bp, synthetic construct
  misc_feature 1..17: note = Oligonucleotide
  source 1..17: mol_type = other DNA
ccctgcctgcctgaccc

SEQ ID NO: 20941 - DNA, 17 bp, synthetic construct
  misc_feature 1..17: note = Oligonucleotide
  source 1..17: mol_type = other DNA
agcccctgcctgcctga

SEQ ID NO: 20942 - DNA, 17 bp, synthetic construct
  misc_feature 1..17: note = Oligonucleotide
  source 1..17: mol_type = other DNA
tgcagcccctgcctgcc

SEQ ID NO: 20943 - DNA, 17 bp, synthetic construct
  misc_feature 1..17: note = Oligonucleotide
  source 1..17: mol_type = other DNA
gtgtgcagcccctgcct

SEQ ID NO: 20944 - DNA, 17 bp, synthetic construct
  misc_feature 1..17: note = Oligonucleotide
  source 1..17: mol_type = other DNA
gcggtgtgcagcccctg

SEQ ID NO: 20945 - DNA, 17 bp, synthetic construct
  misc_feature 1..17: note = Oligonucleotide
  source 1..17: mol_type = other DNA
tgagcggtgtgcagccc

SEQ ID NO: 20946 - DNA, 17 bp, synthetic construct
  misc_feature 1..17: note = Oligonucleotide
  source 1..17: mol_type = other DNA
ccctgagcggtgtgcag

SEQ ID NO: 20947 - DNA, 17 bp, synthetic construct
  misc_feature 1..17: note = Oligonucleotide
  source 1..17: mol_type = other DNA
catccctgagcggtgtg

SEQ ID NO: 20948 - DNA, 17 bp, synthetic construct
  misc_feature 1..17: note = Oligonucleotide
  source 1..17: mol_type = other DNA
agacatccctgagcggt

SEQ ID NO: 20949 - DNA, 17 bp, synthetic construct
  misc_feature 1..17: note = Oligonucleotide
  source 1..17: mol_type = other DNA
tgaagacatccctgagc

SEQ ID NO: 20950 - DNA, 17 bp, synthetic construct
  misc_feature 1..17: note = Oligonucleotide
  source 1..17: mol_type = other DNA
agctgaagacatccctg

SEQ ID NO: 20951 - DNA, 17 bp, synthetic construct
  misc_feature 1..17: note = Oligonucleotide
  source 1..17: mol_type = other DNA
agaagctgaagacatcc

SEQ ID NO: 20952 - DNA, 17 bp, synthetic construct
  misc_feature 1..17: note = Oligonucleotide
  source 1..17: mol_type = other DNA
gcaagaagctgaagaca

SEQ ID NO: 20953 - DNA, 17 bp, synthetic construct
  misc_feature 1..17: note = Oligonucleotide
  source 1..17: mol_type = other DNA
gaagcaagaagctgaag

SEQ ID NO: 20954 - DNA, 17 bp, synthetic construct
  misc_feature 1..17: note = Oligonucleotide
  source 1..17: mol_type = other DNA
gcagaagcaagaagctg

SEQ ID NO: 20955 - DNA, 17 bp, synthetic construct
  misc_feature 1..17: note = Oligonucleotide
  source 1..17: mol_type = other DNA
ggggcagaagcaagaag

SEQ ID NO: 20956 - DNA, 17 bp, synthetic construct
  misc_feature 1..17: note = Oligonucleotide
  source 1..17: mol_type = other DNA
ttgggggcagaagcaag

SEQ ID NO: 20957 - DNA, 17 bp, synthetic construct
  misc_feature 1..17: note = Oligonucleotide
  source 1..17: mol_type = other DNA
gagttgggggcagaagc

SEQ ID NO: 20958 - DNA, 17 bp, synthetic construct
  misc_feature 1..17: note = Oligonucleotide
  source 1..17: mol_type = other DNA
gcagagttgggggcaga

SEQ ID NO: 20959 - DNA, 17 bp, synthetic construct
  misc_feature 1..17: note = Oligonucleotide
  source 1..17: mol_type = other DNA
agagcagagttgggggc

SEQ ID NO: 20960 - DNA, 17 bp, synthetic construct
  misc_feature 1..17: note = Oligonucleotide
  source 1..17: mol_type = other DNA
ggcagagcagagttggg

SEQ ID NO: 20961 - DNA, 17 bp, synthetic construct
  misc_feature 1..17: note = Oligonucleotide
  source 1..17: mol_type = other DNA
tggggcagagcagagtt

SEQ ID NO: 20962 - DNA, 17 bp, synthetic construct
  misc_feature 1..17: note = Oligonucleotide
  source 1..17: mol_type = other DNA
gtgtggggcagagcaga

SEQ ID NO: 20963 - DNA, 17 bp, synthetic construct
  misc_feature 1..17: note = Oligonucleotide
  source 1..17: mol_type = other DNA
ggagtgtggggcagagc

SEQ ID NO: 20964 - DNA, 17 bp, synthetic construct
  misc_feature 1..17: note = Oligonucleotide
  source 1..17: mol_type = other DNA
gagggagtgtggggcag

SEQ ID NO: 20965 - DNA, 17 bp, synthetic construct
  misc_feature 1..17: note = Oligonucleotide
  source 1..17: mol_type = other DNA
agggagggagtgtgggg

SEQ ID NO: 20966 - DNA, 17 bp, synthetic construct
  misc_feature 1..17: note = Oligonucleotide
  source 1..17: mol_type = other DNA
ggcagggagggagtgtg

SEQ ID NO: 20967 - DNA, 17 bp, synthetic construct
  misc_feature 1..17: note = Oligonucleotide
  source 1..17: mol_type = other DNA
caaggcagggagggagt

SEQ ID NO: 20968 - DNA, 17 bp, synthetic construct
  misc_feature 1..17: note = Oligonucleotide
  source 1..17: mol_type = other DNA
gggcaaggcagggaggg

SEQ ID NO: 20969 - DNA, 17 bp, synthetic construct
  misc_feature 1..17: note = Oligonucleotide
  source 1..17: mol_type = other DNA
caggggcaaggcaggga

SEQ ID NO: 20970 - DNA, 17 bp, synthetic construct
  misc_feature 1..17: note = Oligonucleotide
  source 1..17: mol_type = other DNA
ccgcaggggcaaggcag

SEQ ID NO: 20971 - DNA, 17 bp, synthetic construct
  misc_feature 1..17: note = Oligonucleotide
  source 1..17: mol_type = other DNA
gagccgcaggggcaagg

SEQ ID NO: 20972 - DNA, 17 bp, synthetic construct
  misc_feature 1..17: note = Oligonucleotide
  source 1..17: mol_type = other DNA
cgggagccgcaggggca

SEQ ID NO: 20973 - DNA, 17 bp, synthetic construct
  misc_feature 1..17: note = Oligonucleotide
  source 1..17: mol_type = other DNA
aagcgggagccgcaggg

SEQ ID NO: 20974 - DNA, 17 bp, synthetic construct
  misc_feature 1..17: note = Oligonucleotide
  source 1..17: mol_type = other DNA
caaaagcgggagccgca

SEQ ID NO: 20975 - DNA, 17 bp, synthetic construct
  misc_feature 1..17: note = Oligonucleotide
  source 1..17: mol_type = other DNA
ggccaaaagcgggagcc

SEQ ID NO: 20976 - DNA, 17 bp, synthetic construct
  misc_feature 1..17: note = Oligonucleotide
  source 1..17: mol_type = other DNA
cggggccaaaagcggga

SEQ ID NO: 20977 - DNA, 17 bp, synthetic construct
  misc_feature 1..17: note = Oligonucleotide
  source 1..17: mol_type = other DNA
agccggggccaaaagcg

SEQ ID NO: 20978 - DNA, 17 bp, synthetic construct
  misc_feature 1..17: note = Oligonucleotide
  source 1..17: mol_type = other DNA
gaaagccggggccaaaa

SEQ ID NO: 20979 - DNA, 17 bp, synthetic construct
  misc_feature 1..17: note = Oligonucleotide
  source 1..17: mol_type = other DNA
caggaaagccggggcca

SEQ ID NO: 20980 - DNA, 17 bp, synthetic construct
  misc_feature 1..17: note = Oligonucleotide
  source 1..17: mol_type = other DNA
aaccaggaaagccgggg

SEQ ID NO: 20981 - DNA, 17 bp, synthetic construct
  misc_feature 1..17: note = Oligonucleotide
  source 1..17: mol_type = other DNA
aggaaccaggaaagccg

SEQ ID NO: 20982 - DNA, 17 bp, synthetic construct
  misc_feature 1..17: note = Oligonucleotide
  source 1..17: mol_type = other DNA
cagaggaaccaggaaag

SEQ ID NO: 20983 - DNA, 17 bp, synthetic construct
  misc_feature 1..17: note = Oligonucleotide
  source 1..17: mol_type = other DNA
gagcagaggaaccagga

SEQ ID NO: 20984 - DNA, 17 bp, synthetic construct
  misc_feature 1..17: note = Oligonucleotide
  source 1..17: mol_type = other DNA
accgagcagaggaacca

SEQ ID NO: 20985 - DNA, 17 bp, synthetic construct
  misc_feature 1..17: note = Oligonucleotide
  source 1..17: mol_type = other DNA
gcgaccgagcagaggaa

SEQ ID NO: 20986 - DNA, 17 bp, synthetic construct
  misc_feature 1..17: note = Oligonucleotide
  source 1..17: mol_type = other DNA
gtcgcgaccgagcagag

SEQ ID NO: 20987 - DNA, 17 bp, synthetic construct
  misc_feature 1..17: note = Oligonucleotide
  source 1..17: mol_type = other DNA
acggtcgcgaccgagca

SEQ ID NO: 20988 - DNA, 17 bp, synthetic construct
  misc_feature 1..17: note = Oligonucleotide
  source 1..17: mol_type = other DNA
acgacggtcgcgaccga

SEQ ID NO: 20989 - DNA, 17 bp, synthetic construct
  misc_feature 1..17: note = Oligonucleotide
  source 1..17: mol_type = other DNA
accacgacggtcgcgac

SEQ ID NO: 20990 - DNA, 17 bp, synthetic construct
  misc_feature 1..17: note = Oligonucleotide
  source 1..17: mol_type = other DNA
caaaccacgacggtcgc

SEQ ID NO: 20991 - DNA, 17 bp, synthetic construct
  misc_feature 1..17: note = Oligonucleotide
  source 1..17: mol_type = other DNA
ttgcaaaccacgacggt

SEQ ID NO: 20992 - DNA, 17 bp, synthetic construct
  misc_feature 1..17: note = Oligonucleotide
  source 1..17: mol_type = other DNA
acgttgcaaaccacgac

SEQ ID NO: 20993 - DNA, 17 bp, synthetic construct
  misc_feature 1..17: note = Oligonucleotide
  source 1..17: mol_type = other DNA
gggacgttgcaaaccac

SEQ ID NO: 20994 - DNA, 17 bp, synthetic construct
  misc_feature 1..17: note = Oligonucleotide
  source 1..17: mol_type = other DNA
gccgggacgttgcaaac

SEQ ID NO: 20995 - DNA, 17 bp, synthetic construct
  misc_feature 1..17: note = Oligonucleotide
  source 1..17: mol_type = other DNA
tgggccgggacgttgca

SEQ ID NO: 20996 - DNA, 17 bp, synthetic construct
  misc_feature 1..17: note = Oligonucleotide
  source 1..17: mol_type = other DNA
gcctgggccgggacgtt

SEQ ID NO: 20997 - DNA, 17 bp, synthetic construct
  misc_feature 1..17: note = Oligonucleotide
  source 1..17: mol_type = other DNA
gccgcctgggccgggac

SEQ ID NO: 20998 - DNA, 17 bp, synthetic construct
  misc_feature 1..17: note = Oligonucleotide
  source 1..17: mol_type = other DNA
attgccgcctgggccgg

SEQ ID NO: 20999 - DNA, 17 bp, synthetic construct
  misc_feature 1..17: note = Oligonucleotide
  source 1..17: mol_type = other DNA
ggaattgccgcctgggc

SEQ ID NO: 21000 - DNA, 17 bp, synthetic construct
  misc_feature 1..17: note = Oligonucleotide
  source 1..17: mol_type = other DNA
gaaggaattgccgcctg

SEQ ID NO: 21001 - DNA, 17 bp, synthetic construct
  misc_feature 1..17: note = Oligonucleotide
  source 1..17: mol_type = other DNA
agggaaggaattgccgc

SEQ ID NO: 21002 - DNA, 17 bp, synthetic construct
  misc_feature 1..17: note = Oligonucleotide
  source 1..17: mol_type = other DNA
cgaagggaaggaattgc

SEQ ID NO: 21003 - DNA, 17 bp, synthetic construct
  misc_feature 1..17: note = Oligonucleotide
  source 1..17: mol_type = other DNA
caacgaagggaaggaat

SEQ ID NO: 21004 - DNA, 17 bp, synthetic construct
  misc_feature 1..17: note = Oligonucleotide
  source 1..17: mol_type = other DNA
aaacaacgaagggaagg

SEQ ID NO: 21005 - DNA, 17 bp, synthetic construct
  misc_feature 1..17: note = Oligonucleotide
  source 1..17: mol_type = other DNA
ggaaaacaacgaaggga

SEQ ID NO: 21006 - DNA, 17 bp, synthetic construct
  misc_feature 1..17: note = Oligonucleotide
  source 1..17: mol_type = other DNA
agtggaaaacaacgaag

SEQ ID NO: 21007 - DNA, 17 bp, synthetic construct
  misc_feature 1..17: note = Oligonucleotide
  source 1..17: mol_type = other DNA
gacagtggaaaacaacg

SEQ ID NO: 21008 - DNA, 17 bp, synthetic construct
  misc_feature 1..17: note = Oligonucleotide
  source 1..17: mol_type = other DNA
aaagacagtggaaaaca

SEQ ID NO: 21009 - DNA, 17 bp, synthetic construct
  misc_feature 1..17: note = Oligonucleotide
  source 1..17: mol_type = other DNA
agcaaagacagtggaaa

SEQ ID NO: 21010 - DNA, 17 bp, synthetic construct
  misc_feature 1..17: note = Oligonucleotide
  source 1..17: mol_type = other DNA
tagagcaaagacagtgg

SEQ ID NO: 21011 - DNA, 17 bp, synthetic construct
  misc_feature 1..17: note = Oligonucleotide
  source 1..17: mol_type = other DNA
ctctagagcaaagacag

SEQ ID NO: 21012 - DNA, 17 bp, synthetic construct
  misc_feature 1..17: note = Oligonucleotide
  source 1..17: mol_type = other DNA
agactctagagcaaaga

SEQ ID NO: 21013 - DNA, 17 bp, synthetic construct
  misc_feature 1..17: note = Oligonucleotide
  source 1..17: mol_type = other DNA
gttagactctagagcaa

SEQ ID NO: 21014 - DNA, 17 bp, synthetic construct
  misc_feature 1..17: note = Oligonucleotide
  source 1..17: mol_type = other DNA
tcggttagactctagag

SEQ ID NO: 21015 - DNA, 17 bp, synthetic construct
  misc_feature 1..17: note = Oligonucleotide
  source 1..17: mol_type = other DNA
cactcggttagactcta

SEQ ID NO: 21016 - DNA, 17 bp, synthetic construct
  misc_feature 1..17: note = Oligonucleotide
  source 1..17: mol_type = other DNA
ccccactcggttagact

SEQ ID NO: 21017 - DNA, 17 bp, synthetic construct
  misc_feature 1..17: note = Oligonucleotide
  source 1..17: mol_type = other DNA
agcccccactcggttag

SEQ ID NO: 21018 - DNA, 17 bp, synthetic construct
  misc_feature 1..17: note = Oligonucleotide
  source 1..17: mol_type = other DNA
aaaagcccccactcggt

SEQ ID NO: 21019 - DNA, 17 bp, synthetic construct
  misc_feature 1..17: note = Oligonucleotide
  source 1..17: mol_type = other DNA
cagaaaagcccccactc

SEQ ID NO: 21020 - DNA, 17 bp, synthetic construct
  misc_feature 1..17: note = Oligonucleotide
  source 1..17: mol_type = other DNA
tgccagaaaagccccca

SEQ ID NO: 21021 - DNA, 17 bp, synthetic construct
  misc_feature 1..17: note = Oligonucleotide
  source 1..17: mol_type = other DNA
ccatgccagaaaagccc

SEQ ID NO: 21022 - DNA, 17 bp, synthetic construct
  misc_feature 1..17: note = Oligonucleotide
  source 1..17: mol_type = other DNA
tgcccatgccagaaaag

SEQ ID NO: 21023 - DNA, 17 bp, synthetic construct
  misc_feature 1..17: note = Oligonucleotide
  source 1..17: mol_type = other DNA
ctttgcccatgccagaa

SEQ ID NO: 21024 - DNA, 17 bp, synthetic construct
  misc_feature 1..17: note = Oligonucleotide
  source 1..17: mol_type = other DNA
tccctttgcccatgcca

SEQ ID NO: 21025 - DNA, 17 bp, synthetic construct
  misc_feature 1..17: note = Oligonucleotide
  source 1..17: mol_type = other DNA
aactccctttgcccatg

SEQ ID NO: 21026 - DNA, 17 bp, synthetic construct
  misc_feature 1..17: note = Oligonucleotide
  source 1..17: mol_type = other DNA
caaaactccctttgccc

SEQ ID NO: 21027 - DNA, 17 bp, synthetic construct
  misc_feature 1..17: note = Oligonucleotide
  source 1..17: mol_type = other DNA
ctgcaaaactccctttg

SEQ ID NO: 21028 - DNA, 17 bp, synthetic construct
  misc_feature 1..17: note = Oligonucleotide
  source 1..17: mol_type = other DNA
cctctgcaaaactccct

SEQ ID NO: 21029 - DNA, 17 bp, synthetic construct
  misc_feature 1..17: note = Oligonucleotide
  source 1..17: mol_type = other DNA
gaccctctgcaaaactc

SEQ ID NO: 21030 - DNA, 17 bp, synthetic construct
  misc_feature 1..17: note = Oligonucleotide
  source 1..17: mol_type = other DNA
catgaccctctgcaaaa

SEQ ID NO: 21031 - DNA, 17 bp, synthetic construct
  misc_feature 1..17: note = Oligonucleotide
  source 1..17: mol_type = other DNA
agacatgaccctctgca

SEQ ID NO: 21032 - DNA, 17 bp, synthetic construct
  misc_feature 1..17: note = Oligonucleotide
  source 1..17: mol_type = other DNA
cctagacatgaccctct

SEQ ID NO: 21033 - DNA, 17 bp, synthetic construct
  misc_feature 1..17: note = Oligonucleotide
  source 1..17: mol_type = other DNA
gatcctagacatgaccc

SEQ ID NO: 21034 - DNA, 17 bp, synthetic construct
  misc_feature 1..17: note = Oligonucleotide
  source 1..17: mol_type = other DNA
aaggatcctagacatga

SEQ ID NO: 21035 - DNA, 17 bp, synthetic construct
  misc_feature 1..17: note = Oligonucleotide
  source 1..17: mol_type = other DNA
cccaaggatcctagaca

SEQ ID NO: 21036 - DNA, 17 bp, synthetic construct
  misc_feature 1..17: note = Oligonucleotide
  source 1..17: mol_type = other DNA
cggcccaaggatcctag

SEQ ID NO: 21037 - DNA, 17 bp, synthetic construct
  misc_feature 1..17: note = Oligonucleotide
  source 1..17: mol_type = other DNA
agccggcccaaggatcc

SEQ ID NO: 21038 - DNA, 17 bp, synthetic construct
  misc_feature 1..17: note = Oligonucleotide
  source 1..17: mol_type = other DNA
acgagccggcccaagga

SEQ ID NO: 21039 - DNA, 17 bp, synthetic construct
  misc_feature 1..17: note = Oligonucleotide
  source 1..17: mol_type = other DNA
gggacgagccggcccaa

SEQ ID NO: 21040 - DNA, 17 bp, synthetic construct
  misc_feature 1..17: note = Oligonucleotide
  source 1..17: mol_type = other DNA
gcagggacgagccggcc

SEQ ID NO: 21041 - DNA, 17 bp, synthetic construct
  misc_feature 1..17: note = Oligonucleotide
  source 1..17: mol_type = other DNA
agcgcagggacgagccg

SEQ ID NO: 21042 - DNA, 17 bp, synthetic construct
  misc_feature 1..17: note = Oligonucleotide
  source 1..17: mol_type = other DNA
cacagcgcagggacgag

SEQ ID NO: 21043 - DNA, 17 bp, synthetic construct
  misc_feature 1..17: note = Oligonucleotide
  source 1..17: mol_type = other DNA
agccacagcgcagggac

SEQ ID NO: 21044 - DNA, 17 bp, synthetic construct
  misc_feature 1..17: note = Oligonucleotide
  source 1..17: mol_type = other DNA
gggagccacagcgcagg

SEQ ID NO: 21045 - DNA, 17 bp, synthetic construct
  misc_feature 1..17: note = Oligonucleotide
  source 1..17: mol_type = other DNA
acggggagccacagcgc

SEQ ID NO: 21046 - DNA, 17 bp, synthetic construct
  misc_feature 1..17: note = Oligonucleotide
  source 1..17: mol_type = other DNA
gccacggggagccacag

SEQ ID NO: 21047 - DNA, 17 bp, synthetic construct
  misc_feature 1..17: note = Oligonucleotide
  source 1..17: mol_type = other DNA
agggccacggggagcca

SEQ ID NO: 21048 - DNA, 17 bp, synthetic construct
  misc_feature 1..17: note = Oligonucleotide
  source 1..17: mol_type = other DNA
gggagggccacggggag

SEQ ID NO: 21049 - DNA, 17 bp, synthetic construct
  misc_feature 1..17: note = Oligonucleotide
  source 1..17: mol_type = other DNA
tgggggagggccacggg

SEQ ID NO: 21050 - DNA, 17 bp, synthetic construct
  misc_feature 1..17: note = Oligonucleotide
  source 1..17: mol_type = other DNA
ggctgggggagggccac

SEQ ID NO: 21051 - DNA, 17 bp, synthetic construct
  misc_feature 1..17: note = Oligonucleotide
  source 1..17: mol_type = other DNA
cggggctgggggagggc

SEQ ID NO: 21052 - DNA, 17 bp, synthetic construct
  misc_feature 1..17: note = Oligonucleotide
  source 1..17: mol_type = other DNA
acccggggctgggggag

SEQ ID NO: 21053 - DNA, 17 bp, synthetic construct
  misc_feature 1..17: note = Oligonucleotide
  source 1..17: mol_type = other DNA
gtgacccggggctgggg

SEQ ID NO: 21054 - DNA, 17 bp, synthetic construct
  misc_feature 1..17: note = Oligonucleotide
  source 1..17: mol_type = other DNA
gcagtgacccggggctg

SEQ ID NO: 21055 - DNA, 17 bp, synthetic construct
  misc_feature 1..17: note = Oligonucleotide
  source 1..17: mol_type = other DNA
ggggcagtgacccgggg

SEQ ID NO: 21056 - DNA, 17 bp, synthetic construct
  misc_feature 1..17: note = Oligonucleotide
  source 1..17: mol_type = other DNA
cggggggcagtgacccg

SEQ ID NO: 21057 - DNA, 17 bp, synthetic construct
  misc_feature 1..17: note = Oligonucleotide
  source 1..17: mol_type = other DNA
ctgcggggggcagtgac

SEQ ID NO: 21058 - DNA, 17 bp, synthetic construct
  misc_feature 1..17: note = Oligonucleotide
  source 1..17: mol_type = other DNA
tgactgcggggggcagt

SEQ ID NO: 21059 - DNA, 17 bp, synthetic construct
  misc_feature 1..17: note = Oligonucleotide
  source 1..17: mol_type = other DNA
agatgactgcggggggc

SEQ ID NO: 21060 - DNA, 17 bp, synthetic construct
  misc_feature 1..17: note = Oligonucleotide
  source 1..17: mol_type = other DNA
aagagatgactgcgggg

SEQ ID NO: 21061 - DNA, 17 bp, synthetic construct
  misc_feature 1..17: note = Oligonucleotide
  source 1..17: mol_type = other DNA
ggaaagagatgactgcg

SEQ ID NO: 21062 - DNA, 17 bp, synthetic construct
  misc_feature 1..17: note = Oligonucleotide
  source 1..17: mol_type = other DNA
acaggaaagagatgact

SEQ ID NO: 21063 - DNA, 17 bp, synthetic construct
  misc_feature 1..17: note = Oligonucleotide
  source 1..17: mol_type = other DNA
agcacaggaaagagatg

SEQ ID NO: 21064 - DNA, 17 bp, synthetic construct
  misc_feature 1..17: note = Oligonucleotide
  source 1..17: mol_type = other DNA
ctcagcacaggaaagag

SEQ ID NO: 21065 - DNA, 17 bp, synthetic construct
  misc_feature 1..17: note = Oligonucleotide
  source 1..17: mol_type = other DNA
tggctcagcacaggaaa

SEQ ID NO: 21066 - DNA, 17 bp, synthetic construct
  misc_feature 1..17: note = Oligonucleotide
  source 1..17: mol_type = other DNA
gagtggctcagcacagg

SEQ ID NO: 21067 - DNA, 17 bp, synthetic construct
  misc_feature 1..17: note = Oligonucleotide
  source 1..17: mol_type = other DNA
tccgagtggctcagcac

SEQ ID NO: 21068 - DNA, 17 bp, synthetic construct
  misc_feature 1..17: note = Oligonucleotide
  source 1..17: mol_type = other DNA
acctccgagtggctcag

SEQ ID NO: 21069 - DNA, 17 bp, synthetic construct
  misc_feature 1..17: note = Oligonucleotide
  source 1..17: mol_type = other DNA
gcaacctccgagtggct

SEQ ID NO: 21070 - DNA, 17 bp, synthetic construct
  misc_feature 1..17: note = Oligonucleotide
  source 1..17: mol_type = other DNA
acagcaacctccgagtg

SEQ ID NO: 21071 - DNA, 17 bp, synthetic construct
  misc_feature 1..17: note = Oligonucleotide
  source 1..17: mol_type = other DNA
cacacagcaacctccga

SEQ ID NO: 21072 - DNA, 17 bp, synthetic construct
  misc_feature 1..17: note = Oligonucleotide
  source 1..17: mol_type = other DNA
tgccacacagcaacctc

SEQ ID NO: 21073 - DNA, 17 bp, synthetic construct
  misc_feature 1..17: note = Oligonucleotide
  source 1..17: mol_type = other DNA
ggctgccacacagcaac

SEQ ID NO: 21074 - DNA, 17 bp, synthetic construct
  misc_feature 1..17: note = Oligonucleotide
  source 1..17: mol_type = other DNA
ggcggctgccacacagc

SEQ ID NO: 21075 - DNA, 17 bp, synthetic construct
  misc_feature 1..17: note = Oligonucleotide
  source 1..17: mol_type = other DNA
gggggcggctgccacac

SEQ ID NO: 21076 - DNA, 17 bp, synthetic construct
  misc_feature 1..17: note = Oligonucleotide
  source 1..17: mol_type = other DNA
ggtgggggcggctgcca

SEQ ID NO: 21077 - DNA, 17 bp, synthetic construct
  misc_feature 1..17: note = Oligonucleotide
  source 1..17: mol_type = other DNA
tcgggtgggggcggctg

SEQ ID NO: 21078 - DNA, 17 bp, synthetic construct
  misc_feature 1..17: note = Oligonucleotide
  source 1..17: mol_type = other DNA
ggttcgggtgggggcgg

SEQ ID NO: 21079 - DNA, 17 bp, synthetic construct
  misc_feature 1..17: note = Oligonucleotide
  source 1..17: mol_type = other DNA
ctaggttcgggtggggg

SEQ ID NO: 21080 - DNA, 17 bp, synthetic construct
  misc_feature 1..17: note = Oligonucleotide
  source 1..17: mol_type = other DNA
cagctaggttcgggtgg

SEQ ID NO: 21081 - DNA, 17 bp, synthetic construct
  misc_feature 1..17: note = Oligonucleotide
  source 1..17: mol_type = other DNA
caccagctaggttcggg

SEQ ID NO: 21082 - DNA, 17 bp, synthetic construct
  misc_feature 1..17: note = Oligonucleotide
  source 1..17: mol_type = other DNA
cttcaccagctaggttc

SEQ ID NO: 21083 - DNA, 17 bp, synthetic construct
  misc_feature 1..17: note = Oligonucleotide
  source 1..17: mol_type = other DNA
gcgcttcaccagctagg

SEQ ID NO: 21084 - DNA, 17 bp, synthetic construct
  misc_feature 1..17: note = Oligonucleotide
  source 1..17: mol_type = other DNA
aaggcgcttcaccagct

SEQ ID NO: 21085 - DNA, 17 bp, synthetic construct
  misc_feature 1..17: note = Oligonucleotide
  source 1..17: mol_type = other DNA
aggaaggcgcttcacca

SEQ ID NO: 21086 - DNA, 17 bp, synthetic construct
  misc_feature 1..17: note = Oligonucleotide
  source 1..17: mol_type = other DNA
attaggaaggcgcttca

SEQ ID NO: 21087 - DNA, 17 bp, synthetic construct
  misc_feature 1..17: note = Oligonucleotide
  source 1..17: mol_type = other DNA
gcaattaggaaggcgct

SEQ ID NO: 21088 - DNA, 17 bp, synthetic construct
  misc_feature 1..17: note = Oligonucleotide
  source 1..17: mol_type = other DNA
ggggcaattaggaaggc

SEQ ID NO: 21089 - DNA, 17 bp, synthetic construct
  misc_feature 1..17: note = Oligonucleotide
  source 1..17: mol_type = other DNA
cggggggcaattaggaa

SEQ ID NO: 21090 - DNA, 17 bp, synthetic construct
  misc_feature 1..17: note = Oligonucleotide
  source 1..17: mol_type = other DNA
ctgcggggggcaattag

SEQ ID NO: 21091 - DNA, 17 bp, synthetic construct
  misc_feature 1..17: note = Oligonucleotide
  source 1..17: mol_type = other DNA
ctgctgcggggggcaat

SEQ ID NO: 21092 - DNA, 17 bp, synthetic construct
  misc_feature 1..17: note = Oligonucleotide
  source 1..17: mol_type = other DNA
tctctgctgcggggggc

SEQ ID NO: 21093 - DNA, 17 bp, synthetic construct
  misc_feature 1..17: note = Oligonucleotide
  source 1..17: mol_type = other DNA
gggtctctgctgcgggg

SEQ ID NO: 21094 - DNA, 17 bp, synthetic construct
  misc_feature 1..17: note = Oligonucleotide
  source 1..17: mol_type = other DNA
tgggggtctctgctgcg

SEQ ID NO: 21095 - DNA, 17 bp, synthetic construct
  misc_feature 1..17: note = Oligonucleotide
  source 1..17: mol_type = other DNA
cgatgggggtctctgct

SEQ ID NO: 21096 - DNA, 17 bp, synthetic construct
  misc_feature 1..17: note = Oligonucleotide
  source 1..17: mol_type = other DNA
cctcgatgggggtctct

SEQ ID NO: 21097 - DNA, 17 bp, synthetic construct
  misc_feature 1..17: note = Oligonucleotide
  source 1..17: mol_type = other DNA
actcctcgatgggggtc

SEQ ID NO: 21098 - DNA, 17 bp, synthetic construct
  misc_feature 1..17: note = Oligonucleotide
  source 1..17: mol_type = other DNA
tgaactcctcgatgggg

SEQ ID NO: 21099 - DNA, 17 bp, synthetic construct
  misc_feature 1..17: note = Oligonucleotide
  source 1..17: mol_type = other DNA
gcgtgaactcctcgatg

SEQ ID NO: 21100 - DNA, 17 bp, synthetic construct
  misc_feature 1..17: note = Oligonucleotide
  source 1..17: mol_type = other DNA
tgggcgtgaactcctcg

SEQ ID NO: 21101 - DNA, 17 bp, synthetic construct
  misc_feature 1..17: note = Oligonucleotide
  source 1..17: mol_type = other DNA
gcgtgggcgtgaactcc

SEQ ID NO: 21102 - DNA, 17 bp, synthetic construct
  misc_feature 1..17: note = Oligonucleotide
  source 1..17: mol_type = other DNA
ctggcgtgggcgtgaac

SEQ ID NO: 21103 - DNA, 17 bp, synthetic construct
  misc_feature 1..17: note = Oligonucleotide
  source 1..17: mol_type = other DNA
aggctggcgtgggcgtg

SEQ ID NO: 21104 - DNA, 17 bp, synthetic construct
  misc_feature 1..17: note = Oligonucleotide
  source 1..17: mol_type = other DNA
ggaaggctggcgtgggc

SEQ ID NO: 21105 - DNA, 17 bp, synthetic construct
  misc_feature 1..17: note = Oligonucleotide
  source 1..17: mol_type = other DNA
ccgggaaggctggcgtg

SEQ ID NO: 21106 - DNA, 17 bp, synthetic construct
  misc_feature 1..17: note = Oligonucleotide
  source 1..17: mol_type = other DNA
gcgccgggaaggctggc

SEQ ID NO: 21107 - DNA, 17 bp, synthetic construct
  misc_feature 1..17: note = Oligonucleotide
  source 1..17: mol_type = other DNA
gcagcgccgggaaggct

SEQ ID NO: 21108 - DNA, 17 bp, synthetic construct
  misc_feature 1..17: note = Oligonucleotide
  source 1..17: mol_type = other DNA
actgcagcgccgggaag

SEQ ID NO: 21109 - DNA, 17 bp, synthetic construct
  misc_feature 1..17: note = Oligonucleotide
  source 1..17: mol_type = other DNA
gatactgcagcgccggg

SEQ ID NO: 21110 - DNA, 17 bp, synthetic construct
  misc_feature 1..17: note = Oligonucleotide
  source 1..17: mol_type = other DNA
cgagatactgcagcgcc

SEQ ID NO: 21111 - DNA, 17 bp, synthetic construct
  misc_feature 1..17: note = Oligonucleotide
  source 1..17: mol_type = other DNA
actcgagatactgcagc

SEQ ID NO: 21112 - DNA, 17 bp, synthetic construct
  misc_feature 1..17: note = Oligonucleotide
  source 1..17: mol_type = other DNA
ccgactcgagatactgc

SEQ ID NO: 21113 - DNA, 17 bp, synthetic construct
  misc_feature 1..17: note = Oligonucleotide
  source 1..17: mol_type = other DNA
ccaccgactcgagatac

SEQ ID NO: 21114 - DNA, 17 bp, synthetic construct
  misc_feature 1..17: note = Oligonucleotide
  source 1..17: mol_type = other DNA
cgtccaccgactcgaga

SEQ ID NO: 21115 - DNA, 17 bp, synthetic construct
  misc_feature 1..17: note = Oligonucleotide
  source 1..17: mol_type = other DNA
ccacgtccaccgactcg

SEQ ID NO: 21116 - DNA, 17 bp, synthetic construct
  misc_feature 1..17: note = Oligonucleotide
  source 1..17: mol_type = other DNA
cctccacgtccaccgac

SEQ ID NO: 21117 - DNA, 17 bp, synthetic construct
  misc_feature 1..17: note = Oligonucleotide
  source 1..17: mol_type = other DNA
caccctccacgtccacc

SEQ ID NO: 21118 - DNA, 17 bp, synthetic construct
  misc_feature 1..17: note = Oligonucleotide
  source 1..17: mol_type = other DNA
ccacaccctccacgtcc

SEQ ID NO: 21119 - DNA, 17 bp, synthetic construct
  misc_feature 1..17: note = Oligonucleotide
  source 1..17: mol_type = other DNA
aggccacaccctccacg

SEQ ID NO: 21120 - DNA, 17 bp, synthetic construct
  misc_feature 1..17: note = Oligonucleotide
  source 1..17: mol_type = other DNA
tccaggccacaccctcc

SEQ ID NO: 21121 - DNA, 17 bp, synthetic construct
  misc_feature 1..17: note = Oligonucleotide
  source 1..17: mol_type = other DNA
ccctccaggccacaccc

SEQ ID NO: 21122 - DNA, 17 bp, synthetic construct
  misc_feature 1..17: note = Oligonucleotide
  source 1..17: mol_type = other DNA
cggccctccaggccaca

SEQ ID NO: 21123 - DNA, 17 bp, synthetic construct
  misc_feature 1..17: note = Oligonucleotide
  source 1..17: mol_type = other DNA
gcccggccctccaggcc

SEQ ID NO: 21124 - DNA, 17 bp, synthetic construct
  misc_feature 1..17: note = Oligonucleotide
  source 1..17: mol_type = other DNA
gcagcccggccctccag

SEQ ID NO: 21125 - DNA, 17 bp, synthetic construct
  misc_feature 1..17: note = Oligonucleotide
  source 1..17: mol_type = other DNA
tgcgcagcccggccctc

SEQ ID NO: 21126 - DNA, 17 bp, synthetic construct
  misc_feature 1..17: note = Oligonucleotide
  source 1..17: mol_type = other DNA
ccgtgcgcagcccggcc

SEQ ID NO: 21127 - DNA, 17 bp, synthetic construct
  misc_feature 1..17: note = Oligonucleotide
  source 1..17: mol_type = other DNA
ctcccgtgcgcagcccg

SEQ ID NO: 21128 - DNA, 17 bp, synthetic construct
  misc_feature 1..17: note = Oligonucleotide
  source 1..17: mol_type = other DNA
agtctcccgtgcgcagc

SEQ ID NO: 21129 - DNA, 17 bp, synthetic construct
  misc_feature 1..17: note = Oligonucleotide
  source 1..17: mol_type = other DNA
ggaagtctcccgtgcgc

SEQ ID NO: 21130 - DNA, 17 bp, synthetic construct
  misc_feature 1..17: note = Oligonucleotide
  source 1..17: mol_type = other DNA
tgaggaagtctcccgtg

SEQ ID NO: 21131 - DNA, 17 bp, synthetic construct
  misc_feature 1..17: note = Oligonucleotide
  source 1..17: mol_type = other DNA
cgatgaggaagtctccc

SEQ ID NO: 21132 - DNA, 17 bp, synthetic construct
  misc_feature 1..17: note = Oligonucleotide
  source 1..17: mol_type = other DNA
cctcgatgaggaagtct

SEQ ID NO: 21133 - DNA, 17 bp, synthetic construct
  misc_feature 1..17: note = Oligonucleotide
  source 1..17: mol_type = other DNA
tcacctcgatgaggaag

SEQ ID NO: 21134 - DNA, 17 bp, synthetic construct
  misc_feature 1..17: note = Oligonucleotide
  source 1..17: mol_type = other DNA
acctcacctcgatgagg

SEQ ID NO: 21135 - DNA, 17 bp, synthetic construct
  misc_feature 1..17: note = Oligonucleotide
  source 1..17: mol_type = other DNA
acgacctcacctcgatg

SEQ ID NO: 21136 - DNA, 17 bp, synthetic construct
  misc_feature 1..17: note = Oligonucleotide
  source 1..17: mol_type = other DNA
agaacgacctcacctcg

SEQ ID NO: 21137 - DNA, 17 bp, synthetic construct
  misc_feature 1..17: note = Oligonucleotide
  source 1..17: mol_type = other DNA
gccagaacgacctcacc

SEQ ID NO: 21138 - DNA, 17 bp, synthetic construct
  misc_feature 1..17: note = Oligonucleotide
  source 1..17: mol_type = other DNA
ccggccagaacgacctc

SEQ ID NO: 21139 - DNA, 17 bp, synthetic construct
  misc_feature 1..17: note = Oligonucleotide
  source 1..17: mol_type = other DNA
gcaccggccagaacgac

SEQ ID NO: 21140 - DNA, 17 bp, synthetic construct
  misc_feature 1..17: note = Oligonucleotide
  source 1..17: mol_type = other DNA
gcagcaccggccagaac

SEQ ID NO: 21141 - DNA, 17 bp, synthetic construct
  misc_feature 1..17: note = Oligonucleotide
  source 1..17: mol_type = other DNA
tgggcagcaccggccag

SEQ ID NO: 21142 - DNA, 17 bp, synthetic construct
  misc_feature 1..17: note = Oligonucleotide
  source 1..17: mol_type = other DNA
cactgggcagcaccggc

SEQ ID NO: 21143 - DNA, 17 bp, synthetic construct
  misc_feature 1..17: note = Oligonucleotide
  source 1..17: mol_type = other DNA
tcccactgggcagcacc

SEQ ID NO: 21144 - DNA, 17 bp, synthetic construct
  misc_feature 1..17: note = Oligonucleotide
  source 1..17: mol_type = other DNA
gcatcccactgggcagc

SEQ ID NO: 21145 - DNA, 17 bp, synthetic construct
  misc_feature 1..17: note = Oligonucleotide
  source 1..17: mol_type = other DNA
tcagcatcccactgggc

SEQ ID NO: 21146 - DNA, 17 bp, synthetic construct
  misc_feature 1..17: note = Oligonucleotide
  source 1..17: mol_type = other DNA
ggctcagcatcccactg

SEQ ID NO: 21147 - DNA, 17 bp, synthetic construct
  misc_feature 1..17: note = Oligonucleotide
  source 1..17: mol_type = other DNA
cagggctcagcatccca

SEQ ID NO: 21148 - DNA, 17 bp, synthetic construct
  misc_feature 1..17: note = Oligonucleotide
  source 1..17: mol_type = other DNA
gctcagggctcagcatc

SEQ ID NO: 21149 - DNA, 17 bp, synthetic construct
  misc_feature 1..17: note = Oligonucleotide
  source 1..17: mol_type = other DNA
agggctcagggctcagc

SEQ ID NO: 21150 - DNA, 17 bp, synthetic construct
  misc_feature 1..17: note = Oligonucleotide
  source 1..17: mol_type = other DNA
cacagggctcagggctc

SEQ ID NO: 21151 - DNA, 17 bp, synthetic construct
  misc_feature 1..17: note = Oligonucleotide
  source 1..17: mol_type = other DNA
caccacagggctcaggg

SEQ ID NO: 21152 - DNA, 17 bp, synthetic construct
  misc_feature 1..17: note = Oligonucleotide
  source 1..17: mol_type = other DNA
gtccaccacagggctca

SEQ ID NO: 21153 - DNA, 17 bp, synthetic construct
  misc_feature 1..17: note = Oligonucleotide
  source 1..17: mol_type = other DNA
cacgtccaccacagggc

SEQ ID NO: 21154 - DNA, 17 bp, synthetic construct
  misc_feature 1..17: note = Oligonucleotide
  source 1..17: mol_type = other DNA
aggcacgtccaccacag

SEQ ID NO: 21155 - DNA, 17 bp, synthetic construct
  misc_feature 1..17: note = Oligonucleotide
  source 1..17: mol_type = other DNA
cccaggcacgtccacca

SEQ ID NO: 21156 - DNA, 17 bp, synthetic construct
  misc_feature 1..17: note = Oligonucleotide
  source 1..17: mol_type = other DNA
cgccccaggcacgtcca

SEQ ID NO: 21157 - DNA, 17 bp, synthetic construct
  misc_feature 1..17: note = Oligonucleotide
  source 1..17: mol_type = other DNA
ggacgccccaggcacgt

SEQ ID NO: 21158 - DNA, 17 bp, synthetic construct
  misc_feature 1..17: note = Oligonucleotide
  source 1..17: mol_type = other DNA
tggggacgccccaggca

SEQ ID NO: 21159 - DNA, 17 bp, synthetic construct
  misc_feature 1..17: note = Oligonucleotide
  source 1..17: mol_type = other DNA
gggtggggacgccccag

SEQ ID NO: 21160 - DNA, 17 bp, synthetic construct
  misc_feature 1..17: note = Oligonucleotide
  source 1..17: mol_type = other DNA
gctgggtggggacgccc

SEQ ID NO: 21161 - DNA, 17 bp, synthetic construct
  misc_feature 1..17: note = Oligonucleotide
  source 1..17: mol_type = other DNA
gcagctgggtggggacg

SEQ ID NO: 21162 - DNA, 17 bp, synthetic construct
  misc_feature 1..17: note = Oligonucleotide
  source 1..17: mol_type = other DNA
caggcagctgggtgggg

SEQ ID NO: 21163 - DNA, 17 bp, synthetic construct
  misc_feature 1..17: note = Oligonucleotide
  source 1..17: mol_type = other DNA
agacaggcagctgggtg

SEQ ID NO: 21164 - DNA, 17 bp, synthetic construct
  misc_feature 1..17: note = Oligonucleotide
  source 1..17: mol_type = other DNA
gatagacaggcagctgg

SEQ ID NO: 21165 - DNA, 17 bp, synthetic construct
  misc_feature 1..17: note = Oligonucleotide
  source 1..17: mol_type = other DNA
tgggatagacaggcagc

SEQ ID NO: 21166 - DNA, 17 bp, synthetic construct
  misc_feature 1..17: note = Oligonucleotide
  source 1..17: mol_type = other DNA
acctgggatagacaggc

SEQ ID NO: 21167 - DNA, 17 bp, synthetic construct
  misc_feature 1..17: note = Oligonucleotide
  source 1..17: mol_type = other DNA
ttcacctgggatagaca

SEQ ID NO: 21168 - DNA, 17 bp, synthetic construct
  misc_feature 1..17: note = Oligonucleotide
  source 1..17: mol_type = other DNA
ccgttcacctgggatag

SEQ ID NO: 21169 - DNA, 17 bp, synthetic construct
  misc_feature 1..17: note = Oligonucleotide
  source 1..17: mol_type = other DNA
accccgttcacctggga

SEQ ID NO: 21170 - DNA, 17 bp, synthetic construct
  misc_feature 1..17: note = Oligonucleotide
  source 1..17: mol_type = other DNA
ttcaccccgttcacctg

SEQ ID NO: 21171 - DNA, 17 bp, synthetic construct
  misc_feature 1..17: note = Oligonucleotide
  source 1..17: mol_type = other DNA
acgttcaccccgttcac

SEQ ID NO: 21172 - DNA, 17 bp, synthetic construct
  misc_feature 1..17: note = Oligonucleotide
  source 1..17: mol_type = other DNA
accacgttcaccccgtt

SEQ ID NO: 21173 - DNA, 17 bp, synthetic construct
  misc_feature 1..17: note = Oligonucleotide
  source 1..17: mol_type = other DNA
ttcaccacgttcacccc

SEQ ID NO: 21174 - DNA, 17 bp, synthetic construct
  misc_feature 1..17: note = Oligonucleotide
  source 1..17: mol_type = other DNA
accttcaccacgttcac

SEQ ID NO: 21175 - DNA, 17 bp, synthetic construct
  misc_feature 1..17: note = Oligonucleotide
  source 1..17: mol_type = other DNA
ccgaccttcaccacgtt

SEQ ID NO: 21176 - DNA, 17 bp, synthetic construct
  misc_feature 1..17: note = Oligonucleotide
  source 1..17: mol_type = other DNA
tgtccgaccttcaccac

SEQ ID NO: 21177 - DNA, 17 bp, synthetic construct
  misc_feature 1..17: note = Oligonucleotide
  source 1..17: mol_type = other DNA
ttgtgtccgaccttcac

SEQ ID NO: 21178 - DNA, 17 bp, synthetic construct
  misc_feature 1..17: note = Oligonucleotide
  source 1..17: mol_type = other DNA
tgcttgtgtccgacctt

SEQ ID NO: 21179 - DNA, 17 bp, synthetic construct
  misc_feature 1..17: note = Oligonucleotide
  source 1..17: mol_type = other DNA
acctgcttgtgtccgac

SEQ ID NO: 21180 - DNA, 17 bp, synthetic construct
  misc_feature 1..17: note = Oligonucleotide
  source 1..17: mol_type = other DNA
accacctgcttgtgtcc

SEQ ID NO: 21181 - DNA, 17 bp, synthetic construct
  misc_feature 1..17: note = Oligonucleotide
  source 1..17: mol_type = other DNA
gccaccacctgcttgtg

SEQ ID NO: 21182 - DNA, 17 bp, synthetic construct
  misc_feature 1..17: note = Oligonucleotide
  source 1..17: mol_type = other DNA
agagccaccacctgctt

SEQ ID NO: 21183 - DNA, 17 bp, synthetic construct
  misc_feature 1..17: note = Oligonucleotide
  source 1..17: mol_type = other DNA
atcagagccaccacctg

SEQ ID NO: 21184 - DNA, 17 bp, synthetic construct
  misc_feature 1..17: note = Oligonucleotide
  source 1..17: mol_type = other DNA
cgaatcagagccaccac

SEQ ID NO: 21185 - DNA, 17 bp, synthetic construct
  misc_feature 1..17: note = Oligonucleotide
  source 1..17: mol_type = other DNA
tggcgaatcagagccac

SEQ ID NO: 21186 - DNA, 17 bp, synthetic construct
  misc_feature 1..17: note = Oligonucleotide
  source 1..17: mol_type = other DNA
ccctggcgaatcagagc

SEQ ID NO: 21187 - DNA, 17 bp, synthetic construct
  misc_feature 1..17: note = Oligonucleotide
  source 1..17: mol_type = other DNA
ccaccctggcgaatcag

SEQ ID NO: 21188 - DNA, 17 bp, synthetic construct
  misc_feature 1..17: note = Oligonucleotide
  source 1..17: mol_type = other DNA
ttgccaccctggcgaat

SEQ ID NO: 21189 - DNA, 17 bp, synthetic construct
  misc_feature 1..17: note = Oligonucleotide
  source 1..17: mol_type = other DNA
cggttgccaccctggcg

SEQ ID NO: 21190 - DNA, 17 bp, synthetic construct
  misc_feature 1..17: note = Oligonucleotide
  source 1..17: mol_type = other DNA
aggcggttgccaccctg

SEQ ID NO: 21191 - DNA, 17 bp, synthetic construct
  misc_feature 1..17: note = Oligonucleotide
  source 1..17: mol_type = other DNA
acgaggcggttgccacc

SEQ ID NO: 21192 - DNA, 17 bp, synthetic construct
  misc_feature 1..17: note = Oligonucleotide
  source 1..17: mol_type = other DNA
atgacgaggcggttgcc

SEQ ID NO: 21193 - DNA, 17 bp, synthetic construct
  misc_feature 1..17: note = Oligonucleotide
  source 1..17: mol_type = other DNA
ttcatgacgaggcggtt

SEQ ID NO: 21194 - DNA, 17 bp, synthetic construct
  misc_feature 1..17: note = Oligonucleotide
  source 1..17: mol_type = other DNA
accttcatgacgaggcg

SEQ ID NO: 21195 - DNA, 17 bp, synthetic construct
  misc_feature 1..17: note = Oligonucleotide
  source 1..17: mol_type = other DNA
acaaccttcatgacgag

SEQ ID NO: 21196 - DNA, 17 bp, synthetic construct
  misc_feature 1..17: note = Oligonucleotide
  source 1..17: mol_type = other DNA
gacacaaccttcatgac

SEQ ID NO: 21197 - DNA, 17 bp, synthetic construct
  misc_feature 1..17: note = Oligonucleotide
  source 1..17: mol_type = other DNA
acagacacaaccttcat

SEQ ID NO: 21198 - DNA, 17 bp, synthetic construct
  misc_feature 1..17: note = Oligonucleotide
  source 1..17: mol_type = other DNA
gtcacagacacaacctt

SEQ ID NO: 21199 - DNA, 17 bp, synthetic construct
  misc_feature 1..17: note = Oligonucleotide
  source 1..17: mol_type = other DNA
cttgtcacagacacaac

SEQ ID NO: 21200 - DNA, 17 bp, synthetic construct
  misc_feature 1..17: note = Oligonucleotide
  source 1..17: mol_type = other DNA
ttccttgtcacagacac

SEQ ID NO: 21201 - DNA, 17 bp, synthetic construct
  misc_feature 1..17: note = Oligonucleotide
  source 1..17: mol_type = other DNA
ggcttccttgtcacaga

SEQ ID NO: 21202 - DNA, 17 bp, synthetic construct
  misc_feature 1..17: note = Oligonucleotide
  source 1..17: mol_type = other DNA
tctggcttccttgtcac

SEQ ID NO: 21203 - DNA, 17 bp, synthetic construct
  misc_feature 1..17: note = Oligonucleotide
  source 1..17: mol_type = other DNA
tcttctggcttccttgt

SEQ ID NO: 21204 - DNA, 17 bp, synthetic construct
  misc_feature 1..17: note = Oligonucleotide
  source 1..17: mol_type = other DNA
tcctcttctggcttcct

SEQ ID NO: 21205 - DNA, 17 bp, synthetic construct
  misc_feature 1..17: note = Oligonucleotide
  source 1..17: mol_type = other DNA
ccgtcctcttctggctt

SEQ ID NO: 21206 - DNA, 17 bp, synthetic construct
  misc_feature 1..17: note = Oligonucleotide
  source 1..17: mol_type = other DNA
gccccgtcctcttctgg

SEQ ID NO: 21207 - DNA, 17 bp, synthetic construct
  misc_feature 1..17: note = Oligonucleotide
  source 1..17: mol_type = other DNA
cgagccccgtcctcttc

SEQ ID NO: 21208 - DNA, 17 bp, synthetic construct
  misc_feature 1..17: note = Oligonucleotide
  source 1..17: mol_type = other DNA
cgccgagccccgtcctc

SEQ ID NO: 21209 - DNA, 17 bp, synthetic construct
  misc_feature 1..17: note = Oligonucleotide
  source 1..17: mol_type = other DNA
ctgcgccgagccccgtc

SEQ ID NO: 21210 - DNA, 17 bp, synthetic construct
  misc_feature 1..17: note = Oligonucleotide
  source 1..17: mol_type = other DNA
cctctgcgccgagcccc

SEQ ID NO: 21211 - DNA, 17 bp, synthetic construct
  misc_feature 1..17: note = Oligonucleotide
  source 1..17: mol_type = other DNA
tcacctctgcgccgagc

SEQ ID NO: 21212 - DNA, 17 bp, synthetic construct
  misc_feature 1..17: note = Oligonucleotide
  source 1..17: mol_type = other DNA
ccctcacctctgcgccg

SEQ ID NO: 21213 - DNA, 17 bp, synthetic construct
  misc_feature 1..17: note = Oligonucleotide
  source 1..17: mol_type = other DNA
gacccctcacctctgcg

SEQ ID NO: 21214 - DNA, 17 bp, synthetic construct
  misc_feature 1..17: note = Oligonucleotide
  source 1..17: mol_type = other DNA
cgtgacccctcacctct

SEQ ID NO: 21215 - DNA, 17 bp, synthetic construct
  misc_feature 1..17: note = Oligonucleotide
  source 1..17: mol_type = other DNA
aagcgtgacccctcacc

SEQ ID NO: 21216 - DNA, 17 bp, synthetic construct
  misc_feature 1..17: note = Oligonucleotide
  source 1..17: mol_type = other DNA
ctgaagcgtgacccctc

SEQ ID NO: 21217 - DNA, 17 bp, synthetic construct
  misc_feature 1..17: note = Oligonucleotide
  source 1..17: mol_type = other DNA
ggcctgaagcgtgaccc

SEQ ID NO: 21218 - DNA, 17 bp, synthetic construct
  misc_feature 1..17: note = Oligonucleotide
  source 1..17: mol_type = other DNA
agaggcctgaagcgtga

SEQ ID NO: 21219 - DNA, 17 bp, synthetic construct
  misc_feature 1..17: note = Oligonucleotide
  source 1..17: mol_type = other DNA
cacagaggcctgaagcg

SEQ ID NO: 21220 - DNA, 17 bp, synthetic construct
  misc_feature 1..17: note = Oligonucleotide
  source 1..17: mol_type = other DNA
gggcacagaggcctgaa

SEQ ID NO: 21221 - DNA, 17 bp, synthetic construct
  misc_feature 1..17: note = Oligonucleotide
  source 1..17: mol_type = other DNA
tttgggcacagaggcct

SEQ ID NO: 21222 - DNA, 17 bp, synthetic construct
  misc_feature 1..17: note = Oligonucleotide
  source 1..17: mol_type = other DNA
aagtttgggcacagagg

SEQ ID NO: 21223 - DNA, 17 bp, synthetic construct
  misc_feature 1..17: note = Oligonucleotide
  source 1..17: mol_type = other DNA
ggaaagtttgggcacag

SEQ ID NO: 21224 - DNA, 17 bp, synthetic construct
  misc_feature 1..17: note = Oligonucleotide
  source 1..17: mol_type = other DNA
aggggaaagtttgggca

SEQ ID NO: 21225 - DNA, 17 bp, synthetic construct
  misc_feature 1..17: note = Oligonucleotide
  source 1..17: mol_type = other DNA
gtcaggggaaagtttgg

SEQ ID NO: 21226 - DNA, 17 bp, synthetic construct
  misc_feature 1..17: note = Oligonucleotide
  source 1..17: mol_type = other DNA
aaggtcaggggaaagtt

SEQ ID NO: 21227 - DNA, 17 bp, synthetic construct
  misc_feature 1..17: note = Oligonucleotide
  source 1..17: mol_type = other DNA
tctaaggtcaggggaaa

SEQ ID NO: 21228 - DNA, 17 bp, synthetic construct
  misc_feature 1..17: note = Oligonucleotide
  source 1..17: mol_type = other DNA
aggtctaaggtcagggg

SEQ ID NO: 21229 - DNA, 17 bp, synthetic construct
  misc_feature 1..17: note = Oligonucleotide
  source 1..17: mol_type = other DNA
caaaggtctaaggtcag

SEQ ID NO: 21230 - DNA, 17 bp, synthetic construct
  misc_feature 1..17: note = Oligonucleotide
  source 1..17: mol_type = other DNA
agtcaaaggtctaaggt

SEQ ID NO: 21231 - DNA, 17 bp, synthetic construct
  misc_feature 1..17: note = Oligonucleotide
  source 1..17: mol_type = other DNA
tgaagtcaaaggtctaa

SEQ ID NO: 21232 - DNA, 17 bp, synthetic construct
  misc_feature 1..17: note = Oligonucleotide
  source 1..17: mol_type = other DNA
gcctgaagtcaaaggtc

SEQ ID NO: 21233 - DNA, 17 bp, synthetic construct
  misc_feature 1..17: note = Oligonucleotide
  source 1..17: mol_type = other DNA
tgggcctgaagtcaaag

SEQ ID NO: 21234 - DNA, 17 bp, synthetic construct
  misc_feature 1..17: note = Oligonucleotide
  source 1..17: mol_type = other DNA
atgtgggcctgaagtca

SEQ ID NO: 21235 - DNA, 17 bp, synthetic construct
  misc_feature 1..17: note = Oligonucleotide
  source 1..17: mol_type = other DNA
ggaatgtgggcctgaag

SEQ ID NO: 21236 - DNA, 17 bp, synthetic construct
  misc_feature 1..17: note = Oligonucleotide
  source 1..17: mol_type = other DNA
agaggaatgtgggcctg

SEQ ID NO: 21237 - DNA, 17 bp, synthetic construct
  misc_feature 1..17: note = Oligonucleotide
  source 1..17: mol_type = other DNA
ggaagaggaatgtgggc

SEQ ID NO: 21238 - DNA, 17 bp, synthetic construct
  misc_feature 1..17: note = Oligonucleotide
  source 1..17: mol_type = other DNA
atgggaagaggaatgtg

SEQ ID NO: 21239 - DNA, 17 bp, synthetic construct
  misc_feature 1..17: note = Oligonucleotide
  source 1..17: mol_type = other DNA
gggatgggaagaggaat

SEQ ID NO: 21240 - DNA, 17 bp, synthetic construct
  misc_feature 1..17: note = Oligonucleotide
  source 1..17: mol_type = other DNA
tcagggatgggaagagg

SEQ ID NO: 21241 - DNA, 17 bp, synthetic construct
  misc_feature 1..17: note = Oligonucleotide
  source 1..17: mol_type = other DNA
gggtcagggatgggaag

SEQ ID NO: 21242 - DNA, 17 bp, synthetic construct
  misc_feature 1..17: note = Oligonucleotide
  source 1..17: mol_type = other DNA
tgggggtcagggatggg

SEQ ID NO: 21243 - DNA, 17 bp, synthetic construct
  misc_feature 1..17: note = Oligonucleotide
  source 1..17: mol_type = other DNA
agttgggggtcagggat

SEQ ID NO: 21244 - DNA, 17 bp, synthetic construct
  misc_feature 1..17: note = Oligonucleotide
  source 1..17: mol_type = other DNA
agcagttgggggtcagg

SEQ ID NO: 21245 - DNA, 17 bp, synthetic construct
  misc_feature 1..17: note = Oligonucleotide
  source 1..17: mol_type = other DNA
gtcagcagttgggggtc

SEQ ID NO: 21246 - DNA, 17 bp, synthetic construct
  misc_feature 1..17: note = Oligonucleotide
  source 1..17: mol_type = other DNA
gatgtcagcagttgggg

SEQ ID NO: 21247 - DNA, 17 bp, synthetic construct
  misc_feature 1..17: note = Oligonucleotide
  source 1..17: mol_type = other DNA
tctgatgtcagcagttg

SEQ ID NO: 21248 - DNA, 17 bp, synthetic construct
  misc_feature 1..17: note = Oligonucleotide
  source 1..17: mol_type = other DNA
gaatctgatgtcagcag

SEQ ID NO: 21249 - DNA, 17 bp, synthetic construct
  misc_feature 1..17: note = Oligonucleotide
  source 1..17: mol_type = other DNA
caggaatctgatgtcag

SEQ ID NO: 21250 - DNA, 17 bp, synthetic construct
  misc_feature 1..17: note = Oligonucleotide
  source 1..17: mol_type = other DNA
gttcaggaatctgatgt

SEQ ID NO: 21251 - DNA, 17 bp, synthetic construct
  misc_feature 1..17: note = Oligonucleotide
  source 1..17: mol_type = other DNA
gaggttcaggaatctga

SEQ ID NO: 21252 - DNA, 17 bp, synthetic construct
  misc_feature 1..17: note = Oligonucleotide
  source 1..17: mol_type = other DNA
attgaggttcaggaatc

SEQ ID NO: 21253 - DNA, 17 bp, synthetic construct
  misc_feature 1..17: note = Oligonucleotide
  source 1..17: mol_type = other DNA
ttcattgaggttcagga

SEQ ID NO: 21254 - DNA, 17 bp, synthetic construct
  misc_feature 1..17: note = Oligonucleotide
  source 1..17: mol_type = other DNA
tggttcattgaggttca

SEQ ID NO: 21255 - DNA, 17 bp, synthetic construct
  misc_feature 1..17: note = Oligonucleotide
  source 1..17: mol_type = other DNA
gggtggttcattgaggt

SEQ ID NO: 21256 - DNA, 17 bp, synthetic construct
  misc_feature 1..17: note = Oligonucleotide
  source 1..17: mol_type = other DNA
tgtgggtggttcattga

SEQ ID NO: 21257 - DNA, 17 bp, synthetic construct
  misc_feature 1..17: note = Oligonucleotide
  source 1..17: mol_type = other DNA
acgtgtgggtggttcat

SEQ ID NO: 21258 - DNA, 17 bp, synthetic construct
  misc_feature 1..17: note = Oligonucleotide
  source 1..17: mol_type = other DNA
cacacgtgtgggtggtt

SEQ ID NO: 21259 - DNA, 17 bp, synthetic construct
  misc_feature 1..17: note = Oligonucleotide
  source 1..17: mol_type = other DNA
gcccacacgtgtgggtg

SEQ ID NO: 21260 - DNA, 17 bp, synthetic construct
  misc_feature 1..17: note = Oligonucleotide
  source 1..17: mol_type = other DNA
ccagcccacacgtgtgg

SEQ ID NO: 21261 - DNA, 17 bp, synthetic construct
  misc_feature 1..17: note = Oligonucleotide
  source 1..17: mol_type = other DNA
gtcccagcccacacgtg

SEQ ID NO: 21262 - DNA, 17 bp, synthetic construct
  misc_feature 1..17: note = Oligonucleotide
  source 1..17: mol_type = other DNA
ggggtcccagcccacac

SEQ ID NO: 21263 - DNA, 17 bp, synthetic construct
  misc_feature 1..17: note = Oligonucleotide
  source 1..17: mol_type = other DNA
ggaggggtcccagccca

SEQ ID NO: 21264 - DNA, 17 bp, synthetic construct
  misc_feature 1..17: note = Oligonucleotide
  source 1..17: mol_type = other DNA
tcgggaggggtcccagc

SEQ ID NO: 21265 - DNA, 17 bp, synthetic construct
  misc_feature 1..17: note = Oligonucleotide
  source 1..17: mol_type = other DNA
ggatcgggaggggtccc

SEQ ID NO: 21266 - DNA, 17 bp, synthetic construct
  misc_feature 1..17: note = Oligonucleotide
  source 1..17: mol_type = other DNA
cagggatcgggaggggt

SEQ ID NO: 21267 - DNA, 17 bp, synthetic construct
  misc_feature 1..17: note = Oligonucleotide
  source 1..17: mol_type = other DNA
caccagggatcgggagg

SEQ ID NO: 21268 - DNA, 17 bp, synthetic construct
  misc_feature 1..17: note = Oligonucleotide
  source 1..17: mol_type = other DNA
tagcaccagggatcggg

SEQ ID NO: 21269 - DNA, 17 bp, synthetic construct
  misc_feature 1..17: note = Oligonucleotide
  source 1..17: mol_type = other DNA
gtctagcaccagggatc

SEQ ID NO: 21270 - DNA, 17 bp, synthetic construct
  misc_feature 1..17: note = Oligonucleotide
  source 1..17: mol_type = other DNA
gcagtctagcaccaggg

SEQ ID NO: 21271 - DNA, 17 bp, synthetic construct
  misc_feature 1..17: note = Oligonucleotide
  source 1..17: mol_type = other DNA
ctggcagtctagcacca

SEQ ID NO: 21272 - DNA, 17 bp, synthetic construct
  misc_feature 1..17: note = Oligonucleotide
  source 1..17: mol_type = other DNA
ggactggcagtctagca

SEQ ID NO: 21273 - DNA, 17 bp, synthetic construct
  misc_feature 1..17: note = Oligonucleotide
  source 1..17: mol_type = other DNA
acaggactggcagtcta

SEQ ID NO: 21274 - DNA, 17 bp, synthetic construct
  misc_feature 1..17: note = Oligonucleotide
  source 1..17: mol_type = other DNA
gggacaggactggcagt

SEQ ID NO: 21275 - DNA, 17 bp, synthetic construct
  misc_feature 1..17: note = Oligonucleotide
  source 1..17: mol_type = other DNA
caggggacaggactggc

SEQ ID NO: 21276 - DNA, 17 bp, synthetic construct
  misc_feature 1..17: note = Oligonucleotide
  source 1..17: mol_type = other DNA
ggccaggggacaggact

SEQ ID NO: 21277 - DNA, 17 bp, synthetic construct
  misc_feature 1..17: note = Oligonucleotide
  source 1..17: mol_type = other DNA
tcaggccaggggacagg

SEQ ID NO: 21278 - DNA, 17 bp, synthetic construct
  misc_feature 1..17: note = Oligonucleotide
  source 1..17: mol_type = other DNA
gcctcaggccaggggac

SEQ ID NO: 21279 - DNA, 17 bp, synthetic construct
  misc_feature 1..17: note = Oligonucleotide
  source 1..17: mol_type = other DNA
aaggcctcaggccaggg

SEQ ID NO: 21280 - DNA, 17 bp, synthetic construct
  misc_feature 1..17: note = Oligonucleotide
  source 1..17: mol_type = other DNA
tcaaaggcctcaggcca

SEQ ID NO: 21281 - DNA, 17 bp, synthetic construct
  misc_feature 1..17: note = Oligonucleotide
  source 1..17: mol_type = other DNA
gggtcaaaggcctcagg

SEQ ID NO: 21282 - DNA, 17 bp, synthetic construct
  misc_feature 1..17: note = Oligonucleotide
  source 1..17: mol_type = other DNA
caggggtcaaaggcctc

SEQ ID NO: 21283 - DNA, 17 bp, synthetic construct
  misc_feature 1..17: note = Oligonucleotide
  source 1..17: mol_type = other DNA
ggtcaggggtcaaaggc

SEQ ID NO: 21284 - DNA, 17 bp, synthetic construct
  misc_feature 1..17: note = Oligonucleotide
  source 1..17: mol_type = other DNA
aggggtcaggggtcaaa

SEQ ID NO: 21285 - DNA, 17 bp, synthetic construct
  misc_feature 1..17: note = Oligonucleotide
  source 1..17: mol_type = other DNA
gtcaggggtcaggggtc

SEQ ID NO: 21286 - DNA, 17 bp, synthetic construct
  misc_feature 1..17: note = Oligonucleotide
  source 1..17: mol_type = other DNA
gaggtcaggggtcaggg

SEQ ID NO: 21287 - DNA, 17 bp, synthetic construct
  misc_feature 1..17: note = Oligonucleotide
  source 1..17: mol_type = other DNA
cctgaggtcaggggtca

SEQ ID NO: 21288 - DNA, 17 bp, synthetic construct
  misc_feature 1..17: note = Oligonucleotide
  source 1..17: mol_type = other DNA
cagcctgaggtcagggg

SEQ ID NO: 21289 - DNA, 17 bp, synthetic construct
  misc_feature 1..17: note = Oligonucleotide
  source 1..17: mol_type = other DNA
gggcagcctgaggtcag

SEQ ID NO: 21290 - DNA, 17 bp, synthetic construct
  misc_feature 1..17: note = Oligonucleotide
  source 1..17: mol_type = other DNA
gaggggcagcctgaggt

SEQ ID NO: 21291 - DNA, 17 bp, synthetic construct
  misc_feature 1..17: note = Oligonucleotide
  source 1..17: mol_type = other DNA
gaggaggggcagcctga

SEQ ID NO: 21292 - DNA, 17 bp, synthetic construct
  misc_feature 1..17: note = Oligonucleotide
  source 1..17: mol_type = other DNA
tctgaggaggggcagcc

SEQ ID NO: 21293 - DNA, 17 bp, synthetic construct
  misc_feature 1..17: note = Oligonucleotide
  source 1..17: mol_type = other DNA
ggatctgaggaggggca

SEQ ID NO: 21294 - DNA, 17 bp, synthetic construct
  misc_feature 1..17: note = Oligonucleotide
  source 1..17: mol_type = other DNA
cagggatctgaggaggg

SEQ ID NO: 21295 - DNA, 17 bp, synthetic construct
  misc_feature 1..17: note = Oligonucleotide
  source 1..17: mol_type = other DNA
gggcagggatctgagga

SEQ ID NO: 21296 - DNA, 17 bp, synthetic construct
  misc_feature 1..17: note = Oligonucleotide
  source 1..17: mol_type = other DNA
agggggcagggatctga

SEQ ID NO: 21297 - DNA, 17 bp, synthetic construct
  misc_feature 1..17: note = Oligonucleotide
  source 1..17: mol_type = other DNA
aggagggggcagggatc

SEQ ID NO: 21298 - DNA, 17 bp, synthetic construct
  misc_feature 1..17: note = Oligonucleotide
  source 1..17: mol_type = other DNA
ggaaggagggggcaggg

SEQ ID NO: 21299 - DNA, 17 bp, synthetic construct
  misc_feature 1..17: note = Oligonucleotide
  source 1..17: mol_type = other DNA
ccgggaaggagggggca

SEQ ID NO: 21300 - DNA, 17 bp, synthetic construct
  misc_feature 1..17: note = Oligonucleotide
  source 1..17: mol_type = other DNA
acgccgggaaggagggg

SEQ ID NO: 21301 - DNA, 17 bp, synthetic construct
  misc_feature 1..17: note = Oligonucleotide
  source 1..17: mol_type = other DNA
ggaacgccgggaaggag

SEQ ID NO: 21302 - DNA, 17 bp, synthetic construct
  misc_feature 1..17: note = Oligonucleotide
  source 1..17: mol_type = other DNA
gggggaacgccgggaag

SEQ ID NO: 21303 - DNA, 17 bp, synthetic construct
  misc_feature 1..17: note = Oligonucleotide
  source 1..17: mol_type = other DNA
gctgggggaacgccggg

SEQ ID NO: 21304 - DNA, 17 bp, synthetic construct
  misc_feature 1..17: note = Oligonucleotide
  source 1..17: mol_type = other DNA
ggggctgggggaacgcc

SEQ ID NO: 21305 - DNA, 17 bp, synthetic construct
  misc_feature 1..17: note = Oligonucleotide
  source 1..17: mol_type = other DNA
ccaggggctgggggaac

SEQ ID NO: 21306 - DNA, 17 bp, synthetic construct
  misc_feature 1..17: note = Oligonucleotide
  source 1..17: mol_type = other DNA
acgccaggggctggggg

SEQ ID NO: 21307 - DNA, 17 bp, synthetic construct
  misc_feature 1..17: note = Oligonucleotide
  source 1..17: mol_type = other DNA
gccacgccaggggctgg

SEQ ID NO: 21308 - DNA, 17 bp, synthetic construct
  misc_feature 1..17: note = Oligonucleotide
  source 1..17: mol_type = other DNA
tctgccacgccaggggc

SEQ ID NO: 21309 - DNA, 17 bp, synthetic construct
  misc_feature 1..17: note = Oligonucleotide
  source 1..17: mol_type = other DNA
ggctctgccacgccagg

SEQ ID NO: 21310 - DNA, 17 bp, synthetic construct
  misc_feature 1..17: note = Oligonucleotide
  source 1..17: mol_type = other DNA
gagggctctgccacgcc

SEQ ID NO: 21311 - DNA, 17 bp, synthetic construct
  misc_feature 1..17: note = Oligonucleotide
  source 1..17: mol_type = other DNA
aaggagggctctgccac

SEQ ID NO: 21312 - DNA, 17 bp, synthetic construct
  misc_feature 1..17: note = Oligonucleotide
  source 1..17: mol_type = other DNA
gggaaggagggctctgc

SEQ ID NO: 21313 - DNA, 17 bp, synthetic construct
  misc_feature 1..17: note = Oligonucleotide
  source 1..17: mol_type = other DNA
gtagggaaggagggctc

SEQ ID NO: 21314 - DNA, 17 bp, synthetic construct
  misc_feature 1..17: note = Oligonucleotide
  source 1..17: mol_type = other DNA
ggtgtagggaaggaggg

SEQ ID NO: 21315 - DNA, 17 bp, synthetic construct
  misc_feature 1..17: note = Oligonucleotide
  source 1..17: mol_type = other DNA
ggcggtgtagggaagga

SEQ ID NO: 21316 - DNA, 17 bp, synthetic construct
  misc_feature 1..17: note = Oligonucleotide
  source 1..17: mol_type = other DNA
gctggcggtgtagggaa

SEQ ID NO: 21317 - DNA, 17 bp, synthetic construct
  misc_feature 1..17: note = Oligonucleotide
  source 1..17: mol_type = other DNA
gctgctggcggtgtagg

SEQ ID NO: 21318 - DNA, 17 bp, synthetic construct
  misc_feature 1..17: note = Oligonucleotide
  source 1..17: mol_type = other DNA
gcagctgctggcggtgt

SEQ ID NO: 21319 - DNA, 17 bp, synthetic construct
  misc_feature 1..17: note = Oligonucleotide
  source 1..17: mol_type = other DNA
caggcagctgctggcgg

SEQ ID NO: 21320 - DNA, 17 bp, synthetic construct
  misc_feature 1..17: note = Oligonucleotide
  source 1..17: mol_type = other DNA
ctccaggcagctgctgg

SEQ ID NO: 21321 - DNA, 17 bp, synthetic construct
  misc_feature 1..17: note = Oligonucleotide
  source 1..17: mol_type = other DNA
ggcctccaggcagctgc

SEQ ID NO: 21322 - DNA, 17 bp, synthetic construct
  misc_feature 1..17: note = Oligonucleotide
  source 1..17: mol_type = other DNA
cccggcctccaggcagc

SEQ ID NO: 21323 - DNA, 17 bp, synthetic construct
  misc_feature 1..17: note = Oligonucleotide
  source 1..17: mol_type = other DNA
aaccccggcctccaggc

SEQ ID NO: 21324 - DNA, 17 bp, synthetic construct
  misc_feature 1..17: note = Oligonucleotide
  source 1..17: mol_type = other DNA
ggcaaccccggcctcca

SEQ ID NO: 21325 - DNA, 17 bp, synthetic construct
  misc_feature 1..17: note = Oligonucleotide
  source 1..17: mol_type = other DNA
tatggcaaccccggcct

SEQ ID NO: 21326 - DNA, 17 bp, synthetic construct
  misc_feature 1..17: note = Oligonucleotide
  source 1..17: mol_type = other DNA
tgctatggcaaccccgg

SEQ ID NO: 21327 - DNA, 17 bp, synthetic construct
  misc_feature 1..17: note = Oligonucleotide
  source 1..17: mol_type = other DNA
agttgctatggcaaccc

SEQ ID NO: 21328 - DNA, 17 bp, synthetic construct
  misc_feature 1..17: note = Oligonucleotide
  source 1..17: mol_type = other DNA
cacagttgctatggcaa

SEQ ID NO: 21329 - DNA, 17 bp, synthetic construct
  misc_feature 1..17: note = Oligonucleotide
  source 1..17: mol_type = other DNA
cctcacagttgctatgg

SEQ ID NO: 21330 - DNA, 17 bp, synthetic construct
  misc_feature 1..17: note = Oligonucleotide
  source 1..17: mol_type = other DNA
caacctcacagttgcta

SEQ ID NO: 21331 - DNA, 17 bp, synthetic construct
  misc_feature 1..17: note = Oligonucleotide
  source 1..17: mol_type = other DNA
cgtcaacctcacagttg

SEQ ID NO: 21332 - DNA, 17 bp, synthetic construct
  misc_feature 1..17: note = Oligonucleotide
  source 1..17: mol_type = other DNA
cagcgtcaacctcacag

SEQ ID NO: 21333 - DNA, 17 bp, synthetic construct
  misc_feature 1..17: note = Oligonucleotide
  source 1..17: mol_type = other DNA
cggcagcgtcaacctca

SEQ ID NO: 21334 - DNA, 17 bp, synthetic construct
  misc_feature 1..17: note = Oligonucleotide
  source 1..17: mol_type = other DNA
gcgcggcagcgtcaacc

SEQ ID NO: 21335 - DNA, 17 bp, synthetic construct
  misc_feature 1..17: note = Oligonucleotide
  source 1..17: mol_type = other DNA
gcagcgcggcagcgtca

SEQ ID NO: 21336 - DNA, 17 bp, synthetic construct
  misc_feature 1..17: note = Oligonucleotide
  source 1..17: mol_type = other DNA
taagcagcgcggcagcg

SEQ ID NO: 21337 - DNA, 17 bp, synthetic construct
  misc_feature 1..17: note = Oligonucleotide
  source 1..17: mol_type = other DNA
caataagcagcgcggca

SEQ ID NO: 21338 - DNA, 17 bp, synthetic construct
  misc_feature 1..17: note = Oligonucleotide
  source 1..17: mol_type = other DNA
cgacaataagcagcgcg

SEQ ID NO: 21339 - DNA, 17 bp, synthetic construct
  misc_feature 1..17: note = Oligonucleotide
  source 1..17: mol_type = other DNA
ctccgacaataagcagc

SEQ ID NO: 21340 - DNA, 17 bp, synthetic construct
  misc_feature 1..17: note = Oligonucleotide
  source 1..17: mol_type = other DNA
tccctccgacaataagc

SEQ ID NO: 21341 - DNA, 17 bp, synthetic construct
  misc_feature 1..17: note = Oligonucleotide
  source 1..17: mol_type = other DNA
ccttccctccgacaata

SEQ ID NO: 21342 - DNA, 17 bp, synthetic construct
  misc_feature 1..17: note = Oligonucleotide
  source 1..17: mol_type = other DNA
cccccttccctccgaca

SEQ ID NO: 21343 - DNA, 17 bp, synthetic construct
  misc_feature 1..17: note = Oligonucleotide
  source 1..17: mol_type = other DNA
cctcccccttccctccg

SEQ ID NO: 21344 - DNA, 17 bp, synthetic construct
  misc_feature 1..17: note = Oligonucleotide
  source 1..17: mol_type = other DNA
ccgcctcccccttccct

SEQ ID NO: 21345 - DNA, 17 bp, synthetic construct
  misc_feature 1..17: note = Oligonucleotide
  source 1..17: mol_type = other DNA
gtgccgcctcccccttc

SEQ ID NO: 21346 - DNA, 17 bp, synthetic construct
  misc_feature 1..17: note = Oligonucleotide
  source 1..17: mol_type = other DNA
caggtgccgcctccccc

SEQ ID NO: 21347 - DNA, 17 bp, synthetic construct
  misc_feature 1..17: note = Oligonucleotide
  source 1..17: mol_type = other DNA
cctcaggtgccgcctcc

SEQ ID NO: 21348 - DNA, 17 bp, synthetic construct
  misc_feature 1..17: note = Oligonucleotide
  source 1..17: mol_type = other DNA
ttccctcaggtgccgcc

SEQ ID NO: 21349 - DNA, 17 bp, synthetic construct
  misc_feature 1..17: note = Oligonucleotide
  source 1..17: mol_type = other DNA
ctcttccctcaggtgcc

SEQ ID NO: 21350 - DNA, 17 bp, synthetic construct
  misc_feature 1..17: note = Oligonucleotide
  source 1..17: mol_type = other DNA
ttcctcttccctcaggt

SEQ ID NO: 21351 - DNA, 17 bp, synthetic construct
  misc_feature 1..17: note = Oligonucleotide
  source 1..17: mol_type = other DNA
cttttcctcttccctca

SEQ ID NO: 21352 - DNA, 17 bp, synthetic construct
  misc_feature 1..17: note = Oligonucleotide
  source 1..17: mol_type = other DNA
acgcttttcctcttccc

SEQ ID NO: 21353 - DNA, 17 bp, synthetic construct
  misc_feature 1..17: note = Oligonucleotide
  source 1..17: mol_type = other DNA
aagacgcttttcctctt

SEQ ID NO: 21354 - DNA, 17 bp, synthetic construct
  misc_feature 1..17: note = Oligonucleotide
  source 1..17: mol_type = other DNA
gagaagacgcttttcct

SEQ ID NO: 21355 - DNA, 17 bp, synthetic construct
  misc_feature 1..17: note = Oligonucleotide
  source 1..17: mol_type = other DNA
ggggagaagacgctttt

SEQ ID NO: 21356 - DNA, 17 bp, synthetic construct
  misc_feature 1..17: note = Oligonucleotide
  source 1..17: mol_type = other DNA
cgcggggagaagacgct

SEQ ID NO: 21357 - DNA, 17 bp, synthetic construct
  misc_feature 1..17: note = Oligonucleotide
  source 1..17: mol_type = other DNA
cgtcgcggggagaagac

SEQ ID NO: 21358 - DNA, 17 bp, synthetic construct
  misc_feature 1..17: note = Oligonucleotide
  source 1..17: mol_type = other DNA
cgtcgtcgcggggagaa

SEQ ID NO: 21359 - DNA, 17 bp, synthetic construct
  misc_feature 1..17: note = Oligonucleotide
  source 1..17: mol_type = other DNA
ccgcgtcgtcgcgggga

SEQ ID NO: 21360 - DNA, 17 bp, synthetic construct
  misc_feature 1..17: note = Oligonucleotide
  source 1..17: mol_type = other DNA
gtgccgcgtcgtcgcgg

SEQ ID NO: 21361 - DNA, 17 bp, synthetic construct
  misc_feature 1..17: note = Oligonucleotide
  source 1..17: mol_type = other DNA
gctgtgccgcgtcgtcg

SEQ ID NO: 21362 - DNA, 17 bp, synthetic construct
  misc_feature 1..17: note = Oligonucleotide
  source 1..17: mol_type = other DNA
caggctgtgccgcgtcg

SEQ ID NO: 21363 - DNA, 17 bp, synthetic construct
  misc_feature 1..17: note = Oligonucleotide
  source 1..17: mol_type = other DNA
gcccaggctgtgccgcg

SEQ ID NO: 21364 - DNA, 17 bp, synthetic construct
  misc_feature 1..17: note = Oligonucleotide
  source 1..17: mol_type = other DNA
tgggcccaggctgtgcc

SEQ ID NO: 21365 - DNA, 17 bp, synthetic construct
  misc_feature 1..17: note = Oligonucleotide
  source 1..17: mol_type = other DNA
tcctgggcccaggctgt

SEQ ID NO: 21366 - DNA, 17 bp, synthetic construct
  misc_feature 1..17: note = Oligonucleotide
  source 1..17: mol_type = other DNA
gcctcctgggcccaggc

SEQ ID NO: 21367 - DNA, 17 bp, synthetic construct
  misc_feature 1..17: note = Oligonucleotide
  source 1..17: mol_type = other DNA
aaagcctcctgggccca

SEQ ID NO: 21368 - DNA, 17 bp, synthetic construct
  misc_feature 1..17: note = Oligonucleotide
  source 1..17: mol_type = other DNA
ggcaaagcctcctgggc

SEQ ID NO: 21369 - DNA, 17 bp, synthetic construct
  misc_feature 1..17: note = Oligonucleotide
  source 1..17: mol_type = other DNA
gccggcaaagcctcctg

SEQ ID NO: 21370 - DNA, 17 bp, synthetic construct
  misc_feature 1..17: note = Oligonucleotide
  source 1..17: mol_type = other DNA
ctggccggcaaagcctc

SEQ ID NO: 21371 - DNA, 17 bp, synthetic construct
  misc_feature 1..17: note = Oligonucleotide
  source 1..17: mol_type = other DNA
ggcctggccggcaaagc

SEQ ID NO: 21372 - DNA, 17 bp, synthetic construct
  misc_feature 1..17: note = Oligonucleotide
  source 1..17: mol_type = other DNA
ctgggcctggccggcaa

SEQ ID NO: 21373 - DNA, 17 bp, synthetic construct
  misc_feature 1..17: note = Oligonucleotide
  source 1..17: mol_type = other DNA
gggctgggcctggccgg

SEQ ID NO: 21374 - DNA, 17 bp, synthetic construct
  misc_feature 1..17: note = Oligonucleotide
  source 1..17: mol_type = other DNA
cctgggctgggcctggc

SEQ ID NO: 21375 - DNA, 17 bp, synthetic construct
  misc_feature 1..17: note = Oligonucleotide
  source 1..17: mol_type = other DNA
gggcctgggctgggcct

SEQ ID NO: 21376 - DNA, 17 bp, synthetic construct
  misc_feature 1..17: note = Oligonucleotide
  source 1..17: mol_type = other DNA
cacgggcctgggctggg

SEQ ID NO: 21377 - DNA, 17 bp, synthetic construct
  misc_feature 1..17: note = Oligonucleotide
  source 1..17: mol_type = other DNA
agccacgggcctgggct

SEQ ID NO: 21378 - DNA, 17 bp, synthetic construct
  misc_feature 1..17: note = Oligonucleotide
  source 1..17: mol_type = other DNA
ccaagccacgggcctgg

SEQ ID NO: 21379 - DNA, 17 bp, synthetic construct
  misc_feature 1..17: note = Oligonucleotide
  source 1..17: mol_type = other DNA
cagccaagccacgggcc

SEQ ID NO: 21380 - DNA, 17 bp, synthetic construct
  misc_feature 1..17: note = Oligonucleotide
  source 1..17: mol_type = other DNA
ggtcagccaagccacgg

SEQ ID NO: 21381 - DNA, 17 bp, synthetic construct
  misc_feature 1..17: note = Oligonucleotide
  source 1..17: mol_type = other DNA
tgtggtcagccaagcca

SEQ ID NO: 21382 - DNA, 17 bp, synthetic construct
  misc_feature 1..17: note = Oligonucleotide
  source 1..17: mol_type = other DNA
gggtgtggtcagccaag

SEQ ID NO: 21383 - DNA, 17 bp, synthetic construct
  misc_feature 1..17: note = Oligonucleotide
  source 1..17: mol_type = other DNA
ccagggtgtggtcagcc

SEQ ID NO: 21384 - DNA, 17 bp, synthetic construct
  misc_feature 1..17: note = Oligonucleotide
  source 1..17: mol_type = other DNA
gggccagggtgtggtca

SEQ ID NO: 21385 - DNA, 17 bp, synthetic construct
  misc_feature 1..17: note = Oligonucleotide
  source 1..17: mol_type = other DNA
gtggggccagggtgtgg

SEQ ID NO: 21386 - DNA, 17 bp, synthetic construct
  misc_feature 1..17: note = Oligonucleotide
  source 1..17: mol_type = other DNA
cttgtggggccagggtg

SEQ ID NO: 21387 - DNA, 17 bp, synthetic construct
  misc_feature 1..17: note = Oligonucleotide
  source 1..17: mol_type = other DNA
ccccttgtggggccagg

SEQ ID NO: 21388 - DNA, 17 bp, synthetic construct
  misc_feature 1..17: note = Oligonucleotide
  source 1..17: mol_type = other DNA
ctgccccttgtggggcc

SEQ ID NO: 21389 - DNA, 17 bp, synthetic construct
  misc_feature 1..17: note = Oligonucleotide
  source 1..17: mol_type = other DNA
ccactgccccttgtggg

SEQ ID NO: 21390 - DNA, 17 bp, synthetic construct
  misc_feature 1..17: note = Oligonucleotide
  source 1..17: mol_type = other DNA
tggccactgccccttgt

SEQ ID NO: 21391 - DNA, 17 bp, synthetic construct
  misc_feature 1..17: note = Oligonucleotide
  source 1..17: mol_type = other DNA
gggtggccactgcccct

SEQ ID NO: 21392 - DNA, 17 bp, synthetic construct
  misc_feature 1..17: note = Oligonucleotide
  source 1..17: mol_type = other DNA
cccgggtggccactgcc

SEQ ID NO: 21393 - DNA, 17 bp, synthetic construct
  misc_feature 1..17: note = Oligonucleotide
  source 1..17: mol_type = other DNA
aggcccgggtggccact

SEQ ID NO: 21394 - DNA, 17 bp, synthetic construct
  misc_feature 1..17: note = Oligonucleotide
  source 1..17: mol_type = other DNA
cccaggcccgggtggcc

SEQ ID NO: 21395 - DNA, 17 bp, synthetic construct
  misc_feature 1..17: note = Oligonucleotide
  source 1..17: mol_type = other DNA
ccccccaggcccgggtg

SEQ ID NO: 21396 - DNA, 17 bp, synthetic construct
  misc_feature 1..17: note = Oligonucleotide
  source 1..17: mol_type = other DNA
gctccccccaggcccgg

SEQ ID NO: 21397 - DNA, 17 bp, synthetic construct
  misc_feature 1..17: note = Oligonucleotide
  source 1..17: mol_type = other DNA
agggctccccccaggcc

SEQ ID NO: 21398 - DNA, 17 bp, synthetic construct
  misc_feature 1..17: note = Oligonucleotide
  source 1..17: mol_type = other DNA
tccagggctccccccag

SEQ ID NO: 21399 - DNA, 17 bp, synthetic construct
  misc_feature 1..17: note = Oligonucleotide
  source 1..17: mol_type = other DNA
tgctccagggctccccc

SEQ ID NO: 21400 - DNA, 17 bp, synthetic construct
  misc_feature 1..17: note = Oligonucleotide
  source 1..17: mol_type = other DNA
tgctgctccagggctcc

SEQ ID NO: 21401 - DNA, 17 bp, synthetic construct
  misc_feature 1..17: note = Oligonucleotide
  source 1..17: mol_type = other DNA
tcctgctgctccagggc

SEQ ID NO: 21402 - DNA, 17 bp, synthetic construct
  misc_feature 1..17: note = Oligonucleotide
  source 1..17: mol_type = other DNA
ggctcctgctgctccag

SEQ ID NO: 21403 - DNA, 17 bp, synthetic construct
  misc_feature 1..17: note = Oligonucleotide
  source 1..17: mol_type = other DNA
cggggctcctgctgctc

SEQ ID NO: 21404 - DNA, 17 bp, synthetic construct
  misc_feature 1..17: note = Oligonucleotide
  source 1..17: mol_type = other DNA
gggcggggctcctgctg

SEQ ID NO: 21405 - DNA, 17 bp, synthetic construct
  misc_feature 1..17: note = Oligonucleotide
  source 1..17: mol_type = other DNA
tgcgggcggggctcctg

SEQ ID NO: 21406 - DNA, 17 bp, synthetic construct
  misc_feature 1..17: note = Oligonucleotide
  source 1..17: mol_type = other DNA
ccttgcgggcggggctc

SEQ ID NO: 21407 - DNA, 17 bp, synthetic construct
  misc_feature 1..17: note = Oligonucleotide
  source 1..17: mol_type = other DNA
tctccttgcgggcgggg

SEQ ID NO: 21408 - DNA, 17 bp, synthetic construct
  misc_feature 1..17: note = Oligonucleotide
  source 1..17: mol_type = other DNA
gggtctccttgcgggcg

SEQ ID NO: 21409 - DNA, 17 bp, synthetic construct
  misc_feature 1..17: note = Oligonucleotide
  source 1..17: mol_type = other DNA
gaggggtctccttgcgg

SEQ ID NO: 21410 - DNA, 17 bp, synthetic construct
  misc_feature 1..17: note = Oligonucleotide
  source 1..17: mol_type = other DNA
tgggaggggtctccttg

SEQ ID NO: 21411 - DNA, 17 bp, synthetic construct
  misc_feature 1..17: note = Oligonucleotide
  source 1..17: mol_type = other DNA
ggctgggaggggtctcc

SEQ ID NO: 21412 - DNA, 17 bp, synthetic construct
  misc_feature 1..17: note = Oligonucleotide
  source 1..17: mol_type = other DNA
gggggctgggaggggtc

SEQ ID NO: 21413 - DNA, 17 bp, synthetic construct
  misc_feature 1..17: note = Oligonucleotide
  source 1..17: mol_type = other DNA
ggtgggggctgggaggg

SEQ ID NO: 21414 - DNA, 17 bp, synthetic construct
  misc_feature 1..17: note = Oligonucleotide
  source 1..17: mol_type = other DNA
tggggtgggggctggga

SEQ ID NO: 21415 - DNA, 17 bp, synthetic construct
  misc_feature 1..17: note = Oligonucleotide
  source 1..17: mol_type = other DNA
ccatggggtgggggctg

SEQ ID NO: 21416 - DNA, 17 bp, synthetic construct
  misc_feature 1..17: note = Oligonucleotide
  source 1..17: mol_type = other DNA
gagccatggggtggggg

SEQ ID NO: 21417 - DNA, 17 bp, synthetic construct
  misc_feature 1..17: note = Oligonucleotide
  source 1..17: mol_type = other DNA
ccagagccatggggtgg

SEQ ID NO: 21418 - DNA, 17 bp, synthetic construct
  misc_feature 1..17: note = Oligonucleotide
  source 1..17: mol_type = other DNA
gcaccagagccatgggg

SEQ ID NO: 21419 - DNA, 17 bp, synthetic construct
  misc_feature 1..17: note = Oligonucleotide
  source 1..17: mol_type = other DNA
ggggcaccagagccatg

SEQ ID NO: 21420 - DNA, 17 bp, synthetic construct
  misc_feature 1..17: note = Oligonucleotide
  source 1..17: mol_type = other DNA
aagggggcaccagagcc

SEQ ID NO: 21421 - DNA, 17 bp, synthetic construct
  misc_feature 1..17: note = Oligonucleotide
  source 1..17: mol_type = other DNA
agcaagggggcaccaga

SEQ ID NO: 21422 - DNA, 17 bp, synthetic construct
  misc_feature 1..17: note = Oligonucleotide
  source 1..17: mol_type = other DNA
ctaagcaagggggcacc

SEQ ID NO: 21423 - DNA, 17 bp, synthetic construct
  misc_feature 1..17: note = Oligonucleotide
  source 1..17: mol_type = other DNA
gggctaagcaagggggc

SEQ ID NO: 21424 - DNA, 17 bp, synthetic construct
  misc_feature 1..17: note = Oligonucleotide
  source 1..17: mol_type = other DNA
cgagggctaagcaaggg

SEQ ID NO: 21425 - DNA, 17 bp, synthetic construct
  misc_feature 1..17: note = Oligonucleotide
  source 1..17: mol_type = other DNA
cttcgagggctaagcaa

SEQ ID NO: 21426 - DNA, 17 bp, synthetic construct
  misc_feature 1..17: note = Oligonucleotide
  source 1..17: mol_type = other DNA
aggcttcgagggctaag

SEQ ID NO: 21427 - DNA, 17 bp, synthetic construct
  misc_feature 1..17: note = Oligonucleotide
  source 1..17: mol_type = other DNA
tgcaggcttcgagggct

SEQ ID NO: 21428 - DNA, 17 bp, synthetic construct
  misc_feature 1..17: note = Oligonucleotide
  source 1..17: mol_type = other DNA
ccctgcaggcttcgagg

SEQ ID NO: 21429 - DNA, 17 bp, synthetic construct
  misc_feature 1..17: note = Oligonucleotide
  source 1..17: mol_type = other DNA
ccaccctgcaggcttcg

SEQ ID NO: 21430 - DNA, 17 bp, synthetic construct
  misc_feature 1..17: note = Oligonucleotide
  source 1..17: mol_type = other DNA
cacccaccctgcaggct

SEQ ID NO: 21431 - DNA, 17 bp, synthetic construct
  misc_feature 1..17: note = Oligonucleotide
  source 1..17: mol_type = other DNA
gagcacccaccctgcag

SEQ ID NO: 21432 - DNA, 17 bp, synthetic construct
  misc_feature 1..17: note = Oligonucleotide
  source 1..17: mol_type = other DNA
cctgagcacccaccctg

SEQ ID NO: 21433 - DNA, 17 bp, synthetic construct
  misc_feature 1..17: note = Oligonucleotide
  source 1..17: mol_type = other DNA
tggcctgagcacccacc

SEQ ID NO: 21434 - DNA, 17 bp, synthetic construct
  misc_feature 1..17: note = Oligonucleotide
  source 1..17: mol_type = other DNA
ctctggcctgagcaccc

SEQ ID NO: 21435 - DNA, 17 bp, synthetic construct
  misc_feature 1..17: note = Oligonucleotide
  source 1..17: mol_type = other DNA
tggctctggcctgagca

SEQ ID NO: 21436 - DNA, 17 bp, synthetic construct
  misc_feature 1..17: note = Oligonucleotide
  source 1..17: mol_type = other DNA
ggctggctctggcctga

SEQ ID NO: 21437 - DNA, 17 bp, synthetic construct
  misc_feature 1..17: note = Oligonucleotide
  source 1..17: mol_type = other DNA
gccggctggctctggcc

SEQ ID NO: 21438 - DNA, 17 bp, synthetic construct
  misc_feature 1..17: note = Oligonucleotide
  source 1..17: mol_type = other DNA
ggtgccggctggctctg

SEQ ID NO: 21439 - DNA, 17 bp, synthetic construct
  misc_feature 1..17: note = Oligonucleotide
  source 1..17: mol_type = other DNA
cacggtgccggctggct

SEQ ID NO: 21440 - DNA, 17 bp, synthetic construct
  misc_feature 1..17: note = Oligonucleotide
  source 1..17: mol_type = other DNA
ggtcacggtgccggctg

SEQ ID NO: 21441 - DNA, 17 bp, synthetic construct
  misc_feature 1..17: note = Oligonucleotide
  source 1..17: mol_type = other DNA
gggggtcacggtgccgg

SEQ ID NO: 21442 - DNA, 17 bp, synthetic construct
  misc_feature 1..17: note = Oligonucleotide
  source 1..17: mol_type = other DNA
ggcgggggtcacggtgc

SEQ ID NO: 21443 - DNA, 17 bp, synthetic construct
  misc_feature 1..17: note = Oligonucleotide
  source 1..17: mol_type = other DNA
gctggcgggggtcacgg

SEQ ID NO: 21444 - DNA, 17 bp, synthetic construct
  misc_feature 1..17: note = Oligonucleotide
  source 1..17: mol_type = other DNA
ggtgctggcgggggtca

SEQ ID NO: 21445 - DNA, 17 bp, synthetic construct
  misc_feature 1..17: note = Oligonucleotide
  source 1..17: mol_type = other DNA
aagggtgctggcggggg

SEQ ID NO: 21446 - DNA, 17 bp, synthetic construct
  misc_feature 1..17: note = Oligonucleotide
  source 1..17: mol_type = other DNA
atcaagggtgctggcgg

SEQ ID NO: 21447 - DNA, 17 bp, synthetic construct
  misc_feature 1..17: note = Oligonucleotide
  source 1..17: mol_type = other DNA
acgatcaagggtgctgg

SEQ ID NO: 21448 - DNA, 17 bp, synthetic construct
  misc_feature 1..17: note = Oligonucleotide
  source 1..17: mol_type = other DNA
gagacgatcaagggtgc

SEQ ID NO: 21449 - DNA, 17 bp, synthetic construct
  misc_feature 1..17: note = Oligonucleotide
  source 1..17: mol_type = other DNA
caggagacgatcaaggg

SEQ ID NO: 21450 - DNA, 17 bp, synthetic construct
  misc_feature 1..17: note = Oligonucleotide
  source 1..17: mol_type = other DNA
cctcaggagacgatcaa

SEQ ID NO: 21451 - DNA, 17 bp, synthetic construct
  misc_feature 1..17: note = Oligonucleotide
  source 1..17: mol_type = other DNA
gggcctcaggagacgat

SEQ ID NO: 21452 - DNA, 17 bp, synthetic construct
  misc_feature 1..17: note = Oligonucleotide
  source 1..17: mol_type = other DNA
tcagggcctcaggagac

SEQ ID NO: 21453 - DNA, 17 bp, synthetic construct
  misc_feature 1..17: note = Oligonucleotide
  source 1..17: mol_type = other DNA
gaatcagggcctcagga

SEQ ID NO: 21454 - DNA, 17 bp, synthetic construct
  misc_feature 1..17: note = Oligonucleotide
  source 1..17: mol_type = other DNA
ccagaatcagggcctca

SEQ ID NO: 21455 - DNA, 17 bp, synthetic construct
  misc_feature 1..17: note = Oligonucleotide
  source 1..17: mol_type = other DNA
cccccagaatcagggcc

SEQ ID NO: 21456 - DNA, 17 bp, synthetic construct
  misc_feature 1..17: note = Oligonucleotide
  source 1..17: mol_type = other DNA
gaacccccagaatcagg

SEQ ID NO: 21457 - DNA, 17 bp, synthetic construct
  misc_feature 1..17: note = Oligonucleotide
  source 1..17: mol_type = other DNA
tgggaacccccagaatc

SEQ ID NO: 21458 - DNA, 17 bp, synthetic construct
  misc_feature 1..17: note = Oligonucleotide
  source 1..17: mol_type = other DNA
ccctgggaacccccaga

SEQ ID NO: 21459 - DNA, 17 bp, synthetic construct
  misc_feature 1..17: note = Oligonucleotide
  source 1..17: mol_type = other DNA
gggccctgggaaccccc

SEQ ID NO: 21460 - DNA, 17 bp, synthetic construct
  misc_feature 1..17: note = Oligonucleotide
  source 1..17: mol_type = other DNA
caggggccctgggaacc

SEQ ID NO: 21461 - DNA, 17 bp, synthetic construct
  misc_feature 1..17: note = Oligonucleotide
  source 1..17: mol_type = other DNA
cctcaggggccctggga

SEQ ID NO: 21462 - DNA, 17 bp, synthetic construct
  misc_feature 1..17: note = Oligonucleotide
  source 1..17: mol_type = other DNA
gggcctcaggggccctg

SEQ ID NO: 21463 - DNA, 17 bp, synthetic construct
  misc_feature 1..17: note = Oligonucleotide
  source 1..17: mol_type = other DNA
tcagggcctcaggggcc

SEQ ID NO: 21464 - DNA, 17 bp, synthetic construct
  misc_feature 1..17: note = Oligonucleotide
  source 1..17: mol_type = other DNA
cggtcagggcctcaggg

SEQ ID NO: 21465 - DNA, 17 bp, synthetic construct
  misc_feature 1..17: note = Oligonucleotide
  source 1..17: mol_type = other DNA
gggcggtcagggcctca

SEQ ID NO: 21466 - DNA, 17 bp, synthetic construct
  misc_feature 1..17: note = Oligonucleotide
  source 1..17: mol_type = other DNA
ggcgggcggtcagggcc

SEQ ID NO: 21467 - DNA, 17 bp, synthetic construct
  misc_feature 1..17: note = Oligonucleotide
  source 1..17: mol_type = other DNA
gggggcgggcggtcagg

SEQ ID NO: 21468 - DNA, 17 bp, synthetic construct
  misc_feature 1..17: note = Oligonucleotide
  source 1..17: mol_type = other DNA
ggggggggcgggcggtc

SEQ ID NO: 21469 - DNA, 17 bp, synthetic construct
  misc_feature 1..17: note = Oligonucleotide
  source 1..17: mol_type = other DNA
gggggggggggcgggcg

SEQ ID NO: 21470 - DNA, 17 bp, synthetic construct
  misc_feature 1..17: note = Oligonucleotide
  source 1..17: mol_type = other DNA
cgggggggggggggcgg

SEQ ID NO: 21471 - DNA, 17 bp, synthetic construct
  misc_feature 1..17: note = Oligonucleotide
  source 1..17: mol_type = other DNA
gtgcggggggggggggg

SEQ ID NO: 21472 - DNA, 17 bp, synthetic construct
  misc_feature 1..17: note = Oligonucleotide
  source 1..17: mol_type = other DNA
ggagtgcgggggggggg

SEQ ID NO: 21473 - DNA, 17 bp, synthetic construct
  misc_feature 1..17: note = Oligonucleotide
  source 1..17: mol_type = other DNA
cagggagtgcggggggg

SEQ ID NO: 21474 - DNA, 17 bp, synthetic construct
  misc_feature 1..17: note = Oligonucleotide
  source 1..17: mol_type = other DNA
gctcagggagtgcgggg

SEQ ID NO: 21475 - DNA, 17 bp, synthetic construct
  misc_feature 1..17: note = Oligonucleotide
  source 1..17: mol_type = other DNA
ggagctcagggagtgcg

SEQ ID NO: 21476 - DNA, 17 bp, synthetic construct
  misc_feature 1..17: note = Oligonucleotide
  source 1..17: mol_type = other DNA
caaggagctcagggagt

SEQ ID NO: 21477 - DNA, 17 bp, synthetic construct
  misc_feature 1..17: note = Oligonucleotide
  source 1..17: mol_type = other DNA
gctcaaggagctcaggg

SEQ ID NO: 21478 - DNA, 17 bp, synthetic construct
  misc_feature 1..17: note = Oligonucleotide
  source 1..17: mol_type = other DNA
atggctcaaggagctca

SEQ ID NO: 21479 - DNA, 17 bp, synthetic construct
  misc_feature 1..17: note = Oligonucleotide
  source 1..17: mol_type = other DNA
ttcatggctcaaggagc

SEQ ID NO: 21480 - DNA, 17 bp, synthetic construct
  misc_feature 1..17: note = Oligonucleotide
  source 1..17: mol_type = other DNA
ttcttcatggctcaagg

SEQ ID NO: 21481 - DNA, 17 bp, synthetic construct
  misc_feature 1..17: note = Oligonucleotide
  source 1..17: mol_type = other DNA
aacttcttcatggctca

SEQ ID NO: 21482 - DNA, 17 bp, synthetic construct
  misc_feature 1..17: note = Oligonucleotide
  source 1..17: mol_type = other DNA
gcaaacttcttcatggc

SEQ ID NO: 21483 - DNA, 17 bp, synthetic construct
  misc_feature 1..17: note = Oligonucleotide
  source 1..17: mol_type = other DNA
gacgcaaacttcttcat

SEQ ID NO: 21484 - DNA, 17 bp, synthetic construct
  misc_feature 1..17: note = Oligonucleotide
  source 1..17: mol_type = other DNA
ctggacgcaaacttctt

SEQ ID NO: 21485 - DNA, 17 bp, synthetic construct
  misc_feature 1..17: note = Oligonucleotide
  source 1..17: mol_type = other DNA
cggctggacgcaaactt

SEQ ID NO: 21486 - DNA, 17 bp, synthetic construct
  misc_feature 1..17: note = Oligonucleotide
  source 1..17: mol_type = other DNA
ttacggctggacgcaaa

SEQ ID NO: 21487 - DNA, 17 bp, synthetic construct
  misc_feature 1..17: note = Oligonucleotide
  source 1..17: mol_type = other DNA
aggttacggctggacgc

SEQ ID NO: 21488 - DNA, 17 bp, synthetic construct
  misc_feature 1..17: note = Oligonucleotide
  source 1..17: mol_type = other DNA
ttcaggttacggctgga

SEQ ID NO: 21489 - DNA, 17 bp, synthetic construct
  misc_feature 1..17: note = Oligonucleotide
  source 1..17: mol_type = other DNA
ttgttcaggttacggct

SEQ ID NO: 21490 - DNA, 17 bp, synthetic construct
  misc_feature 1..17: note = Oligonucleotide
  source 1..17: mol_type = other DNA
atcttgttcaggttacg

SEQ ID NO: 21491 - DNA, 17 bp, synthetic construct
  misc_feature 1..17: note = Oligonucleotide
  source 1..17: mol_type = other DNA
aggatcttgttcaggtt

SEQ ID NO: 21492 - DNA, 17 bp, synthetic construct
  misc_feature 1..17: note = Oligonucleotide
  source 1..17: mol_type = other DNA
gccaggatcttgttcag

SEQ ID NO: 21493 - DNA, 17 bp, synthetic construct
  misc_feature 1..17: note = Oligonucleotide
  source 1..17: mol_type = other DNA
tgtgccaggatcttgtt

SEQ ID NO: 21494 - DNA, 17 bp, synthetic construct
  misc_feature 1..17: note = Oligonucleotide
  source 1..17: mol_type = other DNA
cactgtgccaggatctt

SEQ ID NO: 21495 - DNA, 17 bp, synthetic construct
  misc_feature 1..17: note = Oligonucleotide
  source 1..17: mol_type = other DNA
tcgcactgtgccaggat

SEQ ID NO: 21496 - DNA, 17 bp, synthetic construct
  misc_feature 1..17: note = Oligonucleotide
  source 1..17: mol_type = other DNA
gagtcgcactgtgccag

SEQ ID NO: 21497 - DNA, 17 bp, synthetic construct
  misc_feature 1..17: note = Oligonucleotide
  source 1..17: mol_type = other DNA
gatgagtcgcactgtgc

SEQ ID NO: 21498 - DNA, 17 bp, synthetic construct
  misc_feature 1..17: note = Oligonucleotide
  source 1..17: mol_type = other DNA
gaggatgagtcgcactg

SEQ ID NO: 21499 - DNA, 17 bp, synthetic construct
  misc_feature 1..17: note = Oligonucleotide
  source 1..17: mol_type = other DNA
cgcgaggatgagtcgca

SEQ ID NO: 21500 - DNA, 17 bp, synthetic construct
  misc_feature 1..17: note = Oligonucleotide
  source 1..17: mol_type = other DNA
tcccgcgaggatgagtc

SEQ ID NO: 21501 - DNA, 17 bp, synthetic construct
  misc_feature 1..17: note = Oligonucleotide
  source 1..17: mol_type = other DNA
tactcccgcgaggatga

SEQ ID NO: 21502 - DNA, 17 bp, synthetic construct
  misc_feature 1..17: note = Oligonucleotide
  source 1..17: mol_type = other DNA
tcgtactcccgcgagga

SEQ ID NO: 21503 - DNA, 17 bp, synthetic construct
  misc_feature 1..17: note = Oligonucleotide
  source 1..17: mol_type = other DNA
tcctcgtactcccgcga

SEQ ID NO: 21504 - DNA, 17 bp, synthetic construct
  misc_feature 1..17: note = Oligonucleotide
  source 1..17: mol_type = other DNA
atctcctcgtactcccg

SEQ ID NO: 21505 - DNA, 17 bp, synthetic construct
  misc_feature 1..17: note = Oligonucleotide
  source 1..17: mol_type = other DNA
tggatctcctcgtactc

SEQ ID NO: 21506 - DNA, 17 bp, synthetic construct
  misc_feature 1..17: note = Oligonucleotide
  source 1..17: mol_type = other DNA
gcctggatctcctcgta

SEQ ID NO: 21507 - DNA, 17 bp, synthetic construct
  misc_feature 1..17: note = Oligonucleotide
  source 1..17: mol_type = other DNA
accgcctggatctcctc

SEQ ID NO: 21508 - DNA, 17 bp, synthetic construct
  misc_feature 1..17: note = Oligonucleotide
  source 1..17: mol_type = other DNA
tccaccgcctggatctc

SEQ ID NO: 21509 - DNA, 17 bp, synthetic construct
  misc_feature 1..17: note = Oligonucleotide
  source 1..17: mol_type = other DNA
cgctccaccgcctggat

SEQ ID NO: 21510 - DNA, 17 bp, synthetic construct
  misc_feature 1..17: note = Oligonucleotide
  source 1..17: mol_type = other DNA
ttgcgctccaccgcctg

SEQ ID NO: 21511 - DNA, 17 bp, synthetic construct
  misc_feature 1..17: note = Oligonucleotide
  source 1..17: mol_type = other DNA
cacttgcgctccaccgc

SEQ ID NO: 21512 - DNA, 17 bp, synthetic construct
  misc_feature 1..17: note = Oligonucleotide
  source 1..17: mol_type = other DNA
tgccacttgcgctccac

SEQ ID NO: 21513 - DNA, 17 bp, synthetic construct
  misc_feature 1..17: note = Oligonucleotide
  source 1..17: mol_type = other DNA
aggtgccacttgcgctc

SEQ ID NO: 21514 - DNA, 17 bp, synthetic construct
  misc_feature 1..17: note = Oligonucleotide
  source 1..17: mol_type = other DNA
tgcaggtgccacttgcg

SEQ ID NO: 21515 - DNA, 17 bp, synthetic construct
  misc_feature 1..17: note = Oligonucleotide
  source 1..17: mol_type = other DNA
aggtgcaggtgccactt

SEQ ID NO: 21516 - DNA, 17 bp, synthetic construct
  misc_feature 1..17: note = Oligonucleotide
  source 1..17: mol_type = other DNA
gccaggtgcaggtgcca

SEQ ID NO: 21517 - DNA, 17 bp, synthetic construct
  misc_feature 1..17: note = Oligonucleotide
  source 1..17: mol_type = other DNA
gtggccaggtgcaggtg

SEQ ID NO: 21518 - DNA, 17 bp, synthetic construct
  misc_feature 1..17: note = Oligonucleotide
  source 1..17: mol_type = other DNA
ggcgtggccaggtgcag

SEQ ID NO: 21519 - DNA, 17 bp, synthetic construct
  misc_feature 1..17: note = Oligonucleotide
  source 1..17: mol_type = other DNA
cgcggcgtggccaggtg

SEQ ID NO: 21520 - DNA, 17 bp, synthetic construct
  misc_feature 1..17: note = Oligonucleotide
  source 1..17: mol_type = other DNA
cggcgcggcgtggccag

SEQ ID NO: 21521 - DNA, 17 bp, synthetic construct
  misc_feature 1..17: note = Oligonucleotide
  source 1..17: mol_type = other DNA
aggcggcgcggcgtggc

SEQ ID NO: 21522 - DNA, 17 bp, synthetic construct
  misc_feature 1..17: note = Oligonucleotide
  source 1..17: mol_type = other DNA
agcaggcggcgcggcgt

SEQ ID NO: 21523 - DNA, 17 bp, synthetic construct
  misc_feature 1..17: note = Oligonucleotide
  source 1..17: mol_type = other DNA
agcagcaggcggcgcgg

SEQ ID NO: 21524 - DNA, 17 bp, synthetic construct
  misc_feature 1..17: note = Oligonucleotide
  source 1..17: mol_type = other DNA
tccagcagcaggcggcg

SEQ ID NO: 21525 - DNA, 17 bp, synthetic construct
  misc_feature 1..17: note = Oligonucleotide
  source 1..17: mol_type = other DNA
ctgtccagcagcaggcg

SEQ ID NO: 21526 - DNA, 17 bp, synthetic construct
  misc_feature 1..17: note = Oligonucleotide
  source 1..17: mol_type = other DNA
ctcctgtccagcagcag

SEQ ID NO: 21527 - DNA, 17 bp, synthetic construct
  misc_feature 1..17: note = Oligonucleotide
  source 1..17: mol_type = other DNA
gacctcctgtccagcag

SEQ ID NO: 21528 - DNA, 17 bp, synthetic construct
  misc_feature 1..17: note = Oligonucleotide
  source 1..17: mol_type = other DNA
ttggacctcctgtccag

SEQ ID NO: 21529 - DNA, 17 bp, synthetic construct
  misc_feature 1..17: note = Oligonucleotide
  source 1..17: mol_type = other DNA
gccttggacctcctgtc

SEQ ID NO: 21530 - DNA, 17 bp, synthetic construct
  misc_feature 1..17: note = Oligonucleotide
  source 1..17: mol_type = other DNA
gaggccttggacctcct

SEQ ID NO: 21531 - DNA, 17 bp, synthetic construct
  misc_feature 1..17: note = Oligonucleotide
  source 1..17: mol_type = other DNA
agggaggccttggacct

SEQ ID NO: 21532 - DNA, 17 bp, synthetic construct
  misc_feature 1..17: note = Oligonucleotide
  source 1..17: mol_type = other DNA
aagagggaggccttgga

SEQ ID NO: 21533 - DNA, 17 bp, synthetic construct
  misc_feature 1..17: note = Oligonucleotide
  source 1..17: mol_type = other DNA
aagaagagggaggcctt

SEQ ID NO: 21534 - DNA, 17 bp, synthetic construct
  misc_feature 1..17: note = Oligonucleotide
  source 1..17: mol_type = other DNA
gcaaagaagagggaggc

SEQ ID NO: 21535 - DNA, 17 bp, synthetic construct
  misc_feature 1..17: note = Oligonucleotide
  source 1..17: mol_type = other DNA
gctgcaaagaagaggga

SEQ ID NO: 21536 - DNA, 17 bp, synthetic construct
  misc_feature 1..17: note = Oligonucleotide
  source 1..17: mol_type = other DNA
ggggctgcaaagaagag

SEQ ID NO: 21537 - DNA, 17 bp, synthetic construct
  misc_feature 1..17: note = Oligonucleotide
  source 1..17: mol_type = other DNA
ggtggggctgcaaagaa

SEQ ID NO: 21538 - DNA, 17 bp, synthetic construct
  misc_feature 1..17: note = Oligonucleotide
  source 1..17: mol_type = other DNA
ggcggtggggctgcaaa

SEQ ID NO: 21539 - DNA, 17 bp, synthetic construct
  misc_feature 1..17: note = Oligonucleotide
  source 1..17: mol_type = other DNA
gggggcggtggggctgc

SEQ ID NO: 21540 - DNA, 17 bp, synthetic construct
  misc_feature 1..17: note = Oligonucleotide
  source 1..17: mol_type = other DNA
ttggggggcggtggggc

SEQ ID NO: 21541 - DNA, 17 bp, synthetic construct
  misc_feature 1..17: note = Oligonucleotide
  source 1..17: mol_type = other DNA
ctcttggggggcggtgg

SEQ ID NO: 21542 - DNA, 17 bp, synthetic construct
  misc_feature 1..17: note = Oligonucleotide
  source 1..17: mol_type = other DNA
gccctcttggggggcgg

SEQ ID NO: 21543 - DNA, 17 bp, synthetic construct
  misc_feature 1..17: note = Oligonucleotide
  source 1..17: mol_type = other DNA
ggggccctcttgggggg

SEQ ID NO: 21544 - DNA, 17 bp, synthetic construct
  misc_feature 1..17: note = Oligonucleotide
  source 1..17: mol_type = other DNA
ctgggggccctcttggg

SEQ ID NO: 21545 - DNA, 17 bp, synthetic construct
  misc_feature 1..17: note = Oligonucleotide
  source 1..17: mol_type = other DNA
gtgctgggggccctctt

SEQ ID NO: 21546 - DNA, 17 bp, synthetic construct
  misc_feature 1..17: note = Oligonucleotide
  source 1..17: mol_type = other DNA
gtggtgctgggggccct

SEQ ID NO: 21547 - DNA, 17 bp, synthetic construct
  misc_feature 1..17: note = Oligonucleotide
  source 1..17: mol_type = other DNA
agtgtggtgctgggggc

SEQ ID NO: 21548 - DNA, 17 bp, synthetic construct
  misc_feature 1..17: note = Oligonucleotide
  source 1..17: mol_type = other DNA
gtcagtgtggtgctggg

SEQ ID NO: 21549 - DNA, 17 bp, synthetic construct
  misc_feature 1..17: note = Oligonucleotide
  source 1..17: mol_type = other DNA
agggtcagtgtggtgct

SEQ ID NO: 21550 - DNA, 17 bp, synthetic construct
  misc_feature 1..17: note = Oligonucleotide
  source 1..17: mol_type = other DNA
cgcagggtcagtgtggt

SEQ ID NO: 21551 - DNA, 17 bp, synthetic construct
  misc_feature 1..17: note = Oligonucleotide
  source 1..17: mol_type = other DNA
gagcgcagggtcagtgt

SEQ ID NO: 21552 - DNA, 17 bp, synthetic construct
  misc_feature 1..17: note = Oligonucleotide
  source 1..17: mol_type = other DNA
ttggagcgcagggtcag

SEQ ID NO: 21553 - DNA, 17 bp, synthetic construct
  misc_feature 1..17: note = Oligonucleotide
  source 1..17: mol_type = other DNA
gacttggagcgcagggt

SEQ ID NO: 21554 - DNA, 17 bp, synthetic construct
  misc_feature 1..17: note = Oligonucleotide
  source 1..17: mol_type = other DNA
atggacttggagcgcag

SEQ ID NO: 21555 - DNA, 17 bp, synthetic construct
  misc_feature 1..17: note = Oligonucleotide
  source 1..17: mol_type = other DNA
gtcatggacttggagcg

SEQ ID NO: 21556 - DNA, 17 bp, synthetic construct
  misc_feature 1..17: note = Oligonucleotide
  source 1..17: mol_type = other DNA
gctgtcatggacttgga

SEQ ID NO: 21557 - DNA, 17 bp, synthetic construct
  misc_feature 1..17: note = Oligonucleotide
  source 1..17: mol_type = other DNA
tcagctgtcatggactt

SEQ ID NO: 21558 - DNA, 17 bp, synthetic construct
  misc_feature 1..17: note = Oligonucleotide
  source 1..17: mol_type = other DNA
agctcagctgtcatgga

SEQ ID NO: 21559 - DNA, 17 bp, synthetic construct
  misc_feature 1..17: note = Oligonucleotide
  source 1..17: mol_type = other DNA
tcgagctcagctgtcat

SEQ ID NO: 21560 - DNA, 17 bp, synthetic construct
  misc_feature 1..17: note = Oligonucleotide
  source 1..17: mol_type = other DNA
tcctcgagctcagctgt

SEQ ID NO: 21561 - DNA, 17 bp, synthetic construct
  misc_feature 1..17: note = Oligonucleotide
  source 1..17: mol_type = other DNA
agttcctcgagctcagc

SEQ ID NO: 21562 - DNA, 17 bp, synthetic construct
  misc_feature 1..17: note = Oligonucleotide
  source 1..17: mol_type = other DNA
ccaagttcctcgagctc

SEQ ID NO: 21563 - DNA, 17 bp, synthetic construct
  misc_feature 1..17: note = Oligonucleotide
  source 1..17: mol_type = other DNA
tcaccaagttcctcgag

SEQ ID NO: 21564 - DNA, 17 bp, synthetic construct
  misc_feature 1..17: note = Oligonucleotide
  source 1..17: mol_type = other DNA
cactcaccaagttcctc

SEQ ID NO: 21565 - DNA, 17 bp, synthetic construct
  misc_feature 1..17: note = Oligonucleotide
  source 1..17: mol_type = other DNA
cgccactcaccaagttc

SEQ ID NO: 21566 - DNA, 17 bp, synthetic construct
  misc_feature 1..17: note = Oligonucleotide
  source 1..17: mol_type = other DNA
ccccgccactcaccaag

SEQ ID NO: 21567 - DNA, 17 bp, synthetic construct
  misc_feature 1..17: note = Oligonucleotide
  source 1..17: mol_type = other DNA
cacccccgccactcacc

SEQ ID NO: 21568 - DNA, 17 bp, synthetic construct
  misc_feature 1..17: note = Oligonucleotide
  source 1..17: mol_type = other DNA
cgccacccccgccactc

SEQ ID NO: 21569 - DNA, 17 bp, synthetic construct
  misc_feature 1..17: note = Oligonucleotide
  source 1..17: mol_type = other DNA
caccgccacccccgcca

SEQ ID NO: 21570 - DNA, 17 bp, synthetic construct
  misc_feature 1..17: note = Oligonucleotide
  source 1..17: mol_type = other DNA
ctccaccgccacccccg

SEQ ID NO: 21571 - DNA, 17 bp, synthetic construct
  misc_feature 1..17: note = Oligonucleotide
  source 1..17: mol_type = other DNA
cacctccaccgccaccc

SEQ ID NO: 21572 - DNA, 17 bp, synthetic construct
  misc_feature 1..17: note = Oligonucleotide
  source 1..17: mol_type = other DNA
gtccacctccaccgcca

SEQ ID NO: 21573 - DNA, 17 bp, synthetic construct
  misc_feature 1..17: note = Oligonucleotide
  source 1..17: mol_type = other DNA
tgcgtccacctccaccg

SEQ ID NO: 21574 - DNA, 17 bp, synthetic construct
  misc_feature 1..17: note = Oligonucleotide
  source 1..17: mol_type = other DNA
acctgcgtccacctcca

SEQ ID NO: 21575 - DNA, 17 bp, synthetic construct
  misc_feature 1..17: note = Oligonucleotide
  source 1..17: mol_type = other DNA
tccacctgcgtccacct

SEQ ID NO: 21576 - DNA, 17 bp, synthetic construct
  misc_feature 1..17: note = Oligonucleotide
  source 1..17: mol_type = other DNA
ccgtccacctgcgtcca

SEQ ID NO: 21577 - DNA, 17 bp, synthetic construct
  misc_feature 1..17: note = Oligonucleotide
  source 1..17: mol_type = other DNA
ggaccgtccacctgcgt

SEQ ID NO: 21578 - DNA, 17 bp, synthetic construct
  misc_feature 1..17: note = Oligonucleotide
  source 1..17: mol_type = other DNA
catggaccgtccacctg

SEQ ID NO: 21579 - DNA, 17 bp, synthetic construct
  misc_feature 1..17: note = Oligonucleotide
  source 1..17: mol_type = other DNA
catcatggaccgtccac

SEQ ID NO: 21580 - DNA, 17 bp, synthetic construct
  misc_feature 1..17: note = Oligonucleotide
  source 1..17: mol_type = other DNA
gcccatcatggaccgtc

SEQ ID NO: 21581 - DNA, 17 bp, synthetic construct
  misc_feature 1..17: note = Oligonucleotide
  source 1..17: mol_type = other DNA
tctgcccatcatggacc

SEQ ID NO: 21582 - DNA, 17 bp, synthetic construct
  misc_feature 1..17: note = Oligonucleotide
  source 1..17: mol_type = other DNA
ctgtctgcccatcatgg

SEQ ID NO: 21583 - DNA, 17 bp, synthetic construct
  misc_feature 1..17: note = Oligonucleotide
  source 1..17: mol_type = other DNA
gccctgtctgcccatca

SEQ ID NO: 21584 - DNA, 17 bp, synthetic construct
  misc_feature 1..17: note = Oligonucleotide
  source 1..17: mol_type = other DNA
ccggccctgtctgccca

SEQ ID NO: 21585 - DNA, 17 bp, synthetic construct
  misc_feature 1..17: note = Oligonucleotide
  source 1..17: mol_type = other DNA
ctcccggccctgtctgc

SEQ ID NO: 21586 - DNA, 17 bp, synthetic construct
  misc_feature 1..17: note = Oligonucleotide
  source 1..17: mol_type = other DNA
tgtctcccggccctgtc

SEQ ID NO: 21587 - DNA, 17 bp, synthetic construct
  misc_feature 1..17: note = Oligonucleotide
  source 1..17: mol_type = other DNA
ctgtgtctcccggccct

SEQ ID NO: 21588 - DNA, 17 bp, synthetic construct
  misc_feature 1..17: note = Oligonucleotide
  source 1..17: mol_type = other DNA
cacctgtgtctcccggc

SEQ ID NO: 21589 - DNA, 17 bp, synthetic construct
  misc_feature 1..17: note = Oligonucleotide
  source 1..17: mol_type = other DNA
taccacctgtgtctccc

SEQ ID NO: 21590 - DNA, 17 bp, synthetic construct
  misc_feature 1..17: note = Oligonucleotide
  source 1..17: mol_type = other DNA
ccgtaccacctgtgtct

SEQ ID NO: 21591 - DNA, 17 bp, synthetic construct
  misc_feature 1..17: note = Oligonucleotide
  source 1..17: mol_type = other DNA
ctcccgtaccacctgtg

SEQ ID NO: 21592 - DNA, 17 bp, synthetic construct
  misc_feature 1..17: note = Oligonucleotide
  source 1..17: mol_type = other DNA
gccctcccgtaccacct

SEQ ID NO: 21593 - DNA, 17 bp, synthetic construct
  misc_feature 1..17: note = Oligonucleotide
  source 1..17: mol_type = other DNA
cctgccctcccgtacca

SEQ ID NO: 21594 - DNA, 17 bp, synthetic construct
  misc_feature 1..17: note = Oligonucleotide
  source 1..17: mol_type = other DNA
ccgcctgccctcccgta

SEQ ID NO: 21595 - DNA, 17 bp, synthetic construct
  misc_feature 1..17: note = Oligonucleotide
  source 1..17: mol_type = other DNA
ggaccgcctgccctccc

SEQ ID NO: 21596 - DNA, 17 bp, synthetic construct
  misc_feature 1..17: note = Oligonucleotide
  source 1..17: mol_type = other DNA
gctggaccgcctgccct

SEQ ID NO: 21597 - DNA, 17 bp, synthetic construct
  misc_feature 1..17: note = Oligonucleotide
  source 1..17: mol_type = other DNA
ctggctggaccgcctgc

SEQ ID NO: 21598 - DNA, 17 bp, synthetic construct
  misc_feature 1..17: note = Oligonucleotide
  source 1..17: mol_type = other DNA
cctctggctggaccgcc

SEQ ID NO: 21599 - DNA, 17 bp, synthetic construct
  misc_feature 1..17: note = Oligonucleotide
  source 1..17: mol_type = other DNA
taccctctggctggacc

SEQ ID NO: 21600 - DNA, 17 bp, synthetic construct
  misc_feature 1..17: note = Oligonucleotide
  source 1..17: mol_type = other DNA
tcctaccctctggctgg

SEQ ID NO: 21601 - DNA, 17 bp, synthetic construct
  misc_feature 1..17: note = Oligonucleotide
  source 1..17: mol_type = other DNA
ccttcctaccctctggc

SEQ ID NO: 21602 - DNA, 17 bp, synthetic construct
  misc_feature 1..17: note = Oligonucleotide
  source 1..17: mol_type = other DNA
tgtccttcctaccctct

SEQ ID NO: 21603 - DNA, 17 bp, synthetic construct
  misc_feature 1..17: note = Oligonucleotide
  source 1..17: mol_type = other DNA
acctgtccttcctaccc

SEQ ID NO: 21604 - DNA, 17 bp, synthetic construct
  misc_feature 1..17: note = Oligonucleotide
  source 1..17: mol_type = other DNA
cccacctgtccttccta

SEQ ID NO: 21605 - DNA, 17 bp, synthetic construct
  misc_feature 1..17: note = Oligonucleotide
  source 1..17: mol_type = other DNA
gtacccacctgtccttc

SEQ ID NO: 21606 - DNA, 17 bp, synthetic construct
  misc_feature 1..17: note = Oligonucleotide
  source 1..17: mol_type = other DNA
cttgtacccacctgtcc

SEQ ID NO: 21607 - DNA, 17 bp, synthetic construct
  misc_feature 1..17: note = Oligonucleotide
  source 1..17: mol_type = other DNA
gctcttgtacccacctg

SEQ ID NO: 21608 - DNA, 17 bp, synthetic construct
  misc_feature 1..17: note = Oligonucleotide
  source 1..17: mol_type = other DNA
cctgctcttgtacccac

SEQ ID NO: 21609 - DNA, 17 bp, synthetic construct
  misc_feature 1..17: note = Oligonucleotide
  source 1..17: mol_type = other DNA
tgacctgctcttgtacc

SEQ ID NO: 21610 - DNA, 17 bp, synthetic construct
  misc_feature 1..17: note = Oligonucleotide
  source 1..17: mol_type = other DNA
ctctgacctgctcttgt

SEQ ID NO: 21611 - DNA, 17 bp, synthetic construct
  misc_feature 1..17: note = Oligonucleotide
  source 1..17: mol_type = other DNA
cacctctgacctgctct

SEQ ID NO: 21612 - DNA, 17 bp, synthetic construct
  misc_feature 1..17: note = Oligonucleotide
  source 1..17: mol_type = other DNA
attcacctctgacctgc

SEQ ID NO: 21613 - DNA, 17 bp, synthetic construct
  misc_feature 1..17: note = Oligonucleotide
  source 1..17: mol_type = other DNA
cccattcacctctgacc

SEQ ID NO: 21614 - DNA, 17 bp, synthetic construct
  misc_feature 1..17: note = Oligonucleotide
  source 1..17: mol_type = other DNA
ccacccattcacctctg

SEQ ID NO: 21615 - DNA, 17 bp, synthetic construct
  misc_feature 1..17: note = Oligonucleotide
  source 1..17: mol_type = other DNA
cacccacccattcacct

SEQ ID NO: 21616 - DNA, 17 bp, synthetic construct
  misc_feature 1..17: note = Oligonucleotide
  source 1..17: mol_type = other DNA
cagcacccacccattca

SEQ ID NO: 21617 - DNA, 17 bp, synthetic construct
  misc_feature 1..17: note = Oligonucleotide
  source 1..17: mol_type = other DNA
cgccagcacccacccat

SEQ ID NO: 21618 - DNA, 17 bp, synthetic construct
  misc_feature 1..17: note = Oligonucleotide
  source 1..17: mol_type = other DNA
tcgcgccagcacccacc

SEQ ID NO: 21619 - DNA, 17 bp, synthetic construct
  misc_feature 1..17: note = Oligonucleotide
  source 1..17: mol_type = other DNA
ccatcgcgccagcaccc

SEQ ID NO: 21620 - DNA, 17 bp, synthetic construct
  misc_feature 1..17: note = Oligonucleotide
  source 1..17: mol_type = other DNA
tccccatcgcgccagca

SEQ ID NO: 21621 - DNA, 17 bp, synthetic construct
  misc_feature 1..17: note = Oligonucleotide
  source 1..17: mol_type = other DNA
atttccccatcgcgcca

SEQ ID NO: 21622 - DNA, 17 bp, synthetic construct
  misc_feature 1..17: note = Oligonucleotide
  source 1..17: mol_type = other DNA
caaatttccccatcgcg

SEQ ID NO: 21623 - DNA, 17 bp, synthetic construct
  misc_feature 1..17: note = Oligonucleotide
  source 1..17: mol_type = other DNA
caccaaatttccccatc

SEQ ID NO: 21624 - DNA, 17 bp, synthetic construct
  misc_feature 1..17: note = Oligonucleotide
  source 1..17: mol_type = other DNA
aagcaccaaatttcccc

SEQ ID NO: 21625 - DNA, 17 bp, synthetic construct
  misc_feature 1..17: note = Oligonucleotide
  source 1..17: mol_type = other DNA
cacaagcaccaaatttc

SEQ ID NO: 21626 - DNA, 17 bp, synthetic construct
  misc_feature 1..17: note = Oligonucleotide
  source 1..17: mol_type = other DNA
ccccacaagcaccaaat

SEQ ID NO: 21627 - DNA, 17 bp, synthetic construct
  misc_feature 1..17: note = Oligonucleotide
  source 1..17: mol_type = other DNA
tcaccccacaagcacca

SEQ ID NO: 21628 - DNA, 17 bp, synthetic construct
  misc_feature 1..17: note = Oligonucleotide
  source 1..17: mol_type = other DNA
tcctcaccccacaagca

SEQ ID NO: 21629 - DNA, 17 bp, synthetic construct
  misc_feature 1..17: note = Oligonucleotide
  source 1..17: mol_type = other DNA
ctctcctcaccccacaa

SEQ ID NO: 21630 - DNA, 17 bp, synthetic construct
  misc_feature 1..17: note = Oligonucleotide
  source 1..17: mol_type = other DNA
accctctcctcacccca

SEQ ID NO: 21631 - DNA, 17 bp, synthetic construct
  misc_feature 1..17: note = Oligonucleotide
  source 1..17: mol_type = other DNA
gccaccctctcctcacc

SEQ ID NO: 21632 - DNA, 17 bp, synthetic construct
  misc_feature 1..17: note = Oligonucleotide
  source 1..17: mol_type = other DNA
catgccaccctctcctc

SEQ ID NO: 21633 - DNA, 17 bp, synthetic construct
  misc_feature 1..17: note = Oligonucleotide
  source 1..17: mol_type = other DNA
ccacatgccaccctctc

SEQ ID NO: 21634 - DNA, 17 bp, synthetic construct
  misc_feature 1..17: note = Oligonucleotide
  source 1..17: mol_type = other DNA
cttccacatgccaccct

SEQ ID NO: 21635 - DNA, 17 bp, synthetic construct
  misc_feature 1..17: note = Oligonucleotide
  source 1..17: mol_type = other DNA
ccccttccacatgccac

SEQ ID NO: 21636 - DNA, 17 bp, synthetic construct
  misc_feature 1..17: note = Oligonucleotide
  source 1..17: mol_type = other DNA
tcaccccttccacatgc

SEQ ID NO: 21637 - DNA, 17 bp, synthetic construct
  misc_feature 1..17: note = Oligonucleotide
  source 1..17: mol_type = other DNA
atctcaccccttccaca

SEQ ID NO: 21638 - DNA, 17 bp, synthetic construct
  misc_feature 1..17: note = Oligonucleotide
  source 1..17: mol_type = other DNA
cacatctcaccccttcc

SEQ ID NO: 21639 - DNA, 17 bp, synthetic construct
  misc_feature 1..17: note = Oligonucleotide
  source 1..17: mol_type = other DNA
tctcacatctcacccct

SEQ ID NO: 21640 - DNA, 17 bp, synthetic construct
  misc_feature 1..17: note = Oligonucleotide
  source 1..17: mol_type = other DNA
gcctctcacatctcacc

SEQ ID NO: 21641 - DNA, 17 bp, synthetic construct
  misc_feature 1..17: note = Oligonucleotide
  source 1..17: mol_type = other DNA
ccagcctctcacatctc

SEQ ID NO: 21642 - DNA, 17 bp, synthetic construct
  misc_feature 1..17: note = Oligonucleotide
  source 1..17: mol_type = other DNA
tccccagcctctcacat

SEQ ID NO: 21643 - DNA, 17 bp, synthetic construct
  misc_feature 1..17: note = Oligonucleotide
  source 1..17: mol_type = other DNA
ccatccccagcctctca

SEQ ID NO: 21644 - DNA, 17 bp, synthetic construct
  misc_feature 1..17: note = Oligonucleotide
  source 1..17: mol_type = other DNA
tgtccatccccagcctc

SEQ ID NO: 21645 - DNA, 17 bp, synthetic construct
  misc_feature 1..17: note = Oligonucleotide
  source 1..17: mol_type = other DNA
cactgtccatccccagc

SEQ ID NO: 21646 - DNA, 17 bp, synthetic construct
  misc_feature 1..17: note = Oligonucleotide
  source 1..17: mol_type = other DNA
ccccactgtccatcccc

SEQ ID NO: 21647 - DNA, 17 bp, synthetic construct
  misc_feature 1..17: note = Oligonucleotide
  source 1..17: mol_type = other DNA
acaccccactgtccatc

SEQ ID NO: 21648 - DNA, 17 bp, synthetic construct
  misc_feature 1..17: note = Oligonucleotide
  source 1..17: mol_type = other DNA
tggacaccccactgtcc

SEQ ID NO: 21649 - DNA, 17 bp, synthetic construct
  misc_feature 1..17: note = Oligonucleotide
  source 1..17: mol_type = other DNA
tcctggacaccccactg

SEQ ID NO: 21650 - DNA, 17 bp, synthetic construct
  misc_feature 1..17: note = Oligonucleotide
  source 1..17: mol_type = other DNA
ctgtcctggacacccca

SEQ ID NO: 21651 - DNA, 17 bp, synthetic construct
  misc_feature 1..17: note = Oligonucleotide
  source 1..17: mol_type = other DNA
catctgtcctggacacc

SEQ ID NO: 21652 - DNA, 17 bp, synthetic construct
  misc_feature 1..17: note = Oligonucleotide
  source 1..17: mol_type = other DNA
cgtcatctgtcctggac

SEQ ID NO: 21653 - DNA, 17 bp, synthetic construct
  misc_feature 1..17: note = Oligonucleotide
  source 1..17: mol_type = other DNA
ccccgtcatctgtcctg

SEQ ID NO: 21654 - DNA, 17 bp, synthetic construct
  misc_feature 1..17: note = Oligonucleotide
  source 1..17: mol_type = other DNA
gctccccgtcatctgtc

SEQ ID NO: 21655 - DNA, 17 bp, synthetic construct
  misc_feature 1..17: note = Oligonucleotide
  source 1..17: mol_type = other DNA
cctgctccccgtcatct

SEQ ID NO: 21656 - DNA, 17 bp, synthetic construct
  misc_feature 1..17: note = Oligonucleotide
  source 1..17: mol_type = other DNA
ggccctgctccccgtca

SEQ ID NO: 21657 - DNA, 17 bp, synthetic construct
  misc_feature 1..17: note = Oligonucleotide
  source 1..17: mol_type = other DNA
ccaggccctgctccccg

SEQ ID NO: 21658 - DNA, 17 bp, synthetic construct
  misc_feature 1..17: note = Oligonucleotide
  source 1..17: mol_type = other DNA
gggccaggccctgctcc

SEQ ID NO: 21659 - DNA, 17 bp, synthetic construct
  misc_feature 1..17: note = Oligonucleotide
  source 1..17: mol_type = other DNA
ggtgggccaggccctgc

SEQ ID NO: 21660 - DNA, 17 bp, synthetic construct
  misc_feature 1..17: note = Oligonucleotide
  source 1..17: mol_type = other DNA
actggtgggccaggccc

SEQ ID NO: 21661 - DNA, 17 bp, synthetic construct
  misc_feature 1..17: note = Oligonucleotide
  source 1..17: mol_type = other DNA
catactggtgggccagg

SEQ ID NO: 21662 - DNA, 17 bp, synthetic construct
  misc_feature 1..17: note = Oligonucleotide
  source 1..17: mol_type = other DNA
aaacatactggtgggcc

SEQ ID NO: 21663 - DNA, 17 bp, synthetic construct
  misc_feature 1..17: note = Oligonucleotide
  source 1..17: mol_type = other DNA
tgcaaacatactggtgg

SEQ ID NO: 21664 - DNA, 17 bp, synthetic construct
  misc_feature 1..17: note = Oligonucleotide
  source 1..17: mol_type = other DNA
acatgcaaacatactgg

SEQ ID NO: 21665 - DNA, 17 bp, synthetic construct
  misc_feature 1..17: note = Oligonucleotide
  source 1..17: mol_type = other DNA
cacacatgcaaacatac

SEQ ID NO: 21666 - DNA, 17 bp, synthetic construct
  misc_feature 1..17: note = Oligonucleotide
  source 1..17: mol_type = other DNA
gcacacacatgcaaaca

SEQ ID NO: 21667 - DNA, 17 bp, synthetic construct
  misc_feature 1..17: note = Oligonucleotide
  source 1..17: mol_type = other DNA
catgcacacacatgcaa

SEQ ID NO: 21668 - DNA, 17 bp, synthetic construct
  misc_feature 1..17: note = Oligonucleotide
  source 1..17: mol_type = other DNA
acacatgcacacacatg

SEQ ID NO: 21669 - DNA, 17 bp, synthetic construct
  misc_feature 1..17: note = Oligonucleotide
  source 1..17: mol_type = other DNA
cacacacatgcacacac

SEQ ID NO: 21670 - DNA, 17 bp, synthetic construct
  misc_feature 1..17: note = Oligonucleotide
  source 1..17: mol_type = other DNA
acgcacacacatgcaca

SEQ ID NO: 21671 - DNA, 17 bp, synthetic construct
  misc_feature 1..17: note = Oligonucleotide
  source 1..17: mol_type = other DNA
cacacgcacacacatgc

SEQ ID NO: 21672 - DNA, 17 bp, synthetic construct
  misc_feature 1..17: note = Oligonucleotide
  source 1..17: mol_type = other DNA
cagcacacgcacacaca

SEQ ID NO: 21673 - DNA, 17 bp, synthetic construct
  misc_feature 1..17: note = Oligonucleotide
  source 1..17: mol_type = other DNA
aggcagcacacgcacac

SEQ ID NO: 21674 - DNA, 17 bp, synthetic construct
  misc_feature 1..17: note = Oligonucleotide
  source 1..17: mol_type = other DNA
cagaggcagcacacgca

SEQ ID NO: 21675 - DNA, 17 bp, synthetic construct
  misc_feature 1..17: note = Oligonucleotide
  source 1..17: mol_type = other DNA
aaccagaggcagcacac

SEQ ID NO: 21676 - DNA, 17 bp, synthetic construct
  misc_feature 1..17: note = Oligonucleotide
  source 1..17: mol_type = other DNA
gaaaaccagaggcagca

SEQ ID NO: 21677 - DNA, 17 bp, synthetic construct
  misc_feature 1..17: note = Oligonucleotide
  source 1..17: mol_type = other DNA
gtggaaaaccagaggca

SEQ ID NO: 21678 - DNA, 17 bp, synthetic construct
  misc_feature 1..17: note = Oligonucleotide
  source 1..17: mol_type = other DNA
gacgtggaaaaccagag

SEQ ID NO: 21679 - DNA, 17 bp, synthetic construct
  misc_feature 1..17: note = Oligonucleotide
  source 1..17: mol_type = other DNA
ggagacgtggaaaacca

SEQ ID NO: 21680 - DNA, 17 bp, synthetic construct
  misc_feature 1..17: note = Oligonucleotide
  source 1..17: mol_type = other DNA
agtggagacgtggaaaa

SEQ ID NO: 21681 - DNA, 17 bp, synthetic construct
  misc_feature 1..17: note = Oligonucleotide
  source 1..17: mol_type = other DNA
caaagtggagacgtgga

SEQ ID NO: 21682 - DNA, 17 bp, synthetic construct
  misc_feature 1..17: note = Oligonucleotide
  source 1..17: mol_type = other DNA
agtcaaagtggagacgt

SEQ ID NO: 21683 - DNA, 17 bp, synthetic construct
  misc_feature 1..17: note = Oligonucleotide
  source 1..17: mol_type = other DNA
taaagtcaaagtggaga

SEQ ID NO: 21684 - DNA, 17 bp, synthetic construct
  misc_feature 1..17: note = Oligonucleotide
  source 1..17: mol_type = other DNA
gagtaaagtcaaagtgg

SEQ ID NO: 21685 - DNA, 17 bp, synthetic construct
  misc_feature 1..17: note = Oligonucleotide
  source 1..17: mol_type = other DNA
caggagtaaagtcaaag

SEQ ID NO: 21686 - DNA, 17 bp, synthetic construct
  misc_feature 1..17: note = Oligonucleotide
  source 1..17: mol_type = other DNA
atgcaggagtaaagtca

SEQ ID NO: 21687 - DNA, 17 bp, synthetic construct
  misc_feature 1..17: note = Oligonucleotide
  source 1..17: mol_type = other DNA
gaaatgcaggagtaaag

SEQ ID NO: 21688 - DNA, 17 bp, synthetic construct
  misc_feature 1..17: note = Oligonucleotide
  source 1..17: mol_type = other DNA
gatgaaatgcaggagta

SEQ ID NO: 21689 - DNA, 17 bp, synthetic construct
  misc_feature 1..17: note = Oligonucleotide
  source 1..17: mol_type = other DNA
ttggatgaaatgcagga

SEQ ID NO: 21690 - DNA, 17 bp, synthetic construct
  misc_feature 1..17: note = Oligonucleotide
  source 1..17: mol_type = other DNA
cacttggatgaaatgca

SEQ ID NO: 21691 - DNA, 17 bp, synthetic construct
  misc_feature 1..17: note = Oligonucleotide
  source 1..17: mol_type = other DNA
cctcacttggatgaaat

SEQ ID NO: 21692 - DNA, 17 bp, synthetic construct
  misc_feature 1..17: note = Oligonucleotide
  source 1..17: mol_type = other DNA
tctcctcacttggatga

SEQ ID NO: 21693 - DNA, 17 bp, synthetic construct
  misc_feature 1..17: note = Oligonucleotide
  source 1..17: mol_type = other DNA
ctctctcctcacttgga

SEQ ID NO: 21694 - DNA, 17 bp, synthetic construct
  misc_feature 1..17: note = Oligonucleotide
  source 1..17: mol_type = other DNA
ccgctctctcctcactt

SEQ ID NO: 21695 - DNA, 17 bp, synthetic construct
  misc_feature 1..17: note = Oligonucleotide
  source 1..17: mol_type = other DNA
ctaccgctctctcctca

SEQ ID NO: 21696 - DNA, 17 bp, synthetic construct
  misc_feature 1..17: note = Oligonucleotide
  source 1..17: mol_type = other DNA
tcactaccgctctctcc

SEQ ID NO: 21697 - DNA, 17 bp, synthetic construct
  misc_feature 1..17: note = Oligonucleotide
  source 1..17: mol_type = other DNA
acctcactaccgctctc

SEQ ID NO: 21698 - DNA, 17 bp, synthetic construct
  misc_feature 1..17: note = Oligonucleotide
  source 1..17: mol_type = other DNA
gtcacctcactaccgct

SEQ ID NO: 21699 - DNA, 17 bp, synthetic construct
  misc_feature 1..17: note = Oligonucleotide
  source 1..17: mol_type = other DNA
ctggtcacctcactacc

SEQ ID NO: 21700 - DNA, 17 bp, synthetic construct
  misc_feature 1..17: note = Oligonucleotide
  source 1..17: mol_type = other DNA
accctggtcacctcact

SEQ ID NO: 21701 - DNA, 17 bp, synthetic construct
  misc_feature 1..17: note = Oligonucleotide
  source 1..17: mol_type = other DNA
cagaccctggtcacctc

SEQ ID NO: 21702 - DNA, 17 bp, synthetic construct
  misc_feature 1..17: note = Oligonucleotide
  source 1..17: mol_type = other DNA
cagcagaccctggtcac

SEQ ID NO: 21703 - DNA, 17 bp, synthetic construct
  misc_feature 1..17: note = Oligonucleotide
  source 1..17: mol_type = other DNA
cagcagcagaccctggt

SEQ ID NO: 21704 - DNA, 17 bp, synthetic construct
  misc_feature 1..17: note = Oligonucleotide
  source 1..17: mol_type = other DNA
agccagcagcagaccct

SEQ ID NO: 21705 - DNA, 17 bp, synthetic construct
  misc_feature 1..17: note = Oligonucleotide
  source 1..17: mol_type = other DNA
cagagccagcagcagac

SEQ ID NO: 21706 - DNA, 17 bp, synthetic construct
  misc_feature 1..17: note = Oligonucleotide
  source 1..17: mol_type = other DNA
tggcagagccagcagca

SEQ ID NO: 21707 - DNA, 17 bp, synthetic construct
  misc_feature 1..17: note = Oligonucleotide
  source 1..17: mol_type = other DNA
gcctggcagagccagca

SEQ ID NO: 21708 - DNA, 17 bp, synthetic construct
  misc_feature 1..17: note = Oligonucleotide
  source 1..17: mol_type = other DNA
agtgcctggcagagcca

SEQ ID NO: 21709 - DNA, 17 bp, synthetic construct
  misc_feature 1..17: note = Oligonucleotide
  source 1..17: mol_type = other DNA
gccagtgcctggcagag

SEQ ID NO: 21710 - DNA, 17 bp, synthetic construct
  misc_feature 1..17: note = Oligonucleotide
  source 1..17: mol_type = other DNA
acagccagtgcctggca

SEQ ID NO: 21711 - DNA, 17 bp, synthetic construct
  misc_feature 1..17: note = Oligonucleotide
  source 1..17: mol_type = other DNA
gacacagccagtgcctg

SEQ ID NO: 21712 - DNA, 17 bp, synthetic construct
  misc_feature 1..17: note = Oligonucleotide
  source 1..17: mol_type = other DNA
gctgacacagccagtgc

SEQ ID NO: 21713 - DNA, 17 bp, synthetic construct
  misc_feature 1..17: note = Oligonucleotide
  source 1..17: mol_type = other DNA
agagctgacacagccag

SEQ ID NO: 21714 - DNA, 17 bp, synthetic construct
  misc_feature 1..17: note = Oligonucleotide
  source 1..17: mol_type = other DNA
cacagagctgacacagc

SEQ ID NO: 21715 - DNA, 17 bp, synthetic construct
  misc_feature 1..17: note = Oligonucleotide
  source 1..17: mol_type = other DNA
aaacacagagctgacac

SEQ ID NO: 21716 - DNA, 17 bp, synthetic construct
  misc_feature 1..17: note = Oligonucleotide
  source 1..17: mol_type = other DNA
aataaacacagagctga

SEQ ID NO: 21717 - DNA, 17 bp, synthetic construct
  misc_feature 1..17: note = Oligonucleotide
  source 1..17: mol_type = other DNA
taaaataaacacagagc

SEQ ID NO: 21718 - DNA, 17 bp, synthetic construct
  misc_feature 1..17: note = Oligonucleotide
  source 1..17: mol_type = other DNA
gggtaaaataaacacag

SEQ ID NO: 21719 - DNA, 17 bp, synthetic construct
  misc_feature 1..17: note = Oligonucleotide
  source 1..17: mol_type = other DNA
agagggtaaaataaaca

SEQ ID NO: 21720 - DNA, 17 bp, synthetic construct
  misc_feature 1..17: note = Oligonucleotide
  source 1..17: mol_type = other DNA
ccaagagggtaaaataa

SEQ ID NO: 21721 - DNA, 17 bp, synthetic construct
  misc_feature 1..17: note = Oligonucleotide
  source 1..17: mol_type = other DNA
tcaccaagagggtaaaa

SEQ ID NO: 21722 - DNA, 17 bp, synthetic construct
  misc_feature 1..17: note = Oligonucleotide
  source 1..17: mol_type = other DNA
cagtcaccaagagggta

SEQ ID NO: 21723 - DNA, 17 bp, synthetic construct
  misc_feature 1..17: note = Oligonucleotide
  source 1..17: mol_type = other DNA
gcacagtcaccaagagg

SEQ ID NO: 21724 - DNA, 17 bp, synthetic construct
  misc_feature 1..17: note = Oligonucleotide
  source 1..17: mol_type = other DNA
agtgcacagtcaccaag

SEQ ID NO: 21725 - DNA, 17 bp, synthetic construct
  misc_feature 1..17: note = Oligonucleotide
  source 1..17: mol_type = other DNA
atgagtgcacagtcacc

SEQ ID NO: 21726 - DNA, 17 bp, synthetic construct
  misc_feature 1..17: note = Oligonucleotide
  source 1..17: mol_type = other DNA
tcaatgagtgcacagtc

SEQ ID NO: 21727 - DNA, 17 bp, synthetic construct
  misc_feature 1..17: note = Oligonucleotide
  source 1..17: mol_type = other DNA
ctgtcaatgagtgcaca

SEQ ID NO: 21728 - DNA, 17 bp, synthetic construct
  misc_feature 1..17: note = Oligonucleotide
  source 1..17: mol_type = other DNA
cacctgtcaatgagtgc

SEQ ID NO: 21729 - DNA, 17 bp, synthetic construct
  misc_feature 1..17: note = Oligonucleotide
  source 1..17: mol_type = other DNA
ggccacctgtcaatgag

SEQ ID NO: 21730 - DNA, 17 bp, synthetic construct
  misc_feature 1..17: note = Oligonucleotide
  source 1..17: mol_type = other DNA
cagggccacctgtcaat

SEQ ID NO: 21731 - DNA, 17 bp, synthetic construct
  misc_feature 1..17: note = Oligonucleotide
  source 1..17: mol_type = other DNA
cagcagggccacctgtc

SEQ ID NO: 21732 - DNA, 17 bp, synthetic construct
  misc_feature 1..17: note = Oligonucleotide
  source 1..17: mol_type = other DNA
ggtcagcagggccacct

SEQ ID NO: 21733 - DNA, 17 bp, synthetic construct
  misc_feature 1..17: note = Oligonucleotide
  source 1..17: mol_type = other DNA
tggggtcagcagggcca

SEQ ID NO: 21734 - DNA, 17 bp, synthetic construct
  misc_feature 1..17: note = Oligonucleotide
  source 1..17: mol_type = other DNA
ctgtggggtcagcaggg

SEQ ID NO: 21735 - DNA, 17 bp, synthetic construct
  misc_feature 1..17: note = Oligonucleotide
  source 1..17: mol_type = other DNA
ggcctgtggggtcagca

SEQ ID NO: 21736 - DNA, 17 bp, synthetic construct
  misc_feature 1..17: note = Oligonucleotide
  source 1..17: mol_type = other DNA
tgtggcctgtggggtca

SEQ ID NO: 21737 - DNA, 17 bp, synthetic construct
  misc_feature 1..17: note = Oligonucleotide
  source 1..17: mol_type = other DNA
tcctgtggcctgtgggg

SEQ ID NO: 21738 - DNA, 17 bp, synthetic construct
  misc_feature 1..17: note = Oligonucleotide
  source 1..17: mol_type = other DNA
tactcctgtggcctgtg

SEQ ID NO: 21739 - DNA, 17 bp, synthetic construct
  misc_feature 1..17: note = Oligonucleotide
  source 1..17: mol_type = other DNA
cagtactcctgtggcct

SEQ ID NO: 21740 - DNA, 17 bp, synthetic construct
  misc_feature 1..17: note = Oligonucleotide
  source 1..17: mol_type = other DNA
cgacagtactcctgtgg

SEQ ID NO: 21741 - DNA, 17 bp, synthetic construct
  misc_feature 1..17: note = Oligonucleotide
  source 1..17: mol_type = other DNA
caccgacagtactcctg

SEQ ID NO: 21742 - DNA, 17 bp, synthetic construct
  misc_feature 1..17: note = Oligonucleotide
  source 1..17: mol_type = other DNA
tcccaccgacagtactc

SEQ ID NO: 21743 - DNA, 17 bp, synthetic construct
  misc_feature 1..17: note = Oligonucleotide
  source 1..17: mol_type = other DNA
tcatcccaccgacagta

SEQ ID NO: 21744 - DNA, 17 bp, synthetic construct
  misc_feature 1..17: note = Oligonucleotide
  source 1..17: mol_type = other DNA
ccatcatcccaccgaca

SEQ ID NO: 21745 - DNA, 17 bp, synthetic construct
  misc_feature 1..17: note = Oligonucleotide
  source 1..17: mol_type = other DNA
gccccatcatcccaccg

SEQ ID NO: 21746 - DNA, 17 bp, synthetic construct
  misc_feature 1..17: note = Oligonucleotide
  source 1..17: mol_type = other DNA
cctgccccatcatccca

SEQ ID NO: 21747 - DNA, 17 bp, synthetic construct
  misc_feature 1..17: note = Oligonucleotide
  source 1..17: mol_type = other DNA
ggccctgccccatcatc

SEQ ID NO: 21748 - DNA, 17 bp, synthetic construct
  misc_feature 1..17: note = Oligonucleotide
  source 1..17: mol_type = other DNA
cgaggccctgccccatc

SEQ ID NO: 21749 - DNA, 17 bp, synthetic construct
  misc_feature 1..17: note = Oligonucleotide
  source 1..17: mol_type = other DNA
gctcgaggccctgcccc

SEQ ID NO: 21750 - DNA, 17 bp, synthetic construct
  misc_feature 1..17: note = Oligonucleotide
  source 1..17: mol_type = other DNA
cgcgctcgaggccctgc

SEQ ID NO: 21751 - DNA, 17 bp, synthetic construct
  misc_feature 1..17: note = Oligonucleotide
  source 1..17: mol_type = other DNA
tgccgcgctcgaggccc

SEQ ID NO: 21752 - DNA, 17 bp, synthetic construct
  misc_feature 1..17: note = Oligonucleotide
  source 1..17: mol_type = other DNA
tcctgccgcgctcgagg

SEQ ID NO: 21753 - DNA, 17 bp, synthetic construct
  misc_feature 1..17: note = Oligonucleotide
  source 1..17: mol_type = other DNA
ccctcctgccgcgctcg

SEQ ID NO: 21754 - DNA, 17 bp, synthetic construct
  misc_feature 1..17: note = Oligonucleotide
  source 1..17: mol_type = other DNA
ctcccctcctgccgcgc

SEQ ID NO: 21755 - DNA, 17 bp, synthetic construct
  misc_feature 1..17: note = Oligonucleotide
  source 1..17: mol_type = other DNA
ctgctcccctcctgccg

SEQ ID NO: 21756 - DNA, 17 bp, synthetic construct
  misc_feature 1..17: note = Oligonucleotide
  source 1..17: mol_type = other DNA
ctcctgctcccctcctg

SEQ ID NO: 21757 - DNA, 17 bp, synthetic construct
  misc_feature 1..17: note = Oligonucleotide
  source 1..17: mol_type = other DNA
acactcctgctcccctc

SEQ ID NO: 21758 - DNA, 17 bp, synthetic construct
  misc_feature 1..17: note = Oligonucleotide
  source 1..17: mol_type = other DNA
aacacactcctgctccc

SEQ ID NO: 21759 - DNA, 17 bp, synthetic construct
  misc_feature 1..17: note = Oligonucleotide
  source 1..17: mol_type = other DNA
cccaacacactcctgct

SEQ ID NO: 21760 - DNA, 17 bp, synthetic construct
  misc_feature 1..17: note = Oligonucleotide
  source 1..17: mol_type = other DNA
aaccccaacacactcct

SEQ ID NO: 21761 - DNA, 17 bp, synthetic construct
  misc_feature 1..17: note = Oligonucleotide
  source 1..17: mol_type = other DNA
tcaaaccccaacacact

SEQ ID NO: 21762 - DNA, 17 bp, synthetic construct
  misc_feature 1..17: note = Oligonucleotide
  source 1..17: mol_type = other DNA
ccatcaaaccccaacac

SEQ ID NO: 21763 - DNA, 17 bp, synthetic construct
  misc_feature 1..17: note = Oligonucleotide
  source 1..17: mol_type = other DNA
gccccatcaaaccccaa

SEQ ID NO: 21764 - DNA, 17 bp, synthetic construct
  misc_feature 1..17: note = Oligonucleotide
  source 1..17: mol_type = other DNA
catgccccatcaaaccc

SEQ ID NO: 21765 - DNA, 17 bp, synthetic construct
  misc_feature 1..17: note = Oligonucleotide
  source 1..17: mol_type = other DNA
gaacatgccccatcaaa

SEQ ID NO: 21766 - DNA, 17 bp, synthetic construct
  misc_feature 1..17: note = Oligonucleotide
  source 1..17: mol_type = other DNA
ccagaacatgccccatc

SEQ ID NO: 21767 - DNA, 17 bp, synthetic construct
  misc_feature 1..17: note = Oligonucleotide
  source 1..17: mol_type = other DNA
tgcccagaacatgcccc

SEQ ID NO: 21768 - DNA, 17 bp, synthetic construct
  misc_feature 1..17: note = Oligonucleotide
  source 1..17: mol_type = other DNA
ttgtgcccagaacatgc

SEQ ID NO: 21769 - DNA, 17 bp, synthetic construct
  misc_feature 1..17: note = Oligonucleotide
  source 1..17: mol_type = other DNA
ggcttgtgcccagaaca

SEQ ID NO: 21770 - DNA, 17 bp, synthetic construct
  misc_feature 1..17: note = Oligonucleotide
  source 1..17: mol_type = other DNA
cagggcttgtgcccaga

SEQ ID NO: 21771 - DNA, 17 bp, synthetic construct
  misc_feature 1..17: note = Oligonucleotide
  source 1..17: mol_type = other DNA
aaccagggcttgtgccc

SEQ ID NO: 21772 - DNA, 17 bp, synthetic construct
  misc_feature 1..17: note = Oligonucleotide
  source 1..17: mol_type = other DNA
gtcaaccagggcttgtg

SEQ ID NO: 21773 - DNA, 17 bp, synthetic construct
  misc_feature 1..17: note = Oligonucleotide
  source 1..17: mol_type = other DNA
atggtcaaccagggctt

SEQ ID NO: 21774 - DNA, 17 bp, synthetic construct
  misc_feature 1..17: note = Oligonucleotide
  source 1..17: mol_type = other DNA
ttgatggtcaaccaggg

SEQ ID NO: 21775 - DNA, 17 bp, synthetic construct
  misc_feature 1..17: note = Oligonucleotide
  source 1..17: mol_type = other DNA
ctgttgatggtcaacca

SEQ ID NO: 21776 - DNA, 17 bp, synthetic construct
  misc_feature 1..17: note = Oligonucleotide
  source 1..17: mol_type = other DNA
aggctgttgatggtcaa

SEQ ID NO: 21777 - DNA, 17 bp, synthetic construct
  misc_feature 1..17: note = Oligonucleotide
  source 1..17: mol_type = other DNA
aagaggctgttgatggt

SEQ ID NO: 21778 - DNA, 17 bp, synthetic construct
  misc_feature 1..17: note = Oligonucleotide
  source 1..17: mol_type = other DNA
atgaagaggctgttgat

SEQ ID NO: 21779 - DNA, 17 bp, synthetic construct
  misc_feature 1..17: note = Oligonucleotide
  source 1..17: mol_type = other DNA
cccatgaagaggctgtt

SEQ ID NO: 21780 - DNA, 17 bp, synthetic construct
  misc_feature 1..17: note = Oligonucleotide
  source 1..17: mol_type = other DNA
ctgcccatgaagaggct

SEQ ID NO: 21781 - DNA, 17 bp, synthetic construct
  misc_feature 1..17: note = Oligonucleotide
  source 1..17: mol_type = other DNA
gacctgcccatgaagag

SEQ ID NO: 21782 - DNA, 17 bp, synthetic construct
  misc_feature 1..17: note = Oligonucleotide
  source 1..17: mol_type = other DNA
taagacctgcccatgaa

SEQ ID NO: 21783 - DNA, 17 bp, synthetic construct
  misc_feature 1..17: note = Oligonucleotide
  source 1..17: mol_type = other DNA
atataagacctgcccat

SEQ ID NO: 21784 - DNA, 17 bp, synthetic construct
  misc_feature 1..17: note = Oligonucleotide
  source 1..17: mol_type = other DNA
catatataagacctgcc

SEQ ID NO: 21785 - DNA, 17 bp, synthetic construct
  misc_feature 1..17: note = Oligonucleotide
  source 1..17: mol_type = other DNA
acacatatataagacct

SEQ ID NO: 21786 - DNA, 17 bp, synthetic construct
  misc_feature 1..17: note = Oligonucleotide
  source 1..17: mol_type = other DNA
tggacacatatataaga

SEQ ID NO: 21787 - DNA, 17 bp, synthetic construct
  misc_feature 1..17: note = Oligonucleotide
  source 1..17: mol_type = other DNA
taatggacacatatata

SEQ ID NO: 21788 - DNA, 17 bp, synthetic construct
  misc_feature 1..17: note = Oligonucleotide
  source 1..17: mol_type = other DNA
tgttaatggacacatat

SEQ ID NO: 21789 - DNA, 17 bp, synthetic construct
  misc_feature 1..17: note = Oligonucleotide
  source 1..17: mol_type = other DNA
ggttgttaatggacaca

SEQ ID NO: 21790 - DNA, 17 bp, synthetic construct
  misc_feature 1..17: note = Oligonucleotide
  source 1..17: mol_type = other DNA
caaggttgttaatggac

SEQ ID NO: 21791 - DNA, 17 bp, synthetic construct
  misc_feature 1..17: note = Oligonucleotide
  source 1..17: mol_type = other DNA
tgacaaggttgttaatg

SEQ ID NO: 21792 - DNA, 17 bp, synthetic construct
  misc_feature 1..17: note = Oligonucleotide
  source 1..17: mol_type = other DNA
acatgacaaggttgtta

SEQ ID NO: 21793 - DNA, 17 bp, synthetic construct
  misc_feature 1..17: note = Oligonucleotide
  source 1..17: mol_type = other DNA
tgcacatgacaaggttg

SEQ ID NO: 21794 - DNA, 17 bp, synthetic construct
  misc_feature 1..17: note = Oligonucleotide
  source 1..17: mol_type = other DNA
acgtgcacatgacaagg

SEQ ID NO: 21795 - DNA, 17 bp, synthetic construct
  misc_feature 1..17: note = Oligonucleotide
  source 1..17: mol_type = other DNA
tggacgtgcacatgaca

SEQ ID NO: 21796 - DNA, 17 bp, synthetic construct
  misc_feature 1..17: note = Oligonucleotide
  source 1..17: mol_type = other DNA
atctggacgtgcacatg

SEQ ID NO: 21797 - DNA, 17 bp, synthetic construct
  misc_feature 1..17: note = Oligonucleotide
  source 1..17: mol_type = other DNA
tatatctggacgtgcac

SEQ ID NO: 21798 - DNA, 17 bp, synthetic construct
  misc_feature 1..17: note = Oligonucleotide
  source 1..17: mol_type = other DNA
aagtatatctggacgtg

SEQ ID NO: 21799 - DNA, 17 bp, synthetic construct
  misc_feature 1..17: note = Oligonucleotide
  source 1..17: mol_type = other DNA
atcaagtatatctggac

SEQ ID NO: 21800 - DNA, 17 bp, synthetic construct
  misc_feature 1..17: note = Oligonucleotide
  source 1..17: mol_type = other DNA
atgatcaagtatatctg

SEQ ID NO: 21801 - DNA, 17 bp, synthetic construct
  misc_feature 1..17: note = Oligonucleotide
  source 1..17: mol_type = other DNA
gacatgatcaagtatat

SEQ ID NO: 21802 - DNA, 17 bp, synthetic construct
  misc_feature 1..17: note = Oligonucleotide
  source 1..17: mol_type = other DNA
caggacatgatcaagta

SEQ ID NO: 21803 - DNA, 17 bp, synthetic construct
  misc_feature 1..17: note = Oligonucleotide
  source 1..17: mol_type = other DNA
cgtcaggacatgatcaa

SEQ ID NO: 21804 - DNA, 17 bp, synthetic construct
  misc_feature 1..17: note = Oligonucleotide
  source 1..17: mol_type = other DNA
tcacgtcaggacatgat

SEQ ID NO: 21805 - DNA, 17 bp, synthetic construct
  misc_feature 1..17: note = Oligonucleotide
  source 1..17: mol_type = other DNA
ctgtcacgtcaggacat

SEQ ID NO: 21806 - DNA, 17 bp, synthetic construct
  misc_feature 1..17: note = Oligonucleotide
  source 1..17: mol_type = other DNA
tgactgtcacgtcagga

SEQ ID NO: 21807 - DNA, 17 bp, synthetic construct
  misc_feature 1..17: note = Oligonucleotide
  source 1..17: mol_type = other DNA
tactgactgtcacgtca

SEQ ID NO: 21808 - DNA, 17 bp, synthetic construct
  misc_feature 1..17: note = Oligonucleotide
  source 1..17: mol_type = other DNA
ggctactgactgtcacg

SEQ ID NO: 21809 - DNA, 17 bp, synthetic construct
  misc_feature 1..17: note = Oligonucleotide
  source 1..17: mol_type = other DNA
agaggctactgactgtc

SEQ ID NO: 21810 - DNA, 17 bp, synthetic construct
  misc_feature 1..17: note = Oligonucleotide
  source 1..17: mol_type = other DNA
tgaagaggctactgact

SEQ ID NO: 21811 - DNA, 17 bp, synthetic construct
  misc_feature 1..17: note = Oligonucleotide
  source 1..17: mol_type = other DNA
ccatgaagaggctactg

SEQ ID NO: 21812 - DNA, 17 bp, synthetic construct
  misc_feature 1..17: note = Oligonucleotide
  source 1..17: mol_type = other DNA
gtcccatgaagaggcta

SEQ ID NO: 21813 - DNA, 17 bp, synthetic construct
  misc_feature 1..17: note = Oligonucleotide
  source 1..17: mol_type = other DNA
acagtcccatgaagagg

SEQ ID NO: 21814 - DNA, 17 bp, synthetic construct
  misc_feature 1..17: note = Oligonucleotide
  source 1..17: mol_type = other DNA
gggacagtcccatgaag

SEQ ID NO: 21815 - DNA, 17 bp, synthetic construct
  misc_feature 1..17: note = Oligonucleotide
  source 1..17: mol_type = other DNA
aatgggacagtcccatg

SEQ ID NO: 21816 - DNA, 17 bp, synthetic construct
  misc_feature 1..17: note = Oligonucleotide
  source 1..17: mol_type = other DNA
cgtaatgggacagtccc

SEQ ID NO: 21817 - DNA, 17 bp, synthetic construct
  misc_feature 1..17: note = Oligonucleotide
  source 1..17: mol_type = other DNA
acacgtaatgggacagt

SEQ ID NO: 21818 - DNA, 17 bp, synthetic construct
  misc_feature 1..17: note = Oligonucleotide
  source 1..17: mol_type = other DNA
gtcacacgtaatgggac

SEQ ID NO: 21819 - DNA, 17 bp, synthetic construct
  misc_feature 1..17: note = Oligonucleotide
  source 1..17: mol_type = other DNA
acggtcacacgtaatgg

SEQ ID NO: 21820 - DNA, 17 bp, synthetic construct
  misc_feature 1..17: note = Oligonucleotide
  source 1..17: mol_type = other DNA
acaacggtcacacgtaa

SEQ ID NO: 21821 - DNA, 17 bp, synthetic construct
  misc_feature 1..17: note = Oligonucleotide
  source 1..17: mol_type = other DNA
aggacaacggtcacacg

SEQ ID NO: 21822 - DNA, 17 bp, synthetic construct
  misc_feature 1..17: note = Oligonucleotide
  source 1..17: mol_type = other DNA
gtgaggacaacggtcac

SEQ ID NO: 21823 - DNA, 17 bp, synthetic construct
  misc_feature 1..17: note = Oligonucleotide
  source 1..17: mol_type = other DNA
acagtgaggacaacggt

SEQ ID NO: 21824 - DNA, 17 bp, synthetic construct
  misc_feature 1..17: note = Oligonucleotide
  source 1..17: mol_type = other DNA
cccacagtgaggacaac

SEQ ID NO: 21825 - DNA, 17 bp, synthetic construct
  misc_feature 1..17: note = Oligonucleotide
  source 1..17: mol_type = other DNA
atacccacagtgaggac

SEQ ID NO: 21826 - DNA, 17 bp, synthetic construct
  misc_feature 1..17: note = Oligonucleotide
  source 1..17: mol_type = other DNA
cacatacccacagtgag

SEQ ID NO: 21827 - DNA, 17 bp, synthetic construct
  misc_feature 1..17: note = Oligonucleotide
  source 1..17: mol_type = other DNA
tagcacatacccacagt

SEQ ID NO: 21828 - DNA, 17 bp, synthetic construct
  misc_feature 1..17: note = Oligonucleotide
  source 1..17: mol_type = other DNA
gtatagcacatacccac

SEQ ID NO: 21829 - DNA, 17 bp, synthetic construct
  misc_feature 1..17: note = Oligonucleotide
  source 1..17: mol_type = other DNA
catgtatagcacatacc

SEQ ID NO: 21830 - DNA, 17 bp, synthetic construct
  misc_feature 1..17: note = Oligonucleotide
  source 1..17: mol_type = other DNA
ccacatgtatagcacat

SEQ ID NO: 21831 - DNA, 17 bp, synthetic construct
  misc_feature 1..17: note = Oligonucleotide
  source 1..17: mol_type = other DNA
tggccacatgtatagca

SEQ ID NO: 21832 - DNA, 17 bp, synthetic construct
  misc_feature 1..17: note = Oligonucleotide
  source 1..17: mol_type = other DNA
tgatggccacatgtata

SEQ ID NO: 21833 - DNA, 17 bp, synthetic construct
  misc_feature 1..17: note = Oligonucleotide
  source 1..17: mol_type = other DNA
tgttgatggccacatgt

SEQ ID NO: 21834 - DNA, 17 bp, synthetic construct
  misc_feature 1..17: note = Oligonucleotide
  source 1..17: mol_type = other DNA
ggctgttgatggccaca

SEQ ID NO: 21835 - DNA, 17 bp, synthetic construct
  misc_feature 1..17: note = Oligonucleotide
  source 1..17: mol_type = other DNA
cgaggctgttgatggcc

SEQ ID NO: 21836 - DNA, 17 bp, synthetic construct
  misc_feature 1..17: note = Oligonucleotide
  source 1..17: mol_type = other DNA
tgacgaggctgttgatg

SEQ ID NO: 21837 - DNA, 17 bp, synthetic construct
  misc_feature 1..17: note = Oligonucleotide
  source 1..17: mol_type = other DNA
ccatgacgaggctgttg

SEQ ID NO: 21838 - DNA, 17 bp, synthetic construct
  misc_feature 1..17: note = Oligonucleotide
  source 1..17: mol_type = other DNA
tgcccatgacgaggctg

SEQ ID NO: 21839 - DNA, 17 bp, synthetic construct
  misc_feature 1..17: note = Oligonucleotide
  source 1..17: mol_type = other DNA
acatgcccatgacgagg

SEQ ID NO: 21840 - DNA, 17 bp, synthetic construct
  misc_feature 1..17: note = Oligonucleotide
  source 1..17: mol_type = other DNA
gggacatgcccatgacg

SEQ ID NO: 21841 - DNA, 17 bp, synthetic construct
  misc_feature 1..17: note = Oligonucleotide
  source 1..17: mol_type = other DNA
agtgggacatgcccatg

SEQ ID NO: 21842 - DNA, 17 bp, synthetic construct
  misc_feature 1..17: note = Oligonucleotide
  source 1..17: mol_type = other DNA
tacagtgggacatgccc

SEQ ID NO: 21843 - DNA, 17 bp, synthetic construct
  misc_feature 1..17: note = Oligonucleotide
  source 1..17: mol_type = other DNA
acgtacagtgggacatg

SEQ ID NO: 21844 - DNA, 17 bp, synthetic construct
  misc_feature 1..17: note = Oligonucleotide
  source 1..17: mol_type = other DNA
gtcacgtacagtgggac

SEQ ID NO: 21845 - DNA, 17 bp, synthetic construct
  misc_feature 1..17: note = Oligonucleotide
  source 1..17: mol_type = other DNA
actgtcacgtacagtgg

SEQ ID NO: 21846 - DNA, 17 bp, synthetic construct
  misc_feature 1..17: note = Oligonucleotide
  source 1..17: mol_type = other DNA
tcaactgtcacgtacag

SEQ ID NO: 21847 - DNA, 17 bp, synthetic construct
  misc_feature 1..17: note = Oligonucleotide
  source 1..17: mol_type = other DNA
ctgtcaactgtcacgta

SEQ ID NO: 21848 - DNA, 17 bp, synthetic construct
  misc_feature 1..17: note = Oligonucleotide
  source 1..17: mol_type = other DNA
agcctgtcaactgtcac

SEQ ID NO: 21849 - DNA, 17 bp, synthetic construct
  misc_feature 1..17: note = Oligonucleotide
  source 1..17: mol_type = other DNA
aagagcctgtcaactgt

SEQ ID NO: 21850 - DNA, 17 bp, synthetic construct
  misc_feature 1..17: note = Oligonucleotide
  source 1..17: mol_type = other DNA
agaaagagcctgtcaac

SEQ ID NO: 21851 - DNA, 17 bp, synthetic construct
  misc_feature 1..17: note = Oligonucleotide
  source 1..17: mol_type = other DNA
gaaagaaagagcctgtc

SEQ ID NO: 21852 - DNA, 17 bp, synthetic construct
  misc_feature 1..17: note = Oligonucleotide
  source 1..17: mol_type = other DNA
aaagaaagaaagagcct

SEQ ID NO: 21853 - DNA, 17 bp, synthetic construct
  misc_feature 1..17: note = Oligonucleotide
  source 1..17: mol_type = other DNA
aaaaaagaaagaaagag

SEQ ID NO: 21854 - DNA, 17 bp, synthetic construct
  misc_feature 1..17: note = Oligonucleotide
  source 1..17: mol_type = other DNA
aaaaaaaaagaaagaaa

SEQ ID NO: 21855 - DNA, 17 bp, synthetic construct
  misc_feature 1..17: note = Oligonucleotide
  source 1..17: mol_type = other DNA
gaaaaaaaaaaagaaag

SEQ ID NO: 21856 - DNA, 17 bp, synthetic construct
  misc_feature 1..17: note = Oligonucleotide
  source 1..17: mol_type = other DNA
aaagaaaaaaaaaaaga

SEQ ID NO: 21857 - DNA, 17 bp, synthetic construct
  misc_feature 1..17: note = Oligonucleotide
  source 1..17: mol_type = other DNA
aaaaaagaaaaaaaaaa

SEQ ID NO: 21858 - DNA, 17 bp, synthetic construct
  misc_feature 1..17: note = Oligonucleotide
  source 1..17: mol_type = other DNA
aaaaaaaaagaaaaaaa

SEQ ID NO: 21859 - DNA, 17 bp, synthetic construct
  misc_feature 1..17: note = Oligonucleotide
  source 1..17: mol_type = other DNA
aaaaaaaaaaaagaaaa

SEQ ID NO: 21860 - DNA, 17 bp, synthetic construct
  misc_feature 1..17: note = Oligonucleotide
  source 1..17: mol_type = other DNA
aaaaaaaaaaaaaaaga

SEQ ID NO: 21861 - DNA, 17 bp, synthetic construct
  misc_feature 1..17: note = Oligonucleotide
  source 1..17: mol_type = other DNA
ctcaaaaaaaaaaaaaa

SEQ ID NO: 21862 - DNA, 17 bp, synthetic construct
  misc_feature 1..17: note = Oligonucleotide
  source 1..17: mol_type = other DNA
tgtctcaaaaaaaaaaa

SEQ ID NO: 21863 - DNA, 17 bp, synthetic construct
  misc_feature 1..17: note = Oligonucleotide
  source 1..17: mol_type = other DNA
aactgtctcaaaaaaaa

SEQ ID NO: 21864 - DNA, 17 bp, synthetic construct
  misc_feature 1..17: note = Oligonucleotide
  source 1..17: mol_type = other DNA
tgaaactgtctcaaaaa

SEQ ID NO: 21865 - DNA, 17 bp, synthetic construct
  misc_feature 1..17: note = Oligonucleotide
  source 1..17: mol_type = other DNA
gagtgaaactgtctcaa

SEQ ID NO: 21866 - DNA, 17 bp, synthetic construct
  misc_feature 1..17: note = Oligonucleotide
  source 1..17: mol_type = other DNA
caagagtgaaactgtct

SEQ ID NO: 21867 - DNA, 17 bp, synthetic construct
  misc_feature 1..17: note = Oligonucleotide
  source 1..17: mol_type = other DNA
caacaagagtgaaactg

SEQ ID NO: 21868 - DNA, 17 bp, synthetic construct
  misc_feature 1..17: note = Oligonucleotide
  source 1..17: mol_type = other DNA
gggcaacaagagtgaaa

SEQ ID NO: 21869 - DNA, 17 bp, synthetic construct
  misc_feature 1..17: note = Oligonucleotide
  source 1..17: mol_type = other DNA
cctgggcaacaagagtg

SEQ ID NO: 21870 - DNA, 17 bp, synthetic construct
  misc_feature 1..17: note = Oligonucleotide
  source 1..17: mol_type = other DNA
cagcctgggcaacaaga

SEQ ID NO: 21871 - DNA, 17 bp, synthetic construct
  misc_feature 1..17: note = Oligonucleotide
  source 1..17: mol_type = other DNA
ctccagcctgggcaaca

SEQ ID NO: 21872 - DNA, 17 bp, synthetic construct
  misc_feature 1..17: note = Oligonucleotide
  source 1..17: mol_type = other DNA
gcactccagcctgggca

SEQ ID NO: 21873 - DNA, 17 bp, synthetic construct
  misc_feature 1..17: note = Oligonucleotide
  source 1..17: mol_type = other DNA
attgcactccagcctgg

SEQ ID NO: 21874 - DNA, 17 bp, synthetic construct
  misc_feature 1..17: note = Oligonucleotide
  source 1..17: mol_type = other DNA
gtcattgcactccagcc

SEQ ID NO: 21875 - DNA, 17 bp, synthetic construct
  misc_feature 1..17: note = Oligonucleotide
  source 1..17: mol_type = other DNA
cgtgtcattgcactcca

SEQ ID NO: 21876 - DNA, 17 bp, synthetic construct
  misc_feature 1..17: note = Oligonucleotide
  source 1..17: mol_type = other DNA
gaacgtgtcattgcact

SEQ ID NO: 21877 - DNA, 17 bp, synthetic construct
  misc_feature 1..17: note = Oligonucleotide
  source 1..17: mol_type = other DNA
cgagaacgtgtcattgc

SEQ ID NO: 21878 - DNA, 17 bp, synthetic construct
  misc_feature 1..17: note = Oligonucleotide
  source 1..17: mol_type = other DNA
agccgagaacgtgtcat

SEQ ID NO: 21879 - DNA, 17 bp, synthetic construct
  misc_feature 1..17: note = Oligonucleotide
  source 1..17: mol_type = other DNA
gtgagccgagaacgtgt

SEQ ID NO: 21880 - DNA, 17 bp, synthetic construct
  misc_feature 1..17: note = Oligonucleotide
  source 1..17: mol_type = other DNA
gcagtgagccgagaacg

SEQ ID NO: 21881 - DNA, 17 bp, synthetic construct
  misc_feature 1..17: note = Oligonucleotide
  source 1..17: mol_type = other DNA
gttgcagtgagccgaga

SEQ ID NO: 21882 - DNA, 17 bp, synthetic construct
  misc_feature 1..17: note = Oligonucleotide
  source 1..17: mol_type = other DNA
gaggttgcagtgagccg

SEQ ID NO: 21883 - DNA, 17 bp, synthetic construct
  misc_feature 1..17: note = Oligonucleotide
  source 1..17: mol_type = other DNA
gtggaggttgcagtgag

SEQ ID NO: 21884 - DNA, 17 bp, synthetic construct
  misc_feature 1..17: note = Oligonucleotide
  source 1..17: mol_type = other DNA
gaagtggaggttgcagt

SEQ ID NO: 21885 - DNA, 17 bp, synthetic construct
  misc_feature 1..17: note = Oligonucleotide
  source 1..17: mol_type = other DNA
caagaagtggaggttgc

SEQ ID NO: 21886 - DNA, 17 bp, synthetic construct
  misc_feature 1..17: note = Oligonucleotide
  source 1..17: mol_type = other DNA
acccaagaagtggaggt

SEQ ID NO: 21887 - DNA, 17 bp, synthetic construct
  misc_feature 1..17: note = Oligonucleotide
  source 1..17: mol_type = other DNA
tgaacccaagaagtgga

SEQ ID NO: 21888 - DNA, 17 bp, synthetic construct
  misc_feature 1..17: note = Oligonucleotide
  source 1..17: mol_type = other DNA
acttgaacccaagaagt

SEQ ID NO: 21889 - DNA, 17 bp, synthetic construct
  misc_feature 1..17: note = Oligonucleotide
  source 1..17: mol_type = other DNA
atcacttgaacccaaga

SEQ ID NO: 21890 - DNA, 17 bp, synthetic construct
  misc_feature 1..17: note = Oligonucleotide
  source 1..17: mol_type = other DNA
agaatcacttgaaccca

SEQ ID NO: 21891 - DNA, 17 bp, synthetic construct
  misc_feature 1..17: note = Oligonucleotide
  source 1..17: mol_type = other DNA
aggagaatcacttgaac

SEQ ID NO: 21892 - DNA, 17 bp, synthetic construct
  misc_feature 1..17: note = Oligonucleotide
  source 1..17: mol_type = other DNA
ggcaggagaatcacttg

SEQ ID NO: 21893 - DNA, 17 bp, synthetic construct
  misc_feature 1..17: note = Oligonucleotide
  source 1..17: mol_type = other DNA
tgaggcaggagaatcac

SEQ ID NO: 21894 - DNA, 17 bp, synthetic construct
  misc_feature 1..17: note = Oligonucleotide
  source 1..17: mol_type = other DNA
ggctgaggcaggagaat

SEQ ID NO: 21895 - DNA, 17 bp, synthetic construct
  misc_feature 1..17: note = Oligonucleotide
  source 1..17: mol_type = other DNA
ggaggctgaggcaggag

SEQ ID NO: 21896 - DNA, 17 bp, synthetic construct
  misc_feature 1..17: note = Oligonucleotide
  source 1..17: mol_type = other DNA
ttgggaggctgaggcag

SEQ ID NO: 21897 - DNA, 17 bp, synthetic construct
  misc_feature 1..17: note = Oligonucleotide
  source 1..17: mol_type = other DNA
tacttgggaggctgagg

SEQ ID NO: 21898 - DNA, 17 bp, synthetic construct
  misc_feature 1..17: note = Oligonucleotide
  source 1..17: mol_type = other DNA
agctacttgggaggctg

SEQ ID NO: 21899 - DNA, 17 bp, synthetic construct
  misc_feature 1..17: note = Oligonucleotide
  source 1..17: mol_type = other DNA
cccagctacttgggagg

SEQ ID NO: 21900 - DNA, 17 bp, synthetic construct
  misc_feature 1..17: note = Oligonucleotide
  source 1..17: mol_type = other DNA
aatcccagctacttggg

SEQ ID NO: 21901 - DNA, 17 bp, synthetic construct
  misc_feature 1..17: note = Oligonucleotide
  source 1..17: mol_type = other DNA
tgtaatcccagctactt

SEQ ID NO: 21902 - DNA, 17 bp, synthetic construct
  misc_feature 1..17: note = Oligonucleotide
  source 1..17: mol_type = other DNA
gcctgtaatcccagcta

SEQ ID NO: 21903 - DNA, 17 bp, synthetic construct
  misc_feature 1..17: note = Oligonucleotide
  source 1..17: mol_type = other DNA
ggtgcctgtaatcccag

SEQ ID NO: 21904 - DNA, 17 bp, synthetic construct
  misc_feature 1..17: note = Oligonucleotide
  source 1..17: mol_type = other DNA
gcgggtgcctgtaatcc

SEQ ID NO: 21905 - DNA, 17 bp, synthetic construct
  misc_feature 1..17: note = Oligonucleotide
  source 1..17: mol_type = other DNA
gtggcgggtgcctgtaa

SEQ ID NO: 21906 - DNA, 17 bp, synthetic construct
  misc_feature 1..17: note = Oligonucleotide
  source 1..17: mol_type = other DNA
atggtggcgggtgcctg

SEQ ID NO: 21907 - DNA, 17 bp, synthetic construct
  misc_feature 1..17: note = Oligonucleotide
  source 1..17: mol_type = other DNA
tgcatggtggcgggtgc

SEQ ID NO: 21908 - DNA, 17 bp, synthetic construct
  misc_feature 1..17: note = Oligonucleotide
  source 1..17: mol_type = other DNA
ccgtgcatggtggcggg

SEQ ID NO: 21909 - DNA, 17 bp, synthetic construct
  misc_feature 1..17: note = Oligonucleotide
  source 1..17: mol_type = other DNA
tagccgtgcatggtggc

SEQ ID NO: 21910 - DNA, 17 bp, synthetic construct
  misc_feature 1..17: note = Oligonucleotide
  source 1..17: mol_type = other DNA
aattagccgtgcatggt

SEQ ID NO: 21911 - DNA, 17 bp, synthetic construct
  misc_feature 1..17: note = Oligonucleotide
  source 1..17: mol_type = other DNA
aaaaattagccgtgcat

SEQ ID NO: 21912 - DNA, 17 bp, synthetic construct
  misc_feature 1..17: note = Oligonucleotide
  source 1..17: mol_type = other DNA
aaaaaaaattagccgtg

SEQ ID NO: 21913 - DNA, 17 bp, synthetic construct
  misc_feature 1..17: note = Oligonucleotide
  source 1..17: mol_type = other DNA
aaaaaaaaaaattagcc

SEQ ID NO: 21914 - DNA, 17 bp, synthetic construct
  misc_feature 1..17: note = Oligonucleotide
  source 1..17: mol_type = other DNA
aaaaaaaaaaaaaatta

SEQ ID NO: 21915 - DNA, 17 bp, synthetic construct
  misc_feature 1..17: note = Oligonucleotide
  source 1..17: mol_type = other DNA
aaaaaaaaaaaaaaaaa

SEQ ID NO: 21916 - DNA, 17 bp, synthetic construct
  misc_feature 1..17: note = Oligonucleotide
  source 1..17: mol_type = other DNA
caaaaaaaaaaaaaaaa

SEQ ID NO: 21917 - DNA, 17 bp, synthetic construct
  misc_feature 1..17: note = Oligonucleotide
  source 1..17: mol_type = other DNA
atacaaaaaaaaaaaaa

SEQ ID NO: 21918 - DNA, 17 bp, synthetic construct
  misc_feature 1..17: note = Oligonucleotide
  source 1..17: mol_type = other DNA
aaaatacaaaaaaaaaa

SEQ ID NO: 21919 - DNA, 17 bp, synthetic construct
  misc_feature 1..17: note = Oligonucleotide
  source 1..17: mol_type = other DNA
ctaaaaatacaaaaaaa

SEQ ID NO: 21920 - DNA, 17 bp, synthetic construct
  misc_feature 1..17: note = Oligonucleotide
  source 1..17: mol_type = other DNA
ctactaaaaatacaaaa

SEQ ID NO: 21921 - DNA, 17 bp, synthetic construct
  misc_feature 1..17: note = Oligonucleotide
  source 1..17: mol_type = other DNA
cctctactaaaaataca

SEQ ID NO: 21922 - DNA, 17 bp, synthetic construct
  misc_feature 1..17: note = Oligonucleotide
  source 1..17: mol_type = other DNA
ccgcctctactaaaaat

SEQ ID NO: 21923 - DNA, 17 bp, synthetic construct
  misc_feature 1..17: note = Oligonucleotide
  source 1..17: mol_type = other DNA
accccgcctctactaaa

SEQ ID NO: 21924 - DNA, 17 bp, synthetic construct
  misc_feature 1..17: note = Oligonucleotide
  source 1..17: mol_type = other DNA
gacaccccgcctctact

SEQ ID NO: 21925 - DNA, 17 bp, synthetic construct
  misc_feature 1..17: note = Oligonucleotide
  source 1..17: mol_type = other DNA
ggtgacaccccgcctct

SEQ ID NO: 21926 - DNA, 17 bp, synthetic construct
  misc_feature 1..17: note = Oligonucleotide
  source 1..17: mol_type = other DNA
catggtgacaccccgcc

SEQ ID NO: 21927 - DNA, 17 bp, synthetic construct
  misc_feature 1..17: note = Oligonucleotide
  source 1..17: mol_type = other DNA
caacatggtgacacccc

SEQ ID NO: 21928 - DNA, 17 bp, synthetic construct
  misc_feature 1..17: note = Oligonucleotide
  source 1..17: mol_type = other DNA
ggccaacatggtgacac

SEQ ID NO: 21929 - DNA, 17 bp, synthetic construct
  misc_feature 1..17: note = Oligonucleotide
  source 1..17: mol_type = other DNA
cccggccaacatggtga

SEQ ID NO: 21930 - DNA, 17 bp, synthetic construct
  misc_feature 1..17: note = Oligonucleotide
  source 1..17: mol_type = other DNA
cagcccggccaacatgg

SEQ ID NO: 21931 - DNA, 17 bp, synthetic construct
  misc_feature 1..17: note = Oligonucleotide
  source 1..17: mol_type = other DNA
gaccagcccggccaaca

SEQ ID NO: 21932 - DNA, 17 bp, synthetic construct
  misc_feature 1..17: note = Oligonucleotide
  source 1..17: mol_type = other DNA
cgagaccagcccggcca

SEQ ID NO: 21933 - DNA, 17 bp, synthetic construct
  misc_feature 1..17: note = Oligonucleotide
  source 1..17: mol_type = other DNA
gttcgagaccagcccgg

SEQ ID NO: 21934 - DNA, 17 bp, synthetic construct
  misc_feature 1..17: note = Oligonucleotide
  source 1..17: mol_type = other DNA
ggagttcgagaccagcc

SEQ ID NO: 21935 - DNA, 17 bp, synthetic construct
  misc_feature 1..17: note = Oligonucleotide
  source 1..17: mol_type = other DNA
tcaggagttcgagacca

SEQ ID NO: 21936 - DNA, 17 bp, synthetic construct
  misc_feature 1..17: note = Oligonucleotide
  source 1..17: mol_type = other DNA
aggtcaggagttcgaga

SEQ ID NO: 21937 - DNA, 17 bp, synthetic construct
  misc_feature 1..17: note = Oligonucleotide
  source 1..17: mol_type = other DNA
ctgaggtcaggagttcg

SEQ ID NO: 21938 - DNA, 17 bp, synthetic construct
  misc_feature 1..17: note = Oligonucleotide
  source 1..17: mol_type = other DNA
tacctgaggtcaggagt

SEQ ID NO: 21939 - DNA, 17 bp, synthetic construct
  misc_feature 1..17: note = Oligonucleotide
  source 1..17: mol_type = other DNA
gattacctgaggtcagg

SEQ ID NO: 21940 - DNA, 17 bp, synthetic construct
  misc_feature 1..17: note = Oligonucleotide
  source 1..17: mol_type = other DNA
gcagattacctgaggtc

SEQ ID NO: 21941 - DNA, 17 bp, synthetic construct
  misc_feature 1..17: note = Oligonucleotide
  source 1..17: mol_type = other DNA
caggcagattacctgag

SEQ ID NO: 21942 - DNA, 17 bp, synthetic construct
  misc_feature 1..17: note = Oligonucleotide
  source 1..17: mol_type = other DNA
aggcaggcagattacct

SEQ ID NO: 21943 - DNA, 17 bp, synthetic construct
  misc_feature 1..17: note = Oligonucleotide
  source 1..17: mol_type = other DNA
ccgaggcaggcagatta

SEQ ID NO: 21944 - DNA, 17 bp, synthetic construct
  misc_feature 1..17: note = Oligonucleotide
  source 1..17: mol_type = other DNA
aggccgaggcaggcaga

SEQ ID NO: 21945 - DNA, 17 bp, synthetic construct
  misc_feature 1..17: note = Oligonucleotide
  source 1..17: mol_type = other DNA
gggaggccgaggcaggc

SEQ ID NO: 21946 - DNA, 17 bp, synthetic construct
  misc_feature 1..17: note = Oligonucleotide
  source 1..17: mol_type = other DNA
tttgggaggccgaggca

SEQ ID NO: 21947 - DNA, 17 bp, synthetic construct
  misc_feature 1..17: note = Oligonucleotide
  source 1..17: mol_type = other DNA
cactttgggaggccgag

SEQ ID NO: 21948 - DNA, 17 bp, synthetic construct
  misc_feature 1..17: note = Oligonucleotide
  source 1..17: mol_type = other DNA
cagcactttgggaggcc

SEQ ID NO: 21949 - DNA, 17 bp, synthetic construct
  misc_feature 1..17: note = Oligonucleotide
  source 1..17: mol_type = other DNA
tcccagcactttgggag

SEQ ID NO: 21950 - DNA, 17 bp, synthetic construct
  misc_feature 1..17: note = Oligonucleotide
  source 1..17: mol_type = other DNA
taatcccagcactttgg

SEQ ID NO: 21951 - DNA, 17 bp, synthetic construct
  misc_feature 1..17: note = Oligonucleotide
  source 1..17: mol_type = other DNA
ctgtaatcccagcactt

SEQ ID NO: 21952 - DNA, 17 bp, synthetic construct
  misc_feature 1..17: note = Oligonucleotide
  source 1..17: mol_type = other DNA
cgcctgtaatcccagca

SEQ ID NO: 21953 - DNA, 17 bp, synthetic construct
  misc_feature 1..17: note = Oligonucleotide
  source 1..17: mol_type = other DNA
tcacgcctgtaatccca

SEQ ID NO: 21954 - DNA, 17 bp, synthetic construct
  misc_feature 1..17: note = Oligonucleotide
  source 1..17: mol_type = other DNA
gcctcacgcctgtaatc

SEQ ID NO: 21955 - DNA, 17 bp, synthetic construct
  misc_feature 1..17: note = Oligonucleotide
  source 1..17: mol_type = other DNA
agagcctcacgcctgta

SEQ ID NO: 21956 - DNA, 17 bp, synthetic construct
  misc_feature 1..17: note = Oligonucleotide
  source 1..17: mol_type = other DNA
gaaagagcctcacgcct

SEQ ID NO: 21957 - DNA, 17 bp, synthetic construct
  misc_feature 1..17: note = Oligonucleotide
  source 1..17: mol_type = other DNA
aaagaaagagcctcacg

SEQ ID NO: 21958 - DNA, 17 bp, synthetic construct
  misc_feature 1..17: note = Oligonucleotide
  source 1..17: mol_type = other DNA
cagaaagaaagagcctc

SEQ ID NO: 21959 - DNA, 17 bp, synthetic construct
  misc_feature 1..17: note = Oligonucleotide
  source 1..17: mol_type = other DNA
tcacagaaagaaagagc

SEQ ID NO: 21960 - DNA, 17 bp, synthetic construct
  misc_feature 1..17: note = Oligonucleotide
  source 1..17: mol_type = other DNA
agatcacagaaagaaag

SEQ ID NO: 21961 - DNA, 17 bp, synthetic construct
  misc_feature 1..17: note = Oligonucleotide
  source 1..17: mol_type = other DNA
ctcagatcacagaaaga

SEQ ID NO: 21962 - DNA, 17 bp, synthetic construct
  misc_feature 1..17: note = Oligonucleotide
  source 1..17: mol_type = other DNA
gggctcagatcacagaa

SEQ ID NO: 21963 - DNA, 17 bp, synthetic construct
  misc_feature 1..17: note = Oligonucleotide
  source 1..17: mol_type = other DNA
actgggctcagatcaca

SEQ ID NO: 21964 - DNA, 17 bp, synthetic construct
  misc_feature 1..17: note = Oligonucleotide
  source 1..17: mol_type = other DNA
agaactgggctcagatc

SEQ ID NO: 21965 - DNA, 17 bp, synthetic construct
  misc_feature 1..17: note = Oligonucleotide
  source 1..17: mol_type = other DNA
aacagaactgggctcag

SEQ ID NO: 21966 - DNA, 17 bp, synthetic construct
  misc_feature 1..17: note = Oligonucleotide
  source 1..17: mol_type = other DNA
gggaacagaactgggct

SEQ ID NO: 21967 - DNA, 17 bp, synthetic construct
  misc_feature 1..17: note = Oligonucleotide
  source 1..17: mol_type = other DNA
tctgggaacagaactgg

SEQ ID NO: 21968 - DNA, 17 bp, synthetic construct
  misc_feature 1..17: note = Oligonucleotide
  source 1..17: mol_type = other DNA
aagtctgggaacagaac

SEQ ID NO: 21969 - DNA, 17 bp, synthetic construct
  misc_feature 1..17: note = Oligonucleotide
  source 1..17: mol_type = other DNA
gttaagtctgggaacag

SEQ ID NO: 21970 - DNA, 17 bp, synthetic construct
  misc_feature 1..17: note = Oligonucleotide
  source 1..17: mol_type = other DNA
agagttaagtctgggaa

SEQ ID NO: 21971 - DNA, 17 bp, synthetic construct
  misc_feature 1..17: note = Oligonucleotide
  source 1..17: mol_type = other DNA
ggcagagttaagtctgg

SEQ ID NO: 21972 - DNA, 17 bp, synthetic construct
  misc_feature 1..17: note = Oligonucleotide
  source 1..17: mol_type = other DNA
agaggcagagttaagtc

SEQ ID NO: 21973 - DNA, 17 bp, synthetic construct
  misc_feature 1..17: note = Oligonucleotide
  source 1..17: mol_type = other DNA
accagaggcagagttaa

SEQ ID NO: 21974 - DNA, 17 bp, synthetic construct
  misc_feature 1..17: note = Oligonucleotide
  source 1..17: mol_type = other DNA
atgaccagaggcagagt

SEQ ID NO: 21975 - DNA, 17 bp, synthetic construct
  misc_feature 1..17: note = Oligonucleotide
  source 1..17: mol_type = other DNA
tctatgaccagaggcag

SEQ ID NO: 21976 - DNA, 17 bp, synthetic construct
  misc_feature 1..17: note = Oligonucleotide
  source 1..17: mol_type = other DNA
ccttctatgaccagagg

SEQ ID NO: 21977 - DNA, 17 bp, synthetic construct
  misc_feature 1..17: note = Oligonucleotide
  source 1..17: mol_type = other DNA
gttccttctatgaccag

SEQ ID NO: 21978 - DNA, 17 bp, synthetic construct
  misc_feature 1..17: note = Oligonucleotide
  source 1..17: mol_type = other DNA
ggggttccttctatgac

SEQ ID NO: 21979 - DNA, 17 bp, synthetic construct
  misc_feature 1..17: note = Oligonucleotide
  source 1..17: mol_type = other DNA
gttggggttccttctat

SEQ ID NO: 21980 - DNA, 17 bp, synthetic construct
  misc_feature 1..17: note = Oligonucleotide
  source 1..17: mol_type = other DNA
aaagttggggttccttc

SEQ ID NO: 21981 - DNA, 17 bp, synthetic construct
  misc_feature 1..17: note = Oligonucleotide
  source 1..17: mol_type = other DNA
accaaagttggggttcc

SEQ ID NO: 21982 - DNA, 17 bp, synthetic construct
  misc_feature 1..17: note = Oligonucleotide
  source 1..17: mol_type = other DNA
aggaccaaagttggggt

SEQ ID NO: 21983 - DNA, 17 bp, synthetic construct
  misc_feature 1..17: note = Oligonucleotide
  source 1..17: mol_type = other DNA
tttaggaccaaagttgg

SEQ ID NO: 21984 - DNA, 17 bp, synthetic construct
  misc_feature 1..17: note = Oligonucleotide
  source 1..17: mol_type = other DNA
cagtttaggaccaaagt

SEQ ID NO: 21985 - DNA, 17 bp, synthetic construct
  misc_feature 1..17: note = Oligonucleotide
  source 1..17: mol_type = other DNA
gttcagtttaggaccaa

SEQ ID NO: 21986 - DNA, 17 bp, synthetic construct
  misc_feature 1..17: note = Oligonucleotide
  source 1..17: mol_type = other DNA
agggttcagtttaggac

SEQ ID NO: 21987 - DNA, 17 bp, synthetic construct
  misc_feature 1..17: note = Oligonucleotide
  source 1..17: mol_type = other DNA
ttcagggttcagtttag

SEQ ID NO: 21988 - DNA, 17 bp, synthetic construct
  misc_feature 1..17: note = Oligonucleotide
  source 1..17: mol_type = other DNA
gacttcagggttcagtt

SEQ ID NO: 21989 - DNA, 17 bp, synthetic construct
  misc_feature 1..17: note = Oligonucleotide
  source 1..17: mol_type = other DNA
caggacttcagggttca

SEQ ID NO: 21990 - DNA, 17 bp, synthetic construct
  misc_feature 1..17: note = Oligonucleotide
  source 1..17: mol_type = other DNA
ggccaggacttcagggt

SEQ ID NO: 21991 - DNA, 17 bp, synthetic construct
  misc_feature 1..17: note = Oligonucleotide
  source 1..17: mol_type = other DNA
tgtggccaggacttcag

SEQ ID NO: 21992 - DNA, 17 bp, synthetic construct
  misc_feature 1..17: note = Oligonucleotide
  source 1..17: mol_type = other DNA
tcctgtggccaggactt

SEQ ID NO: 21993 - DNA, 17 bp, synthetic construct
  misc_feature 1..17: note = Oligonucleotide
  source 1..17: mol_type = other DNA
ccttcctgtggccagga

SEQ ID NO: 21994 - DNA, 17 bp, synthetic construct
  misc_feature 1..17: note = Oligonucleotide
  source 1..17: mol_type = other DNA
gtcccttcctgtggcca

SEQ ID NO: 21995 - DNA, 17 bp, synthetic construct
  misc_feature 1..17: note = Oligonucleotide
  source 1..17: mol_type = other DNA
ggggtcccttcctgtgg

SEQ ID NO: 21996 - DNA, 17 bp, synthetic construct
  misc_feature 1..17: note = Oligonucleotide
  source 1..17: mol_type = other DNA
aatggggtcccttcctg

SEQ ID NO: 21997 - DNA, 17 bp, synthetic construct
  misc_feature 1..17: note = Oligonucleotide
  source 1..17: mol_type = other DNA
cagaatggggtcccttc

SEQ ID NO: 21998 - DNA, 17 bp, synthetic construct
  misc_feature 1..17: note = Oligonucleotide
  source 1..17: mol_type = other DNA
aaccagaatggggtccc

SEQ ID NO: 21999 - DNA, 17 bp, synthetic construct
  misc_feature 1..17: note = Oligonucleotide
  source 1..17: mol_type = other DNA
tagaaccagaatggggt

SEQ ID NO: 22000 - DNA, 17 bp, synthetic construct
  misc_feature 1..17: note = Oligonucleotide
  source 1..17: mol_type = other DNA
gcctagaaccagaatgg

SEQ ID NO: 22001 - DNA, 17 bp, synthetic construct
  misc_feature 1..17: note = Oligonucleotide
  source 1..17: mol_type = other DNA
tcagcctagaaccagaa

SEQ ID NO: 22002 - DNA, 17 bp, synthetic construct
  misc_feature 1..17: note = Oligonucleotide
  source 1..17: mol_type = other DNA
ggctcagcctagaacca

SEQ ID NO: 22003 - DNA, 17 bp, synthetic construct
  misc_feature 1..17: note = Oligonucleotide
  source 1..17: mol_type = other DNA
tagggctcagcctagaa

SEQ ID NO: 22004 - DNA, 17 bp, synthetic construct
  misc_feature 1..17: note = Oligonucleotide
  source 1..17: mol_type = other DNA
ggatagggctcagccta

SEQ ID NO: 22005 - DNA, 17 bp, synthetic construct
  misc_feature 1..17: note = Oligonucleotide
  source 1..17: mol_type = other DNA
cagggatagggctcagc

SEQ ID NO: 22006 - DNA, 17 bp, synthetic construct
  misc_feature 1..17: note = Oligonucleotide
  source 1..17: mol_type = other DNA
agccagggatagggctc

SEQ ID NO: 22007 - DNA, 17 bp, synthetic construct
  misc_feature 1..17: note = Oligonucleotide
  source 1..17: mol_type = other DNA
tgaagccagggataggg

SEQ ID NO: 22008 - DNA, 17 bp, synthetic construct
  misc_feature 1..17: note = Oligonucleotide
  source 1..17: mol_type = other DNA
gactgaagccagggata

SEQ ID NO: 22009 - DNA, 17 bp, synthetic construct
  misc_feature 1..17: note = Oligonucleotide
  source 1..17: mol_type = other DNA
caagactgaagccaggg

SEQ ID NO: 22010 - DNA, 17 bp, synthetic construct
  misc_feature 1..17: note = Oligonucleotide
  source 1..17: mol_type = other DNA
aaccaagactgaagcca

SEQ ID NO: 22011 - DNA, 17 bp, synthetic construct
  misc_feature 1..17: note = Oligonucleotide
  source 1..17: mol_type = other DNA
tagaaccaagactgaag

SEQ ID NO: 22012 - DNA, 17 bp, synthetic construct
  misc_feature 1..17: note = Oligonucleotide
  source 1..17: mol_type = other DNA
gggtagaaccaagactg

SEQ ID NO: 22013 - DNA, 17 bp, synthetic construct
  misc_feature 1..17: note = Oligonucleotide
  source 1..17: mol_type = other DNA
ctggggtagaaccaaga

SEQ ID NO: 22014 - DNA, 17 bp, synthetic construct
  misc_feature 1..17: note = Oligonucleotide
  source 1..17: mol_type = other DNA
tggctggggtagaacca

SEQ ID NO: 22015 - DNA, 17 bp, synthetic construct
  misc_feature 1..17: note = Oligonucleotide
  source 1..17: mol_type = other DNA
ctatggctggggtagaa

SEQ ID NO: 22016 - DNA, 17 bp, synthetic construct
  misc_feature 1..17: note = Oligonucleotide
  source 1..17: mol_type = other DNA
cttctatggctggggta

SEQ ID NO: 22017 - DNA, 17 bp, synthetic construct
  misc_feature 1..17: note = Oligonucleotide
  source 1..17: mol_type = other DNA
ttccttctatggctggg

SEQ ID NO: 22018 - DNA, 17 bp, synthetic construct
  misc_feature 1..17: note = Oligonucleotide
  source 1..17: mol_type = other DNA
gggttccttctatggct

SEQ ID NO: 22019 - DNA, 17 bp, synthetic construct
  misc_feature 1..17: note = Oligonucleotide
  source 1..17: mol_type = other DNA
aaagggttccttctatg

SEQ ID NO: 22020 - DNA, 17 bp, synthetic construct
  misc_feature 1..17: note = Oligonucleotide
  source 1..17: mol_type = other DNA
ggaaaagggttccttct

SEQ ID NO: 22021 - DNA, 17 bp, synthetic construct
  misc_feature 1..17: note = Oligonucleotide
  source 1..17: mol_type = other DNA
ccaggaaaagggttcct

SEQ ID NO: 22022 - DNA, 17 bp, synthetic construct
  misc_feature 1..17: note = Oligonucleotide
  source 1..17: mol_type = other DNA
ggaccaggaaaagggtt

SEQ ID NO: 22023 - DNA, 17 bp, synthetic construct
  misc_feature 1..17: note = Oligonucleotide
  source 1..17: mol_type = other DNA
tggggaccaggaaaagg

SEQ ID NO: 22024 - DNA, 17 bp, synthetic construct
  misc_feature 1..17: note = Oligonucleotide
  source 1..17: mol_type = other DNA
ttctggggaccaggaaa

SEQ ID NO: 22025 - DNA, 17 bp, synthetic construct
  misc_feature 1..17: note = Oligonucleotide
  source 1..17: mol_type = other DNA
taattctggggaccagg

SEQ ID NO: 22026 - DNA, 17 bp, synthetic construct
  misc_feature 1..17: note = Oligonucleotide
  source 1..17: mol_type = other DNA
ggataattctggggacc

SEQ ID NO: 22027 - DNA, 17 bp, synthetic construct
  misc_feature 1..17: note = Oligonucleotide
  source 1..17: mol_type = other DNA
cagggataattctgggg

SEQ ID NO: 22028 - DNA, 17 bp, synthetic construct
  misc_feature 1..17: note = Oligonucleotide
  source 1..17: mol_type = other DNA
ggtcagggataattctg

SEQ ID NO: 22029 - DNA, 17 bp, synthetic construct
  misc_feature 1..17: note = Oligonucleotide
  source 1..17: mol_type = other DNA
tgaggtcagggataatt

SEQ ID NO: 22030 - DNA, 17 bp, synthetic construct
  misc_feature 1..17: note = Oligonucleotide
  source 1..17: mol_type = other DNA
gagtgaggtcagggata

SEQ ID NO: 22031 - DNA, 17 bp, synthetic construct
  misc_feature 1..17: note = Oligonucleotide
  source 1..17: mol_type = other DNA
catgagtgaggtcaggg

SEQ ID NO: 22032 - DNA, 17 bp, synthetic construct
  misc_feature 1..17: note = Oligonucleotide
  source 1..17: mol_type = other DNA
gttcatgagtgaggtca

SEQ ID NO: 22033 - DNA, 17 bp, synthetic construct
  misc_feature 1..17: note = Oligonucleotide
  source 1..17: mol_type = other DNA
ttggttcatgagtgagg

SEQ ID NO: 22034 - DNA, 17 bp, synthetic construct
  misc_feature 1..17: note = Oligonucleotide
  source 1..17: mol_type = other DNA
ggcttggttcatgagtg

SEQ ID NO: 22035 - DNA, 17 bp, synthetic construct
  misc_feature 1..17: note = Oligonucleotide
  source 1..17: mol_type = other DNA
cagggcttggttcatga

SEQ ID NO: 22036 - DNA, 17 bp, synthetic construct
  misc_feature 1..17: note = Oligonucleotide
  source 1..17: mol_type = other DNA
ggtcagggcttggttca

SEQ ID NO: 22037 - DNA, 17 bp, synthetic construct
  misc_feature 1..17: note = Oligonucleotide
  source 1..17: mol_type = other DNA
cagggtcagggcttggt

SEQ ID NO: 22038 - DNA, 17 bp, synthetic construct
  misc_feature 1..17: note = Oligonucleotide
  source 1..17: mol_type = other DNA
ggacagggtcagggctt

SEQ ID NO: 22039 - DNA, 17 bp, synthetic construct
  misc_feature 1..17: note = Oligonucleotide
  source 1..17: mol_type = other DNA
caaggacagggtcaggg

SEQ ID NO: 22040 - DNA, 17 bp, synthetic construct
  misc_feature 1..17: note = Oligonucleotide
  source 1..17: mol_type = other DNA
tggcaaggacagggtca

SEQ ID NO: 22041 - DNA, 17 bp, synthetic construct
  misc_feature 1..17: note = Oligonucleotide
  source 1..17: mol_type = other DNA
ctgtggcaaggacaggg

SEQ ID NO: 22042 - DNA, 17 bp, synthetic construct
  misc_feature 1..17: note = Oligonucleotide
  source 1..17: mol_type = other DNA
agcctgtggcaaggaca

SEQ ID NO: 22043 - DNA, 17 bp, synthetic construct
  misc_feature 1..17: note = Oligonucleotide
  source 1..17: mol_type = other DNA
ctcagcctgtggcaagg

SEQ ID NO: 22044 - DNA, 17 bp, synthetic construct
  misc_feature 1..17: note = Oligonucleotide
  source 1..17: mol_type = other DNA
cagctcagcctgtggca

SEQ ID NO: 22045 - DNA, 17 bp, synthetic construct
  misc_feature 1..17: note = Oligonucleotide
  source 1..17: mol_type = other DNA
gggcagctcagcctgtg

SEQ ID NO: 22046 - DNA, 17 bp, synthetic construct
  misc_feature 1..17: note = Oligonucleotide
  source 1..17: mol_type = other DNA
atggggcagctcagcct

SEQ ID NO: 22047 - DNA, 17 bp, synthetic construct
  misc_feature 1..17: note = Oligonucleotide
  source 1..17: mol_type = other DNA
ggcatggggcagctcag

SEQ ID NO: 22048 - DNA, 17 bp, synthetic construct
  misc_feature 1..17: note = Oligonucleotide
  source 1..17: mol_type = other DNA
cttggcatggggcagct

SEQ ID NO: 22049 - DNA, 17 bp, synthetic construct
  misc_feature 1..17: note = Oligonucleotide
  source 1..17: mol_type = other DNA
ctgcttggcatggggca

SEQ ID NO: 22050 - DNA, 17 bp, synthetic construct
  misc_feature 1..17: note = Oligonucleotide
  source 1..17: mol_type = other DNA
cacctgcttggcatggg

SEQ ID NO: 22051 - DNA, 17 bp, synthetic construct
  misc_feature 1..17: note = Oligonucleotide
  source 1..17: mol_type = other DNA
gaccacctgcttggcat

SEQ ID NO: 22052 - DNA, 17 bp, synthetic construct
  misc_feature 1..17: note = Oligonucleotide
  source 1..17: mol_type = other DNA
taagaccacctgcttgg

SEQ ID NO: 22053 - DNA, 17 bp, synthetic construct
  misc_feature 1..17: note = Oligonucleotide
  source 1..17: mol_type = other DNA
agttaagaccacctgct

SEQ ID NO: 22054 - DNA, 17 bp, synthetic construct
  misc_feature 1..17: note = Oligonucleotide
  source 1..17: mol_type = other DNA
tgcagttaagaccacct

SEQ ID NO: 22055 - DNA, 17 bp, synthetic construct
  misc_feature 1..17: note = Oligonucleotide
  source 1..17: mol_type = other DNA
aactgcagttaagacca

SEQ ID NO: 22056 - DNA, 17 bp, synthetic construct
  misc_feature 1..17: note = Oligonucleotide
  source 1..17: mol_type = other DNA
ctaaactgcagttaaga

SEQ ID NO: 22057 - DNA, 17 bp, synthetic construct
  misc_feature 1..17: note = Oligonucleotide
  source 1..17: mol_type = other DNA
gaactaaactgcagtta

SEQ ID NO: 22058 - DNA, 17 bp, synthetic construct
  misc_feature 1..17: note = Oligonucleotide
  source 1..17: mol_type = other DNA
cctgaactaaactgcag

SEQ ID NO: 22059 - DNA, 17 bp, synthetic construct
  misc_feature 1..17: note = Oligonucleotide
  source 1..17: mol_type = other DNA
caccctgaactaaactg

SEQ ID NO: 22060 - DNA, 17 bp, synthetic construct
  misc_feature 1..17: note = Oligonucleotide
  source 1..17: mol_type = other DNA
ctccaccctgaactaaa

SEQ ID NO: 22061 - DNA, 17 bp, synthetic construct
  misc_feature 1..17: note = Oligonucleotide
  source 1..17: mol_type = other DNA
gttctccaccctgaact

SEQ ID NO: 22062 - DNA, 17 bp, synthetic construct
  misc_feature 1..17: note = Oligonucleotide
  source 1..17: mol_type = other DNA
gctgttctccaccctga

SEQ ID NO: 22063 - DNA, 17 bp, synthetic construct
  misc_feature 1..17: note = Oligonucleotide
  source 1..17: mol_type = other DNA
gtagctgttctccaccc

SEQ ID NO: 22064 - DNA, 17 bp, synthetic construct
  misc_feature 1..17: note = Oligonucleotide
  source 1..17: mol_type = other DNA
ttggtagctgttctcca

SEQ ID NO: 22065 - DNA, 17 bp, synthetic construct
  misc_feature 1..17: note = Oligonucleotide
  source 1..17: mol_type = other DNA
acgttggtagctgttct

SEQ ID NO: 22066 - DNA, 17 bp, synthetic construct
  misc_feature 1..17: note = Oligonucleotide
  source 1..17: mol_type = other DNA
tggacgttggtagctgt

SEQ ID NO: 22067 - DNA, 17 bp, synthetic construct
  misc_feature 1..17: note = Oligonucleotide
  source 1..17: mol_type = other DNA
caatggacgttggtagc

SEQ ID NO: 22068 - DNA, 17 bp, synthetic construct
  misc_feature 1..17: note = Oligonucleotide
  source 1..17: mol_type = other DNA
gcccaatggacgttggt

SEQ ID NO: 22069 - DNA, 17 bp, synthetic construct
  misc_feature 1..17: note = Oligonucleotide
  source 1..17: mol_type = other DNA
tcagcccaatggacgtt

SEQ ID NO: 22070 - DNA, 17 bp, synthetic construct
  misc_feature 1..17: note = Oligonucleotide
  source 1..17: mol_type = other DNA
acgtcagcccaatggac

SEQ ID NO: 22071 - DNA, 17 bp, synthetic construct
  misc_feature 1..17: note = Oligonucleotide
  source 1..17: mol_type = other DNA
accacgtcagcccaatg

SEQ ID NO: 22072 - DNA, 17 bp, synthetic construct
  misc_feature 1..17: note = Oligonucleotide
  source 1..17: mol_type = other DNA
ctgaccacgtcagccca

SEQ ID NO: 22073 - DNA, 17 bp, synthetic construct
  misc_feature 1..17: note = Oligonucleotide
  source 1..17: mol_type = other DNA
attctgaccacgtcagc

SEQ ID NO: 22074 - DNA, 17 bp, synthetic construct
  misc_feature 1..17: note = Oligonucleotide
  source 1..17: mol_type = other DNA
aaaattctgaccacgtc

SEQ ID NO: 22075 - DNA, 17 bp, synthetic construct
  misc_feature 1..17: note = Oligonucleotide
  source 1..17: mol_type = other DNA
gtgaaaattctgaccac

SEQ ID NO: 22076 - DNA, 17 bp, synthetic construct
  misc_feature 1..17: note = Oligonucleotide
  source 1..17: mol_type = other DNA
atggtgaaaattctgac

SEQ ID NO: 22077 - DNA, 17 bp, synthetic construct
  misc_feature 1..17: note = Oligonucleotide
  source 1..17: mol_type = other DNA
gctatggtgaaaattct

SEQ ID NO: 22078 - DNA, 17 bp, synthetic construct
  misc_feature 1..17: note = Oligonucleotide
  source 1..17: mol_type = other DNA
atagctatggtgaaaat

SEQ ID NO: 22079 - DNA, 17 bp, synthetic construct
  misc_feature 1..17: note = Oligonucleotide
  source 1..17: mol_type = other DNA
ggaatagctatggtgaa

SEQ ID NO: 22080 - DNA, 17 bp, synthetic construct
  misc_feature 1..17: note = Oligonucleotide
  source 1..17: mol_type = other DNA
tttggaatagctatggt

SEQ ID NO: 22081 - DNA, 17 bp, synthetic construct
  misc_feature 1..17: note = Oligonucleotide
  source 1..17: mol_type = other DNA
ttatttggaatagctat

SEQ ID NO: 22082 - DNA, 17 bp, synthetic construct
  misc_feature 1..17: note = Oligonucleotide
  source 1..17: mol_type = other DNA
attttatttggaatagc

SEQ ID NO: 22083 - DNA, 17 bp, synthetic construct
  misc_feature 1..17: note = Oligonucleotide
  source 1..17: mol_type = other DNA
tttattttatttggaat

SEQ ID NO: 22084 - DNA, 17 bp, synthetic construct
  misc_feature 1..17: note = Oligonucleotide
  source 1..17: mol_type = other DNA
ggttttattttatttgg

SEQ ID NO: 22085 - DNA, 17 bp, synthetic construct
  misc_feature 1..17: note = Oligonucleotide
  source 1..17: mol_type = other DNA
ttgggttttattttatt

SEQ ID NO: 22086 - DNA, 17 bp, synthetic construct
  misc_feature 1..17: note = Oligonucleotide
  source 1..17: mol_type = other DNA
tctttgggttttatttt

SEQ ID NO: 22087 - DNA, 17 bp, synthetic construct
  misc_feature 1..17: note = Oligonucleotide
  source 1..17: mol_type = other DNA
ttttctttgggttttat

SEQ ID NO: 22088 - DNA, 17 bp, synthetic construct
  misc_feature 1..17: note = Oligonucleotide
  source 1..17: mol_type = other DNA
tttttttctttgggttt

SEQ ID NO: 22089 - DNA, 17 bp, synthetic construct
  misc_feature 1..17: note = Oligonucleotide
  source 1..17: mol_type = other DNA
ttgtttttttctttggg

SEQ ID NO: 22090 - DNA, 17 bp, synthetic construct
  misc_feature 1..17: note = Oligonucleotide
  source 1..17: mol_type = other DNA
tttttgtttttttcttt

SEQ ID NO: 22091 - DNA, 17 bp, synthetic construct
  misc_feature 1..17: note = Oligonucleotide
  source 1..17: mol_type = other DNA
ggttttttgtttttttc

SEQ ID NO: 22092 - DNA, 17 bp, synthetic construct
  misc_feature 1..17: note = Oligonucleotide
  source 1..17: mol_type = other DNA
tggggttttttgttttt

SEQ ID NO: 22093 - DNA, 17 bp, synthetic construct
  misc_feature 1..17: note = Oligonucleotide
  source 1..17: mol_type = other DNA
acatggggttttttgtt

SEQ ID NO: 22094 - DNA, 17 bp, synthetic construct
  misc_feature 1..17: note = Oligonucleotide
  source 1..17: mol_type = other DNA
tctacatggggtttttt

SEQ ID NO: 22095 - DNA, 17 bp, synthetic construct
  misc_feature 1..17: note = Oligonucleotide
  source 1..17: mol_type = other DNA
ttatctacatggggttt

SEQ ID NO: 22096 - DNA, 17 bp, synthetic construct
  misc_feature 1..17: note = Oligonucleotide
  source 1..17: mol_type = other DNA
gaattatctacatgggg

SEQ ID NO: 22097 - DNA, 17 bp, synthetic construct
  misc_feature 1..17: note = Oligonucleotide
  source 1..17: mol_type = other DNA
tctgaattatctacatg

SEQ ID NO: 22098 - DNA, 17 bp, synthetic construct
  misc_feature 1..17: note = Oligonucleotide
  source 1..17: mol_type = other DNA
cattctgaattatctac

SEQ ID NO: 22099 - DNA, 17 bp, synthetic construct
  misc_feature 1..17: note = Oligonucleotide
  source 1..17: mol_type = other DNA
tttcattctgaattatc

SEQ ID NO: 22100 - DNA, 17 bp, synthetic construct
  misc_feature 1..17: note = Oligonucleotide
  source 1..17: mol_type = other DNA
ccttttcattctgaatt

SEQ ID NO: 22101 - DNA, 17 bp, synthetic construct
  misc_feature 1..17: note = Oligonucleotide
  source 1..17: mol_type = other DNA
tctccttttcattctga

SEQ ID NO: 22102 - DNA, 17 bp, synthetic construct
  misc_feature 1..17: note = Oligonucleotide
  source 1..17: mol_type = other DNA
ttctctccttttcattc

SEQ ID NO: 22103 - DNA, 17 bp, synthetic construct
  misc_feature 1..17: note = Oligonucleotide
  source 1..17: mol_type = other DNA
ggtttctctccttttca

SEQ ID NO: 22104 - DNA, 17 bp, synthetic construct
  misc_feature 1..17: note = Oligonucleotide
  source 1..17: mol_type = other DNA
tttggtttctctccttt

SEQ ID NO: 22105 - DNA, 17 bp, synthetic construct
  misc_feature 1..17: note = Oligonucleotide
  source 1..17: mol_type = other DNA
ggctttggtttctctcc

SEQ ID NO: 22106 - DNA, 17 bp, synthetic construct
  misc_feature 1..17: note = Oligonucleotide
  source 1..17: mol_type = other DNA
tctggctttggtttctc

SEQ ID NO: 22107 - DNA, 17 bp, synthetic construct
  misc_feature 1..17: note = Oligonucleotide
  source 1..17: mol_type = other DNA
gcctctggctttggttt

SEQ ID NO: 22108 - DNA, 17 bp, synthetic construct
  misc_feature 1..17: note = Oligonucleotide
  source 1..17: mol_type = other DNA
gaagcctctggctttgg

SEQ ID NO: 22109 - DNA, 17 bp, synthetic construct
  misc_feature 1..17: note = Oligonucleotide
  source 1..17: mol_type = other DNA
atggaagcctctggctt

SEQ ID NO: 22110 - DNA, 17 bp, synthetic construct
  misc_feature 1..17: note = Oligonucleotide
  source 1..17: mol_type = other DNA
gctatggaagcctctgg

SEQ ID NO: 22111 - DNA, 17 bp, synthetic construct
  misc_feature 1..17: note = Oligonucleotide
  source 1..17: mol_type = other DNA
cgagctatggaagcctc

SEQ ID NO: 22112 - DNA, 17 bp, synthetic construct
  misc_feature 1..17: note = Oligonucleotide
  source 1..17: mol_type = other DNA
taacgagctatggaagc

SEQ ID NO: 22113 - DNA, 17 bp, synthetic construct
  misc_feature 1..17: note = Oligonucleotide
  source 1..17: mol_type = other DNA
agataacgagctatgga

SEQ ID NO: 22114 - DNA, 17 bp, synthetic construct
  misc_feature 1..17: note = Oligonucleotide
  source 1..17: mol_type = other DNA
actagataacgagctat

SEQ ID NO: 22115 - DNA, 17 bp, synthetic construct
  misc_feature 1..17: note = Oligonucleotide
  source 1..17: mol_type = other DNA
cgtactagataacgagc

SEQ ID NO: 22116 - DNA, 17 bp, synthetic construct
  misc_feature 1..17: note = Oligonucleotide
  source 1..17: mol_type = other DNA
ctgcgtactagataacg

SEQ ID NO: 22117 - DNA, 17 bp, synthetic construct
  misc_feature 1..17: note = Oligonucleotide
  source 1..17: mol_type = other DNA
cccctgcgtactagata

SEQ ID NO: 22118 - DNA, 17 bp, synthetic construct
  misc_feature 1..17: note = Oligonucleotide
  source 1..17: mol_type = other DNA
ttgcccctgcgtactag

SEQ ID NO: 22119 - DNA, 17 bp, synthetic construct
  misc_feature 1..17: note = Oligonucleotide
  source 1..17: mol_type = other DNA
cccttgcccctgcgtac

SEQ ID NO: 22120 - DNA, 17 bp, synthetic construct
  misc_feature 1..17: note = Oligonucleotide
  source 1..17: mol_type = other DNA
aaccccttgcccctgcg

SEQ ID NO: 22121 - DNA, 17 bp, synthetic construct
  misc_feature 1..17: note = Oligonucleotide
  source 1..17: mol_type = other DNA
cccaaccccttgcccct

SEQ ID NO: 22122 - DNA, 17 bp, synthetic construct
  misc_feature 1..17: note = Oligonucleotide
  source 1..17: mol_type = other DNA
gaccccaaccccttgcc

SEQ ID NO: 22123 - DNA, 17 bp, synthetic construct
  misc_feature 1..17: note = Oligonucleotide
  source 1..17: mol_type = other DNA
caggaccccaacccctt

SEQ ID NO: 22124 - DNA, 17 bp, synthetic construct
  misc_feature 1..17: note = Oligonucleotide
  source 1..17: mol_type = other DNA
cctcaggaccccaaccc

SEQ ID NO: 22125 - DNA, 17 bp, synthetic construct
  misc_feature 1..17: note = Oligonucleotide
  source 1..17: mol_type = other DNA
gggcctcaggaccccaa

SEQ ID NO: 22126 - DNA, 17 bp, synthetic construct
  misc_feature 1..17: note = Oligonucleotide
  source 1..17: mol_type = other DNA
tgggggcctcaggaccc

SEQ ID NO: 22127 - DNA, 17 bp, synthetic construct
  misc_feature 1..17: note = Oligonucleotide
  source 1..17: mol_type = other DNA
ttgtgggggcctcagga

SEQ ID NO: 22128 - DNA, 17 bp, synthetic construct
  misc_feature 1..17: note = Oligonucleotide
  source 1..17: mol_type = other DNA
gccttgtgggggcctca

SEQ ID NO: 22129 - DNA, 17 bp, synthetic construct
  misc_feature 1..17: note = Oligonucleotide
  source 1..17: mol_type = other DNA
ccagccttgtgggggcc

SEQ ID NO: 22130 - DNA, 17 bp, synthetic construct
  misc_feature 1..17: note = Oligonucleotide
  source 1..17: mol_type = other DNA
ctcccagccttgtgggg

SEQ ID NO: 22131 - DNA, 17 bp, synthetic construct
  misc_feature 1..17: note = Oligonucleotide
  source 1..17: mol_type = other DNA
cgtctcccagccttgtg

SEQ ID NO: 22132 - DNA, 17 bp, synthetic construct
  misc_feature 1..17: note = Oligonucleotide
  source 1..17: mol_type = other DNA
ccacgtctcccagcctt

SEQ ID NO: 22133 - DNA, 17 bp, synthetic construct
  misc_feature 1..17: note = Oligonucleotide
  source 1..17: mol_type = other DNA
cagccacgtctcccagc

SEQ ID NO: 22134 - DNA, 17 bp, synthetic construct
  misc_feature 1..17: note = Oligonucleotide
  source 1..17: mol_type = other DNA
gtccagccacgtctccc

SEQ ID NO: 22135 - DNA, 17 bp, synthetic construct
  misc_feature 1..17: note = Oligonucleotide
  source 1..17: mol_type = other DNA
caggtccagccacgtct

SEQ ID NO: 22136 - DNA, 17 bp, synthetic construct
  misc_feature 1..17: note = Oligonucleotide
  source 1..17: mol_type = other DNA
tcacaggtccagccacg

SEQ ID NO: 22137 - DNA, 17 bp, synthetic construct
  misc_feature 1..17: note = Oligonucleotide
  source 1..17: mol_type = other DNA
ttctcacaggtccagcc

SEQ ID NO: 22138 - DNA, 17 bp, synthetic construct
  misc_feature 1..17: note = Oligonucleotide
  source 1..17: mol_type = other DNA
cgcttctcacaggtcca

SEQ ID NO: 22139 - DNA, 17 bp, synthetic construct
  misc_feature 1..17: note = Oligonucleotide
  source 1..17: mol_type = other DNA
tcccgcttctcacaggt

SEQ ID NO: 22140 - DNA, 17 bp, synthetic construct
  misc_feature 1..17: note = Oligonucleotide
  source 1..17: mol_type = other DNA
ccttcccgcttctcaca

SEQ ID NO: 22141 - DNA, 17 bp, synthetic construct
  misc_feature 1..17: note = Oligonucleotide
  source 1..17: mol_type = other DNA
taaccttcccgcttctc

SEQ ID NO: 22142 - DNA, 17 bp, synthetic construct
  misc_feature 1..17: note = Oligonucleotide
  source 1..17: mol_type = other DNA
ttttaaccttcccgctt

SEQ ID NO: 22143 - DNA, 17 bp, synthetic construct
  misc_feature 1..17: note = Oligonucleotide
  source 1..17: mol_type = other DNA
ggtttttaaccttcccg

SEQ ID NO: 22144 - DNA, 17 bp, synthetic construct
  misc_feature 1..17: note = Oligonucleotide
  source 1..17: mol_type = other DNA
cttggtttttaaccttc

SEQ ID NO: 22145 - DNA, 17 bp, synthetic construct
  misc_feature 1..17: note = Oligonucleotide
  source 1..17: mol_type = other DNA
gggcttggtttttaacc

SEQ ID NO: 22146 - DNA, 17 bp, synthetic construct
  misc_feature 1..17: note = Oligonucleotide
  source 1..17: mol_type = other DNA
gttgggcttggttttta

SEQ ID NO: 22147 - DNA, 17 bp, synthetic construct
  misc_feature 1..17: note = Oligonucleotide
  source 1..17: mol_type = other DNA
gtggttgggcttggttt

SEQ ID NO: 22148 - DNA, 17 bp, synthetic construct
  misc_feature 1..17: note = Oligonucleotide
  source 1..17: mol_type = other DNA
ccagtggttgggcttgg

SEQ ID NO: 22149 - DNA, 17 bp, synthetic construct
  misc_feature 1..17: note = Oligonucleotide
  source 1..17: mol_type = other DNA
attccagtggttgggct

SEQ ID NO: 22150 - DNA, 17 bp, synthetic construct
  misc_feature 1..17: note = Oligonucleotide
  source 1..17: mol_type = other DNA
ctaattccagtggttgg

SEQ ID NO: 22151 - DNA, 17 bp, synthetic construct
  misc_feature 1..17: note = Oligonucleotide
  source 1..17: mol_type = other DNA
aagctaattccagtggt

SEQ ID NO: 22152 - DNA, 17 bp, synthetic construct
  misc_feature 1..17: note = Oligonucleotide
  source 1..17: mol_type = other DNA
tcgaagctaattccagt

SEQ ID NO: 22153 - DNA, 17 bp, synthetic construct
  misc_feature 1..17: note = Oligonucleotide
  source 1..17: mol_type = other DNA
ctttcgaagctaattcc

SEQ ID NO: 22154 - DNA, 17 bp, synthetic construct
  misc_feature 1..17: note = Oligonucleotide
  source 1..17: mol_type = other DNA
gttctttcgaagctaat

SEQ ID NO: 22155 - DNA, 17 bp, synthetic construct
  misc_feature 1..17: note = Oligonucleotide
  source 1..17: mol_type = other DNA
ccagttctttcgaagct

SEQ ID NO: 22156 - DNA, 17 bp, synthetic construct
  misc_feature 1..17: note = Oligonucleotide
  source 1..17: mol_type = other DNA
tttccagttctttcgaa

SEQ ID NO: 22157 - DNA, 17 bp, synthetic construct
  misc_feature 1..17: note = Oligonucleotide
  source 1..17: mol_type = other DNA
tgatttccagttctttc

SEQ ID NO: 22158 - DNA, 17 bp, synthetic construct
  misc_feature 1..17: note = Oligonucleotide
  source 1..17: mol_type = other DNA
ctctgatttccagttct

SEQ ID NO: 22159 - DNA, 17 bp, synthetic construct
  misc_feature 1..17: note = Oligonucleotide
  source 1..17: mol_type = other DNA
cttctctgatttccagt

SEQ ID NO: 22160 - DNA, 17 bp, synthetic construct
  misc_feature 1..17: note = Oligonucleotide
  source 1..17: mol_type = other DNA
attcttctctgatttcc

SEQ ID NO: 22161 - DNA, 17 bp, synthetic construct
  misc_feature 1..17: note = Oligonucleotide
  source 1..17: mol_type = other DNA
catattcttctctgatt

SEQ ID NO: 22162 - DNA, 17 bp, synthetic construct
  misc_feature 1..17: note = Oligonucleotide
  source 1..17: mol_type = other DNA
tttcatattcttctctg

SEQ ID NO: 22163 - DNA, 17 bp, synthetic construct
  misc_feature 1..17: note = Oligonucleotide
  source 1..17: mol_type = other DNA
gtttttcatattcttct

SEQ ID NO: 22164 - DNA, 17 bp, synthetic construct
  misc_feature 1..17: note = Oligonucleotide
  source 1..17: mol_type = other DNA
aatgtttttcatattct

SEQ ID NO: 22165 - DNA, 17 bp, synthetic construct
  misc_feature 1..17: note = Oligonucleotide
  source 1..17: mol_type = other DNA
tttaatgtttttcatat

SEQ ID NO: 22166 - DNA, 17 bp, synthetic construct
  misc_feature 1..17: note = Oligonucleotide
  source 1..17: mol_type = other DNA
tattttaatgtttttca

SEQ ID NO: 22167 - DNA, 17 bp, synthetic construct
  misc_feature 1..17: note = Oligonucleotide
  source 1..17: mol_type = other DNA
ctttattttaatgtttt

SEQ ID NO: 22168 - DNA, 17 bp, synthetic construct
  misc_feature 1..17: note = Oligonucleotide
  source 1..17: mol_type = other DNA
ttactttattttaatgt

SEQ ID NO: 22169 - DNA, 17 bp, synthetic construct
  misc_feature 1..17: note = Oligonucleotide
  source 1..17: mol_type = other DNA
aatttactttattttaa

SEQ ID NO: 22170 - DNA, 17 bp, synthetic construct
  misc_feature 1..17: note = Oligonucleotide
  source 1..17: mol_type = other DNA
gacaatttactttattt

SEQ ID NO: 22171 - DNA, 17 bp, synthetic construct
  misc_feature 1..17: note = Oligonucleotide
  source 1..17: mol_type = other DNA
tgtgacaatttacttta

SEQ ID NO: 22172 - DNA, 17 bp, synthetic construct
  misc_feature 1..17: note = Oligonucleotide
  source 1..17: mol_type = other DNA
ctttgtgacaatttact

SEQ ID NO: 22173 - DNA, 17 bp, synthetic construct
  misc_feature 1..17: note = Oligonucleotide
  source 1..17: mol_type = other DNA
aatctttgtgacaattt

SEQ ID NO: 22174 - DNA, 17 bp, synthetic construct
  misc_feature 1..17: note = Oligonucleotide
  source 1..17: mol_type = other DNA
tttaatctttgtgacaa

SEQ ID NO: 22175 - DNA, 17 bp, synthetic construct
  misc_feature 1..17: note = Oligonucleotide
  source 1..17: mol_type = other DNA
tcttttaatctttgtga

SEQ ID NO: 22176 - DNA, 17 bp, synthetic construct
  misc_feature 1..17: note = Oligonucleotide
  source 1..17: mol_type = other DNA
agttcttttaatctttg

SEQ ID NO: 22177 - DNA, 17 bp, synthetic construct
  misc_feature 1..17: note = Oligonucleotide
  source 1..17: mol_type = other DNA
gttagttcttttaatct

SEQ ID NO: 22178 - DNA, 17 bp, synthetic construct
  misc_feature 1..17: note = Oligonucleotide
  source 1..17: mol_type = other DNA
tctgttagttcttttaa

SEQ ID NO: 22179 - DNA, 17 bp, synthetic construct
  misc_feature 1..17: note = Oligonucleotide
  source 1..17: mol_type = other DNA
agttctgttagttcttt

SEQ ID NO: 22180 - DNA, 17 bp, synthetic construct
  misc_feature 1..17: note = Oligonucleotide
  source 1..17: mol_type = other DNA
attagttctgttagttc

SEQ ID NO: 22181 - DNA, 17 bp, synthetic construct
  misc_feature 1..17: note = Oligonucleotide
  source 1..17: mol_type = other DNA
ctcattagttctgttag

SEQ ID NO: 22182 - DNA, 17 bp, synthetic construct
  misc_feature 1..17: note = Oligonucleotide
  source 1..17: mol_type = other DNA
tctctcattagttctgt

SEQ ID NO: 22183 - DNA, 17 bp, synthetic construct
  misc_feature 1..17: note = Oligonucleotide
  source 1..17: mol_type = other DNA
tattctctcattagttc

SEQ ID NO: 22184 - DNA, 17 bp, synthetic construct
  misc_feature 1..17: note = Oligonucleotide
  source 1..17: mol_type = other DNA
tcctattctctcattag

SEQ ID NO: 22185 - DNA, 17 bp, synthetic construct
  misc_feature 1..17: note = Oligonucleotide
  source 1..17: mol_type = other DNA
ctgtcctattctctcat

SEQ ID NO: 22186 - DNA, 17 bp, synthetic construct
  misc_feature 1..17: note = Oligonucleotide
  source 1..17: mol_type = other DNA
gttctgtcctattctct

SEQ ID NO: 22187 - DNA, 17 bp, synthetic construct
  misc_feature 1..17: note = Oligonucleotide
  source 1..17: mol_type = other DNA
tttgttctgtcctattc

SEQ ID NO: 22188 - DNA, 17 bp, synthetic construct
  misc_feature 1..17: note = Oligonucleotide
  source 1..17: mol_type = other DNA
ttgtttgttctgtccta

SEQ ID NO: 22189 - DNA, 17 bp, synthetic construct
  misc_feature 1..17: note = Oligonucleotide
  source 1..17: mol_type = other DNA
tgcttgtttgttctgtc

SEQ ID NO: 22190 - DNA, 17 bp, synthetic construct
  misc_feature 1..17: note = Oligonucleotide
  source 1..17: mol_type = other DNA
ttttgcttgtttgttct

SEQ ID NO: 22191 - DNA, 17 bp, synthetic construct
  misc_feature 1..17: note = Oligonucleotide
  source 1..17: mol_type = other DNA
tttttttgcttgtttgt

SEQ ID NO: 22192 - DNA, 17 bp, synthetic construct
  misc_feature 1..17: note = Oligonucleotide
  source 1..17: mol_type = other DNA
ttctttttttgcttgtt

SEQ ID NO: 22193 - DNA, 17 bp, synthetic construct
  misc_feature 1..17: note = Oligonucleotide
  source 1..17: mol_type = other DNA
ttattctttttttgctt

SEQ ID NO: 22194 - DNA, 17 bp, synthetic construct
  misc_feature 1..17: note = Oligonucleotide
  source 1..17: mol_type = other DNA
tgcttattctttttttg

SEQ ID NO: 22195 - DNA, 17 bp, synthetic construct
  misc_feature 1..17: note = Oligonucleotide
  source 1..17: mol_type = other DNA
atgtgcttattcttttt

SEQ ID NO: 22196 - DNA, 17 bp, synthetic construct
  misc_feature 1..17: note = Oligonucleotide
  source 1..17: mol_type = other DNA
aaaatgtgcttattctt

SEQ ID NO: 22197 - DNA, 17 bp, synthetic construct
  misc_feature 1..17: note = Oligonucleotide
  source 1..17: mol_type = other DNA
tctaaaatgtgcttatt

SEQ ID NO: 22198 - DNA, 17 bp, synthetic construct
  misc_feature 1..17: note = Oligonucleotide
  source 1..17: mol_type = other DNA
cattctaaaatgtgctt

SEQ ID NO: 22199 - DNA, 17 bp, synthetic construct
  misc_feature 1..17: note = Oligonucleotide
  source 1..17: mol_type = other DNA
aatcattctaaaatgtg

SEQ ID NO: 22200 - DNA, 17 bp, synthetic construct
  misc_feature 1..17: note = Oligonucleotide
  source 1..17: mol_type = other DNA
aagaatcattctaaaat

SEQ ID NO: 22201 - DNA, 17 bp, synthetic construct
  misc_feature 1..17: note = Oligonucleotide
  source 1..17: mol_type = other DNA
aaaaagaatcattctaa

SEQ ID NO: 22202 - DNA, 17 bp, synthetic construct
  misc_feature 1..17: note = Oligonucleotide
  source 1..17: mol_type = other DNA
aaaaaaaagaatcattc

SEQ ID NO: 22203 - DNA, 17 bp, synthetic construct
  misc_feature 1..17: note = Oligonucleotide
  source 1..17: mol_type = other DNA
aaaaaaaaaaagaatca

SEQ ID NO: 22204 - DNA, 17 bp, synthetic construct
  misc_feature 1..17: note = Oligonucleotide
  source 1..17: mol_type = other DNA
aaaaaaaaaaaaaagaa

SEQ ID NO: 22205 - DNA, 17 bp, synthetic construct
  misc_feature 1..17: note = Oligonucleotide
  source 1..17: mol_type = other DNA
aaaaaaaaaaaaaaaaa

SEQ ID NO: 22206 - DNA, 17 bp, synthetic construct
  misc_feature 1..17: note = Oligonucleotide
  source 1..17: mol_type = other DNA
aaaaaaaaaaaaaaaaa

SEQ ID NO: 22207 - DNA, 17 bp, synthetic construct
  misc_feature 1..17: note = Oligonucleotide
  source 1..17: mol_type = other DNA
taaaaaaaaaaaaaaaa

SEQ ID NO: 22208 - DNA, 17 bp, synthetic construct
  misc_feature 1..17: note = Oligonucleotide
  source 1..17: mol_type = other DNA
gtctaaaaaaaaaaaaa

SEQ ID NO: 22209 - DNA, 17 bp, synthetic construct
  misc_feature 1..17: note = Oligonucleotide
  source 1..17: mol_type = other DNA
tcagtctaaaaaaaaaa

SEQ ID NO: 22210 - DNA, 17 bp, synthetic construct
  misc_feature 1..17: note = Oligonucleotide
  source 1..17: mol_type = other DNA
gactcagtctaaaaaaa

SEQ ID NO: 22211 - DNA, 17 bp, synthetic construct
  misc_feature 1..17: note = Oligonucleotide
  source 1..17: mol_type = other DNA
cgagactcagtctaaaa

SEQ ID NO: 22212 - DNA, 17 bp, synthetic construct
  misc_feature 1..17: note = Oligonucleotide
  source 1..17: mol_type = other DNA
gaacgagactcagtcta

SEQ ID NO: 22213 - DNA, 17 bp, synthetic construct
  misc_feature 1..17: note = Oligonucleotide
  source 1..17: mol_type = other DNA
atagaacgagactcagt

SEQ ID NO: 22214 - DNA, 17 bp, synthetic construct
  misc_feature 1..17: note = Oligonucleotide
  source 1..17: mol_type = other DNA
gtaatagaacgagactc

SEQ ID NO: 22215 - DNA, 17 bp, synthetic construct
  misc_feature 1..17: note = Oligonucleotide
  source 1..17: mol_type = other DNA
ctggtaatagaacgaga

SEQ ID NO: 22216 - DNA, 17 bp, synthetic construct
  misc_feature 1..17: note = Oligonucleotide
  source 1..17: mol_type = other DNA
cagctggtaatagaacg

SEQ ID NO: 22217 - DNA, 17 bp, synthetic construct
  misc_feature 1..17: note = Oligonucleotide
  source 1..17: mol_type = other DNA
ctccagctggtaataga

SEQ ID NO: 22218 - DNA, 17 bp, synthetic construct
  misc_feature 1..17: note = Oligonucleotide
  source 1..17: mol_type = other DNA
gcactccagctggtaat

SEQ ID NO: 22219 - DNA, 17 bp, synthetic construct
  misc_feature 1..17: note = Oligonucleotide
  source 1..17: mol_type = other DNA
actgcactccagctggt

SEQ ID NO: 22220 - DNA, 17 bp, synthetic construct
  misc_feature 1..17: note = Oligonucleotide
  source 1..17: mol_type = other DNA
gccactgcactccagct

SEQ ID NO: 22221 - DNA, 17 bp, synthetic construct
  misc_feature 1..17: note = Oligonucleotide
  source 1..17: mol_type = other DNA
cgcgccactgcactcca

SEQ ID NO: 22222 - DNA, 17 bp, synthetic construct
  misc_feature 1..17: note = Oligonucleotide
  source 1..17: mol_type = other DNA
gatcgcgccactgcact

SEQ ID NO: 22223 - DNA, 17 bp, synthetic construct
  misc_feature 1..17: note = Oligonucleotide
  source 1..17: mol_type = other DNA
cgagatcgcgccactgc

SEQ ID NO: 22224 - DNA, 17 bp, synthetic construct
  misc_feature 1..17: note = Oligonucleotide
  source 1..17: mol_type = other DNA
agccgagatcgcgccac

SEQ ID NO: 22225 - DNA, 17 bp, synthetic construct
  misc_feature 1..17: note = Oligonucleotide
  source 1..17: mol_type = other DNA
gtgagccgagatcgcgc

SEQ ID NO: 22226 - DNA, 17 bp, synthetic construct
  misc_feature 1..17: note = Oligonucleotide
  source 1..17: mol_type = other DNA
gcagtgagccgagatcg

SEQ ID NO: 22227 - DNA, 17 bp, synthetic construct
  misc_feature 1..17: note = Oligonucleotide
  source 1..17: mol_type = other DNA
gatgcagtgagccgaga

SEQ ID NO: 22228 - DNA, 17 bp, synthetic construct
  misc_feature 1..17: note = Oligonucleotide
  source 1..17: mol_type = other DNA
gaggatgcagtgagccg

SEQ ID NO: 22229 - DNA, 17 bp, synthetic construct
  misc_feature 1..17: note = Oligonucleotide
  source 1..17: mol_type = other DNA
gcggaggatgcagtgag

SEQ ID NO: 22230 - DNA, 17 bp, synthetic construct
  misc_feature 1..17: note = Oligonucleotide
  source 1..17: mol_type = other DNA
gaggcggaggatgcagt

SEQ ID NO: 22231 - DNA, 17 bp, synthetic construct
  misc_feature 1..17: note = Oligonucleotide
  source 1..17: mol_type = other DNA
cgggaggcggaggatgc

SEQ ID NO: 22232 - DNA, 17 bp, synthetic construct
  misc_feature 1..17: note = Oligonucleotide
  source 1..17: mol_type = other DNA
acccgggaggcggagga

SEQ ID NO: 22233 - DNA, 17 bp, synthetic construct
  misc_feature 1..17: note = Oligonucleotide
  source 1..17: mol_type = other DNA
tgaacccgggaggcgga

SEQ ID NO: 22234 - DNA, 17 bp, synthetic construct
  misc_feature 1..17: note = Oligonucleotide
  source 1..17: mol_type = other DNA
acttgaacccgggaggc

SEQ ID NO: 22235 - DNA, 17 bp, synthetic construct
  misc_feature 1..17: note = Oligonucleotide
  source 1..17: mol_type = other DNA
atcacttgaacccggga

SEQ ID NO: 22236 - DNA, 17 bp, synthetic construct
  misc_feature 1..17: note = Oligonucleotide
  source 1..17: mol_type = other DNA
agaatcacttgaacccg

SEQ ID NO: 22237 - DNA, 17 bp, synthetic construct
  misc_feature 1..17: note = Oligonucleotide
  source 1..17: mol_type = other DNA
aagagaatcacttgaac

SEQ ID NO: 22238 - DNA, 17 bp, synthetic construct
  misc_feature 1..17: note = Oligonucleotide
  source 1..17: mol_type = other DNA
gccaagagaatcacttg

SEQ ID NO: 22239 - DNA, 17 bp, synthetic construct
  misc_feature 1..17: note = Oligonucleotide
  source 1..17: mol_type = other DNA
tgagccaagagaatcac

SEQ ID NO: 22240 - DNA, 17 bp, synthetic construct
  misc_feature 1..17: note = Oligonucleotide
  source 1..17: mol_type = other DNA
ggctgagccaagagaat

SEQ ID NO: 22241 - DNA, 17 bp, synthetic construct
  misc_feature 1..17: note = Oligonucleotide
  source 1..17: mol_type = other DNA
ggaggctgagccaagag

SEQ ID NO: 22242 - DNA, 17 bp, synthetic construct
  misc_feature 1..17: note = Oligonucleotide
  source 1..17: mol_type = other DNA
tcaggaggctgagccaa

SEQ ID NO: 22243 - DNA, 17 bp, synthetic construct
  misc_feature 1..17: note = Oligonucleotide
  source 1..17: mol_type = other DNA
tactcaggaggctgagc

SEQ ID NO: 22244 - DNA, 17 bp, synthetic construct
  misc_feature 1..17: note = Oligonucleotide
  source 1..17: mol_type = other DNA
agctactcaggaggctg

SEQ ID NO: 22245 - DNA, 17 bp, synthetic construct
  misc_feature 1..17: note = Oligonucleotide
  source 1..17: mol_type = other DNA
cccagctactcaggagg

SEQ ID NO: 22246 - DNA, 17 bp, synthetic construct
  misc_feature 1..17: note = Oligonucleotide
  source 1..17: mol_type = other DNA
aatcccagctactcagg

SEQ ID NO: 22247 - DNA, 17 bp, synthetic construct
  misc_feature 1..17: note = Oligonucleotide
  source 1..17: mol_type = other DNA
tgtaatcccagctactc

SEQ ID NO: 22248 - DNA, 17 bp, synthetic construct
  misc_feature 1..17: note = Oligonucleotide
  source 1..17: mol_type = other DNA
gcctgtaatcccagcta

SEQ ID NO: 22249 - DNA, 17 bp, synthetic construct
  misc_feature 1..17: note = Oligonucleotide
  source 1..17: mol_type = other DNA
tgcgcctgtaatcccag

SEQ ID NO: 22250 - DNA, 17 bp, synthetic construct
  misc_feature 1..17: note = Oligonucleotide
  source 1..17: mol_type = other DNA
ttgtgcgcctgtaatcc

SEQ ID NO: 22251 - DNA, 17 bp, synthetic construct
  misc_feature 1..17: note = Oligonucleotide
  source 1..17: mol_type = other DNA
gtgttgtgcgcctgtaa

SEQ ID NO: 22252 - DNA, 17 bp, synthetic construct
  misc_feature 1..17: note = Oligonucleotide
  source 1..17: mol_type = other DNA
gtggtgttgtgcgcctg

SEQ ID NO: 22253 - DNA, 17 bp, synthetic construct
  misc_feature 1..17: note = Oligonucleotide
  source 1..17: mol_type = other DNA
ggtgtggtgttgtgcgc

SEQ ID NO: 22254 - DNA, 17 bp, synthetic construct
  misc_feature 1..17: note = Oligonucleotide
  source 1..17: mol_type = other DNA
ctgggtgtggtgttgtg

SEQ ID NO: 22255 - DNA, 17 bp, synthetic construct
  misc_feature 1..17: note = Oligonucleotide
  source 1..17: mol_type = other DNA
tagctgggtgtggtgtt

SEQ ID NO: 22256 - DNA, 17 bp, synthetic construct
  misc_feature 1..17: note = Oligonucleotide
  source 1..17: mol_type = other DNA
aattagctgggtgtggt

SEQ ID NO: 22257 - DNA, 17 bp, synthetic construct
  misc_feature 1..17: note = Oligonucleotide
  source 1..17: mol_type = other DNA
aaaaattagctgggtgt

SEQ ID NO: 22258 - DNA, 17 bp, synthetic construct
  misc_feature 1..17: note = Oligonucleotide
  source 1..17: mol_type = other DNA
acaaaaaattagctggg

SEQ ID NO: 22259 - DNA, 17 bp, synthetic construct
  misc_feature 1..17: note = Oligonucleotide
  source 1..17: mol_type = other DNA
aatacaaaaaattagct

SEQ ID NO: 22260 - DNA, 17 bp, synthetic construct
  misc_feature 1..17: note = Oligonucleotide
  source 1..17: mol_type = other DNA
aaaaatacaaaaaatta

SEQ ID NO: 22261 - DNA, 17 bp, synthetic construct
  misc_feature 1..17: note = Oligonucleotide
  source 1..17: mol_type = other DNA
actaaaaatacaaaaaa

SEQ ID NO: 22262 - DNA, 17 bp, synthetic construct
  misc_feature 1..17: note = Oligonucleotide
  source 1..17: mol_type = other DNA
tctactaaaaatacaaa

SEQ ID NO: 22263 - DNA, 17 bp, synthetic construct
  misc_feature 1..17: note = Oligonucleotide
  source 1..17: mol_type = other DNA
atctctactaaaaatac

SEQ ID NO: 22264 - DNA, 17 bp, synthetic construct
  misc_feature 1..17: note = Oligonucleotide
  source 1..17: mol_type = other DNA
cccatctctactaaaaa

SEQ ID NO: 22265 - DNA, 17 bp, synthetic construct
  misc_feature 1..17: note = Oligonucleotide
  source 1..17: mol_type = other DNA
aaccccatctctactaa

SEQ ID NO: 22266 - DNA, 17 bp, synthetic construct
  misc_feature 1..17: note = Oligonucleotide
  source 1..17: mol_type = other DNA
tgaaaccccatctctac

SEQ ID NO: 22267 - DNA, 17 bp, synthetic construct
  misc_feature 1..17: note = Oligonucleotide
  source 1..17: mol_type = other DNA
tggtgaaaccccatctc

SEQ ID NO: 22268 - DNA, 17 bp, synthetic construct
  misc_feature 1..17: note = Oligonucleotide
  source 1..17: mol_type = other DNA
acatggtgaaaccccat

SEQ ID NO: 22269 - DNA, 17 bp, synthetic construct
  misc_feature 1..17: note = Oligonucleotide
  source 1..17: mol_type = other DNA
ccaacatggtgaaaccc

SEQ ID NO: 22270 - DNA, 17 bp, synthetic construct
  misc_feature 1..17: note = Oligonucleotide
  source 1..17: mol_type = other DNA
tggccaacatggtgaaa

SEQ ID NO: 22271 - DNA, 17 bp, synthetic construct
  misc_feature 1..17: note = Oligonucleotide
  source 1..17: mol_type = other DNA
gcctggccaacatggtg

SEQ ID NO: 22272 - DNA, 17 bp, synthetic construct
  misc_feature 1..17: note = Oligonucleotide
  source 1..17: mol_type = other DNA
ccagcctggccaacatg

SEQ ID NO: 22273 - DNA, 17 bp, synthetic construct
  misc_feature 1..17: note = Oligonucleotide
  source 1..17: mol_type = other DNA
agaccagcctggccaac

SEQ ID NO: 22274 - DNA, 17 bp, synthetic construct
  misc_feature 1..17: note = Oligonucleotide
  source 1..17: mol_type = other DNA
tcgagaccagcctggcc

SEQ ID NO: 22275 - DNA, 17 bp, synthetic construct
  misc_feature 1..17: note = Oligonucleotide
  source 1..17: mol_type = other DNA
agttcgagaccagcctg

SEQ ID NO: 22276 - DNA, 17 bp, synthetic construct
  misc_feature 1..17: note = Oligonucleotide
  source 1..17: mol_type = other DNA
agcagttcgagaccagc

SEQ ID NO: 22277 - DNA, 17 bp, synthetic construct
  misc_feature 1..17: note = Oligonucleotide
  source 1..17: mol_type = other DNA
gtcagcagttcgagacc

SEQ ID NO: 22278 - DNA, 17 bp, synthetic construct
  misc_feature 1..17: note = Oligonucleotide
  source 1..17: mol_type = other DNA
aaggtcagcagttcgag

SEQ ID NO: 22279 - DNA, 17 bp, synthetic construct
  misc_feature 1..17: note = Oligonucleotide
  source 1..17: mol_type = other DNA
cacaaggtcagcagttc

SEQ ID NO: 22280 - DNA, 17 bp, synthetic construct
  misc_feature 1..17: note = Oligonucleotide
  source 1..17: mol_type = other DNA
aatcacaaggtcagcag

SEQ ID NO: 22281 - DNA, 17 bp, synthetic construct
  misc_feature 1..17: note = Oligonucleotide
  source 1..17: mol_type = other DNA
gtgaatcacaaggtcag

SEQ ID NO: 22282 - DNA, 17 bp, synthetic construct
  misc_feature 1..17: note = Oligonucleotide
  source 1..17: mol_type = other DNA
caggtgaatcacaaggt

SEQ ID NO: 22283 - DNA, 17 bp, synthetic construct
  misc_feature 1..17: note = Oligonucleotide
  source 1..17: mol_type = other DNA
aggcaggtgaatcacaa

SEQ ID NO: 22284 - DNA, 17 bp, synthetic construct
  misc_feature 1..17: note = Oligonucleotide
  source 1..17: mol_type = other DNA
ccgaggcaggtgaatca

SEQ ID NO: 22285 - DNA, 17 bp, synthetic construct
  misc_feature 1..17: note = Oligonucleotide
  source 1..17: mol_type = other DNA
aggccgaggcaggtgaa

SEQ ID NO: 22286 - DNA, 17 bp, synthetic construct
  misc_feature 1..17: note = Oligonucleotide
  source 1..17: mol_type = other DNA
gggaggccgaggcaggt

SEQ ID NO: 22287 - DNA, 17 bp, synthetic construct
  misc_feature 1..17: note = Oligonucleotide
  source 1..17: mol_type = other DNA
tttgggaggccgaggca

SEQ ID NO: 22288 - DNA, 17 bp, synthetic construct
  misc_feature 1..17: note = Oligonucleotide
  source 1..17: mol_type = other DNA
cactttgggaggccgag

SEQ ID NO: 22289 - DNA, 17 bp, synthetic construct
  misc_feature 1..17: note = Oligonucleotide
  source 1..17: mol_type = other DNA
cagcactttgggaggcc

SEQ ID NO: 22290 - DNA, 17 bp, synthetic construct
  misc_feature 1..17: note = Oligonucleotide
  source 1..17: mol_type = other DNA
tcccagcactttgggag

SEQ ID NO: 22291 - DNA, 17 bp, synthetic construct
  misc_feature 1..17: note = Oligonucleotide
  source 1..17: mol_type = other DNA
taatcccagcactttgg

SEQ ID NO: 22292 - DNA, 17 bp, synthetic construct
  misc_feature 1..17: note = Oligonucleotide
  source 1..17: mol_type = other DNA
ctgtaatcccagcactt

SEQ ID NO: 22293 - DNA, 17 bp, synthetic construct
  misc_feature 1..17: note = Oligonucleotide
  source 1..17: mol_type = other DNA
cgcctgtaatcccagca

SEQ ID NO: 22294 - DNA, 17 bp, synthetic construct
  misc_feature 1..17: note = Oligonucleotide
  source 1..17: mol_type = other DNA
tcacgcctgtaatccca

SEQ ID NO: 22295 - DNA, 17 bp, synthetic construct
  misc_feature 1..17: note = Oligonucleotide
  source 1..17: mol_type = other DNA
ggctcacgcctgtaatc

SEQ ID NO: 22296 - DNA, 17 bp, synthetic construct
  misc_feature 1..17: note = Oligonucleotide
  source 1..17: mol_type = other DNA
agtggctcacgcctgta

SEQ ID NO: 22297 - DNA, 17 bp, synthetic construct
  misc_feature 1..17: note = Oligonucleotide
  source 1..17: mol_type = other DNA
cgcagtggctcacgcct

SEQ ID NO: 22298 - DNA, 17 bp, synthetic construct
  misc_feature 1..17: note = Oligonucleotide
  source 1..17: mol_type = other DNA
gggcgcagtggctcacg

SEQ ID NO: 22299 - DNA, 17 bp, synthetic construct
  misc_feature 1..17: note = Oligonucleotide
  source 1..17: mol_type = other DNA
gctgggcgcagtggctc

SEQ ID NO: 22300 - DNA, 17 bp, synthetic construct
  misc_feature 1..17: note = Oligonucleotide
  source 1..17: mol_type = other DNA
ctggctgggcgcagtgg

SEQ ID NO: 22301 - DNA, 17 bp, synthetic construct
  misc_feature 1..17: note = Oligonucleotide
  source 1..17: mol_type = other DNA
cttctggctgggcgcag

SEQ ID NO: 22302 - DNA, 17 bp, synthetic construct
  misc_feature 1..17: note = Oligonucleotide
  source 1..17: mol_type = other DNA
atccttctggctgggcg

SEQ ID NO: 22303 - DNA, 17 bp, synthetic construct
  misc_feature 1..17: note = Oligonucleotide
  source 1..17: mol_type = other DNA
agaatccttctggctgg

SEQ ID NO: 22304 - DNA, 17 bp, synthetic construct
  misc_feature 1..17: note = Oligonucleotide
  source 1..17: mol_type = other DNA
ttaagaatccttctggc

SEQ ID NO: 22305 - DNA, 17 bp, synthetic construct
  misc_feature 1..17: note = Oligonucleotide
  source 1..17: mol_type = other DNA
tctttaagaatccttct

SEQ ID NO: 22306 - DNA, 17 bp, synthetic construct
  misc_feature 1..17: note = Oligonucleotide
  source 1..17: mol_type = other DNA
agttctttaagaatcct

SEQ ID NO: 22307 - DNA, 17 bp, synthetic construct
  misc_feature 1..17: note = Oligonucleotide
  source 1..17: mol_type = other DNA
aacagttctttaagaat

SEQ ID NO: 22308 - DNA, 17 bp, synthetic construct
  misc_feature 1..17: note = Oligonucleotide
  source 1..17: mol_type = other DNA
aataacagttctttaag

SEQ ID NO: 22309 - DNA, 17 bp, synthetic construct
  misc_feature 1..17: note = Oligonucleotide
  source 1..17: mol_type = other DNA
ttcaataacagttcttt

SEQ ID NO: 22310 - DNA, 17 bp, synthetic construct
  misc_feature 1..17: note = Oligonucleotide
  source 1..17: mol_type = other DNA
tgtttcaataacagttc

SEQ ID NO: 22311 - DNA, 17 bp, synthetic construct
  misc_feature 1..17: note = Oligonucleotide
  source 1..17: mol_type = other DNA
ttttgtttcaataacag

SEQ ID NO: 22312 - DNA, 17 bp, synthetic construct
  misc_feature 1..17: note = Oligonucleotide
  source 1..17: mol_type = other DNA
actttttgtttcaataa

SEQ ID NO: 22313 - DNA, 17 bp, synthetic construct
  misc_feature 1..17: note = Oligonucleotide
  source 1..17: mol_type = other DNA
tacactttttgtttcaa

SEQ ID NO: 22314 - DNA, 17 bp, synthetic construct
  misc_feature 1..17: note = Oligonucleotide
  source 1..17: mol_type = other DNA
gactacactttttgttt

SEQ ID NO: 22315 - DNA, 17 bp, synthetic construct
  misc_feature 1..17: note = Oligonucleotide
  source 1..17: mol_type = other DNA
agtgactacactttttg

SEQ ID NO: 22316 - DNA, 17 bp, synthetic construct
  misc_feature 1..17: note = Oligonucleotide
  source 1..17: mol_type = other DNA
ctcagtgactacacttt

SEQ ID NO: 22317 - DNA, 17 bp, synthetic construct
  misc_feature 1..17: note = Oligonucleotide
  source 1..17: mol_type = other DNA
tatctcagtgactacac

SEQ ID NO: 22318 - DNA, 17 bp, synthetic construct
  misc_feature 1..17: note = Oligonucleotide
  source 1..17: mol_type = other DNA
ttttatctcagtgacta

SEQ ID NO: 22319 - DNA, 17 bp, synthetic construct
  misc_feature 1..17: note = Oligonucleotide
  source 1..17: mol_type = other DNA
cttttttatctcagtga

SEQ ID NO: 22320 - DNA, 17 bp, synthetic construct
  misc_feature 1..17: note = Oligonucleotide
  source 1..17: mol_type = other DNA
tttcttttttatctcag

SEQ ID NO: 22321 - DNA, 17 bp, synthetic construct
  misc_feature 1..17: note = Oligonucleotide
  source 1..17: mol_type = other DNA
ggctttcttttttatct

SEQ ID NO: 22322 - DNA, 17 bp, synthetic construct
  misc_feature 1..17: note = Oligonucleotide
  source 1..17: mol_type = other DNA
catggctttctttttta

SEQ ID NO: 22323 - DNA, 17 bp, synthetic construct
  misc_feature 1..17: note = Oligonucleotide
  source 1..17: mol_type = other DNA
aggcatggctttctttt

SEQ ID NO: 22324 - DNA, 17 bp, synthetic construct
  misc_feature 1..17: note = Oligonucleotide
  source 1..17: mol_type = other DNA
cccaggcatggctttct

SEQ ID NO: 22325 - DNA, 17 bp, synthetic construct
  misc_feature 1..17: note = Oligonucleotide
  source 1..17: mol_type = other DNA
tatcccaggcatggctt

SEQ ID NO: 22326 - DNA, 17 bp, synthetic construct
  misc_feature 1..17: note = Oligonucleotide
  source 1..17: mol_type = other DNA
gtttatcccaggcatgg

SEQ ID NO: 22327 - DNA, 17 bp, synthetic construct
  misc_feature 1..17: note = Oligonucleotide
  source 1..17: mol_type = other DNA
actgtttatcccaggca

SEQ ID NO: 22328 - DNA, 17 bp, synthetic construct
  misc_feature 1..17: note = Oligonucleotide
  source 1..17: mol_type = other DNA
tgtactgtttatcccag

SEQ ID NO: 22329 - DNA, 17 bp, synthetic construct
  misc_feature 1..17: note = Oligonucleotide
  source 1..17: mol_type = other DNA
tagtgtactgtttatcc

SEQ ID NO: 22330 - DNA, 17 bp, synthetic construct
  misc_feature 1..17: note = Oligonucleotide
  source 1..17: mol_type = other DNA
gtctagtgtactgttta

SEQ ID NO: 22331 - DNA, 17 bp, synthetic construct
  misc_feature 1..17: note = Oligonucleotide
  source 1..17: mol_type = other DNA
tgggtctagtgtactgt

SEQ ID NO: 22332 - DNA, 17 bp, synthetic construct
  misc_feature 1..17: note = Oligonucleotide
  source 1..17: mol_type = other DNA
acctgggtctagtgtac

SEQ ID NO: 22333 - DNA, 17 bp, synthetic construct
  misc_feature 1..17: note = Oligonucleotide
  source 1..17: mol_type = other DNA
ttcacctgggtctagtg

SEQ ID NO: 22334 - DNA, 17 bp, synthetic construct
  misc_feature 1..17: note = Oligonucleotide
  source 1..17: mol_type = other DNA
ttcttcacctgggtcta

SEQ ID NO: 22335 - DNA, 17 bp, synthetic construct
  misc_feature 1..17: note = Oligonucleotide
  source 1..17: mol_type = other DNA
tctttcttcacctgggt

SEQ ID NO: 22336 - DNA, 17 bp, synthetic construct
  misc_feature 1..17: note = Oligonucleotide
  source 1..17: mol_type = other DNA
gtttctttcttcacctg

SEQ ID NO: 22337 - DNA, 17 bp, synthetic construct
  misc_feature 1..17: note = Oligonucleotide
  source 1..17: mol_type = other DNA
gctgtttctttcttcac

SEQ ID NO: 22338 - DNA, 17 bp, synthetic construct
  misc_feature 1..17: note = Oligonucleotide
  source 1..17: mol_type = other DNA
cttgctgtttctttctt

SEQ ID NO: 22339 - DNA, 17 bp, synthetic construct
  misc_feature 1..17: note = Oligonucleotide
  source 1..17: mol_type = other DNA
taacttgctgtttcttt

SEQ ID NO: 22340 - DNA, 17 bp, synthetic construct
  misc_feature 1..17: note = Oligonucleotide
  source 1..17: mol_type = other DNA
ttctaacttgctgtttc

SEQ ID NO: 22341 - DNA, 17 bp, synthetic construct
  misc_feature 1..17: note = Oligonucleotide
  source 1..17: mol_type = other DNA
atcttctaacttgctgt

SEQ ID NO: 22342 - DNA, 17 bp, synthetic construct
  misc_feature 1..17: note = Oligonucleotide
  source 1..17: mol_type = other DNA
tttatcttctaacttgc

SEQ ID NO: 22343 - DNA, 17 bp, synthetic construct
  misc_feature 1..17: note = Oligonucleotide
  source 1..17: mol_type = other DNA
agatttatcttctaact

SEQ ID NO: 22344 - DNA, 17 bp, synthetic construct
  misc_feature 1..17: note = Oligonucleotide
  source 1..17: mol_type = other DNA
ctcagatttatcttcta

SEQ ID NO: 22345 - DNA, 17 bp, synthetic construct
  misc_feature 1..17: note = Oligonucleotide
  source 1..17: mol_type = other DNA
aacctcagatttatctt

SEQ ID NO: 22346 - DNA, 17 bp, synthetic construct
  misc_feature 1..17: note = Oligonucleotide
  source 1..17: mol_type = other DNA
ggtaacctcagatttat

SEQ ID NO: 22347 - DNA, 17 bp, synthetic construct
  misc_feature 1..17: note = Oligonucleotide
  source 1..17: mol_type = other DNA
ctgggtaacctcagatt

SEQ ID NO: 22348 - DNA, 17 bp, synthetic construct
  misc_feature 1..17: note = Oligonucleotide
  source 1..17: mol_type = other DNA
attctgggtaacctcag

SEQ ID NO: 22349 - DNA, 17 bp, synthetic construct
  misc_feature 1..17: note = Oligonucleotide
  source 1..17: mol_type = other DNA
tatattctgggtaacct

SEQ ID NO: 22350 - DNA, 17 bp, synthetic construct
  misc_feature 1..17: note = Oligonucleotide
  source 1..17: mol_type = other DNA
tgctatattctgggtaa

SEQ ID NO: 22351 - DNA, 17 bp, synthetic construct
  misc_feature 1..17: note = Oligonucleotide
  source 1..17: mol_type = other DNA
ctgtgctatattctggg

SEQ ID NO: 22352 - DNA, 17 bp, synthetic construct
  misc_feature 1..17: note = Oligonucleotide
  source 1..17: mol_type = other DNA
tttctgtgctatattct

SEQ ID NO: 22353 - DNA, 17 bp, synthetic construct
  misc_feature 1..17: note = Oligonucleotide
  source 1..17: mol_type = other DNA
atatttctgtgctatat

SEQ ID NO: 22354 - DNA, 17 bp, synthetic construct
  misc_feature 1..17: note = Oligonucleotide
  source 1..17: mol_type = other DNA
cttatatttctgtgcta

SEQ ID NO: 22355 - DNA, 17 bp, synthetic construct
  misc_feature 1..17: note = Oligonucleotide
  source 1..17: mol_type = other DNA
ctccttatatttctgtg

SEQ ID NO: 22356 - DNA, 17 bp, synthetic construct
  misc_feature 1..17: note = Oligonucleotide
  source 1..17: mol_type = other DNA
tatctccttatatttct

SEQ ID NO: 22357 - DNA, 17 bp, synthetic construct
  misc_feature 1..17: note = Oligonucleotide
  source 1..17: mol_type = other DNA
ttctatctccttatatt

SEQ ID NO: 22358 - DNA, 17 bp, synthetic construct
  misc_feature 1..17: note = Oligonucleotide
  source 1..17: mol_type = other DNA
attttctatctccttat

SEQ ID NO: 22359 - DNA, 17 bp, synthetic construct
  misc_feature 1..17: note = Oligonucleotide
  source 1..17: mol_type = other DNA
gatattttctatctcct

SEQ ID NO: 22360 - DNA, 17 bp, synthetic construct
  misc_feature 1..17: note = Oligonucleotide
  source 1..17: mol_type = other DNA
tttgatattttctatct

SEQ ID NO: 22361 - DNA, 17 bp, synthetic construct
  misc_feature 1..17: note = Oligonucleotide
  source 1..17: mol_type = other DNA
ctctttgatattttcta

SEQ ID NO: 22362 - DNA, 17 bp, synthetic construct
  misc_feature 1..17: note = Oligonucleotide
  source 1..17: mol_type = other DNA
ctgctctttgatatttt

SEQ ID NO: 22363 - DNA, 17 bp, synthetic construct
  misc_feature 1..17: note = Oligonucleotide
  source 1..17: mol_type = other DNA
taactgctctttgatat

SEQ ID NO: 22364 - DNA, 17 bp, synthetic construct
  misc_feature 1..17: note = Oligonucleotide
  source 1..17: mol_type = other DNA
tcctaactgctctttga

SEQ ID NO: 22365 - DNA, 17 bp, synthetic construct
  misc_feature 1..17: note = Oligonucleotide
  source 1..17: mol_type = other DNA
gtgtcctaactgctctt

SEQ ID NO: 22366 - DNA, 17 bp, synthetic construct
  misc_feature 1..17: note = Oligonucleotide
  source 1..17: mol_type = other DNA
tgtgtgtcctaactgct

SEQ ID NO: 22367 - DNA, 17 bp, synthetic construct
  misc_feature 1..17: note = Oligonucleotide
  source 1..17: mol_type = other DNA
gtgtgtgtgtcctaact

SEQ ID NO: 22368 - DNA, 17 bp, synthetic construct
  misc_feature 1..17: note = Oligonucleotide
  source 1..17: mol_type = other DNA
tgtgtgtgtgtgtccta

SEQ ID NO: 22369 - DNA, 17 bp, synthetic construct
  misc_feature 1..17: note = Oligonucleotide
  source 1..17: mol_type = other DNA
ttttgtgtgtgtgtgtc

SEQ ID NO: 22370 - DNA, 17 bp, synthetic construct
  misc_feature 1..17: note = Oligonucleotide
  source 1..17: mol_type = other DNA
gatttttgtgtgtgtgt

SEQ ID NO: 22371 - DNA, 17 bp, synthetic construct
  misc_feature 1..17: note = Oligonucleotide
  source 1..17: mol_type = other DNA
tgtgatttttgtgtgtg

SEQ ID NO: 22372 - DNA, 17 bp, synthetic construct
  misc_feature 1..17: note = Oligonucleotide
  source 1..17: mol_type = other DNA
ctatgtgatttttgtgt

SEQ ID NO: 22373 - DNA, 17 bp, synthetic construct
  misc_feature 1..17: note = Oligonucleotide
  source 1..17: mol_type = other DNA
tatctatgtgatttttg

SEQ ID NO: 22374 - DNA, 17 bp, synthetic construct
  misc_feature 1..17: note = Oligonucleotide
  source 1..17: mol_type = other DNA
aattatctatgtgattt

SEQ ID NO: 22375 - DNA, 17 bp, synthetic construct
  misc_feature 1..17: note = Oligonucleotide
  source 1..17: mol_type = other DNA
ttgaattatctatgtga

SEQ ID NO: 22376 - DNA, 17 bp, synthetic construct
  misc_feature 1..17: note = Oligonucleotide
  source 1..17: mol_type = other DNA
ccattgaattatctatg

SEQ ID NO: 22377 - DNA, 17 bp, synthetic construct
  misc_feature 1..17: note = Oligonucleotide
  source 1..17: mol_type = other DNA
gtcccattgaattatct

SEQ ID NO: 22378 - DNA, 17 bp, synthetic construct
  misc_feature 1..17: note = Oligonucleotide
  source 1..17: mol_type = other DNA
atagtcccattgaatta

SEQ ID NO: 22379 - DNA, 17 bp, synthetic construct
  misc_feature 1..17: note = Oligonucleotide
  source 1..17: mol_type = other DNA
ccaatagtcccattgaa

SEQ ID NO: 22380 - DNA, 17 bp, synthetic construct
  misc_feature 1..17: note = Oligonucleotide
  source 1..17: mol_type = other DNA
ttcccaatagtcccatt

SEQ ID NO: 22381 - DNA, 17 bp, synthetic construct
  misc_feature 1..17: note = Oligonucleotide
  source 1..17: mol_type = other DNA
attttcccaatagtccc

SEQ ID NO: 22382 - DNA, 17 bp, synthetic construct
  misc_feature 1..17: note = Oligonucleotide
  source 1..17: mol_type = other DNA
gggattttcccaatagt

SEQ ID NO: 22383 - DNA, 17 bp, synthetic construct
  misc_feature 1..17: note = Oligonucleotide
  source 1..17: mol_type = other DNA
gctgggattttcccaat

SEQ ID NO: 22384 - DNA, 17 bp, synthetic construct
  misc_feature 1..17: note = Oligonucleotide
  source 1..17: mol_type = other DNA
gatgctgggattttccc

SEQ ID NO: 22385 - DNA, 17 bp, synthetic construct
  misc_feature 1..17: note = Oligonucleotide
  source 1..17: mol_type = other DNA
gtagatgctgggatttt

SEQ ID NO: 22386 - DNA, 17 bp, synthetic construct
  misc_feature 1..17: note = Oligonucleotide
  source 1..17: mol_type = other DNA
taggtagatgctgggat

SEQ ID NO: 22387 - DNA, 17 bp, synthetic construct
  misc_feature 1..17: note = Oligonucleotide
  source 1..17: mol_type = other DNA
cattaggtagatgctgg

SEQ ID NO: 22388 - DNA, 17 bp, synthetic construct
  misc_feature 1..17: note = Oligonucleotide
  source 1..17: mol_type = other DNA
ttgcattaggtagatgc

SEQ ID NO: 22389 - DNA, 17 bp, synthetic construct
  misc_feature 1..17: note = Oligonucleotide
  source 1..17: mol_type = other DNA
gccttgcattaggtaga

SEQ ID NO: 22390 - DNA, 17 bp, synthetic construct
  misc_feature 1..17: note = Oligonucleotide
  source 1..17: mol_type = other DNA
cacgccttgcattaggt

SEQ ID NO: 22391 - DNA, 17 bp, synthetic construct
  misc_feature 1..17: note = Oligonucleotide
  source 1..17: mol_type = other DNA
ttccacgccttgcatta

SEQ ID NO: 22392 - DNA, 17 bp, synthetic construct
  misc_feature 1..17: note = Oligonucleotide
  source 1..17: mol_type = other DNA
tgcttccacgccttgca

SEQ ID NO: 22393 - DNA, 17 bp, synthetic construct
  misc_feature 1..17: note = Oligonucleotide
  source 1..17: mol_type = other DNA
ttttgcttccacgcctt

SEQ ID NO: 22394 - DNA, 17 bp, synthetic construct
  misc_feature 1..17: note = Oligonucleotide
  source 1..17: mol_type = other DNA
tatttttgcttccacgc

SEQ ID NO: 22395 - DNA, 17 bp, synthetic construct
  misc_feature 1..17: note = Oligonucleotide
  source 1..17: mol_type = other DNA
ttttatttttgcttcca

SEQ ID NO: 22396 - DNA, 17 bp, synthetic construct
  misc_feature 1..17: note = Oligonucleotide
  source 1..17: mol_type = other DNA
acattttatttttgctt

SEQ ID NO: 22397 - DNA, 17 bp, synthetic construct
  misc_feature 1..17: note = Oligonucleotide
  source 1..17: mol_type = other DNA
gcaacattttatttttg

SEQ ID NO: 22398 - DNA, 17 bp, synthetic construct
  misc_feature 1..17: note = Oligonucleotide
  source 1..17: mol_type = other DNA
caggcaacattttattt

SEQ ID NO: 22399 - DNA, 17 bp, synthetic construct
  misc_feature 1..17: note = Oligonucleotide
  source 1..17: mol_type = other DNA
ctccaggcaacatttta

SEQ ID NO: 22400 - DNA, 17 bp, synthetic construct
  misc_feature 1..17: note = Oligonucleotide
  source 1..17: mol_type = other DNA
tgcctccaggcaacatt

SEQ ID NO: 22401 - DNA, 17 bp, synthetic construct
  misc_feature 1..17: note = Oligonucleotide
  source 1..17: mol_type = other DNA
tattgcctccaggcaac

SEQ ID NO: 22402 - DNA, 17 bp, synthetic construct
  misc_feature 1..17: note = Oligonucleotide
  source 1..17: mol_type = other DNA
aaatattgcctccaggc

SEQ ID NO: 22403 - DNA, 17 bp, synthetic construct
  misc_feature 1..17: note = Oligonucleotide
  source 1..17: mol_type = other DNA
tccaaatattgcctcca

SEQ ID NO: 22404 - DNA, 17 bp, synthetic construct
  misc_feature 1..17: note = Oligonucleotide
  source 1..17: mol_type = other DNA
atctccaaatattgcct

SEQ ID NO: 22405 - DNA, 17 bp, synthetic construct
  misc_feature 1..17: note = Oligonucleotide
  source 1..17: mol_type = other DNA
ctcatctccaaatattg

SEQ ID NO: 22406 - DNA, 17 bp, synthetic construct
  misc_feature 1..17: note = Oligonucleotide
  source 1..17: mol_type = other DNA
catctcatctccaaata

SEQ ID NO: 22407 - DNA, 17 bp, synthetic construct
  misc_feature 1..17: note = Oligonucleotide
  source 1..17: mol_type = other DNA
agccatctcatctccaa

SEQ ID NO: 22408 - DNA, 17 bp, synthetic construct
  misc_feature 1..17: note = Oligonucleotide
  source 1..17: mol_type = other DNA
ttaagccatctcatctc

SEQ ID NO: 22409 - DNA, 17 bp, synthetic construct
  misc_feature 1..17: note = Oligonucleotide
  source 1..17: mol_type = other DNA
ttcttaagccatctcat

SEQ ID NO: 22410 - DNA, 17 bp, synthetic construct
  misc_feature 1..17: note = Oligonucleotide
  source 1..17: mol_type = other DNA
aaattcttaagccatct

SEQ ID NO: 22411 - DNA, 17 bp, synthetic construct
  misc_feature 1..17: note = Oligonucleotide
  source 1..17: mol_type = other DNA
cggaaattcttaagcca

SEQ ID NO: 22412 - DNA, 17 bp, synthetic construct
  misc_feature 1..17: note = Oligonucleotide
  source 1..17: mol_type = other DNA
tttcggaaattcttaag

SEQ ID NO: 22413 - DNA, 17 bp, synthetic construct
  misc_feature 1..17: note = Oligonucleotide
  source 1..17: mol_type = other DNA
aactttcggaaattctt

SEQ ID NO: 22414 - DNA, 17 bp, synthetic construct
  misc_feature 1..17: note = Oligonucleotide
  source 1..17: mol_type = other DNA
ttcaactttcggaaatt

SEQ ID NO: 22415 - DNA, 17 bp, synthetic construct
  misc_feature 1..17: note = Oligonucleotide
  source 1..17: mol_type = other DNA
ttgttcaactttcggaa

SEQ ID NO: 22416 - DNA, 17 bp, synthetic construct
  misc_feature 1..17: note = Oligonucleotide
  source 1..17: mol_type = other DNA
tctttgttcaactttcg

SEQ ID NO: 22417 - DNA, 17 bp, synthetic construct
  misc_feature 1..17: note = Oligonucleotide
  source 1..17: mol_type = other DNA
atgtctttgttcaactt

SEQ ID NO: 22418 - DNA, 17 bp, synthetic construct
  misc_feature 1..17: note = Oligonucleotide
  source 1..17: mol_type = other DNA
ctcatgtctttgttcaa

SEQ ID NO: 22419 - DNA, 17 bp, synthetic construct
  misc_feature 1..17: note = Oligonucleotide
  source 1..17: mol_type = other DNA
agactcatgtctttgtt

SEQ ID NO: 22420 - DNA, 17 bp, synthetic construct
  misc_feature 1..17: note = Oligonucleotide
  source 1..17: mol_type = other DNA
tgaagactcatgtcttt

SEQ ID NO: 22421 - DNA, 17 bp, synthetic construct
  misc_feature 1..17: note = Oligonucleotide
  source 1..17: mol_type = other DNA
aactgaagactcatgtc

SEQ ID NO: 22422 - DNA, 17 bp, synthetic construct
  misc_feature 1..17: note = Oligonucleotide
  source 1..17: mol_type = other DNA
ttaaactgaagactcat

SEQ ID NO: 22423 - DNA, 17 bp, synthetic construct
  misc_feature 1..17: note = Oligonucleotide
  source 1..17: mol_type = other DNA
tctttaaactgaagact

SEQ ID NO: 22424 - DNA, 17 bp, synthetic construct
  misc_feature 1..17: note = Oligonucleotide
  source 1..17: mol_type = other DNA
atttctttaaactgaag

SEQ ID NO: 22425 - DNA, 17 bp, synthetic construct
  misc_feature 1..17: note = Oligonucleotide
  source 1..17: mol_type = other DNA
tatatttctttaaactg

SEQ ID NO: 22426 - DNA, 17 bp, synthetic construct
  misc_feature 1..17: note = Oligonucleotide
  source 1..17: mol_type = other DNA
acttatatttctttaaa

SEQ ID NO: 22427 - DNA, 17 bp, synthetic construct
  misc_feature 1..17: note = Oligonucleotide
  source 1..17: mol_type = other DNA
gagacttatatttcttt

SEQ ID NO: 22428 - DNA, 17 bp, synthetic construct
  misc_feature 1..17: note = Oligonucleotide
  source 1..17: mol_type = other DNA
gctgagacttatatttc

SEQ ID NO: 22429 - DNA, 17 bp, synthetic construct
  misc_feature 1..17: note = Oligonucleotide
  source 1..17: mol_type = other DNA
cttgctgagacttatat

SEQ ID NO: 22430 - DNA, 17 bp, synthetic construct
  misc_feature 1..17: note = Oligonucleotide
  source 1..17: mol_type = other DNA
ttccttgctgagactta

SEQ ID NO: 22431 - DNA, 17 bp, synthetic construct
  misc_feature 1..17: note = Oligonucleotide
  source 1..17: mol_type = other DNA
tatttccttgctgagac

SEQ ID NO: 22432 - DNA, 17 bp, synthetic construct
  misc_feature 1..17: note = Oligonucleotide
  source 1..17: mol_type = other DNA
ttttatttccttgctga

SEQ ID NO: 22433 - DNA, 17 bp, synthetic construct
  misc_feature 1..17: note = Oligonucleotide
  source 1..17: mol_type = other DNA
tgtttttatttccttgc

SEQ ID NO: 22434 - DNA, 17 bp, synthetic construct
  misc_feature 1..17: note = Oligonucleotide
  source 1..17: mol_type = other DNA
atttgtttttatttcct

SEQ ID NO: 22435 - DNA, 17 bp, synthetic construct
  misc_feature 1..17: note = Oligonucleotide
  source 1..17: mol_type = other DNA
cagatttgtttttattt

SEQ ID NO: 22436 - DNA, 17 bp, synthetic construct
  misc_feature 1..17: note = Oligonucleotide
  source 1..17: mol_type = other DNA
atacagatttgttttta

SEQ ID NO: 22437 - DNA, 17 bp, synthetic construct
  misc_feature 1..17: note = Oligonucleotide
  source 1..17: mol_type = other DNA
tggatacagatttgttt

SEQ ID NO: 22438 - DNA, 17 bp, synthetic construct
  misc_feature 1..17: note = Oligonucleotide
  source 1..17: mol_type = other DNA
atgtggatacagatttg

SEQ ID NO: 22439 - DNA, 17 bp, synthetic construct
  misc_feature 1..17: note = Oligonucleotide
  source 1..17: mol_type = other DNA
aagatgtggatacagat

SEQ ID NO: 22440 - DNA, 17 bp, synthetic construct
  misc_feature 1..17: note = Oligonucleotide
  source 1..17: mol_type = other DNA
tgaaagatgtggataca

SEQ ID NO: 22441 - DNA, 17 bp, synthetic construct
  misc_feature 1..17: note = Oligonucleotide
  source 1..17: mol_type = other DNA
ctatgaaagatgtggat

SEQ ID NO: 22442 - DNA, 17 bp, synthetic construct
  misc_feature 1..17: note = Oligonucleotide
  source 1..17: mol_type = other DNA
ttactatgaaagatgtg

SEQ ID NO: 22443 - DNA, 17 bp, synthetic construct
  misc_feature 1..17: note = Oligonucleotide
  source 1..17: mol_type = other DNA
gttttactatgaaagat

SEQ ID NO: 22444 - DNA, 17 bp, synthetic construct
  misc_feature 1..17: note = Oligonucleotide
  source 1..17: mol_type = other DNA
acagttttactatgaaa

SEQ ID NO: 22445 - DNA, 17 bp, synthetic construct
  misc_feature 1..17: note = Oligonucleotide
  source 1..17: mol_type = other DNA
tctacagttttactatg

SEQ ID NO: 22446 - DNA, 17 bp, synthetic construct
  misc_feature 1..17: note = Oligonucleotide
  source 1..17: mol_type = other DNA
cattctacagttttact

SEQ ID NO: 22447 - DNA, 17 bp, synthetic construct
  misc_feature 1..17: note = Oligonucleotide
  source 1..17: mol_type = other DNA
cagcattctacagtttt

SEQ ID NO: 22448 - DNA, 17 bp, synthetic construct
  misc_feature 1..17: note = Oligonucleotide
  source 1..17: mol_type = other DNA
tcacagcattctacagt

SEQ ID NO: 22449 - DNA, 17 bp, synthetic construct
  misc_feature 1..17: note = Oligonucleotide
  source 1..17: mol_type = other DNA
tgctcacagcattctac

SEQ ID NO: 22450 - DNA, 17 bp, synthetic construct
  misc_feature 1..17: note = Oligonucleotide
  source 1..17: mol_type = other DNA
gcttgctcacagcattc

SEQ ID NO: 22451 - DNA, 17 bp, synthetic construct
  misc_feature 1..17: note = Oligonucleotide
  source 1..17: mol_type = other DNA
tctgcttgctcacagca

SEQ ID NO: 22452 - DNA, 17 bp, synthetic construct
  misc_feature 1..17: note = Oligonucleotide
  source 1..17: mol_type = other DNA
atttctgcttgctcaca

SEQ ID NO: 22453 - DNA, 17 bp, synthetic construct
  misc_feature 1..17: note = Oligonucleotide
  source 1..17: mol_type = other DNA
aagatttctgcttgctc

SEQ ID NO: 22454 - DNA, 17 bp, synthetic construct
  misc_feature 1..17: note = Oligonucleotide
  source 1..17: mol_type = other DNA
ttaaagatttctgcttg

SEQ ID NO: 22455 - DNA, 17 bp, synthetic construct
  misc_feature 1..17: note = Oligonucleotide
  source 1..17: mol_type = other DNA
gttttaaagatttctgc

SEQ ID NO: 22456 - DNA, 17 bp, synthetic construct
  misc_feature 1..17: note = Oligonucleotide
  source 1..17: mol_type = other DNA
attgttttaaagatttc

SEQ ID NO: 22457 - DNA, 17 bp, synthetic construct
  misc_feature 1..17: note = Oligonucleotide
  source 1..17: mol_type = other DNA
ctcattgttttaaagat

SEQ ID NO: 22458 - DNA, 17 bp, synthetic construct
  misc_feature 1..17: note = Oligonucleotide
  source 1..17: mol_type = other DNA
tctctcattgttttaaa

SEQ ID NO: 22459 - DNA, 17 bp, synthetic construct
  misc_feature 1..17: note = Oligonucleotide
  source 1..17: mol_type = other DNA
gcctctctcattgtttt

SEQ ID NO: 22460 - DNA, 17 bp, synthetic construct
  misc_feature 1..17: note = Oligonucleotide
  source 1..17: mol_type = other DNA
ccagcctctctcattgt

SEQ ID NO: 22461 - DNA, 17 bp, synthetic construct
  misc_feature 1..17: note = Oligonucleotide
  source 1..17: mol_type = other DNA
cacccagcctctctcat

SEQ ID NO: 22462 - DNA, 17 bp, synthetic construct
  misc_feature 1..17: note = Oligonucleotide
  source 1..17: mol_type = other DNA
ccgcacccagcctctct

SEQ ID NO: 22463 - DNA, 17 bp, synthetic construct
  misc_feature 1..17: note = Oligonucleotide
  source 1..17: mol_type = other DNA
ccaccgcacccagcctc

SEQ ID NO: 22464 - DNA, 17 bp, synthetic construct
  misc_feature 1..17: note = Oligonucleotide
  source 1..17: mol_type = other DNA
gagccaccgcacccagc

SEQ ID NO: 22465 - DNA, 17 bp, synthetic construct
  misc_feature 1..17: note = Oligonucleotide
  source 1..17: mol_type = other DNA
catgagccaccgcaccc

SEQ ID NO: 22466 - DNA, 17 bp, synthetic construct
  misc_feature 1..17: note = Oligonucleotide
  source 1..17: mol_type = other DNA
aggcatgagccaccgca

SEQ ID NO: 22467 - DNA, 17 bp, synthetic construct
  misc_feature 1..17: note = Oligonucleotide
  source 1..17: mol_type = other DNA
tacaggcatgagccacc

SEQ ID NO: 22468 - DNA, 17 bp, synthetic construct
  misc_feature 1..17: note = Oligonucleotide
  source 1..17: mol_type = other DNA
gagtacaggcatgagcc

SEQ ID NO: 22469 - DNA, 17 bp, synthetic construct
  misc_feature 1..17: note = Oligonucleotide
  source 1..17: mol_type = other DNA
tgagagtacaggcatga

SEQ ID NO: 22470 - DNA, 17 bp, synthetic construct
  misc_feature 1..17: note = Oligonucleotide
  source 1..17: mol_type = other DNA
tgctgagagtacaggca

SEQ ID NO: 22471 - DNA, 17 bp, synthetic construct
  misc_feature 1..17: note = Oligonucleotide
  source 1..17: mol_type = other DNA
gagtgctgagagtacag

SEQ ID NO: 22472 - DNA, 17 bp, synthetic construct
  misc_feature 1..17: note = Oligonucleotide
  source 1..17: mol_type = other DNA
ccagagtgctgagagta

SEQ ID NO: 22473 - DNA, 17 bp, synthetic construct
  misc_feature 1..17: note = Oligonucleotide
  source 1..17: mol_type = other DNA
ctcccagagtgctgaga

SEQ ID NO: 22474 - DNA, 17 bp, synthetic construct
  misc_feature 1..17: note = Oligonucleotide
  source 1..17: mol_type = other DNA
ggcctcccagagtgctg

SEQ ID NO: 22475 - DNA, 17 bp, synthetic construct
  misc_feature 1..17: note = Oligonucleotide
  source 1..17: mol_type = other DNA
cttggcctcccagagtg

SEQ ID NO: 22476 - DNA, 17 bp, synthetic construct
  misc_feature 1..17: note = Oligonucleotide
  source 1..17: mol_type = other DNA
tgtcttggcctcccaga

SEQ ID NO: 22477 - DNA, 17 bp, synthetic construct
  misc_feature 1..17: note = Oligonucleotide
  source 1..17: mol_type = other DNA
acctgtcttggcctccc

SEQ ID NO: 22478 - DNA, 17 bp, synthetic construct
  misc_feature 1..17: note = Oligonucleotide
  source 1..17: mol_type = other DNA
tccacctgtcttggcct

SEQ ID NO: 22479 - DNA, 17 bp, synthetic construct
  misc_feature 1..17: note = Oligonucleotide
  source 1..17: mol_type = other DNA
tgatccacctgtcttgg

SEQ ID NO: 22480 - DNA, 17 bp, synthetic construct
  misc_feature 1..17: note = Oligonucleotide
  source 1..17: mol_type = other DNA
aagtgatccacctgtct

SEQ ID NO: 22481 - DNA, 17 bp, synthetic construct
  misc_feature 1..17: note = Oligonucleotide
  source 1..17: mol_type = other DNA
ctcaagtgatccacctg

SEQ ID NO: 22482 - DNA, 17 bp, synthetic construct
  misc_feature 1..17: note = Oligonucleotide
  source 1..17: mol_type = other DNA
agactcaagtgatccac

SEQ ID NO: 22483 - DNA, 17 bp, synthetic construct
  misc_feature 1..17: note = Oligonucleotide
  source 1..17: mol_type = other DNA
cctagactcaagtgatc

SEQ ID NO: 22484 - DNA, 17 bp, synthetic construct
  misc_feature 1..17: note = Oligonucleotide
  source 1..17: mol_type = other DNA
actcctagactcaagtg

SEQ ID NO: 22485 - DNA, 17 bp, synthetic construct
  misc_feature 1..17: note = Oligonucleotide
  source 1..17: mol_type = other DNA
caaactcctagactcaa

SEQ ID NO: 22486 - DNA, 17 bp, synthetic construct
  misc_feature 1..17: note = Oligonucleotide
  source 1..17: mol_type = other DNA
tctcaaactcctagact

SEQ ID NO: 22487 - DNA, 17 bp, synthetic construct
  misc_feature 1..17: note = Oligonucleotide
  source 1..17: mol_type = other DNA
tggtctcaaactcctag

SEQ ID NO: 22488 - DNA, 17 bp, synthetic construct
  misc_feature 1..17: note = Oligonucleotide
  source 1..17: mol_type = other DNA
ggctggtctcaaactcc

SEQ ID NO: 22489 - DNA, 17 bp, synthetic construct
  misc_feature 1..17: note = Oligonucleotide
  source 1..17: mol_type = other DNA
ccaggctggtctcaaac

SEQ ID NO: 22490 - DNA, 17 bp, synthetic construct
  misc_feature 1..17: note = Oligonucleotide
  source 1..17: mol_type = other DNA
tccccaggctggtctca

SEQ ID NO: 22491 - DNA, 17 bp, synthetic construct
  misc_feature 1..17: note = Oligonucleotide
  source 1..17: mol_type = other DNA
tgttccccaggctggtc

SEQ ID NO: 22492 - DNA, 17 bp, synthetic construct
  misc_feature 1..17: note = Oligonucleotide
  source 1..17: mol_type = other DNA
ccatgttccccaggctg

SEQ ID NO: 22493 - DNA, 17 bp, synthetic construct
  misc_feature 1..17: note = Oligonucleotide
  source 1..17: mol_type = other DNA
tcgccatgttccccagg

SEQ ID NO: 22494 - DNA, 17 bp, synthetic construct
  misc_feature 1..17: note = Oligonucleotide
  source 1..17: mol_type = other DNA
gtttcgccatgttcccc

SEQ ID NO: 22495 - DNA, 17 bp, synthetic construct
  misc_feature 1..17: note = Oligonucleotide
  source 1..17: mol_type = other DNA
agggtttcgccatgttc

SEQ ID NO: 22496 - DNA, 17 bp, synthetic construct
  misc_feature 1..17: note = Oligonucleotide
  source 1..17: mol_type = other DNA
gatagggtttcgccatg

SEQ ID NO: 22497 - DNA, 17 bp, synthetic construct
  misc_feature 1..17: note = Oligonucleotide
  source 1..17: mol_type = other DNA
agagatagggtttcgcc

SEQ ID NO: 22498 - DNA, 17 bp, synthetic construct
  misc_feature 1..17: note = Oligonucleotide
  source 1..17: mol_type = other DNA
agtagagatagggtttc

SEQ ID NO: 22499 - DNA, 17 bp, synthetic construct
  misc_feature 1..17: note = Oligonucleotide
  source 1..17: mol_type = other DNA
tttagtagagatagggt

SEQ ID NO: 22500 - DNA, 17 bp, synthetic construct
  misc_feature 1..17: note = Oligonucleotide
  source 1..17: mol_type = other DNA
atttttagtagagatag

SEQ ID NO: 22501 - DNA, 17 bp, synthetic construct
  misc_feature 1..17: note = Oligonucleotide
  source 1..17: mol_type = other DNA
tgtatttttagtagaga

SEQ ID NO: 22502 - DNA, 17 bp, synthetic construct
  misc_feature 1..17: note = Oligonucleotide
  source 1..17: mol_type = other DNA
ttttgtatttttagtag

SEQ ID NO: 22503 - DNA, 17 bp, synthetic construct
  misc_feature 1..17: note = Oligonucleotide
  source 1..17: mol_type = other DNA
aatttttgtatttttag

SEQ ID NO: 22504 - DNA, 17 bp, synthetic construct
  misc_feature 1..17: note = Oligonucleotide
  source 1..17: mol_type = other DNA
gataatttttgtatttt

SEQ ID NO: 22505 - DNA, 17 bp, synthetic construct
  misc_feature 1..17: note = Oligonucleotide
  source 1..17: mol_type = other DNA
caggataatttttgtat

SEQ ID NO: 22506 - DNA, 17 bp, synthetic construct
  misc_feature 1..17: note = Oligonucleotide
  source 1..17: mol_type = other DNA
tgccaggataatttttg

SEQ ID NO: 22507 - DNA, 17 bp, synthetic construct
  misc_feature 1..17: note = Oligonucleotide
  source 1..17: mol_type = other DNA
ccatgccaggataattt

SEQ ID NO: 22508 - DNA, 17 bp, synthetic construct
  misc_feature 1..17: note = Oligonucleotide
  source 1..17: mol_type = other DNA
ccaccatgccaggataa

SEQ ID NO: 22509 - DNA, 17 bp, synthetic construct
  misc_feature 1..17: note = Oligonucleotide
  source 1..17: mol_type = other DNA
acaccaccatgccagga

SEQ ID NO: 22510 - DNA, 17 bp, synthetic construct
  misc_feature 1..17: note = Oligonucleotide
  source 1..17: mol_type = other DNA
cacacaccaccatgcca

SEQ ID NO: 22511 - DNA, 17 bp, synthetic construct
  misc_feature 1..17: note = Oligonucleotide
  source 1..17: mol_type = other DNA
aggcacacaccaccatg

SEQ ID NO: 22512 - DNA, 17 bp, synthetic construct
  misc_feature 1..17: note = Oligonucleotide
  source 1..17: mol_type = other DNA
cacaggcacacaccacc

SEQ ID NO: 22513 - DNA, 17 bp, synthetic construct
  misc_feature 1..17: note = Oligonucleotide
  source 1..17: mol_type = other DNA
gaccacaggcacacacc

SEQ ID NO: 22514 - DNA, 17 bp, synthetic construct
  misc_feature 1..17: note = Oligonucleotide
  source 1..17: mol_type = other DNA
tgggaccacaggcacac

SEQ ID NO: 22515 - DNA, 17 bp, synthetic construct
  misc_feature 1..17: note = Oligonucleotide
  source 1..17: mol_type = other DNA
agctgggaccacaggca

SEQ ID NO: 22516 - DNA, 17 bp, synthetic construct
  misc_feature 1..17: note = Oligonucleotide
  source 1..17: mol_type = other DNA
agtagctgggaccacag

SEQ ID NO: 22517 - DNA, 17 bp, synthetic construct
  misc_feature 1..17: note = Oligonucleotide
  source 1..17: mol_type = other DNA
ctgagtagctgggacca

SEQ ID NO: 22518 - DNA, 17 bp, synthetic construct
  misc_feature 1..17: note = Oligonucleotide
  source 1..17: mol_type = other DNA
ctcctgagtagctggga

SEQ ID NO: 22519 - DNA, 17 bp, synthetic construct
  misc_feature 1..17: note = Oligonucleotide
  source 1..17: mol_type = other DNA
agcctcctgagtagctg

SEQ ID NO: 22520 - DNA, 17 bp, synthetic construct
  misc_feature 1..17: note = Oligonucleotide
  source 1..17: mol_type = other DNA
ctcagcctcctgagtag

SEQ ID NO: 22521 - DNA, 17 bp, synthetic construct
  misc_feature 1..17: note = Oligonucleotide
  source 1..17: mol_type = other DNA
cacctcagcctcctgag

SEQ ID NO: 22522 - DNA, 17 bp, synthetic construct
  misc_feature 1..17: note = Oligonucleotide
  source 1..17: mol_type = other DNA
tcccacctcagcctcct

SEQ ID NO: 22523 - DNA, 17 bp, synthetic construct
  misc_feature 1..17: note = Oligonucleotide
  source 1..17: mol_type = other DNA
tcctcccacctcagcct

SEQ ID NO: 22524 - DNA, 17 bp, synthetic construct
  misc_feature 1..17: note = Oligonucleotide
  source 1..17: mol_type = other DNA
caatcctcccacctcag

SEQ ID NO: 22525 - DNA, 17 bp, synthetic construct
  misc_feature 1..17: note = Oligonucleotide
  source 1..17: mol_type = other DNA
aagcaatcctcccacct

SEQ ID NO: 22526 - DNA, 17 bp, synthetic construct
  misc_feature 1..17: note = Oligonucleotide
  source 1..17: mol_type = other DNA
cttaagcaatcctccca

SEQ ID NO: 22527 - DNA, 17 bp, synthetic construct
  misc_feature 1..17: note = Oligonucleotide
  source 1..17: mol_type = other DNA
aggcttaagcaatcctc

SEQ ID NO: 22528 - DNA, 17 bp, synthetic construct
  misc_feature 1..17: note = Oligonucleotide
  source 1..17: mol_type = other DNA
cccaggcttaagcaatc

SEQ ID NO: 22529 - DNA, 17 bp, synthetic construct
  misc_feature 1..17: note = Oligonucleotide
  source 1..17: mol_type = other DNA
cgtcccaggcttaagca

SEQ ID NO: 22530 - DNA, 17 bp, synthetic construct
  misc_feature 1..17: note = Oligonucleotide
  source 1..17: mol_type = other DNA
ccacgtcccaggcttaa

SEQ ID NO: 22531 - DNA, 17 bp, synthetic construct
  misc_feature 1..17: note = Oligonucleotide
  source 1..17: mol_type = other DNA
cctccacgtcccaggct

SEQ ID NO: 22532 - DNA, 17 bp, synthetic construct
  misc_feature 1..17: note = Oligonucleotide
  source 1..17: mol_type = other DNA
caacctccacgtcccag

SEQ ID NO: 22533 - DNA, 17 bp, synthetic construct
  misc_feature 1..17: note = Oligonucleotide
  source 1..17: mol_type = other DNA
ctgcaacctccacgtcc

SEQ ID NO: 22534 - DNA, 17 bp, synthetic construct
  misc_feature 1..17: note = Oligonucleotide
  source 1..17: mol_type = other DNA
tcactgcaacctccacg

SEQ ID NO: 22535 - DNA, 17 bp, synthetic construct
  misc_feature 1..17: note = Oligonucleotide
  source 1..17: mol_type = other DNA
ggctcactgcaacctcc

SEQ ID NO: 22536 - DNA, 17 bp, synthetic construct
  misc_feature 1..17: note = Oligonucleotide
  source 1..17: mol_type = other DNA
cttggctcactgcaacc

SEQ ID NO: 22537 - DNA, 17 bp, synthetic construct
  misc_feature 1..17: note = Oligonucleotide
  source 1..17: mol_type = other DNA
gatcttggctcactgca

SEQ ID NO: 22538 - DNA, 17 bp, synthetic construct
  misc_feature 1..17: note = Oligonucleotide
  source 1..17: mol_type = other DNA
catgatcttggctcact

SEQ ID NO: 22539 - DNA, 17 bp, synthetic construct
  misc_feature 1..17: note = Oligonucleotide
  source 1..17: mol_type = other DNA
tggcatgatcttggctc

SEQ ID NO: 22540 - DNA, 17 bp, synthetic construct
  misc_feature 1..17: note = Oligonucleotide
  source 1..17: mol_type = other DNA
cactggcatgatcttgg

SEQ ID NO: 22541 - DNA, 17 bp, synthetic construct
  misc_feature 1..17: note = Oligonucleotide
  source 1..17: mol_type = other DNA
gtgcactggcatgatct

SEQ ID NO: 22542 - DNA, 17 bp, synthetic construct
  misc_feature 1..17: note = Oligonucleotide
  source 1..17: mol_type = other DNA
ggagtgcactggcatga

SEQ ID NO: 22543 - DNA, 17 bp, synthetic construct
  misc_feature 1..17: note = Oligonucleotide
  source 1..17: mol_type = other DNA
gctggagtgcactggca

SEQ ID NO: 22544 - DNA, 17 bp, synthetic construct
  misc_feature 1..17: note = Oligonucleotide
  source 1..17: mol_type = other DNA
caggctggagtgcactg

SEQ ID NO: 22545 - DNA, 17 bp, synthetic construct
  misc_feature 1..17: note = Oligonucleotide
  source 1..17: mol_type = other DNA
gcccaggctggagtgca

SEQ ID NO: 22546 - DNA, 17 bp, synthetic construct
  misc_feature 1..17: note = Oligonucleotide
  source 1..17: mol_type = other DNA
gttgcccaggctggagt

SEQ ID NO: 22547 - DNA, 17 bp, synthetic construct
  misc_feature 1..17: note = Oligonucleotide
  source 1..17: mol_type = other DNA
tctgttgcccaggctgg

SEQ ID NO: 22548 - DNA, 17 bp, synthetic construct
  misc_feature 1..17: note = Oligonucleotide
  source 1..17: mol_type = other DNA
cgctctgttgcccaggc

SEQ ID NO: 22549 - DNA, 17 bp, synthetic construct
  misc_feature 1..17: note = Oligonucleotide
  source 1..17: mol_type = other DNA
tctcgctctgttgccca

SEQ ID NO: 22550 - DNA, 17 bp, synthetic construct
  misc_feature 1..17: note = Oligonucleotide
  source 1..17: mol_type = other DNA
gggtctcgctctgttgc

SEQ ID NO: 22551 - DNA, 17 bp, synthetic construct
  misc_feature 1..17: note = Oligonucleotide
  source 1..17: mol_type = other DNA
acagggtctcgctctgt

SEQ ID NO: 22552 - DNA, 17 bp, synthetic construct
  misc_feature 1..17: note = Oligonucleotide
  source 1..17: mol_type = other DNA
gagacagggtctcgctc

SEQ ID NO: 22553 - DNA, 17 bp, synthetic construct
  misc_feature 1..17: note = Oligonucleotide
  source 1..17: mol_type = other DNA
tttgagacagggtctcg

SEQ ID NO: 22554 - DNA, 17 bp, synthetic construct
  misc_feature 1..17: note = Oligonucleotide
  source 1..17: mol_type = other DNA
tgttttgagacagggtc

SEQ ID NO: 22555 - DNA, 17 bp, synthetic construct
  misc_feature 1..17: note = Oligonucleotide
  source 1..17: mol_type = other DNA
ttttgttttgagacagg

SEQ ID NO: 22556 - DNA, 17 bp, synthetic construct
  misc_feature 1..17: note = Oligonucleotide
  source 1..17: mol_type = other DNA
ttgttttgttttgagac

SEQ ID NO: 22557 - DNA, 17 bp, synthetic construct
  misc_feature 1..17: note = Oligonucleotide
  source 1..17: mol_type = other DNA
gctttgttttgttttga

SEQ ID NO: 22558 - DNA, 17 bp, synthetic construct
  misc_feature 1..17: note = Oligonucleotide
  source 1..17: mol_type = other DNA
tttgctttgttttgttt

SEQ ID NO: 22559 - DNA, 17 bp, synthetic construct
  misc_feature 1..17: note = Oligonucleotide
  source 1..17: mol_type = other DNA
ttttttgctttgttttg

SEQ ID NO: 22560 - DNA, 17 bp, synthetic construct
  misc_feature 1..17: note = Oligonucleotide
  source 1..17: mol_type = other DNA
tcattttttgctttgtt

SEQ ID NO: 22561 - DNA, 17 bp, synthetic construct
  misc_feature 1..17: note = Oligonucleotide
  source 1..17: mol_type = other DNA
tcatcattttttgcttt

SEQ ID NO: 22562 - DNA, 17 bp, synthetic construct
  misc_feature 1..17: note = Oligonucleotide
  source 1..17: mol_type = other DNA
ctctcatcattttttgc

SEQ ID NO: 22563 - DNA, 17 bp, synthetic construct
  misc_feature 1..17: note = Oligonucleotide
  source 1..17: mol_type = other DNA
tctctctcatcattttt

SEQ ID NO: 22564 - DNA, 17 bp, synthetic construct
  misc_feature 1..17: note = Oligonucleotide
  source 1..17: mol_type = other DNA
ctctctctctcatcatt

SEQ ID NO: 22565 - DNA, 17 bp, synthetic construct
  misc_feature 1..17: note = Oligonucleotide
  source 1..17: mol_type = other DNA
tctctctctctctcatc

SEQ ID NO: 22566 - DNA, 17 bp, synthetic construct
  misc_feature 1..17: note = Oligonucleotide
  source 1..17: mol_type = other DNA
atctctctctctctctc

SEQ ID NO: 22567 - DNA, 17 bp, synthetic construct
  misc_feature 1..17: note = Oligonucleotide
  source 1..17: mol_type = other DNA
cccatctctctctctct

SEQ ID NO: 22568 - DNA, 17 bp, synthetic construct
  misc_feature 1..17: note = Oligonucleotide
  source 1..17: mol_type = other DNA
cagcccatctctctctc

SEQ ID NO: 22569 - DNA, 17 bp, synthetic construct
  misc_feature 1..17: note = Oligonucleotide
  source 1..17: mol_type = other DNA
cagcagcccatctctct

SEQ ID NO: 22570 - DNA, 17 bp, synthetic construct
  misc_feature 1..17: note = Oligonucleotide
  source 1..17: mol_type = other DNA
atccagcagcccatctc

SEQ ID NO: 22571 - DNA, 17 bp, synthetic construct
  misc_feature 1..17: note = Oligonucleotide
  source 1..17: mol_type = other DNA
gacatccagcagcccat

SEQ ID NO: 22572 - DNA, 17 bp, synthetic construct
  misc_feature 1..17: note = Oligonucleotide
  source 1..17: mol_type = other DNA
taagacatccagcagcc

SEQ ID NO: 22573 - DNA, 17 bp, synthetic construct
  misc_feature 1..17: note = Oligonucleotide
  source 1..17: mol_type = other DNA
gtctaagacatccagca

SEQ ID NO: 22574 - DNA, 17 bp, synthetic construct
  misc_feature 1..17: note = Oligonucleotide
  source 1..17: mol_type = other DNA
cccgtctaagacatcca

SEQ ID NO: 22575 - DNA, 17 bp, synthetic construct
  misc_feature 1..17: note = Oligonucleotide
  source 1..17: mol_type = other DNA
gctcccgtctaagacat

SEQ ID NO: 22576 - DNA, 17 bp, synthetic construct
  misc_feature 1..17: note = Oligonucleotide
  source 1..17: mol_type = other DNA
actgctcccgtctaaga

SEQ ID NO: 22577 - DNA, 17 bp, synthetic construct
  misc_feature 1..17: note = Oligonucleotide
  source 1..17: mol_type = other DNA
accactgctcccgtcta

SEQ ID NO: 22578 - DNA, 17 bp, synthetic construct
  misc_feature 1..17: note = Oligonucleotide
  source 1..17: mol_type = other DNA
tggaccactgctcccgt

SEQ ID NO: 22579 - DNA, 17 bp, synthetic construct
  misc_feature 1..17: note = Oligonucleotide
  source 1..17: mol_type = other DNA
agttggaccactgctcc

SEQ ID NO: 22580 - DNA, 17 bp, synthetic construct
  misc_feature 1..17: note = Oligonucleotide
  source 1..17: mol_type = other DNA
gtcagttggaccactgc

SEQ ID NO: 22581 - DNA, 17 bp, synthetic construct
  misc_feature 1..17: note = Oligonucleotide
  source 1..17: mol_type = other DNA
gttgtcagttggaccac

SEQ ID NO: 22582 - DNA, 17 bp, synthetic construct
  misc_feature 1..17: note = Oligonucleotide
  source 1..17: mol_type = other DNA
tctgttgtcagttggac

SEQ ID NO: 22583 - DNA, 17 bp, synthetic construct
  misc_feature 1..17: note = Oligonucleotide
  source 1..17: mol_type = other DNA
aagtctgttgtcagttg

SEQ ID NO: 22584 - DNA, 17 bp, synthetic construct
  misc_feature 1..17: note = Oligonucleotide
  source 1..17: mol_type = other DNA
gagaagtctgttgtcag

SEQ ID NO: 22585 - DNA, 17 bp, synthetic construct
  misc_feature 1..17: note = Oligonucleotide
  source 1..17: mol_type = other DNA
gatgagaagtctgttgt

SEQ ID NO: 22586 - DNA, 17 bp, synthetic construct
  misc_feature 1..17: note = Oligonucleotide
  source 1..17: mol_type = other DNA
gctgatgagaagtctgt

SEQ ID NO: 22587 - DNA, 17 bp, synthetic construct
  misc_feature 1..17: note = Oligonucleotide
  source 1..17: mol_type = other DNA
actgctgatgagaagtc

SEQ ID NO: 22588 - DNA, 17 bp, synthetic construct
  misc_feature 1..17: note = Oligonucleotide
  source 1..17: mol_type = other DNA
gccactgctgatgagaa

SEQ ID NO: 22589 - DNA, 17 bp, synthetic construct
  misc_feature 1..17: note = Oligonucleotide
  source 1..17: mol_type = other DNA
tctgccactgctgatga

SEQ ID NO: 22590 - DNA, 17 bp, synthetic construct
  misc_feature 1..17: note = Oligonucleotide
  source 1..17: mol_type = other DNA
tcatctgccactgctga

SEQ ID NO: 22591 - DNA, 17 bp, synthetic construct
  misc_feature 1..17: note = Oligonucleotide
  source 1..17: mol_type = other DNA
ctgtcatctgccactgc

SEQ ID NO: 22592 - DNA, 17 bp, synthetic construct
  misc_feature 1..17: note = Oligonucleotide
  source 1..17: mol_type = other DNA
ctactgtcatctgccac

SEQ ID NO: 22593 - DNA, 17 bp, synthetic construct
  misc_feature 1..17: note = Oligonucleotide
  source 1..17: mol_type = other DNA
catctactgtcatctgc

SEQ ID NO: 22594 - DNA, 17 bp, synthetic construct
  misc_feature 1..17: note = Oligonucleotide
  source 1..17: mol_type = other DNA
catcatctactgtcatc

SEQ ID NO: 22595 - DNA, 17 bp, synthetic construct
  misc_feature 1..17: note = Oligonucleotide
  source 1..17: mol_type = other DNA
ttccatcatctactgtc

SEQ ID NO: 22596 - DNA, 17 bp, synthetic construct
  misc_feature 1..17: note = Oligonucleotide
  source 1..17: mol_type = other DNA
ttcttccatcatctact

SEQ ID NO: 22597 - DNA, 17 bp, synthetic construct
  misc_feature 1..17: note = Oligonucleotide
  source 1..17: mol_type = other DNA
ctcttcttccatcatct

SEQ ID NO: 22598 - DNA, 17 bp, synthetic construct
  misc_feature 1..17: note = Oligonucleotide
  source 1..17: mol_type = other DNA
aagctcttcttccatca

SEQ ID NO: 22599 - DNA, 17 bp, synthetic construct
  misc_feature 1..17: note = Oligonucleotide
  source 1..17: mol_type = other DNA
ttgaagctcttcttcca

SEQ ID NO: 22600 - DNA, 17 bp, synthetic construct
  misc_feature 1..17: note = Oligonucleotide
  source 1..17: mol_type = other DNA
actttgaagctcttctt

SEQ ID NO: 22601 - DNA, 17 bp, synthetic construct
  misc_feature 1..17: note = Oligonucleotide
  source 1..17: mol_type = other DNA
cacactttgaagctctt

SEQ ID NO: 22602 - DNA, 17 bp, synthetic construct
  misc_feature 1..17: note = Oligonucleotide
  source 1..17: mol_type = other DNA
ctccacactttgaagct

SEQ ID NO: 22603 - DNA, 17 bp, synthetic construct
  misc_feature 1..17: note = Oligonucleotide
  source 1..17: mol_type = other DNA
tgactccacactttgaa

SEQ ID NO: 22604 - DNA, 17 bp, synthetic construct
  misc_feature 1..17: note = Oligonucleotide
  source 1..17: mol_type = other DNA
ttttgactccacacttt

SEQ ID NO: 22605 - DNA, 17 bp, synthetic construct
  misc_feature 1..17: note = Oligonucleotide
  source 1..17: mol_type = other DNA
gaattttgactccacac

SEQ ID NO: 22606 - DNA, 17 bp, synthetic construct
  misc_feature 1..17: note = Oligonucleotide
  source 1..17: mol_type = other DNA
aaagaattttgactcca

SEQ ID NO: 22607 - DNA, 17 bp, synthetic construct
  misc_feature 1..17: note = Oligonucleotide
  source 1..17: mol_type = other DNA
ggaaaagaattttgact

SEQ ID NO: 22608 - DNA, 17 bp, synthetic construct
  misc_feature 1..17: note = Oligonucleotide
  source 1..17: mol_type = other DNA
ggtggaaaagaattttg

SEQ ID NO: 22609 - DNA, 17 bp, synthetic construct
  misc_feature 1..17: note = Oligonucleotide
  source 1..17: mol_type = other DNA
ctaggtggaaaagaatt

SEQ ID NO: 22610 - DNA, 17 bp, synthetic construct
  misc_feature 1..17: note = Oligonucleotide
  source 1..17: mol_type = other DNA
attctaggtggaaaaga

SEQ ID NO: 22611 - DNA, 17 bp, synthetic construct
  misc_feature 1..17: note = Oligonucleotide
  source 1..17: mol_type = other DNA
agaattctaggtggaaa

SEQ ID NO: 22612 - DNA, 17 bp, synthetic construct
  misc_feature 1..17: note = Oligonucleotide
  source 1..17: mol_type = other DNA
tatagaattctaggtgg

SEQ ID NO: 22613 - DNA, 17 bp, synthetic construct
  misc_feature 1..17: note = Oligonucleotide
  source 1..17: mol_type = other DNA
gggtatagaattctagg

SEQ ID NO: 22614 - DNA, 17 bp, synthetic construct
  misc_feature 1..17: note = Oligonucleotide
  source 1..17: mol_type = other DNA
gcggggtatagaattct

SEQ ID NO: 22615 - DNA, 17 bp, synthetic construct
  misc_feature 1..17: note = Oligonucleotide
  source 1..17: mol_type = other DNA
ttagcggggtatagaat

SEQ ID NO: 22616 - DNA, 17 bp, synthetic construct
  misc_feature 1..17: note = Oligonucleotide
  source 1..17: mol_type = other DNA
ggattagcggggtatag

SEQ ID NO: 22617 - DNA, 17 bp, synthetic construct
  misc_feature 1..17: note = Oligonucleotide
  source 1..17: mol_type = other DNA
gcaggattagcggggta

SEQ ID NO: 22618 - DNA, 17 bp, synthetic construct
  misc_feature 1..17: note = Oligonucleotide
  source 1..17: mol_type = other DNA
tgagcaggattagcggg

SEQ ID NO: 22619 - DNA, 17 bp, synthetic construct
  misc_feature 1..17: note = Oligonucleotide
  source 1..17: mol_type = other DNA
gaatgagcaggattagc

SEQ ID NO: 22620 - DNA, 17 bp, synthetic construct
  misc_feature 1..17: note = Oligonucleotide
  source 1..17: mol_type = other DNA
cctgaatgagcaggatt

SEQ ID NO: 22621 - DNA, 17 bp, synthetic construct
  misc_feature 1..17: note = Oligonucleotide
  source 1..17: mol_type = other DNA
actcctgaatgagcagg

SEQ ID NO: 22622 - DNA, 17 bp, synthetic construct
  misc_feature 1..17: note = Oligonucleotide
  source 1..17: mol_type = other DNA
ctcactcctgaatgagc

SEQ ID NO: 22623 - DNA, 17 bp, synthetic construct
  misc_feature 1..17: note = Oligonucleotide
  source 1..17: mol_type = other DNA
tgcctcactcctgaatg

SEQ ID NO: 22624 - DNA, 17 bp, synthetic construct
  misc_feature 1..17: note = Oligonucleotide
  source 1..17: mol_type = other DNA
ctctgcctcactcctga

SEQ ID NO: 22625 - DNA, 17 bp, synthetic construct
  misc_feature 1..17: note = Oligonucleotide
  source 1..17: mol_type = other DNA
cctctctgcctcactcc

SEQ ID NO: 22626 - DNA, 17 bp, synthetic construct
  misc_feature 1..17: note = Oligonucleotide
  source 1..17: mol_type = other DNA
tagcctctctgcctcac

SEQ ID NO: 22627 - DNA, 17 bp, synthetic construct
  misc_feature 1..17: note = Oligonucleotide
  source 1..17: mol_type = other DNA
gattagcctctctgcct

SEQ ID NO: 22628 - DNA, 17 bp, synthetic construct
  misc_feature 1..17: note = Oligonucleotide
  source 1..17: mol_type = other DNA
taggattagcctctctg

SEQ ID NO: 22629 - DNA, 17 bp, synthetic construct
  misc_feature 1..17: note = Oligonucleotide
  source 1..17: mol_type = other DNA
gtctaggattagcctct

SEQ ID NO: 22630 - DNA, 17 bp, synthetic construct
  misc_feature 1..17: note = Oligonucleotide
  source 1..17: mol_type = other DNA
gaggtctaggattagcc

SEQ ID NO: 22631 - DNA, 17 bp, synthetic construct
  misc_feature 1..17: note = Oligonucleotide
  source 1..17: mol_type = other DNA
ccagaggtctaggatta

SEQ ID NO: 22632 - DNA, 17 bp, synthetic construct
  misc_feature 1..17: note = Oligonucleotide
  source 1..17: mol_type = other DNA
gtgccagaggtctagga

SEQ ID NO: 22633 - DNA, 17 bp, synthetic construct
  misc_feature 1..17: note = Oligonucleotide
  source 1..17: mol_type = other DNA
cgagtgccagaggtcta

SEQ ID NO: 22634 - DNA, 17 bp, synthetic construct
  misc_feature 1..17: note = Oligonucleotide
  source 1..17: mol_type = other DNA
acccgagtgccagaggt

SEQ ID NO: 22635 - DNA, 17 bp, synthetic construct
  misc_feature 1..17: note = Oligonucleotide
  source 1..17: mol_type = other DNA
atgacccgagtgccaga

SEQ ID NO: 22636 - DNA, 17 bp, synthetic construct
  misc_feature 1..17: note = Oligonucleotide
  source 1..17: mol_type = other DNA
ctcatgacccgagtgcc

SEQ ID NO: 22637 - DNA, 17 bp, synthetic construct
  misc_feature 1..17: note = Oligonucleotide
  source 1..17: mol_type = other DNA
accctcatgacccgagt

SEQ ID NO: 22638 - DNA, 17 bp, synthetic construct
  misc_feature 1..17: note = Oligonucleotide
  source 1..17: mol_type = other DNA
tggaccctcatgacccg

SEQ ID NO: 22639 - DNA, 17 bp, synthetic construct
  misc_feature 1..17: note = Oligonucleotide
  source 1..17: mol_type = other DNA
ccttggaccctcatgac

SEQ ID NO: 22640 - DNA, 17 bp, synthetic construct
  misc_feature 1..17: note = Oligonucleotide
  source 1..17: mol_type = other DNA
tgaccttggaccctcat

SEQ ID NO: 22641 - DNA, 17 bp, synthetic construct
  misc_feature 1..17: note = Oligonucleotide
  source 1..17: mol_type = other DNA
gactgaccttggaccct

SEQ ID NO: 22642 - DNA, 17 bp, synthetic construct
  misc_feature 1..17: note = Oligonucleotide
  source 1..17: mol_type = other DNA
cgtgactgaccttggac

SEQ ID NO: 22643 - DNA, 17 bp, synthetic construct
  misc_feature 1..17: note = Oligonucleotide
  source 1..17: mol_type = other DNA
ccccgtgactgaccttg

SEQ ID NO: 22644 - DNA, 17 bp, synthetic construct
  misc_feature 1..17: note = Oligonucleotide
  source 1..17: mol_type = other DNA
gctccccgtgactgacc

SEQ ID NO: 22645 - DNA, 17 bp, synthetic construct
  misc_feature 1..17: note = Oligonucleotide
  source 1..17: mol_type = other DNA
tcagctccccgtgactg

SEQ ID NO: 22646 - DNA, 17 bp, synthetic construct
  misc_feature 1..17: note = Oligonucleotide
  source 1..17: mol_type = other DNA
aggtcagctccccgtga

SEQ ID NO: 22647 - DNA, 17 bp, synthetic construct
  misc_feature 1..17: note = Oligonucleotide
  source 1..17: mol_type = other DNA
gacaggtcagctccccg

SEQ ID NO: 22648 - DNA, 17 bp, synthetic construct
  misc_feature 1..17: note = Oligonucleotide
  source 1..17: mol_type = other DNA
attgacaggtcagctcc

SEQ ID NO: 22649 - DNA, 17 bp, synthetic construct
  misc_feature 1..17: note = Oligonucleotide
  source 1..17: mol_type = other DNA
tcaattgacaggtcagc

SEQ ID NO: 22650 - DNA, 17 bp, synthetic construct
  misc_feature 1..17: note = Oligonucleotide
  source 1..17: mol_type = other DNA
tcttcaattgacaggtc

SEQ ID NO: 22651 - DNA, 17 bp, synthetic construct
  misc_feature 1..17: note = Oligonucleotide
  source 1..17: mol_type = other DNA
ggatcttcaattgacag

SEQ ID NO: 22652 - DNA, 17 bp, synthetic construct
  misc_feature 1..17: note = Oligonucleotide
  source 1..17: mol_type = other DNA
tttggatcttcaattga

SEQ ID NO: 22653 - DNA, 17 bp, synthetic construct
  misc_feature 1..17: note = Oligonucleotide
  source 1..17: mol_type = other DNA
cagtttggatcttcaat

SEQ ID NO: 22654 - DNA, 17 bp, synthetic construct
  misc_feature 1..17: note = Oligonucleotide
  source 1..17: mol_type = other DNA
gatcagtttggatcttc

SEQ ID NO: 22655 - DNA, 17 bp, synthetic construct
  misc_feature 1..17: note = Oligonucleotide
  source 1..17: mol_type = other DNA
attgatcagtttggatc

SEQ ID NO: 22656 - DNA, 17 bp, synthetic construct
  misc_feature 1..17: note = Oligonucleotide
  source 1..17: mol_type = other DNA
cttattgatcagtttgg

SEQ ID NO: 22657 - DNA, 17 bp, synthetic construct
  misc_feature 1..17: note = Oligonucleotide
  source 1..17: mol_type = other DNA
tggcttattgatcagtt

SEQ ID NO: 22658 - DNA, 17 bp, synthetic construct
  misc_feature 1..17: note = Oligonucleotide
  source 1..17: mol_type = other DNA
tgctggcttattgatca

SEQ ID NO: 22659 - DNA, 17 bp, synthetic construct
  misc_feature 1..17: note = Oligonucleotide
  source 1..17: mol_type = other DNA
tggtgctggcttattga

SEQ ID NO: 22660 - DNA, 17 bp, synthetic construct
  misc_feature 1..17: note = Oligonucleotide
  source 1..17: mol_type = other DNA
tactggtgctggcttat

SEQ ID NO: 22661 - DNA, 17 bp, synthetic construct
  misc_feature 1..17: note = Oligonucleotide
  source 1..17: mol_type = other DNA
gcctactggtgctggct

SEQ ID NO: 22662 - DNA, 17 bp, synthetic construct
  misc_feature 1..17: note = Oligonucleotide
  source 1..17: mol_type = other DNA
gctgcctactggtgctg

SEQ ID NO: 22663 - DNA, 17 bp, synthetic construct
  misc_feature 1..17: note = Oligonucleotide
  source 1..17: mol_type = other DNA
ccagctgcctactggtg

SEQ ID NO: 22664 - DNA, 17 bp, synthetic construct
  misc_feature 1..17: note = Oligonucleotide
  source 1..17: mol_type = other DNA
gacccagctgcctactg

SEQ ID NO: 22665 - DNA, 17 bp, synthetic construct
  misc_feature 1..17: note = Oligonucleotide
  source 1..17: mol_type = other DNA
tgggacccagctgccta

SEQ ID NO: 22666 - DNA, 17 bp, synthetic construct
  misc_feature 1..17: note = Oligonucleotide
  source 1..17: mol_type = other DNA
tcctgggacccagctgc

SEQ ID NO: 22667 - DNA, 17 bp, synthetic construct
  misc_feature 1..17: note = Oligonucleotide
  source 1..17: mol_type = other DNA
gaatcctgggacccagc

SEQ ID NO: 22668 - DNA, 17 bp, synthetic construct
  misc_feature 1..17: note = Oligonucleotide
  source 1..17: mol_type = other DNA
ggagaatcctgggaccc

SEQ ID NO: 22669 - DNA, 17 bp, synthetic construct
  misc_feature 1..17: note = Oligonucleotide
  source 1..17: mol_type = other DNA
gcaggagaatcctggga

SEQ ID NO: 22670 - DNA, 17 bp, synthetic construct
  misc_feature 1..17: note = Oligonucleotide
  source 1..17: mol_type = other DNA
ctggcaggagaatcctg

SEQ ID NO: 22671 - DNA, 17 bp, synthetic construct
  misc_feature 1..17: note = Oligonucleotide
  source 1..17: mol_type = other DNA
cctctggcaggagaatc

SEQ ID NO: 22672 - DNA, 17 bp, synthetic construct
  misc_feature 1..17: note = Oligonucleotide
  source 1..17: mol_type = other DNA
cagcctctggcaggaga

SEQ ID NO: 22673 - DNA, 17 bp, synthetic construct
  misc_feature 1..17: note = Oligonucleotide
  source 1..17: mol_type = other DNA
tgacagcctctggcagg

SEQ ID NO: 22674 - DNA, 17 bp, synthetic construct
  misc_feature 1..17: note = Oligonucleotide
  source 1..17: mol_type = other DNA
atgtgacagcctctggc

SEQ ID NO: 22675 - DNA, 17 bp, synthetic construct
  misc_feature 1..17: note = Oligonucleotide
  source 1..17: mol_type = other DNA
gctatgtgacagcctct

SEQ ID NO: 22676 - DNA, 17 bp, synthetic construct
  misc_feature 1..17: note = Oligonucleotide
  source 1..17: mol_type = other DNA
gtggctatgtgacagcc

SEQ ID NO: 22677 - DNA, 17 bp, synthetic construct
  misc_feature 1..17: note = Oligonucleotide
  source 1..17: mol_type = other DNA
actgtggctatgtgaca

SEQ ID NO: 22678 - DNA, 17 bp, synthetic construct
  misc_feature 1..17: note = Oligonucleotide
  source 1..17: mol_type = other DNA
ctgactgtggctatgtg

SEQ ID NO: 22679 - DNA, 17 bp, synthetic construct
  misc_feature 1..17: note = Oligonucleotide
  source 1..17: mol_type = other DNA
cagctgactgtggctat

SEQ ID NO: 22680 - DNA, 17 bp, synthetic construct
  misc_feature 1..17: note = Oligonucleotide
  source 1..17: mol_type = other DNA
atgcagctgactgtggc

SEQ ID NO: 22681 - DNA, 17 bp, synthetic construct
  misc_feature 1..17: note = Oligonucleotide
  source 1..17: mol_type = other DNA
aacatgcagctgactgt

SEQ ID NO: 22682 - DNA, 17 bp, synthetic construct
  misc_feature 1..17: note = Oligonucleotide
  source 1..17: mol_type = other DNA
ctgaacatgcagctgac

SEQ ID NO: 22683 - DNA, 17 bp, synthetic construct
  misc_feature 1..17: note = Oligonucleotide
  source 1..17: mol_type = other DNA
cttctgaacatgcagct

SEQ ID NO: 22684 - DNA, 17 bp, synthetic construct
  misc_feature 1..17: note = Oligonucleotide
  source 1..17: mol_type = other DNA
tcccttctgaacatgca

SEQ ID NO: 22685 - DNA, 17 bp, synthetic construct
  misc_feature 1..17: note = Oligonucleotide
  source 1..17: mol_type = other DNA
gagtcccttctgaacat

SEQ ID NO: 22686 - DNA, 17 bp, synthetic construct
  misc_feature 1..17: note = Oligonucleotide
  source 1..17: mol_type = other DNA
gaagagtcccttctgaa

SEQ ID NO: 22687 - DNA, 17 bp, synthetic construct
  misc_feature 1..17: note = Oligonucleotide
  source 1..17: mol_type = other DNA
atagaagagtcccttct

SEQ ID NO: 22688 - DNA, 17 bp, synthetic construct
  misc_feature 1..17: note = Oligonucleotide
  source 1..17: mol_type = other DNA
tgaatagaagagtccct

SEQ ID NO: 22689 - DNA, 17 bp, synthetic construct
  misc_feature 1..17: note = Oligonucleotide
  source 1..17: mol_type = other DNA
tgctgaatagaagagtc

SEQ ID NO: 22690 - DNA, 17 bp, synthetic construct
  misc_feature 1..17: note = Oligonucleotide
  source 1..17: mol_type = other DNA
tggtgctgaatagaaga

SEQ ID NO: 22691 - DNA, 17 bp, synthetic construct
  misc_feature 1..17: note = Oligonucleotide
  source 1..17: mol_type = other DNA
ccgtggtgctgaataga

SEQ ID NO: 22692 - DNA, 17 bp, synthetic construct
  misc_feature 1..17: note = Oligonucleotide
  source 1..17: mol_type = other DNA
gccccgtggtgctgaat

SEQ ID NO: 22693 - DNA, 17 bp, synthetic construct
  misc_feature 1..17: note = Oligonucleotide
  source 1..17: mol_type = other DNA
aaagccccgtggtgctg

SEQ ID NO: 22694 - DNA, 17 bp, synthetic construct
  misc_feature 1..17: note = Oligonucleotide
  source 1..17: mol_type = other DNA
ccaaaagccccgtggtg

SEQ ID NO: 22695 - DNA, 17 bp, synthetic construct
  misc_feature 1..17: note = Oligonucleotide
  source 1..17: mol_type = other DNA
tgcccaaaagccccgtg

SEQ ID NO: 22696 - DNA, 17 bp, synthetic construct
  misc_feature 1..17: note = Oligonucleotide
  source 1..17: mol_type = other DNA
ggctgcccaaaagcccc

SEQ ID NO: 22697 - DNA, 17 bp, synthetic construct
  misc_feature 1..17: note = Oligonucleotide
  source 1..17: mol_type = other DNA
tcaggctgcccaaaagc

SEQ ID NO: 22698 - DNA, 17 bp, synthetic construct
  misc_feature 1..17: note = Oligonucleotide
  source 1..17: mol_type = other DNA
atctcaggctgcccaaa

SEQ ID NO: 22699 - DNA, 17 bp, synthetic construct
  misc_feature 1..17: note = Oligonucleotide
  source 1..17: mol_type = other DNA
cggatctcaggctgccc

SEQ ID NO: 22700 - DNA, 17 bp, synthetic construct
  misc_feature 1..17: note = Oligonucleotide
  source 1..17: mol_type = other DNA
ttacggatctcaggctg

SEQ ID NO: 22701 - DNA, 17 bp, synthetic construct
  misc_feature 1..17: note = Oligonucleotide
  source 1..17: mol_type = other DNA
ggattacggatctcagg

SEQ ID NO: 22702 - DNA, 17 bp, synthetic construct
  misc_feature 1..17: note = Oligonucleotide
  source 1..17: mol_type = other DNA
ccaggattacggatctc

SEQ ID NO: 22703 - DNA, 17 bp, synthetic construct
  misc_feature 1..17: note = Oligonucleotide
  source 1..17: mol_type = other DNA
gtcccaggattacggat

SEQ ID NO: 22704 - DNA, 17 bp, synthetic construct
  misc_feature 1..17: note = Oligonucleotide
  source 1..17: mol_type = other DNA
tgggtcccaggattacg

SEQ ID NO: 22705 - DNA, 17 bp, synthetic construct
  misc_feature 1..17: note = Oligonucleotide
  source 1..17: mol_type = other DNA
ccctgggtcccaggatt

SEQ ID NO: 22706 - DNA, 17 bp, synthetic construct
  misc_feature 1..17: note = Oligonucleotide
  source 1..17: mol_type = other DNA
agtccctgggtcccagg

SEQ ID NO: 22707 - DNA, 17 bp, synthetic construct
  misc_feature 1..17: note = Oligonucleotide
  source 1..17: mol_type = other DNA
cagagtccctgggtccc

SEQ ID NO: 22708 - DNA, 17 bp, synthetic construct
  misc_feature 1..17: note = Oligonucleotide
  source 1..17: mol_type = other DNA
gggcagagtccctgggt

SEQ ID NO: 22709 - DNA, 17 bp, synthetic construct
  misc_feature 1..17: note = Oligonucleotide
  source 1..17: mol_type = other DNA
atagggcagagtccctg

SEQ ID NO: 22710 - DNA, 17 bp, synthetic construct
  misc_feature 1..17: note = Oligonucleotide
  source 1..17: mol_type = other DNA
tccatagggcagagtcc

SEQ ID NO: 22711 - DNA, 17 bp, synthetic construct
  misc_feature 1..17: note = Oligonucleotide
  source 1..17: mol_type = other DNA
gtttccatagggcagag

SEQ ID NO: 22712 - DNA, 17 bp, synthetic construct
  misc_feature 1..17: note = Oligonucleotide
  source 1..17: mol_type = other DNA
tccgtttccatagggca

SEQ ID NO: 22713 - DNA, 17 bp, synthetic construct
  misc_feature 1..17: note = Oligonucleotide
  source 1..17: mol_type = other DNA
ccttccgtttccatagg

SEQ ID NO: 22714 - DNA, 17 bp, synthetic construct
  misc_feature 1..17: note = Oligonucleotide
  source 1..17: mol_type = other DNA
agtccttccgtttccat

SEQ ID NO: 22715 - DNA, 17 bp, synthetic construct
  misc_feature 1..17: note = Oligonucleotide
  source 1..17: mol_type = other DNA
cgcagtccttccgtttc

SEQ ID NO: 22716 - DNA, 17 bp, synthetic construct
  misc_feature 1..17: note = Oligonucleotide
  source 1..17: mol_type = other DNA
aagcgcagtccttccgt

SEQ ID NO: 22717 - DNA, 17 bp, synthetic construct
  misc_feature 1..17: note = Oligonucleotide
  source 1..17: mol_type = other DNA
gcaaagcgcagtccttc

SEQ ID NO: 22718 - DNA, 17 bp, synthetic construct
  misc_feature 1..17: note = Oligonucleotide
  source 1..17: mol_type = other DNA
agagcaaagcgcagtcc

SEQ ID NO: 22719 - DNA, 17 bp, synthetic construct
  misc_feature 1..17: note = Oligonucleotide
  source 1..17: mol_type = other DNA
cagagagcaaagcgcag

SEQ ID NO: 22720 - DNA, 17 bp, synthetic construct
  misc_feature 1..17: note = Oligonucleotide
  source 1..17: mol_type = other DNA
gcccagagagcaaagcg

SEQ ID NO: 22721 - DNA, 17 bp, synthetic construct
  misc_feature 1..17: note = Oligonucleotide
  source 1..17: mol_type = other DNA
aaagcccagagagcaaa

SEQ ID NO: 22722 - DNA, 17 bp, synthetic construct
  misc_feature 1..17: note = Oligonucleotide
  source 1..17: mol_type = other DNA
agaaaagcccagagagc

SEQ ID NO: 22723 - DNA, 17 bp, synthetic construct
  misc_feature 1..17: note = Oligonucleotide
  source 1..17: mol_type = other DNA
ggcagaaaagcccagag

SEQ ID NO: 22724 - DNA, 17 bp, synthetic construct
  misc_feature 1..17: note = Oligonucleotide
  source 1..17: mol_type = other DNA
tcaggcagaaaagccca

SEQ ID NO: 22725 - DNA, 17 bp, synthetic construct
  misc_feature 1..17: note = Oligonucleotide
  source 1..17: mol_type = other DNA
tcttcaggcagaaaagc

SEQ ID NO: 22726 - DNA, 17 bp, synthetic construct
  misc_feature 1..17: note = Oligonucleotide
  source 1..17: mol_type = other DNA
gtttcttcaggcagaaa

SEQ ID NO: 22727 - DNA, 17 bp, synthetic construct
  misc_feature 1..17: note = Oligonucleotide
  source 1..17: mol_type = other DNA
ccagtttcttcaggcag

SEQ ID NO: 22728 - DNA, 17 bp, synthetic construct
  misc_feature 1..17: note = Oligonucleotide
  source 1..17: mol_type = other DNA
tcaccagtttcttcagg

SEQ ID NO: 22729 - DNA, 17 bp, synthetic construct
  misc_feature 1..17: note = Oligonucleotide
  source 1..17: mol_type = other DNA
cattcaccagtttcttc

SEQ ID NO: 22730 - DNA, 17 bp, synthetic construct
  misc_feature 1..17: note = Oligonucleotide
  source 1..17: mol_type = other DNA
cttcattcaccagtttc

SEQ ID NO: 22731 - DNA, 17 bp, synthetic construct
  misc_feature 1..17: note = Oligonucleotide
  source 1..17: mol_type = other DNA
cgtcttcattcaccagt

SEQ ID NO: 22732 - DNA, 17 bp, synthetic construct
  misc_feature 1..17: note = Oligonucleotide
  source 1..17: mol_type = other DNA
gagcgtcttcattcacc

SEQ ID NO: 22733 - DNA, 17 bp, synthetic construct
  misc_feature 1..17: note = Oligonucleotide
  source 1..17: mol_type = other DNA
aaggagcgtcttcattc

SEQ ID NO: 22734 - DNA, 17 bp, synthetic construct
  misc_feature 1..17: note = Oligonucleotide
  source 1..17: mol_type = other DNA
ggaaaggagcgtcttca

SEQ ID NO: 22735 - DNA, 17 bp, synthetic construct
  misc_feature 1..17: note = Oligonucleotide
  source 1..17: mol_type = other DNA
gagggaaaggagcgtct

SEQ ID NO: 22736 - DNA, 17 bp, synthetic construct
  misc_feature 1..17: note = Oligonucleotide
  source 1..17: mol_type = other DNA
ggggagggaaaggagcg

SEQ ID NO: 22737 - DNA, 17 bp, synthetic construct
  misc_feature 1..17: note = Oligonucleotide
  source 1..17: mol_type = other DNA
agaggggagggaaagga

SEQ ID NO: 22738 - DNA, 17 bp, synthetic construct
  misc_feature 1..17: note = Oligonucleotide
  source 1..17: mol_type = other DNA
cccagaggggagggaaa

SEQ ID NO: 22739 - DNA, 17 bp, synthetic construct
  misc_feature 1..17: note = Oligonucleotide
  source 1..17: mol_type = other DNA
cagcccagaggggaggg

SEQ ID NO: 22740 - DNA, 17 bp, synthetic construct
  misc_feature 1..17: note = Oligonucleotide
  source 1..17: mol_type = other DNA
actcagcccagagggga

SEQ ID NO: 22741 - DNA, 17 bp, synthetic construct
  misc_feature 1..17: note = Oligonucleotide
  source 1..17: mol_type = other DNA
aacactcagcccagagg

SEQ ID NO: 22742 - DNA, 17 bp, synthetic construct
  misc_feature 1..17: note = Oligonucleotide
  source 1..17: mol_type = other DNA
gggaacactcagcccag

SEQ ID NO: 22743 - DNA, 17 bp, synthetic construct
  misc_feature 1..17: note = Oligonucleotide
  source 1..17: mol_type = other DNA
agagggaacactcagcc

SEQ ID NO: 22744 - DNA, 17 bp, synthetic construct
  misc_feature 1..17: note = Oligonucleotide
  source 1..17: mol_type = other DNA
agaagagggaacactca

SEQ ID NO: 22745 - DNA, 17 bp, synthetic construct
  misc_feature 1..17: note = Oligonucleotide
  source 1..17: mol_type = other DNA
tgcagaagagggaacac

SEQ ID NO: 22746 - DNA, 17 bp, synthetic construct
  misc_feature 1..17: note = Oligonucleotide
  source 1..17: mol_type = other DNA
tgttgcagaagagggaa

SEQ ID NO: 22747 - DNA, 17 bp, synthetic construct
  misc_feature 1..17: note = Oligonucleotide
  source 1..17: mol_type = other DNA
gcttgttgcagaagagg

SEQ ID NO: 22748 - DNA, 17 bp, synthetic construct
  misc_feature 1..17: note = Oligonucleotide
  source 1..17: mol_type = other DNA
gaggcttgttgcagaag

SEQ ID NO: 22749 - DNA, 17 bp, synthetic construct
  misc_feature 1..17: note = Oligonucleotide
  source 1..17: mol_type = other DNA
cctgaggcttgttgcag

SEQ ID NO: 22750 - DNA, 17 bp, synthetic construct
  misc_feature 1..17: note = Oligonucleotide
  source 1..17: mol_type = other DNA
tgtcctgaggcttgttg

SEQ ID NO: 22751 - DNA, 17 bp, synthetic construct
  misc_feature 1..17: note = Oligonucleotide
  source 1..17: mol_type = other DNA
acctgtcctgaggcttg

SEQ ID NO: 22752 - DNA, 17 bp, synthetic construct
  misc_feature 1..17: note = Oligonucleotide
  source 1..17: mol_type = other DNA
gcaacctgtcctgaggc

SEQ ID NO: 22753 - DNA, 17 bp, synthetic construct
  misc_feature 1..17: note = Oligonucleotide
  source 1..17: mol_type = other DNA
ccagcaacctgtcctga

SEQ ID NO: 22754 - DNA, 17 bp, synthetic construct
  misc_feature 1..17: note = Oligonucleotide
  source 1..17: mol_type = other DNA
actccagcaacctgtcc

SEQ ID NO: 22755 - DNA, 17 bp, synthetic construct
  misc_feature 1..17: note = Oligonucleotide
  source 1..17: mol_type = other DNA
gtgactccagcaacctg

SEQ ID NO: 22756 - DNA, 17 bp, synthetic construct
  misc_feature 1..17: note = Oligonucleotide
  source 1..17: mol_type = other DNA
aaagtgactccagcaac

SEQ ID NO: 22757 - DNA, 17 bp, synthetic construct
  misc_feature 1..17: note = Oligonucleotide
  source 1..17: mol_type = other DNA
tgcaaagtgactccagc

SEQ ID NO: 22758 - DNA, 17 bp, synthetic construct
  misc_feature 1..17: note = Oligonucleotide
  source 1..17: mol_type = other DNA
ctctgcaaagtgactcc

SEQ ID NO: 22759 - DNA, 17 bp, synthetic construct
  misc_feature 1..17: note = Oligonucleotide
  source 1..17: mol_type = other DNA
gggctctgcaaagtgac

SEQ ID NO: 22760 - DNA, 17 bp, synthetic construct
  misc_feature 1..17: note = Oligonucleotide
  source 1..17: mol_type = other DNA
accgggctctgcaaagt

SEQ ID NO: 22761 - DNA, 17 bp, synthetic construct
  misc_feature 1..17: note = Oligonucleotide
  source 1..17: mol_type = other DNA
aagaccgggctctgcaa

SEQ ID NO: 22762 - DNA, 17 bp, synthetic construct
  misc_feature 1..17: note = Oligonucleotide
  source 1..17: mol_type = other DNA
tggaagaccgggctctg

SEQ ID NO: 22763 - DNA, 17 bp, synthetic construct
  misc_feature 1..17: note = Oligonucleotide
  source 1..17: mol_type = other DNA
ctctggaagaccgggct

SEQ ID NO: 22764 - DNA, 17 bp, synthetic construct
  misc_feature 1..17: note = Oligonucleotide
  source 1..17: mol_type = other DNA
ctcctctggaagaccgg

SEQ ID NO: 22765 - DNA, 17 bp, synthetic construct
  misc_feature 1..17: note = Oligonucleotide
  source 1..17: mol_type = other DNA
caactcctctggaagac

SEQ ID NO: 22766 - DNA, 17 bp, synthetic construct
  misc_feature 1..17: note = Oligonucleotide
  source 1..17: mol_type = other DNA
gagcaactcctctggaa

SEQ ID NO: 22767 - DNA, 17 bp, synthetic construct
  misc_feature 1..17: note = Oligonucleotide
  source 1..17: mol_type = other DNA
tgtgagcaactcctctg

SEQ ID NO: 22768 - DNA, 17 bp, synthetic construct
  misc_feature 1..17: note = Oligonucleotide
  source 1..17: mol_type = other DNA
agctgtgagcaactcct

SEQ ID NO: 22769 - DNA, 17 bp, synthetic construct
  misc_feature 1..17: note = Oligonucleotide
  source 1..17: mol_type = other DNA
tgaagctgtgagcaact

SEQ ID NO: 22770 - DNA, 17 bp, synthetic construct
  misc_feature 1..17: note = Oligonucleotide
  source 1..17: mol_type = other DNA
gcctgaagctgtgagca

SEQ ID NO: 22771 - DNA, 17 bp, synthetic construct
  misc_feature 1..17: note = Oligonucleotide
  source 1..17: mol_type = other DNA
gtggcctgaagctgtga

SEQ ID NO: 22772 - DNA, 17 bp, synthetic construct
  misc_feature 1..17: note = Oligonucleotide
  source 1..17: mol_type = other DNA
atggtggcctgaagctg

SEQ ID NO: 22773 - DNA, 17 bp, synthetic construct
  misc_feature 1..17: note = Oligonucleotide
  source 1..17: mol_type = other DNA
attatggtggcctgaag

SEQ ID NO: 22774 - DNA, 17 bp, synthetic construct
  misc_feature 1..17: note = Oligonucleotide
  source 1..17: mol_type = other DNA
aaaattatggtggcctg

SEQ ID NO: 22775 - DNA, 17 bp, synthetic construct
  misc_feature 1..17: note = Oligonucleotide
  source 1..17: mol_type = other DNA
tggaaaattatggtggc

SEQ ID NO: 22776 - DNA, 17 bp, synthetic construct
  misc_feature 1..17: note = Oligonucleotide
  source 1..17: mol_type = other DNA
gcctggaaaattatggt

SEQ ID NO: 22777 - DNA, 17 bp, synthetic construct
  misc_feature 1..17: note = Oligonucleotide
  source 1..17: mol_type = other DNA
aaagcctggaaaattat

SEQ ID NO: 22778 - DNA, 17 bp, synthetic construct
  misc_feature 1..17: note = Oligonucleotide
  source 1..17: mol_type = other DNA
aaaaaagcctggaaaat

SEQ ID NO: 22779 - DNA, 17 bp, synthetic construct
  misc_feature 1..17: note = Oligonucleotide
  source 1..17: mol_type = other DNA
cagaaaaaagcctggaa

SEQ ID NO: 22780 - DNA, 17 bp, synthetic construct
  misc_feature 1..17: note = Oligonucleotide
  source 1..17: mol_type = other DNA
gctcagaaaaaagcctg

SEQ ID NO: 22781 - DNA, 17 bp, synthetic construct
  misc_feature 1..17: note = Oligonucleotide
  source 1..17: mol_type = other DNA
tctgctcagaaaaaagc

SEQ ID NO: 22782 - DNA, 17 bp, synthetic construct
  misc_feature 1..17: note = Oligonucleotide
  source 1..17: mol_type = other DNA
gactctgctcagaaaaa

SEQ ID NO: 22783 - DNA, 17 bp, synthetic construct
  misc_feature 1..17: note = Oligonucleotide
  source 1..17: mol_type = other DNA
ccagactctgctcagaa

SEQ ID NO: 22784 - DNA, 17 bp, synthetic construct
  misc_feature 1..17: note = Oligonucleotide
  source 1..17: mol_type = other DNA
cccccagactctgctca

SEQ ID NO: 22785 - DNA, 17 bp, synthetic construct
  misc_feature 1..17: note = Oligonucleotide
  source 1..17: mol_type = other DNA
cctcccccagactctgc

SEQ ID NO: 22786 - DNA, 17 bp, synthetic construct
  misc_feature 1..17: note = Oligonucleotide
  source 1..17: mol_type = other DNA
catcctcccccagactc

SEQ ID NO: 22787 - DNA, 17 bp, synthetic construct
  misc_feature 1..17: note = Oligonucleotide
  source 1..17: mol_type = other DNA
cttcatcctcccccaga

SEQ ID NO: 22788 - DNA, 17 bp, synthetic construct
  misc_feature 1..17: note = Oligonucleotide
  source 1..17: mol_type = other DNA
tcccttcatcctccccc

SEQ ID NO: 22789 - DNA, 17 bp, synthetic construct
  misc_feature 1..17: note = Oligonucleotide
  source 1..17: mol_type = other DNA
ctgtcccttcatcctcc

SEQ ID NO: 22790 - DNA, 17 bp, synthetic construct
  misc_feature 1..17: note = Oligonucleotide
  source 1..17: mol_type = other DNA
aagctgtcccttcatcc

SEQ ID NO: 22791 - DNA, 17 bp, synthetic construct
  misc_feature 1..17: note = Oligonucleotide
  source 1..17: mol_type = other DNA
gctaagctgtcccttca

SEQ ID NO: 22792 - DNA, 17 bp, synthetic construct
  misc_feature 1..17: note = Oligonucleotide
  source 1..17: mol_type = other DNA
tgcgctaagctgtccct

SEQ ID NO: 22793 - DNA, 17 bp, synthetic construct
  misc_feature 1..17: note = Oligonucleotide
  source 1..17: mol_type = other DNA
ctctgcgctaagctgtc

SEQ ID NO: 22794 - DNA, 17 bp, synthetic construct
  misc_feature 1..17: note = Oligonucleotide
  source 1..17: mol_type = other DNA
aggctctgcgctaagct

SEQ ID NO: 22795 - DNA, 17 bp, synthetic construct
  misc_feature 1..17: note = Oligonucleotide
  source 1..17: mol_type = other DNA
tagaggctctgcgctaa

SEQ ID NO: 22796 - DNA, 17 bp, synthetic construct
  misc_feature 1..17: note = Oligonucleotide
  source 1..17: mol_type = other DNA
gggtagaggctctgcgc

SEQ ID NO: 22797 - DNA, 17 bp, synthetic construct
  misc_feature 1..17: note = Oligonucleotide
  source 1..17: mol_type = other DNA
tgtgggtagaggctctg

SEQ ID NO: 22798 - DNA, 17 bp, synthetic construct
  misc_feature 1..17: note = Oligonucleotide
  source 1..17: mol_type = other DNA
aagtgtgggtagaggct

SEQ ID NO: 22799 - DNA, 17 bp, synthetic construct
  misc_feature 1..17: note = Oligonucleotide
  source 1..17: mol_type = other DNA
cagaagtgtgggtagag

SEQ ID NO: 22800 - DNA, 17 bp, synthetic construct
  misc_feature 1..17: note = Oligonucleotide
  source 1..17: mol_type = other DNA
ctccagaagtgtgggta

SEQ ID NO: 22801 - DNA, 17 bp, synthetic construct
  misc_feature 1..17: note = Oligonucleotide
  source 1..17: mol_type = other DNA
gagctccagaagtgtgg

SEQ ID NO: 22802 - DNA, 17 bp, synthetic construct
  misc_feature 1..17: note = Oligonucleotide
  source 1..17: mol_type = other DNA
cctgagctccagaagtg

SEQ ID NO: 22803 - DNA, 17 bp, synthetic construct
  misc_feature 1..17: note = Oligonucleotide
  source 1..17: mol_type = other DNA
cttcctgagctccagaa

SEQ ID NO: 22804 - DNA, 17 bp, synthetic construct
  misc_feature 1..17: note = Oligonucleotide
  source 1..17: mol_type = other DNA
tggcttcctgagctcca

SEQ ID NO: 22805 - DNA, 17 bp, synthetic construct
  misc_feature 1..17: note = Oligonucleotide
  source 1..17: mol_type = other DNA
gggtggcttcctgagct

SEQ ID NO: 22806 - DNA, 17 bp, synthetic construct
  misc_feature 1..17: note = Oligonucleotide
  source 1..17: mol_type = other DNA
acagggtggcttcctga

SEQ ID NO: 22807 - DNA, 17 bp, synthetic construct
  misc_feature 1..17: note = Oligonucleotide
  source 1..17: mol_type = other DNA
gggacagggtggcttcc

SEQ ID NO: 22808 - DNA, 17 bp, synthetic construct
  misc_feature 1..17: note = Oligonucleotide
  source 1..17: mol_type = other DNA
ctggggacagggtggct

SEQ ID NO: 22809 - DNA, 17 bp, synthetic construct
  misc_feature 1..17: note = Oligonucleotide
  source 1..17: mol_type = other DNA
cttctggggacagggtg

SEQ ID NO: 22810 - DNA, 17 bp, synthetic construct
  misc_feature 1..17: note = Oligonucleotide
  source 1..17: mol_type = other DNA
tgtcttctggggacagg

SEQ ID NO: 22811 - DNA, 17 bp, synthetic construct
  misc_feature 1..17: note = Oligonucleotide
  source 1..17: mol_type = other DNA
agctgtcttctggggac

SEQ ID NO: 22812 - DNA, 17 bp, synthetic construct
  misc_feature 1..17: note = Oligonucleotide
  source 1..17: mol_type = other DNA
gacagctgtcttctggg

SEQ ID NO: 22813 - DNA, 17 bp, synthetic construct
  misc_feature 1..17: note = Oligonucleotide
  source 1..17: mol_type = other DNA
caggacagctgtcttct

SEQ ID NO: 22814 - DNA, 17 bp, synthetic construct
  misc_feature 1..17: note = Oligonucleotide
  source 1..17: mol_type = other DNA
tcccaggacagctgtct

SEQ ID NO: 22815 - DNA, 17 bp, synthetic construct
  misc_feature 1..17: note = Oligonucleotide
  source 1..17: mol_type = other DNA
gcttcccaggacagctg

SEQ ID NO: 22816 - DNA, 17 bp, synthetic construct
  misc_feature 1..17: note = Oligonucleotide
  source 1..17: mol_type = other DNA
ctggcttcccaggacag

SEQ ID NO: 22817 - DNA, 17 bp, synthetic construct
  misc_feature 1..17: note = Oligonucleotide
  source 1..17: mol_type = other DNA
ctgctggcttcccagga

SEQ ID NO: 22818 - DNA, 17 bp, synthetic construct
  misc_feature 1..17: note = Oligonucleotide
  source 1..17: mol_type = other DNA
gccctgctggcttccca

SEQ ID NO: 22819 - DNA, 17 bp, synthetic construct
  misc_feature 1..17: note = Oligonucleotide
  source 1..17: mol_type = other DNA
gaagccctgctggcttc

SEQ ID NO: 22820 - DNA, 17 bp, synthetic construct
  misc_feature 1..17: note = Oligonucleotide
  source 1..17: mol_type = other DNA
ccagaagccctgctggc

SEQ ID NO: 22821 - DNA, 17 bp, synthetic construct
  misc_feature 1..17: note = Oligonucleotide
  source 1..17: mol_type = other DNA
cttccagaagccctgct

SEQ ID NO: 22822 - DNA, 17 bp, synthetic construct
  misc_feature 1..17: note = Oligonucleotide
  source 1..17: mol_type = other DNA
ggacttccagaagccct

SEQ ID NO: 22823 - DNA, 17 bp, synthetic construct
  misc_feature 1..17: note = Oligonucleotide
  source 1..17: mol_type = other DNA
aggggacttccagaagc

SEQ ID NO: 22824 - DNA, 17 bp, synthetic construct
  misc_feature 1..17: note = Oligonucleotide
  source 1..17: mol_type = other DNA
cagaggggacttccaga

SEQ ID NO: 22825 - DNA, 17 bp, synthetic construct
  misc_feature 1..17: note = Oligonucleotide
  source 1..17: mol_type = other DNA
ttccagaggggacttcc

SEQ ID NO: 22826 - DNA, 17 bp, synthetic construct
  misc_feature 1..17: note = Oligonucleotide
  source 1..17: mol_type = other DNA
catttccagaggggact

SEQ ID NO: 22827 - DNA, 17 bp, synthetic construct
  misc_feature 1..17: note = Oligonucleotide
  source 1..17: mol_type = other DNA
aggcatttccagagggg

SEQ ID NO: 22828 - DNA, 17 bp, synthetic construct
  misc_feature 1..17: note = Oligonucleotide
  source 1..17: mol_type = other DNA
atcaggcatttccagag

SEQ ID NO: 22829 - DNA, 17 bp, synthetic construct
  misc_feature 1..17: note = Oligonucleotide
  source 1..17: mol_type = other DNA
caaatcaggcatttcca

SEQ ID NO: 22830 - DNA, 17 bp, synthetic construct
  misc_feature 1..17: note = Oligonucleotide
  source 1..17: mol_type = other DNA
cctcaaatcaggcattt

SEQ ID NO: 22831 - DNA, 17 bp, synthetic construct
  misc_feature 1..17: note = Oligonucleotide
  source 1..17: mol_type = other DNA
cgtcctcaaatcaggca

SEQ ID NO: 22832 - DNA, 17 bp, synthetic construct
  misc_feature 1..17: note = Oligonucleotide
  source 1..17: mol_type = other DNA
tggcgtcctcaaatcag

SEQ ID NO: 22833 - DNA, 17 bp, synthetic construct
  misc_feature 1..17: note = Oligonucleotide
  source 1..17: mol_type = other DNA
gcatggcgtcctcaaat

SEQ ID NO: 22834 - DNA, 17 bp, synthetic construct
  misc_feature 1..17: note = Oligonucleotide
  source 1..17: mol_type = other DNA
ctggcatggcgtcctca

SEQ ID NO: 22835 - DNA, 17 bp, synthetic construct
  misc_feature 1..17: note = Oligonucleotide
  source 1..17: mol_type = other DNA
atgctggcatggcgtcc

SEQ ID NO: 22836 - DNA, 17 bp, synthetic construct
  misc_feature 1..17: note = Oligonucleotide
  source 1..17: mol_type = other DNA
ctgatgctggcatggcg

SEQ ID NO: 22837 - DNA, 17 bp, synthetic construct
  misc_feature 1..17: note = Oligonucleotide
  source 1..17: mol_type = other DNA
accctgatgctggcatg

SEQ ID NO: 22838 - DNA, 17 bp, synthetic construct
  misc_feature 1..17: note = Oligonucleotide
  source 1..17: mol_type = other DNA
gaaaccctgatgctggc

SEQ ID NO: 22839 - DNA, 17 bp, synthetic construct
  misc_feature 1..17: note = Oligonucleotide
  source 1..17: mol_type = other DNA
ggggaaaccctgatgct

SEQ ID NO: 22840 - DNA, 17 bp, synthetic construct
  misc_feature 1..17: note = Oligonucleotide
  source 1..17: mol_type = other DNA
cctggggaaaccctgat

SEQ ID NO: 22841 - DNA, 17 bp, synthetic construct
  misc_feature 1..17: note = Oligonucleotide
  source 1..17: mol_type = other DNA
gtacctggggaaaccct

SEQ ID NO: 22842 - DNA, 17 bp, synthetic construct
  misc_feature 1..17: note = Oligonucleotide
  source 1..17: mol_type = other DNA
taggtacctggggaaac

SEQ ID NO: 22843 - DNA, 17 bp, synthetic construct
  misc_feature 1..17: note = Oligonucleotide
  source 1..17: mol_type = other DNA
ccttaggtacctgggga

SEQ ID NO: 22844 - DNA, 17 bp, synthetic construct
  misc_feature 1..17: note = Oligonucleotide
  source 1..17: mol_type = other DNA
gtcccttaggtacctgg

SEQ ID NO: 22845 - DNA, 17 bp, synthetic construct
  misc_feature 1..17: note = Oligonucleotide
  source 1..17: mol_type = other DNA
atggtcccttaggtacc

SEQ ID NO: 22846 - DNA, 17 bp, synthetic construct
  misc_feature 1..17: note = Oligonucleotide
  source 1..17: mol_type = other DNA
gggatggtcccttaggt

SEQ ID NO: 22847 - DNA, 17 bp, synthetic construct
  misc_feature 1..17: note = Oligonucleotide
  source 1..17: mol_type = other DNA
tgtgggatggtccctta

SEQ ID NO: 22848 - DNA, 17 bp, synthetic construct
  misc_feature 1..17: note = Oligonucleotide
  source 1..17: mol_type = other DNA
ggttgtgggatggtccc

SEQ ID NO: 22849 - DNA, 17 bp, synthetic construct
  misc_feature 1..17: note = Oligonucleotide
  source 1..17: mol_type = other DNA
ctgggttgtgggatggt

SEQ ID NO: 22850 - DNA, 17 bp, synthetic construct
  misc_feature 1..17: note = Oligonucleotide
  source 1..17: mol_type = other DNA
acactgggttgtgggat

SEQ ID NO: 22851 - DNA, 17 bp, synthetic construct
  misc_feature 1..17: note = Oligonucleotide
  source 1..17: mol_type = other DNA
aaaacactgggttgtgg

SEQ ID NO: 22852 - DNA, 17 bp, synthetic construct
  misc_feature 1..17: note = Oligonucleotide
  source 1..17: mol_type = other DNA
gcaaaaacactgggttg

SEQ ID NO: 22853 - DNA, 17 bp, synthetic construct
  misc_feature 1..17: note = Oligonucleotide
  source 1..17: mol_type = other DNA
aaagcaaaaacactggg

SEQ ID NO: 22854 - DNA, 17 bp, synthetic construct
  misc_feature 1..17: note = Oligonucleotide
  source 1..17: mol_type = other DNA
ctgaaagcaaaaacact

SEQ ID NO: 22855 - DNA, 17 bp, synthetic construct
  misc_feature 1..17: note = Oligonucleotide
  source 1..17: mol_type = other DNA
cttctgaaagcaaaaac

SEQ ID NO: 22856 - DNA, 17 bp, synthetic construct
  misc_feature 1..17: note = Oligonucleotide
  source 1..17: mol_type = other DNA
tatcttctgaaagcaaa

SEQ ID NO: 22857 - DNA, 17 bp, synthetic construct
  misc_feature 1..17: note = Oligonucleotide
  source 1..17: mol_type = other DNA
ttctatcttctgaaagc

SEQ ID NO: 22858 - DNA, 17 bp, synthetic construct
  misc_feature 1..17: note = Oligonucleotide
  source 1..17: mol_type = other DNA
catttctatcttctgaa

SEQ ID NO: 22859 - DNA, 17 bp, synthetic construct
  misc_feature 1..17: note = Oligonucleotide
  source 1..17: mol_type = other DNA
cctcatttctatcttct

SEQ ID NO: 22860 - DNA, 17 bp, synthetic construct
  misc_feature 1..17: note = Oligonucleotide
  source 1..17: mol_type = other DNA
aggcctcatttctatct

SEQ ID NO: 22861 - DNA, 17 bp, synthetic construct
  misc_feature 1..17: note = Oligonucleotide
  source 1..17: mol_type = other DNA
aacaggcctcatttcta

SEQ ID NO: 22862 - DNA, 17 bp, synthetic construct
  misc_feature 1..17: note = Oligonucleotide
  source 1..17: mol_type = other DNA
accaacaggcctcattt

SEQ ID NO: 22863 - DNA, 17 bp, synthetic construct
  misc_feature 1..17: note = Oligonucleotide
  source 1..17: mol_type = other DNA
gtgaccaacaggcctca

SEQ ID NO: 22864 - DNA, 17 bp, synthetic construct
  misc_feature 1..17: note = Oligonucleotide
  source 1..17: mol_type = other DNA
gcagtgaccaacaggcc

SEQ ID NO: 22865 - DNA, 17 bp, synthetic construct
  misc_feature 1..17: note = Oligonucleotide
  source 1..17: mol_type = other DNA
ccagcagtgaccaacag

SEQ ID NO: 22866 - DNA, 17 bp, synthetic construct
  misc_feature 1..17: note = Oligonucleotide
  source 1..17: mol_type = other DNA
atgccagcagtgaccaa

SEQ ID NO: 22867 - DNA, 17 bp, synthetic construct
  misc_feature 1..17: note = Oligonucleotide
  source 1..17: mol_type = other DNA
ttcatgccagcagtgac

SEQ ID NO: 22868 - DNA, 17 bp, synthetic construct
  misc_feature 1..17: note = Oligonucleotide
  source 1..17: mol_type = other DNA
gtgttcatgccagcagt

SEQ ID NO: 22869 - DNA, 17 bp, synthetic construct
  misc_feature 1..17: note = Oligonucleotide
  source 1..17: mol_type = other DNA
gatgtgttcatgccagc

SEQ ID NO: 22870 - DNA, 17 bp, synthetic construct
  misc_feature 1..17: note = Oligonucleotide
  source 1..17: mol_type = other DNA
tctgatgtgttcatgcc

SEQ ID NO: 22871 - DNA, 17 bp, synthetic construct
  misc_feature 1..17: note = Oligonucleotide
  source 1..17: mol_type = other DNA
agttctgatgtgttcat

SEQ ID NO: 22872 - DNA, 17 bp, synthetic construct
  misc_feature 1..17: note = Oligonucleotide
  source 1..17: mol_type = other DNA
ggcagttctgatgtgtt

SEQ ID NO: 22873 - DNA, 17 bp, synthetic construct
  misc_feature 1..17: note = Oligonucleotide
  source 1..17: mol_type = other DNA
tgaggcagttctgatgt

SEQ ID NO: 22874 - DNA, 17 bp, synthetic construct
  misc_feature 1..17: note = Oligonucleotide
  source 1..17: mol_type = other DNA
gtgtgaggcagttctga

SEQ ID NO: 22875 - DNA, 17 bp, synthetic construct
  misc_feature 1..17: note = Oligonucleotide
  source 1..17: mol_type = other DNA
acagtgtgaggcagttc

SEQ ID NO: 22876 - DNA, 17 bp, synthetic construct
  misc_feature 1..17: note = Oligonucleotide
  source 1..17: mol_type = other DNA
ttgacagtgtgaggcag

SEQ ID NO: 22877 - DNA, 17 bp, synthetic construct
  misc_feature 1..17: note = Oligonucleotide
  source 1..17: mol_type = other DNA
ctcttgacagtgtgagg

SEQ ID NO: 22878 - DNA, 17 bp, synthetic construct
  misc_feature 1..17: note = Oligonucleotide
  source 1..17: mol_type = other DNA
tagctcttgacagtgtg

SEQ ID NO: 22879 - DNA, 17 bp, synthetic construct
  misc_feature 1..17: note = Oligonucleotide
  source 1..17: mol_type = other DNA
taatagctcttgacagt

SEQ ID NO: 22880 - DNA, 17 bp, synthetic construct
  misc_feature 1..17: note = Oligonucleotide
  source 1..17: mol_type = other DNA
ctctaatagctcttgac

SEQ ID NO: 22881 - DNA, 17 bp, synthetic construct
  misc_feature 1..17: note = Oligonucleotide
  source 1..17: mol_type = other DNA
gggctctaatagctctt

SEQ ID NO: 22882 - DNA, 17 bp, synthetic construct
  misc_feature 1..17: note = Oligonucleotide
  source 1..17: mol_type = other DNA
aaagggctctaatagct

SEQ ID NO: 22883 - DNA, 17 bp, synthetic construct
  misc_feature 1..17: note = Oligonucleotide
  source 1..17: mol_type = other DNA
cctaaagggctctaata

SEQ ID NO: 22884 - DNA, 17 bp, synthetic construct
  misc_feature 1..17: note = Oligonucleotide
  source 1..17: mol_type = other DNA
gatcctaaagggctcta

SEQ ID NO: 22885 - DNA, 17 bp, synthetic construct
  misc_feature 1..17: note = Oligonucleotide
  source 1..17: mol_type = other DNA
atggatcctaaagggct

SEQ ID NO: 22886 - DNA, 17 bp, synthetic construct
  misc_feature 1..17: note = Oligonucleotide
  source 1..17: mol_type = other DNA
actatggatcctaaagg

SEQ ID NO: 22887 - DNA, 17 bp, synthetic construct
  misc_feature 1..17: note = Oligonucleotide
  source 1..17: mol_type = other DNA
tagactatggatcctaa

SEQ ID NO: 22888 - DNA, 17 bp, synthetic construct
  misc_feature 1..17: note = Oligonucleotide
  source 1..17: mol_type = other DNA
cgatagactatggatcc

SEQ ID NO: 22889 - DNA, 17 bp, synthetic construct
  misc_feature 1..17: note = Oligonucleotide
  source 1..17: mol_type = other DNA
tctcgatagactatgga

SEQ ID NO: 22890 - DNA, 17 bp, synthetic construct
  misc_feature 1..17: note = Oligonucleotide
  source 1..17: mol_type = other DNA
ccttctcgatagactat

SEQ ID NO: 22891 - DNA, 17 bp, synthetic construct
  misc_feature 1..17: note = Oligonucleotide
  source 1..17: mol_type = other DNA
gcaccttctcgatagac

SEQ ID NO: 22892 - DNA, 17 bp, synthetic construct
  misc_feature 1..17: note = Oligonucleotide
  source 1..17: mol_type = other DNA
caggcaccttctcgata

SEQ ID NO: 22893 - DNA, 17 bp, synthetic construct
  misc_feature 1..17: note = Oligonucleotide
  source 1..17: mol_type = other DNA
gtccaggcaccttctcg

SEQ ID NO: 22894 - DNA, 17 bp, synthetic construct
  misc_feature 1..17: note = Oligonucleotide
  source 1..17: mol_type = other DNA
ggtgtccaggcaccttc

SEQ ID NO: 22895 - DNA, 17 bp, synthetic construct
  misc_feature 1..17: note = Oligonucleotide
  source 1..17: mol_type = other DNA
ttaggtgtccaggcacc

SEQ ID NO: 22896 - DNA, 17 bp, synthetic construct
  misc_feature 1..17: note = Oligonucleotide
  source 1..17: mol_type = other DNA
tttttaggtgtccaggc

SEQ ID NO: 22897 - DNA, 17 bp, synthetic construct
  misc_feature 1..17: note = Oligonucleotide
  source 1..17: mol_type = other DNA
ttctttttaggtgtcca

SEQ ID NO: 22898 - DNA, 17 bp, synthetic construct
  misc_feature 1..17: note = Oligonucleotide
  source 1..17: mol_type = other DNA
cttttctttttaggtgt

SEQ ID NO: 22899 - DNA, 17 bp, synthetic construct
  misc_feature 1..17: note = Oligonucleotide
  source 1..17: mol_type = other DNA
tttcttttctttttagg

SEQ ID NO: 22900 - DNA, 17 bp, synthetic construct
  misc_feature 1..17: note = Oligonucleotide
  source 1..17: mol_type = other DNA
cactttcttttcttttt

SEQ ID NO: 22901 - DNA, 17 bp, synthetic construct
  misc_feature 1..17: note = Oligonucleotide
  source 1..17: mol_type = other DNA
cctcactttcttttctt

SEQ ID NO: 22902 - DNA, 17 bp, synthetic construct
  misc_feature 1..17: note = Oligonucleotide
  source 1..17: mol_type = other DNA
acacctcactttctttt

SEQ ID NO: 22903 - DNA, 17 bp, synthetic construct
  misc_feature 1..17: note = Oligonucleotide
  source 1..17: mol_type = other DNA
ctgacacctcactttct

SEQ ID NO: 22904 - DNA, 17 bp, synthetic construct
  misc_feature 1..17: note = Oligonucleotide
  source 1..17: mol_type = other DNA
tctctgacacctcactt

SEQ ID NO: 22905 - DNA, 17 bp, synthetic construct
  misc_feature 1..17: note = Oligonucleotide
  source 1..17: mol_type = other DNA
ctttctctgacacctca

SEQ ID NO: 22906 - DNA, 17 bp, synthetic construct
  misc_feature 1..17: note = Oligonucleotide
  source 1..17: mol_type = other DNA
ctgctttctctgacacc

SEQ ID NO: 22907 - DNA, 17 bp, synthetic construct
  misc_feature 1..17: note = Oligonucleotide
  source 1..17: mol_type = other DNA
cacctgctttctctgac

SEQ ID NO: 22908 - DNA, 17 bp, synthetic construct
  misc_feature 1..17: note = Oligonucleotide
  source 1..17: mol_type = other DNA
ttgcacctgctttctct

SEQ ID NO: 22909 - DNA, 17 bp, synthetic construct
  misc_feature 1..17: note = Oligonucleotide
  source 1..17: mol_type = other DNA
gacttgcacctgctttc

SEQ ID NO: 22910 - DNA, 17 bp, synthetic construct
  misc_feature 1..17: note = Oligonucleotide
  source 1..17: mol_type = other DNA
tccgacttgcacctgct

SEQ ID NO: 22911 - DNA, 17 bp, synthetic construct
  misc_feature 1..17: note = Oligonucleotide
  source 1..17: mol_type = other DNA
gcctccgacttgcacct

SEQ ID NO: 22912 - DNA, 17 bp, synthetic construct
  misc_feature 1..17: note = Oligonucleotide
  source 1..17: mol_type = other DNA
ggagcctccgacttgca

SEQ ID NO: 22913 - DNA, 17 bp, synthetic construct
  misc_feature 1..17: note = Oligonucleotide
  source 1..17: mol_type = other DNA
acaggagcctccgactt

SEQ ID NO: 22914 - DNA, 17 bp, synthetic construct
  misc_feature 1..17: note = Oligonucleotide
  source 1..17: mol_type = other DNA
tggacaggagcctccga

SEQ ID NO: 22915 - DNA, 17 bp, synthetic construct
  misc_feature 1..17: note = Oligonucleotide
  source 1..17: mol_type = other DNA
acctggacaggagcctc

SEQ ID NO: 22916 - DNA, 17 bp, synthetic construct
  misc_feature 1..17: note = Oligonucleotide
  source 1..17: mol_type = other DNA
gccacctggacaggagc

SEQ ID NO: 22917 - DNA, 17 bp, synthetic construct
  misc_feature 1..17: note = Oligonucleotide
  source 1..17: mol_type = other DNA
acagccacctggacagg

SEQ ID NO: 22918 - DNA, 17 bp, synthetic construct
  misc_feature 1..17: note = Oligonucleotide
  source 1..17: mol_type = other DNA
caaacagccacctggac

SEQ ID NO: 22919 - DNA, 17 bp, synthetic construct
  misc_feature 1..17: note = Oligonucleotide
  source 1..17: mol_type = other DNA
cagcaaacagccacctg

SEQ ID NO: 22920 - DNA, 17 bp, synthetic construct
  misc_feature 1..17: note = Oligonucleotide
  source 1..17: mol_type = other DNA
gagcagcaaacagccac

SEQ ID NO: 22921 - DNA, 17 bp, synthetic construct
  misc_feature 1..17: note = Oligonucleotide
  source 1..17: mol_type = other DNA
tccgagcagcaaacagc

SEQ ID NO: 22922 - DNA, 17 bp, synthetic construct
  misc_feature 1..17: note = Oligonucleotide
  source 1..17: mol_type = other DNA
tcctccgagcagcaaac

SEQ ID NO: 22923 - DNA, 17 bp, synthetic construct
  misc_feature 1..17: note = Oligonucleotide
  source 1..17: mol_type = other DNA
acatcctccgagcagca

SEQ ID NO: 22924 - DNA, 17 bp, synthetic construct
  misc_feature 1..17: note = Oligonucleotide
  source 1..17: mol_type = other DNA
cccacatcctccgagca

SEQ ID NO: 22925 - DNA, 17 bp, synthetic construct
  misc_feature 1..17: note = Oligonucleotide
  source 1..17: mol_type = other DNA
tctcccacatcctccga

SEQ ID NO: 22926 - DNA, 17 bp, synthetic construct
  misc_feature 1..17: note = Oligonucleotide
  source 1..17: mol_type = other DNA
gcctctcccacatcctc

SEQ ID NO: 22927 - DNA, 17 bp, synthetic construct
  misc_feature 1..17: note = Oligonucleotide
  source 1..17: mol_type = other DNA
catgcctctcccacatc

SEQ ID NO: 22928 - DNA, 17 bp, synthetic construct
  misc_feature 1..17: note = Oligonucleotide
  source 1..17: mol_type = other DNA
ggccatgcctctcccac

SEQ ID NO: 22929 - DNA, 17 bp, synthetic construct
  misc_feature 1..17: note = Oligonucleotide
  source 1..17: mol_type = other DNA
cagggccatgcctctcc

SEQ ID NO: 22930 - DNA, 17 bp, synthetic construct
  misc_feature 1..17: note = Oligonucleotide
  source 1..17: mol_type = other DNA
caacagggccatgcctc

SEQ ID NO: 22931 - DNA, 17 bp, synthetic construct
  misc_feature 1..17: note = Oligonucleotide
  source 1..17: mol_type = other DNA
ctccaacagggccatgc

SEQ ID NO: 22932 - DNA, 17 bp, synthetic construct
  misc_feature 1..17: note = Oligonucleotide
  source 1..17: mol_type = other DNA
ttcctccaacagggcca

SEQ ID NO: 22933 - DNA, 17 bp, synthetic construct
  misc_feature 1..17: note = Oligonucleotide
  source 1..17: mol_type = other DNA
cccttcctccaacaggg

SEQ ID NO: 22934 - DNA, 17 bp, synthetic construct
  misc_feature 1..17: note = Oligonucleotide
  source 1..17: mol_type = other DNA
ctccccttcctccaaca

SEQ ID NO: 22935 - DNA, 17 bp, synthetic construct
  misc_feature 1..17: note = Oligonucleotide
  source 1..17: mol_type = other DNA
tccctccccttcctcca

SEQ ID NO: 22936 - DNA, 17 bp, synthetic construct
  misc_feature 1..17: note = Oligonucleotide
  source 1..17: mol_type = other DNA
ccttccctccccttcct

SEQ ID NO: 22937 - DNA, 17 bp, synthetic construct
  misc_feature 1..17: note = Oligonucleotide
  source 1..17: mol_type = other DNA
accccttccctcccctt

SEQ ID NO: 22938 - DNA, 17 bp, synthetic construct
  misc_feature 1..17: note = Oligonucleotide
  source 1..17: mol_type = other DNA
gataccccttccctccc

SEQ ID NO: 22939 - DNA, 17 bp, synthetic construct
  misc_feature 1..17: note = Oligonucleotide
  source 1..17: mol_type = other DNA
caggataccccttccct

SEQ ID NO: 22940 - DNA, 17 bp, synthetic construct
  misc_feature 1..17: note = Oligonucleotide
  source 1..17: mol_type = other DNA
ccacaggataccccttc

SEQ ID NO: 22941 - DNA, 17 bp, synthetic construct
  misc_feature 1..17: note = Oligonucleotide
  source 1..17: mol_type = other DNA
cccccacaggatacccc

SEQ ID NO: 22942 - DNA, 17 bp, synthetic construct
  misc_feature 1..17: note = Oligonucleotide
  source 1..17: mol_type = other DNA
attcccccacaggatac

SEQ ID NO: 22943 - DNA, 17 bp, synthetic construct
  misc_feature 1..17: note = Oligonucleotide
  source 1..17: mol_type = other DNA
cccattcccccacagga

SEQ ID NO: 22944 - DNA, 17 bp, synthetic construct
  misc_feature 1..17: note = Oligonucleotide
  source 1..17: mol_type = other DNA
caccccattcccccaca

SEQ ID NO: 22945 - DNA, 17 bp, synthetic construct
  misc_feature 1..17: note = Oligonucleotide
  source 1..17: mol_type = other DNA
gctcaccccattccccc

SEQ ID NO: 22946 - DNA, 17 bp, synthetic construct
  misc_feature 1..17: note = Oligonucleotide
  source 1..17: mol_type = other DNA
tttgctcaccccattcc

SEQ ID NO: 22947 - DNA, 17 bp, synthetic construct
  misc_feature 1..17: note = Oligonucleotide
  source 1..17: mol_type = other DNA
gcctttgctcaccccat

SEQ ID NO: 22948 - DNA, 17 bp, synthetic construct
  misc_feature 1..17: note = Oligonucleotide
  source 1..17: mol_type = other DNA
ccagcctttgctcaccc

SEQ ID NO: 22949 - DNA, 17 bp, synthetic construct
  misc_feature 1..17: note = Oligonucleotide
  source 1..17: mol_type = other DNA
gcaccagcctttgctca

SEQ ID NO: 22950 - DNA, 17 bp, synthetic construct
  misc_feature 1..17: note = Oligonucleotide
  source 1..17: mol_type = other DNA
caggcaccagcctttgc

SEQ ID NO: 22951 - DNA, 17 bp, synthetic construct
  misc_feature 1..17: note = Oligonucleotide
  source 1..17: mol_type = other DNA
ttccaggcaccagcctt

SEQ ID NO: 22952 - DNA, 17 bp, synthetic construct
  misc_feature 1..17: note = Oligonucleotide
  source 1..17: mol_type = other DNA
attttccaggcaccagc

SEQ ID NO: 22953 - DNA, 17 bp, synthetic construct
  misc_feature 1..17: note = Oligonucleotide
  source 1..17: mol_type = other DNA
tccattttccaggcacc

SEQ ID NO: 22954 - DNA, 17 bp, synthetic construct
  misc_feature 1..17: note = Oligonucleotide
  source 1..17: mol_type = other DNA
ccctccattttccaggc

SEQ ID NO: 22955 - DNA, 17 bp, synthetic construct
  misc_feature 1..17: note = Oligonucleotide
  source 1..17: mol_type = other DNA
caaccctccattttcca

SEQ ID NO: 22956 - DNA, 17 bp, synthetic construct
  misc_feature 1..17: note = Oligonucleotide
  source 1..17: mol_type = other DNA
ctgcaaccctccatttt

SEQ ID NO: 22957 - DNA, 17 bp, synthetic construct
  misc_feature 1..17: note = Oligonucleotide
  source 1..17: mol_type = other DNA
gctctgcaaccctccat

SEQ ID NO: 22958 - DNA, 17 bp, synthetic construct
  misc_feature 1..17: note = Oligonucleotide
  source 1..17: mol_type = other DNA
ccagctctgcaaccctc

SEQ ID NO: 22959 - DNA, 17 bp, synthetic construct
  misc_feature 1..17: note = Oligonucleotide
  source 1..17: mol_type = other DNA
ctcccagctctgcaacc

SEQ ID NO: 22960 - DNA, 17 bp, synthetic construct
  misc_feature 1..17: note = Oligonucleotide
  source 1..17: mol_type = other DNA
tcactcccagctctgca

SEQ ID NO: 22961 - DNA, 17 bp, synthetic construct
  misc_feature 1..17: note = Oligonucleotide
  source 1..17: mol_type = other DNA
ctctcactcccagctct

SEQ ID NO: 22962 - DNA, 17 bp, synthetic construct
  misc_feature 1..17: note = Oligonucleotide
  source 1..17: mol_type = other DNA
ttcctctcactcccagc

SEQ ID NO: 22963 - DNA, 17 bp, synthetic construct
  misc_feature 1..17: note = Oligonucleotide
  source 1..17: mol_type = other DNA
cccttcctctcactccc

SEQ ID NO: 22964 - DNA, 17 bp, synthetic construct
  misc_feature 1..17: note = Oligonucleotide
  source 1..17: mol_type = other DNA
agccccttcctctcact

SEQ ID NO: 22965 - DNA, 17 bp, synthetic construct
  misc_feature 1..17: note = Oligonucleotide
  source 1..17: mol_type = other DNA
cccagccccttcctctc

SEQ ID NO: 22966 - DNA, 17 bp, synthetic construct
  misc_feature 1..17: note = Oligonucleotide
  source 1..17: mol_type = other DNA
ccacccagccccttcct

SEQ ID NO: 22967 - DNA, 17 bp, synthetic construct
  misc_feature 1..17: note = Oligonucleotide
  source 1..17: mol_type = other DNA
tccccacccagcccctt

SEQ ID NO: 22968 - DNA, 17 bp, synthetic construct
  misc_feature 1..17: note = Oligonucleotide
  source 1..17: mol_type = other DNA
gggtccccacccagccc

SEQ ID NO: 22969 - DNA, 17 bp, synthetic construct
  misc_feature 1..17: note = Oligonucleotide
  source 1..17: mol_type = other DNA
ggagggtccccacccag

SEQ ID NO: 22970 - DNA, 17 bp, synthetic construct
  misc_feature 1..17: note = Oligonucleotide
  source 1..17: mol_type = other DNA
tcaggagggtccccacc

SEQ ID NO: 22971 - DNA, 17 bp, synthetic construct
  misc_feature 1..17: note = Oligonucleotide
  source 1..17: mol_type = other DNA
atctcaggagggtcccc

SEQ ID NO: 22972 - DNA, 17 bp, synthetic construct
  misc_feature 1..17: note = Oligonucleotide
  source 1..17: mol_type = other DNA
cctatctcaggagggtc

SEQ ID NO: 22973 - DNA, 17 bp, synthetic construct
  misc_feature 1..17: note = Oligonucleotide
  source 1..17: mol_type = other DNA
ccacctatctcaggagg

SEQ ID NO: 22974 - DNA, 17 bp, synthetic construct
  misc_feature 1..17: note = Oligonucleotide
  source 1..17: mol_type = other DNA
tcaccacctatctcagg

SEQ ID NO: 22975 - DNA, 17 bp, synthetic construct
  misc_feature 1..17: note = Oligonucleotide
  source 1..17: mol_type = other DNA
ctctcaccacctatctc

SEQ ID NO: 22976 - DNA, 17 bp, synthetic construct
  misc_feature 1..17: note = Oligonucleotide
  source 1..17: mol_type = other DNA
tctctctcaccacctat

SEQ ID NO: 22977 - DNA, 17 bp, synthetic construct
  misc_feature 1..17: note = Oligonucleotide
  source 1..17: mol_type = other DNA
ttctctctctcaccacc

SEQ ID NO: 22978 - DNA, 17 bp, synthetic construct
  misc_feature 1..17: note = Oligonucleotide
  source 1..17: mol_type = other DNA
ctcttctctctctcacc

SEQ ID NO: 22979 - DNA, 17 bp, synthetic construct
  misc_feature 1..17: note = Oligonucleotide
  source 1..17: mol_type = other DNA
gccctcttctctctctc

SEQ ID NO: 22980 - DNA, 17 bp, synthetic construct
  misc_feature 1..17: note = Oligonucleotide
  source 1..17: mol_type = other DNA
tctgccctcttctctct

SEQ ID NO: 22981 - DNA, 17 bp, synthetic construct
  misc_feature 1..17: note = Oligonucleotide
  source 1..17: mol_type = other DNA
tgttctgccctcttctc

SEQ ID NO: 22982 - DNA, 17 bp, synthetic construct
  misc_feature 1..17: note = Oligonucleotide
  source 1..17: mol_type = other DNA
gggtgttctgccctctt

SEQ ID NO: 22983 - DNA, 17 bp, synthetic construct
  misc_feature 1..17: note = Oligonucleotide
  source 1..17: mol_type = other DNA
gaggggtgttctgccct

SEQ ID NO: 22984 - DNA, 17 bp, synthetic construct
  misc_feature 1..17: note = Oligonucleotide
  source 1..17: mol_type = other DNA
gaggaggggtgttctgc

SEQ ID NO: 22985 - DNA, 17 bp, synthetic construct
  misc_feature 1..17: note = Oligonucleotide
  source 1..17: mol_type = other DNA
ggggaggaggggtgttc

SEQ ID NO: 22986 - DNA, 17 bp, synthetic construct
  misc_feature 1..17: note = Oligonucleotide
  source 1..17: mol_type = other DNA
tgaggggaggaggggtg

SEQ ID NO: 22987 - DNA, 17 bp, synthetic construct
  misc_feature 1..17: note = Oligonucleotide
  source 1..17: mol_type = other DNA
tgctgaggggaggaggg

SEQ ID NO: 22988 - DNA, 17 bp, synthetic construct
  misc_feature 1..17: note = Oligonucleotide
  source 1..17: mol_type = other DNA
cagtgctgaggggagga

SEQ ID NO: 22989 - DNA, 17 bp, synthetic construct
  misc_feature 1..17: note = Oligonucleotide
  source 1..17: mol_type = other DNA
ccccagtgctgagggga

SEQ ID NO: 22990 - DNA, 17 bp, synthetic construct
  misc_feature 1..17: note = Oligonucleotide
  source 1..17: mol_type = other DNA
agcccccagtgctgagg

SEQ ID NO: 22991 - DNA, 17 bp, synthetic construct
  misc_feature 1..17: note = Oligonucleotide
  source 1..17: mol_type = other DNA
aggagcccccagtgctg

SEQ ID NO: 22992 - DNA, 17 bp, synthetic construct
  misc_feature 1..17: note = Oligonucleotide
  source 1..17: mol_type = other DNA
atgaggagcccccagtg

SEQ ID NO: 22993 - DNA, 17 bp, synthetic construct
  misc_feature 1..17: note = Oligonucleotide
  source 1..17: mol_type = other DNA
accatgaggagccccca

SEQ ID NO: 22994 - DNA, 17 bp, synthetic construct
  misc_feature 1..17: note = Oligonucleotide
  source 1..17: mol_type = other DNA
gcgaccatgaggagccc

SEQ ID NO: 22995 - DNA, 17 bp, synthetic construct
  misc_feature 1..17: note = Oligonucleotide
  source 1..17: mol_type = other DNA
gtggcgaccatgaggag

SEQ ID NO: 22996 - DNA, 17 bp, synthetic construct
  misc_feature 1..17: note = Oligonucleotide
  source 1..17: mol_type = other DNA
catgtggcgaccatgag

SEQ ID NO: 22997 - DNA, 17 bp, synthetic construct
  misc_feature 1..17: note = Oligonucleotide
  source 1..17: mol_type = other DNA
atgcatgtggcgaccat

SEQ ID NO: 22998 - DNA, 17 bp, synthetic construct
  misc_feature 1..17: note = Oligonucleotide
  source 1..17: mol_type = other DNA
gacatgcatgtggcgac

SEQ ID NO: 22999 - DNA, 17 bp, synthetic construct
  misc_feature 1..17: note = Oligonucleotide
  source 1..17: mol_type = other DNA
gcagacatgcatgtggc

SEQ ID NO: 23000 - DNA, 17 bp, synthetic construct
  misc_feature 1..17: note = Oligonucleotide
  source 1..17: mol_type = other DNA
cgagcagacatgcatgt

SEQ ID NO: 23001 - DNA, 17 bp, synthetic construct
  misc_feature 1..17: note = Oligonucleotide
  source 1..17: mol_type = other DNA
aaccgagcagacatgca

SEQ ID NO: 23002 - DNA, 17 bp, synthetic construct
  misc_feature 1..17: note = Oligonucleotide
  source 1..17: mol_type = other DNA
acaaaccgagcagacat

SEQ ID NO: 23003 - DNA, 17 bp, synthetic construct
  misc_feature 1..17: note = Oligonucleotide
  source 1..17: mol_type = other DNA
ggtacaaaccgagcaga

SEQ ID NO: 23004 - DNA, 17 bp, synthetic construct
  misc_feature 1..17: note = Oligonucleotide
  source 1..17: mol_type = other DNA
cctggtacaaaccgagc

SEQ ID NO: 23005 - DNA, 17 bp, synthetic construct
  misc_feature 1..17: note = Oligonucleotide
  source 1..17: mol_type = other DNA
attcctggtacaaaccg

SEQ ID NO: 23006 - DNA, 17 bp, synthetic construct
  misc_feature 1..17: note = Oligonucleotide
  source 1..17: mol_type = other DNA
cacattcctggtacaaa

SEQ ID NO: 23007 - DNA, 17 bp, synthetic construct
  misc_feature 1..17: note = Oligonucleotide
  source 1..17: mol_type = other DNA
cagcacattcctggtac

SEQ ID NO: 23008 - DNA, 17 bp, synthetic construct
  misc_feature 1..17: note = Oligonucleotide
  source 1..17: mol_type = other DNA
ccccagcacattcctgg

SEQ ID NO: 23009 - DNA, 17 bp, synthetic construct
  misc_feature 1..17: note = Oligonucleotide
  source 1..17: mol_type = other DNA
tggccccagcacattcc

SEQ ID NO: 23010 - DNA, 17 bp, synthetic construct
  misc_feature 1..17: note = Oligonucleotide
  source 1..17: mol_type = other DNA
ctgtggccccagcacat

SEQ ID NO: 23011 - DNA, 17 bp, synthetic construct
  misc_feature 1..17: note = Oligonucleotide
  source 1..17: mol_type = other DNA
gacctgtggccccagca

SEQ ID NO: 23012 - DNA, 17 bp, synthetic construct
  misc_feature 1..17: note = Oligonucleotide
  source 1..17: mol_type = other DNA
actgacctgtggcccca

SEQ ID NO: 23013 - DNA, 17 bp, synthetic construct
  misc_feature 1..17: note = Oligonucleotide
  source 1..17: mol_type = other DNA
tccactgacctgtggcc

SEQ ID NO: 23014 - DNA, 17 bp, synthetic construct
  misc_feature 1..17: note = Oligonucleotide
  source 1..17: mol_type = other DNA
gtctccactgacctgtg

SEQ ID NO: 23015 - DNA, 17 bp, synthetic construct
  misc_feature 1..17: note = Oligonucleotide
  source 1..17: mol_type = other DNA
tgggtctccactgacct

SEQ ID NO: 23016 - DNA, 17 bp, synthetic construct
  misc_feature 1..17: note = Oligonucleotide
  source 1..17: mol_type = other DNA
gcctgggtctccactga

SEQ ID NO: 23017 - DNA, 17 bp, synthetic construct
  misc_feature 1..17: note = Oligonucleotide
  source 1..17: mol_type = other DNA
ctggcctgggtctccac

SEQ ID NO: 23018 - DNA, 17 bp, synthetic construct
  misc_feature 1..17: note = Oligonucleotide
  source 1..17: mol_type = other DNA
tccctggcctgggtctc

SEQ ID NO: 23019 - DNA, 17 bp, synthetic construct
  misc_feature 1..17: note = Oligonucleotide
  source 1..17: mol_type = other DNA
ccttccctggcctgggt

SEQ ID NO: 23020 - DNA, 17 bp, synthetic construct
  misc_feature 1..17: note = Oligonucleotide
  source 1..17: mol_type = other DNA
gggccttccctggcctg

SEQ ID NO: 23021 - DNA, 17 bp, synthetic construct
  misc_feature 1..17: note = Oligonucleotide
  source 1..17: mol_type = other DNA
acagggccttccctggc

SEQ ID NO: 23022 - DNA, 17 bp, synthetic construct
  misc_feature 1..17: note = Oligonucleotide
  source 1..17: mol_type = other DNA
gccacagggccttccct

SEQ ID NO: 23023 - DNA, 17 bp, synthetic construct
  misc_feature 1..17: note = Oligonucleotide
  source 1..17: mol_type = other DNA
cccgccacagggccttc

SEQ ID NO: 23024 - DNA, 17 bp, synthetic construct
  misc_feature 1..17: note = Oligonucleotide
  source 1..17: mol_type = other DNA
ggacccgccacagggcc

SEQ ID NO: 23025 - DNA, 17 bp, synthetic construct
  misc_feature 1..17: note = Oligonucleotide
  source 1..17: mol_type = other DNA
cttggacccgccacagg

SEQ ID NO: 23026 - DNA, 17 bp, synthetic construct
  misc_feature 1..17: note = Oligonucleotide
  source 1..17: mol_type = other DNA
gggcttggacccgccac

SEQ ID NO: 23027 - DNA, 17 bp, synthetic construct
  misc_feature 1..17: note = Oligonucleotide
  source 1..17: mol_type = other DNA
gaagggcttggacccgc

SEQ ID NO: 23028 - DNA, 17 bp, synthetic construct
  misc_feature 1..17: note = Oligonucleotide
  source 1..17: mol_type = other DNA
caggaagggcttggacc

SEQ ID NO: 23029 - DNA, 17 bp, synthetic construct
  misc_feature 1..17: note = Oligonucleotide
  source 1..17: mol_type = other DNA
acacaggaagggcttgg

SEQ ID NO: 23030 - DNA, 17 bp, synthetic construct
  misc_feature 1..17: note = Oligonucleotide
  source 1..17: mol_type = other DNA
aatacacaggaagggct

SEQ ID NO: 23031 - DNA, 17 bp, synthetic construct
  misc_feature 1..17: note = Oligonucleotide
  source 1..17: mol_type = other DNA
gtgaatacacaggaagg

SEQ ID NO: 23032 - DNA, 17 bp, synthetic construct
  misc_feature 1..17: note = Oligonucleotide
  source 1..17: mol_type = other DNA
aacgtgaatacacagga

SEQ ID NO: 23033 - DNA, 17 bp, synthetic construct
  misc_feature 1..17: note = Oligonucleotide
  source 1..17: mol_type = other DNA
gggaacgtgaatacaca

SEQ ID NO: 23034 - DNA, 17 bp, synthetic construct
  misc_feature 1..17: note = Oligonucleotide
  source 1..17: mol_type = other DNA
cccgggaacgtgaatac

SEQ ID NO: 23035 - DNA, 17 bp, synthetic construct
  misc_feature 1..17: note = Oligonucleotide
  source 1..17: mol_type = other DNA
tctcccgggaacgtgaa

SEQ ID NO: 23036 - DNA, 17 bp, synthetic construct
  misc_feature 1..17: note = Oligonucleotide
  source 1..17: mol_type = other DNA
agttctcccgggaacgt

SEQ ID NO: 23037 - DNA, 17 bp, synthetic construct
  misc_feature 1..17: note = Oligonucleotide
  source 1..17: mol_type = other DNA
cagagttctcccgggaa

SEQ ID NO: 23038 - DNA, 17 bp, synthetic construct
  misc_feature 1..17: note = Oligonucleotide
  source 1..17: mol_type = other DNA
gtccagagttctcccgg

SEQ ID NO: 23039 - DNA, 17 bp, synthetic construct
  misc_feature 1..17: note = Oligonucleotide
  source 1..17: mol_type = other DNA
gaagtccagagttctcc

SEQ ID NO: 23040 - DNA, 17 bp, synthetic construct
  misc_feature 1..17: note = Oligonucleotide
  source 1..17: mol_type = other DNA
agggaagtccagagttc

SEQ ID NO: 23041 - DNA, 17 bp, synthetic construct
  misc_feature 1..17: note = Oligonucleotide
  source 1..17: mol_type = other DNA
tacagggaagtccagag

SEQ ID NO: 23042 - DNA, 17 bp, synthetic construct
  misc_feature 1..17: note = Oligonucleotide
  source 1..17: mol_type = other DNA
aattacagggaagtcca

SEQ ID NO: 23043 - DNA, 17 bp, synthetic construct
  misc_feature 1..17: note = Oligonucleotide
  source 1..17: mol_type = other DNA
agaaattacagggaagt

SEQ ID NO: 23044 - DNA, 17 bp, synthetic construct
  misc_feature 1..17: note = Oligonucleotide
  source 1..17: mol_type = other DNA
cccagaaattacaggga

SEQ ID NO: 23045 - DNA, 17 bp, synthetic construct
  misc_feature 1..17: note = Oligonucleotide
  source 1..17: mol_type = other DNA
gggcccagaaattacag

SEQ ID NO: 23046 - DNA, 17 bp, synthetic construct
  misc_feature 1..17: note = Oligonucleotide
  source 1..17: mol_type = other DNA
aaggggcccagaaatta

SEQ ID NO: 23047 - DNA, 17 bp, synthetic construct
  misc_feature 1..17: note = Oligonucleotide
  source 1..17: mol_type = other DNA
aaaaaggggcccagaaa

SEQ ID NO: 23048 - DNA, 17 bp, synthetic construct
  misc_feature 1..17: note = Oligonucleotide
  source 1..17: mol_type = other DNA
aagaaaaaggggcccag

SEQ ID NO: 23049 - DNA, 17 bp, synthetic construct
  misc_feature 1..17: note = Oligonucleotide
  source 1..17: mol_type = other DNA
caaaagaaaaaggggcc

SEQ ID NO: 23050 - DNA, 17 bp, synthetic construct
  misc_feature 1..17: note = Oligonucleotide
  source 1..17: mol_type = other DNA
tcacaaaagaaaaaggg

SEQ ID NO: 23051 - DNA, 17 bp, synthetic construct
  misc_feature 1..17: note = Oligonucleotide
  source 1..17: mol_type = other DNA
tcatcacaaaagaaaaa

SEQ ID NO: 23052 - DNA, 17 bp, synthetic construct
  misc_feature 1..17: note = Oligonucleotide
  source 1..17: mol_type = other DNA
ttctcatcacaaaagaa

SEQ ID NO: 23053 - DNA, 17 bp, synthetic construct
  misc_feature 1..17: note = Oligonucleotide
  source 1..17: mol_type = other DNA
atgttctcatcacaaaa

SEQ ID NO: 23054 - DNA, 17 bp, synthetic construct
  misc_feature 1..17: note = Oligonucleotide
  source 1..17: mol_type = other DNA
ctgatgttctcatcaca

SEQ ID NO: 23055 - DNA, 17 bp, synthetic construct
  misc_feature 1..17: note = Oligonucleotide
  source 1..17: mol_type = other DNA
accctgatgttctcatc

SEQ ID NO: 23056 - DNA, 17 bp, synthetic construct
  misc_feature 1..17: note = Oligonucleotide
  source 1..17: mol_type = other DNA
cctaccctgatgttctc

SEQ ID NO: 23057 - DNA, 17 bp, synthetic construct
  misc_feature 1..17: note = Oligonucleotide
  source 1..17: mol_type = other DNA
gcacctaccctgatgtt

SEQ ID NO: 23058 - DNA, 17 bp, synthetic construct
  misc_feature 1..17: note = Oligonucleotide
  source 1..17: mol_type = other DNA
gtggcacctaccctgat

SEQ ID NO: 23059 - DNA, 17 bp, synthetic construct
  misc_feature 1..17: note = Oligonucleotide
  source 1..17: mol_type = other DNA
ggtgtggcacctaccct

SEQ ID NO: 23060 - DNA, 17 bp, synthetic construct
  misc_feature 1..17: note = Oligonucleotide
  source 1..17: mol_type = other DNA
ctgggtgtggcacctac

SEQ ID NO: 23061 - DNA, 17 bp, synthetic construct
  misc_feature 1..17: note = Oligonucleotide
  source 1..17: mol_type = other DNA
atgctgggtgtggcacc

SEQ ID NO: 23062 - DNA, 17 bp, synthetic construct
  misc_feature 1..17: note = Oligonucleotide
  source 1..17: mol_type = other DNA
tagatgctgggtgtggc

SEQ ID NO: 23063 - DNA, 17 bp, synthetic construct
  misc_feature 1..17: note = Oligonucleotide
  source 1..17: mol_type = other DNA
acatagatgctgggtgt

SEQ ID NO: 23064 - DNA, 17 bp, synthetic construct
  misc_feature 1..17: note = Oligonucleotide
  source 1..17: mol_type = other DNA
ctcacatagatgctggg

(The sequence listing continues in the following parts.)